United States Patent Application Publication US 2021/0382068 A1 - sequence listing, part 3

SEQ ID NO: 86876 - protein, 11 aa, Homo Sapiens
GRHSLYKMLGY

SEQ ID NO: 86877 - protein, 11 aa, Homo Sapiens
GRIDIKQLIAK

SEQ ID NO: 86878 - protein, 11 aa, Homo Sapiens
GRIFIGTFKAF

SEQ ID NO: 86879 - protein, 11 aa, Homo Sapiens
GRILSGVVTKM

SEQ ID NO: 86880 - protein, 11 aa, Homo Sapiens
GRIQVPFPTQR

SEQ ID NO: 86881 - protein, 11 aa, Homo Sapiens
GRLAAIVAKQV

SEQ ID NO: 86882 - protein, 11 aa, Homo Sapiens
GRLAHEVGWKY

SEQ ID NO: 86883 - protein, 11 aa, Homo Sapiens
GRLIYTGNMAR

SEQ ID NO: 86884 - protein, 11 aa, Homo Sapiens
GRLLIQPGPRF

SEQ ID NO: 86885 - protein, 11 aa, Homo Sapiens
GRLPQGIVREL

SEQ ID NO: 86886 - protein, 11 aa, Homo Sapiens
GRMGSQVIIPY

SEQ ID NO: 86887 - protein, 11 aa, Homo Sapiens
GRSDLIPTIKF

SEQ ID NO: 86888 - protein, 11 aa, Homo Sapiens
GRSTGEAFVQF

SEQ ID NO: 86889 - protein, 11 aa, Homo Sapiens
GRVDLKEYVGY

SEQ ID NO: 86890 - protein, 11 aa, Homo Sapiens
GRVESVKILPK

SEQ ID NO: 86891 - protein, 11 aa, Homo Sapiens
GRWFPEGPTHM

SEQ ID NO: 86892 - protein, 11 aa, Homo Sapiens
GRWGPTFPSSY

SEQ ID NO: 86893 - protein, 11 aa, Homo Sapiens
GRYDPSVKPPF

SEQ ID NO: 86894 - protein, 11 aa, Homo Sapiens
GRYGAISGFGL

SEQ ID NO: 86895 - protein, 11 aa, Homo Sapiens
GRYGISGELAM

SEQ ID NO: 86896 - protein, 11 aa, Homo Sapiens
HRFLLTPKVNM

SEQ ID NO: 86897 - protein, 11 aa, Homo Sapiens
HRFVSVSKLKY

SEQ ID NO: 86898 - protein, 11 aa, Homo Sapiens
HRLDHLVEIDF

SEQ ID NO: 86899 - protein, 11 aa, Homo Sapiens
HRVGPIEATSF

SEQ ID NO: 86900 - protein, 11 aa, Homo Sapiens
HRWNFDDLLEK

SEQ ID NO: 86901 - protein, 11 aa, Homo Sapiens
IETKSASVAPF

SEQ ID NO: 86902 - protein, 11 aa, Homo Sapiens
IRIPRTVGQEK

SEQ ID NO: 86903 - protein, 11 aa, Homo Sapiens
KPINTTGTLKP

SEQ ID NO: 86904 - protein, 11 aa, Homo Sapiens
KRAFIITGQTY

SEQ ID NO: 86905 - protein, 11 aa, Homo Sapiens
KRFADAASLLL

SEQ ID NO: 86906 - protein, 11 aa, Homo Sapiens
KRFEQKGFRLV

SEQ ID NO: 86907 - protein, 11 aa, Homo Sapiens
KRFGNAVILLY

SEQ ID NO: 86908 - protein, 11 aa, Homo Sapiens
KRFGPNVPALL

SEQ ID NO: 86909 - protein, 11 aa, Homo Sapiens
KRFKVSDEVGF

SEQ ID NO: 86910 - protein, 11 aa, Homo Sapiens
KRFNADNKLLL

SEQ ID NO: 86911 - protein, 11 aa, Homo Sapiens
KRFQQAGFNLR

SEQ ID NO: 86912 - protein, 11 aa, Homo Sapiens
KRIGKVLDNAI

SEQ ID NO: 86913 - protein, 11 aa, Homo Sapiens
KRIQDIVGILR

SEQ ID NO: 86914 - protein, 11 aa, Homo Sapiens
KRISEQFTAMF

SEQ ID NO: 86915 - protein, 11 aa, Homo Sapiens
KRLESLGALTH

SEQ ID NO: 86916 - protein, 11 aa, Homo Sapiens
KRLGLLAGFAF

SEQ ID NO: 86917 - protein, 11 aa, Homo Sapiens
KRLKTVLELQY

SEQ ID NO: 86918 - protein, 11 aa, Homo Sapiens
KRLLPVFAQTF

SEQ ID NO: 86919 - protein, 11 aa, Homo Sapiens
KRMNLSPAKQF

SEQ ID NO: 86920 - protein, 11 aa, Homo Sapiens
KRNAVIGLNLY

SEQ ID NO: 86921 - protein, 11 aa, Homo Sapiens
KRWESERVLSF

SEQ ID NO: 86922 - protein, 11 aa, Homo Sapiens
KRWFWSIVEKM

SEQ ID NO: 86923 - protein, 11 aa, Homo Sapiens
KRYDPDILLGY

SEQ ID NO: 86924 - protein, 11 aa, Homo Sapiens
KRYDREFLLGF

SEQ ID NO: 86925 - protein, 11 aa, Homo Sapiens
KRYLNSQQQYF

SEQ ID NO: 86926 - protein, 11 aa, Homo Sapiens
LRDEINAILQK

SEQ ID NO: 86927 - protein, 11 aa, Homo Sapiens
LRFGPNGGLVF

SEQ ID NO: 86928 - protein, 11 aa, Homo Sapiens
LRFQSSAVMAL

SEQ ID NO: 86929 - protein, 11 aa, Homo Sapiens
LRLDFHAHGRH

SEQ ID NO: 86930 - protein, 11 aa, Homo Sapiens
LRLRQIFNGTF

SEQ ID NO: 86931 - protein, 11 aa, Homo Sapiens
LRSLLEGLLQR

SEQ ID NO: 86932 - protein, 11 aa, Homo Sapiens
LRVDPVNFKLL

SEQ ID NO: 86933 - protein, 11 aa, Homo Sapiens
LRWIGDKEATY

SEQ ID NO: 86934 - protein, 11 aa, Homo Sapiens
LRYLEVEPVSR

SEQ ID NO: 86935 - protein, 11 aa, Homo Sapiens
LRYPMAVGLNK

SEQ ID NO: 86936 - protein, 11 aa, Homo Sapiens
LYPNGVPFKVI

SEQ ID NO: 86937 - protein, 11 aa, Homo Sapiens
MRLGSIFGLGL

SEQ ID NO: 86938 - protein, 11 aa, Homo Sapiens
MRLSLPLLLLL

SEQ ID NO: 86939 - protein, 11 aa, Homo Sapiens
MRLSQLKQLLK

SEQ ID NO: 86940 - protein, 11 aa, Homo Sapiens
MRQKAVSLFLC

SEQ ID NO: 86941 - protein, 11 aa, Homo Sapiens
MRWKALIEMEK

SEQ ID NO: 86942 - protein, 11 aa, Homo Sapiens
MRYIPPIPVHR

SEQ ID NO: 86943 - protein, 11 aa, Homo Sapiens
QRAGLQFPVGR

SEQ ID NO: 86944 - protein, 11 aa, Homo Sapiens
QRFDARQKIGL

SEQ ID NO: 86945 - protein, 11 aa, Homo Sapiens
QRFQLPGNIGF

SEQ ID NO: 86946 - protein, 11 aa, Homo Sapiens
QRLEGIVNKMF

SEQ ID NO: 86947 - protein, 11 aa, Homo Sapiens
QRLGCGGVLTF

SEQ ID NO: 86948 - protein, 11 aa, Homo Sapiens
QRMDILDVLTL

SEQ ID NO: 86949 - protein, 11 aa, Homo Sapiens
QRNKAAALLRL

SEQ ID NO: 86950 - protein, 11 aa, Homo Sapiens
RRAALGLLPLL

SEQ ID NO: 86951 - protein, 11 aa, Homo Sapiens
RRAEVLALPFK

SEQ ID NO: 86952 - protein, 11 aa, Homo Sapiens
RRAFIITINSF

SEQ ID NO: 86953 - protein, 11 aa, Homo Sapiens
RRAGADIIITY

SEQ ID NO: 86954 - protein, 11 aa, Homo Sapiens
RRAPFDLFENK

SEQ ID NO: 86955 - protein, 11 aa, Homo Sapiens
RRDQKEALLRF

SEQ ID NO: 86956 - protein, 11 aa, Homo Sapiens
RRFDAMPFTLR

SEQ ID NO: 86957 - protein, 11 aa, Homo Sapiens
RRFDGVQDPRI

SEQ ID NO: 86958 - protein, 11 aa, Homo Sapiens
RRFDLQNPSRM

SEQ ID NO: 86959 - protein, 11 aa, Homo Sapiens
RRFDPARGMEY

SEQ ID NO: 86960 - protein, 11 aa, Homo Sapiens
RRFDPKLFLVF

SEQ ID NO: 86961 - protein, 11 aa, Homo Sapiens
RRFEEALQTIF

SEQ ID NO: 86962 - protein, 11 aa, Homo Sapiens
RRFGDKLNFRQ

SEQ ID NO: 86963 - protein, 11 aa, Homo Sapiens
RRFGSVPHGGF

SEQ ID NO: 86964 - protein, 11 aa, Homo Sapiens
RRFLCGVVEGF

SEQ ID NO: 86965 - protein, 11 aa, Homo Sapiens
RRFLIDNGVSL

SEQ ID NO: 86966 - protein, 11 aa, Homo Sapiens
RRFLSQLIQKF

SEQ ID NO: 86967 - protein, 11 aa, Homo Sapiens
RRFLTQPQVVA

SEQ ID NO: 86968 - protein, 11 aa, Homo Sapiens
RRFNIKLWKTF

SEQ ID NO: 86969 - protein, 11 aa, Homo Sapiens
RRFQTIPLYYI

SEQ ID NO: 86970 - protein, 11 aa, Homo Sapiens
RRFSDIQIRRL

SEQ ID NO: 86971 - protein, 11 aa, Homo Sapiens
RRFSQKPNLTR

SEQ ID NO: 86972 - protein, 11 aa, Homo Sapiens
RRFVEVGRVAY

SEQ ID NO: 86973 - protein, 11 aa, Homo Sapiens
RRFVGHTKDVL

SEQ ID NO: 86974 - protein, 11 aa, Homo Sapiens
RRFVGPRVQRL

SEQ ID NO: 86975 - protein, 11 aa, Homo Sapiens
RRFVNVVPTFG

SEQ ID NO: 86976 - protein, 11 aa, Homo Sapiens
RRFWNSIVMQR

SEQ ID NO: 86977 - protein, 11 aa, Homo Sapiens
RRGDLPFVVPR

SEQ ID NO: 86978 - protein, 11 aa, Homo Sapiens
RRGLFTGLTPR

SEQ ID NO: 86979 - protein, 11 aa, Homo Sapiens
RRHLNIAKEGF

SEQ ID NO: 86980 - protein, 11 aa, Homo Sapiens
RRIEYIEARVT

SEQ ID NO: 86981 - protein, 11 aa, Homo Sapiens
RRILDSAEFIK

SEQ ID NO: 86982 - protein, 11 aa, Homo Sapiens
RRILLAEVPTM

SEQ ID NO: 86983 - protein, 11 aa, Homo Sapiens
RRILMGSTLRK

SEQ ID NO: 86984 - protein, 11 aa, Homo Sapiens
RRIPAEGRVAL

SEQ ID NO: 86985 - protein, 11 aa, Homo Sapiens
RRISPPVDLEY

SEQ ID NO: 86986 - protein, 11 aa, Homo Sapiens
RRITSDFRIGF

SEQ ID NO: 86987 - protein, 11 aa, Homo Sapiens
RRKGAEDLLRF

SEQ ID NO: 86988 - protein, 11 aa, Homo Sapiens
RRKIATEKDFL

SEQ ID NO: 86989 - protein, 11 aa, Homo Sapiens
RRLALFPGVAL

SEQ ID NO: 86990 - protein, 11 aa, Homo Sapiens
RRLDIVRSLYE

SEQ ID NO: 86991 - protein, 11 aa, Homo Sapiens
RRLDLVHTAAL

SEQ ID NO: 86992 - protein, 11 aa, Homo Sapiens
RRLDSIVGPQL

SEQ ID NO: 86993 - protein, 11 aa, Homo Sapiens
RRLENVENLLR

SEQ ID NO: 86994 - protein, 11 aa, Homo Sapiens
RRLGLALGLLL

SEQ ID NO: 86995 - protein, 11 aa, Homo Sapiens
RRLKPFGVQRF

SEQ ID NO: 86996 - protein, 11 aa, Homo Sapiens
RRLKSLLIDFF

SEQ ID NO: 86997 - protein, 11 aa, Homo Sapiens
RRLLEEEIIAF

SEQ ID NO: 86998 - protein, 11 aa, Homo Sapiens
RRLLLEDLVKK

SEQ ID NO: 86999 - protein, 11 aa, Homo Sapiens
RRLLLLPLLLF

SEQ ID NO: 87000 - protein, 11 aa, Homo Sapiens
RRLLVDSKVSL

SEQ ID NO: 87001 - protein, 11 aa, Homo Sapiens
RRLPATLLNAF

SEQ ID NO: 87002 - protein, 11 aa, Homo Sapiens
RRLPSDVVTGY

SEQ ID NO: 87003 - protein, 11 aa, Homo Sapiens
RRLRNHMAVAF

SEQ ID NO: 87004 - protein, 11 aa, Homo Sapiens
RRLSAVNSIFL

SEQ ID NO: 87005 - protein, 11 aa, Homo Sapiens
RRLTVLPFAGL

SEQ ID NO: 87006 - protein, 11 aa, Homo Sapiens
RRLVPDSDVRF

SEQ ID NO: 87007 - protein, 11 aa, Homo Sapiens
RRMGNPALSVR

SEQ ID NO: 87008 - protein, 11 aa, Homo Sapiens
RRMGTSLLFQL

SEQ ID NO: 87009 - protein, 11 aa, Homo Sapiens
RRMWPLAFGSG

SEQ ID NO: 87010 - protein, 11 aa, Homo Sapiens
RRNPDTQWITK

SEQ ID NO: 87011 - protein, 11 aa, Homo Sapiens
RRSSEMLVKKL

SEQ ID NO: 87012 - protein, 11 aa, Homo Sapiens
RRSWASLVLAF

SEQ ID NO: 87013 - protein, 11 aa, Homo Sapiens
RRTASALFAGF

SEQ ID NO: 87014 - protein, 11 aa, Homo Sapiens
RRTGPPMGSRF

SEQ ID NO: 87015 - protein, 11 aa, Homo Sapiens
RRVLHLGVQML

SEQ ID NO: 87016 - protein, 11 aa, Homo Sapiens
RRVLQALEGLK

SEQ ID NO: 87017 - protein, 11 aa, Homo Sapiens
RRVSLRVLSER

SEQ ID NO: 87018 - protein, 11 aa, Homo Sapiens
RRVSVTAVAAL

SEQ ID NO: 87019 - protein, 11 aa, Homo Sapiens
RRVVYPLEKLL

SEQ ID NO: 87020 - protein, 11 aa, Homo Sapiens
RRWGDSVLLVD

SEQ ID NO: 87021 - protein, 11 aa, Homo Sapiens
RRWLPAGDALL

SEQ ID NO: 87022 - protein, 11 aa, Homo Sapiens
RRWTLGGMVNR

SEQ ID NO: 87023 - protein, 11 aa, Homo Sapiens
RRYCDPVVLTY

SEQ ID NO: 87024 - protein, 11 aa, Homo Sapiens
RRYFGGTEDRL

SEQ ID NO: 87025 - protein, 11 aa, Homo Sapiens
RRYGELTKLIR

SEQ ID NO: 87026 - protein, 11 aa, Homo Sapiens
RRYLSPKYIKM

SEQ ID NO: 87027 - protein, 11 aa, Homo Sapiens
RRYNIKLWKTF

SEQ ID NO: 87028 - protein, 11 aa, Homo Sapiens
RRYSNLILNLF

SEQ ID NO: 87029 - protein, 11 aa, Homo Sapiens
SRAGLQFPVGR

SEQ ID NO: 87030 - protein, 11 aa, Homo Sapiens
SRFGKFIRINF

SEQ ID NO: 87031 - protein, 11 aa, Homo Sapiens
SRFGNAFLNRF

SEQ ID NO: 87032 - protein, 11 aa, Homo Sapiens
SRFKPRVPVIK

SEQ ID NO: 87033 - protein, 11 aa, Homo Sapiens
SRFLKSDLFLK

SEQ ID NO: 87034 - protein, 11 aa, Homo Sapiens
SRFLPRPVFSK

SEQ ID NO: 87035 - protein, 11 aa, Homo Sapiens
SRFQAEIPLMR

SEQ ID NO: 87036 - protein, 11 aa, Homo Sapiens
SRFRHPNIVDF

SEQ ID NO: 87037 - protein, 11 aa, Homo Sapiens
SRFTGSIFIGR

SEQ ID NO: 87038 - protein, 11 aa, Homo Sapiens
SRIHPVSTMVK

SEQ ID NO: 87039 - protein, 11 aa, Homo Sapiens
SRIPFNQALVF

SEQ ID NO: 87040 - protein, 11 aa, Homo Sapiens
SRISLADIAQK

SEQ ID NO: 87041 - protein, 11 aa, Homo Sapiens
SRLGVAGQWRF

SEQ ID NO: 87042 - protein, 11 aa, Homo Sapiens
SRLKYPPFAKK

SEQ ID NO: 87043 - protein, 11 aa, Homo Sapiens
SRLLKPGGMVL

SEQ ID NO: 87044 - protein, 11 aa, Homo Sapiens
SRLNITYPMLF

SEQ ID NO: 87045 - protein, 11 aa, Homo Sapiens
SRLQETGLLSK

SEQ ID NO: 87046 - protein, 11 aa, Homo Sapiens
SRLRNQSVFNF

SEQ ID NO: 87047 - protein, 11 aa, Homo Sapiens
SRLSVASDMRF

SEQ ID NO: 87048 - protein, 11 aa, Homo Sapiens
SRMDGEGQLTL

SEQ ID NO: 87049 - protein, 11 aa, Homo Sapiens
SRMSASILLSK

SEQ ID NO: 87050 - protein, 11 aa, Homo Sapiens
SRNALLFNLGF

SEQ ID NO: 87051 - protein, 11 aa, Homo Sapiens
SRNSNTVVFVK

SEQ ID NO: 87052 - protein, 11 aa, Homo Sapiens
SRSLLAAALLY

SEQ ID NO: 87053 - protein, 11 aa, Homo Sapiens
SRVDSLIPWIK

SEQ ID NO: 87054 - protein, 11 aa, Homo Sapiens
SRWSASFTVTK

SEQ ID NO: 87055 - protein, 11 aa, Homo Sapiens
TPVTVSAVKPA

SEQ ID NO: 87056 - protein, 11 aa, Homo Sapiens
TRFLAEEGFYK

SEQ ID NO: 87057 - protein, 11 aa, Homo Sapiens
TRIGVMSLIRK

SEQ ID NO: 87058 - protein, 11 aa, Homo Sapiens
TRLPLISGFYK

SEQ ID NO: 87059 - protein, 11 aa, Homo Sapiens
TRLPPTPLLLF

SEQ ID NO: 87060 - protein, 11 aa, Homo Sapiens
TRLSNIFVIGK

SEQ ID NO: 87061 - protein, 11 aa, Homo Sapiens
VRFVTGNKILR

SEQ ID NO: 87062 - protein, 11 aa, Homo Sapiens
VRIDPFVRTFL

SEQ ID NO: 87063 - protein, 11 aa, Homo Sapiens
VRIGGISGIFK

SEQ ID NO: 87064 - protein, 11 aa, Homo Sapiens
VRLLLPGELAK

SEQ ID NO: 87065 - protein, 11 aa, Homo Sapiens
VRMNVLADALK

SEQ ID NO: 87066 - protein, 11 aa, Homo Sapiens
VRWSPVRPLVF

SEQ ID NO: 87067 - protein, 11 aa, Homo Sapiens
WRKKQSDVMRF

SEQ ID NO: 87068 - protein, 11 aa, Homo Sapiens
WRLGSSDILNY

SEQ ID NO: 87069 - protein, 11 aa, Homo Sapiens
YRFLPQKIIYL

SEQ ID NO: 87070 - protein, 11 aa, Homo Sapiens
YRFVQGKDWGF

SEQ ID NO: 87071 - protein, 11 aa, Homo Sapiens
YRLPLRVVKHF

SEQ ID NO: 87072 - protein, 11 aa, Homo Sapiens
YRVTLNPPGTF

SEQ ID NO: 87073 - protein, 11 aa, Homo Sapiens
YRWAVSSVMTR

SEQ ID NO: 87074 - protein, 11 aa, Homo Sapiens
YRWFPSGKVVF

SEQ ID NO: 87075 - protein, 11 aa, Homo Sapiens
YRYKMPRLIAK

SEQ ID NO: 87076 - protein, 11 aa, Homo Sapiens
YRYYNKYINVK

SEQ ID NO: 87077 - protein, 8 aa, Homo Sapiens
AVFLLDDK

SEQ ID NO: 87078 - protein, 8 aa, Homo Sapiens
DALVITHY

SEQ ID NO: 87079 - protein, 8 aa, Homo Sapiens
FPAEPLEL

SEQ ID NO: 87080 - protein, 8 aa, Homo Sapiens
FPGPIFHL

SEQ ID NO: 87081 - protein, 8 aa, Homo Sapiens
FPGPSKPF

SEQ ID NO: 87082 - protein, 8 aa, Homo Sapiens
FPMEIRQY

SEQ ID NO: 87083 - protein, 8 aa, Homo Sapiens
FPTISLEF

SEQ ID NO: 87084 - protein, 8 aa, Homo Sapiens
IPAESYTF

SEQ ID NO: 87085 - protein, 8 aa, Homo Sapiens
IPFLPLEY

SEQ ID NO: 87086 - protein, 8 aa, Homo Sapiens
LPIVTPAL

SEQ ID NO: 87087 - protein, 8 aa, Homo Sapiens
LPLISVAL

SEQ ID NO: 87088 - protein, 8 aa, Homo Sapiens
LPRTDYSF

SEQ ID NO: 87089 - protein, 8 aa, Homo Sapiens
LVIEDDVR

SEQ ID NO: 87090 - protein, 8 aa, Homo Sapiens
MPTVHYEF

SEQ ID NO: 87091 - protein, 8 aa, Homo Sapiens
WPLVAALL

SEQ ID NO: 87092 - protein, 8 aa, Homo Sapiens
YPVEIHEY

SEQ ID NO: 87093 - protein, 9 aa, Homo Sapiens
AAIGLVIYY

SEQ ID NO: 87094 - protein, 9 aa, Homo Sapiens
AANPHSFVF

SEQ ID NO: 87095 - protein, 9 aa, Homo Sapiens
APAFLYDIY

SEQ ID NO: 87096 - protein, 9 aa, Homo Sapiens
APALPGPQF

SEQ ID NO: 87097 - protein, 9 aa, Homo Sapiens
APAPTAVVL

SEQ ID NO: 87098 - protein, 9 aa, Homo Sapiens
APATSILEY

SEQ ID NO: 87099 - protein, 9 aa, Homo Sapiens
APFDWKILY

SEQ ID NO: 87100 - protein, 9 aa, Homo Sapiens
APFSKVITF

SEQ ID NO: 87101 - protein, 9 aa, Homo Sapiens
APFTEGISF

SEQ ID NO: 87102 - protein, 9 aa, Homo Sapiens
APLKLQMEF

SEQ ID NO: 87103 - protein, 9 aa, Homo Sapiens
APSVVKISY

SEQ ID NO: 87104 - protein, 9 aa, Homo Sapiens
APWEVLVTY

SEQ ID NO: 87105 - protein, 9 aa, Homo Sapiens
APWFDPAIF

SEQ ID NO: 87106 - protein, 9 aa, Homo Sapiens
APWQVVPEL

SEQ ID NO: 87107 - protein, 9 aa, Homo Sapiens
ATADTVIIY

SEQ ID NO: 87108 - protein, 9 aa, Homo Sapiens
AVHDITVAY

SEQ ID NO: 87109 - protein, 9 aa, Homo Sapiens
DAADIRFVY

SEQ ID NO: 87110 - protein, 9 aa, Homo Sapiens
DAFEFHEAF

SEQ ID NO: 87111 - protein, 9 aa, Homo Sapiens
DAFPLAFDY

SEQ ID NO: 87112 - protein, 9 aa, Homo Sapiens
DAIPAVEVF

SEQ ID NO: 87113 - protein, 9 aa, Homo Sapiens
DASKVVTVF

SEQ ID NO: 87114 - protein, 9 aa, Homo Sapiens
DASPVQAVF

SEQ ID NO: 87115 - protein, 9 aa, Homo Sapiens
DAVAIVLTY

SEQ ID NO: 87116 - protein, 9 aa, Homo Sapiens
DAWIEHDVW

SEQ ID NO: 87117 - protein, 9 aa, Homo Sapiens
DAYPEIEKF

SEQ ID NO: 87118 - protein, 9 aa, Homo Sapiens
DLWLEREVF

SEQ ID NO: 87119 - protein, 9 aa, Homo Sapiens
DPFIDLNYM

SEQ ID NO: 87120 - protein, 9 aa, Homo Sapiens
DPFKDIILY

SEQ ID NO: 87121 - protein, 9 aa, Homo Sapiens
DPFPAAIIL

SEQ ID NO: 87122 - protein, 9 aa, Homo Sapiens
DPFPDHVVF

SEQ ID NO: 87123 - protein, 9 aa, Homo Sapiens
DPFRDLHSL

SEQ ID NO: 87124 - protein, 9 aa, Homo Sapiens
DPFVDRIGY

SEQ ID NO: 87125 - protein, 9 aa, Homo Sapiens
DPNLEFVAM

SEQ ID NO: 87126 - protein, 9 aa, Homo Sapiens
DVIRLIMQY

SEQ ID NO: 87127 - protein, 9 aa, Homo Sapiens
EAASVPVVY

SEQ ID NO: 87128 - protein, 9 aa, Homo Sapiens
EAFLNNQEY

SEQ ID NO: 87129 - protein, 9 aa, Homo Sapiens
EAFSPVYKY

SEQ ID NO: 87130 - protein, 9 aa, Homo Sapiens
EAIEQILKY

SEQ ID NO: 87131 - protein, 9 aa, Homo Sapiens
EAIGAVIHY

SEQ ID NO: 87132 - protein, 9 aa, Homo Sapiens
EPDFVAKFY

SEQ ID NO: 87133 - protein, 9 aa, Homo Sapiens
EVFPLAMNY

SEQ ID NO: 87134 - protein, 9 aa, Homo Sapiens
EVIPYTPAM

SEQ ID NO: 87135 - protein, 9 aa, Homo Sapiens
EVLGLILRY

SEQ ID NO: 87136 - protein, 9 aa, Homo Sapiens
EVNAVVLLY

SEQ ID NO: 87137 - protein, 9 aa, Homo Sapiens
FAADIISVL

SEQ ID NO: 87138 - protein, 9 aa, Homo Sapiens
FAANVYEAF

SEQ ID NO: 87139 - protein, 9 aa, Homo Sapiens
FAFDPSVNY

SEQ ID NO: 87140 - protein, 9 aa, Homo Sapiens
FAFEHSEEY

SEQ ID NO: 87141 - protein, 9 aa, Homo Sapiens
FAFFDPVMY

SEQ ID NO: 87142 - protein, 9 aa, Homo Sapiens
FALVFPLMY

SEQ ID NO: 87143 - protein, 9 aa, Homo Sapiens
FIDASRLVY

SEQ ID NO: 87144 - protein, 9 aa, Homo Sapiens
FLWPEAFLY

SEQ ID NO: 87145 - protein, 9 aa, Homo Sapiens
FPAAPAPKM

SEQ ID NO: 87146 - protein, 9 aa, Homo Sapiens
FPAAPIPTL

SEQ ID NO: 87147 - protein, 9 aa, Homo Sapiens
FPAELGIVF

SEQ ID NO: 87148 - protein, 9 aa, Homo Sapiens
FPAGKVPAF

SEQ ID NO: 87149 - protein, 9 aa, Homo Sapiens
FPAKVTAHW

SEQ ID NO: 87150 - protein, 9 aa, Homo Sapiens
FPALAPLTY

SEQ ID NO: 87151 - protein, 9 aa, Homo Sapiens
FPALPGSSY

SEQ ID NO: 87152 - protein, 9 aa, Homo Sapiens
FPANNIVKF

SEQ ID NO: 87153 - protein, 9 aa, Homo Sapiens
FPASPPKGY

SEQ ID NO: 87154 - protein, 9 aa, Homo Sapiens
FPATPLLDY

SEQ ID NO: 87155 - protein, 9 aa, Homo Sapiens
FPDKPITQY

SEQ ID NO: 87156 - protein, 9 aa, Homo Sapiens
FPDLFSEQL

SEQ ID NO: 87157 - protein, 9 aa, Homo Sapiens
FPDQVAIQL

SEQ ID NO: 87158 - protein, 9 aa, Homo Sapiens
FPEELTQTF

SEQ ID NO: 87159 - protein, 9 aa, Homo Sapiens
FPEEVIATI

SEQ ID NO: 87160 - protein, 9 aa, Homo Sapiens
FPEGLFYEF

SEQ ID NO: 87161 - protein, 9 aa, Homo Sapiens
FPEGSVELY

SEQ ID NO: 87162 - protein, 9 aa, Homo Sapiens
FPEHIFPAL

SEQ ID NO: 87163 - protein, 9 aa, Homo Sapiens
FPEIDLEKY

SEQ ID NO: 87164 - protein, 9 aa, Homo Sapiens
FPEIHVAQY

SEQ ID NO: 87165 - protein, 9 aa, Homo Sapiens
FPELDSPQL

SEQ ID NO: 87166 - protein, 9 aa, Homo Sapiens
FPFEDITQH

SEQ ID NO: 87167 - protein, 9 aa, Homo Sapiens
FPFFDIAHY

SEQ ID NO: 87168 - protein, 9 aa, Homo Sapiens
FPFKPPSIY

SEQ ID NO: 87169 - protein, 9 aa, Homo Sapiens
FPIAEVFTL

SEQ ID NO: 87170 - protein, 9 aa, Homo Sapiens
FPIEYHDIW

SEQ ID NO: 87171 - protein, 9 aa, Homo Sapiens
FPIHVQTSL

SEQ ID NO: 87172 - protein, 9 aa, Homo Sapiens
FPIPGEPGF

SEQ ID NO: 87173 - protein, 9 aa, Homo Sapiens
FPLAPLLAL

SEQ ID NO: 87174 - protein, 9 aa, Homo Sapiens
FPLEAITAF

SEQ ID NO: 87175 - protein, 9 aa, Homo Sapiens
FPLPGLPDF

SEQ ID NO: 87176 - protein, 9 aa, Homo Sapiens
FPMEIRQYL

SEQ ID NO: 87177 - protein, 9 aa, Homo Sapiens
FPMELRQFL

SEQ ID NO: 87178 - protein, 9 aa, Homo Sapiens
FPNAIEHTL

SEQ ID NO: 87179 - protein, 9 aa, Homo Sapiens
FPNALFVVY

SEQ ID NO: 87180 - protein, 9 aa, Homo Sapiens
FPNIPGKSL

SEQ ID NO: 87181 - protein, 9 aa, Homo Sapiens
FPNKQGYVL

SEQ ID NO: 87182 - protein, 9 aa, Homo Sapiens
FPNVSSFEW

SEQ ID NO: 87183 - protein, 9 aa, Homo Sapiens
FPPDAILFY

SEQ ID NO: 87184 - protein, 9 aa, Homo Sapiens
FPPEANYLF

SEQ ID NO: 87185 - protein, 9 aa, Homo Sapiens
FPQEFIICF

SEQ ID NO: 87186 - protein, 9 aa, Homo Sapiens
FPQFEPQRY

SEQ ID NO: 87187 - protein, 9 aa, Homo Sapiens
FPQIEINKM

SEQ ID NO: 87188 - protein, 9 aa, Homo Sapiens
FPQLDSTSF

SEQ ID NO: 87189 - protein, 9 aa, Homo Sapiens
FPQTALVSF

SEQ ID NO: 87190 - protein, 9 aa, Homo Sapiens
FPRHIEPEL

SEQ ID NO: 87191 - protein, 9 aa, Homo Sapiens
FPSAKDPTW

SEQ ID NO: 87192 - protein, 9 aa, Homo Sapiens
FPSEDILLV

SEQ ID NO: 87193 - protein, 9 aa, Homo Sapiens
FPSIYDVKY

SEQ ID NO: 87194 - protein, 9 aa, Homo Sapiens
FPSLQRLVY

SEQ ID NO: 87195 - protein, 9 aa, Homo Sapiens
FPSNFIKEL

SEQ ID NO: 87196 - protein, 9 aa, Homo Sapiens
FPSPIRLEF

SEQ ID NO: 87197 - protein, 9 aa, Homo Sapiens
FPTYPVPHY

SEQ ID NO: 87198 - protein, 9 aa, Homo Sapiens
FPVEIKSFY

SEQ ID NO: 87199 - protein, 9 aa, Homo Sapiens
FPVEVNTVL

SEQ ID NO: 87200 - protein, 9 aa, Homo Sapiens
FPVFATVIL

SEQ ID NO: 87201 - protein, 9 aa, Homo Sapiens
FPVGDVNNF

SEQ ID NO: 87202 - protein, 9 aa, Homo Sapiens
FPVIYDVKY

SEQ ID NO: 87203 - protein, 9 aa, Homo Sapiens
FPVPKPIDY

SEQ ID NO: 87204 - protein, 9 aa, Homo Sapiens
FPVSIPAVL

SEQ ID NO: 87205 - protein, 9 aa, Homo Sapiens
FPVTPVSTL

SEQ ID NO: 87206 - protein, 9 aa, Homo Sapiens
FPWDIDEAL

SEQ ID NO: 87207 - protein, 9 aa, Homo Sapiens
FPWELDPDW

SEQ ID NO: 87208 - protein, 9 aa, Homo Sapiens
FPYPFQVVY

SEQ ID NO: 87209 - protein, 9 aa, Homo Sapiens
FVNPGVVEF

SEQ ID NO: 87210 - protein, 9 aa, Homo Sapiens
GAAAIILTY

SEQ ID NO: 87211 - protein, 9 aa, Homo Sapiens
GAAGVHFIY

SEQ ID NO: 87212 - protein, 9 aa, Homo Sapiens
GAHGIIVVY

SEQ ID NO: 87213 - protein, 9 aa, Homo Sapiens
GAMGIMLVY

SEQ ID NO: 87214 - protein, 9 aa, Homo Sapiens
GNPQKAILY

SEQ ID NO: 87215 - protein, 9 aa, Homo Sapiens
HACGVIATI

SEQ ID NO: 87216 - protein, 9 aa, Homo Sapiens
HAFVELHEF

SEQ ID NO: 87217 - protein, 9 aa, Homo Sapiens
HAIPPTLAM

SEQ ID NO: 87218 - protein, 9 aa, Homo Sapiens
HALALAWTF

SEQ ID NO: 87219 - protein, 9 aa, Homo Sapiens
HAMVILLTL

SEQ ID NO: 87220 - protein, 9 aa, Homo Sapiens
HAVEWPVVM

SEQ ID NO: 87221 - protein, 9 aa, Homo Sapiens
HAVIDINAF

SEQ ID NO: 87222 - protein, 9 aa, Homo Sapiens
HAVVNLINY

SEQ ID NO: 87223 - protein, 9 aa, Homo Sapiens
HGVLLEVQY

SEQ ID NO: 87224 - protein, 9 aa, Homo Sapiens
HIMEIFSTY

SEQ ID NO: 87225 - protein, 9 aa, Homo Sapiens
HPALAIPEL

SEQ ID NO: 87226 - protein, 9 aa, Homo Sapiens
HPDEPLYSF

SEQ ID NO: 87227 - protein, 9 aa, Homo Sapiens
HPDGVIPVL

SEQ ID NO: 87228 - protein, 9 aa, Homo Sapiens
HPDVLPFAL

SEQ ID NO: 87229 - protein, 9 aa, Homo Sapiens
HPEKLATVL

SEQ ID NO: 87230 - protein, 9 aa, Homo Sapiens
HPFKFSDHY

SEQ ID NO: 87231 - protein, 9 aa, Homo Sapiens
HPILNDPIY

SEQ ID NO: 87232 - protein, 9 aa, Homo Sapiens
HPLGDIVAF

SEQ ID NO: 87233 - protein, 9 aa, Homo Sapiens
HPLGIVQGF

SEQ ID NO: 87234 - protein, 9 aa, Homo Sapiens
HPLPGTQLL

SEQ ID NO: 87235 - protein, 9 aa, Homo Sapiens
HPMAYQLQL

SEQ ID NO: 87236 - protein, 9 aa, Homo Sapiens
HPQIIIRAF

SEQ ID NO: 87237 - protein, 9 aa, Homo Sapiens
HPQPGAVEL

SEQ ID NO: 87238 - protein, 9 aa, Homo Sapiens
HPSNVLHFF

SEQ ID NO: 87239 - protein, 9 aa, Homo Sapiens
HPSQTVELF

SEQ ID NO: 87240 - protein, 9 aa, Homo Sapiens
HPTDPLTSF

SEQ ID NO: 87241 - protein, 9 aa, Homo Sapiens
HPTIISESF

SEQ ID NO: 87242 - protein, 9 aa, Homo Sapiens
HPTVVISAY

SEQ ID NO: 87243 - protein, 9 aa, Homo Sapiens
HPVDFLDAF

SEQ ID NO: 87244 - protein, 9 aa, Homo Sapiens
HPVWALIYY

SEQ ID NO: 87245 - protein, 9 aa, Homo Sapiens
HVGPFIDSY

SEQ ID NO: 87246 - protein, 9 aa, Homo Sapiens
HVIDVKFLY

SEQ ID NO: 87247 - protein, 9 aa, Homo Sapiens
IAFFDVRTF

SEQ ID NO: 87248 - protein, 9 aa, Homo Sapiens
IAIDVIDAY

SEQ ID NO: 87249 - protein, 9 aa, Homo Sapiens
IAIPVTVAF

SEQ ID NO: 87250 - protein, 9 aa, Homo Sapiens
IAMALEVTY

SEQ ID NO: 87251 - protein, 9 aa, Homo Sapiens
IAMDLILKM

SEQ ID NO: 87252 - protein, 9 aa, Homo Sapiens
IPAATTIAY

SEQ ID NO: 87253 - protein, 9 aa, Homo Sapiens
IPAAVKLTY

SEQ ID NO: 87254 - protein, 9 aa, Homo Sapiens
IPAESYTFF

SEQ ID NO: 87255 - protein, 9 aa, Homo Sapiens
IPDDLKQLY

SEQ ID NO: 87256 - protein, 9 aa, Homo Sapiens
IPDQVIRVF

SEQ ID NO: 87257 - protein, 9 aa, Homo Sapiens
IPFAAPTAL

SEQ ID NO: 87258 - protein, 9 aa, Homo Sapiens
IPFEFPLHL

SEQ ID NO: 87259 - protein, 9 aa, Homo Sapiens
IPFNQALVF

SEQ ID NO: 87260 - protein, 9 aa, Homo Sapiens
IPFRPSIQF

SEQ ID NO: 87261 - protein, 9 aa, Homo Sapiens
IPHMDIEAL

SEQ ID NO: 87262 - protein, 9 aa, Homo Sapiens
IPIEPDYKF

SEQ ID NO: 87263 - protein, 9 aa, Homo Sapiens
IPISLHTSL

SEQ ID NO: 87264 - protein, 9 aa, Homo Sapiens
IPLPLIKSY

SEQ ID NO: 87265 - protein, 9 aa, Homo Sapiens
IPNEIIHAL

SEQ ID NO: 87266 - protein, 9 aa, Homo Sapiens
IPNENELQF

SEQ ID NO: 87267 - protein, 9 aa, Homo Sapiens
IPNGVQIFF

SEQ ID NO: 87268 - protein, 9 aa, Homo Sapiens
IPQNFIADY

SEQ ID NO: 87269 - protein, 9 aa, Homo Sapiens
IPSELFSSF

SEQ ID NO: 87270 - protein, 9 aa, Homo Sapiens
IPTPPLPSY

SEQ ID NO: 87271 - protein, 9 aa, Homo Sapiens
IPVIVTEQY

SEQ ID NO: 87272 - protein, 9 aa, Homo Sapiens
IPVPINAEL

SEQ ID NO: 87273 - protein, 9 aa, Homo Sapiens
IPVTIITGY

SEQ ID NO: 87274 - protein, 9 aa, Homo Sapiens
IPVTIMDVF

SEQ ID NO: 87275 - protein, 9 aa, Homo Sapiens
IPWDDLIAL

SEQ ID NO: 87276 - protein, 9 aa, Homo Sapiens
IPWKHIDYF

SEQ ID NO: 87277 - protein, 9 aa, Homo Sapiens
IPWLNEPSF

SEQ ID NO: 87278 - protein, 9 aa, Homo Sapiens
IPWVIEPVY

SEQ ID NO: 87279 - protein, 9 aa, Homo Sapiens
IPYEGFASL

SEQ ID NO: 87280 - protein, 9 aa, Homo Sapiens
IPYPLPPNY

SEQ ID NO: 87281 - protein, 9 aa, Homo Sapiens
IVSQIAVAY

SEQ ID NO: 87282 - protein, 9 aa, Homo Sapiens
LAIPITNTY

SEQ ID NO: 87283 - protein, 9 aa, Homo Sapiens
LALEPGVAY

SEQ ID NO: 87284 - protein, 9 aa, Homo Sapiens
LALFSETAY

SEQ ID NO: 87285 - protein, 9 aa, Homo Sapiens
LAQQYYLVY

SEQ ID NO: 87286 - protein, 9 aa, Homo Sapiens
LAWLDEHTL

SEQ ID NO: 87287 - protein, 9 aa, Homo Sapiens
LDPVLQNPL

SEQ ID NO: 87288 - protein, 9 aa, Homo Sapiens
LLTDIIAAY

SEQ ID NO: 87289 - protein, 9 aa, Homo Sapiens
LPADWAPLF

SEQ ID NO: 87290 - protein, 9 aa, Homo Sapiens
LPAEFFEVL

SEQ ID NO: 87291 - protein, 9 aa, Homo Sapiens
LPAGIVAVL

SEQ ID NO: 87292 - protein, 9 aa, Homo Sapiens
LPAKILVEF

SEQ ID NO: 87293 - protein, 9 aa, Homo Sapiens
LPALPLAEL

SEQ ID NO: 87294 - protein, 9 aa, Homo Sapiens
LPALPTQAL

SEQ ID NO: 87295 - protein, 9 aa, Homo Sapiens
LPAPGVPAW

SEQ ID NO: 87296 - protein, 9 aa, Homo Sapiens
LPAPPKIYF

SEQ ID NO: 87297 - protein, 9 aa, Homo Sapiens
LPAPPTQNM

SEQ ID NO: 87298 - protein, 9 aa, Homo Sapiens
LPAVVVETF

SEQ ID NO: 87299 - protein, 9 aa, Homo Sapiens
LPAYPTENF

SEQ ID NO: 87300 - protein, 9 aa, Homo Sapiens
LPDEIYHVY

SEQ ID NO: 87301 - protein, 9 aa, Homo Sapiens
LPDPNLITF

SEQ ID NO: 87302 - protein, 9 aa, Homo Sapiens
LPDTLKVTY

SEQ ID NO: 87303 - protein, 9 aa, Homo Sapiens
LPDVSLQEF

SEQ ID NO: 87304 - protein, 9 aa, Homo Sapiens
LPELNTRAF

SEQ ID NO: 87305 - protein, 9 aa, Homo Sapiens
LPFATPEEF

SEQ ID NO: 87306 - protein, 9 aa, Homo Sapiens
LPFDCTQAL

SEQ ID NO: 87307 - protein, 9 aa, Homo Sapiens
LPFDKETGF

SEQ ID NO: 87308 - protein, 9 aa, Homo Sapiens
LPFDLRIPF

SEQ ID NO: 87309 - protein, 9 aa, Homo Sapiens
LPFFNDRPW

SEQ ID NO: 87310 - protein, 9 aa, Homo Sapiens
LPFFPIATY

SEQ ID NO: 87311 - protein, 9 aa, Homo Sapiens
LPFHFPGSF

SEQ ID NO: 87312 - protein, 9 aa, Homo Sapiens
LPFPIIQQY

SEQ ID NO: 87313 - protein, 9 aa, Homo Sapiens
LPFPKIDPY

SEQ ID NO: 87314 - protein, 9 aa, Homo Sapiens
LPGEDWVFV

SEQ ID NO: 87315 - protein, 9 aa, Homo Sapiens
LPGLPAPSM

SEQ ID NO: 87316 - protein, 9 aa, Homo Sapiens
LPHAPGVQM

SEQ ID NO: 87317 - protein, 9 aa, Homo Sapiens
LPHDPDLAY

SEQ ID NO: 87318 - protein, 9 aa, Homo Sapiens
LPHEIVVNL

SEQ ID NO: 87319 - protein, 9 aa, Homo Sapiens
LPHFFPWSF

SEQ ID NO: 87320 - protein, 9 aa, Homo Sapiens
LPHGLIESF

SEQ ID NO: 87321 - protein, 9 aa, Homo Sapiens
LPHQPLATY

SEQ ID NO: 87322 - protein, 9 aa, Homo Sapiens
LPKNDLITY

SEQ ID NO: 87323 - protein, 9 aa, Homo Sapiens
LPLDIQIFY

SEQ ID NO: 87324 - protein, 9 aa, Homo Sapiens
LPLDLEDIF

SEQ ID NO: 87325 - protein, 9 aa, Homo Sapiens
LPLEEAYRF

SEQ ID NO: 87326 - protein, 9 aa, Homo Sapiens
LPLHVLPLY

SEQ ID NO: 87327 - protein, 9 aa, Homo Sapiens
LPLLLLLPM

SEQ ID NO: 87328 - protein, 9 aa, Homo Sapiens
LPLLPNVSY

SEQ ID NO: 87329 - protein, 9 aa, Homo Sapiens
LPLLSPVTF

SEQ ID NO: 87330 - protein, 9 aa, Homo Sapiens
LPLNSVYVY

SEQ ID NO: 87331 - protein, 9 aa, Homo Sapiens
LPLPLPMAL

SEQ ID NO: 87332 - protein, 9 aa, Homo Sapiens
LPLPVVQLL

SEQ ID NO: 87333 - protein, 9 aa, Homo Sapiens
LPLTHFELY

SEQ ID NO: 87334 - protein, 9 aa, Homo Sapiens
LPMGVVVDY

SEQ ID NO: 87335 - protein, 9 aa, Homo Sapiens
LPMVPIVAL

SEQ ID NO: 87336 - protein, 9 aa, Homo Sapiens
LPNDVISSL

SEQ ID NO: 87337 - protein, 9 aa, Homo Sapiens
LPNFGFVVF

SEQ ID NO: 87338 - protein, 9 aa, Homo Sapiens
LPNGLDVTF

SEQ ID NO: 87339 - protein, 9 aa, Homo Sapiens
LPNNIVDVW

SEQ ID NO: 87340 - protein, 9 aa, Homo Sapiens
LPNTDVPIL

SEQ ID NO: 87341 - protein, 9 aa, Homo Sapiens
LPNWLINSY

SEQ ID NO: 87342 - protein, 9 aa, Homo Sapiens
LPPEELVPY

SEQ ID NO: 87343 - protein, 9 aa, Homo Sapiens
LPPGVHISY

SEQ ID NO: 87344 - protein, 9 aa, Homo Sapiens
LPPKIVIGY

SEQ ID NO: 87345 - protein, 9 aa, Homo Sapiens
LPPPVHVDY

SEQ ID NO: 87346 - protein, 9 aa, Homo Sapiens
LPQDVILKF

SEQ ID NO: 87347 - protein, 9 aa, Homo Sapiens
LPQEAFEKY

SEQ ID NO: 87348 - protein, 9 aa, Homo Sapiens
LPQEDLEAL

SEQ ID NO: 87349 - protein, 9 aa, Homo Sapiens
LPSDVSILY

SEQ ID NO: 87350 - protein, 9 aa, Homo Sapiens
LPSEHQTIL

SEQ ID NO: 87351 - protein, 9 aa, Homo Sapiens
LPSEIEVKY

SEQ ID NO: 87352 - protein, 9 aa, Homo Sapiens
LPSHLNISY

SEQ ID NO: 87353 - protein, 9 aa, Homo Sapiens
LPSHVVTML

SEQ ID NO: 87354 - protein, 9 aa, Homo Sapiens
LPSLSAHEL

SEQ ID NO: 87355 - protein, 9 aa, Homo Sapiens
LPSSEVVKF

SEQ ID NO: 87356 - protein, 9 aa, Homo Sapiens
LPTAVIANL

SEQ ID NO: 87357 - protein, 9 aa, Homo Sapiens
LPTEEEWEF

SEQ ID NO: 87358 - protein, 9 aa, Homo Sapiens
LPTFQSPEF

SEQ ID NO: 87359 - protein, 9 aa, Homo Sapiens
LPTGVYLNF

SEQ ID NO: 87360 - protein, 9 aa, Homo Sapiens
LPVDFVECL

SEQ ID NO: 87361 - protein, 9 aa, Homo Sapiens
LPVDLAEEL

SEQ ID NO: 87362 - protein, 9 aa, Homo Sapiens
LPVEEFNEL

SEQ ID NO: 87363 - protein, 9 aa, Homo Sapiens
LPVEQGFTF

SEQ ID NO: 87364 - protein, 9 aa, Homo Sapiens
LPVIIFTTF

SEQ ID NO: 87365 - protein, 9 aa, Homo Sapiens
LPVLERLIY

SEQ ID NO: 87366 - protein, 9 aa, Homo Sapiens
LPVPAFNVI

SEQ ID NO: 87367 - protein, 9 aa, Homo Sapiens
LPVPVIPSF

SEQ ID NO: 87368 - protein, 9 aa, Homo Sapiens
LPWNITVHF

SEQ ID NO: 87369 - protein, 9 aa, Homo Sapiens
LPWVGKELY

SEQ ID NO: 87370 - protein, 9 aa, Homo Sapiens
LPYNDYFEY

SEQ ID NO: 87371 - protein, 9 aa, Homo Sapiens
LPYPDLETY

SEQ ID NO: 87372 - protein, 9 aa, Homo Sapiens
LPYTVVIHY

SEQ ID NO: 87373 - protein, 9 aa, Homo Sapiens
LVYNGVYQY

SEQ ID NO: 87374 - protein, 9 aa, Homo Sapiens
MAAMPQTVY

SEQ ID NO: 87375 - protein, 9 aa, Homo Sapiens
MALAVRVVY

SEQ ID NO: 87376 - protein, 9 aa, Homo Sapiens
MALLVPLVY

SEQ ID NO: 87377 - protein, 9 aa, Homo Sapiens
MANIPLPEY

SEQ ID NO: 87378 - protein, 9 aa, Homo Sapiens
MAVIDGNVM

SEQ ID NO: 87379 - protein, 9 aa, Homo Sapiens
MAWLVDHVY

SEQ ID NO: 87380 - protein, 9 aa, Homo Sapiens
MPADIATLL

SEQ ID NO: 87381 - protein, 9 aa, Homo Sapiens
MPAEIVELH

SEQ ID NO: 87382 - protein, 9 aa, Homo Sapiens
MPAPEIVSY

SEQ ID NO: 87383 - protein, 9 aa, Homo Sapiens
MPAVKAIIY

SEQ ID NO: 87384 - protein, 9 aa, Homo Sapiens
MPDDLLTTL

SEQ ID NO: 87385 - protein, 9 aa, Homo Sapiens
MPDSAAALL

SEQ ID NO: 87386 - protein, 9 aa, Homo Sapiens
MPEDVKNFY

SEQ ID NO: 87387 - protein, 9 aa, Homo Sapiens
MPIGPDVSL

SEQ ID NO: 87388 - protein, 9 aa, Homo Sapiens
MPIKLKIGL

SEQ ID NO: 87389 - protein, 9 aa, Homo Sapiens
MPLEDMNEF

SEQ ID NO: 87390 - protein, 9 aa, Homo Sapiens
MPLGARILF

SEQ ID NO: 87391 - protein, 9 aa, Homo Sapiens
MPLQLLLLL

SEQ ID NO: 87392 - protein, 9 aa, Homo Sapiens
MPNENIPEL

SEQ ID NO: 87393 - protein, 9 aa, Homo Sapiens
MPNQIVQIL

SEQ ID NO: 87394 - protein, 9 aa, Homo Sapiens
MPNSPAPHF

SEQ ID NO: 87395 - protein, 9 aa, Homo Sapiens
MPNVKVAVF

SEQ ID NO: 87396 - protein, 9 aa, Homo Sapiens
MPQFSTIEY

SEQ ID NO: 87397 - protein, 9 aa, Homo Sapiens
MPQGAPRLY

SEQ ID NO: 87398 - protein, 9 aa, Homo Sapiens
MPQGLVISF

SEQ ID NO: 87399 - protein, 9 aa, Homo Sapiens
MPQVAPDLY

SEQ ID NO: 87400 - protein, 9 aa, Homo Sapiens
MPSDVLEVT

SEQ ID NO: 87401 - protein, 9 aa, Homo Sapiens
MPSPVSPKL

SEQ ID NO: 87402 - protein, 9 aa, Homo Sapiens
MPSVKVSVF

SEQ ID NO: 87403 - protein, 9 aa, Homo Sapiens
MPTDVLEVT

SEQ ID NO: 87404 - protein, 9 aa, Homo Sapiens
MPTIQITAL

SEQ ID NO: 87405 - protein, 9 aa, Homo Sapiens
MPVLEQSVL

SEQ ID NO: 87406 - protein, 9 aa, Homo Sapiens
MPYLEHESF

SEQ ID NO: 87407 - protein, 9 aa, Homo Sapiens
MSFEWPWQY

SEQ ID NO: 87408 - protein, 9 aa, Homo Sapiens
MVHSLIEAY

SEQ ID NO: 87409 - protein, 9 aa, Homo Sapiens
MVNHFIAEF

SEQ ID NO: 87410 - protein, 9 aa, Homo Sapiens
MVQPINLIF

SEQ ID NO: 87411 - protein, 9 aa, Homo Sapiens
MVVDIVQEL

SEQ ID NO: 87412 - protein, 9 aa, Homo Sapiens
NAAFPFLAY

SEQ ID NO: 87413 - protein, 9 aa, Homo Sapiens
NAAKVFNLY

SEQ ID NO: 87414 - protein, 9 aa, Homo Sapiens
NADTLALVF

SEQ ID NO: 87415 - protein, 9 aa, Homo Sapiens
NAFASVILF

SEQ ID NO: 87416 - protein, 9 aa, Homo Sapiens
NAFDVFAAY

SEQ ID NO: 87417 - protein, 9 aa, Homo Sapiens
NAFEELVAF

SEQ ID NO: 87418 - protein, 9 aa, Homo Sapiens
NAFKEITTM

SEQ ID NO: 87419 - protein, 9 aa, Homo Sapiens
NAFWTIPVY

SEQ ID NO: 87420 - protein, 9 aa, Homo Sapiens
NAISVTTSY

SEQ ID NO: 87421 - protein, 9 aa, Homo Sapiens
NAITLPEEF

SEQ ID NO: 87422 - protein, 9 aa, Homo Sapiens
NAIVAVISY

SEQ ID NO: 87423 - protein, 9 aa, Homo Sapiens
NALPALLIY

SEQ ID NO: 87424 - protein, 9 aa, Homo Sapiens
NAMDVVVQF

SEQ ID NO: 87425 - protein, 9 aa, Homo Sapiens
NAVNLAIKY

SEQ ID NO: 87426 - protein, 9 aa, Homo Sapiens
NAWADIERF

SEQ ID NO: 87427 - protein, 9 aa, Homo Sapiens
NAWNNLEKY

SEQ ID NO: 87428 - protein, 9 aa, Homo Sapiens
NIITILESY

SEQ ID NO: 87429 - protein, 9 aa, Homo Sapiens
NIPEIVAVY

SEQ ID NO: 87430 - protein, 9 aa, Homo Sapiens
NPADITVLF

SEQ ID NO: 87431 - protein, 9 aa, Homo Sapiens
NPDDVFREF

SEQ ID NO: 87432 - protein, 9 aa, Homo Sapiens
NPFELAFSL

SEQ ID NO: 87433 - protein, 9 aa, Homo Sapiens
NPFEYYIFF

SEQ ID NO: 87434 - protein, 9 aa, Homo Sapiens
NPGEIFIIL

SEQ ID NO: 87435 - protein, 9 aa, Homo Sapiens
NPISTVTEL

SEQ ID NO: 87436 - protein, 9 aa, Homo Sapiens
NPLDEQHIF

SEQ ID NO: 87437 - protein, 9 aa, Homo Sapiens
NPSPYHLYY

SEQ ID NO: 87438 - protein, 9 aa, Homo Sapiens
NPTDAFTVF

SEQ ID NO: 87439 - protein, 9 aa, Homo Sapiens
NPTDISYVY

SEQ ID NO: 87440 - protein, 9 aa, Homo Sapiens
NPVDIVSTL

SEQ ID NO: 87441 - protein, 9 aa, Homo Sapiens
NPVEYSIVM

SEQ ID NO: 87442 - protein, 9 aa, Homo Sapiens
NPVGGLLEY

SEQ ID NO: 87443 - protein, 9 aa, Homo Sapiens
NPVQALSEF

SEQ ID NO: 87444 - protein, 9 aa, Homo Sapiens
NPVSWVESF

SEQ ID NO: 87445 - protein, 9 aa, Homo Sapiens
NPVSWVQTF

SEQ ID NO: 87446 - protein, 9 aa, Homo Sapiens
NPWDDKLIF

SEQ ID NO: 87447 - protein, 9 aa, Homo Sapiens
NPYHVVILF

SEQ ID NO: 87448 - protein, 9 aa, Homo Sapiens
NVADVVIKF

SEQ ID NO: 87449 - protein, 9 aa, Homo Sapiens
NVHDIMVSF

SEQ ID NO: 87450 - protein, 9 aa, Homo Sapiens
NVIHNLATY

SEQ ID NO: 87451 - protein, 9 aa, Homo Sapiens
NVIRDAVTY

SEQ ID NO: 87452 - protein, 9 aa, Homo Sapiens
NVVAVIVAF

SEQ ID NO: 87453 - protein, 9 aa, Homo Sapiens
PVATVLTDM

SEQ ID NO: 87454 - protein, 9 aa, Homo Sapiens
QAAMPQVSY

SEQ ID NO: 87455 - protein, 9 aa, Homo Sapiens
QAITLVTQY

SEQ ID NO: 87456 - protein, 9 aa, Homo Sapiens
QALEILFTY

SEQ ID NO: 87457 - protein, 9 aa, Homo Sapiens
QPFQVAEVF

SEQ ID NO: 87458 - protein, 9 aa, Homo Sapiens
QPINLIFRY

SEQ ID NO: 87459 - protein, 9 aa, Homo Sapiens
QPLEEIITY

SEQ ID NO: 87460 - protein, 9 aa, Homo Sapiens
QPMSFVLEF

SEQ ID NO: 87461 - protein, 9 aa, Homo Sapiens
RPFAGFEDF

SEQ ID NO: 87462 - protein, 9 aa, Homo Sapiens
RPIFIITEY

SEQ ID NO: 87463 - protein, 9 aa, Homo Sapiens
RPTDVAISF

SEQ ID NO: 87464 - protein, 9 aa, Homo Sapiens
RPVNVVNVY

SEQ ID NO: 87465 - protein, 9 aa, Homo Sapiens
SAADFFSHY

SEQ ID NO: 87466 - protein, 9 aa, Homo Sapiens
SAANIQPIF

SEQ ID NO: 87467 - protein, 9 aa, Homo Sapiens
SAAPFFVLF

SEQ ID NO: 87468 - protein, 9 aa, Homo Sapiens
SADQVALVY

SEQ ID NO: 87469 - protein, 9 aa, Homo Sapiens
SAFPYAHRF

SEQ ID NO: 87470 - protein, 9 aa, Homo Sapiens
SALPLYNLY

SEQ ID NO: 87471 - protein, 9 aa, Homo Sapiens
SALPTVVAY

SEQ ID NO: 87472 - protein, 9 aa, Homo Sapiens
SAMEVVPAL

SEQ ID NO: 87473 - protein, 9 aa, Homo Sapiens
SAVDVHINM

SEQ ID NO: 87474 - protein, 9 aa, Homo Sapiens
SAVEVCVVY

SEQ ID NO: 87475 - protein, 9 aa, Homo Sapiens
SAWSFITTF

SEQ ID NO: 87476 - protein, 9 aa, Homo Sapiens
SPAPVPVTY

SEQ ID NO: 87477 - protein, 9 aa, Homo Sapiens
SPDATIRIW

SEQ ID NO: 87478 - protein, 9 aa, Homo Sapiens
SPEELYRVF

SEQ ID NO: 87479 - protein, 9 aa, Homo Sapiens
SPFQPHVPY

SEQ ID NO: 87480 - protein, 9 aa, Homo Sapiens
SPFRFEISF

SEQ ID NO: 87481 - protein, 9 aa, Homo Sapiens
SPIDVVEKY

SEQ ID NO: 87482 - protein, 9 aa, Homo Sapiens
SPIQFESAW

SEQ ID NO: 87483 - protein, 9 aa, Homo Sapiens
SPLAFEHVM

SEQ ID NO: 87484 - protein, 9 aa, Homo Sapiens
SPLPAQLVY

SEQ ID NO: 87485 - protein, 9 aa, Homo Sapiens
SPMDIFDMF

SEQ ID NO: 87486 - protein, 9 aa, Homo Sapiens
SPNAEIHIL

SEQ ID NO: 87487 - protein, 9 aa, Homo Sapiens
SPTCLTLIY

SEQ ID NO: 87488 - protein, 9 aa, Homo Sapiens
SPVALNVQY

SEQ ID NO: 87489 - protein, 9 aa, Homo Sapiens
SPVDSVLFY

SEQ ID NO: 87490 - protein, 9 aa, Homo Sapiens
SPVDVLQIF

SEQ ID NO: 87491 - protein, 9 aa, Homo Sapiens
SPVFMQPVY

SEQ ID NO: 87492 - protein, 9 aa, Homo Sapiens
SPVSFIATY

SEQ ID NO: 87493 - protein, 9 aa, Homo Sapiens
SPVYIAIFY

SEQ ID NO: 87494 - protein, 9 aa, Homo Sapiens
SPWADNTAL

SEQ ID NO: 87495 - protein, 9 aa, Homo Sapiens
SVLPFQIYY

SEQ ID NO: 87496 - protein, 9 aa, Homo Sapiens
SVSEVIEGY

SEQ ID NO: 87497 - protein, 9 aa, Homo Sapiens
TAAAVGAVF

SEQ ID NO: 87498 - protein, 9 aa, Homo Sapiens
TAAPVVPEL

SEQ ID NO: 87499 - protein, 9 aa, Homo Sapiens
TAEGIILLF

SEQ ID NO: 87500 - protein, 9 aa, Homo Sapiens
TAFYLIENY

SEQ ID NO: 87501 - protein, 9 aa, Homo Sapiens
TAIRALETY

SEQ ID NO: 87502 - protein, 9 aa, Homo Sapiens
TAISLFYEL

SEQ ID NO: 87503 - protein, 9 aa, Homo Sapiens
TALAAFLSY

SEQ ID NO: 87504 - protein, 9 aa, Homo Sapiens
TALASVVAM

SEQ ID NO: 87505 - protein, 9 aa, Homo Sapiens
TASELKILY

SEQ ID NO: 87506 - protein, 9 aa, Homo Sapiens
TASPVAVSL

SEQ ID NO: 87507 - protein, 9 aa, Homo Sapiens
TAVKIAPRY

SEQ ID NO: 87508 - protein, 9 aa, Homo Sapiens
TAVPTLLKY

SEQ ID NO: 87509 - protein, 9 aa, Homo Sapiens
TAWEDYIWF

SEQ ID NO: 87510 - protein, 9 aa, Homo Sapiens
TIPYLTALL

SEQ ID NO: 87511 - protein, 9 aa, Homo Sapiens
TPADVFIVF

SEQ ID NO: 87512 - protein, 9 aa, Homo Sapiens
TPAGVQVIL

SEQ ID NO: 87513 - protein, 9 aa, Homo Sapiens
TPFAFVIDL

SEQ ID NO: 87514 - protein, 9 aa, Homo Sapiens
TPFLYDLVM

SEQ ID NO: 87515 - protein, 9 aa, Homo Sapiens
TPFVDPRVY

SEQ ID NO: 87516 - protein, 9 aa, Homo Sapiens
TPFVEGLSY

SEQ ID NO: 87517 - protein, 9 aa, Homo Sapiens
TPHSEIIFY

SEQ ID NO: 87518 - protein, 9 aa, Homo Sapiens
TPIKDGILY

SEQ ID NO: 87519 - protein, 9 aa, Homo Sapiens
TPIPGTIEM

SEQ ID NO: 87520 - protein, 9 aa, Homo Sapiens
TPLDFLHIF

SEQ ID NO: 87521 - protein, 9 aa, Homo Sapiens
TPLVDPSVY

SEQ ID NO: 87522 - protein, 9 aa, Homo Sapiens
TPMFVVKAY

SEQ ID NO: 87523 - protein, 9 aa, Homo Sapiens
TPSPIIQQL

SEQ ID NO: 87524 - protein, 9 aa, Homo Sapiens
TPTEISLVL

SEQ ID NO: 87525 - protein, 9 aa, Homo Sapiens
TPTGIKVVM

SEQ ID NO: 87526 - protein, 9 aa, Homo Sapiens
TPTPFFHTF

SEQ ID NO: 87527 - protein, 9 aa, Homo Sapiens
TPWPHIVEF

SEQ ID NO: 87528 - protein, 9 aa, Homo Sapiens
TVFDLVEEY

SEQ ID NO: 87529 - protein, 9 aa, Homo Sapiens
TVSDAILRY

SEQ ID NO: 87530 - protein, 9 aa, Homo Sapiens
TVTEVLLKY

SEQ ID NO: 87531 - protein, 9 aa, Homo Sapiens
VAAPLFELY

SEQ ID NO: 87532 - protein, 9 aa, Homo Sapiens
VADPYVVIM

SEQ ID NO: 87533 - protein, 9 aa, Homo Sapiens
VALNFIISY

SEQ ID NO: 87534 - protein, 9 aa, Homo Sapiens
VPAEVTVIL

SEQ ID NO: 87535 - protein, 9 aa, Homo Sapiens
VPASLPVEF

SEQ ID NO: 87536 - protein, 9 aa, Homo Sapiens
VPFDQFIQL

SEQ ID NO: 87537 - protein, 9 aa, Homo Sapiens
VPHSIINGY

SEQ ID NO: 87538 - protein, 9 aa, Homo Sapiens
VPHSLETLY

SEQ ID NO: 87539 - protein, 9 aa, Homo Sapiens
VPLEIMIKF

SEQ ID NO: 87540 - protein, 9 aa, Homo Sapiens
VPLGMTVTF

SEQ ID NO: 87541 - protein, 9 aa, Homo Sapiens
VPNFIFDEF

SEQ ID NO: 87542 - protein, 9 aa, Homo Sapiens
VPPLFVIEF

SEQ ID NO: 87543 - protein, 9 aa, Homo Sapiens
VPQVSTPTL

SEQ ID NO: 87544 - protein, 9 aa, Homo Sapiens
VPRIQLEEY

SEQ ID NO: 87545 - protein, 9 aa, Homo Sapiens
VPSGLIVDY

SEQ ID NO: 87546 - protein, 9 aa, Homo Sapiens
VPSPAQIMY

SEQ ID NO: 87547 - protein, 9 aa, Homo Sapiens
VPTELALLY

SEQ ID NO: 87548 - protein, 9 aa, Homo Sapiens
VPVDLQHQF

SEQ ID NO: 87549 - protein, 9 aa, Homo Sapiens
VPVDVVVNM

SEQ ID NO: 87550 - protein, 9 aa, Homo Sapiens
VPVEEPIAF

SEQ ID NO: 87551 - protein, 9 aa, Homo Sapiens
VPVPPNVAF

SEQ ID NO: 87552 - protein, 9 aa, Homo Sapiens
VPVSVVECF

SEQ ID NO: 87553 - protein, 9 aa, Homo Sapiens
VPVWIIHYY

SEQ ID NO: 87554 - protein, 9 aa, Homo Sapiens
VPWLSSVRY

SEQ ID NO: 87555 - protein, 9 aa, Homo Sapiens
VVPTAILAF

SEQ ID NO: 87556 - protein, 9 aa, Homo Sapiens
WPAEYIIVF

SEQ ID NO: 87557 - protein, 9 aa, Homo Sapiens
YAFDFARQS

SEQ ID NO: 87558 - protein, 9 aa, Homo Sapiens
YAFPKEFPY

SEQ ID NO: 87559 - protein, 9 aa, Homo Sapiens
YAIDNPLHY

SEQ ID NO: 87560 - protein, 9 aa, Homo Sapiens
YATFIVTNY

SEQ ID NO: 87561 - protein, 9 aa, Homo Sapiens
YGFQEKEAF

SEQ ID NO: 87562 - protein, 9 aa, Homo Sapiens
YMFVDENTF

SEQ ID NO: 87563 - protein, 9 aa, Homo Sapiens
YPAAVPQAL

SEQ ID NO: 87564 - protein, 9 aa, Homo Sapiens
YPAEITLTW

SEQ ID NO: 87565 - protein, 9 aa, Homo Sapiens
YPAGFPMGY

SEQ ID NO: 87566 - protein, 9 aa, Homo Sapiens
YPAQITPKM

SEQ ID NO: 87567 - protein, 9 aa, Homo Sapiens
YPASTVQIL

SEQ ID NO: 87568 - protein, 9 aa, Homo Sapiens
YPDTDVILM

SEQ ID NO: 87569 - protein, 9 aa, Homo Sapiens
YPENIVPSF

SEQ ID NO: 87570 - protein, 9 aa, Homo Sapiens
YPFSSEQKW

SEQ ID NO: 87571 - protein, 9 aa, Homo Sapiens
YPGPGNHFW

SEQ ID NO: 87572 - protein, 9 aa, Homo Sapiens
YPLDLLLKL

SEQ ID NO: 87573 - protein, 9 aa, Homo Sapiens
YPLEDLPSL

SEQ ID NO: 87574 - protein, 9 aa, Homo Sapiens
YPLWGGIMY

SEQ ID NO: 87575 - protein, 9 aa, Homo Sapiens
YPNVNIHNF

SEQ ID NO: 87576 - protein, 9 aa, Homo Sapiens
YPQDWFQVL

SEQ ID NO: 87577 - protein, 9 aa, Homo Sapiens
YPQEVIPTF

SEQ ID NO: 87578 - protein, 9 aa, Homo Sapiens
YPSEFATYL

SEQ ID NO: 87579 - protein, 9 aa, Homo Sapiens
YPSNIFISF

SEQ ID NO: 87580 - protein, 9 aa, Homo Sapiens
YPVDLGDKF

SEQ ID NO: 87581 - protein, 9 aa, Homo Sapiens
YPVEIHEYL

SEQ ID NO: 87582 - protein, 9 aa, Homo Sapiens
YSFLDKMSF

SEQ ID NO: 87583 - protein, 10 aa, Homo Sapiens
APIRPDIVNF

SEQ ID NO: 87584 - protein, 10 aa, Homo Sapiens
DAFLEQAVSY

SEQ ID NO: 87585 - protein, 10 aa, Homo Sapiens
DAWLEMNPGY

SEQ ID NO: 87586 - protein, 10 aa, Homo Sapiens
DPFVDRIGYF

SEQ ID NO: 87587 - protein, 10 aa, Homo Sapiens
EALAGLLVTY

SEQ ID NO: 87588 - protein, 10 aa, Homo Sapiens
EAWHELAELY

SEQ ID NO: 87589 - protein, 10 aa, Homo Sapiens
EAWLEMNPGY

SEQ ID NO: 87590 - protein, 10 aa, Homo Sapiens
EENSRISITF

SEQ ID NO: 87591 - protein, 10 aa, Homo Sapiens
EPWPENATLY

SEQ ID NO: 87592 - protein, 10 aa, Homo Sapiens
FANPEDCVAF

SEQ ID NO: 87593 - protein, 10 aa, Homo Sapiens
FAVDLEHHSY

SEQ ID NO: 87594 - protein, 10 aa, Homo Sapiens
FPAPAKAVVY

SEQ ID NO: 87595 - protein, 10 aa, Homo Sapiens
FPASFPNRQY

SEQ ID NO: 87596 - protein, 10 aa, Homo Sapiens
FPEAYKPTVY

SEQ ID NO: 87597 - protein, 10 aa, Homo Sapiens
FPEDVVRVIF

SEQ ID NO: 87598 - protein, 10 aa, Homo Sapiens
FPEEVIATIF

SEQ ID NO: 87599 - protein, 10 aa, Homo Sapiens
FPEPLIIPVL

SEQ ID NO: 87600 - protein, 10 aa, Homo Sapiens
FPEVYVPTVF

SEQ ID NO: 87601 - protein, 10 aa, Homo Sapiens
FPFHEVIQEF

SEQ ID NO: 87602 - protein, 10 aa, Homo Sapiens
FPHPVNQVTF

SEQ ID NO: 87603 - protein, 10 aa, Homo Sapiens
FPMTHGNTGF

SEQ ID NO: 87604 - protein, 10 aa, Homo Sapiens
FPSEYVPTVF

SEQ ID NO: 87605 - protein, 10 aa, Homo Sapiens
FPTQALNFAF

SEQ ID NO: 87606 - protein, 10 aa, Homo Sapiens
FPVAGQKLIY

SEQ ID NO: 87607 - protein, 10 aa, Homo Sapiens
FPVEIKSFYM

SEQ ID NO: 87608 - protein, 10 aa, Homo Sapiens
FPVPGSGLVL

SEQ ID NO: 87609 - protein, 10 aa, Homo Sapiens
FPWGDGNHTL

SEQ ID NO: 87610 - protein, 10 aa, Homo Sapiens
FPYKNCKTDF

SEQ ID NO: 87611 - protein, 10 aa, Homo Sapiens
FPYQDKLVGY

SEQ ID NO: 87612 - protein, 10 aa, Homo Sapiens
HAIQDLLVFY

SEQ ID NO: 87613 - protein, 10 aa, Homo Sapiens
HPDPTRLLLF

SEQ ID NO: 87614 - protein, 10 aa, Homo Sapiens
HPEASIQAVF

SEQ ID NO: 87615 - protein, 10 aa, Homo Sapiens
HPIDGFLQSL

SEQ ID NO: 87616 - protein, 10 aa, Homo Sapiens
HPIEGSTTVF

SEQ ID NO: 87617 - protein, 10 aa, Homo Sapiens
HPLSVLGINY

SEQ ID NO: 87618 - protein, 10 aa, Homo Sapiens
HPNLVVGGTY

SEQ ID NO: 87619 - protein, 10 aa, Homo Sapiens
HPTLGPKITY

SEQ ID NO: 87620 - protein, 10 aa, Homo Sapiens
HPVYILKGGY

SEQ ID NO: 87621 - protein, 10 aa, Homo Sapiens
HPWEVMPDLY

SEQ ID NO: 87622 - protein, 10 aa, Homo Sapiens
HPWFGMEQEY

SEQ ID NO: 87623 - protein, 10 aa, Homo Sapiens
IPAPGSGVSF

SEQ ID NO: 87624 - protein, 10 aa, Homo Sapiens
IPFDPKFITY

SEQ ID NO: 87625 - protein, 10 aa, Homo Sapiens
IPHSFALISY

SEQ ID NO: 87626 - protein, 10 aa, Homo Sapiens
IPICHGNLIF

SEQ ID NO: 87627 - protein, 10 aa, Homo Sapiens
IPIPFYLSVY

SEQ ID NO: 87628 - protein, 10 aa, Homo Sapiens
IPISPISPAF

SEQ ID NO: 87629 - protein, 10 aa, Homo Sapiens
IPIWGTLIQY

SEQ ID NO: 87630 - protein, 10 aa, Homo Sapiens
IPLDGETWSY

SEQ ID NO: 87631 - protein, 10 aa, Homo Sapiens
IPVFLRHAEL

SEQ ID NO: 87632 - protein, 10 aa, Homo Sapiens
LAAADISAYY

SEQ ID NO: 87633 - protein, 10 aa, Homo Sapiens
LGAPDELLAF

SEQ ID NO: 87634 - protein, 10 aa, Homo Sapiens
LPADITEDEF

SEQ ID NO: 87635 - protein, 10 aa, Homo Sapiens
LPEARGRAGL

SEQ ID NO: 87636 - protein, 10 aa, Homo Sapiens
LPFSSMPTAY

SEQ ID NO: 87637 - protein, 10 aa, Homo Sapiens
LPHPYAIAVF

SEQ ID NO: 87638 - protein, 10 aa, Homo Sapiens
LPIDPNEPTY

SEQ ID NO: 87639 - protein, 10 aa, Homo Sapiens
LPIGDVATQY

SEQ ID NO: 87640 - protein, 10 aa, Homo Sapiens
LPIPDPGVSV

SEQ ID NO: 87641 - protein, 10 aa, Homo Sapiens
LPIPSKLLEF

SEQ ID NO: 87642 - protein, 10 aa, Homo Sapiens
LPLPAPHAQY

SEQ ID NO: 87643 - protein, 10 aa, Homo Sapiens
LPPEIFGDAL

SEQ ID NO: 87644 - protein, 10 aa, Homo Sapiens
LPQPDVFPLF

SEQ ID NO: 87645 - protein, 10 aa, Homo Sapiens
LPSDFTPAVH

SEQ ID NO: 87646 - protein, 10 aa, Homo Sapiens
LPSPVTAQKY

SEQ ID NO: 87647 - protein, 10 aa, Homo Sapiens
LPTEPPYTAY

SEQ ID NO: 87648 - protein, 10 aa, Homo Sapiens
LPYNDYFEYF

SEQ ID NO: 87649 - protein, 10 aa, Homo Sapiens
LPYNHQHEYF

SEQ ID NO: 87650 - protein, 10 aa, Homo Sapiens
LPYSEYFEYF

SEQ ID NO: 87651 - protein, 10 aa, Homo Sapiens
MAFQNDVYEW

SEQ ID NO: 87652 - protein, 10 aa, Homo Sapiens
MPELVDFRQY

SEQ ID NO: 87653 - protein, 10 aa, Homo Sapiens
MPEPDAQRFF

SEQ ID NO: 87654 - protein, 10 aa, Homo Sapiens
MPFEIRLPEF

SEQ ID NO: 87655 - protein, 10 aa, Homo Sapiens
MPLGSAVDIL

SEQ ID NO: 87656 - protein, 10 aa, Homo Sapiens
MPLHTIIPLL

SEQ ID NO: 87657 - protein, 10 aa, Homo Sapiens
MPSSDTTVTF

SEQ ID NO: 87658 - protein, 10 aa, Homo Sapiens
MPSVVGVLVF

SEQ ID NO: 87659 - protein, 10 aa, Homo Sapiens
NAFPEENMNY

SEQ ID NO: 87660 - protein, 10 aa, Homo Sapiens
NAVDALIDSM

SEQ ID NO: 87661 - protein, 10 aa, Homo Sapiens
NAYQELLQHY

SEQ ID NO: 87662 - protein, 10 aa, Homo Sapiens
NPFHWGEVEY

SEQ ID NO: 87663 - protein, 10 aa, Homo Sapiens
NVVQLIMDAY

SEQ ID NO: 87664 - protein, 10 aa, Homo Sapiens
QPAQDIFSVY

SEQ ID NO: 87665 - protein, 10 aa, Homo Sapiens
QPWEEIKTSY

SEQ ID NO: 87666 - protein, 10 aa, Homo Sapiens
SPASDTYIVF

SEQ ID NO: 87667 - protein, 10 aa, Homo Sapiens
SPIEFLENAY

SEQ ID NO: 87668 - protein, 10 aa, Homo Sapiens
SPIPFPPLSY

SEQ ID NO: 87669 - protein, 10 aa, Homo Sapiens
TAAAVVGLLY

SEQ ID NO: 87670 - protein, 10 aa, Homo Sapiens
TAFTLAHIHY

SEQ ID NO: 87671 - protein, 10 aa, Homo Sapiens
TANPFPVPSL

SEQ ID NO: 87672 - protein, 10 aa, Homo Sapiens
TAWDEADVRF

SEQ ID NO: 87673 - protein, 10 aa, Homo Sapiens
TAWLEIMTKY

SEQ ID NO: 87674 - protein, 10 aa, Homo Sapiens
TPLSLFGDTY

SEQ ID NO: 87675 - protein, 10 aa, Homo Sapiens
TVFGSLIIGY

SEQ ID NO: 87676 - protein, 10 aa, Homo Sapiens
VALPGVAVSM

SEQ ID NO: 87677 - protein, 10 aa, Homo Sapiens
VPWHEEVVQF

SEQ ID NO: 87678 - protein, 10 aa, Homo Sapiens
VPYPDDLVGF

SEQ ID NO: 87679 - protein, 10 aa, Homo Sapiens
YAFQDDRYLY

SEQ ID NO: 87680 - protein, 10 aa, Homo Sapiens
YALEEGIVRY

SEQ ID NO: 87681 - protein, 10 aa, Homo Sapiens
YAQDEHLITF

SEQ ID NO: 87682 - protein, 10 aa, Homo Sapiens
YAWRPVFDEY

SEQ ID NO: 87683 - protein, 10 aa, Homo Sapiens
YPFKPPKITF

SEQ ID NO: 87684 - protein, 10 aa, Homo Sapiens
YPFKPPKVAF

SEQ ID NO: 87685 - protein, 10 aa, Homo Sapiens
YPFKPPKVTF

SEQ ID NO: 87686 - protein, 10 aa, Homo Sapiens
YPFLLVGDLM

SEQ ID NO: 87687 - protein, 10 aa, Homo Sapiens
YPFPTFQPAF

SEQ ID NO: 87688 - protein, 10 aa, Homo Sapiens
YPIALTRAEM

SEQ ID NO: 87689 - protein, 10 aa, Homo Sapiens
YPIDPVTQEF

SEQ ID NO: 87690 - protein, 10 aa, Homo Sapiens
YPLEVTKLIY

SEQ ID NO: 87691 - protein, 10 aa, Homo Sapiens
YPTSIASLAF

SEQ ID NO: 87692 - protein, 10 aa, Homo Sapiens
YPYNAPTVKF

SEQ ID NO: 87693 - protein, 10 aa, Homo Sapiens
YPYPPPPPEF

SEQ ID NO: 87694 - protein, 11 aa, Homo Sapiens
APWIESQDWAY

SEQ ID NO: 87695 - protein, 11 aa, Homo Sapiens
DPFSFDGPEIM

SEQ ID NO: 87696 - protein, 11 aa, Homo Sapiens
EAFDELLASKY

SEQ ID NO: 87697 - protein, 11 aa, Homo Sapiens
EPIYPEVVHMF

SEQ ID NO: 87698 - protein, 11 aa, Homo Sapiens
FAGDDAPRAVF

SEQ ID NO: 87699 - protein, 11 aa, Homo Sapiens
FAKSVSFSDVF

SEQ ID NO: 87700 - protein, 11 aa, Homo Sapiens
FALPSELERSY

SEQ ID NO: 87701 - protein, 11 aa, Homo Sapiens
FAVTEYPTLKF

SEQ ID NO: 87702 - protein, 11 aa, Homo Sapiens
FIWVDGSHVDY

SEQ ID NO: 87703 - protein, 11 aa, Homo Sapiens
FPAGSVHVNVY

SEQ ID NO: 87704 - protein, 11 aa, Homo Sapiens
FPASPPKGYFL

SEQ ID NO: 87705 - protein, 11 aa, Homo Sapiens
FPDFPTPGVVF

SEQ ID NO: 87706 - protein, 11 aa, Homo Sapiens
FPEPLIIPVLY

SEQ ID NO: 87707 - protein, 11 aa, Homo Sapiens
FPEPNPRVIEL

SEQ ID NO: 87708 - protein, 11 aa, Homo Sapiens
FPFLSGDNQHY

SEQ ID NO: 87709 - protein, 11 aa, Homo Sapiens
FPFNPLDFESF

SEQ ID NO: 87710 - protein, 11 aa, Homo Sapiens
FPHLPGKTFVY

SEQ ID NO: 87711 - protein, 11 aa, Homo Sapiens
FPLDVGSIVGY

SEQ ID NO: 87712 - protein, 11 aa, Homo Sapiens
FPLIEVNKVYY

SEQ ID NO: 87713 - protein, 11 aa, Homo Sapiens
FPLLPQDVHLL

SEQ ID NO: 87714 - protein, 11 aa, Homo Sapiens
FPNIVIKGSEL

SEQ ID NO: 87715 - protein, 11 aa, Homo Sapiens
FPVYVLPKVEY

SEQ ID NO: 87716 - protein, 11 aa, Homo Sapiens
FPWEVPKKLKY

SEQ ID NO: 87717 - protein, 11 aa, Homo Sapiens
FPWGDGNHTLF

SEQ ID NO: 87718 - protein, 11 aa, Homo Sapiens
FPYYPSPGVLF

SEQ ID NO: 87719 - protein, 11 aa, Homo Sapiens
HPLPETAVRGY

SEQ ID NO: 87720 - protein, 11 aa, Homo Sapiens
HPNIVSLQDVL

SEQ ID NO: 87721 - protein, 11 aa, Homo Sapiens
IPEGEILVITY

SEQ ID NO: 87722 - protein, 11 aa, Homo Sapiens
IPIALSGRDIL

SEQ ID NO: 87723 - protein, 11 aa, Homo Sapiens
IPIGGGTSVSY

SEQ ID NO: 87724 - protein, 11 aa, Homo Sapiens
IPLALEGKDLL

SEQ ID NO: 87725 - protein, 11 aa, Homo Sapiens
IPYHSEVPVSL

SEQ ID NO: 87726 - protein, 11 aa, Homo Sapiens
IPYSEPMPLSF

SEQ ID NO: 87727 - protein, 11 aa, Homo Sapiens
ISFNELNDLFK

SEQ ID NO: 87728 - protein, 11 aa, Homo Sapiens
LPAAGVGDMVM

SEQ ID NO: 87729 - protein, 11 aa, Homo Sapiens
LPFLPSTEDVY

SEQ ID NO: 87730 - protein, 11 aa, Homo Sapiens
LPFPDETHERY

SEQ ID NO: 87731 - protein, 11 aa, Homo Sapiens
LPFSAGSLLVY

SEQ ID NO: 87732 - protein, 11 aa, Homo Sapiens
LPIGDVATQYF

SEQ ID NO: 87733 - protein, 11 aa, Homo Sapiens
LPIGIPYSISF

SEQ ID NO: 87734 - protein, 11 aa, Homo Sapiens
LPINDPLQTVY

SEQ ID NO: 87735 - protein, 11 aa, Homo Sapiens
LPLFPEPLHVF

SEQ ID NO: 87736 - protein, 11 aa, Homo Sapiens
LPLNTNIRLAY

SEQ ID NO: 87737 - protein, 11 aa, Homo Sapiens
LPLPNDKTLLY

SEQ ID NO: 87738 - protein, 11 aa, Homo Sapiens
LPMGALPQGPM

SEQ ID NO: 87739 - protein, 11 aa, Homo Sapiens
LPYKITAEEMY

SEQ ID NO: 87740 - protein, 11 aa, Homo Sapiens
LPYPDPAIAQF

SEQ ID NO: 87741 - protein, 11 aa, Homo Sapiens
LPYRATENDIY

SEQ ID NO: 87742 - protein, 11 aa, Homo Sapiens
MAAAAAAAAEQ

SEQ ID NO: 87743 - protein, 11 aa, Homo Sapiens
MPAAQEGAVAF

SEQ ID NO: 87744 - protein, 11 aa, Homo Sapiens
MPAVKAIIYQY

SEQ ID NO: 87745 - protein, 11 aa, Homo Sapiens
MPVGPDAILRY

SEQ ID NO: 87746 - protein, 11 aa, Homo Sapiens
MPWVQETLAAN

SEQ ID NO: 87747 - protein, 11 aa, Homo Sapiens
NAFAEPGRVPF

SEQ ID NO: 87748 - protein, 11 aa, Homo Sapiens
NAFEHGGEFTY

SEQ ID NO: 87749 - protein, 11 aa, Homo Sapiens
NALPDTLKVTY

SEQ ID NO: 87750 - protein, 11 aa, Homo Sapiens
NPADSISHVAY

SEQ ID NO: 87751 - protein, 11 aa, Homo Sapiens
NPENLATLERY

SEQ ID NO: 87752 - protein, 11 aa, Homo Sapiens
RAFDQGADAIY

SEQ ID NO: 87753 - protein, 11 aa, Homo Sapiens
RPFADLLGTAF

SEQ ID NO: 87754 - protein, 11 aa, Homo Sapiens
RPFASGANFEY

SEQ ID NO: 87755 - protein, 11 aa, Homo Sapiens
SPEGRLYQVEY

SEQ ID NO: 87756 - protein, 11 aa, Homo Sapiens
SPFFERSGLAY

SEQ ID NO: 87757 - protein, 11 aa, Homo Sapiens
TPALVNAAVTY

SEQ ID NO: 87758 - protein, 11 aa, Homo Sapiens
VPDSSGPERIL

SEQ ID NO: 87759 - protein, 11 aa, Homo Sapiens
VPFTEQIIQTF

SEQ ID NO: 87760 - protein, 11 aa, Homo Sapiens
VPVTLIGEAVF

SEQ ID NO: 87761 - protein, 11 aa, Homo Sapiens
YAWESSAGGSF

SEQ ID NO: 87762 - protein, 11 aa, Homo Sapiens
YPDPVSIIQKY

SEQ ID NO: 87763 - protein, 11 aa, Homo Sapiens
YPETLGRLLIL

SEQ ID NO: 87764 - protein, 11 aa, Homo Sapiens
YPFESAEAQLL

SEQ ID NO: 87765 - protein, 11 aa, Homo Sapiens
YPGPASLTQIY

SEQ ID NO: 87766 - protein, 11 aa, Homo Sapiens
YPIDLAGLLQY

SEQ ID NO: 87767 - protein, 11 aa, Homo Sapiens
YPLDLEGGSEY

SEQ ID NO: 87768 - protein, 11 aa, Homo Sapiens
YPLEDATHIAL

SEQ ID NO: 87769 - protein, 11 aa, Homo Sapiens
YPLEDLPSLLY

SEQ ID NO: 87770 - protein, 11 aa, Homo Sapiens
YPSETTVKYVF

SEQ ID NO: 87771 - protein, 11 aa, Homo Sapiens
YPVFPWIIHDY

SEQ ID NO: 87772 - protein, 11 aa, Homo Sapiens
YPVTPELLERY

SEQ ID NO: 87773 - protein, 8 aa, Homo Sapiens
DAHKGVAL

SEQ ID NO: 87774 - protein, 8 aa, Homo Sapiens
EPGPAEEL

SEQ ID NO: 87775 - protein, 8 aa, Homo Sapiens
FNEKSKEL

SEQ ID NO: 87776 - protein, 8 aa, Homo Sapiens
FPAEPLEL

SEQ ID NO: 87777 - protein, 8 aa, Homo Sapiens
FPAPNVIL

SEQ ID NO: 87778 - protein, 8 aa, Homo Sapiens
FPAPSHVV

SEQ ID NO: 87779 - protein, 8 aa, Homo Sapiens
FPDEDEIL

SEQ ID NO: 87780 - protein, 8 aa, Homo Sapiens
FPDTPLAL

SEQ ID NO: 87781 - protein, 8 aa, Homo Sapiens
FPELGAAL

SEQ ID NO: 87782 - protein, 8 aa, Homo Sapiens
FPFYDKPM

SEQ ID NO: 87783 - protein, 8 aa, Homo Sapiens
FPGLASEL

SEQ ID NO: 87784 - protein, 8 aa, Homo Sapiens
FPGPIFHL

SEQ ID NO: 87785 - protein, 8 aa, Homo Sapiens
FPGPSKPF

SEQ ID NO: 87786 - protein, 8 aa, Homo Sapiens
FPHTTPSM

SEQ ID NO: 87787 - protein, 8 aa, Homo Sapiens
FPIKDVPL

SEQ ID NO: 87788 - protein, 8 aa, Homo Sapiens
FPIVGEPL

SEQ ID NO: 87789 - protein, 8 aa, Homo Sapiens
FPLDGHVL

SEQ ID NO: 87790 - protein, 8 aa, Homo Sapiens
FPSQDPVL

SEQ ID NO: 87791 - protein, 8 aa, Homo Sapiens
FPVPTPEM

SEQ ID NO: 87792 - protein, 8 aa, Homo Sapiens
IPVEDNQM

SEQ ID NO: 87793 - protein, 8 aa, Homo Sapiens
LAATHEPT

SEQ ID NO: 87794 - protein, 8 aa, Homo Sapiens
LEEYAATL

SEQ ID NO: 87795 - protein, 8 aa, Homo Sapiens
LPAETMRI

SEQ ID NO: 87796 - protein, 8 aa, Homo Sapiens
LPAFSPLM

SEQ ID NO: 87797 - protein, 8 aa, Homo Sapiens
LPDEKNVL

SEQ ID NO: 87798 - protein, 8 aa, Homo Sapiens
LPGPAPCL

SEQ ID NO: 87799 - protein, 8 aa, Homo Sapiens
LPHKGNIL

SEQ ID NO: 87800 - protein, 8 aa, Homo Sapiens
LPHSTAAL

SEQ ID NO: 87801 - protein, 8 aa, Homo Sapiens
LPHTDFTL

SEQ ID NO: 87802 - protein, 8 aa, Homo Sapiens
LPIVTPAL

SEQ ID NO: 87803 - protein, 8 aa, Homo Sapiens
LPLTEHEL

SEQ ID NO: 87804 - protein, 8 aa, Homo Sapiens
LPMTTEVL

SEQ ID NO: 87805 - protein, 8 aa, Homo Sapiens
LPQEDPPT

SEQ ID NO: 87806 - protein, 8 aa, Homo Sapiens
MPAETEEL

SEQ ID NO: 87807 - protein, 8 aa, Homo Sapiens
MPDEETPL

SEQ ID NO: 87808 - protein, 8 aa, Homo Sapiens
MPDLAHVM

SEQ ID NO: 87809 - protein, 8 aa, Homo Sapiens
MPDLPHLL

SEQ ID NO: 87810 - protein, 8 aa, Homo Sapiens
MPESGVAL

SEQ ID NO: 87811 - protein, 8 aa, Homo Sapiens
MPIKDNAL

SEQ ID NO: 87812 - protein, 8 aa, Homo Sapiens
MPSDQYEL

SEQ ID NO: 87813 - protein, 8 aa, Homo Sapiens
MPTEPESV

SEQ ID NO: 87814 - protein, 8 aa, Homo Sapiens
PEKEPSVL

SEQ ID NO: 87815 - protein, 8 aa, Homo Sapiens
PIHADPRL

SEQ ID NO: 87816 - protein, 8 aa, Homo Sapiens
PNAIEHTL

SEQ ID NO: 87817 - protein, 8 aa, Homo Sapiens
PSEPHPVL

SEQ ID NO: 87818 - protein, 8 aa, Homo Sapiens
PVEIHEYL

SEQ ID NO: 87819 - protein, 8 aa, Homo Sapiens
PVGRVHRL

SEQ ID NO: 87820 - protein, 8 aa, Homo Sapiens
PYPEPSKL

SEQ ID NO: 87821 - protein, 8 aa, Homo Sapiens
VPAPNFAM

SEQ ID NO: 87822 - protein, 8 aa, Homo Sapiens
VPAPTNVL

SEQ ID NO: 87823 - protein, 8 aa, Homo Sapiens
WGPLPGIP

SEQ ID NO: 87824 - protein, 8 aa, Homo Sapiens
WPAAGFEL

SEQ ID NO: 87825 - protein, 8 aa, Homo Sapiens
WPAPSLSL

SEQ ID NO: 87826 - protein, 8 aa, Homo Sapiens
WPGPLADM

SEQ ID NO: 87827 - protein, 8 aa, Homo Sapiens
YPDTDVIL

SEQ ID NO: 87828 - protein, 8 aa, Homo Sapiens
YPGPAVVL

SEQ ID NO: 87829 - protein, 9 aa, Homo Sapiens
AANPIQFTL

SEQ ID NO: 87830 - protein, 9 aa, Homo Sapiens
APAPKAYVL

SEQ ID NO: 87831 - protein, 9 aa, Homo Sapiens
APAPTAVVL

SEQ ID NO: 87832 - protein, 9 aa, Homo Sapiens
APAPVQPPM

SEQ ID NO: 87833 - protein, 9 aa, Homo Sapiens
APEERPAAL

SEQ ID NO: 87834 - protein, 9 aa, Homo Sapiens
APEPRAALL

SEQ ID NO: 87835 - protein, 9 aa, Homo Sapiens
APHAPGPPA

SEQ ID NO: 87836 - protein, 9 aa, Homo Sapiens
APLEDEATL

SEQ ID NO: 87837 - protein, 9 aa, Homo Sapiens
APSPEDPEL

SEQ ID NO: 87838 - protein, 9 aa, Homo Sapiens
APTDYCFVL

SEQ ID NO: 87839 - protein, 9 aa, Homo Sapiens
APVFRDYVF

SEQ ID NO: 87840 - protein, 9 aa, Homo Sapiens
APVKYDHIL

SEQ ID NO: 87841 - protein, 9 aa, Homo Sapiens
APYPHSNEL

SEQ ID NO: 87842 - protein, 9 aa, Homo Sapiens
AQDPLLLQM

SEQ ID NO: 87843 - protein, 9 aa, Homo Sapiens
ASAPPGPPA

SEQ ID NO: 87844 - protein, 9 aa, Homo Sapiens
CPDALFNEL

SEQ ID NO: 87845 - protein, 9 aa, Homo Sapiens
CPDEVYQLM

SEQ ID NO: 87846 - protein, 9 aa, Homo Sapiens
CPDPRPLEL

SEQ ID NO: 87847 - protein, 9 aa, Homo Sapiens
CPDPSSRSL

SEQ ID NO: 87848 - protein, 9 aa, Homo Sapiens
CPIAVTHFL

SEQ ID NO: 87849 - protein, 9 aa, Homo Sapiens
CPIKEEIAI

SEQ ID NO: 87850 - protein, 9 aa, Homo Sapiens
CPLAGSAVL

SEQ ID NO: 87851 - protein, 9 aa, Homo Sapiens
CPNSKAPVL

SEQ ID NO: 87852 - protein, 9 aa, Homo Sapiens
CPYHSDRQL

SEQ ID NO: 87853 - protein, 9 aa, Homo Sapiens
DAFSKDHQL

SEQ ID NO: 87854 - protein, 9 aa, Homo Sapiens
DAIARDAEL

SEQ ID NO: 87855 - protein, 9 aa, Homo Sapiens
DAQLQIYTL

SEQ ID NO: 87856 - protein, 9 aa, Homo Sapiens
DASGPDPQL

SEQ ID NO: 87857 - protein, 9 aa, Homo Sapiens
DASPVQAVF

SEQ ID NO: 87858 - protein, 9 aa, Homo Sapiens
DAYALNHTL

SEQ ID NO: 87859 - protein, 9 aa, Homo Sapiens
DNPIQTVSL

SEQ ID NO: 87860 - protein, 9 aa, Homo Sapiens
DPASLDHKL

SEQ ID NO: 87861 - protein, 9 aa, Homo Sapiens
DPEAFLVQI

SEQ ID NO: 87862 - protein, 9 aa, Homo Sapiens
DPFRDLHSL

SEQ ID NO: 87863 - protein, 9 aa, Homo Sapiens
DPIYKENIM

SEQ ID NO: 87864 - protein, 9 aa, Homo Sapiens
DPNLEFVAM

SEQ ID NO: 87865 - protein, 9 aa, Homo Sapiens
DPTAVGPVL

SEQ ID NO: 87866 - protein, 9 aa, Homo Sapiens
DPVEPHGEM

SEQ ID NO: 87867 - protein, 9 aa, Homo Sapiens
DPYQGTIVL

SEQ ID NO: 87868 - protein, 9 aa, Homo Sapiens
DSAPGILVL

SEQ ID NO: 87869 - protein, 9 aa, Homo Sapiens
EAAPDGPAL

SEQ ID NO: 87870 - protein, 9 aa, Homo Sapiens
EACGVIVEL

SEQ ID NO: 87871 - protein, 9 aa, Homo Sapiens
EACPGAVAM

SEQ ID NO: 87872 - protein, 9 aa, Homo Sapiens
EAFPHDSQL

SEQ ID NO: 87873 - protein, 9 aa, Homo Sapiens
EAITGDFAL

SEQ ID NO: 87874 - protein, 9 aa, Homo Sapiens
EASPAPLVL

SEQ ID NO: 87875 - protein, 9 aa, Homo Sapiens
EASPFSRSL

SEQ ID NO: 87876 - protein, 9 aa, Homo Sapiens
EASPVEPQL

SEQ ID NO: 87877 - protein, 9 aa, Homo Sapiens
EATKINLSL

SEQ ID NO: 87878 - protein, 9 aa, Homo Sapiens
EAYIDPIAM

SEQ ID NO: 87879 - protein, 9 aa, Homo Sapiens
EGSPIKVTL

SEQ ID NO: 87880 - protein, 9 aa, Homo Sapiens
EPAPEAEAL

SEQ ID NO: 87881 - protein, 9 aa, Homo Sapiens
EPCKNVHVL

SEQ ID NO: 87882 - protein, 9 aa, Homo Sapiens
EPEPSPKAL

SEQ ID NO: 87883 - protein, 9 aa, Homo Sapiens
EPFPDGAEL

SEQ ID NO: 87884 - protein, 9 aa, Homo Sapiens
EPFQDGYSL

SEQ ID NO: 87885 - protein, 9 aa, Homo Sapiens
EPNPDDPLM

SEQ ID NO: 87886 - protein, 9 aa, Homo Sapiens
EPNPESLEL

SEQ ID NO: 87887 - protein, 9 aa, Homo Sapiens
EPSAVALEL

SEQ ID NO: 87888 - protein, 9 aa, Homo Sapiens
EPVLINPVL

SEQ ID NO: 87889 - protein, 9 aa, Homo Sapiens
EPVQLTFAL

SEQ ID NO: 87890 - protein, 9 aa, Homo Sapiens
FAADIISVL

SEQ ID NO: 87891 - protein, 9 aa, Homo Sapiens
FADGHVLEL

SEQ ID NO: 87892 - protein, 9 aa, Homo Sapiens
FAMEIDPSL

SEQ ID NO: 87893 - protein, 9 aa, Homo Sapiens
FANDDRHVM

SEQ ID NO: 87894 - protein, 9 aa, Homo Sapiens
FASEVSNVL

SEQ ID NO: 87895 - protein, 9 aa, Homo Sapiens
FASEYPLIL

SEQ ID NO: 87896 - protein, 9 aa, Homo Sapiens
FASHVSPEV

SEQ ID NO: 87897 - protein, 9 aa, Homo Sapiens
FASLPDPVL

SEQ ID NO: 87898 - protein, 9 aa, Homo Sapiens
FATSTEPVL

SEQ ID NO: 87899 - protein, 9 aa, Homo Sapiens
FAVLEDHTL

SEQ ID NO: 87900 - protein, 9 aa, Homo Sapiens
FPAAIEHTI

SEQ ID NO: 87901 - protein, 9 aa, Homo Sapiens
FPAAPAPKM

SEQ ID NO: 87902 - protein, 9 aa, Homo Sapiens
FPAAPIPTL

SEQ ID NO: 87903 - protein, 9 aa, Homo Sapiens
FPAEDWAGL

SEQ ID NO: 87904 - protein, 9 aa, Homo Sapiens
FPAHILDCL

SEQ ID NO: 87905 - protein, 9 aa, Homo Sapiens
FPAPILRAV

SEQ ID NO: 87906 - protein, 9 aa, Homo Sapiens
FPASVHDSL

SEQ ID NO: 87907 - protein, 9 aa, Homo Sapiens
FPATGCQKL

SEQ ID NO: 87908 - protein, 9 aa, Homo Sapiens
FPAVGMHSL

SEQ ID NO: 87909 - protein, 9 aa, Homo Sapiens
FPAVHAAEM

SEQ ID NO: 87910 - protein, 9 aa, Homo Sapiens
FPAYERVLL

SEQ ID NO: 87911 - protein, 9 aa, Homo Sapiens
FPCFDEPAF

SEQ ID NO: 87912 - protein, 9 aa, Homo Sapiens
FPCQNDINL

SEQ ID NO: 87913 - protein, 9 aa, Homo Sapiens
FPDAGEDEL

SEQ ID NO: 87914 - protein, 9 aa, Homo Sapiens
FPDDATSPL

SEQ ID NO: 87915 - protein, 9 aa, Homo Sapiens
FPDDVPTSL

SEQ ID NO: 87916 - protein, 9 aa, Homo Sapiens
FPDEGFSGL

SEQ ID NO: 87917 - protein, 9 aa, Homo Sapiens
FPDEGILAV

SEQ ID NO: 87918 - protein, 9 aa, Homo Sapiens
FPDEKEDNL

SEQ ID NO: 87919 - protein, 9 aa, Homo Sapiens
FPDEKIPTL

SEQ ID NO: 87920 - protein, 9 aa, Homo Sapiens
FPDELEEML

SEQ ID NO: 87921 - protein, 9 aa, Homo Sapiens
FPDKVAIQL

SEQ ID NO: 87922 - protein, 9 aa, Homo Sapiens
FPDLFSEQL

SEQ ID NO: 87923 - protein, 9 aa, Homo Sapiens
FPDQNFEVM

SEQ ID NO: 87924 - protein, 9 aa, Homo Sapiens
FPDQVAIQL

SEQ ID NO: 87925 - protein, 9 aa, Homo Sapiens
FPDSGHFNV

SEQ ID NO: 87926 - protein, 9 aa, Homo Sapiens
FPDSTKSSL

SEQ ID NO: 87927 - protein, 9 aa, Homo Sapiens
FPEADAEKL

SEQ ID NO: 87928 - protein, 9 aa, Homo Sapiens
FPEAIIVKP

SEQ ID NO: 87929 - protein, 9 aa, Homo Sapiens
FPEALARLL

SEQ ID NO: 87930 - protein, 9 aa, Homo Sapiens
FPEALRLAL

SEQ ID NO: 87931 - protein, 9 aa, Homo Sapiens
FPEDHDPTI

SEQ ID NO: 87932 - protein, 9 aa, Homo Sapiens
FPEEDAEQL

SEQ ID NO: 87933 - protein, 9 aa, Homo Sapiens
FPEEPHVPL

SEQ ID NO: 87934 - protein, 9 aa, Homo Sapiens
FPEERPEVL

SEQ ID NO: 87935 - protein, 9 aa, Homo Sapiens
FPEEVIATI

SEQ ID NO: 87936 - protein, 9 aa, Homo Sapiens
FPEHIFPAL

SEQ ID NO: 87937 - protein, 9 aa, Homo Sapiens
FPEHRAAEI

SEQ ID NO: 87938 - protein, 9 aa, Homo Sapiens
FPELDSPQL

SEQ ID NO: 87939 - protein, 9 aa, Homo Sapiens
FPEPNPRVI

SEQ ID NO: 87940 - protein, 9 aa, Homo Sapiens
FPEPSRPPL

SEQ ID NO: 87941 - protein, 9 aa, Homo Sapiens
FPEQIAEKL

SEQ ID NO: 87942 - protein, 9 aa, Homo Sapiens
FPESQTKEL

SEQ ID NO: 87943 - protein, 9 aa, Homo Sapiens
FPEVEDVVM

SEQ ID NO: 87944 - protein, 9 aa, Homo Sapiens
FPEYELPEL

SEQ ID NO: 87945 - protein, 9 aa, Homo Sapiens
FPFAVANQL

SEQ ID NO: 87946 - protein, 9 aa, Homo Sapiens
FPFERLYDL

SEQ ID NO: 87947 - protein, 9 aa, Homo Sapiens
FPFHSAPAL

SEQ ID NO: 87948 - protein, 9 aa, Homo Sapiens
FPFLDENVV

SEQ ID NO: 87949 - protein, 9 aa, Homo Sapiens
FPFRKDLRM

SEQ ID NO: 87950 - protein, 9 aa, Homo Sapiens
FPFSRPELL

SEQ ID NO: 87951 - protein, 9 aa, Homo Sapiens
FPFTREEAL

SEQ ID NO: 87952 - protein, 9 aa, Homo Sapiens
FPFVDDNEV

SEQ ID NO: 87953 - protein, 9 aa, Homo Sapiens
FPFWPAKAL

SEQ ID NO: 87954 - protein, 9 aa, Homo Sapiens
FPGPFEEEM

SEQ ID NO: 87955 - protein, 9 aa, Homo Sapiens
FPGQLNADL

SEQ ID NO: 87956 - protein, 9 aa, Homo Sapiens
FPGSEDVKL

SEQ ID NO: 87957 - protein, 9 aa, Homo Sapiens
FPHAVDHIL

SEQ ID NO: 87958 - protein, 9 aa, Homo Sapiens
FPHDNVEDL

SEQ ID NO: 87959 - protein, 9 aa, Homo Sapiens
FPHEQKIKL

SEQ ID NO: 87960 - protein, 9 aa, Homo Sapiens
FPHHEFVAL

SEQ ID NO: 87961 - protein, 9 aa, Homo Sapiens
FPHKFEISF

SEQ ID NO: 87962 - protein, 9 aa, Homo Sapiens
FPHLLQPVL

SEQ ID NO: 87963 - protein, 9 aa, Homo Sapiens
FPHLQDAQV

SEQ ID NO: 87964 - protein, 9 aa, Homo Sapiens
FPHSMEPQL

SEQ ID NO: 87965 - protein, 9 aa, Homo Sapiens
FPHVGEPSL

SEQ ID NO: 87966 - protein, 9 aa, Homo Sapiens
FPHVQTDVL

SEQ ID NO: 87967 - protein, 9 aa, Homo Sapiens
FPIANGPNL

SEQ ID NO: 87968 - protein, 9 aa, Homo Sapiens
FPIAPEIAL

SEQ ID NO: 87969 - protein, 9 aa, Homo Sapiens
FPIDHFTHI

SEQ ID NO: 87970 - protein, 9 aa, Homo Sapiens
FPIEVRHYL

SEQ ID NO: 87971 - protein, 9 aa, Homo Sapiens
FPIHLTDQL

SEQ ID NO: 87972 - protein, 9 aa, Homo Sapiens
FPIHVQTSL

SEQ ID NO: 87973 - protein, 9 aa, Homo Sapiens
FPIKDLVHL

SEQ ID NO: 87974 - protein, 9 aa, Homo Sapiens
FPIPEEYTF

SEQ ID NO: 87975 - protein, 9 aa, Homo Sapiens
FPIPGEPGF

SEQ ID NO: 87976 - protein, 9 aa, Homo Sapiens
FPIPLINRL

SEQ ID NO: 87977 - protein, 9 aa, Homo Sapiens
FPITDVLQM

SEQ ID NO: 87978 - protein, 9 aa, Homo Sapiens
FPLDKDELL

SEQ ID NO: 87979 - protein, 9 aa, Homo Sapiens
FPLDKMTYL

SEQ ID NO: 87980 - protein, 9 aa, Homo Sapiens
FPLDKSLLL

SEQ ID NO: 87981 - protein, 9 aa, Homo Sapiens
FPLDLDVKM

SEQ ID NO: 87982 - protein, 9 aa, Homo Sapiens
FPLEQEADL

SEQ ID NO: 87983 - protein, 9 aa, Homo Sapiens
FPLSESQTL

SEQ ID NO: 87984 - protein, 9 aa, Homo Sapiens
FPLTEDQKL

SEQ ID NO: 87985 - protein, 9 aa, Homo Sapiens
FPLTKVYVV

SEQ ID NO: 87986 - protein, 9 aa, Homo Sapiens
FPLTTESAM

SEQ ID NO: 87987 - protein, 9 aa, Homo Sapiens
FPMAHPPNL

SEQ ID NO: 87988 - protein, 9 aa, Homo Sapiens
FPMEIRQYL

SEQ ID NO: 87989 - protein, 9 aa, Homo Sapiens
FPMELRQFL

SEQ ID NO: 87990 - protein, 9 aa, Homo Sapiens
FPNADSKAL

SEQ ID NO: 87991 - protein, 9 aa, Homo Sapiens
FPNAIEHTL

SEQ ID NO: 87992 - protein, 9 aa, Homo Sapiens
FPNALVTKL

SEQ ID NO: 87993 - protein, 9 aa, Homo Sapiens
FPNENQVVF

SEQ ID NO: 87994 - protein, 9 aa, Homo Sapiens
FPNIPGKSL

SEQ ID NO: 87995 - protein, 9 aa, Homo Sapiens
FPNKQGYVL

SEQ ID NO: 87996 - protein, 9 aa, Homo Sapiens
FPNNVATVL

SEQ ID NO: 87997 - protein, 9 aa, Homo Sapiens
FPNQGEVKL

SEQ ID NO: 87998 - protein, 9 aa, Homo Sapiens
FPNRLNLEA

SEQ ID NO: 87999 - protein, 9 aa, Homo Sapiens
FPNSVENIL

SEQ ID NO: 88000 - protein, 9 aa, Homo Sapiens
FPPKDDHTL

SEQ ID NO: 88001 - protein, 9 aa, Homo Sapiens
FPQDQLTAL

SEQ ID NO: 88002 - protein, 9 aa, Homo Sapiens
FPQDRVFML

SEQ ID NO: 88003 - protein, 9 aa, Homo Sapiens
FPQEGMHQM

SEQ ID NO: 88004 - protein, 9 aa, Homo Sapiens
FPQHTIASL

SEQ ID NO: 88005 - protein, 9 aa, Homo Sapiens
FPQIEINKM

SEQ ID NO: 88006 - protein, 9 aa, Homo Sapiens
FPQLDSTSF

SEQ ID NO: 88007 - protein, 9 aa, Homo Sapiens
FPQLDVSRL

SEQ ID NO: 88008 - protein, 9 aa, Homo Sapiens
FPQMGRFTL

SEQ ID NO: 88009 - protein, 9 aa, Homo Sapiens
FPQQGQISL

SEQ ID NO: 88010 - protein, 9 aa, Homo Sapiens
FPQYPDKEL

SEQ ID NO: 88011 - protein, 9 aa, Homo Sapiens
FPRDPEIEM

SEQ ID NO: 88012 - protein, 9 aa, Homo Sapiens
FPRHIEPEL

SEQ ID NO: 88013 - protein, 9 aa, Homo Sapiens
FPSAPDVKA

SEQ ID NO: 88014 - protein, 9 aa, Homo Sapiens
FPSDTFHTM

SEQ ID NO: 88015 - protein, 9 aa, Homo Sapiens
FPSEAPISL

SEQ ID NO: 88016 - protein, 9 aa, Homo Sapiens
FPSEDILLV

SEQ ID NO: 88017 - protein, 9 aa, Homo Sapiens
FPSEITDTV

SEQ ID NO: 88018 - protein, 9 aa, Homo Sapiens
FPSEVVGKM

SEQ ID NO: 88019 - protein, 9 aa, Homo Sapiens
FPSEYVPTV

SEQ ID NO: 88020 - protein, 9 aa, Homo Sapiens
FPSFLTNSL

SEQ ID NO: 88021 - protein, 9 aa, Homo Sapiens
FPSGETIVM

SEQ ID NO: 88022 - protein, 9 aa, Homo Sapiens
FPSGSVHSF

SEQ ID NO: 88023 - protein, 9 aa, Homo Sapiens
FPSKQDILL

SEQ ID NO: 88024 - protein, 9 aa, Homo Sapiens
FPSLEVKEL

SEQ ID NO: 88025 - protein, 9 aa, Homo Sapiens
FPSMPSPRL

SEQ ID NO: 88026 - protein, 9 aa, Homo Sapiens
FPSNFIKEL

SEQ ID NO: 88027 - protein, 9 aa, Homo Sapiens
FPSNLVTEM

SEQ ID NO: 88028 - protein, 9 aa, Homo Sapiens
FPSPDPSGL

SEQ ID NO: 88029 - protein, 9 aa, Homo Sapiens
FPSPEYETF

SEQ ID NO: 88030 - protein, 9 aa, Homo Sapiens
FPSPGPVAL

SEQ ID NO: 88031 - protein, 9 aa, Homo Sapiens
FPSPIRLEF

SEQ ID NO: 88032 - protein, 9 aa, Homo Sapiens
FPSPNQITL

SEQ ID NO: 88033 - protein, 9 aa, Homo Sapiens
FPSSCVREL

SEQ ID NO: 88034 - protein, 9 aa, Homo Sapiens
FPSSGSVSL

SEQ ID NO: 88035 - protein, 9 aa, Homo Sapiens
FPSSSVYPT

SEQ ID NO: 88036 - protein, 9 aa, Homo Sapiens
FPSTAEHTL

SEQ ID NO: 88037 - protein, 9 aa, Homo Sapiens
FPSTETATL

SEQ ID NO: 88038 - protein, 9 aa, Homo Sapiens
FPSTPGPEL

SEQ ID NO: 88039 - protein, 9 aa, Homo Sapiens
FPSVLVEEL

SEQ ID NO: 88040 - protein, 9 aa, Homo Sapiens
FPSWTDSEL

SEQ ID NO: 88041 - protein, 9 aa, Homo Sapiens
FPTAEEPHL

SEQ ID NO: 88042 - protein, 9 aa, Homo Sapiens
FPTGDANSL

SEQ ID NO: 88043 - protein, 9 aa, Homo Sapiens
FPTIGDVHL

SEQ ID NO: 88044 - protein, 9 aa, Homo Sapiens
FPTPDPAAL

SEQ ID NO: 88045 - protein, 9 aa, Homo Sapiens
FPTSTPREL

SEQ ID NO: 88046 - protein, 9 aa, Homo Sapiens
FPTTDGNHL

SEQ ID NO: 88047 - protein, 9 aa, Homo Sapiens
FPTVQHQEL

SEQ ID NO: 88048 - protein, 9 aa, Homo Sapiens
FPVAEDISL

SEQ ID NO: 88049 - protein, 9 aa, Homo Sapiens
FPVEHVQLL

SEQ ID NO: 88050 - protein, 9 aa, Homo Sapiens
FPVEIANEI

SEQ ID NO: 88051 - protein, 9 aa, Homo Sapiens
FPVEKQLDL

SEQ ID NO: 88052 - protein, 9 aa, Homo Sapiens
FPVESEAVM

SEQ ID NO: 88053 - protein, 9 aa, Homo Sapiens
FPVEVEVPM

SEQ ID NO: 88054 - protein, 9 aa, Homo Sapiens
FPVEVNTVL

SEQ ID NO: 88055 - protein, 9 aa, Homo Sapiens
FPVGRVHRL

SEQ ID NO: 88056 - protein, 9 aa, Homo Sapiens
FPVGVFVVA

SEQ ID NO: 88057 - protein, 9 aa, Homo Sapiens
FPVIETSTL

SEQ ID NO: 88058 - protein, 9 aa, Homo Sapiens
FPVNKDVTL

SEQ ID NO: 88059 - protein, 9 aa, Homo Sapiens
FPVPPERAL

SEQ ID NO: 88060 - protein, 9 aa, Homo Sapiens
FPVQGVHTV

SEQ ID NO: 88061 - protein, 9 aa, Homo Sapiens
FPVRDGVVL

SEQ ID NO: 88062 - protein, 9 aa, Homo Sapiens
FPVSIPAVL

SEQ ID NO: 88063 - protein, 9 aa, Homo Sapiens
FPVSKTLVL

SEQ ID NO: 88064 - protein, 9 aa, Homo Sapiens
FPVSRNANL

SEQ ID NO: 88065 - protein, 9 aa, Homo Sapiens
FPVSWDNEV

SEQ ID NO: 88066 - protein, 9 aa, Homo Sapiens
FPVTPVSTL

SEQ ID NO: 88067 - protein, 9 aa, Homo Sapiens
FPWEKPTTL

SEQ ID NO: 88068 - protein, 9 aa, Homo Sapiens
FPYAQRQFL

SEQ ID NO: 88069 - protein, 9 aa, Homo Sapiens
FPYEEHLEM

SEQ ID NO: 88070 - protein, 9 aa, Homo Sapiens
FPYEGPLRL

SEQ ID NO: 88071 - protein, 9 aa, Homo Sapiens
FPYEYSYGL

SEQ ID NO: 88072 - protein, 9 aa, Homo Sapiens
FPYPEDVRV

SEQ ID NO: 88073 - protein, 9 aa, Homo Sapiens
FPYPTQAEL

SEQ ID NO: 88074 - protein, 9 aa, Homo Sapiens
FPYPYAERL

SEQ ID NO: 88075 - protein, 9 aa, Homo Sapiens
FVNPVQVVL

SEQ ID NO: 88076 - protein, 9 aa, Homo Sapiens
FVTEVAYKM

SEQ ID NO: 88077 - protein, 9 aa, Homo Sapiens
FVVEHDFIM

SEQ ID NO: 88078 - protein, 9 aa, Homo Sapiens
GPYPYTLKL

SEQ ID NO: 88079 - protein, 9 aa, Homo Sapiens
HAAASFETL

SEQ ID NO: 88080 - protein, 9 aa, Homo Sapiens
HAAPFQNIL

SEQ ID NO: 88081 - protein, 9 aa, Homo Sapiens
HAASTVQIL

SEQ ID NO: 88082 - protein, 9 aa, Homo Sapiens
HAASVFLTL

SEQ ID NO: 88083 - protein, 9 aa, Homo Sapiens
HACALAASL

SEQ ID NO: 88084 - protein, 9 aa, Homo Sapiens
HACGVIATI

SEQ ID NO: 88085 - protein, 9 aa, Homo Sapiens
HACTHQISL

SEQ ID NO: 88086 - protein, 9 aa, Homo Sapiens
HADDSFLVL

SEQ ID NO: 88087 - protein, 9 aa, Homo Sapiens
HADHSSLTL

SEQ ID NO: 88088 - protein, 9 aa, Homo Sapiens
HADPTELAL

SEQ ID NO: 88089 - protein, 9 aa, Homo Sapiens
HADSNIVIM

SEQ ID NO: 88090 - protein, 9 aa, Homo Sapiens
HAELTVPVL

SEQ ID NO: 88091 - protein, 9 aa, Homo Sapiens
HAFSEDPML

SEQ ID NO: 88092 - protein, 9 aa, Homo Sapiens
HAFVQDTTL

SEQ ID NO: 88093 - protein, 9 aa, Homo Sapiens
HAGEAIPAL

SEQ ID NO: 88094 - protein, 9 aa, Homo Sapiens
HAGPTAHEL

SEQ ID NO: 88095 - protein, 9 aa, Homo Sapiens
HAGPVINTL

SEQ ID NO: 88096 - protein, 9 aa, Homo Sapiens
HAIEDKETI

SEQ ID NO: 88097 - protein, 9 aa, Homo Sapiens
HAIEESVVL

SEQ ID NO: 88098 - protein, 9 aa, Homo Sapiens
HAQNQNYTL

SEQ ID NO: 88099 - protein, 9 aa, Homo Sapiens
HASDRIIAL

SEQ ID NO: 88100 - protein, 9 aa, Homo Sapiens
HASIVEVLL

SEQ ID NO: 88101 - protein, 9 aa, Homo Sapiens
HASQFSTCL

SEQ ID NO: 88102 - protein, 9 aa, Homo Sapiens
HATFNDPVM

SEQ ID NO: 88103 - protein, 9 aa, Homo Sapiens
HATIIPKVL

SEQ ID NO: 88104 - protein, 9 aa, Homo Sapiens
HATVTSVTL

SEQ ID NO: 88105 - protein, 9 aa, Homo Sapiens
HAVHVALVL

SEQ ID NO: 88106 - protein, 9 aa, Homo Sapiens
HAVKDAVAM

SEQ ID NO: 88107 - protein, 9 aa, Homo Sapiens
HGYDKDPVL

SEQ ID NO: 88108 - protein, 9 aa, Homo Sapiens
HINEGETAM

SEQ ID NO: 88109 - protein, 9 aa, Homo Sapiens
HPAAKMIVM

SEQ ID NO: 88110 - protein, 9 aa, Homo Sapiens
HPADKDYGL

SEQ ID NO: 88111 - protein, 9 aa, Homo Sapiens
HPADMQLVL

SEQ ID NO: 88112 - protein, 9 aa, Homo Sapiens
HPAPSISSL

SEQ ID NO: 88113 - protein, 9 aa, Homo Sapiens
HPASAEFVL

SEQ ID NO: 88114 - protein, 9 aa, Homo Sapiens
HPASSDPRF

SEQ ID NO: 88115 - protein, 9 aa, Homo Sapiens
HPASVIFTV

SEQ ID NO: 88116 - protein, 9 aa, Homo Sapiens
HPCTEEKAL

SEQ ID NO: 88117 - protein, 9 aa, Homo Sapiens
HPDAFDNEL

SEQ ID NO: 88118 - protein, 9 aa, Homo Sapiens
HPDAMNQQL

SEQ ID NO: 88119 - protein, 9 aa, Homo Sapiens
HPDCVQLLL

SEQ ID NO: 88120 - protein, 9 aa, Homo Sapiens
HPDDSVKIL

SEQ ID NO: 88121 - protein, 9 aa, Homo Sapiens
HPDGVIPVL

SEQ ID NO: 88122 - protein, 9 aa, Homo Sapiens
HPDKDVRLL

SEQ ID NO: 88123 - protein, 9 aa, Homo Sapiens
HPDKMHLVL

SEQ ID NO: 88124 - protein, 9 aa, Homo Sapiens
HPDPTRLLL

SEQ ID NO: 88125 - protein, 9 aa, Homo Sapiens
HPDQAQAIL

SEQ ID NO: 88126 - protein, 9 aa, Homo Sapiens
HPDSSNTPL

SEQ ID NO: 88127 - protein, 9 aa, Homo Sapiens
HPDSVNASL

SEQ ID NO: 88128 - protein, 9 aa, Homo Sapiens
HPDVDEHSV

SEQ ID NO: 88129 - protein, 9 aa, Homo Sapiens
HPDVLPFAL

SEQ ID NO: 88130 - protein, 9 aa, Homo Sapiens
HPDVTEAML

SEQ ID NO: 88131 - protein, 9 aa, Homo Sapiens
HPEDVEPAL

SEQ ID NO: 88132 - protein, 9 aa, Homo Sapiens
HPEGVASLL

SEQ ID NO: 88133 - protein, 9 aa, Homo Sapiens
HPEINAVQL

SEQ ID NO: 88134 - protein, 9 aa, Homo Sapiens
HPEIYPLVL

SEQ ID NO: 88135 - protein, 9 aa, Homo Sapiens
HPEKLATVL

SEQ ID NO: 88136 - protein, 9 aa, Homo Sapiens
HPEPTDHVL

SEQ ID NO: 88137 - protein, 9 aa, Homo Sapiens
HPEQCIKVL

SEQ ID NO: 88138 - protein, 9 aa, Homo Sapiens
HPESERISM

SEQ ID NO: 88139 - protein, 9 aa, Homo Sapiens
HPESTPKSL

SEQ ID NO: 88140 - protein, 9 aa, Homo Sapiens
HPESVSQSL

SEQ ID NO: 88141 - protein, 9 aa, Homo Sapiens
HPETRSAFL

SEQ ID NO: 88142 - protein, 9 aa, Homo Sapiens
HPFDQRIIL

SEQ ID NO: 88143 - protein, 9 aa, Homo Sapiens
HPFEDGAKL

SEQ ID NO: 88144 - protein, 9 aa, Homo Sapiens
HPFFKDMSL

SEQ ID NO: 88145 - protein, 9 aa, Homo Sapiens
HPFHILIAL

SEQ ID NO: 88146 - protein, 9 aa, Homo Sapiens
HPGEADSVL

SEQ ID NO: 88147 - protein, 9 aa, Homo Sapiens
HPHDLVILM

SEQ ID NO: 88148 - protein, 9 aa, Homo Sapiens
HPHPLITVL

SEQ ID NO: 88149 - protein, 9 aa, Homo Sapiens
HPIDDLQSA

SEQ ID NO: 88150 - protein, 9 aa, Homo Sapiens
HPIDIETSV

SEQ ID NO: 88151 - protein, 9 aa, Homo Sapiens
HPIEGSTTV

SEQ ID NO: 88152 - protein, 9 aa, Homo Sapiens
HPIEIARQL

SEQ ID NO: 88153 - protein, 9 aa, Homo Sapiens
HPIHADNCL

SEQ ID NO: 88154 - protein, 9 aa, Homo Sapiens
HPIKQVDVL

SEQ ID NO: 88155 - protein, 9 aa, Homo Sapiens
HPIPGEYKF

SEQ ID NO: 88156 - protein, 9 aa, Homo Sapiens
HPIQQAKAL

SEQ ID NO: 88157 - protein, 9 aa, Homo Sapiens
HPIRLGLAL

SEQ ID NO: 88158 - protein, 9 aa, Homo Sapiens
HPIRVVNAL

SEQ ID NO: 88159 - protein, 9 aa, Homo Sapiens
HPISNNNSL

SEQ ID NO: 88160 - protein, 9 aa, Homo Sapiens
HPISSEELL

SEQ ID NO: 88161 - protein, 9 aa, Homo Sapiens
HPLDLQSAL

SEQ ID NO: 88162 - protein, 9 aa, Homo Sapiens
HPLEDRNTI

SEQ ID NO: 88163 - protein, 9 aa, Homo Sapiens
HPLEGTHEL

SEQ ID NO: 88164 - protein, 9 aa, Homo Sapiens
HPLGDIVAF

SEQ ID NO: 88165 - protein, 9 aa, Homo Sapiens
HPLHNDPNL

SEQ ID NO: 88166 - protein, 9 aa, Homo Sapiens
HPLPGTQLL

SEQ ID NO: 88167 - protein, 9 aa, Homo Sapiens
HPLSNPAEL

SEQ ID NO: 88168 - protein, 9 aa, Homo Sapiens
HPLTLDHCL

SEQ ID NO: 88169 - protein, 9 aa, Homo Sapiens
HPLTQSAVM

SEQ ID NO: 88170 - protein, 9 aa, Homo Sapiens
HPMAYQLQL

SEQ ID NO: 88171 - protein, 9 aa, Homo Sapiens
HPMNSISSL

SEQ ID NO: 88172 - protein, 9 aa, Homo Sapiens
HPNALNLQL

SEQ ID NO: 88173 - protein, 9 aa, Homo Sapiens
HPNEGALVL

SEQ ID NO: 88174 - protein, 9 aa, Homo Sapiens
HPNEICVPM

SEQ ID NO: 88175 - protein, 9 aa, Homo Sapiens
HPNGNITEL

SEQ ID NO: 88176 - protein, 9 aa, Homo Sapiens
HPNIDTASL

SEQ ID NO: 88177 - protein, 9 aa, Homo Sapiens
HPNQAELIV

SEQ ID NO: 88178 - protein, 9 aa, Homo Sapiens
HPNQEAHSL

SEQ ID NO: 88179 - protein, 9 aa, Homo Sapiens
HPNSAVLMV

SEQ ID NO: 88180 - protein, 9 aa, Homo Sapiens
HPNVQKVVL

SEQ ID NO: 88181 - protein, 9 aa, Homo Sapiens
HPNYVDCYL

SEQ ID NO: 88182 - protein, 9 aa, Homo Sapiens
HPQGFEVAL

SEQ ID NO: 88183 - protein, 9 aa, Homo Sapiens
HPQPFEEGL

SEQ ID NO: 88184 - protein, 9 aa, Homo Sapiens
HPQPGAVEL

SEQ ID NO: 88185 - protein, 9 aa, Homo Sapiens
HPQPGSQAL

SEQ ID NO: 88186 - protein, 9 aa, Homo Sapiens
HPQPIDPLL

SEQ ID NO: 88187 - protein, 9 aa, Homo Sapiens
HPQQFQYTL

SEQ ID NO: 88188 - protein, 9 aa, Homo Sapiens
HPQTHETAL

SEQ ID NO: 88189 - protein, 9 aa, Homo Sapiens
HPQYEVVEI

SEQ ID NO: 88190 - protein, 9 aa, Homo Sapiens
HPSASYNQL

SEQ ID NO: 88191 - protein, 9 aa, Homo Sapiens
HPSDIEVDL

SEQ ID NO: 88192 - protein, 9 aa, Homo Sapiens
HPSEGGQVL

SEQ ID NO: 88193 - protein, 9 aa, Homo Sapiens
HPSELIAEM

SEQ ID NO: 88194 - protein, 9 aa, Homo Sapiens
HPSESDFSL

SEQ ID NO: 88195 - protein, 9 aa, Homo Sapiens
HPSFDDYEL

SEQ ID NO: 88196 - protein, 9 aa, Homo Sapiens
HPSGATPTL

SEQ ID NO: 88197 - protein, 9 aa, Homo Sapiens
HPSQLVLTL

SEQ ID NO: 88198 - protein, 9 aa, Homo Sapiens
HPSVDSSVL

SEQ ID NO: 88199 - protein, 9 aa, Homo Sapiens
HPTAHAPMM

SEQ ID NO: 88200 - protein, 9 aa, Homo Sapiens
HPTDDTTTL

SEQ ID NO: 88201 - protein, 9 aa, Homo Sapiens
HPTDERVAL

SEQ ID NO: 88202 - protein, 9 aa, Homo Sapiens
HPTDVDYRV

SEQ ID NO: 88203 - protein, 9 aa, Homo Sapiens
HPTERCFVF

SEQ ID NO: 88204 - protein, 9 aa, Homo Sapiens
HPTEVLCLM

SEQ ID NO: 88205 - protein, 9 aa, Homo Sapiens
HPTGKMFIL

SEQ ID NO: 88206 - protein, 9 aa, Homo Sapiens
HPTIISESF

SEQ ID NO: 88207 - protein, 9 aa, Homo Sapiens
HPTPQVDEL

SEQ ID NO: 88208 - protein, 9 aa, Homo Sapiens
HPTSHVSLL

SEQ ID NO: 88209 - protein, 9 aa, Homo Sapiens
HPVDQANTL

SEQ ID NO: 88210 - protein, 9 aa, Homo Sapiens
HPVEAAQTL

SEQ ID NO: 88211 - protein, 9 aa, Homo Sapiens
HPVEKPVVL

SEQ ID NO: 88212 - protein, 9 aa, Homo Sapiens
HPVGEASIL

SEQ ID NO: 88213 - protein, 9 aa, Homo Sapiens
HPVHPDIKL

SEQ ID NO: 88214 - protein, 9 aa, Homo Sapiens
HPVSGKHIL

SEQ ID NO: 88215 - protein, 9 aa, Homo Sapiens
HPVSLEQYL

SEQ ID NO: 88216 - protein, 9 aa, Homo Sapiens
HPVSREWTL

SEQ ID NO: 88217 - protein, 9 aa, Homo Sapiens
HPVVSSVPL

SEQ ID NO: 88218 - protein, 9 aa, Homo Sapiens
HPYILADRM

SEQ ID NO: 88219 - protein, 9 aa, Homo Sapiens
HPYIQYNVL

SEQ ID NO: 88220 - protein, 9 aa, Homo Sapiens
HPYLAQNEL

SEQ ID NO: 88221 - protein, 9 aa, Homo Sapiens
HPYPHNHYM

SEQ ID NO: 88222 - protein, 9 aa, Homo Sapiens
HPYQPDPKM

SEQ ID NO: 88223 - protein, 9 aa, Homo Sapiens
HVAPSDTVL

SEQ ID NO: 88224 - protein, 9 aa, Homo Sapiens
HVSLVQLTL

SEQ ID NO: 88225 - protein, 9 aa, Homo Sapiens
HVTQEDFEM

SEQ ID NO: 88226 - protein, 9 aa, Homo Sapiens
IAHLEITAL

SEQ ID NO: 88227 - protein, 9 aa, Homo Sapiens
IANPTATLL

SEQ ID NO: 88228 - protein, 9 aa, Homo Sapiens
IAQLDPEAL

SEQ ID NO: 88229 - protein, 9 aa, Homo Sapiens
IASPVQPVL

SEQ ID NO: 88230 - protein, 9 aa, Homo Sapiens
IPAASAAAM

SEQ ID NO: 88231 - protein, 9 aa, Homo Sapiens
IPADTFAAL

SEQ ID NO: 88232 - protein, 9 aa, Homo Sapiens
IPAEGRVAL

SEQ ID NO: 88233 - protein, 9 aa, Homo Sapiens
IPAPPSSPL

SEQ ID NO: 88234 - protein, 9 aa, Homo Sapiens
IPASEQETL

SEQ ID NO: 88235 - protein, 9 aa, Homo Sapiens
IPCEEGDKL

SEQ ID NO: 88236 - protein, 9 aa, Homo Sapiens
IPCKSSPEL

SEQ ID NO: 88237 - protein, 9 aa, Homo Sapiens
IPCPEPIML

SEQ ID NO: 88238 - protein, 9 aa, Homo Sapiens
IPCPTVVLL

SEQ ID NO: 88239 - protein, 9 aa, Homo Sapiens
IPDEQIVVM

SEQ ID NO: 88240 - protein, 9 aa, Homo Sapiens
IPDQETTSL

SEQ ID NO: 88241 - protein, 9 aa, Homo Sapiens
IPDQVIRVF

SEQ ID NO: 88242 - protein, 9 aa, Homo Sapiens
IPDSHEITL

SEQ ID NO: 88243 - protein, 9 aa, Homo Sapiens
IPDSHIVLM

SEQ ID NO: 88244 - protein, 9 aa, Homo Sapiens
IPDSSKISL

SEQ ID NO: 88245 - protein, 9 aa, Homo Sapiens
IPDSTAETL

SEQ ID NO: 88246 - protein, 9 aa, Homo Sapiens
IPENVDITL

SEQ ID NO: 88247 - protein, 9 aa, Homo Sapiens
IPEPEAAVL

SEQ ID NO: 88248 - protein, 9 aa, Homo Sapiens
IPEPIDPLF

SEQ ID NO: 88249 - protein, 9 aa, Homo Sapiens
IPEPVVRIL

SEQ ID NO: 88250 - protein, 9 aa, Homo Sapiens
IPEQTYITL

SEQ ID NO: 88251 - protein, 9 aa, Homo Sapiens
IPFAAPTAL

SEQ ID NO: 88252 - protein, 9 aa, Homo Sapiens
IPFEFPLHL

SEQ ID NO: 88253 - protein, 9 aa, Homo Sapiens
IPFSGALEL

SEQ ID NO: 88254 - protein, 9 aa, Homo Sapiens
IPHMDIEAL

SEQ ID NO: 88255 - protein, 9 aa, Homo Sapiens
IPIAVGGAL

SEQ ID NO: 88256 - protein, 9 aa, Homo Sapiens
IPIEPDYKF

SEQ ID NO: 88257 - protein, 9 aa, Homo Sapiens
IPIFTDVAL

SEQ ID NO: 88258 - protein, 9 aa, Homo Sapiens
IPIGIDKAL

SEQ ID NO: 88259 - protein, 9 aa, Homo Sapiens
IPIHADPRL

SEQ ID NO: 88260 - protein, 9 aa, Homo Sapiens
IPIKKSDPV

SEQ ID NO: 88261 - protein, 9 aa, Homo Sapiens
IPILYEHQL

SEQ ID NO: 88262 - protein, 9 aa, Homo Sapiens
IPITDTGRM

SEQ ID NO: 88263 - protein, 9 aa, Homo Sapiens
IPKSSDPEM

SEQ ID NO: 88264 - protein, 9 aa, Homo Sapiens
IPLQDLVAA

SEQ ID NO: 88265 - protein, 9 aa, Homo Sapiens
IPLRSSWVM

SEQ ID NO: 88266 - protein, 9 aa, Homo Sapiens
IPMEFVNKM

SEQ ID NO: 88267 - protein, 9 aa, Homo Sapiens
IPMSDPQVL

SEQ ID NO: 88268 - protein, 9 aa, Homo Sapiens
IPNEIIHAL

SEQ ID NO: 88269 - protein, 9 aa, Homo Sapiens
IPNSIMTIL

SEQ ID NO: 88270 - protein, 9 aa, Homo Sapiens
IPQPTPASL

SEQ ID NO: 88271 - protein, 9 aa, Homo Sapiens
IPSAATLII

SEQ ID NO: 88272 - protein, 9 aa, Homo Sapiens
IPSEDHQVL

SEQ ID NO: 88273 - protein, 9 aa, Homo Sapiens
IPSPVLVKL

SEQ ID NO: 88274 - protein, 9 aa, Homo Sapiens
IPSSHPVSL

SEQ ID NO: 88275 - protein, 9 aa, Homo Sapiens
IPSSVAEAL

SEQ ID NO: 88276 - protein, 9 aa, Homo Sapiens
IPTEQVNEL

SEQ ID NO: 88277 - protein, 9 aa, Homo Sapiens
IPTGEGPPL

SEQ ID NO: 88278 - protein, 9 aa, Homo Sapiens
IPVAIRTQI

SEQ ID NO: 88279 - protein, 9 aa, Homo Sapiens
IPVDTVLTM

SEQ ID NO: 88280 - protein, 9 aa, Homo Sapiens
IPVHDGYVL

SEQ ID NO: 88281 - protein, 9 aa, Homo Sapiens
IPVHEEFIL

SEQ ID NO: 88282 - protein, 9 aa, Homo Sapiens
IPVNEKDTL

SEQ ID NO: 88283 - protein, 9 aa, Homo Sapiens
IPVNEKETL

SEQ ID NO: 88284 - protein, 9 aa, Homo Sapiens
IPVPINAEL

SEQ ID NO: 88285 - protein, 9 aa, Homo Sapiens
IPVPVVSAL

SEQ ID NO: 88286 - protein, 9 aa, Homo Sapiens
IPVSRDWEL

SEQ ID NO: 88287 - protein, 9 aa, Homo Sapiens
IPYARDAVI

SEQ ID NO: 88288 - protein, 9 aa, Homo Sapiens
IPYEGFASL

SEQ ID NO: 88289 - protein, 9 aa, Homo Sapiens
IPYGERITL

SEQ ID NO: 88290 - protein, 9 aa, Homo Sapiens
IPYMGDEVL

SEQ ID NO: 88291 - protein, 9 aa, Homo Sapiens
IPYSKDVDL

SEQ ID NO: 88292 - protein, 9 aa, Homo Sapiens
IPYSPDVQI

SEQ ID NO: 88293 - protein, 9 aa, Homo Sapiens
KPCPVQIVL

SEQ ID NO: 88294 - protein, 9 aa, Homo Sapiens
KPIEVDELL

SEQ ID NO: 88295 - protein, 9 aa, Homo Sapiens
KPVGPDLEL

SEQ ID NO: 88296 - protein, 9 aa, Homo Sapiens
LAADCAHEL

SEQ ID NO: 88297 - protein, 9 aa, Homo Sapiens
LACGVAKVL

SEQ ID NO: 88298 - protein, 9 aa, Homo Sapiens
LANEVKVLL

SEQ ID NO: 88299 - protein, 9 aa, Homo Sapiens
LASPVSPEL

SEQ ID NO: 88300 - protein, 9 aa, Homo Sapiens
LATVVAETL

SEQ ID NO: 88301 - protein, 9 aa, Homo Sapiens
LDPVLQNPL

SEQ ID NO: 88302 - protein, 9 aa, Homo Sapiens
LPADECNKL

SEQ ID NO: 88303 - protein, 9 aa, Homo Sapiens
LPAEEDSVL

SEQ ID NO: 88304 - protein, 9 aa, Homo Sapiens
LPAEEEATL

SEQ ID NO: 88305 - protein, 9 aa, Homo Sapiens
LPAEEVDVL

SEQ ID NO: 88306 - protein, 9 aa, Homo Sapiens
LPAEFFEVL

SEQ ID NO: 88307 - protein, 9 aa, Homo Sapiens
LPAGIVAVL

SEQ ID NO: 88308 - protein, 9 aa, Homo Sapiens
LPALPTQAL

SEQ ID NO: 88309 - protein, 9 aa, Homo Sapiens
LPAPFEESL

SEQ ID NO: 88310 - protein, 9 aa, Homo Sapiens
LPAPPTQNM

SEQ ID NO: 88311 - protein, 9 aa, Homo Sapiens
LPAQSAATL

SEQ ID NO: 88312 - protein, 9 aa, Homo Sapiens
LPARDSPSL

SEQ ID NO: 88313 - protein, 9 aa, Homo Sapiens
LPASPAHQL

SEQ ID NO: 88314 - protein, 9 aa, Homo Sapiens
LPASVHPQL

SEQ ID NO: 88315 - protein, 9 aa, Homo Sapiens
LPCDLGAAL

SEQ ID NO: 88316 - protein, 9 aa, Homo Sapiens
LPCEVKVVA

SEQ ID NO: 88317 - protein, 9 aa, Homo Sapiens
LPCGASVIL

SEQ ID NO: 88318 - protein, 9 aa, Homo Sapiens
LPCKDAPEL

SEQ ID NO: 88319 - protein, 9 aa, Homo Sapiens
LPCPDSQKL

SEQ ID NO: 88320 - protein, 9 aa, Homo Sapiens
LPCPGKATL

SEQ ID NO: 88321 - protein, 9 aa, Homo Sapiens
LPCSKDALL

SEQ ID NO: 88322 - protein, 9 aa, Homo Sapiens
LPDDIGAAL

SEQ ID NO: 88323 - protein, 9 aa, Homo Sapiens
LPDDTVSTL

SEQ ID NO: 88324 - protein, 9 aa, Homo Sapiens
LPDDVRRRL

SEQ ID NO: 88325 - protein, 9 aa, Homo Sapiens
LPDEIFKEL

SEQ ID NO: 88326 - protein, 9 aa, Homo Sapiens
LPDFERESL

SEQ ID NO: 88327 - protein, 9 aa, Homo Sapiens
LPDFGGNVL

SEQ ID NO: 88328 - protein, 9 aa, Homo Sapiens
LPDGPDAPA

SEQ ID NO: 88329 - protein, 9 aa, Homo Sapiens
LPDGQVITI

SEQ ID NO: 88330 - protein, 9 aa, Homo Sapiens
LPDHINIVL

SEQ ID NO: 88331 - protein, 9 aa, Homo Sapiens
LPDINIYQL

SEQ ID NO: 88332 - protein, 9 aa, Homo Sapiens
LPDKGAQRL

SEQ ID NO: 88333 - protein, 9 aa, Homo Sapiens
LPDKTIASL

SEQ ID NO: 88334 - protein, 9 aa, Homo Sapiens
LPDNSILVV

SEQ ID NO: 88335 - protein, 9 aa, Homo Sapiens
LPDPIIIHL

SEQ ID NO: 88336 - protein, 9 aa, Homo Sapiens
LPDPQNISL

SEQ ID NO: 88337 - protein, 9 aa, Homo Sapiens
LPDSFSPEL

SEQ ID NO: 88338 - protein, 9 aa, Homo Sapiens
LPDSGDSML

SEQ ID NO: 88339 - protein, 9 aa, Homo Sapiens
LPDSNYNTL

SEQ ID NO: 88340 - protein, 9 aa, Homo Sapiens
LPDSVVSIL

SEQ ID NO: 88341 - protein, 9 aa, Homo Sapiens
LPEAFPITL

SEQ ID NO: 88342 - protein, 9 aa, Homo Sapiens
LPEDSKAVL

SEQ ID NO: 88343 - protein, 9 aa, Homo Sapiens
LPEEISSCL

SEQ ID NO: 88344 - protein, 9 aa, Homo Sapiens
LPEENYQVL

SEQ ID NO: 88345 - protein, 9 aa, Homo Sapiens
LPEGGCYEL

SEQ ID NO: 88346 - protein, 9 aa, Homo Sapiens
LPEGGETPI

SEQ ID NO: 88347 - protein, 9 aa, Homo Sapiens
LPEKKGNTL

SEQ ID NO: 88348 - protein, 9 aa, Homo Sapiens
LPEPSCPQL

SEQ ID NO: 88349 - protein, 9 aa, Homo Sapiens
LPEYNPRTL

SEQ ID NO: 88350 - protein, 9 aa, Homo Sapiens
LPFCKGDVL

SEQ ID NO: 88351 - protein, 9 aa, Homo Sapiens
LPFDCTQAL

SEQ ID NO: 88352 - protein, 9 aa, Homo Sapiens
LPFDDDNVM

SEQ ID NO: 88353 - protein, 9 aa, Homo Sapiens
LPFGKVTNI

SEQ ID NO: 88354 - protein, 9 aa, Homo Sapiens
LPFLEASTL

SEQ ID NO: 88355 - protein, 9 aa, Homo Sapiens
LPFPKDASL

SEQ ID NO: 88356 - protein, 9 aa, Homo Sapiens
LPFQFAHHL

SEQ ID NO: 88357 - protein, 9 aa, Homo Sapiens
LPFSDQVVL

SEQ ID NO: 88358 - protein, 9 aa, Homo Sapiens
LPHAPGVQM

SEQ ID NO: 88359 - protein, 9 aa, Homo Sapiens
LPHGSSYSL

SEQ ID NO: 88360 - protein, 9 aa, Homo Sapiens
LPHISDVVL

SEQ ID NO: 88361 - protein, 9 aa, Homo Sapiens
LPHLESQSL

SEQ ID NO: 88362 - protein, 9 aa, Homo Sapiens
LPHSATVTL

SEQ ID NO: 88363 - protein, 9 aa, Homo Sapiens
LPHSGEAQL

SEQ ID NO: 88364 - protein, 9 aa, Homo Sapiens
LPIAASSSL

SEQ ID NO: 88365 - protein, 9 aa, Homo Sapiens
LPIATVEEL

SEQ ID NO: 88366 - protein, 9 aa, Homo Sapiens
LPIDCSPAL

SEQ ID NO: 88367 - protein, 9 aa, Homo Sapiens
LPIDEDEEM

SEQ ID NO: 88368 - protein, 9 aa, Homo Sapiens
LPIDESNTI

SEQ ID NO: 88369 - protein, 9 aa, Homo Sapiens
LPIDGANDL

SEQ ID NO: 88370 - protein, 9 aa, Homo Sapiens
LPIEDSQDL

SEQ ID NO: 88371 - protein, 9 aa, Homo Sapiens
LPIEVYCHL

SEQ ID NO: 88372 - protein, 9 aa, Homo Sapiens
LPIHCIYQL

SEQ ID NO: 88373 - protein, 9 aa, Homo Sapiens
LPISQESLL

SEQ ID NO: 88374 - protein, 9 aa, Homo Sapiens
LPLAGEEEL

SEQ ID NO: 88375 - protein, 9 aa, Homo Sapiens
LPLAHVLEL

SEQ ID NO: 88376 - protein, 9 aa, Homo Sapiens
LPLASDPLL

SEQ ID NO: 88377 - protein, 9 aa, Homo Sapiens
LPLDNPSVL

SEQ ID NO: 88378 - protein, 9 aa, Homo Sapiens
LPLEKVYSL

SEQ ID NO: 88379 - protein, 9 aa, Homo Sapiens
LPLENASIL

SEQ ID NO: 88380 - protein, 9 aa, Homo Sapiens
LPLMSWMKM

SEQ ID NO: 88381 - protein, 9 aa, Homo Sapiens
LPLPEEPQL

SEQ ID NO: 88382 - protein, 9 aa, Homo Sapiens
LPLQTSHAL

SEQ ID NO: 88383 - protein, 9 aa, Homo Sapiens
LPMPTEPLL

SEQ ID NO: 88384 - protein, 9 aa, Homo Sapiens
LPNADSECL

SEQ ID NO: 88385 - protein, 9 aa, Homo Sapiens
LPNASADSL

SEQ ID NO: 88386 - protein, 9 aa, Homo Sapiens
LPNAVITRI

SEQ ID NO: 88387 - protein, 9 aa, Homo Sapiens
LPNDFPTCL

SEQ ID NO: 88388 - protein, 9 aa, Homo Sapiens
LPNDVISSL

SEQ ID NO: 88389 - protein, 9 aa, Homo Sapiens
LPNFGSHVL

SEQ ID NO: 88390 - protein, 9 aa, Homo Sapiens
LPNGMIVTL

SEQ ID NO: 88391 - protein, 9 aa, Homo Sapiens
LPNGQPTVL

SEQ ID NO: 88392 - protein, 9 aa, Homo Sapiens
LPNIHPELL

SEQ ID NO: 88393 - protein, 9 aa, Homo Sapiens
LPNKVDPLV

SEQ ID NO: 88394 - protein, 9 aa, Homo Sapiens
LPNNAKLEM

SEQ ID NO: 88395 - protein, 9 aa, Homo Sapiens
LPNPTLVTI

SEQ ID NO: 88396 - protein, 9 aa, Homo Sapiens
LPNSGDSTL

SEQ ID NO: 88397 - protein, 9 aa, Homo Sapiens
LPNVNAAIL

SEQ ID NO: 88398 - protein, 9 aa, Homo Sapiens
LPQEDLEAL

SEQ ID NO: 88399 - protein, 9 aa, Homo Sapiens
LPQHEEICL

SEQ ID NO: 88400 - protein, 9 aa, Homo Sapiens
LPQHPDVEM

SEQ ID NO: 88401 - protein, 9 aa, Homo Sapiens
LPQKGDVEM

SEQ ID NO: 88402 - protein, 9 aa, Homo Sapiens
LPQPDVFPL

SEQ ID NO: 88403 - protein, 9 aa, Homo Sapiens
LPQPSSIVL

SEQ ID NO: 88404 - protein, 9 aa, Homo Sapiens
LPQTGEQEL

SEQ ID NO: 88405 - protein, 9 aa, Homo Sapiens
LPSDATVVL

SEQ ID NO: 88406 - protein, 9 aa, Homo Sapiens
LPSDFTPAV

SEQ ID NO: 88407 - protein, 9 aa, Homo Sapiens
LPSDIAAEA

SEQ ID NO: 88408 - protein, 9 aa, Homo Sapiens
LPSDKALVL

SEQ ID NO: 88409 - protein, 9 aa, Homo Sapiens
LPSDMAVAL

SEQ ID NO: 88410 - protein, 9 aa, Homo Sapiens
LPSEHQTIL

SEQ ID NO: 88411 - protein, 9 aa, Homo Sapiens
LPSEVDKAL

SEQ ID NO: 88412 - protein, 9 aa, Homo Sapiens
LPSEVEPEL

SEQ ID NO: 88413 - protein, 9 aa, Homo Sapiens
LPSEYDTPL

SEQ ID NO: 88414 - protein, 9 aa, Homo Sapiens
LPSGAVFVI

SEQ ID NO: 88415 - protein, 9 aa, Homo Sapiens
LPSGEDYNL

SEQ ID NO: 88416 - protein, 9 aa, Homo Sapiens
LPSGLDSVL

SEQ ID NO: 88417 - protein, 9 aa, Homo Sapiens
LPSGVSAKL

SEQ ID NO: 88418 - protein, 9 aa, Homo Sapiens
LPSHVVTML

SEQ ID NO: 88419 - protein, 9 aa, Homo Sapiens
LPSIVNEVL

SEQ ID NO: 88420 - protein, 9 aa, Homo Sapiens
LPSKDVQSL

SEQ ID NO: 88421 - protein, 9 aa, Homo Sapiens
LPSKVPTTL

SEQ ID NO: 88422 - protein, 9 aa, Homo Sapiens
LPSLSAHEL

SEQ ID NO: 88423 - protein, 9 aa, Homo Sapiens
LPSMPEPAL

SEQ ID NO: 88424 - protein, 9 aa, Homo Sapiens
LPSNDEPIL

SEQ ID NO: 88425 - protein, 9 aa, Homo Sapiens
LPSQEDMPH

SEQ ID NO: 88426 - protein, 9 aa, Homo Sapiens
LPSQEVQAL

SEQ ID NO: 88427 - protein, 9 aa, Homo Sapiens
LPSRVIEEL

SEQ ID NO: 88428 - protein, 9 aa, Homo Sapiens
LPSSFVEKL

SEQ ID NO: 88429 - protein, 9 aa, Homo Sapiens
LPSTEAVAL

SEQ ID NO: 88430 - protein, 9 aa, Homo Sapiens
LPSTTIVSM

SEQ ID NO: 88431 - protein, 9 aa, Homo Sapiens
LPTAVEPLM

SEQ ID NO: 88432 - protein, 9 aa, Homo Sapiens
LPTAVIANL

SEQ ID NO: 88433 - protein, 9 aa, Homo Sapiens
LPTDSAIIM

SEQ ID NO: 88434 - protein, 9 aa, Homo Sapiens
LPTDSHASL

SEQ ID NO: 88435 - protein, 9 aa, Homo Sapiens
LPTDTLQEL

SEQ ID NO: 88436 - protein, 9 aa, Homo Sapiens
LPTEEEWEF

SEQ ID NO: 88437 - protein, 9 aa, Homo Sapiens
LPTEISQSL

SEQ ID NO: 88438 - protein, 9 aa, Homo Sapiens
LPTEKEVAL

SEQ ID NO: 88439 - protein, 9 aa, Homo Sapiens
LPTENVDKM

SEQ ID NO: 88440 - protein, 9 aa, Homo Sapiens
LPTSPGPAL

SEQ ID NO: 88441 - protein, 9 aa, Homo Sapiens
LPTSVVTIT

SEQ ID NO: 88442 - protein, 9 aa, Homo Sapiens
LPVALQTRL

SEQ ID NO: 88443 - protein, 9 aa, Homo Sapiens
LPVASSSTL

SEQ ID NO: 88444 - protein, 9 aa, Homo Sapiens
LPVATDFEF

SEQ ID NO: 88445 - protein, 9 aa, Homo Sapiens
LPVDFVECL

SEQ ID NO: 88446 - protein, 9 aa, Homo Sapiens
LPVDIRQYL

SEQ ID NO: 88447 - protein, 9 aa, Homo Sapiens
LPVDKAQEL

SEQ ID NO: 88448 - protein, 9 aa, Homo Sapiens
LPVDLAEEL

SEQ ID NO: 88449 - protein, 9 aa, Homo Sapiens
LPVEDDIDL

SEQ ID NO: 88450 - protein, 9 aa, Homo Sapiens
LPVEEFNEL

SEQ ID NO: 88451 - protein, 9 aa, Homo Sapiens
LPVESVHIL

SEQ ID NO: 88452 - protein, 9 aa, Homo Sapiens
LPVFDKEEL

SEQ ID NO: 88453 - protein, 9 aa, Homo Sapiens
LPVGSSQVL

SEQ ID NO: 88454 - protein, 9 aa, Homo Sapiens
LPVGTTATL

SEQ ID NO: 88455 - protein, 9 aa, Homo Sapiens
LPVHGEQAL

SEQ ID NO: 88456 - protein, 9 aa, Homo Sapiens
LPVHVFEAL

SEQ ID NO: 88457 - protein, 9 aa, Homo Sapiens
LPVPMDAAL

SEQ ID NO: 88458 - protein, 9 aa, Homo Sapiens
LPVQPENAL

SEQ ID NO: 88459 - protein, 9 aa, Homo Sapiens
LPVQPEVAL

SEQ ID NO: 88460 - protein, 9 aa, Homo Sapiens
LPVSVSREL

SEQ ID NO: 88461 - protein, 9 aa, Homo Sapiens
LPVVDFNEM

SEQ ID NO: 88462 - protein, 9 aa, Homo Sapiens
LPWASTHSL

SEQ ID NO: 88463 - protein, 9 aa, Homo Sapiens
LPWGGGTAL

SEQ ID NO: 88464 - protein, 9 aa, Homo Sapiens
LPYAGDVSM

SEQ ID NO: 88465 - protein, 9 aa, Homo Sapiens
LPYGREDVL

SEQ ID NO: 88466 - protein, 9 aa, Homo Sapiens
MAATGDVAL

SEQ ID NO: 88467 - protein, 9 aa, Homo Sapiens
MADPNIRFL

SEQ ID NO: 88468 - protein, 9 aa, Homo Sapiens
MAHADPTEL

SEQ ID NO: 88469 - protein, 9 aa, Homo Sapiens
MANGAVIHL

SEQ ID NO: 88470 - protein, 9 aa, Homo Sapiens
MANPTALLL

SEQ ID NO: 88471 - protein, 9 aa, Homo Sapiens
MAVEGDHSM

SEQ ID NO: 88472 - protein, 9 aa, Homo Sapiens
MAVIDGNVM

SEQ ID NO: 88473 - protein, 9 aa, Homo Sapiens
MAYGVEPAL

SEQ ID NO: 88474 - protein, 9 aa, Homo Sapiens
MIAFHDPEL

SEQ ID NO: 88475 - protein, 9 aa, Homo Sapiens
MIFQDPTAM

SEQ ID NO: 88476 - protein, 9 aa, Homo Sapiens
MPADIATLL

SEQ ID NO: 88477 - protein, 9 aa, Homo Sapiens
MPADSGYPA

SEQ ID NO: 88478 - protein, 9 aa, Homo Sapiens
MPADVSEAL

SEQ ID NO: 88479 - protein, 9 aa, Homo Sapiens
MPAEEFREL

SEQ ID NO: 88480 - protein, 9 aa, Homo Sapiens
MPANSGLAL

SEQ ID NO: 88481 - protein, 9 aa, Homo Sapiens
MPAPADPTA

SEQ ID NO: 88482 - protein, 9 aa, Homo Sapiens
MPCEALVRM

SEQ ID NO: 88483 - protein, 9 aa, Homo Sapiens
MPCEDDHHL

SEQ ID NO: 88484 - protein, 9 aa, Homo Sapiens
MPCQALVRM

SEQ ID NO: 88485 - protein, 9 aa, Homo Sapiens
MPCVFVTEV

SEQ ID NO: 88486 - protein, 9 aa, Homo Sapiens
MPDDLLTTL

SEQ ID NO: 88487 - protein, 9 aa, Homo Sapiens
MPDELLTSL

SEQ ID NO: 88488 - protein, 9 aa, Homo Sapiens
MPDHTDVSL

SEQ ID NO: 88489 - protein, 9 aa, Homo Sapiens
MPDHVIPEI

SEQ ID NO: 88490 - protein, 9 aa, Homo Sapiens
MPDIIIKAL

SEQ ID NO: 88491 - protein, 9 aa, Homo Sapiens
MPDNNFHSL

SEQ ID NO: 88492 - protein, 9 aa, Homo Sapiens
MPDPTPFLL

SEQ ID NO: 88493 - protein, 9 aa, Homo Sapiens
MPDSAAALL

SEQ ID NO: 88494 - protein, 9 aa, Homo Sapiens
MPDSELFEL

SEQ ID NO: 88495 - protein, 9 aa, Homo Sapiens
MPDVVVRSF

SEQ ID NO: 88496 - protein, 9 aa, Homo Sapiens
MPEDLVEAL

SEQ ID NO: 88497 - protein, 9 aa, Homo Sapiens
MPEDSDTYL

SEQ ID NO: 88498 - protein, 9 aa, Homo Sapiens
MPEEAIETL

SEQ ID NO: 88499 - protein, 9 aa, Homo Sapiens
MPEEDPATL

SEQ ID NO: 88500 - protein, 9 aa, Homo Sapiens
MPEEESAKV

SEQ ID NO: 88501 - protein, 9 aa, Homo Sapiens
MPEKEPSVL

SEQ ID NO: 88502 - protein, 9 aa, Homo Sapiens
MPEKLSHKL

SEQ ID NO: 88503 - protein, 9 aa, Homo Sapiens
MPEPASRCL

SEQ ID NO: 88504 - protein, 9 aa, Homo Sapiens
MPEPTVLSL

SEQ ID NO: 88505 - protein, 9 aa, Homo Sapiens
MPEQWARLL

SEQ ID NO: 88506 - protein, 9 aa, Homo Sapiens
MPETTETVL

SEQ ID NO: 88507 - protein, 9 aa, Homo Sapiens
MPETYQARL

SEQ ID NO: 88508 - protein, 9 aa, Homo Sapiens
MPEYNAPAL

SEQ ID NO: 88509 - protein, 9 aa, Homo Sapiens
MPFGNVISA

SEQ ID NO: 88510 - protein, 9 aa, Homo Sapiens
MPFGNVVSA

SEQ ID NO: 88511 - protein, 9 aa, Homo Sapiens
MPFQQWEAL

SEQ ID NO: 88512 - protein, 9 aa, Homo Sapiens
MPFRGDTVI

SEQ ID NO: 88513 - protein, 9 aa, Homo Sapiens
MPFRGYAVL

SEQ ID NO: 88514 - protein, 9 aa, Homo Sapiens
MPFTTVSEL

SEQ ID NO: 88515 - protein, 9 aa, Homo Sapiens
MPFYNPAQL

SEQ ID NO: 88516 - protein, 9 aa, Homo Sapiens
MPGKTAIEL

SEQ ID NO: 88517 - protein, 9 aa, Homo Sapiens
MPGRVEPIL

SEQ ID NO: 88518 - protein, 9 aa, Homo Sapiens
MPHDAIILL

SEQ ID NO: 88519 - protein, 9 aa, Homo Sapiens
MPHDLITQL

SEQ ID NO: 88520 - protein, 9 aa, Homo Sapiens
MPHEDCITA

SEQ ID NO: 88521 - protein, 9 aa, Homo Sapiens
MPHEKHYTL

SEQ ID NO: 88522 - protein, 9 aa, Homo Sapiens
MPHHTPHQL

SEQ ID NO: 88523 - protein, 9 aa, Homo Sapiens
MPHNQFIKM

SEQ ID NO: 88524 - protein, 9 aa, Homo Sapiens
MPHSSSAKL

SEQ ID NO: 88525 - protein, 9 aa, Homo Sapiens
MPHVPITTL

SEQ ID NO: 88526 - protein, 9 aa, Homo Sapiens
MPHYDIDSA

SEQ ID NO: 88527 - protein, 9 aa, Homo Sapiens
MPIGPDVSL

SEQ ID NO: 88528 - protein, 9 aa, Homo Sapiens
MPIKLKIGL

SEQ ID NO: 88529 - protein, 9 aa, Homo Sapiens
MPISSHVDL

SEQ ID NO: 88530 - protein, 9 aa, Homo Sapiens
MPKMDQDSL

SEQ ID NO: 88531 - protein, 9 aa, Homo Sapiens
MPLAEAGAL

SEQ ID NO: 88532 - protein, 9 aa, Homo Sapiens
MPLDKHMEM

SEQ ID NO: 88533 - protein, 9 aa, Homo Sapiens
MPLEDMNEF

SEQ ID NO: 88534 - protein, 9 aa, Homo Sapiens
MPLHVAPLL

SEQ ID NO: 88535 - protein, 9 aa, Homo Sapiens
MPLNVADLI

SEQ ID NO: 88536 - protein, 9 aa, Homo Sapiens
MPLPGTKAL

SEQ ID NO: 88537 - protein, 9 aa, Homo Sapiens
MPLQDSISL

SEQ ID NO: 88538 - protein, 9 aa, Homo Sapiens
MPLRDAAKL

SEQ ID NO: 88539 - protein, 9 aa, Homo Sapiens
MPLTADPTL

SEQ ID NO: 88540 - protein, 9 aa, Homo Sapiens
MPLVEETSL

SEQ ID NO: 88541 - protein, 9 aa, Homo Sapiens
MPMNVADLI

SEQ ID NO: 88542 - protein, 9 aa, Homo Sapiens
MPMPEPCEL

SEQ ID NO: 88543 - protein, 9 aa, Homo Sapiens
MPMVTDNKM

SEQ ID NO: 88544 - protein, 9 aa, Homo Sapiens
MPNENIPEL

SEQ ID NO: 88545 - protein, 9 aa, Homo Sapiens
MPNGTVQRF

SEQ ID NO: 88546 - protein, 9 aa, Homo Sapiens
MPNLDSVTL

SEQ ID NO: 88547 - protein, 9 aa, Homo Sapiens
MPNLYGDIL

SEQ ID NO: 88548 - protein, 9 aa, Homo Sapiens
MPNLYGNII

SEQ ID NO: 88549 - protein, 9 aa, Homo Sapiens
MPNQHACKL

SEQ ID NO: 88550 - protein, 9 aa, Homo Sapiens
MPNQIVQIL

SEQ ID NO: 88551 - protein, 9 aa, Homo Sapiens
MPQDLSEAL

SEQ ID NO: 88552 - protein, 9 aa, Homo Sapiens
MPQEEVELL

SEQ ID NO: 88553 - protein, 9 aa, Homo Sapiens
MPQGNPLLL

SEQ ID NO: 88554 - protein, 9 aa, Homo Sapiens
MPQHIMAIL

SEQ ID NO: 88555 - protein, 9 aa, Homo Sapiens
MPQLDPRVL

SEQ ID NO: 88556 - protein, 9 aa, Homo Sapiens
MPSDVLEVT

SEQ ID NO: 88557 - protein, 9 aa, Homo Sapiens
MPSEDVVSL

SEQ ID NO: 88558 - protein, 9 aa, Homo Sapiens
MPSKTELIV

SEQ ID NO: 88559 - protein, 9 aa, Homo Sapiens
MPSLQPVVM

SEQ ID NO: 88560 - protein, 9 aa, Homo Sapiens
MPSPMPEYL

SEQ ID NO: 88561 - protein, 9 aa, Homo Sapiens
MPSPVSPKL

SEQ ID NO: 88562 - protein, 9 aa, Homo Sapiens
MPSQFRDIL

SEQ ID NO: 88563 - protein, 9 aa, Homo Sapiens
MPSRELASM

SEQ ID NO: 88564 - protein, 9 aa, Homo Sapiens
MPSSAVRVL

SEQ ID NO: 88565 - protein, 9 aa, Homo Sapiens
MPSVFQNVL

SEQ ID NO: 88566 - protein, 9 aa, Homo Sapiens
MPTDSQDSL

SEQ ID NO: 88567 - protein, 9 aa, Homo Sapiens
MPTDVLEVT

SEQ ID NO: 88568 - protein, 9 aa, Homo Sapiens
MPTGAGKSL

SEQ ID NO: 88569 - protein, 9 aa, Homo Sapiens
MPTGGGKSL

SEQ ID NO: 88570 - protein, 9 aa, Homo Sapiens
MPTIQITAL

SEQ ID NO: 88571 - protein, 9 aa, Homo Sapiens
MPTKETTKL

SEQ ID NO: 88572 - protein, 9 aa, Homo Sapiens
MPTKTIEVL

SEQ ID NO: 88573 - protein, 9 aa, Homo Sapiens
MPTQEVQEL

SEQ ID NO: 88574 - protein, 9 aa, Homo Sapiens
MPTSTILRL

SEQ ID NO: 88575 - protein, 9 aa, Homo Sapiens
MPTTERVTL

SEQ ID NO: 88576 - protein, 9 aa, Homo Sapiens
MPVDLELVA

SEQ ID NO: 88577 - protein, 9 aa, Homo Sapiens
MPVDSFNSM

SEQ ID NO: 88578 - protein, 9 aa, Homo Sapiens
MPVEKNITL

SEQ ID NO: 88579 - protein, 9 aa, Homo Sapiens
MPVEVQTEL

SEQ ID NO: 88580 - protein, 9 aa, Homo Sapiens
MPVFPDFKM

SEQ ID NO: 88581 - protein, 9 aa, Homo Sapiens
MPVGMTHGL

SEQ ID NO: 88582 - protein, 9 aa, Homo Sapiens
MPVGPAPGM

SEQ ID NO: 88583 - protein, 9 aa, Homo Sapiens
MPVGPDAIL

SEQ ID NO: 88584 - protein, 9 aa, Homo Sapiens
MPVHAAVQM

SEQ ID NO: 88585 - protein, 9 aa, Homo Sapiens
MPVKQPYYL

SEQ ID NO: 88586 - protein, 9 aa, Homo Sapiens
MPVKVEAAI

SEQ ID NO: 88587 - protein, 9 aa, Homo Sapiens
MPVLEQSVL

SEQ ID NO: 88588 - protein, 9 aa, Homo Sapiens
MPVMEQSVL

SEQ ID NO: 88589 - protein, 9 aa, Homo Sapiens
MPVPEILQL

SEQ ID NO: 88590 - protein, 9 aa, Homo Sapiens
MPVPTTPEF

SEQ ID NO: 88591 - protein, 9 aa, Homo Sapiens
MPVQDLPRL

SEQ ID NO: 88592 - protein, 9 aa, Homo Sapiens
MPVRAADKL

SEQ ID NO: 88593 - protein, 9 aa, Homo Sapiens
MPVRWVTGL

SEQ ID NO: 88594 - protein, 9 aa, Homo Sapiens
MPVTARVVF

SEQ ID NO: 88595 - protein, 9 aa, Homo Sapiens
MPVVAGAVF

SEQ ID NO: 88596 - protein, 9 aa, Homo Sapiens
MPYLEHESF

SEQ ID NO: 88597 - protein, 9 aa, Homo Sapiens
MPYNYPVLL

SEQ ID NO: 88598 - protein, 9 aa, Homo Sapiens
MPYPDETNL

SEQ ID NO: 88599 - protein, 9 aa, Homo Sapiens
MVADPDNPL

SEQ ID NO: 88600 - protein, 9 aa, Homo Sapiens
MVLEYDHPL

SEQ ID NO: 88601 - protein, 9 aa, Homo Sapiens
MVNHFIAEF

SEQ ID NO: 88602 - protein, 9 aa, Homo Sapiens
MVTAVAYRL

SEQ ID NO: 88603 - protein, 9 aa, Homo Sapiens
MVVDIVQEL

SEQ ID NO: 88604 - protein, 9 aa, Homo Sapiens
NAAFKDVAL

SEQ ID NO: 88605 - protein, 9 aa, Homo Sapiens
NAAFPDTSM

SEQ ID NO: 88606 - protein, 9 aa, Homo Sapiens
NAAPVDPTL

SEQ ID NO: 88607 - protein, 9 aa, Homo Sapiens
NADPQAVTM

SEQ ID NO: 88608 - protein, 9 aa, Homo Sapiens
NAEPEPRSL

SEQ ID NO: 88609 - protein, 9 aa, Homo Sapiens
NAFKEITTM

SEQ ID NO: 88610 - protein, 9 aa, Homo Sapiens
NAILVDTPL

SEQ ID NO: 88611 - protein, 9 aa, Homo Sapiens
NAIREVLEL

SEQ ID NO: 88612 - protein, 9 aa, Homo Sapiens
NAMEDAQTL

SEQ ID NO: 88613 - protein, 9 aa, Homo Sapiens
NAMRADPAL

SEQ ID NO: 88614 - protein, 9 aa, Homo Sapiens
NANHPDFPM

SEQ ID NO: 88615 - protein, 9 aa, Homo Sapiens
NASEVPMVL

SEQ ID NO: 88616 - protein, 9 aa, Homo Sapiens
NATGPDLEF

SEQ ID NO: 88617 - protein, 9 aa, Homo Sapiens
NAVGDGIVL

SEQ ID NO: 88618 - protein, 9 aa, Homo Sapiens
NAWDKEPVL

SEQ ID NO: 88619 - protein, 9 aa, Homo Sapiens
NIAGPDAAL

SEQ ID NO: 88620 - protein, 9 aa, Homo Sapiens
NPCSEQDVL

SEQ ID NO: 88621 - protein, 9 aa, Homo Sapiens
NPDDVFREF

SEQ ID NO: 88622 - protein, 9 aa, Homo Sapiens
NPDEAEKAL

SEQ ID NO: 88623 - protein, 9 aa, Homo Sapiens
NPDPAVYQL

SEQ ID NO: 88624 - protein, 9 aa, Homo Sapiens
NPDTHSWEM

SEQ ID NO: 88625 - protein, 9 aa, Homo Sapiens
NPHDRVVAL

SEQ ID NO: 88626 - protein, 9 aa, Homo Sapiens
NPIEDEAVI

SEQ ID NO: 88627 - protein, 9 aa, Homo Sapiens
NPIEEISVL

SEQ ID NO: 88628 - protein, 9 aa, Homo Sapiens
NPISTVTEL

SEQ ID NO: 88629 - protein, 9 aa, Homo Sapiens
NPLHLDYVM

SEQ ID NO: 88630 - protein, 9 aa, Homo Sapiens
NPQFLDPVL

SEQ ID NO: 88631 - protein, 9 aa, Homo Sapiens
NPTEIDKVL

SEQ ID NO: 88632 - protein, 9 aa, Homo Sapiens
NPTEPDHAI

SEQ ID NO: 88633 - protein, 9 aa, Homo Sapiens
NPVDIVSTL

SEQ ID NO: 88634 - protein, 9 aa, Homo Sapiens
NPVEYSIVM

SEQ ID NO: 88635 - protein, 9 aa, Homo Sapiens
NVFATDAIL

SEQ ID NO: 88636 - protein, 9 aa, Homo Sapiens
PALHEGPPL

SEQ ID NO: 88637 - protein, 9 aa, Homo Sapiens
PARSFGPAI

SEQ ID NO: 88638 - protein, 9 aa, Homo Sapiens
QADPTKLEL

SEQ ID NO: 88639 - protein, 9 aa, Homo Sapiens
QADTTRLEL

SEQ ID NO: 88640 - protein, 9 aa, Homo Sapiens
QAFIDLHSA

SEQ ID NO: 88641 - protein, 9 aa, Homo Sapiens
QAIENAHVL

SEQ ID NO: 88642 - protein, 9 aa, Homo Sapiens
QPADAERAL

SEQ ID NO: 88643 - protein, 9 aa, Homo Sapiens
QPAEMAAEL

SEQ ID NO: 88644 - protein, 9 aa, Homo Sapiens
QPAPISPHL

SEQ ID NO: 88645 - protein, 9 aa, Homo Sapiens
QPCADNAVL

SEQ ID NO: 88646 - protein, 9 aa, Homo Sapiens
QPDNIVYVM

SEQ ID NO: 88647 - protein, 9 aa, Homo Sapiens
QPDPESVVL

SEQ ID NO: 88648 - protein, 9 aa, Homo Sapiens
QPHPFDPIL

SEQ ID NO: 88649 - protein, 9 aa, Homo Sapiens
QPINSTHEL

SEQ ID NO: 88650 - protein, 9 aa, Homo Sapiens
QPMDIHVEL

SEQ ID NO: 88651 - protein, 9 aa, Homo Sapiens
QPNPLPLRL

SEQ ID NO: 88652 - protein, 9 aa, Homo Sapiens
QPQSHETAL

SEQ ID NO: 88653 - protein, 9 aa, Homo Sapiens
QPTCPDHML

SEQ ID NO: 88654 - protein, 9 aa, Homo Sapiens
QPTEVVNIL

SEQ ID NO: 88655 - protein, 9 aa, Homo Sapiens
QPYSKDSPF

SEQ ID NO: 88656 - protein, 9 aa, Homo Sapiens
RPEEIAALL

SEQ ID NO: 88657 - protein, 9 aa, Homo Sapiens
RPFEDQTSL

SEQ ID NO: 88658 - protein, 9 aa, Homo Sapiens
RPITDSPVL

SEQ ID NO: 88659 - protein, 9 aa, Homo Sapiens
RPLDVDWTL

SEQ ID NO: 88660 - protein, 9 aa, Homo Sapiens
RPLEEDCTL

SEQ ID NO: 88661 - protein, 9 aa, Homo Sapiens
RPNSIDPAL

SEQ ID NO: 88662 - protein, 9 aa, Homo Sapiens
RPSEVSEAL

SEQ ID NO: 88663 - protein, 9 aa, Homo Sapiens
RPTSVDPAL

SEQ ID NO: 88664 - protein, 9 aa, Homo Sapiens
RPWLDPAAA

SEQ ID NO: 88665 - protein, 9 aa, Homo Sapiens
SAAPPEPAV

SEQ ID NO: 88666 - protein, 9 aa, Homo Sapiens
SACGHTAVL

SEQ ID NO: 88667 - protein, 9 aa, Homo Sapiens
SACHVSNTL

SEQ ID NO: 88668 - protein, 9 aa, Homo Sapiens
SADPGILVL

SEQ ID NO: 88669 - protein, 9 aa, Homo Sapiens
SADPNVVDL

SEQ ID NO: 88670 - protein, 9 aa, Homo Sapiens
SAGPADAEM

SEQ ID NO: 88671 - protein, 9 aa, Homo Sapiens
SAIFPDVAL

SEQ ID NO: 88672 - protein, 9 aa, Homo Sapiens
SAIGYIHSL

SEQ ID NO: 88673 - protein, 9 aa, Homo Sapiens
SASALAVAL

SEQ ID NO: 88674 - protein, 9 aa, Homo Sapiens
SASGVLFSL

SEQ ID NO: 88675 - protein, 9 aa, Homo Sapiens
SAVPSDPAM

SEQ ID NO: 88676 - protein, 9 aa, Homo Sapiens
SPAPTHNSL

SEQ ID NO: 88677 - protein, 9 aa, Homo Sapiens
SPCSVVNDL

SEQ ID NO: 88678 - protein, 9 aa, Homo Sapiens
SPDEHEPLL

SEQ ID NO: 88679 - protein, 9 aa, Homo Sapiens
SPDGSDPKL

SEQ ID NO: 88680 - protein, 9 aa, Homo Sapiens
SPDHTIILL

SEQ ID NO: 88681 - protein, 9 aa, Homo Sapiens
SPDSGVYEM

SEQ ID NO: 88682 - protein, 9 aa, Homo Sapiens
SPEAQPKTL

SEQ ID NO: 88683 - protein, 9 aa, Homo Sapiens
SPEPGAVVL

SEQ ID NO: 88684 - protein, 9 aa, Homo Sapiens
SPEPSPVTL

SEQ ID NO: 88685 - protein, 9 aa, Homo Sapiens
SPFKADIEM

SEQ ID NO: 88686 - protein, 9 aa, Homo Sapiens
SPFNDRFPL

SEQ ID NO: 88687 - protein, 9 aa, Homo Sapiens
SPFPASQAL

SEQ ID NO: 88688 - protein, 9 aa, Homo Sapiens
SPFPTSTPL

SEQ ID NO: 88689 - protein, 9 aa, Homo Sapiens
SPFSFHHVL

SEQ ID NO: 88690 - protein, 9 aa, Homo Sapiens
SPHDISNVL

SEQ ID NO: 88691 - protein, 9 aa, Homo Sapiens
SPHDVSSVL

SEQ ID NO: 88692 - protein, 9 aa, Homo Sapiens
SPHEESISL

SEQ ID NO: 88693 - protein, 9 aa, Homo Sapiens
SPHSAAYVL

SEQ ID NO: 88694 - protein, 9 aa, Homo Sapiens
SPIEKSGVL

SEQ ID NO: 88695 - protein, 9 aa, Homo Sapiens
SPIERNEQL

SEQ ID NO: 88696 - protein, 9 aa, Homo Sapiens
SPIGDDVQL

SEQ ID NO: 88697 - protein, 9 aa, Homo Sapiens
SPIGRDGKL

SEQ ID NO: 88698 - protein, 9 aa, Homo Sapiens
SPIKDQPVM

SEQ ID NO: 88699 - protein, 9 aa, Homo Sapiens
SPIPHDPEF

SEQ ID NO: 88700 - protein, 9 aa, Homo Sapiens
SPISSDQSL

SEQ ID NO: 88701 - protein, 9 aa, Homo Sapiens
SPLAFEHVM

SEQ ID NO: 88702 - protein, 9 aa, Homo Sapiens
SPLEDSWCL

SEQ ID NO: 88703 - protein, 9 aa, Homo Sapiens
SPLESDVSL

SEQ ID NO: 88704 - protein, 9 aa, Homo Sapiens
SPMSVNAVM

SEQ ID NO: 88705 - protein, 9 aa, Homo Sapiens
SPNAEIHIL

SEQ ID NO: 88706 - protein, 9 aa, Homo Sapiens
SPNANEPPL

SEQ ID NO: 88707 - protein, 9 aa, Homo Sapiens
SPNDFSVSL

SEQ ID NO: 88708 - protein, 9 aa, Homo Sapiens
SPNHLYLVM

SEQ ID NO: 88709 - protein, 9 aa, Homo Sapiens
SPNSDDTVL

SEQ ID NO: 88710 - protein, 9 aa, Homo Sapiens
SPNSYVVIM

SEQ ID NO: 88711 - protein, 9 aa, Homo Sapiens
SPNYDHVVL

SEQ ID NO: 88712 - protein, 9 aa, Homo Sapiens
SPQDFGLVL

SEQ ID NO: 88713 - protein, 9 aa, Homo Sapiens
SPSDADREL

SEQ ID NO: 88714 - protein, 9 aa, Homo Sapiens
SPSDFSVSL

SEQ ID NO: 88715 - protein, 9 aa, Homo Sapiens
SPSEILQEL

SEQ ID NO: 88716 - protein, 9 aa, Homo Sapiens
SPSELMLTL

SEQ ID NO: 88717 - protein, 9 aa, Homo Sapiens
SPSKADPAL

SEQ ID NO: 88718 - protein, 9 aa, Homo Sapiens
SPSPMDPHM

SEQ ID NO: 88719 - protein, 9 aa, Homo Sapiens
SPSPSDPVL

SEQ ID NO: 88720 - protein, 9 aa, Homo Sapiens
SPTCTNKEL

SEQ ID NO: 88721 - protein, 9 aa, Homo Sapiens
SPTDSDVSL

SEQ ID NO: 88722 - protein, 9 aa, Homo Sapiens
SPTENSFTL

SEQ ID NO: 88723 - protein, 9 aa, Homo Sapiens
SPTSPDYSL

SEQ ID NO: 88724 - protein, 9 aa, Homo Sapiens
SPVDVLQIF

SEQ ID NO: 88725 - protein, 9 aa, Homo Sapiens
SPVGVNHRL

SEQ ID NO: 88726 - protein, 9 aa, Homo Sapiens
SPVSFSPVL

SEQ ID NO: 88727 - protein, 9 aa, Homo Sapiens
SPVTQEPEL

SEQ ID NO: 88728 - protein, 9 aa, Homo Sapiens
SPYPEAVEL

SEQ ID NO: 88729 - protein, 9 aa, Homo Sapiens
SSLLEKGLD

SEQ ID NO: 88730 - protein, 9 aa, Homo Sapiens
TAAAVGAVF

SEQ ID NO: 88731 - protein, 9 aa, Homo Sapiens
TAAERDEIL

SEQ ID NO: 88732 - protein, 9 aa, Homo Sapiens
TAAMIDAVL

SEQ ID NO: 88733 - protein, 9 aa, Homo Sapiens
TAAPPAQPL

SEQ ID NO: 88734 - protein, 9 aa, Homo Sapiens
TAAPTIGVL

SEQ ID NO: 88735 - protein, 9 aa, Homo Sapiens
TAAPVPTTL

SEQ ID NO: 88736 - protein, 9 aa, Homo Sapiens
TAAPVQETL

SEQ ID NO: 88737 - protein, 9 aa, Homo Sapiens
TAAQVAYVL

SEQ ID NO: 88738 - protein, 9 aa, Homo Sapiens
TAASPTIAL

SEQ ID NO: 88739 - protein, 9 aa, Homo Sapiens
TACAINKVL

SEQ ID NO: 88740 - protein, 9 aa, Homo Sapiens
TACDIQTHM

SEQ ID NO: 88741 - protein, 9 aa, Homo Sapiens
TADGAHFEL

SEQ ID NO: 88742 - protein, 9 aa, Homo Sapiens
TADPSHQTM

SEQ ID NO: 88743 - protein, 9 aa, Homo Sapiens
TAFDRDRAM

SEQ ID NO: 88744 - protein, 9 aa, Homo Sapiens
TAIDDRCEL

SEQ ID NO: 88745 - protein, 9 aa, Homo Sapiens
TAIEAQHLL

SEQ ID NO: 88746 - protein, 9 aa, Homo Sapiens
TAIESTPTL

SEQ ID NO: 88747 - protein, 9 aa, Homo Sapiens
TAIMEKHSM

SEQ ID NO: 88748 - protein, 9 aa, Homo Sapiens
TAISLFYEL

SEQ ID NO: 88749 - protein, 9 aa, Homo Sapiens
TAKDSDPEL

SEQ ID NO: 88750 - protein, 9 aa, Homo Sapiens
TALQEVYTL

SEQ ID NO: 88751 - protein, 9 aa, Homo Sapiens
TAMEQLYTL

SEQ ID NO: 88752 - protein, 9 aa, Homo Sapiens
TANALALAM

SEQ ID NO: 88753 - protein, 9 aa, Homo Sapiens
TANNDHTVL

SEQ ID NO: 88754 - protein, 9 aa, Homo Sapiens
TANNVEIHI

SEQ ID NO: 88755 - protein, 9 aa, Homo Sapiens
TASEMILVL

SEQ ID NO: 88756 - protein, 9 aa, Homo Sapiens
TASPVAVSL

SEQ ID NO: 88757 - protein, 9 aa, Homo Sapiens
TASQVYETL

SEQ ID NO: 88758 - protein, 9 aa, Homo Sapiens
TATATNHVL

SEQ ID NO: 88759 - protein, 9 aa, Homo Sapiens
TAVENMPSL

SEQ ID NO: 88760 - protein, 9 aa, Homo Sapiens
TAVKNDYEM

SEQ ID NO: 88761 - protein, 9 aa, Homo Sapiens
TAVSVCPVL

SEQ ID NO: 88762 - protein, 9 aa, Homo Sapiens
TAYYNDPAF

SEQ ID NO: 88763 - protein, 9 aa, Homo Sapiens
TPADVFIVF

SEQ ID NO: 88764 - protein, 9 aa, Homo Sapiens
TPAEVRQVL

SEQ ID NO: 88765 - protein, 9 aa, Homo Sapiens
TPAGVQVIL

SEQ ID NO: 88766 - protein, 9 aa, Homo Sapiens
TPAPPDLTL

SEQ ID NO: 88767 - protein, 9 aa, Homo Sapiens
TPAPPTHAL

SEQ ID NO: 88768 - protein, 9 aa, Homo Sapiens
TPAVVSERL

SEQ ID NO: 88769 - protein, 9 aa, Homo Sapiens
TPDEIDHVF

SEQ ID NO: 88770 - protein, 9 aa, Homo Sapiens
TPDGAVRVL

SEQ ID NO: 88771 - protein, 9 aa, Homo Sapiens
TPEEGAQAL

SEQ ID NO: 88772 - protein, 9 aa, Homo Sapiens
TPEEVIAKL

SEQ ID NO: 88773 - protein, 9 aa, Homo Sapiens
TPENLPQIL

SEQ ID NO: 88774 - protein, 9 aa, Homo Sapiens
TPEQQAAIL

SEQ ID NO: 88775 - protein, 9 aa, Homo Sapiens
TPFHEIMSL

SEQ ID NO: 88776 - protein, 9 aa, Homo Sapiens
TPFLYDLVM

SEQ ID NO: 88777 - protein, 9 aa, Homo Sapiens
TPFYGDEAL

SEQ ID NO: 88778 - protein, 9 aa, Homo Sapiens
TPGGSHPAL

SEQ ID NO: 88779 - protein, 9 aa, Homo Sapiens
TPINQNVSL

SEQ ID NO: 88780 - protein, 9 aa, Homo Sapiens
TPIREQHVL

SEQ ID NO: 88781 - protein, 9 aa, Homo Sapiens
TPISAGDLL

SEQ ID NO: 88782 - protein, 9 aa, Homo Sapiens
TPISNEVEM

SEQ ID NO: 88783 - protein, 9 aa, Homo Sapiens
TPLPEDNSM

SEQ ID NO: 88784 - protein, 9 aa, Homo Sapiens
TPLPEEFEL

SEQ ID NO: 88785 - protein, 9 aa, Homo Sapiens
TPLSSTVTL

SEQ ID NO: 88786 - protein, 9 aa, Homo Sapiens
TPMDLAVAL

SEQ ID NO: 88787 - protein, 9 aa, Homo Sapiens
TPMFREYSL

SEQ ID NO: 88788 - protein, 9 aa, Homo Sapiens
TPQDHEVAL

SEQ ID NO: 88789 - protein, 9 aa, Homo Sapiens
TPQFPDMIL

SEQ ID NO: 88790 - protein, 9 aa, Homo Sapiens
TPSDIFMVM

SEQ ID NO: 88791 - protein, 9 aa, Homo Sapiens
TPSEPHPVL

SEQ ID NO: 88792 - protein, 9 aa, Homo Sapiens
TPSNIAIVL

SEQ ID NO: 88793 - protein, 9 aa, Homo Sapiens
TPSPDIIVL

SEQ ID NO: 88794 - protein, 9 aa, Homo Sapiens
TPSPIIQQL

SEQ ID NO: 88795 - protein, 9 aa, Homo Sapiens
TPSPSADLL

SEQ ID NO: 88796 - protein, 9 aa, Homo Sapiens
TPSQIGVIL

SEQ ID NO: 88797 - protein, 9 aa, Homo Sapiens
TPSSDVLVF

SEQ ID NO: 88798 - protein, 9 aa, Homo Sapiens
TPSVHEPVL

SEQ ID NO: 88799 - protein, 9 aa, Homo Sapiens
TPTEISLVL

SEQ ID NO: 88800 - protein, 9 aa, Homo Sapiens
TPTIANPIL

SEQ ID NO: 88801 - protein, 9 aa, Homo Sapiens
TPVAGSQSL

SEQ ID NO: 88802 - protein, 9 aa, Homo Sapiens
TPVDDRISL

SEQ ID NO: 88803 - protein, 9 aa, Homo Sapiens
TPVEEVEAL

SEQ ID NO: 88804 - protein, 9 aa, Homo Sapiens
TPVENSHSL

SEQ ID NO: 88805 - protein, 9 aa, Homo Sapiens
TPVPDSHKL

SEQ ID NO: 88806 - protein, 9 aa, Homo Sapiens
TPVPSVNEL

SEQ ID NO: 88807 - protein, 9 aa, Homo Sapiens
TPVSFDETL

SEQ ID NO: 88808 - protein, 9 aa, Homo Sapiens
TPYKDIFAA

SEQ ID NO: 88809 - protein, 9 aa, Homo Sapiens
TPYNGTEAL

SEQ ID NO: 88810 - protein, 9 aa, Homo Sapiens
TPYPSSASL

SEQ ID NO: 88811 - protein, 9 aa, Homo Sapiens
TSSPPDKVL

SEQ ID NO: 88812 - protein, 9 aa, Homo Sapiens
TVAPAQVAL

SEQ ID NO: 88813 - protein, 9 aa, Homo Sapiens
VAPGKDLTK

SEQ ID NO: 88814 - protein, 9 aa, Homo Sapiens
VPAESAAVL

SEQ ID NO: 88815 - protein, 9 aa, Homo Sapiens
VPAEVTVIL

SEQ ID NO: 88816 - protein, 9 aa, Homo Sapiens
VPCALLLEL

SEQ ID NO: 88817 - protein, 9 aa, Homo Sapiens
VPDPNVIKL

SEQ ID NO: 88818 - protein, 9 aa, Homo Sapiens
VPEEKAAEL

SEQ ID NO: 88819 - protein, 9 aa, Homo Sapiens
VPIESDKTL

SEQ ID NO: 88820 - protein, 9 aa, Homo Sapiens
VPIPKDHQV

SEQ ID NO: 88821 - protein, 9 aa, Homo Sapiens
VPIQSSVVL

SEQ ID NO: 88822 - protein, 9 aa, Homo Sapiens
VPISKSEAL

SEQ ID NO: 88823 - protein, 9 aa, Homo Sapiens
VPIYEGYAL

SEQ ID NO: 88824 - protein, 9 aa, Homo Sapiens
VPNDIQSEL

SEQ ID NO: 88825 - protein, 9 aa, Homo Sapiens
VPNEEDPSL

SEQ ID NO: 88826 - protein, 9 aa, Homo Sapiens
VPQDTKLVL

SEQ ID NO: 88827 - protein, 9 aa, Homo Sapiens
VPQLHGEVL

SEQ ID NO: 88828 - protein, 9 aa, Homo Sapiens
VPQSGVPAL

SEQ ID NO: 88829 - protein, 9 aa, Homo Sapiens
VPSAVALVL

SEQ ID NO: 88830 - protein, 9 aa, Homo Sapiens
VPSSIDPIL

SEQ ID NO: 88831 - protein, 9 aa, Homo Sapiens
VPVDSAPVM

SEQ ID NO: 88832 - protein, 9 aa, Homo Sapiens
VPVGNSPAL

SEQ ID NO: 88833 - protein, 9 aa, Homo Sapiens
VPVPRVDVL

SEQ ID NO: 88834 - protein, 9 aa, Homo Sapiens
VPVSRDFTL

SEQ ID NO: 88835 - protein, 9 aa, Homo Sapiens
VPYEKGFAL

SEQ ID NO: 88836 - protein, 9 aa, Homo Sapiens
VPYWPEVGM

SEQ ID NO: 88837 - protein, 9 aa, Homo Sapiens
VTIKKDVDG

SEQ ID NO: 88838 - protein, 9 aa, Homo Sapiens
WPDDKVHKL

SEQ ID NO: 88839 - protein, 9 aa, Homo Sapiens
WPDEDSRLL

SEQ ID NO: 88840 - protein, 9 aa, Homo Sapiens
WPLSEGKAL

SEQ ID NO: 88841 - protein, 9 aa, Homo Sapiens
WPNSKCPLL

SEQ ID NO: 88842 - protein, 9 aa, Homo Sapiens
YAECYPATM

SEQ ID NO: 88843 - protein, 9 aa, Homo Sapiens
YAFGGGCEL

SEQ ID NO: 88844 - protein, 9 aa, Homo Sapiens
YAFPLAHSL

SEQ ID NO: 88845 - protein, 9 aa, Homo Sapiens
YAFSGVEEL

SEQ ID NO: 88846 - protein, 9 aa, Homo Sapiens
YAIEVDPVL

SEQ ID NO: 88847 - protein, 9 aa, Homo Sapiens
YAIGVSHPL

SEQ ID NO: 88848 - protein, 9 aa, Homo Sapiens
YAVRDTIAL

SEQ ID NO: 88849 - protein, 9 aa, Homo Sapiens
YAVTGDVKM

SEQ ID NO: 88850 - protein, 9 aa, Homo Sapiens
YPAAVPQAL

SEQ ID NO: 88851 - protein, 9 aa, Homo Sapiens
YPASAGTSL

SEQ ID NO: 88852 - protein, 9 aa, Homo Sapiens
YPASTVQIL

SEQ ID NO: 88853 - protein, 9 aa, Homo Sapiens
YPCIPNHEL

SEQ ID NO: 88854 - protein, 9 aa, Homo Sapiens
YPDATPEEL

SEQ ID NO: 88855 - protein, 9 aa, Homo Sapiens
YPDEKSVCL

SEQ ID NO: 88856 - protein, 9 aa, Homo Sapiens
YPDFTNPTM

SEQ ID NO: 88857 - protein, 9 aa, Homo Sapiens
YPDINFNRL

SEQ ID NO: 88858 - protein, 9 aa, Homo Sapiens
YPDPVIQEL

SEQ ID NO: 88859 - protein, 9 aa, Homo Sapiens
YPDRIMNTF

SEQ ID NO: 88860 - protein, 9 aa, Homo Sapiens
YPDSKDLTM

SEQ ID NO: 88861 - protein, 9 aa, Homo Sapiens
YPDTDVILM

SEQ ID NO: 88862 - protein, 9 aa, Homo Sapiens
YPECEIRTM

SEQ ID NO: 88863 - protein, 9 aa, Homo Sapiens
YPEDVAEEL

SEQ ID NO: 88864 - protein, 9 aa, Homo Sapiens
YPEDVSEEL

SEQ ID NO: 88865 - protein, 9 aa, Homo Sapiens
YPEEITPLL

SEQ ID NO: 88866 - protein, 9 aa, Homo Sapiens
YPEELKPVL

SEQ ID NO: 88867 - protein, 9 aa, Homo Sapiens
YPEGAPAVL

SEQ ID NO: 88868 - protein, 9 aa, Homo Sapiens
YPENGVVQM

SEQ ID NO: 88869 - protein, 9 aa, Homo Sapiens
YPENIVPSF

SEQ ID NO: 88870 - protein, 9 aa, Homo Sapiens
YPEPAPAAL

SEQ ID NO: 88871 - protein, 9 aa, Homo Sapiens
YPEPLGERL

SEQ ID NO: 88872 - protein, 9 aa, Homo Sapiens
YPESGYSML

SEQ ID NO: 88873 - protein, 9 aa, Homo Sapiens
YPETGVFVI

SEQ ID NO: 88874 - protein, 9 aa, Homo Sapiens
YPETLGRLL

SEQ ID NO: 88875 - protein, 9 aa, Homo Sapiens
YPFDSPQVM

SEQ ID NO: 88876 - protein, 9 aa, Homo Sapiens
YPFEDHNPP

SEQ ID NO: 88877 - protein, 9 aa, Homo Sapiens
YPFELEKDL

SEQ ID NO: 88878 - protein, 9 aa, Homo Sapiens
YPFIIDAHL

SEQ ID NO: 88879 - protein, 9 aa, Homo Sapiens
YPFPLSHSV

SEQ ID NO: 88880 - protein, 9 aa, Homo Sapiens
YPGLADPVF

SEQ ID NO: 88881 - protein, 9 aa, Homo Sapiens
YPGQPHPAL

SEQ ID NO: 88882 - protein, 9 aa, Homo Sapiens
YPHAAVNGL

SEQ ID NO: 88883 - protein, 9 aa, Homo Sapiens
YPHLHNAEL

SEQ ID NO: 88884 - protein, 9 aa, Homo Sapiens
YPHQVPLVL

SEQ ID NO: 88885 - protein, 9 aa, Homo Sapiens
YPIADLVKM

SEQ ID NO: 88886 - protein, 9 aa, Homo Sapiens
YPIGTNAIV

SEQ ID NO: 88887 - protein, 9 aa, Homo Sapiens
YPITRTQQL

SEQ ID NO: 88888 - protein, 9 aa, Homo Sapiens
YPLDLLLKL

SEQ ID NO: 88889 - protein, 9 aa, Homo Sapiens
YPLEDHTEF

SEQ ID NO: 88890 - protein, 9 aa, Homo Sapiens
YPLEDLPSL

SEQ ID NO: 88891 - protein, 9 aa, Homo Sapiens
YPLLKDPSL

SEQ ID NO: 88892 - protein, 9 aa, Homo Sapiens
YPMGSAEAL

SEQ ID NO: 88893 - protein, 9 aa, Homo Sapiens
YPNERFELL

SEQ ID NO: 88894 - protein, 9 aa, Homo Sapiens
YPNGTSAAL

SEQ ID NO: 88895 - protein, 9 aa, Homo Sapiens
YPNKYESVI

SEQ ID NO: 88896 - protein, 9 aa, Homo Sapiens
YPNPKPEVL

SEQ ID NO: 88897 - protein, 9 aa, Homo Sapiens
YPNTYIFDL

SEQ ID NO: 88898 - protein, 9 aa, Homo Sapiens
YPQDLPRPL

SEQ ID NO: 88899 - protein, 9 aa, Homo Sapiens
YPQDWFQVL

SEQ ID NO: 88900 - protein, 9 aa, Homo Sapiens
YPQDYQFYI

SEQ ID NO: 88901 - protein, 9 aa, Homo Sapiens
YPQEDYESF

SEQ ID NO: 88902 - protein, 9 aa, Homo Sapiens
YPQGQAPPL

SEQ ID NO: 88903 - protein, 9 aa, Homo Sapiens
YPQNPDHVL

SEQ ID NO: 88904 - protein, 9 aa, Homo Sapiens
YPQNPDSVL

SEQ ID NO: 88905 - protein, 9 aa, Homo Sapiens
YPSEFATYL

SEQ ID NO: 88906 - protein, 9 aa, Homo Sapiens
YPSEFSTYL

SEQ ID NO: 88907 - protein, 9 aa, Homo Sapiens
YPSETFTRV

SEQ ID NO: 88908 - protein, 9 aa, Homo Sapiens
YPSINPPTL

SEQ ID NO: 88909 - protein, 9 aa, Homo Sapiens
YPSKQFDVL

SEQ ID NO: 88910 - protein, 9 aa, Homo Sapiens
YPSLPTPLL

SEQ ID NO: 88911 - protein, 9 aa, Homo Sapiens
YPSMSDPYL

SEQ ID NO: 88912 - protein, 9 aa, Homo Sapiens
YPSQDPQRM

SEQ ID NO: 88913 - protein, 9 aa, Homo Sapiens
YPTEKVNCL

SEQ ID NO: 88914 - protein, 9 aa, Homo Sapiens
YPTIATGIL

SEQ ID NO: 88915 - protein, 9 aa, Homo Sapiens
YPTISLHAL

SEQ ID NO: 88916 - protein, 9 aa, Homo Sapiens
YPTPYPDEL

SEQ ID NO: 88917 - protein, 9 aa, Homo Sapiens
YPTVDSNSL

SEQ ID NO: 88918 - protein, 9 aa, Homo Sapiens
YPTVGDVAL

SEQ ID NO: 88919 - protein, 9 aa, Homo Sapiens
YPVDKDMEL

SEQ ID NO: 88920 - protein, 9 aa, Homo Sapiens
YPVDLGDKF

SEQ ID NO: 88921 - protein, 9 aa, Homo Sapiens
YPVEIHEYL

SEQ ID NO: 88922 - protein, 9 aa, Homo Sapiens
YPVNSVNIL

SEQ ID NO: 88923 - protein, 9 aa, Homo Sapiens
YPVSSPKSM

SEQ ID NO: 88924 - protein, 9 aa, Homo Sapiens
YPWEGLNAL

SEQ ID NO: 88925 - protein, 9 aa, Homo Sapiens
YPYEHSYGL

SEQ ID NO: 88926 - protein, 9 aa, Homo Sapiens
YPYPYPHTL

SEQ ID NO: 88927 - protein, 9 aa, Homo Sapiens
YVLPEHMSM

SEQ ID NO: 88928 - protein, 10 aa, Homo Sapiens
APAPAEKTPV

SEQ ID NO: 88929 - protein, 10 aa, Homo Sapiens
CPAPGPHPAL

SEQ ID NO: 88930 - protein, 10 aa, Homo Sapiens
EPIMDNNISL

SEQ ID NO: 88931 - protein, 10 aa, Homo Sapiens
FADPVDVNPF

SEQ ID NO: 88932 - protein, 10 aa, Homo Sapiens
FPAEAGRDTL

SEQ ID NO: 88933 - protein, 10 aa, Homo Sapiens
FPAEGVESAL

SEQ ID NO: 88934 - protein, 10 aa, Homo Sapiens
FPAESDKDAL

SEQ ID NO: 88935 - protein, 10 aa, Homo Sapiens
FPAKPGSLTL

SEQ ID NO: 88936 - protein, 10 aa, Homo Sapiens
FPALDGGDAL

SEQ ID NO: 88937 - protein, 10 aa, Homo Sapiens
FPAPVQPVSL

SEQ ID NO: 88938 - protein, 10 aa, Homo Sapiens
FPDEFHLQTL

SEQ ID NO: 88939 - protein, 10 aa, Homo Sapiens
FPDPEKPCKM

SEQ ID NO: 88940 - protein, 10 aa, Homo Sapiens
FPDPNVKYVF

SEQ ID NO: 88941 - protein, 10 aa, Homo Sapiens
FPDSRTNVDL

SEQ ID NO: 88942 - protein, 10 aa, Homo Sapiens
FPDTSTPRPF

SEQ ID NO: 88943 - protein, 10 aa, Homo Sapiens
FPEADKVRTM

SEQ ID NO: 88944 - protein, 10 aa, Homo Sapiens
FPEDVVRVIF

SEQ ID NO: 88945 - protein, 10 aa, Homo Sapiens
FPEHMANVEL

SEQ ID NO: 88946 - protein, 10 aa, Homo Sapiens
FPEPSRPPLF

SEQ ID NO: 88947 - protein, 10 aa, Homo Sapiens
FPESSAIEAL

SEQ ID NO: 88948 - protein, 10 aa, Homo Sapiens
FPFSDKLGEL

SEQ ID NO: 88949 - protein, 10 aa, Homo Sapiens
FPHELEVPAL

SEQ ID NO: 88950 - protein, 10 aa, Homo Sapiens
FPHISQCEEL

SEQ ID NO: 88951 - protein, 10 aa, Homo Sapiens
FPHPGFNMSL

SEQ ID NO: 88952 - protein, 10 aa, Homo Sapiens
FPIEDASNKL

SEQ ID NO: 88953 - protein, 10 aa, Homo Sapiens
FPIQMEGVKL

SEQ ID NO: 88954 - protein, 10 aa, Homo Sapiens
FPISEETIKL

SEQ ID NO: 88955 - protein, 10 aa, Homo Sapiens
FPLSESQTLL

SEQ ID NO: 88956 - protein, 10 aa, Homo Sapiens
FPQSLPKLLL

SEQ ID NO: 88957 - protein, 10 aa, Homo Sapiens
FPQYSPKMQL

SEQ ID NO: 88958 - protein, 10 aa, Homo Sapiens
FPSGDIQEQL

SEQ ID NO: 88959 - protein, 10 aa, Homo Sapiens
FPVEIKSFYM

SEQ ID NO: 88960 - protein, 10 aa, Homo Sapiens
FPVGGPGTSL

SEQ ID NO: 88961 - protein, 10 aa, Homo Sapiens
FPVNSDVGVL

SEQ ID NO: 88962 - protein, 10 aa, Homo Sapiens
FPVPGSGLVL

SEQ ID NO: 88963 - protein, 10 aa, Homo Sapiens
FPVRDGKIKL

SEQ ID NO: 88964 - protein, 10 aa, Homo Sapiens
FPVSEAQVHL

SEQ ID NO: 88965 - protein, 10 aa, Homo Sapiens
FPWGDGNHTL

SEQ ID NO: 88966 - protein, 10 aa, Homo Sapiens
FPYARDDLSL

SEQ ID NO: 88967 - protein, 10 aa, Homo Sapiens
FPYEKDLIEA

SEQ ID NO: 88968 - protein, 10 aa, Homo Sapiens
FPYQTQEEPL

SEQ ID NO: 88969 - protein, 10 aa, Homo Sapiens
FVDPNGKISL

SEQ ID NO: 88970 - protein, 10 aa, Homo Sapiens
HAAEYGAEAL

SEQ ID NO: 88971 - protein, 10 aa, Homo Sapiens
HACDVVAVTL

SEQ ID NO: 88972 - protein, 10 aa, Homo Sapiens
HPDPFANKSL

SEQ ID NO: 88973 - protein, 10 aa, Homo Sapiens
HPDPTRLLLF

SEQ ID NO: 88974 - protein, 10 aa, Homo Sapiens
HPDTGEKMIL

SEQ ID NO: 88975 - protein, 10 aa, Homo Sapiens
HPESGCRTVL

SEQ ID NO: 88976 - protein, 10 aa, Homo Sapiens
HPFPESKPVL

SEQ ID NO: 88977 - protein, 10 aa, Homo Sapiens
HPFPGPGLAI

SEQ ID NO: 88978 - protein, 10 aa, Homo Sapiens
HPHAVNEIAL

SEQ ID NO: 88979 - protein, 10 aa, Homo Sapiens
HPIDGFLQSL

SEQ ID NO: 88980 - protein, 10 aa, Homo Sapiens
HPIEGSTTVF

SEQ ID NO: 88981 - protein, 10 aa, Homo Sapiens
HPIHADNCLL

SEQ ID NO: 88982 - protein, 10 aa, Homo Sapiens
HPIHQGITEL

SEQ ID NO: 88983 - protein, 10 aa, Homo Sapiens
HPISDHEATL

SEQ ID NO: 88984 - protein, 10 aa, Homo Sapiens
HPISSGLEAM

SEQ ID NO: 88985 - protein, 10 aa, Homo Sapiens
HPIYPDPARL

SEQ ID NO: 88986 - protein, 10 aa, Homo Sapiens
HPNYLGDLIM

SEQ ID NO: 88987 - protein, 10 aa, Homo Sapiens
HPQPGSANSL

SEQ ID NO: 88988 - protein, 10 aa, Homo Sapiens
HPSDIEVDLL

SEQ ID NO: 88989 - protein, 10 aa, Homo Sapiens
HPVLLTEAPL

SEQ ID NO: 88990 - protein, 10 aa, Homo Sapiens
HPVPCEQPAL

SEQ ID NO: 88991 - protein, 10 aa, Homo Sapiens
HPVSDHEATL

SEQ ID NO: 88992 - protein, 10 aa, Homo Sapiens
HPYDSGHIAM

SEQ ID NO: 88993 - protein, 10 aa, Homo Sapiens
HPYRNSDPVI

SEQ ID NO: 88994 - protein, 10 aa, Homo Sapiens
IPAPAEKTPV

SEQ ID NO: 88995 - protein, 10 aa, Homo Sapiens
IPFDGDLLSM

SEQ ID NO: 88996 - protein, 10 aa, Homo Sapiens
IPLEEGELEL

SEQ ID NO: 88997 - protein, 10 aa, Homo Sapiens
IPSSVIHPAM

SEQ ID NO: 88998 - protein, 10 aa, Homo Sapiens
IPVEEHFQTL

SEQ ID NO: 88999 - protein, 10 aa, Homo Sapiens
IPYPKEELPL

SEQ ID NO: 89000 - protein, 10 aa, Homo Sapiens
LPAHIPYQEL

SEQ ID NO: 89001 - protein, 10 aa, Homo Sapiens
LPANVGGQIL

SEQ ID NO: 89002 - protein, 10 aa, Homo Sapiens
LPAPADFLSL

SEQ ID NO: 89003 - protein, 10 aa, Homo Sapiens
LPAPPHIDVM

SEQ ID NO: 89004 - protein, 10 aa, Homo Sapiens
LPEEEQQRVL

SEQ ID NO: 89005 - protein, 10 aa, Homo Sapiens
LPFAKEIVSL

SEQ ID NO: 89006 - protein, 10 aa, Homo Sapiens
LPIAEAPGKL

SEQ ID NO: 89007 - protein, 10 aa, Homo Sapiens
LPIDKEEVSL

SEQ ID NO: 89008 - protein, 10 aa, Homo Sapiens
LPIPRPGEVL

SEQ ID NO: 89009 - protein, 10 aa, Homo Sapiens
LPLEEGQAVL

SEQ ID NO: 89010 - protein, 10 aa, Homo Sapiens
LPLPAERVTL

SEQ ID NO: 89011 - protein, 10 aa, Homo Sapiens
LPSPSPRISL

SEQ ID NO: 89012 - protein, 10 aa, Homo Sapiens
LPSQDPEVAL

SEQ ID NO: 89013 - protein, 10 aa, Homo Sapiens
LPVNDEHVTV

SEQ ID NO: 89014 - protein, 10 aa, Homo Sapiens
LPYPKDVYSV

SEQ ID NO: 89015 - protein, 10 aa, Homo Sapiens
MPAEEREKKL

SEQ ID NO: 89016 - protein, 10 aa, Homo Sapiens
MPANGETVTL

SEQ ID NO: 89017 - protein, 10 aa, Homo Sapiens
MPAPHTSITM

SEQ ID NO: 89018 - protein, 10 aa, Homo Sapiens
MPCPVPPARM

SEQ ID NO: 89019 - protein, 10 aa, Homo Sapiens
MPDPLLTREL

SEQ ID NO: 89020 - protein, 10 aa, Homo Sapiens
MPEDVKNFYL

SEQ ID NO: 89021 - protein, 10 aa, Homo Sapiens
MPEEKLVEAL

SEQ ID NO: 89022 - protein, 10 aa, Homo Sapiens
MPEEQAFCVL

SEQ ID NO: 89023 - protein, 10 aa, Homo Sapiens
MPEQIVIHAL

SEQ ID NO: 89024 - protein, 10 aa, Homo Sapiens
MPEQIVVQAL

SEQ ID NO: 89025 - protein, 10 aa, Homo Sapiens
MPEQNPTHAL

SEQ ID NO: 89026 - protein, 10 aa, Homo Sapiens
MPETSHIVAL

SEQ ID NO: 89027 - protein, 10 aa, Homo Sapiens
MPFAPAIQTF

SEQ ID NO: 89028 - protein, 10 aa, Homo Sapiens
MPHEDCITAL

SEQ ID NO: 89029 - protein, 10 aa, Homo Sapiens
MPHSYPYVAL

SEQ ID NO: 89030 - protein, 10 aa, Homo Sapiens
MPIDQGFASL

SEQ ID NO: 89031 - protein, 10 aa, Homo Sapiens
MPIGGDVPAL

SEQ ID NO: 89032 - protein, 10 aa, Homo Sapiens
MPIKACADKL

SEQ ID NO: 89033 - protein, 10 aa, Homo Sapiens
MPLGSAVDIL

SEQ ID NO: 89034 - protein, 10 aa, Homo Sapiens
MPLPGVGEEL

SEQ ID NO: 89035 - protein, 10 aa, Homo Sapiens
MPNHSASIQL

SEQ ID NO: 89036 - protein, 10 aa, Homo Sapiens
MPQKERESIM

SEQ ID NO: 89037 - protein, 10 aa, Homo Sapiens
MPQSMPEYAL

SEQ ID NO: 89038 - protein, 10 aa, Homo Sapiens
MPSPAPEVPL

SEQ ID NO: 89039 - protein, 10 aa, Homo Sapiens
MPVDDVIGTL

SEQ ID NO: 89040 - protein, 10 aa, Homo Sapiens
MPVEVQTELL

SEQ ID NO: 89041 - protein, 10 aa, Homo Sapiens
MPVHMVPTEL

SEQ ID NO: 89042 - protein, 10 aa, Homo Sapiens
MPVSELTDKL

SEQ ID NO: 89043 - protein, 10 aa, Homo Sapiens
MPVSGPGLSL

SEQ ID NO: 89044 - protein, 10 aa, Homo Sapiens
MPVTKGDFEL

SEQ ID NO: 89045 - protein, 10 aa, Homo Sapiens
MPYDSNRVVL

SEQ ID NO: 89046 - protein, 10 aa, Homo Sapiens
MPYGSRENSL

SEQ ID NO: 89047 - protein, 10 aa, Homo Sapiens
NAAGVPKQSL

SEQ ID NO: 89048 - protein, 10 aa, Homo Sapiens
NAESGRGQVM

SEQ ID NO: 89049 - protein, 10 aa, Homo Sapiens
QIPELPDPSL

SEQ ID NO: 89050 - protein, 10 aa, Homo Sapiens
QPEGMISESL

SEQ ID NO: 89051 - protein, 10 aa, Homo Sapiens
SPMDDGFVSL

SEQ ID NO: 89052 - protein, 10 aa, Homo Sapiens
TANPFPVPSL

SEQ ID NO: 89053 - protein, 10 aa, Homo Sapiens
TPDPSANISL

SEQ ID NO: 89054 - protein, 10 aa, Homo Sapiens
TPFNTREPVM

SEQ ID NO: 89055 - protein, 10 aa, Homo Sapiens
TPLDEKSLAL

SEQ ID NO: 89056 - protein, 10 aa, Homo Sapiens
TPSDVKELVL

SEQ ID NO: 89057 - protein, 10 aa, Homo Sapiens
VPDPNKPQKL

SEQ ID NO: 89058 - protein, 10 aa, Homo Sapiens
VPTIYPLETL

SEQ ID NO: 89059 - protein, 10 aa, Homo Sapiens
YADPTKRLEL

SEQ ID NO: 89060 - protein, 10 aa, Homo Sapiens
YGPPGTGKTL

SEQ ID NO: 89061 - protein, 10 aa, Homo Sapiens
YPDEQTSRTL

SEQ ID NO: 89062 - protein, 10 aa, Homo Sapiens
YPDPSKQKPM

SEQ ID NO: 89063 - protein, 10 aa, Homo Sapiens
YPEEVSSMVL

SEQ ID NO: 89064 - protein, 10 aa, Homo Sapiens
YPEPSTSTTM

SEQ ID NO: 89065 - protein, 10 aa, Homo Sapiens
YPFESAEAQL

SEQ ID NO: 89066 - protein, 10 aa, Homo Sapiens
YPFIGDVHSL

SEQ ID NO: 89067 - protein, 10 aa, Homo Sapiens
YPFQDSEPVL

SEQ ID NO: 89068 - protein, 10 aa, Homo Sapiens
YPIALTRAEM

SEQ ID NO: 89069 - protein, 10 aa, Homo Sapiens
YPIDDVYTGM

SEQ ID NO: 89070 - protein, 10 aa, Homo Sapiens
YPLEEGSTSL

SEQ ID NO: 89071 - protein, 10 aa, Homo Sapiens
YPLPAVKVSM

SEQ ID NO: 89072 - protein, 10 aa, Homo Sapiens
YPNPYSKHVL

SEQ ID NO: 89073 - protein, 10 aa, Homo Sapiens
YPSPYPIRSL

SEQ ID NO: 89074 - protein, 10 aa, Homo Sapiens
YPVHAQMPSL

SEQ ID NO: 89075 - protein, 11 aa, Homo Sapiens
EPYKTNKGDEL

SEQ ID NO: 89076 - protein, 11 aa, Homo Sapiens
FAEDITTGQVL

SEQ ID NO: 89077 - protein, 11 aa, Homo Sapiens
FPADEASIQAL

SEQ ID NO: 89078 - protein, 11 aa, Homo Sapiens
FPDFKSAGVTL

SEQ ID NO: 89079 - protein, 11 aa, Homo Sapiens
FPDGLAHSDLM

SEQ ID NO: 89080 - protein, 11 aa, Homo Sapiens
FPEPNPRVIEL

SEQ ID NO: 89081 - protein, 11 aa, Homo Sapiens
FPFSDKEKNKL

SEQ ID NO: 89082 - protein, 11 aa, Homo Sapiens
FPHFDLSHGSA

SEQ ID NO: 89083 - protein, 11 aa, Homo Sapiens
FPIPAAEVDRL

SEQ ID NO: 89084 - protein, 11 aa, Homo Sapiens
FPIPGEPGFPL

SEQ ID NO: 89085 - protein, 11 aa, Homo Sapiens
FPISDDRNSSV

SEQ ID NO: 89086 - protein, 11 aa, Homo Sapiens
FPISEETIKLL

SEQ ID NO: 89087 - protein, 11 aa, Homo Sapiens
FPITQDREQLM

SEQ ID NO: 89088 - protein, 11 aa, Homo Sapiens
FPLQPEAQRAL

SEQ ID NO: 89089 - protein, 11 aa, Homo Sapiens
FPNAIEHTLQW

SEQ ID NO: 89090 - protein, 11 aa, Homo Sapiens
FPNIVIKGSEL

SEQ ID NO: 89091 - protein, 11 aa, Homo Sapiens
FPSVPMKEEVL

SEQ ID NO: 89092 - protein, 11 aa, Homo Sapiens
FPSYVDKNLEL

SEQ ID NO: 89093 - protein, 11 aa, Homo Sapiens
FPVREDVLNSL

SEQ ID NO: 89094 - protein, 11 aa, Homo Sapiens
HAVAEGAKNVL

SEQ ID NO: 89095 - protein, 11 aa, Homo Sapiens
HPAPLCTIRTL

SEQ ID NO: 89096 - protein, 11 aa, Homo Sapiens
HPCFWIDGQYL

SEQ ID NO: 89097 - protein, 11 aa, Homo Sapiens
HPDTGISSKAM

SEQ ID NO: 89098 - protein, 11 aa, Homo Sapiens
HPEGSLPDLTM

SEQ ID NO: 89099 - protein, 11 aa, Homo Sapiens
HPETIVLDPLP

SEQ ID NO: 89100 - protein, 11 aa, Homo Sapiens
HPISSEELLSL

SEQ ID NO: 89101 - protein, 11 aa, Homo Sapiens
HPLCEGSSATL

SEQ ID NO: 89102 - protein, 11 aa, Homo Sapiens
HPQIEPANQEL

SEQ ID NO: 89103 - protein, 11 aa, Homo Sapiens
IPEEILGKITL

SEQ ID NO: 89104 - protein, 11 aa, Homo Sapiens
IPIALSGRDIL

SEQ ID NO: 89105 - protein, 11 aa, Homo Sapiens
IPIPSTGSVEM

SEQ ID NO: 89106 - protein, 11 aa, Homo Sapiens
IPNPQERTLTL

SEQ ID NO: 89107 - protein, 11 aa, Homo Sapiens
IPYHSEVPVSL

SEQ ID NO: 89108 - protein, 11 aa, Homo Sapiens
KKDVDNAYMIK

SEQ ID NO: 89109 - protein, 11 aa, Homo Sapiens
LPAAGVGDMVM

SEQ ID NO: 89110 - protein, 11 aa, Homo Sapiens
LPAPALEYETL

SEQ ID NO: 89111 - protein, 11 aa, Homo Sapiens
LPDGTSLTQTF

SEQ ID NO: 89112 - protein, 11 aa, Homo Sapiens
LPEDEGHTRTL

SEQ ID NO: 89113 - protein, 11 aa, Homo Sapiens
LPFFTEREQTL

SEQ ID NO: 89114 - protein, 11 aa, Homo Sapiens
LPFSGPREPSL

SEQ ID NO: 89115 - protein, 11 aa, Homo Sapiens
LPFYESSPQVL

SEQ ID NO: 89116 - protein, 11 aa, Homo Sapiens
LPIDESNTIHL

SEQ ID NO: 89117 - protein, 11 aa, Homo Sapiens
LPIEDRETIIM

SEQ ID NO: 89118 - protein, 11 aa, Homo Sapiens
LPIGDSASNLL

SEQ ID NO: 89119 - protein, 11 aa, Homo Sapiens
LPLDDGAAHVM

SEQ ID NO: 89120 - protein, 11 aa, Homo Sapiens
LPLWVDKEASL

SEQ ID NO: 89121 - protein, 11 aa, Homo Sapiens
LPQLTGAENVL

SEQ ID NO: 89122 - protein, 11 aa, Homo Sapiens
LPSFDAHLTEL

SEQ ID NO: 89123 - protein, 11 aa, Homo Sapiens
LPYDVTPEQAL

SEQ ID NO: 89124 - protein, 11 aa, Homo Sapiens
MPAPEEIVEEL

SEQ ID NO: 89125 - protein, 11 aa, Homo Sapiens
MPAPSDQSETL

SEQ ID NO: 89126 - protein, 11 aa, Homo Sapiens
MPCSEEPAHGL

SEQ ID NO: 89127 - protein, 11 aa, Homo Sapiens
MPDGQFKDISL

SEQ ID NO: 89128 - protein, 11 aa, Homo Sapiens
MPEEESAKVCL

SEQ ID NO: 89129 - protein, 11 aa, Homo Sapiens
MPEGGQGAPPM

SEQ ID NO: 89130 - protein, 11 aa, Homo Sapiens
MPEPASRCLLL

SEQ ID NO: 89131 - protein, 11 aa, Homo Sapiens
MPFEDDNRTRL

SEQ ID NO: 89132 - protein, 11 aa, Homo Sapiens
MPFQDGKPFNL

SEQ ID NO: 89133 - protein, 11 aa, Homo Sapiens
MPGTTDTIQVL

SEQ ID NO: 89134 - protein, 11 aa, Homo Sapiens
MPIREGDTVTL

SEQ ID NO: 89135 - protein, 11 aa, Homo Sapiens
MPISSHVDLGL

SEQ ID NO: 89136 - protein, 11 aa, Homo Sapiens
MPMGSLEHEGL

SEQ ID NO: 89137 - protein, 11 aa, Homo Sapiens
MPSPIMHPLIL

SEQ ID NO: 89138 - protein, 11 aa, Homo Sapiens
MPVGLIAGASL

SEQ ID NO: 89139 - protein, 11 aa, Homo Sapiens
NALQESANSIL

SEQ ID NO: 89140 - protein, 11 aa, Homo Sapiens
QPIPILYEHQL

SEQ ID NO: 89141 - protein, 11 aa, Homo Sapiens
QPIRENDDQVL

SEQ ID NO: 89142 - protein, 11 aa, Homo Sapiens
TPIEGMLSHQL

SEQ ID NO: 89143 - protein, 11 aa, Homo Sapiens
TPLDEKSLALL

SEQ ID NO: 89144 - protein, 11 aa, Homo Sapiens
VPDSSGPERIL

SEQ ID NO: 89145 - protein, 11 aa, Homo Sapiens
VPLDEKLLPQL

SEQ ID NO: 89146 - protein, 11 aa, Homo Sapiens
YALEEHENQRL

SEQ ID NO: 89147 - protein, 11 aa, Homo Sapiens
YPDPNYLQNVL

SEQ ID NO: 89148 - protein, 11 aa, Homo Sapiens
YPETLGRLLIL

SEQ ID NO: 89149 - protein, 11 aa, Homo Sapiens
YPFESAEAQLL

SEQ ID NO: 89150 - protein, 11 aa, Homo Sapiens
YPFSSSNDEEL

SEQ ID NO: 89151 - protein, 11 aa, Homo Sapiens
YPFTGDHKQKF

SEQ ID NO: 89152 - protein, 11 aa, Homo Sapiens
YPLEDATHIAL

SEQ ID NO: 89153 - protein, 11 aa, Homo Sapiens
YPLPEHRSTAL

SEQ ID NO: 89154 - protein, 11 aa, Homo Sapiens
YPLQDPKNLIL

SEQ ID NO: 89155 - protein, 11 aa, Homo Sapiens
YPYDGIHPDDL

SEQ ID NO: 89156 - protein, 11 aa, Homo Sapiens
YPYPYPHTLYL

SEQ ID NO: 89157 - protein, 11 aa, Homo Sapiens
YPYTPRKEDEL

SEQ ID NO: 89158 - protein, 8 aa, Homo Sapiens
DAFKASVY

SEQ ID NO: 89159 - protein, 8 aa, Homo Sapiens
DALVITHY

SEQ ID NO: 89160 - protein, 8 aa, Homo Sapiens
DAVVSQVL

SEQ ID NO: 89161 - protein, 8 aa, Homo Sapiens
DSHLPMLL

SEQ ID NO: 89162 - protein, 8 aa, Homo Sapiens
EALKSHIM

SEQ ID NO: 89163 - protein, 8 aa, Homo Sapiens
EVPKKLKY

SEQ ID NO: 89164 - protein, 8 aa, Homo Sapiens
FALVSQAY

SEQ ID NO: 89165 - protein, 8 aa, Homo Sapiens
FPAEPLEL

SEQ ID NO: 89166 - protein, 8 aa, Homo Sapiens
FPGIKLIY

SEQ ID NO: 89167 - protein, 8 aa, Homo Sapiens
FPGPIFHL

SEQ ID NO: 89168 - protein, 8 aa, Homo Sapiens
FPGPLQAF

SEQ ID NO: 89169 - protein, 8 aa, Homo Sapiens
FPGPSKPF

SEQ ID NO: 89170 - protein, 8 aa, Homo Sapiens
FPHESARL

SEQ ID NO: 89171 - protein, 8 aa, Homo Sapiens
FPHTTPSM

SEQ ID NO: 89172 - protein, 8 aa, Homo Sapiens
FPLKVFGY

SEQ ID NO: 89173 - protein, 8 aa, Homo Sapiens
FPLLATAY

SEQ ID NO: 89174 - protein, 8 aa, Homo Sapiens
FPMEIRQY

SEQ ID NO: 89175 - protein, 8 aa, Homo Sapiens
FPQPAAVY

SEQ ID NO: 89176 - protein, 8 aa, Homo Sapiens
FPTISLEF

SEQ ID NO: 89177 - protein, 8 aa, Homo Sapiens
FPVCLLAS

SEQ ID NO: 89178 - protein, 8 aa, Homo Sapiens
HPGLILKY

SEQ ID NO: 89179 - protein, 8 aa, Homo Sapiens
HPITSIEY

SEQ ID NO: 89180 - protein, 8 aa, Homo Sapiens
HPVQHISF

SEQ ID NO: 89181 - protein, 8 aa, Homo Sapiens
IPAESYTF

SEQ ID NO: 89182 - protein, 8 aa, Homo Sapiens
IPALAVEM

SEQ ID NO: 89183 - protein, 8 aa, Homo Sapiens
IPCVSHVW

SEQ ID NO: 89184 - protein, 8 aa, Homo Sapiens
IPHEAFVY

SEQ ID NO: 89185 - protein, 8 aa, Homo Sapiens
IPHESQVY

SEQ ID NO: 89186 - protein, 8 aa, Homo Sapiens
IPVHPHVY

SEQ ID NO: 89187 - protein, 8 aa, Homo Sapiens
LEEYAATL

SEQ ID NO: 89188 - protein, 8 aa, Homo Sapiens
LPAETMRI

SEQ ID NO: 89189 - protein, 8 aa, Homo Sapiens
LPAVSWKM

SEQ ID NO: 89190 - protein, 8 aa, Homo Sapiens
LPGEVLEY

SEQ ID NO: 89191 - protein, 8 aa, Homo Sapiens
LPGVAVSM

SEQ ID NO: 89192 - protein, 8 aa, Homo Sapiens
LPHEILEM

SEQ ID NO: 89193 - protein, 8 aa, Homo Sapiens
LPHQPLAT

SEQ ID NO: 89194 - protein, 8 aa, Homo Sapiens
LPIVTPAL

SEQ ID NO: 89195 - protein, 8 aa, Homo Sapiens
LPLISVAL

SEQ ID NO: 89196 - protein, 8 aa, Homo Sapiens
LPMESAIL

SEQ ID NO: 89197 - protein, 8 aa, Homo Sapiens
LPRTDYSF

SEQ ID NO: 89198 - protein, 8 aa, Homo Sapiens
LPVASSVM

SEQ ID NO: 89199 - protein, 8 aa, Homo Sapiens
LPWKAFTY

SEQ ID NO: 89200 - protein, 8 aa, Homo Sapiens
LQEVCVLY

SEQ ID NO: 89201 - protein, 8 aa, Homo Sapiens
MPDLAHVM

SEQ ID NO: 89202 - protein, 8 aa, Homo Sapiens
MPDLPHLL

SEQ ID NO: 89203 - protein, 8 aa, Homo Sapiens
MPDSAAAL

SEQ ID NO: 89204 - protein, 8 aa, Homo Sapiens
MPIHSDIL

SEQ ID NO: 89205 - protein, 8 aa, Homo Sapiens
MPKVHIEF

SEQ ID NO: 89206 - protein, 8 aa, Homo Sapiens
MPLTVDEY

SEQ ID NO: 89207 - protein, 8 aa, Homo Sapiens
MPSGAYVY

SEQ ID NO: 89208 - protein, 8 aa, Homo Sapiens
MPTVHYEF

SEQ ID NO: 89209 - protein, 8 aa, Homo Sapiens
MVGKTFTY

SEQ ID NO: 89210 - protein, 8 aa, Homo Sapiens
PHADTIIY

SEQ ID NO: 89211 - protein, 8 aa, Homo Sapiens
TPHVAPVM

SEQ ID NO: 89212 - protein, 8 aa, Homo Sapiens
TPMEVAVY

SEQ ID NO: 89213 - protein, 8 aa, Homo Sapiens
VHFPMVVY

SEQ ID NO: 89214 - protein, 8 aa, Homo Sapiens
VPAESHIY

SEQ ID NO: 89215 - protein, 8 aa, Homo Sapiens
VPGPAAAL

SEQ ID NO: 89216 - protein, 8 aa, Homo Sapiens
VPYRIFPY

SEQ ID NO: 89217 - protein, 8 aa, Homo Sapiens
YALQVHCY

SEQ ID NO: 89218 - protein, 8 aa, Homo Sapiens
YPGPAVVL

SEQ ID NO: 89219 - protein, 8 aa, Homo Sapiens
YPVEIHEY

SEQ ID NO: 89220 - protein, 9 aa, Homo Sapiens
AAAPAIMSY

SEQ ID NO: 89221 - protein, 9 aa, Homo Sapiens
AAAPVIKAY

SEQ ID NO: 89222 - protein, 9 aa, Homo Sapiens
AANPHSFVF

SEQ ID NO: 89223 - protein, 9 aa, Homo Sapiens
AMNPTNTVF

SEQ ID NO: 89224 - protein, 9 aa, Homo Sapiens
APAPIHNQF

SEQ ID NO: 89225 - protein, 9 aa, Homo Sapiens
APAPPASQY

SEQ ID NO: 89226 - protein, 9 aa, Homo Sapiens
APAPTAVVL

SEQ ID NO: 89227 - protein, 9 aa, Homo Sapiens
APAPVQPPM

SEQ ID NO: 89228 - protein, 9 aa, Homo Sapiens
APARPQPAY

SEQ ID NO: 89229 - protein, 9 aa, Homo Sapiens
APATSILEY

SEQ ID NO: 89230 - protein, 9 aa, Homo Sapiens
APFEEQENY

SEQ ID NO: 89231 - protein, 9 aa, Homo Sapiens
APFGEKEAY

SEQ ID NO: 89232 - protein, 9 aa, Homo Sapiens
APFGMEAEY

SEQ ID NO: 89233 - protein, 9 aa, Homo Sapiens
APFGNFPHY

SEQ ID NO: 89234 - protein, 9 aa, Homo Sapiens
APFRSEVCF

SEQ ID NO: 89235 - protein, 9 aa, Homo Sapiens
APFSKVITF

SEQ ID NO: 89236 - protein, 9 aa, Homo Sapiens
APFTEGISF

SEQ ID NO: 89237 - protein, 9 aa, Homo Sapiens
APHAPGPPA

SEQ ID NO: 89238 - protein, 9 aa, Homo Sapiens
APIASIHSF

SEQ ID NO: 89239 - protein, 9 aa, Homo Sapiens
APIQVFSTY

SEQ ID NO: 89240 - protein, 9 aa, Homo Sapiens
APLKSKMIY

SEQ ID NO: 89241 - protein, 9 aa, Homo Sapiens
APTDCVSSF

SEQ ID NO: 89242 - protein, 9 aa, Homo Sapiens
APVALVVHM

SEQ ID NO: 89243 - protein, 9 aa, Homo Sapiens
APVEVTHNF

SEQ ID NO: 89244 - protein, 9 aa, Homo Sapiens
APVPLYNSF

SEQ ID NO: 89245 - protein, 9 aa, Homo Sapiens
APVPTGEVY

SEQ ID NO: 89246 - protein, 9 aa, Homo Sapiens
APVQILQEY

SEQ ID NO: 89247 - protein, 9 aa, Homo Sapiens
APWEVLVTY

SEQ ID NO: 89248 - protein, 9 aa, Homo Sapiens
AQNAVRLHY

SEQ ID NO: 89249 - protein, 9 aa, Homo Sapiens
ATADTVIIY

SEQ ID NO: 89250 - protein, 9 aa, Homo Sapiens
ATAQPPAPL

SEQ ID NO: 89251 - protein, 9 aa, Homo Sapiens
AVHDITVAY

SEQ ID NO: 89252 - protein, 9 aa, Homo Sapiens
AVIAPKSSY

SEQ ID NO: 89253 - protein, 9 aa, Homo Sapiens
AVNALQSVY

SEQ ID NO: 89254 - protein, 9 aa, Homo Sapiens
AVSAVVHEY

SEQ ID NO: 89255 - protein, 9 aa, Homo Sapiens
CADPVYKVY

SEQ ID NO: 89256 - protein, 9 aa, Homo Sapiens
CAHFGAYVY

SEQ ID NO: 89257 - protein, 9 aa, Homo Sapiens
CPAGIFQAM

SEQ ID NO: 89258 - protein, 9 aa, Homo Sapiens
CPATAVIIY

SEQ ID NO: 89259 - protein, 9 aa, Homo Sapiens
CPFGENAEF

SEQ ID NO: 89260 - protein, 9 aa, Homo Sapiens
CPFQGTVAF

SEQ ID NO: 89261 - protein, 9 aa, Homo Sapiens
CPHTIGVEF

SEQ ID NO: 89262 - protein, 9 aa, Homo Sapiens
CPLEEFSVY

SEQ ID NO: 89263 - protein, 9 aa, Homo Sapiens
CPLMAAVTY

SEQ ID NO: 89264 - protein, 9 aa, Homo Sapiens
CPNSKAPVL

SEQ ID NO: 89265 - protein, 9 aa, Homo Sapiens
CPTDKTMEF

SEQ ID NO: 89266 - protein, 9 aa, Homo Sapiens
CPYHYVEVM

SEQ ID NO: 89267 - protein, 9 aa, Homo Sapiens
CPYIEFESF

SEQ ID NO: 89268 - protein, 9 aa, Homo Sapiens
CVAPTIHVY

SEQ ID NO: 89269 - protein, 9 aa, Homo Sapiens
DAADIRFVY

SEQ ID NO: 89270 - protein, 9 aa, Homo Sapiens
DAARLQAAY

SEQ ID NO: 89271 - protein, 9 aa, Homo Sapiens
DACRYLQTY

SEQ ID NO: 89272 - protein, 9 aa, Homo Sapiens
DAFEFHEAF

SEQ ID NO: 89273 - protein, 9 aa, Homo Sapiens
DAFNQIMGY

SEQ ID NO: 89274 - protein, 9 aa, Homo Sapiens
DAFPLAFDY

SEQ ID NO: 89275 - protein, 9 aa, Homo Sapiens
DAFPLLSAY

SEQ ID NO: 89276 - protein, 9 aa, Homo Sapiens
DAGPPTHAF

SEQ ID NO: 89277 - protein, 9 aa, Homo Sapiens
DAHPTLVTY

SEQ ID NO: 89278 - protein, 9 aa, Homo Sapiens
DAIRLAVSY

SEQ ID NO: 89279 - protein, 9 aa, Homo Sapiens
DAIRLFAAY

SEQ ID NO: 89280 - protein, 9 aa, Homo Sapiens
DAISKTYSY

SEQ ID NO: 89281 - protein, 9 aa, Homo Sapiens
DALGHFFQY

SEQ ID NO: 89282 - protein, 9 aa, Homo Sapiens
DAMDISCAY

SEQ ID NO: 89283 - protein, 9 aa, Homo Sapiens
DASKVVTVF

SEQ ID NO: 89284 - protein, 9 aa, Homo Sapiens
DASPVQAVF

SEQ ID NO: 89285 - protein, 9 aa, Homo Sapiens
DAWIEHDVW

SEQ ID NO: 89286 - protein, 9 aa, Homo Sapiens
DAYPEIEKF

SEQ ID NO: 89287 - protein, 9 aa, Homo Sapiens
DAYTHLETF

SEQ ID NO: 89288 - protein, 9 aa, Homo Sapiens
DLWLEREVF

SEQ ID NO: 89289 - protein, 9 aa, Homo Sapiens
DPFIDLNYM

SEQ ID NO: 89290 - protein, 9 aa, Homo Sapiens
DPFKDIILY

SEQ ID NO: 89291 - protein, 9 aa, Homo Sapiens
DPFPDHVVF

SEQ ID NO: 89292 - protein, 9 aa, Homo Sapiens
DPFRDLHSL

SEQ ID NO: 89293 - protein, 9 aa, Homo Sapiens
DPFVDRIGY

SEQ ID NO: 89294 - protein, 9 aa, Homo Sapiens
DPFVGSDPF

SEQ ID NO: 89295 - protein, 9 aa, Homo Sapiens
DPHQQIYTF

SEQ ID NO: 89296 - protein, 9 aa, Homo Sapiens
DPHTVTVSM

SEQ ID NO: 89297 - protein, 9 aa, Homo Sapiens
DPNLEFVAM

SEQ ID NO: 89298 - protein, 9 aa, Homo Sapiens
DPVEPHGEM

SEQ ID NO: 89299 - protein, 9 aa, Homo Sapiens
DPWIGKLLY

SEQ ID NO: 89300 - protein, 9 aa, Homo Sapiens
DPYCFVEFY

SEQ ID NO: 89301 - protein, 9 aa, Homo Sapiens
DSNGAILVY

SEQ ID NO: 89302 - protein, 9 aa, Homo Sapiens
DVSPVVSTY

SEQ ID NO: 89303 - protein, 9 aa, Homo Sapiens
EAAPHDIGY

SEQ ID NO: 89304 - protein, 9 aa, Homo Sapiens
EAAPPGELY

SEQ ID NO: 89305 - protein, 9 aa, Homo Sapiens
EAASVPVVY

SEQ ID NO: 89306 - protein, 9 aa, Homo Sapiens
EAAVAIKAM

SEQ ID NO: 89307 - protein, 9 aa, Homo Sapiens
EAFLDVGEY

SEQ ID NO: 89308 - protein, 9 aa, Homo Sapiens
EAFLNNQEY

SEQ ID NO: 89309 - protein, 9 aa, Homo Sapiens
EAFRGVHRY

SEQ ID NO: 89310 - protein, 9 aa, Homo Sapiens
EAFSPVYKY

SEQ ID NO: 89311 - protein, 9 aa, Homo Sapiens
EAIGAVIHY

SEQ ID NO: 89312 - protein, 9 aa, Homo Sapiens
EALDHMVEY

SEQ ID NO: 89313 - protein, 9 aa, Homo Sapiens
EALSLAHTY

SEQ ID NO: 89314 - protein, 9 aa, Homo Sapiens
EANAIALKY

SEQ ID NO: 89315 - protein, 9 aa, Homo Sapiens
EAQPIVTKY

SEQ ID NO: 89316 - protein, 9 aa, Homo Sapiens
EASAVTVRF

SEQ ID NO: 89317 - protein, 9 aa, Homo Sapiens
EAVDVTPVM

SEQ ID NO: 89318 - protein, 9 aa, Homo Sapiens
EAVKPTVGM

SEQ ID NO: 89319 - protein, 9 aa, Homo Sapiens
EAVKQYSSY

SEQ ID NO: 89320 - protein, 9 aa, Homo Sapiens
EAYIDPIAM

SEQ ID NO: 89321 - protein, 9 aa, Homo Sapiens
EAYNAVVRY

SEQ ID NO: 89322 - protein, 9 aa, Homo Sapiens
EAYPDHTQF

SEQ ID NO: 89323 - protein, 9 aa, Homo Sapiens
EAYTDHATY

SEQ ID NO: 89324 - protein, 9 aa, Homo Sapiens
EPCPSNYKY

SEQ ID NO: 89325 - protein, 9 aa, Homo Sapiens
EPFHLIVSY

SEQ ID NO: 89326 - protein, 9 aa, Homo Sapiens
EPFLFVDEF

SEQ ID NO: 89327 - protein, 9 aa, Homo Sapiens
EPFNFQMVY

SEQ ID NO: 89328 - protein, 9 aa, Homo Sapiens
EPFQDGYSL

SEQ ID NO: 89329 - protein, 9 aa, Homo Sapiens
EPIYIITEY

SEQ ID NO: 89330 - protein, 9 aa, Homo Sapiens
EPIYIVTEY

SEQ ID NO: 89331 - protein, 9 aa, Homo Sapiens
EPNPDDPLM

SEQ ID NO: 89332 - protein, 9 aa, Homo Sapiens
EPNSYAISF

SEQ ID NO: 89333 - protein, 9 aa, Homo Sapiens
EPSFITESY

SEQ ID NO: 89334 - protein, 9 aa, Homo Sapiens
EPTAAAIAY

SEQ ID NO: 89335 - protein, 9 aa, Homo Sapiens
EPVDISTAM

SEQ ID NO: 89336 - protein, 9 aa, Homo Sapiens
EPVELAQEF

SEQ ID NO: 89337 - protein, 9 aa, Homo Sapiens
ESSSVVLRY

SEQ ID NO: 89338 - protein, 9 aa, Homo Sapiens
EVFPLAMNY

SEQ ID NO: 89339 - protein, 9 aa, Homo Sapiens
EVIPYTPAM

SEQ ID NO: 89340 - protein, 9 aa, Homo Sapiens
EVLGILRYI

SEQ ID NO: 89341 - protein, 9 aa, Homo Sapiens
EVYAGSHQY

SEQ ID NO: 89342 - protein, 9 aa, Homo Sapiens
FAADIISVL

SEQ ID NO: 89343 - protein, 9 aa, Homo Sapiens
FAAHLRCTY

SEQ ID NO: 89344 - protein, 9 aa, Homo Sapiens
FAANVYEAF

SEQ ID NO: 89345 - protein, 9 aa, Homo Sapiens
FADGFVLVY

SEQ ID NO: 89346 - protein, 9 aa, Homo Sapiens
FADPHGKVF

SEQ ID NO: 89347 - protein, 9 aa, Homo Sapiens
FAEMIQPEY

SEQ ID NO: 89348 - protein, 9 aa, Homo Sapiens
FAFDPSVNY

SEQ ID NO: 89349 - protein, 9 aa, Homo Sapiens
FAFEHSEEY

SEQ ID NO: 89350 - protein, 9 aa, Homo Sapiens
FAFQEDDSF

SEQ ID NO: 89351 - protein, 9 aa, Homo Sapiens
FAHDDSVMY

SEQ ID NO: 89352 - protein, 9 aa, Homo Sapiens
FANIDQETY

SEQ ID NO: 89353 - protein, 9 aa, Homo Sapiens
FANVEEHSF

SEQ ID NO: 89354 - protein, 9 aa, Homo Sapiens
FAQPGSFEY

SEQ ID NO: 89355 - protein, 9 aa, Homo Sapiens
FASHVSPEV

SEQ ID NO: 89356 - protein, 9 aa, Homo Sapiens
FAYKDYLSF

SEQ ID NO: 89357 - protein, 9 aa, Homo Sapiens
FLWCEVEKY

SEQ ID NO: 89358 - protein, 9 aa, Homo Sapiens
FPAAPAPKM

SEQ ID NO: 89359 - protein, 9 aa, Homo Sapiens
FPAAPIPTL

SEQ ID NO: 89360 - protein, 9 aa, Homo Sapiens
FPAEKESEW

SEQ ID NO: 89361 - protein, 9 aa, Homo Sapiens
FPAELGIVF

SEQ ID NO: 89362 - protein, 9 aa, Homo Sapiens
FPAEQYYRF

SEQ ID NO: 89363 - protein, 9 aa, Homo Sapiens
FPAGIVRVF

SEQ ID NO: 89364 - protein, 9 aa, Homo Sapiens
FPAGKVPAF

SEQ ID NO: 89365 - protein, 9 aa, Homo Sapiens
FPAHILDCL

SEQ ID NO: 89366 - protein, 9 aa, Homo Sapiens
FPAKVTAHW

SEQ ID NO: 89367 - protein, 9 aa, Homo Sapiens
FPALAPLTY

SEQ ID NO: 89368 - protein, 9 aa, Homo Sapiens
FPALPGSSY

SEQ ID NO: 89369 - protein, 9 aa, Homo Sapiens
FPANIQVVY

SEQ ID NO: 89370 - protein, 9 aa, Homo Sapiens
FPANNIVKF

SEQ ID NO: 89371 - protein, 9 aa, Homo Sapiens
FPASPPKGY

SEQ ID NO: 89372 - protein, 9 aa, Homo Sapiens
FPASSGVSH

SEQ ID NO: 89373 - protein, 9 aa, Homo Sapiens
FPASVHDSL

SEQ ID NO: 89374 - protein, 9 aa, Homo Sapiens
FPATPLLDY

SEQ ID NO: 89375 - protein, 9 aa, Homo Sapiens
FPDETHERY

SEQ ID NO: 89376 - protein, 9 aa, Homo Sapiens
FPDHSLLAI

SEQ ID NO: 89377 - protein, 9 aa, Homo Sapiens
FPDKPITQY

SEQ ID NO: 89378 - protein, 9 aa, Homo Sapiens
FPDQNFEVM

SEQ ID NO: 89379 - protein, 9 aa, Homo Sapiens
FPEEDKKTY

SEQ ID NO: 89380 - protein, 9 aa, Homo Sapiens
FPEELTQTF

SEQ ID NO: 89381 - protein, 9 aa, Homo Sapiens
FPEEVIATI

SEQ ID NO: 89382 - protein, 9 aa, Homo Sapiens
FPEGLFYEF

SEQ ID NO: 89383 - protein, 9 aa, Homo Sapiens
FPEGSVELY

SEQ ID NO: 89384 - protein, 9 aa, Homo Sapiens
FPEHIFPAL

SEQ ID NO: 89385 - protein, 9 aa, Homo Sapiens
FPEIDLEKY

SEQ ID NO: 89386 - protein, 9 aa, Homo Sapiens
FPEIHVAQY

SEQ ID NO: 89387 - protein, 9 aa, Homo Sapiens
FPEIVAPLL

SEQ ID NO: 89388 - protein, 9 aa, Homo Sapiens
FPEPEHSSF

SEQ ID NO: 89389 - protein, 9 aa, Homo Sapiens
FPEPNPRVI

SEQ ID NO: 89390 - protein, 9 aa, Homo Sapiens
FPESCNHVF

SEQ ID NO: 89391 - protein, 9 aa, Homo Sapiens
FPETKAEKY

SEQ ID NO: 89392 - protein, 9 aa, Homo Sapiens
FPFAVANQL

SEQ ID NO: 89393 - protein, 9 aa, Homo Sapiens
FPFDVAVKF

SEQ ID NO: 89394 - protein, 9 aa, Homo Sapiens
FPFEDITQH

SEQ ID NO: 89395 - protein, 9 aa, Homo Sapiens
FPFEQQSEF

SEQ ID NO: 89396 - protein, 9 aa, Homo Sapiens
FPFFDIAHY

SEQ ID NO: 89397 - protein, 9 aa, Homo Sapiens
FPFHSAPAL

SEQ ID NO: 89398 - protein, 9 aa, Homo Sapiens
FPFKPPSIY

SEQ ID NO: 89399 - protein, 9 aa, Homo Sapiens
FPFLDENVV

SEQ ID NO: 89400 - protein, 9 aa, Homo Sapiens
FPGACGLRY

SEQ ID NO: 89401 - protein, 9 aa, Homo Sapiens
FPGPFEEEM

SEQ ID NO: 89402 - protein, 9 aa, Homo Sapiens
FPHDNVEDL

SEQ ID NO: 89403 - protein, 9 aa, Homo Sapiens
FPHGDLTEF

SEQ ID NO: 89404 - protein, 9 aa, Homo Sapiens
FPHHEFVAL

SEQ ID NO: 89405 - protein, 9 aa, Homo Sapiens
FPHLLQPVL

SEQ ID NO: 89406 - protein, 9 aa, Homo Sapiens
FPHLQQPSF

SEQ ID NO: 89407 - protein, 9 aa, Homo Sapiens
FPHPHIHEY

SEQ ID NO: 89408 - protein, 9 aa, Homo Sapiens
FPHRQPLRY

SEQ ID NO: 89409 - protein, 9 aa, Homo Sapiens
FPHSAHQKY

SEQ ID NO: 89410 - protein, 9 aa, Homo Sapiens
FPHSMEPQL

SEQ ID NO: 89411 - protein, 9 aa, Homo Sapiens
FPHVPHPSM

SEQ ID NO: 89412 - protein, 9 aa, Homo Sapiens
FPHVQTDVL

SEQ ID NO: 89413 - protein, 9 aa, Homo Sapiens
FPHYGFPTY

SEQ ID NO: 89414 - protein, 9 aa, Homo Sapiens
FPIDKPPSF

SEQ ID NO: 89415 - protein, 9 aa, Homo Sapiens
FPIEVRHYL

SEQ ID NO: 89416 - protein, 9 aa, Homo Sapiens
FPIEYHDIW

SEQ ID NO: 89417 - protein, 9 aa, Homo Sapiens
FPIHLTDQL

SEQ ID NO: 89418 - protein, 9 aa, Homo Sapiens
FPIHVQTSL

SEQ ID NO: 89419 - protein, 9 aa, Homo Sapiens
FPIPDLQKY

SEQ ID NO: 89420 - protein, 9 aa, Homo Sapiens
FPIPGEPGF

SEQ ID NO: 89421 - protein, 9 aa, Homo Sapiens
FPIPLINRL

SEQ ID NO: 89422 - protein, 9 aa, Homo Sapiens
FPITDVLQM

SEQ ID NO: 89423 - protein, 9 aa, Homo Sapiens
FPLDKAVAY

SEQ ID NO: 89424 - protein, 9 aa, Homo Sapiens
FPLEAITAF

SEQ ID NO: 89425 - protein, 9 aa, Homo Sapiens
FPLHLPLEL

SEQ ID NO: 89426 - protein, 9 aa, Homo Sapiens
FPLIPQEAF

SEQ ID NO: 89427 - protein, 9 aa, Homo Sapiens
FPLMTIEEF

SEQ ID NO: 89428 - protein, 9 aa, Homo Sapiens
FPLPGLPDF

SEQ ID NO: 89429 - protein, 9 aa, Homo Sapiens
FPLSHLDAL

SEQ ID NO: 89430 - protein, 9 aa, Homo Sapiens
FPMEIRQYL

SEQ ID NO: 89431 - protein, 9 aa, Homo Sapiens
FPMTMDEKY

SEQ ID NO: 89432 - protein, 9 aa, Homo Sapiens
FPNAIEHTL

SEQ ID NO: 89433 - protein, 9 aa, Homo Sapiens
FPNDPHVQY

SEQ ID NO: 89434 - protein, 9 aa, Homo Sapiens
FPNEFIVET

SEQ ID NO: 89435 - protein, 9 aa, Homo Sapiens
FPNENQVVF

SEQ ID NO: 89436 - protein, 9 aa, Homo Sapiens
FPNIGVEKF

SEQ ID NO: 89437 - protein, 9 aa, Homo Sapiens
FPNIPGKSL

SEQ ID NO: 89438 - protein, 9 aa, Homo Sapiens
FPNKQGYVL

SEQ ID NO: 89439 - protein, 9 aa, Homo Sapiens
FPNVSSFEW

SEQ ID NO: 89440 - protein, 9 aa, Homo Sapiens
FPPREIVTY

SEQ ID NO: 89441 - protein, 9 aa, Homo Sapiens
FPQEGMHQM

SEQ ID NO: 89442 - protein, 9 aa, Homo Sapiens
FPQIEINKM

SEQ ID NO: 89443 - protein, 9 aa, Homo Sapiens
FPQIGQIQY

SEQ ID NO: 89444 - protein, 9 aa, Homo Sapiens
FPQKPIQRY

SEQ ID NO: 89445 - protein, 9 aa, Homo Sapiens
FPQLDSTSF

SEQ ID NO: 89446 - protein, 9 aa, Homo Sapiens
FPQPEKESF

SEQ ID NO: 89447 - protein, 9 aa, Homo Sapiens
FPQTALVSF

SEQ ID NO: 89448 - protein, 9 aa, Homo Sapiens
FPRDPEIEM

SEQ ID NO: 89449 - protein, 9 aa, Homo Sapiens
FPRHIEPEL

SEQ ID NO: 89450 - protein, 9 aa, Homo Sapiens
FPSAKDPTW

SEQ ID NO: 89451 - protein, 9 aa, Homo Sapiens
FPSGETIVM

SEQ ID NO: 89452 - protein, 9 aa, Homo Sapiens
FPSGSVHSF

SEQ ID NO: 89453 - protein, 9 aa, Homo Sapiens
FPSIYDVKY

SEQ ID NO: 89454 - protein, 9 aa, Homo Sapiens
FPSNFIKEL

SEQ ID NO: 89455 - protein, 9 aa, Homo Sapiens
FPSPIRLEF

SEQ ID NO: 89456 - protein, 9 aa, Homo Sapiens
FPSPNQITL

SEQ ID NO: 89457 - protein, 9 aa, Homo Sapiens
FPSTAEHTL

SEQ ID NO: 89458 - protein, 9 aa, Homo Sapiens
FPTVQHQEL

SEQ ID NO: 89459 - protein, 9 aa, Homo Sapiens
FPTYPVPHY

SEQ ID NO: 89460 - protein, 9 aa, Homo Sapiens
FPVEHVQLL

SEQ ID NO: 89461 - protein, 9 aa, Homo Sapiens
FPVEIKSFY

SEQ ID NO: 89462 - protein, 9 aa, Homo Sapiens
FPVEKQLDL

SEQ ID NO: 89463 - protein, 9 aa, Homo Sapiens
FPVELNTVY

SEQ ID NO: 89464 - protein, 9 aa, Homo Sapiens
FPVEVNTVL

SEQ ID NO: 89465 - protein, 9 aa, Homo Sapiens
FPVGDVNNF

SEQ ID NO: 89466 - protein, 9 aa, Homo Sapiens
FPVGPGTGF

SEQ ID NO: 89467 - protein, 9 aa, Homo Sapiens
FPVGRVHRL

SEQ ID NO: 89468 - protein, 9 aa, Homo Sapiens
FPVIYDVKY

SEQ ID NO: 89469 - protein, 9 aa, Homo Sapiens
FPVLNVTRY

SEQ ID NO: 89470 - protein, 9 aa, Homo Sapiens
FPVPKPIDY

SEQ ID NO: 89471 - protein, 9 aa, Homo Sapiens
FPVPKPILY

SEQ ID NO: 89472 - protein, 9 aa, Homo Sapiens
FPVSKTLVL

SEQ ID NO: 89473 - protein, 9 aa, Homo Sapiens
FPVTPVSTL

SEQ ID NO: 89474 - protein, 9 aa, Homo Sapiens
FPWDIDEAL

SEQ ID NO: 89475 - protein, 9 aa, Homo Sapiens
FPWPSLRTY

SEQ ID NO: 89476 - protein, 9 aa, Homo Sapiens
FPYGDASKF

SEQ ID NO: 89477 - protein, 9 aa, Homo Sapiens
FPYGTTVTY

SEQ ID NO: 89478 - protein, 9 aa, Homo Sapiens
FPYPFQVVY

SEQ ID NO: 89479 - protein, 9 aa, Homo Sapiens
FSNPYSIEY

SEQ ID NO: 89480 - protein, 9 aa, Homo Sapiens
FVAEQKVEY

SEQ ID NO: 89481 - protein, 9 aa, Homo Sapiens
FVNDDRHVM

SEQ ID NO: 89482 - protein, 9 aa, Homo Sapiens
FVNDYILYY

SEQ ID NO: 89483 - protein, 9 aa, Homo Sapiens
FVNPGVVEF

SEQ ID NO: 89484 - protein, 9 aa, Homo Sapiens
FVNPHVSSF

SEQ ID NO: 89485 - protein, 9 aa, Homo Sapiens
FVNPTSFVY

SEQ ID NO: 89486 - protein, 9 aa, Homo Sapiens
FVSGVKIFY

SEQ ID NO: 89487 - protein, 9 aa, Homo Sapiens
FVVEQVESY

SEQ ID NO: 89488 - protein, 9 aa, Homo Sapiens
GAAGVHFIY

SEQ ID NO: 89489 - protein, 9 aa, Homo Sapiens
GAHGIIVVY

SEQ ID NO: 89490 - protein, 9 aa, Homo Sapiens
GQKPWSQHY

SEQ ID NO: 89491 - protein, 9 aa, Homo Sapiens
GQNPFELAF

SEQ ID NO: 89492 - protein, 9 aa, Homo Sapiens
GQTKPVVVY

SEQ ID NO: 89493 - protein, 9 aa, Homo Sapiens
GVTHICPVY

SEQ ID NO: 89494 - protein, 9 aa, Homo Sapiens
HAADVFEAY

SEQ ID NO: 89495 - protein, 9 aa, Homo Sapiens
HAAGFAYTY

SEQ ID NO: 89496 - protein, 9 aa, Homo Sapiens
HAAHIISEL

SEQ ID NO: 89497 - protein, 9 aa, Homo Sapiens
HAAMLGLMY

SEQ ID NO: 89498 - protein, 9 aa, Homo Sapiens
HAAPCMLFM

SEQ ID NO: 89499 - protein, 9 aa, Homo Sapiens
HAAPFQNIL

SEQ ID NO: 89500 - protein, 9 aa, Homo Sapiens
HAAVDRWQY

SEQ ID NO: 89501 - protein, 9 aa, Homo Sapiens
HAAVPTPGY

SEQ ID NO: 89502 - protein, 9 aa, Homo Sapiens
HACGVIATI

SEQ ID NO: 89503 - protein, 9 aa, Homo Sapiens
HACLAVAVL

SEQ ID NO: 89504 - protein, 9 aa, Homo Sapiens
HACSSIIKM

SEQ ID NO: 89505 - protein, 9 aa, Homo Sapiens
HADDSFLVL

SEQ ID NO: 89506 - protein, 9 aa, Homo Sapiens
HADGTIVRY

SEQ ID NO: 89507 - protein, 9 aa, Homo Sapiens
HADPRIQGY

SEQ ID NO: 89508 - protein, 9 aa, Homo Sapiens
HADSNIVIM

SEQ ID NO: 89509 - protein, 9 aa, Homo Sapiens
HAFVDLHEF

SEQ ID NO: 89510 - protein, 9 aa, Homo Sapiens
HAFVELHEF

SEQ ID NO: 89511 - protein, 9 aa, Homo Sapiens
HAFVTEVAY

SEQ ID NO: 89512 - protein, 9 aa, Homo Sapiens
HAGEAIPAL

SEQ ID NO: 89513 - protein, 9 aa, Homo Sapiens
HAHVDKVTY

SEQ ID NO: 89514 - protein, 9 aa, Homo Sapiens
HAIDIICGF

SEQ ID NO: 89515 - protein, 9 aa, Homo Sapiens
HAIKVGVKY

SEQ ID NO: 89516 - protein, 9 aa, Homo Sapiens
HAIPPTAIM

SEQ ID NO: 89517 - protein, 9 aa, Homo Sapiens
HAIPPTLAM

SEQ ID NO: 89518 - protein, 9 aa, Homo Sapiens
HAIQDLLVF

SEQ ID NO: 89519 - protein, 9 aa, Homo Sapiens
HAIRLLLEY

SEQ ID NO: 89520 - protein, 9 aa, Homo Sapiens
HAISCVEMY

SEQ ID NO: 89521 - protein, 9 aa, Homo Sapiens
HALERLFTM

SEQ ID NO: 89522 - protein, 9 aa, Homo Sapiens
HALSLKIVL

SEQ ID NO: 89523 - protein, 9 aa, Homo Sapiens
HANDQTVIF

SEQ ID NO: 89524 - protein, 9 aa, Homo Sapiens
HANVVVYSY

SEQ ID NO: 89525 - protein, 9 aa, Homo Sapiens
HAQGFALTY

SEQ ID NO: 89526 - protein, 9 aa, Homo Sapiens
HASVYQITY

SEQ ID NO: 89527 - protein, 9 aa, Homo Sapiens
HATFNDPVM

SEQ ID NO: 89528 - protein, 9 aa, Homo Sapiens
HATTALLHY

SEQ ID NO: 89529 - protein, 9 aa, Homo Sapiens
HATTIQPEF

SEQ ID NO: 89530 - protein, 9 aa, Homo Sapiens
HAVAVTESY

SEQ ID NO: 89531 - protein, 9 aa, Homo Sapiens
HAVEISAVH

SEQ ID NO: 89532 - protein, 9 aa, Homo Sapiens
HAVEWPVVM

SEQ ID NO: 89533 - protein, 9 aa, Homo Sapiens
HAVGNVELY

SEQ ID NO: 89534 - protein, 9 aa, Homo Sapiens
HAVGPSTAM

SEQ ID NO: 89535 - protein, 9 aa, Homo Sapiens
HAVHVALVL

SEQ ID NO: 89536 - protein, 9 aa, Homo Sapiens
HAVIDINAF

SEQ ID NO: 89537 - protein, 9 aa, Homo Sapiens
HAVPIYEGF

SEQ ID NO: 89538 - protein, 9 aa, Homo Sapiens
HAVQTVETM

SEQ ID NO: 89539 - protein, 9 aa, Homo Sapiens
HAVSPIAKY

SEQ ID NO: 89540 - protein, 9 aa, Homo Sapiens
HAVVNLINY

SEQ ID NO: 89541 - protein, 9 aa, Homo Sapiens
HAVVTVPAY

SEQ ID NO: 89542 - protein, 9 aa, Homo Sapiens
HGFGNVHAY

SEQ ID NO: 89543 - protein, 9 aa, Homo Sapiens
HGIDPTGTY

SEQ ID NO: 89544 - protein, 9 aa, Homo Sapiens
HIMEIFSTY

SEQ ID NO: 89545 - protein, 9 aa, Homo Sapiens
HPAAKMIVM

SEQ ID NO: 89546 - protein, 9 aa, Homo Sapiens
HPAGCMSQF

SEQ ID NO: 89547 - protein, 9 aa, Homo Sapiens
HPAIALREY

SEQ ID NO: 89548 - protein, 9 aa, Homo Sapiens
HPAPPPSNY

SEQ ID NO: 89549 - protein, 9 aa, Homo Sapiens
HPATVFILF

SEQ ID NO: 89550 - protein, 9 aa, Homo Sapiens
HPCLYILTF

SEQ ID NO: 89551 - protein, 9 aa, Homo Sapiens
HPDEPLYSF

SEQ ID NO: 89552 - protein, 9 aa, Homo Sapiens
HPDKKIVAY

SEQ ID NO: 89553 - protein, 9 aa, Homo Sapiens
HPDLPLAVY

SEQ ID NO: 89554 - protein, 9 aa, Homo Sapiens
HPDQAQAIL

SEQ ID NO: 89555 - protein, 9 aa, Homo Sapiens
HPDRSQPAF

SEQ ID NO: 89556 - protein, 9 aa, Homo Sapiens
HPDSRAIMY

SEQ ID NO: 89557 - protein, 9 aa, Homo Sapiens
HPDVLPFAL

SEQ ID NO: 89558 - protein, 9 aa, Homo Sapiens
HPEIDNPEY

SEQ ID NO: 89559 - protein, 9 aa, Homo Sapiens
HPEKLATVL

SEQ ID NO: 89560 - protein, 9 aa, Homo Sapiens
HPELQALIY

SEQ ID NO: 89561 - protein, 9 aa, Homo Sapiens
HPEPTDHVL

SEQ ID NO: 89562 - protein, 9 aa, Homo Sapiens
HPESVSQSL

SEQ ID NO: 89563 - protein, 9 aa, Homo Sapiens
HPFAPPICF

SEQ ID NO: 89564 - protein, 9 aa, Homo Sapiens
HPFENMVAF

SEQ ID NO: 89565 - protein, 9 aa, Homo Sapiens
HPFEVPREY

SEQ ID NO: 89566 - protein, 9 aa, Homo Sapiens
HPFFVGVQY

SEQ ID NO: 89567 - protein, 9 aa, Homo Sapiens
HPFHILIAL

SEQ ID NO: 89568 - protein, 9 aa, Homo Sapiens
HPFIDDYQY

SEQ ID NO: 89569 - protein, 9 aa, Homo Sapiens
HPFKFSDHY

SEQ ID NO: 89570 - protein, 9 aa, Homo Sapiens
HPFKIFTKM

SEQ ID NO: 89571 - protein, 9 aa, Homo Sapiens
HPFPCPTSY

SEQ ID NO: 89572 - protein, 9 aa, Homo Sapiens
HPFQERHVY

SEQ ID NO: 89573 - protein, 9 aa, Homo Sapiens
HPGQISAGY

SEQ ID NO: 89574 - protein, 9 aa, Homo Sapiens
HPGSFDVVH

SEQ ID NO: 89575 - protein, 9 aa, Homo Sapiens
HPGSSALHY

SEQ ID NO: 89576 - protein, 9 aa, Homo Sapiens
HPHDLVILM

SEQ ID NO: 89577 - protein, 9 aa, Homo Sapiens
HPHKIIVMY

SEQ ID NO: 89578 - protein, 9 aa, Homo Sapiens
HPHLVAEAF

SEQ ID NO: 89579 - protein, 9 aa, Homo Sapiens
HPHLVAEAY

SEQ ID NO: 89580 - protein, 9 aa, Homo Sapiens
HPHPEDIKF

SEQ ID NO: 89581 - protein, 9 aa, Homo Sapiens
HPHPVVPKM

SEQ ID NO: 89582 - protein, 9 aa, Homo Sapiens
HPIDRSVDF

SEQ ID NO: 89583 - protein, 9 aa, Homo Sapiens
HPIEVSVGH

SEQ ID NO: 89584 - protein, 9 aa, Homo Sapiens
HPIHADNCL

SEQ ID NO: 89585 - protein, 9 aa, Homo Sapiens
HPIKQVDVL

SEQ ID NO: 89586 - protein, 9 aa, Homo Sapiens
HPILNDPIY

SEQ ID NO: 89587 - protein, 9 aa, Homo Sapiens
HPIPGEYKF

SEQ ID NO: 89588 - protein, 9 aa, Homo Sapiens
HPIQTQAQY

SEQ ID NO: 89589 - protein, 9 aa, Homo Sapiens
HPIRIADGY

SEQ ID NO: 89590 - protein, 9 aa, Homo Sapiens
HPIRLFCRY

SEQ ID NO: 89591 - protein, 9 aa, Homo Sapiens
HPIRVVNAL

SEQ ID NO: 89592 - protein, 9 aa, Homo Sapiens
HPLDLQSAL

SEQ ID NO: 89593 - protein, 9 aa, Homo Sapiens
HPLDLRVQF

SEQ ID NO: 89594 - protein, 9 aa, Homo Sapiens
HPLDYELTY

SEQ ID NO: 89595 - protein, 9 aa, Homo Sapiens
HPLEGTHEL

SEQ ID NO: 89596 - protein, 9 aa, Homo Sapiens
HPLGDIVAF

SEQ ID NO: 89597 - protein, 9 aa, Homo Sapiens
HPLGVLSAF

SEQ ID NO: 89598 - protein, 9 aa, Homo Sapiens
HPLINPVAF

SEQ ID NO: 89599 - protein, 9 aa, Homo Sapiens
HPLLKTLEY

SEQ ID NO: 89600 - protein, 9 aa, Homo Sapiens
HPLSNPAEL

SEQ ID NO: 89601 - protein, 9 aa, Homo Sapiens
HPLTQSAVM

SEQ ID NO: 89602 - protein, 9 aa, Homo Sapiens
HPMAYQLQL

SEQ ID NO: 89603 - protein, 9 aa, Homo Sapiens
HPMDHPSAF

SEQ ID NO: 89604 - protein, 9 aa, Homo Sapiens
HPMGGLNAM

SEQ ID NO: 89605 - protein, 9 aa, Homo Sapiens
HPMNSISSL

SEQ ID NO: 89606 - protein, 9 aa, Homo Sapiens
HPNDDDVHF

SEQ ID NO: 89607 - protein, 9 aa, Homo Sapiens
HPNEGALVL

SEQ ID NO: 89608 - protein, 9 aa, Homo Sapiens
HPNGLQVMY

SEQ ID NO: 89609 - protein, 9 aa, Homo Sapiens
HPNPIPSGL

SEQ ID NO: 89610 - protein, 9 aa, Homo Sapiens
HPNTIQEYM

SEQ ID NO: 89611 - protein, 9 aa, Homo Sapiens
HPPHYFFTY

SEQ ID NO: 89612 - protein, 9 aa, Homo Sapiens
HPQDSAFSY

SEQ ID NO: 89613 - protein, 9 aa, Homo Sapiens
HPQEVYNEY

SEQ ID NO: 89614 - protein, 9 aa, Homo Sapiens
HPQFVTDVM

SEQ ID NO: 89615 - protein, 9 aa, Homo Sapiens
HPQIIIRAF

SEQ ID NO: 89616 - protein, 9 aa, Homo Sapiens
HPQPGAVEL

SEQ ID NO: 89617 - protein, 9 aa, Homo Sapiens
HPQQKVAVY

SEQ ID NO: 89618 - protein, 9 aa, Homo Sapiens
HPQYEVVEI

SEQ ID NO: 89619 - protein, 9 aa, Homo Sapiens
HPRIITEGF

SEQ ID NO: 89620 - protein, 9 aa, Homo Sapiens
HPSALSSVY

SEQ ID NO: 89621 - protein, 9 aa, Homo Sapiens
HPSDIEVDL

SEQ ID NO: 89622 - protein, 9 aa, Homo Sapiens
HPSESLEKM

SEQ ID NO: 89623 - protein, 9 aa, Homo Sapiens
HPSGATPTL

SEQ ID NO: 89624 - protein, 9 aa, Homo Sapiens
HPSHVQPAY

SEQ ID NO: 89625 - protein, 9 aa, Homo Sapiens
HPSLQPEEY

SEQ ID NO: 89626 - protein, 9 aa, Homo Sapiens
HPSNVLHFF

SEQ ID NO: 89627 - protein, 9 aa, Homo Sapiens
HPSQHVMQY

SEQ ID NO: 89628 - protein, 9 aa, Homo Sapiens
HPSQTVELF

SEQ ID NO: 89629 - protein, 9 aa, Homo Sapiens
HPTADVQTF

SEQ ID NO: 89630 - protein, 9 aa, Homo Sapiens
HPTAFVVSY

SEQ ID NO: 89631 - protein, 9 aa, Homo Sapiens
HPTAHAPMM

SEQ ID NO: 89632 - protein, 9 aa, Homo Sapiens
HPTDPLTSF

SEQ ID NO: 89633 - protein, 9 aa, Homo Sapiens
HPTERCFVF

SEQ ID NO: 89634 - protein, 9 aa, Homo Sapiens
HPTIISESF

SEQ ID NO: 89635 - protein, 9 aa, Homo Sapiens
HPTLIQRTY

SEQ ID NO: 89636 - protein, 9 aa, Homo Sapiens
HPTPSPMAY

SEQ ID NO: 89637 - protein, 9 aa, Homo Sapiens
HPTSHVSLL

SEQ ID NO: 89638 - protein, 9 aa, Homo Sapiens
HPTSVISGY

SEQ ID NO: 89639 - protein, 9 aa, Homo Sapiens
HPTTISPRY

SEQ ID NO: 89640 - protein, 9 aa, Homo Sapiens
HPTVVISAY

SEQ ID NO: 89641 - protein, 9 aa, Homo Sapiens
HPVDFLDAF

SEQ ID NO: 89642 - protein, 9 aa, Homo Sapiens
HPVNLTWPF

SEQ ID NO: 89643 - protein, 9 aa, Homo Sapiens
HPVTGQFLY

SEQ ID NO: 89644 - protein, 9 aa, Homo Sapiens
HPVVGDLTY

SEQ ID NO: 89645 - protein, 9 aa, Homo Sapiens
HPVVSSVPL

SEQ ID NO: 89646 - protein, 9 aa, Homo Sapiens
HPWELFVKY

SEQ ID NO: 89647 - protein, 9 aa, Homo Sapiens
HPWGSSSSF

SEQ ID NO: 89648 - protein, 9 aa, Homo Sapiens
HPYIYRVTF

SEQ ID NO: 89649 - protein, 9 aa, Homo Sapiens
HPYPHNHYM

SEQ ID NO: 89650 - protein, 9 aa, Homo Sapiens
HPYQFLLKY

SEQ ID NO: 89651 - protein, 9 aa, Homo Sapiens
HPYQPDPKM

SEQ ID NO: 89652 - protein, 9 aa, Homo Sapiens
HSGPVIPVY

SEQ ID NO: 89653 - protein, 9 aa, Homo Sapiens
HSSSIVTAY

SEQ ID NO: 89654 - protein, 9 aa, Homo Sapiens
HVAQPDSVY

SEQ ID NO: 89655 - protein, 9 aa, Homo Sapiens
HVFPTFVAY

SEQ ID NO: 89656 - protein, 9 aa, Homo Sapiens
HVHHLINEY

SEQ ID NO: 89657 - protein, 9 aa, Homo Sapiens
HVICLAEEF

SEQ ID NO: 89658 - protein, 9 aa, Homo Sapiens
HVIDVKFLY

SEQ ID NO: 89659 - protein, 9 aa, Homo Sapiens
HVSLVQLTL

SEQ ID NO: 89660 - protein, 9 aa, Homo Sapiens
HVSTVNPNY

SEQ ID NO: 89661 - protein, 9 aa, Homo Sapiens
HVYEIPVEY

SEQ ID NO: 89662 - protein, 9 aa, Homo Sapiens
IAFFDVRTF

SEQ ID NO: 89663 - protein, 9 aa, Homo Sapiens
IAIDVIDAY

SEQ ID NO: 89664 - protein, 9 aa, Homo Sapiens
IAIPVTVAF

SEQ ID NO: 89665 - protein, 9 aa, Homo Sapiens
IALVHTDSY

SEQ ID NO: 89666 - protein, 9 aa, Homo Sapiens
IAMDLILKM

SEQ ID NO: 89667 - protein, 9 aa, Homo Sapiens
IANQVQLFY

SEQ ID NO: 89668 - protein, 9 aa, Homo Sapiens
IATAVITLF

SEQ ID NO: 89669 - protein, 9 aa, Homo Sapiens
ILGPPGSVY

SEQ ID NO: 89670 - protein, 9 aa, Homo Sapiens
INELMIYIF

SEQ ID NO: 89671 - protein, 9 aa, Homo Sapiens
IPAAPVPSL

SEQ ID NO: 89672 - protein, 9 aa, Homo Sapiens
IPAATTIAY

SEQ ID NO: 89673 - protein, 9 aa, Homo Sapiens
IPAAVKLTY

SEQ ID NO: 89674 - protein, 9 aa, Homo Sapiens
IPADIVFVL

SEQ ID NO: 89675 - protein, 9 aa, Homo Sapiens
IPADTFAAL

SEQ ID NO: 89676 - protein, 9 aa, Homo Sapiens
IPAEDMNAF

SEQ ID NO: 89677 - protein, 9 aa, Homo Sapiens
IPAEEIPAY

SEQ ID NO: 89678 - protein, 9 aa, Homo Sapiens
IPAESYTFF

SEQ ID NO: 89679 - protein, 9 aa, Homo Sapiens
IPAFTCEEY

SEQ ID NO: 89680 - protein, 9 aa, Homo Sapiens
IPCKSSPEL

SEQ ID NO: 89681 - protein, 9 aa, Homo Sapiens
IPCPTVVLL

SEQ ID NO: 89682 - protein, 9 aa, Homo Sapiens
IPDDLKQLY

SEQ ID NO: 89683 - protein, 9 aa, Homo Sapiens
IPDEQIVVM

SEQ ID NO: 89684 - protein, 9 aa, Homo Sapiens
IPDQVIRVF

SEQ ID NO: 89685 - protein, 9 aa, Homo Sapiens
IPEESQLVF

SEQ ID NO: 89686 - protein, 9 aa, Homo Sapiens
IPFEFPLHL

SEQ ID NO: 89687 - protein, 9 aa, Homo Sapiens
IPFGNNPIF

SEQ ID NO: 89688 - protein, 9 aa, Homo Sapiens
IPFNQALVF

SEQ ID NO: 89689 - protein, 9 aa, Homo Sapiens
IPFRPSIQF

SEQ ID NO: 89690 - protein, 9 aa, Homo Sapiens
IPFSGALEL

SEQ ID NO: 89691 - protein, 9 aa, Homo Sapiens
IPHMDIEAL

SEQ ID NO: 89692 - protein, 9 aa, Homo Sapiens
IPHTDPVDY

SEQ ID NO: 89693 - protein, 9 aa, Homo Sapiens
IPIANTEKY

SEQ ID NO: 89694 - protein, 9 aa, Homo Sapiens
IPIKAICDY

SEQ ID NO: 89695 - protein, 9 aa, Homo Sapiens
IPISAQLKY

SEQ ID NO: 89696 - protein, 9 aa, Homo Sapiens
IPISSELCY

SEQ ID NO: 89697 - protein, 9 aa, Homo Sapiens
IPLGEIISF

SEQ ID NO: 89698 - protein, 9 aa, Homo Sapiens
IPLPLIKSY

SEQ ID NO: 89699 - protein, 9 aa, Homo Sapiens
IPLRSSWVM

SEQ ID NO: 89700 - protein, 9 aa, Homo Sapiens
IPLTTFTPR

SEQ ID NO: 89701 - protein, 9 aa, Homo Sapiens
IPMEFVNKM

SEQ ID NO: 89702 - protein, 9 aa, Homo Sapiens
IPMQSEPQY

SEQ ID NO: 89703 - protein, 9 aa, Homo Sapiens
IPMSDPQVL

SEQ ID NO: 89704 - protein, 9 aa, Homo Sapiens
IPMTPTSSF

SEQ ID NO: 89705 - protein, 9 aa, Homo Sapiens
IPNEIIHAL

SEQ ID NO: 89706 - protein, 9 aa, Homo Sapiens
IPNENEAQF

SEQ ID NO: 89707 - protein, 9 aa, Homo Sapiens
IPNENELQF

SEQ ID NO: 89708 - protein, 9 aa, Homo Sapiens
IPNGVQIFF

SEQ ID NO: 89709 - protein, 9 aa, Homo Sapiens
IPNSIMTIL

SEQ ID NO: 89710 - protein, 9 aa, Homo Sapiens
IPPDVPILL

SEQ ID NO: 89711 - protein, 9 aa, Homo Sapiens
IPSPLQPEM

SEQ ID NO: 89712 - protein, 9 aa, Homo Sapiens
IPSSVPATF

SEQ ID NO: 89713 - protein, 9 aa, Homo Sapiens
IPTEQVNEL

SEQ ID NO: 89714 - protein, 9 aa, Homo Sapiens
IPTHHPRVY

SEQ ID NO: 89715 - protein, 9 aa, Homo Sapiens
IPTHTQPSY

SEQ ID NO: 89716 - protein, 9 aa, Homo Sapiens
IPTKQTQTF

SEQ ID NO: 89717 - protein, 9 aa, Homo Sapiens
IPTPPLPSY

SEQ ID NO: 89718 - protein, 9 aa, Homo Sapiens
IPTRVITNF

SEQ ID NO: 89719 - protein, 9 aa, Homo Sapiens
IPVAIRTQI

SEQ ID NO: 89720 - protein, 9 aa, Homo Sapiens
IPVDTVLTM

SEQ ID NO: 89721 - protein, 9 aa, Homo Sapiens
IPVEEPLPF

SEQ ID NO: 89722 - protein, 9 aa, Homo Sapiens
IPVIVTEQY

SEQ ID NO: 89723 - protein, 9 aa, Homo Sapiens
IPVPINAEL

SEQ ID NO: 89724 - protein, 9 aa, Homo Sapiens
IPVPYVEKY

SEQ ID NO: 89725 - protein, 9 aa, Homo Sapiens
IPVTIITGY

SEQ ID NO: 89726 - protein, 9 aa, Homo Sapiens
IPVTIMDVF

SEQ ID NO: 89727 - protein, 9 aa, Homo Sapiens
IPWDDLIAL

SEQ ID NO: 89728 - protein, 9 aa, Homo Sapiens
IPWKHIDYF

SEQ ID NO: 89729 - protein, 9 aa, Homo Sapiens
IPYEGFASL

SEQ ID NO: 89730 - protein, 9 aa, Homo Sapiens
IPYPLPPNY

SEQ ID NO: 89731 - protein, 9 aa, Homo Sapiens
IPYQDRESY

SEQ ID NO: 89732 - protein, 9 aa, Homo Sapiens
ISQPRILLY

SEQ ID NO: 89733 - protein, 9 aa, Homo Sapiens
ISSDTFITY

SEQ ID NO: 89734 - protein, 9 aa, Homo Sapiens
IVSQIAVAY

SEQ ID NO: 89735 - protein, 9 aa, Homo Sapiens
KPAPLTPAY

SEQ ID NO: 89736 - protein, 9 aa, Homo Sapiens
KPIESFNEY

SEQ ID NO: 89737 - protein, 9 aa, Homo Sapiens
LAAGVVSAM

SEQ ID NO: 89738 - protein, 9 aa, Homo Sapiens
LADLSCLVY

SEQ ID NO: 89739 - protein, 9 aa, Homo Sapiens
LAHQHVVGF

SEQ ID NO: 89740 - protein, 9 aa, Homo Sapiens
LALEPGVAY

SEQ ID NO: 89741 - protein, 9 aa, Homo Sapiens
LAMVEAISY

SEQ ID NO: 89742 - protein, 9 aa, Homo Sapiens
LAQQYYLVY

SEQ ID NO: 89743 - protein, 9 aa, Homo Sapiens
LAWLDEHTL

SEQ ID NO: 89744 - protein, 9 aa, Homo Sapiens
LDPVLQNPL

SEQ ID NO: 89745 - protein, 9 aa, Homo Sapiens
LIFSVPIVY

SEQ ID NO: 89746 - protein, 9 aa, Homo Sapiens
LPADHVSGY

SEQ ID NO: 89747 - protein, 9 aa, Homo Sapiens
LPADIQAQF

SEQ ID NO: 89748 - protein, 9 aa, Homo Sapiens
LPADVQNYY

SEQ ID NO: 89749 - protein, 9 aa, Homo Sapiens
LPADWAPLF

SEQ ID NO: 89750 - protein, 9 aa, Homo Sapiens
LPAEFFEVL

SEQ ID NO: 89751 - protein, 9 aa, Homo Sapiens
LPAEHQFSF

SEQ ID NO: 89752 - protein, 9 aa, Homo Sapiens
LPAGIVAVL

SEQ ID NO: 89753 - protein, 9 aa, Homo Sapiens
LPAKILVEF

SEQ ID NO: 89754 - protein, 9 aa, Homo Sapiens
LPALFTDLY

SEQ ID NO: 89755 - protein, 9 aa, Homo Sapiens
LPALPTQAL

SEQ ID NO: 89756 - protein, 9 aa, Homo Sapiens
LPAPPTQNM

SEQ ID NO: 89757 - protein, 9 aa, Homo Sapiens
LPAPSTKEY

SEQ ID NO: 89758 - protein, 9 aa, Homo Sapiens
LPAQGLIEF

SEQ ID NO: 89759 - protein, 9 aa, Homo Sapiens
LPAQLLELY

SEQ ID NO: 89760 - protein, 9 aa, Homo Sapiens
LPAQQVHNY

SEQ ID NO: 89761 - protein, 9 aa, Homo Sapiens
LPATATMSL

SEQ ID NO: 89762 - protein, 9 aa, Homo Sapiens
LPAYPTENF

SEQ ID NO: 89763 - protein, 9 aa, Homo Sapiens
LPCFEPYEF

SEQ ID NO: 89764 - protein, 9 aa, Homo Sapiens
LPCGASVIL

SEQ ID NO: 89765 - protein, 9 aa, Homo Sapiens
LPCKAEEIY

SEQ ID NO: 89766 - protein, 9 aa, Homo Sapiens
LPCKDAPEL

SEQ ID NO: 89767 - protein, 9 aa, Homo Sapiens
LPCPLLPSY

SEQ ID NO: 89768 - protein, 9 aa, Homo Sapiens
LPDEIYHVY

SEQ ID NO: 89769 - protein, 9 aa, Homo Sapiens
LPDKKTVHY

SEQ ID NO: 89770 - protein, 9 aa, Homo Sapiens
LPDNVHYVF

SEQ ID NO: 89771 - protein, 9 aa, Homo Sapiens
LPDPLQEPY

SEQ ID NO: 89772 - protein, 9 aa, Homo Sapiens
LPDPNLITF

SEQ ID NO: 89773 - protein, 9 aa, Homo Sapiens
LPDPNVQKY

SEQ ID NO: 89774 - protein, 9 aa, Homo Sapiens
LPDSGVVEY

SEQ ID NO: 89775 - protein, 9 aa, Homo Sapiens
LPDTLKVTY

SEQ ID NO: 89776 - protein, 9 aa, Homo Sapiens
LPDTRSEAY

SEQ ID NO: 89777 - protein, 9 aa, Homo Sapiens
LPEDRALYY

SEQ ID NO: 89778 - protein, 9 aa, Homo Sapiens
LPEDVGHCF

SEQ ID NO: 89779 - protein, 9 aa, Homo Sapiens
LPEEHARFY

SEQ ID NO: 89780 - protein, 9 aa, Homo Sapiens
LPESAPLIY

SEQ ID NO: 89781 - protein, 9 aa, Homo Sapiens
LPESTHVEF

SEQ ID NO: 89782 - protein, 9 aa, Homo Sapiens
LPFAEAEAF

SEQ ID NO: 89783 - protein, 9 aa, Homo Sapiens
LPFATPEEF

SEQ ID NO: 89784 - protein, 9 aa, Homo Sapiens
LPFDCTQAL

SEQ ID NO: 89785 - protein, 9 aa, Homo Sapiens
LPFDKETGF

SEQ ID NO: 89786 - protein, 9 aa, Homo Sapiens
LPFDLRASF

SEQ ID NO: 89787 - protein, 9 aa, Homo Sapiens
LPFDLRIPF

SEQ ID NO: 89788 - protein, 9 aa, Homo Sapiens
LPFEGKCYY

SEQ ID NO: 89789 - protein, 9 aa, Homo Sapiens
LPFFNDRPW

SEQ ID NO: 89790 - protein, 9 aa, Homo Sapiens
LPFFPIATY

SEQ ID NO: 89791 - protein, 9 aa, Homo Sapiens
LPFHFPGSF

SEQ ID NO: 89792 - protein, 9 aa, Homo Sapiens
LPFPIIQQY

SEQ ID NO: 89793 - protein, 9 aa, Homo Sapiens
LPFPKDASL

SEQ ID NO: 89794 - protein, 9 aa, Homo Sapiens
LPFPKIDPY

SEQ ID NO: 89795 - protein, 9 aa, Homo Sapiens
LPGSIQHVY

SEQ ID NO: 89796 - protein, 9 aa, Homo Sapiens
LPHAPGVQM

SEQ ID NO: 89797 - protein, 9 aa, Homo Sapiens
LPHDPDLAY

SEQ ID NO: 89798 - protein, 9 aa, Homo Sapiens
LPHELFQEF

SEQ ID NO: 89799 - protein, 9 aa, Homo Sapiens
LPHFDESTF

SEQ ID NO: 89800 - protein, 9 aa, Homo Sapiens
LPHFIKDDY

SEQ ID NO: 89801 - protein, 9 aa, Homo Sapiens
LPHGLIESF

SEQ ID NO: 89802 - protein, 9 aa, Homo Sapiens
LPHQPLATY

SEQ ID NO: 89803 - protein, 9 aa, Homo Sapiens
LPHSATVTL

SEQ ID NO: 89804 - protein, 9 aa, Homo Sapiens
LPHYEPIPF

SEQ ID NO: 89805 - protein, 9 aa, Homo Sapiens
LPIATVEEL

SEQ ID NO: 89806 - protein, 9 aa, Homo Sapiens
LPIDCSPAL

SEQ ID NO: 89807 - protein, 9 aa, Homo Sapiens
LPINHQIIY

SEQ ID NO: 89808 - protein, 9 aa, Homo Sapiens
LPIPDQQLY

SEQ ID NO: 89809 - protein, 9 aa, Homo Sapiens
LPIPSQPQF

SEQ ID NO: 89810 - protein, 9 aa, Homo Sapiens
LPIRFNLTY

SEQ ID NO: 89811 - protein, 9 aa, Homo Sapiens
LPKNDLITY

SEQ ID NO: 89812 - protein, 9 aa, Homo Sapiens
LPKTCDISF

SEQ ID NO: 89813 - protein, 9 aa, Homo Sapiens
LPLAHVLEL

SEQ ID NO: 89814 - protein, 9 aa, Homo Sapiens
LPLDIQIFY

SEQ ID NO: 89815 - protein, 9 aa, Homo Sapiens
LPLDTVTFY

SEQ ID NO: 89816 - protein, 9 aa, Homo Sapiens
LPLEEAYRF

SEQ ID NO: 89817 - protein, 9 aa, Homo Sapiens
LPLEEHYRF

SEQ ID NO: 89818 - protein, 9 aa, Homo Sapiens
LPLHVLPLY

SEQ ID NO: 89819 - protein, 9 aa, Homo Sapiens
LPLLDPWYF

SEQ ID NO: 89820 - protein, 9 aa, Homo Sapiens
LPLLKAQEY

SEQ ID NO: 89821 - protein, 9 aa, Homo Sapiens
LPLLPNVSY

SEQ ID NO: 89822 - protein, 9 aa, Homo Sapiens
LPLLSPVTF

SEQ ID NO: 89823 - protein, 9 aa, Homo Sapiens
LPLNSVYVY

SEQ ID NO: 89824 - protein, 9 aa, Homo Sapiens
LPLPDPLKY

SEQ ID NO: 89825 - protein, 9 aa, Homo Sapiens
LPLPEVQCF

SEQ ID NO: 89826 - protein, 9 aa, Homo Sapiens
LPLPLPMAL

SEQ ID NO: 89827 - protein, 9 aa, Homo Sapiens
LPLQDELAF

SEQ ID NO: 89828 - protein, 9 aa, Homo Sapiens
LPLQREPLY

SEQ ID NO: 89829 - protein, 9 aa, Homo Sapiens
LPLQTSHAL

SEQ ID NO: 89830 - protein, 9 aa, Homo Sapiens
LPLRFDLQY

SEQ ID NO: 89831 - protein, 9 aa, Homo Sapiens
LPLSIQEAY

SEQ ID NO: 89832 - protein, 9 aa, Homo Sapiens
LPLSLQTVF

SEQ ID NO: 89833 - protein, 9 aa, Homo Sapiens
LPLTARWEY

SEQ ID NO: 89834 - protein, 9 aa, Homo Sapiens
LPLTHFELY

SEQ ID NO: 89835 - protein, 9 aa, Homo Sapiens
LPMGVVVDY

SEQ ID NO: 89836 - protein, 9 aa, Homo Sapiens
LPMRMLEVF

SEQ ID NO: 89837 - protein, 9 aa, Homo Sapiens
LPNDGDEKY

SEQ ID NO: 89838 - protein, 9 aa, Homo Sapiens
LPNDKTLLY

SEQ ID NO: 89839 - protein, 9 aa, Homo Sapiens
LPNDVISSL

SEQ ID NO: 89840 - protein, 9 aa, Homo Sapiens
LPNGLDVTF

SEQ ID NO: 89841 - protein, 9 aa, Homo Sapiens
LPNGQMFVF

SEQ ID NO: 89842 - protein, 9 aa, Homo Sapiens
LPNGYVYGY

SEQ ID NO: 89843 - protein, 9 aa, Homo Sapiens
LPNNAKLEM

SEQ ID NO: 89844 - protein, 9 aa, Homo Sapiens
LPNNIVDVW

SEQ ID NO: 89845 - protein, 9 aa, Homo Sapiens
LPNSIASRF

SEQ ID NO: 89846 - protein, 9 aa, Homo Sapiens
LPPEELVPY

SEQ ID NO: 89847 - protein, 9 aa, Homo Sapiens
LPPGVHISY

SEQ ID NO: 89848 - protein, 9 aa, Homo Sapiens
LPPKIVIGY

SEQ ID NO: 89849 - protein, 9 aa, Homo Sapiens
LPPNTIMEY

SEQ ID NO: 89850 - protein, 9 aa, Homo Sapiens
LPPPSDPQY

SEQ ID NO: 89851 - protein, 9 aa, Homo Sapiens
LPQDVILKF

SEQ ID NO: 89852 - protein, 9 aa, Homo Sapiens
LPQEAFEKY

SEQ ID NO: 89853 - protein, 9 aa, Homo Sapiens
LPQEDLEAL

SEQ ID NO: 89854 - protein, 9 aa, Homo Sapiens
LPQHPDVEM

SEQ ID NO: 89855 - protein, 9 aa, Homo Sapiens
LPQHQVPAY

SEQ ID NO: 89856 - protein, 9 aa, Homo Sapiens
LPQHTIETY

SEQ ID NO: 89857 - protein, 9 aa, Homo Sapiens
LPQKGDVEM

SEQ ID NO: 89858 - protein, 9 aa, Homo Sapiens
LPQNQPFVF

SEQ ID NO: 89859 - protein, 9 aa, Homo Sapiens
LPQPDVFPL

SEQ ID NO: 89860 - protein, 9 aa, Homo Sapiens
LPQSTVPEM

SEQ ID NO: 89861 - protein, 9 aa, Homo Sapiens
LPQVQNTAM

SEQ ID NO: 89862 - protein, 9 aa, Homo Sapiens
LPREGEQNF

SEQ ID NO: 89863 - protein, 9 aa, Homo Sapiens
LPRISPEEY

SEQ ID NO: 89864 - protein, 9 aa, Homo Sapiens
LPSDHSVKY

SEQ ID NO: 89865 - protein, 9 aa, Homo Sapiens
LPSDIAAEA

SEQ ID NO: 89866 - protein, 9 aa, Homo Sapiens
LPSDKALVL

SEQ ID NO: 89867 - protein, 9 aa, Homo Sapiens
LPSDVPLHF

SEQ ID NO: 89868 - protein, 9 aa, Homo Sapiens
LPSDVSILY

SEQ ID NO: 89869 - protein, 9 aa, Homo Sapiens
LPSDVVTGY

SEQ ID NO: 89870 - protein, 9 aa, Homo Sapiens
LPSEHQTIL

SEQ ID NO: 89871 - protein, 9 aa, Homo Sapiens
LPSEIEVKY

SEQ ID NO: 89872 - protein, 9 aa, Homo Sapiens
LPSELERSY

SEQ ID NO: 89873 - protein, 9 aa, Homo Sapiens
LPSHTKIKY

SEQ ID NO: 89874 - protein, 9 aa, Homo Sapiens
LPSHVVTML

SEQ ID NO: 89875 - protein, 9 aa, Homo Sapiens
LPSNDPVVM

SEQ ID NO: 89876 - protein, 9 aa, Homo Sapiens
LPSNDSSKF

SEQ ID NO: 89877 - protein, 9 aa, Homo Sapiens
LPSPHPVRY

SEQ ID NO: 89878 - protein, 9 aa, Homo Sapiens
LPSRVIEEL

SEQ ID NO: 89879 - protein, 9 aa, Homo Sapiens
LPSSEVVKF

SEQ ID NO: 89880 - protein, 9 aa, Homo Sapiens
LPSSVISAI

SEQ ID NO: 89881 - protein, 9 aa, Homo Sapiens
LPSTTIVSM

SEQ ID NO: 89882 - protein, 9 aa, Homo Sapiens
LPTDAVDCM

SEQ ID NO: 89883 - protein, 9 aa, Homo Sapiens
LPTDSHASL

SEQ ID NO: 89884 - protein, 9 aa, Homo Sapiens
LPTDTLQEL

SEQ ID NO: 89885 - protein, 9 aa, Homo Sapiens
LPTEEEWEF

SEQ ID NO: 89886 - protein, 9 aa, Homo Sapiens
LPTENVDKM

SEQ ID NO: 89887 - protein, 9 aa, Homo Sapiens
LPTFQSPEF

SEQ ID NO: 89888 - protein, 9 aa, Homo Sapiens
LPTGIPIVY

SEQ ID NO: 89889 - protein, 9 aa, Homo Sapiens
LPTIVIVAH

SEQ ID NO: 89890 - protein, 9 aa, Homo Sapiens
LPTKQNEEF

SEQ ID NO: 89891 - protein, 9 aa, Homo Sapiens
LPTPETVPF

SEQ ID NO: 89892 - protein, 9 aa, Homo Sapiens
LPTSVVTIT

SEQ ID NO: 89893 - protein, 9 aa, Homo Sapiens
LPVAKDVSY

SEQ ID NO: 89894 - protein, 9 aa, Homo Sapiens
LPVATDFEF

SEQ ID NO: 89895 - protein, 9 aa, Homo Sapiens
LPVDFHIKM

SEQ ID NO: 89896 - protein, 9 aa, Homo Sapiens
LPVDFVECL

SEQ ID NO: 89897 - protein, 9 aa, Homo Sapiens
LPVDLAEEL

SEQ ID NO: 89898 - protein, 9 aa, Homo Sapiens
LPVEEFNEL

SEQ ID NO: 89899 - protein, 9 aa, Homo Sapiens
LPVEELRVY

SEQ ID NO: 89900 - protein, 9 aa, Homo Sapiens
LPVEHVNQL

SEQ ID NO: 89901 - protein, 9 aa, Homo Sapiens
LPVHVFEAL

SEQ ID NO: 89902 - protein, 9 aa, Homo Sapiens
LPVIIFTTF

SEQ ID NO: 89903 - protein, 9 aa, Homo Sapiens
LPVKGFRSY

SEQ ID NO: 89904 - protein, 9 aa, Homo Sapiens
LPVLERLIY

SEQ ID NO: 89905 - protein, 9 aa, Homo Sapiens
LPVPDPILL

SEQ ID NO: 89906 - protein, 9 aa, Homo Sapiens
LPVPSGVAF

SEQ ID NO: 89907 - protein, 9 aa, Homo Sapiens
LPVPVIPSF

SEQ ID NO: 89908 - protein, 9 aa, Homo Sapiens
LPVPVLETY

SEQ ID NO: 89909 - protein, 9 aa, Homo Sapiens
LPVRLATAM

SEQ ID NO: 89910 - protein, 9 aa, Homo Sapiens
LPVVDFNEM

SEQ ID NO: 89911 - protein, 9 aa, Homo Sapiens
LPVVPKATY

SEQ ID NO: 89912 - protein, 9 aa, Homo Sapiens
LPWASTHSL

SEQ ID NO: 89913 - protein, 9 aa, Homo Sapiens
LPWVGKELY

SEQ ID NO: 89914 - protein, 9 aa, Homo Sapiens
LPYAGDVSM

SEQ ID NO: 89915 - protein, 9 aa, Homo Sapiens
LPYDLRASF

SEQ ID NO: 89916 - protein, 9 aa, Homo Sapiens
LPYNDYFEY

SEQ ID NO: 89917 - protein, 9 aa, Homo Sapiens
LPYNHQHEY

SEQ ID NO: 89918 - protein, 9 aa, Homo Sapiens
LPYNMPLAY

SEQ ID NO: 89919 - protein, 9 aa, Homo Sapiens
LPYPDLETY

SEQ ID NO: 89920 - protein, 9 aa, Homo Sapiens
LPYPDLQEF

SEQ ID NO: 89921 - protein, 9 aa, Homo Sapiens
LPYQGHNSF

SEQ ID NO: 89922 - protein, 9 aa, Homo Sapiens
LPYSEYFEY

SEQ ID NO: 89923 - protein, 9 aa, Homo Sapiens
LPYTVVIHY

SEQ ID NO: 89924 - protein, 9 aa, Homo Sapiens
LSDTEVLEY

SEQ ID NO: 89925 - protein, 9 aa, Homo Sapiens
MAADDVEEY

SEQ ID NO: 89926 - protein, 9 aa, Homo Sapiens
MAAKILEEF

SEQ ID NO: 89927 - protein, 9 aa, Homo Sapiens
MAAMPQTVY

SEQ ID NO: 89928 - protein, 9 aa, Homo Sapiens
MAGDIYSVF

SEQ ID NO: 89929 - protein, 9 aa, Homo Sapiens
MAHSFGESY

SEQ ID NO: 89930 - protein, 9 aa, Homo Sapiens
MAIEAQQKF

SEQ ID NO: 89931 - protein, 9 aa, Homo Sapiens
MAIKLRNEY

SEQ ID NO: 89932 - protein, 9 aa, Homo Sapiens
MAISDELHY

SEQ ID NO: 89933 - protein, 9 aa, Homo Sapiens
MALAVRVVY

SEQ ID NO: 89934 - protein, 9 aa, Homo Sapiens
MALLVPLVY

SEQ ID NO: 89935 - protein, 9 aa, Homo Sapiens
MALSIAERY

SEQ ID NO: 89936 - protein, 9 aa, Homo Sapiens
MANIPLPEY

SEQ ID NO: 89937 - protein, 9 aa, Homo Sapiens
MAQNAIKAM

SEQ ID NO: 89938 - protein, 9 aa, Homo Sapiens
MAQTAIKAM

SEQ ID NO: 89939 - protein, 9 aa, Homo Sapiens
MAVEGDHSM

SEQ ID NO: 89940 - protein, 9 aa, Homo Sapiens
MAVIDGNVM

SEQ ID NO: 89941 - protein, 9 aa, Homo Sapiens
MAWLVDHVY

SEQ ID NO: 89942 - protein, 9 aa, Homo Sapiens
MAYETLEQY

SEQ ID NO: 89943 - protein, 9 aa, Homo Sapiens
MAYGGKLKY

SEQ ID NO: 89944 - protein, 9 aa, Homo Sapiens
MAYGHIDSY

SEQ ID NO: 89945 - protein, 9 aa, Homo Sapiens
MGDPGARVY

SEQ ID NO: 89946 - protein, 9 aa, Homo Sapiens
MIFQDPTAM

SEQ ID NO: 89947 - protein, 9 aa, Homo Sapiens
MIHDLCLVF

SEQ ID NO: 89948 - protein, 9 aa, Homo Sapiens
MINELAVAM

SEQ ID NO: 89949 - protein, 9 aa, Homo Sapiens
MPAAGGVLY

SEQ ID NO: 89950 - protein, 9 aa, Homo Sapiens
MPAATDNRY

SEQ ID NO: 89951 - protein, 9 aa, Homo Sapiens
MPADIATLL

SEQ ID NO: 89952 - protein, 9 aa, Homo Sapiens
MPADTNKAF

SEQ ID NO: 89953 - protein, 9 aa, Homo Sapiens
MPAGEIEQF

SEQ ID NO: 89954 - protein, 9 aa, Homo Sapiens
MPAPCAQVM

SEQ ID NO: 89955 - protein, 9 aa, Homo Sapiens
MPAPEIVSY

SEQ ID NO: 89956 - protein, 9 aa, Homo Sapiens
MPATVFMLF

SEQ ID NO: 89957 - protein, 9 aa, Homo Sapiens
MPAVKAIIY

SEQ ID NO: 89958 - protein, 9 aa, Homo Sapiens
MPCVFVTEV

SEQ ID NO: 89959 - protein, 9 aa, Homo Sapiens
MPDDLLTTL

SEQ ID NO: 89960 - protein, 9 aa, Homo Sapiens
MPDHTDVSL

SEQ ID NO: 89961 - protein, 9 aa, Homo Sapiens
MPDPTPFLL

SEQ ID NO: 89962 - protein, 9 aa, Homo Sapiens
MPDSAAALL

SEQ ID NO: 89963 - protein, 9 aa, Homo Sapiens
MPDSGRPAF

SEQ ID NO: 89964 - protein, 9 aa, Homo Sapiens
MPEDLVEAL

SEQ ID NO: 89965 - protein, 9 aa, Homo Sapiens
MPEDVKNFY

SEQ ID NO: 89966 - protein, 9 aa, Homo Sapiens
MPEEIARYY

SEQ ID NO: 89967 - protein, 9 aa, Homo Sapiens
MPEFVNAAF

SEQ ID NO: 89968 - protein, 9 aa, Homo Sapiens
MPEKEPSVL

SEQ ID NO: 89969 - protein, 9 aa, Homo Sapiens
MPEPASRCL

SEQ ID NO: 89970 - protein, 9 aa, Homo Sapiens
MPEPDAQRF

SEQ ID NO: 89971 - protein, 9 aa, Homo Sapiens
MPETTETVL

SEQ ID NO: 89972 - protein, 9 aa, Homo Sapiens
MPFGNVISA

SEQ ID NO: 89973 - protein, 9 aa, Homo Sapiens
MPFGNVVSA

SEQ ID NO: 89974 - protein, 9 aa, Homo Sapiens
MPFITCDEF

SEQ ID NO: 89975 - protein, 9 aa, Homo Sapiens
MPFNKEPKW

SEQ ID NO: 89976 - protein, 9 aa, Homo Sapiens
MPFPAHLTY

SEQ ID NO: 89977 - protein, 9 aa, Homo Sapiens
MPFQQWEAL

SEQ ID NO: 89978 - protein, 9 aa, Homo Sapiens
MPFTTVSEL

SEQ ID NO: 89979 - protein, 9 aa, Homo Sapiens
MPFYPRVVY

SEQ ID NO: 89980 - protein, 9 aa, Homo Sapiens
MPHDAIILL

SEQ ID NO: 89981 - protein, 9 aa, Homo Sapiens
MPHDLITQL

SEQ ID NO: 89982 - protein, 9 aa, Homo Sapiens
MPHEDCITA

SEQ ID NO: 89983 - protein, 9 aa, Homo Sapiens
MPHEKHYTL

SEQ ID NO: 89984 - protein, 9 aa, Homo Sapiens
MPHHTPHQL

SEQ ID NO: 89985 - protein, 9 aa, Homo Sapiens
MPHNQFIKM

SEQ ID NO: 89986 - protein, 9 aa, Homo Sapiens
MPHNYSRCY

SEQ ID NO: 89987 - protein, 9 aa, Homo Sapiens
MPHQLQDTF

SEQ ID NO: 89988 - protein, 9 aa, Homo Sapiens
MPIGPDVSL

SEQ ID NO: 89989 - protein, 9 aa, Homo Sapiens
MPIQGQPCF

SEQ ID NO: 89990 - protein, 9 aa, Homo Sapiens
MPISSHVDL

SEQ ID NO: 89991 - protein, 9 aa, Homo Sapiens
MPLEDLLAF

SEQ ID NO: 89992 - protein, 9 aa, Homo Sapiens
MPLEDMNEF

SEQ ID NO: 89993 - protein, 9 aa, Homo Sapiens
MPLEEGDTF

SEQ ID NO: 89994 - protein, 9 aa, Homo Sapiens
MPLGARILF

SEQ ID NO: 89995 - protein, 9 aa, Homo Sapiens
MPLHVAPLL

SEQ ID NO: 89996 - protein, 9 aa, Homo Sapiens
MPLQDSISL

SEQ ID NO: 89997 - protein, 9 aa, Homo Sapiens
MPLQLLLLL

SEQ ID NO: 89998 - protein, 9 aa, Homo Sapiens
MPMGPDQKY

SEQ ID NO: 89999 - protein, 9 aa, Homo Sapiens
MPNENIPEL

SEQ ID NO: 90000 - protein, 9 aa, Homo Sapiens
MPNGTVQRF

SEQ ID NO: 90001 - protein, 9 aa, Homo Sapiens
MPNQHACKL

SEQ ID NO: 90002 - protein, 9 aa, Homo Sapiens
MPNQIVQIL

SEQ ID NO: 90003 - protein, 9 aa, Homo Sapiens
MPNSPAPHF

SEQ ID NO: 90004 - protein, 9 aa, Homo Sapiens
MPNVKVAVF

SEQ ID NO: 90005 - protein, 9 aa, Homo Sapiens
MPPALCIDY

SEQ ID NO: 90006 - protein, 9 aa, Homo Sapiens
MPQDLSEAL

SEQ ID NO: 90007 - protein, 9 aa, Homo Sapiens
MPQEKSPGY

SEQ ID NO: 90008 - protein, 9 aa, Homo Sapiens
MPQFSTIEY

SEQ ID NO: 90009 - protein, 9 aa, Homo Sapiens
MPQGAPRLY

SEQ ID NO: 90010 - protein, 9 aa, Homo Sapiens
MPQGGGQHY

SEQ ID NO: 90011 - protein, 9 aa, Homo Sapiens
MPQHIMAIL

SEQ ID NO: 90012 - protein, 9 aa, Homo Sapiens
MPQVAPDLY

SEQ ID NO: 90013 - protein, 9 aa, Homo Sapiens
MPRLEVQSF

SEQ ID NO: 90014 - protein, 9 aa, Homo Sapiens
MPRVQTQQY

SEQ ID NO: 90015 - protein, 9 aa, Homo Sapiens
MPSDVLEVT

SEQ ID NO: 90016 - protein, 9 aa, Homo Sapiens
MPSEDVVSL

SEQ ID NO: 90017 - protein, 9 aa, Homo Sapiens
MPSEKVSSY

SEQ ID NO: 90018 - protein, 9 aa, Homo Sapiens
MPSKTELIV

SEQ ID NO: 90019 - protein, 9 aa, Homo Sapiens
MPSPATLSH

SEQ ID NO: 90020 - protein, 9 aa, Homo Sapiens
MPSPVSPKL

SEQ ID NO: 90021 - protein, 9 aa, Homo Sapiens
MPSQSVETY

SEQ ID NO: 90022 - protein, 9 aa, Homo Sapiens
MPSSAVRVL

SEQ ID NO: 90023 - protein, 9 aa, Homo Sapiens
MPSVKVSVF

SEQ ID NO: 90024 - protein, 9 aa, Homo Sapiens
MPTAYNTDY

SEQ ID NO: 90025 - protein, 9 aa, Homo Sapiens
MPTDVLEVT

SEQ ID NO: 90026 - protein, 9 aa, Homo Sapiens
MPTEQAEGF

SEQ ID NO: 90027 - protein, 9 aa, Homo Sapiens
MPTQEVQEL

SEQ ID NO: 90028 - protein, 9 aa, Homo Sapiens
MPTRPVPSY

SEQ ID NO: 90029 - protein, 9 aa, Homo Sapiens
MPTSTILRL

SEQ ID NO: 90030 - protein, 9 aa, Homo Sapiens
MPTSVAYIH

SEQ ID NO: 90031 - protein, 9 aa, Homo Sapiens
MPTTGINEY

SEQ ID NO: 90032 - protein, 9 aa, Homo Sapiens
MPTVSVLEY

SEQ ID NO: 90033 - protein, 9 aa, Homo Sapiens
MPVDSFNSM

SEQ ID NO: 90034 - protein, 9 aa, Homo Sapiens
MPVFPDFKM

SEQ ID NO: 90035 - protein, 9 aa, Homo Sapiens
MPVGMTHGL

SEQ ID NO: 90036 - protein, 9 aa, Homo Sapiens
MPVGPAPGM

SEQ ID NO: 90037 - protein, 9 aa, Homo Sapiens
MPVHAAVQM

SEQ ID NO: 90038 - protein, 9 aa, Homo Sapiens
MPVLEQSVL

SEQ ID NO: 90039 - protein, 9 aa, Homo Sapiens
MPVPTTPEF

SEQ ID NO: 90040 - protein, 9 aa, Homo Sapiens
MPVPVILNF

SEQ ID NO: 90041 - protein, 9 aa, Homo Sapiens
MPVRAADKL

SEQ ID NO: 90042 - protein, 9 aa, Homo Sapiens
MPVSSQHRY

SEQ ID NO: 90043 - protein, 9 aa, Homo Sapiens
MPVVAGAVF

SEQ ID NO: 90044 - protein, 9 aa, Homo Sapiens
MPYACKLLF

SEQ ID NO: 90045 - protein, 9 aa, Homo Sapiens
MPYLEHESF

SEQ ID NO: 90046 - protein, 9 aa, Homo Sapiens
MPYNHQHKY

SEQ ID NO: 90047 - protein, 9 aa, Homo Sapiens
MPYNYPVLL

SEQ ID NO: 90048 - protein, 9 aa, Homo Sapiens
MPYSHPSSY

SEQ ID NO: 90049 - protein, 9 aa, Homo Sapiens
MVADRVEVY

SEQ ID NO: 90050 - protein, 9 aa, Homo Sapiens
MVHSEVAAY

SEQ ID NO: 90051 - protein, 9 aa, Homo Sapiens
MVLENVKEM

SEQ ID NO: 90052 - protein, 9 aa, Homo Sapiens
MVNHFIAEF

SEQ ID NO: 90053 - protein, 9 aa, Homo Sapiens
MVVEERCVY

SEQ ID NO: 90054 - protein, 9 aa, Homo Sapiens
NAAFPFLAY

SEQ ID NO: 90055 - protein, 9 aa, Homo Sapiens
NAAPCAVSY

SEQ ID NO: 90056 - protein, 9 aa, Homo Sapiens
NAAPPPVTY

SEQ ID NO: 90057 - protein, 9 aa, Homo Sapiens
NAAQIFAIY

SEQ ID NO: 90058 - protein, 9 aa, Homo Sapiens
NAAQTSVAY

SEQ ID NO: 90059 - protein, 9 aa, Homo Sapiens
NADPQAVTM

SEQ ID NO: 90060 - protein, 9 aa, Homo Sapiens
NADTLALVF

SEQ ID NO: 90061 - protein, 9 aa, Homo Sapiens
NAFDVFAAY

SEQ ID NO: 90062 - protein, 9 aa, Homo Sapiens
NAFEELVAF

SEQ ID NO: 90063 - protein, 9 aa, Homo Sapiens
NAFEVAEKY

SEQ ID NO: 90064 - protein, 9 aa, Homo Sapiens
NAFHVYQVY

SEQ ID NO: 90065 - protein, 9 aa, Homo Sapiens
NAFKEITTM

SEQ ID NO: 90066 - protein, 9 aa, Homo Sapiens
NAFLDDPEF

SEQ ID NO: 90067 - protein, 9 aa, Homo Sapiens
NAHNLALVF

SEQ ID NO: 90068 - protein, 9 aa, Homo Sapiens
NAIEDTIFY

SEQ ID NO: 90069 - protein, 9 aa, Homo Sapiens
NAISVTTSY

SEQ ID NO: 90070 - protein, 9 aa, Homo Sapiens
NAITLPEEF

SEQ ID NO: 90071 - protein, 9 aa, Homo Sapiens
NALNHTEQY

SEQ ID NO: 90072 - protein, 9 aa, Homo Sapiens
NAMDVTTGY

SEQ ID NO: 90073 - protein, 9 aa, Homo Sapiens
NAMDVVVQF

SEQ ID NO: 90074 - protein, 9 aa, Homo Sapiens
NAMNMQETY

SEQ ID NO: 90075 - protein, 9 aa, Homo Sapiens
NATGPDLEF

SEQ ID NO: 90076 - protein, 9 aa, Homo Sapiens
NAVNLAIKY

SEQ ID NO: 90077 - protein, 9 aa, Homo Sapiens
NAVNLSCKY

SEQ ID NO: 90078 - protein, 9 aa, Homo Sapiens
NAVVTVPAY

SEQ ID NO: 90079 - protein, 9 aa, Homo Sapiens
NAWADIERF

SEQ ID NO: 90080 - protein, 9 aa, Homo Sapiens
NAWAEQTGM

SEQ ID NO: 90081 - protein, 9 aa, Homo Sapiens
NAWNNLEKY

SEQ ID NO: 90082 - protein, 9 aa, Homo Sapiens
NIPEIVAVY

SEQ ID NO: 90083 - protein, 9 aa, Homo Sapiens
NPADITVLF

SEQ ID NO: 90084 - protein, 9 aa, Homo Sapiens
NPAIVALVY

SEQ ID NO: 90085 - protein, 9 aa, Homo Sapiens
NPAPNPAVY

SEQ ID NO: 90086 - protein, 9 aa, Homo Sapiens
NPCEYDLKF

SEQ ID NO: 90087 - protein, 9 aa, Homo Sapiens
NPDDVFREF

SEQ ID NO: 90088 - protein, 9 aa, Homo Sapiens
NPDTHSWEM

SEQ ID NO: 90089 - protein, 9 aa, Homo Sapiens
NPEPNTVSY

SEQ ID NO: 90090 - protein, 9 aa, Homo Sapiens
NPFEKGDLY

SEQ ID NO: 90091 - protein, 9 aa, Homo Sapiens
NPFPHSHTF

SEQ ID NO: 90092 - protein, 9 aa, Homo Sapiens
NPFQEAIVF

SEQ ID NO: 90093 - protein, 9 aa, Homo Sapiens
NPHEVQPAY

SEQ ID NO: 90094 - protein, 9 aa, Homo Sapiens
NPHQQYSVY

SEQ ID NO: 90095 - protein, 9 aa, Homo Sapiens
NPIDQCNTL

SEQ ID NO: 90096 - protein, 9 aa, Homo Sapiens
NPISGLLEY

SEQ ID NO: 90097 - protein, 9 aa, Homo Sapiens
NPISTVTEL

SEQ ID NO: 90098 - protein, 9 aa, Homo Sapiens
NPITVQTVY

SEQ ID NO: 90099 - protein, 9 aa, Homo Sapiens
NPIWHREKY

SEQ ID NO: 90100 - protein, 9 aa, Homo Sapiens
NPLAATHEF

SEQ ID NO: 90101 - protein, 9 aa, Homo Sapiens
NPLQKDPQY

SEQ ID NO: 90102 - protein, 9 aa, Homo Sapiens
NPNSPSITY

SEQ ID NO: 90103 - protein, 9 aa, Homo Sapiens
NPSPYHLYY

SEQ ID NO: 90104 - protein, 9 aa, Homo Sapiens
NPTDAFTVF

SEQ ID NO: 90105 - protein, 9 aa, Homo Sapiens
NPTDISYVY

SEQ ID NO: 90106 - protein, 9 aa, Homo Sapiens
NPTDPLLAY

SEQ ID NO: 90107 - protein, 9 aa, Homo Sapiens
NPTIVALVY

SEQ ID NO: 90108 - protein, 9 aa, Homo Sapiens
NPVDIVSTL

SEQ ID NO: 90109 - protein, 9 aa, Homo Sapiens
NPVDWKEKY

SEQ ID NO: 90110 - protein, 9 aa, Homo Sapiens
NPVELKALY

SEQ ID NO: 90111 - protein, 9 aa, Homo Sapiens
NPVEYSIVM

SEQ ID NO: 90112 - protein, 9 aa, Homo Sapiens
NPVGGLLEY

SEQ ID NO: 90113 - protein, 9 aa, Homo Sapiens
NPVQALSEF

SEQ ID NO: 90114 - protein, 9 aa, Homo Sapiens
NPWDDKLIF

SEQ ID NO: 90115 - protein, 9 aa, Homo Sapiens
NPWDNKAVY

SEQ ID NO: 90116 - protein, 9 aa, Homo Sapiens
NPYHVVILF

SEQ ID NO: 90117 - protein, 9 aa, Homo Sapiens
NPYRDLQIY

SEQ ID NO: 90118 - protein, 9 aa, Homo Sapiens
NTCNIILIY

SEQ ID NO: 90119 - protein, 9 aa, Homo Sapiens
NVADLHEKY

SEQ ID NO: 90120 - protein, 9 aa, Homo Sapiens
NVADVVIKF

SEQ ID NO: 90121 - protein, 9 aa, Homo Sapiens
NVFGVCHIF

SEQ ID NO: 90122 - protein, 9 aa, Homo Sapiens
NVHAVVFVY

SEQ ID NO: 90123 - protein, 9 aa, Homo Sapiens
NVHDIMVSF

SEQ ID NO: 90124 - protein, 9 aa, Homo Sapiens
NVIHNLATY

SEQ ID NO: 90125 - protein, 9 aa, Homo Sapiens
NVIRDAVTY

SEQ ID NO: 90126 - protein, 9 aa, Homo Sapiens
NVRCESEVF

SEQ ID NO: 90127 - protein, 9 aa, Homo Sapiens
NVYCGVHRY

SEQ ID NO: 90128 - protein, 9 aa, Homo Sapiens
NVYDFKTTY

SEQ ID NO: 90129 - protein, 9 aa, Homo Sapiens
PALHEGPPL

SEQ ID NO: 90130 - protein, 9 aa, Homo Sapiens
PEIAFLTAF

SEQ ID NO: 90131 - protein, 9 aa, Homo Sapiens
PHNQFIKMM

SEQ ID NO: 90132 - protein, 9 aa, Homo Sapiens
PKVDFPTAI

SEQ ID NO: 90133 - protein, 9 aa, Homo Sapiens
PVATVLTDM

SEQ ID NO: 90134 - protein, 9 aa, Homo Sapiens
QAADTVVIF

SEQ ID NO: 90135 - protein, 9 aa, Homo Sapiens
QAAMPQVSY

SEQ ID NO: 90136 - protein, 9 aa, Homo Sapiens
QAAQCYIKY

SEQ ID NO: 90137 - protein, 9 aa, Homo Sapiens
QADPTKLEL

SEQ ID NO: 90138 - protein, 9 aa, Homo Sapiens
QAFEQALEF

SEQ ID NO: 90139 - protein, 9 aa, Homo Sapiens
QAFESSQKY

SEQ ID NO: 90140 - protein, 9 aa, Homo Sapiens
QAFFLHTTY

SEQ ID NO: 90141 - protein, 9 aa, Homo Sapiens
QAFLEAVQF

SEQ ID NO: 90142 - protein, 9 aa, Homo Sapiens
QAFPGGHSM

SEQ ID NO: 90143 - protein, 9 aa, Homo Sapiens
QAFVDCHEF

SEQ ID NO: 90144 - protein, 9 aa, Homo Sapiens
QAIEDMVGY

SEQ ID NO: 90145 - protein, 9 aa, Homo Sapiens
QAIENAHVL

SEQ ID NO: 90146 - protein, 9 aa, Homo Sapiens
QAINNAISY

SEQ ID NO: 90147 - protein, 9 aa, Homo Sapiens
QAINNAITY

SEQ ID NO: 90148 - protein, 9 aa, Homo Sapiens
QAIQWILHY

SEQ ID NO: 90149 - protein, 9 aa, Homo Sapiens
QAITLVTQY

SEQ ID NO: 90150 - protein, 9 aa, Homo Sapiens
QALALIELY

SEQ ID NO: 90151 - protein, 9 aa, Homo Sapiens
QALLDLHAL

SEQ ID NO: 90152 - protein, 9 aa, Homo Sapiens
QANVICIVY

SEQ ID NO: 90153 - protein, 9 aa, Homo Sapiens
QARIEIESF

SEQ ID NO: 90154 - protein, 9 aa, Homo Sapiens
QASDVSVKY

SEQ ID NO: 90155 - protein, 9 aa, Homo Sapiens
QASSKILKY

SEQ ID NO: 90156 - protein, 9 aa, Homo Sapiens
QATQVLQEM

SEQ ID NO: 90157 - protein, 9 aa, Homo Sapiens
QATRTVPVF

SEQ ID NO: 90158 - protein, 9 aa, Homo Sapiens
QAVADAVTY

SEQ ID NO: 90159 - protein, 9 aa, Homo Sapiens
QAVADMAAY

SEQ ID NO: 90160 - protein, 9 aa, Homo Sapiens
QAVAIFTVY

SEQ ID NO: 90161 - protein, 9 aa, Homo Sapiens
QAVDAVEEF

SEQ ID NO: 90162 - protein, 9 aa, Homo Sapiens
QAVQQQEVY

SEQ ID NO: 90163 - protein, 9 aa, Homo Sapiens
QAYDDKIYY

SEQ ID NO: 90164 - protein, 9 aa, Homo Sapiens
QPAEMAAEL

SEQ ID NO: 90165 - protein, 9 aa, Homo Sapiens
QPAPISPHL

SEQ ID NO: 90166 - protein, 9 aa, Homo Sapiens
QPAPPHISH

SEQ ID NO: 90167 - protein, 9 aa, Homo Sapiens
QPFQVAEVF

SEQ ID NO: 90168 - protein, 9 aa, Homo Sapiens
QPFYHDDSY

SEQ ID NO: 90169 - protein, 9 aa, Homo Sapiens
QPGSFEYEY

SEQ ID NO: 90170 - protein, 9 aa, Homo Sapiens
QPILYSYSF

SEQ ID NO: 90171 - protein, 9 aa, Homo Sapiens
QPINLIFRY

SEQ ID NO: 90172 - protein, 9 aa, Homo Sapiens
QPIVWITPY

SEQ ID NO: 90173 - protein, 9 aa, Homo Sapiens
QPLALNVAY

SEQ ID NO: 90174 - protein, 9 aa, Homo Sapiens
QPLEDLASF

SEQ ID NO: 90175 - protein, 9 aa, Homo Sapiens
QPLEEIITY

SEQ ID NO: 90176 - protein, 9 aa, Homo Sapiens
QPLHVTKGY

SEQ ID NO: 90177 - protein, 9 aa, Homo Sapiens
QPLKLDTSF

SEQ ID NO: 90178 - protein, 9 aa, Homo Sapiens
QPMDIHVEL

SEQ ID NO: 90179 - protein, 9 aa, Homo Sapiens
QPMEVQEGY

SEQ ID NO: 90180 - protein, 9 aa, Homo Sapiens
QPMQTNVVY

SEQ ID NO: 90181 - protein, 9 aa, Homo Sapiens
QPNPLPLRL

SEQ ID NO: 90182 - protein, 9 aa, Homo Sapiens
QPQANSHVY

SEQ ID NO: 90183 - protein, 9 aa, Homo Sapiens
QPSPQQDVY

SEQ ID NO: 90184 - protein, 9 aa, Homo Sapiens
QPTEVVNIL

SEQ ID NO: 90185 - protein, 9 aa, Homo Sapiens
QPVDWFVVY

SEQ ID NO: 90186 - protein, 9 aa, Homo Sapiens
QPVEPLPGF

SEQ ID NO: 90187 - protein, 9 aa, Homo Sapiens
QPVKVRVSY

SEQ ID NO: 90188 - protein, 9 aa, Homo Sapiens
QPYSKDSPF

SEQ ID NO: 90189 - protein, 9 aa, Homo Sapiens
QQVPVNQVF

SEQ ID NO: 90190 - protein, 9 aa, Homo Sapiens
QVFEGHTHY

SEQ ID NO: 90191 - protein, 9 aa, Homo Sapiens
RPADCIANY

SEQ ID NO: 90192 - protein, 9 aa, Homo Sapiens
RPAPVEVSY

SEQ ID NO: 90193 - protein, 9 aa, Homo Sapiens
RPAPVEVTY

SEQ ID NO: 90194 - protein, 9 aa, Homo Sapiens
RPAQVSQPF

SEQ ID NO: 90195 - protein, 9 aa, Homo Sapiens
RPFAGFEDF

SEQ ID NO: 90196 - protein, 9 aa, Homo Sapiens
RPFDLVIPF

SEQ ID NO: 90197 - protein, 9 aa, Homo Sapiens
RPFEDQTSL

SEQ ID NO: 90198 - protein, 9 aa, Homo Sapiens
RPFEQPQEY

SEQ ID NO: 90199 - protein, 9 aa, Homo Sapiens
RPFERTITM

SEQ ID NO: 90200 - protein, 9 aa, Homo Sapiens
RPIFIITEY

SEQ ID NO: 90201 - protein, 9 aa, Homo Sapiens
RPIRLQVQY

SEQ ID NO: 90202 - protein, 9 aa, Homo Sapiens
RPLEQVTCY

SEQ ID NO: 90203 - protein, 9 aa, Homo Sapiens
RPLPPMKSY

SEQ ID NO: 90204 - protein, 9 aa, Homo Sapiens
RPNDIYVNM

SEQ ID NO: 90205 - protein, 9 aa, Homo Sapiens
RPTDVAISF

SEQ ID NO: 90206 - protein, 9 aa, Homo Sapiens
RPVNVVNVY

SEQ ID NO: 90207 - protein, 9 aa, Homo Sapiens
RPVPLEQTY

SEQ ID NO: 90208 - protein, 9 aa, Homo Sapiens
SAANIQPIF

SEQ ID NO: 90209 - protein, 9 aa, Homo Sapiens
SAAQPGVAF

SEQ ID NO: 90210 - protein, 9 aa, Homo Sapiens
SADKTVRVY

SEQ ID NO: 90211 - protein, 9 aa, Homo Sapiens
SADQVALVY

SEQ ID NO: 90212 - protein, 9 aa, Homo Sapiens
SAFDEAMSY

SEQ ID NO: 90213 - protein, 9 aa, Homo Sapiens
SAIPHPLIM

SEQ ID NO: 90214 - protein, 9 aa, Homo Sapiens
SALEHSIQY

SEQ ID NO: 90215 - protein, 9 aa, Homo Sapiens
SALHIIVQY

SEQ ID NO: 90216 - protein, 9 aa, Homo Sapiens
SALPAVTEM

SEQ ID NO: 90217 - protein, 9 aa, Homo Sapiens
SALPLAIKY

SEQ ID NO: 90218 - protein, 9 aa, Homo Sapiens
SALPLYNLY

SEQ ID NO: 90219 - protein, 9 aa, Homo Sapiens
SALPTVVAY

SEQ ID NO: 90220 - protein, 9 aa, Homo Sapiens
SAMEVVPAL

SEQ ID NO: 90221 - protein, 9 aa, Homo Sapiens
SASALAVAL

SEQ ID NO: 90222 - protein, 9 aa, Homo Sapiens
SASRLVLNY

SEQ ID NO: 90223 - protein, 9 aa, Homo Sapiens
SASTTTLRY

SEQ ID NO: 90224 - protein, 9 aa, Homo Sapiens
SASVVFTTY

SEQ ID NO: 90225 - protein, 9 aa, Homo Sapiens
SATAVAQLY

SEQ ID NO: 90226 - protein, 9 aa, Homo Sapiens
SATELFEAY

SEQ ID NO: 90227 - protein, 9 aa, Homo Sapiens
SATYIAEEY

SEQ ID NO: 90228 - protein, 9 aa, Homo Sapiens
SAVAATYKY

SEQ ID NO: 90229 - protein, 9 aa, Homo Sapiens
SAVDVHINM

SEQ ID NO: 90230 - protein, 9 aa, Homo Sapiens
SAVELVQEF

SEQ ID NO: 90231 - protein, 9 aa, Homo Sapiens
SAYEALEKY

SEQ ID NO: 90232 - protein, 9 aa, Homo Sapiens
SPAEVAEQY

SEQ ID NO: 90233 - protein, 9 aa, Homo Sapiens
SPAPVPVTY

SEQ ID NO: 90234 - protein, 9 aa, Homo Sapiens
SPAVAAPAY

SEQ ID NO: 90235 - protein, 9 aa, Homo Sapiens
SPCQISQIY

SEQ ID NO: 90236 - protein, 9 aa, Homo Sapiens
SPDATIRIW

SEQ ID NO: 90237 - protein, 9 aa, Homo Sapiens
SPDPSIYAY

SEQ ID NO: 90238 - protein, 9 aa, Homo Sapiens
SPDSGVYEM

SEQ ID NO: 90239 - protein, 9 aa, Homo Sapiens
SPEDIKKAY

SEQ ID NO: 90240 - protein, 9 aa, Homo Sapiens
SPEELYRVF

SEQ ID NO: 90241 - protein, 9 aa, Homo Sapiens
SPFHDIPIY

SEQ ID NO: 90242 - protein, 9 aa, Homo Sapiens
SPFLTITSM

SEQ ID NO: 90243 - protein, 9 aa, Homo Sapiens
SPFNDRFPL

SEQ ID NO: 90244 - protein, 9 aa, Homo Sapiens
SPFQPHVPY

SEQ ID NO: 90245 - protein, 9 aa, Homo Sapiens
SPFSFHHVL

SEQ ID NO: 90246 - protein, 9 aa, Homo Sapiens
SPHGGALVM

SEQ ID NO: 90247 - protein, 9 aa, Homo Sapiens
SPIDVVEKY

SEQ ID NO: 90248 - protein, 9 aa, Homo Sapiens
SPIHTSVQF

SEQ ID NO: 90249 - protein, 9 aa, Homo Sapiens
SPIKDQPVM

SEQ ID NO: 90250 - protein, 9 aa, Homo Sapiens
SPIVKSAKF

SEQ ID NO: 90251 - protein, 9 aa, Homo Sapiens
SPLAFEHVM

SEQ ID NO: 90252 - protein, 9 aa, Homo Sapiens
SPLERYYDY

SEQ ID NO: 90253 - protein, 9 aa, Homo Sapiens
SPLPAQLVY

SEQ ID NO: 90254 - protein, 9 aa, Homo Sapiens
SPMDIFDMF

SEQ ID NO: 90255 - protein, 9 aa, Homo Sapiens
SPNAKEFVY

SEQ ID NO: 90256 - protein, 9 aa, Homo Sapiens
SPQDLRLFY

SEQ ID NO: 90257 - protein, 9 aa, Homo Sapiens
SPSDVFIGY

SEQ ID NO: 90258 - protein, 9 aa, Homo Sapiens
SPSHIIHNY

SEQ ID NO: 90259 - protein, 9 aa, Homo Sapiens
SPSKPTLAY

SEQ ID NO: 90260 - protein, 9 aa, Homo Sapiens
SPTCLTLIY

SEQ ID NO: 90261 - protein, 9 aa, Homo Sapiens
SPVALNVQY

SEQ ID NO: 90262 - protein, 9 aa, Homo Sapiens
SPVDSVLFY

SEQ ID NO: 90263 - protein, 9 aa, Homo Sapiens
SPVDVLQIF

SEQ ID NO: 90264 - protein, 9 aa, Homo Sapiens
SPVENKEVY

SEQ ID NO: 90265 - protein, 9 aa, Homo Sapiens
SPVFMQPVY

SEQ ID NO: 90266 - protein, 9 aa, Homo Sapiens
SPVSFIATY

SEQ ID NO: 90267 - protein, 9 aa, Homo Sapiens
SPWADNTAL

SEQ ID NO: 90268 - protein, 9 aa, Homo Sapiens
SQFGTVTRF

SEQ ID NO: 90269 - protein, 9 aa, Homo Sapiens
SSLLEKGLD

SEQ ID NO: 90270 - protein, 9 aa, Homo Sapiens
TAAAALPAF

SEQ ID NO: 90271 - protein, 9 aa, Homo Sapiens
TAAAPMIGY

SEQ ID NO: 90272 - protein, 9 aa, Homo Sapiens
TAAAVGAVF

SEQ ID NO: 90273 - protein, 9 aa, Homo Sapiens
TAADIFKQY

SEQ ID NO: 90274 - protein, 9 aa, Homo Sapiens
TAADLVPIF

SEQ ID NO: 90275 - protein, 9 aa, Homo Sapiens
TAADTVIFY

SEQ ID NO: 90276 - protein, 9 aa, Homo Sapiens
TAADTVIIY

SEQ ID NO: 90277 - protein, 9 aa, Homo Sapiens
TAAETHYTY

SEQ ID NO: 90278 - protein, 9 aa, Homo Sapiens
TAAKAILLY

SEQ ID NO: 90279 - protein, 9 aa, Homo Sapiens
TAAPLLLAM

SEQ ID NO: 90280 - protein, 9 aa, Homo Sapiens
TAAPPAQPL

SEQ ID NO: 90281 - protein, 9 aa, Homo Sapiens
TAAPVPTTL

SEQ ID NO: 90282 - protein, 9 aa, Homo Sapiens
TAAPVVPEL

SEQ ID NO: 90283 - protein, 9 aa, Homo Sapiens
TAASPTIAL

SEQ ID NO: 90284 - protein, 9 aa, Homo Sapiens
TACDIQTHM

SEQ ID NO: 90285 - protein, 9 aa, Homo Sapiens
TACELMNIY

SEQ ID NO: 90286 - protein, 9 aa, Homo Sapiens
TADHNLLLY

SEQ ID NO: 90287 - protein, 9 aa, Homo Sapiens
TAEGQTIVY

SEQ ID NO: 90288 - protein, 9 aa, Homo Sapiens
TAFGGFLKY

SEQ ID NO: 90289 - protein, 9 aa, Homo Sapiens
TAFHVTCAF

SEQ ID NO: 90290 - protein, 9 aa, Homo Sapiens
TAGDFQEIY

SEQ ID NO: 90291 - protein, 9 aa, Homo Sapiens
TAIDDMEAY

SEQ ID NO: 90292 - protein, 9 aa, Homo Sapiens
TAIMEKHSM

SEQ ID NO: 90293 - protein, 9 aa, Homo Sapiens
TAIRALETY

SEQ ID NO: 90294 - protein, 9 aa, Homo Sapiens
TAIREAQTF

SEQ ID NO: 90295 - protein, 9 aa, Homo Sapiens
TAISLFYEL

SEQ ID NO: 90296 - protein, 9 aa, Homo Sapiens
TALAAFLSY

SEQ ID NO: 90297 - protein, 9 aa, Homo Sapiens
TALASVVAM

SEQ ID NO: 90298 - protein, 9 aa, Homo Sapiens
TALDKIEEM

SEQ ID NO: 90299 - protein, 9 aa, Homo Sapiens
TALHLATEM

SEQ ID NO: 90300 - protein, 9 aa, Homo Sapiens
TALNPHIGY

SEQ ID NO: 90301 - protein, 9 aa, Homo Sapiens
TALPTRIAY

SEQ ID NO: 90302 - protein, 9 aa, Homo Sapiens
TALQAIVEY

SEQ ID NO: 90303 - protein, 9 aa, Homo Sapiens
TALRLALQY

SEQ ID NO: 90304 - protein, 9 aa, Homo Sapiens
TALSWKEAY

SEQ ID NO: 90305 - protein, 9 aa, Homo Sapiens
TAMPYLTSY

SEQ ID NO: 90306 - protein, 9 aa, Homo Sapiens
TANALALAM

SEQ ID NO: 90307 - protein, 9 aa, Homo Sapiens
TAPAAPTMA

SEQ ID NO: 90308 - protein, 9 aa, Homo Sapiens
TARMEDFTF

SEQ ID NO: 90309 - protein, 9 aa, Homo Sapiens
TASAVVQHM

SEQ ID NO: 90310 - protein, 9 aa, Homo Sapiens
TASELKILY

SEQ ID NO: 90311 - protein, 9 aa, Homo Sapiens
TASEMILVL

SEQ ID NO: 90312 - protein, 9 aa, Homo Sapiens
TASHYYIKY

SEQ ID NO: 90313 - protein, 9 aa, Homo Sapiens
TASPVAVSL

SEQ ID NO: 90314 - protein, 9 aa, Homo Sapiens
TATALAIIY

SEQ ID NO: 90315 - protein, 9 aa, Homo Sapiens
TATATNHVL

SEQ ID NO: 90316 - protein, 9 aa, Homo Sapiens
TAVGSILLY

SEQ ID NO: 90317 - protein, 9 aa, Homo Sapiens
TAVIDHHNY

SEQ ID NO: 90318 - protein, 9 aa, Homo Sapiens
TAVKIAPRY

SEQ ID NO: 90319 - protein, 9 aa, Homo Sapiens
TAVRVHVSY

SEQ ID NO: 90320 - protein, 9 aa, Homo Sapiens
TAYPGQTQY

SEQ ID NO: 90321 - protein, 9 aa, Homo Sapiens
TAYVGSAVM

SEQ ID NO: 90322 - protein, 9 aa, Homo Sapiens
TGYGGYEEY

SEQ ID NO: 90323 - protein, 9 aa, Homo Sapiens
TNFEDRNAF

SEQ ID NO: 90324 - protein, 9 aa, Homo Sapiens
TPADVFIVF

SEQ ID NO: 90325 - protein, 9 aa, Homo Sapiens
TPAEIREEF

SEQ ID NO: 90326 - protein, 9 aa, Homo Sapiens
TPAEVSHRF

SEQ ID NO: 90327 - protein, 9 aa, Homo Sapiens
TPAGVVNKY

SEQ ID NO: 90328 - protein, 9 aa, Homo Sapiens
TPAPGFSSM

SEQ ID NO: 90329 - protein, 9 aa, Homo Sapiens
TPAPPTHAL

SEQ ID NO: 90330 - protein, 9 aa, Homo Sapiens
TPDEIDHVF

SEQ ID NO: 90331 - protein, 9 aa, Homo Sapiens
TPDPSRSVF

SEQ ID NO: 90332 - protein, 9 aa, Homo Sapiens
TPEEFFRIF

SEQ ID NO: 90333 - protein, 9 aa, Homo Sapiens
TPEEKIREY

SEQ ID NO: 90334 - protein, 9 aa, Homo Sapiens
TPFSVGLVY

SEQ ID NO: 90335 - protein, 9 aa, Homo Sapiens
TPFVDPRVY

SEQ ID NO: 90336 - protein, 9 aa, Homo Sapiens
TPFVEGLSY

SEQ ID NO: 90337 - protein, 9 aa, Homo Sapiens
TPGGTRIIY

SEQ ID NO: 90338 - protein, 9 aa, Homo Sapiens
TPHGLFILF

SEQ ID NO: 90339 - protein, 9 aa, Homo Sapiens
TPHSEIIFY

SEQ ID NO: 90340 - protein, 9 aa, Homo Sapiens
TPIDSNIAF

SEQ ID NO: 90341 - protein, 9 aa, Homo Sapiens
TPIKDGILY

SEQ ID NO: 90342 - protein, 9 aa, Homo Sapiens
TPIPGTIEM

SEQ ID NO: 90343 - protein, 9 aa, Homo Sapiens
TPIQSKEAY

SEQ ID NO: 90344 - protein, 9 aa, Homo Sapiens
TPIQVLHEY

SEQ ID NO: 90345 - protein, 9 aa, Homo Sapiens
TPIREQHVL

SEQ ID NO: 90346 - protein, 9 aa, Homo Sapiens
TPISEHAVF

SEQ ID NO: 90347 - protein, 9 aa, Homo Sapiens
TPISITSSY

SEQ ID NO: 90348 - protein, 9 aa, Homo Sapiens
TPLATQLTY

SEQ ID NO: 90349 - protein, 9 aa, Homo Sapiens
TPLEEAIKF

SEQ ID NO: 90350 - protein, 9 aa, Homo Sapiens
TPLHLVALY

SEQ ID NO: 90351 - protein, 9 aa, Homo Sapiens
TPLHMAIAY

SEQ ID NO: 90352 - protein, 9 aa, Homo Sapiens
TPLPEDNSM

SEQ ID NO: 90353 - protein, 9 aa, Homo Sapiens
TPLSSTVTL

SEQ ID NO: 90354 - protein, 9 aa, Homo Sapiens
TPLVDPSVY

SEQ ID NO: 90355 - protein, 9 aa, Homo Sapiens
TPMFVVKAY

SEQ ID NO: 90356 - protein, 9 aa, Homo Sapiens
TPMLNSLIY

SEQ ID NO: 90357 - protein, 9 aa, Homo Sapiens
TPNDFCSFY

SEQ ID NO: 90358 - protein, 9 aa, Homo Sapiens
TPRIELEEM

SEQ ID NO: 90359 - protein, 9 aa, Homo Sapiens
TPSEPHPVL

SEQ ID NO: 90360 - protein, 9 aa, Homo Sapiens
TPSPDIIVL

SEQ ID NO: 90361 - protein, 9 aa, Homo Sapiens
TPSPEIVKY

SEQ ID NO: 90362 - protein, 9 aa, Homo Sapiens
TPSPPEVVY

SEQ ID NO: 90363 - protein, 9 aa, Homo Sapiens
TPSQPLPTY

SEQ ID NO: 90364 - protein, 9 aa, Homo Sapiens
TPSSDVLVF

SEQ ID NO: 90365 - protein, 9 aa, Homo Sapiens
TPTEISLVL

SEQ ID NO: 90366 - protein, 9 aa, Homo Sapiens
TPTGIKVVM

SEQ ID NO: 90367 - protein, 9 aa, Homo Sapiens
TPTPFFHTF

SEQ ID NO: 90368 - protein, 9 aa, Homo Sapiens
TPVFNPTVF

SEQ ID NO: 90369 - protein, 9 aa, Homo Sapiens
TPVFSKARY

SEQ ID NO: 90370 - protein, 9 aa, Homo Sapiens
TPWPHIVEF

SEQ ID NO: 90371 - protein, 9 aa, Homo Sapiens
TPYDRFCPF

SEQ ID NO: 90372 - protein, 9 aa, Homo Sapiens
TPYKGGNLY

SEQ ID NO: 90373 - protein, 9 aa, Homo Sapiens
TPYSDGVLY

SEQ ID NO: 90374 - protein, 9 aa, Homo Sapiens
TRPLYRHLF

SEQ ID NO: 90375 - protein, 9 aa, Homo Sapiens
TSSDILLCY

SEQ ID NO: 90376 - protein, 9 aa, Homo Sapiens
TVCDFRLSY

SEQ ID NO: 90377 - protein, 9 aa, Homo Sapiens
TVFDLVEEY

SEQ ID NO: 90378 - protein, 9 aa, Homo Sapiens
TVFREVVSF

SEQ ID NO: 90379 - protein, 9 aa, Homo Sapiens
TVLELVTQY

SEQ ID NO: 90380 - protein, 9 aa, Homo Sapiens
TVMNIAEHY

SEQ ID NO: 90381 - protein, 9 aa, Homo Sapiens
TVSDAILRY

SEQ ID NO: 90382 - protein, 9 aa, Homo Sapiens
TVTEVLLKY

SEQ ID NO: 90383 - protein, 9 aa, Homo Sapiens
TVVRNLEAY

SEQ ID NO: 90384 - protein, 9 aa, Homo Sapiens
VAAPLFELY

SEQ ID NO: 90385 - protein, 9 aa, Homo Sapiens
VADPYVVIM

SEQ ID NO: 90386 - protein, 9 aa, Homo Sapiens
VAQSTRIIY

SEQ ID NO: 90387 - protein, 9 aa, Homo Sapiens
VPADAVVQY

SEQ ID NO: 90388 - protein, 9 aa, Homo Sapiens
VPAEHQVAM

SEQ ID NO: 90389 - protein, 9 aa, Homo Sapiens
VPASLPVEF

SEQ ID NO: 90390 - protein, 9 aa, Homo Sapiens
VPASNAIAY

SEQ ID NO: 90391 - protein, 9 aa, Homo Sapiens
VPDPNVIKL

SEQ ID NO: 90392 - protein, 9 aa, Homo Sapiens
VPFALFESF

SEQ ID NO: 90393 - protein, 9 aa, Homo Sapiens
VPFDQFIQL

SEQ ID NO: 90394 - protein, 9 aa, Homo Sapiens
VPFETSCRY

SEQ ID NO: 90395 - protein, 9 aa, Homo Sapiens
VPFHSDLGY

SEQ ID NO: 90396 - protein, 9 aa, Homo Sapiens
VPFNIPLEF

SEQ ID NO: 90397 - protein, 9 aa, Homo Sapiens
VPFPLTLRF

SEQ ID NO: 90398 - protein, 9 aa, Homo Sapiens
VPFSIFDEF

SEQ ID NO: 90399 - protein, 9 aa, Homo Sapiens
VPFTEEQLF

SEQ ID NO: 90400 - protein, 9 aa, Homo Sapiens
VPHSIINGY

SEQ ID NO: 90401 - protein, 9 aa, Homo Sapiens
VPHTNPPEY

SEQ ID NO: 90402 - protein, 9 aa, Homo Sapiens
VPILNPVVY

SEQ ID NO: 90403 - protein, 9 aa, Homo Sapiens
VPIPTVNQY

SEQ ID NO: 90404 - protein, 9 aa, Homo Sapiens
VPLDLCEVY

SEQ ID NO: 90405 - protein, 9 aa, Homo Sapiens
VPLGMTVTF

SEQ ID NO: 90406 - protein, 9 aa, Homo Sapiens
VPNDIQSEL

SEQ ID NO: 90407 - protein, 9 aa, Homo Sapiens
VPNKVIQCF

SEQ ID NO: 90408 - protein, 9 aa, Homo Sapiens
VPQSGVPAL

SEQ ID NO: 90409 - protein, 9 aa, Homo Sapiens
VPRIQLEEY

SEQ ID NO: 90410 - protein, 9 aa, Homo Sapiens
VPSGLIVDY

SEQ ID NO: 90411 - protein, 9 aa, Homo Sapiens
VPSPAQIMY

SEQ ID NO: 90412 - protein, 9 aa, Homo Sapiens
VPTDEITVY

SEQ ID NO: 90413 - protein, 9 aa, Homo Sapiens
VPTELALLY

SEQ ID NO: 90414 - protein, 9 aa, Homo Sapiens
VPTPIHPIF

SEQ ID NO: 90415 - protein, 9 aa, Homo Sapiens
VPTPIQPTF

SEQ ID NO: 90416 - protein, 9 aa, Homo Sapiens
VPTTGIIEY

SEQ ID NO: 90417 - protein, 9 aa, Homo Sapiens
VPVDDLEVY

SEQ ID NO: 90418 - protein, 9 aa, Homo Sapiens
VPVDLQHQF

SEQ ID NO: 90419 - protein, 9 aa, Homo Sapiens
VPVDSAPVM

SEQ ID NO: 90420 - protein, 9 aa, Homo Sapiens
VPVDVVVNM

SEQ ID NO: 90421 - protein, 9 aa, Homo Sapiens
VPVEEPIAF

SEQ ID NO: 90422 - protein, 9 aa, Homo Sapiens
VPVEEQEEF

SEQ ID NO: 90423 - protein, 9 aa, Homo Sapiens
VPVGEKTTY

SEQ ID NO: 90424 - protein, 9 aa, Homo Sapiens
VPVMLTEQY

SEQ ID NO: 90425 - protein, 9 aa, Homo Sapiens
VPVNHTQVM

SEQ ID NO: 90426 - protein, 9 aa, Homo Sapiens
VPVPPLPEY

SEQ ID NO: 90427 - protein, 9 aa, Homo Sapiens
VPVPPNVAF

SEQ ID NO: 90428 - protein, 9 aa, Homo Sapiens
VPVRDIPAF

SEQ ID NO: 90429 - protein, 9 aa, Homo Sapiens
VPVSVVECF

SEQ ID NO: 90430 - protein, 9 aa, Homo Sapiens
VPVWIIHYY

SEQ ID NO: 90431 - protein, 9 aa, Homo Sapiens
VPWLSSVRY

SEQ ID NO: 90432 - protein, 9 aa, Homo Sapiens
VPWTELLSL

SEQ ID NO: 90433 - protein, 9 aa, Homo Sapiens
VPYKDEELY

SEQ ID NO: 90434 - protein, 9 aa, Homo Sapiens
VPYWPEVGM

SEQ ID NO: 90435 - protein, 9 aa, Homo Sapiens
VVAPITTGY

SEQ ID NO: 90436 - protein, 9 aa, Homo Sapiens
VVPTAILAF

SEQ ID NO: 90437 - protein, 9 aa, Homo Sapiens
WARLDETPF

SEQ ID NO: 90438 - protein, 9 aa, Homo Sapiens
WPHEDAAQF

SEQ ID NO: 90439 - protein, 9 aa, Homo Sapiens
WPIDDHFTY

SEQ ID NO: 90440 - protein, 9 aa, Homo Sapiens
YAALHGEFY

SEQ ID NO: 90441 - protein, 9 aa, Homo Sapiens
YAFDFARQS

SEQ ID NO: 90442 - protein, 9 aa, Homo Sapiens
YAFKFFDTY

SEQ ID NO: 90443 - protein, 9 aa, Homo Sapiens
YAFPKEFPY

SEQ ID NO: 90444 - protein, 9 aa, Homo Sapiens
YAHQYYMQY

SEQ ID NO: 90445 - protein, 9 aa, Homo Sapiens
YAIDNPLHY

SEQ ID NO: 90446 - protein, 9 aa, Homo Sapiens
YAIEVDPVL

SEQ ID NO: 90447 - protein, 9 aa, Homo Sapiens
YANEVGEAF

SEQ ID NO: 90448 - protein, 9 aa, Homo Sapiens
YARDETEFY

SEQ ID NO: 90449 - protein, 9 aa, Homo Sapiens
YARNDTVRF

SEQ ID NO: 90450 - protein, 9 aa, Homo Sapiens
YATFIVTNY

SEQ ID NO: 90451 - protein, 9 aa, Homo Sapiens
YAYETKDAL

SEQ ID NO: 90452 - protein, 9 aa, Homo Sapiens
YGFQEKEAF

SEQ ID NO: 90453 - protein, 9 aa, Homo Sapiens
YIFKERESF

SEQ ID NO: 90454 - protein, 9 aa, Homo Sapiens
YMFVDENTF

SEQ ID NO: 90455 - protein, 9 aa, Homo Sapiens
YPAAPLPGF

SEQ ID NO: 90456 - protein, 9 aa, Homo Sapiens
YPAAVPQAL

SEQ ID NO: 90457 - protein, 9 aa, Homo Sapiens
YPAEITLTW

SEQ ID NO: 90458 - protein, 9 aa, Homo Sapiens
YPAENLIEY

SEQ ID NO: 90459 - protein, 9 aa, Homo Sapiens
YPAHMYQVY

SEQ ID NO: 90460 - protein, 9 aa, Homo Sapiens
YPALVVEKM

SEQ ID NO: 90461 - protein, 9 aa, Homo Sapiens
YPAPGLKTF

SEQ ID NO: 90462 - protein, 9 aa, Homo Sapiens
YPAPYLDEY

SEQ ID NO: 90463 - protein, 9 aa, Homo Sapiens
YPAQGVQQF

SEQ ID NO: 90464 - protein, 9 aa, Homo Sapiens
YPAQITPKM

SEQ ID NO: 90465 - protein, 9 aa, Homo Sapiens
YPASTVQIL

SEQ ID NO: 90466 - protein, 9 aa, Homo Sapiens
YPDEKSVCL

SEQ ID NO: 90467 - protein, 9 aa, Homo Sapiens
YPDEYHGEY

SEQ ID NO: 90468 - protein, 9 aa, Homo Sapiens
YPDPRGAPW

SEQ ID NO: 90469 - protein, 9 aa, Homo Sapiens
YPDPTFPAM

SEQ ID NO: 90470 - protein, 9 aa, Homo Sapiens
YPDPVIQEL

SEQ ID NO: 90471 - protein, 9 aa, Homo Sapiens
YPDQYVREY

SEQ ID NO: 90472 - protein, 9 aa, Homo Sapiens
YPDTDVILM

SEQ ID NO: 90473 - protein, 9 aa, Homo Sapiens
YPENIVPSF

SEQ ID NO: 90474 - protein, 9 aa, Homo Sapiens
YPFDDSPEH

SEQ ID NO: 90475 - protein, 9 aa, Homo Sapiens
YPFDSPQVM

SEQ ID NO: 90476 - protein, 9 aa, Homo Sapiens
YPFENKREF

SEQ ID NO: 90477 - protein, 9 aa, Homo Sapiens
YPFKDVNNW

SEQ ID NO: 90478 - protein, 9 aa, Homo Sapiens
YPFSSEQKW

SEQ ID NO: 90479 - protein, 9 aa, Homo Sapiens
YPFYKTDPF

SEQ ID NO: 90480 - protein, 9 aa, Homo Sapiens
YPGQPHPAL

SEQ ID NO: 90481 - protein, 9 aa, Homo Sapiens
YPHDGKIFF

SEQ ID NO: 90482 - protein, 9 aa, Homo Sapiens
YPHEPTAVF

SEQ ID NO: 90483 - protein, 9 aa, Homo Sapiens
YPHQVPLVL

SEQ ID NO: 90484 - protein, 9 aa, Homo Sapiens
YPIAVDCSW

SEQ ID NO: 90485 - protein, 9 aa, Homo Sapiens
YPKANIVAY

SEQ ID NO: 90486 - protein, 9 aa, Homo Sapiens
YPLDLLLKL

SEQ ID NO: 90487 - protein, 9 aa, Homo Sapiens
YPLDVQKEF

SEQ ID NO: 90488 - protein, 9 aa, Homo Sapiens
YPLEDHTEF

SEQ ID NO: 90489 - protein, 9 aa, Homo Sapiens
YPLEDLPSL

SEQ ID NO: 90490 - protein, 9 aa, Homo Sapiens
YPLLQDPAY

SEQ ID NO: 90491 - protein, 9 aa, Homo Sapiens
YPLQEVERF

SEQ ID NO: 90492 - protein, 9 aa, Homo Sapiens
YPLTCKVVY

SEQ ID NO: 90493 - protein, 9 aa, Homo Sapiens
YPLWGGIMY

SEQ ID NO: 90494 - protein, 9 aa, Homo Sapiens
YPNEEKDAW

SEQ ID NO: 90495 - protein, 9 aa, Homo Sapiens
YPNGLQVNF

SEQ ID NO: 90496 - protein, 9 aa, Homo Sapiens
YPNGVVVHY

SEQ ID NO: 90497 - protein, 9 aa, Homo Sapiens
YPNPKPEVL

SEQ ID NO: 90498 - protein, 9 aa, Homo Sapiens
YPNSHTHYF

SEQ ID NO: 90499 - protein, 9 aa, Homo Sapiens
YPNVNIHNF

SEQ ID NO: 90500 - protein, 9 aa, Homo Sapiens
YPQDNMHQM

SEQ ID NO: 90501 - protein, 9 aa, Homo Sapiens
YPQEDYESF

SEQ ID NO: 90502 - protein, 9 aa, Homo Sapiens
YPQEVIPTF

SEQ ID NO: 90503 - protein, 9 aa, Homo Sapiens
YPQNPDHVL

SEQ ID NO: 90504 - protein, 9 aa, Homo Sapiens
YPQPPSQSY

SEQ ID NO: 90505 - protein, 9 aa, Homo Sapiens
YPRFLESEF

SEQ ID NO: 90506 - protein, 9 aa, Homo Sapiens
YPRPRDTSF

SEQ ID NO: 90507 - protein, 9 aa, Homo Sapiens
YPRSDVDLY

SEQ ID NO: 90508 - protein, 9 aa, Homo Sapiens
YPSEFATYL

SEQ ID NO: 90509 - protein, 9 aa, Homo Sapiens
YPSETTVKY

SEQ ID NO: 90510 - protein, 9 aa, Homo Sapiens
YPSIHITAY

SEQ ID NO: 90511 - protein, 9 aa, Homo Sapiens
YPSNIFISF

SEQ ID NO: 90512 - protein, 9 aa, Homo Sapiens
YPSSDNSLY

SEQ ID NO: 90513 - protein, 9 aa, Homo Sapiens
YPTEDYKVY

SEQ ID NO: 90514 - protein, 9 aa, Homo Sapiens
YPTQPGQGY

SEQ ID NO: 90515 - protein, 9 aa, Homo Sapiens
YPTVASVPH

SEQ ID NO: 90516 - protein, 9 aa, Homo Sapiens
YPVDLGDKF

SEQ ID NO: 90517 - protein, 9 aa, Homo Sapiens
YPVEHPDKF

SEQ ID NO: 90518 - protein, 9 aa, Homo Sapiens
YPVEIHEYL

SEQ ID NO: 90519 - protein, 9 aa, Homo Sapiens
YPVLVRAAF

SEQ ID NO: 90520 - protein, 9 aa, Homo Sapiens
YPVPDVSTY

SEQ ID NO: 90521 - protein, 9 aa, Homo Sapiens
YPVSSPKSM

SEQ ID NO: 90522 - protein, 9 aa, Homo Sapiens
YPWSQRVSF

SEQ ID NO: 90523 - protein, 9 aa, Homo Sapiens
YPWWEQQGF

SEQ ID NO: 90524 - protein, 9 aa, Homo Sapiens
YPYEAPPSY

SEQ ID NO: 90525 - protein, 9 aa, Homo Sapiens
YPYNPPICF

SEQ ID NO: 90526 - protein, 9 aa, Homo Sapiens
YPYPYPHTL

SEQ ID NO: 90527 - protein, 9 aa, Homo Sapiens
YPYTETQMY

SEQ ID NO: 90528 - protein, 9 aa, Homo Sapiens
YVVDLDDEY

SEQ ID NO: 90529 - protein, 10 aa, Homo Sapiens
AGHINPLIIY

SEQ ID NO: 90530 - protein, 10 aa, Homo Sapiens
APIDEAFESY

SEQ ID NO: 90531 - protein, 10 aa, Homo Sapiens
AQAGWLQHDY

SEQ ID NO: 90532 - protein, 10 aa, Homo Sapiens
CPASLRDVAY

SEQ ID NO: 90533 - protein, 10 aa, Homo Sapiens
DAFLEQAVSY

SEQ ID NO: 90534 - protein, 10 aa, Homo Sapiens
DAWEGKGVSY

SEQ ID NO: 90535 - protein, 10 aa, Homo Sapiens
DAWLEMNPGY

SEQ ID NO: 90536 - protein, 10 aa, Homo Sapiens
DPIGGHIHSY

SEQ ID NO: 90537 - protein, 10 aa, Homo Sapiens
EAARLEYDAY

SEQ ID NO: 90538 - protein, 10 aa, Homo Sapiens
EAIKILKGEY

SEQ ID NO: 90539 - protein, 10 aa, Homo Sapiens
EAMRIGAEVY

SEQ ID NO: 90540 - protein, 10 aa, Homo Sapiens
EAVWLTDNTY

SEQ ID NO: 90541 - protein, 10 aa, Homo Sapiens
EAWADDVERF

SEQ ID NO: 90542 - protein, 10 aa, Homo Sapiens
EAWASKDATY

SEQ ID NO: 90543 - protein, 10 aa, Homo Sapiens
EAWHELAELY

SEQ ID NO: 90544 - protein, 10 aa, Homo Sapiens
EAWLEMNPGY

SEQ ID NO: 90545 - protein, 10 aa, Homo Sapiens
EPAHRTAPAG

SEQ ID NO: 90546 - protein, 10 aa, Homo Sapiens
EPVDHGKIEY

SEQ ID NO: 90547 - protein, 10 aa, Homo Sapiens
EPWPENATLY

SEQ ID NO: 90548 - protein, 10 aa, Homo Sapiens
FAAQTVGNTY

SEQ ID NO: 90549 - protein, 10 aa, Homo Sapiens
FADPHSKRVF

SEQ ID NO: 90550 - protein, 10 aa, Homo Sapiens
FANPEDCVAF

SEQ ID NO: 90551 - protein, 10 aa, Homo Sapiens
FAVDLEHHSY

SEQ ID NO: 90552 - protein, 10 aa, Homo Sapiens
FAYSDSRVGF

SEQ ID NO: 90553 - protein, 10 aa, Homo Sapiens
FPAGILQAPF

SEQ ID NO: 90554 - protein, 10 aa, Homo Sapiens
FPAGIYDTKY

SEQ ID NO: 90555 - protein, 10 aa, Homo Sapiens
FPAPAKAVVY

SEQ ID NO: 90556 - protein, 10 aa, Homo Sapiens
FPASFPNRQY

SEQ ID NO: 90557 - protein, 10 aa, Homo Sapiens
FPASVHTTRY

SEQ ID NO: 90558 - protein, 10 aa, Homo Sapiens
FPDEPYKDGY

SEQ ID NO: 90559 - protein, 10 aa, Homo Sapiens
FPDPEKPCKM

SEQ ID NO: 90560 - protein, 10 aa, Homo Sapiens
FPDPNVKYVF

SEQ ID NO: 90561 - protein, 10 aa, Homo Sapiens
FPDTGSDHSY

SEQ ID NO: 90562 - protein, 10 aa, Homo Sapiens
FPEAYKPTVY

SEQ ID NO: 90563 - protein, 10 aa, Homo Sapiens
FPEEVIATIF

SEQ ID NO: 90564 - protein, 10 aa, Homo Sapiens
FPEGLVIQAY

SEQ ID NO: 90565 - protein, 10 aa, Homo Sapiens
FPEPSRPPLF

SEQ ID NO: 90566 - protein, 10 aa, Homo Sapiens
FPESLVIQAY

SEQ ID NO: 90567 - protein, 10 aa, Homo Sapiens
FPESSAIEAL

SEQ ID NO: 90568 - protein, 10 aa, Homo Sapiens
FPETTSPHEY

SEQ ID NO: 90569 - protein, 10 aa, Homo Sapiens
FPFEKGSVQY

SEQ ID NO: 90570 - protein, 10 aa, Homo Sapiens
FPFHEVIQEF

SEQ ID NO: 90571 - protein, 10 aa, Homo Sapiens
FPFPKPDLIF

SEQ ID NO: 90572 - protein, 10 aa, Homo Sapiens
FPFSQDINSH

SEQ ID NO: 90573 - protein, 10 aa, Homo Sapiens
FPHNFQETTY

SEQ ID NO: 90574 - protein, 10 aa, Homo Sapiens
FPHPVNQVTF

SEQ ID NO: 90575 - protein, 10 aa, Homo Sapiens
FPMTHGNTGF

SEQ ID NO: 90576 - protein, 10 aa, Homo Sapiens
FPNTETNGEF

SEQ ID NO: 90577 - protein, 10 aa, Homo Sapiens
FPRAQDKVHY

SEQ ID NO: 90578 - protein, 10 aa, Homo Sapiens
FPSEYVPTVF

SEQ ID NO: 90579 - protein, 10 aa, Homo Sapiens
FPSPILKVQY

SEQ ID NO: 90580 - protein, 10 aa, Homo Sapiens
FPSSVAALRF

SEQ ID NO: 90581 - protein, 10 aa, Homo Sapiens
FPSTICTESF

SEQ ID NO: 90582 - protein, 10 aa, Homo Sapiens
FPTDPKVVVY

SEQ ID NO: 90583 - protein, 10 aa, Homo Sapiens
FPVAGQKLIY

SEQ ID NO: 90584 - protein, 10 aa, Homo Sapiens
FPVEEKAVEY

SEQ ID NO: 90585 - protein, 10 aa, Homo Sapiens
FPVEIKSFYM

SEQ ID NO: 90586 - protein, 10 aa, Homo Sapiens
FPVKGLKTGY

SEQ ID NO: 90587 - protein, 10 aa, Homo Sapiens
FPVPGSGLVL

SEQ ID NO: 90588 - protein, 10 aa, Homo Sapiens
FPWGDGNHTL

SEQ ID NO: 90589 - protein, 10 aa, Homo Sapiens
FPYADGPHQF

SEQ ID NO: 90590 - protein, 10 aa, Homo Sapiens
FPYDYSASEY

SEQ ID NO: 90591 - protein, 10 aa, Homo Sapiens
FPYEESKEKF

SEQ ID NO: 90592 - protein, 10 aa, Homo Sapiens
FPYIEAEVKY

SEQ ID NO: 90593 - protein, 10 aa, Homo Sapiens
FPYQDKLVGY

SEQ ID NO: 90594 - protein, 10 aa, Homo Sapiens
FPYSENKEKY

SEQ ID NO: 90595 - protein, 10 aa, Homo Sapiens
HAAESISSPY

SEQ ID NO: 90596 - protein, 10 aa, Homo Sapiens
HAARIINDLL

SEQ ID NO: 90597 - protein, 10 aa, Homo Sapiens
HACDVVAVTL

SEQ ID NO: 90598 - protein, 10 aa, Homo Sapiens
HAEASAIVEY

SEQ ID NO: 90599 - protein, 10 aa, Homo Sapiens
HAFGGNKASY

SEQ ID NO: 90600 - protein, 10 aa, Homo Sapiens
HAIQDLLVFY

SEQ ID NO: 90601 - protein, 10 aa, Homo Sapiens
HAYIFRPEVY

SEQ ID NO: 90602 - protein, 10 aa, Homo Sapiens
HPCGADVPSY

SEQ ID NO: 90603 - protein, 10 aa, Homo Sapiens
HPDAPMSQVY

SEQ ID NO: 90604 - protein, 10 aa, Homo Sapiens
HPDEKSIITY

SEQ ID NO: 90605 - protein, 10 aa, Homo Sapiens
HPDPFANKSL

SEQ ID NO: 90606 - protein, 10 aa, Homo Sapiens
HPEASIQAVF

SEQ ID NO: 90607 - protein, 10 aa, Homo Sapiens
HPFHATPNTY

SEQ ID NO: 90608 - protein, 10 aa, Homo Sapiens
HPFHATPNVY

SEQ ID NO: 90609 - protein, 10 aa, Homo Sapiens
HPFLSGAETF

SEQ ID NO: 90610 - protein, 10 aa, Homo Sapiens
HPFLYDRETY

SEQ ID NO: 90611 - protein, 10 aa, Homo Sapiens
HPFTNKPTTF

SEQ ID NO: 90612 - protein, 10 aa, Homo Sapiens
HPHPFLNSVY

SEQ ID NO: 90613 - protein, 10 aa, Homo Sapiens
HPHQNLIATY

SEQ ID NO: 90614 - protein, 10 aa, Homo Sapiens
HPIDDLQSAY

SEQ ID NO: 90615 - protein, 10 aa, Homo Sapiens
HPIDGFLQSL

SEQ ID NO: 90616 - protein, 10 aa, Homo Sapiens
HPIEGSTTVF

SEQ ID NO: 90617 - protein, 10 aa, Homo Sapiens
HPIETLVDIF

SEQ ID NO: 90618 - protein, 10 aa, Homo Sapiens
HPIHADNCLL

SEQ ID NO: 90619 - protein, 10 aa, Homo Sapiens
HPIHQGITEL

SEQ ID NO: 90620 - protein, 10 aa, Homo Sapiens
HPIIPEQSTF

SEQ ID NO: 90621 - protein, 10 aa, Homo Sapiens
HPISDHEATL

SEQ ID NO: 90622 - protein, 10 aa, Homo Sapiens
HPISSGLEAM

SEQ ID NO: 90623 - protein, 10 aa, Homo Sapiens
HPLSLTSDQY

SEQ ID NO: 90624 - protein, 10 aa, Homo Sapiens
HPLSVLGINY

SEQ ID NO: 90625 - protein, 10 aa, Homo Sapiens
HPLYPFNDPY

SEQ ID NO: 90626 - protein, 10 aa, Homo Sapiens
HPNLVVGGTY

SEQ ID NO: 90627 - protein, 10 aa, Homo Sapiens
HPNNVVSIKY

SEQ ID NO: 90628 - protein, 10 aa, Homo Sapiens
HPNNVVSVKY

SEQ ID NO: 90629 - protein, 10 aa, Homo Sapiens
HPNSCNTFVY

SEQ ID NO: 90630 - protein, 10 aa, Homo Sapiens
HPNYLGDLIM

SEQ ID NO: 90631 - protein, 10 aa, Homo Sapiens
HPTLGPKITY

SEQ ID NO: 90632 - protein, 10 aa, Homo Sapiens
HPVAKILHAY

SEQ ID NO: 90633 - protein, 10 aa, Homo Sapiens
HPVEELLDSY

SEQ ID NO: 90634 - protein, 10 aa, Homo Sapiens
HPVRDPVHMY

SEQ ID NO: 90635 - protein, 10 aa, Homo Sapiens
HPVSLEQYLM

SEQ ID NO: 90636 - protein, 10 aa, Homo Sapiens
HPVYILKGGY

SEQ ID NO: 90637 - protein, 10 aa, Homo Sapiens
HPWEVMPDLY

SEQ ID NO: 90638 - protein, 10 aa, Homo Sapiens
HPWFGMEQEY

SEQ ID NO: 90639 - protein, 10 aa, Homo Sapiens
HPYSQALIQY

SEQ ID NO: 90640 - protein, 10 aa, Homo Sapiens
IPAPGSGVSF

SEQ ID NO: 90641 - protein, 10 aa, Homo Sapiens
IPFDGDLLSM

SEQ ID NO: 90642 - protein, 10 aa, Homo Sapiens
IPFDPKFITY

SEQ ID NO: 90643 - protein, 10 aa, Homo Sapiens
IPFLGHAIAF

SEQ ID NO: 90644 - protein, 10 aa, Homo Sapiens
IPFSGKGYVL

SEQ ID NO: 90645 - protein, 10 aa, Homo Sapiens
IPIAGRDITY

SEQ ID NO: 90646 - protein, 10 aa, Homo Sapiens
IPLDGETWSY

SEQ ID NO: 90647 - protein, 10 aa, Homo Sapiens
IPLHQINQVY

SEQ ID NO: 90648 - protein, 10 aa, Homo Sapiens
IPMELINEVM

SEQ ID NO: 90649 - protein, 10 aa, Homo Sapiens
IPMELVNEVM

SEQ ID NO: 90650 - protein, 10 aa, Homo Sapiens
IPSSVIHPAM

SEQ ID NO: 90651 - protein, 10 aa, Homo Sapiens
IPVEQKEGAF

SEQ ID NO: 90652 - protein, 10 aa, Homo Sapiens
LAWLDEHVAF

SEQ ID NO: 90653 - protein, 10 aa, Homo Sapiens
LPAAAAAGAA

SEQ ID NO: 90654 - protein, 10 aa, Homo Sapiens
LPAAAQDVYY

SEQ ID NO: 90655 - protein, 10 aa, Homo Sapiens
LPADITEDEF

SEQ ID NO: 90656 - protein, 10 aa, Homo Sapiens
LPDLSGPHSY

SEQ ID NO: 90657 - protein, 10 aa, Homo Sapiens
LPEARGRAGL

SEQ ID NO: 90658 - protein, 10 aa, Homo Sapiens
LPFEGKCYYF

SEQ ID NO: 90659 - protein, 10 aa, Homo Sapiens
LPFPGRSASY

SEQ ID NO: 90660 - protein, 10 aa, Homo Sapiens
LPFPNPERNF

SEQ ID NO: 90661 - protein, 10 aa, Homo Sapiens
LPFSSMPTAY

SEQ ID NO: 90662 - protein, 10 aa, Homo Sapiens
LPHPYAIAVF

SEQ ID NO: 90663 - protein, 10 aa, Homo Sapiens
LPIAPDLEHF

SEQ ID NO: 90664 - protein, 10 aa, Homo Sapiens
LPIDGANDLF

SEQ ID NO: 90665 - protein, 10 aa, Homo Sapiens
LPIDPNEPTY

SEQ ID NO: 90666 - protein, 10 aa, Homo Sapiens
LPIENDVYKY

SEQ ID NO: 90667 - protein, 10 aa, Homo Sapiens
LPIESNPHSF

SEQ ID NO: 90668 - protein, 10 aa, Homo Sapiens
LPIGDVATQY

SEQ ID NO: 90669 - protein, 10 aa, Homo Sapiens
LPIPGPVEEM

SEQ ID NO: 90670 - protein, 10 aa, Homo Sapiens
LPIPSKLLEF

SEQ ID NO: 90671 - protein, 10 aa, Homo Sapiens
LPLERDAESF

SEQ ID NO: 90672 - protein, 10 aa, Homo Sapiens
LPLPAPHAQY

SEQ ID NO: 90673 - protein, 10 aa, Homo Sapiens
LPLPSCLPAL

SEQ ID NO: 90674 - protein, 10 aa, Homo Sapiens
LPLPSPALEY

SEQ ID NO: 90675 - protein, 10 aa, Homo Sapiens
LPLSIKDDEY

SEQ ID NO: 90676 - protein, 10 aa, Homo Sapiens
LPMKETGLMY

SEQ ID NO: 90677 - protein, 10 aa, Homo Sapiens
LPQPPEGQTY

SEQ ID NO: 90678 - protein, 10 aa, Homo Sapiens
LPSEAGFAEY

SEQ ID NO: 90679 - protein, 10 aa, Homo Sapiens
LPSPVTAQKY

SEQ ID NO: 90680 - protein, 10 aa, Homo Sapiens
LPTAAHFIEY

SEQ ID NO: 90681 - protein, 10 aa, Homo Sapiens
LPTEPPYTAY

SEQ ID NO: 90682 - protein, 10 aa, Homo Sapiens
LPVEQGNFPY

SEQ ID NO: 90683 - protein, 10 aa, Homo Sapiens
LPVGNETGLL

SEQ ID NO: 90684 - protein, 10 aa, Homo Sapiens
LPWEDPSFQY

SEQ ID NO: 90685 - protein, 10 aa, Homo Sapiens
LPYNHQHEYF

SEQ ID NO: 90686 - protein, 10 aa, Homo Sapiens
MALQEACEAY

SEQ ID NO: 90687 - protein, 10 aa, Homo Sapiens
MALQEASEAY

SEQ ID NO: 90688 - protein, 10 aa, Homo Sapiens
MAYEGQYDAY

SEQ ID NO: 90689 - protein, 10 aa, Homo Sapiens
MPADSGYPAY

SEQ ID NO: 90690 - protein, 10 aa, Homo Sapiens
MPALFSDHTF

SEQ ID NO: 90691 - protein, 10 aa, Homo Sapiens
MPAPHTSITM

SEQ ID NO: 90692 - protein, 10 aa, Homo Sapiens
MPCPVPPARM

SEQ ID NO: 90693 - protein, 10 aa, Homo Sapiens
MPEEKLVEAL

SEQ ID NO: 90694 - protein, 10 aa, Homo Sapiens
MPEPDAQRFF

SEQ ID NO: 90695 - protein, 10 aa, Homo Sapiens
MPESGPSYEF

SEQ ID NO: 90696 - protein, 10 aa, Homo Sapiens
MPFAPAIQTF

SEQ ID NO: 90697 - protein, 10 aa, Homo Sapiens
MPFEIRLPEF

SEQ ID NO: 90698 - protein, 10 aa, Homo Sapiens
MPFKDRATSM

SEQ ID NO: 90699 - protein, 10 aa, Homo Sapiens
MPFQRAGVNF

SEQ ID NO: 90700 - protein, 10 aa, Homo Sapiens
MPHANMNVHY

SEQ ID NO: 90701 - protein, 10 aa, Homo Sapiens
MPHAPIGLYF

SEQ ID NO: 90702 - protein, 10 aa, Homo Sapiens
MPHEDCITAL

SEQ ID NO: 90703 - protein, 10 aa, Homo Sapiens
MPIPGGNQRF

SEQ ID NO: 90704 - protein, 10 aa, Homo Sapiens
MPLEEGDTFF

SEQ ID NO: 90705 - protein, 10 aa, Homo Sapiens
MPLGSAVDIL

SEQ ID NO: 90706 - protein, 10 aa, Homo Sapiens
MPLSNGLQLY

SEQ ID NO: 90707 - protein, 10 aa, Homo Sapiens
MPNSASRDEF

SEQ ID NO: 90708 - protein, 10 aa, Homo Sapiens
MPPQNVGEVY

SEQ ID NO: 90709 - protein, 10 aa, Homo Sapiens
MPSQSVEQTY

SEQ ID NO: 90710 - protein, 10 aa, Homo Sapiens
MPSSDTTVTF

SEQ ID NO: 90711 - protein, 10 aa, Homo Sapiens
MPTGEAMVAF

SEQ ID NO: 90712 - protein, 10 aa, Homo Sapiens
MPVDDVIGTL

SEQ ID NO: 90713 - protein, 10 aa, Homo Sapiens
MPVDPNEPTY

SEQ ID NO: 90714 - protein, 10 aa, Homo Sapiens
MPVPSMVPSY

SEQ ID NO: 90715 - protein, 10 aa, Homo Sapiens
MPVTYKDPAY

SEQ ID NO: 90716 - protein, 10 aa, Homo Sapiens
MPYDTPVPGY

SEQ ID NO: 90717 - protein, 10 aa, Homo Sapiens
MVNPFAYEEY

SEQ ID NO: 90718 - protein, 10 aa, Homo Sapiens
MVYAATPIDF

SEQ ID NO: 90719 - protein, 10 aa, Homo Sapiens
NAARSQLETY

SEQ ID NO: 90720 - protein, 10 aa, Homo Sapiens
NAFYEHAQTY

SEQ ID NO: 90721 - protein, 10 aa, Homo Sapiens
NALNEQRVEF

SEQ ID NO: 90722 - protein, 10 aa, Homo Sapiens
NAVDALIDSM

SEQ ID NO: 90723 - protein, 10 aa, Homo Sapiens
NPFHWGEVEY

SEQ ID NO: 90724 - protein, 10 aa, Homo Sapiens
NPMMEDGISY

SEQ ID NO: 90725 - protein, 10 aa, Homo Sapiens
NVVKLLGEQY

SEQ ID NO: 90726 - protein, 10 aa, Homo Sapiens
QAFQERLNSY

SEQ ID NO: 90727 - protein, 10 aa, Homo Sapiens
QALRLEREEY

SEQ ID NO: 90728 - protein, 10 aa, Homo Sapiens
QARPELLEVF

SEQ ID NO: 90729 - protein, 10 aa, Homo Sapiens
QAYPEYLITY

SEQ ID NO: 90730 - protein, 10 aa, Homo Sapiens
QPAIIDGELY

SEQ ID NO: 90731 - protein, 10 aa, Homo Sapiens
QPAQDIFSVY

SEQ ID NO: 90732 - protein, 10 aa, Homo Sapiens
QPDPDAIKMF

SEQ ID NO: 90733 - protein, 10 aa, Homo Sapiens
QPWEEIKTSY

SEQ ID NO: 90734 - protein, 10 aa, Homo Sapiens
SALDRCYSVY

SEQ ID NO: 90735 - protein, 10 aa, Homo Sapiens
SASEVTSTVY

SEQ ID NO: 90736 - protein, 10 aa, Homo Sapiens
SMPADVSEAL

SEQ ID NO: 90737 - protein, 10 aa, Homo Sapiens
SPASDTYIVF

SEQ ID NO: 90738 - protein, 10 aa, Homo Sapiens
SPFPGPDPGF

SEQ ID NO: 90739 - protein, 10 aa, Homo Sapiens
SPFYPGKTTY

SEQ ID NO: 90740 - protein, 10 aa, Homo Sapiens
SPIEFLENAY

SEQ ID NO: 90741 - protein, 10 aa, Homo Sapiens
SPIPFPPLSY

SEQ ID NO: 90742 - protein, 10 aa, Homo Sapiens
SPPIIVGEEY

SEQ ID NO: 90743 - protein, 10 aa, Homo Sapiens
SPQPDGKVVY

SEQ ID NO: 90744 - protein, 10 aa, Homo Sapiens
SPVSKGILQY

SEQ ID NO: 90745 - protein, 10 aa, Homo Sapiens
SQRPPTRETF

SEQ ID NO: 90746 - protein, 10 aa, Homo Sapiens
SVAEITNACF

SEQ ID NO: 90747 - protein, 10 aa, Homo Sapiens
TAALIKGELY

SEQ ID NO: 90748 - protein, 10 aa, Homo Sapiens
TAHDDRGIRF

SEQ ID NO: 90749 - protein, 10 aa, Homo Sapiens
TAIGAHPVSM

SEQ ID NO: 90750 - protein, 10 aa, Homo Sapiens
TANPQTPVEY

SEQ ID NO: 90751 - protein, 10 aa, Homo Sapiens
TAVHLVDSHY

SEQ ID NO: 90752 - protein, 10 aa, Homo Sapiens
TAWDEADVRF

SEQ ID NO: 90753 - protein, 10 aa, Homo Sapiens
TAWLEIMTKY

SEQ ID NO: 90754 - protein, 10 aa, Homo Sapiens
TPCPGPFLRY

SEQ ID NO: 90755 - protein, 10 aa, Homo Sapiens
TPLSLFGDTY

SEQ ID NO: 90756 - protein, 10 aa, Homo Sapiens
TPNPGYQPSM

SEQ ID NO: 90757 - protein, 10 aa, Homo Sapiens
VPFSSCLEAY

SEQ ID NO: 90758 - protein, 10 aa, Homo Sapiens
VPLEEAAQEY

SEQ ID NO: 90759 - protein, 10 aa, Homo Sapiens
VPLREINQKY

SEQ ID NO: 90760 - protein, 10 aa, Homo Sapiens
VPYPDDLVGF

SEQ ID NO: 90761 - protein, 10 aa, Homo Sapiens
YAAPAPEQAY

SEQ ID NO: 90762 - protein, 10 aa, Homo Sapiens
YAAPHPLQSY

SEQ ID NO: 90763 - protein, 10 aa, Homo Sapiens
YAFQDDRYLY

SEQ ID NO: 90764 - protein, 10 aa, Homo Sapiens
YALEEGIVRY

SEQ ID NO: 90765 - protein, 10 aa, Homo Sapiens
YAQDEHLITF

SEQ ID NO: 90766 - protein, 10 aa, Homo Sapiens
YAWRPVFDEY

SEQ ID NO: 90767 - protein, 10 aa, Homo Sapiens
YDAEISQIHQ

SEQ ID NO: 90768 - protein, 10 aa, Homo Sapiens
YPAHIEDIDY

SEQ ID NO: 90769 - protein, 10 aa, Homo Sapiens
YPATGADVAF

SEQ ID NO: 90770 - protein, 10 aa, Homo Sapiens
YPDPSKQKPM

SEQ ID NO: 90771 - protein, 10 aa, Homo Sapiens
YPEPQNKEAF

SEQ ID NO: 90772 - protein, 10 aa, Homo Sapiens
YPFDSPQVMF

SEQ ID NO: 90773 - protein, 10 aa, Homo Sapiens
YPFHKQPPTY

SEQ ID NO: 90774 - protein, 10 aa, Homo Sapiens
YPFIISSESY

SEQ ID NO: 90775 - protein, 10 aa, Homo Sapiens
YPFKPPKIAF

SEQ ID NO: 90776 - protein, 10 aa, Homo Sapiens
YPFKPPKITF

SEQ ID NO: 90777 - protein, 10 aa, Homo Sapiens
YPFKPPKVAF

SEQ ID NO: 90778 - protein, 10 aa, Homo Sapiens
YPFKPPKVTF

SEQ ID NO: 90779 - protein, 10 aa, Homo Sapiens
YPFKSPSIGF

SEQ ID NO: 90780 - protein, 10 aa, Homo Sapiens
YPFLLVGDLM

SEQ ID NO: 90781 - protein, 10 aa, Homo Sapiens
YPFPTFQPAF

SEQ ID NO: 90782 - protein, 10 aa, Homo Sapiens
YPIALTRAEM

SEQ ID NO: 90783 - protein, 10 aa, Homo Sapiens
YPIDDVYTGM

SEQ ID NO: 90784 - protein, 10 aa, Homo Sapiens
YPIDPVTQEF

SEQ ID NO: 90785 - protein, 10 aa, Homo Sapiens
YPLEVTKLIY

SEQ ID NO: 90786 - protein, 10 aa, Homo Sapiens
YPLPAVKVSM

SEQ ID NO: 90787 - protein, 10 aa, Homo Sapiens
YPLTSPPTSY

SEQ ID NO: 90788 - protein, 10 aa, Homo Sapiens
YPMYSRDYVY

SEQ ID NO: 90789 - protein, 10 aa, Homo Sapiens
YPRFLESEFY

SEQ ID NO: 90790 - protein, 10 aa, Homo Sapiens
YPTSIASLAF

SEQ ID NO: 90791 - protein, 10 aa, Homo Sapiens
YPVEDFEASF

SEQ ID NO: 90792 - protein, 10 aa, Homo Sapiens
YPYGEKQDEF

SEQ ID NO: 90793 - protein, 10 aa, Homo Sapiens
YPYNAPTVKF

SEQ ID NO: 90794 - protein, 10 aa, Homo Sapiens
YPYPGELTMM

SEQ ID NO: 90795 - protein, 10 aa, Homo Sapiens
YPYPPPPPEF

SEQ ID NO: 90796 - protein, 10 aa, Homo Sapiens
YPYPPVPETF

SEQ ID NO: 90797 - protein, 10 aa, Homo Sapiens
YPYPYPHTLY

SEQ ID NO: 90798 - protein, 10 aa, Homo Sapiens
YVFDGTNPPY

SEQ ID NO: 90799 - protein, 10 aa, Homo Sapiens
YVHDDGRVSY

SEQ ID NO: 90800 - protein, 11 aa, Homo Sapiens
APWIESQDWAY

SEQ ID NO: 90801 - protein, 11 aa, Homo Sapiens
CPRVINLHEVY

SEQ ID NO: 90802 - protein, 11 aa, Homo Sapiens
DAIRSLASVSY

SEQ ID NO: 90803 - protein, 11 aa, Homo Sapiens
DPFSFDGPEIM

SEQ ID NO: 90804 - protein, 11 aa, Homo Sapiens
DVREEGKENAF

SEQ ID NO: 90805 - protein, 11 aa, Homo Sapiens
EAFDELLASKY

SEQ ID NO: 90806 - protein, 11 aa, Homo Sapiens
EAVFLRGVDIY

SEQ ID NO: 90807 - protein, 11 aa, Homo Sapiens
EAWNEEGKAVW

SEQ ID NO: 90808 - protein, 11 aa, Homo Sapiens
ELPQDVPEEPN

SEQ ID NO: 90809 - protein, 11 aa, Homo Sapiens
EPIYPEVVHMF

SEQ ID NO: 90810 - protein, 11 aa, Homo Sapiens
EPMSIDCGHSF

SEQ ID NO: 90811 - protein, 11 aa, Homo Sapiens
EPVPASIPNYY

SEQ ID NO: 90812 - protein, 11 aa, Homo Sapiens
ETQITQIEHEV

SEQ ID NO: 90813 - protein, 11 aa, Homo Sapiens
FAKSVSFSDVF

SEQ ID NO: 90814 - protein, 11 aa, Homo Sapiens
FALPSELERSY

SEQ ID NO: 90815 - protein, 11 aa, Homo Sapiens
FASKEIAENAL

SEQ ID NO: 90816 - protein, 11 aa, Homo Sapiens
FPAGSVHVNVY

SEQ ID NO: 90817 - protein, 11 aa, Homo Sapiens
FPASPPKGYFL

SEQ ID NO: 90818 - protein, 11 aa, Homo Sapiens
FPAVEPAVVKF

SEQ ID NO: 90819 - protein, 11 aa, Homo Sapiens
FPEPNPRVIEL

SEQ ID NO: 90820 - protein, 11 aa, Homo Sapiens
FPFGYVSNIHY

SEQ ID NO: 90821 - protein, 11 aa, Homo Sapiens
FPFLPGGPPEY

SEQ ID NO: 90822 - protein, 11 aa, Homo Sapiens
FPFLSGDNQHY

SEQ ID NO: 90823 - protein, 11 aa, Homo Sapiens
FPFNPLDFESF

SEQ ID NO: 90824 - protein, 11 aa, Homo Sapiens
FPFSAVVPAAL

SEQ ID NO: 90825 - protein, 11 aa, Homo Sapiens
FPHHLQEYIEY

SEQ ID NO: 90826 - protein, 11 aa, Homo Sapiens
FPHLPGKTFVY

SEQ ID NO: 90827 - protein, 11 aa, Homo Sapiens
FPIIIHDEPTY

SEQ ID NO: 90828 - protein, 11 aa, Homo Sapiens
FPLDVGSIVGY

SEQ ID NO: 90829 - protein, 11 aa, Homo Sapiens
FPLEAVREDAF

SEQ ID NO: 90830 - protein, 11 aa, Homo Sapiens
FPLIEVNKVYY

SEQ ID NO: 90831 - protein, 11 aa, Homo Sapiens
FPLLPQDVHLL

SEQ ID NO: 90832 - protein, 11 aa, Homo Sapiens
FPLQPGKVATF

SEQ ID NO: 90833 - protein, 11 aa, Homo Sapiens
FPNIVIKGSEL

SEQ ID NO: 90834 - protein, 11 aa, Homo Sapiens
FPQEEAIIDKY

SEQ ID NO: 90835 - protein, 11 aa, Homo Sapiens
FPVDPQRMSIF

SEQ ID NO: 90836 - protein, 11 aa, Homo Sapiens
FPVPESILTSM

SEQ ID NO: 90837 - protein, 11 aa, Homo Sapiens
FPVYVLPKVEY

SEQ ID NO: 90838 - protein, 11 aa, Homo Sapiens
FPWEVPKKLKY

SEQ ID NO: 90839 - protein, 11 aa, Homo Sapiens
FPWGDGNHTLF

SEQ ID NO: 90840 - protein, 11 aa, Homo Sapiens
FPYIEENVKEY

SEQ ID NO: 90841 - protein, 11 aa, Homo Sapiens
HAAEDSSLLIY

SEQ ID NO: 90842 - protein, 11 aa, Homo Sapiens
HAAVAIACVVM

SEQ ID NO: 90843 - protein, 11 aa, Homo Sapiens
HACGVIATIAF

SEQ ID NO: 90844 - protein, 11 aa, Homo Sapiens
HAGPPYEDIAF

SEQ ID NO: 90845 - protein, 11 aa, Homo Sapiens
HATVATENEVF

SEQ ID NO: 90846 - protein, 11 aa, Homo Sapiens
HAVDVDSGNSY

SEQ ID NO: 90847 - protein, 11 aa, Homo Sapiens
HAVDVDSGSVY

SEQ ID NO: 90848 - protein, 11 aa, Homo Sapiens
HAWLQAGKIYY

SEQ ID NO: 90849 - protein, 11 aa, Homo Sapiens
HPAPLCTIRTL

SEQ ID NO: 90850 - protein, 11 aa, Homo Sapiens
HPASVLSQPQY

SEQ ID NO: 90851 - protein, 11 aa, Homo Sapiens
HPDPDAELQRM

SEQ ID NO: 90852 - protein, 11 aa, Homo Sapiens
HPDTGISSKAM

SEQ ID NO: 90853 - protein, 11 aa, Homo Sapiens
HPFPSPATDLY

SEQ ID NO: 90854 - protein, 11 aa, Homo Sapiens
HPKDIRESDYF

SEQ ID NO: 90855 - protein, 11 aa, Homo Sapiens
HPLEDRNTIEM

SEQ ID NO: 90856 - protein, 11 aa, Homo Sapiens
HPLPETAVRGY

SEQ ID NO: 90857 - protein, 11 aa, Homo Sapiens
HPLSECEFQEY

SEQ ID NO: 90858 - protein, 11 aa, Homo Sapiens
HPNIITLKDVY

SEQ ID NO: 90859 - protein, 11 aa, Homo Sapiens
HPQGSTAGVVY

SEQ ID NO: 90860 - protein, 11 aa, Homo Sapiens
HPTDITSLDQY

SEQ ID NO: 90861 - protein, 11 aa, Homo Sapiens
HVRPVTQGDVY

SEQ ID NO: 90862 - protein, 11 aa, Homo Sapiens
IARREEEFDLF

SEQ ID NO: 90863 - protein, 11 aa, Homo Sapiens
IPEGEILVITY

SEQ ID NO: 90864 - protein, 11 aa, Homo Sapiens
IPFSSDVTHEM

SEQ ID NO: 90865 - protein, 11 aa, Homo Sapiens
IPIALSGRDIL

SEQ ID NO: 90866 - protein, 11 aa, Homo Sapiens
IPIGGGTSVSY

SEQ ID NO: 90867 - protein, 11 aa, Homo Sapiens
IPSEDIARNLM

SEQ ID NO: 90868 - protein, 11 aa, Homo Sapiens
IPWKHAGKQDY

SEQ ID NO: 90869 - protein, 11 aa, Homo Sapiens
IPYHSEVPVSL

SEQ ID NO: 90870 - protein, 11 aa, Homo Sapiens
IPYSEPMPLSF

SEQ ID NO: 90871 - protein, 11 aa, Homo Sapiens
KPYNPIIGETF

SEQ ID NO: 90872 - protein, 11 aa, Homo Sapiens
LAAAAAASYQV

SEQ ID NO: 90873 - protein, 11 aa, Homo Sapiens
LAAVAGARDTY

SEQ ID NO: 90874 - protein, 11 aa, Homo Sapiens
LPAAGVGDMVM

SEQ ID NO: 90875 - protein, 11 aa, Homo Sapiens
LPADIRIPDGY

SEQ ID NO: 90876 - protein, 11 aa, Homo Sapiens
LPAETGQNHPF

SEQ ID NO: 90877 - protein, 11 aa, Homo Sapiens
LPAKDIQTNVY

SEQ ID NO: 90878 - protein, 11 aa, Homo Sapiens
LPAPPHIDVMY

SEQ ID NO: 90879 - protein, 11 aa, Homo Sapiens
LPEAQLSTVEY

SEQ ID NO: 90880 - protein, 11 aa, Homo Sapiens
LPFCQPSKITY

SEQ ID NO: 90881 - protein, 11 aa, Homo Sapiens
LPFLPSTEDVY

SEQ ID NO: 90882 - protein, 11 aa, Homo Sapiens
LPFPDETHERY

SEQ ID NO: 90883 - protein, 11 aa, Homo Sapiens
LPIGDVATQYF

SEQ ID NO: 90884 - protein, 11 aa, Homo Sapiens
LPINDPLQTVY

SEQ ID NO: 90885 - protein, 11 aa, Homo Sapiens
LPLDDGAAHVM

SEQ ID NO: 90886 - protein, 11 aa, Homo Sapiens
LPLFPEPLHVF

SEQ ID NO: 90887 - protein, 11 aa, Homo Sapiens
LPLGSCASKML

SEQ ID NO: 90888 - protein, 11 aa, Homo Sapiens
LPLNTNIRLAY

SEQ ID NO: 90889 - protein, 11 aa, Homo Sapiens
LPRTTTESEVM

SEQ ID NO: 90890 - protein, 11 aa, Homo Sapiens
LPVFLDSHFVY

SEQ ID NO: 90891 - protein, 11 aa, Homo Sapiens
LPYKATENDIY

SEQ ID NO: 90892 - protein, 11 aa, Homo Sapiens
LPYKITAEEMY

SEQ ID NO: 90893 - protein, 11 aa, Homo Sapiens
LPYPDPAIAQF

SEQ ID NO: 90894 - protein, 11 aa, Homo Sapiens
LPYPSEASTTF

SEQ ID NO: 90895 - protein, 11 aa, Homo Sapiens
LPYRATENDIY

SEQ ID NO: 90896 - protein, 11 aa, Homo Sapiens
MAFLDSQTATF

SEQ ID NO: 90897 - protein, 11 aa, Homo Sapiens
MPAAQEGAVAF

SEQ ID NO: 90898 - protein, 11 aa, Homo Sapiens
MPALAPPEVVM

SEQ ID NO: 90899 - protein, 11 aa, Homo Sapiens
MPAPEEIVEEL

SEQ ID NO: 90900 - protein, 11 aa, Homo Sapiens
MPAVKAIIYQY

SEQ ID NO: 90901 - protein, 11 aa, Homo Sapiens
MPEEESAKVCL

SEQ ID NO: 90902 - protein, 11 aa, Homo Sapiens
MPEGEKLVNYY

SEQ ID NO: 90903 - protein, 11 aa, Homo Sapiens
MPFDFRRFDIY

SEQ ID NO: 90904 - protein, 11 aa, Homo Sapiens
MPHPETGKDLY

SEQ ID NO: 90905 - protein, 11 aa, Homo Sapiens
MPIQEERFVTY

SEQ ID NO: 90906 - protein, 11 aa, Homo Sapiens
MPIREGDTVTL

SEQ ID NO: 90907 - protein, 11 aa, Homo Sapiens
MPKSDVNKEYY

SEQ ID NO: 90908 - protein, 11 aa, Homo Sapiens
MPRAPGGFECF

SEQ ID NO: 90909 - protein, 11 aa, Homo Sapiens
MPTGAGKSLCY

SEQ ID NO: 90910 - protein, 11 aa, Homo Sapiens
MPVAAREASIY

SEQ ID NO: 90911 - protein, 11 aa, Homo Sapiens
MPVGPDAILRY

SEQ ID NO: 90912 - protein, 11 aa, Homo Sapiens
MPVRGPDVEAY

SEQ ID NO: 90913 - protein, 11 aa, Homo Sapiens
NAFAEPGRVPF

SEQ ID NO: 90914 - protein, 11 aa, Homo Sapiens
NAFEHGGEFTY

SEQ ID NO: 90915 - protein, 11 aa, Homo Sapiens
NAFYEHAQTYY

SEQ ID NO: 90916 - protein, 11 aa, Homo Sapiens
NAIKLEEKGVY

SEQ ID NO: 90917 - protein, 11 aa, Homo Sapiens
NALPDTLKVTY

SEQ ID NO: 90918 - protein, 11 aa, Homo Sapiens
NAVDLGQMSSF

SEQ ID NO: 90919 - protein, 11 aa, Homo Sapiens
NAWMETEAVNY

SEQ ID NO: 90920 - protein, 11 aa, Homo Sapiens
NPADSISHVAY

SEQ ID NO: 90921 - protein, 11 aa, Homo Sapiens
NPENLATLERY

SEQ ID NO: 90922 - protein, 11 aa, Homo Sapiens
NPFCEPVFVRY

SEQ ID NO: 90923 - protein, 11 aa, Homo Sapiens
NPLKGDLANTF

SEQ ID NO: 90924 - protein, 11 aa, Homo Sapiens
PVSVYEDPPDA

SEQ ID NO: 90925 - protein, 11 aa, Homo Sapiens
QAADIDTRSEF

SEQ ID NO: 90926 - protein, 11 aa, Homo Sapiens
QALDDRLYCVY

SEQ ID NO: 90927 - protein, 11 aa, Homo Sapiens
QAWQEASDNCF

SEQ ID NO: 90928 - protein, 11 aa, Homo Sapiens
QPAENISKDLY

SEQ ID NO: 90929 - protein, 11 aa, Homo Sapiens
QPFLEVTKEAF

SEQ ID NO: 90930 - protein, 11 aa, Homo Sapiens
QPFPTCQALVY

SEQ ID NO: 90931 - protein, 11 aa, Homo Sapiens
RAFDQGADAIY

SEQ ID NO: 90932 - protein, 11 aa, Homo Sapiens
RPFASGANFEY

SEQ ID NO: 90933 - protein, 11 aa, Homo Sapiens
RPFEENGACKY

SEQ ID NO: 90934 - protein, 11 aa, Homo Sapiens
RPFEESGTCKY

SEQ ID NO: 90935 - protein, 11 aa, Homo Sapiens
RPVETHQVHEY

SEQ ID NO: 90936 - protein, 11 aa, Homo Sapiens
RPVETYQVHEY

SEQ ID NO: 90937 - protein, 11 aa, Homo Sapiens
SAAAAAAAAAY

SEQ ID NO: 90938 - protein, 11 aa, Homo Sapiens
SPAPSPVPEPD

SEQ ID NO: 90939 - protein, 11 aa, Homo Sapiens
SPDPLPDNKVL

SEQ ID NO: 90940 - protein, 11 aa, Homo Sapiens
SPEGRLYQVEY

SEQ ID NO: 90941 - protein, 11 aa, Homo Sapiens
SPFFERSGLAY

SEQ ID NO: 90942 - protein, 11 aa, Homo Sapiens
SPLGMPDPHLY

SEQ ID NO: 90943 - protein, 11 aa, Homo Sapiens
SPVNSSKQPSY

SEQ ID NO: 90944 - protein, 11 aa, Homo Sapiens
SPWPQDSRGLY

SEQ ID NO: 90945 - protein, 11 aa, Homo Sapiens
TAAPSLKNAAF

SEQ ID NO: 90946 - protein, 11 aa, Homo Sapiens
TADGSGCRVSY

SEQ ID NO: 90947 - protein, 11 aa, Homo Sapiens
TAEGQATLERL

SEQ ID NO: 90948 - protein, 11 aa, Homo Sapiens
TAIPVHDGYVL

SEQ ID NO: 90949 - protein, 11 aa, Homo Sapiens
TPALVNAAVTY

SEQ ID NO: 90950 - protein, 11 aa, Homo Sapiens
TPIQDNVDQTY

SEQ ID NO: 90951 - protein, 11 aa, Homo Sapiens
TPLKEGNTNCY

SEQ ID NO: 90952 - protein, 11 aa, Homo Sapiens
TPLSSTVTLSM

SEQ ID NO: 90953 - protein, 11 aa, Homo Sapiens
TPWNQGATPAY

SEQ ID NO: 90954 - protein, 11 aa, Homo Sapiens
VGGEFDLEMNF

SEQ ID NO: 90955 - protein, 11 aa, Homo Sapiens
VPDSSGPERIL

SEQ ID NO: 90956 - protein, 11 aa, Homo Sapiens
VPEAASTLVSM

SEQ ID NO: 90957 - protein, 11 aa, Homo Sapiens
VPEEGGATHVY

SEQ ID NO: 90958 - protein, 11 aa, Homo Sapiens
VPESSLAGHSF

SEQ ID NO: 90959 - protein, 11 aa, Homo Sapiens
VPIHDIAAVSY

SEQ ID NO: 90960 - protein, 11 aa, Homo Sapiens
VPMPYTLKVHY

SEQ ID NO: 90961 - protein, 11 aa, Homo Sapiens
WPSGTECIAKY

SEQ ID NO: 90962 - protein, 11 aa, Homo Sapiens
YAWESSAGGSF

SEQ ID NO: 90963 - protein, 11 aa, Homo Sapiens
YPANQGQEVEY

SEQ ID NO: 90964 - protein, 11 aa, Homo Sapiens
YPASIVDEPTF

SEQ ID NO: 90965 - protein, 11 aa, Homo Sapiens
YPDPVSIIQKY

SEQ ID NO: 90966 - protein, 11 aa, Homo Sapiens
YPETLGRLLIL

SEQ ID NO: 90967 - protein, 11 aa, Homo Sapiens
YPFESAEAQLL

SEQ ID NO: 90968 - protein, 11 aa, Homo Sapiens
YPFTGDHKQKF

SEQ ID NO: 90969 - protein, 11 aa, Homo Sapiens
YPGPASLTQIY

SEQ ID NO: 90970 - protein, 11 aa, Homo Sapiens
YPLDLEGGSEY

SEQ ID NO: 90971 - protein, 11 aa, Homo Sapiens
YPLDPTTEHIY

SEQ ID NO: 90972 - protein, 11 aa, Homo Sapiens
YPLEDATHIAL

SEQ ID NO: 90973 - protein, 11 aa, Homo Sapiens
YPLQDPKNLIL

SEQ ID NO: 90974 - protein, 11 aa, Homo Sapiens
YPLQISPVSSY

SEQ ID NO: 90975 - protein, 11 aa, Homo Sapiens
YPSETTVKYVF

SEQ ID NO: 90976 - protein, 11 aa, Homo Sapiens
YPVFPWIIHDY

SEQ ID NO: 90977 - protein, 11 aa, Homo Sapiens
YPVTPELLERY

SEQ ID NO: 90978 - protein, 8 aa, Homo Sapiens
ADALTYGF

SEQ ID NO: 90979 - protein, 8 aa, Homo Sapiens
ADELVAEF

SEQ ID NO: 90980 - protein, 8 aa, Homo Sapiens
ADELVSEF

SEQ ID NO: 90981 - protein, 8 aa, Homo Sapiens
ADFCHTHM

SEQ ID NO: 90982 - protein, 8 aa, Homo Sapiens
ADFEAHNI

SEQ ID NO: 90983 - protein, 8 aa, Homo Sapiens
ADFETVRM

SEQ ID NO: 90984 - protein, 8 aa, Homo Sapiens
ADFKAQNV

SEQ ID NO: 90985 - protein, 8 aa, Homo Sapiens
ADFLVYEF

SEQ ID NO: 90986 - protein, 8 aa, Homo Sapiens
ADFMTTNV

SEQ ID NO: 90987 - protein, 8 aa, Homo Sapiens
ADFYVRVF

SEQ ID NO: 90988 - protein, 8 aa, Homo Sapiens
ADGVHNTL

SEQ ID NO: 90989 - protein, 8 aa, Homo Sapiens
ADHIGQGF

SEQ ID NO: 90990 - protein, 8 aa, Homo Sapiens
ADHLAHEV

SEQ ID NO: 90991 - protein, 8 aa, Homo Sapiens
ADHTAPLL

SEQ ID NO: 90992 - protein, 8 aa, Homo Sapiens
ADHVSSSL

SEQ ID NO: 90993 - protein, 8 aa, Homo Sapiens
ADHYSQQM

SEQ ID NO: 90994 - protein, 8 aa, Homo Sapiens
ADIVATGF

SEQ ID NO: 90995 - protein, 8 aa, Homo Sapiens
ADKGHYKF

SEQ ID NO: 90996 - protein, 8 aa, Homo Sapiens
ADKIHSSF

SEQ ID NO: 90997 - protein, 8 aa, Homo Sapiens
ADKLIYVF

SEQ ID NO: 90998 - protein, 8 aa, Homo Sapiens
ADLIHHDL

SEQ ID NO: 90999 - protein, 8 aa, Homo Sapiens
ADLKKYHF

SEQ ID NO: 91000 - protein, 8 aa, Homo Sapiens
ADLLKRAF

SEQ ID NO: 91001 - protein, 8 aa, Homo Sapiens
ADLPARGF

SEQ ID NO: 91002 - protein, 8 aa, Homo Sapiens
ADLRAVNI

SEQ ID NO: 91003 - protein, 8 aa, Homo Sapiens
ADLVHFLF

SEQ ID NO: 91004 - protein, 8 aa, Homo Sapiens
ADMKIRLF

SEQ ID NO: 91005 - protein, 8 aa, Homo Sapiens
ADMSHVAL

SEQ ID NO: 91006 - protein, 8 aa, Homo Sapiens
ADMVKQFF

SEQ ID NO: 91007 - protein, 8 aa, Homo Sapiens
ADNISHGL

SEQ ID NO: 91008 - protein, 8 aa, Homo Sapiens
ADNPHVAL

SEQ ID NO: 91009 - protein, 8 aa, Homo Sapiens
ADNQVMHF

SEQ ID NO: 91010 - protein, 8 aa, Homo Sapiens
ADNRHYTF

SEQ ID NO: 91011 - protein, 8 aa, Homo Sapiens
ADQIVTKL

SEQ ID NO: 91012 - protein, 8 aa, Homo Sapiens
ADQLHAAV

SEQ ID NO: 91013 - protein, 8 aa, Homo Sapiens
ADQVIASF

SEQ ID NO: 91014 - protein, 8 aa, Homo Sapiens
ADSATRLL

SEQ ID NO: 91015 - protein, 8 aa, Homo Sapiens
ADSAVSSF

SEQ ID NO: 91016 - protein, 8 aa, Homo Sapiens
ADSGHYCV

SEQ ID NO: 91017 - protein, 8 aa, Homo Sapiens
ADSIHSTL

SEQ ID NO: 91018 - protein, 8 aa, Homo Sapiens
ADSITNTM

SEQ ID NO: 91019 - protein, 8 aa, Homo Sapiens
ADSKSVHF

SEQ ID NO: 91020 - protein, 8 aa, Homo Sapiens
ADSKTVKL

SEQ ID NO: 91021 - protein, 8 aa, Homo Sapiens
ADSKVLLF

SEQ ID NO: 91022 - protein, 8 aa, Homo Sapiens
ADSLINSF

SEQ ID NO: 91023 - protein, 8 aa, Homo Sapiens
ADSLTYDI

SEQ ID NO: 91024 - protein, 8 aa, Homo Sapiens
ADSLVTGI

SEQ ID NO: 91025 - protein, 8 aa, Homo Sapiens
ADSNAREF

SEQ ID NO: 91026 - protein, 8 aa, Homo Sapiens
ADSPSEGF

SEQ ID NO: 91027 - protein, 8 aa, Homo Sapiens
ADSPSQNL

SEQ ID NO: 91028 - protein, 8 aa, Homo Sapiens
ADSRIVKM

SEQ ID NO: 91029 - protein, 8 aa, Homo Sapiens
ADSTPAHF

SEQ ID NO: 91030 - protein, 8 aa, Homo Sapiens
ADSVANKL

SEQ ID NO: 91031 - protein, 8 aa, Homo Sapiens
ADSVGHHL

SEQ ID NO: 91032 - protein, 8 aa, Homo Sapiens
ADSVVVLL

SEQ ID NO: 91033 - protein, 8 aa, Homo Sapiens
ADTLAFEM

SEQ ID NO: 91034 - protein, 8 aa, Homo Sapiens
ADTLVTKF

SEQ ID NO: 91035 - protein, 8 aa, Homo Sapiens
ADTTHTSL

SEQ ID NO: 91036 - protein, 8 aa, Homo Sapiens
ADTVSSKL

SEQ ID NO: 91037 - protein, 8 aa, Homo Sapiens
ADVIVHRL

SEQ ID NO: 91038 - protein, 8 aa, Homo Sapiens
ADVVISAF

SEQ ID NO: 91039 - protein, 8 aa, Homo Sapiens
ADWFKASF

SEQ ID NO: 91040 - protein, 8 aa, Homo Sapiens
ADYASKNL

SEQ ID NO: 91041 - protein, 8 aa, Homo Sapiens
ADYEATTF

SEQ ID NO: 91042 - protein, 8 aa, Homo Sapiens
ADYIAPLF

SEQ ID NO: 91043 - protein, 8 aa, Homo Sapiens
ADYLAHES

SEQ ID NO: 91044 - protein, 8 aa, Homo Sapiens
ADYLSSHL

SEQ ID NO: 91045 - protein, 8 aa, Homo Sapiens
AEAFVRAF

SEQ ID NO: 91046 - protein, 8 aa, Homo Sapiens
AEALVNGF

SEQ ID NO: 91047 - protein, 8 aa, Homo Sapiens
AEALVQSF

SEQ ID NO: 91048 - protein, 8 aa, Homo Sapiens
AEAVKTVF

SEQ ID NO: 91049 - protein, 8 aa, Homo Sapiens
AEFVWHKL

SEQ ID NO: 91050 - protein, 8 aa, Homo Sapiens
AEIRVHTV

SEQ ID NO: 91051 - protein, 8 aa, Homo Sapiens
AEKKVVKI

SEQ ID NO: 91052 - protein, 8 aa, Homo Sapiens
AEKRWDRV

SEQ ID NO: 91053 - protein, 8 aa, Homo Sapiens
AEMVHTGL

SEQ ID NO: 91054 - protein, 8 aa, Homo Sapiens
AEMVRHAL

SEQ ID NO: 91055 - protein, 8 aa, Homo Sapiens
AEMYVAKF

SEQ ID NO: 91056 - protein, 8 aa, Homo Sapiens
AENISHGL

SEQ ID NO: 91057 - protein, 8 aa, Homo Sapiens
AEPIKQAF

SEQ ID NO: 91058 - protein, 8 aa, Homo Sapiens
AEQVIAGF

SEQ ID NO: 91059 - protein, 8 aa, Homo Sapiens
AEQYVSAF

SEQ ID NO: 91060 - protein, 8 aa, Homo Sapiens
AESIHTGL

SEQ ID NO: 91061 - protein, 8 aa, Homo Sapiens
AESKIKSF

SEQ ID NO: 91062 - protein, 8 aa, Homo Sapiens
AESKVFYL

SEQ ID NO: 91063 - protein, 8 aa, Homo Sapiens
AESKVVLV

SEQ ID NO: 91064 - protein, 8 aa, Homo Sapiens
AESLKTKF

SEQ ID NO: 91065 - protein, 8 aa, Homo Sapiens
AESLRYKL

SEQ ID NO: 91066 - protein, 8 aa, Homo Sapiens
AESLVRNL

SEQ ID NO: 91067 - protein, 8 aa, Homo Sapiens
AESYHQHF

SEQ ID NO: 91068 - protein, 8 aa, Homo Sapiens
AETAVQLF

SEQ ID NO: 91069 - protein, 8 aa, Homo Sapiens
AETLHFLL

SEQ ID NO: 91070 - protein, 8 aa, Homo Sapiens
AEVEVKKF

SEQ ID NO: 91071 - protein, 8 aa, Homo Sapiens
AEVIKNRF

SEQ ID NO: 91072 - protein, 8 aa, Homo Sapiens
AEYGAEAL

SEQ ID NO: 91073 - protein, 8 aa, Homo Sapiens
AEYIQKNV

SEQ ID NO: 91074 - protein, 8 aa, Homo Sapiens
AEYLHWLL

SEQ ID NO: 91075 - protein, 8 aa, Homo Sapiens
AEYLREKL

SEQ ID NO: 91076 - protein, 8 aa, Homo Sapiens
AEYPAVKF

SEQ ID NO: 91077 - protein, 8 aa, Homo Sapiens
ALAVRGSD

SEQ ID NO: 91078 - protein, 8 aa, Homo Sapiens
CSSVHPSV

SEQ ID NO: 91079 - protein, 8 aa, Homo Sapiens
DHLDLKAP

SEQ ID NO: 91080 - protein, 8 aa, Homo Sapiens
DLARAQAV

SEQ ID NO: 91081 - protein, 8 aa, Homo Sapiens
DLRKVEAL

SEQ ID NO: 91082 - protein, 8 aa, Homo Sapiens
DNIRVCKI

SEQ ID NO: 91083 - protein, 8 aa, Homo Sapiens
DRIPSKHF

SEQ ID NO: 91084 - protein, 8 aa, Homo Sapiens
EKSTDFVF

SEQ ID NO: 91085 - protein, 8 aa, Homo Sapiens
ELSGKNTI

SEQ ID NO: 91086 - protein, 8 aa, Homo Sapiens
ENQKLNSF

SEQ ID NO: 91087 - protein, 8 aa, Homo Sapiens
ERDLLKKF

SEQ ID NO: 91088 - protein, 8 aa, Homo Sapiens
FDDIVHSF

SEQ ID NO: 91089 - protein, 8 aa, Homo Sapiens
FDHAVSKF

SEQ ID NO: 91090 - protein, 8 aa, Homo Sapiens
FDSLSQML

SEQ ID NO: 91091 - protein, 8 aa, Homo Sapiens
FEHIVTQF

SEQ ID NO: 91092 - protein, 8 aa, Homo Sapiens
FESIIHEF

SEQ ID NO: 91093 - protein, 8 aa, Homo Sapiens
FESLASQF

SEQ ID NO: 91094 - protein, 8 aa, Homo Sapiens
FESLSEAF

SEQ ID NO: 91095 - protein, 8 aa, Homo Sapiens
FESVIHEF

SEQ ID NO: 91096 - protein, 8 aa, Homo Sapiens
FESVVEYF

SEQ ID NO: 91097 - protein, 8 aa, Homo Sapiens
GDHIHTNF

SEQ ID NO: 91098 - protein, 8 aa, Homo Sapiens
GDHLSPGV

SEQ ID NO: 91099 - protein, 8 aa, Homo Sapiens
GDILVQQF

SEQ ID NO: 91100 - protein, 8 aa, Homo Sapiens
GDNRVHEF

SEQ ID NO: 91101 - protein, 8 aa, Homo Sapiens
GDTLVTGF

SEQ ID NO: 91102 - protein, 8 aa, Homo Sapiens
GDTQVVVF

SEQ ID NO: 91103 - protein, 8 aa, Homo Sapiens
GDVLVNQF

SEQ ID NO: 91104 - protein, 8 aa, Homo Sapiens
GDYLKELF

SEQ ID NO: 91105 - protein, 8 aa, Homo Sapiens
GESITHAL

SEQ ID NO: 91106 - protein, 8 aa, Homo Sapiens
GEYVVAKL

SEQ ID NO: 91107 - protein, 8 aa, Homo Sapiens
HDCVVKLL

SEQ ID NO: 91108 - protein, 8 aa, Homo Sapiens
HDDIVTEF

SEQ ID NO: 91109 - protein, 8 aa, Homo Sapiens
HDFHHMNF

SEQ ID NO: 91110 - protein, 8 aa, Homo Sapiens
HDFLKYDF

SEQ ID NO: 91111 - protein, 8 aa, Homo Sapiens
HDFQAPYL

SEQ ID NO: 91112 - protein, 8 aa, Homo Sapiens
HDFSVQNF

SEQ ID NO: 91113 - protein, 8 aa, Homo Sapiens
HDFTSQIF

SEQ ID NO: 91114 - protein, 8 aa, Homo Sapiens
HDGITVAV

SEQ ID NO: 91115 - protein, 8 aa, Homo Sapiens
HDGLTVHL

SEQ ID NO: 91116 - protein, 8 aa, Homo Sapiens
HDILIRKF

SEQ ID NO: 91117 - protein, 8 aa, Homo Sapiens
HDKLSHYL

SEQ ID NO: 91118 - protein, 8 aa, Homo Sapiens
HDLLKYEF

SEQ ID NO: 91119 - protein, 8 aa, Homo Sapiens
HDLLVHKA

SEQ ID NO: 91120 - protein, 8 aa, Homo Sapiens
HDMEVYSF

SEQ ID NO: 91121 - protein, 8 aa, Homo Sapiens
HDNIVKVF

SEQ ID NO: 91122 - protein, 8 aa, Homo Sapiens
HDNPVFEM

SEQ ID NO: 91123 - protein, 8 aa, Homo Sapiens
HDQAVQAL

SEQ ID NO: 91124 - protein, 8 aa, Homo Sapiens
HDQQVARM

SEQ ID NO: 91125 - protein, 8 aa, Homo Sapiens
HDSAVTSV

SEQ ID NO: 91126 - protein, 8 aa, Homo Sapiens
HDSPVKAV

SEQ ID NO: 91127 - protein, 8 aa, Homo Sapiens
HDSPVRAM

SEQ ID NO: 91128 - protein, 8 aa, Homo Sapiens
HDSRAVKF

SEQ ID NO: 91129 - protein, 8 aa, Homo Sapiens
HDSRVAGF

SEQ ID NO: 91130 - protein, 8 aa, Homo Sapiens
HDSSTVEV

SEQ ID NO: 91131 - protein, 8 aa, Homo Sapiens
HDSVVSMF

SEQ ID NO: 91132 - protein, 8 aa, Homo Sapiens
HDSYGNQF

SEQ ID NO: 91133 - protein, 8 aa, Homo Sapiens
HDVLKLEF

SEQ ID NO: 91134 - protein, 8 aa, Homo Sapiens
HDVPHQPF

SEQ ID NO: 91135 - protein, 8 aa, Homo Sapiens
HDYAKAAF

SEQ ID NO: 91136 - protein, 8 aa, Homo Sapiens
HDYEVAQM

SEQ ID NO: 91137 - protein, 8 aa, Homo Sapiens
HDYGHLSV

SEQ ID NO: 91138 - protein, 8 aa, Homo Sapiens
HDYTSVCL

SEQ ID NO: 91139 - protein, 8 aa, Homo Sapiens
HDYYTTEF

SEQ ID NO: 91140 - protein, 8 aa, Homo Sapiens
HECMVNKF

SEQ ID NO: 91141 - protein, 8 aa, Homo Sapiens
HEGHVYGF

SEQ ID NO: 91142 - protein, 8 aa, Homo Sapiens
HEGLHNGF

SEQ ID NO: 91143 - protein, 8 aa, Homo Sapiens
HEHFVTSL

SEQ ID NO: 91144 - protein, 8 aa, Homo Sapiens
HEHQANLL

SEQ ID NO: 91145 - protein, 8 aa, Homo Sapiens
HEHQVMLM

SEQ ID NO: 91146 - protein, 8 aa, Homo Sapiens
HEHYWETI

SEQ ID NO: 91147 - protein, 8 aa, Homo Sapiens
HEQVVERL

SEQ ID NO: 91148 - protein, 8 aa, Homo Sapiens
HESAVTGL

SEQ ID NO: 91149 - protein, 8 aa, Homo Sapiens
HESLSHEL

SEQ ID NO: 91150 - protein, 8 aa, Homo Sapiens
IDFLTKQM

SEQ ID NO: 91151 - protein, 8 aa, Homo Sapiens
IDHSVTGF

SEQ ID NO: 91152 - protein, 8 aa, Homo Sapiens
IDKVVQEF

SEQ ID NO: 91153 - protein, 8 aa, Homo Sapiens
IDSIHHLL

SEQ ID NO: 91154 - protein, 8 aa, Homo Sapiens
IDSIIQRL

SEQ ID NO: 91155 - protein, 8 aa, Homo Sapiens
IDSKVKGM

SEQ ID NO: 91156 - protein, 8 aa, Homo Sapiens
IDSLKESF

SEQ ID NO: 91157 - protein, 8 aa, Homo Sapiens
IDYIVHPL

SEQ ID NO: 91158 - protein, 8 aa, Homo Sapiens
IEDVIHKF

SEQ ID NO: 91159 - protein, 8 aa, Homo Sapiens
IEHITHSL

SEQ ID NO: 91160 - protein, 8 aa, Homo Sapiens
IESIVHAF

SEQ ID NO: 91161 - protein, 8 aa, Homo Sapiens
IESKIYKM

SEQ ID NO: 91162 - protein, 8 aa, Homo Sapiens
IESLAHAL

SEQ ID NO: 91163 - protein, 8 aa, Homo Sapiens
IESLVKKL

SEQ ID NO: 91164 - protein, 8 aa, Homo Sapiens
IETIVAAM

SEQ ID NO: 91165 - protein, 8 aa, Homo Sapiens
IQERLQKI

SEQ ID NO: 91166 - protein, 8 aa, Homo Sapiens
ISRDIQSI

SEQ ID NO: 91167 - protein, 8 aa, Homo Sapiens
KDAEKVHF

SEQ ID NO: 91168 - protein, 8 aa, Homo Sapiens
KDAIVACF

SEQ ID NO: 91169 - protein, 8 aa, Homo Sapiens
KDCIHEHL

SEQ ID NO: 91170 - protein, 8 aa, Homo Sapiens
KDFPAHRI

SEQ ID NO: 91171 - protein, 8 aa, Homo Sapiens
KDFPSNSF

SEQ ID NO: 91172 - protein, 8 aa, Homo Sapiens
KDFSHPQM

SEQ ID NO: 91173 - protein, 8 aa, Homo Sapiens
KDHASIQM

SEQ ID NO: 91174 - protein, 8 aa, Homo Sapiens
KDHGVNSF

SEQ ID NO: 91175 - protein, 8 aa, Homo Sapiens
KDHPTVEM

SEQ ID NO: 91176 - protein, 8 aa, Homo Sapiens
KDHRISTF

SEQ ID NO: 91177 - protein, 8 aa, Homo Sapiens
KDHSVNSF

SEQ ID NO: 91178 - protein, 8 aa, Homo Sapiens
KDHYSNGF

SEQ ID NO: 91179 - protein, 8 aa, Homo Sapiens
KDIAINLF

SEQ ID NO: 91180 - protein, 8 aa, Homo Sapiens
KDIPKRPF

SEQ ID NO: 91181 - protein, 8 aa, Homo Sapiens
KDLISKLL

SEQ ID NO: 91182 - protein, 8 aa, Homo Sapiens
KDLIVCLF

SEQ ID NO: 91183 - protein, 8 aa, Homo Sapiens
KDLKVNRF

SEQ ID NO: 91184 - protein, 8 aa, Homo Sapiens
KDLLHRAL

SEQ ID NO: 91185 - protein, 8 aa, Homo Sapiens
KDMESHVF

SEQ ID NO: 91186 - protein, 8 aa, Homo Sapiens
KDMPHNAL

SEQ ID NO: 91187 - protein, 8 aa, Homo Sapiens
KDMVHKEL

SEQ ID NO: 91188 - protein, 8 aa, Homo Sapiens
KDNPKFSF

SEQ ID NO: 91189 - protein, 8 aa, Homo Sapiens
KDNRVVLF

SEQ ID NO: 91190 - protein, 8 aa, Homo Sapiens
KDSITHDF

SEQ ID NO: 91191 - protein, 8 aa, Homo Sapiens
KDSIVQGF

SEQ ID NO: 91192 - protein, 8 aa, Homo Sapiens
KDSKVFPL

SEQ ID NO: 91193 - protein, 8 aa, Homo Sapiens
KDSKVVEI

SEQ ID NO: 91194 - protein, 8 aa, Homo Sapiens
KDSLHEKF

SEQ ID NO: 91195 - protein, 8 aa, Homo Sapiens
KDSLIVQV

SEQ ID NO: 91196 - protein, 8 aa, Homo Sapiens
KDSLVSSL

SEQ ID NO: 91197 - protein, 8 aa, Homo Sapiens
KDSMIRKF

SEQ ID NO: 91198 - protein, 8 aa, Homo Sapiens
KDSPVSAF

SEQ ID NO: 91199 - protein, 8 aa, Homo Sapiens
KDSQVVQV

SEQ ID NO: 91200 - protein, 8 aa, Homo Sapiens
KDSTKTAF

SEQ ID NO: 91201 - protein, 8 aa, Homo Sapiens
KDSTVQVF

SEQ ID NO: 91202 - protein, 8 aa, Homo Sapiens
KDSVSTFS

SEQ ID NO: 91203 - protein, 8 aa, Homo Sapiens
KDSVVAGF

SEQ ID NO: 91204 - protein, 8 aa, Homo Sapiens
KDSYVVAF

SEQ ID NO: 91205 - protein, 8 aa, Homo Sapiens
KDTYSWLL

SEQ ID NO: 91206 - protein, 8 aa, Homo Sapiens
KDVATVAF

SEQ ID NO: 91207 - protein, 8 aa, Homo Sapiens
KDVKVFNV

SEQ ID NO: 91208 - protein, 8 aa, Homo Sapiens
KDVLAHQV

SEQ ID NO: 91209 - protein, 8 aa, Homo Sapiens
KDVLISEF

SEQ ID NO: 91210 - protein, 8 aa, Homo Sapiens
KDVLKFGF

SEQ ID NO: 91211 - protein, 8 aa, Homo Sapiens
KDVLSVAF

SEQ ID NO: 91212 - protein, 8 aa, Homo Sapiens
KDVVIHRF

SEQ ID NO: 91213 - protein, 8 aa, Homo Sapiens
KDVYKEHF

SEQ ID NO: 91214 - protein, 8 aa, Homo Sapiens
KDWWTYEF

SEQ ID NO: 91215 - protein, 8 aa, Homo Sapiens
KDYEVELL

SEQ ID NO: 91216 - protein, 8 aa, Homo Sapiens
KDYIHINI

SEQ ID NO: 91217 - protein, 8 aa, Homo Sapiens
KDYLKHKF

SEQ ID NO: 91218 - protein, 8 aa, Homo Sapiens
KDYPHSAF

SEQ ID NO: 91219 - protein, 8 aa, Homo Sapiens
KEALKTGF

SEQ ID NO: 91220 - protein, 8 aa, Homo Sapiens
KEALTHSF

SEQ ID NO: 91221 - protein, 8 aa, Homo Sapiens
KEALVWKV

SEQ ID NO: 91222 - protein, 8 aa, Homo Sapiens
KEASKVPF

SEQ ID NO: 91223 - protein, 8 aa, Homo Sapiens
KEAVVHGL

SEQ ID NO: 91224 - protein, 8 aa, Homo Sapiens
KECAVNTF

SEQ ID NO: 91225 - protein, 8 aa, Homo Sapiens
KEDIIQGF

SEQ ID NO: 91226 - protein, 8 aa, Homo Sapiens
KEEIVHQL

SEQ ID NO: 91227 - protein, 8 aa, Homo Sapiens
KEEIVQFF

SEQ ID NO: 91228 - protein, 8 aa, Homo Sapiens
KEELVVQF

SEQ ID NO: 91229 - protein, 8 aa, Homo Sapiens
KEHLVFTV

SEQ ID NO: 91230 - protein, 8 aa, Homo Sapiens
KEHLWQKV

SEQ ID NO: 91231 - protein, 8 aa, Homo Sapiens
KEILIPVF

SEQ ID NO: 91232 - protein, 8 aa, Homo Sapiens
KEKIVRSF

SEQ ID NO: 91233 - protein, 8 aa, Homo Sapiens
KEKVWYHV

SEQ ID NO: 91234 - protein, 8 aa, Homo Sapiens
KELAVRTF

SEQ ID NO: 91235 - protein, 8 aa, Homo Sapiens
KELEATVR

SEQ ID NO: 91236 - protein, 8 aa, Homo Sapiens
KELEVPHF

SEQ ID NO: 91237 - protein, 8 aa, Homo Sapiens
KELEVRKL

SEQ ID NO: 91238 - protein, 8 aa, Homo Sapiens
KELLKHKF

SEQ ID NO: 91239 - protein, 8 aa, Homo Sapiens
KELLTHHL

SEQ ID NO: 91240 - protein, 8 aa, Homo Sapiens
KELLTHHV

SEQ ID NO: 91241 - protein, 8 aa, Homo Sapiens
KELLTREL

SEQ ID NO: 91242 - protein, 8 aa, Homo Sapiens
KENIVNSF

SEQ ID NO: 91243 - protein, 8 aa, Homo Sapiens
KENLTNEL

SEQ ID NO: 91244 - protein, 8 aa, Homo Sapiens
KENLVQAF

SEQ ID NO: 91245 - protein, 8 aa, Homo Sapiens
KEQIIHHV

SEQ ID NO: 91246 - protein, 8 aa, Homo Sapiens
KEQLVQAV

SEQ ID NO: 91247 - protein, 8 aa, Homo Sapiens
KESESFVF

SEQ ID NO: 91248 - protein, 8 aa, Homo Sapiens
KESEVKAL

SEQ ID NO: 91249 - protein, 8 aa, Homo Sapiens
KESEVYKM

SEQ ID NO: 91250 - protein, 8 aa, Homo Sapiens
KESKIFRI

SEQ ID NO: 91251 - protein, 8 aa, Homo Sapiens
KESLTTDL

SEQ ID NO: 91252 - protein, 8 aa, Homo Sapiens
KESSVAKL

SEQ ID NO: 91253 - protein, 8 aa, Homo Sapiens
KESVAFNF

SEQ ID NO: 91254 - protein, 8 aa, Homo Sapiens
KESVANHL

SEQ ID NO: 91255 - protein, 8 aa, Homo Sapiens
KESVITHF

SEQ ID NO: 91256 - protein, 8 aa, Homo Sapiens
KEVVVHLL

SEQ ID NO: 91257 - protein, 8 aa, Homo Sapiens
KEYLIELF

SEQ ID NO: 91258 - protein, 8 aa, Homo Sapiens
KQDFVQHF

SEQ ID NO: 91259 - protein, 8 aa, Homo Sapiens
KSDMVHRF

SEQ ID NO: 91260 - protein, 8 aa, Homo Sapiens
LDALVFHF

SEQ ID NO: 91261 - protein, 8 aa, Homo Sapiens
LDHESYEF

SEQ ID NO: 91262 - protein, 8 aa, Homo Sapiens
LDHLAEKF

SEQ ID NO: 91263 - protein, 8 aa, Homo Sapiens
LDKKVEKV

SEQ ID NO: 91264 - protein, 8 aa, Homo Sapiens
LDNAAFPF

SEQ ID NO: 91265 - protein, 8 aa, Homo Sapiens
LDNPHHGF

SEQ ID NO: 91266 - protein, 8 aa, Homo Sapiens
LDRHYLNL

SEQ ID NO: 91267 - protein, 8 aa, Homo Sapiens
LDRVLLHK

SEQ ID NO: 91268 - protein, 8 aa, Homo Sapiens
LDSEVVTF

SEQ ID NO: 91269 - protein, 8 aa, Homo Sapiens
LDSIIWAF

SEQ ID NO: 91270 - protein, 8 aa, Homo Sapiens
LDSKANNL

SEQ ID NO: 91271 - protein, 8 aa, Homo Sapiens
LDSQSHHL

SEQ ID NO: 91272 - protein, 8 aa, Homo Sapiens
LDSSHSEL

SEQ ID NO: 91273 - protein, 8 aa, Homo Sapiens
LDSVHQLL

SEQ ID NO: 91274 - protein, 8 aa, Homo Sapiens
LDTNGKNL

SEQ ID NO: 91275 - protein, 8 aa, Homo Sapiens
LENVVHHF

SEQ ID NO: 91276 - protein, 8 aa, Homo Sapiens
LESLVQKV

SEQ ID NO: 91277 - protein, 8 aa, Homo Sapiens
LLEGATGF

SEQ ID NO: 91278 - protein, 8 aa, Homo Sapiens
LQQAKDEI

SEQ ID NO: 91279 - protein, 8 aa, Homo Sapiens
MDHPHHTL

SEQ ID NO: 91280 - protein, 8 aa, Homo Sapiens
MDILKQAF

SEQ ID NO: 91281 - protein, 8 aa, Homo Sapiens
MDSKIVQV

SEQ ID NO: 91282 - protein, 8 aa, Homo Sapiens
MDSSHVSL

SEQ ID NO: 91283 - protein, 8 aa, Homo Sapiens
MDTVHHML

SEQ ID NO: 91284 - protein, 8 aa, Homo Sapiens
MDWEKVAF

SEQ ID NO: 91285 - protein, 8 aa, Homo Sapiens
MEKIWHHT

SEQ ID NO: 91286 - protein, 8 aa, Homo Sapiens
MENRVQSF

SEQ ID NO: 91287 - protein, 8 aa, Homo Sapiens
MESLIHHF

SEQ ID NO: 91288 - protein, 8 aa, Homo Sapiens
NDFLAHHV

SEQ ID NO: 91289 - protein, 8 aa, Homo Sapiens
NDSAHYAL

SEQ ID NO: 91290 - protein, 8 aa, Homo Sapiens
QDFQIQAF

SEQ ID NO: 91291 - protein, 8 aa, Homo Sapiens
QDHITFAM

SEQ ID NO: 91292 - protein, 8 aa, Homo Sapiens
QDIGAKSL

SEQ ID NO: 91293 - protein, 8 aa, Homo Sapiens
QDSITRLM

SEQ ID NO: 91294 - protein, 8 aa, Homo Sapiens
QDSLINQM

SEQ ID NO: 91295 - protein, 8 aa, Homo Sapiens
QDSQVNAL

SEQ ID NO: 91296 - protein, 8 aa, Homo Sapiens
RDALKTEF

SEQ ID NO: 91297 - protein, 8 aa, Homo Sapiens
RDALVKEF

SEQ ID NO: 91298 - protein, 8 aa, Homo Sapiens
RDAYVQAL

SEQ ID NO: 91299 - protein, 8 aa, Homo Sapiens
RDCEASLF

SEQ ID NO: 91300 - protein, 8 aa, Homo Sapiens
RDCNKIAF

SEQ ID NO: 91301 - protein, 8 aa, Homo Sapiens
RDDTHYLL

SEQ ID NO: 91302 - protein, 8 aa, Homo Sapiens
RDEESHEF

SEQ ID NO: 91303 - protein, 8 aa, Homo Sapiens
RDEEVKSF

SEQ ID NO: 91304 - protein, 8 aa, Homo Sapiens
RDEVVQVF

SEQ ID NO: 91305 - protein, 8 aa, Homo Sapiens
RDFAARLV

SEQ ID NO: 91306 - protein, 8 aa, Homo Sapiens
RDFIHVSF

SEQ ID NO: 91307 - protein, 8 aa, Homo Sapiens
RDFIKLEF

SEQ ID NO: 91308 - protein, 8 aa, Homo Sapiens
RDFKAYSL

SEQ ID NO: 91309 - protein, 8 aa, Homo Sapiens
RDFKVQFV

SEQ ID NO: 91310 - protein, 8 aa, Homo Sapiens
RDFLITQM

SEQ ID NO: 91311 - protein, 8 aa, Homo Sapiens
RDFLKVKF

SEQ ID NO: 91312 - protein, 8 aa, Homo Sapiens
RDFLVEIL

SEQ ID NO: 91313 - protein, 8 aa, Homo Sapiens
RDFLVQRI

SEQ ID NO: 91314 - protein, 8 aa, Homo Sapiens
RDFNHINV

SEQ ID NO: 91315 - protein, 8 aa, Homo Sapiens
RDFRSSDF

SEQ ID NO: 91316 - protein, 8 aa, Homo Sapiens
RDFTVSAL

SEQ ID NO: 91317 - protein, 8 aa, Homo Sapiens
RDFTVSAM

SEQ ID NO: 91318 - protein, 8 aa, Homo Sapiens
RDFVARNV

SEQ ID NO: 91319 - protein, 8 aa, Homo Sapiens
RDGLLFRH

SEQ ID NO: 91320 - protein, 8 aa, Homo Sapiens
RDGVVRPL

SEQ ID NO: 91321 - protein, 8 aa, Homo Sapiens
RDHEAVPL

SEQ ID NO: 91322 - protein, 8 aa, Homo Sapiens
RDHIHVHF

SEQ ID NO: 91323 - protein, 8 aa, Homo Sapiens
RDHIKDSF

SEQ ID NO: 91324 - protein, 8 aa, Homo Sapiens
RDHLFHQV

SEQ ID NO: 91325 - protein, 8 aa, Homo Sapiens
RDHLRVNL

SEQ ID NO: 91326 - protein, 8 aa, Homo Sapiens
RDHMAQHF

SEQ ID NO: 91327 - protein, 8 aa, Homo Sapiens
RDHTNAQF

SEQ ID NO: 91328 - protein, 8 aa, Homo Sapiens
RDHVNVSM

SEQ ID NO: 91329 - protein, 8 aa, Homo Sapiens
RDIEVQKM

SEQ ID NO: 91330 - protein, 8 aa, Homo Sapiens
RDIKAANV

SEQ ID NO: 91331 - protein, 8 aa, Homo Sapiens
RDILKEMF

SEQ ID NO: 91332 - protein, 8 aa, Homo Sapiens
RDILVKGV

SEQ ID NO: 91333 - protein, 8 aa, Homo Sapiens
RDKISESL

SEQ ID NO: 91334 - protein, 8 aa, Homo Sapiens
RDKLAAHL

SEQ ID NO: 91335 - protein, 8 aa, Homo Sapiens
RDKPHVNV

SEQ ID NO: 91336 - protein, 8 aa, Homo Sapiens
RDKVVSIF

SEQ ID NO: 91337 - protein, 8 aa, Homo Sapiens
RDLEAEHV

SEQ ID NO: 91338 - protein, 8 aa, Homo Sapiens
RDLEKPFL

SEQ ID NO: 91339 - protein, 8 aa, Homo Sapiens
RDLHTTAF

SEQ ID NO: 91340 - protein, 8 aa, Homo Sapiens
RDLIHTGV

SEQ ID NO: 91341 - protein, 8 aa, Homo Sapiens
RDLISRLL

SEQ ID NO: 91342 - protein, 8 aa, Homo Sapiens
RDLITEAM

SEQ ID NO: 91343 - protein, 8 aa, Homo Sapiens
RDLITNKM

SEQ ID NO: 91344 - protein, 8 aa, Homo Sapiens
RDLKAENL

SEQ ID NO: 91345 - protein, 8 aa, Homo Sapiens
RDLKSSQL

SEQ ID NO: 91346 - protein, 8 aa, Homo Sapiens
RDLKTSNL

SEQ ID NO: 91347 - protein, 8 aa, Homo Sapiens
RDLLAVVF

SEQ ID NO: 91348 - protein, 8 aa, Homo Sapiens
RDLLHNSL

SEQ ID NO: 91349 - protein, 8 aa, Homo Sapiens
RDLLHPSL

SEQ ID NO: 91350 - protein, 8 aa, Homo Sapiens
RDLLTRRL

SEQ ID NO: 91351 - protein, 8 aa, Homo Sapiens
RDLMVHNI

SEQ ID NO: 91352 - protein, 8 aa, Homo Sapiens
RDLPAQLL

SEQ ID NO: 91353 - protein, 8 aa, Homo Sapiens
RDMAAAGL

SEQ ID NO: 91354 - protein, 8 aa, Homo Sapiens
RDMEANLL

SEQ ID NO: 91355 - protein, 8 aa, Homo Sapiens
RDMETIGF

SEQ ID NO: 91356 - protein, 8 aa, Homo Sapiens
RDMVHHLL

SEQ ID NO: 91357 - protein, 8 aa, Homo Sapiens
RDMVSKKL

SEQ ID NO: 91358 - protein, 8 aa, Homo Sapiens
RDMVVNLF

SEQ ID NO: 91359 - protein, 8 aa, Homo Sapiens
RDMYSHYV

SEQ ID NO: 91360 - protein, 8 aa, Homo Sapiens
RDNIFRNV

SEQ ID NO: 91361 - protein, 8 aa, Homo Sapiens
RDNLTRRF

SEQ ID NO: 91362 - protein, 8 aa, Homo Sapiens
RDNQWLGV

SEQ ID NO: 91363 - protein, 8 aa, Homo Sapiens
RDNTVHSF

SEQ ID NO: 91364 - protein, 8 aa, Homo Sapiens
RDNYVPEV

SEQ ID NO: 91365 - protein, 8 aa, Homo Sapiens
RDPRERTL

SEQ ID NO: 91366 - protein, 8 aa, Homo Sapiens
RDQEKPYF

SEQ ID NO: 91367 - protein, 8 aa, Homo Sapiens
RDQLVESL

SEQ ID NO: 91368 - protein, 8 aa, Homo Sapiens
RDQYSHLL

SEQ ID NO: 91369 - protein, 8 aa, Homo Sapiens
RDRIHVTV

SEQ ID NO: 91370 - protein, 8 aa, Homo Sapiens
RDRIKRAF

SEQ ID NO: 91371 - protein, 8 aa, Homo Sapiens
RDSEITHL

SEQ ID NO: 91372 - protein, 8 aa, Homo Sapiens
RDSIINDF

SEQ ID NO: 91373 - protein, 8 aa, Homo Sapiens
RDSISETV

SEQ ID NO: 91374 - protein, 8 aa, Homo Sapiens
RDSIVAEL

SEQ ID NO: 91375 - protein, 8 aa, Homo Sapiens
RDSIVETL

SEQ ID NO: 91376 - protein, 8 aa, Homo Sapiens
RDSLAEKL

SEQ ID NO: 91377 - protein, 8 aa, Homo Sapiens
RDSLAKTI

SEQ ID NO: 91378 - protein, 8 aa, Homo Sapiens
RDSLSHLV

SEQ ID NO: 91379 - protein, 8 aa, Homo Sapiens
RDSLVALL

SEQ ID NO: 91380 - protein, 8 aa, Homo Sapiens
RDSLVERL

SEQ ID NO: 91381 - protein, 8 aa, Homo Sapiens
RDSMAKSL

SEQ ID NO: 91382 - protein, 8 aa, Homo Sapiens
RDSPAVSL

SEQ ID NO: 91383 - protein, 8 aa, Homo Sapiens
RDSRSTVF

SEQ ID NO: 91384 - protein, 8 aa, Homo Sapiens
RDSRTYSV

SEQ ID NO: 91385 - protein, 8 aa, Homo Sapiens
RDSVSGEL

SEQ ID NO: 91386 - protein, 8 aa, Homo Sapiens
RDSYAKLL

SEQ ID NO: 91387 - protein, 8 aa, Homo Sapiens
RDSYVREL

SEQ ID NO: 91388 - protein, 8 aa, Homo Sapiens
RDTKVVSM

SEQ ID NO: 91389 - protein, 8 aa, Homo Sapiens
RDTLVSYM

SEQ ID NO: 91390 - protein, 8 aa, Homo Sapiens
RDTMVTKL

SEQ ID NO: 91391 - protein, 8 aa, Homo Sapiens
RDTPHSDF

SEQ ID NO: 91392 - protein, 8 aa, Homo Sapiens
RDTVVEGL

SEQ ID NO: 91393 - protein, 8 aa, Homo Sapiens
RDTYVSSF

SEQ ID NO: 91394 - protein, 8 aa, Homo Sapiens
RDVITHVV

SEQ ID NO: 91395 - protein, 8 aa, Homo Sapiens
RDVKKTGF

SEQ ID NO: 91396 - protein, 8 aa, Homo Sapiens
RDVKVSLF

SEQ ID NO: 91397 - protein, 8 aa, Homo Sapiens
RDVLKQHF

SEQ ID NO: 91398 - protein, 8 aa, Homo Sapiens
RDVLSAAF

SEQ ID NO: 91399 - protein, 8 aa, Homo Sapiens
RDVMVENF

SEQ ID NO: 91400 - protein, 8 aa, Homo Sapiens
RDVRVANV

SEQ ID NO: 91401 - protein, 8 aa, Homo Sapiens
RDVTVVQF

SEQ ID NO: 91402 - protein, 8 aa, Homo Sapiens
RDVVHSTL

SEQ ID NO: 91403 - protein, 8 aa, Homo Sapiens
RDWFSSQL

SEQ ID NO: 91404 - protein, 8 aa, Homo Sapiens
RDWVLNEF

SEQ ID NO: 91405 - protein, 8 aa, Homo Sapiens
RDWYKRNF

SEQ ID NO: 91406 - protein, 8 aa, Homo Sapiens
RDWYVYAF

SEQ ID NO: 91407 - protein, 8 aa, Homo Sapiens
RDYCAHHL

SEQ ID NO: 91408 - protein, 8 aa, Homo Sapiens
RDYETATL

SEQ ID NO: 91409 - protein, 8 aa, Homo Sapiens
RDYLATHV

SEQ ID NO: 91410 - protein, 8 aa, Homo Sapiens
RDYLHYHI

SEQ ID NO: 91411 - protein, 8 aa, Homo Sapiens
RDYLVQKL

SEQ ID NO: 91412 - protein, 8 aa, Homo Sapiens
RDYQVRGL

SEQ ID NO: 91413 - protein, 8 aa, Homo Sapiens
RDYVAPTA

SEQ ID NO: 91414 - protein, 8 aa, Homo Sapiens
RDYVKARL

SEQ ID NO: 91415 - protein, 8 aa, Homo Sapiens
RDYVRYRL

SEQ ID NO: 91416 - protein, 8 aa, Homo Sapiens
REALKHPF

SEQ ID NO: 91417 - protein, 8 aa, Homo Sapiens
REALTTGF

SEQ ID NO: 91418 - protein, 8 aa, Homo Sapiens
REALVKKF

SEQ ID NO: 91419 - protein, 8 aa, Homo Sapiens
REDAVHAM

SEQ ID NO: 91420 - protein, 8 aa, Homo Sapiens
REDIVNQM

SEQ ID NO: 91421 - protein, 8 aa, Homo Sapiens
REDLKFYF

SEQ ID NO: 91422 - protein, 8 aa, Homo Sapiens
REDLVNKM

SEQ ID NO: 91423 - protein, 8 aa, Homo Sapiens
REDTHHLV

SEQ ID NO: 91424 - protein, 8 aa, Homo Sapiens
REEYITAF

SEQ ID NO: 91425 - protein, 8 aa, Homo Sapiens
REFLKKEF

SEQ ID NO: 91426 - protein, 8 aa, Homo Sapiens
REFLVRSL

SEQ ID NO: 91427 - protein, 8 aa, Homo Sapiens
REFLWQHV

SEQ ID NO: 91428 - protein, 8 aa, Homo Sapiens
REFLWSKL

SEQ ID NO: 91429 - protein, 8 aa, Homo Sapiens
REHLTASM

SEQ ID NO: 91430 - protein, 8 aa, Homo Sapiens
REHPVPLL

SEQ ID NO: 91431 - protein, 8 aa, Homo Sapiens
REHVSRAL

SEQ ID NO: 91432 - protein, 8 aa, Homo Sapiens
REIIINAV

SEQ ID NO: 91433 - protein, 8 aa, Homo Sapiens
REILINNF

SEQ ID NO: 91434 - protein, 8 aa, Homo Sapiens
REKEWQRL

SEQ ID NO: 91435 - protein, 8 aa, Homo Sapiens
REKIVWEF

SEQ ID NO: 91436 - protein, 8 aa, Homo Sapiens
RELISRKL

SEQ ID NO: 91437 - protein, 8 aa, Homo Sapiens
RELLSHHF

SEQ ID NO: 91438 - protein, 8 aa, Homo Sapiens
RELLVERL

SEQ ID NO: 91439 - protein, 8 aa, Homo Sapiens
RELQHAAL

SEQ ID NO: 91440 - protein, 8 aa, Homo Sapiens
RELVAHHL

SEQ ID NO: 91441 - protein, 8 aa, Homo Sapiens
RELVKKGF

SEQ ID NO: 91442 - protein, 8 aa, Homo Sapiens
REMIVHSV

SEQ ID NO: 91443 - protein, 8 aa, Homo Sapiens
REMVVQLL

SEQ ID NO: 91444 - protein, 8 aa, Homo Sapiens
RENKAYSF

SEQ ID NO: 91445 - protein, 8 aa, Homo Sapiens
RENLISAL

SEQ ID NO: 91446 - protein, 8 aa, Homo Sapiens
RENLKQHF

SEQ ID NO: 91447 - protein, 8 aa, Homo Sapiens
RENLSAAF

SEQ ID NO: 91448 - protein, 8 aa, Homo Sapiens
RENYIHRI

SEQ ID NO: 91449 - protein, 8 aa, Homo Sapiens
REPVAVSV

SEQ ID NO: 91450 - protein, 8 aa, Homo Sapiens
REQEITAV

SEQ ID NO: 91451 - protein, 8 aa, Homo Sapiens
REQEVNIL

SEQ ID NO: 91452 - protein, 8 aa, Homo Sapiens
REQLVIEV

SEQ ID NO: 91453 - protein, 8 aa, Homo Sapiens
REQRVTGI

SEQ ID NO: 91454 - protein, 8 aa, Homo Sapiens
RESGVRNL

SEQ ID NO: 91455 - protein, 8 aa, Homo Sapiens
RESIVKDF

SEQ ID NO: 91456 - protein, 8 aa, Homo Sapiens
RESRHIAL

SEQ ID NO: 91457 - protein, 8 aa, Homo Sapiens
RESRVPAV

SEQ ID NO: 91458 - protein, 8 aa, Homo Sapiens
RESYICKV

SEQ ID NO: 91459 - protein, 8 aa, Homo Sapiens
RETKKISF

SEQ ID NO: 91460 - protein, 8 aa, Homo Sapiens
REWLTELF

SEQ ID NO: 91461 - protein, 8 aa, Homo Sapiens
REYCIQAF

SEQ ID NO: 91462 - protein, 8 aa, Homo Sapiens
REYHVQFF

SEQ ID NO: 91463 - protein, 8 aa, Homo Sapiens
REYQHIGL

SEQ ID NO: 91464 - protein, 8 aa, Homo Sapiens
REYVRPGL

SEQ ID NO: 91465 - protein, 8 aa, Homo Sapiens
REYYVNQF

SEQ ID NO: 91466 - protein, 8 aa, Homo Sapiens
RGCVVTSV

SEQ ID NO: 91467 - protein, 8 aa, Homo Sapiens
SDALAHHL

SEQ ID NO: 91468 - protein, 8 aa, Homo Sapiens
SDALAVTF

SEQ ID NO: 91469 - protein, 8 aa, Homo Sapiens
SDALKVTF

SEQ ID NO: 91470 - protein, 8 aa, Homo Sapiens
SDAPHPPL

SEQ ID NO: 91471 - protein, 8 aa, Homo Sapiens
SDCSHFDL

SEQ ID NO: 91472 - protein, 8 aa, Homo Sapiens
SDELTHNF

SEQ ID NO: 91473 - protein, 8 aa, Homo Sapiens
SDFEARQL

SEQ ID NO: 91474 - protein, 8 aa, Homo Sapiens
SDFKAHAV

SEQ ID NO: 91475 - protein, 8 aa, Homo Sapiens
SDFLVQQL

SEQ ID NO: 91476 - protein, 8 aa, Homo Sapiens
SDFVVHEI

SEQ ID NO: 91477 - protein, 8 aa, Homo Sapiens
SDFVVVQF

SEQ ID NO: 91478 - protein, 8 aa, Homo Sapiens
SDGIKHGF

SEQ ID NO: 91479 - protein, 8 aa, Homo Sapiens
SDGLVNVF

SEQ ID NO: 91480 - protein, 8 aa, Homo Sapiens
SDHSSHPF

SEQ ID NO: 91481 - protein, 8 aa, Homo Sapiens
SDITVHNF

SEQ ID NO: 91482 - protein, 8 aa, Homo Sapiens
SDIVKKEF

SEQ ID NO: 91483 - protein, 8 aa, Homo Sapiens
SDKETYEL

SEQ ID NO: 91484 - protein, 8 aa, Homo Sapiens
SDLHAHKL

SEQ ID NO: 91485 - protein, 8 aa, Homo Sapiens
SDMMSHLV

SEQ ID NO: 91486 - protein, 8 aa, Homo Sapiens
SDMRTERF

SEQ ID NO: 91487 - protein, 8 aa, Homo Sapiens
SDNFSHNL

SEQ ID NO: 91488 - protein, 8 aa, Homo Sapiens
SDNIIFQF

SEQ ID NO: 91489 - protein, 8 aa, Homo Sapiens
SDNRVTSF

SEQ ID NO: 91490 - protein, 8 aa, Homo Sapiens
SDQRVQNF

SEQ ID NO: 91491 - protein, 8 aa, Homo Sapiens
SDRLIIGF

SEQ ID NO: 91492 - protein, 8 aa, Homo Sapiens
SDSIHYQM

SEQ ID NO: 91493 - protein, 8 aa, Homo Sapiens
SDSLITKK

SEQ ID NO: 91494 - protein, 8 aa, Homo Sapiens
SDSLTQAL

SEQ ID NO: 91495 - protein, 8 aa, Homo Sapiens
SDSLTYKL

SEQ ID NO: 91496 - protein, 8 aa, Homo Sapiens
SDSLVKYF

SEQ ID NO: 91497 - protein, 8 aa, Homo Sapiens
SDSLVPAL

SEQ ID NO: 91498 - protein, 8 aa, Homo Sapiens
SDSPTNHF

SEQ ID NO: 91499 - protein, 8 aa, Homo Sapiens
SDSQVRAF

SEQ ID NO: 91500 - protein, 8 aa, Homo Sapiens
SDSQVRKL

SEQ ID NO: 91501 - protein, 8 aa, Homo Sapiens
SDSRTPAF

SEQ ID NO: 91502 - protein, 8 aa, Homo Sapiens
SDSRVQYF

SEQ ID NO: 91503 - protein, 8 aa, Homo Sapiens
SDSRVTCL

SEQ ID NO: 91504 - protein, 8 aa, Homo Sapiens
SDSSHAQF

SEQ ID NO: 91505 - protein, 8 aa, Homo Sapiens
SDSTHVTF

SEQ ID NO: 91506 - protein, 8 aa, Homo Sapiens
SDSVKSTF

SEQ ID NO: 91507 - protein, 8 aa, Homo Sapiens
SDSYAITF

SEQ ID NO: 91508 - protein, 8 aa, Homo Sapiens
SDTGNFGF

SEQ ID NO: 91509 - protein, 8 aa, Homo Sapiens
SDTLKTYF

SEQ ID NO: 91510 - protein, 8 aa, Homo Sapiens
SDTLVRYF

SEQ ID NO: 91511 - protein, 8 aa, Homo Sapiens
SDVIKEEF

SEQ ID NO: 91512 - protein, 8 aa, Homo Sapiens
SEHVWVEV

SEQ ID NO: 91513 - protein, 8 aa, Homo Sapiens
SELLIHVF

SEQ ID NO: 91514 - protein, 8 aa, Homo Sapiens
SENVVCHF

SEQ ID NO: 91515 - protein, 8 aa, Homo Sapiens
SENVVNRM

SEQ ID NO: 91516 - protein, 8 aa, Homo Sapiens
SENVVVEF

SEQ ID NO: 91517 - protein, 8 aa, Homo Sapiens
SEPTTVAF

SEQ ID NO: 91518 - protein, 8 aa, Homo Sapiens
SESIHQSL

SEQ ID NO: 91519 - protein, 8 aa, Homo Sapiens
SESIVNDF

SEQ ID NO: 91520 - protein, 8 aa, Homo Sapiens
SESIVQGF

SEQ ID NO: 91521 - protein, 8 aa, Homo Sapiens
SESMKPKF

SEQ ID NO: 91522 - protein, 8 aa, Homo Sapiens
SESQTHSF

SEQ ID NO: 91523 - protein, 8 aa, Homo Sapiens
SESQVKSL

SEQ ID NO: 91524 - protein, 8 aa, Homo Sapiens
SESYTQSF

SEQ ID NO: 91525 - protein, 8 aa, Homo Sapiens
TDALIKKF

SEQ ID NO: 91526 - protein, 8 aa, Homo Sapiens
TDFIAHLL

SEQ ID NO: 91527 - protein, 8 aa, Homo Sapiens
TDFISHLF

SEQ ID NO: 91528 - protein, 8 aa, Homo Sapiens
TDGKVFQF

SEQ ID NO: 91529 - protein, 8 aa, Homo Sapiens
TDHATTAL

SEQ ID NO: 91530 - protein, 8 aa, Homo Sapiens
TDLLKTGF

SEQ ID NO: 91531 - protein, 8 aa, Homo Sapiens
TDLRHTGF

SEQ ID NO: 91532 - protein, 8 aa, Homo Sapiens
TDSCVQRL

SEQ ID NO: 91533 - protein, 8 aa, Homo Sapiens
TDSFVNKL

SEQ ID NO: 91534 - protein, 8 aa, Homo Sapiens
TDSHVACF

SEQ ID NO: 91535 - protein, 8 aa, Homo Sapiens
TDSIVCEM

SEQ ID NO: 91536 - protein, 8 aa, Homo Sapiens
TDSPIWNF

SEQ ID NO: 91537 - protein, 8 aa, Homo Sapiens
TDSRKNPF

SEQ ID NO: 91538 - protein, 8 aa, Homo Sapiens
TDTAHVSL

SEQ ID NO: 91539 - protein, 8 aa, Homo Sapiens
TDVLVVGV

SEQ ID NO: 91540 - protein, 8 aa, Homo Sapiens
TDYETHEF

SEQ ID NO: 91541 - protein, 8 aa, Homo Sapiens
TESEVTAF

SEQ ID NO: 91542 - protein, 8 aa, Homo Sapiens
TESKVTEF

SEQ ID NO: 91543 - protein, 8 aa, Homo Sapiens
TESLVRGF

SEQ ID NO: 91544 - protein, 8 aa, Homo Sapiens
TESSVYNF

SEQ ID NO: 91545 - protein, 8 aa, Homo Sapiens
TNGEPPVF

SEQ ID NO: 91546 - protein, 8 aa, Homo Sapiens
TSPSHVNL

SEQ ID NO: 91547 - protein, 8 aa, Homo Sapiens
TVGNNKTL

SEQ ID NO: 91548 - protein, 8 aa, Homo Sapiens
VDHLHEHF

SEQ ID NO: 91549 - protein, 8 aa, Homo Sapiens
VDKAVQAF

SEQ ID NO: 91550 - protein, 8 aa, Homo Sapiens
VDKKIEEF

SEQ ID NO: 91551 - protein, 8 aa, Homo Sapiens
VDKTVQAF

SEQ ID NO: 91552 - protein, 8 aa, Homo Sapiens
VDMGHSAF

SEQ ID NO: 91553 - protein, 8 aa, Homo Sapiens
VDRVSYLL

SEQ ID NO: 91554 - protein, 8 aa, Homo Sapiens
VDSIVWTF

SEQ ID NO: 91555 - protein, 8 aa, Homo Sapiens
VDSKVKAF

SEQ ID NO: 91556 - protein, 8 aa, Homo Sapiens
VDSLHQLF

SEQ ID NO: 91557 - protein, 8 aa, Homo Sapiens
VDSLINKF

SEQ ID NO: 91558 - protein, 8 aa, Homo Sapiens
VDSLITRL

SEQ ID NO: 91559 - protein, 8 aa, Homo Sapiens
VDSMVQHF

SEQ ID NO: 91560 - protein, 8 aa, Homo Sapiens
VDSPAASF

SEQ ID NO: 91561 - protein, 8 aa, Homo Sapiens
VDSPSHGL

SEQ ID NO: 91562 - protein, 8 aa, Homo Sapiens
VDTLVTKF

SEQ ID NO: 91563 - protein, 8 aa, Homo Sapiens
VDTYKYLF

SEQ ID NO: 91564 - protein, 8 aa, Homo Sapiens
VDWLHELL

SEQ ID NO: 91565 - protein, 8 aa, Homo Sapiens
VDWLTEKM

SEQ ID NO: 91566 - protein, 8 aa, Homo Sapiens
VDYWVKAF

SEQ ID NO: 91567 - protein, 8 aa, Homo Sapiens
VEAVVRSF

SEQ ID NO: 91568 - protein, 8 aa, Homo Sapiens
VENKKVKF

SEQ ID NO: 91569 - protein, 8 aa, Homo Sapiens
VENKWHRV

SEQ ID NO: 91570 - protein, 8 aa, Homo Sapiens
VESKSQAF

SEQ ID NO: 91571 - protein, 8 aa, Homo Sapiens
VESKVYAV

SEQ ID NO: 91572 - protein, 8 aa, Homo Sapiens
VESMKYPF

SEQ ID NO: 91573 - protein, 8 aa, Homo Sapiens
YDFIHTSF

SEQ ID NO: 91574 - protein, 8 aa, Homo Sapiens
YDKAVASF

SEQ ID NO: 91575 - protein, 8 aa, Homo Sapiens
YDKDHYKL

SEQ ID NO: 91576 - protein, 8 aa, Homo Sapiens
YDLIVHQL

SEQ ID NO: 91577 - protein, 8 aa, Homo Sapiens
YDNPHEAL

SEQ ID NO: 91578 - protein, 8 aa, Homo Sapiens
YDSESKEF

SEQ ID NO: 91579 - protein, 8 aa, Homo Sapiens
YDSIIYRM

SEQ ID NO: 91580 - protein, 8 aa, Homo Sapiens
YDSTHGKF

SEQ ID NO: 91581 - protein, 8 aa, Homo Sapiens
YDSVKVYF

SEQ ID NO: 91582 - protein, 8 aa, Homo Sapiens
YDTVVHPF

SEQ ID NO: 91583 - protein, 8 aa, Homo Sapiens
YEMILHEF

SEQ ID NO: 91584 - protein, 8 aa, Homo Sapiens
YENLTNKL

SEQ ID NO: 91585 - protein, 8 aa, Homo Sapiens
YENLVVAL

SEQ ID NO: 91586 - protein, 8 aa, Homo Sapiens
YESKVFYL

SEQ ID NO: 91587 - protein, 8 aa, Homo Sapiens
YESLVHAV

SEQ ID NO: 91588 - protein, 8 aa, Homo Sapiens
YETLTRPF

SEQ ID NO: 91589 - protein, 9 aa, Homo Sapiens
ADALRPSVV

SEQ ID NO: 91590 - protein, 9 aa, Homo Sapiens
ADAMKVIGF

SEQ ID NO: 91591 - protein, 9 aa, Homo Sapiens
ADAVTHARF

SEQ ID NO: 91592 - protein, 9 aa, Homo Sapiens
ADFARVAHL

SEQ ID NO: 91593 - protein, 9 aa, Homo Sapiens
ADFERFSKV

SEQ ID NO: 91594 - protein, 9 aa, Homo Sapiens
ADFHRVEGL

SEQ ID NO: 91595 - protein, 9 aa, Homo Sapiens
ADGVHLLGF

SEQ ID NO: 91596 - protein, 9 aa, Homo Sapiens
ADHARTITV

SEQ ID NO: 91597 - protein, 9 aa, Homo Sapiens
ADHIHSVEM

SEQ ID NO: 91598 - protein, 9 aa, Homo Sapiens
ADHIRSIHV

SEQ ID NO: 91599 - protein, 9 aa, Homo Sapiens
ADKVRTMLV

SEQ ID NO: 91600 - protein, 9 aa, Homo Sapiens
ADLAHVLSL

SEQ ID NO: 91601 - protein, 9 aa, Homo Sapiens
ADLARFYTV

SEQ ID NO: 91602 - protein, 9 aa, Homo Sapiens
ADLARHAQV

SEQ ID NO: 91603 - protein, 9 aa, Homo Sapiens
ADLARRLGL

SEQ ID NO: 91604 - protein, 9 aa, Homo Sapiens
ADLERAQAM

SEQ ID NO: 91605 - protein, 9 aa, Homo Sapiens
ADLERFFNF

SEQ ID NO: 91606 - protein, 9 aa, Homo Sapiens
ADLERVLGL

SEQ ID NO: 91607 - protein, 9 aa, Homo Sapiens
ADLIRCKLL

SEQ ID NO: 91608 - protein, 9 aa, Homo Sapiens
ADLIRHVYF

SEQ ID NO: 91609 - protein, 9 aa, Homo Sapiens
ADLIRMAFM

SEQ ID NO: 91610 - protein, 9 aa, Homo Sapiens
ADLKKQELF

SEQ ID NO: 91611 - protein, 9 aa, Homo Sapiens
ADLKRHVEF

SEQ ID NO: 91612 - protein, 9 aa, Homo Sapiens
ADLLRARNM

SEQ ID NO: 91613 - protein, 9 aa, Homo Sapiens
ADLPRNIML

SEQ ID NO: 91614 - protein, 9 aa, Homo Sapiens
ADLRHKEAL

SEQ ID NO: 91615 - protein, 9 aa, Homo Sapiens
ADLRRAIQL

SEQ ID NO: 91616 - protein, 9 aa, Homo Sapiens
ADLSRAVSL

SEQ ID NO: 91617 - protein, 9 aa, Homo Sapiens
ADLTRVETF

SEQ ID NO: 91618 - protein, 9 aa, Homo Sapiens
ADLVNAHVV

SEQ ID NO: 91619 - protein, 9 aa, Homo Sapiens
ADLYRVLGV

SEQ ID NO: 91620 - protein, 9 aa, Homo Sapiens
ADMAHISGL

SEQ ID NO: 91621 - protein, 9 aa, Homo Sapiens
ADMAKRERF

SEQ ID NO: 91622 - protein, 9 aa, Homo Sapiens
ADMPRVFVF

SEQ ID NO: 91623 - protein, 9 aa, Homo Sapiens
ADNARVNFF

SEQ ID NO: 91624 - protein, 9 aa, Homo Sapiens
ADNIKAQLF

SEQ ID NO: 91625 - protein, 9 aa, Homo Sapiens
ADNLRLIQV

SEQ ID NO: 91626 - protein, 9 aa, Homo Sapiens
ADQKRFSAL

SEQ ID NO: 91627 - protein, 9 aa, Homo Sapiens
ADQLKEYLF

SEQ ID NO: 91628 - protein, 9 aa, Homo Sapiens
ADQLRFSYL

SEQ ID NO: 91629 - protein, 9 aa, Homo Sapiens
ADQMRMLNF

SEQ ID NO: 91630 - protein, 9 aa, Homo Sapiens
ADRARYSAF

SEQ ID NO: 91631 - protein, 9 aa, Homo Sapiens
ADSFHLQQF

SEQ ID NO: 91632 - protein, 9 aa, Homo Sapiens
ADSFKADYF

SEQ ID NO: 91633 - protein, 9 aa, Homo Sapiens
ADSIRQQEL

SEQ ID NO: 91634 - protein, 9 aa, Homo Sapiens
ADSKRAFEL

SEQ ID NO: 91635 - protein, 9 aa, Homo Sapiens
ADSLHRGLI

SEQ ID NO: 91636 - protein, 9 aa, Homo Sapiens
ADSLHRLGL

SEQ ID NO: 91637 - protein, 9 aa, Homo Sapiens
ADSLRHFKV

SEQ ID NO: 91638 - protein, 9 aa, Homo Sapiens
ADSLRLQQL

SEQ ID NO: 91639 - protein, 9 aa, Homo Sapiens
ADSPRTALL

SEQ ID NO: 91640 - protein, 9 aa, Homo Sapiens
ADSPRTSVF

SEQ ID NO: 91641 - protein, 9 aa, Homo Sapiens
ADSQRFRQF

SEQ ID NO: 91642 - protein, 9 aa, Homo Sapiens
ADTGRIHRF

SEQ ID NO: 91643 - protein, 9 aa, Homo Sapiens
ADVKHVFRL

SEQ ID NO: 91644 - protein, 9 aa, Homo Sapiens
ADVLKVEVF

SEQ ID NO: 91645 - protein, 9 aa, Homo Sapiens
ADWIRISEM

SEQ ID NO: 91646 - protein, 9 aa, Homo Sapiens
ADYIMANSF

SEQ ID NO: 91647 - protein, 9 aa, Homo Sapiens
ADYKRSSSL

SEQ ID NO: 91648 - protein, 9 aa, Homo Sapiens
ADYLVPILA

SEQ ID NO: 91649 - protein, 9 aa, Homo Sapiens
ADYQRICKM

SEQ ID NO: 91650 - protein, 9 aa, Homo Sapiens
ADYVHSLGL

SEQ ID NO: 91651 - protein, 9 aa, Homo Sapiens
AEAHARIHL

SEQ ID NO: 91652 - protein, 9 aa, Homo Sapiens
AEAIRKIGF

SEQ ID NO: 91653 - protein, 9 aa, Homo Sapiens
AEALRTSGL

SEQ ID NO: 91654 - protein, 9 aa, Homo Sapiens
AEAPHLVQV

SEQ ID NO: 91655 - protein, 9 aa, Homo Sapiens
AEAQRFARM

SEQ ID NO: 91656 - protein, 9 aa, Homo Sapiens
AEERRKYTL

SEQ ID NO: 91657 - protein, 9 aa, Homo Sapiens
AEGLRNENL

SEQ ID NO: 91658 - protein, 9 aa, Homo Sapiens
AEGPPRLAI

SEQ ID NO: 91659 - protein, 9 aa, Homo Sapiens
AEIRHEVSV

SEQ ID NO: 91660 - protein, 9 aa, Homo Sapiens
AEKAYHEQL

SEQ ID NO: 91661 - protein, 9 aa, Homo Sapiens
AELERAAAL

SEQ ID NO: 91662 - protein, 9 aa, Homo Sapiens
AELERAQKI

SEQ ID NO: 91663 - protein, 9 aa, Homo Sapiens
AELERNVAL

SEQ ID NO: 91664 - protein, 9 aa, Homo Sapiens
AELERQAVL

SEQ ID NO: 91665 - protein, 9 aa, Homo Sapiens
AELIRAFGL

SEQ ID NO: 91666 - protein, 9 aa, Homo Sapiens
AELLRGLSL

SEQ ID NO: 91667 - protein, 9 aa, Homo Sapiens
AELLRHDFV

SEQ ID NO: 91668 - protein, 9 aa, Homo Sapiens
AELLRHKFF

SEQ ID NO: 91669 - protein, 9 aa, Homo Sapiens
AELMRSMGL

SEQ ID NO: 91670 - protein, 9 aa, Homo Sapiens
AELQHCWAL

SEQ ID NO: 91671 - protein, 9 aa, Homo Sapiens
AELQRAESL

SEQ ID NO: 91672 - protein, 9 aa, Homo Sapiens
AELQRKESL

SEQ ID NO: 91673 - protein, 9 aa, Homo Sapiens
AELQRVQKV

SEQ ID NO: 91674 - protein, 9 aa, Homo Sapiens
AELRRHLQF

SEQ ID NO: 91675 - protein, 9 aa, Homo Sapiens
AELRRMQEM

SEQ ID NO: 91676 - protein, 9 aa, Homo Sapiens
AELVRHQRI

SEQ ID NO: 91677 - protein, 9 aa, Homo Sapiens
AEMIRQIEF

SEQ ID NO: 91678 - protein, 9 aa, Homo Sapiens
AEMLHNVTL

SEQ ID NO: 91679 - protein, 9 aa, Homo Sapiens
AEMLRSISF

SEQ ID NO: 91680 - protein, 9 aa, Homo Sapiens
AENPGKYNI

SEQ ID NO: 91681 - protein, 9 aa, Homo Sapiens
AEPAHFYLF

SEQ ID NO: 91682 - protein, 9 aa, Homo Sapiens
AEPGPRPAL

SEQ ID NO: 91683 - protein, 9 aa, Homo Sapiens
AEPKAKDPF

SEQ ID NO: 91684 - protein, 9 aa, Homo Sapiens
AEPVPTSHF

SEQ ID NO: 91685 - protein, 9 aa, Homo Sapiens
AEQIRLAQM

SEQ ID NO: 91686 - protein, 9 aa, Homo Sapiens
AEQKRLKTV

SEQ ID NO: 91687 - protein, 9 aa, Homo Sapiens
AEQKVEYTL

SEQ ID NO: 91688 - protein, 9 aa, Homo Sapiens
AEQLRAELL

SEQ ID NO: 91689 - protein, 9 aa, Homo Sapiens
AEQMHKTGF

SEQ ID NO: 91690 - protein, 9 aa, Homo Sapiens
AEQMRKIAL

SEQ ID NO: 91691 - protein, 9 aa, Homo Sapiens
AEQMRLAQV

SEQ ID NO: 91692 - protein, 9 aa, Homo Sapiens
AEQQITEVF

SEQ ID NO: 91693 - protein, 9 aa, Homo Sapiens
AEQVRKSTL

SEQ ID NO: 91694 - protein, 9 aa, Homo Sapiens
AEQWRSAQL

SEQ ID NO: 91695 - protein, 9 aa, Homo Sapiens
AEQYRSYRL

SEQ ID NO: 91696 - protein, 9 aa, Homo Sapiens
AESIRTGKL

SEQ ID NO: 91697 - protein, 9 aa, Homo Sapiens
AESLRYKLL

SEQ ID NO: 91698 - protein, 9 aa, Homo Sapiens
AESPAGHSF

SEQ ID NO: 91699 - protein, 9 aa, Homo Sapiens
AESPERVLL

SEQ ID NO: 91700 - protein, 9 aa, Homo Sapiens
AESVVPARM

SEQ ID NO: 91701 - protein, 9 aa, Homo Sapiens
AEVERVKNM

SEQ ID NO: 91702 - protein, 9 aa, Homo Sapiens
AEVLRTMEL

SEQ ID NO: 91703 - protein, 9 aa, Homo Sapiens
AEVPHSTGV

SEQ ID NO: 91704 - protein, 9 aa, Homo Sapiens
AEWQRAMTM

SEQ ID NO: 91705 - protein, 9 aa, Homo Sapiens
AEYIRTEML

SEQ ID NO: 91706 - protein, 9 aa, Homo Sapiens
AEYKRYLEM

SEQ ID NO: 91707 - protein, 9 aa, Homo Sapiens
AGPSHVAAM

SEQ ID NO: 91708 - protein, 9 aa, Homo Sapiens
AKMANYAKF

SEQ ID NO: 91709 - protein, 9 aa, Homo Sapiens
AQDEHLITF

SEQ ID NO: 91710 - protein, 9 aa, Homo Sapiens
AQPDHSYNL

SEQ ID NO: 91711 - protein, 9 aa, Homo Sapiens
ASPTPHAAF

SEQ ID NO: 91712 - protein, 9 aa, Homo Sapiens
ATNQMGSSF

SEQ ID NO: 91713 - protein, 9 aa, Homo Sapiens
CDVVKDYAF

SEQ ID NO: 91714 - protein, 9 aa, Homo Sapiens
CEVTRVKAV

SEQ ID NO: 91715 - protein, 9 aa, Homo Sapiens
DKVSVTFQF

SEQ ID NO: 91716 - protein, 9 aa, Homo Sapiens
EAQSRALQL

SEQ ID NO: 91717 - protein, 9 aa, Homo Sapiens
EDLIHEIAF

SEQ ID NO: 91718 - protein, 9 aa, Homo Sapiens
EDLQRALAL

SEQ ID NO: 91719 - protein, 9 aa, Homo Sapiens
EDQLRGAGF

SEQ ID NO: 91720 - protein, 9 aa, Homo Sapiens
EELERHAQF

SEQ ID NO: 91721 - protein, 9 aa, Homo Sapiens
EELKRVASF

SEQ ID NO: 91722 - protein, 9 aa, Homo Sapiens
EELPHIHAF

SEQ ID NO: 91723 - protein, 9 aa, Homo Sapiens
EVREHVKLL

SEQ ID NO: 91724 - protein, 9 aa, Homo Sapiens
FDHPHIVKL

SEQ ID NO: 91725 - protein, 9 aa, Homo Sapiens
FDRERIELF

SEQ ID NO: 91726 - protein, 9 aa, Homo Sapiens
FEDETVRKF

SEQ ID NO: 91727 - protein, 9 aa, Homo Sapiens
FEQIKKERF

SEQ ID NO: 91728 - protein, 9 aa, Homo Sapiens
FLQQPRPLM

SEQ ID NO: 91729 - protein, 9 aa, Homo Sapiens
FSDEIRHNL

SEQ ID NO: 91730 - protein, 9 aa, Homo Sapiens
GDEERVIGF

SEQ ID NO: 91731 - protein, 9 aa, Homo Sapiens
GDHLRKAKL

SEQ ID NO: 91732 - protein, 9 aa, Homo Sapiens
GDHVKKVSF

SEQ ID NO: 91733 - protein, 9 aa, Homo Sapiens
GDLAHANGL

SEQ ID NO: 91734 - protein, 9 aa, Homo Sapiens
GDLGRVKHL

SEQ ID NO: 91735 - protein, 9 aa, Homo Sapiens
GDLIRYIVL

SEQ ID NO: 91736 - protein, 9 aa, Homo Sapiens
GDLKHITKL

SEQ ID NO: 91737 - protein, 9 aa, Homo Sapiens
GDLQRELNL

SEQ ID NO: 91738 - protein, 9 aa, Homo Sapiens
GDLSHIHRL

SEQ ID NO: 91739 - protein, 9 aa, Homo Sapiens
GDLSRHLGL

SEQ ID NO: 91740 - protein, 9 aa, Homo Sapiens
GDLVKKESF

SEQ ID NO: 91741 - protein, 9 aa, Homo Sapiens
GDMRRLIGF

SEQ ID NO: 91742 - protein, 9 aa, Homo Sapiens
GDSVKASKF

SEQ ID NO: 91743 - protein, 9 aa, Homo Sapiens
GDTLRVFKM

SEQ ID NO: 91744 - protein, 9 aa, Homo Sapiens
GDYIRTGFI

SEQ ID NO: 91745 - protein, 9 aa, Homo Sapiens
GDYLRVWRV

SEQ ID NO: 91746 - protein, 9 aa, Homo Sapiens
GDYSRPLHI

SEQ ID NO: 91747 - protein, 9 aa, Homo Sapiens
GEAARAAGF

SEQ ID NO: 91748 - protein, 9 aa, Homo Sapiens
GEDPYPHKF

SEQ ID NO: 91749 - protein, 9 aa, Homo Sapiens
GELKRRLGL

SEQ ID NO: 91750 - protein, 9 aa, Homo Sapiens
GELQRKIGL

SEQ ID NO: 91751 - protein, 9 aa, Homo Sapiens
GEMPRHMQL

SEQ ID NO: 91752 - protein, 9 aa, Homo Sapiens
GEQEDRPGL

SEQ ID NO: 91753 - protein, 9 aa, Homo Sapiens
GGGWDHISV

SEQ ID NO: 91754 - protein, 9 aa, Homo Sapiens
GREAVLAAL

SEQ ID NO: 91755 - protein, 9 aa, Homo Sapiens
GSDMRTERF

SEQ ID NO: 91756 - protein, 9 aa, Homo Sapiens
GYERPFAQI

SEQ ID NO: 91757 - protein, 9 aa, Homo Sapiens
HDAARTGFL

SEQ ID NO: 91758 - protein, 9 aa, Homo Sapiens
HDFFRNDFL

SEQ ID NO: 91759 - protein, 9 aa, Homo Sapiens
HDFGHLSVF

SEQ ID NO: 91760 - protein, 9 aa, Homo Sapiens
HDFLKYDFF

SEQ ID NO: 91761 - protein, 9 aa, Homo Sapiens
HDFLVKVKV

SEQ ID NO: 91762 - protein, 9 aa, Homo Sapiens
HDFPQFYPL

SEQ ID NO: 91763 - protein, 9 aa, Homo Sapiens
HDFPRALIF

SEQ ID NO: 91764 - protein, 9 aa, Homo Sapiens
HDFVVVETV

SEQ ID NO: 91765 - protein, 9 aa, Homo Sapiens
HDGLTVHLV

SEQ ID NO: 91766 - protein, 9 aa, Homo Sapiens
HDHPHALEF

SEQ ID NO: 91767 - protein, 9 aa, Homo Sapiens
HDHQIRVGV

SEQ ID NO: 91768 - protein, 9 aa, Homo Sapiens
HDIETTHGV

SEQ ID NO: 91769 - protein, 9 aa, Homo Sapiens
HDILHLVEL

SEQ ID NO: 91770 - protein, 9 aa, Homo Sapiens
HDLERARLL

SEQ ID NO: 91771 - protein, 9 aa, Homo Sapiens
HDLERKYAV

SEQ ID NO: 91772 - protein, 9 aa, Homo Sapiens
HDLERRYEL

SEQ ID NO: 91773 - protein, 9 aa, Homo Sapiens
HDLKHAHEL

SEQ ID NO: 91774 - protein, 9 aa, Homo Sapiens
HDLKRKMIL

SEQ ID NO: 91775 - protein, 9 aa, Homo Sapiens
HDLLKLKKF

SEQ ID NO: 91776 - protein, 9 aa, Homo Sapiens
HDLLMSQVM

SEQ ID NO: 91777 - protein, 9 aa, Homo Sapiens
HDLMHFNTL

SEQ ID NO: 91778 - protein, 9 aa, Homo Sapiens
HDLPHYVAL

SEQ ID NO: 91779 - protein, 9 aa, Homo Sapiens
HDLTKWDLF

SEQ ID NO: 91780 - protein, 9 aa, Homo Sapiens
HDLWHIIKF

SEQ ID NO: 91781 - protein, 9 aa, Homo Sapiens
HDMVSPAVF

SEQ ID NO: 91782 - protein, 9 aa, Homo Sapiens
HDPGRGAPL

SEQ ID NO: 91783 - protein, 9 aa, Homo Sapiens
HDQLRHGGL

SEQ ID NO: 91784 - protein, 9 aa, Homo Sapiens
HDRIRPHNL

SEQ ID NO: 91785 - protein, 9 aa, Homo Sapiens
HDVLSFLTF

SEQ ID NO: 91786 - protein, 9 aa, Homo Sapiens
HDYAKAAFC

SEQ ID NO: 91787 - protein, 9 aa, Homo Sapiens
HDYMKQMTF

SEQ ID NO: 91788 - protein, 9 aa, Homo Sapiens
HEAERNIAL

SEQ ID NO: 91789 - protein, 9 aa, Homo Sapiens
HEDLRKAGL

SEQ ID NO: 91790 - protein, 9 aa, Homo Sapiens
HEFLRLSQV

SEQ ID NO: 91791 - protein, 9 aa, Homo Sapiens
HEGPALYYM

SEQ ID NO: 91792 - protein, 9 aa, Homo Sapiens
HEHIHSCQF

SEQ ID NO: 91793 - protein, 9 aa, Homo Sapiens
HEIGHSLGL

SEQ ID NO: 91794 - protein, 9 aa, Homo Sapiens
HELIHGSSF

SEQ ID NO: 91795 - protein, 9 aa, Homo Sapiens
HELLKENGF

SEQ ID NO: 91796 - protein, 9 aa, Homo Sapiens
HELQRFYSL

SEQ ID NO: 91797 - protein, 9 aa, Homo Sapiens
HEMEKAFAF

SEQ ID NO: 91798 - protein, 9 aa, Homo Sapiens
HEMPKTFTF

SEQ ID NO: 91799 - protein, 9 aa, Homo Sapiens
HENDAIHKI

SEQ ID NO: 91800 - protein, 9 aa, Homo Sapiens
HEPEPHILL

SEQ ID NO: 91801 - protein, 9 aa, Homo Sapiens
HEQLRAVIV

SEQ ID NO: 91802 - protein, 9 aa, Homo Sapiens
HEQSRIITV

SEQ ID NO: 91803 - protein, 9 aa, Homo Sapiens
HESPAVKLM

SEQ ID NO: 91804 - protein, 9 aa, Homo Sapiens
HGLIRKYGL

SEQ ID NO: 91805 - protein, 9 aa, Homo Sapiens
HSPLHSTGV

SEQ ID NO: 91806 - protein, 9 aa, Homo Sapiens
HSQAHCIGF

SEQ ID NO: 91807 - protein, 9 aa, Homo Sapiens
IDAIHQLGF

SEQ ID NO: 91808 - protein, 9 aa, Homo Sapiens
IDHPHTHVV

SEQ ID NO: 91809 - protein, 9 aa, Homo Sapiens
IDHVKGDSF

SEQ ID NO: 91810 - protein, 9 aa, Homo Sapiens
IDLERLQCL

SEQ ID NO: 91811 - protein, 9 aa, Homo Sapiens
IDLKRGFGF

SEQ ID NO: 91812 - protein, 9 aa, Homo Sapiens
IDLKRRYNF

SEQ ID NO: 91813 - protein, 9 aa, Homo Sapiens
IDLLRVIHV

SEQ ID NO: 91814 - protein, 9 aa, Homo Sapiens
IDLPRYAVL

SEQ ID NO: 91815 - protein, 9 aa, Homo Sapiens
IDMKRALMM

SEQ ID NO: 91816 - protein, 9 aa, Homo Sapiens
IDMSRVAVM

SEQ ID NO: 91817 - protein, 9 aa, Homo Sapiens
IDNGRAAEF

SEQ ID NO: 91818 - protein, 9 aa, Homo Sapiens
IDNNPKVKF

SEQ ID NO: 91819 - protein, 9 aa, Homo Sapiens
IDSIHQLGF

SEQ ID NO: 91820 - protein, 9 aa, Homo Sapiens
IDSIHQVGV

SEQ ID NO: 91821 - protein, 9 aa, Homo Sapiens
IDSLHSYCF

SEQ ID NO: 91822 - protein, 9 aa, Homo Sapiens
IDSLRALGV

SEQ ID NO: 91823 - protein, 9 aa, Homo Sapiens
IEDNPHPRL

SEQ ID NO: 91824 - protein, 9 aa, Homo Sapiens
IEHPHTDVV

SEQ ID NO: 91825 - protein, 9 aa, Homo Sapiens
IEISRNEAL

SEQ ID NO: 91826 - protein, 9 aa, Homo Sapiens
IEMPCHHLF

SEQ ID NO: 91827 - protein, 9 aa, Homo Sapiens
IENGHIFTV

SEQ ID NO: 91828 - protein, 9 aa, Homo Sapiens
IEPPERMEF

SEQ ID NO: 91829 - protein, 9 aa, Homo Sapiens
IERPTYTNL

SEQ ID NO: 91830 - protein, 9 aa, Homo Sapiens
ISPDAKVCF

SEQ ID NO: 91831 - protein, 9 aa, Homo Sapiens
ISPIKTETF

SEQ ID NO: 91832 - protein, 9 aa, Homo Sapiens
KAPPPKAAF

SEQ ID NO: 91833 - protein, 9 aa, Homo Sapiens
KDALRALNF

SEQ ID NO: 91834 - protein, 9 aa, Homo Sapiens
KDAVRKAMF

SEQ ID NO: 91835 - protein, 9 aa, Homo Sapiens
KDFEKAYKT

SEQ ID NO: 91836 - protein, 9 aa, Homo Sapiens
KDFERAKAV

SEQ ID NO: 91837 - protein, 9 aa, Homo Sapiens
KDFFRVLNL

SEQ ID NO: 91838 - protein, 9 aa, Homo Sapiens
KDFIKFIEF

SEQ ID NO: 91839 - protein, 9 aa, Homo Sapiens
KDFLKIFTF

SEQ ID NO: 91840 - protein, 9 aa, Homo Sapiens
KDFLRIAGL

SEQ ID NO: 91841 - protein, 9 aa, Homo Sapiens
KDFNRAFGF

SEQ ID NO: 91842 - protein, 9 aa, Homo Sapiens
KDFQKVAHF

SEQ ID NO: 91843 - protein, 9 aa, Homo Sapiens
KDHMVTSSF

SEQ ID NO: 91844 - protein, 9 aa, Homo Sapiens
KDHVLVKAF

SEQ ID NO: 91845 - protein, 9 aa, Homo Sapiens
KDIEHALSV

SEQ ID NO: 91846 - protein, 9 aa, Homo Sapiens
KDKLRINRF

SEQ ID NO: 91847 - protein, 9 aa, Homo Sapiens
KDLAKFSTF

SEQ ID NO: 91848 - protein, 9 aa, Homo Sapiens
KDLIHDVSF

SEQ ID NO: 91849 - protein, 9 aa, Homo Sapiens
KDLIRHFNI

SEQ ID NO: 91850 - protein, 9 aa, Homo Sapiens
KDLLRFAQV

SEQ ID NO: 91851 - protein, 9 aa, Homo Sapiens
KDLLRLSHL

SEQ ID NO: 91852 - protein, 9 aa, Homo Sapiens
KDLPHWNKL

SEQ ID NO: 91853 - protein, 9 aa, Homo Sapiens
KDLPRAVEI

SEQ ID NO: 91854 - protein, 9 aa, Homo Sapiens
KDLPRDIQF

SEQ ID NO: 91855 - protein, 9 aa, Homo Sapiens
KDLVHEFVV

SEQ ID NO: 91856 - protein, 9 aa, Homo Sapiens
KDLVHLLTL

SEQ ID NO: 91857 - protein, 9 aa, Homo Sapiens
KDMERLTSL

SEQ ID NO: 91858 - protein, 9 aa, Homo Sapiens
KDNERVVGF

SEQ ID NO: 91859 - protein, 9 aa, Homo Sapiens
KDQERVAEV

SEQ ID NO: 91860 - protein, 9 aa, Homo Sapiens
KDQLRTQVV

SEQ ID NO: 91861 - protein, 9 aa, Homo Sapiens
KDRLRINRF

SEQ ID NO: 91862 - protein, 9 aa, Homo Sapiens
KDRPWIWNI

SEQ ID NO: 91863 - protein, 9 aa, Homo Sapiens
KDSSVAARF

SEQ ID NO: 91864 - protein, 9 aa, Homo Sapiens
KDSVKGDVF

SEQ ID NO: 91865 - protein, 9 aa, Homo Sapiens
KDSVKVMTV

SEQ ID NO: 91866 - protein, 9 aa, Homo Sapiens
KDSVTCAGF

SEQ ID NO: 91867 - protein, 9 aa, Homo Sapiens
KDVAKHLGF

SEQ ID NO: 91868 - protein, 9 aa, Homo Sapiens
KDVDRIIGL

SEQ ID NO: 91869 - protein, 9 aa, Homo Sapiens
KDWERHHRL

SEQ ID NO: 91870 - protein, 9 aa, Homo Sapiens
KDYERVLEL

SEQ ID NO: 91871 - protein, 9 aa, Homo Sapiens
KDYPHRCEF

SEQ ID NO: 91872 - protein, 9 aa, Homo Sapiens
KEACRAYGL

SEQ ID NO: 91873 - protein, 9 aa, Homo Sapiens
KEAETRAEF

SEQ ID NO: 91874 - protein, 9 aa, Homo Sapiens
KEAIREASF

SEQ ID NO: 91875 - protein, 9 aa, Homo Sapiens
KEAIREHQM

SEQ ID NO: 91876 - protein, 9 aa, Homo Sapiens
KEALPKAAF

SEQ ID NO: 91877 - protein, 9 aa, Homo Sapiens
KEAQRIMTL

SEQ ID NO: 91878 - protein, 9 aa, Homo Sapiens
KECMRALGF

SEQ ID NO: 91879 - protein, 9 aa, Homo Sapiens
KEDGTFYEF

SEQ ID NO: 91880 - protein, 9 aa, Homo Sapiens
KEDNTIYRL

SEQ ID NO: 91881 - protein, 9 aa, Homo Sapiens
KEDPTSFRL

SEQ ID NO: 91882 - protein, 9 aa, Homo Sapiens
KEDTPHTAL

SEQ ID NO: 91883 - protein, 9 aa, Homo Sapiens
KEEIPTHSF

SEQ ID NO: 91884 - protein, 9 aa, Homo Sapiens
KEEPRKVCF

SEQ ID NO: 91885 - protein, 9 aa, Homo Sapiens
KEGEFVAQF

SEQ ID NO: 91886 - protein, 9 aa, Homo Sapiens
KEHRPVEKF

SEQ ID NO: 91887 - protein, 9 aa, Homo Sapiens
KEHVLHCQF

SEQ ID NO: 91888 - protein, 9 aa, Homo Sapiens
KEHYKIEAF

SEQ ID NO: 91889 - protein, 9 aa, Homo Sapiens
KEIPHLVAV

SEQ ID NO: 91890 - protein, 9 aa, Homo Sapiens
KEKVHEYNV

SEQ ID NO: 91891 - protein, 9 aa, Homo Sapiens
KELARIEEF

SEQ ID NO: 91892 - protein, 9 aa, Homo Sapiens
KELARQISF

SEQ ID NO: 91893 - protein, 9 aa, Homo Sapiens
KELERLTSL

SEQ ID NO: 91894 - protein, 9 aa, Homo Sapiens
KELERSYHL

SEQ ID NO: 91895 - protein, 9 aa, Homo Sapiens
KELERVTSL

SEQ ID NO: 91896 - protein, 9 aa, Homo Sapiens
KELGRMCQL

SEQ ID NO: 91897 - protein, 9 aa, Homo Sapiens
KELHRFEKL

SEQ ID NO: 91898 - protein, 9 aa, Homo Sapiens
KELIREVEM

SEQ ID NO: 91899 - protein, 9 aa, Homo Sapiens
KELLHNIQL

SEQ ID NO: 91900 - protein, 9 aa, Homo Sapiens
KELLRVAQI

SEQ ID NO: 91901 - protein, 9 aa, Homo Sapiens
KELNILHEM

SEQ ID NO: 91902 - protein, 9 aa, Homo Sapiens
KELNRWCSL

SEQ ID NO: 91903 - protein, 9 aa, Homo Sapiens
KELQHYVTM

SEQ ID NO: 91904 - protein, 9 aa, Homo Sapiens
KELQKSCTF

SEQ ID NO: 91905 - protein, 9 aa, Homo Sapiens
KELQRFKAV

SEQ ID NO: 91906 - protein, 9 aa, Homo Sapiens
KELQRSVEF

SEQ ID NO: 91907 - protein, 9 aa, Homo Sapiens
KELVRQLQL

SEQ ID NO: 91908 - protein, 9 aa, Homo Sapiens
KEMLKLLDF

SEQ ID NO: 91909 - protein, 9 aa, Homo Sapiens
KEMLPHVGV

SEQ ID NO: 91910 - protein, 9 aa, Homo Sapiens
KEMPAVLVF

SEQ ID NO: 91911 - protein, 9 aa, Homo Sapiens
KENPLQFKF

SEQ ID NO: 91912 - protein, 9 aa, Homo Sapiens
KENSYVKKF

SEQ ID NO: 91913 - protein, 9 aa, Homo Sapiens
KEPEERPTF

SEQ ID NO: 91914 - protein, 9 aa, Homo Sapiens
KEPPEVQSF

SEQ ID NO: 91915 - protein, 9 aa, Homo Sapiens
KEPPGSEEF

SEQ ID NO: 91916 - protein, 9 aa, Homo Sapiens
KEPPPEFEF

SEQ ID NO: 91917 - protein, 9 aa, Homo Sapiens
KEPPQGAHF

SEQ ID NO: 91918 - protein, 9 aa, Homo Sapiens
KEQARYNQL

SEQ ID NO: 91919 - protein, 9 aa, Homo Sapiens
KEQERIFQL

SEQ ID NO: 91920 - protein, 9 aa, Homo Sapiens
KEQERLAQL

SEQ ID NO: 91921 - protein, 9 aa, Homo Sapiens
KEQERTLAL

SEQ ID NO: 91922 - protein, 9 aa, Homo Sapiens
KEQMRIQSL

SEQ ID NO: 91923 - protein, 9 aa, Homo Sapiens
KESDGFHRF

SEQ ID NO: 91924 - protein, 9 aa, Homo Sapiens
KESERLQAM

SEQ ID NO: 91925 - protein, 9 aa, Homo Sapiens
KESETFVQF

SEQ ID NO: 91926 - protein, 9 aa, Homo Sapiens
KESEVFYEL

SEQ ID NO: 91927 - protein, 9 aa, Homo Sapiens
KESEVKREF

SEQ ID NO: 91928 - protein, 9 aa, Homo Sapiens
KESEVVMKF

SEQ ID NO: 91929 - protein, 9 aa, Homo Sapiens
KESEVYKML

SEQ ID NO: 91930 - protein, 9 aa, Homo Sapiens
KESKINQVF

SEQ ID NO: 91931 - protein, 9 aa, Homo Sapiens
KESPLLFKF

SEQ ID NO: 91932 - protein, 9 aa, Homo Sapiens
KESPPHEDL

SEQ ID NO: 91933 - protein, 9 aa, Homo Sapiens
KESQRLVGF

SEQ ID NO: 91934 - protein, 9 aa, Homo Sapiens
KESTTKYYF

SEQ ID NO: 91935 - protein, 9 aa, Homo Sapiens
KEVERILGL

SEQ ID NO: 91936 - protein, 9 aa, Homo Sapiens
KEVPRSYEL

SEQ ID NO: 91937 - protein, 9 aa, Homo Sapiens
KEYVRCETV

SEQ ID NO: 91938 - protein, 9 aa, Homo Sapiens
KQDKGGFGF

SEQ ID NO: 91939 - protein, 9 aa, Homo Sapiens
KSDERLTAF

SEQ ID NO: 91940 - protein, 9 aa, Homo Sapiens
KSDPSIVRL

SEQ ID NO: 91941 - protein, 9 aa, Homo Sapiens
KSPAPSSDF

SEQ ID NO: 91942 - protein, 9 aa, Homo Sapiens
KSPDASSAF

SEQ ID NO: 91943 - protein, 9 aa, Homo Sapiens
LDFERTLGL

SEQ ID NO: 91944 - protein, 9 aa, Homo Sapiens
LDHPHIIKL

SEQ ID NO: 91945 - protein, 9 aa, Homo Sapiens
LDHPHIVKL

SEQ ID NO: 91946 - protein, 9 aa, Homo Sapiens
LDHVRTSFL

SEQ ID NO: 91947 - protein, 9 aa, Homo Sapiens
LDLQRNYIF

SEQ ID NO: 91948 - protein, 9 aa, Homo Sapiens
LDLQRTLSL

SEQ ID NO: 91949 - protein, 9 aa, Homo Sapiens
LDMLKVAVF

SEQ ID NO: 91950 - protein, 9 aa, Homo Sapiens
LDVPHSYSV

SEQ ID NO: 91951 - protein, 9 aa, Homo Sapiens
LEAHRIVKM

SEQ ID NO: 91952 - protein, 9 aa, Homo Sapiens
LELPRGWEM

SEQ ID NO: 91953 - protein, 9 aa, Homo Sapiens
LENPRFYGF

SEQ ID NO: 91954 - protein, 9 aa, Homo Sapiens
LENQVRHQL

SEQ ID NO: 91955 - protein, 9 aa, Homo Sapiens
LEQLRPVTV

SEQ ID NO: 91956 - protein, 9 aa, Homo Sapiens
LESGHYTSF

SEQ ID NO: 91957 - protein, 9 aa, Homo Sapiens
LHREDLTSI

SEQ ID NO: 91958 - protein, 9 aa, Homo Sapiens
LQERRHLDL

SEQ ID NO: 91959 - protein, 9 aa, Homo Sapiens
LQQTPHAHL

SEQ ID NO: 91960 - protein, 9 aa, Homo Sapiens
LTVGNNKTL

SEQ ID NO: 91961 - protein, 9 aa, Homo Sapiens
MDHPHHTLF

SEQ ID NO: 91962 - protein, 9 aa, Homo Sapiens
MDLEHKVLL

SEQ ID NO: 91963 - protein, 9 aa, Homo Sapiens
MDLKRGMLL

SEQ ID NO: 91964 - protein, 9 aa, Homo Sapiens
MDLLRESQL

SEQ ID NO: 91965 - protein, 9 aa, Homo Sapiens
MDLVKNHLM

SEQ ID NO: 91966 - protein, 9 aa, Homo Sapiens
MDSIHDVTF

SEQ ID NO: 91967 - protein, 9 aa, Homo Sapiens
MDSVRQAKL

SEQ ID NO: 91968 - protein, 9 aa, Homo Sapiens
MDSVRSGPF

SEQ ID NO: 91969 - protein, 9 aa, Homo Sapiens
MEIERILGV

SEQ ID NO: 91970 - protein, 9 aa, Homo Sapiens
MELERVKAL

SEQ ID NO: 91971 - protein, 9 aa, Homo Sapiens
MEMAHLYSL

SEQ ID NO: 91972 - protein, 9 aa, Homo Sapiens
MGPPPTPHF

SEQ ID NO: 91973 - protein, 9 aa, Homo Sapiens
MGPPPTSHF

SEQ ID NO: 91974 - protein, 9 aa, Homo Sapiens
MQSGPKPLF

SEQ ID NO: 91975 - protein, 9 aa, Homo Sapiens
NDSVKTVGF

SEQ ID NO: 91976 - protein, 9 aa, Homo Sapiens
NELIRFEEF

SEQ ID NO: 91977 - protein, 9 aa, Homo Sapiens
NELKRLCGL

SEQ ID NO: 91978 - protein, 9 aa, Homo Sapiens
PDLPHLLAF

SEQ ID NO: 91979 - protein, 9 aa, Homo Sapiens
PDLPRNAQV

SEQ ID NO: 91980 - protein, 9 aa, Homo Sapiens
QDFLRASQM

SEQ ID NO: 91981 - protein, 9 aa, Homo Sapiens
QDHPSSMGV

SEQ ID NO: 91982 - protein, 9 aa, Homo Sapiens
QDLCRLAKL

SEQ ID NO: 91983 - protein, 9 aa, Homo Sapiens
QDLEHHLGL

SEQ ID NO: 91984 - protein, 9 aa, Homo Sapiens
QDLERASQL

SEQ ID NO: 91985 - protein, 9 aa, Homo Sapiens
QDLERVRNL

SEQ ID NO: 91986 - protein, 9 aa, Homo Sapiens
QDLIHRSKM

SEQ ID NO: 91987 - protein, 9 aa, Homo Sapiens
QDLIRELEL

SEQ ID NO: 91988 - protein, 9 aa, Homo Sapiens
QDLLRCRVL

SEQ ID NO: 91989 - protein, 9 aa, Homo Sapiens
QDLLRIGLF

SEQ ID NO: 91990 - protein, 9 aa, Homo Sapiens
QDLQHGNSM

SEQ ID NO: 91991 - protein, 9 aa, Homo Sapiens
QDLRRTNSL

SEQ ID NO: 91992 - protein, 9 aa, Homo Sapiens
QDNCRAANF

SEQ ID NO: 91993 - protein, 9 aa, Homo Sapiens
QDNLRQLSV

SEQ ID NO: 91994 - protein, 9 aa, Homo Sapiens
QDSVRLLAV

SEQ ID NO: 91995 - protein, 9 aa, Homo Sapiens
QDTLRTMYF

SEQ ID NO: 91996 - protein, 9 aa, Homo Sapiens
QDVARVLGF

SEQ ID NO: 91997 - protein, 9 aa, Homo Sapiens
QDVERWLGF

SEQ ID NO: 91998 - protein, 9 aa, Homo Sapiens
QDVKKIEKF

SEQ ID NO: 91999 - protein, 9 aa, Homo Sapiens
QDYARIFQF

SEQ ID NO: 92000 - protein, 9 aa, Homo Sapiens
QEDMPHNQF

SEQ ID NO: 92001 - protein, 9 aa, Homo Sapiens
QEDVRLIGL

SEQ ID NO: 92002 - protein, 9 aa, Homo Sapiens
QEHARHISF

SEQ ID NO: 92003 - protein, 9 aa, Homo Sapiens
QEMPWNVRM

SEQ ID NO: 92004 - protein, 9 aa, Homo Sapiens
QEPPPVKQV

SEQ ID NO: 92005 - protein, 9 aa, Homo Sapiens
QEPPTKPRF

SEQ ID NO: 92006 - protein, 9 aa, Homo Sapiens
QEQLRLQGL

SEQ ID NO: 92007 - protein, 9 aa, Homo Sapiens
QEYTRVCSL

SEQ ID NO: 92008 - protein, 9 aa, Homo Sapiens
QITAGRHGD

SEQ ID NO: 92009 - protein, 9 aa, Homo Sapiens
QSQKHLIGL

SEQ ID NO: 92010 - protein, 9 aa, Homo Sapiens
RAPEKIVTF

SEQ ID NO: 92011 - protein, 9 aa, Homo Sapiens
RDAERVKEM

SEQ ID NO: 92012 - protein, 9 aa, Homo Sapiens
RDAFRTLGL

SEQ ID NO: 92013 - protein, 9 aa, Homo Sapiens
RDALVHARL

SEQ ID NO: 92014 - protein, 9 aa, Homo Sapiens
RDCEVRATF

SEQ ID NO: 92015 - protein, 9 aa, Homo Sapiens
RDCLVLQSF

SEQ ID NO: 92016 - protein, 9 aa, Homo Sapiens
RDCQRLVAL

SEQ ID NO: 92017 - protein, 9 aa, Homo Sapiens
RDCVHIMKL

SEQ ID NO: 92018 - protein, 9 aa, Homo Sapiens
RDEIRPLSF

SEQ ID NO: 92019 - protein, 9 aa, Homo Sapiens
RDFEKNYNM

SEQ ID NO: 92020 - protein, 9 aa, Homo Sapiens
RDFERISTV

SEQ ID NO: 92021 - protein, 9 aa, Homo Sapiens
RDFFRAQTL

SEQ ID NO: 92022 - protein, 9 aa, Homo Sapiens
RDFLRYWRI

SEQ ID NO: 92023 - protein, 9 aa, Homo Sapiens
RDFPSFAQL

SEQ ID NO: 92024 - protein, 9 aa, Homo Sapiens
RDFQHVEKL

SEQ ID NO: 92025 - protein, 9 aa, Homo Sapiens
RDHAVVVGV

SEQ ID NO: 92026 - protein, 9 aa, Homo Sapiens
RDHDRFWVL

SEQ ID NO: 92027 - protein, 9 aa, Homo Sapiens
RDHILISHF

SEQ ID NO: 92028 - protein, 9 aa, Homo Sapiens
RDHLIAKNV

SEQ ID NO: 92029 - protein, 9 aa, Homo Sapiens
RDHLQPAVF

SEQ ID NO: 92030 - protein, 9 aa, Homo Sapiens
RDHLRQTLL

SEQ ID NO: 92031 - protein, 9 aa, Homo Sapiens
RDILAVLTM

SEQ ID NO: 92032 - protein, 9 aa, Homo Sapiens
RDILRASTL

SEQ ID NO: 92033 - protein, 9 aa, Homo Sapiens
RDILSHGRF

SEQ ID NO: 92034 - protein, 9 aa, Homo Sapiens
RDIYRSQSF

SEQ ID NO: 92035 - protein, 9 aa, Homo Sapiens
RDKLLKDAV

SEQ ID NO: 92036 - protein, 9 aa, Homo Sapiens
RDKSRNIQF

SEQ ID NO: 92037 - protein, 9 aa, Homo Sapiens
RDKVKLMKF

SEQ ID NO: 92038 - protein, 9 aa, Homo Sapiens
RDKVREMFM

SEQ ID NO: 92039 - protein, 9 aa, Homo Sapiens
RDLCRVLQL

SEQ ID NO: 92040 - protein, 9 aa, Homo Sapiens
RDLEELVKL

SEQ ID NO: 92041 - protein, 9 aa, Homo Sapiens
RDLEHLMLL

SEQ ID NO: 92042 - protein, 9 aa, Homo Sapiens
RDLERAEVA

SEQ ID NO: 92043 - protein, 9 aa, Homo Sapiens
RDLERALYL

SEQ ID NO: 92044 - protein, 9 aa, Homo Sapiens
RDLERGVEI

SEQ ID NO: 92045 - protein, 9 aa, Homo Sapiens
RDLERMENI

SEQ ID NO: 92046 - protein, 9 aa, Homo Sapiens
RDLERSRTV

SEQ ID NO: 92047 - protein, 9 aa, Homo Sapiens
RDLGHVETI

SEQ ID NO: 92048 - protein, 9 aa, Homo Sapiens
RDLIREVEM

SEQ ID NO: 92049 - protein, 9 aa, Homo Sapiens
RDLIRQGIL

SEQ ID NO: 92050 - protein, 9 aa, Homo Sapiens
RDLLHNSLL

SEQ ID NO: 92051 - protein, 9 aa, Homo Sapiens
RDLLIKVKF

SEQ ID NO: 92052 - protein, 9 aa, Homo Sapiens
RDLLRFLLI

SEQ ID NO: 92053 - protein, 9 aa, Homo Sapiens
RDLMHVHSF

SEQ ID NO: 92054 - protein, 9 aa, Homo Sapiens
RDLPRLLAV

SEQ ID NO: 92055 - protein, 9 aa, Homo Sapiens
RDLQEFVPF

SEQ ID NO: 92056 - protein, 9 aa, Homo Sapiens
RDLQHRHIV

SEQ ID NO: 92057 - protein, 9 aa, Homo Sapiens
RDLQRLGEL

SEQ ID NO: 92058 - protein, 9 aa, Homo Sapiens
RDLSHKEKL

SEQ ID NO: 92059 - protein, 9 aa, Homo Sapiens
RDLTRHISL

SEQ ID NO: 92060 - protein, 9 aa, Homo Sapiens
RDLVHKVQM

SEQ ID NO: 92061 - protein, 9 aa, Homo Sapiens
RDLVHRQTA

SEQ ID NO: 92062 - protein, 9 aa, Homo Sapiens
RDLVRQGRL

SEQ ID NO: 92063 - protein, 9 aa, Homo Sapiens
RDLVSKEGF

SEQ ID NO: 92064 - protein, 9 aa, Homo Sapiens
RDMEQRHVL

SEQ ID NO: 92065 - protein, 9 aa, Homo Sapiens
RDMGRPMEL

SEQ ID NO: 92066 - protein, 9 aa, Homo Sapiens
RDNLKISDF

SEQ ID NO: 92067 - protein, 9 aa, Homo Sapiens
RDNPRFNLM

SEQ ID NO: 92068 - protein, 9 aa, Homo Sapiens
RDNPRNTRF

SEQ ID NO: 92069 - protein, 9 aa, Homo Sapiens
RDQLRPTQL

SEQ ID NO: 92070 - protein, 9 aa, Homo Sapiens
RDQPQFQNM

SEQ ID NO: 92071 - protein, 9 aa, Homo Sapiens
RDRPHEVLL

SEQ ID NO: 92072 - protein, 9 aa, Homo Sapiens
RDSDGHVSF

SEQ ID NO: 92073 - protein, 9 aa, Homo Sapiens
RDSERLLEV

SEQ ID NO: 92074 - protein, 9 aa, Homo Sapiens
RDSLREQTL

SEQ ID NO: 92075 - protein, 9 aa, Homo Sapiens
RDSMCRQTF

SEQ ID NO: 92076 - protein, 9 aa, Homo Sapiens
RDSPKCYKL

SEQ ID NO: 92077 - protein, 9 aa, Homo Sapiens
RDSQRVLYI

SEQ ID NO: 92078 - protein, 9 aa, Homo Sapiens
RDSSPKVRF

SEQ ID NO: 92079 - protein, 9 aa, Homo Sapiens
RDSVVEILF

SEQ ID NO: 92080 - protein, 9 aa, Homo Sapiens
RDTMRAMGL

SEQ ID NO: 92081 - protein, 9 aa, Homo Sapiens
RDTQKYKPF

SEQ ID NO: 92082 - protein, 9 aa, Homo Sapiens
RDVIRHITV

SEQ ID NO: 92083 - protein, 9 aa, Homo Sapiens
RDVQHIIVF

SEQ ID NO: 92084 - protein, 9 aa, Homo Sapiens
RDVQKVVGF

SEQ ID NO: 92085 - protein, 9 aa, Homo Sapiens
RDYAQQIGV

SEQ ID NO: 92086 - protein, 9 aa, Homo Sapiens
RDYCAHHLI

SEQ ID NO: 92087 - protein, 9 aa, Homo Sapiens
RDYEHQFHL

SEQ ID NO: 92088 - protein, 9 aa, Homo Sapiens
RDYEKAIKF

SEQ ID NO: 92089 - protein, 9 aa, Homo Sapiens
RDYTRFQKL

SEQ ID NO: 92090 - protein, 9 aa, Homo Sapiens
REAEPIPKM

SEQ ID NO: 92091 - protein, 9 aa, Homo Sapiens
REAEREALL

SEQ ID NO: 92092 - protein, 9 aa, Homo Sapiens
REAIRVLGL

SEQ ID NO: 92093 - protein, 9 aa, Homo Sapiens
REALKKYLF

SEQ ID NO: 92094 - protein, 9 aa, Homo Sapiens
REAPERPSL

SEQ ID NO: 92095 - protein, 9 aa, Homo Sapiens
REATGKITF

SEQ ID NO: 92096 - protein, 9 aa, Homo Sapiens
RECGKSFSF

SEQ ID NO: 92097 - protein, 9 aa, Homo Sapiens
RECPRSFLL

SEQ ID NO: 92098 - protein, 9 aa, Homo Sapiens
REDRRPITV

SEQ ID NO: 92099 - protein, 9 aa, Homo Sapiens
REDTRVATF

SEQ ID NO: 92100 - protein, 9 aa, Homo Sapiens
REDVGKVKF

SEQ ID NO: 92101 - protein, 9 aa, Homo Sapiens
REEAHRVSV

SEQ ID NO: 92102 - protein, 9 aa, Homo Sapiens
REEKRVLGL

SEQ ID NO: 92103 - protein, 9 aa, Homo Sapiens
REFERFQEM

SEQ ID NO: 92104 - protein, 9 aa, Homo Sapiens
REFPKFFTF

SEQ ID NO: 92105 - protein, 9 aa, Homo Sapiens
REGARVLAL

SEQ ID NO: 92106 - protein, 9 aa, Homo Sapiens
REHLLTNHL

SEQ ID NO: 92107 - protein, 9 aa, Homo Sapiens
REHYHATAL

SEQ ID NO: 92108 - protein, 9 aa, Homo Sapiens
RELARQKNM

SEQ ID NO: 92109 - protein, 9 aa, Homo Sapiens
RELARVSVL

SEQ ID NO: 92110 - protein, 9 aa, Homo Sapiens
RELDRNELF

SEQ ID NO: 92111 - protein, 9 aa, Homo Sapiens
RELEKLFQL

SEQ ID NO: 92112 - protein, 9 aa, Homo Sapiens
RELEKLMVF

SEQ ID NO: 92113 - protein, 9 aa, Homo Sapiens
RELEVQHPA

SEQ ID NO: 92114 - protein, 9 aa, Homo Sapiens
RELIRSQAV

SEQ ID NO: 92115 - protein, 9 aa, Homo Sapiens
RELLHCARL

SEQ ID NO: 92116 - protein, 9 aa, Homo Sapiens
RELLKYKAF

SEQ ID NO: 92117 - protein, 9 aa, Homo Sapiens
RELPAWVSF

SEQ ID NO: 92118 - protein, 9 aa, Homo Sapiens
RELQKLSKF

SEQ ID NO: 92119 - protein, 9 aa, Homo Sapiens
RELQRLSYL

SEQ ID NO: 92120 - protein, 9 aa, Homo Sapiens
RELTHLSEM

SEQ ID NO: 92121 - protein, 9 aa, Homo Sapiens
RELYHVISF

SEQ ID NO: 92122 - protein, 9 aa, Homo Sapiens
REMDVIRNF

SEQ ID NO: 92123 - protein, 9 aa, Homo Sapiens
REMEHLRQF

SEQ ID NO: 92124 - protein, 9 aa, Homo Sapiens
REMERREAL

SEQ ID NO: 92125 - protein, 9 aa, Homo Sapiens
REMGVIAAM

SEQ ID NO: 92126 - protein, 9 aa, Homo Sapiens
REMHRAATF

SEQ ID NO: 92127 - protein, 9 aa, Homo Sapiens
REMLHNHSF

SEQ ID NO: 92128 - protein, 9 aa, Homo Sapiens
REMLIRVNM

SEQ ID NO: 92129 - protein, 9 aa, Homo Sapiens
REMLKQYYI

SEQ ID NO: 92130 - protein, 9 aa, Homo Sapiens
RENDIKSYF

SEQ ID NO: 92131 - protein, 9 aa, Homo Sapiens
RENIATHHL

SEQ ID NO: 92132 - protein, 9 aa, Homo Sapiens
RENIRSLTM

SEQ ID NO: 92133 - protein, 9 aa, Homo Sapiens
RENIRTEVM

SEQ ID NO: 92134 - protein, 9 aa, Homo Sapiens
RENNAVYAF

SEQ ID NO: 92135 - protein, 9 aa, Homo Sapiens
RENNYTYEF

SEQ ID NO: 92136 - protein, 9 aa, Homo Sapiens
RENPRRFVI

SEQ ID NO: 92137 - protein, 9 aa, Homo Sapiens
RENPVLRAF

SEQ ID NO: 92138 - protein, 9 aa, Homo Sapiens
RENSHLVTF

SEQ ID NO: 92139 - protein, 9 aa, Homo Sapiens
RENVAHNAL

SEQ ID NO: 92140 - protein, 9 aa, Homo Sapiens
REPAPAEAL

SEQ ID NO: 92141 - protein, 9 aa, Homo Sapiens
REPAPCAAL

SEQ ID NO: 92142 - protein, 9 aa, Homo Sapiens
REPLPHLHF

SEQ ID NO: 92143 - protein, 9 aa, Homo Sapiens
REPNVLICF

SEQ ID NO: 92144 - protein, 9 aa, Homo Sapiens
REPPNDPCL

SEQ ID NO: 92145 - protein, 9 aa, Homo Sapiens
REPPPGEAI

SEQ ID NO: 92146 - protein, 9 aa, Homo Sapiens
REPPPIWRV

SEQ ID NO: 92147 - protein, 9 aa, Homo Sapiens
REPPPSPMV

SEQ ID NO: 92148 - protein, 9 aa, Homo Sapiens
REPQAKPQL

SEQ ID NO: 92149 - protein, 9 aa, Homo Sapiens
REPTAVNSF

SEQ ID NO: 92150 - protein, 9 aa, Homo Sapiens
REPTKRLGV

SEQ ID NO: 92151 - protein, 9 aa, Homo Sapiens
REQDRDVQL

SEQ ID NO: 92152 - protein, 9 aa, Homo Sapiens
REQEHTFVF

SEQ ID NO: 92153 - protein, 9 aa, Homo Sapiens
REQEIPFVF

SEQ ID NO: 92154 - protein, 9 aa, Homo Sapiens
REQERAYIV

SEQ ID NO: 92155 - protein, 9 aa, Homo Sapiens
REQERDIAL

SEQ ID NO: 92156 - protein, 9 aa, Homo Sapiens
REQLRADLL

SEQ ID NO: 92157 - protein, 9 aa, Homo Sapiens
REQPKLAGF

SEQ ID NO: 92158 - protein, 9 aa, Homo Sapiens
REQVRFNGF

SEQ ID NO: 92159 - protein, 9 aa, Homo Sapiens
RERIIPRSV

SEQ ID NO: 92160 - protein, 9 aa, Homo Sapiens
RESELIYVF

SEQ ID NO: 92161 - protein, 9 aa, Homo Sapiens
RESERQLRL

SEQ ID NO: 92162 - protein, 9 aa, Homo Sapiens
RESHTHVSV

SEQ ID NO: 92163 - protein, 9 aa, Homo Sapiens
RESIHILSV

SEQ ID NO: 92164 - protein, 9 aa, Homo Sapiens
RESLGHTRL

SEQ ID NO: 92165 - protein, 9 aa, Homo Sapiens
RESLPPEQF

SEQ ID NO: 92166 - protein, 9 aa, Homo Sapiens
RESPCHVKL

SEQ ID NO: 92167 - protein, 9 aa, Homo Sapiens
RESPPIRAF

SEQ ID NO: 92168 - protein, 9 aa, Homo Sapiens
RESPRPLQL

SEQ ID NO: 92169 - protein, 9 aa, Homo Sapiens
RESPSVKRM

SEQ ID NO: 92170 - protein, 9 aa, Homo Sapiens
RESPTMTEF

SEQ ID NO: 92171 - protein, 9 aa, Homo Sapiens
RESPVQHLV

SEQ ID NO: 92172 - protein, 9 aa, Homo Sapiens
RESQRLVGF

SEQ ID NO: 92173 - protein, 9 aa, Homo Sapiens
RESSGKYTF

SEQ ID NO: 92174 - protein, 9 aa, Homo Sapiens
RETERIYSL

SEQ ID NO: 92175 - protein, 9 aa, Homo Sapiens
REVLHKFTV

SEQ ID NO: 92176 - protein, 9 aa, Homo Sapiens
REVQREYNL

SEQ ID NO: 92177 - protein, 9 aa, Homo Sapiens
REYLRVNVV

SEQ ID NO: 92178 - protein, 9 aa, Homo Sapiens
RNVSTGDVN

SEQ ID NO: 92179 - protein, 9 aa, Homo Sapiens
RPSEPKPFS

SEQ ID NO: 92180 - protein, 9 aa, Homo Sapiens
RQAPPHIEL

SEQ ID NO: 92181 - protein, 9 aa, Homo Sapiens
RQDARSVHL

SEQ ID NO: 92182 - protein, 9 aa, Homo Sapiens
RQDQRVEQL

SEQ ID NO: 92183 - protein, 9 aa, Homo Sapiens
RQPKHLLAF

SEQ ID NO: 92184 - protein, 9 aa, Homo Sapiens
RQPPPRPFL

SEQ ID NO: 92185 - protein, 9 aa, Homo Sapiens
RSDEAVKPF

SEQ ID NO: 92186 - protein, 9 aa, Homo Sapiens
RSDELTRHF

SEQ ID NO: 92187 - protein, 9 aa, Homo Sapiens
RSDPGHYSF

SEQ ID NO: 92188 - protein, 9 aa, Homo Sapiens
RSNPKIWNV

SEQ ID NO: 92189 - protein, 9 aa, Homo Sapiens
RSPPPGMGL

SEQ ID NO: 92190 - protein, 9 aa, Homo Sapiens
RVHEAVKAI

SEQ ID NO: 92191 - protein, 9 aa, Homo Sapiens
SDAERALAV

SEQ ID NO: 92192 - protein, 9 aa, Homo Sapiens
SDAPAHHLF

SEQ ID NO: 92193 - protein, 9 aa, Homo Sapiens
SDDPRYNQM

SEQ ID NO: 92194 - protein, 9 aa, Homo Sapiens
SDFEHTIHV

SEQ ID NO: 92195 - protein, 9 aa, Homo Sapiens
SDFIRILVI

SEQ ID NO: 92196 - protein, 9 aa, Homo Sapiens
SDFIRVQLI

SEQ ID NO: 92197 - protein, 9 aa, Homo Sapiens
SDFNRQDRF

SEQ ID NO: 92198 - protein, 9 aa, Homo Sapiens
SDGLRLIAL

SEQ ID NO: 92199 - protein, 9 aa, Homo Sapiens
SDGTRPVGM

SEQ ID NO: 92200 - protein, 9 aa, Homo Sapiens
SDHIHIIAL

SEQ ID NO: 92201 - protein, 9 aa, Homo Sapiens
SDIVRVCFF

SEQ ID NO: 92202 - protein, 9 aa, Homo Sapiens
SDKAHILSM

SEQ ID NO: 92203 - protein, 9 aa, Homo Sapiens
SDKVRVITL

SEQ ID NO: 92204 - protein, 9 aa, Homo Sapiens
SDLARLILL

SEQ ID NO: 92205 - protein, 9 aa, Homo Sapiens
SDLERVTSL

SEQ ID NO: 92206 - protein, 9 aa, Homo Sapiens
SDLFHLIGV

SEQ ID NO: 92207 - protein, 9 aa, Homo Sapiens
SDLGKVFSF

SEQ ID NO: 92208 - protein, 9 aa, Homo Sapiens
SDLIHGEVL

SEQ ID NO: 92209 - protein, 9 aa, Homo Sapiens
SDLIRHEGI

SEQ ID NO: 92210 - protein, 9 aa, Homo Sapiens
SDLIRHEKT

SEQ ID NO: 92211 - protein, 9 aa, Homo Sapiens
SDLIRHHRI

SEQ ID NO: 92212 - protein, 9 aa, Homo Sapiens
SDLIRHQGI

SEQ ID NO: 92213 - protein, 9 aa, Homo Sapiens
SDLIRMAFM

SEQ ID NO: 92214 - protein, 9 aa, Homo Sapiens
SDLKRGLKI

SEQ ID NO: 92215 - protein, 9 aa, Homo Sapiens
SDLKRHMRV

SEQ ID NO: 92216 - protein, 9 aa, Homo Sapiens
SDLKRINGF

SEQ ID NO: 92217 - protein, 9 aa, Homo Sapiens
SDLLRLTKI

SEQ ID NO: 92218 - protein, 9 aa, Homo Sapiens
SDLMRMEKI

SEQ ID NO: 92219 - protein, 9 aa, Homo Sapiens
SDLNHSFSL

SEQ ID NO: 92220 - protein, 9 aa, Homo Sapiens
SDLPRTDGL

SEQ ID NO: 92221 - protein, 9 aa, Homo Sapiens
SDLPRTFEF

SEQ ID NO: 92222 - protein, 9 aa, Homo Sapiens
SDLQRTQLL

SEQ ID NO: 92223 - protein, 9 aa, Homo Sapiens
SDLQRVYSI

SEQ ID NO: 92224 - protein, 9 aa, Homo Sapiens
SDLRHLRAV

SEQ ID NO: 92225 - protein, 9 aa, Homo Sapiens
SDLRHRHGF

SEQ ID NO: 92226 - protein, 9 aa, Homo Sapiens
SDLSHFHVV

SEQ ID NO: 92227 - protein, 9 aa, Homo Sapiens
SDLSRASSV

SEQ ID NO: 92228 - protein, 9 aa, Homo Sapiens
SDLTHLAAL

SEQ ID NO: 92229 - protein, 9 aa, Homo Sapiens
SDLTRHHRI

SEQ ID NO: 92230 - protein, 9 aa, Homo Sapiens
SDLTRHQRI

SEQ ID NO: 92231 - protein, 9 aa, Homo Sapiens
SDLVIRAKF

SEQ ID NO: 92232 - protein, 9 aa, Homo Sapiens
SDLVRCLSV

SEQ ID NO: 92233 - protein, 9 aa, Homo Sapiens
SDLVRCREV

SEQ ID NO: 92234 - protein, 9 aa, Homo Sapiens
SDLVRHQGV

SEQ ID NO: 92235 - protein, 9 aa, Homo Sapiens
SDLYRHQRL

SEQ ID NO: 92236 - protein, 9 aa, Homo Sapiens
SDLYRVHFL

SEQ ID NO: 92237 - protein, 9 aa, Homo Sapiens
SDMPRAHSF

SEQ ID NO: 92238 - protein, 9 aa, Homo Sapiens
SDMVHRFLL

SEQ ID NO: 92239 - protein, 9 aa, Homo Sapiens
SDMVRFHLF

SEQ ID NO: 92240 - protein, 9 aa, Homo Sapiens
SDNIRIETV

SEQ ID NO: 92241 - protein, 9 aa, Homo Sapiens
SDNPRFSDL

SEQ ID NO: 92242 - protein, 9 aa, Homo Sapiens
SDQIRSAVL

SEQ ID NO: 92243 - protein, 9 aa, Homo Sapiens
SDQLKKHGF

SEQ ID NO: 92244 - protein, 9 aa, Homo Sapiens
SDQQRSYEI

SEQ ID NO: 92245 - protein, 9 aa, Homo Sapiens
SDQVKFNVF

SEQ ID NO: 92246 - protein, 9 aa, Homo Sapiens
SDSARVAAM

SEQ ID NO: 92247 - protein, 9 aa, Homo Sapiens
SDSCREVTV

SEQ ID NO: 92248 - protein, 9 aa, Homo Sapiens
SDSIHTVAM

SEQ ID NO: 92249 - protein, 9 aa, Homo Sapiens
SDSMRTASL

SEQ ID NO: 92250 - protein, 9 aa, Homo Sapiens
SDSPHAVTV

SEQ ID NO: 92251 - protein, 9 aa, Homo Sapiens
SDSTHLVTL

SEQ ID NO: 92252 - protein, 9 aa, Homo Sapiens
SDVAHVESL

SEQ ID NO: 92253 - protein, 9 aa, Homo Sapiens
SDYELKYCF

SEQ ID NO: 92254 - protein, 9 aa, Homo Sapiens
SDYGRPLSF

SEQ ID NO: 92255 - protein, 9 aa, Homo Sapiens
SDYIRCIAV

SEQ ID NO: 92256 - protein, 9 aa, Homo Sapiens
SDYIRLLAI

SEQ ID NO: 92257 - protein, 9 aa, Homo Sapiens
SEAARVLQF

SEQ ID NO: 92258 - protein, 9 aa, Homo Sapiens
SEACRELGF

SEQ ID NO: 92259 - protein, 9 aa, Homo Sapiens
SEAERVSEL

SEQ ID NO: 92260 - protein, 9 aa, Homo Sapiens
SEALHVLAF

SEQ ID NO: 92261 - protein, 9 aa, Homo Sapiens
SEAPARQGF

SEQ ID NO: 92262 - protein, 9 aa, Homo Sapiens
SEAQRITGL

SEQ ID NO: 92263 - protein, 9 aa, Homo Sapiens
SECHPHYSF

SEQ ID NO: 92264 - protein, 9 aa, Homo Sapiens
SEDPSHPSM

SEQ ID NO: 92265 - protein, 9 aa, Homo Sapiens
SEEERQVGL

SEQ ID NO: 92266 - protein, 9 aa, Homo Sapiens
SEFQRLLGF

SEQ ID NO: 92267 - protein, 9 aa, Homo Sapiens
SEGDAHAGF

SEQ ID NO: 92268 - protein, 9 aa, Homo Sapiens
SEGPPLTSF

SEQ ID NO: 92269 - protein, 9 aa, Homo Sapiens
SEGTPVNKL

SEQ ID NO: 92270 - protein, 9 aa, Homo Sapiens
SEHERQYLL

SEQ ID NO: 92271 - protein, 9 aa, Homo Sapiens
SEKKRWLGL

SEQ ID NO: 92272 - protein, 9 aa, Homo Sapiens
SELIRHQKI

SEQ ID NO: 92273 - protein, 9 aa, Homo Sapiens
SELIRHQTI

SEQ ID NO: 92274 - protein, 9 aa, Homo Sapiens
SELIRNVTL

SEQ ID NO: 92275 - protein, 9 aa, Homo Sapiens
SELKHWATF

SEQ ID NO: 92276 - protein, 9 aa, Homo Sapiens
SELKRLFNL

SEQ ID NO: 92277 - protein, 9 aa, Homo Sapiens
SELLKNMGF

SEQ ID NO: 92278 - protein, 9 aa, Homo Sapiens
SELPHCLEV

SEQ ID NO: 92279 - protein, 9 aa, Homo Sapiens
SELVRHSSF

SEQ ID NO: 92280 - protein, 9 aa, Homo Sapiens
SEMQRHYVM

SEQ ID NO: 92281 - protein, 9 aa, Homo Sapiens
SENMKASSF

SEQ ID NO: 92282 - protein, 9 aa, Homo Sapiens
SEPLHNVQV

SEQ ID NO: 92283 - protein, 9 aa, Homo Sapiens
SEQKRVQFL

SEQ ID NO: 92284 - protein, 9 aa, Homo Sapiens
SEQLRCLEL

SEQ ID NO: 92285 - protein, 9 aa, Homo Sapiens
SEQLRVFVL

SEQ ID NO: 92286 - protein, 9 aa, Homo Sapiens
SEQVRKHYL

SEQ ID NO: 92287 - protein, 9 aa, Homo Sapiens
SESFPHPGF

SEQ ID NO: 92288 - protein, 9 aa, Homo Sapiens
SESLPKEAF

SEQ ID NO: 92289 - protein, 9 aa, Homo Sapiens
SESLRLHSL

SEQ ID NO: 92290 - protein, 9 aa, Homo Sapiens
SEYARPHVM

SEQ ID NO: 92291 - protein, 9 aa, Homo Sapiens
SEYQRFAVM

SEQ ID NO: 92292 - protein, 9 aa, Homo Sapiens
SGPLHSVSL

SEQ ID NO: 92293 - protein, 9 aa, Homo Sapiens
SSPAPRTAL

SEQ ID NO: 92294 - protein, 9 aa, Homo Sapiens
SSPARPCSF

SEQ ID NO: 92295 - protein, 9 aa, Homo Sapiens
SSPPPHPQL

SEQ ID NO: 92296 - protein, 9 aa, Homo Sapiens
TDAKRLHGL

SEQ ID NO: 92297 - protein, 9 aa, Homo Sapiens
TDAPHFYGL

SEQ ID NO: 92298 - protein, 9 aa, Homo Sapiens
TDFIKIEEF

SEQ ID NO: 92299 - protein, 9 aa, Homo Sapiens
TDFISHLFM

SEQ ID NO: 92300 - protein, 9 aa, Homo Sapiens
TDGPPPVQF

SEQ ID NO: 92301 - protein, 9 aa, Homo Sapiens
TDIARTEYL

SEQ ID NO: 92302 - protein, 9 aa, Homo Sapiens
TDLAKRTVF

SEQ ID NO: 92303 - protein, 9 aa, Homo Sapiens
TDLEQVHQF

SEQ ID NO: 92304 - protein, 9 aa, Homo Sapiens
TDLERKGLL

SEQ ID NO: 92305 - protein, 9 aa, Homo Sapiens
TDLIRHQTV

SEQ ID NO: 92306 - protein, 9 aa, Homo Sapiens
TDLNRKDKF

SEQ ID NO: 92307 - protein, 9 aa, Homo Sapiens
TDLSRNAQL

SEQ ID NO: 92308 - protein, 9 aa, Homo Sapiens
TDLTRKEGL

SEQ ID NO: 92309 - protein, 9 aa, Homo Sapiens
TDMNRLHRF

SEQ ID NO: 92310 - protein, 9 aa, Homo Sapiens
TDMVRSSTI

SEQ ID NO: 92311 - protein, 9 aa, Homo Sapiens
TDNPRLLSM

SEQ ID NO: 92312 - protein, 9 aa, Homo Sapiens
TDNQRILEF

SEQ ID NO: 92313 - protein, 9 aa, Homo Sapiens
TDNQRQQQL

SEQ ID NO: 92314 - protein, 9 aa, Homo Sapiens
TDSPREVFF

SEQ ID NO: 92315 - protein, 9 aa, Homo Sapiens
TDSVHNINF

SEQ ID NO: 92316 - protein, 9 aa, Homo Sapiens
TEAMRVIGF

SEQ ID NO: 92317 - protein, 9 aa, Homo Sapiens
TEDTRQLGL

SEQ ID NO: 92318 - protein, 9 aa, Homo Sapiens
TEGAAKIAF

SEQ ID NO: 92319 - protein, 9 aa, Homo Sapiens
TEHAHQVVV

SEQ ID NO: 92320 - protein, 9 aa, Homo Sapiens
TEHKRFLAF

SEQ ID NO: 92321 - protein, 9 aa, Homo Sapiens
TEKIHQTGL

SEQ ID NO: 92322 - protein, 9 aa, Homo Sapiens
TELERKLTF

SEQ ID NO: 92323 - protein, 9 aa, Homo Sapiens
TELGRAAKL

SEQ ID NO: 92324 - protein, 9 aa, Homo Sapiens
TELIHIALL

SEQ ID NO: 92325 - protein, 9 aa, Homo Sapiens
TELLRYYML

SEQ ID NO: 92326 - protein, 9 aa, Homo Sapiens
TELTRNKKF

SEQ ID NO: 92327 - protein, 9 aa, Homo Sapiens
TEMERTLAL

SEQ ID NO: 92328 - protein, 9 aa, Homo Sapiens
TEMLRAALL

SEQ ID NO: 92329 - protein, 9 aa, Homo Sapiens
TEMQRHYVM

SEQ ID NO: 92330 - protein, 9 aa, Homo Sapiens
TEPPAHFQV

SEQ ID NO: 92331 - protein, 9 aa, Homo Sapiens
TEPPPKAAL

SEQ ID NO: 92332 - protein, 9 aa, Homo Sapiens
TEQERGVGI

SEQ ID NO: 92333 - protein, 9 aa, Homo Sapiens
TEQKRLGLL

SEQ ID NO: 92334 - protein, 9 aa, Homo Sapiens
TETARIAQL

SEQ ID NO: 92335 - protein, 9 aa, Homo Sapiens
TEWIRAIQM

SEQ ID NO: 92336 - protein, 9 aa, Homo Sapiens
TSPDPHKGL

SEQ ID NO: 92337 - protein, 9 aa, Homo Sapiens
VDFVRPDFL

SEQ ID NO: 92338 - protein, 9 aa, Homo Sapiens
VDHEKIYRM

SEQ ID NO: 92339 - protein, 9 aa, Homo Sapiens
VDHEKPLSF

SEQ ID NO: 92340 - protein, 9 aa, Homo Sapiens
VDHERLKNL

SEQ ID NO: 92341 - protein, 9 aa, Homo Sapiens
VDLERKETA

SEQ ID NO: 92342 - protein, 9 aa, Homo Sapiens
VDLERTIAL

SEQ ID NO: 92343 - protein, 9 aa, Homo Sapiens
VDLIHDIQI

SEQ ID NO: 92344 - protein, 9 aa, Homo Sapiens
VDLIRGSTF

SEQ ID NO: 92345 - protein, 9 aa, Homo Sapiens
VDLPHCHLI

SEQ ID NO: 92346 - protein, 9 aa, Homo Sapiens
VDLTRSFSF

SEQ ID NO: 92347 - protein, 9 aa, Homo Sapiens
VDMVRVMEV

SEQ ID NO: 92348 - protein, 9 aa, Homo Sapiens
VDNIRVCKI

SEQ ID NO: 92349 - protein, 9 aa, Homo Sapiens
VDNLHVLDF

SEQ ID NO: 92350 - protein, 9 aa, Homo Sapiens
VDNQRGSGL

SEQ ID NO: 92351 - protein, 9 aa, Homo Sapiens
VDSARNLQL

SEQ ID NO: 92352 - protein, 9 aa, Homo Sapiens
VDSLKLAVF

SEQ ID NO: 92353 - protein, 9 aa, Homo Sapiens
VDSLLHGTF

SEQ ID NO: 92354 - protein, 9 aa, Homo Sapiens
VDVVRNLVF

SEQ ID NO: 92355 - protein, 9 aa, Homo Sapiens
VDWLRYASL

SEQ ID NO: 92356 - protein, 9 aa, Homo Sapiens
VEDGIGHEF

SEQ ID NO: 92357 - protein, 9 aa, Homo Sapiens
VEGHPVWAL

SEQ ID NO: 92358 - protein, 9 aa, Homo Sapiens
VEILPCSRI

SEQ ID NO: 92359 - protein, 9 aa, Homo Sapiens
VELERFVNL

SEQ ID NO: 92360 - protein, 9 aa, Homo Sapiens
VELFRTAYF

SEQ ID NO: 92361 - protein, 9 aa, Homo Sapiens
VELIHFERV

SEQ ID NO: 92362 - protein, 9 aa, Homo Sapiens
VELPHINLL

SEQ ID NO: 92363 - protein, 9 aa, Homo Sapiens
VENTRWDYL

SEQ ID NO: 92364 - protein, 9 aa, Homo Sapiens
VEQLRPERL

SEQ ID NO: 92365 - protein, 9 aa, Homo Sapiens
VEVGRVAYV

SEQ ID NO: 92366 - protein, 9 aa, Homo Sapiens
VSHPRYLEL

SEQ ID NO: 92367 - protein, 9 aa, Homo Sapiens
WESERVLSF

SEQ ID NO: 92368 - protein, 9 aa, Homo Sapiens
YDFLKQNKF

SEQ ID NO: 92369 - protein, 9 aa, Homo Sapiens
YDHKRISKL

SEQ ID NO: 92370 - protein, 9 aa, Homo Sapiens
YDLERIKLL

SEQ ID NO: 92371 - protein, 9 aa, Homo Sapiens
YDLGRSYAM

SEQ ID NO: 92372 - protein, 9 aa, Homo Sapiens
YDLLRHERL

SEQ ID NO: 92373 - protein, 9 aa, Homo Sapiens
YDLLRNTNF

SEQ ID NO: 92374 - protein, 9 aa, Homo Sapiens
YDYLRPIAL

SEQ ID NO: 92375 - protein, 9 aa, Homo Sapiens
YEEARSAYL

SEQ ID NO: 92376 - protein, 9 aa, Homo Sapiens
YELARVKEI

SEQ ID NO: 92377 - protein, 9 aa, Homo Sapiens
YELERVAGF

SEQ ID NO: 92378 - protein, 9 aa, Homo Sapiens
YEPPLTNVF

SEQ ID NO: 92379 - protein, 9 aa, Homo Sapiens
YEPPRYMSV

SEQ ID NO: 92380 - protein, 9 aa, Homo Sapiens
YEPPVQESV

SEQ ID NO: 92381 - protein, 9 aa, Homo Sapiens
YEVERCQQL

SEQ ID NO: 92382 - protein, 9 aa, Homo Sapiens
YEVERTERI

SEQ ID NO: 92383 - protein, 9 aa, Homo Sapiens
YSDDIPHAL

SEQ ID NO: 92384 - protein, 9 aa, Homo Sapiens
YSDLRKESM

SEQ ID NO: 92385 - protein, 9 aa, Homo Sapiens
YSSLRVVGV

SEQ ID NO: 92386 - protein, 10 aa, Homo Sapiens
AAGPPISEGK

SEQ ID NO: 92387 - protein, 10 aa, Homo Sapiens
ADNPGPMVVF

SEQ ID NO: 92388 - protein, 10 aa, Homo Sapiens
AEEVARLWGI

SEQ ID NO: 92389 - protein, 10 aa, Homo Sapiens
AELKGRSEAL

SEQ ID NO: 92390 - protein, 10 aa, Homo Sapiens
AEMDARTILL

SEQ ID NO: 92391 - protein, 10 aa, Homo Sapiens
AENPGKYNIL

SEQ ID NO: 92392 - protein, 10 aa, Homo Sapiens
AEQERQHNYL

SEQ ID NO: 92393 - protein, 10 aa, Homo Sapiens
AEQLPRLQAF

SEQ ID NO: 92394 - protein, 10 aa, Homo Sapiens
ETQITQIEHE

SEQ ID NO: 92395 - protein, 10 aa, Homo Sapiens
HEPEPHILLF

SEQ ID NO: 92396 - protein, 10 aa, Homo Sapiens
HEPPSRPCGL

SEQ ID NO: 92397 - protein, 10 aa, Homo Sapiens
IHIVFTAHVF

SEQ ID NO: 92398 - protein, 10 aa, Homo Sapiens
KEDKPRKSLF

SEQ ID NO: 92399 - protein, 10 aa, Homo Sapiens
KEGIGRVIGM

SEQ ID NO: 92400 - protein, 10 aa, Homo Sapiens
KEHDPRVITV

SEQ ID NO: 92401 - protein, 10 aa, Homo Sapiens
KQQNPRLVYV

SEQ ID NO: 92402 - protein, 10 aa, Homo Sapiens
MDSVRSGPFG

SEQ ID NO: 92403 - protein, 10 aa, Homo Sapiens
QSELVRHSSF

SEQ ID NO: 92404 - protein, 10 aa, Homo Sapiens
RDFEREYGKL

SEQ ID NO: 92405 - protein, 10 aa, Homo Sapiens
RDLERALYLL

SEQ ID NO: 92406 - protein, 10 aa, Homo Sapiens
RDLERGCHLL

SEQ ID NO: 92407 - protein, 10 aa, Homo Sapiens
RDMIREVCGF

SEQ ID NO: 92408 - protein, 10 aa, Homo Sapiens
RDVQATRVGL

SEQ ID NO: 92409 - protein, 10 aa, Homo Sapiens
REEAARTQQL

SEQ ID NO: 92410 - protein, 10 aa, Homo Sapiens
REQAEEERYF

SEQ ID NO: 92411 - protein, 10 aa, Homo Sapiens
REQEIRMGQM

SEQ ID NO: 92412 - protein, 10 aa, Homo Sapiens
REYELRKNNF

SEQ ID NO: 92413 - protein, 10 aa, Homo Sapiens
RQGVDADING

SEQ ID NO: 92414 - protein, 10 aa, Homo Sapiens
SDILYVISKT

SEQ ID NO: 92415 - protein, 10 aa, Homo Sapiens
SDLLHGAPGF

SEQ ID NO: 92416 - protein, 10 aa, Homo Sapiens
SEAGSQPHGI

SEQ ID NO: 92417 - protein, 10 aa, Homo Sapiens
SEDGFIKELF

SEQ ID NO: 92418 - protein, 10 aa, Homo Sapiens
SEDGITKIMF

SEQ ID NO: 92419 - protein, 10 aa, Homo Sapiens
SEGFPRRAVM

SEQ ID NO: 92420 - protein, 10 aa, Homo Sapiens
SEKGSLKIEF

SEQ ID NO: 92421 - protein, 10 aa, Homo Sapiens
SMDNNRSLDL

SEQ ID NO: 92422 - protein, 10 aa, Homo Sapiens
SSDLKRINGF

SEQ ID NO: 92423 - protein, 10 aa, Homo Sapiens
SYGGGSGGGF

SEQ ID NO: 92424 - protein, 10 aa, Homo Sapiens
TDAEKGKGLI

SEQ ID NO: 92425 - protein, 10 aa, Homo Sapiens
TDGPNERIGM

SEQ ID NO: 92426 - protein, 10 aa, Homo Sapiens
TEKDSYVVAF

SEQ ID NO: 92427 - protein, 10 aa, Homo Sapiens
VDLWSIGVTL

SEQ ID NO: 92428 - protein, 10 aa, Homo Sapiens
VDREVVSLFL

SEQ ID NO: 92429 - protein, 10 aa, Homo Sapiens
VESPAKIHVF

SEQ ID NO: 92430 - protein, 10 aa, Homo Sapiens
VVHGSPREGF

SEQ ID NO: 92431 - protein, 10 aa, Homo Sapiens
YSPPERTESF

SEQ ID NO: 92432 - protein, 11 aa, Homo Sapiens
ADKGTCKYVSL

SEQ ID NO: 92433 - protein, 11 aa, Homo Sapiens
AEQCRKISASL

SEQ ID NO: 92434 - protein, 11 aa, Homo Sapiens
AEQLREKAGQL

SEQ ID NO: 92435 - protein, 11 aa, Homo Sapiens
DSLDHVTSDAV

SEQ ID NO: 92436 - protein, 11 aa, Homo Sapiens
GAGSDTLVRYF

SEQ ID NO: 92437 - protein, 11 aa, Homo Sapiens
GLGSGGSIRSS

SEQ ID NO: 92438 - protein, 11 aa, Homo Sapiens
IAKNRKDIENQ

SEQ ID NO: 92439 - protein, 11 aa, Homo Sapiens
KDMVHKELHRF

SEQ ID NO: 92440 - protein, 11 aa, Homo Sapiens
KEQNRAKPVHL

SEQ ID NO: 92441 - protein, 11 aa, Homo Sapiens
KQDAFANFANF

SEQ ID NO: 92442 - protein, 11 aa, Homo Sapiens
LALIYNEALKG

SEQ ID NO: 92443 - protein, 11 aa, Homo Sapiens
PAVPQLLHMPD

SEQ ID NO: 92444 - protein, 11 aa, Homo Sapiens
RDLKRTVDARL

SEQ ID NO: 92445 - protein, 11 aa, Homo Sapiens
REHERLLKHKL

SEQ ID NO: 92446 - protein, 11 aa, Homo Sapiens
RQGVDADINGL

SEQ ID NO: 92447 - protein, 11 aa, Homo Sapiens
RSSDLKRINGF

SEQ ID NO: 92448 - protein, 11 aa, Homo Sapiens
SDYRRLSESQL

SEQ ID NO: 92449 - protein, 11 aa, Homo Sapiens
TEKGNERNVKF

SEQ ID NO: 92450 - protein, 11 aa, Homo Sapiens
VGGSDHSSHPF

SEQ ID NO: 92451 - protein, 11 aa, Homo Sapiens
VTIKKDVDGAY

SEQ ID NO: 92452 - protein, 11 aa, Homo Sapiens
YQAELSQMQTQ

SEQ ID NO: 92453 - protein, 8 aa, Homo Sapiens
AHGPEWNL

SEQ ID NO: 92454 - protein, 8 aa, Homo Sapiens
DHCVAHKL

SEQ ID NO: 92455 - protein, 8 aa, Homo Sapiens
EHGPNPIL

SEQ ID NO: 92456 - protein, 8 aa, Homo Sapiens
FHAIDHRL

SEQ ID NO: 92457 - protein, 8 aa, Homo Sapiens
FHDIERKF

SEQ ID NO: 92458 - protein, 8 aa, Homo Sapiens
FHSEEQQL

SEQ ID NO: 92459 - protein, 8 aa, Homo Sapiens
HCALILNL

SEQ ID NO: 92460 - protein, 8 aa, Homo Sapiens
HDGLTVHL

SEQ ID NO: 92461 - protein, 8 aa, Homo Sapiens
HDGQRIYI

SEQ ID NO: 92462 - protein, 8 aa, Homo Sapiens
HDRNVVTI

SEQ ID NO: 92463 - protein, 8 aa, Homo Sapiens
HDSIDYRF

SEQ ID NO: 92464 - protein, 8 aa, Homo Sapiens
HDTTEYKL

SEQ ID NO: 92465 - protein, 8 aa, Homo Sapiens
HDTVFQYL

SEQ ID NO: 92466 - protein, 8 aa, Homo Sapiens
HFEELETI

SEQ ID NO: 92467 - protein, 8 aa, Homo Sapiens
HFLELVTL

SEQ ID NO: 92468 - protein, 8 aa, Homo Sapiens
HHFQEFSF

SEQ ID NO: 92469 - protein, 8 aa, Homo Sapiens
HIGDAVVI

SEQ ID NO: 92470 - protein, 8 aa, Homo Sapiens
HIITGNKI

SEQ ID NO: 92471 - protein, 8 aa, Homo Sapiens
HTVAGNDI

SEQ ID NO: 92472 - protein, 8 aa, Homo Sapiens
IDHDQVLV

SEQ ID NO: 92473 - protein, 8 aa, Homo Sapiens
IHNADVTL

SEQ ID NO: 92474 - protein, 8 aa, Homo Sapiens
IHSLEVLI

SEQ ID NO: 92475 - protein, 8 aa, Homo Sapiens
LEQQNQVL

SEQ ID NO: 92476 - protein, 8 aa, Homo Sapiens
LPWWLILI

SEQ ID NO: 92477 - protein, 8 aa, Homo Sapiens
LWMESHLI

SEQ ID NO: 92478 - protein, 8 aa, Homo Sapiens
NHDKEIFF

SEQ ID NO: 92479 - protein, 8 aa, Homo Sapiens
NHHTDTFL

SEQ ID NO: 92480 - protein, 8 aa, Homo Sapiens
NHSSDFLL

SEQ ID NO: 92481 - protein, 8 aa, Homo Sapiens
QHAEEFLI

SEQ ID NO: 92482 - protein, 8 aa, Homo Sapiens
RLQEGDKI

SEQ ID NO: 92483 - protein, 8 aa, Homo Sapiens
TVGNNKTL

SEQ ID NO: 92484 - protein, 8 aa, Homo Sapiens
VHGPDWHL

SEQ ID NO: 92485 - protein, 8 aa, Homo Sapiens
VHGPDWNL

SEQ ID NO: 92486 - protein, 8 aa, Homo Sapiens
WHSEDVSL

SEQ ID NO: 92487 - protein, 8 aa, Homo Sapiens
YEDIAQKS

SEQ ID NO: 92488 - protein, 8 aa, Homo Sapiens
YHDLEQSI

SEQ ID NO: 92489 - protein, 8 aa, Homo Sapiens
YHDNAQLI

SEQ ID NO: 92490 - protein, 8 aa, Homo Sapiens
YHLENAGC

SEQ ID NO: 92491 - protein, 8 aa, Homo Sapiens
YHQKSVLI

SEQ ID NO: 92492 - protein, 9 aa, Homo Sapiens
AHAEEKLQL

SEQ ID NO: 92493 - protein, 9 aa, Homo Sapiens
AHAKEDPLL

SEQ ID NO: 92494 - protein, 9 aa, Homo Sapiens
AHAQPQTTM

SEQ ID NO: 92495 - protein, 9 aa, Homo Sapiens
AHARVQTCI

SEQ ID NO: 92496 - protein, 9 aa, Homo Sapiens
AHCGAGDEL

SEQ ID NO: 92497 - protein, 9 aa, Homo Sapiens
AHCPELVTL

SEQ ID NO: 92498 - protein, 9 aa, Homo Sapiens
AHCPHTPEF

SEQ ID NO: 92499 - protein, 9 aa, Homo Sapiens
AHCPKAEVL

SEQ ID NO: 92500 - protein, 9 aa, Homo Sapiens
AHCQLVHHF

SEQ ID NO: 92501 - protein, 9 aa, Homo Sapiens
AHCWVVVRL

SEQ ID NO: 92502 - protein, 9 aa, Homo Sapiens
AHDAGITIF

SEQ ID NO: 92503 - protein, 9 aa, Homo Sapiens
AHDDAIWSV

SEQ ID NO: 92504 - protein, 9 aa, Homo Sapiens
AHDDGRWSL

SEQ ID NO: 92505 - protein, 9 aa, Homo Sapiens
AHDDSVMYL

SEQ ID NO: 92506 - protein, 9 aa, Homo Sapiens
AHDEYLQLL

SEQ ID NO: 92507 - protein, 9 aa, Homo Sapiens
AHDFHRIYI

SEQ ID NO: 92508 - protein, 9 aa, Homo Sapiens
AHDFLAFIL

SEQ ID NO: 92509 - protein, 9 aa, Homo Sapiens
AHDGAGLKL

SEQ ID NO: 92510 - protein, 9 aa, Homo Sapiens
AHDGDVNVI

SEQ ID NO: 92511 - protein, 9 aa, Homo Sapiens
AHDGIILKV

SEQ ID NO: 92512 - protein, 9 aa, Homo Sapiens
AHDGQRIYI

SEQ ID NO: 92513 - protein, 9 aa, Homo Sapiens
AHDGSATYL

SEQ ID NO: 92514 - protein, 9 aa, Homo Sapiens
AHDKEVYDI

SEQ ID NO: 92515 - protein, 9 aa, Homo Sapiens
AHDKPRYTL

SEQ ID NO: 92516 - protein, 9 aa, Homo Sapiens
AHDNPVCTL

SEQ ID NO: 92517 - protein, 9 aa, Homo Sapiens
AHDPISPVL

SEQ ID NO: 92518 - protein, 9 aa, Homo Sapiens
AHDQAVRTL

SEQ ID NO: 92519 - protein, 9 aa, Homo Sapiens
AHDQFKSTL

SEQ ID NO: 92520 - protein, 9 aa, Homo Sapiens
AHDQLLWAI

SEQ ID NO: 92521 - protein, 9 aa, Homo Sapiens
AHDSSEYAI

SEQ ID NO: 92522 - protein, 9 aa, Homo Sapiens
AHDTKSVKL

SEQ ID NO: 92523 - protein, 9 aa, Homo Sapiens
AHDTTLVAL

SEQ ID NO: 92524 - protein, 9 aa, Homo Sapiens
AHDVDPIEL

SEQ ID NO: 92525 - protein, 9 aa, Homo Sapiens
AHEDAVYGL

SEQ ID NO: 92526 - protein, 9 aa, Homo Sapiens
AHEDKVWGL

SEQ ID NO: 92527 - protein, 9 aa, Homo Sapiens
AHEEIGNIL

SEQ ID NO: 92528 - protein, 9 aa, Homo Sapiens
AHEEINITF

SEQ ID NO: 92529 - protein, 9 aa, Homo Sapiens
AHEFGAITF

SEQ ID NO: 92530 - protein, 9 aa, Homo Sapiens
AHEGLGFSI

SEQ ID NO: 92531 - protein, 9 aa, Homo Sapiens
AHFADPDTL

SEQ ID NO: 92532 - protein, 9 aa, Homo Sapiens
AHFAKSISL

SEQ ID NO: 92533 - protein, 9 aa, Homo Sapiens
AHFGFDEQL

SEQ ID NO: 92534 - protein, 9 aa, Homo Sapiens
AHFKEMESI

SEQ ID NO: 92535 - protein, 9 aa, Homo Sapiens
AHFPINVVI

SEQ ID NO: 92536 - protein, 9 aa, Homo Sapiens
AHFQKSYTL

SEQ ID NO: 92537 - protein, 9 aa, Homo Sapiens
AHFSYPFTF

SEQ ID NO: 92538 - protein, 9 aa, Homo Sapiens
AHHEVCPKF

SEQ ID NO: 92539 - protein, 9 aa, Homo Sapiens
AHHLELWRL

SEQ ID NO: 92540 - protein, 9 aa, Homo Sapiens
AHHNYLTRL

SEQ ID NO: 92541 - protein, 9 aa, Homo Sapiens
AHHPHQNLI

SEQ ID NO: 92542 - protein, 9 aa, Homo Sapiens
AHHTDCTFI

SEQ ID NO: 92543 - protein, 9 aa, Homo Sapiens
AHHTDHHMF

SEQ ID NO: 92544 - protein, 9 aa, Homo Sapiens
AHIGSFVSF

SEQ ID NO: 92545 - protein, 9 aa, Homo Sapiens
AHIIALESI

SEQ ID NO: 92546 - protein, 9 aa, Homo Sapiens
AHIKDAVAL

SEQ ID NO: 92547 - protein, 9 aa, Homo Sapiens
AHIKGVETI

SEQ ID NO: 92548 - protein, 9 aa, Homo Sapiens
AHISEQAVW

SEQ ID NO: 92549 - protein, 9 aa, Homo Sapiens
AHLALIDYL

SEQ ID NO: 92550 - protein, 9 aa, Homo Sapiens
AHLDATTVL

SEQ ID NO: 92551 - protein, 9 aa, Homo Sapiens
AHMDGTYKF

SEQ ID NO: 92552 - protein, 9 aa, Homo Sapiens
AHMDIFQNL

SEQ ID NO: 92553 - protein, 9 aa, Homo Sapiens
AHMWFDNQI

SEQ ID NO: 92554 - protein, 9 aa, Homo Sapiens
AHNDVMEVL

SEQ ID NO: 92555 - protein, 9 aa, Homo Sapiens
AHNKEIYTI

SEQ ID NO: 92556 - protein, 9 aa, Homo Sapiens
AHNLCYTTL

SEQ ID NO: 92557 - protein, 9 aa, Homo Sapiens
AHNPQQIYF

SEQ ID NO: 92558 - protein, 9 aa, Homo Sapiens
AHQAEIAQL

SEQ ID NO: 92559 - protein, 9 aa, Homo Sapiens
AHQFPEVRF

SEQ ID NO: 92560 - protein, 9 aa, Homo Sapiens
AHQIFEEFI

SEQ ID NO: 92561 - protein, 9 aa, Homo Sapiens
AHQQQQQLL

SEQ ID NO: 92562 - protein, 9 aa, Homo Sapiens
AHQVEQVLL

SEQ ID NO: 92563 - protein, 9 aa, Homo Sapiens
AHSDTLFTI

SEQ ID NO: 92564 - protein, 9 aa, Homo Sapiens
AHSDYIRCI

SEQ ID NO: 92565 - protein, 9 aa, Homo Sapiens
AHSEDLQSL

SEQ ID NO: 92566 - protein, 9 aa, Homo Sapiens
AHSELLCYF

SEQ ID NO: 92567 - protein, 9 aa, Homo Sapiens
AHSEQTLSL

SEQ ID NO: 92568 - protein, 9 aa, Homo Sapiens
AHSESINVI

SEQ ID NO: 92569 - protein, 9 aa, Homo Sapiens
AHSFVDLLL

SEQ ID NO: 92570 - protein, 9 aa, Homo Sapiens
AHSILIANI

SEQ ID NO: 92571 - protein, 9 aa, Homo Sapiens
AHSILQFQF

SEQ ID NO: 92572 - protein, 9 aa, Homo Sapiens
AHSKGVTCL

SEQ ID NO: 92573 - protein, 9 aa, Homo Sapiens
AHSNEILIF

SEQ ID NO: 92574 - protein, 9 aa, Homo Sapiens
AHSNLASVL

SEQ ID NO: 92575 - protein, 9 aa, Homo Sapiens
AHSPAGNQV

SEQ ID NO: 92576 - protein, 9 aa, Homo Sapiens
AHSPELLQF

SEQ ID NO: 92577 - protein, 9 aa, Homo Sapiens
AHSPLAAQL

SEQ ID NO: 92578 - protein, 9 aa, Homo Sapiens
AHSPSLQSL

SEQ ID NO: 92579 - protein, 9 aa, Homo Sapiens
AHSSLQIVL

SEQ ID NO: 92580 - protein, 9 aa, Homo Sapiens
AHSTIMPRL

SEQ ID NO: 92581 - protein, 9 aa, Homo Sapiens
AHSVPSPAF

SEQ ID NO: 92582 - protein, 9 aa, Homo Sapiens
AHSVVLGYL

SEQ ID NO: 92583 - protein, 9 aa, Homo Sapiens
AHTAEVNCL

SEQ ID NO: 92584 - protein, 9 aa, Homo Sapiens
AHTGVIFFL

SEQ ID NO: 92585 - protein, 9 aa, Homo Sapiens
AHTIPLVPL

SEQ ID NO: 92586 - protein, 9 aa, Homo Sapiens
AHTTVSTNI

SEQ ID NO: 92587 - protein, 9 aa, Homo Sapiens
AHVDEQVFL

SEQ ID NO: 92588 - protein, 9 aa, Homo Sapiens
AHVDFEAML

SEQ ID NO: 92589 - protein, 9 aa, Homo Sapiens
AHVDLIEKL

SEQ ID NO: 92590 - protein, 9 aa, Homo Sapiens
AHVFPSNTI

SEQ ID NO: 92591 - protein, 9 aa, Homo Sapiens
AHVGSGDLF

SEQ ID NO: 92592 - protein, 9 aa, Homo Sapiens
AHVVVGDVL

SEQ ID NO: 92593 - protein, 9 aa, Homo Sapiens
AHWQFETAL

SEQ ID NO: 92594 - protein, 9 aa, Homo Sapiens
AQGGVLPNI

SEQ ID NO: 92595 - protein, 9 aa, Homo Sapiens
AQHVEVESI

SEQ ID NO: 92596 - protein, 9 aa, Homo Sapiens
ARALAQEIL

SEQ ID NO: 92597 - protein, 9 aa, Homo Sapiens
ARDDTHYLL

SEQ ID NO: 92598 - protein, 9 aa, Homo Sapiens
ARDEIIWLL

SEQ ID NO: 92599 - protein, 9 aa, Homo Sapiens
ARDETEFYL

SEQ ID NO: 92600 - protein, 9 aa, Homo Sapiens
ARLFIFETF

SEQ ID NO: 92601 - protein, 9 aa, Homo Sapiens
ARVEGREII

SEQ ID NO: 92602 - protein, 9 aa, Homo Sapiens
CHAPDEQGL

SEQ ID NO: 92603 - protein, 9 aa, Homo Sapiens
CHAVILLQL

SEQ ID NO: 92604 - protein, 9 aa, Homo Sapiens
CHDATPFIF

SEQ ID NO: 92605 - protein, 9 aa, Homo Sapiens
CHDESSVSL

SEQ ID NO: 92606 - protein, 9 aa, Homo Sapiens
CHDPINIQF

SEQ ID NO: 92607 - protein, 9 aa, Homo Sapiens
CHDRNVVTI

SEQ ID NO: 92608 - protein, 9 aa, Homo Sapiens
CHDSGATVL

SEQ ID NO: 92609 - protein, 9 aa, Homo Sapiens
CHDVYRATF

SEQ ID NO: 92610 - protein, 9 aa, Homo Sapiens
CHFMDPQTI

SEQ ID NO: 92611 - protein, 9 aa, Homo Sapiens
CHIIQILEI

SEQ ID NO: 92612 - protein, 9 aa, Homo Sapiens
CHMLVEPNL

SEQ ID NO: 92613 - protein, 9 aa, Homo Sapiens
CHNAQTFNL

SEQ ID NO: 92614 - protein, 9 aa, Homo Sapiens
CHNQFSLFL

SEQ ID NO: 92615 - protein, 9 aa, Homo Sapiens
CHNSAITHL

SEQ ID NO: 92616 - protein, 9 aa, Homo Sapiens
CHSPVVSQL

SEQ ID NO: 92617 - protein, 9 aa, Homo Sapiens
CHSVLPLLL

SEQ ID NO: 92618 - protein, 9 aa, Homo Sapiens
CHTAFFVSI

SEQ ID NO: 92619 - protein, 9 aa, Homo Sapiens
DHAAPEITL

SEQ ID NO: 92620 - protein, 9 aa, Homo Sapiens
DHADSNIVI

SEQ ID NO: 92621 - protein, 9 aa, Homo Sapiens
DHARLQLQL

SEQ ID NO: 92622 - protein, 9 aa, Homo Sapiens
DHCDFPELL

SEQ ID NO: 92623 - protein, 9 aa, Homo Sapiens
DHCGALPYF

SEQ ID NO: 92624 - protein, 9 aa, Homo Sapiens
DHCKQVVEI

SEQ ID NO: 92625 - protein, 9 aa, Homo Sapiens
DHCPITLYL

SEQ ID NO: 92626 - protein, 9 aa, Homo Sapiens
DHCPTKISL

SEQ ID NO: 92627 - protein, 9 aa, Homo Sapiens
DHDCVLVLL

SEQ ID NO: 92628 - protein, 9 aa, Homo Sapiens
DHDGNIVEL

SEQ ID NO: 92629 - protein, 9 aa, Homo Sapiens
DHDGVVMCF

SEQ ID NO: 92630 - protein, 9 aa, Homo Sapiens
DHDIGTTNL

SEQ ID NO: 92631 - protein, 9 aa, Homo Sapiens
DHDKALQLL

SEQ ID NO: 92632 - protein, 9 aa, Homo Sapiens
DHDRIRQFI

SEQ ID NO: 92633 - protein, 9 aa, Homo Sapiens
DHDTVFQYL

SEQ ID NO: 92634 - protein, 9 aa, Homo Sapiens
DHEASYHSL

SEQ ID NO: 92635 - protein, 9 aa, Homo Sapiens
DHEGLGISI

SEQ ID NO: 92636 - protein, 9 aa, Homo Sapiens
DHESSTWII

SEQ ID NO: 92637 - protein, 9 aa, Homo Sapiens
DHFEEAMRF

SEQ ID NO: 92638 - protein, 9 aa, Homo Sapiens
DHFPEILFI

SEQ ID NO: 92639 - protein, 9 aa, Homo Sapiens
DHFPVEFKL

SEQ ID NO: 92640 - protein, 9 aa, Homo Sapiens
DHFVEGQTV

SEQ ID NO: 92641 - protein, 9 aa, Homo Sapiens
DHHFDMINI

SEQ ID NO: 92642 - protein, 9 aa, Homo Sapiens
DHHMEFCRV

SEQ ID NO: 92643 - protein, 9 aa, Homo Sapiens
DHHQEVIGF

SEQ ID NO: 92644 - protein, 9 aa, Homo Sapiens
DHIIDICFL

SEQ ID NO: 92645 - protein, 9 aa, Homo Sapiens
DHIKFDLEI

SEQ ID NO: 92646 - protein, 9 aa, Homo Sapiens
DHINDIIKI

SEQ ID NO: 92647 - protein, 9 aa, Homo Sapiens
DHIRFISEL

SEQ ID NO: 92648 - protein, 9 aa, Homo Sapiens
DHLLDPSSF

SEQ ID NO: 92649 - protein, 9 aa, Homo Sapiens
DHLPETTTI

SEQ ID NO: 92650 - protein, 9 aa, Homo Sapiens
DHLSYFTFI

SEQ ID NO: 92651 - protein, 9 aa, Homo Sapiens
DHMSLIVTI

SEQ ID NO: 92652 - protein, 9 aa, Homo Sapiens
DHNCEIGLI

SEQ ID NO: 92653 - protein, 9 aa, Homo Sapiens
DHQQNSPTL

SEQ ID NO: 92654 - protein, 9 aa, Homo Sapiens
DHQREITSL

SEQ ID NO: 92655 - protein, 9 aa, Homo Sapiens
DHSAFIILL

SEQ ID NO: 92656 - protein, 9 aa, Homo Sapiens
DHSATIVSI

SEQ ID NO: 92657 - protein, 9 aa, Homo Sapiens
DHSPCDPTI

SEQ ID NO: 92658 - protein, 9 aa, Homo Sapiens
DHSPDLYSL

SEQ ID NO: 92659 - protein, 9 aa, Homo Sapiens
DHSPVFATF

SEQ ID NO: 92660 - protein, 9 aa, Homo Sapiens
DHSPVFGTF

SEQ ID NO: 92661 - protein, 9 aa, Homo Sapiens
DHSTLVTLF

SEQ ID NO: 92662 - protein, 9 aa, Homo Sapiens
DHSYVELFL

SEQ ID NO: 92663 - protein, 9 aa, Homo Sapiens
DHVGTEPSI

SEQ ID NO: 92664 - protein, 9 aa, Homo Sapiens
DHYEDVRKI

SEQ ID NO: 92665 - protein, 9 aa, Homo Sapiens
DQDPSVLYF

SEQ ID NO: 92666 - protein, 9 aa, Homo Sapiens
EHAANDVSF

SEQ ID NO: 92667 - protein, 9 aa, Homo Sapiens
EHADDDPSL

SEQ ID NO: 92668 - protein, 9 aa, Homo Sapiens
EHAGGEVEL

SEQ ID NO: 92669 - protein, 9 aa, Homo Sapiens
EHAGVISVL

SEQ ID NO: 92670 - protein, 9 aa, Homo Sapiens
EHAKEIPRF

SEQ ID NO: 92671 - protein, 9 aa, Homo Sapiens
EHALLAYTL

SEQ ID NO: 92672 - protein, 9 aa, Homo Sapiens
EHALTSGTI

SEQ ID NO: 92673 - protein, 9 aa, Homo Sapiens
EHANDYAEI

SEQ ID NO: 92674 - protein, 9 aa, Homo Sapiens
EHAPGNQGF

SEQ ID NO: 92675 - protein, 9 aa, Homo Sapiens
EHAPGVPRI

SEQ ID NO: 92676 - protein, 9 aa, Homo Sapiens
EHAPSIIFM

SEQ ID NO: 92677 - protein, 9 aa, Homo Sapiens
EHAPSIVFI

SEQ ID NO: 92678 - protein, 9 aa, Homo Sapiens
EHARPQTTL

SEQ ID NO: 92679 - protein, 9 aa, Homo Sapiens
EHASSLLEL

SEQ ID NO: 92680 - protein, 9 aa, Homo Sapiens
EHAVGYALL

SEQ ID NO: 92681 - protein, 9 aa, Homo Sapiens
EHCDIFMNL

SEQ ID NO: 92682 - protein, 9 aa, Homo Sapiens
EHCNKYSKI

SEQ ID NO: 92683 - protein, 9 aa, Homo Sapiens
EHCPSQVTV

SEQ ID NO: 92684 - protein, 9 aa, Homo Sapiens
EHCYDIYRL

SEQ ID NO: 92685 - protein, 9 aa, Homo Sapiens
EHDAAAESL

SEQ ID NO: 92686 - protein, 9 aa, Homo Sapiens
EHDAFIFAL

SEQ ID NO: 92687 - protein, 9 aa, Homo Sapiens
EHDDFFISL

SEQ ID NO: 92688 - protein, 9 aa, Homo Sapiens
EHDDIVSTV

SEQ ID NO: 92689 - protein, 9 aa, Homo Sapiens
EHDFSKISI

SEQ ID NO: 92690 - protein, 9 aa, Homo Sapiens
EHDISLDRI

SEQ ID NO: 92691 - protein, 9 aa, Homo Sapiens
EHDPQYAVI

SEQ ID NO: 92692 - protein, 9 aa, Homo Sapiens
EHDPRVITV

SEQ ID NO: 92693 - protein, 9 aa, Homo Sapiens
EHDPSSIYL

SEQ ID NO: 92694 - protein, 9 aa, Homo Sapiens
EHDPVGQMV

SEQ ID NO: 92695 - protein, 9 aa, Homo Sapiens
EHDRIARQW

SEQ ID NO: 92696 - protein, 9 aa, Homo Sapiens
EHDRMARQW

SEQ ID NO: 92697 - protein, 9 aa, Homo Sapiens
EHDSQIVQI

SEQ ID NO: 92698 - protein, 9 aa, Homo Sapiens
EHDTTEYKL

SEQ ID NO: 92699 - protein, 9 aa, Homo Sapiens
EHDVKTLQL

SEQ ID NO: 92700 - protein, 9 aa, Homo Sapiens
EHDVPHQPF

SEQ ID NO: 92701 - protein, 9 aa, Homo Sapiens
EHDYGLFHL

SEQ ID NO: 92702 - protein, 9 aa, Homo Sapiens
EHDYTSVCL

SEQ ID NO: 92703 - protein, 9 aa, Homo Sapiens
EHEDTFVYL

SEQ ID NO: 92704 - protein, 9 aa, Homo Sapiens
EHENFLETI

SEQ ID NO: 92705 - protein, 9 aa, Homo Sapiens
EHEQFQHAI

SEQ ID NO: 92706 - protein, 9 aa, Homo Sapiens
EHFKTILLL

SEQ ID NO: 92707 - protein, 9 aa, Homo Sapiens
EHFKYPVMI

SEQ ID NO: 92708 - protein, 9 aa, Homo Sapiens
EHFNGVAEL

SEQ ID NO: 92709 - protein, 9 aa, Homo Sapiens
EHFPNHQQL

SEQ ID NO: 92710 - protein, 9 aa, Homo Sapiens
EHFPRVLEF

SEQ ID NO: 92711 - protein, 9 aa, Homo Sapiens
EHFSHSSKW

SEQ ID NO: 92712 - protein, 9 aa, Homo Sapiens
EHFSSEVTI

SEQ ID NO: 92713 - protein, 9 aa, Homo Sapiens
EHGDQDYIW

SEQ ID NO: 92714 - protein, 9 aa, Homo Sapiens
EHHAEAAQF

SEQ ID NO: 92715 - protein, 9 aa, Homo Sapiens
EHHEDFEFI

SEQ ID NO: 92716 - protein, 9 aa, Homo Sapiens
EHHEEDFFL

SEQ ID NO: 92717 - protein, 9 aa, Homo Sapiens
EHHSKELRL

SEQ ID NO: 92718 - protein, 9 aa, Homo Sapiens
EHIAASVSI

SEQ ID NO: 92719 - protein, 9 aa, Homo Sapiens
EHIDDKIAL

SEQ ID NO: 92720 - protein, 9 aa, Homo Sapiens
EHIEEVSLF

SEQ ID NO: 92721 - protein, 9 aa, Homo Sapiens
EHIGPDEVI

SEQ ID NO: 92722 - protein, 9 aa, Homo Sapiens
EHIHFIGKI

SEQ ID NO: 92723 - protein, 9 aa, Homo Sapiens
EHIHSNEVI

SEQ ID NO: 92724 - protein, 9 aa, Homo Sapiens
EHILSFETI

SEQ ID NO: 92725 - protein, 9 aa, Homo Sapiens
EHIMDLTRL

SEQ ID NO: 92726 - protein, 9 aa, Homo Sapiens
EHIQEIRTL

SEQ ID NO: 92727 - protein, 9 aa, Homo Sapiens
EHIQNIMTL

SEQ ID NO: 92728 - protein, 9 aa, Homo Sapiens
EHITSEYTL

SEQ ID NO: 92729 - protein, 9 aa, Homo Sapiens
EHIVADDRF

SEQ ID NO: 92730 - protein, 9 aa, Homo Sapiens
EHLFSVEQI

SEQ ID NO: 92731 - protein, 9 aa, Homo Sapiens
EHLNYVTEI

SEQ ID NO: 92732 - protein, 9 aa, Homo Sapiens
EHMAEPVTF

SEQ ID NO: 92733 - protein, 9 aa, Homo Sapiens
EHMMESVLI

SEQ ID NO: 92734 - protein, 9 aa, Homo Sapiens
EHNLFKQRL

SEQ ID NO: 92735 - protein, 9 aa, Homo Sapiens
EHQAIVQHL

SEQ ID NO: 92736 - protein, 9 aa, Homo Sapiens
EHQEYITFL

SEQ ID NO: 92737 - protein, 9 aa, Homo Sapiens
EHQKPPVSI

SEQ ID NO: 92738 - protein, 9 aa, Homo Sapiens
EHQQEISKI

SEQ ID NO: 92739 - protein, 9 aa, Homo Sapiens
EHQQFITFL

SEQ ID NO: 92740 - protein, 9 aa, Homo Sapiens
EHQVELELL

SEQ ID NO: 92741 - protein, 9 aa, Homo Sapiens
EHQVPVEKL

SEQ ID NO: 92742 - protein, 9 aa, Homo Sapiens
EHSAAFFLL

SEQ ID NO: 92743 - protein, 9 aa, Homo Sapiens
EHSAVNMNL

SEQ ID NO: 92744 - protein, 9 aa, Homo Sapiens
EHSAVPDSL

SEQ ID NO: 92745 - protein, 9 aa, Homo Sapiens
EHSCDEQYL

SEQ ID NO: 92746 - protein, 9 aa, Homo Sapiens
EHSDVLPVL

SEQ ID NO: 92747 - protein, 9 aa, Homo Sapiens
EHSGPPIVI

SEQ ID NO: 92748 - protein, 9 aa, Homo Sapiens
EHSIATLLL

SEQ ID NO: 92749 - protein, 9 aa, Homo Sapiens
EHSKLIAKV

SEQ ID NO: 92750 - protein, 9 aa, Homo Sapiens
EHSKVRLVI

SEQ ID NO: 92751 - protein, 9 aa, Homo Sapiens
EHSLLPLML

SEQ ID NO: 92752 - protein, 9 aa, Homo Sapiens
EHSLPTLGL

SEQ ID NO: 92753 - protein, 9 aa, Homo Sapiens
EHSLVIDTL

SEQ ID NO: 92754 - protein, 9 aa, Homo Sapiens
EHSPVPAGF

SEQ ID NO: 92755 - protein, 9 aa, Homo Sapiens
EHSSLKTHL

SEQ ID NO: 92756 - protein, 9 aa, Homo Sapiens
EHSTGITHL

SEQ ID NO: 92757 - protein, 9 aa, Homo Sapiens
EHSTVITFL

SEQ ID NO: 92758 - protein, 9 aa, Homo Sapiens
EHSVCANEM

SEQ ID NO: 92759 - protein, 9 aa, Homo Sapiens
EHTDIQEYI

SEQ ID NO: 92760 - protein, 9 aa, Homo Sapiens
EHTDQVLHL

SEQ ID NO: 92761 - protein, 9 aa, Homo Sapiens
EHTEVLQLL

SEQ ID NO: 92762 - protein, 9 aa, Homo Sapiens
EHVDVIAKF

SEQ ID NO: 92763 - protein, 9 aa, Homo Sapiens
EHVEAFITI

SEQ ID NO: 92764 - protein, 9 aa, Homo Sapiens
EHVKEVQQL

SEQ ID NO: 92765 - protein, 9 aa, Homo Sapiens
EHVLETINF

SEQ ID NO: 92766 - protein, 9 aa, Homo Sapiens
EHVLHFITI

SEQ ID NO: 92767 - protein, 9 aa, Homo Sapiens
EHVLLVSIL

SEQ ID NO: 92768 - protein, 9 aa, Homo Sapiens
EHVLTGDSI

SEQ ID NO: 92769 - protein, 9 aa, Homo Sapiens
EHVNLFPLF

SEQ ID NO: 92770 - protein, 9 aa, Homo Sapiens
EHVPLLLYI

SEQ ID NO: 92771 - protein, 9 aa, Homo Sapiens
EHVPSSSSI

SEQ ID NO: 92772 - protein, 9 aa, Homo Sapiens
EHVQFNEFL

SEQ ID NO: 92773 - protein, 9 aa, Homo Sapiens
EHVQLFDLM

SEQ ID NO: 92774 - protein, 9 aa, Homo Sapiens
EHVVQGDAL

SEQ ID NO: 92775 - protein, 9 aa, Homo Sapiens
EHYHIVQKF

SEQ ID NO: 92776 - protein, 9 aa, Homo Sapiens
ELDPVEYTL

SEQ ID NO: 92777 - protein, 9 aa, Homo Sapiens
ELDSNEHLL

SEQ ID NO: 92778 - protein, 9 aa, Homo Sapiens
EQIRDVPVL

SEQ ID NO: 92779 - protein, 9 aa, Homo Sapiens
EQRLIYEEL

SEQ ID NO: 92780 - protein, 9 aa, Homo Sapiens
ERAAANEQL

SEQ ID NO: 92781 - protein, 9 aa, Homo Sapiens
ERAALQEEL

SEQ ID NO: 92782 - protein, 9 aa, Homo Sapiens
ERDPATYNI

SEQ ID NO: 92783 - protein, 9 aa, Homo Sapiens
ERDPQSPEF

SEQ ID NO: 92784 - protein, 9 aa, Homo Sapiens
ERDRLILFL

SEQ ID NO: 92785 - protein, 9 aa, Homo Sapiens
ERIRDVVYF

SEQ ID NO: 92786 - protein, 9 aa, Homo Sapiens
ERLQIDEQL

SEQ ID NO: 92787 - protein, 9 aa, Homo Sapiens
ERMNGQEVF

SEQ ID NO: 92788 - protein, 9 aa, Homo Sapiens
FEDLEVSTF

SEQ ID NO: 92789 - protein, 9 aa, Homo Sapiens
FHADAILSF

SEQ ID NO: 92790 - protein, 9 aa, Homo Sapiens
FHAEPVDVW

SEQ ID NO: 92791 - protein, 9 aa, Homo Sapiens
FHAFLKTEF

SEQ ID NO: 92792 - protein, 9 aa, Homo Sapiens
FHCESSAHW

SEQ ID NO: 92793 - protein, 9 aa, Homo Sapiens
FHCTLIGYF

SEQ ID NO: 92794 - protein, 9 aa, Homo Sapiens
FHDATRVYL

SEQ ID NO: 92795 - protein, 9 aa, Homo Sapiens
FHDDWISSI

SEQ ID NO: 92796 - protein, 9 aa, Homo Sapiens
FHDGDSVVF

SEQ ID NO: 92797 - protein, 9 aa, Homo Sapiens
FHDGFLLEV

SEQ ID NO: 92798 - protein, 9 aa, Homo Sapiens
FHDGSVHIV

SEQ ID NO: 92799 - protein, 9 aa, Homo Sapiens
FHDKYGNAV

SEQ ID NO: 92800 - protein, 9 aa, Homo Sapiens
FHDMGGVQL

SEQ ID NO: 92801 - protein, 9 aa, Homo Sapiens
FHDMNPQSI

SEQ ID NO: 92802 - protein, 9 aa, Homo Sapiens
FHDNSGDVF

SEQ ID NO: 92803 - protein, 9 aa, Homo Sapiens
FHDPDSAVV

SEQ ID NO: 92804 - protein, 9 aa, Homo Sapiens
FHDPWKLLI

SEQ ID NO: 92805 - protein, 9 aa, Homo Sapiens
FHDSAVTSV

SEQ ID NO: 92806 - protein, 9 aa, Homo Sapiens
FHDSSPTQI

SEQ ID NO: 92807 - protein, 9 aa, Homo Sapiens
FHEEDESSF

SEQ ID NO: 92808 - protein, 9 aa, Homo Sapiens
FHEEILPMF

SEQ ID NO: 92809 - protein, 9 aa, Homo Sapiens
FHEFQESTI

SEQ ID NO: 92810 - protein, 9 aa, Homo Sapiens
FHEGDVITL

SEQ ID NO: 92811 - protein, 9 aa, Homo Sapiens
FHESGFTTV

SEQ ID NO: 92812 - protein, 9 aa, Homo Sapiens
FHEYQESTI

SEQ ID NO: 92813 - protein, 9 aa, Homo Sapiens
FHFAGDGKL

SEQ ID NO: 92814 - protein, 9 aa, Homo Sapiens
FHFEPNEYF

SEQ ID NO: 92815 - protein, 9 aa, Homo Sapiens
FHGDPHATF

SEQ ID NO: 92816 - protein, 9 aa, Homo Sapiens
FHGPPEPVL

SEQ ID NO: 92817 - protein, 9 aa, Homo Sapiens
FHHESKENF

SEQ ID NO: 92818 - protein, 9 aa, Homo Sapiens
FHHEYPWIL

SEQ ID NO: 92819 - protein, 9 aa, Homo Sapiens
FHHPNILEL

SEQ ID NO: 92820 - protein, 9 aa, Homo Sapiens
FHHQDGYRY

SEQ ID NO: 92821 - protein, 9 aa, Homo Sapiens
FHIDFGHFL

SEQ ID NO: 92822 - protein, 9 aa, Homo Sapiens
FHIDFGHIL

SEQ ID NO: 92823 - protein, 9 aa, Homo Sapiens
FHIGDRVLI

SEQ ID NO: 92824 - protein, 9 aa, Homo Sapiens
FHKDPDVNM

SEQ ID NO: 92825 - protein, 9 aa, Homo Sapiens
FHLDVEDYL

SEQ ID NO: 92826 - protein, 9 aa, Homo Sapiens
FHLIDFNLL

SEQ ID NO: 92827 - protein, 9 aa, Homo Sapiens
FHLPDDPSI

SEQ ID NO: 92828 - protein, 9 aa, Homo Sapiens
FHMDPSGTF

SEQ ID NO: 92829 - protein, 9 aa, Homo Sapiens
FHMGGNMEL

SEQ ID NO: 92830 - protein, 9 aa, Homo Sapiens
FHNFIKVTL

SEQ ID NO: 92831 - protein, 9 aa, Homo Sapiens
FHNLPSLTL

SEQ ID NO: 92832 - protein, 9 aa, Homo Sapiens
FHNNIIVLI

SEQ ID NO: 92833 - protein, 9 aa, Homo Sapiens
FHNTEVEAM

SEQ ID NO: 92834 - protein, 9 aa, Homo Sapiens
FHQDDHNNL

SEQ ID NO: 92835 - protein, 9 aa, Homo Sapiens
FHQDLPLSI

SEQ ID NO: 92836 - protein, 9 aa, Homo Sapiens
FHQDPPLMF

SEQ ID NO: 92837 - protein, 9 aa, Homo Sapiens
FHQELPLYI

SEQ ID NO: 92838 - protein, 9 aa, Homo Sapiens
FHQPDSVIL

SEQ ID NO: 92839 - protein, 9 aa, Homo Sapiens
FHQVQVVHL

SEQ ID NO: 92840 - protein, 9 aa, Homo Sapiens
FHSDPLSAI

SEQ ID NO: 92841 - protein, 9 aa, Homo Sapiens
FHSEEQQLL

SEQ ID NO: 92842 - protein, 9 aa, Homo Sapiens
FHSGGKFIL

SEQ ID NO: 92843 - protein, 9 aa, Homo Sapiens
FHSHDGPSL

SEQ ID NO: 92844 - protein, 9 aa, Homo Sapiens
FHSNDVATL

SEQ ID NO: 92845 - protein, 9 aa, Homo Sapiens
FHSVEVHKW

SEQ ID NO: 92846 - protein, 9 aa, Homo Sapiens
FHTEFQNLL

SEQ ID NO: 92847 - protein, 9 aa, Homo Sapiens
FHTVIGDTV

SEQ ID NO: 92848 - protein, 9 aa, Homo Sapiens
FHVDVPVQF

SEQ ID NO: 92849 - protein, 9 aa, Homo Sapiens
FHVSPDPSV

SEQ ID NO: 92850 - protein, 9 aa, Homo Sapiens
FHWSGNEQM

SEQ ID NO: 92851 - protein, 9 aa, Homo Sapiens
FHYPGVQNL

SEQ ID NO: 92852 - protein, 9 aa, Homo Sapiens
FKIDAGDRF

SEQ ID NO: 92853 - protein, 9 aa, Homo Sapiens
FKIDKEYLL

SEQ ID NO: 92854 - protein, 9 aa, Homo Sapiens
FPNVEIVTI

SEQ ID NO: 92855 - protein, 9 aa, Homo Sapiens
FQCQTKLEL

SEQ ID NO: 92856 - protein, 9 aa, Homo Sapiens
FQDALEPLL

SEQ ID NO: 92857 - protein, 9 aa, Homo Sapiens
FQDEINWRL

SEQ ID NO: 92858 - protein, 9 aa, Homo Sapiens
FQDGTKATF

SEQ ID NO: 92859 - protein, 9 aa, Homo Sapiens
FQHEDLNFL

SEQ ID NO: 92860 - protein, 9 aa, Homo Sapiens
FQSPPTPFL

SEQ ID NO: 92861 - protein, 9 aa, Homo Sapiens
FRFAGSENL

SEQ ID NO: 92862 - protein, 9 aa, Homo Sapiens
FRGPVVPAF

SEQ ID NO: 92863 - protein, 9 aa, Homo Sapiens
FRTEGAEKL

SEQ ID NO: 92864 - protein, 9 aa, Homo Sapiens
GHAASSPEI

SEQ ID NO: 92865 - protein, 9 aa, Homo Sapiens
GHADVAQLL

SEQ ID NO: 92866 - protein, 9 aa, Homo Sapiens
GHAMPIRSL

SEQ ID NO: 92867 - protein, 9 aa, Homo Sapiens
GHASPCPPL

SEQ ID NO: 92868 - protein, 9 aa, Homo Sapiens
GHCDVLLSL

SEQ ID NO: 92869 - protein, 9 aa, Homo Sapiens
GHDASQITL

SEQ ID NO: 92870 - protein, 9 aa, Homo Sapiens
GHDASVLKV

SEQ ID NO: 92871 - protein, 9 aa, Homo Sapiens
GHDCFPVLF

SEQ ID NO: 92872 - protein, 9 aa, Homo Sapiens
GHDGIVLAL

SEQ ID NO: 92873 - protein, 9 aa, Homo Sapiens
GHDNTDVSI

SEQ ID NO: 92874 - protein, 9 aa, Homo Sapiens
GHDQVVVLL

SEQ ID NO: 92875 - protein, 9 aa, Homo Sapiens
GHDTNHVLL

SEQ ID NO: 92876 - protein, 9 aa, Homo Sapiens
GHFDGVQDL

SEQ ID NO: 92877 - protein, 9 aa, Homo Sapiens
GHFEKPLFL

SEQ ID NO: 92878 - protein, 9 aa, Homo Sapiens
GHLDMVEFL

SEQ ID NO: 92879 - protein, 9 aa, Homo Sapiens
GHMPTVELL

SEQ ID NO: 92880 - protein, 9 aa, Homo Sapiens
GHNVFKERI

SEQ ID NO: 92881 - protein, 9 aa, Homo Sapiens
GHSAPLTNI

SEQ ID NO: 92882 - protein, 9 aa, Homo Sapiens
GHSDIHSLL

SEQ ID NO: 92883 - protein, 9 aa, Homo Sapiens
GHSDPEESF

SEQ ID NO: 92884 - protein, 9 aa, Homo Sapiens
GHSEVVAIL

SEQ ID NO: 92885 - protein, 9 aa, Homo Sapiens
GHSGPITSI

SEQ ID NO: 92886 - protein, 9 aa, Homo Sapiens
GHSPPTSSL

SEQ ID NO: 92887 - protein, 9 aa, Homo Sapiens
GHSPVLRNI

SEQ ID NO: 92888 - protein, 9 aa, Homo Sapiens
GHSSFITHL

SEQ ID NO: 92889 - protein, 9 aa, Homo Sapiens
GHSSYITHL

SEQ ID NO: 92890 - protein, 9 aa, Homo Sapiens
GHTAVVSFL

SEQ ID NO: 92891 - protein, 9 aa, Homo Sapiens
GHVVDGHKL

SEQ ID NO: 92892 - protein, 9 aa, Homo Sapiens
GHYEVAELL

SEQ ID NO: 92893 - protein, 9 aa, Homo Sapiens
GHYEVTELL

SEQ ID NO: 92894 - protein, 9 aa, Homo Sapiens
GHYLGEFSI

SEQ ID NO: 92895 - protein, 9 aa, Homo Sapiens
GRYAGEESL

SEQ ID NO: 92896 - protein, 9 aa, Homo Sapiens
HDPTSANLL

SEQ ID NO: 92897 - protein, 9 aa, Homo Sapiens
HEAMEQQTI

SEQ ID NO: 92898 - protein, 9 aa, Homo Sapiens
HEVMEQQTI

SEQ ID NO: 92899 - protein, 9 aa, Homo Sapiens
HHAEPPPAL

SEQ ID NO: 92900 - protein, 9 aa, Homo Sapiens
HHAEYLTEL

SEQ ID NO: 92901 - protein, 9 aa, Homo Sapiens
HHAFQPSKL

SEQ ID NO: 92902 - protein, 9 aa, Homo Sapiens
HHALELEYL

SEQ ID NO: 92903 - protein, 9 aa, Homo Sapiens
HHANPILLL

SEQ ID NO: 92904 - protein, 9 aa, Homo Sapiens
HHAPLPSHL

SEQ ID NO: 92905 - protein, 9 aa, Homo Sapiens
HHAPLVNSL

SEQ ID NO: 92906 - protein, 9 aa, Homo Sapiens
HHAQDYGGL

SEQ ID NO: 92907 - protein, 9 aa, Homo Sapiens
HHCDDHLSL

SEQ ID NO: 92908 - protein, 9 aa, Homo Sapiens
HHCEAVLHL

SEQ ID NO: 92909 - protein, 9 aa, Homo Sapiens
HHCKLTQVL

SEQ ID NO: 92910 - protein, 9 aa, Homo Sapiens
HHCPAFGLL

SEQ ID NO: 92911 - protein, 9 aa, Homo Sapiens
HHCPGNHSW

SEQ ID NO: 92912 - protein, 9 aa, Homo Sapiens
HHCPKTPFL

SEQ ID NO: 92913 - protein, 9 aa, Homo Sapiens
HHDFHHMNF

SEQ ID NO: 92914 - protein, 9 aa, Homo Sapiens
HHDHLQPLL

SEQ ID NO: 92915 - protein, 9 aa, Homo Sapiens
HHDIKPSNI

SEQ ID NO: 92916 - protein, 9 aa, Homo Sapiens
HHDQLHTYL

SEQ ID NO: 92917 - protein, 9 aa, Homo Sapiens
HHEAGVTAL

SEQ ID NO: 92918 - protein, 9 aa, Homo Sapiens
HHEAMKTQI

SEQ ID NO: 92919 - protein, 9 aa, Homo Sapiens
HHEASGVTV

SEQ ID NO: 92920 - protein, 9 aa, Homo Sapiens
HHELHAAHL

SEQ ID NO: 92921 - protein, 9 aa, Homo Sapiens
HHELVALLL

SEQ ID NO: 92922 - protein, 9 aa, Homo Sapiens
HHENLVSFL

SEQ ID NO: 92923 - protein, 9 aa, Homo Sapiens
HHEPESPQL

SEQ ID NO: 92924 - protein, 9 aa, Homo Sapiens
HHFCDFINL

SEQ ID NO: 92925 - protein, 9 aa, Homo Sapiens
HHFEGAQIL

SEQ ID NO: 92926 - protein, 9 aa, Homo Sapiens
HHFEKAVTL

SEQ ID NO: 92927 - protein, 9 aa, Homo Sapiens
HHFEQMLKL

SEQ ID NO: 92928 - protein, 9 aa, Homo Sapiens
HHFLELVTL

SEQ ID NO: 92929 - protein, 9 aa, Homo Sapiens
HHFLIGNNF

SEQ ID NO: 92930 - protein, 9 aa, Homo Sapiens
HHFPGPLLV

SEQ ID NO: 92931 - protein, 9 aa, Homo Sapiens
HHFVPLVTL

SEQ ID NO: 92932 - protein, 9 aa, Homo Sapiens
HHGPMAVAF

SEQ ID NO: 92933 - protein, 9 aa, Homo Sapiens
HHGPPGPTF

SEQ ID NO: 92934 - protein, 9 aa, Homo Sapiens
HHGQAQPGL

SEQ ID NO: 92935 - protein, 9 aa, Homo Sapiens
HHGTFMEEF

SEQ ID NO: 92936 - protein, 9 aa, Homo Sapiens
HHGTPHTTI

SEQ ID NO: 92937 - protein, 9 aa, Homo Sapiens
HHGTSILTL

SEQ ID NO: 92938 - protein, 9 aa, Homo Sapiens
HHHAGYEQF

SEQ ID NO: 92939 - protein, 9 aa, Homo Sapiens
HHHHHPPMI

SEQ ID NO: 92940 - protein, 9 aa, Homo Sapiens
HHHLQNNEL

SEQ ID NO: 92941 - protein, 9 aa, Homo Sapiens
HHHQEVILV

SEQ ID NO: 92942 - protein, 9 aa, Homo Sapiens
HHHSVPVFI

SEQ ID NO: 92943 - protein, 9 aa, Homo Sapiens
HHHTDGAYF

SEQ ID NO: 92944 - protein, 9 aa, Homo Sapiens
HHIANANLM

SEQ ID NO: 92945 - protein, 9 aa, Homo Sapiens
HHIASVEKL

SEQ ID NO: 92946 - protein, 9 aa, Homo Sapiens
HHIATVEKL

SEQ ID NO: 92947 - protein, 9 aa, Homo Sapiens
HHIDSANAL

SEQ ID NO: 92948 - protein, 9 aa, Homo Sapiens
HHIEAQQRL

SEQ ID NO: 92949 - protein, 9 aa, Homo Sapiens
HHIEPFCKL

SEQ ID NO: 92950 - protein, 9 aa, Homo Sapiens
HHIIENNHI

SEQ ID NO: 92951 - protein, 9 aa, Homo Sapiens
HHIIEQLRF

SEQ ID NO: 92952 - protein, 9 aa, Homo Sapiens
HHILADVSL

SEQ ID NO: 92953 - protein, 9 aa, Homo Sapiens
HHILKSDDL

SEQ ID NO: 92954 - protein, 9 aa, Homo Sapiens
HHISTEQEI

SEQ ID NO: 92955 - protein, 9 aa, Homo Sapiens
HHITGSQNI

SEQ ID NO: 92956 - protein, 9 aa, Homo Sapiens
HHIVENTYF

SEQ ID NO: 92957 - protein, 9 aa, Homo Sapiens
HHLADLSHL

SEQ ID NO: 92958 - protein, 9 aa, Homo Sapiens
HHLDPDTEL

SEQ ID NO: 92959 - protein, 9 aa, Homo Sapiens
HHLEQMYKL

SEQ ID NO: 92960 - protein, 9 aa, Homo Sapiens
HHLVIPSVL

SEQ ID NO: 92961 - protein, 9 aa, Homo Sapiens
HHMEVLREL

SEQ ID NO: 92962 - protein, 9 aa, Homo Sapiens
HHMGGMAGL

SEQ ID NO: 92963 - protein, 9 aa, Homo Sapiens
HHMGISHVL

SEQ ID NO: 92964 - protein, 9 aa, Homo Sapiens
HHMNSIRKI

SEQ ID NO: 92965 - protein, 9 aa, Homo Sapiens
HHNEAVLHL

SEQ ID NO: 92966 - protein, 9 aa, Homo Sapiens
HHNGIAELL

SEQ ID NO: 92967 - protein, 9 aa, Homo Sapiens
HHQAAIEKL

SEQ ID NO: 92968 - protein, 9 aa, Homo Sapiens
HHQALEVLL

SEQ ID NO: 92969 - protein, 9 aa, Homo Sapiens
HHQPMVQGI

SEQ ID NO: 92970 - protein, 9 aa, Homo Sapiens
HHQQPHQYL

SEQ ID NO: 92971 - protein, 9 aa, Homo Sapiens
HHSALLILL

SEQ ID NO: 92972 - protein, 9 aa, Homo Sapiens
HHSDGSVSL

SEQ ID NO: 92973 - protein, 9 aa, Homo Sapiens
HHSFDLVIF

SEQ ID NO: 92974 - protein, 9 aa, Homo Sapiens
HHSGAKVVL

SEQ ID NO: 92975 - protein, 9 aa, Homo Sapiens
HHSGILPIL

SEQ ID NO: 92976 - protein, 9 aa, Homo Sapiens
HHSGTITCL

SEQ ID NO: 92977 - protein, 9 aa, Homo Sapiens
HHSISSQTF

SEQ ID NO: 92978 - protein, 9 aa, Homo Sapiens
HHSLALTSF

SEQ ID NO: 92979 - protein, 9 aa, Homo Sapiens
HHSLVLSHL

SEQ ID NO: 92980 - protein, 9 aa, Homo Sapiens
HHSNILLTF

SEQ ID NO: 92981 - protein, 9 aa, Homo Sapiens
HHSNIPMSL

SEQ ID NO: 92982 - protein, 9 aa, Homo Sapiens
HHSNLIAGM

SEQ ID NO: 92983 - protein, 9 aa, Homo Sapiens
HHSQSFQLL

SEQ ID NO: 92984 - protein, 9 aa, Homo Sapiens
HHSRALQSI

SEQ ID NO: 92985 - protein, 9 aa, Homo Sapiens
HHSSEDYNL

SEQ ID NO: 92986 - protein, 9 aa, Homo Sapiens
HHSTQMQEL

SEQ ID NO: 92987 - protein, 9 aa, Homo Sapiens
HHSTSLPNL

SEQ ID NO: 92988 - protein, 9 aa, Homo Sapiens
HHSVGTELL

SEQ ID NO: 92989 - protein, 9 aa, Homo Sapiens
HHSYEDTGL

SEQ ID NO: 92990 - protein, 9 aa, Homo Sapiens
HHTLYINLI

SEQ ID NO: 92991 - protein, 9 aa, Homo Sapiens
HHTSSVYSI

SEQ ID NO: 92992 - protein, 9 aa, Homo Sapiens
HHTTQQTFL

SEQ ID NO: 92993 - protein, 9 aa, Homo Sapiens
HHVIPMPLL

SEQ ID NO: 92994 - protein, 9 aa, Homo Sapiens
HHVKDISCL

SEQ ID NO: 92995 - protein, 9 aa, Homo Sapiens
HHVLQNDVL

SEQ ID NO: 92996 - protein, 9 aa, Homo Sapiens
HHVNMTPEF

SEQ ID NO: 92997 - protein, 9 aa, Homo Sapiens
HHVNVNPNF

SEQ ID NO: 92998 - protein, 9 aa, Homo Sapiens
HHYEGAVVI

SEQ ID NO: 92999 - protein, 9 aa, Homo Sapiens
HHYELPAIL

SEQ ID NO: 93000 - protein, 9 aa, Homo Sapiens
HHYQAGESL

SEQ ID NO: 93001 - protein, 9 aa, Homo Sapiens
HHYTGLLKL

SEQ ID NO: 93002 - protein, 9 aa, Homo Sapiens
HLAWFGDSL

SEQ ID NO: 93003 - protein, 9 aa, Homo Sapiens
HPLEDRNTI

SEQ ID NO: 93004 - protein, 9 aa, Homo Sapiens
HPNQEPAVI

SEQ ID NO: 93005 - protein, 9 aa, Homo Sapiens
HQAEYELNI

SEQ ID NO: 93006 - protein, 9 aa, Homo Sapiens
HQALELDFL

SEQ ID NO: 93007 - protein, 9 aa, Homo Sapiens
HQAPTERQL

SEQ ID NO: 93008 - protein, 9 aa, Homo Sapiens
HQAQIDHYL

SEQ ID NO: 93009 - protein, 9 aa, Homo Sapiens
HQCSRIDLL

SEQ ID NO: 93010 - protein, 9 aa, Homo Sapiens
HQDDFNQLL

SEQ ID NO: 93011 - protein, 9 aa, Homo Sapiens
HQDNNFLYL

SEQ ID NO: 93012 - protein, 9 aa, Homo Sapiens
HQDPNSYSW

SEQ ID NO: 93013 - protein, 9 aa, Homo Sapiens
HQDQLQVLL

SEQ ID NO: 93014 - protein, 9 aa, Homo Sapiens
HQDSRAHLL

SEQ ID NO: 93015 - protein, 9 aa, Homo Sapiens
HQEQGHQLL

SEQ ID NO: 93016 - protein, 9 aa, Homo Sapiens
HQFGMDLLL

SEQ ID NO: 93017 - protein, 9 aa, Homo Sapiens
HQGPDDIYL

SEQ ID NO: 93018 - protein, 9 aa, Homo Sapiens
HQHEEIQNV

SEQ ID NO: 93019 - protein, 9 aa, Homo Sapiens
HQHEYFFLI

SEQ ID NO: 93020 - protein, 9 aa, Homo Sapiens
HQLLEKVRI

SEQ ID NO: 93021 - protein, 9 aa, Homo Sapiens
HQNVESHLL

SEQ ID NO: 93022 - protein, 9 aa, Homo Sapiens
HQRLEPATL

SEQ ID NO: 93023 - protein, 9 aa, Homo Sapiens
HQSKEENLI

SEQ ID NO: 93024 - protein, 9 aa, Homo Sapiens
HQSPATPAF

SEQ ID NO: 93025 - protein, 9 aa, Homo Sapiens
HQSVDIATL

SEQ ID NO: 93026 - protein, 9 aa, Homo Sapiens
HQTELGNQL

SEQ ID NO: 93027 - protein, 9 aa, Homo Sapiens
HQTGGEVTI

SEQ ID NO: 93028 - protein, 9 aa, Homo Sapiens
HRAQLQIRI

SEQ ID NO: 93029 - protein, 9 aa, Homo Sapiens
HRAQYEPLF

SEQ ID NO: 93030 - protein, 9 aa, Homo Sapiens
HRDNLEFFL

SEQ ID NO: 93031 - protein, 9 aa, Homo Sapiens
HRDSHITNL

SEQ ID NO: 93032 - protein, 9 aa, Homo Sapiens
HRFYMFHSF

SEQ ID NO: 93033 - protein, 9 aa, Homo Sapiens
HRLPLQELW

SEQ ID NO: 93034 - protein, 9 aa, Homo Sapiens
HSLSSSESL

SEQ ID NO: 93035 - protein, 9 aa, Homo Sapiens
IHCNTPSLL

SEQ ID NO: 93036 - protein, 9 aa, Homo Sapiens
IHDELQQSF

SEQ ID NO: 93037 - protein, 9 aa, Homo Sapiens
IHDFQPHVI

SEQ ID NO: 93038 - protein, 9 aa, Homo Sapiens
IHDGFGFML

SEQ ID NO: 93039 - protein, 9 aa, Homo Sapiens
IHDGLTVHL

SEQ ID NO: 93040 - protein, 9 aa, Homo Sapiens
IHDGMNLEL

SEQ ID NO: 93041 - protein, 9 aa, Homo Sapiens
IHDGTVHTI

SEQ ID NO: 93042 - protein, 9 aa, Homo Sapiens
IHDHNIPTL

SEQ ID NO: 93043 - protein, 9 aa, Homo Sapiens
IHDHSKAEF

SEQ ID NO: 93044 - protein, 9 aa, Homo Sapiens
IHDILDLTF

SEQ ID NO: 93045 - protein, 9 aa, Homo Sapiens
IHDKTEINL

SEQ ID NO: 93046 - protein, 9 aa, Homo Sapiens
IHDLDNISF

SEQ ID NO: 93047 - protein, 9 aa, Homo Sapiens
IHDLDSNSF

SEQ ID NO: 93048 - protein, 9 aa, Homo Sapiens
IHDLFPSLI

SEQ ID NO: 93049 - protein, 9 aa, Homo Sapiens
IHDMFPLHL

SEQ ID NO: 93050 - protein, 9 aa, Homo Sapiens
IHDNGEFYL

SEQ ID NO: 93051 - protein, 9 aa, Homo Sapiens
IHDSQAPSL

SEQ ID NO: 93052 - protein, 9 aa, Homo Sapiens
IHEDQTVYI

SEQ ID NO: 93053 - protein, 9 aa, Homo Sapiens
IHEDSMNLL

SEQ ID NO: 93054 - protein, 9 aa, Homo Sapiens
IHEDTRHLL

SEQ ID NO: 93055 - protein, 9 aa, Homo Sapiens
IHEPEPHIL

SEQ ID NO: 93056 - protein, 9 aa, Homo Sapiens
IHESVSAQI

SEQ ID NO: 93057 - protein, 9 aa, Homo Sapiens
IHETTFNSI

SEQ ID NO: 93058 - protein, 9 aa, Homo Sapiens
IHEVTKVLL

SEQ ID NO: 93059 - protein, 9 aa, Homo Sapiens
IHFFGEEYL

SEQ ID NO: 93060 - protein, 9 aa, Homo Sapiens
IHGPKGNEI

SEQ ID NO: 93061 - protein, 9 aa, Homo Sapiens
IHGPTDYQV

SEQ ID NO: 93062 - protein, 9 aa, Homo Sapiens
IHHDVNELL

SEQ ID NO: 93063 - protein, 9 aa, Homo Sapiens
IHHEGGENI

SEQ ID NO: 93064 - protein, 9 aa, Homo Sapiens
IHHGGLLPI

SEQ ID NO: 93065 - protein, 9 aa, Homo Sapiens
IHHPTPIQI

SEQ ID NO: 93066 - protein, 9 aa, Homo Sapiens
IHIDIMDYI

SEQ ID NO: 93067 - protein, 9 aa, Homo Sapiens
IHILDVLVL

SEQ ID NO: 93068 - protein, 9 aa, Homo Sapiens
IHIPINNII

SEQ ID NO: 93069 - protein, 9 aa, Homo Sapiens
IHITPEPEF

SEQ ID NO: 93070 - protein, 9 aa, Homo Sapiens
IHLGHILFL

SEQ ID NO: 93071 - protein, 9 aa, Homo Sapiens
IHLHTEALL

SEQ ID NO: 93072 - protein, 9 aa, Homo Sapiens
IHLIDPNTL

SEQ ID NO: 93073 - protein, 9 aa, Homo Sapiens
IHNDNEELI

SEQ ID NO: 93074 - protein, 9 aa, Homo Sapiens
IHNDVKVLL

SEQ ID NO: 93075 - protein, 9 aa, Homo Sapiens
IHNEDNSQF

SEQ ID NO: 93076 - protein, 9 aa, Homo Sapiens
IHNEPFLTL

SEQ ID NO: 93077 - protein, 9 aa, Homo Sapiens
IHNIEPVTF

SEQ ID NO: 93078 - protein, 9 aa, Homo Sapiens
IHNNFGVLF

SEQ ID NO: 93079 - protein, 9 aa, Homo Sapiens
IHNSDQILL

SEQ ID NO: 93080 - protein, 9 aa, Homo Sapiens
IHQDGIHIL

SEQ ID NO: 93081 - protein, 9 aa, Homo Sapiens
IHSDFQTLI

SEQ ID NO: 93082 - protein, 9 aa, Homo Sapiens
IHSENFQTL

SEQ ID NO: 93083 - protein, 9 aa, Homo Sapiens
IHSESSDTF

SEQ ID NO: 93084 - protein, 9 aa, Homo Sapiens
IHSFELDLL

SEQ ID NO: 93085 - protein, 9 aa, Homo Sapiens
IHSFIGDGL

SEQ ID NO: 93086 - protein, 9 aa, Homo Sapiens
IHSGELTKI

SEQ ID NO: 93087 - protein, 9 aa, Homo Sapiens
IHSPVVNEL

SEQ ID NO: 93088 - protein, 9 aa, Homo Sapiens
IHSQPQPAL

SEQ ID NO: 93089 - protein, 9 aa, Homo Sapiens
IHSQVSQQL

SEQ ID NO: 93090 - protein, 9 aa, Homo Sapiens
IHSQVTVQI

SEQ ID NO: 93091 - protein, 9 aa, Homo Sapiens
IHSSIVSTL

SEQ ID NO: 93092 - protein, 9 aa, Homo Sapiens
IHSSVQCKL

SEQ ID NO: 93093 - protein, 9 aa, Homo Sapiens
IHTEVINNL

SEQ ID NO: 93094 - protein, 9 aa, Homo Sapiens
IHTPENPVI

SEQ ID NO: 93095 - protein, 9 aa, Homo Sapiens
IHVDFPVIL

SEQ ID NO: 93096 - protein, 9 aa, Homo Sapiens
IHVIGGNDV

SEQ ID NO: 93097 - protein, 9 aa, Homo Sapiens
ILANIGDHF

SEQ ID NO: 93098 - protein, 9 aa, Homo Sapiens
ILANVGDQF

SEQ ID NO: 93099 - protein, 9 aa, Homo Sapiens
ILATDDPNF

SEQ ID NO: 93100 - protein, 9 aa, Homo Sapiens
ILDPHVVLL

SEQ ID NO: 93101 - protein, 9 aa, Homo Sapiens
IPCEEGDKL

SEQ ID NO: 93102 - protein, 9 aa, Homo Sapiens
IPHMDIEAL

SEQ ID NO: 93103 - protein, 9 aa, Homo Sapiens
IQCEIFQVL

SEQ ID NO: 93104 - protein, 9 aa, Homo Sapiens
IQDEEFYTL

SEQ ID NO: 93105 - protein, 9 aa, Homo Sapiens
IRAAPPPLF

SEQ ID NO: 93106 - protein, 9 aa, Homo Sapiens
IRTPTGDEF

SEQ ID NO: 93107 - protein, 9 aa, Homo Sapiens
ITQIEHEVS

SEQ ID NO: 93108 - protein, 9 aa, Homo Sapiens
KDVDGAYMT

SEQ ID NO: 93109 - protein, 9 aa, Homo Sapiens
KHAVSDPSI

SEQ ID NO: 93110 - protein, 9 aa, Homo Sapiens
KHDEYLILL

SEQ ID NO: 93111 - protein, 9 aa, Homo Sapiens
KHDTKLLIL

SEQ ID NO: 93112 - protein, 9 aa, Homo Sapiens
KHFEGTEFL

SEQ ID NO: 93113 - protein, 9 aa, Homo Sapiens
KHGDVITII

SEQ ID NO: 93114 - protein, 9 aa, Homo Sapiens
KHVEFDFLI

SEQ ID NO: 93115 - protein, 9 aa, Homo Sapiens
KLAPKDVKI

SEQ ID NO: 93116 - protein, 9 aa, Homo Sapiens
LHADPEPSV

SEQ ID NO: 93117 - protein, 9 aa, Homo Sapiens
LHAFPELYF

SEQ ID NO: 93118 - protein, 9 aa, Homo Sapiens
LHALPELYF

SEQ ID NO: 93119 - protein, 9 aa, Homo Sapiens
LHAQGDPAL

SEQ ID NO: 93120 - protein, 9 aa, Homo Sapiens
LHAQPIISI

SEQ ID NO: 93121 - protein, 9 aa, Homo Sapiens
LHATVMNTL

SEQ ID NO: 93122 - protein, 9 aa, Homo Sapiens
LHDDRGPVL

SEQ ID NO: 93123 - protein, 9 aa, Homo Sapiens
LHDERFEKF

SEQ ID NO: 93124 - protein, 9 aa, Homo Sapiens
LHDETLTYL

SEQ ID NO: 93125 - protein, 9 aa, Homo Sapiens
LHDHGVSSL

SEQ ID NO: 93126 - protein, 9 aa, Homo Sapiens
LHDKFVTKM

SEQ ID NO: 93127 - protein, 9 aa, Homo Sapiens
LHDQFQHQL

SEQ ID NO: 93128 - protein, 9 aa, Homo Sapiens
LHDSSDYLL

SEQ ID NO: 93129 - protein, 9 aa, Homo Sapiens
LHDTRTHFL

SEQ ID NO: 93130 - protein, 9 aa, Homo Sapiens
LHDTVTTLI

SEQ ID NO: 93131 - protein, 9 aa, Homo Sapiens
LHDVDLNTF

SEQ ID NO: 93132 - protein, 9 aa, Homo Sapiens
LHDVEHVLI

SEQ ID NO: 93133 - protein, 9 aa, Homo Sapiens
LHDVSDFLL

SEQ ID NO: 93134 - protein, 9 aa, Homo Sapiens
LHEAGGQIL

SEQ ID NO: 93135 - protein, 9 aa, Homo Sapiens
LHEDFVVEL

SEQ ID NO: 93136 - protein, 9 aa, Homo Sapiens
LHEDGGKLF

SEQ ID NO: 93137 - protein, 9 aa, Homo Sapiens
LHEEATMTI

SEQ ID NO: 93138 - protein, 9 aa, Homo Sapiens
LHENGCITL

SEQ ID NO: 93139 - protein, 9 aa, Homo Sapiens
LHFADDISI

SEQ ID NO: 93140 - protein, 9 aa, Homo Sapiens
LHHRELENL

SEQ ID NO: 93141 - protein, 9 aa, Homo Sapiens
LHIATEDNI

SEQ ID NO: 93142 - protein, 9 aa, Homo Sapiens
LHIGDIVSL

SEQ ID NO: 93143 - protein, 9 aa, Homo Sapiens
LHNAETSSW

SEQ ID NO: 93144 - protein, 9 aa, Homo Sapiens
LHNNLLTYL

SEQ ID NO: 93145 - protein, 9 aa, Homo Sapiens
LHSEDFLEL

SEQ ID NO: 93146 - protein, 9 aa, Homo Sapiens
LHSEEFLSF

SEQ ID NO: 93147 - protein, 9 aa, Homo Sapiens
LHSRVKLIL

SEQ ID NO: 93148 - protein, 9 aa, Homo Sapiens
LHTEECNVL

SEQ ID NO: 93149 - protein, 9 aa, Homo Sapiens
LHTSIGNSV

SEQ ID NO: 93150 - protein, 9 aa, Homo Sapiens
LHYFPEYQW

SEQ ID NO: 93151 - protein, 9 aa, Homo Sapiens
LLTTMGDRF

SEQ ID NO: 93152 - protein, 9 aa, Homo Sapiens
LPDGQVITI

SEQ ID NO: 93153 - protein, 9 aa, Homo Sapiens
LPIDDVLRI

SEQ ID NO: 93154 - protein, 9 aa, Homo Sapiens
LQDPGNHLI

SEQ ID NO: 93155 - protein, 9 aa, Homo Sapiens
LQHPDPIVI

SEQ ID NO: 93156 - protein, 9 aa, Homo Sapiens
LRAAGNESF

SEQ ID NO: 93157 - protein, 9 aa, Homo Sapiens
LTVGNNKTL

SEQ ID NO: 93158 - protein, 9 aa, Homo Sapiens
MHAGSSDLL

SEQ ID NO: 93159 - protein, 9 aa, Homo Sapiens
MHAPGMKKI

SEQ ID NO: 93160 - protein, 9 aa, Homo Sapiens
MHAQDPQML

SEQ ID NO: 93161 - protein, 9 aa, Homo Sapiens
MHDCVVKLL

SEQ ID NO: 93162 - protein, 9 aa, Homo Sapiens
MHDEKVDLW

SEQ ID NO: 93163 - protein, 9 aa, Homo Sapiens
MHDFNLISI

SEQ ID NO: 93164 - protein, 9 aa, Homo Sapiens
MHDHFNAEI

SEQ ID NO: 93165 - protein, 9 aa, Homo Sapiens
MHDKVFAYI

SEQ ID NO: 93166 - protein, 9 aa, Homo Sapiens
MHDYDGNNL

SEQ ID NO: 93167 - protein, 9 aa, Homo Sapiens
MHEENVYTV

SEQ ID NO: 93168 - protein, 9 aa, Homo Sapiens
MHEVGVVAF

SEQ ID NO: 93169 - protein, 9 aa, Homo Sapiens
MHFHETETF

SEQ ID NO: 93170 - protein, 9 aa, Homo Sapiens
MHGLEPQTI

SEQ ID NO: 93171 - protein, 9 aa, Homo Sapiens
MHGQPSPSL

SEQ ID NO: 93172 - protein, 9 aa, Homo Sapiens
MHHFIPDLL

SEQ ID NO: 93173 - protein, 9 aa, Homo Sapiens
MHHSLPETL

SEQ ID NO: 93174 - protein, 9 aa, Homo Sapiens
MHIDSHEAL

SEQ ID NO: 93175 - protein, 9 aa, Homo Sapiens
MHILDGCSI

SEQ ID NO: 93176 - protein, 9 aa, Homo Sapiens
MHLLGPWLL

SEQ ID NO: 93177 - protein, 9 aa, Homo Sapiens
MHLRQYELL

SEQ ID NO: 93178 - protein, 9 aa, Homo Sapiens
MHNEKVDLW

SEQ ID NO: 93179 - protein, 9 aa, Homo Sapiens
MHSAGTPGL

SEQ ID NO: 93180 - protein, 9 aa, Homo Sapiens
MHSDHTVGL

SEQ ID NO: 93181 - protein, 9 aa, Homo Sapiens
MHSDMIYNV

SEQ ID NO: 93182 - protein, 9 aa, Homo Sapiens
MHSGPVVAM

SEQ ID NO: 93183 - protein, 9 aa, Homo Sapiens
MHYKEAIRI

SEQ ID NO: 93184 - protein, 9 aa, Homo Sapiens
MHYPTALLF

SEQ ID NO: 93185 - protein, 9 aa, Homo Sapiens
MKDDFFIKI

SEQ ID NO: 93186 - protein, 9 aa, Homo Sapiens
MKIEEKITL

SEQ ID NO: 93187 - protein, 9 aa, Homo Sapiens
MLDNSFERL

SEQ ID NO: 93188 - protein, 9 aa, Homo Sapiens
MLDPLEVHL

SEQ ID NO: 93189 - protein, 9 aa, Homo Sapiens
MLVGIGDKI

SEQ ID NO: 93190 - protein, 9 aa, Homo Sapiens
MQALEKAYI

SEQ ID NO: 93191 - protein, 9 aa, Homo Sapiens
MQDESQYFF

SEQ ID NO: 93192 - protein, 9 aa, Homo Sapiens
MQDGSVQVI

SEQ ID NO: 93193 - protein, 9 aa, Homo Sapiens
MQDKSSYLL

SEQ ID NO: 93194 - protein, 9 aa, Homo Sapiens
MQDSRLYLI

SEQ ID NO: 93195 - protein, 9 aa, Homo Sapiens
MQEPSAHTF

SEQ ID NO: 93196 - protein, 9 aa, Homo Sapiens
MRDPTFVRL

SEQ ID NO: 93197 - protein, 9 aa, Homo Sapiens
MRLSLPLLL

SEQ ID NO: 93198 - protein, 9 aa, Homo Sapiens
MRMVLNESL

SEQ ID NO: 93199 - protein, 9 aa, Homo Sapiens
NHAAQLHTL

SEQ ID NO: 93200 - protein, 9 aa, Homo Sapiens
NHADIGFCL

SEQ ID NO: 93201 - protein, 9 aa, Homo Sapiens
NHAEAYNNL

SEQ ID NO: 93202 - protein, 9 aa, Homo Sapiens
NHAFHFHCI

SEQ ID NO: 93203 - protein, 9 aa, Homo Sapiens
NHALELLVI

SEQ ID NO: 93204 - protein, 9 aa, Homo Sapiens
NHALPLPGF

SEQ ID NO: 93205 - protein, 9 aa, Homo Sapiens
NHALPVYVF

SEQ ID NO: 93206 - protein, 9 aa, Homo Sapiens
NHASAKLDF

SEQ ID NO: 93207 - protein, 9 aa, Homo Sapiens
NHASMIQGI

SEQ ID NO: 93208 - protein, 9 aa, Homo Sapiens
NHCELLSRL

SEQ ID NO: 93209 - protein, 9 aa, Homo Sapiens
NHCMEVIRL

SEQ ID NO: 93210 - protein, 9 aa, Homo Sapiens
NHCSVSSEL

SEQ ID NO: 93211 - protein, 9 aa, Homo Sapiens
NHDDYTNQI

SEQ ID NO: 93212 - protein, 9 aa, Homo Sapiens
NHDEAIALL

SEQ ID NO: 93213 - protein, 9 aa, Homo Sapiens
NHDFQALAL

SEQ ID NO: 93214 - protein, 9 aa, Homo Sapiens
NHDFSPLEI

SEQ ID NO: 93215 - protein, 9 aa, Homo Sapiens
NHDFTPLEI

SEQ ID NO: 93216 - protein, 9 aa, Homo Sapiens
NHDIISMKL

SEQ ID NO: 93217 - protein, 9 aa, Homo Sapiens
NHDKLIPLL

SEQ ID NO: 93218 - protein, 9 aa, Homo Sapiens
NHDKVLQRL

SEQ ID NO: 93219 - protein, 9 aa, Homo Sapiens
NHDMTLTEF

SEQ ID NO: 93220 - protein, 9 aa, Homo Sapiens
NHDPNVEEF

SEQ ID NO: 93221 - protein, 9 aa, Homo Sapiens
NHDPQFEPI

SEQ ID NO: 93222 - protein, 9 aa, Homo Sapiens
NHDQHLLLL

SEQ ID NO: 93223 - protein, 9 aa, Homo Sapiens
NHDQKLLLI

SEQ ID NO: 93224 - protein, 9 aa, Homo Sapiens
NHDRPDVCI

SEQ ID NO: 93225 - protein, 9 aa, Homo Sapiens
NHDTGECRL

SEQ ID NO: 93226 - protein, 9 aa, Homo Sapiens
NHDTGEYVL

SEQ ID NO: 93227 - protein, 9 aa, Homo Sapiens
NHDVAQSEI

SEQ ID NO: 93228 - protein, 9 aa, Homo Sapiens
NHDVQVILF

SEQ ID NO: 93229 - protein, 9 aa, Homo Sapiens
NHEDKEWKF

SEQ ID NO: 93230 - protein, 9 aa, Homo Sapiens
NHEDPTPEI

SEQ ID NO: 93231 - protein, 9 aa, Homo Sapiens
NHENQKVQL

SEQ ID NO: 93232 - protein, 9 aa, Homo Sapiens
NHFDRSVVL

SEQ ID NO: 93233 - protein, 9 aa, Homo Sapiens
NHFIDLSQI

SEQ ID NO: 93234 - protein, 9 aa, Homo Sapiens
NHFMDNTTL

SEQ ID NO: 93235 - protein, 9 aa, Homo Sapiens
NHFPGSFQI

SEQ ID NO: 93236 - protein, 9 aa, Homo Sapiens
NHFQEDEQF

SEQ ID NO: 93237 - protein, 9 aa, Homo Sapiens
NHFSPCHFL

SEQ ID NO: 93238 - protein, 9 aa, Homo Sapiens
NHGAKEPTI

SEQ ID NO: 93239 - protein, 9 aa, Homo Sapiens
NHGVLKITI

SEQ ID NO: 93240 - protein, 9 aa, Homo Sapiens
NHHLQETSF

SEQ ID NO: 93241 - protein, 9 aa, Homo Sapiens
NHIGHTGYL

SEQ ID NO: 93242 - protein, 9 aa, Homo Sapiens
NHILPGQSI

SEQ ID NO: 93243 - protein, 9 aa, Homo Sapiens
NHINVMVKF

SEQ ID NO: 93244 - protein, 9 aa, Homo Sapiens
NHIQDLISL

SEQ ID NO: 93245 - protein, 9 aa, Homo Sapiens
NHISELVQL

SEQ ID NO: 93246 - protein, 9 aa, Homo Sapiens
NHLAAIEIF

SEQ ID NO: 93247 - protein, 9 aa, Homo Sapiens
NHLALIFKI

SEQ ID NO: 93248 - protein, 9 aa, Homo Sapiens
NHLDSHILL

SEQ ID NO: 93249 - protein, 9 aa, Homo Sapiens
NHLEDKINI

SEQ ID NO: 93250 - protein, 9 aa, Homo Sapiens
NHLEKFFTL

SEQ ID NO: 93251 - protein, 9 aa, Homo Sapiens
NHLSFAELL

SEQ ID NO: 93252 - protein, 9 aa, Homo Sapiens
NHMAVAFVL

SEQ ID NO: 93253 - protein, 9 aa, Homo Sapiens
NHMVQQDYF

SEQ ID NO: 93254 - protein, 9 aa, Homo Sapiens
NHNEIGELI

SEQ ID NO: 93255 - protein, 9 aa, Homo Sapiens
NHNFEIDFL

SEQ ID NO: 93256 - protein, 9 aa, Homo Sapiens
NHNFSQQCL

SEQ ID NO: 93257 - protein, 9 aa, Homo Sapiens
NHNSGIDLL

SEQ ID NO: 93258 - protein, 9 aa, Homo Sapiens
NHQEVVELL

SEQ ID NO: 93259 - protein, 9 aa, Homo Sapiens
NHQGGSVQL

SEQ ID NO: 93260 - protein, 9 aa, Homo Sapiens
NHQKDIQVL

SEQ ID NO: 93261 - protein, 9 aa, Homo Sapiens
NHSADFETV

SEQ ID NO: 93262 - protein, 9 aa, Homo Sapiens
NHSELAILL

SEQ ID NO: 93263 - protein, 9 aa, Homo Sapiens
NHSFALTLF

SEQ ID NO: 93264 - protein, 9 aa, Homo Sapiens
NHSGISVNI

SEQ ID NO: 93265 - protein, 9 aa, Homo Sapiens
NHSHDQLVL

SEQ ID NO: 93266 - protein, 9 aa, Homo Sapiens
NHSIIEEEF

SEQ ID NO: 93267 - protein, 9 aa, Homo Sapiens
NHSNQFTQL

SEQ ID NO: 93268 - protein, 9 aa, Homo Sapiens
NHSYSDPLL

SEQ ID NO: 93269 - protein, 9 aa, Homo Sapiens
NHTEDYVLL

SEQ ID NO: 93270 - protein, 9 aa, Homo Sapiens
NHTIYINNL

SEQ ID NO: 93271 - protein, 9 aa, Homo Sapiens
NHTSIAELI

SEQ ID NO: 93272 - protein, 9 aa, Homo Sapiens
NHTSISSLF

SEQ ID NO: 93273 - protein, 9 aa, Homo Sapiens
NHVASDISL

SEQ ID NO: 93274 - protein, 9 aa, Homo Sapiens
NHVDPEEEI

SEQ ID NO: 93275 - protein, 9 aa, Homo Sapiens
NHVEVAELL

SEQ ID NO: 93276 - protein, 9 aa, Homo Sapiens
NHVILTDTF

SEQ ID NO: 93277 - protein, 9 aa, Homo Sapiens
NHVPSGPSI

SEQ ID NO: 93278 - protein, 9 aa, Homo Sapiens
NHVPVITTL

SEQ ID NO: 93279 - protein, 9 aa, Homo Sapiens
NHYQKQLEI

SEQ ID NO: 93280 - protein, 9 aa, Homo Sapiens
NKTAIGDYL

SEQ ID NO: 93281 - protein, 9 aa, Homo Sapiens
NKTVIGDYL

SEQ ID NO: 93282 - protein, 9 aa, Homo Sapiens
NLVQVGDSL

SEQ ID NO: 93283 - protein, 9 aa, Homo Sapiens
NQDDLTHKL

SEQ ID NO: 93284 - protein, 9 aa, Homo Sapiens
NQDLTFQHI

SEQ ID NO: 93285 - protein, 9 aa, Homo Sapiens
NQDNLQLFL

SEQ ID NO: 93286 - protein, 9 aa, Homo Sapiens
NQSELAVLL

SEQ ID NO: 93287 - protein, 9 aa, Homo Sapiens
NRAAAFEQL

SEQ ID NO: 93288 - protein, 9 aa, Homo Sapiens
NRAHVQELL

SEQ ID NO: 93289 - protein, 9 aa, Homo Sapiens
NRCVKGDSL

SEQ ID NO: 93290 - protein, 9 aa, Homo Sapiens
NRDDSNLYI

SEQ ID NO: 93291 - protein, 9 aa, Homo Sapiens
NRDFILYRF

SEQ ID NO: 93292 - protein, 9 aa, Homo Sapiens
NRHYYSITI

SEQ ID NO: 93293 - protein, 9 aa, Homo Sapiens
NRIAIYELL

SEQ ID NO: 93294 - protein, 9 aa, Homo Sapiens
NRLGGEEKF

SEQ ID NO: 93295 - protein, 9 aa, Homo Sapiens
NRTDVVLIL

SEQ ID NO: 93296 - protein, 9 aa, Homo Sapiens
PANRDLHIP

SEQ ID NO: 93297 - protein, 9 aa, Homo Sapiens
QEYPDLIHI

SEQ ID NO: 93298 - protein, 9 aa, Homo Sapiens
QHAASLLKL

SEQ ID NO: 93299 - protein, 9 aa, Homo Sapiens
QHAAVSEKL

SEQ ID NO: 93300 - protein, 9 aa, Homo Sapiens
QHADPPVQI

SEQ ID NO: 93301 - protein, 9 aa, Homo Sapiens
QHADVGKEL

SEQ ID NO: 93302 - protein, 9 aa, Homo Sapiens
QHAIVFQHI

SEQ ID NO: 93303 - protein, 9 aa, Homo Sapiens
QHAKYTCSF

SEQ ID NO: 93304 - protein, 9 aa, Homo Sapiens
QHALERETM

SEQ ID NO: 93305 - protein, 9 aa, Homo Sapiens
QHALLQEEL

SEQ ID NO: 93306 - protein, 9 aa, Homo Sapiens
QHAPANDYL

SEQ ID NO: 93307 - protein, 9 aa, Homo Sapiens
QHAVEAISL

SEQ ID NO: 93308 - protein, 9 aa, Homo Sapiens
QHAWAQLTF

SEQ ID NO: 93309 - protein, 9 aa, Homo Sapiens
QHCEQWIEF

SEQ ID NO: 93310 - protein, 9 aa, Homo Sapiens
QHCLALLNL

SEQ ID NO: 93311 - protein, 9 aa, Homo Sapiens
QHDAACRVI

SEQ ID NO: 93312 - protein, 9 aa, Homo Sapiens
QHDAAQLYL

SEQ ID NO: 93313 - protein, 9 aa, Homo Sapiens
QHDAPVKTI

SEQ ID NO: 93314 - protein, 9 aa, Homo Sapiens
QHDEVETYF

SEQ ID NO: 93315 - protein, 9 aa, Homo Sapiens
QHDFQAPYL

SEQ ID NO: 93316 - protein, 9 aa, Homo Sapiens
QHDFQKVKL

SEQ ID NO: 93317 - protein, 9 aa, Homo Sapiens
QHDFTSQIF

SEQ ID NO: 93318 - protein, 9 aa, Homo Sapiens
QHDGPTKNL

SEQ ID NO: 93319 - protein, 9 aa, Homo Sapiens
QHDIHNAKL

SEQ ID NO: 93320 - protein, 9 aa, Homo Sapiens
QHDLALLRL

SEQ ID NO: 93321 - protein, 9 aa, Homo Sapiens
QHDLFDSGF

SEQ ID NO: 93322 - protein, 9 aa, Homo Sapiens
QHDLFFDTL

SEQ ID NO: 93323 - protein, 9 aa, Homo Sapiens
QHDNIIAYY

SEQ ID NO: 93324 - protein, 9 aa, Homo Sapiens
QHDPGKMFI

SEQ ID NO: 93325 - protein, 9 aa, Homo Sapiens
QHDPLTTDL

SEQ ID NO: 93326 - protein, 9 aa, Homo Sapiens
QHDPYITSI

SEQ ID NO: 93327 - protein, 9 aa, Homo Sapiens
QHDTIGYLL

SEQ ID NO: 93328 - protein, 9 aa, Homo Sapiens
QHDVLFSYL

SEQ ID NO: 93329 - protein, 9 aa, Homo Sapiens
QHDVLKLEF

SEQ ID NO: 93330 - protein, 9 aa, Homo Sapiens
QHDVQTLLL

SEQ ID NO: 93331 - protein, 9 aa, Homo Sapiens
QHDVSQTLL

SEQ ID NO: 93332 - protein, 9 aa, Homo Sapiens
QHEAAVPQL

SEQ ID NO: 93333 - protein, 9 aa, Homo Sapiens
QHEAFIRSI

SEQ ID NO: 93334 - protein, 9 aa, Homo Sapiens
QHEEFVTSL

SEQ ID NO: 93335 - protein, 9 aa, Homo Sapiens
QHEEPESFF

SEQ ID NO: 93336 - protein, 9 aa, Homo Sapiens
QHEFPGPAF

SEQ ID NO: 93337 - protein, 9 aa, Homo Sapiens
QHEGGVQEL

SEQ ID NO: 93338 - protein, 9 aa, Homo Sapiens
QHEKAALYF

SEQ ID NO: 93339 - protein, 9 aa, Homo Sapiens
QHEKLIVRI

SEQ ID NO: 93340 - protein, 9 aa, Homo Sapiens
QHELGNVFL

SEQ ID NO: 93341 - protein, 9 aa, Homo Sapiens
QHENSSLLL

SEQ ID NO: 93342 - protein, 9 aa, Homo Sapiens
QHEQPGQGI

SEQ ID NO: 93343 - protein, 9 aa, Homo Sapiens
QHETSSPAL

SEQ ID NO: 93344 - protein, 9 aa, Homo Sapiens
QHFDAAYIF

SEQ ID NO: 93345 - protein, 9 aa, Homo Sapiens
QHFDSVMQL

SEQ ID NO: 93346 - protein, 9 aa, Homo Sapiens
QHFEGLNML

SEQ ID NO: 93347 - protein, 9 aa, Homo Sapiens
QHFGMVELL

SEQ ID NO: 93348 - protein, 9 aa, Homo Sapiens
QHFNGLLEI

SEQ ID NO: 93349 - protein, 9 aa, Homo Sapiens
QHFPATPLL

SEQ ID NO: 93350 - protein, 9 aa, Homo Sapiens
QHFVEKVVF

SEQ ID NO: 93351 - protein, 9 aa, Homo Sapiens
QHFYICENF

SEQ ID NO: 93352 - protein, 9 aa, Homo Sapiens
QHGDTFTVL

SEQ ID NO: 93353 - protein, 9 aa, Homo Sapiens
QHGDVVSAI

SEQ ID NO: 93354 - protein, 9 aa, Homo Sapiens
QHGPLLLTL

SEQ ID NO: 93355 - protein, 9 aa, Homo Sapiens
QHHAKPNIF

SEQ ID NO: 93356 - protein, 9 aa, Homo Sapiens
QHHHLPQHL

SEQ ID NO: 93357 - protein, 9 aa, Homo Sapiens
QHIAQDSSL

SEQ ID NO: 93358 - protein, 9 aa, Homo Sapiens
QHIDAVARF

SEQ ID NO: 93359 - protein, 9 aa, Homo Sapiens
QHIDFVTAI

SEQ ID NO: 93360 - protein, 9 aa, Homo Sapiens
QHIDNITQI

SEQ ID NO: 93361 - protein, 9 aa, Homo Sapiens
QHIGKPSTI

SEQ ID NO: 93362 - protein, 9 aa, Homo Sapiens
QHIKSDVHL

SEQ ID NO: 93363 - protein, 9 aa, Homo Sapiens
QHILNPAFL

SEQ ID NO: 93364 - protein, 9 aa, Homo Sapiens
QHILSVQQF

SEQ ID NO: 93365 - protein, 9 aa, Homo Sapiens
QHIPTPLFV

SEQ ID NO: 93366 - protein, 9 aa, Homo Sapiens
QHISDSPII

SEQ ID NO: 93367 - protein, 9 aa, Homo Sapiens
QHLIDTNKI

SEQ ID NO: 93368 - protein, 9 aa, Homo Sapiens
QHLIIFDYI

SEQ ID NO: 93369 - protein, 9 aa, Homo Sapiens
QHLPYIQIL

SEQ ID NO: 93370 - protein, 9 aa, Homo Sapiens
QHLQQSNEI

SEQ ID NO: 93371 - protein, 9 aa, Homo Sapiens
QHLSDYSQL

SEQ ID NO: 93372 - protein, 9 aa, Homo Sapiens
QHLVQQLVL

SEQ ID NO: 93373 - protein, 9 aa, Homo Sapiens
QHNIPFPCL

SEQ ID NO: 93374 - protein, 9 aa, Homo Sapiens
QHNPVPDFI

SEQ ID NO: 93375 - protein, 9 aa, Homo Sapiens
QHNQSVNYF

SEQ ID NO: 93376 - protein, 9 aa, Homo Sapiens
QHNYPGIKL

SEQ ID NO: 93377 - protein, 9 aa, Homo Sapiens
QHQAWLQSI

SEQ ID NO: 93378 - protein, 9 aa, Homo Sapiens
QHQDRVQNL

SEQ ID NO: 93379 - protein, 9 aa, Homo Sapiens
QHQEFSFLL

SEQ ID NO: 93380 - protein, 9 aa, Homo Sapiens
QHQESIIQL

SEQ ID NO: 93381 - protein, 9 aa, Homo Sapiens
QHQETINTL

SEQ ID NO: 93382 - protein, 9 aa, Homo Sapiens
QHQETPVYL

SEQ ID NO: 93383 - protein, 9 aa, Homo Sapiens
QHQFRDQRW

SEQ ID NO: 93384 - protein, 9 aa, Homo Sapiens
QHQGAVELL

SEQ ID NO: 93385 - protein, 9 aa, Homo Sapiens
QHQLDTILF

SEQ ID NO: 93386 - protein, 9 aa, Homo Sapiens
QHQLQQQQL

SEQ ID NO: 93387 - protein, 9 aa, Homo Sapiens
QHQMDVAFL

SEQ ID NO: 93388 - protein, 9 aa, Homo Sapiens
QHQSGIVQL

SEQ ID NO: 93389 - protein, 9 aa, Homo Sapiens
QHQSVPQCL

SEQ ID NO: 93390 - protein, 9 aa, Homo Sapiens
QHSAAGATI

SEQ ID NO: 93391 - protein, 9 aa, Homo Sapiens
QHSDKIIRL

SEQ ID NO: 93392 - protein, 9 aa, Homo Sapiens
QHSEEERTL

SEQ ID NO: 93393 - protein, 9 aa, Homo Sapiens
QHSGSYEVI

SEQ ID NO: 93394 - protein, 9 aa, Homo Sapiens
QHSILACKI

SEQ ID NO: 93395 - protein, 9 aa, Homo Sapiens
QHSIPVFIF

SEQ ID NO: 93396 - protein, 9 aa, Homo Sapiens
QHSLGGHRL

SEQ ID NO: 93397 - protein, 9 aa, Homo Sapiens
QHSLPLLLI

SEQ ID NO: 93398 - protein, 9 aa, Homo Sapiens
QHSLTQQRL

SEQ ID NO: 93399 - protein, 9 aa, Homo Sapiens
QHSPDLMSF

SEQ ID NO: 93400 - protein, 9 aa, Homo Sapiens
QHSQLGQDL

SEQ ID NO: 93401 - protein, 9 aa, Homo Sapiens
QHSSFFIFL

SEQ ID NO: 93402 - protein, 9 aa, Homo Sapiens
QHSSLSTRF

SEQ ID NO: 93403 - protein, 9 aa, Homo Sapiens
QHSTAQLNL

SEQ ID NO: 93404 - protein, 9 aa, Homo Sapiens
QHSVQVDQL

SEQ ID NO: 93405 - protein, 9 aa, Homo Sapiens
QHTDTVVNF

SEQ ID NO: 93406 - protein, 9 aa, Homo Sapiens
QHTPTSITL

SEQ ID NO: 93407 - protein, 9 aa, Homo Sapiens
QHTSLPLTF

SEQ ID NO: 93408 - protein, 9 aa, Homo Sapiens
QHVTEAFQF

SEQ ID NO: 93409 - protein, 9 aa, Homo Sapiens
QHVTISQLF

SEQ ID NO: 93410 - protein, 9 aa, Homo Sapiens
QQDAQEFFL

SEQ ID NO: 93411 - protein, 9 aa, Homo Sapiens
QQDQVDRNI

SEQ ID NO: 93412 - protein, 9 aa, Homo Sapiens
QQSNVILLL

SEQ ID NO: 93413 - protein, 9 aa, Homo Sapiens
QQSVIGDYL

SEQ ID NO: 93414 - protein, 9 aa, Homo Sapiens
QRAHVQEFF

SEQ ID NO: 93415 - protein, 9 aa, Homo Sapiens
QRDGYQQNF

SEQ ID NO: 93416 - protein, 9 aa, Homo Sapiens
QRDNTVHSF

SEQ ID NO: 93417 - protein, 9 aa, Homo Sapiens
QRIIQQETL

SEQ ID NO: 93418 - protein, 9 aa, Homo Sapiens
QRISSFETF

SEQ ID NO: 93419 - protein, 9 aa, Homo Sapiens
QRLAGNEQV

SEQ ID NO: 93420 - protein, 9 aa, Homo Sapiens
QRLDLQIKL

SEQ ID NO: 93421 - protein, 9 aa, Homo Sapiens
QRTPGEEKI

SEQ ID NO: 93422 - protein, 9 aa, Homo Sapiens
QRVPINESF

SEQ ID NO: 93423 - protein, 9 aa, Homo Sapiens
QRYADFTLL

SEQ ID NO: 93424 - protein, 9 aa, Homo Sapiens
RHADLEIRL

SEQ ID NO: 93425 - protein, 9 aa, Homo Sapiens
RHAEPGFSL

SEQ ID NO: 93426 - protein, 9 aa, Homo Sapiens
RHAVVMELI

SEQ ID NO: 93427 - protein, 9 aa, Homo Sapiens
RHCDLQVRI

SEQ ID NO: 93428 - protein, 9 aa, Homo Sapiens
RHDDRPQVL

SEQ ID NO: 93429 - protein, 9 aa, Homo Sapiens
RHDDYLVML

SEQ ID NO: 93430 - protein, 9 aa, Homo Sapiens
RHDIAFVEF

SEQ ID NO: 93431 - protein, 9 aa, Homo Sapiens
RHDKFLDTL

SEQ ID NO: 93432 - protein, 9 aa, Homo Sapiens
RHDLEDNLL

SEQ ID NO: 93433 - protein, 9 aa, Homo Sapiens
RHDNKVTWL

SEQ ID NO: 93434 - protein, 9 aa, Homo Sapiens
RHDPQTTNL

SEQ ID NO: 93435 - protein, 9 aa, Homo Sapiens
RHDPYINRI

SEQ ID NO: 93436 - protein, 9 aa, Homo Sapiens
RHDSAQLVL

SEQ ID NO: 93437 - protein, 9 aa, Homo Sapiens
RHDSYGNQF

SEQ ID NO: 93438 - protein, 9 aa, Homo Sapiens
RHDVIVTII

SEQ ID NO: 93439 - protein, 9 aa, Homo Sapiens
RHFEELETI

SEQ ID NO: 93440 - protein, 9 aa, Homo Sapiens
RHLDFFEML

SEQ ID NO: 93441 - protein, 9 aa, Homo Sapiens
RHLDSYEFL

SEQ ID NO: 93442 - protein, 9 aa, Homo Sapiens
RHMEQHVSF

SEQ ID NO: 93443 - protein, 9 aa, Homo Sapiens
RHMHVQLQL

SEQ ID NO: 93444 - protein, 9 aa, Homo Sapiens
RHMQIVHKI

SEQ ID NO: 93445 - protein, 9 aa, Homo Sapiens
RHSDYPLSL

SEQ ID NO: 93446 - protein, 9 aa, Homo Sapiens
RHSGLIIHL

SEQ ID NO: 93447 - protein, 9 aa, Homo Sapiens
RHSNLVQLL

SEQ ID NO: 93448 - protein, 9 aa, Homo Sapiens
RHVDAHATL

SEQ ID NO: 93449 - protein, 9 aa, Homo Sapiens
RHVDFPLML

SEQ ID NO: 93450 - protein, 9 aa, Homo Sapiens
RLVDTGDKF

SEQ ID NO: 93451 - protein, 9 aa, Homo Sapiens
RMDELFVLI

SEQ ID NO: 93452 - protein, 9 aa, Homo Sapiens
RPAQVGDSF

SEQ ID NO: 93453 - protein, 9 aa, Homo Sapiens
RQIEREHLI

SEQ ID NO: 93454 - protein, 9 aa, Homo Sapiens
SGHVELYTI

SEQ ID NO: 93455 - protein, 9 aa, Homo Sapiens
SHADVVNLL

SEQ ID NO: 93456 - protein, 9 aa, Homo Sapiens
SHAEIKAII

SEQ ID NO: 93457 - protein, 9 aa, Homo Sapiens
SHAENILQI

SEQ ID NO: 93458 - protein, 9 aa, Homo Sapiens
SHAIEALIL

SEQ ID NO: 93459 - protein, 9 aa, Homo Sapiens
SHAIFTITI

SEQ ID NO: 93460 - protein, 9 aa, Homo Sapiens
SHANSAVVL

SEQ ID NO: 93461 - protein, 9 aa, Homo Sapiens
SHAPQDVSL

SEQ ID NO: 93462 - protein, 9 aa, Homo Sapiens
SHAPSFNFL

SEQ ID NO: 93463 - protein, 9 aa, Homo Sapiens
SHAPYLLVF

SEQ ID NO: 93464 - protein, 9 aa, Homo Sapiens
SHASGTYLI

SEQ ID NO: 93465 - protein, 9 aa, Homo Sapiens
SHASKDVAI

SEQ ID NO: 93466 - protein, 9 aa, Homo Sapiens
SHAVFQIYL

SEQ ID NO: 93467 - protein, 9 aa, Homo Sapiens
SHAVGPQEI

SEQ ID NO: 93468 - protein, 9 aa, Homo Sapiens
SHAVQHPVL

SEQ ID NO: 93469 - protein, 9 aa, Homo Sapiens
SHCDETYTL

SEQ ID NO: 93470 - protein, 9 aa, Homo Sapiens
SHCDLSLKI

SEQ ID NO: 93471 - protein, 9 aa, Homo Sapiens
SHCEIAVFI

SEQ ID NO: 93472 - protein, 9 aa, Homo Sapiens
SHCQLVTLI

SEQ ID NO: 93473 - protein, 9 aa, Homo Sapiens
SHDAPENTL

SEQ ID NO: 93474 - protein, 9 aa, Homo Sapiens
SHDDGNIDL

SEQ ID NO: 93475 - protein, 9 aa, Homo Sapiens
SHDDIVTEF

SEQ ID NO: 93476 - protein, 9 aa, Homo Sapiens
SHDDIVTRM

SEQ ID NO: 93477 - protein, 9 aa, Homo Sapiens
SHDEINNYL

SEQ ID NO: 93478 - protein, 9 aa, Homo Sapiens
SHDERFIRL

SEQ ID NO: 93479 - protein, 9 aa, Homo Sapiens
SHDEVFVVL

SEQ ID NO: 93480 - protein, 9 aa, Homo Sapiens
SHDFLEIRF

SEQ ID NO: 93481 - protein, 9 aa, Homo Sapiens
SHDFLETRF

SEQ ID NO: 93482 - protein, 9 aa, Homo Sapiens
SHDFYSHEL

SEQ ID NO: 93483 - protein, 9 aa, Homo Sapiens
SHDGHINYW

SEQ ID NO: 93484 - protein, 9 aa, Homo Sapiens
SHDHGYTTL

SEQ ID NO: 93485 - protein, 9 aa, Homo Sapiens
SHDHLTLFL

SEQ ID NO: 93486 - protein, 9 aa, Homo Sapiens
SHDLMLLRL

SEQ ID NO: 93487 - protein, 9 aa, Homo Sapiens
SHDNFIYLY

SEQ ID NO: 93488 - protein, 9 aa, Homo Sapiens
SHDNIICGI

SEQ ID NO: 93489 - protein, 9 aa, Homo Sapiens
SHDNLVYVY

SEQ ID NO: 93490 - protein, 9 aa, Homo Sapiens
SHDNVIYIY

SEQ ID NO: 93491 - protein, 9 aa, Homo Sapiens
SHDQHAYAL

SEQ ID NO: 93492 - protein, 9 aa, Homo Sapiens
SHDSIKMEI

SEQ ID NO: 93493 - protein, 9 aa, Homo Sapiens
SHDTMTYCL

SEQ ID NO: 93494 - protein, 9 aa, Homo Sapiens
SHDYSLYSL

SEQ ID NO: 93495 - protein, 9 aa, Homo Sapiens
SHEAPIPTF

SEQ ID NO: 93496 - protein, 9 aa, Homo Sapiens
SHEDYRVFI

SEQ ID NO: 93497 - protein, 9 aa, Homo Sapiens
SHEEVVQTL

SEQ ID NO: 93498 - protein, 9 aa, Homo Sapiens
SHEGETAYI

SEQ ID NO: 93499 - protein, 9 aa, Homo Sapiens
SHEGETSYI

SEQ ID NO: 93500 - protein, 9 aa, Homo Sapiens
SHEGHVYGF

SEQ ID NO: 93501 - protein, 9 aa, Homo Sapiens
SHEGKPLKL

SEQ ID NO: 93502 - protein, 9 aa, Homo Sapiens
SHELENHQI

SEQ ID NO: 93503 - protein, 9 aa, Homo Sapiens
SHEPKSPSL

SEQ ID NO: 93504 - protein, 9 aa, Homo Sapiens
SHEQIILLL

SEQ ID NO: 93505 - protein, 9 aa, Homo Sapiens
SHETSLYYL

SEQ ID NO: 93506 - protein, 9 aa, Homo Sapiens
SHETVTIEL

SEQ ID NO: 93507 - protein, 9 aa, Homo Sapiens
SHEVTVVLF

SEQ ID NO: 93508 - protein, 9 aa, Homo Sapiens
SHFQVAHTI

SEQ ID NO: 93509 - protein, 9 aa, Homo Sapiens
SHFTEPENI

SEQ ID NO: 93510 - protein, 9 aa, Homo Sapiens
SHFVEPVYL

SEQ ID NO: 93511 - protein, 9 aa, Homo Sapiens
SHFVSDVVI

SEQ ID NO: 93512 - protein, 9 aa, Homo Sapiens
SHGELQYYL

SEQ ID NO: 93513 - protein, 9 aa, Homo Sapiens
SHGPPTHRL

SEQ ID NO: 93514 - protein, 9 aa, Homo Sapiens
SHGVPLPNW

SEQ ID NO: 93515 - protein, 9 aa, Homo Sapiens
SHHLVISHL

SEQ ID NO: 93516 - protein, 9 aa, Homo Sapiens
SHHPGQYNL

SEQ ID NO: 93517 - protein, 9 aa, Homo Sapiens
SHHQIFVFI

SEQ ID NO: 93518 - protein, 9 aa, Homo Sapiens
SHHSMVSML

SEQ ID NO: 93519 - protein, 9 aa, Homo Sapiens
SHIDQREKI

SEQ ID NO: 93520 - protein, 9 aa, Homo Sapiens
SHIGDAVVI

SEQ ID NO: 93521 - protein, 9 aa, Homo Sapiens
SHIIGDEEI

SEQ ID NO: 93522 - protein, 9 aa, Homo Sapiens
SHIITGNKI

SEQ ID NO: 93523 - protein, 9 aa, Homo Sapiens
SHILEAINI

SEQ ID NO: 93524 - protein, 9 aa, Homo Sapiens
SHINSNYKL

SEQ ID NO: 93525 - protein, 9 aa, Homo Sapiens
SHINTVFVL

SEQ ID NO: 93526 - protein, 9 aa, Homo Sapiens
SHIPEASFL

SEQ ID NO: 93527 - protein, 9 aa, Homo Sapiens
SHIPLIIQF

SEQ ID NO: 93528 - protein, 9 aa, Homo Sapiens
SHIQDDMHL

SEQ ID NO: 93529 - protein, 9 aa, Homo Sapiens
SHIQGAVHI

SEQ ID NO: 93530 - protein, 9 aa, Homo Sapiens
SHIRGDINI

SEQ ID NO: 93531 - protein, 9 aa, Homo Sapiens
SHISSSESI

SEQ ID NO: 93532 - protein, 9 aa, Homo Sapiens
SHITPTQGF

SEQ ID NO: 93533 - protein, 9 aa, Homo Sapiens
SHKGEEPTI

SEQ ID NO: 93534 - protein, 9 aa, Homo Sapiens
SHLDYDITL

SEQ ID NO: 93535 - protein, 9 aa, Homo Sapiens
SHLEKAWLI

SEQ ID NO: 93536 - protein, 9 aa, Homo Sapiens
SHLGEPHKF

SEQ ID NO: 93537 - protein, 9 aa, Homo Sapiens
SHLGQEVTL

SEQ ID NO: 93538 - protein, 9 aa, Homo Sapiens
SHLNLLLGF

SEQ ID NO: 93539 - protein, 9 aa, Homo Sapiens
SHLPFDCVL

SEQ ID NO: 93540 - protein, 9 aa, Homo Sapiens
SHLPLVEEL

SEQ ID NO: 93541 - protein, 9 aa, Homo Sapiens
SHLSDQLTL

SEQ ID NO: 93542 - protein, 9 aa, Homo Sapiens
SHLVEHVRI

SEQ ID NO: 93543 - protein, 9 aa, Homo Sapiens
SHMEPQVCL

SEQ ID NO: 93544 - protein, 9 aa, Homo Sapiens
SHMETTMKL

SEQ ID NO: 93545 - protein, 9 aa, Homo Sapiens
SHNRFEHSL

SEQ ID NO: 93546 - protein, 9 aa, Homo Sapiens
SHNSSFELI

SEQ ID NO: 93547 - protein, 9 aa, Homo Sapiens
SHQDILSTI

SEQ ID NO: 93548 - protein, 9 aa, Homo Sapiens
SHQEAISKI

SEQ ID NO: 93549 - protein, 9 aa, Homo Sapiens
SHQEILILL

SEQ ID NO: 93550 - protein, 9 aa, Homo Sapiens
SHQGDYAVL

SEQ ID NO: 93551 - protein, 9 aa, Homo Sapiens
SHQLDFNVL

SEQ ID NO: 93552 - protein, 9 aa, Homo Sapiens
SHQNFALFF

SEQ ID NO: 93553 - protein, 9 aa, Homo Sapiens
SHQQYFYKI

SEQ ID NO: 93554 - protein, 9 aa, Homo Sapiens
SHSDTIQAI

SEQ ID NO: 93555 - protein, 9 aa, Homo Sapiens
SHSEAVAML

SEQ ID NO: 93556 - protein, 9 aa, Homo Sapiens
SHSELIHNL

SEQ ID NO: 93557 - protein, 9 aa, Homo Sapiens
SHSELKCDI

SEQ ID NO: 93558 - protein, 9 aa, Homo Sapiens
SHSFVVNIL

SEQ ID NO: 93559 - protein, 9 aa, Homo Sapiens
SHSGITNKL

SEQ ID NO: 93560 - protein, 9 aa, Homo Sapiens
SHSGLSIFI

SEQ ID NO: 93561 - protein, 9 aa, Homo Sapiens
SHSHVGYTL

SEQ ID NO: 93562 - protein, 9 aa, Homo Sapiens
SHSQLMQLI

SEQ ID NO: 93563 - protein, 9 aa, Homo Sapiens
SHSSDFIEL

SEQ ID NO: 93564 - protein, 9 aa, Homo Sapiens
SHSSDLQGL

SEQ ID NO: 93565 - protein, 9 aa, Homo Sapiens
SHSSFQASL

SEQ ID NO: 93566 - protein, 9 aa, Homo Sapiens
SHSSIIHRL

SEQ ID NO: 93567 - protein, 9 aa, Homo Sapiens
SHSSSFLSL

SEQ ID NO: 93568 - protein, 9 aa, Homo Sapiens
SHSSSVQTL

SEQ ID NO: 93569 - protein, 9 aa, Homo Sapiens
SHSSVILKM

SEQ ID NO: 93570 - protein, 9 aa, Homo Sapiens
SHSTPSSSI

SEQ ID NO: 93571 - protein, 9 aa, Homo Sapiens
SHSVFQLQI

SEQ ID NO: 93572 - protein, 9 aa, Homo Sapiens
SHSVFSVTI

SEQ ID NO: 93573 - protein, 9 aa, Homo Sapiens
SHSVLNLLF

SEQ ID NO: 93574 - protein, 9 aa, Homo Sapiens
SHSVPDTAF

SEQ ID NO: 93575 - protein, 9 aa, Homo Sapiens
SHTAPQVLF

SEQ ID NO: 93576 - protein, 9 aa, Homo Sapiens
SHTDVVPVF

SEQ ID NO: 93577 - protein, 9 aa, Homo Sapiens
SHTHVSVVI

SEQ ID NO: 93578 - protein, 9 aa, Homo Sapiens
SHTPGEHQI

SEQ ID NO: 93579 - protein, 9 aa, Homo Sapiens
SHTPWIVII

SEQ ID NO: 93580 - protein, 9 aa, Homo Sapiens
SHTSVGNIL

SEQ ID NO: 93581 - protein, 9 aa, Homo Sapiens
SHTSVPLLL

SEQ ID NO: 93582 - protein, 9 aa, Homo Sapiens
SHVEEGNVV

SEQ ID NO: 93583 - protein, 9 aa, Homo Sapiens
SHVHFDEKL

SEQ ID NO: 93584 - protein, 9 aa, Homo Sapiens
SHVQIPVML

SEQ ID NO: 93585 - protein, 9 aa, Homo Sapiens
SHVSGTTTL

SEQ ID NO: 93586 - protein, 9 aa, Homo Sapiens
SHWPFFEAF

SEQ ID NO: 93587 - protein, 9 aa, Homo Sapiens
SHYEKEYIL

SEQ ID NO: 93588 - protein, 9 aa, Homo Sapiens
SHYLFSEEI

SEQ ID NO: 93589 - protein, 9 aa, Homo Sapiens
SHYPFFSTF

SEQ ID NO: 93590 - protein, 9 aa, Homo Sapiens
SHYTTPMVL

SEQ ID NO: 93591 - protein, 9 aa, Homo Sapiens
SLIDADPYL

SEQ ID NO: 93592 - protein, 9 aa, Homo Sapiens
SQCPHIVRI

SEQ ID NO: 93593 - protein, 9 aa, Homo Sapiens
SQDPGTHVV

SEQ ID NO: 93594 - protein, 9 aa, Homo Sapiens
SQDPPEKSI

SEQ ID NO: 93595 - protein, 9 aa, Homo Sapiens
SQDTGKYCF

SEQ ID NO: 93596 - protein, 9 aa, Homo Sapiens
SQIADVARF

SEQ ID NO: 93597 - protein, 9 aa, Homo Sapiens
SQYPFPVTL

SEQ ID NO: 93598 - protein, 9 aa, Homo Sapiens
SRDPGHFLI

SEQ ID NO: 93599 - protein, 9 aa, Homo Sapiens
SRDPVQLNL

SEQ ID NO: 93600 - protein, 9 aa, Homo Sapiens
SRDRLIHVL

SEQ ID NO: 93601 - protein, 9 aa, Homo Sapiens
SREPSQVIF

SEQ ID NO: 93602 - protein, 9 aa, Homo Sapiens
SRFEKEFSF

SEQ ID NO: 93603 - protein, 9 aa, Homo Sapiens
SRFLANEVL

SEQ ID NO: 93604 - protein, 9 aa, Homo Sapiens
SYLDKVQAL

SEQ ID NO: 93605 - protein, 9 aa, Homo Sapiens
TEDGNILQL

SEQ ID NO: 93606 - protein, 9 aa, Homo Sapiens
TEIEDSHTL

SEQ ID NO: 93607 - protein, 9 aa, Homo Sapiens
THAAPCMLF

SEQ ID NO: 93608 - protein, 9 aa, Homo Sapiens
THAAQQILL

SEQ ID NO: 93609 - protein, 9 aa, Homo Sapiens
THAAQQLKL

SEQ ID NO: 93610 - protein, 9 aa, Homo Sapiens
THADYVLEM

SEQ ID NO: 93611 - protein, 9 aa, Homo Sapiens
THAEHIETI

SEQ ID NO: 93612 - protein, 9 aa, Homo Sapiens
THAEVHQSL

SEQ ID NO: 93613 - protein, 9 aa, Homo Sapiens
THAGVRLYF

SEQ ID NO: 93614 - protein, 9 aa, Homo Sapiens
THALEYVLF

SEQ ID NO: 93615 - protein, 9 aa, Homo Sapiens
THALLGDSL

SEQ ID NO: 93616 - protein, 9 aa, Homo Sapiens
THALLSVLL

SEQ ID NO: 93617 - protein, 9 aa, Homo Sapiens
THALPIPVI

SEQ ID NO: 93618 - protein, 9 aa, Homo Sapiens
THANYKVTL

SEQ ID NO: 93619 - protein, 9 aa, Homo Sapiens
THASQIELL

SEQ ID NO: 93620 - protein, 9 aa, Homo Sapiens
THAVVFAKL

SEQ ID NO: 93621 - protein, 9 aa, Homo Sapiens
THAVVIKKL

SEQ ID NO: 93622 - protein, 9 aa, Homo Sapiens
THCEIHPSM

SEQ ID NO: 93623 - protein, 9 aa, Homo Sapiens
THCLWTDQL

SEQ ID NO: 93624 - protein, 9 aa, Homo Sapiens
THCPDTPLL

SEQ ID NO: 93625 - protein, 9 aa, Homo Sapiens
THDAPATTF

SEQ ID NO: 93626 - protein, 9 aa, Homo Sapiens
THDAPIRCV

SEQ ID NO: 93627 - protein, 9 aa, Homo Sapiens
THDDVQQSF

SEQ ID NO: 93628 - protein, 9 aa, Homo Sapiens
THDEDFVEL

SEQ ID NO: 93629 - protein, 9 aa, Homo Sapiens
THDEGFYWW

SEQ ID NO: 93630 - protein, 9 aa, Homo Sapiens
THDELIQLV

SEQ ID NO: 93631 - protein, 9 aa, Homo Sapiens
THDFSDSSL

SEQ ID NO: 93632 - protein, 9 aa, Homo Sapiens
THDGGFLSL

SEQ ID NO: 93633 - protein, 9 aa, Homo Sapiens
THDGSILIV

SEQ ID NO: 93634 - protein, 9 aa, Homo Sapiens
THDGSVYFW

SEQ ID NO: 93635 - protein, 9 aa, Homo Sapiens
THDIHALIL

SEQ ID NO: 93636 - protein, 9 aa, Homo Sapiens
THDIPIKVI

SEQ ID NO: 93637 - protein, 9 aa, Homo Sapiens
THDITTISI

SEQ ID NO: 93638 - protein, 9 aa, Homo Sapiens
THDLEGPPL

SEQ ID NO: 93639 - protein, 9 aa, Homo Sapiens
THDLKTLSL

SEQ ID NO: 93640 - protein, 9 aa, Homo Sapiens
THDLLDICL

SEQ ID NO: 93641 - protein, 9 aa, Homo Sapiens
THDLVGPEL

SEQ ID NO: 93642 - protein, 9 aa, Homo Sapiens
THDPLHQEV

SEQ ID NO: 93643 - protein, 9 aa, Homo Sapiens
THDPNKEAL

SEQ ID NO: 93644 - protein, 9 aa, Homo Sapiens
THDPNKETF

SEQ ID NO: 93645 - protein, 9 aa, Homo Sapiens
THDPNKMAF

SEQ ID NO: 93646 - protein, 9 aa, Homo Sapiens
THDQAVQAL

SEQ ID NO: 93647 - protein, 9 aa, Homo Sapiens
THDQMIDLL

SEQ ID NO: 93648 - protein, 9 aa, Homo Sapiens
THDSGLITI

SEQ ID NO: 93649 - protein, 9 aa, Homo Sapiens
THDSNTDMF

SEQ ID NO: 93650 - protein, 9 aa, Homo Sapiens
THDSRAVKF

SEQ ID NO: 93651 - protein, 9 aa, Homo Sapiens
THDTFQNEL

SEQ ID NO: 93652 - protein, 9 aa, Homo Sapiens
THDTKIELL

SEQ ID NO: 93653 - protein, 9 aa, Homo Sapiens
THEAYVTVL

SEQ ID NO: 93654 - protein, 9 aa, Homo Sapiens
THEDDKYRL

SEQ ID NO: 93655 - protein, 9 aa, Homo Sapiens
THEDGVLEL

SEQ ID NO: 93656 - protein, 9 aa, Homo Sapiens
THEDIEAQI

SEQ ID NO: 93657 - protein, 9 aa, Homo Sapiens
THEDSKILL

SEQ ID NO: 93658 - protein, 9 aa, Homo Sapiens
THEEMPQSI

SEQ ID NO: 93659 - protein, 9 aa, Homo Sapiens
THEGFNVTL

SEQ ID NO: 93660 - protein, 9 aa, Homo Sapiens
THEGNKTFI

SEQ ID NO: 93661 - protein, 9 aa, Homo Sapiens
THEITVLII

SEQ ID NO: 93662 - protein, 9 aa, Homo Sapiens
THENENYLL

SEQ ID NO: 93663 - protein, 9 aa, Homo Sapiens
THEPNFTII

SEQ ID NO: 93664 - protein, 9 aa, Homo Sapiens
THEQAILRL

SEQ ID NO: 93665 - protein, 9 aa, Homo Sapiens
THEYHAETI

SEQ ID NO: 93666 - protein, 9 aa, Homo Sapiens
THFDTQNNI

SEQ ID NO: 93667 - protein, 9 aa, Homo Sapiens
THFLQPIYL

SEQ ID NO: 93668 - protein, 9 aa, Homo Sapiens
THFPDETEI

SEQ ID NO: 93669 - protein, 9 aa, Homo Sapiens
THFQLAYRL

SEQ ID NO: 93670 - protein, 9 aa, Homo Sapiens
THFSFPLRL

SEQ ID NO: 93671 - protein, 9 aa, Homo Sapiens
THGEAVQLL

SEQ ID NO: 93672 - protein, 9 aa, Homo Sapiens
THGLVINII

SEQ ID NO: 93673 - protein, 9 aa, Homo Sapiens
THGPENPKL

SEQ ID NO: 93674 - protein, 9 aa, Homo Sapiens
THGQFYDLL

SEQ ID NO: 93675 - protein, 9 aa, Homo Sapiens
THGVVHVTI

SEQ ID NO: 93676 - protein, 9 aa, Homo Sapiens
THHLFVIFF

SEQ ID NO: 93677 - protein, 9 aa, Homo Sapiens
THHNDTELI

SEQ ID NO: 93678 - protein, 9 aa, Homo Sapiens
THIAEATGW

SEQ ID NO: 93679 - protein, 9 aa, Homo Sapiens
THIDINSKI

SEQ ID NO: 93680 - protein, 9 aa, Homo Sapiens
THIEAQNKI

SEQ ID NO: 93681 - protein, 9 aa, Homo Sapiens
THILTPQKL

SEQ ID NO: 93682 - protein, 9 aa, Homo Sapiens
THINGESVL

SEQ ID NO: 93683 - protein, 9 aa, Homo Sapiens
THIRDFLQV

SEQ ID NO: 93684 - protein, 9 aa, Homo Sapiens
THISPNAIF

SEQ ID NO: 93685 - protein, 9 aa, Homo Sapiens
THIVSTSNF

SEQ ID NO: 93686 - protein, 9 aa, Homo Sapiens
THIYDARRL

SEQ ID NO: 93687 - protein, 9 aa, Homo Sapiens
THLAEFHQI

SEQ ID NO: 93688 - protein, 9 aa, Homo Sapiens
THLDSVTKI

SEQ ID NO: 93689 - protein, 9 aa, Homo Sapiens
THLEAQNRI

SEQ ID NO: 93690 - protein, 9 aa, Homo Sapiens
THLEHQQRI

SEQ ID NO: 93691 - protein, 9 aa, Homo Sapiens
THLEPAPYI

SEQ ID NO: 93692 - protein, 9 aa, Homo Sapiens
THLESLVEL

SEQ ID NO: 93693 - protein, 9 aa, Homo Sapiens
THLEYFSLW

SEQ ID NO: 93694 - protein, 9 aa, Homo Sapiens
THLPQTLTI

SEQ ID NO: 93695 - protein, 9 aa, Homo Sapiens
THLSAGELL

SEQ ID NO: 93696 - protein, 9 aa, Homo Sapiens
THLTIGNRL

SEQ ID NO: 93697 - protein, 9 aa, Homo Sapiens
THLWLNEGF

SEQ ID NO: 93698 - protein, 9 aa, Homo Sapiens
THMAPEVVL

SEQ ID NO: 93699 - protein, 9 aa, Homo Sapiens
THMELYSQL

SEQ ID NO: 93700 - protein, 9 aa, Homo Sapiens
THMEPEHRL

SEQ ID NO: 93701 - protein, 9 aa, Homo Sapiens
THMNSSEKL

SEQ ID NO: 93702 - protein, 9 aa, Homo Sapiens
THMTAIVGM

SEQ ID NO: 93703 - protein, 9 aa, Homo Sapiens
THNEPGVRL

SEQ ID NO: 93704 - protein, 9 aa, Homo Sapiens
THNLMELLI

SEQ ID NO: 93705 - protein, 9 aa, Homo Sapiens
THNLSFDEI

SEQ ID NO: 93706 - protein, 9 aa, Homo Sapiens
THNPTNATL

SEQ ID NO: 93707 - protein, 9 aa, Homo Sapiens
THQAAHIQL

SEQ ID NO: 93708 - protein, 9 aa, Homo Sapiens
THQENGIEI

SEQ ID NO: 93709 - protein, 9 aa, Homo Sapiens
THQHQVELI

SEQ ID NO: 93710 - protein, 9 aa, Homo Sapiens
THQKGKVVF

SEQ ID NO: 93711 - protein, 9 aa, Homo Sapiens
THQPVYHKI

SEQ ID NO: 93712 - protein, 9 aa, Homo Sapiens
THQQETQSI

SEQ ID NO: 93713 - protein, 9 aa, Homo Sapiens
THQQGQPAL

SEQ ID NO: 93714 - protein, 9 aa, Homo Sapiens
THQQVVSRI

SEQ ID NO: 93715 - protein, 9 aa, Homo Sapiens
THSDDVTQV

SEQ ID NO: 93716 - protein, 9 aa, Homo Sapiens
THSDIQVKL

SEQ ID NO: 93717 - protein, 9 aa, Homo Sapiens
THSDSALKI

SEQ ID NO: 93718 - protein, 9 aa, Homo Sapiens
THSEPLSTI

SEQ ID NO: 93719 - protein, 9 aa, Homo Sapiens
THSLETQEL

SEQ ID NO: 93720 - protein, 9 aa, Homo Sapiens
THSLPISQW

SEQ ID NO: 93721 - protein, 9 aa, Homo Sapiens
THSLPLLLF

SEQ ID NO: 93722 - protein, 9 aa, Homo Sapiens
THSLPVVVI

SEQ ID NO: 93723 - protein, 9 aa, Homo Sapiens
THSLTTPVV

SEQ ID NO: 93724 - protein, 9 aa, Homo Sapiens
THSMDLVAL

SEQ ID NO: 93725 - protein, 9 aa, Homo Sapiens
THSNLHTSI

SEQ ID NO: 93726 - protein, 9 aa, Homo Sapiens
THSNMANAL

SEQ ID NO: 93727 - protein, 9 aa, Homo Sapiens
THSPFCWHL

SEQ ID NO: 93728 - protein, 9 aa, Homo Sapiens
THSPKEVMF

SEQ ID NO: 93729 - protein, 9 aa, Homo Sapiens
THSPSNAQF

SEQ ID NO: 93730 - protein, 9 aa, Homo Sapiens
THSPSSSSI

SEQ ID NO: 93731 - protein, 9 aa, Homo Sapiens
THSPYVAQI

SEQ ID NO: 93732 - protein, 9 aa, Homo Sapiens
THSQELCKL

SEQ ID NO: 93733 - protein, 9 aa, Homo Sapiens
THSSPSFNL

SEQ ID NO: 93734 - protein, 9 aa, Homo Sapiens
THSTTSQAI

SEQ ID NO: 93735 - protein, 9 aa, Homo Sapiens
THTDAVNLL

SEQ ID NO: 93736 - protein, 9 aa, Homo Sapiens
THTLDISQL

SEQ ID NO: 93737 - protein, 9 aa, Homo Sapiens
THTNEFITW

SEQ ID NO: 93738 - protein, 9 aa, Homo Sapiens
THTQPGVQL

SEQ ID NO: 93739 - protein, 9 aa, Homo Sapiens
THTTVIHQL

SEQ ID NO: 93740 - protein, 9 aa, Homo Sapiens
THVDPILLI

SEQ ID NO: 93741 - protein, 9 aa, Homo Sapiens
THVDSMDLI

SEQ ID NO: 93742 - protein, 9 aa, Homo Sapiens
THVETLLTF

SEQ ID NO: 93743 - protein, 9 aa, Homo Sapiens
THVFVIAEL

SEQ ID NO: 93744 - protein, 9 aa, Homo Sapiens
THVGADTTL

SEQ ID NO: 93745 - protein, 9 aa, Homo Sapiens
THVGKVNIF

SEQ ID NO: 93746 - protein, 9 aa, Homo Sapiens
THVGPTPAI

SEQ ID NO: 93747 - protein, 9 aa, Homo Sapiens
THVIENIYL

SEQ ID NO: 93748 - protein, 9 aa, Homo Sapiens
THVKELWTW

SEQ ID NO: 93749 - protein, 9 aa, Homo Sapiens
THVNDGTEF

SEQ ID NO: 93750 - protein, 9 aa, Homo Sapiens
THVPSTEEI

SEQ ID NO: 93751 - protein, 9 aa, Homo Sapiens
THVRDWVMW

SEQ ID NO: 93752 - protein, 9 aa, Homo Sapiens
THVSNGCQL

SEQ ID NO: 93753 - protein, 9 aa, Homo Sapiens
THVTEIISF

SEQ ID NO: 93754 - protein, 9 aa, Homo Sapiens
THYGKVYLL

SEQ ID NO: 93755 - protein, 9 aa, Homo Sapiens
TKIEIGDTI

SEQ ID NO: 93756 - protein, 9 aa, Homo Sapiens
TLCDLYETL

SEQ ID NO: 93757 - protein, 9 aa, Homo Sapiens
TLDPAEYNI

SEQ ID NO: 93758 - protein, 9 aa, Homo Sapiens
TLTELGDEL

SEQ ID NO: 93759 - protein, 9 aa, Homo Sapiens
TQALEKYNI

SEQ ID NO: 93760 - protein, 9 aa, Homo Sapiens
TQAMEKYNI

SEQ ID NO: 93761 - protein, 9 aa, Homo Sapiens
TQCADAHLF

SEQ ID NO: 93762 - protein, 9 aa, Homo Sapiens
TQDAVPLTL

SEQ ID NO: 93763 - protein, 9 aa, Homo Sapiens
TQDDFHLKI

SEQ ID NO: 93764 - protein, 9 aa, Homo Sapiens
TQDECILHF

SEQ ID NO: 93765 - protein, 9 aa, Homo Sapiens
TQDGIKLMF

SEQ ID NO: 93766 - protein, 9 aa, Homo Sapiens
TQDGLLFTF

SEQ ID NO: 93767 - protein, 9 aa, Homo Sapiens
TQDGNIYQL

SEQ ID NO: 93768 - protein, 9 aa, Homo Sapiens
TQDNGILTF

SEQ ID NO: 93769 - protein, 9 aa, Homo Sapiens
TQDPTVTRL

SEQ ID NO: 93770 - protein, 9 aa, Homo Sapiens
TQESTFQEL

SEQ ID NO: 93771 - protein, 9 aa, Homo Sapiens
TQGPIEVYL

SEQ ID NO: 93772 - protein, 9 aa, Homo Sapiens
TQGPSERTL

SEQ ID NO: 93773 - protein, 9 aa, Homo Sapiens
TQMDVKLVF

SEQ ID NO: 93774 - protein, 9 aa, Homo Sapiens
TQMPDPKTF

SEQ ID NO: 93775 - protein, 9 aa, Homo Sapiens
TQNLDVHFW

SEQ ID NO: 93776 - protein, 9 aa, Homo Sapiens
TQSEVDPHL

SEQ ID NO: 93777 - protein, 9 aa, Homo Sapiens
TQTAVITRI

SEQ ID NO: 93778 - protein, 9 aa, Homo Sapiens
TQTTHELTI

SEQ ID NO: 93779 - protein, 9 aa, Homo Sapiens
TQVGPGPQI

SEQ ID NO: 93780 - protein, 9 aa, Homo Sapiens
TQVLIGNNI

SEQ ID NO: 93781 - protein, 9 aa, Homo Sapiens
TRCIAILYI

SEQ ID NO: 93782 - protein, 9 aa, Homo Sapiens
TRCQFQTKF

SEQ ID NO: 93783 - protein, 9 aa, Homo Sapiens
TRDALHLGF

SEQ ID NO: 93784 - protein, 9 aa, Homo Sapiens
TRDELEWKL

SEQ ID NO: 93785 - protein, 9 aa, Homo Sapiens
TRDELPYTF

SEQ ID NO: 93786 - protein, 9 aa, Homo Sapiens
TRDPLVIEL

SEQ ID NO: 93787 - protein, 9 aa, Homo Sapiens
TRDSNIIRL

SEQ ID NO: 93788 - protein, 9 aa, Homo Sapiens
TRDSVKTVL

SEQ ID NO: 93789 - protein, 9 aa, Homo Sapiens
TREEGAQTL

SEQ ID NO: 93790 - protein, 9 aa, Homo Sapiens
TREEGKALL

SEQ ID NO: 93791 - protein, 9 aa, Homo Sapiens
TRLAIQEAL

SEQ ID NO: 93792 - protein, 9 aa, Homo Sapiens
TRLDQDESF

SEQ ID NO: 93793 - protein, 9 aa, Homo Sapiens
TRLEFQQQL

SEQ ID NO: 93794 - protein, 9 aa, Homo Sapiens
TRLLMKERF

SEQ ID NO: 93795 - protein, 9 aa, Homo Sapiens
TRSAIILHL

SEQ ID NO: 93796 - protein, 9 aa, Homo Sapiens
VHAFLIHTL

SEQ ID NO: 93797 - protein, 9 aa, Homo Sapiens
VHAFPELFL

SEQ ID NO: 93798 - protein, 9 aa, Homo Sapiens
VHAVIGDEL

SEQ ID NO: 93799 - protein, 9 aa, Homo Sapiens
VHAYIISYL

SEQ ID NO: 93800 - protein, 9 aa, Homo Sapiens
VHDALVQII

SEQ ID NO: 93801 - protein, 9 aa, Homo Sapiens
VHDDVDIIL

SEQ ID NO: 93802 - protein, 9 aa, Homo Sapiens
VHDEGVWAL

SEQ ID NO: 93803 - protein, 9 aa, Homo Sapiens
VHDETCQVI

SEQ ID NO: 93804 - protein, 9 aa, Homo Sapiens
VHDGCVNTI

SEQ ID NO: 93805 - protein, 9 aa, Homo Sapiens
VHDKTPTHF

SEQ ID NO: 93806 - protein, 9 aa, Homo Sapiens
VHDLPAAVL

SEQ ID NO: 93807 - protein, 9 aa, Homo Sapiens
VHDNKVLRI

SEQ ID NO: 93808 - protein, 9 aa, Homo Sapiens
VHDNLAMKI

SEQ ID NO: 93809 - protein, 9 aa, Homo Sapiens
VHDSFQQLI

SEQ ID NO: 93810 - protein, 9 aa, Homo Sapiens
VHDSIDYRF

SEQ ID NO: 93811 - protein, 9 aa, Homo Sapiens
VHFIKPLLL

SEQ ID NO: 93812 - protein, 9 aa, Homo Sapiens
VHFLQLELI

SEQ ID NO: 93813 - protein, 9 aa, Homo Sapiens
VHHLDNNEF

SEQ ID NO: 93814 - protein, 9 aa, Homo Sapiens
VHIADVSYF

SEQ ID NO: 93815 - protein, 9 aa, Homo Sapiens
VHIADVTHF

SEQ ID NO: 93816 - protein, 9 aa, Homo Sapiens
VHIDLPLFF

SEQ ID NO: 93817 - protein, 9 aa, Homo Sapiens
VHIEVGNRV

SEQ ID NO: 93818 - protein, 9 aa, Homo Sapiens
VHIIEKDKI

SEQ ID NO: 93819 - protein, 9 aa, Homo Sapiens
VHILDTESF

SEQ ID NO: 93820 - protein, 9 aa, Homo Sapiens
VHILDTETF

SEQ ID NO: 93821 - protein, 9 aa, Homo Sapiens
VHINAGPEI

SEQ ID NO: 93822 - protein, 9 aa, Homo Sapiens
VHIPEVYLI

SEQ ID NO: 93823 - protein, 9 aa, Homo Sapiens
VHMDVVELL

SEQ ID NO: 93824 - protein, 9 aa, Homo Sapiens
VHNEGMQVL

SEQ ID NO: 93825 - protein, 9 aa, Homo Sapiens
VHNLLLTYL

SEQ ID NO: 93826 - protein, 9 aa, Homo Sapiens
VHTIVNETL

SEQ ID NO: 93827 - protein, 9 aa, Homo Sapiens
VHTQLEPLL

SEQ ID NO: 93828 - protein, 9 aa, Homo Sapiens
VHVDQELLI

SEQ ID NO: 93829 - protein, 9 aa, Homo Sapiens
VHVPEGQTI

SEQ ID NO: 93830 - protein, 9 aa, Homo Sapiens
VHYGGVQNL

SEQ ID NO: 93831 - protein, 9 aa, Homo Sapiens
WHAGKVWLI

SEQ ID NO: 93832 - protein, 9 aa, Homo Sapiens
WHDGKQVHL

SEQ ID NO: 93833 - protein, 9 aa, Homo Sapiens
WHDMEVYSF

SEQ ID NO: 93834 - protein, 9 aa, Homo Sapiens
WHEDITQDL

SEQ ID NO: 93835 - protein, 9 aa, Homo Sapiens
WQEGSVTRL

SEQ ID NO: 93836 - protein, 9 aa, Homo Sapiens
YHADIYDKV

SEQ ID NO: 93837 - protein, 9 aa, Homo Sapiens
YHAGFNHGF

SEQ ID NO: 93838 - protein, 9 aa, Homo Sapiens
YHAKDPNNL

SEQ ID NO: 93839 - protein, 9 aa, Homo Sapiens
YHALCNEEF

SEQ ID NO: 93840 - protein, 9 aa, Homo Sapiens
YHALDSDHL

SEQ ID NO: 93841 - protein, 9 aa, Homo Sapiens
YHALPATVW

SEQ ID NO: 93842 - protein, 9 aa, Homo Sapiens
YHARVYEFL

SEQ ID NO: 93843 - protein, 9 aa, Homo Sapiens
YHATTETVI

SEQ ID NO: 93844 - protein, 9 aa, Homo Sapiens
YHCALILNL

SEQ ID NO: 93845 - protein, 9 aa, Homo Sapiens
YHDDKQPAF

SEQ ID NO: 93846 - protein, 9 aa, Homo Sapiens
YHDEGWVAI

SEQ ID NO: 93847 - protein, 9 aa, Homo Sapiens
YHDFSVQNF

SEQ ID NO: 93848 - protein, 9 aa, Homo Sapiens
YHDIAQQAF

SEQ ID NO: 93849 - protein, 9 aa, Homo Sapiens
YHDINVYSL

SEQ ID NO: 93850 - protein, 9 aa, Homo Sapiens
YHDIVVTFL

SEQ ID NO: 93851 - protein, 9 aa, Homo Sapiens
YHDKNIVLL

SEQ ID NO: 93852 - protein, 9 aa, Homo Sapiens
YHDLECQLI

SEQ ID NO: 93853 - protein, 9 aa, Homo Sapiens
YHDMGNINL

SEQ ID NO: 93854 - protein, 9 aa, Homo Sapiens
YHDPEMDFF

SEQ ID NO: 93855 - protein, 9 aa, Homo Sapiens
YHDRTNLKV

SEQ ID NO: 93856 - protein, 9 aa, Homo Sapiens
YHDVMLENL

SEQ ID NO: 93857 - protein, 9 aa, Homo Sapiens
YHDYGHLEL

SEQ ID NO: 93858 - protein, 9 aa, Homo Sapiens
YHEDIHTYL

SEQ ID NO: 93859 - protein, 9 aa, Homo Sapiens
YHEEKERLM

SEQ ID NO: 93860 - protein, 9 aa, Homo Sapiens
YHEGLSDHI

SEQ ID NO: 93861 - protein, 9 aa, Homo Sapiens
YHEHQANLL

SEQ ID NO: 93862 - protein, 9 aa, Homo Sapiens
YHEKGRAFL

SEQ ID NO: 93863 - protein, 9 aa, Homo Sapiens
YHESGHAII

SEQ ID NO: 93864 - protein, 9 aa, Homo Sapiens
YHFEEVQKL

SEQ ID NO: 93865 - protein, 9 aa, Homo Sapiens
YHFMPEHRL

SEQ ID NO: 93866 - protein, 9 aa, Homo Sapiens
YHFPDQQEL

SEQ ID NO: 93867 - protein, 9 aa, Homo Sapiens
YHFPELVKI

SEQ ID NO: 93868 - protein, 9 aa, Homo Sapiens
YHGAEIVSL

SEQ ID NO: 93869 - protein, 9 aa, Homo Sapiens
YHGATPLHL

SEQ ID NO: 93870 - protein, 9 aa, Homo Sapiens
YHGDAGDSL

SEQ ID NO: 93871 - protein, 9 aa, Homo Sapiens
YHGDLNETF

SEQ ID NO: 93872 - protein, 9 aa, Homo Sapiens
YHGDSDLQL

SEQ ID NO: 93873 - protein, 9 aa, Homo Sapiens
YHGGDDALL

SEQ ID NO: 93874 - protein, 9 aa, Homo Sapiens
YHGLTVPLI

SEQ ID NO: 93875 - protein, 9 aa, Homo Sapiens
YHGNTNPEL

SEQ ID NO: 93876 - protein, 9 aa, Homo Sapiens
YHHCVINKL

SEQ ID NO: 93877 - protein, 9 aa, Homo Sapiens
YHIAVDEKL

SEQ ID NO: 93878 - protein, 9 aa, Homo Sapiens
YHIDLDPHF

SEQ ID NO: 93879 - protein, 9 aa, Homo Sapiens
YHILNDPEL

SEQ ID NO: 93880 - protein, 9 aa, Homo Sapiens
YHIQQNEAL

SEQ ID NO: 93881 - protein, 9 aa, Homo Sapiens
YHISLEHEI

SEQ ID NO: 93882 - protein, 9 aa, Homo Sapiens
YHISLVDLL

SEQ ID NO: 93883 - protein, 9 aa, Homo Sapiens
YHISMDDRF

SEQ ID NO: 93884 - protein, 9 aa, Homo Sapiens
YHITDIPII

SEQ ID NO: 93885 - protein, 9 aa, Homo Sapiens
YHITDQVHL

SEQ ID NO: 93886 - protein, 9 aa, Homo Sapiens
YHITDVPCI

SEQ ID NO: 93887 - protein, 9 aa, Homo Sapiens
YHITGAISF

SEQ ID NO: 93888 - protein, 9 aa, Homo Sapiens
YHLLAEEKL

SEQ ID NO: 93889 - protein, 9 aa, Homo Sapiens
YHLQDATSW

SEQ ID NO: 93890 - protein, 9 aa, Homo Sapiens
YHLQLFEEL

SEQ ID NO: 93891 - protein, 9 aa, Homo Sapiens
YHLQSAELL

SEQ ID NO: 93892 - protein, 9 aa, Homo Sapiens
YHNLHPDYI

SEQ ID NO: 93893 - protein, 9 aa, Homo Sapiens
YHNQSQGLL

SEQ ID NO: 93894 - protein, 9 aa, Homo Sapiens
YHQDKEAAI

SEQ ID NO: 93895 - protein, 9 aa, Homo Sapiens
YHQEASKRI

SEQ ID NO: 93896 - protein, 9 aa, Homo Sapiens
YHQEEIDVW

SEQ ID NO: 93897 - protein, 9 aa, Homo Sapiens
YHQHFDPVI

SEQ ID NO: 93898 - protein, 9 aa, Homo Sapiens
YHQHLQEQL

SEQ ID NO: 93899 - protein, 9 aa, Homo Sapiens
YHQNVESHL

SEQ ID NO: 93900 - protein, 9 aa, Homo Sapiens
YHQPDLPEI

SEQ ID NO: 93901 - protein, 9 aa, Homo Sapiens
YHSDDYIKF

SEQ ID NO: 93902 - protein, 9 aa, Homo Sapiens
YHSDEYIKF

SEQ ID NO: 93903 - protein, 9 aa, Homo Sapiens
YHSEGHRGL

SEQ ID NO: 93904 - protein, 9 aa, Homo Sapiens
YHSEVPVSL

SEQ ID NO: 93905 - protein, 9 aa, Homo Sapiens
YHSEYFLAL

SEQ ID NO: 93906 - protein, 9 aa, Homo Sapiens
YHSFSEQSF

SEQ ID NO: 93907 - protein, 9 aa, Homo Sapiens
YHSFVSSVF

SEQ ID NO: 93908 - protein, 9 aa, Homo Sapiens
YHSGYVHKF

SEQ ID NO: 93909 - protein, 9 aa, Homo Sapiens
YHSIEEDKW

SEQ ID NO: 93910 - protein, 9 aa, Homo Sapiens
YHSNQVVRM

SEQ ID NO: 93911 - protein, 9 aa, Homo Sapiens
YHSNSGAQL

SEQ ID NO: 93912 - protein, 9 aa, Homo Sapiens
YHSPADRVM

SEQ ID NO: 93913 - protein, 9 aa, Homo Sapiens
YHSQDRYEF

SEQ ID NO: 93914 - protein, 9 aa, Homo Sapiens
YHSTPDRLF

SEQ ID NO: 93915 - protein, 9 aa, Homo Sapiens
YHSVGDSVL

SEQ ID NO: 93916 - protein, 9 aa, Homo Sapiens
YHTDCNVLL

SEQ ID NO: 93917 - protein, 9 aa, Homo Sapiens
YHTDTTVKF

SEQ ID NO: 93918 - protein, 9 aa, Homo Sapiens
YHTNAEVKL

SEQ ID NO: 93919 - protein, 9 aa, Homo Sapiens
YHTPNVVFI

SEQ ID NO: 93920 - protein, 9 aa, Homo Sapiens
YHTQTTPLI

SEQ ID NO: 93921 - protein, 9 aa, Homo Sapiens
YHTVAGNDI

SEQ ID NO: 93922 - protein, 9 aa, Homo Sapiens
YHVDSLLQL

SEQ ID NO: 93923 - protein, 9 aa, Homo Sapiens
YHVLQEELI

SEQ ID NO: 93924 - protein, 9 aa, Homo Sapiens
YHWADGTNI

SEQ ID NO: 93925 - protein, 9 aa, Homo Sapiens
YHWLEKEVI

SEQ ID NO: 93926 - protein, 9 aa, Homo Sapiens
YHYDPEQVI

SEQ ID NO: 93927 - protein, 9 aa, Homo Sapiens
YHYGFCDVI

SEQ ID NO: 93928 - protein, 9 aa, Homo Sapiens
YKADEDPAL

SEQ ID NO: 93929 - protein, 9 aa, Homo Sapiens
YKDKYSHLI

SEQ ID NO: 93930 - protein, 9 aa, Homo Sapiens
YNDEDIYLF

SEQ ID NO: 93931 - protein, 9 aa, Homo Sapiens
YNQKLQQQL

SEQ ID NO: 93932 - protein, 9 aa, Homo Sapiens
YPVDLGDKF

SEQ ID NO: 93933 - protein, 9 aa, Homo Sapiens
YPVEIHEYL

SEQ ID NO: 93934 - protein, 9 aa, Homo Sapiens
YQFGEIRTI

SEQ ID NO: 93935 - protein, 9 aa, Homo Sapiens
YQHKEEYQL

SEQ ID NO: 93936 - protein, 9 aa, Homo Sapiens
YQNPDYNFF

SEQ ID NO: 93937 - protein, 9 aa, Homo Sapiens
YQNQEIHNL

SEQ ID NO: 93938 - protein, 9 aa, Homo Sapiens
YQSPTGDRI

SEQ ID NO: 93939 - protein, 9 aa, Homo Sapiens
YRDTFSYNF

SEQ ID NO: 93940 - protein, 9 aa, Homo Sapiens
YRWQDEHKF

SEQ ID NO: 93941 - protein, 9 aa, Homo Sapiens
YVPPLAPHP

SEQ ID NO: 93942 - protein, 10 aa, Homo Sapiens
AHAASDTVGW

SEQ ID NO: 93943 - protein, 10 aa, Homo Sapiens
AHADHIGQGF

SEQ ID NO: 93944 - protein, 10 aa, Homo Sapiens
AHAQNQNYTL

SEQ ID NO: 93945 - protein, 10 aa, Homo Sapiens
AHASTTRLYL

SEQ ID NO: 93946 - protein, 10 aa, Homo Sapiens
AHDPQTTQEL

SEQ ID NO: 93947 - protein, 10 aa, Homo Sapiens
AHDRDNQTTL

SEQ ID NO: 93948 - protein, 10 aa, Homo Sapiens
AHFGIHEEML

SEQ ID NO: 93949 - protein, 10 aa, Homo Sapiens
AHIDGDHLTL

SEQ ID NO: 93950 - protein, 10 aa, Homo Sapiens
AHIDPDASYM

SEQ ID NO: 93951 - protein, 10 aa, Homo Sapiens
AHIDSGKTTL

SEQ ID NO: 93952 - protein, 10 aa, Homo Sapiens
AHIFCTTDQL

SEQ ID NO: 93953 - protein, 10 aa, Homo Sapiens
AHIGVIPHFF

SEQ ID NO: 93954 - protein, 10 aa, Homo Sapiens
AHIKEEHCIF

SEQ ID NO: 93955 - protein, 10 aa, Homo Sapiens
AHIQQLYDLL

SEQ ID NO: 93956 - protein, 10 aa, Homo Sapiens
AHLSIINEYL

SEQ ID NO: 93957 - protein, 10 aa, Homo Sapiens
AHMEFCYQEL

SEQ ID NO: 93958 - protein, 10 aa, Homo Sapiens
AHNSNWYITF

SEQ ID NO: 93959 - protein, 10 aa, Homo Sapiens
AHNTNDFVTL

SEQ ID NO: 93960 - protein, 10 aa, Homo Sapiens
AHQDDFNQLL

SEQ ID NO: 93961 - protein, 10 aa, Homo Sapiens
AHQNVVAETL

SEQ ID NO: 93962 - protein, 10 aa, Homo Sapiens
AHSVSGQQTL

SEQ ID NO: 93963 - protein, 10 aa, Homo Sapiens
AHVDLTGDGL

SEQ ID NO: 93964 - protein, 10 aa, Homo Sapiens
AHVICLAEEF

SEQ ID NO: 93965 - protein, 10 aa, Homo Sapiens
AHYDPATEEF

SEQ ID NO: 93966 - protein, 10 aa, Homo Sapiens
AKMLSIFTEF

SEQ ID NO: 93967 - protein, 10 aa, Homo Sapiens
AQAKAESITL

SEQ ID NO: 93968 - protein, 10 aa, Homo Sapiens
AQQSRCTLTI

SEQ ID NO: 93969 - protein, 10 aa, Homo Sapiens
CGHTACVKLL

SEQ ID NO: 93970 - protein, 10 aa, Homo Sapiens
CHDRNVVTIF

SEQ ID NO: 93971 - protein, 10 aa, Homo Sapiens
CHEGKVFISL

SEQ ID NO: 93972 - protein, 10 aa, Homo Sapiens
CHLFLPDEQF

SEQ ID NO: 93973 - protein, 10 aa, Homo Sapiens
CHNSKDTVTI

SEQ ID NO: 93974 - protein, 10 aa, Homo Sapiens
CHSDEYFRQL

SEQ ID NO: 93975 - protein, 10 aa, Homo Sapiens
CHSKLANILF

SEQ ID NO: 93976 - protein, 10 aa, Homo Sapiens
CHVYVRNDSL

SEQ ID NO: 93977 - protein, 10 aa, Homo Sapiens
DHAPAIGRYI

SEQ ID NO: 93978 - protein, 10 aa, Homo Sapiens
DHDPVDKIVL

SEQ ID NO: 93979 - protein, 10 aa, Homo Sapiens
DHDSVDKIVI

SEQ ID NO: 93980 - protein, 10 aa, Homo Sapiens
DHESVCKYYL

SEQ ID NO: 93981 - protein, 10 aa, Homo Sapiens
DHIKDSFHSL

SEQ ID NO: 93982 - protein, 10 aa, Homo Sapiens
DHINGATNYF

SEQ ID NO: 93983 - protein, 10 aa, Homo Sapiens
DHSFLTNDEL

SEQ ID NO: 93984 - protein, 10 aa, Homo Sapiens
DHSLPESDKI

SEQ ID NO: 93985 - protein, 10 aa, Homo Sapiens
DHSSTVLQRL

SEQ ID NO: 93986 - protein, 10 aa, Homo Sapiens
DHVEVNGEVF

SEQ ID NO: 93987 - protein, 10 aa, Homo Sapiens
DHYYGTGETF

SEQ ID NO: 93988 - protein, 10 aa, Homo Sapiens
EHAAPYFQQL

SEQ ID NO: 93989 - protein, 10 aa, Homo Sapiens
EHAGPQLTCI

SEQ ID NO: 93990 - protein, 10 aa, Homo Sapiens
EHAIEDKETI

SEQ ID NO: 93991 - protein, 10 aa, Homo Sapiens
EHANLTEVTF

SEQ ID NO: 93992 - protein, 10 aa, Homo Sapiens
EHAPISYEDF

SEQ ID NO: 93993 - protein, 10 aa, Homo Sapiens
EHAQKELQKL

SEQ ID NO: 93994 - protein, 10 aa, Homo Sapiens
EHCSINLMYL

SEQ ID NO: 93995 - protein, 10 aa, Homo Sapiens
EHDDTLPSQL

SEQ ID NO: 93996 - protein, 10 aa, Homo Sapiens
EHDEPILKHL

SEQ ID NO: 93997 - protein, 10 aa, Homo Sapiens
EHDPHVLLAV

SEQ ID NO: 93998 - protein, 10 aa, Homo Sapiens
EHDPQYAVIL

SEQ ID NO: 93999 - protein, 10 aa, Homo Sapiens
EHDPVKPRQL

SEQ ID NO: 94000 - protein, 10 aa, Homo Sapiens
EHDWPVHNNF

SEQ ID NO: 94001 - protein, 10 aa, Homo Sapiens
EHEDLLNITL

SEQ ID NO: 94002 - protein, 10 aa, Homo Sapiens
EHEGPALYYM

SEQ ID NO: 94003 - protein, 10 aa, Homo Sapiens
EHFDDTVVCL

SEQ ID NO: 94004 - protein, 10 aa, Homo Sapiens
EHFNGVAELL

SEQ ID NO: 94005 - protein, 10 aa, Homo Sapiens
EHIEALLDKF

SEQ ID NO: 94006 - protein, 10 aa, Homo Sapiens
EHIGIGLLSL

SEQ ID NO: 94007 - protein, 10 aa, Homo Sapiens
EHINEINAEL

SEQ ID NO: 94008 - protein, 10 aa, Homo Sapiens
EHIRVGWEQL

SEQ ID NO: 94009 - protein, 10 aa, Homo Sapiens
EHLDTQKELL

SEQ ID NO: 94010 - protein, 10 aa, Homo Sapiens
EHLRDTKSTF

SEQ ID NO: 94011 - protein, 10 aa, Homo Sapiens
EHMPVGPDAI

SEQ ID NO: 94012 - protein, 10 aa, Homo Sapiens
EHQPTTWVSF

SEQ ID NO: 94013 - protein, 10 aa, Homo Sapiens
EHQRKEKELL

SEQ ID NO: 94014 - protein, 10 aa, Homo Sapiens
EHSESTLNVM

SEQ ID NO: 94015 - protein, 10 aa, Homo Sapiens
EHSPFHEHVL

SEQ ID NO: 94016 - protein, 10 aa, Homo Sapiens
EHSPHNGSLF

SEQ ID NO: 94017 - protein, 10 aa, Homo Sapiens
EHSPLSEDRF

SEQ ID NO: 94018 - protein, 10 aa, Homo Sapiens
EHSQPLEELL

SEQ ID NO: 94019 - protein, 10 aa, Homo Sapiens
EHSSDSEYTL

SEQ ID NO: 94020 - protein, 10 aa, Homo Sapiens
EHSSRVVQEL

SEQ ID NO: 94021 - protein, 10 aa, Homo Sapiens
EHTDPHVQQI

SEQ ID NO: 94022 - protein, 10 aa, Homo Sapiens
EHVADVDTLL

SEQ ID NO: 94023 - protein, 10 aa, Homo Sapiens
EHVEAIKIGL

SEQ ID NO: 94024 - protein, 10 aa, Homo Sapiens
EHVQADHELF

SEQ ID NO: 94025 - protein, 10 aa, Homo Sapiens
EHVREMQEKL

SEQ ID NO: 94026 - protein, 10 aa, Homo Sapiens
EHVRGMQEKL

SEQ ID NO: 94027 - protein, 10 aa, Homo Sapiens
EHVSGPFVQF

SEQ ID NO: 94028 - protein, 10 aa, Homo Sapiens
EQNNDSQLKI

SEQ ID NO: 94029 - protein, 10 aa, Homo Sapiens
ERFFSDKETF

SEQ ID NO: 94030 - protein, 10 aa, Homo Sapiens
FFNFKVAQTL

SEQ ID NO: 94031 - protein, 10 aa, Homo Sapiens
FHAQLQLEQL

SEQ ID NO: 94032 - protein, 10 aa, Homo Sapiens
FHARPGLSTL

SEQ ID NO: 94033 - protein, 10 aa, Homo Sapiens
FHCDLNSDQF

SEQ ID NO: 94034 - protein, 10 aa, Homo Sapiens
FHDDSMKSFF

SEQ ID NO: 94035 - protein, 10 aa, Homo Sapiens
FHDESTQVQL

SEQ ID NO: 94036 - protein, 10 aa, Homo Sapiens
FHDKYGNAVL

SEQ ID NO: 94037 - protein, 10 aa, Homo Sapiens
FHDMGGVQLI

SEQ ID NO: 94038 - protein, 10 aa, Homo Sapiens
FHDPELSNHL

SEQ ID NO: 94039 - protein, 10 aa, Homo Sapiens
FHDSSDHHTF

SEQ ID NO: 94040 - protein, 10 aa, Homo Sapiens
FHDTSSPLLI

SEQ ID NO: 94041 - protein, 10 aa, Homo Sapiens
FHEEAGIFKL

SEQ ID NO: 94042 - protein, 10 aa, Homo Sapiens
FHEGTDVIML

SEQ ID NO: 94043 - protein, 10 aa, Homo Sapiens
FHEPSAFNDF

SEQ ID NO: 94044 - protein, 10 aa, Homo Sapiens
FHETSNINDF

SEQ ID NO: 94045 - protein, 10 aa, Homo Sapiens
FHEVGIGSVL

SEQ ID NO: 94046 - protein, 10 aa, Homo Sapiens
FHFNDSTVTL

SEQ ID NO: 94047 - protein, 10 aa, Homo Sapiens
FHFTSSTEVF

SEQ ID NO: 94048 - protein, 10 aa, Homo Sapiens
FHGNIIKVSF

SEQ ID NO: 94049 - protein, 10 aa, Homo Sapiens
FHGNSEVNAI

SEQ ID NO: 94050 - protein, 10 aa, Homo Sapiens
FHGPPEPVLL

SEQ ID NO: 94051 - protein, 10 aa, Homo Sapiens
FHGVSNLQEF

SEQ ID NO: 94052 - protein, 10 aa, Homo Sapiens
FHHEASGVTV

SEQ ID NO: 94053 - protein, 10 aa, Homo Sapiens
FHIAGDNNPL

SEQ ID NO: 94054 - protein, 10 aa, Homo Sapiens
FHKDPDVNML

SEQ ID NO: 94055 - protein, 10 aa, Homo Sapiens
FHLGKIEELL

SEQ ID NO: 94056 - protein, 10 aa, Homo Sapiens
FHMDPSGTFV

SEQ ID NO: 94057 - protein, 10 aa, Homo Sapiens
FHNQVEIEFL

SEQ ID NO: 94058 - protein, 10 aa, Homo Sapiens
FHQDSRAHLL

SEQ ID NO: 94059 - protein, 10 aa, Homo Sapiens
FHQEQGHQLL

SEQ ID NO: 94060 - protein, 10 aa, Homo Sapiens
FHSEDYIDFL

SEQ ID NO: 94061 - protein, 10 aa, Homo Sapiens
FHSEEQQLLL

SEQ ID NO: 94062 - protein, 10 aa, Homo Sapiens
FHSEIEDFLL

SEQ ID NO: 94063 - protein, 10 aa, Homo Sapiens
FHSGDDSQVL

SEQ ID NO: 94064 - protein, 10 aa, Homo Sapiens
FHSNDVATLL

SEQ ID NO: 94065 - protein, 10 aa, Homo Sapiens
FHSVAEEELL

SEQ ID NO: 94066 - protein, 10 aa, Homo Sapiens
FHTEALTALL

SEQ ID NO: 94067 - protein, 10 aa, Homo Sapiens
FHVEPGLQRL

SEQ ID NO: 94068 - protein, 10 aa, Homo Sapiens
FHVGAFGELW

SEQ ID NO: 94069 - protein, 10 aa, Homo Sapiens
FHVGAHVNTF

SEQ ID NO: 94070 - protein, 10 aa, Homo Sapiens
FHVIDDFVQF

SEQ ID NO: 94071 - protein, 10 aa, Homo Sapiens
FHYNGTDVSF

SEQ ID NO: 94072 - protein, 10 aa, Homo Sapiens
GAHHGPGVLG

SEQ ID NO: 94073 - protein, 10 aa, Homo Sapiens
GHDEYSTQSL

SEQ ID NO: 94074 - protein, 10 aa, Homo Sapiens
GHDKVLSILL

SEQ ID NO: 94075 - protein, 10 aa, Homo Sapiens
GHDPHLLYTL

SEQ ID NO: 94076 - protein, 10 aa, Homo Sapiens
GHDPKEPEQL

SEQ ID NO: 94077 - protein, 10 aa, Homo Sapiens
GHDPNLSLLL

SEQ ID NO: 94078 - protein, 10 aa, Homo Sapiens
GHDPRAQGTL

SEQ ID NO: 94079 - protein, 10 aa, Homo Sapiens
GHEELVSVLI

SEQ ID NO: 94080 - protein, 10 aa, Homo Sapiens
GHGPAETQTL

SEQ ID NO: 94081 - protein, 10 aa, Homo Sapiens
GHIFTVNDQF

SEQ ID NO: 94082 - protein, 10 aa, Homo Sapiens
GHIQESRVTI

SEQ ID NO: 94083 - protein, 10 aa, Homo Sapiens
GHMDSRLDEL

SEQ ID NO: 94084 - protein, 10 aa, Homo Sapiens
GHTHFGNDNF

SEQ ID NO: 94085 - protein, 10 aa, Homo Sapiens
GHVEDDYILF

SEQ ID NO: 94086 - protein, 10 aa, Homo Sapiens
GHYEVTELLL

SEQ ID NO: 94087 - protein, 10 aa, Homo Sapiens
HDADRIHNEL

SEQ ID NO: 94088 - protein, 10 aa, Homo Sapiens
HDGLTVHLVI

SEQ ID NO: 94089 - protein, 10 aa, Homo Sapiens
HEDVSLQYFI

SEQ ID NO: 94090 - protein, 10 aa, Homo Sapiens
HEDVVNSVVF

SEQ ID NO: 94091 - protein, 10 aa, Homo Sapiens
HENVVNLIEI

SEQ ID NO: 94092 - protein, 10 aa, Homo Sapiens
HHAAAPAVSL

SEQ ID NO: 94093 - protein, 10 aa, Homo Sapiens
HHADDSFLVL

SEQ ID NO: 94094 - protein, 10 aa, Homo Sapiens
HHAEPLAAVL

SEQ ID NO: 94095 - protein, 10 aa, Homo Sapiens
HHAEYLTELL

SEQ ID NO: 94096 - protein, 10 aa, Homo Sapiens
HHAQAHKALF

SEQ ID NO: 94097 - protein, 10 aa, Homo Sapiens
HHAQDYGGLL

SEQ ID NO: 94098 - protein, 10 aa, Homo Sapiens
HHATHLSNTL

SEQ ID NO: 94099 - protein, 10 aa, Homo Sapiens
HHCEHLLERL

SEQ ID NO: 94100 - protein, 10 aa, Homo Sapiens
HHCNSFLEEL

SEQ ID NO: 94101 - protein, 10 aa, Homo Sapiens
HHCPDVPILL

SEQ ID NO: 94102 - protein, 10 aa, Homo Sapiens
HHCPHTPILL

SEQ ID NO: 94103 - protein, 10 aa, Homo Sapiens
HHDFHHMNFI

SEQ ID NO: 94104 - protein, 10 aa, Homo Sapiens
HHDHHDEFCL

SEQ ID NO: 94105 - protein, 10 aa, Homo Sapiens
HHDMVMDLAF

SEQ ID NO: 94106 - protein, 10 aa, Homo Sapiens
HHDNTYTVKY

SEQ ID NO: 94107 - protein, 10 aa, Homo Sapiens
HHDSHSSVIL

SEQ ID NO: 94108 - protein, 10 aa, Homo Sapiens
HHDSPALEVF

SEQ ID NO: 94109 - protein, 10 aa, Homo Sapiens
HHDYIDSPSL

SEQ ID NO: 94110 - protein, 10 aa, Homo Sapiens
HHDYSTYTFL

SEQ ID NO: 94111 - protein, 10 aa, Homo Sapiens
HHEAITCLEW

SEQ ID NO: 94112 - protein, 10 aa, Homo Sapiens
HHEEDFFLYI

SEQ ID NO: 94113 - protein, 10 aa, Homo Sapiens
HHEGYVHADL

SEQ ID NO: 94114 - protein, 10 aa, Homo Sapiens
HHELHAAHLL

SEQ ID NO: 94115 - protein, 10 aa, Homo Sapiens
HHELVYEAII

SEQ ID NO: 94116 - protein, 10 aa, Homo Sapiens
HHEPGVADRL

SEQ ID NO: 94117 - protein, 10 aa, Homo Sapiens
HHFLIGNNFL

SEQ ID NO: 94118 - protein, 10 aa, Homo Sapiens
HHGEEEVETF

SEQ ID NO: 94119 - protein, 10 aa, Homo Sapiens
HHGTAQLQAL

SEQ ID NO: 94120 - protein, 10 aa, Homo Sapiens
HHGTSILTLF

SEQ ID NO: 94121 - protein, 10 aa, Homo Sapiens
HHHIASVEKL

SEQ ID NO: 94122 - protein, 10 aa, Homo Sapiens
HHHYEGAVVI

SEQ ID NO: 94123 - protein, 10 aa, Homo Sapiens
HHIDPALPYI

SEQ ID NO: 94124 - protein, 10 aa, Homo Sapiens
HHIDSANALY

SEQ ID NO: 94125 - protein, 10 aa, Homo Sapiens
HHIEAQQRLL

SEQ ID NO: 94126 - protein, 10 aa, Homo Sapiens
HHIEQLNDKL

SEQ ID NO: 94127 - protein, 10 aa, Homo Sapiens
HHINDTDTIL

SEQ ID NO: 94128 - protein, 10 aa, Homo Sapiens
HHIPDVITYL

SEQ ID NO: 94129 - protein, 10 aa, Homo Sapiens
HHIQEIMVQL

SEQ ID NO: 94130 - protein, 10 aa, Homo Sapiens
HHISSKYDEL

SEQ ID NO: 94131 - protein, 10 aa, Homo Sapiens
HHIYDKTSVL

SEQ ID NO: 94132 - protein, 10 aa, Homo Sapiens
HHLDPDTELM

SEQ ID NO: 94133 - protein, 10 aa, Homo Sapiens
HHLEEPVIFI

SEQ ID NO: 94134 - protein, 10 aa, Homo Sapiens
HHLGSVILIF

SEQ ID NO: 94135 - protein, 10 aa, Homo Sapiens
HHLLLEVEVI

SEQ ID NO: 94136 - protein, 10 aa, Homo Sapiens
HHNQSTAINL

SEQ ID NO: 94137 - protein, 10 aa, Homo Sapiens
HHQDHKTELL

SEQ ID NO: 94138 - protein, 10 aa, Homo Sapiens
HHSAFSQMVI

SEQ ID NO: 94139 - protein, 10 aa, Homo Sapiens
HHSEEGRDTL

SEQ ID NO: 94140 - protein, 10 aa, Homo Sapiens
HHSKWLDETL

SEQ ID NO: 94141 - protein, 10 aa, Homo Sapiens
HHSTQMQELF

SEQ ID NO: 94142 - protein, 10 aa, Homo Sapiens
HHSYEDTGLL

SEQ ID NO: 94143 - protein, 10 aa, Homo Sapiens
HHTKPDKYQL

SEQ ID NO: 94144 - protein, 10 aa, Homo Sapiens
HHVAPELDEL

SEQ ID NO: 94145 - protein, 10 aa, Homo Sapiens
HHVENKGATL

SEQ ID NO: 94146 - protein, 10 aa, Homo Sapiens
HHVSPHETYF

SEQ ID NO: 94147 - protein, 10 aa, Homo Sapiens
HHVYLEGTLL

SEQ ID NO: 94148 - protein, 10 aa, Homo Sapiens
HHVYSGKDLI

SEQ ID NO: 94149 - protein, 10 aa, Homo Sapiens
HHYEGAVVIL

SEQ ID NO: 94150 - protein, 10 aa, Homo Sapiens
HHYFSKADHF

SEQ ID NO: 94151 - protein, 10 aa, Homo Sapiens
HHYNSHYEKF

SEQ ID NO: 94152 - protein, 10 aa, Homo Sapiens
HHYPGPGNHF

SEQ ID NO: 94153 - protein, 10 aa, Homo Sapiens
HHYSGNNIEL

SEQ ID NO: 94154 - protein, 10 aa, Homo Sapiens
HHYTEAERSL

SEQ ID NO: 94155 - protein, 10 aa, Homo Sapiens
HPISDHEATL

SEQ ID NO: 94156 - protein, 10 aa, Homo Sapiens
HQDPGQPLYI

SEQ ID NO: 94157 - protein, 10 aa, Homo Sapiens
HQNDDAEVSL

SEQ ID NO: 94158 - protein, 10 aa, Homo Sapiens
HSLTMDLWIP

SEQ ID NO: 94159 - protein, 10 aa, Homo Sapiens
IHAFVQDTTL

SEQ ID NO: 94160 - protein, 10 aa, Homo Sapiens
IHAGIIADEL

SEQ ID NO: 94161 - protein, 10 aa, Homo Sapiens
IHDFMSEYLI

SEQ ID NO: 94162 - protein, 10 aa, Homo Sapiens
IHDGAAGVHF

SEQ ID NO: 94163 - protein, 10 aa, Homo Sapiens
IHDGTVTHTF

SEQ ID NO: 94164 - protein, 10 aa, Homo Sapiens
IHDPGRGAPL

SEQ ID NO: 94165 - protein, 10 aa, Homo Sapiens
IHEAMEQQTI

SEQ ID NO: 94166 - protein, 10 aa, Homo Sapiens
IHEDLLGLTF

SEQ ID NO: 94167 - protein, 10 aa, Homo Sapiens
IHEGAVTHTF

SEQ ID NO: 94168 - protein, 10 aa, Homo Sapiens
IHEGENSYKF

SEQ ID NO: 94169 - protein, 10 aa, Homo Sapiens
IHEPEPHILL

SEQ ID NO: 94170 - protein, 10 aa, Homo Sapiens
IHGDTVQNQL

SEQ ID NO: 94171 - protein, 10 aa, Homo Sapiens
IHHSGAKVVL

SEQ ID NO: 94172 - protein, 10 aa, Homo Sapiens
IHILEVTNNL

SEQ ID NO: 94173 - protein, 10 aa, Homo Sapiens
IHMETDPQTI

SEQ ID NO: 94174 - protein, 10 aa, Homo Sapiens
IHSPASETLL

SEQ ID NO: 94175 - protein, 10 aa, Homo Sapiens
IHSSIVSTLL

SEQ ID NO: 94176 - protein, 10 aa, Homo Sapiens
IHVGQAGVQI

SEQ ID NO: 94177 - protein, 10 aa, Homo Sapiens
IHYLDTTTLI

SEQ ID NO: 94178 - protein, 10 aa, Homo Sapiens
ILDNDGDRLF

SEQ ID NO: 94179 - protein, 10 aa, Homo Sapiens
IQAGQCGNQI

SEQ ID NO: 94180 - protein, 10 aa, Homo Sapiens
IQDGKGDVTI

SEQ ID NO: 94181 - protein, 10 aa, Homo Sapiens
IWQTHNALFI

SEQ ID NO: 94182 - protein, 10 aa, Homo Sapiens
KHDPTSANLL

SEQ ID NO: 94183 - protein, 10 aa, Homo Sapiens
KLIDDQDISI

SEQ ID NO: 94184 - protein, 10 aa, Homo Sapiens
KQILEGVYYL

SEQ ID NO: 94185 - protein, 10 aa, Homo Sapiens
LHCDIIGDAF

SEQ ID NO: 94186 - protein, 10 aa, Homo Sapiens
LHDATRDLVL

SEQ ID NO: 94187 - protein, 10 aa, Homo Sapiens
LHDTVTTLIL

SEQ ID NO: 94188 - protein, 10 aa, Homo Sapiens
LHEGTGPRVI

SEQ ID NO: 94189 - protein, 10 aa, Homo Sapiens
LHIDPNFASL

SEQ ID NO: 94190 - protein, 10 aa, Homo Sapiens
LHIEAYNETF

SEQ ID NO: 94191 - protein, 10 aa, Homo Sapiens
LHIESQVELL

SEQ ID NO: 94192 - protein, 10 aa, Homo Sapiens
LHIPYAGETL

SEQ ID NO: 94193 - protein, 10 aa, Homo Sapiens
LHSMEVVNRL

SEQ ID NO: 94194 - protein, 10 aa, Homo Sapiens
LHSNPEPKTF

SEQ ID NO: 94195 - protein, 10 aa, Homo Sapiens
LHTSIGNSVW

SEQ ID NO: 94196 - protein, 10 aa, Homo Sapiens
LHVSGESSVF

SEQ ID NO: 94197 - protein, 10 aa, Homo Sapiens
LPEPNILQLL

SEQ ID NO: 94198 - protein, 10 aa, Homo Sapiens
LPVNDEHVTV

SEQ ID NO: 94199 - protein, 10 aa, Homo Sapiens
MHCGTTSDQF

SEQ ID NO: 94200 - protein, 10 aa, Homo Sapiens
MHDKQGEVRL

SEQ ID NO: 94201 - protein, 10 aa, Homo Sapiens
MHDYDGNNLL

SEQ ID NO: 94202 - protein, 10 aa, Homo Sapiens
MHIDNNILLI

SEQ ID NO: 94203 - protein, 10 aa, Homo Sapiens
MHINVAVETL

SEQ ID NO: 94204 - protein, 10 aa, Homo Sapiens
MHISESQQEF

SEQ ID NO: 94205 - protein, 10 aa, Homo Sapiens
MHLLEEPIYL

SEQ ID NO: 94206 - protein, 10 aa, Homo Sapiens
MHMPAEQAFW

SEQ ID NO: 94207 - protein, 10 aa, Homo Sapiens
MHSDAAAVNF

SEQ ID NO: 94208 - protein, 10 aa, Homo Sapiens
MHSGVDTSVL

SEQ ID NO: 94209 - protein, 10 aa, Homo Sapiens
MHYNQTVDIW

SEQ ID NO: 94210 - protein, 10 aa, Homo Sapiens
MQCDAKFDFL

SEQ ID NO: 94211 - protein, 10 aa, Homo Sapiens
MRDPDDQYKL

SEQ ID NO: 94212 - protein, 10 aa, Homo Sapiens
NHADILLINL

SEQ ID NO: 94213 - protein, 10 aa, Homo Sapiens
NHAPGATDAF

SEQ ID NO: 94214 - protein, 10 aa, Homo Sapiens
NHAPGATEAF

SEQ ID NO: 94215 - protein, 10 aa, Homo Sapiens
NHASSEQLYF

SEQ ID NO: 94216 - protein, 10 aa, Homo Sapiens
NHASYYKDAL

SEQ ID NO: 94217 - protein, 10 aa, Homo Sapiens
NHCYIAILNI

SEQ ID NO: 94218 - protein, 10 aa, Homo Sapiens
NHDASSIPRL

SEQ ID NO: 94219 - protein, 10 aa, Homo Sapiens
NHDFSAGLII

SEQ ID NO: 94220 - protein, 10 aa, Homo Sapiens
NHDGDFGITL

SEQ ID NO: 94221 - protein, 10 aa, Homo Sapiens
NHDKLIPLLL

SEQ ID NO: 94222 - protein, 10 aa, Homo Sapiens
NHDLGENHHL

SEQ ID NO: 94223 - protein, 10 aa, Homo Sapiens
NHDPNTHHCL

SEQ ID NO: 94224 - protein, 10 aa, Homo Sapiens
NHDPVVGDRL

SEQ ID NO: 94225 - protein, 10 aa, Homo Sapiens
NHDRPDVCIL

SEQ ID NO: 94226 - protein, 10 aa, Homo Sapiens
NHDSTHVIRF

SEQ ID NO: 94227 - protein, 10 aa, Homo Sapiens
NHDTSFAKTF

SEQ ID NO: 94228 - protein, 10 aa, Homo Sapiens
NHDYMKQMTF

SEQ ID NO: 94229 - protein, 10 aa, Homo Sapiens
NHECASINRI

SEQ ID NO: 94230 - protein, 10 aa, Homo Sapiens
NHEDKIRVVL

SEQ ID NO: 94231 - protein, 10 aa, Homo Sapiens
NHEFLVKPSF

SEQ ID NO: 94232 - protein, 10 aa, Homo Sapiens
NHENEDIYKL

SEQ ID NO: 94233 - protein, 10 aa, Homo Sapiens
NHETECITFL

SEQ ID NO: 94234 - protein, 10 aa, Homo Sapiens
NHFPGEAETL

SEQ ID NO: 94235 - protein, 10 aa, Homo Sapiens
NHHLDSQSRW

SEQ ID NO: 94236 - protein, 10 aa, Homo Sapiens
NHIEPLKIQL

SEQ ID NO: 94237 - protein, 10 aa, Homo Sapiens
NHIGVTEVLL

SEQ ID NO: 94238 - protein, 10 aa, Homo Sapiens
NHINVELSLL

SEQ ID NO: 94239 - protein, 10 aa, Homo Sapiens
NHIRNGIDIL

SEQ ID NO: 94240 - protein, 10 aa, Homo Sapiens
NHITHTGVYL

SEQ ID NO: 94241 - protein, 10 aa, Homo Sapiens
NHQEVVELLI

SEQ ID NO: 94242 - protein, 10 aa, Homo Sapiens
NHQGATPLVL

SEQ ID NO: 94243 - protein, 10 aa, Homo Sapiens
NHSDPESMSL

SEQ ID NO: 94244 - protein, 10 aa, Homo Sapiens
NHSNADFHRI

SEQ ID NO: 94245 - protein, 10 aa, Homo Sapiens
NHVAAHGQSL

SEQ ID NO: 94246 - protein, 10 aa, Homo Sapiens
NHVSQASVTI

SEQ ID NO: 94247 - protein, 10 aa, Homo Sapiens
NHVTPPNVSL

SEQ ID NO: 94248 - protein, 10 aa, Homo Sapiens
NHYKSNVEIF

SEQ ID NO: 94249 - protein, 10 aa, Homo Sapiens
NRLEVVKEFL

SEQ ID NO: 94250 - protein, 10 aa, Homo Sapiens
QAHNKEIYTI

SEQ ID NO: 94251 - protein, 10 aa, Homo Sapiens
QHADPPVQIL

SEQ ID NO: 94252 - protein, 10 aa, Homo Sapiens
QHADVARAML

SEQ ID NO: 94253 - protein, 10 aa, Homo Sapiens
QHAEADREQL

SEQ ID NO: 94254 - protein, 10 aa, Homo Sapiens
QHAIEESVVL

SEQ ID NO: 94255 - protein, 10 aa, Homo Sapiens
QHCDLELSIL

SEQ ID NO: 94256 - protein, 10 aa, Homo Sapiens
QHDAASLLKL

SEQ ID NO: 94257 - protein, 10 aa, Homo Sapiens
QHDEPCYWRL

SEQ ID NO: 94258 - protein, 10 aa, Homo Sapiens
QHDFGHLSVF

SEQ ID NO: 94259 - protein, 10 aa, Homo Sapiens
QHDFQAPYLL

SEQ ID NO: 94260 - protein, 10 aa, Homo Sapiens
QHDGPTKNLF

SEQ ID NO: 94261 - protein, 10 aa, Homo Sapiens
QHDGSITASL

SEQ ID NO: 94262 - protein, 10 aa, Homo Sapiens
QHDITGRALL

SEQ ID NO: 94263 - protein, 10 aa, Homo Sapiens
QHDLSQSAFL

SEQ ID NO: 94264 - protein, 10 aa, Homo Sapiens
QHDPGQLLGW

SEQ ID NO: 94265 - protein, 10 aa, Homo Sapiens
QHDPKAETRL

SEQ ID NO: 94266 - protein, 10 aa, Homo Sapiens
QHDSQELLSF

SEQ ID NO: 94267 - protein, 10 aa, Homo Sapiens
QHDVFGDISF

SEQ ID NO: 94268 - protein, 10 aa, Homo Sapiens
QHECIPQAIL

SEQ ID NO: 94269 - protein, 10 aa, Homo Sapiens
QHEDLAKKSI

SEQ ID NO: 94270 - protein, 10 aa, Homo Sapiens
QHEERRCQYL

SEQ ID NO: 94271 - protein, 10 aa, Homo Sapiens
QHEIFVDYEL

SEQ ID NO: 94272 - protein, 10 aa, Homo Sapiens
QHELVTTQRL

SEQ ID NO: 94273 - protein, 10 aa, Homo Sapiens
QHENEDIYKL

SEQ ID NO: 94274 - protein, 10 aa, Homo Sapiens
QHETSSPALL

SEQ ID NO: 94275 - protein, 10 aa, Homo Sapiens
QHFDLASTTI

SEQ ID NO: 94276 - protein, 10 aa, Homo Sapiens
QHFLEPEVNL

SEQ ID NO: 94277 - protein, 10 aa, Homo Sapiens
QHIAGFLDGF

SEQ ID NO: 94278 - protein, 10 aa, Homo Sapiens
QHIEVLKESL

SEQ ID NO: 94279 - protein, 10 aa, Homo Sapiens
QHIGTGNLYI

SEQ ID NO: 94280 - protein, 10 aa, Homo Sapiens
QHIQDGALRL

SEQ ID NO: 94281 - protein, 10 aa, Homo Sapiens
QHIQVFIDRF

SEQ ID NO: 94282 - protein, 10 aa, Homo Sapiens
QHIYKEIVNF

SEQ ID NO: 94283 - protein, 10 aa, Homo Sapiens
QHLETQNVTF

SEQ ID NO: 94284 - protein, 10 aa, Homo Sapiens
QHLNPDPQLI

SEQ ID NO: 94285 - protein, 10 aa, Homo Sapiens
QHLQATGVSL

SEQ ID NO: 94286 - protein, 10 aa, Homo Sapiens
QHLREDNLRL

SEQ ID NO: 94287 - protein, 10 aa, Homo Sapiens
QHNDALTVTL

SEQ ID NO: 94288 - protein, 10 aa, Homo Sapiens
QHNIPFPCLL

SEQ ID NO: 94289 - protein, 10 aa, Homo Sapiens
QHQAAQALHL

SEQ ID NO: 94290 - protein, 10 aa, Homo Sapiens
QHQDSQVNAL

SEQ ID NO: 94291 - protein, 10 aa, Homo Sapiens
QHQEVKPYTL

SEQ ID NO: 94292 - protein, 10 aa, Homo Sapiens
QHQGPDDIYL

SEQ ID NO: 94293 - protein, 10 aa, Homo Sapiens
QHQLDTILFF

SEQ ID NO: 94294 - protein, 10 aa, Homo Sapiens
QHQSGIVQLL

SEQ ID NO: 94295 - protein, 10 aa, Homo Sapiens
QHSASSANVF

SEQ ID NO: 94296 - protein, 10 aa, Homo Sapiens
QHSEFEEVTI

SEQ ID NO: 94297 - protein, 10 aa, Homo Sapiens
QHSLAITNNF

SEQ ID NO: 94298 - protein, 10 aa, Homo Sapiens
QHSNVVINLI

SEQ ID NO: 94299 - protein, 10 aa, Homo Sapiens
QHSQEFINRL

SEQ ID NO: 94300 - protein, 10 aa, Homo Sapiens
QHTDTVVNFL

SEQ ID NO: 94301 - protein, 10 aa, Homo Sapiens
QHVDESGLSL

SEQ ID NO: 94302 - protein, 10 aa, Homo Sapiens
QQIEAQQQLL

SEQ ID NO: 94303 - protein, 10 aa, Homo Sapiens
QQLEDEFYTF

SEQ ID NO: 94304 - protein, 10 aa, Homo Sapiens
QQMEAEHNTL

SEQ ID NO: 94305 - protein, 10 aa, Homo Sapiens
RHDPNMKYEL

SEQ ID NO: 94306 - protein, 10 aa, Homo Sapiens
RHDPQTTNLL

SEQ ID NO: 94307 - protein, 10 aa, Homo Sapiens
RHESGASIKI

SEQ ID NO: 94308 - protein, 10 aa, Homo Sapiens
RHIEAHRILL

SEQ ID NO: 94309 - protein, 10 aa, Homo Sapiens
RHIIEDPCTL

SEQ ID NO: 94310 - protein, 10 aa, Homo Sapiens
RHLDMEHERL

SEQ ID NO: 94311 - protein, 10 aa, Homo Sapiens
RHMQAKGILL

SEQ ID NO: 94312 - protein, 10 aa, Homo Sapiens
RQGVDADING

SEQ ID NO: 94313 - protein, 10 aa, Homo Sapiens
SFPAALIILL

SEQ ID NO: 94314 - protein, 10 aa, Homo Sapiens
SHAENILQIF

SEQ ID NO: 94315 - protein, 10 aa, Homo Sapiens
SHCNIIHTEI

SEQ ID NO: 94316 - protein, 10 aa, Homo Sapiens
SHCQEAGATL

SEQ ID NO: 94317 - protein, 10 aa, Homo Sapiens
SHCVPDVSTI

SEQ ID NO: 94318 - protein, 10 aa, Homo Sapiens
SHDISRNVTL

SEQ ID NO: 94319 - protein, 10 aa, Homo Sapiens
SHDNGSQFFF

SEQ ID NO: 94320 - protein, 10 aa, Homo Sapiens
SHDVSGALLL

SEQ ID NO: 94321 - protein, 10 aa, Homo Sapiens
SHDVSLANRM

SEQ ID NO: 94322 - protein, 10 aa, Homo Sapiens
SHEAATKAVL

SEQ ID NO: 94323 - protein, 10 aa, Homo Sapiens
SHEAGDPQLF

SEQ ID NO: 94324 - protein, 10 aa, Homo Sapiens
SHEEPAFQNF

SEQ ID NO: 94325 - protein, 10 aa, Homo Sapiens
SHEGEILQAF

SEQ ID NO: 94326 - protein, 10 aa, Homo Sapiens
SHEGLVLTKL

SEQ ID NO: 94327 - protein, 10 aa, Homo Sapiens
SHEGSSFQMF

SEQ ID NO: 94328 - protein, 10 aa, Homo Sapiens
SHENPVDILI

SEQ ID NO: 94329 - protein, 10 aa, Homo Sapiens
SHFEGLITTI

SEQ ID NO: 94330 - protein, 10 aa, Homo Sapiens
SHFFSENEDF

SEQ ID NO: 94331 - protein, 10 aa, Homo Sapiens
SHGEVHLDCL

SEQ ID NO: 94332 - protein, 10 aa, Homo Sapiens
SHHEAEFQHL

SEQ ID NO: 94333 - protein, 10 aa, Homo Sapiens
SHIEDQAEQF

SEQ ID NO: 94334 - protein, 10 aa, Homo Sapiens
SHIKDFAAKL

SEQ ID NO: 94335 - protein, 10 aa, Homo Sapiens
SHILISGDGL

SEQ ID NO: 94336 - protein, 10 aa, Homo Sapiens
SHIVRGEHTF

SEQ ID NO: 94337 - protein, 10 aa, Homo Sapiens
SHLNALEERF

SEQ ID NO: 94338 - protein, 10 aa, Homo Sapiens
SHLPPFFDCL

SEQ ID NO: 94339 - protein, 10 aa, Homo Sapiens
SHMPAETEEL

SEQ ID NO: 94340 - protein, 10 aa, Homo Sapiens
SHQDITEDSF

SEQ ID NO: 94341 - protein, 10 aa, Homo Sapiens
SHQEARNMLL

SEQ ID NO: 94342 - protein, 10 aa, Homo Sapiens
SHSDDGCLKL

SEQ ID NO: 94343 - protein, 10 aa, Homo Sapiens
SHSDGSFNLL

SEQ ID NO: 94344 - protein, 10 aa, Homo Sapiens
SHSDSSVITI

SEQ ID NO: 94345 - protein, 10 aa, Homo Sapiens
SHSGPEISRI

SEQ ID NO: 94346 - protein, 10 aa, Homo Sapiens
SHSGSDSPTL

SEQ ID NO: 94347 - protein, 10 aa, Homo Sapiens
SHSNPEGSSW

SEQ ID NO: 94348 - protein, 10 aa, Homo Sapiens
SHSPFGLDSF

SEQ ID NO: 94349 - protein, 10 aa, Homo Sapiens
SHSSYVLQQL

SEQ ID NO: 94350 - protein, 10 aa, Homo Sapiens
SHVKEPRYLL

SEQ ID NO: 94351 - protein, 10 aa, Homo Sapiens
SHVNYFLDQF

SEQ ID NO: 94352 - protein, 10 aa, Homo Sapiens
SHVPYTSVFL

SEQ ID NO: 94353 - protein, 10 aa, Homo Sapiens
SHVRPDRQTL

SEQ ID NO: 94354 - protein, 10 aa, Homo Sapiens
SHVSLVQLTL

SEQ ID NO: 94355 - protein, 10 aa, Homo Sapiens
SKDPGENYNL

SEQ ID NO: 94356 - protein, 10 aa, Homo Sapiens
SLLDDTTVTL

SEQ ID NO: 94357 - protein, 10 aa, Homo Sapiens
SMDNNRSLDL

SEQ ID NO: 94358 - protein, 10 aa, Homo Sapiens
SQLDDQYSRF

SEQ ID NO: 94359 - protein, 10 aa, Homo Sapiens
SRCPHLLDFF

SEQ ID NO: 94360 - protein, 10 aa, Homo Sapiens
SRMLEDRDLF

SEQ ID NO: 94361 - protein, 10 aa, Homo Sapiens
THAKSILNSM

SEQ ID NO: 94362 - protein, 10 aa, Homo Sapiens
THANNTVSNF

SEQ ID NO: 94363 - protein, 10 aa, Homo Sapiens
THAPLPEVQL

SEQ ID NO: 94364 - protein, 10 aa, Homo Sapiens
THAQVEDGRL

SEQ ID NO: 94365 - protein, 10 aa, Homo Sapiens
THAVPIYEGF

SEQ ID NO: 94366 - protein, 10 aa, Homo Sapiens
THCEIHPSMI

SEQ ID NO: 94367 - protein, 10 aa, Homo Sapiens
THCLPEPHLL

SEQ ID NO: 94368 - protein, 10 aa, Homo Sapiens
THCLWTDQLL

SEQ ID NO: 94369 - protein, 10 aa, Homo Sapiens
THCPPSSIEL

SEQ ID NO: 94370 - protein, 10 aa, Homo Sapiens
THCTYDRVVL

SEQ ID NO: 94371 - protein, 10 aa, Homo Sapiens
THDDFVMIDF

SEQ ID NO: 94372 - protein, 10 aa, Homo Sapiens
THDDSHLVSL

SEQ ID NO: 94373 - protein, 10 aa, Homo Sapiens
THDEDFVELL

SEQ ID NO: 94374 - protein, 10 aa, Homo Sapiens
THDELIQLVL

SEQ ID NO: 94375 - protein, 10 aa, Homo Sapiens
THDQSISQKL

SEQ ID NO: 94376 - protein, 10 aa, Homo Sapiens
THDQVLKTRL

SEQ ID NO: 94377 - protein, 10 aa, Homo Sapiens
THDSVTVLLF

SEQ ID NO: 94378 - protein, 10 aa, Homo Sapiens
THDVPYHDYF

SEQ ID NO: 94379 - protein, 10 aa, Homo Sapiens
THEDAVAAML

SEQ ID NO: 94380 - protein, 10 aa, Homo Sapiens
THEDPVIAVF

SEQ ID NO: 94381 - protein, 10 aa, Homo Sapiens
THEGTSVTNL

SEQ ID NO: 94382 - protein, 10 aa, Homo Sapiens
THENLTYLQL

SEQ ID NO: 94383 - protein, 10 aa, Homo Sapiens
THEQGSVMMF

SEQ ID NO: 94384 - protein, 10 aa, Homo Sapiens
THFDTIFEVF

SEQ ID NO: 94385 - protein, 10 aa, Homo Sapiens
THFENENQKL

SEQ ID NO: 94386 - protein, 10 aa, Homo Sapiens
THFKELPTLL

SEQ ID NO: 94387 - protein, 10 aa, Homo Sapiens
THFQQGHEEL

SEQ ID NO: 94388 - protein, 10 aa, Homo Sapiens
THFTGNEVGF

SEQ ID NO: 94389 - protein, 10 aa, Homo Sapiens
THHKDHFTKL

SEQ ID NO: 94390 - protein, 10 aa, Homo Sapiens
THICPVYEGF

SEQ ID NO: 94391 - protein, 10 aa, Homo Sapiens
THIPNIFQKI

SEQ ID NO: 94392 - protein, 10 aa, Homo Sapiens
THISALLQYI

SEQ ID NO: 94393 - protein, 10 aa, Homo Sapiens
THISPYKDLL

SEQ ID NO: 94394 - protein, 10 aa, Homo Sapiens
THISSQNSEL

SEQ ID NO: 94395 - protein, 10 aa, Homo Sapiens
THISSSGQNL

SEQ ID NO: 94396 - protein, 10 aa, Homo Sapiens
THITAQTAVL

SEQ ID NO: 94397 - protein, 10 aa, Homo Sapiens
THLINFSETL

SEQ ID NO: 94398 - protein, 10 aa, Homo Sapiens
THLKAVKMTL

SEQ ID NO: 94399 - protein, 10 aa, Homo Sapiens
THLSGLLDIF

SEQ ID NO: 94400 - protein, 10 aa, Homo Sapiens
THLTSMFEYL

SEQ ID NO: 94401 - protein, 10 aa, Homo Sapiens
THMSPSWTLL

SEQ ID NO: 94402 - protein, 10 aa, Homo Sapiens
THQEAVSALL

SEQ ID NO: 94403 - protein, 10 aa, Homo Sapiens
THQSEVAQSF

SEQ ID NO: 94404 - protein, 10 aa, Homo Sapiens
THSAVDNILL

SEQ ID NO: 94405 - protein, 10 aa, Homo Sapiens
THSIPENTNF

SEQ ID NO: 94406 - protein, 10 aa, Homo Sapiens
THSSVVLQGF

SEQ ID NO: 94407 - protein, 10 aa, Homo Sapiens
THTETGKVLF

SEQ ID NO: 94408 - protein, 10 aa, Homo Sapiens
THTSPEDVSF

SEQ ID NO: 94409 - protein, 10 aa, Homo Sapiens
THVEDLNAKW

SEQ ID NO: 94410 - protein, 10 aa, Homo Sapiens
THVKEQLETL

SEQ ID NO: 94411 - protein, 10 aa, Homo Sapiens
THVQSQLEKL

SEQ ID NO: 94412 - protein, 10 aa, Homo Sapiens
THVSNGCQLL

SEQ ID NO: 94413 - protein, 10 aa, Homo Sapiens
THYDHVLIEL

SEQ ID NO: 94414 - protein, 10 aa, Homo Sapiens
TLIQSFTDRL

SEQ ID NO: 94415 - protein, 10 aa, Homo Sapiens
TQDFPESNRL

SEQ ID NO: 94416 - protein, 10 aa, Homo Sapiens
TQDHNTPALL

SEQ ID NO: 94417 - protein, 10 aa, Homo Sapiens
TQDPHVNAFF

SEQ ID NO: 94418 - protein, 10 aa, Homo Sapiens
TQENVVKTLL

SEQ ID NO: 94419 - protein, 10 aa, Homo Sapiens
TQGPAESSSL

SEQ ID NO: 94420 - protein, 10 aa, Homo Sapiens
TQIGGERYNF

SEQ ID NO: 94421 - protein, 10 aa, Homo Sapiens
TQMESEKENL

SEQ ID NO: 94422 - protein, 10 aa, Homo Sapiens
TQVDPEIELF

SEQ ID NO: 94423 - protein, 10 aa, Homo Sapiens
TRLSITNETF

SEQ ID NO: 94424 - protein, 10 aa, Homo Sapiens
VHAPPMQLGF

SEQ ID NO: 94425 - protein, 10 aa, Homo Sapiens
VHCGIIEPLM

SEQ ID NO: 94426 - protein, 10 aa, Homo Sapiens
VHDANTLYIF

SEQ ID NO: 94427 - protein, 10 aa, Homo Sapiens
VHDNQILIVI

SEQ ID NO: 94428 - protein, 10 aa, Homo Sapiens
VHEDRSIQQI

SEQ ID NO: 94429 - protein, 10 aa, Homo Sapiens
VHIPNDDAQF

SEQ ID NO: 94430 - protein, 10 aa, Homo Sapiens
VHSFEEGSEL

SEQ ID NO: 94431 - protein, 10 aa, Homo Sapiens
VHSTPGANVL

SEQ ID NO: 94432 - protein, 10 aa, Homo Sapiens
VHVNVSGNEL

SEQ ID NO: 94433 - protein, 10 aa, Homo Sapiens
VTIKKDVDGA

SEQ ID NO: 94434 - protein, 10 aa, Homo Sapiens
VVPPFLQPEV

SEQ ID NO: 94435 - protein, 10 aa, Homo Sapiens
WHDEQGHNGL

SEQ ID NO: 94436 - protein, 10 aa, Homo Sapiens
WHEEMKNQII

SEQ ID NO: 94437 - protein, 10 aa, Homo Sapiens
WHIYSEEEYL

SEQ ID NO: 94438 - protein, 10 aa, Homo Sapiens
WHQTGGEVTI

SEQ ID NO: 94439 - protein, 10 aa, Homo Sapiens
WHTTAQNVLL

SEQ ID NO: 94440 - protein, 10 aa, Homo Sapiens
YHAEEVEERF

SEQ ID NO: 94441 - protein, 10 aa, Homo Sapiens
YHAKDPNNLF

SEQ ID NO: 94442 - protein, 10 aa, Homo Sapiens
YHAKLENARL

SEQ ID NO: 94443 - protein, 10 aa, Homo Sapiens
YHAPPRLHHL

SEQ ID NO: 94444 - protein, 10 aa, Homo Sapiens
YHAQPLEDNL

SEQ ID NO: 94445 - protein, 10 aa, Homo Sapiens
YHDEADQSAL

SEQ ID NO: 94446 - protein, 10 aa, Homo Sapiens
YHDFSVQNFI

SEQ ID NO: 94447 - protein, 10 aa, Homo Sapiens
YHDGNRNPKF

SEQ ID NO: 94448 - protein, 10 aa, Homo Sapiens
YHDNHIVIRW

SEQ ID NO: 94449 - protein, 10 aa, Homo Sapiens
YHDPMLKLSI

SEQ ID NO: 94450 - protein, 10 aa, Homo Sapiens
YHDSRIHVCL

SEQ ID NO: 94451 - protein, 10 aa, Homo Sapiens
YHDYGHLELI

SEQ ID NO: 94452 - protein, 10 aa, Homo Sapiens
YHEADKTYML

SEQ ID NO: 94453 - protein, 10 aa, Homo Sapiens
YHEGSAPALI

SEQ ID NO: 94454 - protein, 10 aa, Homo Sapiens
YHEGYACTSI

SEQ ID NO: 94455 - protein, 10 aa, Homo Sapiens
YHEKDIKVFF

SEQ ID NO: 94456 - protein, 10 aa, Homo Sapiens
YHEQLSVAEI

SEQ ID NO: 94457 - protein, 10 aa, Homo Sapiens
YHEQLTVAEI

SEQ ID NO: 94458 - protein, 10 aa, Homo Sapiens
YHEVPYTTSF

SEQ ID NO: 94459 - protein, 10 aa, Homo Sapiens
YHEVVDEIYF

SEQ ID NO: 94460 - protein, 10 aa, Homo Sapiens
YHFYQGLVYL

SEQ ID NO: 94461 - protein, 10 aa, Homo Sapiens
YHHEAGVTAL

SEQ ID NO: 94462 - protein, 10 aa, Homo Sapiens
YHHHGVGQGF

SEQ ID NO: 94463 - protein, 10 aa, Homo Sapiens
YHIDVGTQTF

SEQ ID NO: 94464 - protein, 10 aa, Homo Sapiens
YHISLEHEIL

SEQ ID NO: 94465 - protein, 10 aa, Homo Sapiens
YHITDVPCIF

SEQ ID NO: 94466 - protein, 10 aa, Homo Sapiens
YHNEVEIEKL

SEQ ID NO: 94467 - protein, 10 aa, Homo Sapiens
YHNNEEKNRL

SEQ ID NO: 94468 - protein, 10 aa, Homo Sapiens
YHQGSGTFLF

SEQ ID NO: 94469 - protein, 10 aa, Homo Sapiens
YHQNVESHLL

SEQ ID NO: 94470 - protein, 10 aa, Homo Sapiens
YHQPAPIAQL

SEQ ID NO: 94471 - protein, 10 aa, Homo Sapiens
YHQSASEHGL

SEQ ID NO: 94472 - protein, 10 aa, Homo Sapiens
YHSDEYIKFL

SEQ ID NO: 94473 - protein, 10 aa, Homo Sapiens
YHSEESQIYL

SEQ ID NO: 94474 - protein, 10 aa, Homo Sapiens
YHSPEEEISL

SEQ ID NO: 94475 - protein, 10 aa, Homo Sapiens
YHVAEKETLL

SEQ ID NO: 94476 - protein, 10 aa, Homo Sapiens
YHVEPHPEHL

SEQ ID NO: 94477 - protein, 10 aa, Homo Sapiens
YHYPSCDLYF

SEQ ID NO: 94478 - protein, 10 aa, Homo Sapiens
YQAPDIDVQL

SEQ ID NO: 94479 - protein, 10 aa, Homo Sapiens
YQNEDEKVTL

SEQ ID NO: 94480 - protein, 10 aa, Homo Sapiens
YRDPYTEQTI

SEQ ID NO: 94481 - protein, 11 aa, Homo Sapiens
AHAAAGPGEVL

SEQ ID NO: 94482 - protein, 11 aa, Homo Sapiens
AHAPPGHHSVI

SEQ ID NO: 94483 - protein, 11 aa, Homo Sapiens
AHAQSIGMNRL

SEQ ID NO: 94484 - protein, 11 aa, Homo Sapiens
AHCDLGAHHSL

SEQ ID NO: 94485 - protein, 11 aa, Homo Sapiens
AHCPAAAVPAL

SEQ ID NO: 94486 - protein, 11 aa, Homo Sapiens
AHDDSVMYLQF

SEQ ID NO: 94487 - protein, 11 aa, Homo Sapiens
AHDESPGNNVV

SEQ ID NO: 94488 - protein, 11 aa, Homo Sapiens
AHDEYLQLLNL

SEQ ID NO: 94489 - protein, 11 aa, Homo Sapiens
AHDGSATYLRF

SEQ ID NO: 94490 - protein, 11 aa, Homo Sapiens
AHDPQTLEQNI

SEQ ID NO: 94491 - protein, 11 aa, Homo Sapiens
AHDPQTTQELL

SEQ ID NO: 94492 - protein, 11 aa, Homo Sapiens
AHDTDPKALRL

SEQ ID NO: 94493 - protein, 11 aa, Homo Sapiens
AHEDCVNNIRF

SEQ ID NO: 94494 - protein, 11 aa, Homo Sapiens
AHEENSQIYKF

SEQ ID NO: 94495 - protein, 11 aa, Homo Sapiens
AHEGTLAAITF

SEQ ID NO: 94496 - protein, 11 aa, Homo Sapiens
AHELVTSKIAL

SEQ ID NO: 94497 - protein, 11 aa, Homo Sapiens
AHESAVTGLSL

SEQ ID NO: 94498 - protein, 11 aa, Homo Sapiens
AHFPGLASELL

SEQ ID NO: 94499 - protein, 11 aa, Homo Sapiens
AHFSENPILYL

SEQ ID NO: 94500 - protein, 11 aa, Homo Sapiens
AHIDGDHLTLL

SEQ ID NO: 94501 - protein, 11 aa, Homo Sapiens
AHLNPSDTEEW

SEQ ID NO: 94502 - protein, 11 aa, Homo Sapiens
AHLPADLEVTL

SEQ ID NO: 94503 - protein, 11 aa, Homo Sapiens
AHLPASGLDIF

SEQ ID NO: 94504 - protein, 11 aa, Homo Sapiens
AHQASHQPLYL

SEQ ID NO: 94505 - protein, 11 aa, Homo Sapiens
AHQRPDKQNLF

SEQ ID NO: 94506 - protein, 11 aa, Homo Sapiens
AHQSNRVCNAL

SEQ ID NO: 94507 - protein, 11 aa, Homo Sapiens
AHSSDVLENVF

SEQ ID NO: 94508 - protein, 11 aa, Homo Sapiens
AHSTAIAGLTF

SEQ ID NO: 94509 - protein, 11 aa, Homo Sapiens
AHVPNFIFDEF

SEQ ID NO: 94510 - protein, 11 aa, Homo Sapiens
AHYADVLGLLL

SEQ ID NO: 94511 - protein, 11 aa, Homo Sapiens
AHYDPATEEFI

SEQ ID NO: 94512 - protein, 11 aa, Homo Sapiens
CHAPTSSAYEF

SEQ ID NO: 94513 - protein, 11 aa, Homo Sapiens
CHDIYNSLLQL

SEQ ID NO: 94514 - protein, 11 aa, Homo Sapiens
CHIAISNSENL

SEQ ID NO: 94515 - protein, 11 aa, Homo Sapiens
DHDRYSGNVTI

SEQ ID NO: 94516 - protein, 11 aa, Homo Sapiens
DHSPCDPTITL

SEQ ID NO: 94517 - protein, 11 aa, Homo Sapiens
DHYKPGSSETL

SEQ ID NO: 94518 - protein, 11 aa, Homo Sapiens
EHAKINETDTF

SEQ ID NO: 94519 - protein, 11 aa, Homo Sapiens
EHCWVGELNGL

SEQ ID NO: 94520 - protein, 11 aa, Homo Sapiens
EHDPITKNKQV

SEQ ID NO: 94521 - protein, 11 aa, Homo Sapiens
EHDPSSIYLRI

SEQ ID NO: 94522 - protein, 11 aa, Homo Sapiens
EHEDIKKGILL

SEQ ID NO: 94523 - protein, 11 aa, Homo Sapiens
EHEDTDKYRQL

SEQ ID NO: 94524 - protein, 11 aa, Homo Sapiens
EHFSSCLHQVL

SEQ ID NO: 94525 - protein, 11 aa, Homo Sapiens
EHHSTQMQELF

SEQ ID NO: 94526 - protein, 11 aa, Homo Sapiens
EHILPINSEVL

SEQ ID NO: 94527 - protein, 11 aa, Homo Sapiens
EHINEGETAML

SEQ ID NO: 94528 - protein, 11 aa, Homo Sapiens
EHLLEKDIITL

SEQ ID NO: 94529 - protein, 11 aa, Homo Sapiens
EHLPARDSPSL

SEQ ID NO: 94530 - protein, 11 aa, Homo Sapiens
EHLRKLEAERL

SEQ ID NO: 94531 - protein, 11 aa, Homo Sapiens
EHMPVGPDAIL

SEQ ID NO: 94532 - protein, 11 aa, Homo Sapiens
EHQGSHLTQKL

SEQ ID NO: 94533 - protein, 11 aa, Homo Sapiens
EHQPDNIKALF

SEQ ID NO: 94534 - protein, 11 aa, Homo Sapiens
EHQPPYIIAVL

SEQ ID NO: 94535 - protein, 11 aa, Homo Sapiens
EHQSNGGALVL

SEQ ID NO: 94536 - protein, 11 aa, Homo Sapiens
EHSMDTLLATL

SEQ ID NO: 94537 - protein, 11 aa, Homo Sapiens
EHSPSDLEAHF

SEQ ID NO: 94538 - protein, 11 aa, Homo Sapiens
EHSPVPAGFGF

SEQ ID NO: 94539 - protein, 11 aa, Homo Sapiens
EHVKAANRLTL

SEQ ID NO: 94540 - protein, 11 aa, Homo Sapiens
EHYADQLKEYL

SEQ ID NO: 94541 - protein, 11 aa, Homo Sapiens
FHCEPANILYI

SEQ ID NO: 94542 - protein, 11 aa, Homo Sapiens
FHDCEDAAREL

SEQ ID NO: 94543 - protein, 11 aa, Homo Sapiens
FHDDQGGVTRW

SEQ ID NO: 94544 - protein, 11 aa, Homo Sapiens
FHDKYGNAVLA

SEQ ID NO: 94545 - protein, 11 aa, Homo Sapiens
FHDLPCGASVI

SEQ ID NO: 94546 - protein, 11 aa, Homo Sapiens
FHDPESAQQHF

SEQ ID NO: 94547 - protein, 11 aa, Homo Sapiens
FHDPNAIYSEL

SEQ ID NO: 94548 - protein, 11 aa, Homo Sapiens
FHEEVEQGVKF

SEQ ID NO: 94549 - protein, 11 aa, Homo Sapiens
FHEEYSRLYQL

SEQ ID NO: 94550 - protein, 11 aa, Homo Sapiens
FHEHPDLIVGF

SEQ ID NO: 94551 - protein, 11 aa, Homo Sapiens
FHELTALANQI

SEQ ID NO: 94552 - protein, 11 aa, Homo Sapiens
FHFSQAEKVYI

SEQ ID NO: 94553 - protein, 11 aa, Homo Sapiens
FHFTNRDCDSL

SEQ ID NO: 94554 - protein, 11 aa, Homo Sapiens
FHGDSEIDQLF

SEQ ID NO: 94555 - protein, 11 aa, Homo Sapiens
FHILSGQGDVL

SEQ ID NO: 94556 - protein, 11 aa, Homo Sapiens
FHLDPSLTHTI

SEQ ID NO: 94557 - protein, 11 aa, Homo Sapiens
FHLTPLSYETL

SEQ ID NO: 94558 - protein, 11 aa, Homo Sapiens
FHNDIDSNSTI

SEQ ID NO: 94559 - protein, 11 aa, Homo Sapiens
FHQPASAEQLL

SEQ ID NO: 94560 - protein, 11 aa, Homo Sapiens
FHSGGYGQDAL

SEQ ID NO: 94561 - protein, 11 aa, Homo Sapiens
FHVNSEVNSVL

SEQ ID NO: 94562 - protein, 11 aa, Homo Sapiens
FHVSPDPSVTL

SEQ ID NO: 94563 - protein, 11 aa, Homo Sapiens
FQENSTIGQKI

SEQ ID NO: 94564 - protein, 11 aa, Homo Sapiens
GEQHLPQPLLL

SEQ ID NO: 94565 - protein, 11 aa, Homo Sapiens
GHDGTTESNCF

SEQ ID NO: 94566 - protein, 11 aa, Homo Sapiens
GHDPSSGVQEF

SEQ ID NO: 94567 - protein, 11 aa, Homo Sapiens
GHEEALSKFTL

SEQ ID NO: 94568 - protein, 11 aa, Homo Sapiens
GHQLPVKEATL

SEQ ID NO: 94569 - protein, 11 aa, Homo Sapiens
GHSDYINGNFI

SEQ ID NO: 94570 - protein, 11 aa, Homo Sapiens
GHVVPTILEKF

SEQ ID NO: 94571 - protein, 11 aa, Homo Sapiens
GKHWFNLNSLL

SEQ ID NO: 94572 - protein, 11 aa, Homo Sapiens
HADDSAAMAIA

SEQ ID NO: 94573 - protein, 11 aa, Homo Sapiens
HHAESKNGWTL

SEQ ID NO: 94574 - protein, 11 aa, Homo Sapiens
HHAQDLGVVNL

SEQ ID NO: 94575 - protein, 11 aa, Homo Sapiens
HHAQDYGGLLL

SEQ ID NO: 94576 - protein, 11 aa, Homo Sapiens
HHCPDVPILLV

SEQ ID NO: 94577 - protein, 11 aa, Homo Sapiens
HHCPSTPIILV

SEQ ID NO: 94578 - protein, 11 aa, Homo Sapiens
HHDASTFTINI

SEQ ID NO: 94579 - protein, 11 aa, Homo Sapiens
HHDDYTQNHSF

SEQ ID NO: 94580 - protein, 11 aa, Homo Sapiens
HHDESVLTNVF

SEQ ID NO: 94581 - protein, 11 aa, Homo Sapiens
HHDIHPINQYL

SEQ ID NO: 94582 - protein, 11 aa, Homo Sapiens
HHEDGSQHIGL

SEQ ID NO: 94583 - protein, 11 aa, Homo Sapiens
HHEDRQMNTNW

SEQ ID NO: 94584 - protein, 11 aa, Homo Sapiens
HHEDYQFCYSF

SEQ ID NO: 94585 - protein, 11 aa, Homo Sapiens
HHEESVREASL

SEQ ID NO: 94586 - protein, 11 aa, Homo Sapiens
HHEETLQHEKI

SEQ ID NO: 94587 - protein, 11 aa, Homo Sapiens
HHENTHTGVKF

SEQ ID NO: 94588 - protein, 11 aa, Homo Sapiens
HHGDFSAEEVF

SEQ ID NO: 94589 - protein, 11 aa, Homo Sapiens
HHHGTSILTLF

SEQ ID NO: 94590 - protein, 11 aa, Homo Sapiens
HHHLGSVILIF

SEQ ID NO: 94591 - protein, 11 aa, Homo Sapiens
HHHYEGAVVIL

SEQ ID NO: 94592 - protein, 11 aa, Homo Sapiens
HHIPEQTTQLL

SEQ ID NO: 94593 - protein, 11 aa, Homo Sapiens
HHIYDKTSVLF

SEQ ID NO: 94594 - protein, 11 aa, Homo Sapiens
HHMAGLSSSKL

SEQ ID NO: 94595 - protein, 11 aa, Homo Sapiens
HHQASETHNVI

SEQ ID NO: 94596 - protein, 11 aa, Homo Sapiens
HHQYNPKFQTL

SEQ ID NO: 94597 - protein, 11 aa, Homo Sapiens
HHQYPSRSSGL

SEQ ID NO: 94598 - protein, 11 aa, Homo Sapiens
HHTEEALRELF

SEQ ID NO: 94599 - protein, 11 aa, Homo Sapiens
HHVAESSLSRL

SEQ ID NO: 94600 - protein, 11 aa, Homo Sapiens
HHVAFLEADVL

SEQ ID NO: 94601 - protein, 11 aa, Homo Sapiens
HHVIARHEYTF

SEQ ID NO: 94602 - protein, 11 aa, Homo Sapiens
HHYPGPGNHFW

SEQ ID NO: 94603 - protein, 11 aa, Homo Sapiens
HHYPNQSNTTL

SEQ ID NO: 94604 - protein, 11 aa, Homo Sapiens
HHYQAGESLRF

SEQ ID NO: 94605 - protein, 11 aa, Homo Sapiens
HHYTEAERSLL

SEQ ID NO: 94606 - protein, 11 aa, Homo Sapiens
HQDESSSFHHL

SEQ ID NO: 94607 - protein, 11 aa, Homo Sapiens
HQDLKSGEVTL

SEQ ID NO: 94608 - protein, 11 aa, Homo Sapiens
HQDTSSVGNFI

SEQ ID NO: 94609 - protein, 11 aa, Homo Sapiens
HQIEAVDGEEL

SEQ ID NO: 94610 - protein, 11 aa, Homo Sapiens
HQTELGNQLEY

SEQ ID NO: 94611 - protein, 11 aa, Homo Sapiens
IHCNTPSLLQL

SEQ ID NO: 94612 - protein, 11 aa, Homo Sapiens
IHDDQDYLHSL

SEQ ID NO: 94613 - protein, 11 aa, Homo Sapiens
IHDGAAGVHFI

SEQ ID NO: 94614 - protein, 11 aa, Homo Sapiens
IHDNSVLRNFL

SEQ ID NO: 94615 - protein, 11 aa, Homo Sapiens
IHEDSTNRRRL

SEQ ID NO: 94616 - protein, 11 aa, Homo Sapiens
IHEEFSEHALL

SEQ ID NO: 94617 - protein, 11 aa, Homo Sapiens
IHEIYTVGKRF

SEQ ID NO: 94618 - protein, 11 aa, Homo Sapiens
IHEPEPHILLF

SEQ ID NO: 94619 - protein, 11 aa, Homo Sapiens
IHLISSEANEI

SEQ ID NO: 94620 - protein, 11 aa, Homo Sapiens
IHSDPHPGNVL

SEQ ID NO: 94621 - protein, 11 aa, Homo Sapiens
IHYDDKAIERL

SEQ ID NO: 94622 - protein, 11 aa, Homo Sapiens
ILILDNDGDRL

SEQ ID NO: 94623 - protein, 11 aa, Homo Sapiens
ILINDAGEVRL

SEQ ID NO: 94624 - protein, 11 aa, Homo Sapiens
ILLDDTGLAYI

SEQ ID NO: 94625 - protein, 11 aa, Homo Sapiens
KHEDVAQMLYL

SEQ ID NO: 94626 - protein, 11 aa, Homo Sapiens
KHENVVNLIEI

SEQ ID NO: 94627 - protein, 11 aa, Homo Sapiens
KQDDSQSSNQF

SEQ ID NO: 94628 - protein, 11 aa, Homo Sapiens
LHADVVPNATI

SEQ ID NO: 94629 - protein, 11 aa, Homo Sapiens
LHDIETENQKL

SEQ ID NO: 94630 - protein, 11 aa, Homo Sapiens
LHDIIHTKETL

SEQ ID NO: 94631 - protein, 11 aa, Homo Sapiens
LHDKNGKSYRF

SEQ ID NO: 94632 - protein, 11 aa, Homo Sapiens
LHEIESAGQTW

SEQ ID NO: 94633 - protein, 11 aa, Homo Sapiens
LHHIPDVITYL

SEQ ID NO: 94634 - protein, 11 aa, Homo Sapiens
LHQDPGQPLYI

SEQ ID NO: 94635 - protein, 11 aa, Homo Sapiens
LHVNPYIGLFF

SEQ ID NO: 94636 - protein, 11 aa, Homo Sapiens
LLLDDSLVSIF

SEQ ID NO: 94637 - protein, 11 aa, Homo Sapiens
LPDGTSLTQTF

SEQ ID NO: 94638 - protein, 11 aa, Homo Sapiens
LPEKLTIYTTL

SEQ ID NO: 94639 - protein, 11 aa, Homo Sapiens
LPIDVTEGEVI

SEQ ID NO: 94640 - protein, 11 aa, Homo Sapiens
LQADDGKIVIF

SEQ ID NO: 94641 - protein, 11 aa, Homo Sapiens
MHANAQRTDAL

SEQ ID NO: 94642 - protein, 11 aa, Homo Sapiens
MHAQSAELQRL

SEQ ID NO: 94643 - protein, 11 aa, Homo Sapiens
MHCDADGLHSL

SEQ ID NO: 94644 - protein, 11 aa, Homo Sapiens
MHCGTTSDQFL

SEQ ID NO: 94645 - protein, 11 aa, Homo Sapiens
MHDEKVDLWSL

SEQ ID NO: 94646 - protein, 11 aa, Homo Sapiens
MHDFQDGVLYL

SEQ ID NO: 94647 - protein, 11 aa, Homo Sapiens
MHDLNTDQENL

SEQ ID NO: 94648 - protein, 11 aa, Homo Sapiens
MHENGSTKNLL

SEQ ID NO: 94649 - protein, 11 aa, Homo Sapiens
MHFDPGFEEQL

SEQ ID NO: 94650 - protein, 11 aa, Homo Sapiens
MHGDSEYNIMF

SEQ ID NO: 94651 - protein, 11 aa, Homo Sapiens
MHIKSIILEGF

SEQ ID NO: 94652 - protein, 11 aa, Homo Sapiens
MHIQDPASQRL

SEQ ID NO: 94653 - protein, 11 aa, Homo Sapiens
MHISESQQEFF

SEQ ID NO: 94654 - protein, 11 aa, Homo Sapiens
MRDSTGAGNSL

SEQ ID NO: 94655 - protein, 11 aa, Homo Sapiens
NHDDLMSVVVF

SEQ ID NO: 94656 - protein, 11 aa, Homo Sapiens
NHDQHGRNSLL

SEQ ID NO: 94657 - protein, 11 aa, Homo Sapiens
NHDTSFAKTFV

SEQ ID NO: 94658 - protein, 11 aa, Homo Sapiens
NHEASELANYF

SEQ ID NO: 94659 - protein, 11 aa, Homo Sapiens
NHEEATLGAFL

SEQ ID NO: 94660 - protein, 11 aa, Homo Sapiens
NHINITQSDKF

SEQ ID NO: 94661 - protein, 11 aa, Homo Sapiens
NHLDKQQVQLL

SEQ ID NO: 94662 - protein, 11 aa, Homo Sapiens
NHLESDGQITI

SEQ ID NO: 94663 - protein, 11 aa, Homo Sapiens
NHMEALGHDHL

SEQ ID NO: 94664 - protein, 11 aa, Homo Sapiens
NHMGIHIGEKL

SEQ ID NO: 94665 - protein, 11 aa, Homo Sapiens
NHQATGDVCTL

SEQ ID NO: 94666 - protein, 11 aa, Homo Sapiens
NHQKQLESNKI

SEQ ID NO: 94667 - protein, 11 aa, Homo Sapiens
NHQLPSEHQTI

SEQ ID NO: 94668 - protein, 11 aa, Homo Sapiens
NHSIESKGNEI

SEQ ID NO: 94669 - protein, 11 aa, Homo Sapiens
NHSSLIYSNLL

SEQ ID NO: 94670 - protein, 11 aa, Homo Sapiens
NHVGELCGETL

SEQ ID NO: 94671 - protein, 11 aa, Homo Sapiens
NHVGLGPIESI

SEQ ID NO: 94672 - protein, 11 aa, Homo Sapiens
NHYEFSDCEKF

SEQ ID NO: 94673 - protein, 11 aa, Homo Sapiens
NISHNTQDILI

SEQ ID NO: 94674 - protein, 11 aa, Homo Sapiens
NKTAIGDYLGE

SEQ ID NO: 94675 - protein, 11 aa, Homo Sapiens
NQIPIISAEHL

SEQ ID NO: 94676 - protein, 11 aa, Homo Sapiens
NREGSPDTNRI

SEQ ID NO: 94677 - protein, 11 aa, Homo Sapiens
NRIEENTGHTF

SEQ ID NO: 94678 - protein, 11 aa, Homo Sapiens
NRIGGVQQDTI

SEQ ID NO: 94679 - protein, 11 aa, Homo Sapiens
NRLFTSAEETF

SEQ ID NO: 94680 - protein, 11 aa, Homo Sapiens
PENVEIFAHLL

SEQ ID NO: 94681 - protein, 11 aa, Homo Sapiens
QHAIEESVVLI

SEQ ID NO: 94682 - protein, 11 aa, Homo Sapiens
QHCLDTAFNFF

SEQ ID NO: 94683 - protein, 11 aa, Homo Sapiens
QHDFTSQIFSL

SEQ ID NO: 94684 - protein, 11 aa, Homo Sapiens
QHDPETSVLVL

SEQ ID NO: 94685 - protein, 11 aa, Homo Sapiens
QHDPSSNNAML

SEQ ID NO: 94686 - protein, 11 aa, Homo Sapiens
QHDSGAAVIQL

SEQ ID NO: 94687 - protein, 11 aa, Homo Sapiens
QHDTSLPHCRF

SEQ ID NO: 94688 - protein, 11 aa, Homo Sapiens
QHDVFGDISFL

SEQ ID NO: 94689 - protein, 11 aa, Homo Sapiens
QHECRSILERL

SEQ ID NO: 94690 - protein, 11 aa, Homo Sapiens
QHEDLINLQSF

SEQ ID NO: 94691 - protein, 11 aa, Homo Sapiens
QHEEPESFFTW

SEQ ID NO: 94692 - protein, 11 aa, Homo Sapiens
QHEGLPEPVTL

SEQ ID NO: 94693 - protein, 11 aa, Homo Sapiens
QHEGLPKPLTL

SEQ ID NO: 94694 - protein, 11 aa, Homo Sapiens
QHELGNVFLKF

SEQ ID NO: 94695 - protein, 11 aa, Homo Sapiens
QHETALQGNVF

SEQ ID NO: 94696 - protein, 11 aa, Homo Sapiens
QHEVEEATNIL

SEQ ID NO: 94697 - protein, 11 aa, Homo Sapiens
QHIEESFAEHL

SEQ ID NO: 94698 - protein, 11 aa, Homo Sapiens
QHIEESFSEHL

SEQ ID NO: 94699 - protein, 11 aa, Homo Sapiens
QHIIPLENVTI

SEQ ID NO: 94700 - protein, 11 aa, Homo Sapiens
QHINPLLPACL

SEQ ID NO: 94701 - protein, 11 aa, Homo Sapiens
QHIQTSDPENF

SEQ ID NO: 94702 - protein, 11 aa, Homo Sapiens
QHIVPCTISQL

SEQ ID NO: 94703 - protein, 11 aa, Homo Sapiens
QHIWESDSNEF

SEQ ID NO: 94704 - protein, 11 aa, Homo Sapiens
QHLDPQGAQEL

SEQ ID NO: 94705 - protein, 11 aa, Homo Sapiens
QHLINQNSDYL

SEQ ID NO: 94706 - protein, 11 aa, Homo Sapiens
QHLLSIDEPLF

SEQ ID NO: 94707 - protein, 11 aa, Homo Sapiens
QHLNLNNAEQL

SEQ ID NO: 94708 - protein, 11 aa, Homo Sapiens
QHMDVEESQCL

SEQ ID NO: 94709 - protein, 11 aa, Homo Sapiens
QHQENEGTNQL

SEQ ID NO: 94710 - protein, 11 aa, Homo Sapiens
QHQGAVELLVF

SEQ ID NO: 94711 - protein, 11 aa, Homo Sapiens
QHQLIDQQARL

SEQ ID NO: 94712 - protein, 11 aa, Homo Sapiens
QHQSGIVQLLW

SEQ ID NO: 94713 - protein, 11 aa, Homo Sapiens
QHSGQEVPQVL

SEQ ID NO: 94714 - protein, 11 aa, Homo Sapiens
QHSSQDVHVVL

SEQ ID NO: 94715 - protein, 11 aa, Homo Sapiens
QHVDERKLIQF

SEQ ID NO: 94716 - protein, 11 aa, Homo Sapiens
QHYEDASCGLL

SEQ ID NO: 94717 - protein, 11 aa, Homo Sapiens
QRDEQLLTNVL

SEQ ID NO: 94718 - protein, 11 aa, Homo Sapiens
QRFQSISTEFL

SEQ ID NO: 94719 - protein, 11 aa, Homo Sapiens
QRIGLSSQELF

SEQ ID NO: 94720 - protein, 11 aa, Homo Sapiens
QRLKAIVAEKF

SEQ ID NO: 94721 - protein, 11 aa, Homo Sapiens
QVAEEHYSLFL

SEQ ID NO: 94722 - protein, 11 aa, Homo Sapiens
RHDADGQATLL

SEQ ID NO: 94723 - protein, 11 aa, Homo Sapiens
RHDDSWPFLKL

SEQ ID NO: 94724 - protein, 11 aa, Homo Sapiens
RHEDVVNSVVF

SEQ ID NO: 94725 - protein, 11 aa, Homo Sapiens
RHFGSVVAQTI

SEQ ID NO: 94726 - protein, 11 aa, Homo Sapiens
RHISPTAPDTL

SEQ ID NO: 94727 - protein, 11 aa, Homo Sapiens
RHLPVNSKEFL

SEQ ID NO: 94728 - protein, 11 aa, Homo Sapiens
RQGVDADINGL

SEQ ID NO: 94729 - protein, 11 aa, Homo Sapiens
SHAMASAEQQL

SEQ ID NO: 94730 - protein, 11 aa, Homo Sapiens
SHATQAIFEIL

SEQ ID NO: 94731 - protein, 11 aa, Homo Sapiens
SHDASVKEWTI

SEQ ID NO: 94732 - protein, 11 aa, Homo Sapiens
SHDDTILIWDF

SEQ ID NO: 94733 - protein, 11 aa, Homo Sapiens
SHDIVDGNHRL

SEQ ID NO: 94734 - protein, 11 aa, Homo Sapiens
SHDPSYFACLI

SEQ ID NO: 94735 - protein, 11 aa, Homo Sapiens
SHDSGSDHLAF

SEQ ID NO: 94736 - protein, 11 aa, Homo Sapiens
SHDSTSQLYTV

SEQ ID NO: 94737 - protein, 11 aa, Homo Sapiens
SHDYPGEGIYL

SEQ ID NO: 94738 - protein, 11 aa, Homo Sapiens
SHEANSNAVRF

SEQ ID NO: 94739 - protein, 11 aa, Homo Sapiens
SHEDVILGELL

SEQ ID NO: 94740 - protein, 11 aa, Homo Sapiens
SHEEALSFVSL

SEQ ID NO: 94741 - protein, 11 aa, Homo Sapiens
SHEESELANKL

SEQ ID NO: 94742 - protein, 11 aa, Homo Sapiens
SHEESQTATLL

SEQ ID NO: 94743 - protein, 11 aa, Homo Sapiens
SHEGETAYIRV

SEQ ID NO: 94744 - protein, 11 aa, Homo Sapiens
SHEGETSYIRV

SEQ ID NO: 94745 - protein, 11 aa, Homo Sapiens
SHESDTMSNRI

SEQ ID NO: 94746 - protein, 11 aa, Homo Sapiens
SHETRLPSNTL

SEQ ID NO: 94747 - protein, 11 aa, Homo Sapiens
SHFDDFVTNLI

SEQ ID NO: 94748 - protein, 11 aa, Homo Sapiens
SHFISGGKDCL

SEQ ID NO: 94749 - protein, 11 aa, Homo Sapiens
SHFKESGHNKL

SEQ ID NO: 94750 - protein, 11 aa, Homo Sapiens
SHFNLKEKEYF

SEQ ID NO: 94751 - protein, 11 aa, Homo Sapiens
SHIATEMNQVF

SEQ ID NO: 94752 - protein, 11 aa, Homo Sapiens
SHIDLIDLDTI

SEQ ID NO: 94753 - protein, 11 aa, Homo Sapiens
SHIEDQAEQFF

SEQ ID NO: 94754 - protein, 11 aa, Homo Sapiens
SHILEQHPHTL

SEQ ID NO: 94755 - protein, 11 aa, Homo Sapiens
SHITPSTQQHL

SEQ ID NO: 94756 - protein, 11 aa, Homo Sapiens
SHLSPMEMERF

SEQ ID NO: 94757 - protein, 11 aa, Homo Sapiens
SHLTAEGQATL

SEQ ID NO: 94758 - protein, 11 aa, Homo Sapiens
SHLTDQSSNLL

SEQ ID NO: 94759 - protein, 11 aa, Homo Sapiens
SHMGSIREETL

SEQ ID NO: 94760 - protein, 11 aa, Homo Sapiens
SHSLVELLNQI

SEQ ID NO: 94761 - protein, 11 aa, Homo Sapiens
SHSPVALLNTL

SEQ ID NO: 94762 - protein, 11 aa, Homo Sapiens
SHYEEGPGKNL

SEQ ID NO: 94763 - protein, 11 aa, Homo Sapiens
SHYEFSDCEKF

SEQ ID NO: 94764 - protein, 11 aa, Homo Sapiens
SHYNSVANETF

SEQ ID NO: 94765 - protein, 11 aa, Homo Sapiens
SRADVGDALET

SEQ ID NO: 94766 - protein, 11 aa, Homo Sapiens
SVHVCALEAQA

SEQ ID NO: 94767 - protein, 11 aa, Homo Sapiens
THAAEDIVYTL

SEQ ID NO: 94768 - protein, 11 aa, Homo Sapiens
THADTPVDHCL

SEQ ID NO: 94769 - protein, 11 aa, Homo Sapiens
THAEPQEADYL

SEQ ID NO: 94770 - protein, 11 aa, Homo Sapiens
THANDASALRI

SEQ ID NO: 94771 - protein, 11 aa, Homo Sapiens
THAPLPEVQLL

SEQ ID NO: 94772 - protein, 11 aa, Homo Sapiens
THAPPGEFNEV

SEQ ID NO: 94773 - protein, 11 aa, Homo Sapiens
THAPTHSDYTM

SEQ ID NO: 94774 - protein, 11 aa, Homo Sapiens
THAVVTVPAYF

SEQ ID NO: 94775 - protein, 11 aa, Homo Sapiens
THCIVGATIGF

SEQ ID NO: 94776 - protein, 11 aa, Homo Sapiens
THCIVGSTIGF

SEQ ID NO: 94777 - protein, 11 aa, Homo Sapiens
THCTPLPAQNF

SEQ ID NO: 94778 - protein, 11 aa, Homo Sapiens
THCYDPGSNTW

SEQ ID NO: 94779 - protein, 11 aa, Homo Sapiens
THDATALASVV

SEQ ID NO: 94780 - protein, 11 aa, Homo Sapiens
THDPLHQEVSF

SEQ ID NO: 94781 - protein, 11 aa, Homo Sapiens
THDSEASRQKF

SEQ ID NO: 94782 - protein, 11 aa, Homo Sapiens
THDSNTDMFQI

SEQ ID NO: 94783 - protein, 11 aa, Homo Sapiens
THDVFMNDSLF

SEQ ID NO: 94784 - protein, 11 aa, Homo Sapiens
THEALTLKYKL

SEQ ID NO: 94785 - protein, 11 aa, Homo Sapiens
THEAVYPLYTI

SEQ ID NO: 94786 - protein, 11 aa, Homo Sapiens
THEGTSVTNLL

SEQ ID NO: 94787 - protein, 11 aa, Homo Sapiens
THEKLDFRLHF

SEQ ID NO: 94788 - protein, 11 aa, Homo Sapiens
THELTIPNNLI

SEQ ID NO: 94789 - protein, 11 aa, Homo Sapiens
THEPISVEVQL

SEQ ID NO: 94790 - protein, 11 aa, Homo Sapiens
THEYNEVANLF

SEQ ID NO: 94791 - protein, 11 aa, Homo Sapiens
THFSAGVLQLL

SEQ ID NO: 94792 - protein, 11 aa, Homo Sapiens
THHCPKTPFLL

SEQ ID NO: 94793 - protein, 11 aa, Homo Sapiens
THIILDNADVL

SEQ ID NO: 94794 - protein, 11 aa, Homo Sapiens
THISNDYGNNF

SEQ ID NO: 94795 - protein, 11 aa, Homo Sapiens
THITAQTAVLI

SEQ ID NO: 94796 - protein, 11 aa, Homo Sapiens
THLDYVDTERI

SEQ ID NO: 94797 - protein, 11 aa, Homo Sapiens
THLHRVVSELL

SEQ ID NO: 94798 - protein, 11 aa, Homo Sapiens
THMNSSEKLQF

SEQ ID NO: 94799 - protein, 11 aa, Homo Sapiens
THMTAIVGMAL

SEQ ID NO: 94800 - protein, 11 aa, Homo Sapiens
THNGESVSYLF

SEQ ID NO: 94801 - protein, 11 aa, Homo Sapiens
THQDVHLGETL

SEQ ID NO: 94802 - protein, 11 aa, Homo Sapiens
THQGAGLNMTV

SEQ ID NO: 94803 - protein, 11 aa, Homo Sapiens
THQKVTKGVSL

SEQ ID NO: 94804 - protein, 11 aa, Homo Sapiens
THSDDVTQVRF

SEQ ID NO: 94805 - protein, 11 aa, Homo Sapiens
THSPYVAQILL

SEQ ID NO: 94806 - protein, 11 aa, Homo Sapiens
THTKVLANNSL

SEQ ID NO: 94807 - protein, 11 aa, Homo Sapiens
THVDILNDFTL

SEQ ID NO: 94808 - protein, 11 aa, Homo Sapiens
THVDSHGHNVF

SEQ ID NO: 94809 - protein, 11 aa, Homo Sapiens
THVENQSANCL

SEQ ID NO: 94810 - protein, 11 aa, Homo Sapiens
THVGPTPAITI

SEQ ID NO: 94811 - protein, 11 aa, Homo Sapiens
THVLEGAGNKL

SEQ ID NO: 94812 - protein, 11 aa, Homo Sapiens
THVVVYDGEHL

SEQ ID NO: 94813 - protein, 11 aa, Homo Sapiens
TPDGTEKGDFL

SEQ ID NO: 94814 - protein, 11 aa, Homo Sapiens
TQAESAQSNRL

SEQ ID NO: 94815 - protein, 11 aa, Homo Sapiens
TQANPGKGEGL

SEQ ID NO: 94816 - protein, 11 aa, Homo Sapiens
TQDQNSSSWLI

SEQ ID NO: 94817 - protein, 11 aa, Homo Sapiens
TQEKVTLVQTL

SEQ ID NO: 94818 - protein, 11 aa, Homo Sapiens
TQIGGERYNFF

SEQ ID NO: 94819 - protein, 11 aa, Homo Sapiens
TRDETDTWAYI

SEQ ID NO: 94820 - protein, 11 aa, Homo Sapiens
TRDTNFGTNCI

SEQ ID NO: 94821 - protein, 11 aa, Homo Sapiens
TRLKEEGNEQF

SEQ ID NO: 94822 - protein, 11 aa, Homo Sapiens
VAPGKDLTKTL

SEQ ID NO: 94823 - protein, 11 aa, Homo Sapiens
VHCDPHPGNVL

SEQ ID NO: 94824 - protein, 11 aa, Homo Sapiens
VHDPDKKKMKL

SEQ ID NO: 94825 - protein, 11 aa, Homo Sapiens
VHDPNHSKMRL

SEQ ID NO: 94826 - protein, 11 aa, Homo Sapiens
VHDPVTGKTKL

SEQ ID NO: 94827 - protein, 11 aa, Homo Sapiens
VHDVTLHADAI

SEQ ID NO: 94828 - protein, 11 aa, Homo Sapiens
VHEDIVAVELL

SEQ ID NO: 94829 - protein, 11 aa, Homo Sapiens
VHFHPSNPEHL

SEQ ID NO: 94830 - protein, 11 aa, Homo Sapiens
VHHNPPTIELL

SEQ ID NO: 94831 - protein, 11 aa, Homo Sapiens
VHISDPYNVNL

SEQ ID NO: 94832 - protein, 11 aa, Homo Sapiens
VHLAPFTDEQL

SEQ ID NO: 94833 - protein, 11 aa, Homo Sapiens
VHQGGVELQQL

SEQ ID NO: 94834 - protein, 11 aa, Homo Sapiens
VHSSDLQGNYI

SEQ ID NO: 94835 - protein, 11 aa, Homo Sapiens
VTIKKDVDGAY

SEQ ID NO: 94836 - protein, 11 aa, Homo Sapiens
YEDIAQKSKAE

SEQ ID NO: 94837 - protein, 11 aa, Homo Sapiens
YHAGGSTQNSI

SEQ ID NO: 94838 - protein, 11 aa, Homo Sapiens
YHALPATVWSL

SEQ ID NO: 94839 - protein, 11 aa, Homo Sapiens
YHAPPLSAITF

SEQ ID NO: 94840 - protein, 11 aa, Homo Sapiens
YHARPDSDQRF

SEQ ID NO: 94841 - protein, 11 aa, Homo Sapiens
YHDDSYTATGY

SEQ ID NO: 94842 - protein, 11 aa, Homo Sapiens
YHDIAQQAFKF

SEQ ID NO: 94843 - protein, 11 aa, Homo Sapiens
YHDPTVKHSTF

SEQ ID NO: 94844 - protein, 11 aa, Homo Sapiens
YHDQQDVTSNF

SEQ ID NO: 94845 - protein, 11 aa, Homo Sapiens
YHEATDSLYVF

SEQ ID NO: 94846 - protein, 11 aa, Homo Sapiens
YHEHGSLFDYL

SEQ ID NO: 94847 - protein, 11 aa, Homo Sapiens
YHISLEHEILL

SEQ ID NO: 94848 - protein, 11 aa, Homo Sapiens
YHLENAGCNKI

SEQ ID NO: 94849 - protein, 11 aa, Homo Sapiens
YHLEYSEGESL

SEQ ID NO: 94850 - protein, 11 aa, Homo Sapiens
YHQIGSGKCEI

SEQ ID NO: 94851 - protein, 11 aa, Homo Sapiens
YHSDVAYHNSL

SEQ ID NO: 94852 - protein, 11 aa, Homo Sapiens
YHSEEKASNVL

SEQ ID NO: 94853 - protein, 11 aa, Homo Sapiens
YHSPADNKRYI

SEQ ID NO: 94854 - protein, 11 aa, Homo Sapiens
YHTVAGNDIKI

SEQ ID NO: 94855 - protein, 11 aa, Homo Sapiens
YHVESTVNSEL

SEQ ID NO: 94856 - protein, 11 aa, Homo Sapiens
YQAELSQMQTQ

SEQ ID NO: 94857 - protein, 11 aa, Homo Sapiens
YQLDLPKANLL

SEQ ID NO: 94858 - protein, 11 aa, Homo Sapiens
YRLPAEDEVLL

SEQ ID NO: 94859 - protein, 8 aa, Homo Sapiens
AHGPEWNL

SEQ ID NO: 94860 - protein, 8 aa, Homo Sapiens
DHNQEILL

SEQ ID NO: 94861 - protein, 8 aa, Homo Sapiens
DHQIEVLL

SEQ ID NO: 94862 - protein, 8 aa, Homo Sapiens
DTNADKQL

SEQ ID NO: 94863 - protein, 8 aa, Homo Sapiens
EHSMDTLL

SEQ ID NO: 94864 - protein, 8 aa, Homo Sapiens
EHVFDHPW

SEQ ID NO: 94865 - protein, 8 aa, Homo Sapiens
FHAIDHRL

SEQ ID NO: 94866 - protein, 8 aa, Homo Sapiens
FHDIERKF

SEQ ID NO: 94867 - protein, 8 aa, Homo Sapiens
FHSEEQQL

SEQ ID NO: 94868 - protein, 8 aa, Homo Sapiens
GPTSGHWD

SEQ ID NO: 94869 - protein, 8 aa, Homo Sapiens
HCALILNL

SEQ ID NO: 94870 - protein, 8 aa, Homo Sapiens
HDETLTYL

SEQ ID NO: 94871 - protein, 8 aa, Homo Sapiens
HDGIILKV

SEQ ID NO: 94872 - protein, 8 aa, Homo Sapiens
HDGIVIKI

SEQ ID NO: 94873 - protein, 8 aa, Homo Sapiens
HDGLTVHL

SEQ ID NO: 94874 - protein, 8 aa, Homo Sapiens
HDPYITSI

SEQ ID NO: 94875 - protein, 8 aa, Homo Sapiens
HDSIDYRF

SEQ ID NO: 94876 - protein, 8 aa, Homo Sapiens
HDTTEYKL

SEQ ID NO: 94877 - protein, 8 aa, Homo Sapiens
HDTVFQYL

SEQ ID NO: 94878 - protein, 8 aa, Homo Sapiens
HHCRDVPL

SEQ ID NO: 94879 - protein, 8 aa, Homo Sapiens
HHFQEFSF

SEQ ID NO: 94880 - protein, 8 aa, Homo Sapiens
HHSVEIKI

SEQ ID NO: 94881 - protein, 8 aa, Homo Sapiens
HIITGNKI

SEQ ID NO: 94882 - protein, 8 aa, Homo Sapiens
HTSVGNIL

SEQ ID NO: 94883 - protein, 8 aa, Homo Sapiens
HTVAGNDI

SEQ ID NO: 94884 - protein, 8 aa, Homo Sapiens
IDHDQVLV

SEQ ID NO: 94885 - protein, 8 aa, Homo Sapiens
IHGPDAKL

SEQ ID NO: 94886 - protein, 8 aa, Homo Sapiens
IHSLEVLI

SEQ ID NO: 94887 - protein, 8 aa, Homo Sapiens
IHTVEHMI

SEQ ID NO: 94888 - protein, 8 aa, Homo Sapiens
LHHKDIAL

SEQ ID NO: 94889 - protein, 8 aa, Homo Sapiens
LHNADQPL

SEQ ID NO: 94890 - protein, 8 aa, Homo Sapiens
LHNLDRKW

SEQ ID NO: 94891 - protein, 8 aa, Homo Sapiens
MQGPDWNL

SEQ ID NO: 94892 - protein, 8 aa, Homo Sapiens
NHAPSVQI

SEQ ID NO: 94893 - protein, 8 aa, Homo Sapiens
NHDHEVLL

SEQ ID NO: 94894 - protein, 8 aa, Homo Sapiens
NHDKEIFF

SEQ ID NO: 94895 - protein, 8 aa, Homo Sapiens
NHSSDFLL

SEQ ID NO: 94896 - protein, 8 aa, Homo Sapiens
PINGNGKQ

SEQ ID NO: 94897 - protein, 8 aa, Homo Sapiens
QHAEEFLI

SEQ ID NO: 94898 - protein, 8 aa, Homo Sapiens
QHAYEHSL

SEQ ID NO: 94899 - protein, 8 aa, Homo Sapiens
QHVIETLI

SEQ ID NO: 94900 - protein, 8 aa, Homo Sapiens
RLQEGDKI

SEQ ID NO: 94901 - protein, 8 aa, Homo Sapiens
THSLDIKW

SEQ ID NO: 94902 - protein, 8 aa, Homo Sapiens
VHDFDVKI

SEQ ID NO: 94903 - protein, 8 aa, Homo Sapiens
VHGPDWHL

SEQ ID NO: 94904 - protein, 8 aa, Homo Sapiens
VSLTACKV

SEQ ID NO: 94905 - protein, 8 aa, Homo Sapiens
WHSEDVSL

SEQ ID NO: 94906 - protein, 8 aa, Homo Sapiens
YHDLEQSI

SEQ ID NO: 94907 - protein, 8 aa, Homo Sapiens
YHLENAGC

SEQ ID NO: 94908 - protein, 8 aa, Homo Sapiens
YHMEDSEI

SEQ ID NO: 94909 - protein, 9 aa, Homo Sapiens
AHAEEKLQL

SEQ ID NO: 94910 - protein, 9 aa, Homo Sapiens
AHAKTKVLL

SEQ ID NO: 94911 - protein, 9 aa, Homo Sapiens
AHARVQTCI

SEQ ID NO: 94912 - protein, 9 aa, Homo Sapiens
AHASGLQQV

SEQ ID NO: 94913 - protein, 9 aa, Homo Sapiens
AHAVTEQAI

SEQ ID NO: 94914 - protein, 9 aa, Homo Sapiens
AHCGAGDEL

SEQ ID NO: 94915 - protein, 9 aa, Homo Sapiens
AHCPELVTL

SEQ ID NO: 94916 - protein, 9 aa, Homo Sapiens
AHCQLVHHF

SEQ ID NO: 94917 - protein, 9 aa, Homo Sapiens
AHCWVVVRL

SEQ ID NO: 94918 - protein, 9 aa, Homo Sapiens
AHDAFRSSL

SEQ ID NO: 94919 - protein, 9 aa, Homo Sapiens
AHDAGITIF

SEQ ID NO: 94920 - protein, 9 aa, Homo Sapiens
AHDDAIWSV

SEQ ID NO: 94921 - protein, 9 aa, Homo Sapiens
AHDDGRWSL

SEQ ID NO: 94922 - protein, 9 aa, Homo Sapiens
AHDDSVMYL

SEQ ID NO: 94923 - protein, 9 aa, Homo Sapiens
AHDELDFKL

SEQ ID NO: 94924 - protein, 9 aa, Homo Sapiens
AHDEYLQLL

SEQ ID NO: 94925 - protein, 9 aa, Homo Sapiens
AHDFHRIYI

SEQ ID NO: 94926 - protein, 9 aa, Homo Sapiens
AHDFLAFIL

SEQ ID NO: 94927 - protein, 9 aa, Homo Sapiens
AHDGAGLKL

SEQ ID NO: 94928 - protein, 9 aa, Homo Sapiens
AHDGALWSM

SEQ ID NO: 94929 - protein, 9 aa, Homo Sapiens
AHDGDVNVI

SEQ ID NO: 94930 - protein, 9 aa, Homo Sapiens
AHDGGIYAI

SEQ ID NO: 94931 - protein, 9 aa, Homo Sapiens
AHDGGVFGL

SEQ ID NO: 94932 - protein, 9 aa, Homo Sapiens
AHDGIILKV

SEQ ID NO: 94933 - protein, 9 aa, Homo Sapiens
AHDGIVIKI

SEQ ID NO: 94934 - protein, 9 aa, Homo Sapiens
AHDGQRIYI

SEQ ID NO: 94935 - protein, 9 aa, Homo Sapiens
AHDGSATYL

SEQ ID NO: 94936 - protein, 9 aa, Homo Sapiens
AHDGSVFTL

SEQ ID NO: 94937 - protein, 9 aa, Homo Sapiens
AHDKEVYDI

SEQ ID NO: 94938 - protein, 9 aa, Homo Sapiens
AHDPAGPSL

SEQ ID NO: 94939 - protein, 9 aa, Homo Sapiens
AHDPISPVL

SEQ ID NO: 94940 - protein, 9 aa, Homo Sapiens
AHDQFKSTL

SEQ ID NO: 94941 - protein, 9 aa, Homo Sapiens
AHDQLLWAI

SEQ ID NO: 94942 - protein, 9 aa, Homo Sapiens
AHDSSEYAI

SEQ ID NO: 94943 - protein, 9 aa, Homo Sapiens
AHDTKSVKL

SEQ ID NO: 94944 - protein, 9 aa, Homo Sapiens
AHDTSNATL

SEQ ID NO: 94945 - protein, 9 aa, Homo Sapiens
AHDTTLVAL

SEQ ID NO: 94946 - protein, 9 aa, Homo Sapiens
AHDVDPIEL

SEQ ID NO: 94947 - protein, 9 aa, Homo Sapiens
AHEDAVYGL

SEQ ID NO: 94948 - protein, 9 aa, Homo Sapiens
AHEDKVWGL

SEQ ID NO: 94949 - protein, 9 aa, Homo Sapiens
AHEEIGNIL

SEQ ID NO: 94950 - protein, 9 aa, Homo Sapiens
AHEGFVRGI

SEQ ID NO: 94951 - protein, 9 aa, Homo Sapiens
AHEGMIWSL

SEQ ID NO: 94952 - protein, 9 aa, Homo Sapiens
AHEGQQYNI

SEQ ID NO: 94953 - protein, 9 aa, Homo Sapiens
AHERQAWVI

SEQ ID NO: 94954 - protein, 9 aa, Homo Sapiens
AHETNILEI

SEQ ID NO: 94955 - protein, 9 aa, Homo Sapiens
AHFGFDEQL

SEQ ID NO: 94956 - protein, 9 aa, Homo Sapiens
AHFPINVVI

SEQ ID NO: 94957 - protein, 9 aa, Homo Sapiens
AHFQKSYTL

SEQ ID NO: 94958 - protein, 9 aa, Homo Sapiens
AHFSPQLCI

SEQ ID NO: 94959 - protein, 9 aa, Homo Sapiens
AHHLELWRL

SEQ ID NO: 94960 - protein, 9 aa, Homo Sapiens
AHHNYLTRL

SEQ ID NO: 94961 - protein, 9 aa, Homo Sapiens
AHHPHQNLI

SEQ ID NO: 94962 - protein, 9 aa, Homo Sapiens
AHHTDCTFI

SEQ ID NO: 94963 - protein, 9 aa, Homo Sapiens
AHHTDHHMF

SEQ ID NO: 94964 - protein, 9 aa, Homo Sapiens
AHIFSYERL

SEQ ID NO: 94965 - protein, 9 aa, Homo Sapiens
AHIIALESI

SEQ ID NO: 94966 - protein, 9 aa, Homo Sapiens
AHIKDAVAL

SEQ ID NO: 94967 - protein, 9 aa, Homo Sapiens
AHIKGVETI

SEQ ID NO: 94968 - protein, 9 aa, Homo Sapiens
AHINIRDSI

SEQ ID NO: 94969 - protein, 9 aa, Homo Sapiens
AHISEQAVW

SEQ ID NO: 94970 - protein, 9 aa, Homo Sapiens
AHLALIDYL

SEQ ID NO: 94971 - protein, 9 aa, Homo Sapiens
AHLDGHQKI

SEQ ID NO: 94972 - protein, 9 aa, Homo Sapiens
AHMDGTYKF

SEQ ID NO: 94973 - protein, 9 aa, Homo Sapiens
AHMDIFQNL

SEQ ID NO: 94974 - protein, 9 aa, Homo Sapiens
AHMWFDNQI

SEQ ID NO: 94975 - protein, 9 aa, Homo Sapiens
AHNDVMEVL

SEQ ID NO: 94976 - protein, 9 aa, Homo Sapiens
AHNKEIYTI

SEQ ID NO: 94977 - protein, 9 aa, Homo Sapiens
AHNPQQIYF

SEQ ID NO: 94978 - protein, 9 aa, Homo Sapiens
AHQAEIAQL

SEQ ID NO: 94979 - protein, 9 aa, Homo Sapiens
AHQFPEVRF

SEQ ID NO: 94980 - protein, 9 aa, Homo Sapiens
AHQKFALRL

SEQ ID NO: 94981 - protein, 9 aa, Homo Sapiens
AHQQQQQLL

SEQ ID NO: 94982 - protein, 9 aa, Homo Sapiens
AHQVEQVLL

SEQ ID NO: 94983 - protein, 9 aa, Homo Sapiens
AHSAEEIGI

SEQ ID NO: 94984 - protein, 9 aa, Homo Sapiens
AHSDLILHV

SEQ ID NO: 94985 - protein, 9 aa, Homo Sapiens
AHSDTLFTI

SEQ ID NO: 94986 - protein, 9 aa, Homo Sapiens
AHSEDLQSL

SEQ ID NO: 94987 - protein, 9 aa, Homo Sapiens
AHSELLCYF

SEQ ID NO: 94988 - protein, 9 aa, Homo Sapiens
AHSEQTLSL

SEQ ID NO: 94989 - protein, 9 aa, Homo Sapiens
AHSFVDLLL

SEQ ID NO: 94990 - protein, 9 aa, Homo Sapiens
AHSILIANI

SEQ ID NO: 94991 - protein, 9 aa, Homo Sapiens
AHSILQFQF

SEQ ID NO: 94992 - protein, 9 aa, Homo Sapiens
AHSIQIMKV

SEQ ID NO: 94993 - protein, 9 aa, Homo Sapiens
AHSKGVTCL

SEQ ID NO: 94994 - protein, 9 aa, Homo Sapiens
AHSNEILIF

SEQ ID NO: 94995 - protein, 9 aa, Homo Sapiens
AHSNLASVL

SEQ ID NO: 94996 - protein, 9 aa, Homo Sapiens
AHSPAGNQV

SEQ ID NO: 94997 - protein, 9 aa, Homo Sapiens
AHSPASLSF

SEQ ID NO: 94998 - protein, 9 aa, Homo Sapiens
AHSPELLQF

SEQ ID NO: 94999 - protein, 9 aa, Homo Sapiens
AHSPLAAQL

SEQ ID NO: 95000 - protein, 9 aa, Homo Sapiens
AHSPSLQSL

SEQ ID NO: 95001 - protein, 9 aa, Homo Sapiens
AHSSFQMAL

SEQ ID NO: 95002 - protein, 9 aa, Homo Sapiens
AHSSLPAEL

SEQ ID NO: 95003 - protein, 9 aa, Homo Sapiens
AHSSLQIVL

SEQ ID NO: 95004 - protein, 9 aa, Homo Sapiens
AHSTIMPRL

SEQ ID NO: 95005 - protein, 9 aa, Homo Sapiens
AHSVPSPAF

SEQ ID NO: 95006 - protein, 9 aa, Homo Sapiens
AHTAEVNCL

SEQ ID NO: 95007 - protein, 9 aa, Homo Sapiens
AHTGVIFFL

SEQ ID NO: 95008 - protein, 9 aa, Homo Sapiens
AHTIQICKL

SEQ ID NO: 95009 - protein, 9 aa, Homo Sapiens
AHVDEQVFL

SEQ ID NO: 95010 - protein, 9 aa, Homo Sapiens
AHVDFEAML

SEQ ID NO: 95011 - protein, 9 aa, Homo Sapiens
AHVDLIEKL

SEQ ID NO: 95012 - protein, 9 aa, Homo Sapiens
AHVGSGDLF

SEQ ID NO: 95013 - protein, 9 aa, Homo Sapiens
AHVRTLEML

SEQ ID NO: 95014 - protein, 9 aa, Homo Sapiens
AHVVVGDVL

SEQ ID NO: 95015 - protein, 9 aa, Homo Sapiens
AHWQFETAL

SEQ ID NO: 95016 - protein, 9 aa, Homo Sapiens
ARAALQELL

SEQ ID NO: 95017 - protein, 9 aa, Homo Sapiens
ARCDFALFL

SEQ ID NO: 95018 - protein, 9 aa, Homo Sapiens
ARDEIIWLL

SEQ ID NO: 95019 - protein, 9 aa, Homo Sapiens
ARDSTVLRL

SEQ ID NO: 95020 - protein, 9 aa, Homo Sapiens
ARLDHKFDL

SEQ ID NO: 95021 - protein, 9 aa, Homo Sapiens
ASVRVVNQL

SEQ ID NO: 95022 - protein, 9 aa, Homo Sapiens
CHDPINIQF

SEQ ID NO: 95023 - protein, 9 aa, Homo Sapiens
CHDRNVVTI

SEQ ID NO: 95024 - protein, 9 aa, Homo Sapiens
CHFHIAASI

SEQ ID NO: 95025 - protein, 9 aa, Homo Sapiens
CHFMDPQTI

SEQ ID NO: 95026 - protein, 9 aa, Homo Sapiens
CHIGDNVVL

SEQ ID NO: 95027 - protein, 9 aa, Homo Sapiens
CHNAQTFNL

SEQ ID NO: 95028 - protein, 9 aa, Homo Sapiens
CHNQFSLFL

SEQ ID NO: 95029 - protein, 9 aa, Homo Sapiens
CHSPVVSQL

SEQ ID NO: 95030 - protein, 9 aa, Homo Sapiens
CHSVLPLLL

SEQ ID NO: 95031 - protein, 9 aa, Homo Sapiens
CRSIIQVYL

SEQ ID NO: 95032 - protein, 9 aa, Homo Sapiens
DHARLQLQL

SEQ ID NO: 95033 - protein, 9 aa, Homo Sapiens
DHASIQMNV

SEQ ID NO: 95034 - protein, 9 aa, Homo Sapiens
DHCDFPELL

SEQ ID NO: 95035 - protein, 9 aa, Homo Sapiens
DHCKQVVEI

SEQ ID NO: 95036 - protein, 9 aa, Homo Sapiens
DHCPITLYL

SEQ ID NO: 95037 - protein, 9 aa, Homo Sapiens
DHCPTKISL

SEQ ID NO: 95038 - protein, 9 aa, Homo Sapiens
DHCPVGAVL

SEQ ID NO: 95039 - protein, 9 aa, Homo Sapiens
DHDGGFWLV

SEQ ID NO: 95040 - protein, 9 aa, Homo Sapiens
DHDGNIVEL

SEQ ID NO: 95041 - protein, 9 aa, Homo Sapiens
DHDGVVMCF

SEQ ID NO: 95042 - protein, 9 aa, Homo Sapiens
DHDIGTTNL

SEQ ID NO: 95043 - protein, 9 aa, Homo Sapiens
DHDKALQLL

SEQ ID NO: 95044 - protein, 9 aa, Homo Sapiens
DHDNIVKVF

SEQ ID NO: 95045 - protein, 9 aa, Homo Sapiens
DHDRIRQFI

SEQ ID NO: 95046 - protein, 9 aa, Homo Sapiens
DHDTVFQYL

SEQ ID NO: 95047 - protein, 9 aa, Homo Sapiens
DHEASYHSL

SEQ ID NO: 95048 - protein, 9 aa, Homo Sapiens
DHEGLGISI

SEQ ID NO: 95049 - protein, 9 aa, Homo Sapiens
DHERLFELI

SEQ ID NO: 95050 - protein, 9 aa, Homo Sapiens
DHERLQYYF

SEQ ID NO: 95051 - protein, 9 aa, Homo Sapiens
DHESSTWII

SEQ ID NO: 95052 - protein, 9 aa, Homo Sapiens
DHFGGKLHL

SEQ ID NO: 95053 - protein, 9 aa, Homo Sapiens
DHFPEILFI

SEQ ID NO: 95054 - protein, 9 aa, Homo Sapiens
DHFPVEFKL

SEQ ID NO: 95055 - protein, 9 aa, Homo Sapiens
DHFSKSLFL

SEQ ID NO: 95056 - protein, 9 aa, Homo Sapiens
DHHGEKLLL

SEQ ID NO: 95057 - protein, 9 aa, Homo Sapiens
DHHLEVVAF

SEQ ID NO: 95058 - protein, 9 aa, Homo Sapiens
DHHQEVIGF

SEQ ID NO: 95059 - protein, 9 aa, Homo Sapiens
DHIIDICFL

SEQ ID NO: 95060 - protein, 9 aa, Homo Sapiens
DHINDIIKI

SEQ ID NO: 95061 - protein, 9 aa, Homo Sapiens
DHIRFISEL

SEQ ID NO: 95062 - protein, 9 aa, Homo Sapiens
DHLGDSPKI

SEQ ID NO: 95063 - protein, 9 aa, Homo Sapiens
DHMRFISEL

SEQ ID NO: 95064 - protein, 9 aa, Homo Sapiens
DHNEGFSLI

SEQ ID NO: 95065 - protein, 9 aa, Homo Sapiens
DHQREITSL

SEQ ID NO: 95066 - protein, 9 aa, Homo Sapiens
DHSAFIILL

SEQ ID NO: 95067 - protein, 9 aa, Homo Sapiens
DHSATIVSI

SEQ ID NO: 95068 - protein, 9 aa, Homo Sapiens
DHSNIGNKM

SEQ ID NO: 95069 - protein, 9 aa, Homo Sapiens
DHSPCDPTI

SEQ ID NO: 95070 - protein, 9 aa, Homo Sapiens
DHSPDLYSL

SEQ ID NO: 95071 - protein, 9 aa, Homo Sapiens
DHSPTPSVF

SEQ ID NO: 95072 - protein, 9 aa, Homo Sapiens
DHSPVFATF

SEQ ID NO: 95073 - protein, 9 aa, Homo Sapiens
DHSRDVAAI

SEQ ID NO: 95074 - protein, 9 aa, Homo Sapiens
DHSSALQNI

SEQ ID NO: 95075 - protein, 9 aa, Homo Sapiens
DHSTLVTLF

SEQ ID NO: 95076 - protein, 9 aa, Homo Sapiens
DHSYVELFL

SEQ ID NO: 95077 - protein, 9 aa, Homo Sapiens
DKVQAGDVI

SEQ ID NO: 95078 - protein, 9 aa, Homo Sapiens
DLITKGDLI

SEQ ID NO: 95079 - protein, 9 aa, Homo Sapiens
DQCKTVLKL

SEQ ID NO: 95080 - protein, 9 aa, Homo Sapiens
DQHELGPDA

SEQ ID NO: 95081 - protein, 9 aa, Homo Sapiens
DRCLLVLHL

SEQ ID NO: 95082 - protein, 9 aa, Homo Sapiens
DRDGTIIHL

SEQ ID NO: 95083 - protein, 9 aa, Homo Sapiens
DRDPTAYAL

SEQ ID NO: 95084 - protein, 9 aa, Homo Sapiens
DRFENNELF

SEQ ID NO: 95085 - protein, 9 aa, Homo Sapiens
DRTNVGDQI

SEQ ID NO: 95086 - protein, 9 aa, Homo Sapiens
EHAANDVSF

SEQ ID NO: 95087 - protein, 9 aa, Homo Sapiens
EHADDDPSL

SEQ ID NO: 95088 - protein, 9 aa, Homo Sapiens
EHADTVQLV

SEQ ID NO: 95089 - protein, 9 aa, Homo Sapiens
EHAGGEVEL

SEQ ID NO: 95090 - protein, 9 aa, Homo Sapiens
EHAGVISVL

SEQ ID NO: 95091 - protein, 9 aa, Homo Sapiens
EHAHLIVVL

SEQ ID NO: 95092 - protein, 9 aa, Homo Sapiens
EHAKAVVSL

SEQ ID NO: 95093 - protein, 9 aa, Homo Sapiens
EHAKEIPRF

SEQ ID NO: 95094 - protein, 9 aa, Homo Sapiens
EHANDYAEI

SEQ ID NO: 95095 - protein, 9 aa, Homo Sapiens
EHANNYPEI

SEQ ID NO: 95096 - protein, 9 aa, Homo Sapiens
EHANQQTGF

SEQ ID NO: 95097 - protein, 9 aa, Homo Sapiens
EHAPAPQEV

SEQ ID NO: 95098 - protein, 9 aa, Homo Sapiens
EHAPGNQGF

SEQ ID NO: 95099 - protein, 9 aa, Homo Sapiens
EHAPIRSSL

SEQ ID NO: 95100 - protein, 9 aa, Homo Sapiens
EHAPSIIFM

SEQ ID NO: 95101 - protein, 9 aa, Homo Sapiens
EHAPSIVFI

SEQ ID NO: 95102 - protein, 9 aa, Homo Sapiens
EHAQAVDYI

SEQ ID NO: 95103 - protein, 9 aa, Homo Sapiens
EHARPQTTL

SEQ ID NO: 95104 - protein, 9 aa, Homo Sapiens
EHASSLLEL

SEQ ID NO: 95105 - protein, 9 aa, Homo Sapiens
EHAVGYALL

SEQ ID NO: 95106 - protein, 9 aa, Homo Sapiens
EHCDIFMNL

SEQ ID NO: 95107 - protein, 9 aa, Homo Sapiens
EHCPELQYV

SEQ ID NO: 95108 - protein, 9 aa, Homo Sapiens
EHCYDIYRL

SEQ ID NO: 95109 - protein, 9 aa, Homo Sapiens
EHDAAAESL

SEQ ID NO: 95110 - protein, 9 aa, Homo Sapiens
EHDAFIFAL

SEQ ID NO: 95111 - protein, 9 aa, Homo Sapiens
EHDARIQAL

SEQ ID NO: 95112 - protein, 9 aa, Homo Sapiens
EHDAWFIFF

SEQ ID NO: 95113 - protein, 9 aa, Homo Sapiens
EHDDFFISL

SEQ ID NO: 95114 - protein, 9 aa, Homo Sapiens
EHDDGGYRI

SEQ ID NO: 95115 - protein, 9 aa, Homo Sapiens
EHDDIVSTV

SEQ ID NO: 95116 - protein, 9 aa, Homo Sapiens
EHDFSKISI

SEQ ID NO: 95117 - protein, 9 aa, Homo Sapiens
EHDIRHYDL

SEQ ID NO: 95118 - protein, 9 aa, Homo Sapiens
EHDISLDRI

SEQ ID NO: 95119 - protein, 9 aa, Homo Sapiens
EHDPHVLLA

SEQ ID NO: 95120 - protein, 9 aa, Homo Sapiens
EHDPQYAVI

SEQ ID NO: 95121 - protein, 9 aa, Homo Sapiens
EHDPRVITV

SEQ ID NO: 95122 - protein, 9 aa, Homo Sapiens
EHDPSSIYL

SEQ ID NO: 95123 - protein, 9 aa, Homo Sapiens
EHDPVGQMV

SEQ ID NO: 95124 - protein, 9 aa, Homo Sapiens
EHDPVSQRL

SEQ ID NO: 95125 - protein, 9 aa, Homo Sapiens
EHDPVTEFI

SEQ ID NO: 95126 - protein, 9 aa, Homo Sapiens
EHDQALAVL

SEQ ID NO: 95127 - protein, 9 aa, Homo Sapiens
EHDRIARQW

SEQ ID NO: 95128 - protein, 9 aa, Homo Sapiens
EHDRMARQW

SEQ ID NO: 95129 - protein, 9 aa, Homo Sapiens
EHDSQIVQI

SEQ ID NO: 95130 - protein, 9 aa, Homo Sapiens
EHDTTEYKL

SEQ ID NO: 95131 - protein, 9 aa, Homo Sapiens
EHDVKTLQL

SEQ ID NO: 95132 - protein, 9 aa, Homo Sapiens
EHDVPHQPF

SEQ ID NO: 95133 - protein, 9 aa, Homo Sapiens
EHDVSVDTI

SEQ ID NO: 95134 - protein, 9 aa, Homo Sapiens
EHDYGLFHL

SEQ ID NO: 95135 - protein, 9 aa, Homo Sapiens
EHDYTSVCL

SEQ ID NO: 95136 - protein, 9 aa, Homo Sapiens
EHEDTFVYL

SEQ ID NO: 95137 - protein, 9 aa, Homo Sapiens
EHEKEQYCI

SEQ ID NO: 95138 - protein, 9 aa, Homo Sapiens
EHEKLQQLL

SEQ ID NO: 95139 - protein, 9 aa, Homo Sapiens
EHEQFQHAI

SEQ ID NO: 95140 - protein, 9 aa, Homo Sapiens
EHFEKAIEL

SEQ ID NO: 95141 - protein, 9 aa, Homo Sapiens
EHFEKLIFL

SEQ ID NO: 95142 - protein, 9 aa, Homo Sapiens
EHFFHSLML

SEQ ID NO: 95143 - protein, 9 aa, Homo Sapiens
EHFKTILLL

SEQ ID NO: 95144 - protein, 9 aa, Homo Sapiens
EHFKYPVMI

SEQ ID NO: 95145 - protein, 9 aa, Homo Sapiens
EHFNGVAEL

SEQ ID NO: 95146 - protein, 9 aa, Homo Sapiens
EHFPNHQQL

SEQ ID NO: 95147 - protein, 9 aa, Homo Sapiens
EHFPRVLEF

SEQ ID NO: 95148 - protein, 9 aa, Homo Sapiens
EHFREKHFL

SEQ ID NO: 95149 - protein, 9 aa, Homo Sapiens
EHFSHSSKW

SEQ ID NO: 95150 - protein, 9 aa, Homo Sapiens
EHFSSEVTI

SEQ ID NO: 95151 - protein, 9 aa, Homo Sapiens
EHGDQDYIW

SEQ ID NO: 95152 - protein, 9 aa, Homo Sapiens
EHGLNFQRL

SEQ ID NO: 95153 - protein, 9 aa, Homo Sapiens
EHGNTPLHL

SEQ ID NO: 95154 - protein, 9 aa, Homo Sapiens
EHHAEAAQF

SEQ ID NO: 95155 - protein, 9 aa, Homo Sapiens
EHHEEDFFL

SEQ ID NO: 95156 - protein, 9 aa, Homo Sapiens
EHHNGIAEL

SEQ ID NO: 95157 - protein, 9 aa, Homo Sapiens
EHHSKELRL

SEQ ID NO: 95158 - protein, 9 aa, Homo Sapiens
EHIAQGLRL

SEQ ID NO: 95159 - protein, 9 aa, Homo Sapiens
EHIDDKIAL

SEQ ID NO: 95160 - protein, 9 aa, Homo Sapiens
EHIETAYRI

SEQ ID NO: 95161 - protein, 9 aa, Homo Sapiens
EHIHFIGKI

SEQ ID NO: 95162 - protein, 9 aa, Homo Sapiens
EHIHSNEVI

SEQ ID NO: 95163 - protein, 9 aa, Homo Sapiens
EHIKLQQEL

SEQ ID NO: 95164 - protein, 9 aa, Homo Sapiens
EHIMDLTRL

SEQ ID NO: 95165 - protein, 9 aa, Homo Sapiens
EHITSEYTL

SEQ ID NO: 95166 - protein, 9 aa, Homo Sapiens
EHIVADDRF

SEQ ID NO: 95167 - protein, 9 aa, Homo Sapiens
EHLDLPCAL

SEQ ID NO: 95168 - protein, 9 aa, Homo Sapiens
EHLFSVEQI

SEQ ID NO: 95169 - protein, 9 aa, Homo Sapiens
EHLNYVTEI

SEQ ID NO: 95170 - protein, 9 aa, Homo Sapiens
EHLPVSAEI

SEQ ID NO: 95171 - protein, 9 aa, Homo Sapiens
EHMEMQQNI

SEQ ID NO: 95172 - protein, 9 aa, Homo Sapiens
EHMKEIVVL

SEQ ID NO: 95173 - protein, 9 aa, Homo Sapiens
EHMMESVLI

SEQ ID NO: 95174 - protein, 9 aa, Homo Sapiens
EHMPSGESL

SEQ ID NO: 95175 - protein, 9 aa, Homo Sapiens
EHNDWIIHL

SEQ ID NO: 95176 - protein, 9 aa, Homo Sapiens
EHQAISFML

SEQ ID NO: 95177 - protein, 9 aa, Homo Sapiens
EHQAIVQHL

SEQ ID NO: 95178 - protein, 9 aa, Homo Sapiens
EHQAVLQSL

SEQ ID NO: 95179 - protein, 9 aa, Homo Sapiens
EHQDIVCLL

SEQ ID NO: 95180 - protein, 9 aa, Homo Sapiens
EHQEYITFL

SEQ ID NO: 95181 - protein, 9 aa, Homo Sapiens
EHQGIFTFL

SEQ ID NO: 95182 - protein, 9 aa, Homo Sapiens
EHQKPPVSI

SEQ ID NO: 95183 - protein, 9 aa, Homo Sapiens
EHQQFITFL

SEQ ID NO: 95184 - protein, 9 aa, Homo Sapiens
EHQQLQAKI

SEQ ID NO: 95185 - protein, 9 aa, Homo Sapiens
EHQVPVEKL

SEQ ID NO: 95186 - protein, 9 aa, Homo Sapiens
EHSAVNMNL

SEQ ID NO: 95187 - protein, 9 aa, Homo Sapiens
EHSCDEQYL

SEQ ID NO: 95188 - protein, 9 aa, Homo Sapiens
EHSDLIMTL

SEQ ID NO: 95189 - protein, 9 aa, Homo Sapiens
EHSDVLPVL

SEQ ID NO: 95190 - protein, 9 aa, Homo Sapiens
EHSELQDRL

SEQ ID NO: 95191 - protein, 9 aa, Homo Sapiens
EHSETIIEL

SEQ ID NO: 95192 - protein, 9 aa, Homo Sapiens
EHSFPFQFL

SEQ ID NO: 95193 - protein, 9 aa, Homo Sapiens
EHSGEFEKI

SEQ ID NO: 95194 - protein, 9 aa, Homo Sapiens
EHSGPPIVI

SEQ ID NO: 95195 - protein, 9 aa, Homo Sapiens
EHSIATLLL

SEQ ID NO: 95196 - protein, 9 aa, Homo Sapiens
EHSKLIAKV

SEQ ID NO: 95197 - protein, 9 aa, Homo Sapiens
EHSKSFDKW

SEQ ID NO: 95198 - protein, 9 aa, Homo Sapiens
EHSKVRLVI

SEQ ID NO: 95199 - protein, 9 aa, Homo Sapiens
EHSLLPLML

SEQ ID NO: 95200 - protein, 9 aa, Homo Sapiens
EHSLPTLGL

SEQ ID NO: 95201 - protein, 9 aa, Homo Sapiens
EHSLVIDTL

SEQ ID NO: 95202 - protein, 9 aa, Homo Sapiens
EHSNMAIDL

SEQ ID NO: 95203 - protein, 9 aa, Homo Sapiens
EHSPVPAGF

SEQ ID NO: 95204 - protein, 9 aa, Homo Sapiens
EHSPYYEAM

SEQ ID NO: 95205 - protein, 9 aa, Homo Sapiens
EHSSLKTHL

SEQ ID NO: 95206 - protein, 9 aa, Homo Sapiens
EHSTGITHL

SEQ ID NO: 95207 - protein, 9 aa, Homo Sapiens
EHSTVITFL

SEQ ID NO: 95208 - protein, 9 aa, Homo Sapiens
EHTDQVLHL

SEQ ID NO: 95209 - protein, 9 aa, Homo Sapiens
EHTEVLQLL

SEQ ID NO: 95210 - protein, 9 aa, Homo Sapiens
EHVDVIAKF

SEQ ID NO: 95211 - protein, 9 aa, Homo Sapiens
EHVLTGDSI

SEQ ID NO: 95212 - protein, 9 aa, Homo Sapiens
EHVPLLLYI

SEQ ID NO: 95213 - protein, 9 aa, Homo Sapiens
EHVPSSSSI

SEQ ID NO: 95214 - protein, 9 aa, Homo Sapiens
EHVQYMAEL

SEQ ID NO: 95215 - protein, 9 aa, Homo Sapiens
EHVYPDHRL

SEQ ID NO: 95216 - protein, 9 aa, Homo Sapiens
EHYHIVQKF

SEQ ID NO: 95217 - protein, 9 aa, Homo Sapiens
EHYHLTEAL

SEQ ID NO: 95218 - protein, 9 aa, Homo Sapiens
EHYNIPAFF

SEQ ID NO: 95219 - protein, 9 aa, Homo Sapiens
EHYNSVTRL

SEQ ID NO: 95220 - protein, 9 aa, Homo Sapiens
EHYPMTEQF

SEQ ID NO: 95221 - protein, 9 aa, Homo Sapiens
EHYRHALRL

SEQ ID NO: 95222 - protein, 9 aa, Homo Sapiens
ELDPVEYTL

SEQ ID NO: 95223 - protein, 9 aa, Homo Sapiens
EQDPTNLYI

SEQ ID NO: 95224 - protein, 9 aa, Homo Sapiens
ERAALQEEL

SEQ ID NO: 95225 - protein, 9 aa, Homo Sapiens
ERDDQQVFI

SEQ ID NO: 95226 - protein, 9 aa, Homo Sapiens
ERDPATYNI

SEQ ID NO: 95227 - protein, 9 aa, Homo Sapiens
ERDPQSPEF

SEQ ID NO: 95228 - protein, 9 aa, Homo Sapiens
ERDPVLWSL

SEQ ID NO: 95229 - protein, 9 aa, Homo Sapiens
ERDPVPLSI

SEQ ID NO: 95230 - protein, 9 aa, Homo Sapiens
ERDRLILFL

SEQ ID NO: 95231 - protein, 9 aa, Homo Sapiens
ERFRCPEAI

SEQ ID NO: 95232 - protein, 9 aa, Homo Sapiens
ERIRDVVYF

SEQ ID NO: 95233 - protein, 9 aa, Homo Sapiens
ERLQIDEQL

SEQ ID NO: 95234 - protein, 9 aa, Homo Sapiens
ERLVIQSYF

SEQ ID NO: 95235 - protein, 9 aa, Homo Sapiens
FEDDTRFYL

SEQ ID NO: 95236 - protein, 9 aa, Homo Sapiens
FEDSNVYML

SEQ ID NO: 95237 - protein, 9 aa, Homo Sapiens
FHAEPVDVW

SEQ ID NO: 95238 - protein, 9 aa, Homo Sapiens
FHAEQEKFL

SEQ ID NO: 95239 - protein, 9 aa, Homo Sapiens
FHAFLKTEF

SEQ ID NO: 95240 - protein, 9 aa, Homo Sapiens
FHAKEVQLF

SEQ ID NO: 95241 - protein, 9 aa, Homo Sapiens
FHATDLQML

SEQ ID NO: 95242 - protein, 9 aa, Homo Sapiens
FHCESSAHW

SEQ ID NO: 95243 - protein, 9 aa, Homo Sapiens
FHCLRILDL

SEQ ID NO: 95244 - protein, 9 aa, Homo Sapiens
FHCTLIGYF

SEQ ID NO: 95245 - protein, 9 aa, Homo Sapiens
FHDATRVYL

SEQ ID NO: 95246 - protein, 9 aa, Homo Sapiens
FHDDSMKSF

SEQ ID NO: 95247 - protein, 9 aa, Homo Sapiens
FHDDTHSRI

SEQ ID NO: 95248 - protein, 9 aa, Homo Sapiens
FHDDWISSI

SEQ ID NO: 95249 - protein, 9 aa, Homo Sapiens
FHDGDSVVF

SEQ ID NO: 95250 - protein, 9 aa, Homo Sapiens
FHDGFLLEV

SEQ ID NO: 95251 - protein, 9 aa, Homo Sapiens
FHDGSVHIV

SEQ ID NO: 95252 - protein, 9 aa, Homo Sapiens
FHDGYGEDL

SEQ ID NO: 95253 - protein, 9 aa, Homo Sapiens
FHDITRLHL

SEQ ID NO: 95254 - protein, 9 aa, Homo Sapiens
FHDKTPYTI

SEQ ID NO: 95255 - protein, 9 aa, Homo Sapiens
FHDKYGNAV

SEQ ID NO: 95256 - protein, 9 aa, Homo Sapiens
FHDLEGNAV

SEQ ID NO: 95257 - protein, 9 aa, Homo Sapiens
FHDMGGVQL

SEQ ID NO: 95258 - protein, 9 aa, Homo Sapiens
FHDMMPKYL

SEQ ID NO: 95259 - protein, 9 aa, Homo Sapiens
FHDMNPQSI

SEQ ID NO: 95260 - protein, 9 aa, Homo Sapiens
FHDNSGDVF

SEQ ID NO: 95261 - protein, 9 aa, Homo Sapiens
FHDPDSAVV

SEQ ID NO: 95262 - protein, 9 aa, Homo Sapiens
FHDPWKLLI

SEQ ID NO: 95263 - protein, 9 aa, Homo Sapiens
FHDSAVTSV

SEQ ID NO: 95264 - protein, 9 aa, Homo Sapiens
FHDSSPTQI

SEQ ID NO: 95265 - protein, 9 aa, Homo Sapiens
FHDVAGDIF

SEQ ID NO: 95266 - protein, 9 aa, Homo Sapiens
FHDVNCEVV

SEQ ID NO: 95267 - protein, 9 aa, Homo Sapiens
FHEEDESSF

SEQ ID NO: 95268 - protein, 9 aa, Homo Sapiens
FHEEEREGL

SEQ ID NO: 95269 - protein, 9 aa, Homo Sapiens
FHEEFIHYL

SEQ ID NO: 95270 - protein, 9 aa, Homo Sapiens
FHEEILPMF

SEQ ID NO: 95271 - protein, 9 aa, Homo Sapiens
FHEFHSPAL

SEQ ID NO: 95272 - protein, 9 aa, Homo Sapiens
FHEGDVITL

SEQ ID NO: 95273 - protein, 9 aa, Homo Sapiens
FHESGFTTV

SEQ ID NO: 95274 - protein, 9 aa, Homo Sapiens
FHESGLLRF

SEQ ID NO: 95275 - protein, 9 aa, Homo Sapiens
FHEYQESTI

SEQ ID NO: 95276 - protein, 9 aa, Homo Sapiens
FHFAGDGKL

SEQ ID NO: 95277 - protein, 9 aa, Homo Sapiens
FHFEPNEYF

SEQ ID NO: 95278 - protein, 9 aa, Homo Sapiens
FHFHCISRW

SEQ ID NO: 95279 - protein, 9 aa, Homo Sapiens
FHFRTDERI

SEQ ID NO: 95280 - protein, 9 aa, Homo Sapiens
FHGDPHATF

SEQ ID NO: 95281 - protein, 9 aa, Homo Sapiens
FHGPPEPVL

SEQ ID NO: 95282 - protein, 9 aa, Homo Sapiens
FHGVKDIKW

SEQ ID NO: 95283 - protein, 9 aa, Homo Sapiens
FHHESKENF

SEQ ID NO: 95284 - protein, 9 aa, Homo Sapiens
FHHEYPWIL

SEQ ID NO: 95285 - protein, 9 aa, Homo Sapiens
FHHPNILEL

SEQ ID NO: 95286 - protein, 9 aa, Homo Sapiens
FHHPSAVRL

SEQ ID NO: 95287 - protein, 9 aa, Homo Sapiens
FHHQDGYRY

SEQ ID NO: 95288 - protein, 9 aa, Homo Sapiens
FHHVGQAGL

SEQ ID NO: 95289 - protein, 9 aa, Homo Sapiens
FHIDFGHFL

SEQ ID NO: 95290 - protein, 9 aa, Homo Sapiens
FHIDFGHIL

SEQ ID NO: 95291 - protein, 9 aa, Homo Sapiens
FHIGDRVLI

SEQ ID NO: 95292 - protein, 9 aa, Homo Sapiens
FHITVGKAI

SEQ ID NO: 95293 - protein, 9 aa, Homo Sapiens
FHLAFEEEF

SEQ ID NO: 95294 - protein, 9 aa, Homo Sapiens
FHLDVEDYL

SEQ ID NO: 95295 - protein, 9 aa, Homo Sapiens
FHLIDFNLL

SEQ ID NO: 95296 - protein, 9 aa, Homo Sapiens
FHLPDDPSI

SEQ ID NO: 95297 - protein, 9 aa, Homo Sapiens
FHMDKVHYI

SEQ ID NO: 95298 - protein, 9 aa, Homo Sapiens
FHMDPSGTF

SEQ ID NO: 95299 - protein, 9 aa, Homo Sapiens
FHMHCILKW

SEQ ID NO: 95300 - protein, 9 aa, Homo Sapiens
FHNFIKVTL

SEQ ID NO: 95301 - protein, 9 aa, Homo Sapiens
FHNNIIVLI

SEQ ID NO: 95302 - protein, 9 aa, Homo Sapiens
FHNTEVEAM

SEQ ID NO: 95303 - protein, 9 aa, Homo Sapiens
FHQDLPLSI

SEQ ID NO: 95304 - protein, 9 aa, Homo Sapiens
FHQDPPLMF

SEQ ID NO: 95305 - protein, 9 aa, Homo Sapiens
FHQEEKESL

SEQ ID NO: 95306 - protein, 9 aa, Homo Sapiens
FHQEHEVRM

SEQ ID NO: 95307 - protein, 9 aa, Homo Sapiens
FHQELPLYI

SEQ ID NO: 95308 - protein, 9 aa, Homo Sapiens
FHQEQGHQL

SEQ ID NO: 95309 - protein, 9 aa, Homo Sapiens
FHQPDSVIL

SEQ ID NO: 95310 - protein, 9 aa, Homo Sapiens
FHQRGIALW

SEQ ID NO: 95311 - protein, 9 aa, Homo Sapiens
FHSDPLSAI

SEQ ID NO: 95312 - protein, 9 aa, Homo Sapiens
FHSDYRPLI

SEQ ID NO: 95313 - protein, 9 aa, Homo Sapiens
FHSEEQQLL

SEQ ID NO: 95314 - protein, 9 aa, Homo Sapiens
FHSEIEDFL

SEQ ID NO: 95315 - protein, 9 aa, Homo Sapiens
FHSFEELLL

SEQ ID NO: 95316 - protein, 9 aa, Homo Sapiens
FHSHDGPSL

SEQ ID NO: 95317 - protein, 9 aa, Homo Sapiens
FHSNDVATL

SEQ ID NO: 95318 - protein, 9 aa, Homo Sapiens
FHSPPQEAL

SEQ ID NO: 95319 - protein, 9 aa, Homo Sapiens
FHSVEVHKW

SEQ ID NO: 95320 - protein, 9 aa, Homo Sapiens
FHTEFQNLL

SEQ ID NO: 95321 - protein, 9 aa, Homo Sapiens
FHTGDVLKI

SEQ ID NO: 95322 - protein, 9 aa, Homo Sapiens
FHTVIGDTV

SEQ ID NO: 95323 - protein, 9 aa, Homo Sapiens
FHVDKVHNI

SEQ ID NO: 95324 - protein, 9 aa, Homo Sapiens
FHVDVPVQF

SEQ ID NO: 95325 - protein, 9 aa, Homo Sapiens
FHVFVRDVL

SEQ ID NO: 95326 - protein, 9 aa, Homo Sapiens
FHVPSLEEL

SEQ ID NO: 95327 - protein, 9 aa, Homo Sapiens
FHVSPDPSV

SEQ ID NO: 95328 - protein, 9 aa, Homo Sapiens
FHVVGTNIV

SEQ ID NO: 95329 - protein, 9 aa, Homo Sapiens
FHWSGNEQM

SEQ ID NO: 95330 - protein, 9 aa, Homo Sapiens
FHYDYIDLL

SEQ ID NO: 95331 - protein, 9 aa, Homo Sapiens
FHYHHVTKL

SEQ ID NO: 95332 - protein, 9 aa, Homo Sapiens
FHYPGVQNL

SEQ ID NO: 95333 - protein, 9 aa, Homo Sapiens
FKIDAGDRF

SEQ ID NO: 95334 - protein, 9 aa, Homo Sapiens
FKIDKEYLL

SEQ ID NO: 95335 - protein, 9 aa, Homo Sapiens
FLLPMFERL

SEQ ID NO: 95336 - protein, 9 aa, Homo Sapiens
FLSTVGDLL

SEQ ID NO: 95337 - protein, 9 aa, Homo Sapiens
FQDALEPLL

SEQ ID NO: 95338 - protein, 9 aa, Homo Sapiens
FQDEINWRL

SEQ ID NO: 95339 - protein, 9 aa, Homo Sapiens
FQDGTKATF

SEQ ID NO: 95340 - protein, 9 aa, Homo Sapiens
FQDHTKLIL

SEQ ID NO: 95341 - protein, 9 aa, Homo Sapiens
FQDPSVTQL

SEQ ID NO: 95342 - protein, 9 aa, Homo Sapiens
FQHEDLNFL

SEQ ID NO: 95343 - protein, 9 aa, Homo Sapiens
FRDVGSEEI

SEQ ID NO: 95344 - protein, 9 aa, Homo Sapiens
FRDYLHYHI

SEQ ID NO: 95345 - protein, 9 aa, Homo Sapiens
FRFAGSENL

SEQ ID NO: 95346 - protein, 9 aa, Homo Sapiens
FRMIERHYF

SEQ ID NO: 95347 - protein, 9 aa, Homo Sapiens
FRTEGAEKL

SEQ ID NO: 95348 - protein, 9 aa, Homo Sapiens
GHADVAQLL

SEQ ID NO: 95349 - protein, 9 aa, Homo Sapiens
GHAGSVDSI

SEQ ID NO: 95350 - protein, 9 aa, Homo Sapiens
GHASPCPPL

SEQ ID NO: 95351 - protein, 9 aa, Homo Sapiens
GHCDVLLSL

SEQ ID NO: 95352 - protein, 9 aa, Homo Sapiens
GHDASQITL

SEQ ID NO: 95353 - protein, 9 aa, Homo Sapiens
GHDASVLKV

SEQ ID NO: 95354 - protein, 9 aa, Homo Sapiens
GHDCFPVLF

SEQ ID NO: 95355 - protein, 9 aa, Homo Sapiens
GHDDAVSKI

SEQ ID NO: 95356 - protein, 9 aa, Homo Sapiens
GHDGIVLAL

SEQ ID NO: 95357 - protein, 9 aa, Homo Sapiens
GHDNRVSCL

SEQ ID NO: 95358 - protein, 9 aa, Homo Sapiens
GHDNTDVSI

SEQ ID NO: 95359 - protein, 9 aa, Homo Sapiens
GHDPNLSLL

SEQ ID NO: 95360 - protein, 9 aa, Homo Sapiens
GHDQVVVLL

SEQ ID NO: 95361 - protein, 9 aa, Homo Sapiens
GHDTNHVLL

SEQ ID NO: 95362 - protein, 9 aa, Homo Sapiens
GHDVIKTLI

SEQ ID NO: 95363 - protein, 9 aa, Homo Sapiens
GHFDGVQDL

SEQ ID NO: 95364 - protein, 9 aa, Homo Sapiens
GHFEKPLFL

SEQ ID NO: 95365 - protein, 9 aa, Homo Sapiens
GHIESPVFI

SEQ ID NO: 95366 - protein, 9 aa, Homo Sapiens
GHLDMVEFL

SEQ ID NO: 95367 - protein, 9 aa, Homo Sapiens
GHNGWVTQI

SEQ ID NO: 95368 - protein, 9 aa, Homo Sapiens
GHSDVVMGL

SEQ ID NO: 95369 - protein, 9 aa, Homo Sapiens
GHSEVSTAI

SEQ ID NO: 95370 - protein, 9 aa, Homo Sapiens
GHSGPITSI

SEQ ID NO: 95371 - protein, 9 aa, Homo Sapiens
GHSHVKLQL

SEQ ID NO: 95372 - protein, 9 aa, Homo Sapiens
GHSPVLRNI

SEQ ID NO: 95373 - protein, 9 aa, Homo Sapiens
GHSQGFNKL

SEQ ID NO: 95374 - protein, 9 aa, Homo Sapiens
GHSSFITHL

SEQ ID NO: 95375 - protein, 9 aa, Homo Sapiens
GHSSVFQAL

SEQ ID NO: 95376 - protein, 9 aa, Homo Sapiens
GHSSYITHL

SEQ ID NO: 95377 - protein, 9 aa, Homo Sapiens
GHVNLKDRL

SEQ ID NO: 95378 - protein, 9 aa, Homo Sapiens
GHVVDIVAL

SEQ ID NO: 95379 - protein, 9 aa, Homo Sapiens
GHYEVAELL

SEQ ID NO: 95380 - protein, 9 aa, Homo Sapiens
GHYEVTELL

SEQ ID NO: 95381 - protein, 9 aa, Homo Sapiens
GHYLGEFSI

SEQ ID NO: 95382 - protein, 9 aa, Homo Sapiens
GHYTEGAEL

SEQ ID NO: 95383 - protein, 9 aa, Homo Sapiens
GKDPNTYFI

SEQ ID NO: 95384 - protein, 9 aa, Homo Sapiens
GRYAGEESL

SEQ ID NO: 95385 - protein, 9 aa, Homo Sapiens
HDPTSANLL

SEQ ID NO: 95386 - protein, 9 aa, Homo Sapiens
HEGDIILKI

SEQ ID NO: 95387 - protein, 9 aa, Homo Sapiens
HHAEPPPAL

SEQ ID NO: 95388 - protein, 9 aa, Homo Sapiens
HHAESEAHL

SEQ ID NO: 95389 - protein, 9 aa, Homo Sapiens
HHAEYLTEL

SEQ ID NO: 95390 - protein, 9 aa, Homo Sapiens
HHAFQPSKL

SEQ ID NO: 95391 - protein, 9 aa, Homo Sapiens
HHALELEYL

SEQ ID NO: 95392 - protein, 9 aa, Homo Sapiens
HHANELIRF

SEQ ID NO: 95393 - protein, 9 aa, Homo Sapiens
HHANFPQYV

SEQ ID NO: 95394 - protein, 9 aa, Homo Sapiens
HHANPAIGF

SEQ ID NO: 95395 - protein, 9 aa, Homo Sapiens
HHANPILLL

SEQ ID NO: 95396 - protein, 9 aa, Homo Sapiens
HHAPLPSHL

SEQ ID NO: 95397 - protein, 9 aa, Homo Sapiens
HHAPLVNSL

SEQ ID NO: 95398 - protein, 9 aa, Homo Sapiens
HHAQDKSLL

SEQ ID NO: 95399 - protein, 9 aa, Homo Sapiens
HHAQDYGGL

SEQ ID NO: 95400 - protein, 9 aa, Homo Sapiens
HHAQLIFVF

SEQ ID NO: 95401 - protein, 9 aa, Homo Sapiens
HHARLIFVF

SEQ ID NO: 95402 - protein, 9 aa, Homo Sapiens
HHARSICHL

SEQ ID NO: 95403 - protein, 9 aa, Homo Sapiens
HHAVSPYSI

SEQ ID NO: 95404 - protein, 9 aa, Homo Sapiens
HHAVSTLGI

SEQ ID NO: 95405 - protein, 9 aa, Homo Sapiens
HHCDDHLSL

SEQ ID NO: 95406 - protein, 9 aa, Homo Sapiens
HHCEAVLHL

SEQ ID NO: 95407 - protein, 9 aa, Homo Sapiens
HHCEVDVSF

SEQ ID NO: 95408 - protein, 9 aa, Homo Sapiens
HHCKLTQVL

SEQ ID NO: 95409 - protein, 9 aa, Homo Sapiens
HHCPAFGLL

SEQ ID NO: 95410 - protein, 9 aa, Homo Sapiens
HHCPDVPIL

SEQ ID NO: 95411 - protein, 9 aa, Homo Sapiens
HHCPGNHSW

SEQ ID NO: 95412 - protein, 9 aa, Homo Sapiens
HHCPKTPFL

SEQ ID NO: 95413 - protein, 9 aa, Homo Sapiens
HHDASTFTI

SEQ ID NO: 95414 - protein, 9 aa, Homo Sapiens
HHDDYYSRL

SEQ ID NO: 95415 - protein, 9 aa, Homo Sapiens
HHDFHHMNF

SEQ ID NO: 95416 - protein, 9 aa, Homo Sapiens
HHDHLQPLL

SEQ ID NO: 95417 - protein, 9 aa, Homo Sapiens
HHDIKPSNI

SEQ ID NO: 95418 - protein, 9 aa, Homo Sapiens
HHDIVRFLV

SEQ ID NO: 95419 - protein, 9 aa, Homo Sapiens
HHDQLHTYL

SEQ ID NO: 95420 - protein, 9 aa, Homo Sapiens
HHDQPVKPL

SEQ ID NO: 95421 - protein, 9 aa, Homo Sapiens
HHDSRTYLV

SEQ ID NO: 95422 - protein, 9 aa, Homo Sapiens
HHDSSTFTL

SEQ ID NO: 95423 - protein, 9 aa, Homo Sapiens
HHDYHQYFS

SEQ ID NO: 95424 - protein, 9 aa, Homo Sapiens
HHDYSTYTF

SEQ ID NO: 95425 - protein, 9 aa, Homo Sapiens
HHEAGVTAL

SEQ ID NO: 95426 - protein, 9 aa, Homo Sapiens
HHEAMKTQI

SEQ ID NO: 95427 - protein, 9 aa, Homo Sapiens
HHEASGVTV

SEQ ID NO: 95428 - protein, 9 aa, Homo Sapiens
HHELHAAHL

SEQ ID NO: 95429 - protein, 9 aa, Homo Sapiens
HHENKYLLL

SEQ ID NO: 95430 - protein, 9 aa, Homo Sapiens
HHENLVSFL

SEQ ID NO: 95431 - protein, 9 aa, Homo Sapiens
HHEPESPQL

SEQ ID NO: 95432 - protein, 9 aa, Homo Sapiens
HHERTFIGI

SEQ ID NO: 95433 - protein, 9 aa, Homo Sapiens
HHFAGFSQI

SEQ ID NO: 95434 - protein, 9 aa, Homo Sapiens
HHFEGAQIL

SEQ ID NO: 95435 - protein, 9 aa, Homo Sapiens
HHFEQMLKL

SEQ ID NO: 95436 - protein, 9 aa, Homo Sapiens
HHFKYPCVL

SEQ ID NO: 95437 - protein, 9 aa, Homo Sapiens
HHFLELVTL

SEQ ID NO: 95438 - protein, 9 aa, Homo Sapiens
HHFLIGNNF

SEQ ID NO: 95439 - protein, 9 aa, Homo Sapiens
HHFPGPLLV

SEQ ID NO: 95440 - protein, 9 aa, Homo Sapiens
HHGGLLPIL

SEQ ID NO: 95441 - protein, 9 aa, Homo Sapiens
HHGPAEGLL

SEQ ID NO: 95442 - protein, 9 aa, Homo Sapiens
HHGPMAVAF

SEQ ID NO: 95443 - protein, 9 aa, Homo Sapiens
HHGPPGPTF

SEQ ID NO: 95444 - protein, 9 aa, Homo Sapiens
HHGPQTLYL

SEQ ID NO: 95445 - protein, 9 aa, Homo Sapiens
HHGQAQPGL

SEQ ID NO: 95446 - protein, 9 aa, Homo Sapiens
HHGRFIMSL

SEQ ID NO: 95447 - protein, 9 aa, Homo Sapiens
HHGTFMEEF

SEQ ID NO: 95448 - protein, 9 aa, Homo Sapiens
HHGTSILTL

SEQ ID NO: 95449 - protein, 9 aa, Homo Sapiens
HHGVNQLKF

SEQ ID NO: 95450 - protein, 9 aa, Homo Sapiens
HHHAGYEQF

SEQ ID NO: 95451 - protein, 9 aa, Homo Sapiens
HHHDYHHIL

SEQ ID NO: 95452 - protein, 9 aa, Homo Sapiens
HHHHHPPMI

SEQ ID NO: 95453 - protein, 9 aa, Homo Sapiens
HHHPPMIAL

SEQ ID NO: 95454 - protein, 9 aa, Homo Sapiens
HHHQEVILV

SEQ ID NO: 95455 - protein, 9 aa, Homo Sapiens
HHHSFYDFI

SEQ ID NO: 95456 - protein, 9 aa, Homo Sapiens
HHHSVPVFI

SEQ ID NO: 95457 - protein, 9 aa, Homo Sapiens
HHHTDGAYF

SEQ ID NO: 95458 - protein, 9 aa, Homo Sapiens
HHIASVEKL

SEQ ID NO: 95459 - protein, 9 aa, Homo Sapiens
HHIATVEKL

SEQ ID NO: 95460 - protein, 9 aa, Homo Sapiens
HHIDSANAL

SEQ ID NO: 95461 - protein, 9 aa, Homo Sapiens
HHIEAQQRL

SEQ ID NO: 95462 - protein, 9 aa, Homo Sapiens
HHIENLDLF

SEQ ID NO: 95463 - protein, 9 aa, Homo Sapiens
HHIEPFCKL

SEQ ID NO: 95464 - protein, 9 aa, Homo Sapiens
HHIIEQLRF

SEQ ID NO: 95465 - protein, 9 aa, Homo Sapiens
HHIKYQHLL

SEQ ID NO: 95466 - protein, 9 aa, Homo Sapiens
HHILKSDDL

SEQ ID NO: 95467 - protein, 9 aa, Homo Sapiens
HHISTEQEI

SEQ ID NO: 95468 - protein, 9 aa, Homo Sapiens
HHITGSQNI

SEQ ID NO: 95469 - protein, 9 aa, Homo Sapiens
HHLADLSHL

SEQ ID NO: 95470 - protein, 9 aa, Homo Sapiens
HHLAGPVYI

SEQ ID NO: 95471 - protein, 9 aa, Homo Sapiens
HHLDALDQL

SEQ ID NO: 95472 - protein, 9 aa, Homo Sapiens
HHLDPDTEL

SEQ ID NO: 95473 - protein, 9 aa, Homo Sapiens
HHLEQMYKL

SEQ ID NO: 95474 - protein, 9 aa, Homo Sapiens
HHLKEHLRI

SEQ ID NO: 95475 - protein, 9 aa, Homo Sapiens
HHLSDICHL

SEQ ID NO: 95476 - protein, 9 aa, Homo Sapiens
HHLTAYEKL

SEQ ID NO: 95477 - protein, 9 aa, Homo Sapiens
HHLVIPSVL

SEQ ID NO: 95478 - protein, 9 aa, Homo Sapiens
HHMGGMAGL

SEQ ID NO: 95479 - protein, 9 aa, Homo Sapiens
HHMGISHVL

SEQ ID NO: 95480 - protein, 9 aa, Homo Sapiens
HHMPICVSF

SEQ ID NO: 95481 - protein, 9 aa, Homo Sapiens
HHNEAVLHL

SEQ ID NO: 95482 - protein, 9 aa, Homo Sapiens
HHNGIAELL

SEQ ID NO: 95483 - protein, 9 aa, Homo Sapiens
HHNKLRLCF

SEQ ID NO: 95484 - protein, 9 aa, Homo Sapiens
HHNRAITHL

SEQ ID NO: 95485 - protein, 9 aa, Homo Sapiens
HHQAAIEKL

SEQ ID NO: 95486 - protein, 9 aa, Homo Sapiens
HHQALEVLL

SEQ ID NO: 95487 - protein, 9 aa, Homo Sapiens
HHQDAYIRI

SEQ ID NO: 95488 - protein, 9 aa, Homo Sapiens
HHQPELQQL

SEQ ID NO: 95489 - protein, 9 aa, Homo Sapiens
HHQPMVQGI

SEQ ID NO: 95490 - protein, 9 aa, Homo Sapiens
HHQQPHQYL

SEQ ID NO: 95491 - protein, 9 aa, Homo Sapiens
HHSALLILL

SEQ ID NO: 95492 - protein, 9 aa, Homo Sapiens
HHSDCLSTW

SEQ ID NO: 95493 - protein, 9 aa, Homo Sapiens
HHSDGSVSL

SEQ ID NO: 95494 - protein, 9 aa, Homo Sapiens
HHSGAKVVL

SEQ ID NO: 95495 - protein, 9 aa, Homo Sapiens
HHSGILPIL

SEQ ID NO: 95496 - protein, 9 aa, Homo Sapiens
HHSGTITCL

SEQ ID NO: 95497 - protein, 9 aa, Homo Sapiens
HHSISSQTF

SEQ ID NO: 95498 - protein, 9 aa, Homo Sapiens
HHSLALTSF

SEQ ID NO: 95499 - protein, 9 aa, Homo Sapiens
HHSNILLTF

SEQ ID NO: 95500 - protein, 9 aa, Homo Sapiens
HHSNIPMSL

SEQ ID NO: 95501 - protein, 9 aa, Homo Sapiens
HHSNLIAGM

SEQ ID NO: 95502 - protein, 9 aa, Homo Sapiens
HHSQSFQLL

SEQ ID NO: 95503 - protein, 9 aa, Homo Sapiens
HHSRALQSI

SEQ ID NO: 95504 - protein, 9 aa, Homo Sapiens
HHSSEDYNL

SEQ ID NO: 95505 - protein, 9 aa, Homo Sapiens
HHSSVQDAV

SEQ ID NO: 95506 - protein, 9 aa, Homo Sapiens
HHSTQMQEL

SEQ ID NO: 95507 - protein, 9 aa, Homo Sapiens
HHSVGTELL

SEQ ID NO: 95508 - protein, 9 aa, Homo Sapiens
HHSYEDTGL

SEQ ID NO: 95509 - protein, 9 aa, Homo Sapiens
HHTLYINLI

SEQ ID NO: 95510 - protein, 9 aa, Homo Sapiens
HHTMVVQAI

SEQ ID NO: 95511 - protein, 9 aa, Homo Sapiens
HHTQVDPAM

SEQ ID NO: 95512 - protein, 9 aa, Homo Sapiens
HHTRLILYF

SEQ ID NO: 95513 - protein, 9 aa, Homo Sapiens
HHTSSVYSI

SEQ ID NO: 95514 - protein, 9 aa, Homo Sapiens
HHTTDSASW

SEQ ID NO: 95515 - protein, 9 aa, Homo Sapiens
HHTTQQTFL

SEQ ID NO: 95516 - protein, 9 aa, Homo Sapiens
HHVATIILI

SEQ ID NO: 95517 - protein, 9 aa, Homo Sapiens
HHVDTEANI

SEQ ID NO: 95518 - protein, 9 aa, Homo Sapiens
HHVEPLERL

SEQ ID NO: 95519 - protein, 9 aa, Homo Sapiens
HHVKDISCL

SEQ ID NO: 95520 - protein, 9 aa, Homo Sapiens
HHVKFHYAF

SEQ ID NO: 95521 - protein, 9 aa, Homo Sapiens
HHVLQNDVL

SEQ ID NO: 95522 - protein, 9 aa, Homo Sapiens
HHVNMTPEF

SEQ ID NO: 95523 - protein, 9 aa, Homo Sapiens
HHVNVNPNF

SEQ ID NO: 95524 - protein, 9 aa, Homo Sapiens
HHVPLYLEW

SEQ ID NO: 95525 - protein, 9 aa, Homo Sapiens
HHVQLESLL

SEQ ID NO: 95526 - protein, 9 aa, Homo Sapiens
HHVSAVLNF

SEQ ID NO: 95527 - protein, 9 aa, Homo Sapiens
HHVSSLAWL

SEQ ID NO: 95528 - protein, 9 aa, Homo Sapiens
HHVVFGQVI

SEQ ID NO: 95529 - protein, 9 aa, Homo Sapiens
HHYEGAVVI

SEQ ID NO: 95530 - protein, 9 aa, Homo Sapiens
HHYELPAIL

SEQ ID NO: 95531 - protein, 9 aa, Homo Sapiens
HHYTGLLKL

SEQ ID NO: 95532 - protein, 9 aa, Homo Sapiens
HLATKLNIL

SEQ ID NO: 95533 - protein, 9 aa, Homo Sapiens
HLAWFGDSL

SEQ ID NO: 95534 - protein, 9 aa, Homo Sapiens
HLGEDLKSI

SEQ ID NO: 95535 - protein, 9 aa, Homo Sapiens
HLGLKLLLL

SEQ ID NO: 95536 - protein, 9 aa, Homo Sapiens
HLSDVVLRF

SEQ ID NO: 95537 - protein, 9 aa, Homo Sapiens
HPDSHQLFI

SEQ ID NO: 95538 - protein, 9 aa, Homo Sapiens
HQAPTERQL

SEQ ID NO: 95539 - protein, 9 aa, Homo Sapiens
HQDDFNQLL

SEQ ID NO: 95540 - protein, 9 aa, Homo Sapiens
HQDNILSLI

SEQ ID NO: 95541 - protein, 9 aa, Homo Sapiens
HQDNNFLYL

SEQ ID NO: 95542 - protein, 9 aa, Homo Sapiens
HQDPNSYSW

SEQ ID NO: 95543 - protein, 9 aa, Homo Sapiens
HQDQLQVLL

SEQ ID NO: 95544 - protein, 9 aa, Homo Sapiens
HQDQMVQKI

SEQ ID NO: 95545 - protein, 9 aa, Homo Sapiens
HQEQGHQLL

SEQ ID NO: 95546 - protein, 9 aa, Homo Sapiens
HQHEYFFLI

SEQ ID NO: 95547 - protein, 9 aa, Homo Sapiens
HQSKEENLI

SEQ ID NO: 95548 - protein, 9 aa, Homo Sapiens
HQTELGNQL

SEQ ID NO: 95549 - protein, 9 aa, Homo Sapiens
HRAQLQIRI

SEQ ID NO: 95550 - protein, 9 aa, Homo Sapiens
HRAQYEPLF

SEQ ID NO: 95551 - protein, 9 aa, Homo Sapiens
HRAVFQESI

SEQ ID NO: 95552 - protein, 9 aa, Homo Sapiens
HRDIVELLF

SEQ ID NO: 95553 - protein, 9 aa, Homo Sapiens
HRDSHITNL

SEQ ID NO: 95554 - protein, 9 aa, Homo Sapiens
HRDYVPCKI

SEQ ID NO: 95555 - protein, 9 aa, Homo Sapiens
HRFYMFHSF

SEQ ID NO: 95556 - protein, 9 aa, Homo Sapiens
HRHALRLLI

SEQ ID NO: 95557 - protein, 9 aa, Homo Sapiens
HRIQDLEQL

SEQ ID NO: 95558 - protein, 9 aa, Homo Sapiens
HRLFEDQRF

SEQ ID NO: 95559 - protein, 9 aa, Homo Sapiens
HRLPLQELW

SEQ ID NO: 95560 - protein, 9 aa, Homo Sapiens
HRMKGTEGL

SEQ ID NO: 95561 - protein, 9 aa, Homo Sapiens
HRYECEESF

SEQ ID NO: 95562 - protein, 9 aa, Homo Sapiens
HSLDHLKYL

SEQ ID NO: 95563 - protein, 9 aa, Homo Sapiens
HSLSSSESL

SEQ ID NO: 95564 - protein, 9 aa, Homo Sapiens
IAPETRRSI

SEQ ID NO: 95565 - protein, 9 aa, Homo Sapiens
IHAAYVHVI

SEQ ID NO: 95566 - protein, 9 aa, Homo Sapiens
IHADPKLLL

SEQ ID NO: 95567 - protein, 9 aa, Homo Sapiens
IHAGDILKF

SEQ ID NO: 95568 - protein, 9 aa, Homo Sapiens
IHCNTPSLL

SEQ ID NO: 95569 - protein, 9 aa, Homo Sapiens
IHDDPIRLF

SEQ ID NO: 95570 - protein, 9 aa, Homo Sapiens
IHDEEVLRL

SEQ ID NO: 95571 - protein, 9 aa, Homo Sapiens
IHDELQQSF

SEQ ID NO: 95572 - protein, 9 aa, Homo Sapiens
IHDFQPHVI

SEQ ID NO: 95573 - protein, 9 aa, Homo Sapiens
IHDGFGFML

SEQ ID NO: 95574 - protein, 9 aa, Homo Sapiens
IHDGLTVHL

SEQ ID NO: 95575 - protein, 9 aa, Homo Sapiens
IHDGMNLEL

SEQ ID NO: 95576 - protein, 9 aa, Homo Sapiens
IHDGTVHTI

SEQ ID NO: 95577 - protein, 9 aa, Homo Sapiens
IHDHNIPTL

SEQ ID NO: 95578 - protein, 9 aa, Homo Sapiens
IHDHSKAEF

SEQ ID NO: 95579 - protein, 9 aa, Homo Sapiens
IHDIKLLFL

SEQ ID NO: 95580 - protein, 9 aa, Homo Sapiens
IHDILDLTF

SEQ ID NO: 95581 - protein, 9 aa, Homo Sapiens
IHDKTEINL

SEQ ID NO: 95582 - protein, 9 aa, Homo Sapiens
IHDLDNISF

SEQ ID NO: 95583 - protein, 9 aa, Homo Sapiens
IHDLDSNSF

SEQ ID NO: 95584 - protein, 9 aa, Homo Sapiens
IHDLFPSLI

SEQ ID NO: 95585 - protein, 9 aa, Homo Sapiens
IHDMFPLHL

SEQ ID NO: 95586 - protein, 9 aa, Homo Sapiens
IHDNGEFYL

SEQ ID NO: 95587 - protein, 9 aa, Homo Sapiens
IHDSSSLLM

SEQ ID NO: 95588 - protein, 9 aa, Homo Sapiens
IHDYVVAML

SEQ ID NO: 95589 - protein, 9 aa, Homo Sapiens
IHEDQTVYI

SEQ ID NO: 95590 - protein, 9 aa, Homo Sapiens
IHEDSMNLL

SEQ ID NO: 95591 - protein, 9 aa, Homo Sapiens
IHEDTRHLL

SEQ ID NO: 95592 - protein, 9 aa, Homo Sapiens
IHEPEPHIL

SEQ ID NO: 95593 - protein, 9 aa, Homo Sapiens
IHEPSAALL

SEQ ID NO: 95594 - protein, 9 aa, Homo Sapiens
IHEQVNHRW

SEQ ID NO: 95595 - protein, 9 aa, Homo Sapiens
IHESVSAQI

SEQ ID NO: 95596 - protein, 9 aa, Homo Sapiens
IHETTFNSI

SEQ ID NO: 95597 - protein, 9 aa, Homo Sapiens
IHFFGEEYL

SEQ ID NO: 95598 - protein, 9 aa, Homo Sapiens
IHGDGVQKI

SEQ ID NO: 95599 - protein, 9 aa, Homo Sapiens
IHGPKGNEI

SEQ ID NO: 95600 - protein, 9 aa, Homo Sapiens
IHHDAVIFL

SEQ ID NO: 95601 - protein, 9 aa, Homo Sapiens
IHHEGGENI

SEQ ID NO: 95602 - protein, 9 aa, Homo Sapiens
IHHNWPSLL

SEQ ID NO: 95603 - protein, 9 aa, Homo Sapiens
IHHPTPIQI

SEQ ID NO: 95604 - protein, 9 aa, Homo Sapiens
IHIDCEKRI

SEQ ID NO: 95605 - protein, 9 aa, Homo Sapiens
IHIDIMDYI

SEQ ID NO: 95606 - protein, 9 aa, Homo Sapiens
IHIEQLDKI

SEQ ID NO: 95607 - protein, 9 aa, Homo Sapiens
IHILDVLVL

SEQ ID NO: 95608 - protein, 9 aa, Homo Sapiens
IHISSGNTM

SEQ ID NO: 95609 - protein, 9 aa, Homo Sapiens
IHLGHILFL

SEQ ID NO: 95610 - protein, 9 aa, Homo Sapiens
IHLHTEALL

SEQ ID NO: 95611 - protein, 9 aa, Homo Sapiens
IHLIDPNTL

SEQ ID NO: 95612 - protein, 9 aa, Homo Sapiens
IHNDNEELI

SEQ ID NO: 95613 - protein, 9 aa, Homo Sapiens
IHNDVKVLL

SEQ ID NO: 95614 - protein, 9 aa, Homo Sapiens
IHNEDFPAL

SEQ ID NO: 95615 - protein, 9 aa, Homo Sapiens
IHNEDNSQF

SEQ ID NO: 95616 - protein, 9 aa, Homo Sapiens
IHNSDQILL

SEQ ID NO: 95617 - protein, 9 aa, Homo Sapiens
IHQDGIHIL

SEQ ID NO: 95618 - protein, 9 aa, Homo Sapiens
IHQRETQLI

SEQ ID NO: 95619 - protein, 9 aa, Homo Sapiens
IHSDFQTLI

SEQ ID NO: 95620 - protein, 9 aa, Homo Sapiens
IHSENFQTL

SEQ ID NO: 95621 - protein, 9 aa, Homo Sapiens
IHSESSDTF

SEQ ID NO: 95622 - protein, 9 aa, Homo Sapiens
IHSFELDLL

SEQ ID NO: 95623 - protein, 9 aa, Homo Sapiens
IHSFIGDGL

SEQ ID NO: 95624 - protein, 9 aa, Homo Sapiens
IHSGDEAYI

SEQ ID NO: 95625 - protein, 9 aa, Homo Sapiens
IHSGELTKI

SEQ ID NO: 95626 - protein, 9 aa, Homo Sapiens
IHSMFPLHL

SEQ ID NO: 95627 - protein, 9 aa, Homo Sapiens
IHSPVVNEL

SEQ ID NO: 95628 - protein, 9 aa, Homo Sapiens
IHSQPQPAL

SEQ ID NO: 95629 - protein, 9 aa, Homo Sapiens
IHSQVSQQL

SEQ ID NO: 95630 - protein, 9 aa, Homo Sapiens
IHSSIVSTL

SEQ ID NO: 95631 - protein, 9 aa, Homo Sapiens
IHSSVQCKL

SEQ ID NO: 95632 - protein, 9 aa, Homo Sapiens
IHSTGQQFI

SEQ ID NO: 95633 - protein, 9 aa, Homo Sapiens
IHTDGNEQI

SEQ ID NO: 95634 - protein, 9 aa, Homo Sapiens
IHTETGNIW

SEQ ID NO: 95635 - protein, 9 aa, Homo Sapiens
IHTSVSQDF

SEQ ID NO: 95636 - protein, 9 aa, Homo Sapiens
IHVDDRQDF

SEQ ID NO: 95637 - protein, 9 aa, Homo Sapiens
IHVDFPVIL

SEQ ID NO: 95638 - protein, 9 aa, Homo Sapiens
IHVIGGNDV

SEQ ID NO: 95639 - protein, 9 aa, Homo Sapiens
IKDVIGDEI

SEQ ID NO: 95640 - protein, 9 aa, Homo Sapiens
ILANIGDHF

SEQ ID NO: 95641 - protein, 9 aa, Homo Sapiens
ILANVGDQF

SEQ ID NO: 95642 - protein, 9 aa, Homo Sapiens
ILDGNQLHI

SEQ ID NO: 95643 - protein, 9 aa, Homo Sapiens
ILDPSNTEI

SEQ ID NO: 95644 - protein, 9 aa, Homo Sapiens
IPDDAKDLI

SEQ ID NO: 95645 - protein, 9 aa, Homo Sapiens
IQCEIFQVL

SEQ ID NO: 95646 - protein, 9 aa, Homo Sapiens
KHAVSDPSI

SEQ ID NO: 95647 - protein, 9 aa, Homo Sapiens
KHCHTKLSL

SEQ ID NO: 95648 - protein, 9 aa, Homo Sapiens
KHDDVMAKF

SEQ ID NO: 95649 - protein, 9 aa, Homo Sapiens
KHDEYLILL

SEQ ID NO: 95650 - protein, 9 aa, Homo Sapiens
KHDPTSANL

SEQ ID NO: 95651 - protein, 9 aa, Homo Sapiens
KHDTKLLIL

SEQ ID NO: 95652 - protein, 9 aa, Homo Sapiens
KHDVGAYML

SEQ ID NO: 95653 - protein, 9 aa, Homo Sapiens
KHFDLFLRF

SEQ ID NO: 95654 - protein, 9 aa, Homo Sapiens
KHFEGTEFL

SEQ ID NO: 95655 - protein, 9 aa, Homo Sapiens
KHHPDLHLW

SEQ ID NO: 95656 - protein, 9 aa, Homo Sapiens
KHQEHILRF

SEQ ID NO: 95657 - protein, 9 aa, Homo Sapiens
KHSEVVTQI

SEQ ID NO: 95658 - protein, 9 aa, Homo Sapiens
KHVEFDFLI

SEQ ID NO: 95659 - protein, 9 aa, Homo Sapiens
KLAPKDVKI

SEQ ID NO: 95660 - protein, 9 aa, Homo Sapiens
KPDEFESGI

SEQ ID NO: 95661 - protein, 9 aa, Homo Sapiens
KPHEDIIGI

SEQ ID NO: 95662 - protein, 9 aa, Homo Sapiens
KQDETQTKI

SEQ ID NO: 95663 - protein, 9 aa, Homo Sapiens
KQVHPDTGI

SEQ ID NO: 95664 - protein, 9 aa, Homo Sapiens
LDTNADKQL

SEQ ID NO: 95665 - protein, 9 aa, Homo Sapiens
LHAAESDEF

SEQ ID NO: 95666 - protein, 9 aa, Homo Sapiens
LHADPEPSV

SEQ ID NO: 95667 - protein, 9 aa, Homo Sapiens
LHAFPELYF

SEQ ID NO: 95668 - protein, 9 aa, Homo Sapiens
LHALPELYF

SEQ ID NO: 95669 - protein, 9 aa, Homo Sapiens
LHAQGDPAL

SEQ ID NO: 95670 - protein, 9 aa, Homo Sapiens
LHAQPIISI

SEQ ID NO: 95671 - protein, 9 aa, Homo Sapiens
LHATGDYLL

SEQ ID NO: 95672 - protein, 9 aa, Homo Sapiens
LHCDHQAFL

SEQ ID NO: 95673 - protein, 9 aa, Homo Sapiens
LHCGDESML

SEQ ID NO: 95674 - protein, 9 aa, Homo Sapiens
LHDAEIVRL

SEQ ID NO: 95675 - protein, 9 aa, Homo Sapiens
LHDEMLHWF

SEQ ID NO: 95676 - protein, 9 aa, Homo Sapiens
LHDETLTYL

SEQ ID NO: 95677 - protein, 9 aa, Homo Sapiens
LHDFHSHEI

SEQ ID NO: 95678 - protein, 9 aa, Homo Sapiens
LHDGHFYAL

SEQ ID NO: 95679 - protein, 9 aa, Homo Sapiens
LHDHGVSSL

SEQ ID NO: 95680 - protein, 9 aa, Homo Sapiens
LHDPHPTCW

SEQ ID NO: 95681 - protein, 9 aa, Homo Sapiens
LHDQFQHQL

SEQ ID NO: 95682 - protein, 9 aa, Homo Sapiens
LHDSSDYLL

SEQ ID NO: 95683 - protein, 9 aa, Homo Sapiens
LHDTRTHFL

SEQ ID NO: 95684 - protein, 9 aa, Homo Sapiens
LHDVEHVLI

SEQ ID NO: 95685 - protein, 9 aa, Homo Sapiens
LHEAGGEDF

SEQ ID NO: 95686 - protein, 9 aa, Homo Sapiens
LHEDGGKLF

SEQ ID NO: 95687 - protein, 9 aa, Homo Sapiens
LHENGCITL

SEQ ID NO: 95688 - protein, 9 aa, Homo Sapiens
LHHPNIIRL

SEQ ID NO: 95689 - protein, 9 aa, Homo Sapiens
LHHPNNQTL

SEQ ID NO: 95690 - protein, 9 aa, Homo Sapiens
LHIATEDNI

SEQ ID NO: 95691 - protein, 9 aa, Homo Sapiens
LHIGDIVSL

SEQ ID NO: 95692 - protein, 9 aa, Homo Sapiens
LHLDATKLL

SEQ ID NO: 95693 - protein, 9 aa, Homo Sapiens
LHNGEPLYI

SEQ ID NO: 95694 - protein, 9 aa, Homo Sapiens
LHNNLLTYL

SEQ ID NO: 95695 - protein, 9 aa, Homo Sapiens
LHNRENQSI

SEQ ID NO: 95696 - protein, 9 aa, Homo Sapiens
LHSEDFLEL

SEQ ID NO: 95697 - protein, 9 aa, Homo Sapiens
LHSEEFLSF

SEQ ID NO: 95698 - protein, 9 aa, Homo Sapiens
LHSKVILAI

SEQ ID NO: 95699 - protein, 9 aa, Homo Sapiens
LHSRVKLIL

SEQ ID NO: 95700 - protein, 9 aa, Homo Sapiens
LHTEECNVL

SEQ ID NO: 95701 - protein, 9 aa, Homo Sapiens
LHTSIGNSV

SEQ ID NO: 95702 - protein, 9 aa, Homo Sapiens
LHTTVGSLL

SEQ ID NO: 95703 - protein, 9 aa, Homo Sapiens
LHVDNHIGI

SEQ ID NO: 95704 - protein, 9 aa, Homo Sapiens
LHYFPEYQW

SEQ ID NO: 95705 - protein, 9 aa, Homo Sapiens
LHYGSVLLI

SEQ ID NO: 95706 - protein, 9 aa, Homo Sapiens
LLKVAHLLL

SEQ ID NO: 95707 - protein, 9 aa, Homo Sapiens
LLTTMGDRF

SEQ ID NO: 95708 - protein, 9 aa, Homo Sapiens
LPAESNEKI

SEQ ID NO: 95709 - protein, 9 aa, Homo Sapiens
LPATIGDLI

SEQ ID NO: 95710 - protein, 9 aa, Homo Sapiens
LPIDDVLRI

SEQ ID NO: 95711 - protein, 9 aa, Homo Sapiens
LPINGNGKQ

SEQ ID NO: 95712 - protein, 9 aa, Homo Sapiens
LPSRLGLLL

SEQ ID NO: 95713 - protein, 9 aa, Homo Sapiens
LQDPGNHLI

SEQ ID NO: 95714 - protein, 9 aa, Homo Sapiens
LQDTSLQQL

SEQ ID NO: 95715 - protein, 9 aa, Homo Sapiens
LQNNTILRL

SEQ ID NO: 95716 - protein, 9 aa, Homo Sapiens
MENLDPLGI

SEQ ID NO: 95717 - protein, 9 aa, Homo Sapiens
MHAGSSDLL

SEQ ID NO: 95718 - protein, 9 aa, Homo Sapiens
MHAQDPQML

SEQ ID NO: 95719 - protein, 9 aa, Homo Sapiens
MHCDDETSL

SEQ ID NO: 95720 - protein, 9 aa, Homo Sapiens
MHCEKVFRI

SEQ ID NO: 95721 - protein, 9 aa, Homo Sapiens
MHDCVVKLL

SEQ ID NO: 95722 - protein, 9 aa, Homo Sapiens
MHDEKVDLW

SEQ ID NO: 95723 - protein, 9 aa, Homo Sapiens
MHDFNLISI

SEQ ID NO: 95724 - protein, 9 aa, Homo Sapiens
MHDHFNAEI

SEQ ID NO: 95725 - protein, 9 aa, Homo Sapiens
MHDKVFAYI

SEQ ID NO: 95726 - protein, 9 aa, Homo Sapiens
MHDTIGCYL

SEQ ID NO: 95727 - protein, 9 aa, Homo Sapiens
MHDVYGMLL

SEQ ID NO: 95728 - protein, 9 aa, Homo Sapiens
MHDYDGNNL

SEQ ID NO: 95729 - protein, 9 aa, Homo Sapiens
MHDYNQAEM

SEQ ID NO: 95730 - protein, 9 aa, Homo Sapiens
MHEENVYTV

SEQ ID NO: 95731 - protein, 9 aa, Homo Sapiens
MHEVGVVAF

SEQ ID NO: 95732 - protein, 9 aa, Homo Sapiens
MHFEKHWRL

SEQ ID NO: 95733 - protein, 9 aa, Homo Sapiens
MHFHETETF

SEQ ID NO: 95734 - protein, 9 aa, Homo Sapiens
MHGLEPQTI

SEQ ID NO: 95735 - protein, 9 aa, Homo Sapiens
MHGQPSPSL

SEQ ID NO: 95736 - protein, 9 aa, Homo Sapiens
MHHFIPDLL

SEQ ID NO: 95737 - protein, 9 aa, Homo Sapiens
MHHNIPHRF

SEQ ID NO: 95738 - protein, 9 aa, Homo Sapiens
MHHPDGCAL

SEQ ID NO: 95739 - protein, 9 aa, Homo Sapiens
MHHQPDPAL

SEQ ID NO: 95740 - protein, 9 aa, Homo Sapiens
MHHWLLFEM

SEQ ID NO: 95741 - protein, 9 aa, Homo Sapiens
MHIDSHEAL

SEQ ID NO: 95742 - protein, 9 aa, Homo Sapiens
MHILDGCSI

SEQ ID NO: 95743 - protein, 9 aa, Homo Sapiens
MHIRYQSKL

SEQ ID NO: 95744 - protein, 9 aa, Homo Sapiens
MHIYETDGF

SEQ ID NO: 95745 - protein, 9 aa, Homo Sapiens
MHLRQYELL

SEQ ID NO: 95746 - protein, 9 aa, Homo Sapiens
MHMVDTVTW

SEQ ID NO: 95747 - protein, 9 aa, Homo Sapiens
MHNDTWVLL

SEQ ID NO: 95748 - protein, 9 aa, Homo Sapiens
MHNEEPFAL

SEQ ID NO: 95749 - protein, 9 aa, Homo Sapiens
MHNEKVDLW

SEQ ID NO: 95750 - protein, 9 aa, Homo Sapiens
MHQNIYDYI

SEQ ID NO: 95751 - protein, 9 aa, Homo Sapiens
MHSDHTVGL

SEQ ID NO: 95752 - protein, 9 aa, Homo Sapiens
MHSEELLAF

SEQ ID NO: 95753 - protein, 9 aa, Homo Sapiens
MHSEKLLSF

SEQ ID NO: 95754 - protein, 9 aa, Homo Sapiens
MHSGLTQNL

SEQ ID NO: 95755 - protein, 9 aa, Homo Sapiens
MHSGPVVAM

SEQ ID NO: 95756 - protein, 9 aa, Homo Sapiens
MHSPLIHHI

SEQ ID NO: 95757 - protein, 9 aa, Homo Sapiens
MHSQFHAPL

SEQ ID NO: 95758 - protein, 9 aa, Homo Sapiens
MHVDECVEF

SEQ ID NO: 95759 - protein, 9 aa, Homo Sapiens
MHVRDNVKI

SEQ ID NO: 95760 - protein, 9 aa, Homo Sapiens
MHVSLAEAL

SEQ ID NO: 95761 - protein, 9 aa, Homo Sapiens
MHYKEAIRI

SEQ ID NO: 95762 - protein, 9 aa, Homo Sapiens
MHYPNGHAI

SEQ ID NO: 95763 - protein, 9 aa, Homo Sapiens
MHYPTALLF

SEQ ID NO: 95764 - protein, 9 aa, Homo Sapiens
MIDDTYQCL

SEQ ID NO: 95765 - protein, 9 aa, Homo Sapiens
MIDNVILLI

SEQ ID NO: 95766 - protein, 9 aa, Homo Sapiens
MKDLGAEHL

SEQ ID NO: 95767 - protein, 9 aa, Homo Sapiens
MKMEIGDTL

SEQ ID NO: 95768 - protein, 9 aa, Homo Sapiens
MLDNSFERL

SEQ ID NO: 95769 - protein, 9 aa, Homo Sapiens
MLVGIGDKI

SEQ ID NO: 95770 - protein, 9 aa, Homo Sapiens
MQDGSVQVI

SEQ ID NO: 95771 - protein, 9 aa, Homo Sapiens
MQDKTEWKL

SEQ ID NO: 95772 - protein, 9 aa, Homo Sapiens
MQDPNPYSF

SEQ ID NO: 95773 - protein, 9 aa, Homo Sapiens
MQDSRLYLI

SEQ ID NO: 95774 - protein, 9 aa, Homo Sapiens
MQEAAQHLL

SEQ ID NO: 95775 - protein, 9 aa, Homo Sapiens
MQESGEQTI

SEQ ID NO: 95776 - protein, 9 aa, Homo Sapiens
MQVKVGNEV

SEQ ID NO: 95777 - protein, 9 aa, Homo Sapiens
MRDAIILIF

SEQ ID NO: 95778 - protein, 9 aa, Homo Sapiens
MRDAKIYQI

SEQ ID NO: 95779 - protein, 9 aa, Homo Sapiens
MRDCLILVL

SEQ ID NO: 95780 - protein, 9 aa, Homo Sapiens
MRDGGKYSL

SEQ ID NO: 95781 - protein, 9 aa, Homo Sapiens
MRDPIRILV

SEQ ID NO: 95782 - protein, 9 aa, Homo Sapiens
MRDPTFVRL

SEQ ID NO: 95783 - protein, 9 aa, Homo Sapiens
MRDPVSSQY

SEQ ID NO: 95784 - protein, 9 aa, Homo Sapiens
MREERQDRL

SEQ ID NO: 95785 - protein, 9 aa, Homo Sapiens
MRLSLPLLL

SEQ ID NO: 95786 - protein, 9 aa, Homo Sapiens
MRMVLNESL

SEQ ID NO: 95787 - protein, 9 aa, Homo Sapiens
NCDKHKSIL

SEQ ID NO: 95788 - protein, 9 aa, Homo Sapiens
NHAAVRQML

SEQ ID NO: 95789 - protein, 9 aa, Homo Sapiens
NHADIGFCL

SEQ ID NO: 95790 - protein, 9 aa, Homo Sapiens
NHADPNSGL

SEQ ID NO: 95791 - protein, 9 aa, Homo Sapiens
NHAFHFHCI

SEQ ID NO: 95792 - protein, 9 aa, Homo Sapiens
NHAHHEWYL

SEQ ID NO: 95793 - protein, 9 aa, Homo Sapiens
NHALELLVI

SEQ ID NO: 95794 - protein, 9 aa, Homo Sapiens
NHALPLPGF

SEQ ID NO: 95795 - protein, 9 aa, Homo Sapiens
NHALPVYVF

SEQ ID NO: 95796 - protein, 9 aa, Homo Sapiens
NHANGLTLV

SEQ ID NO: 95797 - protein, 9 aa, Homo Sapiens
NHASAKLDF

SEQ ID NO: 95798 - protein, 9 aa, Homo Sapiens
NHASIIDGI

SEQ ID NO: 95799 - protein, 9 aa, Homo Sapiens
NHASLISAL

SEQ ID NO: 95800 - protein, 9 aa, Homo Sapiens
NHASMIQGI

SEQ ID NO: 95801 - protein, 9 aa, Homo Sapiens
NHCELLSRL

SEQ ID NO: 95802 - protein, 9 aa, Homo Sapiens
NHCMEVIRL

SEQ ID NO: 95803 - protein, 9 aa, Homo Sapiens
NHCPGAVMI

SEQ ID NO: 95804 - protein, 9 aa, Homo Sapiens
NHCSVSSEL

SEQ ID NO: 95805 - protein, 9 aa, Homo Sapiens
NHDDYTNQI

SEQ ID NO: 95806 - protein, 9 aa, Homo Sapiens
NHDEAIALL

SEQ ID NO: 95807 - protein, 9 aa, Homo Sapiens
NHDFQALAL

SEQ ID NO: 95808 - protein, 9 aa, Homo Sapiens
NHDFSPLEI

SEQ ID NO: 95809 - protein, 9 aa, Homo Sapiens
NHDFTPLEI

SEQ ID NO: 95810 - protein, 9 aa, Homo Sapiens
NHDGDPVEL

SEQ ID NO: 95811 - protein, 9 aa, Homo Sapiens
NHDGTRNIL

SEQ ID NO: 95812 - protein, 9 aa, Homo Sapiens
NHDIISMKL

SEQ ID NO: 95813 - protein, 9 aa, Homo Sapiens
NHDKLIPLL

SEQ ID NO: 95814 - protein, 9 aa, Homo Sapiens
NHDMTLTEF

SEQ ID NO: 95815 - protein, 9 aa, Homo Sapiens
NHDPNVEEF

SEQ ID NO: 95816 - protein, 9 aa, Homo Sapiens
NHDQHLLLL

SEQ ID NO: 95817 - protein, 9 aa, Homo Sapiens
NHDQKLLLI

SEQ ID NO: 95818 - protein, 9 aa, Homo Sapiens
NHDRPDVCI

SEQ ID NO: 95819 - protein, 9 aa, Homo Sapiens
NHDTGECRL

SEQ ID NO: 95820 - protein, 9 aa, Homo Sapiens
NHDTGEYVL

SEQ ID NO: 95821 - protein, 9 aa, Homo Sapiens
NHDTLRYLL

SEQ ID NO: 95822 - protein, 9 aa, Homo Sapiens
NHDVAQSEI

SEQ ID NO: 95823 - protein, 9 aa, Homo Sapiens
NHDVISLKL

SEQ ID NO: 95824 - protein, 9 aa, Homo Sapiens
NHDVQVILF

SEQ ID NO: 95825 - protein, 9 aa, Homo Sapiens
NHDYKHLYF

SEQ ID NO: 95826 - protein, 9 aa, Homo Sapiens
NHEDKEWKF

SEQ ID NO: 95827 - protein, 9 aa, Homo Sapiens
NHEDPTPEI

SEQ ID NO: 95828 - protein, 9 aa, Homo Sapiens
NHFDRSVVL

SEQ ID NO: 95829 - protein, 9 aa, Homo Sapiens
NHFMDNTTL

SEQ ID NO: 95830 - protein, 9 aa, Homo Sapiens
NHFPGSFQI

SEQ ID NO: 95831 - protein, 9 aa, Homo Sapiens
NHFSPCHFL

SEQ ID NO: 95832 - protein, 9 aa, Homo Sapiens
NHHNERMLF

SEQ ID NO: 95833 - protein, 9 aa, Homo Sapiens
NHIGWVQEF

SEQ ID NO: 95834 - protein, 9 aa, Homo Sapiens
NHIIDGVKV

SEQ ID NO: 95835 - protein, 9 aa, Homo Sapiens
NHILPGQSI

SEQ ID NO: 95836 - protein, 9 aa, Homo Sapiens
NHIQDLISL

SEQ ID NO: 95837 - protein, 9 aa, Homo Sapiens
NHIQLSSNL

SEQ ID NO: 95838 - protein, 9 aa, Homo Sapiens
NHISDLPLL

SEQ ID NO: 95839 - protein, 9 aa, Homo Sapiens
NHISELVQL

SEQ ID NO: 95840 - protein, 9 aa, Homo Sapiens
NHLALIFKI

SEQ ID NO: 95841 - protein, 9 aa, Homo Sapiens
NHLEKFFTL

SEQ ID NO: 95842 - protein, 9 aa, Homo Sapiens
NHLSFAELL

SEQ ID NO: 95843 - protein, 9 aa, Homo Sapiens
NHLYLFHLI

SEQ ID NO: 95844 - protein, 9 aa, Homo Sapiens
NHMAVAFVL

SEQ ID NO: 95845 - protein, 9 aa, Homo Sapiens
NHMRVHTGL

SEQ ID NO: 95846 - protein, 9 aa, Homo Sapiens
NHMVQQDYF

SEQ ID NO: 95847 - protein, 9 aa, Homo Sapiens
NHNEIGELI

SEQ ID NO: 95848 - protein, 9 aa, Homo Sapiens
NHNFSQQCL

SEQ ID NO: 95849 - protein, 9 aa, Homo Sapiens
NHNFTDHYL

SEQ ID NO: 95850 - protein, 9 aa, Homo Sapiens
NHNGSPLSI

SEQ ID NO: 95851 - protein, 9 aa, Homo Sapiens
NHNSGIDLL

SEQ ID NO: 95852 - protein, 9 aa, Homo Sapiens
NHNVAVYSI

SEQ ID NO: 95853 - protein, 9 aa, Homo Sapiens
NHQFTKLLI

SEQ ID NO: 95854 - protein, 9 aa, Homo Sapiens
NHQGGSVQL

SEQ ID NO: 95855 - protein, 9 aa, Homo Sapiens
NHQHEYFFL

SEQ ID NO: 95856 - protein, 9 aa, Homo Sapiens
NHQKDIQVL

SEQ ID NO: 95857 - protein, 9 aa, Homo Sapiens
NHSADFETV

SEQ ID NO: 95858 - protein, 9 aa, Homo Sapiens
NHSDSSQYI

SEQ ID NO: 95859 - protein, 9 aa, Homo Sapiens
NHSELAILL

SEQ ID NO: 95860 - protein, 9 aa, Homo Sapiens
NHSGISVNI

SEQ ID NO: 95861 - protein, 9 aa, Homo Sapiens
NHSHDQLVL

SEQ ID NO: 95862 - protein, 9 aa, Homo Sapiens
NHSHQTMEL

SEQ ID NO: 95863 - protein, 9 aa, Homo Sapiens
NHSIIEEEF

SEQ ID NO: 95864 - protein, 9 aa, Homo Sapiens
NHSLLRLDL

SEQ ID NO: 95865 - protein, 9 aa, Homo Sapiens
NHSLVTSDL

SEQ ID NO: 95866 - protein, 9 aa, Homo Sapiens
NHSNQFTQL

SEQ ID NO: 95867 - protein, 9 aa, Homo Sapiens
NHSQVGQGI

SEQ ID NO: 95868 - protein, 9 aa, Homo Sapiens
NHSRIVFNL

SEQ ID NO: 95869 - protein, 9 aa, Homo Sapiens
NHSSYGNGI

SEQ ID NO: 95870 - protein, 9 aa, Homo Sapiens
NHSYSDPLL

SEQ ID NO: 95871 - protein, 9 aa, Homo Sapiens
NHTEDYVLL

SEQ ID NO: 95872 - protein, 9 aa, Homo Sapiens
NHTIYINNL

SEQ ID NO: 95873 - protein, 9 aa, Homo Sapiens
NHTLSVEGF

SEQ ID NO: 95874 - protein, 9 aa, Homo Sapiens
NHTSIAELI

SEQ ID NO: 95875 - protein, 9 aa, Homo Sapiens
NHTSISSLF

SEQ ID NO: 95876 - protein, 9 aa, Homo Sapiens
NHVDPEEEI

SEQ ID NO: 95877 - protein, 9 aa, Homo Sapiens
NHVEVAELL

SEQ ID NO: 95878 - protein, 9 aa, Homo Sapiens
NHVPSGPSI

SEQ ID NO: 95879 - protein, 9 aa, Homo Sapiens
NHVPVITTL

SEQ ID NO: 95880 - protein, 9 aa, Homo Sapiens
NHYNNIMAL

SEQ ID NO: 95881 - protein, 9 aa, Homo Sapiens
NHYQKQLEI

SEQ ID NO: 95882 - protein, 9 aa, Homo Sapiens
NKSNDFEEL

SEQ ID NO: 95883 - protein, 9 aa, Homo Sapiens
NKTAIGDYL

SEQ ID NO: 95884 - protein, 9 aa, Homo Sapiens
NKTVIGDYL

SEQ ID NO: 95885 - protein, 9 aa, Homo Sapiens
NLVQVGDSL

SEQ ID NO: 95886 - protein, 9 aa, Homo Sapiens
NQDDLTHKL

SEQ ID NO: 95887 - protein, 9 aa, Homo Sapiens
NQDDNHQEL

SEQ ID NO: 95888 - protein, 9 aa, Homo Sapiens
NQDLTFQHI

SEQ ID NO: 95889 - protein, 9 aa, Homo Sapiens
NQDNLQLFL

SEQ ID NO: 95890 - protein, 9 aa, Homo Sapiens
NQSSVDLKL

SEQ ID NO: 95891 - protein, 9 aa, Homo Sapiens
NRAAAFEQL

SEQ ID NO: 95892 - protein, 9 aa, Homo Sapiens
NRAAAQYYL

SEQ ID NO: 95893 - protein, 9 aa, Homo Sapiens
NRDDSNLYI

SEQ ID NO: 95894 - protein, 9 aa, Homo Sapiens
NRDFILYRF

SEQ ID NO: 95895 - protein, 9 aa, Homo Sapiens
NRDRTQIAL

SEQ ID NO: 95896 - protein, 9 aa, Homo Sapiens
NRHYYSITI

SEQ ID NO: 95897 - protein, 9 aa, Homo Sapiens
NRIAIYELL

SEQ ID NO: 95898 - protein, 9 aa, Homo Sapiens
NRIQDLLEL

SEQ ID NO: 95899 - protein, 9 aa, Homo Sapiens
NRIRQQLRF

SEQ ID NO: 95900 - protein, 9 aa, Homo Sapiens
NRLGGEEKF

SEQ ID NO: 95901 - protein, 9 aa, Homo Sapiens
NRLLDLLYL

SEQ ID NO: 95902 - protein, 9 aa, Homo Sapiens
NRLNIEELL

SEQ ID NO: 95903 - protein, 9 aa, Homo Sapiens
NRMLKQMLF

SEQ ID NO: 95904 - protein, 9 aa, Homo Sapiens
NRSRIQVWL

SEQ ID NO: 95905 - protein, 9 aa, Homo Sapiens
QATAAGDVI

SEQ ID NO: 95906 - protein, 9 aa, Homo Sapiens
QDHRGAFLI

SEQ ID NO: 95907 - protein, 9 aa, Homo Sapiens
QEIRHGDSI

SEQ ID NO: 95908 - protein, 9 aa, Homo Sapiens
QHAASLLKL

SEQ ID NO: 95909 - protein, 9 aa, Homo Sapiens
QHAAVSEKL

SEQ ID NO: 95910 - protein, 9 aa, Homo Sapiens
QHADPPVQI

SEQ ID NO: 95911 - protein, 9 aa, Homo Sapiens
QHADVGKEL

SEQ ID NO: 95912 - protein, 9 aa, Homo Sapiens
QHAEVYYKL

SEQ ID NO: 95913 - protein, 9 aa, Homo Sapiens
QHAFIQEKI

SEQ ID NO: 95914 - protein, 9 aa, Homo Sapiens
QHAGKIDLL

SEQ ID NO: 95915 - protein, 9 aa, Homo Sapiens
QHAISTEKI

SEQ ID NO: 95916 - protein, 9 aa, Homo Sapiens
QHAIVFQHI

SEQ ID NO: 95917 - protein, 9 aa, Homo Sapiens
QHAKYTCSF

SEQ ID NO: 95918 - protein, 9 aa, Homo Sapiens
QHALLQEEL

SEQ ID NO: 95919 - protein, 9 aa, Homo Sapiens
QHAPANDYL

SEQ ID NO: 95920 - protein, 9 aa, Homo Sapiens
QHAVEAISL

SEQ ID NO: 95921 - protein, 9 aa, Homo Sapiens
QHAWAQLTF

SEQ ID NO: 95922 - protein, 9 aa, Homo Sapiens
QHCEQWIEF

SEQ ID NO: 95923 - protein, 9 aa, Homo Sapiens
QHCFIREVL

SEQ ID NO: 95924 - protein, 9 aa, Homo Sapiens
QHCVLPSRL

SEQ ID NO: 95925 - protein, 9 aa, Homo Sapiens
QHDAACRVI

SEQ ID NO: 95926 - protein, 9 aa, Homo Sapiens
QHDAAQLYL

SEQ ID NO: 95927 - protein, 9 aa, Homo Sapiens
QHDAPVKTI

SEQ ID NO: 95928 - protein, 9 aa, Homo Sapiens
QHDETYYMW

SEQ ID NO: 95929 - protein, 9 aa, Homo Sapiens
QHDEVETYF

SEQ ID NO: 95930 - protein, 9 aa, Homo Sapiens
QHDFQAPYL

SEQ ID NO: 95931 - protein, 9 aa, Homo Sapiens
QHDFQKVKL

SEQ ID NO: 95932 - protein, 9 aa, Homo Sapiens
QHDFRTPEF

SEQ ID NO: 95933 - protein, 9 aa, Homo Sapiens
QHDFTSQIF

SEQ ID NO: 95934 - protein, 9 aa, Homo Sapiens
QHDGPTKNL

SEQ ID NO: 95935 - protein, 9 aa, Homo Sapiens
QHDIHNAKL

SEQ ID NO: 95936 - protein, 9 aa, Homo Sapiens
QHDLALLRL

SEQ ID NO: 95937 - protein, 9 aa, Homo Sapiens
QHDLFDSGF

SEQ ID NO: 95938 - protein, 9 aa, Homo Sapiens
QHDLFFDTL

SEQ ID NO: 95939 - protein, 9 aa, Homo Sapiens
QHDLVYGDW

SEQ ID NO: 95940 - protein, 9 aa, Homo Sapiens
QHDNIIAYY

SEQ ID NO: 95941 - protein, 9 aa, Homo Sapiens
QHDPETSVL

SEQ ID NO: 95942 - protein, 9 aa, Homo Sapiens
QHDPGKMFI

SEQ ID NO: 95943 - protein, 9 aa, Homo Sapiens
QHDPLTTDL

SEQ ID NO: 95944 - protein, 9 aa, Homo Sapiens
QHDPSAVAV

SEQ ID NO: 95945 - protein, 9 aa, Homo Sapiens
QHDPYITSI

SEQ ID NO: 95946 - protein, 9 aa, Homo Sapiens
QHDRALERF

SEQ ID NO: 95947 - protein, 9 aa, Homo Sapiens
QHDTIGYLL

SEQ ID NO: 95948 - protein, 9 aa, Homo Sapiens
QHDVLFSYL

SEQ ID NO: 95949 - protein, 9 aa, Homo Sapiens
QHDVLKLEF

SEQ ID NO: 95950 - protein, 9 aa, Homo Sapiens
QHDVQTLLL

SEQ ID NO: 95951 - protein, 9 aa, Homo Sapiens
QHDVSQTLL

SEQ ID NO: 95952 - protein, 9 aa, Homo Sapiens
QHEAAVPQL

SEQ ID NO: 95953 - protein, 9 aa, Homo Sapiens
QHEAFIRSI

SEQ ID NO: 95954 - protein, 9 aa, Homo Sapiens
QHEAGSTSW

SEQ ID NO: 95955 - protein, 9 aa, Homo Sapiens
QHECIPQAI

SEQ ID NO: 95956 - protein, 9 aa, Homo Sapiens
QHEDNKYFL

SEQ ID NO: 95957 - protein, 9 aa, Homo Sapiens
QHEEFVTSL

SEQ ID NO: 95958 - protein, 9 aa, Homo Sapiens
QHEFPGPAF

SEQ ID NO: 95959 - protein, 9 aa, Homo Sapiens
QHEFTVHFL

SEQ ID NO: 95960 - protein, 9 aa, Homo Sapiens
QHEGGVQEL

SEQ ID NO: 95961 - protein, 9 aa, Homo Sapiens
QHEKAALYF

SEQ ID NO: 95962 - protein, 9 aa, Homo Sapiens
QHEKEGYTI

SEQ ID NO: 95963 - protein, 9 aa, Homo Sapiens
QHEKLIVRI

SEQ ID NO: 95964 - protein, 9 aa, Homo Sapiens
QHELGNVFL

SEQ ID NO: 95965 - protein, 9 aa, Homo Sapiens
QHENSSLLL

SEQ ID NO: 95966 - protein, 9 aa, Homo Sapiens
QHEQPGQGI

SEQ ID NO: 95967 - protein, 9 aa, Homo Sapiens
QHETSSPAL

SEQ ID NO: 95968 - protein, 9 aa, Homo Sapiens
QHFDSVMQL

SEQ ID NO: 95969 - protein, 9 aa, Homo Sapiens
QHFDTIYSI

SEQ ID NO: 95970 - protein, 9 aa, Homo Sapiens
QHFGMVELL

SEQ ID NO: 95971 - protein, 9 aa, Homo Sapiens
QHFIQEEQI

SEQ ID NO: 95972 - protein, 9 aa, Homo Sapiens
QHFLRGNEI

SEQ ID NO: 95973 - protein, 9 aa, Homo Sapiens
QHFNGLLEI

SEQ ID NO: 95974 - protein, 9 aa, Homo Sapiens
QHFPEQMKL

SEQ ID NO: 95975 - protein, 9 aa, Homo Sapiens
QHFYICENF

SEQ ID NO: 95976 - protein, 9 aa, Homo Sapiens
QHGDVVSAI

SEQ ID NO: 95977 - protein, 9 aa, Homo Sapiens
QHGTQQQDL

SEQ ID NO: 95978 - protein, 9 aa, Homo Sapiens
QHHAKPNIF

SEQ ID NO: 95979 - protein, 9 aa, Homo Sapiens
QHHHLPQHL

SEQ ID NO: 95980 - protein, 9 aa, Homo Sapiens
QHHKLVNTI

SEQ ID NO: 95981 - protein, 9 aa, Homo Sapiens
QHHVEQLDL

SEQ ID NO: 95982 - protein, 9 aa, Homo Sapiens
QHHVVQDML

SEQ ID NO: 95983 - protein, 9 aa, Homo Sapiens
QHIAQDSSL

SEQ ID NO: 95984 - protein, 9 aa, Homo Sapiens
QHIDAVARF

SEQ ID NO: 95985 - protein, 9 aa, Homo Sapiens
QHIDFVTAI

SEQ ID NO: 95986 - protein, 9 aa, Homo Sapiens
QHIDNITQI

SEQ ID NO: 95987 - protein, 9 aa, Homo Sapiens
QHIGEMSFL

SEQ ID NO: 95988 - protein, 9 aa, Homo Sapiens
QHIGKPSTI

SEQ ID NO: 95989 - protein, 9 aa, Homo Sapiens
QHIGNIFMF

SEQ ID NO: 95990 - protein, 9 aa, Homo Sapiens
QHIKSDVHL

SEQ ID NO: 95991 - protein, 9 aa, Homo Sapiens
QHILNPAFL

SEQ ID NO: 95992 - protein, 9 aa, Homo Sapiens
QHILSVQQF

SEQ ID NO: 95993 - protein, 9 aa, Homo Sapiens
QHIMMVNHL

SEQ ID NO: 95994 - protein, 9 aa, Homo Sapiens
QHIPTPLFV

SEQ ID NO: 95995 - protein, 9 aa, Homo Sapiens
QHISDSPII

SEQ ID NO: 95996 - protein, 9 aa, Homo Sapiens
QHLFIQTFW

SEQ ID NO: 95997 - protein, 9 aa, Homo Sapiens
QHLIDTNKI

SEQ ID NO: 95998 - protein, 9 aa, Homo Sapiens
QHLIIFDYI

SEQ ID NO: 95999 - protein, 9 aa, Homo Sapiens
QHLPLSERI

SEQ ID NO: 96000 - protein, 9 aa, Homo Sapiens
QHLPYIQIL

SEQ ID NO: 96001 - protein, 9 aa, Homo Sapiens
QHLQQSNEI

SEQ ID NO: 96002 - protein, 9 aa, Homo Sapiens
QHMDETVSF

SEQ ID NO: 96003 - protein, 9 aa, Homo Sapiens
QHMKLKLQF

SEQ ID NO: 96004 - protein, 9 aa, Homo Sapiens
QHNDLEFKL

SEQ ID NO: 96005 - protein, 9 aa, Homo Sapiens
QHNPVPDFI

SEQ ID NO: 96006 - protein, 9 aa, Homo Sapiens
QHQAWLQSI

SEQ ID NO: 96007 - protein, 9 aa, Homo Sapiens
QHQDRVQNL

SEQ ID NO: 96008 - protein, 9 aa, Homo Sapiens
QHQEFSFLL

SEQ ID NO: 96009 - protein, 9 aa, Homo Sapiens
QHQEKVLYL

SEQ ID NO: 96010 - protein, 9 aa, Homo Sapiens
QHQESIIQL

SEQ ID NO: 96011 - protein, 9 aa, Homo Sapiens
QHQETINTL

SEQ ID NO: 96012 - protein, 9 aa, Homo Sapiens
QHQETPVYL

SEQ ID NO: 96013 - protein, 9 aa, Homo Sapiens
QHQFRDQRW

SEQ ID NO: 96014 - protein, 9 aa, Homo Sapiens
QHQGAVELL

SEQ ID NO: 96015 - protein, 9 aa, Homo Sapiens
QHQLDTILF

SEQ ID NO: 96016 - protein, 9 aa, Homo Sapiens
QHQLQQQQL

SEQ ID NO: 96017 - protein, 9 aa, Homo Sapiens
QHQMDVAFL

SEQ ID NO: 96018 - protein, 9 aa, Homo Sapiens
QHQQHTTVI

SEQ ID NO: 96019 - protein, 9 aa, Homo Sapiens
QHQSGIVQL

SEQ ID NO: 96020 - protein, 9 aa, Homo Sapiens
QHQSVPQCL

SEQ ID NO: 96021 - protein, 9 aa, Homo Sapiens
QHSAAGATI

SEQ ID NO: 96022 - protein, 9 aa, Homo Sapiens
QHSDKIIRL

SEQ ID NO: 96023 - protein, 9 aa, Homo Sapiens
QHSDSCYKL

SEQ ID NO: 96024 - protein, 9 aa, Homo Sapiens
QHSEMLAKL

SEQ ID NO: 96025 - protein, 9 aa, Homo Sapiens
QHSGSYEVI

SEQ ID NO: 96026 - protein, 9 aa, Homo Sapiens
QHSILACKI

SEQ ID NO: 96027 - protein, 9 aa, Homo Sapiens
QHSIPVFIF

SEQ ID NO: 96028 - protein, 9 aa, Homo Sapiens
QHSKIIQAF

SEQ ID NO: 96029 - protein, 9 aa, Homo Sapiens
QHSLGGHRL

SEQ ID NO: 96030 - protein, 9 aa, Homo Sapiens
QHSMILEQI

SEQ ID NO: 96031 - protein, 9 aa, Homo Sapiens
QHSNASQSL

SEQ ID NO: 96032 - protein, 9 aa, Homo Sapiens
QHSNVVINL

SEQ ID NO: 96033 - protein, 9 aa, Homo Sapiens
QHSPALKAI

SEQ ID NO: 96034 - protein, 9 aa, Homo Sapiens
QHSPDLMSF

SEQ ID NO: 96035 - protein, 9 aa, Homo Sapiens
QHSPSEPFL

SEQ ID NO: 96036 - protein, 9 aa, Homo Sapiens
QHSQLGQDL

SEQ ID NO: 96037 - protein, 9 aa, Homo Sapiens
QHSSFFIFL

SEQ ID NO: 96038 - protein, 9 aa, Homo Sapiens
QHSSLSTRF

SEQ ID NO: 96039 - protein, 9 aa, Homo Sapiens
QHSTAQLNL

SEQ ID NO: 96040 - protein, 9 aa, Homo Sapiens
QHSVQVDQL

SEQ ID NO: 96041 - protein, 9 aa, Homo Sapiens
QHVIDDLSL

SEQ ID NO: 96042 - protein, 9 aa, Homo Sapiens
QHVQLLTQI

SEQ ID NO: 96043 - protein, 9 aa, Homo Sapiens
QHVTEAFQF

SEQ ID NO: 96044 - protein, 9 aa, Homo Sapiens
QHVTISQLF

SEQ ID NO: 96045 - protein, 9 aa, Homo Sapiens
QHYQGQSSI

SEQ ID NO: 96046 - protein, 9 aa, Homo Sapiens
QHYQIPDDF

SEQ ID NO: 96047 - protein, 9 aa, Homo Sapiens
QQADVRLML

SEQ ID NO: 96048 - protein, 9 aa, Homo Sapiens
QQDAHEFLI

SEQ ID NO: 96049 - protein, 9 aa, Homo Sapiens
QQDDGKMFI

SEQ ID NO: 96050 - protein, 9 aa, Homo Sapiens
QQDWVVQRI

SEQ ID NO: 96051 - protein, 9 aa, Homo Sapiens
QQSETFQFL

SEQ ID NO: 96052 - protein, 9 aa, Homo Sapiens
QQSVIGDYL

SEQ ID NO: 96053 - protein, 9 aa, Homo Sapiens
QRAHVQEFF

SEQ ID NO: 96054 - protein, 9 aa, Homo Sapiens
QRCDLEHHF

SEQ ID NO: 96055 - protein, 9 aa, Homo Sapiens
QRDFNQNFI

SEQ ID NO: 96056 - protein, 9 aa, Homo Sapiens
QRDNTVHSF

SEQ ID NO: 96057 - protein, 9 aa, Homo Sapiens
QRDSLLWKL

SEQ ID NO: 96058 - protein, 9 aa, Homo Sapiens
QRISSFETF

SEQ ID NO: 96059 - protein, 9 aa, Homo Sapiens
QRLAGNEQV

SEQ ID NO: 96060 - protein, 9 aa, Homo Sapiens
QRMIGCELL

SEQ ID NO: 96061 - protein, 9 aa, Homo Sapiens
QRTPGEEKI

SEQ ID NO: 96062 - protein, 9 aa, Homo Sapiens
QRYELAEAF

SEQ ID NO: 96063 - protein, 9 aa, Homo Sapiens
QSESELQKL

SEQ ID NO: 96064 - protein, 9 aa, Homo Sapiens
RDYSAILYL

SEQ ID NO: 96065 - protein, 9 aa, Homo Sapiens
RHAAEALLL

SEQ ID NO: 96066 - protein, 9 aa, Homo Sapiens
RHADLEIRL

SEQ ID NO: 96067 - protein, 9 aa, Homo Sapiens
RHAEPGFSL

SEQ ID NO: 96068 - protein, 9 aa, Homo Sapiens
RHAVVMELI

SEQ ID NO: 96069 - protein, 9 aa, Homo Sapiens
RHAYPDGRL

SEQ ID NO: 96070 - protein, 9 aa, Homo Sapiens
RHCDLQVRI

SEQ ID NO: 96071 - protein, 9 aa, Homo Sapiens
RHDDRPQVL

SEQ ID NO: 96072 - protein, 9 aa, Homo Sapiens
RHDDYLVML

SEQ ID NO: 96073 - protein, 9 aa, Homo Sapiens
RHDEVRTYF

SEQ ID NO: 96074 - protein, 9 aa, Homo Sapiens
RHDHAVSLL

SEQ ID NO: 96075 - protein, 9 aa, Homo Sapiens
RHDIAFVEF

SEQ ID NO: 96076 - protein, 9 aa, Homo Sapiens
RHDNKVTWL

SEQ ID NO: 96077 - protein, 9 aa, Homo Sapiens
RHDPQTTNL

SEQ ID NO: 96078 - protein, 9 aa, Homo Sapiens
RHDPYINRI

SEQ ID NO: 96079 - protein, 9 aa, Homo Sapiens
RHDVIVTII

SEQ ID NO: 96080 - protein, 9 aa, Homo Sapiens
RHEYGSPGI

SEQ ID NO: 96081 - protein, 9 aa, Homo Sapiens
RHFEELETI

SEQ ID NO: 96082 - protein, 9 aa, Homo Sapiens
RHHEASIRL

SEQ ID NO: 96083 - protein, 9 aa, Homo Sapiens
RHIEIFTDL

SEQ ID NO: 96084 - protein, 9 aa, Homo Sapiens
RHLDFFEML

SEQ ID NO: 96085 - protein, 9 aa, Homo Sapiens
RHLDSYEFL

SEQ ID NO: 96086 - protein, 9 aa, Homo Sapiens
RHMEVCYIF

SEQ ID NO: 96087 - protein, 9 aa, Homo Sapiens
RHMHVQLQL

SEQ ID NO: 96088 - protein, 9 aa, Homo Sapiens
RHMQIVHKI

SEQ ID NO: 96089 - protein, 9 aa, Homo Sapiens
RHMYHSLYL

SEQ ID NO: 96090 - protein, 9 aa, Homo Sapiens
RHSDELTSL

SEQ ID NO: 96091 - protein, 9 aa, Homo Sapiens
RHSDYPLSL

SEQ ID NO: 96092 - protein, 9 aa, Homo Sapiens
RHSGLIIHL

SEQ ID NO: 96093 - protein, 9 aa, Homo Sapiens
RHSNLVQLL

SEQ ID NO: 96094 - protein, 9 aa, Homo Sapiens
RHSNVNLTI

SEQ ID NO: 96095 - protein, 9 aa, Homo Sapiens
RHVDAHATL

SEQ ID NO: 96096 - protein, 9 aa, Homo Sapiens
RHYEEELRL

SEQ ID NO: 96097 - protein, 9 aa, Homo Sapiens
RHYVGKEYF

SEQ ID NO: 96098 - protein, 9 aa, Homo Sapiens
RLDETIQAI

SEQ ID NO: 96099 - protein, 9 aa, Homo Sapiens
RLVDTGDKF

SEQ ID NO: 96100 - protein, 9 aa, Homo Sapiens
RPAVIGDVL

SEQ ID NO: 96101 - protein, 9 aa, Homo Sapiens
RQDESIQRI

SEQ ID NO: 96102 - protein, 9 aa, Homo Sapiens
SHADVVNLL

SEQ ID NO: 96103 - protein, 9 aa, Homo Sapiens
SHAENILQI

SEQ ID NO: 96104 - protein, 9 aa, Homo Sapiens
SHAFTLDEL

SEQ ID NO: 96105 - protein, 9 aa, Homo Sapiens
SHAPQDVSL

SEQ ID NO: 96106 - protein, 9 aa, Homo Sapiens
SHAPSFNFL

SEQ ID NO: 96107 - protein, 9 aa, Homo Sapiens
SHAPYLLVF

SEQ ID NO: 96108 - protein, 9 aa, Homo Sapiens
SHASKDVAI

SEQ ID NO: 96109 - protein, 9 aa, Homo Sapiens
SHAVFQIYL

SEQ ID NO: 96110 - protein, 9 aa, Homo Sapiens
SHAVGPQEI

SEQ ID NO: 96111 - protein, 9 aa, Homo Sapiens
SHCAQPLAL

SEQ ID NO: 96112 - protein, 9 aa, Homo Sapiens
SHCDLSLKI

SEQ ID NO: 96113 - protein, 9 aa, Homo Sapiens
SHCDYQQNL

SEQ ID NO: 96114 - protein, 9 aa, Homo Sapiens
SHCPLLQKV

SEQ ID NO: 96115 - protein, 9 aa, Homo Sapiens
SHCQLVTLI

SEQ ID NO: 96116 - protein, 9 aa, Homo Sapiens
SHDDGNIDL

SEQ ID NO: 96117 - protein, 9 aa, Homo Sapiens
SHDDIVTEF

SEQ ID NO: 96118 - protein, 9 aa, Homo Sapiens
SHDDIVTRM

SEQ ID NO: 96119 - protein, 9 aa, Homo Sapiens
SHDDTILIW

SEQ ID NO: 96120 - protein, 9 aa, Homo Sapiens
SHDEINNYL

SEQ ID NO: 96121 - protein, 9 aa, Homo Sapiens
SHDEMFSDI

SEQ ID NO: 96122 - protein, 9 aa, Homo Sapiens
SHDERFIRL

SEQ ID NO: 96123 - protein, 9 aa, Homo Sapiens
SHDEVFVVL

SEQ ID NO: 96124 - protein, 9 aa, Homo Sapiens
SHDFLEIRF

SEQ ID NO: 96125 - protein, 9 aa, Homo Sapiens
SHDFLETRF

SEQ ID NO: 96126 - protein, 9 aa, Homo Sapiens
SHDFYSHEL

SEQ ID NO: 96127 - protein, 9 aa, Homo Sapiens
SHDGHINYW

SEQ ID NO: 96128 - protein, 9 aa, Homo Sapiens
SHDHGYTTL

SEQ ID NO: 96129 - protein, 9 aa, Homo Sapiens
SHDHLELFL

SEQ ID NO: 96130 - protein, 9 aa, Homo Sapiens
SHDHLTLFL

SEQ ID NO: 96131 - protein, 9 aa, Homo Sapiens
SHDLLYQEF

SEQ ID NO: 96132 - protein, 9 aa, Homo Sapiens
SHDLMLLRL

SEQ ID NO: 96133 - protein, 9 aa, Homo Sapiens
SHDNEVYAW

SEQ ID NO: 96134 - protein, 9 aa, Homo Sapiens
SHDNFIYLY

SEQ ID NO: 96135 - protein, 9 aa, Homo Sapiens
SHDNGSQFF

SEQ ID NO: 96136 - protein, 9 aa, Homo Sapiens
SHDNIICGI

SEQ ID NO: 96137 - protein, 9 aa, Homo Sapiens
SHDNIVQLI

SEQ ID NO: 96138 - protein, 9 aa, Homo Sapiens
SHDNLVYVY

SEQ ID NO: 96139 - protein, 9 aa, Homo Sapiens
SHDNVIYIY

SEQ ID NO: 96140 - protein, 9 aa, Homo Sapiens
SHDQHAYAL

SEQ ID NO: 96141 - protein, 9 aa, Homo Sapiens
SHDRVKIKL

SEQ ID NO: 96142 - protein, 9 aa, Homo Sapiens
SHDSANCEL

SEQ ID NO: 96143 - protein, 9 aa, Homo Sapiens
SHDSIKMEI

SEQ ID NO: 96144 - protein, 9 aa, Homo Sapiens
SHDTMTYCL

SEQ ID NO: 96145 - protein, 9 aa, Homo Sapiens
SHDVVFLLM

SEQ ID NO: 96146 - protein, 9 aa, Homo Sapiens
SHDYPGEGI

SEQ ID NO: 96147 - protein, 9 aa, Homo Sapiens
SHDYSLYSL

SEQ ID NO: 96148 - protein, 9 aa, Homo Sapiens
SHEAPIPTF

SEQ ID NO: 96149 - protein, 9 aa, Homo Sapiens
SHEDTLALL

SEQ ID NO: 96150 - protein, 9 aa, Homo Sapiens
SHEDYRVFI

SEQ ID NO: 96151 - protein, 9 aa, Homo Sapiens
SHEEVVQTL

SEQ ID NO: 96152 - protein, 9 aa, Homo Sapiens
SHEGETAYI

SEQ ID NO: 96153 - protein, 9 aa, Homo Sapiens
SHEGETSYI

SEQ ID NO: 96154 - protein, 9 aa, Homo Sapiens
SHEGHVYGF

SEQ ID NO: 96155 - protein, 9 aa, Homo Sapiens
SHEPKSPSL

SEQ ID NO: 96156 - protein, 9 aa, Homo Sapiens
SHEQMIDLL

SEQ ID NO: 96157 - protein, 9 aa, Homo Sapiens
SHETSLYYL

SEQ ID NO: 96158 - protein, 9 aa, Homo Sapiens
SHETVTIEL

SEQ ID NO: 96159 - protein, 9 aa, Homo Sapiens
SHFQVAHTI

SEQ ID NO: 96160 - protein, 9 aa, Homo Sapiens
SHFTKVERI

SEQ ID NO: 96161 - protein, 9 aa, Homo Sapiens
SHFVEPVYL

SEQ ID NO: 96162 - protein, 9 aa, Homo Sapiens
SHFVSDVVI

SEQ ID NO: 96163 - protein, 9 aa, Homo Sapiens
SHGPPTHRL

SEQ ID NO: 96164 - protein, 9 aa, Homo Sapiens
SHHEACVRL

SEQ ID NO: 96165 - protein, 9 aa, Homo Sapiens
SHHHVVVFL

SEQ ID NO: 96166 - protein, 9 aa, Homo Sapiens
SHHLVISHL

SEQ ID NO: 96167 - protein, 9 aa, Homo Sapiens
SHHPGQYNL

SEQ ID NO: 96168 - protein, 9 aa, Homo Sapiens
SHHQIFVFI

SEQ ID NO: 96169 - protein, 9 aa, Homo Sapiens
SHHSMVSML

SEQ ID NO: 96170 - protein, 9 aa, Homo Sapiens
SHIDQREKI

SEQ ID NO: 96171 - protein, 9 aa, Homo Sapiens
SHIGDAVVI

SEQ ID NO: 96172 - protein, 9 aa, Homo Sapiens
SHIIGDEEI

SEQ ID NO: 96173 - protein, 9 aa, Homo Sapiens
SHIITGNKI

SEQ ID NO: 96174 - protein, 9 aa, Homo Sapiens
SHINEMQKI

SEQ ID NO: 96175 - protein, 9 aa, Homo Sapiens
SHINTVFVL

SEQ ID NO: 96176 - protein, 9 aa, Homo Sapiens
SHIPEASFL

SEQ ID NO: 96177 - protein, 9 aa, Homo Sapiens
SHIPLIIQF

SEQ ID NO: 96178 - protein, 9 aa, Homo Sapiens
SHIQDDMHL

SEQ ID NO: 96179 - protein, 9 aa, Homo Sapiens
SHIQGAVHI

SEQ ID NO: 96180 - protein, 9 aa, Homo Sapiens
SHITPTQGF

SEQ ID NO: 96181 - protein, 9 aa, Homo Sapiens
SHLDYDITL

SEQ ID NO: 96182 - protein, 9 aa, Homo Sapiens
SHLEDYSGL

SEQ ID NO: 96183 - protein, 9 aa, Homo Sapiens
SHLEKAWLI

SEQ ID NO: 96184 - protein, 9 aa, Homo Sapiens
SHLIGHQRI

SEQ ID NO: 96185 - protein, 9 aa, Homo Sapiens
SHLPESERI

SEQ ID NO: 96186 - protein, 9 aa, Homo Sapiens
SHLPLVEEL

SEQ ID NO: 96187 - protein, 9 aa, Homo Sapiens
SHLPQQLKF

SEQ ID NO: 96188 - protein, 9 aa, Homo Sapiens
SHMEPQVCL

SEQ ID NO: 96189 - protein, 9 aa, Homo Sapiens
SHMETTMKL

SEQ ID NO: 96190 - protein, 9 aa, Homo Sapiens
SHMKQLLLI

SEQ ID NO: 96191 - protein, 9 aa, Homo Sapiens
SHNSSFELI

SEQ ID NO: 96192 - protein, 9 aa, Homo Sapiens
SHQDILSTI

SEQ ID NO: 96193 - protein, 9 aa, Homo Sapiens
SHQDLSQKI

SEQ ID NO: 96194 - protein, 9 aa, Homo Sapiens
SHQDSITRL

SEQ ID NO: 96195 - protein, 9 aa, Homo Sapiens
SHQEAISKI

SEQ ID NO: 96196 - protein, 9 aa, Homo Sapiens
SHQFPSHDL

SEQ ID NO: 96197 - protein, 9 aa, Homo Sapiens
SHQGDYAVL

SEQ ID NO: 96198 - protein, 9 aa, Homo Sapiens
SHQLDFNVL

SEQ ID NO: 96199 - protein, 9 aa, Homo Sapiens
SHQNFALFF

SEQ ID NO: 96200 - protein, 9 aa, Homo Sapiens
SHQQYFYKI

SEQ ID NO: 96201 - protein, 9 aa, Homo Sapiens
SHSDGAQYV

SEQ ID NO: 96202 - protein, 9 aa, Homo Sapiens
SHSDTIQAI

SEQ ID NO: 96203 - protein, 9 aa, Homo Sapiens
SHSEAVAML

SEQ ID NO: 96204 - protein, 9 aa, Homo Sapiens
SHSEAVEAI

SEQ ID NO: 96205 - protein, 9 aa, Homo Sapiens
SHSEAVQEV

SEQ ID NO: 96206 - protein, 9 aa, Homo Sapiens
SHSEFKDLI

SEQ ID NO: 96207 - protein, 9 aa, Homo Sapiens
SHSEGLLQI

SEQ ID NO: 96208 - protein, 9 aa, Homo Sapiens
SHSELIHNL

SEQ ID NO: 96209 - protein, 9 aa, Homo Sapiens
SHSELKCDI

SEQ ID NO: 96210 - protein, 9 aa, Homo Sapiens
SHSFVVNIL

SEQ ID NO: 96211 - protein, 9 aa, Homo Sapiens
SHSGITNKL

SEQ ID NO: 96212 - protein, 9 aa, Homo Sapiens
SHSHVGYTL

SEQ ID NO: 96213 - protein, 9 aa, Homo Sapiens
SHSIFTVKI

SEQ ID NO: 96214 - protein, 9 aa, Homo Sapiens
SHSITNMEI

SEQ ID NO: 96215 - protein, 9 aa, Homo Sapiens
SHSLCEQTM

SEQ ID NO: 96216 - protein, 9 aa, Homo Sapiens
SHSNIIAGI

SEQ ID NO: 96217 - protein, 9 aa, Homo Sapiens
SHSQLMQLI

SEQ ID NO: 96218 - protein, 9 aa, Homo Sapiens
SHSRALVGI

SEQ ID NO: 96219 - protein, 9 aa, Homo Sapiens
SHSRIEYMI

SEQ ID NO: 96220 - protein, 9 aa, Homo Sapiens
SHSSAQFLI

SEQ ID NO: 96221 - protein, 9 aa, Homo Sapiens
SHSSDLQGL

SEQ ID NO: 96222 - protein, 9 aa, Homo Sapiens
SHSSFQASL

SEQ ID NO: 96223 - protein, 9 aa, Homo Sapiens
SHSSIIHRL

SEQ ID NO: 96224 - protein, 9 aa, Homo Sapiens
SHSSIQFSF

SEQ ID NO: 96225 - protein, 9 aa, Homo Sapiens
SHSSKVLHF

SEQ ID NO: 96226 - protein, 9 aa, Homo Sapiens
SHSSSFLSL

SEQ ID NO: 96227 - protein, 9 aa, Homo Sapiens
SHSSSVQTL

SEQ ID NO: 96228 - protein, 9 aa, Homo Sapiens
SHSSVILKM

SEQ ID NO: 96229 - protein, 9 aa, Homo Sapiens
SHSSVSSCL

SEQ ID NO: 96230 - protein, 9 aa, Homo Sapiens
SHSVFQLQI

SEQ ID NO: 96231 - protein, 9 aa, Homo Sapiens
SHSVFSVTI

SEQ ID NO: 96232 - protein, 9 aa, Homo Sapiens
SHSVLNLLF

SEQ ID NO: 96233 - protein, 9 aa, Homo Sapiens
SHSVPDTAF

SEQ ID NO: 96234 - protein, 9 aa, Homo Sapiens
SHTAEGDVL

SEQ ID NO: 96235 - protein, 9 aa, Homo Sapiens
SHTDVVPVF

SEQ ID NO: 96236 - protein, 9 aa, Homo Sapiens
SHTHVSVVI

SEQ ID NO: 96237 - protein, 9 aa, Homo Sapiens
SHTPGDHQI

SEQ ID NO: 96238 - protein, 9 aa, Homo Sapiens
SHTPGEHQI

SEQ ID NO: 96239 - protein, 9 aa, Homo Sapiens
SHTSVGNIL

SEQ ID NO: 96240 - protein, 9 aa, Homo Sapiens
SHTSVPLLL

SEQ ID NO: 96241 - protein, 9 aa, Homo Sapiens
SHVDDEYRW

SEQ ID NO: 96242 - protein, 9 aa, Homo Sapiens
SHVEEGNVV

SEQ ID NO: 96243 - protein, 9 aa, Homo Sapiens
SHVHFDEKL

SEQ ID NO: 96244 - protein, 9 aa, Homo Sapiens
SHVLPEPGF

SEQ ID NO: 96245 - protein, 9 aa, Homo Sapiens
SHVPYPVAL

SEQ ID NO: 96246 - protein, 9 aa, Homo Sapiens
SHVSGISRI

SEQ ID NO: 96247 - protein, 9 aa, Homo Sapiens
SHVSGTTTL

SEQ ID NO: 96248 - protein, 9 aa, Homo Sapiens
SHWPFFEAF

SEQ ID NO: 96249 - protein, 9 aa, Homo Sapiens
SHWQQQSYL

SEQ ID NO: 96250 - protein, 9 aa, Homo Sapiens
SHYDEAYKW

SEQ ID NO: 96251 - protein, 9 aa, Homo Sapiens
SHYEKEYIL

SEQ ID NO: 96252 - protein, 9 aa, Homo Sapiens
SHYLFSEEI

SEQ ID NO: 96253 - protein, 9 aa, Homo Sapiens
SHYTTPMVL

SEQ ID NO: 96254 - protein, 9 aa, Homo Sapiens
SLADDNLKL

SEQ ID NO: 96255 - protein, 9 aa, Homo Sapiens
SLFRLQEQF

SEQ ID NO: 96256 - protein, 9 aa, Homo Sapiens
SNWFQPIYL

SEQ ID NO: 96257 - protein, 9 aa, Homo Sapiens
SPDEHEPLL

SEQ ID NO: 96258 - protein, 9 aa, Homo Sapiens
SPDGSDPKL

SEQ ID NO: 96259 - protein, 9 aa, Homo Sapiens
SQCPHIVRI

SEQ ID NO: 96260 - protein, 9 aa, Homo Sapiens
SQDGTLQSF

SEQ ID NO: 96261 - protein, 9 aa, Homo Sapiens
SQDPFPAAI

SEQ ID NO: 96262 - protein, 9 aa, Homo Sapiens
SQDPGTHVV

SEQ ID NO: 96263 - protein, 9 aa, Homo Sapiens
SQDPPEKSI

SEQ ID NO: 96264 - protein, 9 aa, Homo Sapiens
SQDTGKYCF

SEQ ID NO: 96265 - protein, 9 aa, Homo Sapiens
SQDYGKHLL

SEQ ID NO: 96266 - protein, 9 aa, Homo Sapiens
SQIADVARF

SEQ ID NO: 96267 - protein, 9 aa, Homo Sapiens
SRAAEKLYL

SEQ ID NO: 96268 - protein, 9 aa, Homo Sapiens
SRDDNMFQI

SEQ ID NO: 96269 - protein, 9 aa, Homo Sapiens
SRDKLKLFL

SEQ ID NO: 96270 - protein, 9 aa, Homo Sapiens
SRDKTIIMW

SEQ ID NO: 96271 - protein, 9 aa, Homo Sapiens
SRDPVQLNL

SEQ ID NO: 96272 - protein, 9 aa, Homo Sapiens
SRDRLIHVL

SEQ ID NO: 96273 - protein, 9 aa, Homo Sapiens
SRFEGLEKI

SEQ ID NO: 96274 - protein, 9 aa, Homo Sapiens
SRFEKEFSF

SEQ ID NO: 96275 - protein, 9 aa, Homo Sapiens
SRFLANEVL

SEQ ID NO: 96276 - protein, 9 aa, Homo Sapiens
SRIGGNEGI

SEQ ID NO: 96277 - protein, 9 aa, Homo Sapiens
SRLQGVERI

SEQ ID NO: 96278 - protein, 9 aa, Homo Sapiens
TDAHTVLAL

SEQ ID NO: 96279 - protein, 9 aa, Homo Sapiens
TEDDKQLLL

SEQ ID NO: 96280 - protein, 9 aa, Homo Sapiens
TEDGNILQL

SEQ ID NO: 96281 - protein, 9 aa, Homo Sapiens
TEDGYILCL

SEQ ID NO: 96282 - protein, 9 aa, Homo Sapiens
TEDITRYYL

SEQ ID NO: 96283 - protein, 9 aa, Homo Sapiens
TEDPTILRI

SEQ ID NO: 96284 - protein, 9 aa, Homo Sapiens
THAAQQILL

SEQ ID NO: 96285 - protein, 9 aa, Homo Sapiens
THAAQQLKL

SEQ ID NO: 96286 - protein, 9 aa, Homo Sapiens
THADCPQLL

SEQ ID NO: 96287 - protein, 9 aa, Homo Sapiens
THADFVLEM

SEQ ID NO: 96288 - protein, 9 aa, Homo Sapiens
THADVVQMF

SEQ ID NO: 96289 - protein, 9 aa, Homo Sapiens
THADYVLEM

SEQ ID NO: 96290 - protein, 9 aa, Homo Sapiens
THAEHIETI

SEQ ID NO: 96291 - protein, 9 aa, Homo Sapiens
THAEINQKL

SEQ ID NO: 96292 - protein, 9 aa, Homo Sapiens
THAEVHQSL

SEQ ID NO: 96293 - protein, 9 aa, Homo Sapiens
THAFSSDLM

SEQ ID NO: 96294 - protein, 9 aa, Homo Sapiens
THAGAHLDL

SEQ ID NO: 96295 - protein, 9 aa, Homo Sapiens
THAGVRLYF

SEQ ID NO: 96296 - protein, 9 aa, Homo Sapiens
THALEYVLF

SEQ ID NO: 96297 - protein, 9 aa, Homo Sapiens
THALLGDSL

SEQ ID NO: 96298 - protein, 9 aa, Homo Sapiens
THALLSVLL

SEQ ID NO: 96299 - protein, 9 aa, Homo Sapiens
THALPIPVI

SEQ ID NO: 96300 - protein, 9 aa, Homo Sapiens
THANDASAL

SEQ ID NO: 96301 - protein, 9 aa, Homo Sapiens
THANYKVTL

SEQ ID NO: 96302 - protein, 9 aa, Homo Sapiens
THAPISIYF

SEQ ID NO: 96303 - protein, 9 aa, Homo Sapiens
THAQDIVQI

SEQ ID NO: 96304 - protein, 9 aa, Homo Sapiens
THARNDYLL

SEQ ID NO: 96305 - protein, 9 aa, Homo Sapiens
THARVMTRF

SEQ ID NO: 96306 - protein, 9 aa, Homo Sapiens
THASQIELL

SEQ ID NO: 96307 - protein, 9 aa, Homo Sapiens
THAVVFAKL

SEQ ID NO: 96308 - protein, 9 aa, Homo Sapiens
THCAQDLAM

SEQ ID NO: 96309 - protein, 9 aa, Homo Sapiens
THCEIHPSM

SEQ ID NO: 96310 - protein, 9 aa, Homo Sapiens
THCGVPNYL

SEQ ID NO: 96311 - protein, 9 aa, Homo Sapiens
THCIDFSYL

SEQ ID NO: 96312 - protein, 9 aa, Homo Sapiens
THCLPEPHL

SEQ ID NO: 96313 - protein, 9 aa, Homo Sapiens
THCLWTDQL

SEQ ID NO: 96314 - protein, 9 aa, Homo Sapiens
THCPDTPLL

SEQ ID NO: 96315 - protein, 9 aa, Homo Sapiens
THCTISLAL

SEQ ID NO: 96316 - protein, 9 aa, Homo Sapiens
THDAPATTF

SEQ ID NO: 96317 - protein, 9 aa, Homo Sapiens
THDDVQQSF

SEQ ID NO: 96318 - protein, 9 aa, Homo Sapiens
THDEDFVEL

SEQ ID NO: 96319 - protein, 9 aa, Homo Sapiens
THDEGFYWW

SEQ ID NO: 96320 - protein, 9 aa, Homo Sapiens
THDELIQLV

SEQ ID NO: 96321 - protein, 9 aa, Homo Sapiens
THDGFGFML

SEQ ID NO: 96322 - protein, 9 aa, Homo Sapiens
THDGGFLSL

SEQ ID NO: 96323 - protein, 9 aa, Homo Sapiens
THDGSILIV

SEQ ID NO: 96324 - protein, 9 aa, Homo Sapiens
THDGSVYFW

SEQ ID NO: 96325 - protein, 9 aa, Homo Sapiens
THDHVKPLL

SEQ ID NO: 96326 - protein, 9 aa, Homo Sapiens
THDIHALIL

SEQ ID NO: 96327 - protein, 9 aa, Homo Sapiens
THDIPIKVI

SEQ ID NO: 96328 - protein, 9 aa, Homo Sapiens
THDITTISI

SEQ ID NO: 96329 - protein, 9 aa, Homo Sapiens
THDKLSHYL

SEQ ID NO: 96330 - protein, 9 aa, Homo Sapiens
THDLEGPPL

SEQ ID NO: 96331 - protein, 9 aa, Homo Sapiens
THDLKTLSL

SEQ ID NO: 96332 - protein, 9 aa, Homo Sapiens
THDLLDICL

SEQ ID NO: 96333 - protein, 9 aa, Homo Sapiens
THDLRIHQL

SEQ ID NO: 96334 - protein, 9 aa, Homo Sapiens
THDLVGPEL

SEQ ID NO: 96335 - protein, 9 aa, Homo Sapiens
THDPLHQEV

SEQ ID NO: 96336 - protein, 9 aa, Homo Sapiens
THDPNKEAL

SEQ ID NO: 96337 - protein, 9 aa, Homo Sapiens
THDPNKETF

SEQ ID NO: 96338 - protein, 9 aa, Homo Sapiens
THDPNKMAF

SEQ ID NO: 96339 - protein, 9 aa, Homo Sapiens
THDPRTVTL

SEQ ID NO: 96340 - protein, 9 aa, Homo Sapiens
THDQAVQAL

SEQ ID NO: 96341 - protein, 9 aa, Homo Sapiens
THDQMIDLL

SEQ ID NO: 96342 - protein, 9 aa, Homo Sapiens
THDRSFEEF

SEQ ID NO: 96343 - protein, 9 aa, Homo Sapiens
THDSGLITI

SEQ ID NO: 96344 - protein, 9 aa, Homo Sapiens
THDSNTDMF

SEQ ID NO: 96345 - protein, 9 aa, Homo Sapiens
THDSRAVKF

SEQ ID NO: 96346 - protein, 9 aa, Homo Sapiens
THDTFQNEL

SEQ ID NO: 96347 - protein, 9 aa, Homo Sapiens
THDTKIELL

SEQ ID NO: 96348 - protein, 9 aa, Homo Sapiens
THEAYVTVL

SEQ ID NO: 96349 - protein, 9 aa, Homo Sapiens
THEDAVAAM

SEQ ID NO: 96350 - protein, 9 aa, Homo Sapiens
THEDDKYRL

SEQ ID NO: 96351 - protein, 9 aa, Homo Sapiens
THEDGVLEL

SEQ ID NO: 96352 - protein, 9 aa, Homo Sapiens
THEDIEAQI

SEQ ID NO: 96353 - protein, 9 aa, Homo Sapiens
THEDSKILL

SEQ ID NO: 96354 - protein, 9 aa, Homo Sapiens
THEEAVTAL

SEQ ID NO: 96355 - protein, 9 aa, Homo Sapiens
THEEMPQSI

SEQ ID NO: 96356 - protein, 9 aa, Homo Sapiens
THEGFNVTL

SEQ ID NO: 96357 - protein, 9 aa, Homo Sapiens
THEITVLII

SEQ ID NO: 96358 - protein, 9 aa, Homo Sapiens
THELTNPGI

SEQ ID NO: 96359 - protein, 9 aa, Homo Sapiens
THEPNFTII

SEQ ID NO: 96360 - protein, 9 aa, Homo Sapiens
THEQAILRL

SEQ ID NO: 96361 - protein, 9 aa, Homo Sapiens
THESHAVRL

SEQ ID NO: 96362 - protein, 9 aa, Homo Sapiens
THEVFQQQL

SEQ ID NO: 96363 - protein, 9 aa, Homo Sapiens
THFESKTEL

SEQ ID NO: 96364 - protein, 9 aa, Homo Sapiens
THFFKVLIL

SEQ ID NO: 96365 - protein, 9 aa, Homo Sapiens
THFHELTAL

SEQ ID NO: 96366 - protein, 9 aa, Homo Sapiens
THFLQPIYL

SEQ ID NO: 96367 - protein, 9 aa, Homo Sapiens
THFNFAIVF

SEQ ID NO: 96368 - protein, 9 aa, Homo Sapiens
THFPDETEI

SEQ ID NO: 96369 - protein, 9 aa, Homo Sapiens
THFQLAYRL

SEQ ID NO: 96370 - protein, 9 aa, Homo Sapiens
THFSDHLYW

SEQ ID NO: 96371 - protein, 9 aa, Homo Sapiens
THFSFPLRL

SEQ ID NO: 96372 - protein, 9 aa, Homo Sapiens
THGDFDVAL

SEQ ID NO: 96373 - protein, 9 aa, Homo Sapiens
THGEAVQLL

SEQ ID NO: 96374 - protein, 9 aa, Homo Sapiens
THGEVERRI

SEQ ID NO: 96375 - protein, 9 aa, Homo Sapiens
THGGRIDYI

SEQ ID NO: 96376 - protein, 9 aa, Homo Sapiens
THGPENPKL

SEQ ID NO: 96377 - protein, 9 aa, Homo Sapiens
THGQFYDLL

SEQ ID NO: 96378 - protein, 9 aa, Homo Sapiens
THGQGGWLL

SEQ ID NO: 96379 - protein, 9 aa, Homo Sapiens
THGRVRLLL

SEQ ID NO: 96380 - protein, 9 aa, Homo Sapiens
THGVVHVTI

SEQ ID NO: 96381 - protein, 9 aa, Homo Sapiens
THHDALAIL

SEQ ID NO: 96382 - protein, 9 aa, Homo Sapiens
THHLFVIFF

SEQ ID NO: 96383 - protein, 9 aa, Homo Sapiens
THHNDTELI

SEQ ID NO: 96384 - protein, 9 aa, Homo Sapiens
THHQQDPAF

SEQ ID NO: 96385 - protein, 9 aa, Homo Sapiens
THHYHQTLL

SEQ ID NO: 96386 - protein, 9 aa, Homo Sapiens
THHYVPCSL

SEQ ID NO: 96387 - protein, 9 aa, Homo Sapiens
THIAEATGW

SEQ ID NO: 96388 - protein, 9 aa, Homo Sapiens
THIDINSKI

SEQ ID NO: 96389 - protein, 9 aa, Homo Sapiens
THIEAQNKI

SEQ ID NO: 96390 - protein, 9 aa, Homo Sapiens
THILDGNAV

SEQ ID NO: 96391 - protein, 9 aa, Homo Sapiens
THILTPQKL

SEQ ID NO: 96392 - protein, 9 aa, Homo Sapiens
THINGESVL

SEQ ID NO: 96393 - protein, 9 aa, Homo Sapiens
THIRDFLQV

SEQ ID NO: 96394 - protein, 9 aa, Homo Sapiens
THISPNAIF

SEQ ID NO: 96395 - protein, 9 aa, Homo Sapiens
THLAEFHQI

SEQ ID NO: 96396 - protein, 9 aa, Homo Sapiens
THLDFHLEF

SEQ ID NO: 96397 - protein, 9 aa, Homo Sapiens
THLDSVTKI

SEQ ID NO: 96398 - protein, 9 aa, Homo Sapiens
THLEAQNRI

SEQ ID NO: 96399 - protein, 9 aa, Homo Sapiens
THLEHQQRI

SEQ ID NO: 96400 - protein, 9 aa, Homo Sapiens
THLEYFSLW

SEQ ID NO: 96401 - protein, 9 aa, Homo Sapiens
THLKDLIAW

SEQ ID NO: 96402 - protein, 9 aa, Homo Sapiens
THLKQQLAL

SEQ ID NO: 96403 - protein, 9 aa, Homo Sapiens
THLNDHLQM

SEQ ID NO: 96404 - protein, 9 aa, Homo Sapiens
THLPQTLTI

SEQ ID NO: 96405 - protein, 9 aa, Homo Sapiens
THLSQSSNL

SEQ ID NO: 96406 - protein, 9 aa, Homo Sapiens
THLSSTEAF

SEQ ID NO: 96407 - protein, 9 aa, Homo Sapiens
THLSWIQNI

SEQ ID NO: 96408 - protein, 9 aa, Homo Sapiens
THLWLNEGF

SEQ ID NO: 96409 - protein, 9 aa, Homo Sapiens
THMELYSQL

SEQ ID NO: 96410 - protein, 9 aa, Homo Sapiens
THMEPEHRL

SEQ ID NO: 96411 - protein, 9 aa, Homo Sapiens
THMIESNDI

SEQ ID NO: 96412 - protein, 9 aa, Homo Sapiens
THMNSSEKL

SEQ ID NO: 96413 - protein, 9 aa, Homo Sapiens
THMQHAYDF

SEQ ID NO: 96414 - protein, 9 aa, Homo Sapiens
THMSPSWTL

SEQ ID NO: 96415 - protein, 9 aa, Homo Sapiens
THMTAIVGM

SEQ ID NO: 96416 - protein, 9 aa, Homo Sapiens
THMVCRTAL

SEQ ID NO: 96417 - protein, 9 aa, Homo Sapiens
THNEIYDKF

SEQ ID NO: 96418 - protein, 9 aa, Homo Sapiens
THNEPGVRL

SEQ ID NO: 96419 - protein, 9 aa, Homo Sapiens
THNESVSAL

SEQ ID NO: 96420 - protein, 9 aa, Homo Sapiens
THNLMELLI

SEQ ID NO: 96421 - protein, 9 aa, Homo Sapiens
THNLSFDEI

SEQ ID NO: 96422 - protein, 9 aa, Homo Sapiens
THNMDVPNI

SEQ ID NO: 96423 - protein, 9 aa, Homo Sapiens
THNPTNATL

SEQ ID NO: 96424 - protein, 9 aa, Homo Sapiens
THQEAVSAL

SEQ ID NO: 96425 - protein, 9 aa, Homo Sapiens
THQENGIEI

SEQ ID NO: 96426 - protein, 9 aa, Homo Sapiens
THQPVYHKI

SEQ ID NO: 96427 - protein, 9 aa, Homo Sapiens
THQQETQSI

SEQ ID NO: 96428 - protein, 9 aa, Homo Sapiens
THQQGQPAL

SEQ ID NO: 96429 - protein, 9 aa, Homo Sapiens
THQQKVLRL

SEQ ID NO: 96430 - protein, 9 aa, Homo Sapiens
THQQVVSRI

SEQ ID NO: 96431 - protein, 9 aa, Homo Sapiens
THSATKVLI

SEQ ID NO: 96432 - protein, 9 aa, Homo Sapiens
THSAVDNIL

SEQ ID NO: 96433 - protein, 9 aa, Homo Sapiens
THSDDVTQV

SEQ ID NO: 96434 - protein, 9 aa, Homo Sapiens
THSDIQVKL

SEQ ID NO: 96435 - protein, 9 aa, Homo Sapiens
THSDSALKI

SEQ ID NO: 96436 - protein, 9 aa, Homo Sapiens
THSEPLSTI

SEQ ID NO: 96437 - protein, 9 aa, Homo Sapiens
THSGLFTHL

SEQ ID NO: 96438 - protein, 9 aa, Homo Sapiens
THSHFLARL

SEQ ID NO: 96439 - protein, 9 aa, Homo Sapiens
THSINALLI

SEQ ID NO: 96440 - protein, 9 aa, Homo Sapiens
THSKRTLLI

SEQ ID NO: 96441 - protein, 9 aa, Homo Sapiens
THSKVTFEI

SEQ ID NO: 96442 - protein, 9 aa, Homo Sapiens
THSLETQEL

SEQ ID NO: 96443 - protein, 9 aa, Homo Sapiens
THSLPLLLF

SEQ ID NO: 96444 - protein, 9 aa, Homo Sapiens
THSLPVVVI

SEQ ID NO: 96445 - protein, 9 aa, Homo Sapiens
THSMDLVAL

SEQ ID NO: 96446 - protein, 9 aa, Homo Sapiens
THSNLHTSI

SEQ ID NO: 96447 - protein, 9 aa, Homo Sapiens
THSNMANAL

SEQ ID NO: 96448 - protein, 9 aa, Homo Sapiens
THSPDAPDF

SEQ ID NO: 96449 - protein, 9 aa, Homo Sapiens
THSPFCWHL

SEQ ID NO: 96450 - protein, 9 aa, Homo Sapiens
THSPKEVMF

SEQ ID NO: 96451 - protein, 9 aa, Homo Sapiens
THSPSNAQF

SEQ ID NO: 96452 - protein, 9 aa, Homo Sapiens
THSPSSSSI

SEQ ID NO: 96453 - protein, 9 aa, Homo Sapiens
THSPYVAQI

SEQ ID NO: 96454 - protein, 9 aa, Homo Sapiens
THSQELCKL

SEQ ID NO: 96455 - protein, 9 aa, Homo Sapiens
THSSLLDLI

SEQ ID NO: 96456 - protein, 9 aa, Homo Sapiens
THSSPSFNL

SEQ ID NO: 96457 - protein, 9 aa, Homo Sapiens
THSTIDAKM

SEQ ID NO: 96458 - protein, 9 aa, Homo Sapiens
THSTTSQAI

SEQ ID NO: 96459 - protein, 9 aa, Homo Sapiens
THTLDISQL

SEQ ID NO: 96460 - protein, 9 aa, Homo Sapiens
THTQPGVQL

SEQ ID NO: 96461 - protein, 9 aa, Homo Sapiens
THTSLMQRL

SEQ ID NO: 96462 - protein, 9 aa, Homo Sapiens
THTTVIHQL

SEQ ID NO: 96463 - protein, 9 aa, Homo Sapiens
THVDPILLI

SEQ ID NO: 96464 - protein, 9 aa, Homo Sapiens
THVDSMDLI

SEQ ID NO: 96465 - protein, 9 aa, Homo Sapiens
THVFVIAEL

SEQ ID NO: 96466 - protein, 9 aa, Homo Sapiens
THVGKVNIF

SEQ ID NO: 96467 - protein, 9 aa, Homo Sapiens
THVGPTPAI

SEQ ID NO: 96468 - protein, 9 aa, Homo Sapiens
THVIENIYL

SEQ ID NO: 96469 - protein, 9 aa, Homo Sapiens
THVKELWTW

SEQ ID NO: 96470 - protein, 9 aa, Homo Sapiens
THVLVPVWI

SEQ ID NO: 96471 - protein, 9 aa, Homo Sapiens
THVNDGTEF

SEQ ID NO: 96472 - protein, 9 aa, Homo Sapiens
THVPQPAFL

SEQ ID NO: 96473 - protein, 9 aa, Homo Sapiens
THVPSTEEI

SEQ ID NO: 96474 - protein, 9 aa, Homo Sapiens
THVRDWVMW

SEQ ID NO: 96475 - protein, 9 aa, Homo Sapiens
THVSNGCQL

SEQ ID NO: 96476 - protein, 9 aa, Homo Sapiens
THVTEIISF

SEQ ID NO: 96477 - protein, 9 aa, Homo Sapiens
THYGKVYLL

SEQ ID NO: 96478 - protein, 9 aa, Homo Sapiens
THYWSLEKL

SEQ ID NO: 96479 - protein, 9 aa, Homo Sapiens
TKIEIGDTI

SEQ ID NO: 96480 - protein, 9 aa, Homo Sapiens
TLCDLYETL

SEQ ID NO: 96481 - protein, 9 aa, Homo Sapiens
TLDPAEYNI

SEQ ID NO: 96482 - protein, 9 aa, Homo Sapiens
TLTELGDEL

SEQ ID NO: 96483 - protein, 9 aa, Homo Sapiens
TMATMGDTL

SEQ ID NO: 96484 - protein, 9 aa, Homo Sapiens
TPISIGDSI

SEQ ID NO: 96485 - protein, 9 aa, Homo Sapiens
TQCELLTQL

SEQ ID NO: 96486 - protein, 9 aa, Homo Sapiens
TQCGYDVRI

SEQ ID NO: 96487 - protein, 9 aa, Homo Sapiens
TQDAVPLTL

SEQ ID NO: 96488 - protein, 9 aa, Homo Sapiens
TQDECILHF

SEQ ID NO: 96489 - protein, 9 aa, Homo Sapiens
TQDGIKLMF

SEQ ID NO: 96490 - protein, 9 aa, Homo Sapiens
TQDGLLFTF

SEQ ID NO: 96491 - protein, 9 aa, Homo Sapiens
TQDGNIYQL

SEQ ID NO: 96492 - protein, 9 aa, Homo Sapiens
TQDPHVNAF

SEQ ID NO: 96493 - protein, 9 aa, Homo Sapiens
TQDPTAQSL

SEQ ID NO: 96494 - protein, 9 aa, Homo Sapiens
TQDPTVTRL

SEQ ID NO: 96495 - protein, 9 aa, Homo Sapiens
TQDQGMYRF

SEQ ID NO: 96496 - protein, 9 aa, Homo Sapiens
TQDSSFQGL

SEQ ID NO: 96497 - protein, 9 aa, Homo Sapiens
TQDSSILPL

SEQ ID NO: 96498 - protein, 9 aa, Homo Sapiens
TQDTQPHYI

SEQ ID NO: 96499 - protein, 9 aa, Homo Sapiens
TQESTFQEL

SEQ ID NO: 96500 - protein, 9 aa, Homo Sapiens
TQGPIEVYL

SEQ ID NO: 96501 - protein, 9 aa, Homo Sapiens
TQMDVKLVF

SEQ ID NO: 96502 - protein, 9 aa, Homo Sapiens
TQMPDPKTF

SEQ ID NO: 96503 - protein, 9 aa, Homo Sapiens
TQNLDVHFW

SEQ ID NO: 96504 - protein, 9 aa, Homo Sapiens
TQSEVDPHL

SEQ ID NO: 96505 - protein, 9 aa, Homo Sapiens
TQTAVITRI

SEQ ID NO: 96506 - protein, 9 aa, Homo Sapiens
TQVGPGPQI

SEQ ID NO: 96507 - protein, 9 aa, Homo Sapiens
TQVLIGNNI

SEQ ID NO: 96508 - protein, 9 aa, Homo Sapiens
TRAAVEEGI

SEQ ID NO: 96509 - protein, 9 aa, Homo Sapiens
TRALEEHRL

SEQ ID NO: 96510 - protein, 9 aa, Homo Sapiens
TRCIAILYI

SEQ ID NO: 96511 - protein, 9 aa, Homo Sapiens
TRCPLVLKL

SEQ ID NO: 96512 - protein, 9 aa, Homo Sapiens
TRCPYKDTL

SEQ ID NO: 96513 - protein, 9 aa, Homo Sapiens
TRCQFQTKF

SEQ ID NO: 96514 - protein, 9 aa, Homo Sapiens
TRDDSPLYI

SEQ ID NO: 96515 - protein, 9 aa, Homo Sapiens
TRDELEWKL

SEQ ID NO: 96516 - protein, 9 aa, Homo Sapiens
TRDETNYGI

SEQ ID NO: 96517 - protein, 9 aa, Homo Sapiens
TRDFTQPFI

SEQ ID NO: 96518 - protein, 9 aa, Homo Sapiens
TRDGNFLRL

SEQ ID NO: 96519 - protein, 9 aa, Homo Sapiens
TRDNTLIRI

SEQ ID NO: 96520 - protein, 9 aa, Homo Sapiens
TRDSNIIRL

SEQ ID NO: 96521 - protein, 9 aa, Homo Sapiens
TRDSVKTVL

SEQ ID NO: 96522 - protein, 9 aa, Homo Sapiens
TRDVHIYRL

SEQ ID NO: 96523 - protein, 9 aa, Homo Sapiens
TREEGAQTL

SEQ ID NO: 96524 - protein, 9 aa, Homo Sapiens
TREEGKALL

SEQ ID NO: 96525 - protein, 9 aa, Homo Sapiens
TRHNYYESF

SEQ ID NO: 96526 - protein, 9 aa, Homo Sapiens
TRIGVMSLI

SEQ ID NO: 96527 - protein, 9 aa, Homo Sapiens
TRIPKIQKL

SEQ ID NO: 96528 - protein, 9 aa, Homo Sapiens
TRLAIQEAL

SEQ ID NO: 96529 - protein, 9 aa, Homo Sapiens
TRLDQDESF

SEQ ID NO: 96530 - protein, 9 aa, Homo Sapiens
TRLEFQQQL

SEQ ID NO: 96531 - protein, 9 aa, Homo Sapiens
TRLLMKERF

SEQ ID NO: 96532 - protein, 9 aa, Homo Sapiens
TRSAEQHLI

SEQ ID NO: 96533 - protein, 9 aa, Homo Sapiens
TRSAIILHL

SEQ ID NO: 96534 - protein, 9 aa, Homo Sapiens
TRTPIGSFL

SEQ ID NO: 96535 - protein, 9 aa, Homo Sapiens
TRVQEEPEL

SEQ ID NO: 96536 - protein, 9 aa, Homo Sapiens
TRYQYCDFL

SEQ ID NO: 96537 - protein, 9 aa, Homo Sapiens
TSFWALLYL

SEQ ID NO: 96538 - protein, 9 aa, Homo Sapiens
VGGEALELR

SEQ ID NO: 96539 - protein, 9 aa, Homo Sapiens
VHAELADVL

SEQ ID NO: 96540 - protein, 9 aa, Homo Sapiens
VHAENGDII

SEQ ID NO: 96541 - protein, 9 aa, Homo Sapiens
VHAFPELFL

SEQ ID NO: 96542 - protein, 9 aa, Homo Sapiens
VHAQVQQFL

SEQ ID NO: 96543 - protein, 9 aa, Homo Sapiens
VHAVIGDEL

SEQ ID NO: 96544 - protein, 9 aa, Homo Sapiens
VHAYIISYL

SEQ ID NO: 96545 - protein, 9 aa, Homo Sapiens
VHDALVQII

SEQ ID NO: 96546 - protein, 9 aa, Homo Sapiens
VHDDVDIIL

SEQ ID NO: 96547 - protein, 9 aa, Homo Sapiens
VHDEGVWAL

SEQ ID NO: 96548 - protein, 9 aa, Homo Sapiens
VHDETCQVI

SEQ ID NO: 96549 - protein, 9 aa, Homo Sapiens
VHDGCVNTI

SEQ ID NO: 96550 - protein, 9 aa, Homo Sapiens
VHDKTPTHF

SEQ ID NO: 96551 - protein, 9 aa, Homo Sapiens
VHDNKVLRI

SEQ ID NO: 96552 - protein, 9 aa, Homo Sapiens
VHDNLAMKI

SEQ ID NO: 96553 - protein, 9 aa, Homo Sapiens
VHDSFQQLI

SEQ ID NO: 96554 - protein, 9 aa, Homo Sapiens
VHDSIDYRF

SEQ ID NO: 96555 - protein, 9 aa, Homo Sapiens
VHDTSTELL

SEQ ID NO: 96556 - protein, 9 aa, Homo Sapiens
VHEKDVIGI

SEQ ID NO: 96557 - protein, 9 aa, Homo Sapiens
VHFIKPLLL

SEQ ID NO: 96558 - protein, 9 aa, Homo Sapiens
VHHLDNNEF

SEQ ID NO: 96559 - protein, 9 aa, Homo Sapiens
VHHYSGNNI

SEQ ID NO: 96560 - protein, 9 aa, Homo Sapiens
VHIADVSYF

SEQ ID NO: 96561 - protein, 9 aa, Homo Sapiens
VHIANPDFI

SEQ ID NO: 96562 - protein, 9 aa, Homo Sapiens
VHIDLPLFF

SEQ ID NO: 96563 - protein, 9 aa, Homo Sapiens
VHIEVGNRV

SEQ ID NO: 96564 - protein, 9 aa, Homo Sapiens
VHILDTESF

SEQ ID NO: 96565 - protein, 9 aa, Homo Sapiens
VHILDTETF

SEQ ID NO: 96566 - protein, 9 aa, Homo Sapiens
VHIPEVYLI

SEQ ID NO: 96567 - protein, 9 aa, Homo Sapiens
VHNEGMQVL

SEQ ID NO: 96568 - protein, 9 aa, Homo Sapiens
VHSDFFQKL

SEQ ID NO: 96569 - protein, 9 aa, Homo Sapiens
VHSEQVFAL

SEQ ID NO: 96570 - protein, 9 aa, Homo Sapiens
VHSEYEPSW

SEQ ID NO: 96571 - protein, 9 aa, Homo Sapiens
VHSIFVLRL

SEQ ID NO: 96572 - protein, 9 aa, Homo Sapiens
VHSPYMQCL

SEQ ID NO: 96573 - protein, 9 aa, Homo Sapiens
VHSWLILQV

SEQ ID NO: 96574 - protein, 9 aa, Homo Sapiens
VHVDQELLI

SEQ ID NO: 96575 - protein, 9 aa, Homo Sapiens
VPCKVEPGL

SEQ ID NO: 96576 - protein, 9 aa, Homo Sapiens
VPDSTYEMI

SEQ ID NO: 96577 - protein, 9 aa, Homo Sapiens
VPDSVYQHL

SEQ ID NO: 96578 - protein, 9 aa, Homo Sapiens
WHAGKVWLI

SEQ ID NO: 96579 - protein, 9 aa, Homo Sapiens
WHDGKQVHL

SEQ ID NO: 96580 - protein, 9 aa, Homo Sapiens
WHDGVCPSV

SEQ ID NO: 96581 - protein, 9 aa, Homo Sapiens
WHDMEVYSF

SEQ ID NO: 96582 - protein, 9 aa, Homo Sapiens
WHDPYIQHF

SEQ ID NO: 96583 - protein, 9 aa, Homo Sapiens
WHDWMNNQF

SEQ ID NO: 96584 - protein, 9 aa, Homo Sapiens
WHEDITQDL

SEQ ID NO: 96585 - protein, 9 aa, Homo Sapiens
WHELAELYI

SEQ ID NO: 96586 - protein, 9 aa, Homo Sapiens
WHGDVAVKI

SEQ ID NO: 96587 - protein, 9 aa, Homo Sapiens
WHHDMVMDL

SEQ ID NO: 96588 - protein, 9 aa, Homo Sapiens
WHLDLVQLI

SEQ ID NO: 96589 - protein, 9 aa, Homo Sapiens
WHMTVEQKF

SEQ ID NO: 96590 - protein, 9 aa, Homo Sapiens
WHSDDEPSL

SEQ ID NO: 96591 - protein, 9 aa, Homo Sapiens
WHSDQCNMI

SEQ ID NO: 96592 - protein, 9 aa, Homo Sapiens
WHSFTQPRL

SEQ ID NO: 96593 - protein, 9 aa, Homo Sapiens
WHSPLDRFF

SEQ ID NO: 96594 - protein, 9 aa, Homo Sapiens
WHSYIDYEI

SEQ ID NO: 96595 - protein, 9 aa, Homo Sapiens
WQEGSVTRL

SEQ ID NO: 96596 - protein, 9 aa, Homo Sapiens
YHADIYDKV

SEQ ID NO: 96597 - protein, 9 aa, Homo Sapiens
YHAHFVSML

SEQ ID NO: 96598 - protein, 9 aa, Homo Sapiens
YHAIYLEEL

SEQ ID NO: 96599 - protein, 9 aa, Homo Sapiens
YHAKDPNNL

SEQ ID NO: 96600 - protein, 9 aa, Homo Sapiens
YHALCNEEF

SEQ ID NO: 96601 - protein, 9 aa, Homo Sapiens
YHALDSDHL

SEQ ID NO: 96602 - protein, 9 aa, Homo Sapiens
YHALPATVW

SEQ ID NO: 96603 - protein, 9 aa, Homo Sapiens
YHAQMPDSL

SEQ ID NO: 96604 - protein, 9 aa, Homo Sapiens
YHARVYEFL

SEQ ID NO: 96605 - protein, 9 aa, Homo Sapiens
YHASRKDML

SEQ ID NO: 96606 - protein, 9 aa, Homo Sapiens
YHATTETVI

SEQ ID NO: 96607 - protein, 9 aa, Homo Sapiens
YHCALILNL

SEQ ID NO: 96608 - protein, 9 aa, Homo Sapiens
YHDCVLLFL

SEQ ID NO: 96609 - protein, 9 aa, Homo Sapiens
YHDDKQPAF

SEQ ID NO: 96610 - protein, 9 aa, Homo Sapiens
YHDDTENSL

SEQ ID NO: 96611 - protein, 9 aa, Homo Sapiens
YHDEGWVAI

SEQ ID NO: 96612 - protein, 9 aa, Homo Sapiens
YHDFSVQNF

SEQ ID NO: 96613 - protein, 9 aa, Homo Sapiens
YHDGAATFL

SEQ ID NO: 96614 - protein, 9 aa, Homo Sapiens
YHDIAQQAF

SEQ ID NO: 96615 - protein, 9 aa, Homo Sapiens
YHDINVYSL

SEQ ID NO: 96616 - protein, 9 aa, Homo Sapiens
YHDIVVTFL

SEQ ID NO: 96617 - protein, 9 aa, Homo Sapiens
YHDKNIVLL

SEQ ID NO: 96618 - protein, 9 aa, Homo Sapiens
YHDLECQLI

SEQ ID NO: 96619 - protein, 9 aa, Homo Sapiens
YHDLSQASL

SEQ ID NO: 96620 - protein, 9 aa, Homo Sapiens
YHDRTNLKV

SEQ ID NO: 96621 - protein, 9 aa, Homo Sapiens
YHDTSPYRW

SEQ ID NO: 96622 - protein, 9 aa, Homo Sapiens
YHDYGHLEL

SEQ ID NO: 96623 - protein, 9 aa, Homo Sapiens
YHEDIHTYL

SEQ ID NO: 96624 - protein, 9 aa, Homo Sapiens
YHEEKERLM

SEQ ID NO: 96625 - protein, 9 aa, Homo Sapiens
YHEFLGQQI

SEQ ID NO: 96626 - protein, 9 aa, Homo Sapiens
YHEGKSFQL

SEQ ID NO: 96627 - protein, 9 aa, Homo Sapiens
YHEGLSDHI

SEQ ID NO: 96628 - protein, 9 aa, Homo Sapiens
YHEGSAPAL

SEQ ID NO: 96629 - protein, 9 aa, Homo Sapiens
YHEHQANLL

SEQ ID NO: 96630 - protein, 9 aa, Homo Sapiens
YHEKGRAFL

SEQ ID NO: 96631 - protein, 9 aa, Homo Sapiens
YHESGHAII

SEQ ID NO: 96632 - protein, 9 aa, Homo Sapiens
YHFEEVQKL

SEQ ID NO: 96633 - protein, 9 aa, Homo Sapiens
YHFMPEHRL

SEQ ID NO: 96634 - protein, 9 aa, Homo Sapiens
YHFPDQQEL

SEQ ID NO: 96635 - protein, 9 aa, Homo Sapiens
YHFPELVKI

SEQ ID NO: 96636 - protein, 9 aa, Homo Sapiens
YHGATPLHL

SEQ ID NO: 96637 - protein, 9 aa, Homo Sapiens
YHGDAGDSL

SEQ ID NO: 96638 - protein, 9 aa, Homo Sapiens
YHGDLNETF

SEQ ID NO: 96639 - protein, 9 aa, Homo Sapiens
YHGDLTEKL

SEQ ID NO: 96640 - protein, 9 aa, Homo Sapiens
YHGDSDLQL

SEQ ID NO: 96641 - protein, 9 aa, Homo Sapiens
YHGDTPLHI

SEQ ID NO: 96642 - protein, 9 aa, Homo Sapiens
YHGGDDALL

SEQ ID NO: 96643 - protein, 9 aa, Homo Sapiens
YHGIPMVGI

SEQ ID NO: 96644 - protein, 9 aa, Homo Sapiens
YHGLTVPLI

SEQ ID NO: 96645 - protein, 9 aa, Homo Sapiens
YHHALHSRW

SEQ ID NO: 96646 - protein, 9 aa, Homo Sapiens
YHHCVINKL

SEQ ID NO: 96647 - protein, 9 aa, Homo Sapiens
YHHGWFVMI

SEQ ID NO: 96648 - protein, 9 aa, Homo Sapiens
YHHRFPQAL

SEQ ID NO: 96649 - protein, 9 aa, Homo Sapiens
YHHTFFEML

SEQ ID NO: 96650 - protein, 9 aa, Homo Sapiens
YHHYMQDRI

SEQ ID NO: 96651 - protein, 9 aa, Homo Sapiens
YHIAKDFDI

SEQ ID NO: 96652 - protein, 9 aa, Homo Sapiens
YHIAVDEKL

SEQ ID NO: 96653 - protein, 9 aa, Homo Sapiens
YHIDLDPHF

SEQ ID NO: 96654 - protein, 9 aa, Homo Sapiens
YHIHLVELL

SEQ ID NO: 96655 - protein, 9 aa, Homo Sapiens
YHIIKPDVI

SEQ ID NO: 96656 - protein, 9 aa, Homo Sapiens
YHILNDPEL

SEQ ID NO: 96657 - protein, 9 aa, Homo Sapiens
YHIQQNEAL

SEQ ID NO: 96658 - protein, 9 aa, Homo Sapiens
YHISLEHEI

SEQ ID NO: 96659 - protein, 9 aa, Homo Sapiens
YHISLVDLL

SEQ ID NO: 96660 - protein, 9 aa, Homo Sapiens
YHISMDDRF

SEQ ID NO: 96661 - protein, 9 aa, Homo Sapiens
YHISVQNMM

SEQ ID NO: 96662 - protein, 9 aa, Homo Sapiens
YHITDIPII

SEQ ID NO: 96663 - protein, 9 aa, Homo Sapiens
YHITDQVHL

SEQ ID NO: 96664 - protein, 9 aa, Homo Sapiens
YHITDVPCI

SEQ ID NO: 96665 - protein, 9 aa, Homo Sapiens
YHIVQKFLI

SEQ ID NO: 96666 - protein, 9 aa, Homo Sapiens
YHLLAEEKL

SEQ ID NO: 96667 - protein, 9 aa, Homo Sapiens
YHLLLKELL

SEQ ID NO: 96668 - protein, 9 aa, Homo Sapiens
YHLQLFEEL

SEQ ID NO: 96669 - protein, 9 aa, Homo Sapiens
YHNLHPDYI

SEQ ID NO: 96670 - protein, 9 aa, Homo Sapiens
YHNQSQGLL

SEQ ID NO: 96671 - protein, 9 aa, Homo Sapiens
YHQDAFMQL

SEQ ID NO: 96672 - protein, 9 aa, Homo Sapiens
YHQDKEAAI

SEQ ID NO: 96673 - protein, 9 aa, Homo Sapiens
YHQEEIDVW

SEQ ID NO: 96674 - protein, 9 aa, Homo Sapiens
YHQGPEWLW

SEQ ID NO: 96675 - protein, 9 aa, Homo Sapiens
YHQHFAAHL

SEQ ID NO: 96676 - protein, 9 aa, Homo Sapiens
YHQHFDPVI

SEQ ID NO: 96677 - protein, 9 aa, Homo Sapiens
YHQHLQEQL

SEQ ID NO: 96678 - protein, 9 aa, Homo Sapiens
YHQKSVLIM

SEQ ID NO: 96679 - protein, 9 aa, Homo Sapiens
YHQPDLPEI

SEQ ID NO: 96680 - protein, 9 aa, Homo Sapiens
YHQSEALAL

SEQ ID NO: 96681 - protein, 9 aa, Homo Sapiens
YHSDDYIKF

SEQ ID NO: 96682 - protein, 9 aa, Homo Sapiens
YHSDEYIKF

SEQ ID NO: 96683 - protein, 9 aa, Homo Sapiens
YHSDIVQSL

SEQ ID NO: 96684 - protein, 9 aa, Homo Sapiens
YHSEVPVSL

SEQ ID NO: 96685 - protein, 9 aa, Homo Sapiens
YHSEYFLAL

SEQ ID NO: 96686 - protein, 9 aa, Homo Sapiens
YHSFSEQSF

SEQ ID NO: 96687 - protein, 9 aa, Homo Sapiens
YHSFVSSVF

SEQ ID NO: 96688 - protein, 9 aa, Homo Sapiens
YHSGYVHKF

SEQ ID NO: 96689 - protein, 9 aa, Homo Sapiens
YHSIEEDKW

SEQ ID NO: 96690 - protein, 9 aa, Homo Sapiens
YHSNQTLAL

SEQ ID NO: 96691 - protein, 9 aa, Homo Sapiens
YHSNQVVRM

SEQ ID NO: 96692 - protein, 9 aa, Homo Sapiens
YHSNSGAQL

SEQ ID NO: 96693 - protein, 9 aa, Homo Sapiens
YHSPADRVM

SEQ ID NO: 96694 - protein, 9 aa, Homo Sapiens
YHSQDRYEF

SEQ ID NO: 96695 - protein, 9 aa, Homo Sapiens
YHSSGGLEL

SEQ ID NO: 96696 - protein, 9 aa, Homo Sapiens
YHSTPDRLF

SEQ ID NO: 96697 - protein, 9 aa, Homo Sapiens
YHTDCNVLL

SEQ ID NO: 96698 - protein, 9 aa, Homo Sapiens
YHTDTTVKF

SEQ ID NO: 96699 - protein, 9 aa, Homo Sapiens
YHTLQILFF

SEQ ID NO: 96700 - protein, 9 aa, Homo Sapiens
YHTPNVVFI

SEQ ID NO: 96701 - protein, 9 aa, Homo Sapiens
YHTQDFLEW

SEQ ID NO: 96702 - protein, 9 aa, Homo Sapiens
YHTQTTPLI

SEQ ID NO: 96703 - protein, 9 aa, Homo Sapiens
YHTVAGNDI

SEQ ID NO: 96704 - protein, 9 aa, Homo Sapiens
YHVAEKETL

SEQ ID NO: 96705 - protein, 9 aa, Homo Sapiens
YHVDSLLQL

SEQ ID NO: 96706 - protein, 9 aa, Homo Sapiens
YHVHCIDRW

SEQ ID NO: 96707 - protein, 9 aa, Homo Sapiens
YHVLDMIEL

SEQ ID NO: 96708 - protein, 9 aa, Homo Sapiens
YHWADGTNI

SEQ ID NO: 96709 - protein, 9 aa, Homo Sapiens
YHWLEKEVI

SEQ ID NO: 96710 - protein, 9 aa, Homo Sapiens
YHYDPEQVI

SEQ ID NO: 96711 - protein, 9 aa, Homo Sapiens
YHYGFCDVI

SEQ ID NO: 96712 - protein, 9 aa, Homo Sapiens
YHYLEAQEW

SEQ ID NO: 96713 - protein, 9 aa, Homo Sapiens
YHYLLDPKI

SEQ ID NO: 96714 - protein, 9 aa, Homo Sapiens
YKADEDPAL

SEQ ID NO: 96715 - protein, 9 aa, Homo Sapiens
YKDEKEQLI

SEQ ID NO: 96716 - protein, 9 aa, Homo Sapiens
YKDKYSHLI

SEQ ID NO: 96717 - protein, 9 aa, Homo Sapiens
YKTAKGDEL

SEQ ID NO: 96718 - protein, 9 aa, Homo Sapiens
YPDEIEYIF

SEQ ID NO: 96719 - protein, 9 aa, Homo Sapiens
YPVDLGDKF

SEQ ID NO: 96720 - protein, 9 aa, Homo Sapiens
YPVEIHEYL

SEQ ID NO: 96721 - protein, 9 aa, Homo Sapiens
YQDECDRRL

SEQ ID NO: 96722 - protein, 9 aa, Homo Sapiens
YQHKEEYQL

SEQ ID NO: 96723 - protein, 9 aa, Homo Sapiens
YQIKEGDTI

SEQ ID NO: 96724 - protein, 9 aa, Homo Sapiens
YQSPTGDRI

SEQ ID NO: 96725 - protein, 9 aa, Homo Sapiens
YQTEIGQTL

SEQ ID NO: 96726 - protein, 9 aa, Homo Sapiens
YRDESSSEL

SEQ ID NO: 96727 - protein, 9 aa, Homo Sapiens
YRDIGEEML

SEQ ID NO: 96728 - protein, 9 aa, Homo Sapiens
YRYGREEML

SEQ ID NO: 96729 - protein, 10 aa, Homo Sapiens
AFSQNSALIL

SEQ ID NO: 96730 - protein, 10 aa, Homo Sapiens
AHAASDTVGW

SEQ ID NO: 96731 - protein, 10 aa, Homo Sapiens
AHCDFVHQAL

SEQ ID NO: 96732 - protein, 10 aa, Homo Sapiens
AHDGQRIYIL

SEQ ID NO: 96733 - protein, 10 aa, Homo Sapiens
AHDHFLSNLL

SEQ ID NO: 96734 - protein, 10 aa, Homo Sapiens
AHDPDPGPGV

SEQ ID NO: 96735 - protein, 10 aa, Homo Sapiens
AHDPQTTQEL

SEQ ID NO: 96736 - protein, 10 aa, Homo Sapiens
AHDRAENTQF

SEQ ID NO: 96737 - protein, 10 aa, Homo Sapiens
AHFGIHEEML

SEQ ID NO: 96738 - protein, 10 aa, Homo Sapiens
AHIDSGKTTL

SEQ ID NO: 96739 - protein, 10 aa, Homo Sapiens
AHIEKDFIAF

SEQ ID NO: 96740 - protein, 10 aa, Homo Sapiens
AHIFCTTDQL

SEQ ID NO: 96741 - protein, 10 aa, Homo Sapiens
AHIKEEHCIF

SEQ ID NO: 96742 - protein, 10 aa, Homo Sapiens
AHIQQLYDLL

SEQ ID NO: 96743 - protein, 10 aa, Homo Sapiens
AHLAGVKDQL

SEQ ID NO: 96744 - protein, 10 aa, Homo Sapiens
AHLQLLGESL

SEQ ID NO: 96745 - protein, 10 aa, Homo Sapiens
AHLRPEGQNL

SEQ ID NO: 96746 - protein, 10 aa, Homo Sapiens
AHLSIINEYL

SEQ ID NO: 96747 - protein, 10 aa, Homo Sapiens
AHMEFCYQEL

SEQ ID NO: 96748 - protein, 10 aa, Homo Sapiens
AHMQALAEEW

SEQ ID NO: 96749 - protein, 10 aa, Homo Sapiens
AHSRAALDRL

SEQ ID NO: 96750 - protein, 10 aa, Homo Sapiens
AHVDLTGDGL

SEQ ID NO: 96751 - protein, 10 aa, Homo Sapiens
AHVQELYQEW

SEQ ID NO: 96752 - protein, 10 aa, Homo Sapiens
AHYDPATEEF

SEQ ID NO: 96753 - protein, 10 aa, Homo Sapiens
ASHLSPGSII

SEQ ID NO: 96754 - protein, 10 aa, Homo Sapiens
CHDRNVVTIF

SEQ ID NO: 96755 - protein, 10 aa, Homo Sapiens
CHLFLPDEQF

SEQ ID NO: 96756 - protein, 10 aa, Homo Sapiens
DHAPAIGRYI

SEQ ID NO: 96757 - protein, 10 aa, Homo Sapiens
DHAWIKVEQL

SEQ ID NO: 96758 - protein, 10 aa, Homo Sapiens
DHDPVDKIVL

SEQ ID NO: 96759 - protein, 10 aa, Homo Sapiens
DHDSVDKIVI

SEQ ID NO: 96760 - protein, 10 aa, Homo Sapiens
DHESVCKYYL

SEQ ID NO: 96761 - protein, 10 aa, Homo Sapiens
DHIAHIIELL

SEQ ID NO: 96762 - protein, 10 aa, Homo Sapiens
DHIKDSFHSL

SEQ ID NO: 96763 - protein, 10 aa, Homo Sapiens
DHSFLTNDEL

SEQ ID NO: 96764 - protein, 10 aa, Homo Sapiens
DHSLIPEERL

SEQ ID NO: 96765 - protein, 10 aa, Homo Sapiens
DHSLPESDKI

SEQ ID NO: 96766 - protein, 10 aa, Homo Sapiens
DHSQAFLQAI

SEQ ID NO: 96767 - protein, 10 aa, Homo Sapiens
DHSSTVLQRL

SEQ ID NO: 96768 - protein, 10 aa, Homo Sapiens
DHTSSRLNLL

SEQ ID NO: 96769 - protein, 10 aa, Homo Sapiens
DHVEVNGEVF

SEQ ID NO: 96770 - protein, 10 aa, Homo Sapiens
DHYYGTGETF

SEQ ID NO: 96771 - protein, 10 aa, Homo Sapiens
DRFFSEYEKL

SEQ ID NO: 96772 - protein, 10 aa, Homo Sapiens
DRIKDEFQLL

SEQ ID NO: 96773 - protein, 10 aa, Homo Sapiens
EHAAPYFQQL

SEQ ID NO: 96774 - protein, 10 aa, Homo Sapiens
EHAGPQLTCI

SEQ ID NO: 96775 - protein, 10 aa, Homo Sapiens
EHAGSYFDEI

SEQ ID NO: 96776 - protein, 10 aa, Homo Sapiens
EHANLTEVTF

SEQ ID NO: 96777 - protein, 10 aa, Homo Sapiens
EHAPISYEDF

SEQ ID NO: 96778 - protein, 10 aa, Homo Sapiens
EHAQKELQKL

SEQ ID NO: 96779 - protein, 10 aa, Homo Sapiens
EHAREMCLRF

SEQ ID NO: 96780 - protein, 10 aa, Homo Sapiens
EHCSINLMYL

SEQ ID NO: 96781 - protein, 10 aa, Homo Sapiens
EHDDTLPSQL

SEQ ID NO: 96782 - protein, 10 aa, Homo Sapiens
EHDEGMLEYL

SEQ ID NO: 96783 - protein, 10 aa, Homo Sapiens
EHDGSLFQAV

SEQ ID NO: 96784 - protein, 10 aa, Homo Sapiens
EHDPHVLLAV

SEQ ID NO: 96785 - protein, 10 aa, Homo Sapiens
EHDPQYAVIL

SEQ ID NO: 96786 - protein, 10 aa, Homo Sapiens
EHDQTMLDKL

SEQ ID NO: 96787 - protein, 10 aa, Homo Sapiens
EHDWPVHNNF

SEQ ID NO: 96788 - protein, 10 aa, Homo Sapiens
EHEGPALYYM

SEQ ID NO: 96789 - protein, 10 aa, Homo Sapiens
EHFDDTVVCL

SEQ ID NO: 96790 - protein, 10 aa, Homo Sapiens
EHFNGVAELL

SEQ ID NO: 96791 - protein, 10 aa, Homo Sapiens
EHIEALLDKF

SEQ ID NO: 96792 - protein, 10 aa, Homo Sapiens
EHINEINAEL

SEQ ID NO: 96793 - protein, 10 aa, Homo Sapiens
EHIRVGWEQL

SEQ ID NO: 96794 - protein, 10 aa, Homo Sapiens
EHISFTTSKI

SEQ ID NO: 96795 - protein, 10 aa, Homo Sapiens
EHIVGQLDVL

SEQ ID NO: 96796 - protein, 10 aa, Homo Sapiens
EHMPVGPDAI

SEQ ID NO: 96797 - protein, 10 aa, Homo Sapiens
EHQPTTWVSF

SEQ ID NO: 96798 - protein, 10 aa, Homo Sapiens
EHSESTLNVM

SEQ ID NO: 96799 - protein, 10 aa, Homo Sapiens
EHSPFHEHVL

SEQ ID NO: 96800 - protein, 10 aa, Homo Sapiens
EHSPLSEDRF

SEQ ID NO: 96801 - protein, 10 aa, Homo Sapiens
EHSSDSEYTL

SEQ ID NO: 96802 - protein, 10 aa, Homo Sapiens
EHSSRVVQEL

SEQ ID NO: 96803 - protein, 10 aa, Homo Sapiens
EHTDPHVQQI

SEQ ID NO: 96804 - protein, 10 aa, Homo Sapiens
EHVEAIKIGL

SEQ ID NO: 96805 - protein, 10 aa, Homo Sapiens
EHVREMQEKL

SEQ ID NO: 96806 - protein, 10 aa, Homo Sapiens
EHVSRIPDYL

SEQ ID NO: 96807 - protein, 10 aa, Homo Sapiens
EKSPCQTDVL

SEQ ID NO: 96808 - protein, 10 aa, Homo Sapiens
ERFFSDKETF

SEQ ID NO: 96809 - protein, 10 aa, Homo Sapiens
FHADSDDESF

SEQ ID NO: 96810 - protein, 10 aa, Homo Sapiens
FHAGQIEDEL

SEQ ID NO: 96811 - protein, 10 aa, Homo Sapiens
FHAQLQLEQL

SEQ ID NO: 96812 - protein, 10 aa, Homo Sapiens
FHARNIHQTF

SEQ ID NO: 96813 - protein, 10 aa, Homo Sapiens
FHARPGLSTL

SEQ ID NO: 96814 - protein, 10 aa, Homo Sapiens
FHCDLNSDQF

SEQ ID NO: 96815 - protein, 10 aa, Homo Sapiens
FHCGGGLTDW

SEQ ID NO: 96816 - protein, 10 aa, Homo Sapiens
FHCGVINPSW

SEQ ID NO: 96817 - protein, 10 aa, Homo Sapiens
FHDDSDEDLL

SEQ ID NO: 96818 - protein, 10 aa, Homo Sapiens
FHDDSMKSFF

SEQ ID NO: 96819 - protein, 10 aa, Homo Sapiens
FHDESTQVQL

SEQ ID NO: 96820 - protein, 10 aa, Homo Sapiens
FHDEVGKFRF

SEQ ID NO: 96821 - protein, 10 aa, Homo Sapiens
FHDKGKFEKI

SEQ ID NO: 96822 - protein, 10 aa, Homo Sapiens
FHDKYGNAVL

SEQ ID NO: 96823 - protein, 10 aa, Homo Sapiens
FHDMGGVQLI

SEQ ID NO: 96824 - protein, 10 aa, Homo Sapiens
FHDPELSNHL

SEQ ID NO: 96825 - protein, 10 aa, Homo Sapiens
FHDSSDHHTF

SEQ ID NO: 96826 - protein, 10 aa, Homo Sapiens
FHDTSSPLLI

SEQ ID NO: 96827 - protein, 10 aa, Homo Sapiens
FHEEAGIFKL

SEQ ID NO: 96828 - protein, 10 aa, Homo Sapiens
FHEPGSSSVW

SEQ ID NO: 96829 - protein, 10 aa, Homo Sapiens
FHEPSAFNDF

SEQ ID NO: 96830 - protein, 10 aa, Homo Sapiens
FHETSNINDF

SEQ ID NO: 96831 - protein, 10 aa, Homo Sapiens
FHEVGIGSVL

SEQ ID NO: 96832 - protein, 10 aa, Homo Sapiens
FHEWLAGVGL

SEQ ID NO: 96833 - protein, 10 aa, Homo Sapiens
FHFNDSTVTL

SEQ ID NO: 96834 - protein, 10 aa, Homo Sapiens
FHFTSSTEVF

SEQ ID NO: 96835 - protein, 10 aa, Homo Sapiens
FHGDSEIDQL

SEQ ID NO: 96836 - protein, 10 aa, Homo Sapiens
FHGNIIKVSF

SEQ ID NO: 96837 - protein, 10 aa, Homo Sapiens
FHGNSEVNAI

SEQ ID NO: 96838 - protein, 10 aa, Homo Sapiens
FHGPPEPVLL

SEQ ID NO: 96839 - protein, 10 aa, Homo Sapiens
FHGVSNLQEF

SEQ ID NO: 96840 - protein, 10 aa, Homo Sapiens
FHHEEGASAW

SEQ ID NO: 96841 - protein, 10 aa, Homo Sapiens
FHIAGDNNPL

SEQ ID NO: 96842 - protein, 10 aa, Homo Sapiens
FHIQAQKLGL

SEQ ID NO: 96843 - protein, 10 aa, Homo Sapiens
FHIWSKKEKF

SEQ ID NO: 96844 - protein, 10 aa, Homo Sapiens
FHLDGSRESF

SEQ ID NO: 96845 - protein, 10 aa, Homo Sapiens
FHLGKIEELL

SEQ ID NO: 96846 - protein, 10 aa, Homo Sapiens
FHQDSRAHLL

SEQ ID NO: 96847 - protein, 10 aa, Homo Sapiens
FHQEQGHQLL

SEQ ID NO: 96848 - protein, 10 aa, Homo Sapiens
FHSAVVGTGL

SEQ ID NO: 96849 - protein, 10 aa, Homo Sapiens
FHSDSSHNEW

SEQ ID NO: 96850 - protein, 10 aa, Homo Sapiens
FHSEDYIDFL

SEQ ID NO: 96851 - protein, 10 aa, Homo Sapiens
FHSEEQQLLL

SEQ ID NO: 96852 - protein, 10 aa, Homo Sapiens
FHSEIEDFLL

SEQ ID NO: 96853 - protein, 10 aa, Homo Sapiens
FHSESGLFLF

SEQ ID NO: 96854 - protein, 10 aa, Homo Sapiens
FHSGDDSQVL

SEQ ID NO: 96855 - protein, 10 aa, Homo Sapiens
FHSNDGGNVL

SEQ ID NO: 96856 - protein, 10 aa, Homo Sapiens
FHSNDVATLL

SEQ ID NO: 96857 - protein, 10 aa, Homo Sapiens
FHSSVNLDEF

SEQ ID NO: 96858 - protein, 10 aa, Homo Sapiens
FHSVAEEELL

SEQ ID NO: 96859 - protein, 10 aa, Homo Sapiens
FHTEALTALL

SEQ ID NO: 96860 - protein, 10 aa, Homo Sapiens
FHVEPGLQRL

SEQ ID NO: 96861 - protein, 10 aa, Homo Sapiens
FHVGAFGELW

SEQ ID NO: 96862 - protein, 10 aa, Homo Sapiens
FHVGAHVNTF

SEQ ID NO: 96863 - protein, 10 aa, Homo Sapiens
FHVIDDFVQF

SEQ ID NO: 96864 - protein, 10 aa, Homo Sapiens
FHYNGTDVSF

SEQ ID NO: 96865 - protein, 10 aa, Homo Sapiens
FLYTGEGDTV

SEQ ID NO: 96866 - protein, 10 aa, Homo Sapiens
FVDCPGHDIL

SEQ ID NO: 96867 - protein, 10 aa, Homo Sapiens
GHDEYSTQSL

SEQ ID NO: 96868 - protein, 10 aa, Homo Sapiens
GHDPHLLYTL

SEQ ID NO: 96869 - protein, 10 aa, Homo Sapiens
GHDPKEPEQL

SEQ ID NO: 96870 - protein, 10 aa, Homo Sapiens
GHDPNLSLLL

SEQ ID NO: 96871 - protein, 10 aa, Homo Sapiens
GHDPRAQGTL

SEQ ID NO: 96872 - protein, 10 aa, Homo Sapiens
GHGPAETQTL

SEQ ID NO: 96873 - protein, 10 aa, Homo Sapiens
GHIFTVNDQF

SEQ ID NO: 96874 - protein, 10 aa, Homo Sapiens
GHLSVNGEAL

SEQ ID NO: 96875 - protein, 10 aa, Homo Sapiens
GHMDSRLDEL

SEQ ID NO: 96876 - protein, 10 aa, Homo Sapiens
GHTHFGNDNF

SEQ ID NO: 96877 - protein, 10 aa, Homo Sapiens
GHVEDDYILF

SEQ ID NO: 96878 - protein, 10 aa, Homo Sapiens
GHVHIVEELL

SEQ ID NO: 96879 - protein, 10 aa, Homo Sapiens
GHVYCKTDRL

SEQ ID NO: 96880 - protein, 10 aa, Homo Sapiens
HDADRIHNEL

SEQ ID NO: 96881 - protein, 10 aa, Homo Sapiens
HDGLTVHLVI

SEQ ID NO: 96882 - protein, 10 aa, Homo Sapiens
HDPSSIYLRI

SEQ ID NO: 96883 - protein, 10 aa, Homo Sapiens
HDVYKFTNLL

SEQ ID NO: 96884 - protein, 10 aa, Homo Sapiens
HEESELANKL

SEQ ID NO: 96885 - protein, 10 aa, Homo Sapiens
HELTALANQI

SEQ ID NO: 96886 - protein, 10 aa, Homo Sapiens
HFGSVVAQTI

SEQ ID NO: 96887 - protein, 10 aa, Homo Sapiens
HHADDSFLVL

SEQ ID NO: 96888 - protein, 10 aa, Homo Sapiens
HHAEPLAAVL

SEQ ID NO: 96889 - protein, 10 aa, Homo Sapiens
HHAEYLTELL

SEQ ID NO: 96890 - protein, 10 aa, Homo Sapiens
HHAQDYGGLL

SEQ ID NO: 96891 - protein, 10 aa, Homo Sapiens
HHATHLSNTL

SEQ ID NO: 96892 - protein, 10 aa, Homo Sapiens
HHCEHLLERL

SEQ ID NO: 96893 - protein, 10 aa, Homo Sapiens
HHCNSFLEEL

SEQ ID NO: 96894 - protein, 10 aa, Homo Sapiens
HHCPDVPILL

SEQ ID NO: 96895 - protein, 10 aa, Homo Sapiens
HHCPHTPILL

SEQ ID NO: 96896 - protein, 10 aa, Homo Sapiens
HHCPNTPIIL

SEQ ID NO: 96897 - protein, 10 aa, Homo Sapiens
HHCPSTPIIL

SEQ ID NO: 96898 - protein, 10 aa, Homo Sapiens
HHCVGEKYRW

SEQ ID NO: 96899 - protein, 10 aa, Homo Sapiens
HHCYEGTVSF

SEQ ID NO: 96900 - protein, 10 aa, Homo Sapiens
HHDFHHMNFI

SEQ ID NO: 96901 - protein, 10 aa, Homo Sapiens
HHDHHDEFCL

SEQ ID NO: 96902 - protein, 10 aa, Homo Sapiens
HHDMVMDLAF

SEQ ID NO: 96903 - protein, 10 aa, Homo Sapiens
HHDNTYTVKY

SEQ ID NO: 96904 - protein, 10 aa, Homo Sapiens
HHDSHSSVIL

SEQ ID NO: 96905 - protein, 10 aa, Homo Sapiens
HHDSPALEVF

SEQ ID NO: 96906 - protein, 10 aa, Homo Sapiens
HHDYIDSPSL

SEQ ID NO: 96907 - protein, 10 aa, Homo Sapiens
HHDYSTYTFL

SEQ ID NO: 96908 - protein, 10 aa, Homo Sapiens
HHEAITCLEW

SEQ ID NO: 96909 - protein, 10 aa, Homo Sapiens
HHEFQAPFGM

SEQ ID NO: 96910 - protein, 10 aa, Homo Sapiens
HHEGYVHADL

SEQ ID NO: 96911 - protein, 10 aa, Homo Sapiens
HHEHGSQPEL

SEQ ID NO: 96912 - protein, 10 aa, Homo Sapiens
HHELHAAHLL

SEQ ID NO: 96913 - protein, 10 aa, Homo Sapiens
HHELVYEAII

SEQ ID NO: 96914 - protein, 10 aa, Homo Sapiens
HHEPGVADRL

SEQ ID NO: 96915 - protein, 10 aa, Homo Sapiens
HHFKGIIEAF

SEQ ID NO: 96916 - protein, 10 aa, Homo Sapiens
HHFLIGNNFL

SEQ ID NO: 96917 - protein, 10 aa, Homo Sapiens
HHGEEEVETF

SEQ ID NO: 96918 - protein, 10 aa, Homo Sapiens
HHGPPGPTFF

SEQ ID NO: 96919 - protein, 10 aa, Homo Sapiens
HHGTAQLQAL

SEQ ID NO: 96920 - protein, 10 aa, Homo Sapiens
HHHHAVGLNL

SEQ ID NO: 96921 - protein, 10 aa, Homo Sapiens
HHHIASVEKL

SEQ ID NO: 96922 - protein, 10 aa, Homo Sapiens
HHHQGIYEHI

SEQ ID NO: 96923 - protein, 10 aa, Homo Sapiens
HHHYEGAVVI

SEQ ID NO: 96924 - protein, 10 aa, Homo Sapiens
HHIDPALPYI

SEQ ID NO: 96925 - protein, 10 aa, Homo Sapiens
HHIDSANALY

SEQ ID NO: 96926 - protein, 10 aa, Homo Sapiens
HHIEAQQRLL

SEQ ID NO: 96927 - protein, 10 aa, Homo Sapiens
HHIEQLNDKL

SEQ ID NO: 96928 - protein, 10 aa, Homo Sapiens
HHIHTGNKPF

SEQ ID NO: 96929 - protein, 10 aa, Homo Sapiens
HHINDTDTIL

SEQ ID NO: 96930 - protein, 10 aa, Homo Sapiens
HHIPDVITYL

SEQ ID NO: 96931 - protein, 10 aa, Homo Sapiens
HHIQEIMVQL

SEQ ID NO: 96932 - protein, 10 aa, Homo Sapiens
HHISSKYDEL

SEQ ID NO: 96933 - protein, 10 aa, Homo Sapiens
HHIYDKTSVL

SEQ ID NO: 96934 - protein, 10 aa, Homo Sapiens
HHLDALDQLL

SEQ ID NO: 96935 - protein, 10 aa, Homo Sapiens
HHLEPNMDLI

SEQ ID NO: 96936 - protein, 10 aa, Homo Sapiens
HHLIPVKENL

SEQ ID NO: 96937 - protein, 10 aa, Homo Sapiens
HHLLLEVEVI

SEQ ID NO: 96938 - protein, 10 aa, Homo Sapiens
HHLLVTNELL

SEQ ID NO: 96939 - protein, 10 aa, Homo Sapiens
HHLTPDNQLL

SEQ ID NO: 96940 - protein, 10 aa, Homo Sapiens
HHSPGQTPTL

SEQ ID NO: 96941 - protein, 10 aa, Homo Sapiens
HHTKPDKYQL

SEQ ID NO: 96942 - protein, 10 aa, Homo Sapiens
HHTNPVGTEW

SEQ ID NO: 96943 - protein, 10 aa, Homo Sapiens
HHVDSLHQLF

SEQ ID NO: 96944 - protein, 10 aa, Homo Sapiens
HHVGQDGQVL

SEQ ID NO: 96945 - protein, 10 aa, Homo Sapiens
HHVKIYIDRF

SEQ ID NO: 96946 - protein, 10 aa, Homo Sapiens
HHVNATLDLI

SEQ ID NO: 96947 - protein, 10 aa, Homo Sapiens
HHVRTKLDEL

SEQ ID NO: 96948 - protein, 10 aa, Homo Sapiens
HHVSPHETYF

SEQ ID NO: 96949 - protein, 10 aa, Homo Sapiens
HHVYSGKDLI

SEQ ID NO: 96950 - protein, 10 aa, Homo Sapiens
HHYEGAVVIL

SEQ ID NO: 96951 - protein, 10 aa, Homo Sapiens
HHYFSKADHF

SEQ ID NO: 96952 - protein, 10 aa, Homo Sapiens
HHYNSHYEKF

SEQ ID NO: 96953 - protein, 10 aa, Homo Sapiens
HHYPGPGNHF

SEQ ID NO: 96954 - protein, 10 aa, Homo Sapiens
HHYSGNNIEL

SEQ ID NO: 96955 - protein, 10 aa, Homo Sapiens
HLENAGCNKI

SEQ ID NO: 96956 - protein, 10 aa, Homo Sapiens
HPISDHEATL

SEQ ID NO: 96957 - protein, 10 aa, Homo Sapiens
HQDPGQPLYI

SEQ ID NO: 96958 - protein, 10 aa, Homo Sapiens
HQHEPFLDFL

SEQ ID NO: 96959 - protein, 10 aa, Homo Sapiens
HQNDDAEVSL

SEQ ID NO: 96960 - protein, 10 aa, Homo Sapiens
HRDIESGYRI

SEQ ID NO: 96961 - protein, 10 aa, Homo Sapiens
HRDTGILDSI

SEQ ID NO: 96962 - protein, 10 aa, Homo Sapiens
HRYGDGGSTF

SEQ ID NO: 96963 - protein, 10 aa, Homo Sapiens
HSTGVASNTI

SEQ ID NO: 96964 - protein, 10 aa, Homo Sapiens
IHAFVQDTTL

SEQ ID NO: 96965 - protein, 10 aa, Homo Sapiens
IHAGIIADEL

SEQ ID NO: 96966 - protein, 10 aa, Homo Sapiens
IHDADSEARI

SEQ ID NO: 96967 - protein, 10 aa, Homo Sapiens
IHDENGNNLL

SEQ ID NO: 96968 - protein, 10 aa, Homo Sapiens
IHDGAAGVHF

SEQ ID NO: 96969 - protein, 10 aa, Homo Sapiens
IHDGTVTHTF

SEQ ID NO: 96970 - protein, 10 aa, Homo Sapiens
IHDNEVIVGI

SEQ ID NO: 96971 - protein, 10 aa, Homo Sapiens
IHDPGRGAPL

SEQ ID NO: 96972 - protein, 10 aa, Homo Sapiens
IHDPYSEFMV

SEQ ID NO: 96973 - protein, 10 aa, Homo Sapiens
IHEGENSYKF

SEQ ID NO: 96974 - protein, 10 aa, Homo Sapiens
IHGDTVQNQL

SEQ ID NO: 96975 - protein, 10 aa, Homo Sapiens
IHGGAHLNNF

SEQ ID NO: 96976 - protein, 10 aa, Homo Sapiens
IHINIGALEL

SEQ ID NO: 96977 - protein, 10 aa, Homo Sapiens
IHIRDKLAAI

SEQ ID NO: 96978 - protein, 10 aa, Homo Sapiens
IHQENMGQAL

SEQ ID NO: 96979 - protein, 10 aa, Homo Sapiens
IHSLPGCQDI

SEQ ID NO: 96980 - protein, 10 aa, Homo Sapiens
IHVEVVHDNL

SEQ ID NO: 96981 - protein, 10 aa, Homo Sapiens
IHVGQAGVQI

SEQ ID NO: 96982 - protein, 10 aa, Homo Sapiens
IHVRHVRDLL

SEQ ID NO: 96983 - protein, 10 aa, Homo Sapiens
ILDNDGDRLF

SEQ ID NO: 96984 - protein, 10 aa, Homo Sapiens
IQAGQCGNQI

SEQ ID NO: 96985 - protein, 10 aa, Homo Sapiens
KHDPTSANLL

SEQ ID NO: 96986 - protein, 10 aa, Homo Sapiens
KHVKALTNLI

SEQ ID NO: 96987 - protein, 10 aa, Homo Sapiens
KHYVGHGNAI

SEQ ID NO: 96988 - protein, 10 aa, Homo Sapiens
KLIDDQDISI

SEQ ID NO: 96989 - protein, 10 aa, Homo Sapiens
KPMEGNFEEI

SEQ ID NO: 96990 - protein, 10 aa, Homo Sapiens
LHDATRDLVL

SEQ ID NO: 96991 - protein, 10 aa, Homo Sapiens
LHDQNPDAAL

SEQ ID NO: 96992 - protein, 10 aa, Homo Sapiens
LHEGDIILKI

SEQ ID NO: 96993 - protein, 10 aa, Homo Sapiens
LHSMEVVNRL

SEQ ID NO: 96994 - protein, 10 aa, Homo Sapiens
LHTSIGNSVW

SEQ ID NO: 96995 - protein, 10 aa, Homo Sapiens
LHVTSLLDQL

SEQ ID NO: 96996 - protein, 10 aa, Homo Sapiens
LHYDSEGNKL

SEQ ID NO: 96997 - protein, 10 aa, Homo Sapiens
LNSNHVLNLI

SEQ ID NO: 96998 - protein, 10 aa, Homo Sapiens
MHAPQVADAI

SEQ ID NO: 96999 - protein, 10 aa, Homo Sapiens
MHCGTTSDQF

SEQ ID NO: 97000 - protein, 10 aa, Homo Sapiens
MHDGTTPLIL

SEQ ID NO: 97001 - protein, 10 aa, Homo Sapiens
MHDKQGEVRL

SEQ ID NO: 97002 - protein, 10 aa, Homo Sapiens
MHDYDGNNLL

SEQ ID NO: 97003 - protein, 10 aa, Homo Sapiens
MHHFIPDLLF

SEQ ID NO: 97004 - protein, 10 aa, Homo Sapiens
MHISESQQEF

SEQ ID NO: 97005 - protein, 10 aa, Homo Sapiens
MHMPAEQAFW

SEQ ID NO: 97006 - protein, 10 aa, Homo Sapiens
MHSGVDTSVL

SEQ ID NO: 97007 - protein, 10 aa, Homo Sapiens
MHSIGGVQVL

SEQ ID NO: 97008 - protein, 10 aa, Homo Sapiens
MHSPPGTQNI

SEQ ID NO: 97009 - protein, 10 aa, Homo Sapiens
MHYNQTVDIW

SEQ ID NO: 97010 - protein, 10 aa, Homo Sapiens
MKEDFDVDHF

SEQ ID NO: 97011 - protein, 10 aa, Homo Sapiens
MQCDAKFDFL

SEQ ID NO: 97012 - protein, 10 aa, Homo Sapiens
MQCQAQVDQL

SEQ ID NO: 97013 - protein, 10 aa, Homo Sapiens
MRDPDDQYKL

SEQ ID NO: 97014 - protein, 10 aa, Homo Sapiens
NHAINYVNKI

SEQ ID NO: 97015 - protein, 10 aa, Homo Sapiens
NHAPGATDAF

SEQ ID NO: 97016 - protein, 10 aa, Homo Sapiens
NHAPLSGESL

SEQ ID NO: 97017 - protein, 10 aa, Homo Sapiens
NHASYYKDAL

SEQ ID NO: 97018 - protein, 10 aa, Homo Sapiens
NHCGLLQLGL

SEQ ID NO: 97019 - protein, 10 aa, Homo Sapiens
NHDKLIPLLL

SEQ ID NO: 97020 - protein, 10 aa, Homo Sapiens
NHDLGENHHL

SEQ ID NO: 97021 - protein, 10 aa, Homo Sapiens
NHDPNTHHCL

SEQ ID NO: 97022 - protein, 10 aa, Homo Sapiens
NHDRPDVCIL

SEQ ID NO: 97023 - protein, 10 aa, Homo Sapiens
NHEARANLRL

SEQ ID NO: 97024 - protein, 10 aa, Homo Sapiens
NHECASINRI

SEQ ID NO: 97025 - protein, 10 aa, Homo Sapiens
NHEDKIRVVL

SEQ ID NO: 97026 - protein, 10 aa, Homo Sapiens
NHEFLVKPSF

SEQ ID NO: 97027 - protein, 10 aa, Homo Sapiens
NHENEDIYKL

SEQ ID NO: 97028 - protein, 10 aa, Homo Sapiens
NHFSDCHVAW

SEQ ID NO: 97029 - protein, 10 aa, Homo Sapiens
NHHLDSQSRW

SEQ ID NO: 97030 - protein, 10 aa, Homo Sapiens
NHIEPLKIQL

SEQ ID NO: 97031 - protein, 10 aa, Homo Sapiens
NHIRNGIDIL

SEQ ID NO: 97032 - protein, 10 aa, Homo Sapiens
NHIWTLFENF

SEQ ID NO: 97033 - protein, 10 aa, Homo Sapiens
NHIYVSSDDI

SEQ ID NO: 97034 - protein, 10 aa, Homo Sapiens
NHNEPFLDRI

SEQ ID NO: 97035 - protein, 10 aa, Homo Sapiens
NHQEVVELLI

SEQ ID NO: 97036 - protein, 10 aa, Homo Sapiens
NHSDPESMSL

SEQ ID NO: 97037 - protein, 10 aa, Homo Sapiens
NHSLPEADRI

SEQ ID NO: 97038 - protein, 10 aa, Homo Sapiens
NHVAAHGQSL

SEQ ID NO: 97039 - protein, 10 aa, Homo Sapiens
NHVDKLYQKL

SEQ ID NO: 97040 - protein, 10 aa, Homo Sapiens
NHVTPPNVSL

SEQ ID NO: 97041 - protein, 10 aa, Homo Sapiens
NHWFTYNETM

SEQ ID NO: 97042 - protein, 10 aa, Homo Sapiens
NHYKSNVEIF

SEQ ID NO: 97043 - protein, 10 aa, Homo Sapiens
NQIGTVNDRL

SEQ ID NO: 97044 - protein, 10 aa, Homo Sapiens
NRFEDILSLF

SEQ ID NO: 97045 - protein, 10 aa, Homo Sapiens
NRIKGCTDNL

SEQ ID NO: 97046 - protein, 10 aa, Homo Sapiens
NRLEVVKEFL

SEQ ID NO: 97047 - protein, 10 aa, Homo Sapiens
NSHTSVGNIL

SEQ ID NO: 97048 - protein, 10 aa, Homo Sapiens
QHADPPVQIL

SEQ ID NO: 97049 - protein, 10 aa, Homo Sapiens
QHAEADREQL

SEQ ID NO: 97050 - protein, 10 aa, Homo Sapiens
QHAEHIFLSF

SEQ ID NO: 97051 - protein, 10 aa, Homo Sapiens
QHAYDGKDYI

SEQ ID NO: 97052 - protein, 10 aa, Homo Sapiens
QHCDLELSIL

SEQ ID NO: 97053 - protein, 10 aa, Homo Sapiens
QHCGSEMDYL

SEQ ID NO: 97054 - protein, 10 aa, Homo Sapiens
QHDAASLLKL

SEQ ID NO: 97055 - protein, 10 aa, Homo Sapiens
QHDEPCYWRL

SEQ ID NO: 97056 - protein, 10 aa, Homo Sapiens
QHDFGHLSVF

SEQ ID NO: 97057 - protein, 10 aa, Homo Sapiens
QHDFQAPYLL

SEQ ID NO: 97058 - protein, 10 aa, Homo Sapiens
QHDGPTKNLF

SEQ ID NO: 97059 - protein, 10 aa, Homo Sapiens
QHDITGRALL

SEQ ID NO: 97060 - protein, 10 aa, Homo Sapiens
QHDLSQSAFL

SEQ ID NO: 97061 - protein, 10 aa, Homo Sapiens
QHDPGQLLGW

SEQ ID NO: 97062 - protein, 10 aa, Homo Sapiens
QHDPKAETRL

SEQ ID NO: 97063 - protein, 10 aa, Homo Sapiens
QHDVFGDISF

SEQ ID NO: 97064 - protein, 10 aa, Homo Sapiens
QHECIPQAIL

SEQ ID NO: 97065 - protein, 10 aa, Homo Sapiens
QHEERRCQYL

SEQ ID NO: 97066 - protein, 10 aa, Homo Sapiens
QHELVTTQRL

SEQ ID NO: 97067 - protein, 10 aa, Homo Sapiens
QHENEAKSFF

SEQ ID NO: 97068 - protein, 10 aa, Homo Sapiens
QHENEDIYKL

SEQ ID NO: 97069 - protein, 10 aa, Homo Sapiens
QHFDLASTTI

SEQ ID NO: 97070 - protein, 10 aa, Homo Sapiens
QHGLEEDFML

SEQ ID NO: 97071 - protein, 10 aa, Homo Sapiens
QHIAGFLDGF

SEQ ID NO: 97072 - protein, 10 aa, Homo Sapiens
QHIGTGNLYI

SEQ ID NO: 97073 - protein, 10 aa, Homo Sapiens
QHIQDGALRL

SEQ ID NO: 97074 - protein, 10 aa, Homo Sapiens
QHIQVFIDRF

SEQ ID NO: 97075 - protein, 10 aa, Homo Sapiens
QHIREELAEL

SEQ ID NO: 97076 - protein, 10 aa, Homo Sapiens
QHIYKEIVNF

SEQ ID NO: 97077 - protein, 10 aa, Homo Sapiens
QHLANIVERL

SEQ ID NO: 97078 - protein, 10 aa, Homo Sapiens
QHLKSTTNEL

SEQ ID NO: 97079 - protein, 10 aa, Homo Sapiens
QHQDSQVNAL

SEQ ID NO: 97080 - protein, 10 aa, Homo Sapiens
QHQEVKPYTL

SEQ ID NO: 97081 - protein, 10 aa, Homo Sapiens
QHQLDTILFF

SEQ ID NO: 97082 - protein, 10 aa, Homo Sapiens
QHQQEALQSL

SEQ ID NO: 97083 - protein, 10 aa, Homo Sapiens
QHQSGIVQLL

SEQ ID NO: 97084 - protein, 10 aa, Homo Sapiens
QHSASSANVF

SEQ ID NO: 97085 - protein, 10 aa, Homo Sapiens
QHSLAITNNF

SEQ ID NO: 97086 - protein, 10 aa, Homo Sapiens
QHSNVVINLI

SEQ ID NO: 97087 - protein, 10 aa, Homo Sapiens
QHSPGSADSL

SEQ ID NO: 97088 - protein, 10 aa, Homo Sapiens
QHSQEFINRL

SEQ ID NO: 97089 - protein, 10 aa, Homo Sapiens
QHSSSGLQSV

SEQ ID NO: 97090 - protein, 10 aa, Homo Sapiens
QHTDTVVNFL

SEQ ID NO: 97091 - protein, 10 aa, Homo Sapiens
QHVASVTDSF

SEQ ID NO: 97092 - protein, 10 aa, Homo Sapiens
QHVDESGLSL

SEQ ID NO: 97093 - protein, 10 aa, Homo Sapiens
QHVDTGNSYL

SEQ ID NO: 97094 - protein, 10 aa, Homo Sapiens
QHVFLVSEYL

SEQ ID NO: 97095 - protein, 10 aa, Homo Sapiens
QHVGNVQDFL

SEQ ID NO: 97096 - protein, 10 aa, Homo Sapiens
QHVKYISDAL

SEQ ID NO: 97097 - protein, 10 aa, Homo Sapiens
QHVSTHSDIL

SEQ ID NO: 97098 - protein, 10 aa, Homo Sapiens
QHYDGKADLW

SEQ ID NO: 97099 - protein, 10 aa, Homo Sapiens
QQAPSSLQKL

SEQ ID NO: 97100 - protein, 10 aa, Homo Sapiens
QQDPVIYQRL

SEQ ID NO: 97101 - protein, 10 aa, Homo Sapiens
QQDSGCKVQI

SEQ ID NO: 97102 - protein, 10 aa, Homo Sapiens
QQMEAEHNTL

SEQ ID NO: 97103 - protein, 10 aa, Homo Sapiens
QRCPIVDTFW

SEQ ID NO: 97104 - protein, 10 aa, Homo Sapiens
QRIQTEFDQL

SEQ ID NO: 97105 - protein, 10 aa, Homo Sapiens
RHDPNMKYEL

SEQ ID NO: 97106 - protein, 10 aa, Homo Sapiens
RHDPQTTNLL

SEQ ID NO: 97107 - protein, 10 aa, Homo Sapiens
RHESGASIKI

SEQ ID NO: 97108 - protein, 10 aa, Homo Sapiens
RHIEDKSTVF

SEQ ID NO: 97109 - protein, 10 aa, Homo Sapiens
RHLDMEHERL

SEQ ID NO: 97110 - protein, 10 aa, Homo Sapiens
RHLETGGQKI

SEQ ID NO: 97111 - protein, 10 aa, Homo Sapiens
RHSPAGSQAL

SEQ ID NO: 97112 - protein, 10 aa, Homo Sapiens
RHVFLFTDVL

SEQ ID NO: 97113 - protein, 10 aa, Homo Sapiens
SHAENILQIF

SEQ ID NO: 97114 - protein, 10 aa, Homo Sapiens
SHAPPTQQVL

SEQ ID NO: 97115 - protein, 10 aa, Homo Sapiens
SHCNIIHTEI

SEQ ID NO: 97116 - protein, 10 aa, Homo Sapiens
SHCQKTDLKL

SEQ ID NO: 97117 - protein, 10 aa, Homo Sapiens
SHCTFVIEAL

SEQ ID NO: 97118 - protein, 10 aa, Homo Sapiens
SHDNGSQFFF

SEQ ID NO: 97119 - protein, 10 aa, Homo Sapiens
SHDVSGALLL

SEQ ID NO: 97120 - protein, 10 aa, Homo Sapiens
SHDVSLANRM

SEQ ID NO: 97121 - protein, 10 aa, Homo Sapiens
SHEAATKAVL

SEQ ID NO: 97122 - protein, 10 aa, Homo Sapiens
SHEEPAFQNF

SEQ ID NO: 97123 - protein, 10 aa, Homo Sapiens
SHEGEILQAF

SEQ ID NO: 97124 - protein, 10 aa, Homo Sapiens
SHEGLVLTKL

SEQ ID NO: 97125 - protein, 10 aa, Homo Sapiens
SHEGSSFQMF

SEQ ID NO: 97126 - protein, 10 aa, Homo Sapiens
SHESQLGNRI

SEQ ID NO: 97127 - protein, 10 aa, Homo Sapiens
SHFEGLITTI

SEQ ID NO: 97128 - protein, 10 aa, Homo Sapiens
SHFFMGGEKF

SEQ ID NO: 97129 - protein, 10 aa, Homo Sapiens
SHFFSENEDF

SEQ ID NO: 97130 - protein, 10 aa, Homo Sapiens
SHFQEAIDFI

SEQ ID NO: 97131 - protein, 10 aa, Homo Sapiens
SHGAAGGQAF

SEQ ID NO: 97132 - protein, 10 aa, Homo Sapiens
SHGEVHLDCL

SEQ ID NO: 97133 - protein, 10 aa, Homo Sapiens
SHHEAEFQHL

SEQ ID NO: 97134 - protein, 10 aa, Homo Sapiens
SHIEDQAEQF

SEQ ID NO: 97135 - protein, 10 aa, Homo Sapiens
SHIKDFAAKL

SEQ ID NO: 97136 - protein, 10 aa, Homo Sapiens
SHIKDNEQAL

SEQ ID NO: 97137 - protein, 10 aa, Homo Sapiens
SHILISGDGL

SEQ ID NO: 97138 - protein, 10 aa, Homo Sapiens
SHIQSTSDRI

SEQ ID NO: 97139 - protein, 10 aa, Homo Sapiens
SHIRPYMDEI

SEQ ID NO: 97140 - protein, 10 aa, Homo Sapiens
SHLAWFGDSL

SEQ ID NO: 97141 - protein, 10 aa, Homo Sapiens
SHLNALEERF

SEQ ID NO: 97142 - protein, 10 aa, Homo Sapiens
SHLPPFFDCL

SEQ ID NO: 97143 - protein, 10 aa, Homo Sapiens
SHMDWEKVAF

SEQ ID NO: 97144 - protein, 10 aa, Homo Sapiens
SHMLNTGNDL

SEQ ID NO: 97145 - protein, 10 aa, Homo Sapiens
SHMQSIIDKL

SEQ ID NO: 97146 - protein, 10 aa, Homo Sapiens
SHQDITEDSF

SEQ ID NO: 97147 - protein, 10 aa, Homo Sapiens
SHSAILDQKL

SEQ ID NO: 97148 - protein, 10 aa, Homo Sapiens
SHSDDGCLKL

SEQ ID NO: 97149 - protein, 10 aa, Homo Sapiens
SHSDGSFNLL

SEQ ID NO: 97150 - protein, 10 aa, Homo Sapiens
SHSEVPFQML

SEQ ID NO: 97151 - protein, 10 aa, Homo Sapiens
SHSPFGLDSF

SEQ ID NO: 97152 - protein, 10 aa, Homo Sapiens
SHSSYVLQQL

SEQ ID NO: 97153 - protein, 10 aa, Homo Sapiens
SHVKEPRYLL

SEQ ID NO: 97154 - protein, 10 aa, Homo Sapiens
SHVKVLQEML

SEQ ID NO: 97155 - protein, 10 aa, Homo Sapiens
SHVNYFLDQF

SEQ ID NO: 97156 - protein, 10 aa, Homo Sapiens
SHVRPDRQTL

SEQ ID NO: 97157 - protein, 10 aa, Homo Sapiens
SKDPGENYNL

SEQ ID NO: 97158 - protein, 10 aa, Homo Sapiens
SLRTLTNETF

SEQ ID NO: 97159 - protein, 10 aa, Homo Sapiens
SQLDDQYSRF

SEQ ID NO: 97160 - protein, 10 aa, Homo Sapiens
SRCPHLLDFF

SEQ ID NO: 97161 - protein, 10 aa, Homo Sapiens
SRYNGEPEHI

SEQ ID NO: 97162 - protein, 10 aa, Homo Sapiens
TEIDSKWQEL

SEQ ID NO: 97163 - protein, 10 aa, Homo Sapiens
THAELEGNLV

SEQ ID NO: 97164 - protein, 10 aa, Homo Sapiens
THAKSILNSM

SEQ ID NO: 97165 - protein, 10 aa, Homo Sapiens
THAQVEDGRL

SEQ ID NO: 97166 - protein, 10 aa, Homo Sapiens
THAVPIYEGF

SEQ ID NO: 97167 - protein, 10 aa, Homo Sapiens
THCEIHPSMI

SEQ ID NO: 97168 - protein, 10 aa, Homo Sapiens
THCLPEPHLL

SEQ ID NO: 97169 - protein, 10 aa, Homo Sapiens
THCLWTDQLL

SEQ ID NO: 97170 - protein, 10 aa, Homo Sapiens
THCPPSSIEL

SEQ ID NO: 97171 - protein, 10 aa, Homo Sapiens
THDDFVMIDF

SEQ ID NO: 97172 - protein, 10 aa, Homo Sapiens
THDDSHLVSL

SEQ ID NO: 97173 - protein, 10 aa, Homo Sapiens
THDDTGARYL

SEQ ID NO: 97174 - protein, 10 aa, Homo Sapiens
THDELIQLVL

SEQ ID NO: 97175 - protein, 10 aa, Homo Sapiens
THDPDPETPL

SEQ ID NO: 97176 - protein, 10 aa, Homo Sapiens
THDQSISQKL

SEQ ID NO: 97177 - protein, 10 aa, Homo Sapiens
THDQVLKTRL

SEQ ID NO: 97178 - protein, 10 aa, Homo Sapiens
THDSVTVLLF

SEQ ID NO: 97179 - protein, 10 aa, Homo Sapiens
THDVPYHDYF

SEQ ID NO: 97180 - protein, 10 aa, Homo Sapiens
THEDAVAAML

SEQ ID NO: 97181 - protein, 10 aa, Homo Sapiens
THEDPVIAVF

SEQ ID NO: 97182 - protein, 10 aa, Homo Sapiens
THEEGSYLFW

SEQ ID NO: 97183 - protein, 10 aa, Homo Sapiens
THEFFEAIGF

SEQ ID NO: 97184 - protein, 10 aa, Homo Sapiens
THEFTVEQCF

SEQ ID NO: 97185 - protein, 10 aa, Homo Sapiens
THENIYLWDI

SEQ ID NO: 97186 - protein, 10 aa, Homo Sapiens
THENLTYLQL

SEQ ID NO: 97187 - protein, 10 aa, Homo Sapiens
THENPGLYAL

SEQ ID NO: 97188 - protein, 10 aa, Homo Sapiens
THEPGEEASL

SEQ ID NO: 97189 - protein, 10 aa, Homo Sapiens
THEQTDGATL

SEQ ID NO: 97190 - protein, 10 aa, Homo Sapiens
THFDTIFEVF

SEQ ID NO: 97191 - protein, 10 aa, Homo Sapiens
THFESKTELL

SEQ ID NO: 97192 - protein, 10 aa, Homo Sapiens
THFQQGHEEL

SEQ ID NO: 97193 - protein, 10 aa, Homo Sapiens
THFSAGVLQL

SEQ ID NO: 97194 - protein, 10 aa, Homo Sapiens
THFTGNEVGF

SEQ ID NO: 97195 - protein, 10 aa, Homo Sapiens
THHKETYTEI

SEQ ID NO: 97196 - protein, 10 aa, Homo Sapiens
THIADGVFRF

SEQ ID NO: 97197 - protein, 10 aa, Homo Sapiens
THICPVYEGF

SEQ ID NO: 97198 - protein, 10 aa, Homo Sapiens
THIPNIFQKI

SEQ ID NO: 97199 - protein, 10 aa, Homo Sapiens
THISALLQYI

SEQ ID NO: 97200 - protein, 10 aa, Homo Sapiens
THISDSIIEI

SEQ ID NO: 97201 - protein, 10 aa, Homo Sapiens
THISPYKDLL

SEQ ID NO: 97202 - protein, 10 aa, Homo Sapiens
THISSQNSEL

SEQ ID NO: 97203 - protein, 10 aa, Homo Sapiens
THISSSGQNL

SEQ ID NO: 97204 - protein, 10 aa, Homo Sapiens
THITAQTAVL

SEQ ID NO: 97205 - protein, 10 aa, Homo Sapiens
THLGGTNLDF

SEQ ID NO: 97206 - protein, 10 aa, Homo Sapiens
THLSGLLDIF

SEQ ID NO: 97207 - protein, 10 aa, Homo Sapiens
THLTSMFEYL

SEQ ID NO: 97208 - protein, 10 aa, Homo Sapiens
THMSPSWTLL

SEQ ID NO: 97209 - protein, 10 aa, Homo Sapiens
THNEGLNQKL

SEQ ID NO: 97210 - protein, 10 aa, Homo Sapiens
THNPSQAEKL

SEQ ID NO: 97211 - protein, 10 aa, Homo Sapiens
THQEAVSALL

SEQ ID NO: 97212 - protein, 10 aa, Homo Sapiens
THQSGSLALL

SEQ ID NO: 97213 - protein, 10 aa, Homo Sapiens
THSAVDNILL

SEQ ID NO: 97214 - protein, 10 aa, Homo Sapiens
THSFIWNQDI

SEQ ID NO: 97215 - protein, 10 aa, Homo Sapiens
THSHSWNQHL

SEQ ID NO: 97216 - protein, 10 aa, Homo Sapiens
THSIPENTNF

SEQ ID NO: 97217 - protein, 10 aa, Homo Sapiens
THSLILHDLI

SEQ ID NO: 97218 - protein, 10 aa, Homo Sapiens
THSSVVLQGF

SEQ ID NO: 97219 - protein, 10 aa, Homo Sapiens
THTDVLKDGF

SEQ ID NO: 97220 - protein, 10 aa, Homo Sapiens
THTETGKVLF

SEQ ID NO: 97221 - protein, 10 aa, Homo Sapiens
THTPILRDFF

SEQ ID NO: 97222 - protein, 10 aa, Homo Sapiens
THTSPEDVSF

SEQ ID NO: 97223 - protein, 10 aa, Homo Sapiens
THVEDLNAKW

SEQ ID NO: 97224 - protein, 10 aa, Homo Sapiens
THVKEQLETL

SEQ ID NO: 97225 - protein, 10 aa, Homo Sapiens
THVQSQLEKL

SEQ ID NO: 97226 - protein, 10 aa, Homo Sapiens
THVSNGCQLL

SEQ ID NO: 97227 - protein, 10 aa, Homo Sapiens
THVTTMGQRL

SEQ ID NO: 97228 - protein, 10 aa, Homo Sapiens
THYDHVLIEL

SEQ ID NO: 97229 - protein, 10 aa, Homo Sapiens
TLASAGFDRL

SEQ ID NO: 97230 - protein, 10 aa, Homo Sapiens
TLIQSFTDRL

SEQ ID NO: 97231 - protein, 10 aa, Homo Sapiens
TQDFPESNRL

SEQ ID NO: 97232 - protein, 10 aa, Homo Sapiens
TQDPHVNAFF

SEQ ID NO: 97233 - protein, 10 aa, Homo Sapiens
TQEEPYSDII

SEQ ID NO: 97234 - protein, 10 aa, Homo Sapiens
TQIGGERYNF

SEQ ID NO: 97235 - protein, 10 aa, Homo Sapiens
TQLANEEDNP

SEQ ID NO: 97236 - protein, 10 aa, Homo Sapiens
TRAIETTDII

SEQ ID NO: 97237 - protein, 10 aa, Homo Sapiens
TRDIYKELLI

SEQ ID NO: 97238 - protein, 10 aa, Homo Sapiens
TRLDIISEDI

SEQ ID NO: 97239 - protein, 10 aa, Homo Sapiens
TTNHVEVNFI

SEQ ID NO: 97240 - protein, 10 aa, Homo Sapiens
TVSCSKMSSI

SEQ ID NO: 97241 - protein, 10 aa, Homo Sapiens
VEGGPNVISI

SEQ ID NO: 97242 - protein, 10 aa, Homo Sapiens
VHAGVVSNTL

SEQ ID NO: 97243 - protein, 10 aa, Homo Sapiens
VHAPPMQLGF

SEQ ID NO: 97244 - protein, 10 aa, Homo Sapiens
VHCGIIEPLM

SEQ ID NO: 97245 - protein, 10 aa, Homo Sapiens
VHDFTKNVGL

SEQ ID NO: 97246 - protein, 10 aa, Homo Sapiens
VHEDIVAVEL

SEQ ID NO: 97247 - protein, 10 aa, Homo Sapiens
VHEDRSIQQI

SEQ ID NO: 97248 - protein, 10 aa, Homo Sapiens
VHIADGLDYI

SEQ ID NO: 97249 - protein, 10 aa, Homo Sapiens
VHNIPGFDSI

SEQ ID NO: 97250 - protein, 10 aa, Homo Sapiens
VHSFEEGSEL

SEQ ID NO: 97251 - protein, 10 aa, Homo Sapiens
VHSNIATEHI

SEQ ID NO: 97252 - protein, 10 aa, Homo Sapiens
VHSTPGANVL

SEQ ID NO: 97253 - protein, 10 aa, Homo Sapiens
VHVNVSGNEL

SEQ ID NO: 97254 - protein, 10 aa, Homo Sapiens
VNVTYGHMPV

SEQ ID NO: 97255 - protein, 10 aa, Homo Sapiens
VPDSSGPERI

SEQ ID NO: 97256 - protein, 10 aa, Homo Sapiens
WHDEQGHNGL

SEQ ID NO: 97257 - protein, 10 aa, Homo Sapiens
WHEEMKNQII

SEQ ID NO: 97258 - protein, 10 aa, Homo Sapiens
WHFYDDREFI

SEQ ID NO: 97259 - protein, 10 aa, Homo Sapiens
WHIYSEEEYL

SEQ ID NO: 97260 - protein, 10 aa, Homo Sapiens
WHLEEFGQAF

SEQ ID NO: 97261 - protein, 10 aa, Homo Sapiens
WHQTGGEVTI

SEQ ID NO: 97262 - protein, 10 aa, Homo Sapiens
YHAEEVEERF

SEQ ID NO: 97263 - protein, 10 aa, Homo Sapiens
YHAKDPNNLF

SEQ ID NO: 97264 - protein, 10 aa, Homo Sapiens
YHAKLENARL

SEQ ID NO: 97265 - protein, 10 aa, Homo Sapiens
YHAPPRLHHL

SEQ ID NO: 97266 - protein, 10 aa, Homo Sapiens
YHAPTDCATI

SEQ ID NO: 97267 - protein, 10 aa, Homo Sapiens
YHAQPLEDNL

SEQ ID NO: 97268 - protein, 10 aa, Homo Sapiens
YHDEADQSAL

SEQ ID NO: 97269 - protein, 10 aa, Homo Sapiens
YHDFSVQNFI

SEQ ID NO: 97270 - protein, 10 aa, Homo Sapiens
YHDGNRNPKF

SEQ ID NO: 97271 - protein, 10 aa, Homo Sapiens
YHDISGCYIL

SEQ ID NO: 97272 - protein, 10 aa, Homo Sapiens
YHDNHIVIRW

SEQ ID NO: 97273 - protein, 10 aa, Homo Sapiens
YHDPMLKLSI

SEQ ID NO: 97274 - protein, 10 aa, Homo Sapiens
YHDYGHLELI

SEQ ID NO: 97275 - protein, 10 aa, Homo Sapiens
YHEGSAPALI

SEQ ID NO: 97276 - protein, 10 aa, Homo Sapiens
YHEGYACTSI

SEQ ID NO: 97277 - protein, 10 aa, Homo Sapiens
YHEQLSVAEI

SEQ ID NO: 97278 - protein, 10 aa, Homo Sapiens
YHEQLTVAEI

SEQ ID NO: 97279 - protein, 10 aa, Homo Sapiens
YHHEAGVTAL

SEQ ID NO: 97280 - protein, 10 aa, Homo Sapiens
YHHHGVGQGF

SEQ ID NO: 97281 - protein, 10 aa, Homo Sapiens
YHIDVGTQTF

SEQ ID NO: 97282 - protein, 10 aa, Homo Sapiens
YHILVDTNFI

SEQ ID NO: 97283 - protein, 10 aa, Homo Sapiens
YHISLEHEIL

SEQ ID NO: 97284 - protein, 10 aa, Homo Sapiens
YHLDEKTSRF

SEQ ID NO: 97285 - protein, 10 aa, Homo Sapiens
YHNEVEIEKL

SEQ ID NO: 97286 - protein, 10 aa, Homo Sapiens
YHQNVESHLL

SEQ ID NO: 97287 - protein, 10 aa, Homo Sapiens
YHQPAPIAQL

SEQ ID NO: 97288 - protein, 10 aa, Homo Sapiens
YHQSASEHGL

SEQ ID NO: 97289 - protein, 10 aa, Homo Sapiens
YHSDEYIKFL

SEQ ID NO: 97290 - protein, 10 aa, Homo Sapiens
YHSEESQIYL

SEQ ID NO: 97291 - protein, 10 aa, Homo Sapiens
YHSPEEEISL

SEQ ID NO: 97292 - protein, 10 aa, Homo Sapiens
YHTMDKNQKL

SEQ ID NO: 97293 - protein, 10 aa, Homo Sapiens
YHVASDTEKI

SEQ ID NO: 97294 - protein, 10 aa, Homo Sapiens
YHVEPHPEHL

SEQ ID NO: 97295 - protein, 10 aa, Homo Sapiens
YHVPSSDQNI

SEQ ID NO: 97296 - protein, 10 aa, Homo Sapiens
YHVSEKPYGI

SEQ ID NO: 97297 - protein, 10 aa, Homo Sapiens
YHYPSCDLYF

SEQ ID NO: 97298 - protein, 10 aa, Homo Sapiens
YQDPSNAQFL

SEQ ID NO: 97299 - protein, 10 aa, Homo Sapiens
YQQQGRLDKL

SEQ ID NO: 97300 - protein, 11 aa, Homo Sapiens
AHAAAGPGEVL

SEQ ID NO: 97301 - protein, 11 aa, Homo Sapiens
AHAPPGHHSVI

SEQ ID NO: 97302 - protein, 11 aa, Homo Sapiens
AHAQSIGMNRL

SEQ ID NO: 97303 - protein, 11 aa, Homo Sapiens
AHAQVSITNEI

SEQ ID NO: 97304 - protein, 11 aa, Homo Sapiens
AHCDLGAHHSL

SEQ ID NO: 97305 - protein, 11 aa, Homo Sapiens
AHDDSVMYLQF

SEQ ID NO: 97306 - protein, 11 aa, Homo Sapiens
AHDESPGNNVV

SEQ ID NO: 97307 - protein, 11 aa, Homo Sapiens
AHDGSATYLRF

SEQ ID NO: 97308 - protein, 11 aa, Homo Sapiens
AHDPQTLEQNI

SEQ ID NO: 97309 - protein, 11 aa, Homo Sapiens
AHDTDPKALRL

SEQ ID NO: 97310 - protein, 11 aa, Homo Sapiens
AHEENSQIYKF

SEQ ID NO: 97311 - protein, 11 aa, Homo Sapiens
AHEGTLAAITF

SEQ ID NO: 97312 - protein, 11 aa, Homo Sapiens
AHELVTSKIAL

SEQ ID NO: 97313 - protein, 11 aa, Homo Sapiens
AHEPVNELSAL

SEQ ID NO: 97314 - protein, 11 aa, Homo Sapiens
AHESAVTGLSL

SEQ ID NO: 97315 - protein, 11 aa, Homo Sapiens
AHGGNDVSNAI

SEQ ID NO: 97316 - protein, 11 aa, Homo Sapiens
AHLNPSDTEEW

SEQ ID NO: 97317 - protein, 11 aa, Homo Sapiens
AHLPASGLDIF

SEQ ID NO: 97318 - protein, 11 aa, Homo Sapiens
AHNLADNVQSI

SEQ ID NO: 97319 - protein, 11 aa, Homo Sapiens
AHSSDVLENVF

SEQ ID NO: 97320 - protein, 11 aa, Homo Sapiens
AHVPNFIFDEF

SEQ ID NO: 97321 - protein, 11 aa, Homo Sapiens
AHYADVLGLLL

SEQ ID NO: 97322 - protein, 11 aa, Homo Sapiens
ARWWGGAIEEF

SEQ ID NO: 97323 - protein, 11 aa, Homo Sapiens
CQASFPGANII

SEQ ID NO: 97324 - protein, 11 aa, Homo Sapiens
DHAGEYGANRI

SEQ ID NO: 97325 - protein, 11 aa, Homo Sapiens
DHDKTSLIQKM

SEQ ID NO: 97326 - protein, 11 aa, Homo Sapiens
DHDRYSGNVTI

SEQ ID NO: 97327 - protein, 11 aa, Homo Sapiens
DHIKGLETHLI

SEQ ID NO: 97328 - protein, 11 aa, Homo Sapiens
DHYKPGSSETL

SEQ ID NO: 97329 - protein, 11 aa, Homo Sapiens
DHYSQQMAQQL

SEQ ID NO: 97330 - protein, 11 aa, Homo Sapiens
EHADFAGVERL

SEQ ID NO: 97331 - protein, 11 aa, Homo Sapiens
EHAKINETDTF

SEQ ID NO: 97332 - protein, 11 aa, Homo Sapiens
EHAQNTLNQLL

SEQ ID NO: 97333 - protein, 11 aa, Homo Sapiens
EHCTRGSLQDL

SEQ ID NO: 97334 - protein, 11 aa, Homo Sapiens
EHCWVGELNGL

SEQ ID NO: 97335 - protein, 11 aa, Homo Sapiens
EHDPITKNKQV

SEQ ID NO: 97336 - protein, 11 aa, Homo Sapiens
EHDPSSIYLRI

SEQ ID NO: 97337 - protein, 11 aa, Homo Sapiens
EHEDTDKYRQL

SEQ ID NO: 97338 - protein, 11 aa, Homo Sapiens
EHEHVVECISW

SEQ ID NO: 97339 - protein, 11 aa, Homo Sapiens
EHILPINSEVL

SEQ ID NO: 97340 - protein, 11 aa, Homo Sapiens
EHINEGETAML

SEQ ID NO: 97341 - protein, 11 aa, Homo Sapiens
EHLKERLANEL

SEQ ID NO: 97342 - protein, 11 aa, Homo Sapiens
EHLPARLNEAL

SEQ ID NO: 97343 - protein, 11 aa, Homo Sapiens
EHLRKLEAERL

SEQ ID NO: 97344 - protein, 11 aa, Homo Sapiens
EHMGQLLHQLL

SEQ ID NO: 97345 - protein, 11 aa, Homo Sapiens
EHMPVGPDAIL

SEQ ID NO: 97346 - protein, 11 aa, Homo Sapiens
EHQGSHLTQKL

SEQ ID NO: 97347 - protein, 11 aa, Homo Sapiens
EHQPDNIKALF

SEQ ID NO: 97348 - protein, 11 aa, Homo Sapiens
EHQPPYIIAVL

SEQ ID NO: 97349 - protein, 11 aa, Homo Sapiens
EHQSNGGALVL

SEQ ID NO: 97350 - protein, 11 aa, Homo Sapiens
EHQSPVRFDTF

SEQ ID NO: 97351 - protein, 11 aa, Homo Sapiens
EHSGGRDLDSL

SEQ ID NO: 97352 - protein, 11 aa, Homo Sapiens
EHSKNVNTEKL

SEQ ID NO: 97353 - protein, 11 aa, Homo Sapiens
EHSPSDLEAHF

SEQ ID NO: 97354 - protein, 11 aa, Homo Sapiens
EHSPVPAGFGF

SEQ ID NO: 97355 - protein, 11 aa, Homo Sapiens
EHVRIHTQEQL

SEQ ID NO: 97356 - protein, 11 aa, Homo Sapiens
EHWDDKAKSLL

SEQ ID NO: 97357 - protein, 11 aa, Homo Sapiens
EHYADQLKEYL

SEQ ID NO: 97358 - protein, 11 aa, Homo Sapiens
EKASGYLQDSL

SEQ ID NO: 97359 - protein, 11 aa, Homo Sapiens
ERYDCKGGELF

SEQ ID NO: 97360 - protein, 11 aa, Homo Sapiens
FHCEPANILYI

SEQ ID NO: 97361 - protein, 11 aa, Homo Sapiens
FHDCEDAAREL

SEQ ID NO: 97362 - protein, 11 aa, Homo Sapiens
FHDDQGGVTRW

SEQ ID NO: 97363 - protein, 11 aa, Homo Sapiens
FHDKGSLTDYL

SEQ ID NO: 97364 - protein, 11 aa, Homo Sapiens
FHDPESAQQHF

SEQ ID NO: 97365 - protein, 11 aa, Homo Sapiens
FHDPNAIYSEL

SEQ ID NO: 97366 - protein, 11 aa, Homo Sapiens
FHEDDNQKSAF

SEQ ID NO: 97367 - protein, 11 aa, Homo Sapiens
FHEDPYSGEKL

SEQ ID NO: 97368 - protein, 11 aa, Homo Sapiens
FHEEYSRLYQL

SEQ ID NO: 97369 - protein, 11 aa, Homo Sapiens
FHEHPDLIVGF

SEQ ID NO: 97370 - protein, 11 aa, Homo Sapiens
FHELTALANQI

SEQ ID NO: 97371 - protein, 11 aa, Homo Sapiens
FHFTNRDCDSL

SEQ ID NO: 97372 - protein, 11 aa, Homo Sapiens
FHGDSEIDQLF

SEQ ID NO: 97373 - protein, 11 aa, Homo Sapiens
FHHGDGPGNAV

SEQ ID NO: 97374 - protein, 11 aa, Homo Sapiens
FHILSGQGDVL

SEQ ID NO: 97375 - protein, 11 aa, Homo Sapiens
FHLENSGWQKI

SEQ ID NO: 97376 - protein, 11 aa, Homo Sapiens
FHLTPLSYETL

SEQ ID NO: 97377 - protein, 11 aa, Homo Sapiens
FHNDIDSNSTI

SEQ ID NO: 97378 - protein, 11 aa, Homo Sapiens
FHQDPESYHTL

SEQ ID NO: 97379 - protein, 11 aa, Homo Sapiens
FHQPASAEQLL

SEQ ID NO: 97380 - protein, 11 aa, Homo Sapiens
FHSGGYGQDAL

SEQ ID NO: 97381 - protein, 11 aa, Homo Sapiens
FHVSPDPSVTL

SEQ ID NO: 97382 - protein, 11 aa, Homo Sapiens
FQAVHVQGEDL

SEQ ID NO: 97383 - protein, 11 aa, Homo Sapiens
FQENSTIGQKI

SEQ ID NO: 97384 - protein, 11 aa, Homo Sapiens
FVCDLTQADRL

SEQ ID NO: 97385 - protein, 11 aa, Homo Sapiens
GASSELQAVLS

SEQ ID NO: 97386 - protein, 11 aa, Homo Sapiens
GHDGTTESNCF

SEQ ID NO: 97387 - protein, 11 aa, Homo Sapiens
GHDPSSGVQEF

SEQ ID NO: 97388 - protein, 11 aa, Homo Sapiens
GHLDDPASQEI

SEQ ID NO: 97389 - protein, 11 aa, Homo Sapiens
GHQLPVKEATL

SEQ ID NO: 97390 - protein, 11 aa, Homo Sapiens
GHSDYINGNFI

SEQ ID NO: 97391 - protein, 11 aa, Homo Sapiens
GHSYPGSTQSL

SEQ ID NO: 97392 - protein, 11 aa, Homo Sapiens
GHVVPTILEKF

SEQ ID NO: 97393 - protein, 11 aa, Homo Sapiens
HHAEESTAMGF

SEQ ID NO: 97394 - protein, 11 aa, Homo Sapiens
HHAESKNGWTL

SEQ ID NO: 97395 - protein, 11 aa, Homo Sapiens
HHAQDLGVVNL

SEQ ID NO: 97396 - protein, 11 aa, Homo Sapiens
HHAQDYGGLLL

SEQ ID NO: 97397 - protein, 11 aa, Homo Sapiens
HHAVETVVNML

SEQ ID NO: 97398 - protein, 11 aa, Homo Sapiens
HHCPDVPILLV

SEQ ID NO: 97399 - protein, 11 aa, Homo Sapiens
HHCPSTPIILV

SEQ ID NO: 97400 - protein, 11 aa, Homo Sapiens
HHDASTFTINI

SEQ ID NO: 97401 - protein, 11 aa, Homo Sapiens
HHDDYCVWYSL

SEQ ID NO: 97402 - protein, 11 aa, Homo Sapiens
HHDDYTQNHSF

SEQ ID NO: 97403 - protein, 11 aa, Homo Sapiens
HHDESVLTNVF

SEQ ID NO: 97404 - protein, 11 aa, Homo Sapiens
HHDHAVVSGRL

SEQ ID NO: 97405 - protein, 11 aa, Homo Sapiens
HHDIHPINQYL

SEQ ID NO: 97406 - protein, 11 aa, Homo Sapiens
HHDIITDVATF

SEQ ID NO: 97407 - protein, 11 aa, Homo Sapiens
HHDKVQSLCYL

SEQ ID NO: 97408 - protein, 11 aa, Homo Sapiens
HHDNQSAVAEL

SEQ ID NO: 97409 - protein, 11 aa, Homo Sapiens
HHDVNELLSLL

SEQ ID NO: 97410 - protein, 11 aa, Homo Sapiens
HHEDGSQHIGL

SEQ ID NO: 97411 - protein, 11 aa, Homo Sapiens
HHEDRQMNTNW

SEQ ID NO: 97412 - protein, 11 aa, Homo Sapiens
HHEDYQFCYSF

SEQ ID NO: 97413 - protein, 11 aa, Homo Sapiens
HHEEIWSANSL

SEQ ID NO: 97414 - protein, 11 aa, Homo Sapiens
HHEESVREASL

SEQ ID NO: 97415 - protein, 11 aa, Homo Sapiens
HHENTHTGVKF

SEQ ID NO: 97416 - protein, 11 aa, Homo Sapiens
HHGDFSAEEVF

SEQ ID NO: 97417 - protein, 11 aa, Homo Sapiens
HHHGTSILTLF

SEQ ID NO: 97418 - protein, 11 aa, Homo Sapiens
HHHLGSVILIF

SEQ ID NO: 97419 - protein, 11 aa, Homo Sapiens
HHHYEGAVVIL

SEQ ID NO: 97420 - protein, 11 aa, Homo Sapiens
HHIPEQTTQLL

SEQ ID NO: 97421 - protein, 11 aa, Homo Sapiens
HHIVEDFLTDW

SEQ ID NO: 97422 - protein, 11 aa, Homo Sapiens
HHIYDKTSVLF

SEQ ID NO: 97423 - protein, 11 aa, Homo Sapiens
HHQVEEMLQKI

SEQ ID NO: 97424 - protein, 11 aa, Homo Sapiens
HHQYNPKFQTL

SEQ ID NO: 97425 - protein, 11 aa, Homo Sapiens
HHQYPSRSSGL

SEQ ID NO: 97426 - protein, 11 aa, Homo Sapiens
HHTEEALRELF

SEQ ID NO: 97427 - protein, 11 aa, Homo Sapiens
HHVAESSLSRL

SEQ ID NO: 97428 - protein, 11 aa, Homo Sapiens
HHVAFLEADVL

SEQ ID NO: 97429 - protein, 11 aa, Homo Sapiens
HHVIARHEYTF

SEQ ID NO: 97430 - protein, 11 aa, Homo Sapiens
HHYPGPGNHFW

SEQ ID NO: 97431 - protein, 11 aa, Homo Sapiens
HHYTEAERSLL

SEQ ID NO: 97432 - protein, 11 aa, Homo Sapiens
HQDESSSFHHL

SEQ ID NO: 97433 - protein, 11 aa, Homo Sapiens
HQDTSSVGNFI

SEQ ID NO: 97434 - protein, 11 aa, Homo Sapiens
HQIEAVDGEEL

SEQ ID NO: 97435 - protein, 11 aa, Homo Sapiens
HRAVEEEESRF

SEQ ID NO: 97436 - protein, 11 aa, Homo Sapiens
HRDELEGTYKI

SEQ ID NO: 97437 - protein, 11 aa, Homo Sapiens
HRKEVDYSDSL

SEQ ID NO: 97438 - protein, 11 aa, Homo Sapiens
HRLQVSYEEYL

SEQ ID NO: 97439 - protein, 11 aa, Homo Sapiens
IHASQQRWQQL

SEQ ID NO: 97440 - protein, 11 aa, Homo Sapiens
IHDDQDYLHSL

SEQ ID NO: 97441 - protein, 11 aa, Homo Sapiens
IHDGAAGVHFI

SEQ ID NO: 97442 - protein, 11 aa, Homo Sapiens
IHDGLTVHLVI

SEQ ID NO: 97443 - protein, 11 aa, Homo Sapiens
IHDNSVLRNFL

SEQ ID NO: 97444 - protein, 11 aa, Homo Sapiens
IHEEFSEHALL

SEQ ID NO: 97445 - protein, 11 aa, Homo Sapiens
IHEPEPHILLF

SEQ ID NO: 97446 - protein, 11 aa, Homo Sapiens
IHGDIKSSNVL

SEQ ID NO: 97447 - protein, 11 aa, Homo Sapiens
IHGDLTTSNML

SEQ ID NO: 97448 - protein, 11 aa, Homo Sapiens
IHIRPGQLDVL

SEQ ID NO: 97449 - protein, 11 aa, Homo Sapiens
IHLISSEANEI

SEQ ID NO: 97450 - protein, 11 aa, Homo Sapiens
IHNDDGVWLRL

SEQ ID NO: 97451 - protein, 11 aa, Homo Sapiens
IHSDPHPGNVL

SEQ ID NO: 97452 - protein, 11 aa, Homo Sapiens
IHYDDKAIERL

SEQ ID NO: 97453 - protein, 11 aa, Homo Sapiens
ILADLHSADQL

SEQ ID NO: 97454 - protein, 11 aa, Homo Sapiens
ILILDNDGDRL

SEQ ID NO: 97455 - protein, 11 aa, Homo Sapiens
ILINDAGEVRL

SEQ ID NO: 97456 - protein, 11 aa, Homo Sapiens
ILLDDTGLAYI

SEQ ID NO: 97457 - protein, 11 aa, Homo Sapiens
IPDGSEKGDFI

SEQ ID NO: 97458 - protein, 11 aa, Homo Sapiens
IPDLHSPMSPI

SEQ ID NO: 97459 - protein, 11 aa, Homo Sapiens
IQQRHGLANSI

SEQ ID NO: 97460 - protein, 11 aa, Homo Sapiens
IRDSLEKSDQL

SEQ ID NO: 97461 - protein, 11 aa, Homo Sapiens
IREWGSGSDTL

SEQ ID NO: 97462 - protein, 11 aa, Homo Sapiens
KHDDTTISSWL

SEQ ID NO: 97463 - protein, 11 aa, Homo Sapiens
KHENVVNLIEI

SEQ ID NO: 97464 - protein, 11 aa, Homo Sapiens
KHLPTISSETL

SEQ ID NO: 97465 - protein, 11 aa, Homo Sapiens
KHSEGVIIQQV

SEQ ID NO: 97466 - protein, 11 aa, Homo Sapiens
KHSMILLENQI

SEQ ID NO: 97467 - protein, 11 aa, Homo Sapiens
KHSNLLYVNVI

SEQ ID NO: 97468 - protein, 11 aa, Homo Sapiens
LEDPQTHSNRI

SEQ ID NO: 97469 - protein, 11 aa, Homo Sapiens
LHADVVPNATI

SEQ ID NO: 97470 - protein, 11 aa, Homo Sapiens
LHDADRIHNEL

SEQ ID NO: 97471 - protein, 11 aa, Homo Sapiens
LHDIETENQKL

SEQ ID NO: 97472 - protein, 11 aa, Homo Sapiens
LHDIIHTKETL

SEQ ID NO: 97473 - protein, 11 aa, Homo Sapiens
LHDKNGKSYRF

SEQ ID NO: 97474 - protein, 11 aa, Homo Sapiens
LHDQSIGTQQW

SEQ ID NO: 97475 - protein, 11 aa, Homo Sapiens
LHEGLFQSQLL

SEQ ID NO: 97476 - protein, 11 aa, Homo Sapiens
LHIEDGDSIRF

SEQ ID NO: 97477 - protein, 11 aa, Homo Sapiens
LHVLDVAGNRL

SEQ ID NO: 97478 - protein, 11 aa, Homo Sapiens
LHVNPYIGLFF

SEQ ID NO: 97479 - protein, 11 aa, Homo Sapiens
LPIDVTEGEVI

SEQ ID NO: 97480 - protein, 11 aa, Homo Sapiens
LPVRLPEGEAL

SEQ ID NO: 97481 - protein, 11 aa, Homo Sapiens
MHANAQRTDAL

SEQ ID NO: 97482 - protein, 11 aa, Homo Sapiens
MHAPQVADAIL

SEQ ID NO: 97483 - protein, 11 aa, Homo Sapiens
MHAQSAELQRL

SEQ ID NO: 97484 - protein, 11 aa, Homo Sapiens
MHCDADGLHSL

SEQ ID NO: 97485 - protein, 11 aa, Homo Sapiens
MHCGTTSDQFL

SEQ ID NO: 97486 - protein, 11 aa, Homo Sapiens
MHDEKVDLWSL

SEQ ID NO: 97487 - protein, 11 aa, Homo Sapiens
MHDGTIRDLAF

SEQ ID NO: 97488 - protein, 11 aa, Homo Sapiens
MHDLNTDQENL

SEQ ID NO: 97489 - protein, 11 aa, Homo Sapiens
MHDLSAYSDQF

SEQ ID NO: 97490 - protein, 11 aa, Homo Sapiens
MHDVYGMLLNL

SEQ ID NO: 97491 - protein, 11 aa, Homo Sapiens
MHFDPGFEEQL

SEQ ID NO: 97492 - protein, 11 aa, Homo Sapiens
MHGDSEYNIMF

SEQ ID NO: 97493 - protein, 11 aa, Homo Sapiens
MHIKSIILEGF

SEQ ID NO: 97494 - protein, 11 aa, Homo Sapiens
MHIQDPASQRL

SEQ ID NO: 97495 - protein, 11 aa, Homo Sapiens
MHISESQQEFF

SEQ ID NO: 97496 - protein, 11 aa, Homo Sapiens
MHLLPNFAECW

SEQ ID NO: 97497 - protein, 11 aa, Homo Sapiens
MHQAALLGQAL

SEQ ID NO: 97498 - protein, 11 aa, Homo Sapiens
MHSGPVVAMVW

SEQ ID NO: 97499 - protein, 11 aa, Homo Sapiens
MKCQYVGADVL

SEQ ID NO: 97500 - protein, 11 aa, Homo Sapiens
MKHGDLHAFLL

SEQ ID NO: 97501 - protein, 11 aa, Homo Sapiens
MKVNNNLSDEL

SEQ ID NO: 97502 - protein, 11 aa, Homo Sapiens
MRDSTGAGNSL

SEQ ID NO: 97503 - protein, 11 aa, Homo Sapiens
MRLDDSVFEGL

SEQ ID NO: 97504 - protein, 11 aa, Homo Sapiens
NHADERVLQAL

SEQ ID NO: 97505 - protein, 11 aa, Homo Sapiens
NHAPWSISDYF

SEQ ID NO: 97506 - protein, 11 aa, Homo Sapiens
NHCYIAILNII

SEQ ID NO: 97507 - protein, 11 aa, Homo Sapiens
NHDDLMSVVVF

SEQ ID NO: 97508 - protein, 11 aa, Homo Sapiens
NHDDPTGADAL

SEQ ID NO: 97509 - protein, 11 aa, Homo Sapiens
NHDDSRALYAI

SEQ ID NO: 97510 - protein, 11 aa, Homo Sapiens
NHDQHGRNSLL

SEQ ID NO: 97511 - protein, 11 aa, Homo Sapiens
NHDRPDVCILF

SEQ ID NO: 97512 - protein, 11 aa, Homo Sapiens
NHEASELANYF

SEQ ID NO: 97513 - protein, 11 aa, Homo Sapiens
NHEEATLGAFL

SEQ ID NO: 97514 - protein, 11 aa, Homo Sapiens
NHINITQSDKF

SEQ ID NO: 97515 - protein, 11 aa, Homo Sapiens
NHLDKQQVQLL

SEQ ID NO: 97516 - protein, 11 aa, Homo Sapiens
NHLEFLRDEEL

SEQ ID NO: 97517 - protein, 11 aa, Homo Sapiens
NHMEALGHDHL

SEQ ID NO: 97518 - protein, 11 aa, Homo Sapiens
NHMGIHIGEKL

SEQ ID NO: 97519 - protein, 11 aa, Homo Sapiens
NHMGIHTDEKL

SEQ ID NO: 97520 - protein, 11 aa, Homo Sapiens
NHQKQLESNKI

SEQ ID NO: 97521 - protein, 11 aa, Homo Sapiens
NHQLPSEHQTI

SEQ ID NO: 97522 - protein, 11 aa, Homo Sapiens
NHSIESKGNEI

SEQ ID NO: 97523 - protein, 11 aa, Homo Sapiens
NHSSLIYSNLL

SEQ ID NO: 97524 - protein, 11 aa, Homo Sapiens
NHVGELCGETL

SEQ ID NO: 97525 - protein, 11 aa, Homo Sapiens
NHVGLGPIESI

SEQ ID NO: 97526 - protein, 11 aa, Homo Sapiens
NHVKQLLSNEL

SEQ ID NO: 97527 - protein, 11 aa, Homo Sapiens
NHYEFSDCEKF

SEQ ID NO: 97528 - protein, 11 aa, Homo Sapiens
NKDNNEIVDKI

SEQ ID NO: 97529 - protein, 11 aa, Homo Sapiens
NQIPIISAEHL

SEQ ID NO: 97530 - protein, 11 aa, Homo Sapiens
NQIQAHSSDQL

SEQ ID NO: 97531 - protein, 11 aa, Homo Sapiens
NQVVSTKGERF

SEQ ID NO: 97532 - protein, 11 aa, Homo Sapiens
NREGSPDTNRI

SEQ ID NO: 97533 - protein, 11 aa, Homo Sapiens
NREGYCFTEVL

SEQ ID NO: 97534 - protein, 11 aa, Homo Sapiens
NRIGGVQQDTI

SEQ ID NO: 97535 - protein, 11 aa, Homo Sapiens
NRLFTSAEETF

SEQ ID NO: 97536 - protein, 11 aa, Homo Sapiens
NRLIGQIVSSI

SEQ ID NO: 97537 - protein, 11 aa, Homo Sapiens
PHSTGVASNTI

SEQ ID NO: 97538 - protein, 11 aa, Homo Sapiens
QHAGLPRSDVL

SEQ ID NO: 97539 - protein, 11 aa, Homo Sapiens
QHAIEESVVLI

SEQ ID NO: 97540 - protein, 11 aa, Homo Sapiens
QHALPQEAQSL

SEQ ID NO: 97541 - protein, 11 aa, Homo Sapiens
QHCLDTAFNFF

SEQ ID NO: 97542 - protein, 11 aa, Homo Sapiens
QHDAQEVLQCI

SEQ ID NO: 97543 - protein, 11 aa, Homo Sapiens
QHDEQVRLYKL

SEQ ID NO: 97544 - protein, 11 aa, Homo Sapiens
QHDFTSQIFSL

SEQ ID NO: 97545 - protein, 11 aa, Homo Sapiens
QHDPAPAHTSI

SEQ ID NO: 97546 - protein, 11 aa, Homo Sapiens
QHDPETSVLVL

SEQ ID NO: 97547 - protein, 11 aa, Homo Sapiens
QHDPSSNNAML

SEQ ID NO: 97548 - protein, 11 aa, Homo Sapiens
QHDQTHVQSQL

SEQ ID NO: 97549 - protein, 11 aa, Homo Sapiens
QHDSGAAVIQL

SEQ ID NO: 97550 - protein, 11 aa, Homo Sapiens
QHDTSLPHCRF

SEQ ID NO: 97551 - protein, 11 aa, Homo Sapiens
QHDVFGDISFL

SEQ ID NO: 97552 - protein, 11 aa, Homo Sapiens
QHEDLINLQSF

SEQ ID NO: 97553 - protein, 11 aa, Homo Sapiens
QHEEPESFFTW

SEQ ID NO: 97554 - protein, 11 aa, Homo Sapiens
QHEGLPEPVTL

SEQ ID NO: 97555 - protein, 11 aa, Homo Sapiens
QHEVEEATNIL

SEQ ID NO: 97556 - protein, 11 aa, Homo Sapiens
QHFQGNMMDFL

SEQ ID NO: 97557 - protein, 11 aa, Homo Sapiens
QHIEESFAEHL

SEQ ID NO: 97558 - protein, 11 aa, Homo Sapiens
QHIEESFSEHL

SEQ ID NO: 97559 - protein, 11 aa, Homo Sapiens
QHINPLLPACL

SEQ ID NO: 97560 - protein, 11 aa, Homo Sapiens
QHIVPCTISQL

SEQ ID NO: 97561 - protein, 11 aa, Homo Sapiens
QHIWESDSNEF

SEQ ID NO: 97562 - protein, 11 aa, Homo Sapiens
QHKIPTNDELL

SEQ ID NO: 97563 - protein, 11 aa, Homo Sapiens
QHLDLSSSEKF

SEQ ID NO: 97564 - protein, 11 aa, Homo Sapiens
QHLDPQGAQEL

SEQ ID NO: 97565 - protein, 11 aa, Homo Sapiens
QHLNLNNAEQL

SEQ ID NO: 97566 - protein, 11 aa, Homo Sapiens
QHLSSSQLQSL

SEQ ID NO: 97567 - protein, 11 aa, Homo Sapiens
QHMDVEESQCL

SEQ ID NO: 97568 - protein, 11 aa, Homo Sapiens
QHQENEGTNQL

SEQ ID NO: 97569 - protein, 11 aa, Homo Sapiens
QHQGAVELLVF

SEQ ID NO: 97570 - protein, 11 aa, Homo Sapiens
QHQLIDQQARL

SEQ ID NO: 97571 - protein, 11 aa, Homo Sapiens
QHQSGIVQLLW

SEQ ID NO: 97572 - protein, 11 aa, Homo Sapiens
QHSEYEYGNDL

SEQ ID NO: 97573 - protein, 11 aa, Homo Sapiens
QHSGQEVPQVL

SEQ ID NO: 97574 - protein, 11 aa, Homo Sapiens
QHSHLIEHQRI

SEQ ID NO: 97575 - protein, 11 aa, Homo Sapiens
QHSSQDVHVVL

SEQ ID NO: 97576 - protein, 11 aa, Homo Sapiens
QHTEAETIQKL

SEQ ID NO: 97577 - protein, 11 aa, Homo Sapiens
QHVDERKLIQF

SEQ ID NO: 97578 - protein, 11 aa, Homo Sapiens
QHYEDASCGLL

SEQ ID NO: 97579 - protein, 11 aa, Homo Sapiens
QHYELCSGNQV

SEQ ID NO: 97580 - protein, 11 aa, Homo Sapiens
QQDSYIEDQKL

SEQ ID NO: 97581 - protein, 11 aa, Homo Sapiens
QRDEQLLTNVL

SEQ ID NO: 97582 - protein, 11 aa, Homo Sapiens
QRIGLSSQELF

SEQ ID NO: 97583 - protein, 11 aa, Homo Sapiens
QRILAAETDRL

SEQ ID NO: 97584 - protein, 11 aa, Homo Sapiens
QRLKAIVAEKF

SEQ ID NO: 97585 - protein, 11 aa, Homo Sapiens
RHDDSWPFLKL

SEQ ID NO: 97586 - protein, 11 aa, Homo Sapiens
RHEDVVNSVVF

SEQ ID NO: 97587 - protein, 11 aa, Homo Sapiens
RHFGSVVAQTI

SEQ ID NO: 97588 - protein, 11 aa, Homo Sapiens
RHIEHMESDEL

SEQ ID NO: 97589 - protein, 11 aa, Homo Sapiens
RHLPVNSKEFL

SEQ ID NO: 97590 - protein, 11 aa, Homo Sapiens
SEFMNIIANEI

SEQ ID NO: 97591 - protein, 11 aa, Homo Sapiens
SHAMASAEQQL

SEQ ID NO: 97592 - protein, 11 aa, Homo Sapiens
SHATQAIFEIL

SEQ ID NO: 97593 - protein, 11 aa, Homo Sapiens
SHDASVKEWTI

SEQ ID NO: 97594 - protein, 11 aa, Homo Sapiens
SHDDTILIWDF

SEQ ID NO: 97595 - protein, 11 aa, Homo Sapiens
SHDGVSLHELL

SEQ ID NO: 97596 - protein, 11 aa, Homo Sapiens
SHDIVDGNHRL

SEQ ID NO: 97597 - protein, 11 aa, Homo Sapiens
SHDPLPSWAEL

SEQ ID NO: 97598 - protein, 11 aa, Homo Sapiens
SHDPSYFACLI

SEQ ID NO: 97599 - protein, 11 aa, Homo Sapiens
SHDPVSGTQGL

SEQ ID NO: 97600 - protein, 11 aa, Homo Sapiens
SHDSGSDHLAF

SEQ ID NO: 97601 - protein, 11 aa, Homo Sapiens
SHDSTSQLYTV

SEQ ID NO: 97602 - protein, 11 aa, Homo Sapiens
SHDYPGEGIYL

SEQ ID NO: 97603 - protein, 11 aa, Homo Sapiens
SHEANSNAVRF

SEQ ID NO: 97604 - protein, 11 aa, Homo Sapiens
SHEDVILGELL

SEQ ID NO: 97605 - protein, 11 aa, Homo Sapiens
SHEESELANKL

SEQ ID NO: 97606 - protein, 11 aa, Homo Sapiens
SHEHASGRLGI

SEQ ID NO: 97607 - protein, 11 aa, Homo Sapiens
SHESDTMSNRI

SEQ ID NO: 97608 - protein, 11 aa, Homo Sapiens
SHETRLPSNTL

SEQ ID NO: 97609 - protein, 11 aa, Homo Sapiens
SHFDDFVTNLI

SEQ ID NO: 97610 - protein, 11 aa, Homo Sapiens
SHFISGGKDCL

SEQ ID NO: 97611 - protein, 11 aa, Homo Sapiens
SHFNLKEKEYF

SEQ ID NO: 97612 - protein, 11 aa, Homo Sapiens
SHHREGLLAIF

SEQ ID NO: 97613 - protein, 11 aa, Homo Sapiens
SHIDLIDLDTI

SEQ ID NO: 97614 - protein, 11 aa, Homo Sapiens
SHIKESVEDKL

SEQ ID NO: 97615 - protein, 11 aa, Homo Sapiens
SHIKGLLINFI

SEQ ID NO: 97616 - protein, 11 aa, Homo Sapiens
SHILEQHPHTL

SEQ ID NO: 97617 - protein, 11 aa, Homo Sapiens
SHIQTSHCEVF

SEQ ID NO: 97618 - protein, 11 aa, Homo Sapiens
SHISTPNVNAL

SEQ ID NO: 97619 - protein, 11 aa, Homo Sapiens
SHITPSTQQHL

SEQ ID NO: 97620 - protein, 11 aa, Homo Sapiens
SHLSPMEMERF

SEQ ID NO: 97621 - protein, 11 aa, Homo Sapiens
SHLSVTEAEML

SEQ ID NO: 97622 - protein, 11 aa, Homo Sapiens
SHLTDQSSNLL

SEQ ID NO: 97623 - protein, 11 aa, Homo Sapiens
SHMGSIREETL

SEQ ID NO: 97624 - protein, 11 aa, Homo Sapiens
SHNEENILQKI

SEQ ID NO: 97625 - protein, 11 aa, Homo Sapiens
SHSLVELLNQI

SEQ ID NO: 97626 - protein, 11 aa, Homo Sapiens
SHSTSQLSQKL

SEQ ID NO: 97627 - protein, 11 aa, Homo Sapiens
SHTSVGNILGS

SEQ ID NO: 97628 - protein, 11 aa, Homo Sapiens
SHVLSKHNNEL

SEQ ID NO: 97629 - protein, 11 aa, Homo Sapiens
SHVPVHPYEAL

SEQ ID NO: 97630 - protein, 11 aa, Homo Sapiens
SHVSESVNNSI

SEQ ID NO: 97631 - protein, 11 aa, Homo Sapiens
SHYEFSDCEKF

SEQ ID NO: 97632 - protein, 11 aa, Homo Sapiens
SHYNSVANETF

SEQ ID NO: 97633 - protein, 11 aa, Homo Sapiens
SQDFSVHGNII

SEQ ID NO: 97634 - protein, 11 aa, Homo Sapiens
SQLALKAADMI

SEQ ID NO: 97635 - protein, 11 aa, Homo Sapiens
SQSPGSSENQM

SEQ ID NO: 97636 - protein, 11 aa, Homo Sapiens
SVLCQFPSQQI

SEQ ID NO: 97637 - protein, 11 aa, Homo Sapiens
TEEESQESNKI

SEQ ID NO: 97638 - protein, 11 aa, Homo Sapiens
THAAEDIVYTL

SEQ ID NO: 97639 - protein, 11 aa, Homo Sapiens
THAAQSWRERL

SEQ ID NO: 97640 - protein, 11 aa, Homo Sapiens
THADTPVDHCL

SEQ ID NO: 97641 - protein, 11 aa, Homo Sapiens
THAEPQEADYL

SEQ ID NO: 97642 - protein, 11 aa, Homo Sapiens
THALVEDGQLL

SEQ ID NO: 97643 - protein, 11 aa, Homo Sapiens
THANDASALRI

SEQ ID NO: 97644 - protein, 11 aa, Homo Sapiens
THAPFGLGAHF

SEQ ID NO: 97645 - protein, 11 aa, Homo Sapiens
THAPLPEVQLL

SEQ ID NO: 97646 - protein, 11 aa, Homo Sapiens
THAPPGEFNEV

SEQ ID NO: 97647 - protein, 11 aa, Homo Sapiens
THAPTHSDYTM

SEQ ID NO: 97648 - protein, 11 aa, Homo Sapiens
THAQISRNNEL

SEQ ID NO: 97649 - protein, 11 aa, Homo Sapiens
THAVVTVPAYF

SEQ ID NO: 97650 - protein, 11 aa, Homo Sapiens
THCIVGATIGF

SEQ ID NO: 97651 - protein, 11 aa, Homo Sapiens
THCTPLPAQNF

SEQ ID NO: 97652 - protein, 11 aa, Homo Sapiens
THCYDPGSNTW

SEQ ID NO: 97653 - protein, 11 aa, Homo Sapiens
THDASGQLVLI

SEQ ID NO: 97654 - protein, 11 aa, Homo Sapiens
THDATALASVV

SEQ ID NO: 97655 - protein, 11 aa, Homo Sapiens
THDERPHGQQI

SEQ ID NO: 97656 - protein, 11 aa, Homo Sapiens
THDGYLKLWQL

SEQ ID NO: 97657 - protein, 11 aa, Homo Sapiens
THDPLHQEVSF

SEQ ID NO: 97658 - protein, 11 aa, Homo Sapiens
THDSNTDMFQI

SEQ ID NO: 97659 - protein, 11 aa, Homo Sapiens
THDTKIELLKF

SEQ ID NO: 97660 - protein, 11 aa, Homo Sapiens
THEALTLKYKL

SEQ ID NO: 97661 - protein, 11 aa, Homo Sapiens
THEAVYPLYTI

SEQ ID NO: 97662 - protein, 11 aa, Homo Sapiens
THEGTSVTNLL

SEQ ID NO: 97663 - protein, 11 aa, Homo Sapiens
THELTIPNNLI

SEQ ID NO: 97664 - protein, 11 aa, Homo Sapiens
THEPISVEVQL

SEQ ID NO: 97665 - protein, 11 aa, Homo Sapiens
THEVDELTQII

SEQ ID NO: 97666 - protein, 11 aa, Homo Sapiens
THEYNEVANLF

SEQ ID NO: 97667 - protein, 11 aa, Homo Sapiens
THFSAGVLQLL

SEQ ID NO: 97668 - protein, 11 aa, Homo Sapiens
THHCPKTPFLL

SEQ ID NO: 97669 - protein, 11 aa, Homo Sapiens
THIGGTSSDEM

SEQ ID NO: 97670 - protein, 11 aa, Homo Sapiens
THIILDNADVL

SEQ ID NO: 97671 - protein, 11 aa, Homo Sapiens
THILALQEEEL

SEQ ID NO: 97672 - protein, 11 aa, Homo Sapiens
THISNDYGNNF

SEQ ID NO: 97673 - protein, 11 aa, Homo Sapiens
THKVIHTGEKL

SEQ ID NO: 97674 - protein, 11 aa, Homo Sapiens
THLDYVDTERI

SEQ ID NO: 97675 - protein, 11 aa, Homo Sapiens
THLGVNMFDKL

SEQ ID NO: 97676 - protein, 11 aa, Homo Sapiens
THLHRVVSELL

SEQ ID NO: 97677 - protein, 11 aa, Homo Sapiens
THLTVSSTNTL

SEQ ID NO: 97678 - protein, 11 aa, Homo Sapiens
THMNSSEKLQF

SEQ ID NO: 97679 - protein, 11 aa, Homo Sapiens
THMTAIVGMAL

SEQ ID NO: 97680 - protein, 11 aa, Homo Sapiens
THNAESPDFQL

SEQ ID NO: 97681 - protein, 11 aa, Homo Sapiens
THQDVHLGETL

SEQ ID NO: 97682 - protein, 11 aa, Homo Sapiens
THQKVTKGVSL

SEQ ID NO: 97683 - protein, 11 aa, Homo Sapiens
THQLPVAEAML

SEQ ID NO: 97684 - protein, 11 aa, Homo Sapiens
THQRIHPGEKL

SEQ ID NO: 97685 - protein, 11 aa, Homo Sapiens
THSDDVTQVRF

SEQ ID NO: 97686 - protein, 11 aa, Homo Sapiens
THSPSNAQFKL

SEQ ID NO: 97687 - protein, 11 aa, Homo Sapiens
THSPYVAQILL

SEQ ID NO: 97688 - protein, 11 aa, Homo Sapiens
THVDILNDFTL

SEQ ID NO: 97689 - protein, 11 aa, Homo Sapiens
THVDSHGHNVF

SEQ ID NO: 97690 - protein, 11 aa, Homo Sapiens
THVENQSANCL

SEQ ID NO: 97691 - protein, 11 aa, Homo Sapiens
THVLEGAGNKL

SEQ ID NO: 97692 - protein, 11 aa, Homo Sapiens
THVSLSTSSNI

SEQ ID NO: 97693 - protein, 11 aa, Homo Sapiens
THVVVYDGEHL

SEQ ID NO: 97694 - protein, 11 aa, Homo Sapiens
TKDDTWKADDL

SEQ ID NO: 97695 - protein, 11 aa, Homo Sapiens
TLIDLPGHESL

SEQ ID NO: 97696 - protein, 11 aa, Homo Sapiens
TLIPHTDGEKL

SEQ ID NO: 97697 - protein, 11 aa, Homo Sapiens
TLQVNGRHEYL

SEQ ID NO: 97698 - protein, 11 aa, Homo Sapiens
TPDGTEKGDFL

SEQ ID NO: 97699 - protein, 11 aa, Homo Sapiens
TQAESAQSNRL

SEQ ID NO: 97700 - protein, 11 aa, Homo Sapiens
TQANPGKGEGL

SEQ ID NO: 97701 - protein, 11 aa, Homo Sapiens
TQDQNSSSWLI

SEQ ID NO: 97702 - protein, 11 aa, Homo Sapiens
TQIQYDKTNVL

SEQ ID NO: 97703 - protein, 11 aa, Homo Sapiens
TRDETDTWAYI

SEQ ID NO: 97704 - protein, 11 aa, Homo Sapiens
TRDTNFGTNCI

SEQ ID NO: 97705 - protein, 11 aa, Homo Sapiens
TRLKEEGNEQF

SEQ ID NO: 97706 - protein, 11 aa, Homo Sapiens
VHDPMAALETL

SEQ ID NO: 97707 - protein, 11 aa, Homo Sapiens
VHDPNHSKMRL

SEQ ID NO: 97708 - protein, 11 aa, Homo Sapiens
VHDPVTGKTKL

SEQ ID NO: 97709 - protein, 11 aa, Homo Sapiens
VHDVTLHADAI

SEQ ID NO: 97710 - protein, 11 aa, Homo Sapiens
VHLAPFTDEQL

SEQ ID NO: 97711 - protein, 11 aa, Homo Sapiens
VHMDPNIGKRL

SEQ ID NO: 97712 - protein, 11 aa, Homo Sapiens
VHQAVKIGQSL

SEQ ID NO: 97713 - protein, 11 aa, Homo Sapiens
VHQGGVELQQL

SEQ ID NO: 97714 - protein, 11 aa, Homo Sapiens
VHSSDLQGNYI

SEQ ID NO: 97715 - protein, 11 aa, Homo Sapiens
VQDATPVSNSL

SEQ ID NO: 97716 - protein, 11 aa, Homo Sapiens
WHDEQGHNGLW

SEQ ID NO: 97717 - protein, 11 aa, Homo Sapiens
WHDIEKDNARF

SEQ ID NO: 97718 - protein, 11 aa, Homo Sapiens
YEIDDRDVNKI

SEQ ID NO: 97719 - protein, 11 aa, Homo Sapiens
YHADFLSEAAL

SEQ ID NO: 97720 - protein, 11 aa, Homo Sapiens
YHAGGSTQNSI

SEQ ID NO: 97721 - protein, 11 aa, Homo Sapiens
YHAPPLSAITF

SEQ ID NO: 97722 - protein, 11 aa, Homo Sapiens
YHAQPLEDNLF

SEQ ID NO: 97723 - protein, 11 aa, Homo Sapiens
YHARPDSDQRF

SEQ ID NO: 97724 - protein, 11 aa, Homo Sapiens
YHDDSYTATGY

SEQ ID NO: 97725 - protein, 11 aa, Homo Sapiens
YHDIAQQAFKF

SEQ ID NO: 97726 - protein, 11 aa, Homo Sapiens
YHDPNFVPAAF

SEQ ID NO: 97727 - protein, 11 aa, Homo Sapiens
YHDPTVKHSTF

SEQ ID NO: 97728 - protein, 11 aa, Homo Sapiens
YHDQQDVTSNF

SEQ ID NO: 97729 - protein, 11 aa, Homo Sapiens
YHEATDSLYVF

SEQ ID NO: 97730 - protein, 11 aa, Homo Sapiens
YHEHGSLFDYL

SEQ ID NO: 97731 - protein, 11 aa, Homo Sapiens
YHLDAYIPLQI

SEQ ID NO: 97732 - protein, 11 aa, Homo Sapiens
YHLENAGCNKI

SEQ ID NO: 97733 - protein, 11 aa, Homo Sapiens
YHLEYSEGESL

SEQ ID NO: 97734 - protein, 11 aa, Homo Sapiens
YHQIGSGKCEI

SEQ ID NO: 97735 - protein, 11 aa, Homo Sapiens
YHSDFNRQDRF

SEQ ID NO: 97736 - protein, 11 aa, Homo Sapiens
YHSDVAYHNSL

SEQ ID NO: 97737 - protein, 11 aa, Homo Sapiens
YHTVAGNDIKI

SEQ ID NO: 97738 - protein, 11 aa, Homo Sapiens
YHTVAIEGNTL

SEQ ID NO: 97739 - protein, 11 aa, Homo Sapiens
YHVESTVNSEL

SEQ ID NO: 97740 - protein, 11 aa, Homo Sapiens
YHVGYILTSVL

SEQ ID NO: 97741 - protein, 11 aa, Homo Sapiens
YHVYIKDVDHL

SEQ ID NO: 97742 - protein, 11 aa, Homo Sapiens
YQLDLPKANLL

SEQ ID NO: 97743 - protein, 8 aa, Homo Sapiens
AEAFAEEL

SEQ ID NO: 97744 - protein, 8 aa, Homo Sapiens
AEQPSVKL

SEQ ID NO: 97745 - protein, 8 aa, Homo Sapiens
AEYGAEAL

SEQ ID NO: 97746 - protein, 8 aa, Homo Sapiens
DPLGAIHL

SEQ ID NO: 97747 - protein, 8 aa, Homo Sapiens
EAHAKVRL

SEQ ID NO: 97748 - protein, 8 aa, Homo Sapiens
EAKEKIYL

SEQ ID NO: 97749 - protein, 8 aa, Homo Sapiens
EDLAHSSI

SEQ ID NO: 97750 - protein, 8 aa, Homo Sapiens
EEQLQQIR

SEQ ID NO: 97751 - protein, 8 aa, Homo Sapiens
EPPVDSEP

SEQ ID NO: 97752 - protein, 8 aa, Homo Sapiens
FEFPEFQL

SEQ ID NO: 97753 - protein, 8 aa, Homo Sapiens
FEGPDAKL

SEQ ID NO: 97754 - protein, 8 aa, Homo Sapiens
FEVDTVAP

SEQ ID NO: 97755 - protein, 8 aa, Homo Sapiens
GEAPPELL

SEQ ID NO: 97756 - protein, 8 aa, Homo Sapiens
GEHYSEKL

SEQ ID NO: 97757 - protein, 8 aa, Homo Sapiens
GEIKSHDL

SEQ ID NO: 97758 - protein, 8 aa, Homo Sapiens
GEIPTYGL

SEQ ID NO: 97759 - protein, 8 aa, Homo Sapiens
GEIRGYEL

SEQ ID NO: 97760 - protein, 8 aa, Homo Sapiens
GELPSWIL

SEQ ID NO: 97761 - protein, 8 aa, Homo Sapiens
GEVPVHKL

SEQ ID NO: 97762 - protein, 8 aa, Homo Sapiens
HEAPAVLL

SEQ ID NO: 97763 - protein, 8 aa, Homo Sapiens
HEDFVVEL

SEQ ID NO: 97764 - protein, 8 aa, Homo Sapiens
HEFHSPAL

SEQ ID NO: 97765 - protein, 8 aa, Homo Sapiens
HEGPTNQL

SEQ ID NO: 97766 - protein, 8 aa, Homo Sapiens
HEHQANLL

SEQ ID NO: 97767 - protein, 8 aa, Homo Sapiens
HEIQSDVL

SEQ ID NO: 97768 - protein, 8 aa, Homo Sapiens
HEQASNVL

SEQ ID NO: 97769 - protein, 8 aa, Homo Sapiens
HETVTIEL

SEQ ID NO: 97770 - protein, 8 aa, Homo Sapiens
IDGNKVTL

SEQ ID NO: 97771 - protein, 8 aa, Homo Sapiens
IEFVADRL

SEQ ID NO: 97772 - protein, 8 aa, Homo Sapiens
IEGPDAKL

SEQ ID NO: 97773 - protein, 8 aa, Homo Sapiens
IEGPIIKL

SEQ ID NO: 97774 - protein, 8 aa, Homo Sapiens
KEAELTEI

SEQ ID NO: 97775 - protein, 8 aa, Homo Sapiens
KELEANVL

SEQ ID NO: 97776 - protein, 8 aa, Homo Sapiens
KIEELRQR

SEQ ID NO: 97777 - protein, 8 aa, Homo Sapiens
LEFPAQEL

SEQ ID NO: 97778 - protein, 8 aa, Homo Sapiens
LGNGNIKL

SEQ ID NO: 97779 - protein, 8 aa, Homo Sapiens
QEADSPTL

SEQ ID NO: 97780 - protein, 8 aa, Homo Sapiens
QEFPAHSL

SEQ ID NO: 97781 - protein, 8 aa, Homo Sapiens
REIEGDLL

SEQ ID NO: 97782 - protein, 8 aa, Homo Sapiens
SDDSILRL

SEQ ID NO: 97783 - protein, 8 aa, Homo Sapiens
SEDRAALL

SEQ ID NO: 97784 - protein, 8 aa, Homo Sapiens
SEIKGEVL

SEQ ID NO: 97785 - protein, 8 aa, Homo Sapiens
SEKVSHVL

SEQ ID NO: 97786 - protein, 8 aa, Homo Sapiens
TETPSPVL

SEQ ID NO: 97787 - protein, 8 aa, Homo Sapiens
TEYPVEKL

SEQ ID NO: 97788 - protein, 8 aa, Homo Sapiens
VDGKQVEL

SEQ ID NO: 97789 - protein, 8 aa, Homo Sapiens
VDVEQHTL

SEQ ID NO: 97790 - protein, 8 aa, Homo Sapiens
VEQPAQEL

SEQ ID NO: 97791 - protein, 8 aa, Homo Sapiens
VERINQAL

SEQ ID NO: 97792 - protein, 8 aa, Homo Sapiens
YEDIAVKL

SEQ ID NO: 97793 - protein, 8 aa, Homo Sapiens
YEDISRGL

SEQ ID NO: 97794 - protein, 8 aa, Homo Sapiens
YESPEIAL

SEQ ID NO: 97795 - protein, 8 aa, Homo Sapiens
YEVKSENL

SEQ ID NO: 97796 - protein, 9 aa, Homo Sapiens
ADFAKVLEL

SEQ ID NO: 97797 - protein, 9 aa, Homo Sapiens
ADHVQSLLL

SEQ ID NO: 97798 - protein, 9 aa, Homo Sapiens
AEAAALEVL

SEQ ID NO: 97799 - protein, 9 aa, Homo Sapiens
AEAAVIEAM

SEQ ID NO: 97800 - protein, 9 aa, Homo Sapiens
AEADAIIQM

SEQ ID NO: 97801 - protein, 9 aa, Homo Sapiens
AEAEAAVGL

SEQ ID NO: 97802 - protein, 9 aa, Homo Sapiens
AEAEERGEL

SEQ ID NO: 97803 - protein, 9 aa, Homo Sapiens
AEAEHKIDL

SEQ ID NO: 97804 - protein, 9 aa, Homo Sapiens
AEAEIILQL

SEQ ID NO: 97805 - protein, 9 aa, Homo Sapiens
AEAEIIQLL

SEQ ID NO: 97806 - protein, 9 aa, Homo Sapiens
AEAEKKVQL

SEQ ID NO: 97807 - protein, 9 aa, Homo Sapiens
AEAGADLVL

SEQ ID NO: 97808 - protein, 9 aa, Homo Sapiens
AEAGGLEEL

SEQ ID NO: 97809 - protein, 9 aa, Homo Sapiens
AEAHAKVRL

SEQ ID NO: 97810 - protein, 9 aa, Homo Sapiens
AEAHARIHL

SEQ ID NO: 97811 - protein, 9 aa, Homo Sapiens
AEAKEKIYL

SEQ ID NO: 97812 - protein, 9 aa, Homo Sapiens
AEAKKIERL

SEQ ID NO: 97813 - protein, 9 aa, Homo Sapiens
AEAKPELSL

SEQ ID NO: 97814 - protein, 9 aa, Homo Sapiens
AEAKSVWAL

SEQ ID NO: 97815 - protein, 9 aa, Homo Sapiens
AEALATHIL

SEQ ID NO: 97816 - protein, 9 aa, Homo Sapiens
AEALEKLFL

SEQ ID NO: 97817 - protein, 9 aa, Homo Sapiens
AEALERMFL

SEQ ID NO: 97818 - protein, 9 aa, Homo Sapiens
AEALKAVLL

SEQ ID NO: 97819 - protein, 9 aa, Homo Sapiens
AEALKKLIL

SEQ ID NO: 97820 - protein, 9 aa, Homo Sapiens
AEANHFIDL

SEQ ID NO: 97821 - protein, 9 aa, Homo Sapiens
AEAPGEAFL

SEQ ID NO: 97822 - protein, 9 aa, Homo Sapiens
AEAPSQVRL

SEQ ID NO: 97823 - protein, 9 aa, Homo Sapiens
AEAQFTTAL

SEQ ID NO: 97824 - protein, 9 aa, Homo Sapiens
AEAQGSTTL

SEQ ID NO: 97825 - protein, 9 aa, Homo Sapiens
AEAQLAYEL

SEQ ID NO: 97826 - protein, 9 aa, Homo Sapiens
AEARINAQL

SEQ ID NO: 97827 - protein, 9 aa, Homo Sapiens
AEARKSPAL

SEQ ID NO: 97828 - protein, 9 aa, Homo Sapiens
AEASMISKL

SEQ ID NO: 97829 - protein, 9 aa, Homo Sapiens
AEASVDPSL

SEQ ID NO: 97830 - protein, 9 aa, Homo Sapiens
AEASVMTQL

SEQ ID NO: 97831 - protein, 9 aa, Homo Sapiens
AEATEEVSL

SEQ ID NO: 97832 - protein, 9 aa, Homo Sapiens
AEAVAALLL

SEQ ID NO: 97833 - protein, 9 aa, Homo Sapiens
AEAVLYEHL

SEQ ID NO: 97834 - protein, 9 aa, Homo Sapiens
AEAVVNDVL

SEQ ID NO: 97835 - protein, 9 aa, Homo Sapiens
AEAYHFFIL

SEQ ID NO: 97836 - protein, 9 aa, Homo Sapiens
AECAGKLFL

SEQ ID NO: 97837 - protein, 9 aa, Homo Sapiens
AECGKVFRL

SEQ ID NO: 97838 - protein, 9 aa, Homo Sapiens
AECRAPISL

SEQ ID NO: 97839 - protein, 9 aa, Homo Sapiens
AEDASKFEL

SEQ ID NO: 97840 - protein, 9 aa, Homo Sapiens
AEDEGTQRL

SEQ ID NO: 97841 - protein, 9 aa, Homo Sapiens
AEDGADPNL

SEQ ID NO: 97842 - protein, 9 aa, Homo Sapiens
AEDKDTPAL

SEQ ID NO: 97843 - protein, 9 aa, Homo Sapiens
AEDKPSTDL

SEQ ID NO: 97844 - protein, 9 aa, Homo Sapiens
AEDNIREML

SEQ ID NO: 97845 - protein, 9 aa, Homo Sapiens
AEDPLVQSL

SEQ ID NO: 97846 - protein, 9 aa, Homo Sapiens
AEDPTISLL

SEQ ID NO: 97847 - protein, 9 aa, Homo Sapiens
AEDTITALL

SEQ ID NO: 97848 - protein, 9 aa, Homo Sapiens
AEDTPVVQL

SEQ ID NO: 97849 - protein, 9 aa, Homo Sapiens
AEDTRLIEL

SEQ ID NO: 97850 - protein, 9 aa, Homo Sapiens
AEDVQHQIL

SEQ ID NO: 97851 - protein, 9 aa, Homo Sapiens
AEDYTESLL

SEQ ID NO: 97852 - protein, 9 aa, Homo Sapiens
AEEALKYLL

SEQ ID NO: 97853 - protein, 9 aa, Homo Sapiens
AEEAPKTPL

SEQ ID NO: 97854 - protein, 9 aa, Homo Sapiens
AEEDFYEKL

SEQ ID NO: 97855 - protein, 9 aa, Homo Sapiens
AEEGGAARL

SEQ ID NO: 97856 - protein, 9 aa, Homo Sapiens
AEEHNIVFM

SEQ ID NO: 97857 - protein, 9 aa, Homo Sapiens
AEEHSIATL

SEQ ID NO: 97858 - protein, 9 aa, Homo Sapiens
AEEKAAQAL

SEQ ID NO: 97859 - protein, 9 aa, Homo Sapiens
AEEKHLHVL

SEQ ID NO: 97860 - protein, 9 aa, Homo Sapiens
AEEKLPMTL

SEQ ID NO: 97861 - protein, 9 aa, Homo Sapiens
AEEKMPLSL

SEQ ID NO: 97862 - protein, 9 aa, Homo Sapiens
AEEKSIPTL

SEQ ID NO: 97863 - protein, 9 aa, Homo Sapiens
AEELLRIGL

SEQ ID NO: 97864 - protein, 9 aa, Homo Sapiens
AEEPAGTSL

SEQ ID NO: 97865 - protein, 9 aa, Homo Sapiens
AEEPHALEL

SEQ ID NO: 97866 - protein, 9 aa, Homo Sapiens
AEEPKARVL

SEQ ID NO: 97867 - protein, 9 aa, Homo Sapiens
AEEPPTPAL

SEQ ID NO: 97868 - protein, 9 aa, Homo Sapiens
AEEPRGSSL

SEQ ID NO: 97869 - protein, 9 aa, Homo Sapiens
AEERACQSL

SEQ ID NO: 97870 - protein, 9 aa, Homo Sapiens
AEEREKTVL

SEQ ID NO: 97871 - protein, 9 aa, Homo Sapiens
AEERPRVAL

SEQ ID NO: 97872 - protein, 9 aa, Homo Sapiens
AEERRDVSL

SEQ ID NO: 97873 - protein, 9 aa, Homo Sapiens
AEERVSFGL

SEQ ID NO: 97874 - protein, 9 aa, Homo Sapiens
AEERWEVVL

SEQ ID NO: 97875 - protein, 9 aa, Homo Sapiens
AEETGVHII

SEQ ID NO: 97876 - protein, 9 aa, Homo Sapiens
AEETSSPVI

SEQ ID NO: 97877 - protein, 9 aa, Homo Sapiens
AEEVGVEHL

SEQ ID NO: 97878 - protein, 9 aa, Homo Sapiens
AEEVTRELL

SEQ ID NO: 97879 - protein, 9 aa, Homo Sapiens
AEFAHHNYL

SEQ ID NO: 97880 - protein, 9 aa, Homo Sapiens
AEFEDLDSL

SEQ ID NO: 97881 - protein, 9 aa, Homo Sapiens
AEFIKFTVI

SEQ ID NO: 97882 - protein, 9 aa, Homo Sapiens
AEFKEAFQL

SEQ ID NO: 97883 - protein, 9 aa, Homo Sapiens
AEFKEAFSL

SEQ ID NO: 97884 - protein, 9 aa, Homo Sapiens
AEFKTKYKL

SEQ ID NO: 97885 - protein, 9 aa, Homo Sapiens
AEFNRIMSL

SEQ ID NO: 97886 - protein, 9 aa, Homo Sapiens
AEFPLDPQL

SEQ ID NO: 97887 - protein, 9 aa, Homo Sapiens
AEFPLEPML

SEQ ID NO: 97888 - protein, 9 aa, Homo Sapiens
AEFQRDIML

SEQ ID NO: 97889 - protein, 9 aa, Homo Sapiens
AEFTAKIAL

SEQ ID NO: 97890 - protein, 9 aa, Homo Sapiens
AEFVGVSHL

SEQ ID NO: 97891 - protein, 9 aa, Homo Sapiens
AEFVSTPEL

SEQ ID NO: 97892 - protein, 9 aa, Homo Sapiens
AEGAYQVRL

SEQ ID NO: 97893 - protein, 9 aa, Homo Sapiens
AEGEIYTKL

SEQ ID NO: 97894 - protein, 9 aa, Homo Sapiens
AEGHTDAVL

SEQ ID NO: 97895 - protein, 9 aa, Homo Sapiens
AEGLLQEAL

SEQ ID NO: 97896 - protein, 9 aa, Homo Sapiens
AEGPGETVL

SEQ ID NO: 97897 - protein, 9 aa, Homo Sapiens
AEGPPAASL

SEQ ID NO: 97898 - protein, 9 aa, Homo Sapiens
AEGPVGSTL

SEQ ID NO: 97899 - protein, 9 aa, Homo Sapiens
AEGPYKIIL

SEQ ID NO: 97900 - protein, 9 aa, Homo Sapiens
AEHADTVQL

SEQ ID NO: 97901 - protein, 9 aa, Homo Sapiens
AEHERELAL

SEQ ID NO: 97902 - protein, 9 aa, Homo Sapiens
AEHGETLAM

SEQ ID NO: 97903 - protein, 9 aa, Homo Sapiens
AEHIESRTL

SEQ ID NO: 97904 - protein, 9 aa, Homo Sapiens
AEHLEKSSL

SEQ ID NO: 97905 - protein, 9 aa, Homo Sapiens
AEHLGDCGL

SEQ ID NO: 97906 - protein, 9 aa, Homo Sapiens
AEHRTPDVL

SEQ ID NO: 97907 - protein, 9 aa, Homo Sapiens
AEHYTETAL

SEQ ID NO: 97908 - protein, 9 aa, Homo Sapiens
AEIAAKDKL

SEQ ID NO: 97909 - protein, 9 aa, Homo Sapiens
AEIAEKETL

SEQ ID NO: 97910 - protein, 9 aa, Homo Sapiens
AEIAQLMSL

SEQ ID NO: 97911 - protein, 9 aa, Homo Sapiens
AEIDSIHQL

SEQ ID NO: 97912 - protein, 9 aa, Homo Sapiens
AEIEDIRVL

SEQ ID NO: 97913 - protein, 9 aa, Homo Sapiens
AEIEEREAL

SEQ ID NO: 97914 - protein, 9 aa, Homo Sapiens
AEIEIVKDL

SEQ ID NO: 97915 - protein, 9 aa, Homo Sapiens
AEIKDGERL

SEQ ID NO: 97916 - protein, 9 aa, Homo Sapiens
AEINDLENL

SEQ ID NO: 97917 - protein, 9 aa, Homo Sapiens
AEINNIIKI

SEQ ID NO: 97918 - protein, 9 aa, Homo Sapiens
AEIPLVVCI

SEQ ID NO: 97919 - protein, 9 aa, Homo Sapiens
AEISQPPAL

SEQ ID NO: 97920 - protein, 9 aa, Homo Sapiens
AEITDKLGL

SEQ ID NO: 97921 - protein, 9 aa, Homo Sapiens
AEITKEQRL

SEQ ID NO: 97922 - protein, 9 aa, Homo Sapiens
AEITSGESL

SEQ ID NO: 97923 - protein, 9 aa, Homo Sapiens
AEKAYHEQL

SEQ ID NO: 97924 - protein, 9 aa, Homo Sapiens
AEKIQTIIL

SEQ ID NO: 97925 - protein, 9 aa, Homo Sapiens
AEKPVGALL

SEQ ID NO: 97926 - protein, 9 aa, Homo Sapiens
AEKSEQPTL

SEQ ID NO: 97927 - protein, 9 aa, Homo Sapiens
AEKVEIATL

SEQ ID NO: 97928 - protein, 9 aa, Homo Sapiens
AELAEEVNL

SEQ ID NO: 97929 - protein, 9 aa, Homo Sapiens
AELAVPIEL

SEQ ID NO: 97930 - protein, 9 aa, Homo Sapiens
AELERNVAL

SEQ ID NO: 97931 - protein, 9 aa, Homo Sapiens
AELGSSTSL

SEQ ID NO: 97932 - protein, 9 aa, Homo Sapiens
AELILHDAL

SEQ ID NO: 97933 - protein, 9 aa, Homo Sapiens
AELKNLEVL

SEQ ID NO: 97934 - protein, 9 aa, Homo Sapiens
AELKQAQTL

SEQ ID NO: 97935 - protein, 9 aa, Homo Sapiens
AELKQVQTL

SEQ ID NO: 97936 - protein, 9 aa, Homo Sapiens
AELMKVQAL

SEQ ID NO: 97937 - protein, 9 aa, Homo Sapiens
AELNKIFAL

SEQ ID NO: 97938 - protein, 9 aa, Homo Sapiens
AELPLRLFL

SEQ ID NO: 97939 - protein, 9 aa, Homo Sapiens
AELQHCWAL

SEQ ID NO: 97940 - protein, 9 aa, Homo Sapiens
AELQPTESL

SEQ ID NO: 97941 - protein, 9 aa, Homo Sapiens
AELRSTASL

SEQ ID NO: 97942 - protein, 9 aa, Homo Sapiens
AELTGDHQL

SEQ ID NO: 97943 - protein, 9 aa, Homo Sapiens
AELVPSEVL

SEQ ID NO: 97944 - protein, 9 aa, Homo Sapiens
AEMAMKVEL

SEQ ID NO: 97945 - protein, 9 aa, Homo Sapiens
AEMILKVVM

SEQ ID NO: 97946 - protein, 9 aa, Homo Sapiens
AEMLHNVTL

SEQ ID NO: 97947 - protein, 9 aa, Homo Sapiens
AEMPEKGAL

SEQ ID NO: 97948 - protein, 9 aa, Homo Sapiens
AENAGSYSL

SEQ ID NO: 97949 - protein, 9 aa, Homo Sapiens
AENGLTVRL

SEQ ID NO: 97950 - protein, 9 aa, Homo Sapiens
AENIPENPL

SEQ ID NO: 97951 - protein, 9 aa, Homo Sapiens
AENKDEIAL

SEQ ID NO: 97952 - protein, 9 aa, Homo Sapiens
AENPDTPAL

SEQ ID NO: 97953 - protein, 9 aa, Homo Sapiens
AEPAEALVL

SEQ ID NO: 97954 - protein, 9 aa, Homo Sapiens
AEPDIIEQL

SEQ ID NO: 97955 - protein, 9 aa, Homo Sapiens
AEPEDHYFL

SEQ ID NO: 97956 - protein, 9 aa, Homo Sapiens
AEPEEVEVL

SEQ ID NO: 97957 - protein, 9 aa, Homo Sapiens
AEPILPYAL

SEQ ID NO: 97958 - protein, 9 aa, Homo Sapiens
AEPKLAFVI

SEQ ID NO: 97959 - protein, 9 aa, Homo Sapiens
AEPPLTAVL

SEQ ID NO: 97960 - protein, 9 aa, Homo Sapiens
AEPTIVAQL

SEQ ID NO: 97961 - protein, 9 aa, Homo Sapiens
AEQATKSVL

SEQ ID NO: 97962 - protein, 9 aa, Homo Sapiens
AEQDLVQTL

SEQ ID NO: 97963 - protein, 9 aa, Homo Sapiens
AEQIGCVEL

SEQ ID NO: 97964 - protein, 9 aa, Homo Sapiens
AEQKVEYTL

SEQ ID NO: 97965 - protein, 9 aa, Homo Sapiens
AEQPTPQAL

SEQ ID NO: 97966 - protein, 9 aa, Homo Sapiens
AEQVDAVTL

SEQ ID NO: 97967 - protein, 9 aa, Homo Sapiens
AESAPAWRL

SEQ ID NO: 97968 - protein, 9 aa, Homo Sapiens
AESDGSFLL

SEQ ID NO: 97969 - protein, 9 aa, Homo Sapiens
AESDKPVVI

SEQ ID NO: 97970 - protein, 9 aa, Homo Sapiens
AESDTSPVL

SEQ ID NO: 97971 - protein, 9 aa, Homo Sapiens
AESGAKEEL

SEQ ID NO: 97972 - protein, 9 aa, Homo Sapiens
AESGCKIQI

SEQ ID NO: 97973 - protein, 9 aa, Homo Sapiens
AESHIILVL

SEQ ID NO: 97974 - protein, 9 aa, Homo Sapiens
AESIISPSL

SEQ ID NO: 97975 - protein, 9 aa, Homo Sapiens
AESISLLEL

SEQ ID NO: 97976 - protein, 9 aa, Homo Sapiens
AESLPPPTL

SEQ ID NO: 97977 - protein, 9 aa, Homo Sapiens
AESLVAEGL

SEQ ID NO: 97978 - protein, 9 aa, Homo Sapiens
AESPERVLL

SEQ ID NO: 97979 - protein, 9 aa, Homo Sapiens
AESPSFLSL

SEQ ID NO: 97980 - protein, 9 aa, Homo Sapiens
AESPTPQAL

SEQ ID NO: 97981 - protein, 9 aa, Homo Sapiens
AESRALAQL

SEQ ID NO: 97982 - protein, 9 aa, Homo Sapiens
AESVEEYVL

SEQ ID NO: 97983 - protein, 9 aa, Homo Sapiens
AETAEAVEL

SEQ ID NO: 97984 - protein, 9 aa, Homo Sapiens
AETEKQVAL

SEQ ID NO: 97985 - protein, 9 aa, Homo Sapiens
AETEVEQAL

SEQ ID NO: 97986 - protein, 9 aa, Homo Sapiens
AETFHTPSL

SEQ ID NO: 97987 - protein, 9 aa, Homo Sapiens
AETGKVVII

SEQ ID NO: 97988 - protein, 9 aa, Homo Sapiens
AETHDATAL

SEQ ID NO: 97989 - protein, 9 aa, Homo Sapiens
AETIIKDCL

SEQ ID NO: 97990 - protein, 9 aa, Homo Sapiens
AETLYKEIL

SEQ ID NO: 97991 - protein, 9 aa, Homo Sapiens
AETRAGLTL

SEQ ID NO: 97992 - protein, 9 aa, Homo Sapiens
AETRESTQL

SEQ ID NO: 97993 - protein, 9 aa, Homo Sapiens
AETRVGSAL

SEQ ID NO: 97994 - protein, 9 aa, Homo Sapiens
AETVDPASL

SEQ ID NO: 97995 - protein, 9 aa, Homo Sapiens
AEVAGQFVI

SEQ ID NO: 97996 - protein, 9 aa, Homo Sapiens
AEVDKNIEL

SEQ ID NO: 97997 - protein, 9 aa, Homo Sapiens
AEVDKVARL

SEQ ID NO: 97998 - protein, 9 aa, Homo Sapiens
AEVDPDTIL

SEQ ID NO: 97999 - protein, 9 aa, Homo Sapiens
AEVDTRESL

SEQ ID NO: 98000 - protein, 9 aa, Homo Sapiens
AEVEKQTSL

SEQ ID NO: 98001 - protein, 9 aa, Homo Sapiens
AEVEPGVHL

SEQ ID NO: 98002 - protein, 9 aa, Homo Sapiens
AEVETGDKL

SEQ ID NO: 98003 - protein, 9 aa, Homo Sapiens
AEVGIIESI

SEQ ID NO: 98004 - protein, 9 aa, Homo Sapiens
AEVHSEEAL

SEQ ID NO: 98005 - protein, 9 aa, Homo Sapiens
AEVKERVTL

SEQ ID NO: 98006 - protein, 9 aa, Homo Sapiens
AEVLNKHSL

SEQ ID NO: 98007 - protein, 9 aa, Homo Sapiens
AEVLRTMEL

SEQ ID NO: 98008 - protein, 9 aa, Homo Sapiens
AEVPESVFL

SEQ ID NO: 98009 - protein, 9 aa, Homo Sapiens
AEVRVCTVL

SEQ ID NO: 98010 - protein, 9 aa, Homo Sapiens
AEVVPTEGL

SEQ ID NO: 98011 - protein, 9 aa, Homo Sapiens
AEYIRTEML

SEQ ID NO: 98012 - protein, 9 aa, Homo Sapiens
AEYPEGFEI

SEQ ID NO: 98013 - protein, 9 aa, Homo Sapiens
AEYQDLTFL

SEQ ID NO: 98014 - protein, 9 aa, Homo Sapiens
AEYRLGPLL

SEQ ID NO: 98015 - protein, 9 aa, Homo Sapiens
AEYTAKIAL

SEQ ID NO: 98016 - protein, 9 aa, Homo Sapiens
DAVTKTVGL

SEQ ID NO: 98017 - protein, 9 aa, Homo Sapiens
DEIPETVSL

SEQ ID NO: 98018 - protein, 9 aa, Homo Sapiens
DTRGLKAEL

SEQ ID NO: 98019 - protein, 9 aa, Homo Sapiens
EDKKITVLL

SEQ ID NO: 98020 - protein, 9 aa, Homo Sapiens
EEAPVQPIL

SEQ ID NO: 98021 - protein, 9 aa, Homo Sapiens
EECRLIIHL

SEQ ID NO: 98022 - protein, 9 aa, Homo Sapiens
EEEKRNPAL

SEQ ID NO: 98023 - protein, 9 aa, Homo Sapiens
EEENSKVEL

SEQ ID NO: 98024 - protein, 9 aa, Homo Sapiens
EEEPGIHSL

SEQ ID NO: 98025 - protein, 9 aa, Homo Sapiens
EEEPLHTIL

SEQ ID NO: 98026 - protein, 9 aa, Homo Sapiens
EEKAAVTSL

SEQ ID NO: 98027 - protein, 9 aa, Homo Sapiens
EELGLVTHL

SEQ ID NO: 98028 - protein, 9 aa, Homo Sapiens
EENPEFTSL

SEQ ID NO: 98029 - protein, 9 aa, Homo Sapiens
EESAARVVL

SEQ ID NO: 98030 - protein, 9 aa, Homo Sapiens
EESGAQLLL

SEQ ID NO: 98031 - protein, 9 aa, Homo Sapiens
EESQIRIEL

SEQ ID NO: 98032 - protein, 9 aa, Homo Sapiens
EEVGLFNEL

SEQ ID NO: 98033 - protein, 9 aa, Homo Sapiens
EEVKDRCTL

SEQ ID NO: 98034 - protein, 9 aa, Homo Sapiens
EEVQEFHQL

SEQ ID NO: 98035 - protein, 9 aa, Homo Sapiens
EEYGGTWEL

SEQ ID NO: 98036 - protein, 9 aa, Homo Sapiens
EGEAVPVAI

SEQ ID NO: 98037 - protein, 9 aa, Homo Sapiens
EIEERGVKL

SEQ ID NO: 98038 - protein, 9 aa, Homo Sapiens
EIISEISKL

SEQ ID NO: 98039 - protein, 9 aa, Homo Sapiens
EIKDLEEQL

SEQ ID NO: 98040 - protein, 9 aa, Homo Sapiens
EISTPVTIS

SEQ ID NO: 98041 - protein, 9 aa, Homo Sapiens
ELIEGEREL

SEQ ID NO: 98042 - protein, 9 aa, Homo Sapiens
ELQSTGRLL

SEQ ID NO: 98043 - protein, 9 aa, Homo Sapiens
EMEKGSPSL

SEQ ID NO: 98044 - protein, 9 aa, Homo Sapiens
ENITKQVEI

SEQ ID NO: 98045 - protein, 9 aa, Homo Sapiens
EPNFPEILL

SEQ ID NO: 98046 - protein, 9 aa, Homo Sapiens
EQLNEQLVT

SEQ ID NO: 98047 - protein, 9 aa, Homo Sapiens
ESMVELLDL

SEQ ID NO: 98048 - protein, 9 aa, Homo Sapiens
EVDGKQVEL

SEQ ID NO: 98049 - protein, 9 aa, Homo Sapiens
FEAACPASL

SEQ ID NO: 98050 - protein, 9 aa, Homo Sapiens
FEAPDQKTL

SEQ ID NO: 98051 - protein, 9 aa, Homo Sapiens
FEAQGKPEL

SEQ ID NO: 98052 - protein, 9 aa, Homo Sapiens
FEDAAEIRL

SEQ ID NO: 98053 - protein, 9 aa, Homo Sapiens
FEDEKPALL

SEQ ID NO: 98054 - protein, 9 aa, Homo Sapiens
FEDESEGLL

SEQ ID NO: 98055 - protein, 9 aa, Homo Sapiens
FEDGQKIVV

SEQ ID NO: 98056 - protein, 9 aa, Homo Sapiens
FEDHNPPQL

SEQ ID NO: 98057 - protein, 9 aa, Homo Sapiens
FEDKSAYAL

SEQ ID NO: 98058 - protein, 9 aa, Homo Sapiens
FEDSFSSIL

SEQ ID NO: 98059 - protein, 9 aa, Homo Sapiens
FEDVGRQVL

SEQ ID NO: 98060 - protein, 9 aa, Homo Sapiens
FEEAERTYL

SEQ ID NO: 98061 - protein, 9 aa, Homo Sapiens
FEEDPEISL

SEQ ID NO: 98062 - protein, 9 aa, Homo Sapiens
FEEGKKISL

SEQ ID NO: 98063 - protein, 9 aa, Homo Sapiens
FEENTQHLL

SEQ ID NO: 98064 - protein, 9 aa, Homo Sapiens
FEFEYQTKV

SEQ ID NO: 98065 - protein, 9 aa, Homo Sapiens
FEFGGPEVL

SEQ ID NO: 98066 - protein, 9 aa, Homo Sapiens
FEFPNKVVL

SEQ ID NO: 98067 - protein, 9 aa, Homo Sapiens
FEHHGQVRL

SEQ ID NO: 98068 - protein, 9 aa, Homo Sapiens
FEIPIKVRL

SEQ ID NO: 98069 - protein, 9 aa, Homo Sapiens
FEITPPVVL

SEQ ID NO: 98070 - protein, 9 aa, Homo Sapiens
FEITQPPLL

SEQ ID NO: 98071 - protein, 9 aa, Homo Sapiens
FEKEETFTL

SEQ ID NO: 98072 - protein, 9 aa, Homo Sapiens
FELEKSESL

SEQ ID NO: 98073 - protein, 9 aa, Homo Sapiens
FEMATRAAL

SEQ ID NO: 98074 - protein, 9 aa, Homo Sapiens
FEMKELPQL

SEQ ID NO: 98075 - protein, 9 aa, Homo Sapiens
FEMPYVVRL

SEQ ID NO: 98076 - protein, 9 aa, Homo Sapiens
FEQQMVEKL

SEQ ID NO: 98077 - protein, 9 aa, Homo Sapiens
FESDLHSLL

SEQ ID NO: 98078 - protein, 9 aa, Homo Sapiens
FESEKEIEL

SEQ ID NO: 98079 - protein, 9 aa, Homo Sapiens
FESGISQAL

SEQ ID NO: 98080 - protein, 9 aa, Homo Sapiens
FESQDTVAL

SEQ ID NO: 98081 - protein, 9 aa, Homo Sapiens
FESQSEDEL

SEQ ID NO: 98082 - protein, 9 aa, Homo Sapiens
FESSPDPEL

SEQ ID NO: 98083 - protein, 9 aa, Homo Sapiens
FETEVDKIL

SEQ ID NO: 98084 - protein, 9 aa, Homo Sapiens
FETFNTPAM

SEQ ID NO: 98085 - protein, 9 aa, Homo Sapiens
FETPTEISL

SEQ ID NO: 98086 - protein, 9 aa, Homo Sapiens
FEVDSRVYL

SEQ ID NO: 98087 - protein, 9 aa, Homo Sapiens
FEVEKQALL

SEQ ID NO: 98088 - protein, 9 aa, Homo Sapiens
FEVETPAVL

SEQ ID NO: 98089 - protein, 9 aa, Homo Sapiens
FEVGKKICL

SEQ ID NO: 98090 - protein, 9 aa, Homo Sapiens
FEVNIPTDL

SEQ ID NO: 98091 - protein, 9 aa, Homo Sapiens
FEWAKNSPL

SEQ ID NO: 98092 - protein, 9 aa, Homo Sapiens
FSGANKEKL

SEQ ID NO: 98093 - protein, 9 aa, Homo Sapiens
GEAAKREIL

SEQ ID NO: 98094 - protein, 9 aa, Homo Sapiens
GEADPSIQL

SEQ ID NO: 98095 - protein, 9 aa, Homo Sapiens
GEAEKGAVL

SEQ ID NO: 98096 - protein, 9 aa, Homo Sapiens
GEAEVRTLL

SEQ ID NO: 98097 - protein, 9 aa, Homo Sapiens
GEAEYVVAL

SEQ ID NO: 98098 - protein, 9 aa, Homo Sapiens
GEAGPGRAL

SEQ ID NO: 98099 - protein, 9 aa, Homo Sapiens
GEAGPIHHL

SEQ ID NO: 98100 - protein, 9 aa, Homo Sapiens
GEAGSDVSL

SEQ ID NO: 98101 - protein, 9 aa, Homo Sapiens
GEAGSITHL

SEQ ID NO: 98102 - protein, 9 aa, Homo Sapiens
GEAHLKTIL

SEQ ID NO: 98103 - protein, 9 aa, Homo Sapiens
GEALGFVSL

SEQ ID NO: 98104 - protein, 9 aa, Homo Sapiens
GEANEEFAL

SEQ ID NO: 98105 - protein, 9 aa, Homo Sapiens
GEANVMKAL

SEQ ID NO: 98106 - protein, 9 aa, Homo Sapiens
GEAPVLIMI

SEQ ID NO: 98107 - protein, 9 aa, Homo Sapiens
GEAQSKETL

SEQ ID NO: 98108 - protein, 9 aa, Homo Sapiens
GEARKTEVL

SEQ ID NO: 98109 - protein, 9 aa, Homo Sapiens
GEARVGSEL

SEQ ID NO: 98110 - protein, 9 aa, Homo Sapiens
GEASFPVMV

SEQ ID NO: 98111 - protein, 9 aa, Homo Sapiens
GEAVDRSLL

SEQ ID NO: 98112 - protein, 9 aa, Homo Sapiens
GECGKAFTL

SEQ ID NO: 98113 - protein, 9 aa, Homo Sapiens
GECNPDLRL

SEQ ID NO: 98114 - protein, 9 aa, Homo Sapiens
GECRGVIAL

SEQ ID NO: 98115 - protein, 9 aa, Homo Sapiens
GECVADTQL

SEQ ID NO: 98116 - protein, 9 aa, Homo Sapiens
GEDDKMPPL

SEQ ID NO: 98117 - protein, 9 aa, Homo Sapiens
GEDEPLHAL

SEQ ID NO: 98118 - protein, 9 aa, Homo Sapiens
GEDHPEMAL

SEQ ID NO: 98119 - protein, 9 aa, Homo Sapiens
GEDIPREML

SEQ ID NO: 98120 - protein, 9 aa, Homo Sapiens
GEDKGGYVI

SEQ ID NO: 98121 - protein, 9 aa, Homo Sapiens
GEDKGIKAL

SEQ ID NO: 98122 - protein, 9 aa, Homo Sapiens
GEDLEKVTL

SEQ ID NO: 98123 - protein, 9 aa, Homo Sapiens
GEDLPTIVI

SEQ ID NO: 98124 - protein, 9 aa, Homo Sapiens
GEDMTPTLL

SEQ ID NO: 98125 - protein, 9 aa, Homo Sapiens
GEDPTSVAI

SEQ ID NO: 98126 - protein, 9 aa, Homo Sapiens
GEDSRPPRL

SEQ ID NO: 98127 - protein, 9 aa, Homo Sapiens
GEDTLMEYL

SEQ ID NO: 98128 - protein, 9 aa, Homo Sapiens
GEDTPVTKL

SEQ ID NO: 98129 - protein, 9 aa, Homo Sapiens
GEDVRSALL

SEQ ID NO: 98130 - protein, 9 aa, Homo Sapiens
GEEAKPIIL

SEQ ID NO: 98131 - protein, 9 aa, Homo Sapiens
GEEARVTQL

SEQ ID NO: 98132 - protein, 9 aa, Homo Sapiens
GEEAVPVAL

SEQ ID NO: 98133 - protein, 9 aa, Homo Sapiens
GEEEDGPVL

SEQ ID NO: 98134 - protein, 9 aa, Homo Sapiens
GEEEKKIFL

SEQ ID NO: 98135 - protein, 9 aa, Homo Sapiens
GEEELASKL

SEQ ID NO: 98136 - protein, 9 aa, Homo Sapiens
GEEGYGRSL

SEQ ID NO: 98137 - protein, 9 aa, Homo Sapiens
GEEILITVL

SEQ ID NO: 98138 - protein, 9 aa, Homo Sapiens
GEEKEAATL

SEQ ID NO: 98139 - protein, 9 aa, Homo Sapiens
GEEKLKEIL

SEQ ID NO: 98140 - protein, 9 aa, Homo Sapiens
GEELLHSVL

SEQ ID NO: 98141 - protein, 9 aa, Homo Sapiens
GEENGAHTI

SEQ ID NO: 98142 - protein, 9 aa, Homo Sapiens
GEENQVLEL

SEQ ID NO: 98143 - protein, 9 aa, Homo Sapiens
GEEPAGICL

SEQ ID NO: 98144 - protein, 9 aa, Homo Sapiens
GEEPGSQGL

SEQ ID NO: 98145 - protein, 9 aa, Homo Sapiens
GEEQNKEAL

SEQ ID NO: 98146 - protein, 9 aa, Homo Sapiens
GEEQNRVQL

SEQ ID NO: 98147 - protein, 9 aa, Homo Sapiens
GEEVEVHNL

SEQ ID NO: 98148 - protein, 9 aa, Homo Sapiens
GEFADPFKL

SEQ ID NO: 98149 - protein, 9 aa, Homo Sapiens
GEFEKIMQL

SEQ ID NO: 98150 - protein, 9 aa, Homo Sapiens
GEFGEIEAI

SEQ ID NO: 98151 - protein, 9 aa, Homo Sapiens
GEFQELMKL

SEQ ID NO: 98152 - protein, 9 aa, Homo Sapiens
GEFRAVTEL

SEQ ID NO: 98153 - protein, 9 aa, Homo Sapiens
GEFSASPML

SEQ ID NO: 98154 - protein, 9 aa, Homo Sapiens
GEFSEPVTL

SEQ ID NO: 98155 - protein, 9 aa, Homo Sapiens
GEGAPAWVL

SEQ ID NO: 98156 - protein, 9 aa, Homo Sapiens
GEGDLSCIL

SEQ ID NO: 98157 - protein, 9 aa, Homo Sapiens
GEGKPTPAL

SEQ ID NO: 98158 - protein, 9 aa, Homo Sapiens
GEGPLDVRL

SEQ ID NO: 98159 - protein, 9 aa, Homo Sapiens
GEGSGVEIL

SEQ ID NO: 98160 - protein, 9 aa, Homo Sapiens
GEGTGEVVL

SEQ ID NO: 98161 - protein, 9 aa, Homo Sapiens
GEHCDFTIL

SEQ ID NO: 98162 - protein, 9 aa, Homo Sapiens
GEHGLIIRV

SEQ ID NO: 98163 - protein, 9 aa, Homo Sapiens
GEHHSTPSL

SEQ ID NO: 98164 - protein, 9 aa, Homo Sapiens
GEHLKTDLL

SEQ ID NO: 98165 - protein, 9 aa, Homo Sapiens
GEHLVSVTL

SEQ ID NO: 98166 - protein, 9 aa, Homo Sapiens
GEHTLLVTV

SEQ ID NO: 98167 - protein, 9 aa, Homo Sapiens
GEHVKAIEI

SEQ ID NO: 98168 - protein, 9 aa, Homo Sapiens
GEIEECEVL

SEQ ID NO: 98169 - protein, 9 aa, Homo Sapiens
GEIGTKTTL

SEQ ID NO: 98170 - protein, 9 aa, Homo Sapiens
GEIINTHTL

SEQ ID NO: 98171 - protein, 9 aa, Homo Sapiens
GEIKHVSSL

SEQ ID NO: 98172 - protein, 9 aa, Homo Sapiens
GEIPVQEHL

SEQ ID NO: 98173 - protein, 9 aa, Homo Sapiens
GEIQAGAKL

SEQ ID NO: 98174 - protein, 9 aa, Homo Sapiens
GEIRTITVV

SEQ ID NO: 98175 - protein, 9 aa, Homo Sapiens
GEISEKAKL

SEQ ID NO: 98176 - protein, 9 aa, Homo Sapiens
GEISQEEVL

SEQ ID NO: 98177 - protein, 9 aa, Homo Sapiens
GEITGEVRM

SEQ ID NO: 98178 - protein, 9 aa, Homo Sapiens
GEIVEKIGV

SEQ ID NO: 98179 - protein, 9 aa, Homo Sapiens
GEKKDEVYL

SEQ ID NO: 98180 - protein, 9 aa, Homo Sapiens
GEKNVFEAL

SEQ ID NO: 98181 - protein, 9 aa, Homo Sapiens
GEKSGIEIL

SEQ ID NO: 98182 - protein, 9 aa, Homo Sapiens
GEKSQAPTL

SEQ ID NO: 98183 - protein, 9 aa, Homo Sapiens
GELAPSHGL

SEQ ID NO: 98184 - protein, 9 aa, Homo Sapiens
GELARAVVL

SEQ ID NO: 98185 - protein, 9 aa, Homo Sapiens
GELDHVVEI

SEQ ID NO: 98186 - protein, 9 aa, Homo Sapiens
GELEKDPKL

SEQ ID NO: 98187 - protein, 9 aa, Homo Sapiens
GELEYATKI

SEQ ID NO: 98188 - protein, 9 aa, Homo Sapiens
GELFSSPHL

SEQ ID NO: 98189 - protein, 9 aa, Homo Sapiens
GELHGHFML

SEQ ID NO: 98190 - protein, 9 aa, Homo Sapiens
GELIRPTTL

SEQ ID NO: 98191 - protein, 9 aa, Homo Sapiens
GELITQREL

SEQ ID NO: 98192 - protein, 9 aa, Homo Sapiens
GELKIAYQL

SEQ ID NO: 98193 - protein, 9 aa, Homo Sapiens
GELLMHPVL

SEQ ID NO: 98194 - protein, 9 aa, Homo Sapiens
GELQKAIDL

SEQ ID NO: 98195 - protein, 9 aa, Homo Sapiens
GELSIQPSL

SEQ ID NO: 98196 - protein, 9 aa, Homo Sapiens
GELSLPVHL

SEQ ID NO: 98197 - protein, 9 aa, Homo Sapiens
GELTDLHGL

SEQ ID NO: 98198 - protein, 9 aa, Homo Sapiens
GEMEHSAAL

SEQ ID NO: 98199 - protein, 9 aa, Homo Sapiens
GEMERDCQI

SEQ ID NO: 98200 - protein, 9 aa, Homo Sapiens
GEMKFQWDL

SEQ ID NO: 98201 - protein, 9 aa, Homo Sapiens
GEMREMQQL

SEQ ID NO: 98202 - protein, 9 aa, Homo Sapiens
GEMRNAVCI

SEQ ID NO: 98203 - protein, 9 aa, Homo Sapiens
GEMVALPPV

SEQ ID NO: 98204 - protein, 9 aa, Homo Sapiens
GENEDLLKL

SEQ ID NO: 98205 - protein, 9 aa, Homo Sapiens
GENLPTIIL

SEQ ID NO: 98206 - protein, 9 aa, Homo Sapiens
GENRGPILL

SEQ ID NO: 98207 - protein, 9 aa, Homo Sapiens
GENSRNSIL

SEQ ID NO: 98208 - protein, 9 aa, Homo Sapiens
GENVEKQQL

SEQ ID NO: 98209 - protein, 9 aa, Homo Sapiens
GEPDHNEAL

SEQ ID NO: 98210 - protein, 9 aa, Homo Sapiens
GEPENTYIL

SEQ ID NO: 98211 - protein, 9 aa, Homo Sapiens
GEPFASHSL

SEQ ID NO: 98212 - protein, 9 aa, Homo Sapiens
GEPHSSPEL

SEQ ID NO: 98213 - protein, 9 aa, Homo Sapiens
GEPMNFVHL

SEQ ID NO: 98214 - protein, 9 aa, Homo Sapiens
GEPNIDSPL

SEQ ID NO: 98215 - protein, 9 aa, Homo Sapiens
GEPSLYNSL

SEQ ID NO: 98216 - protein, 9 aa, Homo Sapiens
GEQPLQPVL

SEQ ID NO: 98217 - protein, 9 aa, Homo Sapiens
GEQREPETL

SEQ ID NO: 98218 - protein, 9 aa, Homo Sapiens
GEQSPNVSL

SEQ ID NO: 98219 - protein, 9 aa, Homo Sapiens
GESATLRSL

SEQ ID NO: 98220 - protein, 9 aa, Homo Sapiens
GESEKLVRL

SEQ ID NO: 98221 - protein, 9 aa, Homo Sapiens
GESGKSTFI

SEQ ID NO: 98222 - protein, 9 aa, Homo Sapiens
GESILPTTL

SEQ ID NO: 98223 - protein, 9 aa, Homo Sapiens
GESKYLMAL

SEQ ID NO: 98224 - protein, 9 aa, Homo Sapiens
GESLVREPL

SEQ ID NO: 98225 - protein, 9 aa, Homo Sapiens
GESQTDIEI

SEQ ID NO: 98226 - protein, 9 aa, Homo Sapiens
GESRVPLTL

SEQ ID NO: 98227 - protein, 9 aa, Homo Sapiens
GESSLSPSL

SEQ ID NO: 98228 - protein, 9 aa, Homo Sapiens
GESVTKLTL

SEQ ID NO: 98229 - protein, 9 aa, Homo Sapiens
GETAFAFHL

SEQ ID NO: 98230 - protein, 9 aa, Homo Sapiens
GETEESEKL

SEQ ID NO: 98231 - protein, 9 aa, Homo Sapiens
GETGKGTLL

SEQ ID NO: 98232 - protein, 9 aa, Homo Sapiens
GETKAKVLL

SEQ ID NO: 98233 - protein, 9 aa, Homo Sapiens
GETLGIIGL

SEQ ID NO: 98234 - protein, 9 aa, Homo Sapiens
GETLPEQHL

SEQ ID NO: 98235 - protein, 9 aa, Homo Sapiens
GETNDFELL

SEQ ID NO: 98236 - protein, 9 aa, Homo Sapiens
GETPEAAAL

SEQ ID NO: 98237 - protein, 9 aa, Homo Sapiens
GETPQVAVI

SEQ ID NO: 98238 - protein, 9 aa, Homo Sapiens
GETQDFHSL

SEQ ID NO: 98239 - protein, 9 aa, Homo Sapiens
GETQKTISL

SEQ ID NO: 98240 - protein, 9 aa, Homo Sapiens
GETSDIYVL

SEQ ID NO: 98241 - protein, 9 aa, Homo Sapiens
GETSIAECL

SEQ ID NO: 98242 - protein, 9 aa, Homo Sapiens
GETSTDLKL

SEQ ID NO: 98243 - protein, 9 aa, Homo Sapiens
GETSTVEKL

SEQ ID NO: 98244 - protein, 9 aa, Homo Sapiens
GEVDLPSEL

SEQ ID NO: 98245 - protein, 9 aa, Homo Sapiens
GEVDPKVAL

SEQ ID NO: 98246 - protein, 9 aa, Homo Sapiens
GEVGATSAL

SEQ ID NO: 98247 - protein, 9 aa, Homo Sapiens
GEVGHHIDL

SEQ ID NO: 98248 - protein, 9 aa, Homo Sapiens
GEVGSEVHL

SEQ ID NO: 98249 - protein, 9 aa, Homo Sapiens
GEVKDFPDL

SEQ ID NO: 98250 - protein, 9 aa, Homo Sapiens
GEVLEKSLL

SEQ ID NO: 98251 - protein, 9 aa, Homo Sapiens
GEVLIDTHL

SEQ ID NO: 98252 - protein, 9 aa, Homo Sapiens
GEVNVLDNL

SEQ ID NO: 98253 - protein, 9 aa, Homo Sapiens
GEVPFNHEI

SEQ ID NO: 98254 - protein, 9 aa, Homo Sapiens
GEVPKFKAL

SEQ ID NO: 98255 - protein, 9 aa, Homo Sapiens
GEVPTIESL

SEQ ID NO: 98256 - protein, 9 aa, Homo Sapiens
GEVREDLRL

SEQ ID NO: 98257 - protein, 9 aa, Homo Sapiens
GEVRLGGSL

SEQ ID NO: 98258 - protein, 9 aa, Homo Sapiens
GEVSARQEL

SEQ ID NO: 98259 - protein, 9 aa, Homo Sapiens
GEVTDFLRL

SEQ ID NO: 98260 - protein, 9 aa, Homo Sapiens
GEVTKQTVL

SEQ ID NO: 98261 - protein, 9 aa, Homo Sapiens
GEVTYVELL

SEQ ID NO: 98262 - protein, 9 aa, Homo Sapiens
GEVVDCVIM

SEQ ID NO: 98263 - protein, 9 aa, Homo Sapiens
GEVVGKFYL

SEQ ID NO: 98264 - protein, 9 aa, Homo Sapiens
GEYRAVTEL

SEQ ID NO: 98265 - protein, 9 aa, Homo Sapiens
GEYSDPVTL

SEQ ID NO: 98266 - protein, 9 aa, Homo Sapiens
HEAAARIQL

SEQ ID NO: 98267 - protein, 9 aa, Homo Sapiens
HEAATKAVL

SEQ ID NO: 98268 - protein, 9 aa, Homo Sapiens
HEADKTYML

SEQ ID NO: 98269 - protein, 9 aa, Homo Sapiens
HEADVDVLM

SEQ ID NO: 98270 - protein, 9 aa, Homo Sapiens
HEAEPVRTL

SEQ ID NO: 98271 - protein, 9 aa, Homo Sapiens
HEAERNIAL

SEQ ID NO: 98272 - protein, 9 aa, Homo Sapiens
HEAERTEVL

SEQ ID NO: 98273 - protein, 9 aa, Homo Sapiens
HEAVKAIVL

SEQ ID NO: 98274 - protein, 9 aa, Homo Sapiens
HECASINRI

SEQ ID NO: 98275 - protein, 9 aa, Homo Sapiens
HECIPQAIL

SEQ ID NO: 98276 - protein, 9 aa, Homo Sapiens
HEDCGVASL

SEQ ID NO: 98277 - protein, 9 aa, Homo Sapiens
HEDDHNFEL

SEQ ID NO: 98278 - protein, 9 aa, Homo Sapiens
HEDIVAVEL

SEQ ID NO: 98279 - protein, 9 aa, Homo Sapiens
HEDKIRVVL

SEQ ID NO: 98280 - protein, 9 aa, Homo Sapiens
HEDLGHVAL

SEQ ID NO: 98281 - protein, 9 aa, Homo Sapiens
HEDLLNITL

SEQ ID NO: 98282 - protein, 9 aa, Homo Sapiens
HEDPGQATL

SEQ ID NO: 98283 - protein, 9 aa, Homo Sapiens
HEDPVIAVF

SEQ ID NO: 98284 - protein, 9 aa, Homo Sapiens
HEEAGIFKL

SEQ ID NO: 98285 - protein, 9 aa, Homo Sapiens
HEEDRKDFL

SEQ ID NO: 98286 - protein, 9 aa, Homo Sapiens
HEEDRQELL

SEQ ID NO: 98287 - protein, 9 aa, Homo Sapiens
HEEFSEHAL

SEQ ID NO: 98288 - protein, 9 aa, Homo Sapiens
HEEIDLVSL

SEQ ID NO: 98289 - protein, 9 aa, Homo Sapiens
HEEQKSVRL

SEQ ID NO: 98290 - protein, 9 aa, Homo Sapiens
HEESQTATL

SEQ ID NO: 98291 - protein, 9 aa, Homo Sapiens
HEFDGDEEF

SEQ ID NO: 98292 - protein, 9 aa, Homo Sapiens
HEFEELFRL

SEQ ID NO: 98293 - protein, 9 aa, Homo Sapiens
HEFFHILNL

SEQ ID NO: 98294 - protein, 9 aa, Homo Sapiens
HEFHSQENL

SEQ ID NO: 98295 - protein, 9 aa, Homo Sapiens
HEFSKTEEL

SEQ ID NO: 98296 - protein, 9 aa, Homo Sapiens
HEFSREPSL

SEQ ID NO: 98297 - protein, 9 aa, Homo Sapiens
HEFSSPSHL

SEQ ID NO: 98298 - protein, 9 aa, Homo Sapiens
HEGKVFISL

SEQ ID NO: 98299 - protein, 9 aa, Homo Sapiens
HEGTDSYEL

SEQ ID NO: 98300 - protein, 9 aa, Homo Sapiens
HEGTDVIML

SEQ ID NO: 98301 - protein, 9 aa, Homo Sapiens
HEHRLPHVL

SEQ ID NO: 98302 - protein, 9 aa, Homo Sapiens
HEIDRYTAI

SEQ ID NO: 98303 - protein, 9 aa, Homo Sapiens
HEIGHIFGL

SEQ ID NO: 98304 - protein, 9 aa, Homo Sapiens
HEIHDPQHL

SEQ ID NO: 98305 - protein, 9 aa, Homo Sapiens
HEIKSLEDL

SEQ ID NO: 98306 - protein, 9 aa, Homo Sapiens
HEILCKLSL

SEQ ID NO: 98307 - protein, 9 aa, Homo Sapiens
HEILNEVDL

SEQ ID NO: 98308 - protein, 9 aa, Homo Sapiens
HEIQEKLGL

SEQ ID NO: 98309 - protein, 9 aa, Homo Sapiens
HEKQPDVIL

SEQ ID NO: 98310 - protein, 9 aa, Homo Sapiens
HELDQGQQL

SEQ ID NO: 98311 - protein, 9 aa, Homo Sapiens
HELEKKIEL

SEQ ID NO: 98312 - protein, 9 aa, Homo Sapiens
HELLERIGL

SEQ ID NO: 98313 - protein, 9 aa, Homo Sapiens
HELPESMCL

SEQ ID NO: 98314 - protein, 9 aa, Homo Sapiens
HEMALRIVL

SEQ ID NO: 98315 - protein, 9 aa, Homo Sapiens
HENEDIYKL

SEQ ID NO: 98316 - protein, 9 aa, Homo Sapiens
HENSDHIIL

SEQ ID NO: 98317 - protein, 9 aa, Homo Sapiens
HEPEKSFSL

SEQ ID NO: 98318 - protein, 9 aa, Homo Sapiens
HEQANVESL

SEQ ID NO: 98319 - protein, 9 aa, Homo Sapiens
HEQEEIFKL

SEQ ID NO: 98320 - protein, 9 aa, Homo Sapiens
HEQGLSTAL

SEQ ID NO: 98321 - protein, 9 aa, Homo Sapiens
HEQKEQISL

SEQ ID NO: 98322 - protein, 9 aa, Homo Sapiens
HESETTTSL

SEQ ID NO: 98323 - protein, 9 aa, Homo Sapiens
HESGASIKI

SEQ ID NO: 98324 - protein, 9 aa, Homo Sapiens
HESLQNPLL

SEQ ID NO: 98325 - protein, 9 aa, Homo Sapiens
HESQLSVEL

SEQ ID NO: 98326 - protein, 9 aa, Homo Sapiens
HETAVSVSL

SEQ ID NO: 98327 - protein, 9 aa, Homo Sapiens
HETECITFL

SEQ ID NO: 98328 - protein, 9 aa, Homo Sapiens
HETPVEVEL

SEQ ID NO: 98329 - protein, 9 aa, Homo Sapiens
HETSLPVQL

SEQ ID NO: 98330 - protein, 9 aa, Homo Sapiens
HEVEKMFTL

SEQ ID NO: 98331 - protein, 9 aa, Homo Sapiens
HEVGIGSVL

SEQ ID NO: 98332 - protein, 9 aa, Homo Sapiens
HEVKEAQTL

SEQ ID NO: 98333 - protein, 9 aa, Homo Sapiens
HEVMEQQTI

SEQ ID NO: 98334 - protein, 9 aa, Homo Sapiens
HEVPEKTSI

SEQ ID NO: 98335 - protein, 9 aa, Homo Sapiens
HEVPSGNSL

SEQ ID NO: 98336 - protein, 9 aa, Homo Sapiens
HEVRIQPSL

SEQ ID NO: 98337 - protein, 9 aa, Homo Sapiens
HEWGELVQL

SEQ ID NO: 98338 - protein, 9 aa, Homo Sapiens
HEWMKSEEL

SEQ ID NO: 98339 - protein, 9 aa, Homo Sapiens
HEYYQPTAL

SEQ ID NO: 98340 - protein, 9 aa, Homo Sapiens
IEAPVDADL

SEQ ID NO: 98341 - protein, 9 aa, Homo Sapiens
IECGWKDQL

SEQ ID NO: 98342 - protein, 9 aa, Homo Sapiens
IECIEKTLL

SEQ ID NO: 98343 - protein, 9 aa, Homo Sapiens
IEDEIATIL

SEQ ID NO: 98344 - protein, 9 aa, Homo Sapiens
IEDEYQVFL

SEQ ID NO: 98345 - protein, 9 aa, Homo Sapiens
IEDKVKALL

SEQ ID NO: 98346 - protein, 9 aa, Homo Sapiens
IEDSRVYEL

SEQ ID NO: 98347 - protein, 9 aa, Homo Sapiens
IEEERNVPL

SEQ ID NO: 98348 - protein, 9 aa, Homo Sapiens
IEENIPELL

SEQ ID NO: 98349 - protein, 9 aa, Homo Sapiens
IEESGEHII

SEQ ID NO: 98350 - protein, 9 aa, Homo Sapiens
IEFSDKESV

SEQ ID NO: 98351 - protein, 9 aa, Homo Sapiens
IEFSIPDSL

SEQ ID NO: 98352 - protein, 9 aa, Homo Sapiens
IEHEGQECL

SEQ ID NO: 98353 - protein, 9 aa, Homo Sapiens
IEHLLPLFL

SEQ ID NO: 98354 - protein, 9 aa, Homo Sapiens
IEIDSPYEI

SEQ ID NO: 98355 - protein, 9 aa, Homo Sapiens
IEIGDGAEL

SEQ ID NO: 98356 - protein, 9 aa, Homo Sapiens
IEMNEPVQL

SEQ ID NO: 98357 - protein, 9 aa, Homo Sapiens
IEMQAITAL

SEQ ID NO: 98358 - protein, 9 aa, Homo Sapiens
IENEEPVVL

SEQ ID NO: 98359 - protein, 9 aa, Homo Sapiens
IEPADAHVL

SEQ ID NO: 98360 - protein, 9 aa, Homo Sapiens
IEPGVSVSL

SEQ ID NO: 98361 - protein, 9 aa, Homo Sapiens
IEQEAAVEL

SEQ ID NO: 98362 - protein, 9 aa, Homo Sapiens
IEQEIRILL

SEQ ID NO: 98363 - protein, 9 aa, Homo Sapiens
IEQEQKLAL

SEQ ID NO: 98364 - protein, 9 aa, Homo Sapiens
IERCFQEML

SEQ ID NO: 98365 - protein, 9 aa, Homo Sapiens
IESHPDNAL

SEQ ID NO: 98366 - protein, 9 aa, Homo Sapiens
IESNHPIVL

SEQ ID NO: 98367 - protein, 9 aa, Homo Sapiens
IESPGQDLL

SEQ ID NO: 98368 - protein, 9 aa, Homo Sapiens
IESPLFLKL

SEQ ID NO: 98369 - protein, 9 aa, Homo Sapiens
IESSDVIRL

SEQ ID NO: 98370 - protein, 9 aa, Homo Sapiens
IESSVPCQL

SEQ ID NO: 98371 - protein, 9 aa, Homo Sapiens
IESVIKSNL

SEQ ID NO: 98372 - protein, 9 aa, Homo Sapiens
IEVENKEVL

SEQ ID NO: 98373 - protein, 9 aa, Homo Sapiens
IEVVCNDRL

SEQ ID NO: 98374 - protein, 9 aa, Homo Sapiens
IEYAKPTRL

SEQ ID NO: 98375 - protein, 9 aa, Homo Sapiens
IEYDSPEQL

SEQ ID NO: 98376 - protein, 9 aa, Homo Sapiens
IEYQGDPEL

SEQ ID NO: 98377 - protein, 9 aa, Homo Sapiens
KEAALSTAL

SEQ ID NO: 98378 - protein, 9 aa, Homo Sapiens
KEAEFLQKL

SEQ ID NO: 98379 - protein, 9 aa, Homo Sapiens
KEAEILEVL

SEQ ID NO: 98380 - protein, 9 aa, Homo Sapiens
KEAEKSPQL

SEQ ID NO: 98381 - protein, 9 aa, Homo Sapiens
KEAERDVSL

SEQ ID NO: 98382 - protein, 9 aa, Homo Sapiens
KEAEVQTWL

SEQ ID NO: 98383 - protein, 9 aa, Homo Sapiens
KEAFAKVDL

SEQ ID NO: 98384 - protein, 9 aa, Homo Sapiens
KEAGSIVRL

SEQ ID NO: 98385 - protein, 9 aa, Homo Sapiens
KEAPEEAQL

SEQ ID NO: 98386 - protein, 9 aa, Homo Sapiens
KEAPPPVLL

SEQ ID NO: 98387 - protein, 9 aa, Homo Sapiens
KEAPTAYSL

SEQ ID NO: 98388 - protein, 9 aa, Homo Sapiens
KEAVCEVAL

SEQ ID NO: 98389 - protein, 9 aa, Homo Sapiens
KEAVIKHSL

SEQ ID NO: 98390 - protein, 9 aa, Homo Sapiens
KECGKAFSI

SEQ ID NO: 98391 - protein, 9 aa, Homo Sapiens
KECNAKIMI

SEQ ID NO: 98392 - protein, 9 aa, Homo Sapiens
KECQKIIRL

SEQ ID NO: 98393 - protein, 9 aa, Homo Sapiens
KEDCFFYSL

SEQ ID NO: 98394 - protein, 9 aa, Homo Sapiens
KEDDLDVVL

SEQ ID NO: 98395 - protein, 9 aa, Homo Sapiens
KEDDPKAAL

SEQ ID NO: 98396 - protein, 9 aa, Homo Sapiens
KEDEIKQWL

SEQ ID NO: 98397 - protein, 9 aa, Homo Sapiens
KEDELRTVL

SEQ ID NO: 98398 - protein, 9 aa, Homo Sapiens
KEDENVPFL

SEQ ID NO: 98399 - protein, 9 aa, Homo Sapiens
KEDEQQQAL

SEQ ID NO: 98400 - protein, 9 aa, Homo Sapiens
KEDFSSFQL

SEQ ID NO: 98401 - protein, 9 aa, Homo Sapiens
KEDLGACLL

SEQ ID NO: 98402 - protein, 9 aa, Homo Sapiens
KEDNTIYRL

SEQ ID NO: 98403 - protein, 9 aa, Homo Sapiens
KEDPTSFRL

SEQ ID NO: 98404 - protein, 9 aa, Homo Sapiens
KEDQVIQLM

SEQ ID NO: 98405 - protein, 9 aa, Homo Sapiens
KEDSDEVHL

SEQ ID NO: 98406 - protein, 9 aa, Homo Sapiens
KEDSGKIKL

SEQ ID NO: 98407 - protein, 9 aa, Homo Sapiens
KEDSHPFDL

SEQ ID NO: 98408 - protein, 9 aa, Homo Sapiens
KEDSKLIAL

SEQ ID NO: 98409 - protein, 9 aa, Homo Sapiens
KEEDGSLSL

SEQ ID NO: 98410 - protein, 9 aa, Homo Sapiens
KEEDLQWVL

SEQ ID NO: 98411 - protein, 9 aa, Homo Sapiens
KEEEHAPEL

SEQ ID NO: 98412 - protein, 9 aa, Homo Sapiens
KEEEKPVML

SEQ ID NO: 98413 - protein, 9 aa, Homo Sapiens
KEEELQAAL

SEQ ID NO: 98414 - protein, 9 aa, Homo Sapiens
KEEEPSVKL

SEQ ID NO: 98415 - protein, 9 aa, Homo Sapiens
KEEHLYILI

SEQ ID NO: 98416 - protein, 9 aa, Homo Sapiens
KEEIGNVQL

SEQ ID NO: 98417 - protein, 9 aa, Homo Sapiens
KEEKDFTIL

SEQ ID NO: 98418 - protein, 9 aa, Homo Sapiens
KEEPDGPAL

SEQ ID NO: 98419 - protein, 9 aa, Homo Sapiens
KEEPVAPEL

SEQ ID NO: 98420 - protein, 9 aa, Homo Sapiens
KEESIVSSL

SEQ ID NO: 98421 - protein, 9 aa, Homo Sapiens
KEESMKETL

SEQ ID NO: 98422 - protein, 9 aa, Homo Sapiens
KEESQQMVL

SEQ ID NO: 98423 - protein, 9 aa, Homo Sapiens
KEESVESSL

SEQ ID NO: 98424 - protein, 9 aa, Homo Sapiens
KEETNIVKL

SEQ ID NO: 98425 - protein, 9 aa, Homo Sapiens
KEEVSRQEL

SEQ ID NO: 98426 - protein, 9 aa, Homo Sapiens
KEEYLKPVL

SEQ ID NO: 98427 - protein, 9 aa, Homo Sapiens
KEFAQIIKI

SEQ ID NO: 98428 - protein, 9 aa, Homo Sapiens
KEFDGKSLV

SEQ ID NO: 98429 - protein, 9 aa, Homo Sapiens
KEFDQNVKL

SEQ ID NO: 98430 - protein, 9 aa, Homo Sapiens
KEFEGKTLV

SEQ ID NO: 98431 - protein, 9 aa, Homo Sapiens
KEFIDNEMI

SEQ ID NO: 98432 - protein, 9 aa, Homo Sapiens
KEFKGDEIL

SEQ ID NO: 98433 - protein, 9 aa, Homo Sapiens
KEFNEDGAL

SEQ ID NO: 98434 - protein, 9 aa, Homo Sapiens
KEFPEKQEL

SEQ ID NO: 98435 - protein, 9 aa, Homo Sapiens
KEFSEENVL

SEQ ID NO: 98436 - protein, 9 aa, Homo Sapiens
KEFSGHSSL

SEQ ID NO: 98437 - protein, 9 aa, Homo Sapiens
KEGEEQPVL

SEQ ID NO: 98438 - protein, 9 aa, Homo Sapiens
KEGFPITAI

SEQ ID NO: 98439 - protein, 9 aa, Homo Sapiens
KEHEVTIFV

SEQ ID NO: 98440 - protein, 9 aa, Homo Sapiens
KEIDECVTL

SEQ ID NO: 98441 - protein, 9 aa, Homo Sapiens
KEIDIYANL

SEQ ID NO: 98442 - protein, 9 aa, Homo Sapiens
KEIDKEEHL

SEQ ID NO: 98443 - protein, 9 aa, Homo Sapiens
KEIEDFDSL

SEQ ID NO: 98444 - protein, 9 aa, Homo Sapiens
KEIEFGTSL

SEQ ID NO: 98445 - protein, 9 aa, Homo Sapiens
KEIEKDLRL

SEQ ID NO: 98446 - protein, 9 aa, Homo Sapiens
KEIESRVVF

SEQ ID NO: 98447 - protein, 9 aa, Homo Sapiens
KEIFLRELI

SEQ ID NO: 98448 - protein, 9 aa, Homo Sapiens
KEIGELTQL

SEQ ID NO: 98449 - protein, 9 aa, Homo Sapiens
KEIIQDVTL

SEQ ID NO: 98450 - protein, 9 aa, Homo Sapiens
KEIISSEML

SEQ ID NO: 98451 - protein, 9 aa, Homo Sapiens
KEIKEVIEL

SEQ ID NO: 98452 - protein, 9 aa, Homo Sapiens
KEILSGTKL

SEQ ID NO: 98453 - protein, 9 aa, Homo Sapiens
KEILSLDKL

SEQ ID NO: 98454 - protein, 9 aa, Homo Sapiens
KEINQNVEI

SEQ ID NO: 98455 - protein, 9 aa, Homo Sapiens
KEIPIPFYL

SEQ ID NO: 98456 - protein, 9 aa, Homo Sapiens
KEIQWETRL

SEQ ID NO: 98457 - protein, 9 aa, Homo Sapiens
KEISDLHYL

SEQ ID NO: 98458 - protein, 9 aa, Homo Sapiens
KEISNNDKL

SEQ ID NO: 98459 - protein, 9 aa, Homo Sapiens
KEITGETAL

SEQ ID NO: 98460 - protein, 9 aa, Homo Sapiens
KEKEFQEEL

SEQ ID NO: 98461 - protein, 9 aa, Homo Sapiens
KEKEPEEEL

SEQ ID NO: 98462 - protein, 9 aa, Homo Sapiens
KEKIQPEIL

SEQ ID NO: 98463 - protein, 9 aa, Homo Sapiens
KEKLCYVAL

SEQ ID NO: 98464 - protein, 9 aa, Homo Sapiens
KEKPEEESL

SEQ ID NO: 98465 - protein, 9 aa, Homo Sapiens
KEKPGSEVL

SEQ ID NO: 98466 - protein, 9 aa, Homo Sapiens
KEKVEPEVL

SEQ ID NO: 98467 - protein, 9 aa, Homo Sapiens
KELDTVEVL

SEQ ID NO: 98468 - protein, 9 aa, Homo Sapiens
KELEEEITL

SEQ ID NO: 98469 - protein, 9 aa, Homo Sapiens
KELEEIYML

SEQ ID NO: 98470 - protein, 9 aa, Homo Sapiens
KELEKTLAL

SEQ ID NO: 98471 - protein, 9 aa, Homo Sapiens
KELPEYYEL

SEQ ID NO: 98472 - protein, 9 aa, Homo Sapiens
KELSDSVTL

SEQ ID NO: 98473 - protein, 9 aa, Homo Sapiens
KELSMVTEL

SEQ ID NO: 98474 - protein, 9 aa, Homo Sapiens
KELTIGSKL

SEQ ID NO: 98475 - protein, 9 aa, Homo Sapiens
KEMEDTQRL

SEQ ID NO: 98476 - protein, 9 aa, Homo Sapiens
KEMESIWNL

SEQ ID NO: 98477 - protein, 9 aa, Homo Sapiens
KEMGQMQVL

SEQ ID NO: 98478 - protein, 9 aa, Homo Sapiens
KEMLPHVGV

SEQ ID NO: 98479 - protein, 9 aa, Homo Sapiens
KEMRNLIRL

SEQ ID NO: 98480 - protein, 9 aa, Homo Sapiens
KENATVAHL

SEQ ID NO: 98481 - protein, 9 aa, Homo Sapiens
KENEEKVCL

SEQ ID NO: 98482 - protein, 9 aa, Homo Sapiens
KENSAPVKL

SEQ ID NO: 98483 - protein, 9 aa, Homo Sapiens
KEPDVSEEL

SEQ ID NO: 98484 - protein, 9 aa, Homo Sapiens
KEPEINTTL

SEQ ID NO: 98485 - protein, 9 aa, Homo Sapiens
KEPPVDICL

SEQ ID NO: 98486 - protein, 9 aa, Homo Sapiens
KESDNNVKL

SEQ ID NO: 98487 - protein, 9 aa, Homo Sapiens
KESEDAELL

SEQ ID NO: 98488 - protein, 9 aa, Homo Sapiens
KESEDKPEI

SEQ ID NO: 98489 - protein, 9 aa, Homo Sapiens
KESEEKEVL

SEQ ID NO: 98490 - protein, 9 aa, Homo Sapiens
KESEKQLLL

SEQ ID NO: 98491 - protein, 9 aa, Homo Sapiens
KESEVFYEL

SEQ ID NO: 98492 - protein, 9 aa, Homo Sapiens
KESGNSIVL

SEQ ID NO: 98493 - protein, 9 aa, Homo Sapiens
KESGQVVAI

SEQ ID NO: 98494 - protein, 9 aa, Homo Sapiens
KESIIIHQL

SEQ ID NO: 98495 - protein, 9 aa, Homo Sapiens
KESPPHEDL

SEQ ID NO: 98496 - protein, 9 aa, Homo Sapiens
KESSTVFEL

SEQ ID NO: 98497 - protein, 9 aa, Homo Sapiens
KESTATTFL

SEQ ID NO: 98498 - protein, 9 aa, Homo Sapiens
KESTLHLVL

SEQ ID NO: 98499 - protein, 9 aa, Homo Sapiens
KETAVFINI

SEQ ID NO: 98500 - protein, 9 aa, Homo Sapiens
KETDLLILF

SEQ ID NO: 98501 - protein, 9 aa, Homo Sapiens
KETGGVEKL

SEQ ID NO: 98502 - protein, 9 aa, Homo Sapiens
KETGQIVAI

SEQ ID NO: 98503 - protein, 9 aa, Homo Sapiens
KETIEIIDL

SEQ ID NO: 98504 - protein, 9 aa, Homo Sapiens
KETKDVSAL

SEQ ID NO: 98505 - protein, 9 aa, Homo Sapiens
KETPDKVEL

SEQ ID NO: 98506 - protein, 9 aa, Homo Sapiens
KETTYYDVL

SEQ ID NO: 98507 - protein, 9 aa, Homo Sapiens
KEVADAIRL

SEQ ID NO: 98508 - protein, 9 aa, Homo Sapiens
KEVAELTRL

SEQ ID NO: 98509 - protein, 9 aa, Homo Sapiens
KEVAQAVLL

SEQ ID NO: 98510 - protein, 9 aa, Homo Sapiens
KEVATDVRL

SEQ ID NO: 98511 - protein, 9 aa, Homo Sapiens
KEVDALLHL

SEQ ID NO: 98512 - protein, 9 aa, Homo Sapiens
KEVDVSKQL

SEQ ID NO: 98513 - protein, 9 aa, Homo Sapiens
KEVEAVVYL

SEQ ID NO: 98514 - protein, 9 aa, Homo Sapiens
KEVEEISLL

SEQ ID NO: 98515 - protein, 9 aa, Homo Sapiens
KEVEQFTQV

SEQ ID NO: 98516 - protein, 9 aa, Homo Sapiens
KEVEQQTGL

SEQ ID NO: 98517 - protein, 9 aa, Homo Sapiens
KEVFDSAIL

SEQ ID NO: 98518 - protein, 9 aa, Homo Sapiens
KEVKEVATL

SEQ ID NO: 98519 - protein, 9 aa, Homo Sapiens
KEVMVDDRL

SEQ ID NO: 98520 - protein, 9 aa, Homo Sapiens
KEVNFTSEL

SEQ ID NO: 98521 - protein, 9 aa, Homo Sapiens
KEVQDGIEL

SEQ ID NO: 98522 - protein, 9 aa, Homo Sapiens
KEVSTGTVL

SEQ ID NO: 98523 - protein, 9 aa, Homo Sapiens
KEVVHTVSL

SEQ ID NO: 98524 - protein, 9 aa, Homo Sapiens
KEWEKVFEM

SEQ ID NO: 98525 - protein, 9 aa, Homo Sapiens
KEYDEPYVL

SEQ ID NO: 98526 - protein, 9 aa, Homo Sapiens
KEYEGKWLL

SEQ ID NO: 98527 - protein, 9 aa, Homo Sapiens
KEYENIIAL

SEQ ID NO: 98528 - protein, 9 aa, Homo Sapiens
KEYLDNVQL

SEQ ID NO: 98529 - protein, 9 aa, Homo Sapiens
KEYVGIVRL

SEQ ID NO: 98530 - protein, 9 aa, Homo Sapiens
KEYVQPVQL

SEQ ID NO: 98531 - protein, 9 aa, Homo Sapiens
KQQLELDSI

SEQ ID NO: 98532 - protein, 9 aa, Homo Sapiens
LEAAGIGKL

SEQ ID NO: 98533 - protein, 9 aa, Homo Sapiens
LEACVRDVL

SEQ ID NO: 98534 - protein, 9 aa, Homo Sapiens
LEADVNIKL

SEQ ID NO: 98535 - protein, 9 aa, Homo Sapiens
LEAFGDVKL

SEQ ID NO: 98536 - protein, 9 aa, Homo Sapiens
LEAKVKDLL

SEQ ID NO: 98537 - protein, 9 aa, Homo Sapiens
LEALVPVTI

SEQ ID NO: 98538 - protein, 9 aa, Homo Sapiens
LEAPDETTL

SEQ ID NO: 98539 - protein, 9 aa, Homo Sapiens
LEAPPEVSL

SEQ ID NO: 98540 - protein, 9 aa, Homo Sapiens
LECAKAYLL

SEQ ID NO: 98541 - protein, 9 aa, Homo Sapiens
LECQQHSQL

SEQ ID NO: 98542 - protein, 9 aa, Homo Sapiens
LEDFDIHEL

SEQ ID NO: 98543 - protein, 9 aa, Homo Sapiens
LEDFPTISL

SEQ ID NO: 98544 - protein, 9 aa, Homo Sapiens
LEDGQAVQL

SEQ ID NO: 98545 - protein, 9 aa, Homo Sapiens
LEDKYNLQL

SEQ ID NO: 98546 - protein, 9 aa, Homo Sapiens
LEDVVRAYL

SEQ ID NO: 98547 - protein, 9 aa, Homo Sapiens
LEEAADLLV

SEQ ID NO: 98548 - protein, 9 aa, Homo Sapiens
LEEKDPVPL

SEQ ID NO: 98549 - protein, 9 aa, Homo Sapiens
LEEKIGCLL

SEQ ID NO: 98550 - protein, 9 aa, Homo Sapiens
LEENSTPQL

SEQ ID NO: 98551 - protein, 9 aa, Homo Sapiens
LEENVHEVL

SEQ ID NO: 98552 - protein, 9 aa, Homo Sapiens
LEEPYEIQL

SEQ ID NO: 98553 - protein, 9 aa, Homo Sapiens
LEFDEKAVL

SEQ ID NO: 98554 - protein, 9 aa, Homo Sapiens
LEFGEPVLL

SEQ ID NO: 98555 - protein, 9 aa, Homo Sapiens
LEFGSEPSL

SEQ ID NO: 98556 - protein, 9 aa, Homo Sapiens
LEFLDRESI

SEQ ID NO: 98557 - protein, 9 aa, Homo Sapiens
LEFQTPELL

SEQ ID NO: 98558 - protein, 9 aa, Homo Sapiens
LEGQIHPEL

SEQ ID NO: 98559 - protein, 9 aa, Homo Sapiens
LEGSKDALL

SEQ ID NO: 98560 - protein, 9 aa, Homo Sapiens
LEHIKTHEL

SEQ ID NO: 98561 - protein, 9 aa, Homo Sapiens
LEHLTNEAL

SEQ ID NO: 98562 - protein, 9 aa, Homo Sapiens
LEHQVFTVL

SEQ ID NO: 98563 - protein, 9 aa, Homo Sapiens
LEHVPDTVL

SEQ ID NO: 98564 - protein, 9 aa, Homo Sapiens
LEIADPIVL

SEQ ID NO: 98565 - protein, 9 aa, Homo Sapiens
LEIQDKEYL

SEQ ID NO: 98566 - protein, 9 aa, Homo Sapiens
LEIQHTTAL

SEQ ID NO: 98567 - protein, 9 aa, Homo Sapiens
LEISKMEVL

SEQ ID NO: 98568 - protein, 9 aa, Homo Sapiens
LEKIADPTL

SEQ ID NO: 98569 - protein, 9 aa, Homo Sapiens
LENASDIKL

SEQ ID NO: 98570 - protein, 9 aa, Homo Sapiens
LENDGATAL

SEQ ID NO: 98571 - protein, 9 aa, Homo Sapiens
LENKDNIRL

SEQ ID NO: 98572 - protein, 9 aa, Homo Sapiens
LENKELCIL

SEQ ID NO: 98573 - protein, 9 aa, Homo Sapiens
LENMHIEQL

SEQ ID NO: 98574 - protein, 9 aa, Homo Sapiens
LENPEGVIL

SEQ ID NO: 98575 - protein, 9 aa, Homo Sapiens
LEPGHTELL

SEQ ID NO: 98576 - protein, 9 aa, Homo Sapiens
LEPHDSPVL

SEQ ID NO: 98577 - protein, 9 aa, Homo Sapiens
LEQDFKVTL

SEQ ID NO: 98578 - protein, 9 aa, Homo Sapiens
LEQQNKILL

SEQ ID NO: 98579 - protein, 9 aa, Homo Sapiens
LERIEETAL

SEQ ID NO: 98580 - protein, 9 aa, Homo Sapiens
LERLSELAL

SEQ ID NO: 98581 - protein, 9 aa, Homo Sapiens
LESDAVECL

SEQ ID NO: 98582 - protein, 9 aa, Homo Sapiens
LESDFRDVL

SEQ ID NO: 98583 - protein, 9 aa, Homo Sapiens
LESDNNTAL

SEQ ID NO: 98584 - protein, 9 aa, Homo Sapiens
LESEDEVKL

SEQ ID NO: 98585 - protein, 9 aa, Homo Sapiens
LESKTYHAL

SEQ ID NO: 98586 - protein, 9 aa, Homo Sapiens
LESLPSPTL

SEQ ID NO: 98587 - protein, 9 aa, Homo Sapiens
LESNDFEML

SEQ ID NO: 98588 - protein, 9 aa, Homo Sapiens
LESPTTPLL

SEQ ID NO: 98589 - protein, 9 aa, Homo Sapiens
LESPTVSTL

SEQ ID NO: 98590 - protein, 9 aa, Homo Sapiens
LESQGIERL

SEQ ID NO: 98591 - protein, 9 aa, Homo Sapiens
LESQVRELL

SEQ ID NO: 98592 - protein, 9 aa, Homo Sapiens
LESVDSEAL

SEQ ID NO: 98593 - protein, 9 aa, Homo Sapiens
LETDSVQRL

SEQ ID NO: 98594 - protein, 9 aa, Homo Sapiens
LETKVAELL

SEQ ID NO: 98595 - protein, 9 aa, Homo Sapiens
LETLVSPKL

SEQ ID NO: 98596 - protein, 9 aa, Homo Sapiens
LETSTGHSL

SEQ ID NO: 98597 - protein, 9 aa, Homo Sapiens
LETVTKDIL

SEQ ID NO: 98598 - protein, 9 aa, Homo Sapiens
LEVDKDEAL

SEQ ID NO: 98599 - protein, 9 aa, Homo Sapiens
LEVECATQL

SEQ ID NO: 98600 - protein, 9 aa, Homo Sapiens
LEVEDRTSL

SEQ ID NO: 98601 - protein, 9 aa, Homo Sapiens
LEVEKSLVL

SEQ ID NO: 98602 - protein, 9 aa, Homo Sapiens
LEVIEPEVL

SEQ ID NO: 98603 - protein, 9 aa, Homo Sapiens
LEVPSTTAL

SEQ ID NO: 98604 - protein, 9 aa, Homo Sapiens
LEVPVSDLL

SEQ ID NO: 98605 - protein, 9 aa, Homo Sapiens
LEVQVRESL

SEQ ID NO: 98606 - protein, 9 aa, Homo Sapiens
LEVVQTEKL

SEQ ID NO: 98607 - protein, 9 aa, Homo Sapiens
LEVVTPEVL

SEQ ID NO: 98608 - protein, 9 aa, Homo Sapiens
LEYGLPIQV

SEQ ID NO: 98609 - protein, 9 aa, Homo Sapiens
LEYGVPVTL

SEQ ID NO: 98610 - protein, 9 aa, Homo Sapiens
LEYLTAEVL

SEQ ID NO: 98611 - protein, 9 aa, Homo Sapiens
LTQALKDNK

SEQ ID NO: 98612 - protein, 9 aa, Homo Sapiens
MEDETQKEL

SEQ ID NO: 98613 - protein, 9 aa, Homo Sapiens
MEDGGVKLL

SEQ ID NO: 98614 - protein, 9 aa, Homo Sapiens
MEDGPIVKL

SEQ ID NO: 98615 - protein, 9 aa, Homo Sapiens
MEDKFIVCL

SEQ ID NO: 98616 - protein, 9 aa, Homo Sapiens
MEEKGSISL

SEQ ID NO: 98617 - protein, 9 aa, Homo Sapiens
MEEKTSHIL

SEQ ID NO: 98618 - protein, 9 aa, Homo Sapiens
MESDFEQKL

SEQ ID NO: 98619 - protein, 9 aa, Homo Sapiens
MESEGKTVL

SEQ ID NO: 98620 - protein, 9 aa, Homo Sapiens
METPELIEL

SEQ ID NO: 98621 - protein, 9 aa, Homo Sapiens
MEVAGVTAL

SEQ ID NO: 98622 - protein, 9 aa, Homo Sapiens
MEVSEPHIL

SEQ ID NO: 98623 - protein, 9 aa, Homo Sapiens
NEAIVKDVL

SEQ ID NO: 98624 - protein, 9 aa, Homo Sapiens
NEAKVKETL

SEQ ID NO: 98625 - protein, 9 aa, Homo Sapiens
NECGKVFIL

SEQ ID NO: 98626 - protein, 9 aa, Homo Sapiens
NEDGALAVL

SEQ ID NO: 98627 - protein, 9 aa, Homo Sapiens
NEEDSKIEL

SEQ ID NO: 98628 - protein, 9 aa, Homo Sapiens
NEFGEKWEL

SEQ ID NO: 98629 - protein, 9 aa, Homo Sapiens
NEFHSPIGL

SEQ ID NO: 98630 - protein, 9 aa, Homo Sapiens
NEFPEPIKL

SEQ ID NO: 98631 - protein, 9 aa, Homo Sapiens
NEFPVIVRL

SEQ ID NO: 98632 - protein, 9 aa, Homo Sapiens
NEIPVEVVL

SEQ ID NO: 98633 - protein, 9 aa, Homo Sapiens
NEIRTLIDL

SEQ ID NO: 98634 - protein, 9 aa, Homo Sapiens
NEISIYDKL

SEQ ID NO: 98635 - protein, 9 aa, Homo Sapiens
NESGVRELL

SEQ ID NO: 98636 - protein, 9 aa, Homo Sapiens
NESVVKEML

SEQ ID NO: 98637 - protein, 9 aa, Homo Sapiens
NETDTPAQL

SEQ ID NO: 98638 - protein, 9 aa, Homo Sapiens
NEVFNDVRL

SEQ ID NO: 98639 - protein, 9 aa, Homo Sapiens
NEYFTNEVL

SEQ ID NO: 98640 - protein, 9 aa, Homo Sapiens
NPIDSLPGE

SEQ ID NO: 98641 - protein, 9 aa, Homo Sapiens
PEADKGTVL

SEQ ID NO: 98642 - protein, 9 aa, Homo Sapiens
PECMVPVVL

SEQ ID NO: 98643 - protein, 9 aa, Homo Sapiens
QEADKCPTL

SEQ ID NO: 98644 - protein, 9 aa, Homo Sapiens
QEAESAVRL

SEQ ID NO: 98645 - protein, 9 aa, Homo Sapiens
QEDLDNPVL

SEQ ID NO: 98646 - protein, 9 aa, Homo Sapiens
QEDSKPITL

SEQ ID NO: 98647 - protein, 9 aa, Homo Sapiens
QEEASGVAL

SEQ ID NO: 98648 - protein, 9 aa, Homo Sapiens
QEEDRTVSL

SEQ ID NO: 98649 - protein, 9 aa, Homo Sapiens
QEEDTFHSL

SEQ ID NO: 98650 - protein, 9 aa, Homo Sapiens
QEEKPEPVL

SEQ ID NO: 98651 - protein, 9 aa, Homo Sapiens
QEENITRAL

SEQ ID NO: 98652 - protein, 9 aa, Homo Sapiens
QEEPATYCL

SEQ ID NO: 98653 - protein, 9 aa, Homo Sapiens
QEEPLPHEL

SEQ ID NO: 98654 - protein, 9 aa, Homo Sapiens
QEEPVQPLL

SEQ ID NO: 98655 - protein, 9 aa, Homo Sapiens
QEEQTRVAL

SEQ ID NO: 98656 - protein, 9 aa, Homo Sapiens
QEESLRTYL

SEQ ID NO: 98657 - protein, 9 aa, Homo Sapiens
QEEWFKAEL

SEQ ID NO: 98658 - protein, 9 aa, Homo Sapiens
QEFGADVRL

SEQ ID NO: 98659 - protein, 9 aa, Homo Sapiens
QEFLERIHL

SEQ ID NO: 98660 - protein, 9 aa, Homo Sapiens
QEFQPEPSL

SEQ ID NO: 98661 - protein, 9 aa, Homo Sapiens
QEFVKAFYL

SEQ ID NO: 98662 - protein, 9 aa, Homo Sapiens
QEGPVGSTL

SEQ ID NO: 98663 - protein, 9 aa, Homo Sapiens
QEHAQEVVL

SEQ ID NO: 98664 - protein, 9 aa, Homo Sapiens
QEHLQLQNL

SEQ ID NO: 98665 - protein, 9 aa, Homo Sapiens
QEHPCLVEL

SEQ ID NO: 98666 - protein, 9 aa, Homo Sapiens
QEHPELAVL

SEQ ID NO: 98667 - protein, 9 aa, Homo Sapiens
QEIEDWSKL

SEQ ID NO: 98668 - protein, 9 aa, Homo Sapiens
QEIEEFQKL

SEQ ID NO: 98669 - protein, 9 aa, Homo Sapiens
QEIKDIYGL

SEQ ID NO: 98670 - protein, 9 aa, Homo Sapiens
QEIQDQLSL

SEQ ID NO: 98671 - protein, 9 aa, Homo Sapiens
QEISQVCQL

SEQ ID NO: 98672 - protein, 9 aa, Homo Sapiens
QEKEAIERL

SEQ ID NO: 98673 - protein, 9 aa, Homo Sapiens
QELFLAHIL

SEQ ID NO: 98674 - protein, 9 aa, Homo Sapiens
QELFPAPIL

SEQ ID NO: 98675 - protein, 9 aa, Homo Sapiens
QELLSDTKL

SEQ ID NO: 98676 - protein, 9 aa, Homo Sapiens
QELYFFHEL

SEQ ID NO: 98677 - protein, 9 aa, Homo Sapiens
QEMPGDVPL

SEQ ID NO: 98678 - protein, 9 aa, Homo Sapiens
QENAEIIKL

SEQ ID NO: 98679 - protein, 9 aa, Homo Sapiens
QENVDYVIL

SEQ ID NO: 98680 - protein, 9 aa, Homo Sapiens
QENVQKIIL

SEQ ID NO: 98681 - protein, 9 aa, Homo Sapiens
QEPLHNEEL

SEQ ID NO: 98682 - protein, 9 aa, Homo Sapiens
QEQAAKAVL

SEQ ID NO: 98683 - protein, 9 aa, Homo Sapiens
QEQIEAVLL

SEQ ID NO: 98684 - protein, 9 aa, Homo Sapiens
QEQNQEQPI

SEQ ID NO: 98685 - protein, 9 aa, Homo Sapiens
QEQQENPRL

SEQ ID NO: 98686 - protein, 9 aa, Homo Sapiens
QESGCKIQI

SEQ ID NO: 98687 - protein, 9 aa, Homo Sapiens
QESLAQARL

SEQ ID NO: 98688 - protein, 9 aa, Homo Sapiens
QESNDHVCL

SEQ ID NO: 98689 - protein, 9 aa, Homo Sapiens
QESNVQLKL

SEQ ID NO: 98690 - protein, 9 aa, Homo Sapiens
QESNVRLKL

SEQ ID NO: 98691 - protein, 9 aa, Homo Sapiens
QESVPDPEL

SEQ ID NO: 98692 - protein, 9 aa, Homo Sapiens
QETAVAPSL

SEQ ID NO: 98693 - protein, 9 aa, Homo Sapiens
QETDVRAQI

SEQ ID NO: 98694 - protein, 9 aa, Homo Sapiens
QETEEKILL

SEQ ID NO: 98695 - protein, 9 aa, Homo Sapiens
QETEPSKEL

SEQ ID NO: 98696 - protein, 9 aa, Homo Sapiens
QEVISRAEL

SEQ ID NO: 98697 - protein, 9 aa, Homo Sapiens
QEVVDFEKL

SEQ ID NO: 98698 - protein, 9 aa, Homo Sapiens
RDSISKEDL

SEQ ID NO: 98699 - protein, 9 aa, Homo Sapiens
READFFWSL

SEQ ID NO: 98700 - protein, 9 aa, Homo Sapiens
REAEFTKSI

SEQ ID NO: 98701 - protein, 9 aa, Homo Sapiens
REAEIYQTV

SEQ ID NO: 98702 - protein, 9 aa, Homo Sapiens
REAESFTQL

SEQ ID NO: 98703 - protein, 9 aa, Homo Sapiens
REALTETTL

SEQ ID NO: 98704 - protein, 9 aa, Homo Sapiens
REAMNDPLL

SEQ ID NO: 98705 - protein, 9 aa, Homo Sapiens
REAPERPSL

SEQ ID NO: 98706 - protein, 9 aa, Homo Sapiens
REAPNPIHL

SEQ ID NO: 98707 - protein, 9 aa, Homo Sapiens
REAQMAAKL

SEQ ID NO: 98708 - protein, 9 aa, Homo Sapiens
REAQVFVRL

SEQ ID NO: 98709 - protein, 9 aa, Homo Sapiens
REAQVWEML

SEQ ID NO: 98710 - protein, 9 aa, Homo Sapiens
REAVPEPVL

SEQ ID NO: 98711 - protein, 9 aa, Homo Sapiens
REAVSKEDL

SEQ ID NO: 98712 - protein, 9 aa, Homo Sapiens
REAVSKTAL

SEQ ID NO: 98713 - protein, 9 aa, Homo Sapiens
RECENQLVL

SEQ ID NO: 98714 - protein, 9 aa, Homo Sapiens
REDEKPLVL

SEQ ID NO: 98715 - protein, 9 aa, Homo Sapiens
REDENKSIL

SEQ ID NO: 98716 - protein, 9 aa, Homo Sapiens
REDGSIVIV

SEQ ID NO: 98717 - protein, 9 aa, Homo Sapiens
REDINSLCM

SEQ ID NO: 98718 - protein, 9 aa, Homo Sapiens
REDISSIEI

SEQ ID NO: 98719 - protein, 9 aa, Homo Sapiens
REDKVHLKL

SEQ ID NO: 98720 - protein, 9 aa, Homo Sapiens
REDLTQVEL

SEQ ID NO: 98721 - protein, 9 aa, Homo Sapiens
REDPAPGLL

SEQ ID NO: 98722 - protein, 9 aa, Homo Sapiens
REDSGTFSL

SEQ ID NO: 98723 - protein, 9 aa, Homo Sapiens
REDTKAAVL

SEQ ID NO: 98724 - protein, 9 aa, Homo Sapiens
REDYIEPAL

SEQ ID NO: 98725 - protein, 9 aa, Homo Sapiens
REDYYDIQL

SEQ ID NO: 98726 - protein, 9 aa, Homo Sapiens
REEAIAVTM

SEQ ID NO: 98727 - protein, 9 aa, Homo Sapiens
REEDEETQL

SEQ ID NO: 98728 - protein, 9 aa, Homo Sapiens
REEEVSYQL

SEQ ID NO: 98729 - protein, 9 aa, Homo Sapiens
REEHIVVEL

SEQ ID NO: 98730 - protein, 9 aa, Homo Sapiens
REEIEKQAL

SEQ ID NO: 98731 - protein, 9 aa, Homo Sapiens
REEINFVEI

SEQ ID NO: 98732 - protein, 9 aa, Homo Sapiens
REEKVKAVL

SEQ ID NO: 98733 - protein, 9 aa, Homo Sapiens
REELLPHLL

SEQ ID NO: 98734 - protein, 9 aa, Homo Sapiens
REENKQIAL

SEQ ID NO: 98735 - protein, 9 aa, Homo Sapiens
REENPSSVL

SEQ ID NO: 98736 - protein, 9 aa, Homo Sapiens
REEPEKIIL

SEQ ID NO: 98737 - protein, 9 aa, Homo Sapiens
REEPSNPFL

SEQ ID NO: 98738 - protein, 9 aa, Homo Sapiens
REEQCILYL

SEQ ID NO: 98739 - protein, 9 aa, Homo Sapiens
REEVGNISI

SEQ ID NO: 98740 - protein, 9 aa, Homo Sapiens
REEVVVCEL

SEQ ID NO: 98741 - protein, 9 aa, Homo Sapiens
REEWKFDTL

SEQ ID NO: 98742 - protein, 9 aa, Homo Sapiens
REFDGTEVL

SEQ ID NO: 98743 - protein, 9 aa, Homo Sapiens
REFDQKALL

SEQ ID NO: 98744 - protein, 9 aa, Homo Sapiens
REFEERRSL

SEQ ID NO: 98745 - protein, 9 aa, Homo Sapiens
REFIAPVTL

SEQ ID NO: 98746 - protein, 9 aa, Homo Sapiens
REFNEEGAL

SEQ ID NO: 98747 - protein, 9 aa, Homo Sapiens
REFQNPPQL

SEQ ID NO: 98748 - protein, 9 aa, Homo Sapiens
REFREEESL

SEQ ID NO: 98749 - protein, 9 aa, Homo Sapiens
REFWAKPKP

SEQ ID NO: 98750 - protein, 9 aa, Homo Sapiens
REGDVITII

SEQ ID NO: 98751 - protein, 9 aa, Homo Sapiens
REGEIAQFL

SEQ ID NO: 98752 - protein, 9 aa, Homo Sapiens
REGLLFTAL

SEQ ID NO: 98753 - protein, 9 aa, Homo Sapiens
REGRPIWQL

SEQ ID NO: 98754 - protein, 9 aa, Homo Sapiens
REHDIAIKF

SEQ ID NO: 98755 - protein, 9 aa, Homo Sapiens
REHVEAIKI

SEQ ID NO: 98756 - protein, 9 aa, Homo Sapiens
REIADGLCL

SEQ ID NO: 98757 - protein, 9 aa, Homo Sapiens
REIAGKMDL

SEQ ID NO: 98758 - protein, 9 aa, Homo Sapiens
REIEELHKL

SEQ ID NO: 98759 - protein, 9 aa, Homo Sapiens
REIEGDLLL

SEQ ID NO: 98760 - protein, 9 aa, Homo Sapiens
REIFLFNDL

SEQ ID NO: 98761 - protein, 9 aa, Homo Sapiens
REIIQKLML

SEQ ID NO: 98762 - protein, 9 aa, Homo Sapiens
REIKFLDVL

SEQ ID NO: 98763 - protein, 9 aa, Homo Sapiens
REIKSSQGL

SEQ ID NO: 98764 - protein, 9 aa, Homo Sapiens
REIQEAIAV

SEQ ID NO: 98765 - protein, 9 aa, Homo Sapiens
REIQTAVRL

SEQ ID NO: 98766 - protein, 9 aa, Homo Sapiens
REIREENKL

SEQ ID NO: 98767 - protein, 9 aa, Homo Sapiens
REKDLEVYL

SEQ ID NO: 98768 - protein, 9 aa, Homo Sapiens
REKEIKSEL

SEQ ID NO: 98769 - protein, 9 aa, Homo Sapiens
REKIDQERL

SEQ ID NO: 98770 - protein, 9 aa, Homo Sapiens
REKKPEELI

SEQ ID NO: 98771 - protein, 9 aa, Homo Sapiens
REKLQEEML

SEQ ID NO: 98772 - protein, 9 aa, Homo Sapiens
REKQDTFAL

SEQ ID NO: 98773 - protein, 9 aa, Homo Sapiens
RELDIYNNL

SEQ ID NO: 98774 - protein, 9 aa, Homo Sapiens
RELDQKTWL

SEQ ID NO: 98775 - protein, 9 aa, Homo Sapiens
RELDVSYVL

SEQ ID NO: 98776 - protein, 9 aa, Homo Sapiens
RELECIREI

SEQ ID NO: 98777 - protein, 9 aa, Homo Sapiens
RELEKLFQL

SEQ ID NO: 98778 - protein, 9 aa, Homo Sapiens
RELGFSSNL

SEQ ID NO: 98779 - protein, 9 aa, Homo Sapiens
RELQGETKL

SEQ ID NO: 98780 - protein, 9 aa, Homo Sapiens
RELQSKEFL

SEQ ID NO: 98781 - protein, 9 aa, Homo Sapiens
RELYANVVL

SEQ ID NO: 98782 - protein, 9 aa, Homo Sapiens
RELYLFDVL

SEQ ID NO: 98783 - protein, 9 aa, Homo Sapiens
REMDEQIRL

SEQ ID NO: 98784 - protein, 9 aa, Homo Sapiens
REMEEKVTL

SEQ ID NO: 98785 - protein, 9 aa, Homo Sapiens
REMEENFAV

SEQ ID NO: 98786 - protein, 9 aa, Homo Sapiens
REMENKETL

SEQ ID NO: 98787 - protein, 9 aa, Homo Sapiens
REMFGYMKL

SEQ ID NO: 98788 - protein, 9 aa, Homo Sapiens
REMLIRVNM

SEQ ID NO: 98789 - protein, 9 aa, Homo Sapiens
RENDCIVRI

SEQ ID NO: 98790 - protein, 9 aa, Homo Sapiens
RENGQEILL

SEQ ID NO: 98791 - protein, 9 aa, Homo Sapiens
RENKTAVVV

SEQ ID NO: 98792 - protein, 9 aa, Homo Sapiens
RENWHEEVL

SEQ ID NO: 98793 - protein, 9 aa, Homo Sapiens
REPDQTFSL

SEQ ID NO: 98794 - protein, 9 aa, Homo Sapiens
REPELPCGL

SEQ ID NO: 98795 - protein, 9 aa, Homo Sapiens
REPESVEQL

SEQ ID NO: 98796 - protein, 9 aa, Homo Sapiens
REPLVRQVL

SEQ ID NO: 98797 - protein, 9 aa, Homo Sapiens
REPNVLICF

SEQ ID NO: 98798 - protein, 9 aa, Homo Sapiens
REPVQLETL

SEQ ID NO: 98799 - protein, 9 aa, Homo Sapiens
REQEEIVRL

SEQ ID NO: 98800 - protein, 9 aa, Homo Sapiens
REQRESLKL

SEQ ID NO: 98801 - protein, 9 aa, Homo Sapiens
RESERQLRL

SEQ ID NO: 98802 - protein, 9 aa, Homo Sapiens
RESLPIYKL

SEQ ID NO: 98803 - protein, 9 aa, Homo Sapiens
RESNEVVHL

SEQ ID NO: 98804 - protein, 9 aa, Homo Sapiens
RESPCHVKL

SEQ ID NO: 98805 - protein, 9 aa, Homo Sapiens
RESYVETEL

SEQ ID NO: 98806 - protein, 9 aa, Homo Sapiens
RETDDTLVL

SEQ ID NO: 98807 - protein, 9 aa, Homo Sapiens
RETDLQELF

SEQ ID NO: 98808 - protein, 9 aa, Homo Sapiens
RETEGGTVL

SEQ ID NO: 98809 - protein, 9 aa, Homo Sapiens
RETEHCVSL

SEQ ID NO: 98810 - protein, 9 aa, Homo Sapiens
RETELKVHL

SEQ ID NO: 98811 - protein, 9 aa, Homo Sapiens
RETGVIEKL

SEQ ID NO: 98812 - protein, 9 aa, Homo Sapiens
RETIIMNQI

SEQ ID NO: 98813 - protein, 9 aa, Homo Sapiens
RETKVLGAL

SEQ ID NO: 98814 - protein, 9 aa, Homo Sapiens
RETLQQHKL

SEQ ID NO: 98815 - protein, 9 aa, Homo Sapiens
RETSMVHEL

SEQ ID NO: 98816 - protein, 9 aa, Homo Sapiens
RETSSDVAL

SEQ ID NO: 98817 - protein, 9 aa, Homo Sapiens
RETTEVDLL

SEQ ID NO: 98818 - protein, 9 aa, Homo Sapiens
RETVIKQTM

SEQ ID NO: 98819 - protein, 9 aa, Homo Sapiens
REVDEQHQL

SEQ ID NO: 98820 - protein, 9 aa, Homo Sapiens
REVEDETVL

SEQ ID NO: 98821 - protein, 9 aa, Homo Sapiens
REVEIQSHL

SEQ ID NO: 98822 - protein, 9 aa, Homo Sapiens
REVIQSDSL

SEQ ID NO: 98823 - protein, 9 aa, Homo Sapiens
REVLPSTRL

SEQ ID NO: 98824 - protein, 9 aa, Homo Sapiens
REVSEEHNL

SEQ ID NO: 98825 - protein, 9 aa, Homo Sapiens
REVTPDQKL

SEQ ID NO: 98826 - protein, 9 aa, Homo Sapiens
REVVNKDVL

SEQ ID NO: 98827 - protein, 9 aa, Homo Sapiens
REWKGIDRL

SEQ ID NO: 98828 - protein, 9 aa, Homo Sapiens
REWPESVSL

SEQ ID NO: 98829 - protein, 9 aa, Homo Sapiens
REWQGRDLL

SEQ ID NO: 98830 - protein, 9 aa, Homo Sapiens
REWTEQETL

SEQ ID NO: 98831 - protein, 9 aa, Homo Sapiens
REWTGIDRL

SEQ ID NO: 98832 - protein, 9 aa, Homo Sapiens
REYTLMELL

SEQ ID NO: 98833 - protein, 9 aa, Homo Sapiens
RIDPESGDL

SEQ ID NO: 98834 - protein, 9 aa, Homo Sapiens
SEAAFIENL

SEQ ID NO: 98835 - protein, 9 aa, Homo Sapiens
SEADPAPLL

SEQ ID NO: 98836 - protein, 9 aa, Homo Sapiens
SEAEIFTTL

SEQ ID NO: 98837 - protein, 9 aa, Homo Sapiens
SEAEIRVFL

SEQ ID NO: 98838 - protein, 9 aa, Homo Sapiens
SEAERVSEL

SEQ ID NO: 98839 - protein, 9 aa, Homo Sapiens
SEAGSRIVL

SEQ ID NO: 98840 - protein, 9 aa, Homo Sapiens
SEAIVTVIM

SEQ ID NO: 98841 - protein, 9 aa, Homo Sapiens
SEAKDITCL

SEQ ID NO: 98842 - protein, 9 aa, Homo Sapiens
SEAKGLVTL

SEQ ID NO: 98843 - protein, 9 aa, Homo Sapiens
SEAMGLFCL

SEQ ID NO: 98844 - protein, 9 aa, Homo Sapiens
SEAPATVEL

SEQ ID NO: 98845 - protein, 9 aa, Homo Sapiens
SEAPEAPLL

SEQ ID NO: 98846 - protein, 9 aa, Homo Sapiens
SEAPFLHYL

SEQ ID NO: 98847 - protein, 9 aa, Homo Sapiens
SEAPGQRAL

SEQ ID NO: 98848 - protein, 9 aa, Homo Sapiens
SEAPSQPSL

SEQ ID NO: 98849 - protein, 9 aa, Homo Sapiens
SEAREKAVL

SEQ ID NO: 98850 - protein, 9 aa, Homo Sapiens
SEARLRDVL

SEQ ID NO: 98851 - protein, 9 aa, Homo Sapiens
SEARVKAEL

SEQ ID NO: 98852 - protein, 9 aa, Homo Sapiens
SEASFQEAL

SEQ ID NO: 98853 - protein, 9 aa, Homo Sapiens
SEAVFKEEL

SEQ ID NO: 98854 - protein, 9 aa, Homo Sapiens
SEAVIWEVL

SEQ ID NO: 98855 - protein, 9 aa, Homo Sapiens
SEAVLWEAL

SEQ ID NO: 98856 - protein, 9 aa, Homo Sapiens
SECDILHTL

SEQ ID NO: 98857 - protein, 9 aa, Homo Sapiens
SECGKAFSI

SEQ ID NO: 98858 - protein, 9 aa, Homo Sapiens
SECGPFIKL

SEQ ID NO: 98859 - protein, 9 aa, Homo Sapiens
SECKSRDVL

SEQ ID NO: 98860 - protein, 9 aa, Homo Sapiens
SECSKPEQL

SEQ ID NO: 98861 - protein, 9 aa, Homo Sapiens
SEDALCTVL

SEQ ID NO: 98862 - protein, 9 aa, Homo Sapiens
SEDASIHRL

SEQ ID NO: 98863 - protein, 9 aa, Homo Sapiens
SEDDTVLDL

SEQ ID NO: 98864 - protein, 9 aa, Homo Sapiens
SEDDVKMAL

SEQ ID NO: 98865 - protein, 9 aa, Homo Sapiens
SEDEVKLAL

SEQ ID NO: 98866 - protein, 9 aa, Homo Sapiens
SEDGAIHVI

SEQ ID NO: 98867 - protein, 9 aa, Homo Sapiens
SEDGDAHVL

SEQ ID NO: 98868 - protein, 9 aa, Homo Sapiens
SEDGQPMVL

SEQ ID NO: 98869 - protein, 9 aa, Homo Sapiens
SEDKKNIIL

SEQ ID NO: 98870 - protein, 9 aa, Homo Sapiens
SEDKQLHEL

SEQ ID NO: 98871 - protein, 9 aa, Homo Sapiens
SEDLNKHVL

SEQ ID NO: 98872 - protein, 9 aa, Homo Sapiens
SEDPEPLLL

SEQ ID NO: 98873 - protein, 9 aa, Homo Sapiens
SEDPNQAKL

SEQ ID NO: 98874 - protein, 9 aa, Homo Sapiens
SEDPSHPSM

SEQ ID NO: 98875 - protein, 9 aa, Homo Sapiens
SEDQSFVVL

SEQ ID NO: 98876 - protein, 9 aa, Homo Sapiens
SEDRMTLLL

SEQ ID NO: 98877 - protein, 9 aa, Homo Sapiens
SEDSHLESL

SEQ ID NO: 98878 - protein, 9 aa, Homo Sapiens
SEEAKSILL

SEQ ID NO: 98879 - protein, 9 aa, Homo Sapiens
SEEAVQVLI

SEQ ID NO: 98880 - protein, 9 aa, Homo Sapiens
SEEDRATVL

SEQ ID NO: 98881 - protein, 9 aa, Homo Sapiens
SEEDRVVVI

SEQ ID NO: 98882 - protein, 9 aa, Homo Sapiens
SEEETRVVF

SEQ ID NO: 98883 - protein, 9 aa, Homo Sapiens
SEEEVKLAL

SEQ ID NO: 98884 - protein, 9 aa, Homo Sapiens
SEEGGHVAV

SEQ ID NO: 98885 - protein, 9 aa, Homo Sapiens
SEEGLRNAL

SEQ ID NO: 98886 - protein, 9 aa, Homo Sapiens
SEEKCRITL

SEQ ID NO: 98887 - protein, 9 aa, Homo Sapiens
SEEMIKSEL

SEQ ID NO: 98888 - protein, 9 aa, Homo Sapiens
SEENITIKL

SEQ ID NO: 98889 - protein, 9 aa, Homo Sapiens
SEENKATPL

SEQ ID NO: 98890 - protein, 9 aa, Homo Sapiens
SEEPAGQIL

SEQ ID NO: 98891 - protein, 9 aa, Homo Sapiens
SEEPFTTVL

SEQ ID NO: 98892 - protein, 9 aa, Homo Sapiens
SEEPFVVKL

SEQ ID NO: 98893 - protein, 9 aa, Homo Sapiens
SEERAGAPL

SEQ ID NO: 98894 - protein, 9 aa, Homo Sapiens
SEERFHVEL

SEQ ID NO: 98895 - protein, 9 aa, Homo Sapiens
SEERVQVAL

SEQ ID NO: 98896 - protein, 9 aa, Homo Sapiens
SEESNVLCL

SEQ ID NO: 98897 - protein, 9 aa, Homo Sapiens
SEESRPQSL

SEQ ID NO: 98898 - protein, 9 aa, Homo Sapiens
SEEVHQAVL

SEQ ID NO: 98899 - protein, 9 aa, Homo Sapiens
SEEVSRSEL

SEQ ID NO: 98900 - protein, 9 aa, Homo Sapiens
SEEVVKAIL

SEQ ID NO: 98901 - protein, 9 aa, Homo Sapiens
SEFAKDPSL

SEQ ID NO: 98902 - protein, 9 aa, Homo Sapiens
SEFDFFERL

SEQ ID NO: 98903 - protein, 9 aa, Homo Sapiens
SEFEENTNL

SEQ ID NO: 98904 - protein, 9 aa, Homo Sapiens
SEFGAPVSV

SEQ ID NO: 98905 - protein, 9 aa, Homo Sapiens
SEFGRNYSL

SEQ ID NO: 98906 - protein, 9 aa, Homo Sapiens
SEFKAMDSI

SEQ ID NO: 98907 - protein, 9 aa, Homo Sapiens
SEFLKEEKL

SEQ ID NO: 98908 - protein, 9 aa, Homo Sapiens
SEFQDDPVL

SEQ ID NO: 98909 - protein, 9 aa, Homo Sapiens
SEFQKAVKL

SEQ ID NO: 98910 - protein, 9 aa, Homo Sapiens
SEFSLVDKL

SEQ ID NO: 98911 - protein, 9 aa, Homo Sapiens
SEFVDPSSL

SEQ ID NO: 98912 - protein, 9 aa, Homo Sapiens
SEFYEPEAL

SEQ ID NO: 98913 - protein, 9 aa, Homo Sapiens
SEFYKHIVL

SEQ ID NO: 98914 - protein, 9 aa, Homo Sapiens
SEGDPDLVL

SEQ ID NO: 98915 - protein, 9 aa, Homo Sapiens
SEGKCFSVL

SEQ ID NO: 98916 - protein, 9 aa, Homo Sapiens
SEGKDSVVL

SEQ ID NO: 98917 - protein, 9 aa, Homo Sapiens
SEGLPEPVL

SEQ ID NO: 98918 - protein, 9 aa, Homo Sapiens
SEGPAQVYL

SEQ ID NO: 98919 - protein, 9 aa, Homo Sapiens
SEGPHHVAL

SEQ ID NO: 98920 - protein, 9 aa, Homo Sapiens
SEGPIVATL

SEQ ID NO: 98921 - protein, 9 aa, Homo Sapiens
SEGPPAPAL

SEQ ID NO: 98922 - protein, 9 aa, Homo Sapiens
SEGVVAVLL

SEQ ID NO: 98923 - protein, 9 aa, Homo Sapiens
SEHAVEAML

SEQ ID NO: 98924 - protein, 9 aa, Homo Sapiens
SEHELDVAL

SEQ ID NO: 98925 - protein, 9 aa, Homo Sapiens
SEHGINIDL

SEQ ID NO: 98926 - protein, 9 aa, Homo Sapiens
SEHLAAIEI

SEQ ID NO: 98927 - protein, 9 aa, Homo Sapiens
SEHLTESIL

SEQ ID NO: 98928 - protein, 9 aa, Homo Sapiens
SEHSMDTLL

SEQ ID NO: 98929 - protein, 9 aa, Homo Sapiens
SEIEDAAFL

SEQ ID NO: 98930 - protein, 9 aa, Homo Sapiens
SEIEDVNTL

SEQ ID NO: 98931 - protein, 9 aa, Homo Sapiens
SEIEYYAML

SEQ ID NO: 98932 - protein, 9 aa, Homo Sapiens
SEIGQKQKL

SEQ ID NO: 98933 - protein, 9 aa, Homo Sapiens
SEILDGNQL

SEQ ID NO: 98934 - protein, 9 aa, Homo Sapiens
SEIQVLEHL

SEQ ID NO: 98935 - protein, 9 aa, Homo Sapiens
SEISQVFEI

SEQ ID NO: 98936 - protein, 9 aa, Homo Sapiens
SEISSATKL

SEQ ID NO: 98937 - protein, 9 aa, Homo Sapiens
SEKRNTCVL

SEQ ID NO: 98938 - protein, 9 aa, Homo Sapiens
SEKVDRAVL

SEQ ID NO: 98939 - protein, 9 aa, Homo Sapiens
SELATALAL

SEQ ID NO: 98940 - protein, 9 aa, Homo Sapiens
SELDLISRL

SEQ ID NO: 98941 - protein, 9 aa, Homo Sapiens
SELEKTFNL

SEQ ID NO: 98942 - protein, 9 aa, Homo Sapiens
SELGESSLI

SEQ ID NO: 98943 - protein, 9 aa, Homo Sapiens
SELIRNVTL

SEQ ID NO: 98944 - protein, 9 aa, Homo Sapiens
SELKETVEL

SEQ ID NO: 98945 - protein, 9 aa, Homo Sapiens
SELKKVVAL

SEQ ID NO: 98946 - protein, 9 aa, Homo Sapiens
SELMDITKL

SEQ ID NO: 98947 - protein, 9 aa, Homo Sapiens
SELNGHHTL

SEQ ID NO: 98948 - protein, 9 aa, Homo Sapiens
SELQVHSAL

SEQ ID NO: 98949 - protein, 9 aa, Homo Sapiens
SELRDIYDL

SEQ ID NO: 98950 - protein, 9 aa, Homo Sapiens
SELRSVEGL

SEQ ID NO: 98951 - protein, 9 aa, Homo Sapiens
SEMAVAHAL

SEQ ID NO: 98952 - protein, 9 aa, Homo Sapiens
SEMIDKLTL

SEQ ID NO: 98953 - protein, 9 aa, Homo Sapiens
SEMRFVQDL

SEQ ID NO: 98954 - protein, 9 aa, Homo Sapiens
SEMRYGIEI

SEQ ID NO: 98955 - protein, 9 aa, Homo Sapiens
SEMVELVEL

SEQ ID NO: 98956 - protein, 9 aa, Homo Sapiens
SENKLPAEL

SEQ ID NO: 98957 - protein, 9 aa, Homo Sapiens
SENNRIFTL

SEQ ID NO: 98958 - protein, 9 aa, Homo Sapiens
SENVLQVHL

SEQ ID NO: 98959 - protein, 9 aa, Homo Sapiens
SEPEIEIKL

SEQ ID NO: 98960 - protein, 9 aa, Homo Sapiens
SEPGKVIVL

SEQ ID NO: 98961 - protein, 9 aa, Homo Sapiens
SEPGPAEEL

SEQ ID NO: 98962 - protein, 9 aa, Homo Sapiens
SEPHILETL

SEQ ID NO: 98963 - protein, 9 aa, Homo Sapiens
SEPMICHTL

SEQ ID NO: 98964 - protein, 9 aa, Homo Sapiens
SEPPVYANL

SEQ ID NO: 98965 - protein, 9 aa, Homo Sapiens
SEPSQHVVL

SEQ ID NO: 98966 - protein, 9 aa, Homo Sapiens
SEPSSTVSL

SEQ ID NO: 98967 - protein, 9 aa, Homo Sapiens
SEQEEPIEL

SEQ ID NO: 98968 - protein, 9 aa, Homo Sapiens
SEQGLIEIL

SEQ ID NO: 98969 - protein, 9 aa, Homo Sapiens
SEQRLLIVL

SEQ ID NO: 98970 - protein, 9 aa, Homo Sapiens
SEQTGKELL

SEQ ID NO: 98971 - protein, 9 aa, Homo Sapiens
SESALPTSL

SEQ ID NO: 98972 - protein, 9 aa, Homo Sapiens
SESASPSAL

SEQ ID NO: 98973 - protein, 9 aa, Homo Sapiens
SESDKTAVL

SEQ ID NO: 98974 - protein, 9 aa, Homo Sapiens
SESHRFTVL

SEQ ID NO: 98975 - protein, 9 aa, Homo Sapiens
SESHVHSLL

SEQ ID NO: 98976 - protein, 9 aa, Homo Sapiens
SESKIRVLL

SEQ ID NO: 98977 - protein, 9 aa, Homo Sapiens
SESLPVETL

SEQ ID NO: 98978 - protein, 9 aa, Homo Sapiens
SESLVYTTL

SEQ ID NO: 98979 - protein, 9 aa, Homo Sapiens
SESNHLIHL

SEQ ID NO: 98980 - protein, 9 aa, Homo Sapiens
SESPGATEL

SEQ ID NO: 98981 - protein, 9 aa, Homo Sapiens
SESPIVVVL

SEQ ID NO: 98982 - protein, 9 aa, Homo Sapiens
SESPRSTSL

SEQ ID NO: 98983 - protein, 9 aa, Homo Sapiens
SESPVWVKL

SEQ ID NO: 98984 - protein, 9 aa, Homo Sapiens
SESQDQVFL

SEQ ID NO: 98985 - protein, 9 aa, Homo Sapiens
SESQKAVEL

SEQ ID NO: 98986 - protein, 9 aa, Homo Sapiens
SESRIFNEL

SEQ ID NO: 98987 - protein, 9 aa, Homo Sapiens
SESRYPQAL

SEQ ID NO: 98988 - protein, 9 aa, Homo Sapiens
SESSCKSWL

SEQ ID NO: 98989 - protein, 9 aa, Homo Sapiens
SESSVKVRL

SEQ ID NO: 98990 - protein, 9 aa, Homo Sapiens
SESTAESHL

SEQ ID NO: 98991 - protein, 9 aa, Homo Sapiens
SESVASSQL

SEQ ID NO: 98992 - protein, 9 aa, Homo Sapiens
SETEAKALL

SEQ ID NO: 98993 - protein, 9 aa, Homo Sapiens
SETEGTPKL

SEQ ID NO: 98994 - protein, 9 aa, Homo Sapiens
SETINTELL

SEQ ID NO: 98995 - protein, 9 aa, Homo Sapiens
SETLPLLAL

SEQ ID NO: 98996 - protein, 9 aa, Homo Sapiens
SETRVLVDI

SEQ ID NO: 98997 - protein, 9 aa, Homo Sapiens
SETSSVSHI

SEQ ID NO: 98998 - protein, 9 aa, Homo Sapiens
SETTAAHSL

SEQ ID NO: 98999 - protein, 9 aa, Homo Sapiens
SETTERTVL

SEQ ID NO: 99000 - protein, 9 aa, Homo Sapiens
SETTVAPSL

SEQ ID NO: 99001 - protein, 9 aa, Homo Sapiens
SETVVTGSL

SEQ ID NO: 99002 - protein, 9 aa, Homo Sapiens
SEVDINTTL

SEQ ID NO: 99003 - protein, 9 aa, Homo Sapiens
SEVDSPNVL

SEQ ID NO: 99004 - protein, 9 aa, Homo Sapiens
SEVEKGEAL

SEQ ID NO: 99005 - protein, 9 aa, Homo Sapiens
SEVGKTPTL

SEQ ID NO: 99006 - protein, 9 aa, Homo Sapiens
SEVGSDHEL

SEQ ID NO: 99007 - protein, 9 aa, Homo Sapiens
SEVGTDHKL

SEQ ID NO: 99008 - protein, 9 aa, Homo Sapiens
SEVIFGHVL

SEQ ID NO: 99009 - protein, 9 aa, Homo Sapiens
SEVIGPVSL

SEQ ID NO: 99010 - protein, 9 aa, Homo Sapiens
SEVKEDVVL

SEQ ID NO: 99011 - protein, 9 aa, Homo Sapiens
SEVMGEPHL

SEQ ID NO: 99012 - protein, 9 aa, Homo Sapiens
SEVNIPLSL

SEQ ID NO: 99013 - protein, 9 aa, Homo Sapiens
SEVNPSVEL

SEQ ID NO: 99014 - protein, 9 aa, Homo Sapiens
SEVQDRVML

SEQ ID NO: 99015 - protein, 9 aa, Homo Sapiens
SEVQGMVEL

SEQ ID NO: 99016 - protein, 9 aa, Homo Sapiens
SEVSTVLKL

SEQ ID NO: 99017 - protein, 9 aa, Homo Sapiens
SEVVEASSL

SEQ ID NO: 99018 - protein, 9 aa, Homo Sapiens
SEVVEIQAL

SEQ ID NO: 99019 - protein, 9 aa, Homo Sapiens
SEVVGSSTL

SEQ ID NO: 99020 - protein, 9 aa, Homo Sapiens
SEVVTGSGL

SEQ ID NO: 99021 - protein, 9 aa, Homo Sapiens
SEVYSNPCL

SEQ ID NO: 99022 - protein, 9 aa, Homo Sapiens
SEWDGHEEL

SEQ ID NO: 99023 - protein, 9 aa, Homo Sapiens
SEWDGIVTV

SEQ ID NO: 99024 - protein, 9 aa, Homo Sapiens
SEWNTVERL

SEQ ID NO: 99025 - protein, 9 aa, Homo Sapiens
SEYGEEPIL

SEQ ID NO: 99026 - protein, 9 aa, Homo Sapiens
SEYRFPEEL

SEQ ID NO: 99027 - protein, 9 aa, Homo Sapiens
SEYSVHSSL

SEQ ID NO: 99028 - protein, 9 aa, Homo Sapiens
TEAAHPIRL

SEQ ID NO: 99029 - protein, 9 aa, Homo Sapiens
TEAATRCQL

SEQ ID NO: 99030 - protein, 9 aa, Homo Sapiens
TEADVEEAL

SEQ ID NO: 99031 - protein, 9 aa, Homo Sapiens
TEADVKIVI

SEQ ID NO: 99032 - protein, 9 aa, Homo Sapiens
TEAEIDAHL

SEQ ID NO: 99033 - protein, 9 aa, Homo Sapiens
TEAFDIATL

SEQ ID NO: 99034 - protein, 9 aa, Homo Sapiens
TEALIRTCL

SEQ ID NO: 99035 - protein, 9 aa, Homo Sapiens
TEAQVTQEL

SEQ ID NO: 99036 - protein, 9 aa, Homo Sapiens
TEATAGNVL

SEQ ID NO: 99037 - protein, 9 aa, Homo Sapiens
TEAVVDSIL

SEQ ID NO: 99038 - protein, 9 aa, Homo Sapiens
TEAVVKEKL

SEQ ID NO: 99039 - protein, 9 aa, Homo Sapiens
TEAWLQEKL

SEQ ID NO: 99040 - protein, 9 aa, Homo Sapiens
TECQETVQL

SEQ ID NO: 99041 - protein, 9 aa, Homo Sapiens
TECSDPVEL

SEQ ID NO: 99042 - protein, 9 aa, Homo Sapiens
TECVKQICL

SEQ ID NO: 99043 - protein, 9 aa, Homo Sapiens
TEDDKQLLL

SEQ ID NO: 99044 - protein, 9 aa, Homo Sapiens
TEDHVMHLL

SEQ ID NO: 99045 - protein, 9 aa, Homo Sapiens
TEDITRYFL

SEQ ID NO: 99046 - protein, 9 aa, Homo Sapiens
TEDKISLLL

SEQ ID NO: 99047 - protein, 9 aa, Homo Sapiens
TEDQRFPQL

SEQ ID NO: 99048 - protein, 9 aa, Homo Sapiens
TEDRIQHAL

SEQ ID NO: 99049 - protein, 9 aa, Homo Sapiens
TEEDVKFYL

SEQ ID NO: 99050 - protein, 9 aa, Homo Sapiens
TEEGQKIVL

SEQ ID NO: 99051 - protein, 9 aa, Homo Sapiens
TEEKLTPVL

SEQ ID NO: 99052 - protein, 9 aa, Homo Sapiens
TEETTHVVM

SEQ ID NO: 99053 - protein, 9 aa, Homo Sapiens
TEEVCRIYL

SEQ ID NO: 99054 - protein, 9 aa, Homo Sapiens
TEFDAAQVL

SEQ ID NO: 99055 - protein, 9 aa, Homo Sapiens
TEFEQQERL

SEQ ID NO: 99056 - protein, 9 aa, Homo Sapiens
TEFLDISQL

SEQ ID NO: 99057 - protein, 9 aa, Homo Sapiens
TEFLIEPSL

SEQ ID NO: 99058 - protein, 9 aa, Homo Sapiens
TEGEDKITL

SEQ ID NO: 99059 - protein, 9 aa, Homo Sapiens
TEHEKVAIL

SEQ ID NO: 99060 - protein, 9 aa, Homo Sapiens
TEHGEFLAL

SEQ ID NO: 99061 - protein, 9 aa, Homo Sapiens
TEHGVEVVL

SEQ ID NO: 99062 - protein, 9 aa, Homo Sapiens
TEHINIHQL

SEQ ID NO: 99063 - protein, 9 aa, Homo Sapiens
TEHPENFNL

SEQ ID NO: 99064 - protein, 9 aa, Homo Sapiens
TEHPVPIIL

SEQ ID NO: 99065 - protein, 9 aa, Homo Sapiens
TEIDPICAL

SEQ ID NO: 99066 - protein, 9 aa, Homo Sapiens
TEIDPINAL

SEQ ID NO: 99067 - protein, 9 aa, Homo Sapiens
TEIEDMPTL

SEQ ID NO: 99068 - protein, 9 aa, Homo Sapiens
TEIEDSHTL

SEQ ID NO: 99069 - protein, 9 aa, Homo Sapiens
TEIEGTQKL

SEQ ID NO: 99070 - protein, 9 aa, Homo Sapiens
TEIGQTLDL

SEQ ID NO: 99071 - protein, 9 aa, Homo Sapiens
TEIKKTEVL

SEQ ID NO: 99072 - protein, 9 aa, Homo Sapiens
TEIQLVQSL

SEQ ID NO: 99073 - protein, 9 aa, Homo Sapiens
TEIQQQSAL

SEQ ID NO: 99074 - protein, 9 aa, Homo Sapiens
TEITHAVVI

SEQ ID NO: 99075 - protein, 9 aa, Homo Sapiens
TEKEDFIEL

SEQ ID NO: 99076 - protein, 9 aa, Homo Sapiens
TEKTKPEVL

SEQ ID NO: 99077 - protein, 9 aa, Homo Sapiens
TELEYIHAL

SEQ ID NO: 99078 - protein, 9 aa, Homo Sapiens
TELGDELTL

SEQ ID NO: 99079 - protein, 9 aa, Homo Sapiens
TELPVMVEL

SEQ ID NO: 99080 - protein, 9 aa, Homo Sapiens
TELTTKSSL

SEQ ID NO: 99081 - protein, 9 aa, Homo Sapiens
TEMEQDYQL

SEQ ID NO: 99082 - protein, 9 aa, Homo Sapiens
TENLVRELL

SEQ ID NO: 99083 - protein, 9 aa, Homo Sapiens
TENNDHINL

SEQ ID NO: 99084 - protein, 9 aa, Homo Sapiens
TESDIREMM

SEQ ID NO: 99085 - protein, 9 aa, Homo Sapiens
TESDTAVRL

SEQ ID NO: 99086 - protein, 9 aa, Homo Sapiens
TESGLNVTL

SEQ ID NO: 99087 - protein, 9 aa, Homo Sapiens
TESKDDPSL

SEQ ID NO: 99088 - protein, 9 aa, Homo Sapiens
TESPENVAL

SEQ ID NO: 99089 - protein, 9 aa, Homo Sapiens
TESQVVITL

SEQ ID NO: 99090 - protein, 9 aa, Homo Sapiens
TESRQVVEL

SEQ ID NO: 99091 - protein, 9 aa, Homo Sapiens
TESTARVEL

SEQ ID NO: 99092 - protein, 9 aa, Homo Sapiens
TETEIVTSL

SEQ ID NO: 99093 - protein, 9 aa, Homo Sapiens
TETEPPVAL

SEQ ID NO: 99094 - protein, 9 aa, Homo Sapiens
TETNVYFKL

SEQ ID NO: 99095 - protein, 9 aa, Homo Sapiens
TETQEKNPL

SEQ ID NO: 99096 - protein, 9 aa, Homo Sapiens
TETRLECLL

SEQ ID NO: 99097 - protein, 9 aa, Homo Sapiens
TETVVTEYL

SEQ ID NO: 99098 - protein, 9 aa, Homo Sapiens
TEVGEKIAL

SEQ ID NO: 99099 - protein, 9 aa, Homo Sapiens
TEVKTSTVI

SEQ ID NO: 99100 - protein, 9 aa, Homo Sapiens
TEVPVEPVL

SEQ ID NO: 99101 - protein, 9 aa, Homo Sapiens
TEVRELVSL

SEQ ID NO: 99102 - protein, 9 aa, Homo Sapiens
TEVRVANEL

SEQ ID NO: 99103 - protein, 9 aa, Homo Sapiens
TEVSKVPSL

SEQ ID NO: 99104 - protein, 9 aa, Homo Sapiens
TEYEKDFSL

SEQ ID NO: 99105 - protein, 9 aa, Homo Sapiens
TEYLEPVVL

SEQ ID NO: 99106 - protein, 9 aa, Homo Sapiens
TVLVPTRHP

SEQ ID NO: 99107 - protein, 9 aa, Homo Sapiens
VEADLVEAL

SEQ ID NO: 99108 - protein, 9 aa, Homo Sapiens
VEAIESYVL

SEQ ID NO: 99109 - protein, 9 aa, Homo Sapiens
VEALPGPSL

SEQ ID NO: 99110 - protein, 9 aa, Homo Sapiens
VEALTKEEL

SEQ ID NO: 99111 - protein, 9 aa, Homo Sapiens
VEANYPETL

SEQ ID NO: 99112 - protein, 9 aa, Homo Sapiens
VEAPPSVVL

SEQ ID NO: 99113 - protein, 9 aa, Homo Sapiens
VEASGGITL

SEQ ID NO: 99114 - protein, 9 aa, Homo Sapiens
VECQLKTTL

SEQ ID NO: 99115 - protein, 9 aa, Homo Sapiens
VEDDIQQLL

SEQ ID NO: 99116 - protein, 9 aa, Homo Sapiens
VEDITPPRL

SEQ ID NO: 99117 - protein, 9 aa, Homo Sapiens
VEDKGACRL

SEQ ID NO: 99118 - protein, 9 aa, Homo Sapiens
VEDPYTASL

SEQ ID NO: 99119 - protein, 9 aa, Homo Sapiens
VEDRPQDPL

SEQ ID NO: 99120 - protein, 9 aa, Homo Sapiens
VEDVSWHLL

SEQ ID NO: 99121 - protein, 9 aa, Homo Sapiens
VEEAQVITL

SEQ ID NO: 99122 - protein, 9 aa, Homo Sapiens
VEEGKSITL

SEQ ID NO: 99123 - protein, 9 aa, Homo Sapiens
VEEPTVLVL

SEQ ID NO: 99124 - protein, 9 aa, Homo Sapiens
VEEQRPPEL

SEQ ID NO: 99125 - protein, 9 aa, Homo Sapiens
VEERNTISL

SEQ ID NO: 99126 - protein, 9 aa, Homo Sapiens
VEERPAVSL

SEQ ID NO: 99127 - protein, 9 aa, Homo Sapiens
VEETSHQAL

SEQ ID NO: 99128 - protein, 9 aa, Homo Sapiens
VEFADEVRL

SEQ ID NO: 99129 - protein, 9 aa, Homo Sapiens
VEFDEVDSL

SEQ ID NO: 99130 - protein, 9 aa, Homo Sapiens
VEFEDGSQI

SEQ ID NO: 99131 - protein, 9 aa, Homo Sapiens
VEFFHVEDL

SEQ ID NO: 99132 - protein, 9 aa, Homo Sapiens
VEFPHSPEI

SEQ ID NO: 99133 - protein, 9 aa, Homo Sapiens
VEFPLDPAL

SEQ ID NO: 99134 - protein, 9 aa, Homo Sapiens
VEFREVTEL

SEQ ID NO: 99135 - protein, 9 aa, Homo Sapiens
VEGDPIVAL

SEQ ID NO: 99136 - protein, 9 aa, Homo Sapiens
VEHFMPILM

SEQ ID NO: 99137 - protein, 9 aa, Homo Sapiens
VEIHIPITL

SEQ ID NO: 99138 - protein, 9 aa, Homo Sapiens
VEMDIVEKL

SEQ ID NO: 99139 - protein, 9 aa, Homo Sapiens
VEMRDNPEL

SEQ ID NO: 99140 - protein, 9 aa, Homo Sapiens
VENNDIIIL

SEQ ID NO: 99141 - protein, 9 aa, Homo Sapiens
VEQPEDYTL

SEQ ID NO: 99142 - protein, 9 aa, Homo Sapiens
VESGLKTIL

SEQ ID NO: 99143 - protein, 9 aa, Homo Sapiens
VESHIQHSL

SEQ ID NO: 99144 - protein, 9 aa, Homo Sapiens
VESKVKDIL

SEQ ID NO: 99145 - protein, 9 aa, Homo Sapiens
VETAEGVAL

SEQ ID NO: 99146 - protein, 9 aa, Homo Sapiens
VETATELLL

SEQ ID NO: 99147 - protein, 9 aa, Homo Sapiens
VETVYTHVL

SEQ ID NO: 99148 - protein, 9 aa, Homo Sapiens
VEVPDGPTL

SEQ ID NO: 99149 - protein, 9 aa, Homo Sapiens
VEVSIPAKL

SEQ ID NO: 99150 - protein, 9 aa, Homo Sapiens
VEVTAGNRL

SEQ ID NO: 99151 - protein, 9 aa, Homo Sapiens
VEWNKKEEL

SEQ ID NO: 99152 - protein, 9 aa, Homo Sapiens
VSDAETESI

SEQ ID NO: 99153 - protein, 9 aa, Homo Sapiens
WEAQEPIQM

SEQ ID NO: 99154 - protein, 9 aa, Homo Sapiens
WEEERQPIL

SEQ ID NO: 99155 - protein, 9 aa, Homo Sapiens
WEIEDNQLL

SEQ ID NO: 99156 - protein, 9 aa, Homo Sapiens
WEISQKTVL

SEQ ID NO: 99157 - protein, 9 aa, Homo Sapiens
WESSIVDRL

SEQ ID NO: 99158 - protein, 9 aa, Homo Sapiens
WESSNKALL

SEQ ID NO: 99159 - protein, 9 aa, Homo Sapiens
WETEKICQL

SEQ ID NO: 99160 - protein, 9 aa, Homo Sapiens
WEYDESHVI

SEQ ID NO: 99161 - protein, 9 aa, Homo Sapiens
YEAGPDAVL

SEQ ID NO: 99162 - protein, 9 aa, Homo Sapiens
YEAPDVMNL

SEQ ID NO: 99163 - protein, 9 aa, Homo Sapiens
YEASLPHQI

SEQ ID NO: 99164 - protein, 9 aa, Homo Sapiens
YEDATKITV

SEQ ID NO: 99165 - protein, 9 aa, Homo Sapiens
YEDFHIVKL

SEQ ID NO: 99166 - protein, 9 aa, Homo Sapiens
YEDIKNVVL

SEQ ID NO: 99167 - protein, 9 aa, Homo Sapiens
YEDKTALSL

SEQ ID NO: 99168 - protein, 9 aa, Homo Sapiens
YEDPQHHPL

SEQ ID NO: 99169 - protein, 9 aa, Homo Sapiens
YEDQTKPVL

SEQ ID NO: 99170 - protein, 9 aa, Homo Sapiens
YEDVNPVLL

SEQ ID NO: 99171 - protein, 9 aa, Homo Sapiens
YEEDSKETL

SEQ ID NO: 99172 - protein, 9 aa, Homo Sapiens
YEEEQFTVL

SEQ ID NO: 99173 - protein, 9 aa, Homo Sapiens
YEEEVKKTL

SEQ ID NO: 99174 - protein, 9 aa, Homo Sapiens
YEEGINIHL

SEQ ID NO: 99175 - protein, 9 aa, Homo Sapiens
YEEGLRVVI

SEQ ID NO: 99176 - protein, 9 aa, Homo Sapiens
YEEILNTKL

SEQ ID NO: 99177 - protein, 9 aa, Homo Sapiens
YEEITKWYL

SEQ ID NO: 99178 - protein, 9 aa, Homo Sapiens
YEELVRMVL

SEQ ID NO: 99179 - protein, 9 aa, Homo Sapiens
YEENAKAEL

SEQ ID NO: 99180 - protein, 9 aa, Homo Sapiens
YEERVQAVV

SEQ ID NO: 99181 - protein, 9 aa, Homo Sapiens
YEETRQEVL

SEQ ID NO: 99182 - protein, 9 aa, Homo Sapiens
YEEVHVPAL

SEQ ID NO: 99183 - protein, 9 aa, Homo Sapiens
YEFEGGVKL

SEQ ID NO: 99184 - protein, 9 aa, Homo Sapiens
YEIDDVERL

SEQ ID NO: 99185 - protein, 9 aa, Homo Sapiens
YEIEKEPLL

SEQ ID NO: 99186 - protein, 9 aa, Homo Sapiens
YEIHDGMNL

SEQ ID NO: 99187 - protein, 9 aa, Homo Sapiens
YEILNNPEL

SEQ ID NO: 99188 - protein, 9 aa, Homo Sapiens
YELEKLWTL

SEQ ID NO: 99189 - protein, 9 aa, Homo Sapiens
YELGGPMTL

SEQ ID NO: 99190 - protein, 9 aa, Homo Sapiens
YELPDGQVI

SEQ ID NO: 99191 - protein, 9 aa, Homo Sapiens
YELYEKLEL

SEQ ID NO: 99192 - protein, 9 aa, Homo Sapiens
YEMEVSQRL

SEQ ID NO: 99193 - protein, 9 aa, Homo Sapiens
YENMVTEIM

SEQ ID NO: 99194 - protein, 9 aa, Homo Sapiens
YEPKLIIDL

SEQ ID NO: 99195 - protein, 9 aa, Homo Sapiens
YEQLLDVKI

SEQ ID NO: 99196 - protein, 9 aa, Homo Sapiens
YESGEYEML

SEQ ID NO: 99197 - protein, 9 aa, Homo Sapiens
YESHYALPL

SEQ ID NO: 99198 - protein, 9 aa, Homo Sapiens
YESPGKIFL

SEQ ID NO: 99199 - protein, 9 aa, Homo Sapiens
YETFISDVL

SEQ ID NO: 99200 - protein, 9 aa, Homo Sapiens
YETKDALCL

SEQ ID NO: 99201 - protein, 9 aa, Homo Sapiens
YEVQSEAKL

SEQ ID NO: 99202 - protein, 9 aa, Homo Sapiens
YEVVDKDSI

SEQ ID NO: 99203 - protein, 10 aa, Homo Sapiens
AEAAPDGPAL

SEQ ID NO: 99204 - protein, 10 aa, Homo Sapiens
AEADEIFQEL

SEQ ID NO: 99205 - protein, 10 aa, Homo Sapiens
AEADGAAWVL

SEQ ID NO: 99206 - protein, 10 aa, Homo Sapiens
AEADQIIEYL

SEQ ID NO: 99207 - protein, 10 aa, Homo Sapiens
AEAECQRQQL

SEQ ID NO: 99208 - protein, 10 aa, Homo Sapiens
AEAENKAAAL

SEQ ID NO: 99209 - protein, 10 aa, Homo Sapiens
AEAGADLVLL

SEQ ID NO: 99210 - protein, 10 aa, Homo Sapiens
AEAGSRMDKL

SEQ ID NO: 99211 - protein, 10 aa, Homo Sapiens
AEAKPITEML

SEQ ID NO: 99212 - protein, 10 aa, Homo Sapiens
AEALLTYETL

SEQ ID NO: 99213 - protein, 10 aa, Homo Sapiens
AEAMADKAEL

SEQ ID NO: 99214 - protein, 10 aa, Homo Sapiens
AEAPLPSPKL

SEQ ID NO: 99215 - protein, 10 aa, Homo Sapiens
AEAPVQEEKL

SEQ ID NO: 99216 - protein, 10 aa, Homo Sapiens
AEAQAGTTTL

SEQ ID NO: 99217 - protein, 10 aa, Homo Sapiens
AEAQALRQEL

SEQ ID NO: 99218 - protein, 10 aa, Homo Sapiens
AEAQGSTTLL

SEQ ID NO: 99219 - protein, 10 aa, Homo Sapiens
AEASSVKNEL

SEQ ID NO: 99220 - protein, 10 aa, Homo Sapiens
AEATLGSGNL

SEQ ID NO: 99221 - protein, 10 aa, Homo Sapiens
AEAWMSEQEL

SEQ ID NO: 99222 - protein, 10 aa, Homo Sapiens
AECGLRILAF

SEQ ID NO: 99223 - protein, 10 aa, Homo Sapiens
AECGPPPFFL

SEQ ID NO: 99224 - protein, 10 aa, Homo Sapiens
AECHLNPIIL

SEQ ID NO: 99225 - protein, 10 aa, Homo Sapiens
AECNAVRQAL

SEQ ID NO: 99226 - protein, 10 aa, Homo Sapiens
AECPIAEENL

SEQ ID NO: 99227 - protein, 10 aa, Homo Sapiens
AEDDIRGIQL

SEQ ID NO: 99228 - protein, 10 aa, Homo Sapiens
AEDELRDAVL

SEQ ID NO: 99229 - protein, 10 aa, Homo Sapiens
AEDENTQIAL

SEQ ID NO: 99230 - protein, 10 aa, Homo Sapiens
AEDITTGQVL

SEQ ID NO: 99231 - protein, 10 aa, Homo Sapiens
AEDNADTLAL

SEQ ID NO: 99232 - protein, 10 aa, Homo Sapiens
AEDPETQVVL

SEQ ID NO: 99233 - protein, 10 aa, Homo Sapiens
AEDPLGAIHL

SEQ ID NO: 99234 - protein, 10 aa, Homo Sapiens
AEDRQICPSL

SEQ ID NO: 99235 - protein, 10 aa, Homo Sapiens
AEDVPVRIAL

SEQ ID NO: 99236 - protein, 10 aa, Homo Sapiens
AEEALRTDIL

SEQ ID NO: 99237 - protein, 10 aa, Homo Sapiens
AEEDHVDLSL

SEQ ID NO: 99238 - protein, 10 aa, Homo Sapiens
AEEEAARVAL

SEQ ID NO: 99239 - protein, 10 aa, Homo Sapiens
AEEESTLTKL

SEQ ID NO: 99240 - protein, 10 aa, Homo Sapiens
AEEGEVHVAL

SEQ ID NO: 99241 - protein, 10 aa, Homo Sapiens
AEEGVMTPEL

SEQ ID NO: 99242 - protein, 10 aa, Homo Sapiens
AEEKAAVTSL

SEQ ID NO: 99243 - protein, 10 aa, Homo Sapiens
AEEKIPPSTL

SEQ ID NO: 99244 - protein, 10 aa, Homo Sapiens
AEEKLCPASL

SEQ ID NO: 99245 - protein, 10 aa, Homo Sapiens
AEELGRGIAL

SEQ ID NO: 99246 - protein, 10 aa, Homo Sapiens
AEEQKTSGIM

SEQ ID NO: 99247 - protein, 10 aa, Homo Sapiens
AEERAEVSEL

SEQ ID NO: 99248 - protein, 10 aa, Homo Sapiens
AEERPTFDYL

SEQ ID NO: 99249 - protein, 10 aa, Homo Sapiens
AEERSQFEIL

SEQ ID NO: 99250 - protein, 10 aa, Homo Sapiens
AEESAFSTVL

SEQ ID NO: 99251 - protein, 10 aa, Homo Sapiens
AEESQIRIEL

SEQ ID NO: 99252 - protein, 10 aa, Homo Sapiens
AEFDDRRGVL

SEQ ID NO: 99253 - protein, 10 aa, Homo Sapiens
AEFDTPGHTL

SEQ ID NO: 99254 - protein, 10 aa, Homo Sapiens
AEFEDLDSLL

SEQ ID NO: 99255 - protein, 10 aa, Homo Sapiens
AEFEQGHQFL

SEQ ID NO: 99256 - protein, 10 aa, Homo Sapiens
AEFFLQEERL

SEQ ID NO: 99257 - protein, 10 aa, Homo Sapiens
AEFHTELERL

SEQ ID NO: 99258 - protein, 10 aa, Homo Sapiens
AEFLMKNSDL

SEQ ID NO: 99259 - protein, 10 aa, Homo Sapiens
AEFLPDPSAL

SEQ ID NO: 99260 - protein, 10 aa, Homo Sapiens
AEFPEKEAQL

SEQ ID NO: 99261 - protein, 10 aa, Homo Sapiens
AEFPGLPEAL

SEQ ID NO: 99262 - protein, 10 aa, Homo Sapiens
AEFQEHEHAL

SEQ ID NO: 99263 - protein, 10 aa, Homo Sapiens
AEFQGYNVLL

SEQ ID NO: 99264 - protein, 10 aa, Homo Sapiens
AEFRDYPPVL

SEQ ID NO: 99265 - protein, 10 aa, Homo Sapiens
AEFREPLILL

SEQ ID NO: 99266 - protein, 10 aa, Homo Sapiens
AEFRKQEEVL

SEQ ID NO: 99267 - protein, 10 aa, Homo Sapiens
AEFSSAGHSL

SEQ ID NO: 99268 - protein, 10 aa, Homo Sapiens
AEGIVNGHTL

SEQ ID NO: 99269 - protein, 10 aa, Homo Sapiens
AEHEDFLLAL

SEQ ID NO: 99270 - protein, 10 aa, Homo Sapiens
AEHENMKAVL

SEQ ID NO: 99271 - protein, 10 aa, Homo Sapiens
AEHGGGMDSL

SEQ ID NO: 99272 - protein, 10 aa, Homo Sapiens
AEHKIFPAAL

SEQ ID NO: 99273 - protein, 10 aa, Homo Sapiens
AEHKPHIDKL

SEQ ID NO: 99274 - protein, 10 aa, Homo Sapiens
AEHPAGHLVL

SEQ ID NO: 99275 - protein, 10 aa, Homo Sapiens
AEIDAHLVAL

SEQ ID NO: 99276 - protein, 10 aa, Homo Sapiens
AEIDLRQGRL

SEQ ID NO: 99277 - protein, 10 aa, Homo Sapiens
AEIDSVKMTL

SEQ ID NO: 99278 - protein, 10 aa, Homo Sapiens
AEIEPPHHEL

SEQ ID NO: 99279 - protein, 10 aa, Homo Sapiens
AEIETRIAEL

SEQ ID NO: 99280 - protein, 10 aa, Homo Sapiens
AEIGQVKQEL

SEQ ID NO: 99281 - protein, 10 aa, Homo Sapiens
AEIKELFQYI

SEQ ID NO: 99282 - protein, 10 aa, Homo Sapiens
AEILEVLHSL

SEQ ID NO: 99283 - protein, 10 aa, Homo Sapiens
AEILHEIAVL

SEQ ID NO: 99284 - protein, 10 aa, Homo Sapiens
AEILQANDLL

SEQ ID NO: 99285 - protein, 10 aa, Homo Sapiens
AEINKSLLAL

SEQ ID NO: 99286 - protein, 10 aa, Homo Sapiens
AEIQAELERL

SEQ ID NO: 99287 - protein, 10 aa, Homo Sapiens
AEIQETITAL

SEQ ID NO: 99288 - protein, 10 aa, Homo Sapiens
AEIQHAEEFL

SEQ ID NO: 99289 - protein, 10 aa, Homo Sapiens
AEIRHVLVTL

SEQ ID NO: 99290 - protein, 10 aa, Homo Sapiens
AEISDVWEEM

SEQ ID NO: 99291 - protein, 10 aa, Homo Sapiens
AEKLGETEKL

SEQ ID NO: 99292 - protein, 10 aa, Homo Sapiens
AELAGTEEQL

SEQ ID NO: 99293 - protein, 10 aa, Homo Sapiens
AELASNKEWL

SEQ ID NO: 99294 - protein, 10 aa, Homo Sapiens
AELDEKISAL

SEQ ID NO: 99295 - protein, 10 aa, Homo Sapiens
AELDETKIIL

SEQ ID NO: 99296 - protein, 10 aa, Homo Sapiens
AELDPVEYTL

SEQ ID NO: 99297 - protein, 10 aa, Homo Sapiens
AELDSHTPAL

SEQ ID NO: 99298 - protein, 10 aa, Homo Sapiens
AELEELKQVL

SEQ ID NO: 99299 - protein, 10 aa, Homo Sapiens
AELEGRQEEL

SEQ ID NO: 99300 - protein, 10 aa, Homo Sapiens
AELEIQKDAL

SEQ ID NO: 99301 - protein, 10 aa, Homo Sapiens
AELEPLKEQL

SEQ ID NO: 99302 - protein, 10 aa, Homo Sapiens
AELESKTNTL

SEQ ID NO: 99303 - protein, 10 aa, Homo Sapiens
AELGHLVVSL

SEQ ID NO: 99304 - protein, 10 aa, Homo Sapiens
AELKEKYISL

SEQ ID NO: 99305 - protein, 10 aa, Homo Sapiens
AELKIVADQL

SEQ ID NO: 99306 - protein, 10 aa, Homo Sapiens
AELKMTGNCL

SEQ ID NO: 99307 - protein, 10 aa, Homo Sapiens
AELKQELATL

SEQ ID NO: 99308 - protein, 10 aa, Homo Sapiens
AELKSSTVGL

SEQ ID NO: 99309 - protein, 10 aa, Homo Sapiens
AELLLKSSDL

SEQ ID NO: 99310 - protein, 10 aa, Homo Sapiens
AELMQQVNVL

SEQ ID NO: 99311 - protein, 10 aa, Homo Sapiens
AELPASVHAL

SEQ ID NO: 99312 - protein, 10 aa, Homo Sapiens
AELQEKFLSL

SEQ ID NO: 99313 - protein, 10 aa, Homo Sapiens
AELQQQQAVL

SEQ ID NO: 99314 - protein, 10 aa, Homo Sapiens
AELRSTASLL

SEQ ID NO: 99315 - protein, 10 aa, Homo Sapiens
AELSEKSGML

SEQ ID NO: 99316 - protein, 10 aa, Homo Sapiens
AELTIAKDQL

SEQ ID NO: 99317 - protein, 10 aa, Homo Sapiens
AEMAQNAVRL

SEQ ID NO: 99318 - protein, 10 aa, Homo Sapiens
AEMDARTILL

SEQ ID NO: 99319 - protein, 10 aa, Homo Sapiens
AEMETFRDIL

SEQ ID NO: 99320 - protein, 10 aa, Homo Sapiens
AEMPDSAAAL

SEQ ID NO: 99321 - protein, 10 aa, Homo Sapiens
AEMQEVGVGL

SEQ ID NO: 99322 - protein, 10 aa, Homo Sapiens
AEMVSENDVI

SEQ ID NO: 99323 - protein, 10 aa, Homo Sapiens
AENEPENACL

SEQ ID NO: 99324 - protein, 10 aa, Homo Sapiens
AENPGKYNIL

SEQ ID NO: 99325 - protein, 10 aa, Homo Sapiens
AEPAVTEPGL

SEQ ID NO: 99326 - protein, 10 aa, Homo Sapiens
AEPDYVQPQL

SEQ ID NO: 99327 - protein, 10 aa, Homo Sapiens
AEPEDHYFLL

SEQ ID NO: 99328 - protein, 10 aa, Homo Sapiens
AEPELQYVAL

SEQ ID NO: 99329 - protein, 10 aa, Homo Sapiens
AEPLEIILHL

SEQ ID NO: 99330 - protein, 10 aa, Homo Sapiens
AEPLRPGPAL

SEQ ID NO: 99331 - protein, 10 aa, Homo Sapiens
AEPVLINPVL

SEQ ID NO: 99332 - protein, 10 aa, Homo Sapiens
AEPWPENATL

SEQ ID NO: 99333 - protein, 10 aa, Homo Sapiens
AEQAKASPAL

SEQ ID NO: 99334 - protein, 10 aa, Homo Sapiens
AEQEIARLVL

SEQ ID NO: 99335 - protein, 10 aa, Homo Sapiens
AEQHFADVVL

SEQ ID NO: 99336 - protein, 10 aa, Homo Sapiens
AEQKIKADIL

SEQ ID NO: 99337 - protein, 10 aa, Homo Sapiens
AEQLGTFTTL

SEQ ID NO: 99338 - protein, 10 aa, Homo Sapiens
AEQNGKGVAL

SEQ ID NO: 99339 - protein, 10 aa, Homo Sapiens
AEQQGKGVAL

SEQ ID NO: 99340 - protein, 10 aa, Homo Sapiens
AESAVSRDHL

SEQ ID NO: 99341 - protein, 10 aa, Homo Sapiens
AESEDGKLTL

SEQ ID NO: 99342 - protein, 10 aa, Homo Sapiens
AESEEYDQVL

SEQ ID NO: 99343 - protein, 10 aa, Homo Sapiens
AESELTVTQL

SEQ ID NO: 99344 - protein, 10 aa, Homo Sapiens
AESGVERQVL

SEQ ID NO: 99345 - protein, 10 aa, Homo Sapiens
AESHPSSNLL

SEQ ID NO: 99346 - protein, 10 aa, Homo Sapiens
AESSPDPQAL

SEQ ID NO: 99347 - protein, 10 aa, Homo Sapiens
AETDPGMVHL

SEQ ID NO: 99348 - protein, 10 aa, Homo Sapiens
AETEEIKTIL

SEQ ID NO: 99349 - protein, 10 aa, Homo Sapiens
AETEHENTVL

SEQ ID NO: 99350 - protein, 10 aa, Homo Sapiens
AETHIKGFTL

SEQ ID NO: 99351 - protein, 10 aa, Homo Sapiens
AETKAESEQL

SEQ ID NO: 99352 - protein, 10 aa, Homo Sapiens
AETPGHTPSL

SEQ ID NO: 99353 - protein, 10 aa, Homo Sapiens
AEVAAKNQSL

SEQ ID NO: 99354 - protein, 10 aa, Homo Sapiens
AEVAATEIKM

SEQ ID NO: 99355 - protein, 10 aa, Homo Sapiens
AEVAEHVQYM

SEQ ID NO: 99356 - protein, 10 aa, Homo Sapiens
AEVAEMRQML

SEQ ID NO: 99357 - protein, 10 aa, Homo Sapiens
AEVANEIENL

SEQ ID NO: 99358 - protein, 10 aa, Homo Sapiens
AEVCPTPARL

SEQ ID NO: 99359 - protein, 10 aa, Homo Sapiens
AEVDGASFLL

SEQ ID NO: 99360 - protein, 10 aa, Homo Sapiens
AEVDKNIELL

SEQ ID NO: 99361 - protein, 10 aa, Homo Sapiens
AEVEEKIDQL

SEQ ID NO: 99362 - protein, 10 aa, Homo Sapiens
AEVEGIGEAL

SEQ ID NO: 99363 - protein, 10 aa, Homo Sapiens
AEVEHLTEVL

SEQ ID NO: 99364 - protein, 10 aa, Homo Sapiens
AEVEIPGEFL

SEQ ID NO: 99365 - protein, 10 aa, Homo Sapiens
AEVERVKDVL

SEQ ID NO: 99366 - protein, 10 aa, Homo Sapiens
AEVETRIEAL

SEQ ID NO: 99367 - protein, 10 aa, Homo Sapiens
AEVETRKVVL

SEQ ID NO: 99368 - protein, 10 aa, Homo Sapiens
AEVFALIHEL

SEQ ID NO: 99369 - protein, 10 aa, Homo Sapiens
AEVKDMEQLL

SEQ ID NO: 99370 - protein, 10 aa, Homo Sapiens
AEVKEEGSQL

SEQ ID NO: 99371 - protein, 10 aa, Homo Sapiens
AEVKVSKEIF

SEQ ID NO: 99372 - protein, 10 aa, Homo Sapiens
AEVLAKKEEL

SEQ ID NO: 99373 - protein, 10 aa, Homo Sapiens
AEVLIQQGGL

SEQ ID NO: 99374 - protein, 10 aa, Homo Sapiens
AEVLVKSNNL

SEQ ID NO: 99375 - protein, 10 aa, Homo Sapiens
AEVPAVKDML

SEQ ID NO: 99376 - protein, 10 aa, Homo Sapiens
AEVSELETRL

SEQ ID NO: 99377 - protein, 10 aa, Homo Sapiens
AEVSIVDCIL

SEQ ID NO: 99378 - protein, 10 aa, Homo Sapiens
AEVSQNIEKL

SEQ ID NO: 99379 - protein, 10 aa, Homo Sapiens
AEVSQRFEQL

SEQ ID NO: 99380 - protein, 10 aa, Homo Sapiens
AEVSRACDFL

SEQ ID NO: 99381 - protein, 10 aa, Homo Sapiens
AEWAAANHVL

SEQ ID NO: 99382 - protein, 10 aa, Homo Sapiens
AEYAHPLETL

SEQ ID NO: 99383 - protein, 10 aa, Homo Sapiens
AEYESLRDLL

SEQ ID NO: 99384 - protein, 10 aa, Homo Sapiens
AEYIQKNVQL

SEQ ID NO: 99385 - protein, 10 aa, Homo Sapiens
AVEEEKGEEL

SEQ ID NO: 99386 - protein, 10 aa, Homo Sapiens
CKTWHSAWVI

SEQ ID NO: 99387 - protein, 10 aa, Homo Sapiens
DDIVHSFVSL

SEQ ID NO: 99388 - protein, 10 aa, Homo Sapiens
DEVHLLNDTL

SEQ ID NO: 99389 - protein, 10 aa, Homo Sapiens
DTDSSVHVQV

SEQ ID NO: 99390 - protein, 10 aa, Homo Sapiens
EEFEHKEEVL

SEQ ID NO: 99391 - protein, 10 aa, Homo Sapiens
EEVEIEREVL

SEQ ID NO: 99392 - protein, 10 aa, Homo Sapiens
EEVNIAGDSL

SEQ ID NO: 99393 - protein, 10 aa, Homo Sapiens
EEVYLVHDEL

SEQ ID NO: 99394 - protein, 10 aa, Homo Sapiens
ETGGSEKLSL

SEQ ID NO: 99395 - protein, 10 aa, Homo Sapiens
FEAEVLHTVL

SEQ ID NO: 99396 - protein, 10 aa, Homo Sapiens
FEDPHCEVGL

SEQ ID NO: 99397 - protein, 10 aa, Homo Sapiens
FEEGLETTAL

SEQ ID NO: 99398 - protein, 10 aa, Homo Sapiens
FEEHNSMNEL

SEQ ID NO: 99399 - protein, 10 aa, Homo Sapiens
FEEISRSGEL

SEQ ID NO: 99400 - protein, 10 aa, Homo Sapiens
FEEKSGRTFL

SEQ ID NO: 99401 - protein, 10 aa, Homo Sapiens
FEFDEQGREL

SEQ ID NO: 99402 - protein, 10 aa, Homo Sapiens
FEFGSLDQKL

SEQ ID NO: 99403 - protein, 10 aa, Homo Sapiens
FEFGSLEQKL

SEQ ID NO: 99404 - protein, 10 aa, Homo Sapiens
FEIHDDIEVL

SEQ ID NO: 99405 - protein, 10 aa, Homo Sapiens
FEISDIGAKI

SEQ ID NO: 99406 - protein, 10 aa, Homo Sapiens
FELLEKEVGL

SEQ ID NO: 99407 - protein, 10 aa, Homo Sapiens
FENGKELVEL

SEQ ID NO: 99408 - protein, 10 aa, Homo Sapiens
FEQANIKTQL

SEQ ID NO: 99409 - protein, 10 aa, Homo Sapiens
FESGISQALL

SEQ ID NO: 99410 - protein, 10 aa, Homo Sapiens
FEVDDGTSVL

SEQ ID NO: 99411 - protein, 10 aa, Homo Sapiens
FEVDLSHVYL

SEQ ID NO: 99412 - protein, 10 aa, Homo Sapiens
FEVEKELFAL

SEQ ID NO: 99413 - protein, 10 aa, Homo Sapiens
FEVLVEKEWL

SEQ ID NO: 99414 - protein, 10 aa, Homo Sapiens
FEVSPDGSFL

SEQ ID NO: 99415 - protein, 10 aa, Homo Sapiens
FEYFGPDFKL

SEQ ID NO: 99416 - protein, 10 aa, Homo Sapiens
GEAAEKNLYL

SEQ ID NO: 99417 - protein, 10 aa, Homo Sapiens
GEADNLDEFL

SEQ ID NO: 99418 - protein, 10 aa, Homo Sapiens
GEAGLHFDEL

SEQ ID NO: 99419 - protein, 10 aa, Homo Sapiens
GEAGPSAEAL

SEQ ID NO: 99420 - protein, 10 aa, Homo Sapiens
GEAHAELDSL

SEQ ID NO: 99421 - protein, 10 aa, Homo Sapiens
GEAKTDPAGL

SEQ ID NO: 99422 - protein, 10 aa, Homo Sapiens
GEANVTGSQL

SEQ ID NO: 99423 - protein, 10 aa, Homo Sapiens
GEAPAEMGAL

SEQ ID NO: 99424 - protein, 10 aa, Homo Sapiens
GEAPAKSSTL

SEQ ID NO: 99425 - protein, 10 aa, Homo Sapiens
GEAPPELLCL

SEQ ID NO: 99426 - protein, 10 aa, Homo Sapiens
GEAPPPTESL

SEQ ID NO: 99427 - protein, 10 aa, Homo Sapiens
GEAQRLIEIL

SEQ ID NO: 99428 - protein, 10 aa, Homo Sapiens
GEAQVGKTSL

SEQ ID NO: 99429 - protein, 10 aa, Homo Sapiens
GEAVEVIHKL

SEQ ID NO: 99430 - protein, 10 aa, Homo Sapiens
GECGLDFDRL

SEQ ID NO: 99431 - protein, 10 aa, Homo Sapiens
GECPPQRSIL

SEQ ID NO: 99432 - protein, 10 aa, Homo Sapiens
GECYEKLNQL

SEQ ID NO: 99433 - protein, 10 aa, Homo Sapiens
GEDARNVTVL

SEQ ID NO: 99434 - protein, 10 aa, Homo Sapiens
GEDEGYFQEL

SEQ ID NO: 99435 - protein, 10 aa, Homo Sapiens
GEDGAGKTSL

SEQ ID NO: 99436 - protein, 10 aa, Homo Sapiens
GEDGLPTPAL

SEQ ID NO: 99437 - protein, 10 aa, Homo Sapiens
GEDGSGKTTL

SEQ ID NO: 99438 - protein, 10 aa, Homo Sapiens
GEDHPEMALL

SEQ ID NO: 99439 - protein, 10 aa, Homo Sapiens
GEDLGADYNL

SEQ ID NO: 99440 - protein, 10 aa, Homo Sapiens
GEDPNKAEEL

SEQ ID NO: 99441 - protein, 10 aa, Homo Sapiens
GEDQTQDTEL

SEQ ID NO: 99442 - protein, 10 aa, Homo Sapiens
GEDRSPPTAL

SEQ ID NO: 99443 - protein, 10 aa, Homo Sapiens
GEDSGARALL

SEQ ID NO: 99444 - protein, 10 aa, Homo Sapiens
GEEALLRYVL

SEQ ID NO: 99445 - protein, 10 aa, Homo Sapiens
GEEGDLKTSL

SEQ ID NO: 99446 - protein, 10 aa, Homo Sapiens
GEEGTRPEAL

SEQ ID NO: 99447 - protein, 10 aa, Homo Sapiens
GEEHFKGLVL

SEQ ID NO: 99448 - protein, 10 aa, Homo Sapiens
GEEHPRGSIL

SEQ ID NO: 99449 - protein, 10 aa, Homo Sapiens
GEENKGHQML

SEQ ID NO: 99450 - protein, 10 aa, Homo Sapiens
GEEPGIKSQL

SEQ ID NO: 99451 - protein, 10 aa, Homo Sapiens
GEEQTQDTEL

SEQ ID NO: 99452 - protein, 10 aa, Homo Sapiens
GEETGIDVTL

SEQ ID NO: 99453 - protein, 10 aa, Homo Sapiens
GEEVGPSVYL

SEQ ID NO: 99454 - protein, 10 aa, Homo Sapiens
GEFDPSKERL

SEQ ID NO: 99455 - protein, 10 aa, Homo Sapiens
GEFGTIPLVL

SEQ ID NO: 99456 - protein, 10 aa, Homo Sapiens
GEFNEQVLRL

SEQ ID NO: 99457 - protein, 10 aa, Homo Sapiens
GEFQIVNPHL

SEQ ID NO: 99458 - protein, 10 aa, Homo Sapiens
GEFSDKLLSL

SEQ ID NO: 99459 - protein, 10 aa, Homo Sapiens
GEFSTCFTEL

SEQ ID NO: 99460 - protein, 10 aa, Homo Sapiens
GEFTSARAVL

SEQ ID NO: 99461 - protein, 10 aa, Homo Sapiens
GEGALVNDVL

SEQ ID NO: 99462 - protein, 10 aa, Homo Sapiens
GEGHFGKVSL

SEQ ID NO: 99463 - protein, 10 aa, Homo Sapiens
GEGHTQDTEL

SEQ ID NO: 99464 - protein, 10 aa, Homo Sapiens
GEGKNGTIEL

SEQ ID NO: 99465 - protein, 10 aa, Homo Sapiens
GEGMGISHEL

SEQ ID NO: 99466 - protein, 10 aa, Homo Sapiens
GEGSFSTVVL

SEQ ID NO: 99467 - protein, 10 aa, Homo Sapiens
GEHEIDYILL

SEQ ID NO: 99468 - protein, 10 aa, Homo Sapiens
GEHGTEYDTL

SEQ ID NO: 99469 - protein, 10 aa, Homo Sapiens
GEHHEKAVEL

SEQ ID NO: 99470 - protein, 10 aa, Homo Sapiens
GEHQINQIAL

SEQ ID NO: 99471 - protein, 10 aa, Homo Sapiens
GEHSGRYEEL

SEQ ID NO: 99472 - protein, 10 aa, Homo Sapiens
GEIAKSYAEL

SEQ ID NO: 99473 - protein, 10 aa, Homo Sapiens
GEIATSQERL

SEQ ID NO: 99474 - protein, 10 aa, Homo Sapiens
GEIDGNKVTL

SEQ ID NO: 99475 - protein, 10 aa, Homo Sapiens
GEIDVPSHEL

SEQ ID NO: 99476 - protein, 10 aa, Homo Sapiens
GEIEGLNDTF

SEQ ID NO: 99477 - protein, 10 aa, Homo Sapiens
GEIFELKAEL

SEQ ID NO: 99478 - protein, 10 aa, Homo Sapiens
GEIFSEHSCL

SEQ ID NO: 99479 - protein, 10 aa, Homo Sapiens
GEIHDLKDML

SEQ ID NO: 99480 - protein, 10 aa, Homo Sapiens
GEIHDSKMRL

SEQ ID NO: 99481 - protein, 10 aa, Homo Sapiens
GEIIMGNIEL

SEQ ID NO: 99482 - protein, 10 aa, Homo Sapiens
GEIINTHTLL

SEQ ID NO: 99483 - protein, 10 aa, Homo Sapiens
GEIKNIHLNL

SEQ ID NO: 99484 - protein, 10 aa, Homo Sapiens
GEILHDAKTL

SEQ ID NO: 99485 - protein, 10 aa, Homo Sapiens
GEIQQIPVQL

SEQ ID NO: 99486 - protein, 10 aa, Homo Sapiens
GEIRNVGTGL

SEQ ID NO: 99487 - protein, 10 aa, Homo Sapiens
GEISDIHTKL

SEQ ID NO: 99488 - protein, 10 aa, Homo Sapiens
GEITEERDIL

SEQ ID NO: 99489 - protein, 10 aa, Homo Sapiens
GEKRPEEVAL

SEQ ID NO: 99490 - protein, 10 aa, Homo Sapiens
GELAVGREIL

SEQ ID NO: 99491 - protein, 10 aa, Homo Sapiens
GELDHVVEIL

SEQ ID NO: 99492 - protein, 10 aa, Homo Sapiens
GELEAERQAL

SEQ ID NO: 99493 - protein, 10 aa, Homo Sapiens
GELESHADRL

SEQ ID NO: 99494 - protein, 10 aa, Homo Sapiens
GELGNGNIKL

SEQ ID NO: 99495 - protein, 10 aa, Homo Sapiens
GELKHGPLAL

SEQ ID NO: 99496 - protein, 10 aa, Homo Sapiens
GELKYVRIVL

SEQ ID NO: 99497 - protein, 10 aa, Homo Sapiens
GELPEINGKL

SEQ ID NO: 99498 - protein, 10 aa, Homo Sapiens
GELPGEACTL

SEQ ID NO: 99499 - protein, 10 aa, Homo Sapiens
GELQESQSRL

SEQ ID NO: 99500 - protein, 10 aa, Homo Sapiens
GELQGERGEL

SEQ ID NO: 99501 - protein, 10 aa, Homo Sapiens
GELQHASAVL

SEQ ID NO: 99502 - protein, 10 aa, Homo Sapiens
GELREQLKAL

SEQ ID NO: 99503 - protein, 10 aa, Homo Sapiens
GELSGDFEKL

SEQ ID NO: 99504 - protein, 10 aa, Homo Sapiens
GELTENGLTL

SEQ ID NO: 99505 - protein, 10 aa, Homo Sapiens
GELTLEGGAL

SEQ ID NO: 99506 - protein, 10 aa, Homo Sapiens
GEMKAEVTKL

SEQ ID NO: 99507 - protein, 10 aa, Homo Sapiens
GEMKELPEQL

SEQ ID NO: 99508 - protein, 10 aa, Homo Sapiens
GEMKSGVPVL

SEQ ID NO: 99509 - protein, 10 aa, Homo Sapiens
GEMTALREEL

SEQ ID NO: 99510 - protein, 10 aa, Homo Sapiens
GENEDNRIGL

SEQ ID NO: 99511 - protein, 10 aa, Homo Sapiens
GEPAGTDPGL

SEQ ID NO: 99512 - protein, 10 aa, Homo Sapiens
GEPEEDIVGL

SEQ ID NO: 99513 - protein, 10 aa, Homo Sapiens
GEPEKLGQAL

SEQ ID NO: 99514 - protein, 10 aa, Homo Sapiens
GEPESFGDNL

SEQ ID NO: 99515 - protein, 10 aa, Homo Sapiens
GEPEVQYVAL

SEQ ID NO: 99516 - protein, 10 aa, Homo Sapiens
GEPFSEEATL

SEQ ID NO: 99517 - protein, 10 aa, Homo Sapiens
GEPLDNFESL

SEQ ID NO: 99518 - protein, 10 aa, Homo Sapiens
GEQGGGKLVL

SEQ ID NO: 99519 - protein, 10 aa, Homo Sapiens
GEQGVGKSTL

SEQ ID NO: 99520 - protein, 10 aa, Homo Sapiens
GESAETRALL

SEQ ID NO: 99521 - protein, 10 aa, Homo Sapiens
GESAVGKSSL

SEQ ID NO: 99522 - protein, 10 aa, Homo Sapiens
GESDDSILRL

SEQ ID NO: 99523 - protein, 10 aa, Homo Sapiens
GESEDLASRL

SEQ ID NO: 99524 - protein, 10 aa, Homo Sapiens
GESGIKVAVL

SEQ ID NO: 99525 - protein, 10 aa, Homo Sapiens
GESGNIKAGL

SEQ ID NO: 99526 - protein, 10 aa, Homo Sapiens
GESHIGGVLL

SEQ ID NO: 99527 - protein, 10 aa, Homo Sapiens
GESPLDGICL

SEQ ID NO: 99528 - protein, 10 aa, Homo Sapiens
GESPVPHTVL

SEQ ID NO: 99529 - protein, 10 aa, Homo Sapiens
GESSGKNVTL

SEQ ID NO: 99530 - protein, 10 aa, Homo Sapiens
GETETRLECL

SEQ ID NO: 99531 - protein, 10 aa, Homo Sapiens
GETGIGKSTL

SEQ ID NO: 99532 - protein, 10 aa, Homo Sapiens
GETKISQSEL

SEQ ID NO: 99533 - protein, 10 aa, Homo Sapiens
GETSVGKTSL

SEQ ID NO: 99534 - protein, 10 aa, Homo Sapiens
GEVAKEWQEL

SEQ ID NO: 99535 - protein, 10 aa, Homo Sapiens
GEVDDGARKL

SEQ ID NO: 99536 - protein, 10 aa, Homo Sapiens
GEVDLRECVV

SEQ ID NO: 99537 - protein, 10 aa, Homo Sapiens
GEVDVEQHTL

SEQ ID NO: 99538 - protein, 10 aa, Homo Sapiens
GEVELVEPGL

SEQ ID NO: 99539 - protein, 10 aa, Homo Sapiens
GEVFPTTEVL

SEQ ID NO: 99540 - protein, 10 aa, Homo Sapiens
GEVFRVVDTL

SEQ ID NO: 99541 - protein, 10 aa, Homo Sapiens
GEVGSAHSSL

SEQ ID NO: 99542 - protein, 10 aa, Homo Sapiens
GEVHIGGVML

SEQ ID NO: 99543 - protein, 10 aa, Homo Sapiens
GEVIRTLPSL

SEQ ID NO: 99544 - protein, 10 aa, Homo Sapiens
GEVKGTSGSL

SEQ ID NO: 99545 - protein, 10 aa, Homo Sapiens
GEVLDILTRL

SEQ ID NO: 99546 - protein, 10 aa, Homo Sapiens
GEVLEPANLL

SEQ ID NO: 99547 - protein, 10 aa, Homo Sapiens
GEVLPDIDTL

SEQ ID NO: 99548 - protein, 10 aa, Homo Sapiens
GEVPFNHEIL

SEQ ID NO: 99549 - protein, 10 aa, Homo Sapiens
GEVQDKYECL

SEQ ID NO: 99550 - protein, 10 aa, Homo Sapiens
GEVQDLLVRL

SEQ ID NO: 99551 - protein, 10 aa, Homo Sapiens
GEVRFSAVAL

SEQ ID NO: 99552 - protein, 10 aa, Homo Sapiens
GEVTEGLDVL

SEQ ID NO: 99553 - protein, 10 aa, Homo Sapiens
GEVTNDFVML

SEQ ID NO: 99554 - protein, 10 aa, Homo Sapiens
GEWEESEVKL

SEQ ID NO: 99555 - protein, 10 aa, Homo Sapiens
GEYFPGTGDL

SEQ ID NO: 99556 - protein, 10 aa, Homo Sapiens
GEYGKFFVTI

SEQ ID NO: 99557 - protein, 10 aa, Homo Sapiens
GEYSEAIPIL

SEQ ID NO: 99558 - protein, 10 aa, Homo Sapiens
GQDIAENLQL

SEQ ID NO: 99559 - protein, 10 aa, Homo Sapiens
HEAEVHAESL

SEQ ID NO: 99560 - protein, 10 aa, Homo Sapiens
HEAPSSEPSL

SEQ ID NO: 99561 - protein, 10 aa, Homo Sapiens
HEAQHGVTSL

SEQ ID NO: 99562 - protein, 10 aa, Homo Sapiens
HEAQLKNGSL

SEQ ID NO: 99563 - protein, 10 aa, Homo Sapiens
HEASAILVHL

SEQ ID NO: 99564 - protein, 10 aa, Homo Sapiens
HEATLRCWAL

SEQ ID NO: 99565 - protein, 10 aa, Homo Sapiens
HECMAPLTAL

SEQ ID NO: 99566 - protein, 10 aa, Homo Sapiens
HECTLVHADL

SEQ ID NO: 99567 - protein, 10 aa, Homo Sapiens
HEDSSHIIAL

SEQ ID NO: 99568 - protein, 10 aa, Homo Sapiens
HEEALSFVSL

SEQ ID NO: 99569 - protein, 10 aa, Homo Sapiens
HEEFSEHALL

SEQ ID NO: 99570 - protein, 10 aa, Homo Sapiens
HEEQPRPFVL

SEQ ID NO: 99571 - protein, 10 aa, Homo Sapiens
HEESQTATLL

SEQ ID NO: 99572 - protein, 10 aa, Homo Sapiens
HEFDPSADML

SEQ ID NO: 99573 - protein, 10 aa, Homo Sapiens
HEFECNVEML

SEQ ID NO: 99574 - protein, 10 aa, Homo Sapiens
HEFEEATNLL

SEQ ID NO: 99575 - protein, 10 aa, Homo Sapiens
HEFSSPSHLL

SEQ ID NO: 99576 - protein, 10 aa, Homo Sapiens
HEGLPEPVTL

SEQ ID NO: 99577 - protein, 10 aa, Homo Sapiens
HEHRGTPVGL

SEQ ID NO: 99578 - protein, 10 aa, Homo Sapiens
HEIEVIDQRL

SEQ ID NO: 99579 - protein, 10 aa, Homo Sapiens
HEIEVIGGYL

SEQ ID NO: 99580 - protein, 10 aa, Homo Sapiens
HEILREAYAL

SEQ ID NO: 99581 - protein, 10 aa, Homo Sapiens
HEIQDGTIHL

SEQ ID NO: 99582 - protein, 10 aa, Homo Sapiens
HEIQRTENSL

SEQ ID NO: 99583 - protein, 10 aa, Homo Sapiens
HELDMQVAAL

SEQ ID NO: 99584 - protein, 10 aa, Homo Sapiens
HELLQPFNVL

SEQ ID NO: 99585 - protein, 10 aa, Homo Sapiens
HEMLAHRAVL

SEQ ID NO: 99586 - protein, 10 aa, Homo Sapiens
HEQQALPVDL

SEQ ID NO: 99587 - protein, 10 aa, Homo Sapiens
HESAVTGLSL

SEQ ID NO: 99588 - protein, 10 aa, Homo Sapiens
HESEGGRTPL

SEQ ID NO: 99589 - protein, 10 aa, Homo Sapiens
HEVDTQYSAL

SEQ ID NO: 99590 - protein, 10 aa, Homo Sapiens
HEVEEATNIL

SEQ ID NO: 99591 - protein, 10 aa, Homo Sapiens
HEVEPRYVVL

SEQ ID NO: 99592 - protein, 10 aa, Homo Sapiens
HEVEQGCAVL

SEQ ID NO: 99593 - protein, 10 aa, Homo Sapiens
HEVPSGNSLL

SEQ ID NO: 99594 - protein, 10 aa, Homo Sapiens
HEVSEIIDGL

SEQ ID NO: 99595 - protein, 10 aa, Homo Sapiens
HEVSGETVVF

SEQ ID NO: 99596 - protein, 10 aa, Homo Sapiens
HEVTSQTSHL

SEQ ID NO: 99597 - protein, 10 aa, Homo Sapiens
HEYFPEMQIL

SEQ ID NO: 99598 - protein, 10 aa, Homo Sapiens
HEYKGPKADL

SEQ ID NO: 99599 - protein, 10 aa, Homo Sapiens
IATNIAETSI

SEQ ID NO: 99600 - protein, 10 aa, Homo Sapiens
IEAQINNEDL

SEQ ID NO: 99601 - protein, 10 aa, Homo Sapiens
IEDNELNIVL

SEQ ID NO: 99602 - protein, 10 aa, Homo Sapiens
IEDPGQAYVL

SEQ ID NO: 99603 - protein, 10 aa, Homo Sapiens
IEECISQIVL

SEQ ID NO: 99604 - protein, 10 aa, Homo Sapiens
IEEHCKPQTL

SEQ ID NO: 99605 - protein, 10 aa, Homo Sapiens
IEEKGAVEAL

SEQ ID NO: 99606 - protein, 10 aa, Homo Sapiens
IEESSKPVRL

SEQ ID NO: 99607 - protein, 10 aa, Homo Sapiens
IEGLIEREYL

SEQ ID NO: 99608 - protein, 10 aa, Homo Sapiens
IEIHEQEAIL

SEQ ID NO: 99609 - protein, 10 aa, Homo Sapiens
IEISMQHEQL

SEQ ID NO: 99610 - protein, 10 aa, Homo Sapiens
IENDEAFAIL

SEQ ID NO: 99611 - protein, 10 aa, Homo Sapiens
IENEDMRVQL

SEQ ID NO: 99612 - protein, 10 aa, Homo Sapiens
IENGEKITSL

SEQ ID NO: 99613 - protein, 10 aa, Homo Sapiens
IETKPCGEEL

SEQ ID NO: 99614 - protein, 10 aa, Homo Sapiens
IEVDGKQVEL

SEQ ID NO: 99615 - protein, 10 aa, Homo Sapiens
IEVDLAHTTL

SEQ ID NO: 99616 - protein, 10 aa, Homo Sapiens
IEVEIAKQAL

SEQ ID NO: 99617 - protein, 10 aa, Homo Sapiens
IEWRDRRITL

SEQ ID NO: 99618 - protein, 10 aa, Homo Sapiens
KEAAIGVLVL

SEQ ID NO: 99619 - protein, 10 aa, Homo Sapiens
KEAEGKEPEL

SEQ ID NO: 99620 - protein, 10 aa, Homo Sapiens
KEAELHLTYL

SEQ ID NO: 99621 - protein, 10 aa, Homo Sapiens
KEAELKDLLL

SEQ ID NO: 99622 - protein, 10 aa, Homo Sapiens
KEAENPREVL

SEQ ID NO: 99623 - protein, 10 aa, Homo Sapiens
KEAFLKACTL

SEQ ID NO: 99624 - protein, 10 aa, Homo Sapiens
KEAGNINTSL

SEQ ID NO: 99625 - protein, 10 aa, Homo Sapiens
KEAIVTSEEL

SEQ ID NO: 99626 - protein, 10 aa, Homo Sapiens
KEALENCITL

SEQ ID NO: 99627 - protein, 10 aa, Homo Sapiens
KEALQDPFTL

SEQ ID NO: 99628 - protein, 10 aa, Homo Sapiens
KEALTYDGAL

SEQ ID NO: 99629 - protein, 10 aa, Homo Sapiens
KEASVKFHVL

SEQ ID NO: 99630 - protein, 10 aa, Homo Sapiens
KEATDHATAL

SEQ ID NO: 99631 - protein, 10 aa, Homo Sapiens
KECGETFISL

SEQ ID NO: 99632 - protein, 10 aa, Homo Sapiens
KEDEDDKTVL

SEQ ID NO: 99633 - protein, 10 aa, Homo Sapiens
KEDEIQDISL

SEQ ID NO: 99634 - protein, 10 aa, Homo Sapiens
KEDNIGNQLL

SEQ ID NO: 99635 - protein, 10 aa, Homo Sapiens
KEDPTVSALL

SEQ ID NO: 99636 - protein, 10 aa, Homo Sapiens
KEDRGRPYTL

SEQ ID NO: 99637 - protein, 10 aa, Homo Sapiens
KEDSAVFYEL

SEQ ID NO: 99638 - protein, 10 aa, Homo Sapiens
KEEEGIGEEL

SEQ ID NO: 99639 - protein, 10 aa, Homo Sapiens
KEEENLQVVL

SEQ ID NO: 99640 - protein, 10 aa, Homo Sapiens
KEEEVDCLVL

SEQ ID NO: 99641 - protein, 10 aa, Homo Sapiens
KEEEVQQQKL

SEQ ID NO: 99642 - protein, 10 aa, Homo Sapiens
KEEGNLEAVL

SEQ ID NO: 99643 - protein, 10 aa, Homo Sapiens
KEEGPKEMTL

SEQ ID NO: 99644 - protein, 10 aa, Homo Sapiens
KEEMGIGGVL

SEQ ID NO: 99645 - protein, 10 aa, Homo Sapiens
KEEPSNNVKL

SEQ ID NO: 99646 - protein, 10 aa, Homo Sapiens
KEESAATQAL

SEQ ID NO: 99647 - protein, 10 aa, Homo Sapiens
KEESGADQEL

SEQ ID NO: 99648 - protein, 10 aa, Homo Sapiens
KEETQPPVAL

SEQ ID NO: 99649 - protein, 10 aa, Homo Sapiens
KEFCAFSQTL

SEQ ID NO: 99650 - protein, 10 aa, Homo Sapiens
KEFDAGIIEL

SEQ ID NO: 99651 - protein, 10 aa, Homo Sapiens
KEFDGTKVFL

SEQ ID NO: 99652 - protein, 10 aa, Homo Sapiens
KEFDNGHLLL

SEQ ID NO: 99653 - protein, 10 aa, Homo Sapiens
KEFEDKKVEL

SEQ ID NO: 99654 - protein, 10 aa, Homo Sapiens
KEFEENTQHL

SEQ ID NO: 99655 - protein, 10 aa, Homo Sapiens
KEFEQLAPVL

SEQ ID NO: 99656 - protein, 10 aa, Homo Sapiens
KEFESHLDKL

SEQ ID NO: 99657 - protein, 10 aa, Homo Sapiens
KEFETAETLL

SEQ ID NO: 99658 - protein, 10 aa, Homo Sapiens
KEFEVKDPEL

SEQ ID NO: 99659 - protein, 10 aa, Homo Sapiens
KEFGDDKVQL

SEQ ID NO: 99660 - protein, 10 aa, Homo Sapiens
KEFHLEYDKL

SEQ ID NO: 99661 - protein, 10 aa, Homo Sapiens
KEFLSRSDQL

SEQ ID NO: 99662 - protein, 10 aa, Homo Sapiens
KEFNIPLEML

SEQ ID NO: 99663 - protein, 10 aa, Homo Sapiens
KEFQDLREVM

SEQ ID NO: 99664 - protein, 10 aa, Homo Sapiens
KEFVSEVDVL

SEQ ID NO: 99665 - protein, 10 aa, Homo Sapiens
KEHVDKAIAL

SEQ ID NO: 99666 - protein, 10 aa, Homo Sapiens
KEHVIEKEEL

SEQ ID NO: 99667 - protein, 10 aa, Homo Sapiens
KEIAEAYDVL

SEQ ID NO: 99668 - protein, 10 aa, Homo Sapiens
KEIASEIIGL

SEQ ID NO: 99669 - protein, 10 aa, Homo Sapiens
KEIDECVTLL

SEQ ID NO: 99670 - protein, 10 aa, Homo Sapiens
KEIDEVGDLL

SEQ ID NO: 99671 - protein, 10 aa, Homo Sapiens
KEIEAEKVEL

SEQ ID NO: 99672 - protein, 10 aa, Homo Sapiens
KEIEELKELL

SEQ ID NO: 99673 - protein, 10 aa, Homo Sapiens
KEIEERLHGL

SEQ ID NO: 99674 - protein, 10 aa, Homo Sapiens
KEIEGEEIEI

SEQ ID NO: 99675 - protein, 10 aa, Homo Sapiens
KEIESTKGEL

SEQ ID NO: 99676 - protein, 10 aa, Homo Sapiens
KEIFDKIHSL

SEQ ID NO: 99677 - protein, 10 aa, Homo Sapiens
KEIFETPTEI

SEQ ID NO: 99678 - protein, 10 aa, Homo Sapiens
KEILDQLESL

SEQ ID NO: 99679 - protein, 10 aa, Homo Sapiens
KEINEKSNIL

SEQ ID NO: 99680 - protein, 10 aa, Homo Sapiens
KEINEKSSQL

SEQ ID NO: 99681 - protein, 10 aa, Homo Sapiens
KEINTNQEAL

SEQ ID NO: 99682 - protein, 10 aa, Homo Sapiens
KEIQELEQLL

SEQ ID NO: 99683 - protein, 10 aa, Homo Sapiens
KEISFAYEVL

SEQ ID NO: 99684 - protein, 10 aa, Homo Sapiens
KEIVAEAERL

SEQ ID NO: 99685 - protein, 10 aa, Homo Sapiens
KEIYDDLQAL

SEQ ID NO: 99686 - protein, 10 aa, Homo Sapiens
KEIYNEKELL

SEQ ID NO: 99687 - protein, 10 aa, Homo Sapiens
KEKDFSPEAL

SEQ ID NO: 99688 - protein, 10 aa, Homo Sapiens
KEKEPDYVLL

SEQ ID NO: 99689 - protein, 10 aa, Homo Sapiens
KEKQWSRDEL

SEQ ID NO: 99690 - protein, 10 aa, Homo Sapiens
KEKYIDQEEL

SEQ ID NO: 99691 - protein, 10 aa, Homo Sapiens
KEKYPDAVYL

SEQ ID NO: 99692 - protein, 10 aa, Homo Sapiens
KELEAFREEL

SEQ ID NO: 99693 - protein, 10 aa, Homo Sapiens
KELEALIQNL

SEQ ID NO: 99694 - protein, 10 aa, Homo Sapiens
KELEEELQHL

SEQ ID NO: 99695 - protein, 10 aa, Homo Sapiens
KELEEEWVKL

SEQ ID NO: 99696 - protein, 10 aa, Homo Sapiens
KELEEKVAEL

SEQ ID NO: 99697 - protein, 10 aa, Homo Sapiens
KELEEKVMEL

SEQ ID NO: 99698 - protein, 10 aa, Homo Sapiens
KELEENKRSL

SEQ ID NO: 99699 - protein, 10 aa, Homo Sapiens
KELENANDLL

SEQ ID NO: 99700 - protein, 10 aa, Homo Sapiens
KELEQKKSYL

SEQ ID NO: 99701 - protein, 10 aa, Homo Sapiens
KELESEKEQL

SEQ ID NO: 99702 - protein, 10 aa, Homo Sapiens
KELESVGIRL

SEQ ID NO: 99703 - protein, 10 aa, Homo Sapiens
KELFIHTEEL

SEQ ID NO: 99704 - protein, 10 aa, Homo Sapiens
KELGLAEHQL

SEQ ID NO: 99705 - protein, 10 aa, Homo Sapiens
KELGSSTNAL

SEQ ID NO: 99706 - protein, 10 aa, Homo Sapiens
KELHEKFDRL

SEQ ID NO: 99707 - protein, 10 aa, Homo Sapiens
KELHIQGNRL

SEQ ID NO: 99708 - protein, 10 aa, Homo Sapiens
KELKDAGAGL

SEQ ID NO: 99709 - protein, 10 aa, Homo Sapiens
KELLGQGLLL

SEQ ID NO: 99710 - protein, 10 aa, Homo Sapiens
KELPITGTDL

SEQ ID NO: 99711 - protein, 10 aa, Homo Sapiens
KELQDVGQSL

SEQ ID NO: 99712 - protein, 10 aa, Homo Sapiens
KELQLLSETL

SEQ ID NO: 99713 - protein, 10 aa, Homo Sapiens
KELYVPENKL

SEQ ID NO: 99714 - protein, 10 aa, Homo Sapiens
KEMDIVVHTL

SEQ ID NO: 99715 - protein, 10 aa, Homo Sapiens
KEMDLSVETL

SEQ ID NO: 99716 - protein, 10 aa, Homo Sapiens
KEMDLSVVRL

SEQ ID NO: 99717 - protein, 10 aa, Homo Sapiens
KEMEDWISSL

SEQ ID NO: 99718 - protein, 10 aa, Homo Sapiens
KEMQDVQGAL

SEQ ID NO: 99719 - protein, 10 aa, Homo Sapiens
KENDELDIQL

SEQ ID NO: 99720 - protein, 10 aa, Homo Sapiens
KENDFDRLVL

SEQ ID NO: 99721 - protein, 10 aa, Homo Sapiens
KENSPEKFAL

SEQ ID NO: 99722 - protein, 10 aa, Homo Sapiens
KEPAFEDITL

SEQ ID NO: 99723 - protein, 10 aa, Homo Sapiens
KEPDSEQQPL

SEQ ID NO: 99724 - protein, 10 aa, Homo Sapiens
KEQESYDNRL

SEQ ID NO: 99725 - protein, 10 aa, Homo Sapiens
KEQNYSDDVL

SEQ ID NO: 99726 - protein, 10 aa, Homo Sapiens
KESAAINQIL

SEQ ID NO: 99727 - protein, 10 aa, Homo Sapiens
KESAEFQTQL

SEQ ID NO: 99728 - protein, 10 aa, Homo Sapiens
KESEKIIAEL

SEQ ID NO: 99729 - protein, 10 aa, Homo Sapiens
KESGAINTSL

SEQ ID NO: 99730 - protein, 10 aa, Homo Sapiens
KESHEMGQAL

SEQ ID NO: 99731 - protein, 10 aa, Homo Sapiens
KESQFLKEEL

SEQ ID NO: 99732 - protein, 10 aa, Homo Sapiens
KESSHSGVVL

SEQ ID NO: 99733 - protein, 10 aa, Homo Sapiens
KESSIIGVTL

SEQ ID NO: 99734 - protein, 10 aa, Homo Sapiens
KESVEDKLEL

SEQ ID NO: 99735 - protein, 10 aa, Homo Sapiens
KETEARKVVL

SEQ ID NO: 99736 - protein, 10 aa, Homo Sapiens
KETEVGNVSL

SEQ ID NO: 99737 - protein, 10 aa, Homo Sapiens
KETGLPKCVL

SEQ ID NO: 99738 - protein, 10 aa, Homo Sapiens
KETQEKMTIL

SEQ ID NO: 99739 - protein, 10 aa, Homo Sapiens
KETTIDGEEL

SEQ ID NO: 99740 - protein, 10 aa, Homo Sapiens
KEVANSTANL

SEQ ID NO: 99741 - protein, 10 aa, Homo Sapiens
KEVDPSTGEL

SEQ ID NO: 99742 - protein, 10 aa, Homo Sapiens
KEVEASHLAL

SEQ ID NO: 99743 - protein, 10 aa, Homo Sapiens
KEVGEAFTIL

SEQ ID NO: 99744 - protein, 10 aa, Homo Sapiens
KEVGIEFMDL

SEQ ID NO: 99745 - protein, 10 aa, Homo Sapiens
KEVHQERIAL

SEQ ID NO: 99746 - protein, 10 aa, Homo Sapiens
KEVIGGLCSL

SEQ ID NO: 99747 - protein, 10 aa, Homo Sapiens
KEVLLENTNL

SEQ ID NO: 99748 - protein, 10 aa, Homo Sapiens
KEVMQEVAQL

SEQ ID NO: 99749 - protein, 10 aa, Homo Sapiens
KEVNEGIQAL

SEQ ID NO: 99750 - protein, 10 aa, Homo Sapiens
KEVQEAFLTL

SEQ ID NO: 99751 - protein, 10 aa, Homo Sapiens
KEVRDLKETL

SEQ ID NO: 99752 - protein, 10 aa, Homo Sapiens
KEVSMDDHKL

SEQ ID NO: 99753 - protein, 10 aa, Homo Sapiens
KEVTAAREAL

SEQ ID NO: 99754 - protein, 10 aa, Homo Sapiens
KEVTEKEVTL

SEQ ID NO: 99755 - protein, 10 aa, Homo Sapiens
KEWSGLLEEL

SEQ ID NO: 99756 - protein, 10 aa, Homo Sapiens
KEYDEPYVLL

SEQ ID NO: 99757 - protein, 10 aa, Homo Sapiens
KEYEKTQTVL

SEQ ID NO: 99758 - protein, 10 aa, Homo Sapiens
KEYSDDKVQL

SEQ ID NO: 99759 - protein, 10 aa, Homo Sapiens
LEAEADKIGL

SEQ ID NO: 99760 - protein, 10 aa, Homo Sapiens
LEAEIAHGSL

SEQ ID NO: 99761 - protein, 10 aa, Homo Sapiens
LEAEIKEAQL

SEQ ID NO: 99762 - protein, 10 aa, Homo Sapiens
LEAHLTRDEL

SEQ ID NO: 99763 - protein, 10 aa, Homo Sapiens
LEALPTGTVL

SEQ ID NO: 99764 - protein, 10 aa, Homo Sapiens
LEALVNEGSL

SEQ ID NO: 99765 - protein, 10 aa, Homo Sapiens
LEEPSADAKL

SEQ ID NO: 99766 - protein, 10 aa, Homo Sapiens
LEFEGDPHCL

SEQ ID NO: 99767 - protein, 10 aa, Homo Sapiens
LEFEGGEVSL

SEQ ID NO: 99768 - protein, 10 aa, Homo Sapiens
LEFQKSLETL

SEQ ID NO: 99769 - protein, 10 aa, Homo Sapiens
LEFSPKNTVL

SEQ ID NO: 99770 - protein, 10 aa, Homo Sapiens
LEIDGLEEKL

SEQ ID NO: 99771 - protein, 10 aa, Homo Sapiens
LEIVPNGITL

SEQ ID NO: 99772 - protein, 10 aa, Homo Sapiens
LEQSCAQVVL

SEQ ID NO: 99773 - protein, 10 aa, Homo Sapiens
LESEITYDKL

SEQ ID NO: 99774 - protein, 10 aa, Homo Sapiens
LESEPQTVTL

SEQ ID NO: 99775 - protein, 10 aa, Homo Sapiens
LEVDLRDPVL

SEQ ID NO: 99776 - protein, 10 aa, Homo Sapiens
LEVEVIEGTL

SEQ ID NO: 99777 - protein, 10 aa, Homo Sapiens
LEVIIKDNSL

SEQ ID NO: 99778 - protein, 10 aa, Homo Sapiens
LEVIPGYEEL

SEQ ID NO: 99779 - protein, 10 aa, Homo Sapiens
LEVKENSGYL

SEQ ID NO: 99780 - protein, 10 aa, Homo Sapiens
MEAPGDVEAL

SEQ ID NO: 99781 - protein, 10 aa, Homo Sapiens
MEFEERNAAL

SEQ ID NO: 99782 - protein, 10 aa, Homo Sapiens
MEHAGKNQVL

SEQ ID NO: 99783 - protein, 10 aa, Homo Sapiens
MEIDIPHVWL

SEQ ID NO: 99784 - protein, 10 aa, Homo Sapiens
MEIIHEIAVL

SEQ ID NO: 99785 - protein, 10 aa, Homo Sapiens
MEISELNAKL

SEQ ID NO: 99786 - protein, 10 aa, Homo Sapiens
MELLDGKQTL

SEQ ID NO: 99787 - protein, 10 aa, Homo Sapiens
MEVDTERAML

SEQ ID NO: 99788 - protein, 10 aa, Homo Sapiens
MEYIPEGEIL

SEQ ID NO: 99789 - protein, 10 aa, Homo Sapiens
MEYLESKQFL

SEQ ID NO: 99790 - protein, 10 aa, Homo Sapiens
NEAKIKCEQL

SEQ ID NO: 99791 - protein, 10 aa, Homo Sapiens
NEANLREEVL

SEQ ID NO: 99792 - protein, 10 aa, Homo Sapiens
NEFNPMGDTL

SEQ ID NO: 99793 - protein, 10 aa, Homo Sapiens
NEHPGGEEVL

SEQ ID NO: 99794 - protein, 10 aa, Homo Sapiens
NEILSDPEVL

SEQ ID NO: 99795 - protein, 10 aa, Homo Sapiens
NERAIAGALI

SEQ ID NO: 99796 - protein, 10 aa, Homo Sapiens
NESRAVITSL

SEQ ID NO: 99797 - protein, 10 aa, Homo Sapiens
PEARIFEETL

SEQ ID NO: 99798 - protein, 10 aa, Homo Sapiens
PEARIYEETL

SEQ ID NO: 99799 - protein, 10 aa, Homo Sapiens
PIGRGTKVIL

SEQ ID NO: 99800 - protein, 10 aa, Homo Sapiens
PPVADSLANP

SEQ ID NO: 99801 - protein, 10 aa, Homo Sapiens
PSEDDGTVLL

SEQ ID NO: 99802 - protein, 10 aa, Homo Sapiens
QEAEEAGAAL

SEQ ID NO: 99803 - protein, 10 aa, Homo Sapiens
QEAKPSTEDL

SEQ ID NO: 99804 - protein, 10 aa, Homo Sapiens
QEALEPAVRL

SEQ ID NO: 99805 - protein, 10 aa, Homo Sapiens
QEATPEKESL

SEQ ID NO: 99806 - protein, 10 aa, Homo Sapiens
QEAVAGAAVL

SEQ ID NO: 99807 - protein, 10 aa, Homo Sapiens
QEDEVMRAYL

SEQ ID NO: 99808 - protein, 10 aa, Homo Sapiens
QEDLWTKIIL

SEQ ID NO: 99809 - protein, 10 aa, Homo Sapiens
QEDNPSGVIL

SEQ ID NO: 99810 - protein, 10 aa, Homo Sapiens
QEDVIATANL

SEQ ID NO: 99811 - protein, 10 aa, Homo Sapiens
QEEDYRYEVL

SEQ ID NO: 99812 - protein, 10 aa, Homo Sapiens
QEEPLPPLAL

SEQ ID NO: 99813 - protein, 10 aa, Homo Sapiens
QEETGVRVEL

SEQ ID NO: 99814 - protein, 10 aa, Homo Sapiens
QEFGIPIERL

SEQ ID NO: 99815 - protein, 10 aa, Homo Sapiens
QEFVYKEPAI

SEQ ID NO: 99816 - protein, 10 aa, Homo Sapiens
QEGDLPNAVL

SEQ ID NO: 99817 - protein, 10 aa, Homo Sapiens
QEHEEMNAKL

SEQ ID NO: 99818 - protein, 10 aa, Homo Sapiens
QEHQGALVCL

SEQ ID NO: 99819 - protein, 10 aa, Homo Sapiens
QEIADAHGLL

SEQ ID NO: 99820 - protein, 10 aa, Homo Sapiens
QEIDGKSLLL

SEQ ID NO: 99821 - protein, 10 aa, Homo Sapiens
QEIDLTGVKL

SEQ ID NO: 99822 - protein, 10 aa, Homo Sapiens
QEIEEFKERL

SEQ ID NO: 99823 - protein, 10 aa, Homo Sapiens
QEIIIRDGSL

SEQ ID NO: 99824 - protein, 10 aa, Homo Sapiens
QEIQQAGERL

SEQ ID NO: 99825 - protein, 10 aa, Homo Sapiens
QEIQTSVATL

SEQ ID NO: 99826 - protein, 10 aa, Homo Sapiens
QEKLPDEVVL

SEQ ID NO: 99827 - protein, 10 aa, Homo Sapiens
QELEILTDRL

SEQ ID NO: 99828 - protein, 10 aa, Homo Sapiens
QELNSENERL

SEQ ID NO: 99829 - protein, 10 aa, Homo Sapiens
QELPSHGVPL

SEQ ID NO: 99830 - protein, 10 aa, Homo Sapiens
QENEIRGLCL

SEQ ID NO: 99831 - protein, 10 aa, Homo Sapiens
QENEPEPLSL

SEQ ID NO: 99832 - protein, 10 aa, Homo Sapiens
QESGNGRDVL

SEQ ID NO: 99833 - protein, 10 aa, Homo Sapiens
QETKVTRDAL

SEQ ID NO: 99834 - protein, 10 aa, Homo Sapiens
QETMIKTDFL

SEQ ID NO: 99835 - protein, 10 aa, Homo Sapiens
QETPGPREAL

SEQ ID NO: 99836 - protein, 10 aa, Homo Sapiens
QEVDAIGQTL

SEQ ID NO: 99837 - protein, 10 aa, Homo Sapiens
QEVESSSVKL

SEQ ID NO: 99838 - protein, 10 aa, Homo Sapiens
QEVFEKATFI

SEQ ID NO: 99839 - protein, 10 aa, Homo Sapiens
QEVPGPAAAL

SEQ ID NO: 99840 - protein, 10 aa, Homo Sapiens
QEVQAMFDTL

SEQ ID NO: 99841 - protein, 10 aa, Homo Sapiens
QEVQERLNFL

SEQ ID NO: 99842 - protein, 10 aa, Homo Sapiens
QEVSQCFGVL

SEQ ID NO: 99843 - protein, 10 aa, Homo Sapiens
QEYSSISEKL

SEQ ID NO: 99844 - protein, 10 aa, Homo Sapiens
REAAYNAITL

SEQ ID NO: 99845 - protein, 10 aa, Homo Sapiens
REACGVIVEL

SEQ ID NO: 99846 - protein, 10 aa, Homo Sapiens
READEESLQL

SEQ ID NO: 99847 - protein, 10 aa, Homo Sapiens
REAECKKEML

SEQ ID NO: 99848 - protein, 10 aa, Homo Sapiens
REAEETQSTL

SEQ ID NO: 99849 - protein, 10 aa, Homo Sapiens
REAEHGYASL

SEQ ID NO: 99850 - protein, 10 aa, Homo Sapiens
REAEHLYHTL

SEQ ID NO: 99851 - protein, 10 aa, Homo Sapiens
REAELRKQRL

SEQ ID NO: 99852 - protein, 10 aa, Homo Sapiens
REAEMRNSIL

SEQ ID NO: 99853 - protein, 10 aa, Homo Sapiens
REAEQSNVAL

SEQ ID NO: 99854 - protein, 10 aa, Homo Sapiens
REAFEAEYRL

SEQ ID NO: 99855 - protein, 10 aa, Homo Sapiens
REAFLVNSDL

SEQ ID NO: 99856 - protein, 10 aa, Homo Sapiens
REAFVHVVTL

SEQ ID NO: 99857 - protein, 10 aa, Homo Sapiens
REAGIQPSLL

SEQ ID NO: 99858 - protein, 10 aa, Homo Sapiens
REAITAATCL

SEQ ID NO: 99859 - protein, 10 aa, Homo Sapiens
REALGHQEKL

SEQ ID NO: 99860 - protein, 10 aa, Homo Sapiens
REAPESAQCL

SEQ ID NO: 99861 - protein, 10 aa, Homo Sapiens
REAPPAFSHL

SEQ ID NO: 99862 - protein, 10 aa, Homo Sapiens
REAQELEAQL

SEQ ID NO: 99863 - protein, 10 aa, Homo Sapiens
REASPSNSCL

SEQ ID NO: 99864 - protein, 10 aa, Homo Sapiens
REAVPEPVLL

SEQ ID NO: 99865 - protein, 10 aa, Homo Sapiens
REAVVNTQEL

SEQ ID NO: 99866 - protein, 10 aa, Homo Sapiens
RECENQLVLL

SEQ ID NO: 99867 - protein, 10 aa, Homo Sapiens
RECKEKGVQF

SEQ ID NO: 99868 - protein, 10 aa, Homo Sapiens
RECLQALEFL

SEQ ID NO: 99869 - protein, 10 aa, Homo Sapiens
RECMEITESL

SEQ ID NO: 99870 - protein, 10 aa, Homo Sapiens
REDAPIGPHL

SEQ ID NO: 99871 - protein, 10 aa, Homo Sapiens
REDEDGLFTL

SEQ ID NO: 99872 - protein, 10 aa, Homo Sapiens
REDEEQNVKL

SEQ ID NO: 99873 - protein, 10 aa, Homo Sapiens
REDESYGYVL

SEQ ID NO: 99874 - protein, 10 aa, Homo Sapiens
REDIVVPVYL

SEQ ID NO: 99875 - protein, 10 aa, Homo Sapiens
REDLALGTQL

SEQ ID NO: 99876 - protein, 10 aa, Homo Sapiens
REDQDKVAVL

SEQ ID NO: 99877 - protein, 10 aa, Homo Sapiens
REDQVYACKL

SEQ ID NO: 99878 - protein, 10 aa, Homo Sapiens
REDYPQKEIL

SEQ ID NO: 99879 - protein, 10 aa, Homo Sapiens
REDYTRYNQL

SEQ ID NO: 99880 - protein, 10 aa, Homo Sapiens
REEAIHQSQL

SEQ ID NO: 99881 - protein, 10 aa, Homo Sapiens
REEDAEKAVI

SEQ ID NO: 99882 - protein, 10 aa, Homo Sapiens
REEDLAPFSL

SEQ ID NO: 99883 - protein, 10 aa, Homo Sapiens
REEDVGQPRL

SEQ ID NO: 99884 - protein, 10 aa, Homo Sapiens
REEEAELVRL

SEQ ID NO: 99885 - protein, 10 aa, Homo Sapiens
REEGAAEPAL

SEQ ID NO: 99886 - protein, 10 aa, Homo Sapiens
REENAEQQAL

SEQ ID NO: 99887 - protein, 10 aa, Homo Sapiens
REENPEFTSL

SEQ ID NO: 99888 - protein, 10 aa, Homo Sapiens
REEQAKYYEL

SEQ ID NO: 99889 - protein, 10 aa, Homo Sapiens
REESAARVVL

SEQ ID NO: 99890 - protein, 10 aa, Homo Sapiens
REESESVLTL

SEQ ID NO: 99891 - protein, 10 aa, Homo Sapiens
REESGARINI

SEQ ID NO: 99892 - protein, 10 aa, Homo Sapiens
REESNTKIDL

SEQ ID NO: 99893 - protein, 10 aa, Homo Sapiens
REEVGNISIL

SEQ ID NO: 99894 - protein, 10 aa, Homo Sapiens
REFDAFVETL

SEQ ID NO: 99895 - protein, 10 aa, Homo Sapiens
REFDYVINDL

SEQ ID NO: 99896 - protein, 10 aa, Homo Sapiens
REFEDVVNIL

SEQ ID NO: 99897 - protein, 10 aa, Homo Sapiens
REFEKMNQSL

SEQ ID NO: 99898 - protein, 10 aa, Homo Sapiens
REFLQNLDAL

SEQ ID NO: 99899 - protein, 10 aa, Homo Sapiens
REFPTHRSVL

SEQ ID NO: 99900 - protein, 10 aa, Homo Sapiens
REFQVISEQL

SEQ ID NO: 99901 - protein, 10 aa, Homo Sapiens
REGHEEMVAL

SEQ ID NO: 99902 - protein, 10 aa, Homo Sapiens
REGSASTEVL

SEQ ID NO: 99903 - protein, 10 aa, Homo Sapiens
REGYCFTEVL

SEQ ID NO: 99904 - protein, 10 aa, Homo Sapiens
REHAEKLMKL

SEQ ID NO: 99905 - protein, 10 aa, Homo Sapiens
REHALLAYTL

SEQ ID NO: 99906 - protein, 10 aa, Homo Sapiens
REIADLGEAL

SEQ ID NO: 99907 - protein, 10 aa, Homo Sapiens
REIAEVNKKL

SEQ ID NO: 99908 - protein, 10 aa, Homo Sapiens
REIDDHDAVL

SEQ ID NO: 99909 - protein, 10 aa, Homo Sapiens
REIDERNRPL

SEQ ID NO: 99910 - protein, 10 aa, Homo Sapiens
REIEEKLHKL

SEQ ID NO: 99911 - protein, 10 aa, Homo Sapiens
REIEGRAIRL

SEQ ID NO: 99912 - protein, 10 aa, Homo Sapiens
REIEGSQVTF

SEQ ID NO: 99913 - protein, 10 aa, Homo Sapiens
REIEIRFDQL

SEQ ID NO: 99914 - protein, 10 aa, Homo Sapiens
REIFLSQPIL

SEQ ID NO: 99915 - protein, 10 aa, Homo Sapiens
REIGTVIDQI

SEQ ID NO: 99916 - protein, 10 aa, Homo Sapiens
REIKDTQAQL

SEQ ID NO: 99917 - protein, 10 aa, Homo Sapiens
REIMGTPEYL

SEQ ID NO: 99918 - protein, 10 aa, Homo Sapiens
REIQDAYLQL

SEQ ID NO: 99919 - protein, 10 aa, Homo Sapiens
REIQDDMQTL

SEQ ID NO: 99920 - protein, 10 aa, Homo Sapiens
REISDHVLRM

SEQ ID NO: 99921 - protein, 10 aa, Homo Sapiens
REITEKEVKL

SEQ ID NO: 99922 - protein, 10 aa, Homo Sapiens
REITKPLRPL

SEQ ID NO: 99923 - protein, 10 aa, Homo Sapiens
REKDDANFKL

SEQ ID NO: 99924 - protein, 10 aa, Homo Sapiens
REKDDDVVSL

SEQ ID NO: 99925 - protein, 10 aa, Homo Sapiens
RELAEDDSIL

SEQ ID NO: 99926 - protein, 10 aa, Homo Sapiens
RELAGIVCTL

SEQ ID NO: 99927 - protein, 10 aa, Homo Sapiens
RELAQPASVL

SEQ ID NO: 99928 - protein, 10 aa, Homo Sapiens
RELDALGHEL

SEQ ID NO: 99929 - protein, 10 aa, Homo Sapiens
RELDATATVL

SEQ ID NO: 99930 - protein, 10 aa, Homo Sapiens
RELDLEENKL

SEQ ID NO: 99931 - protein, 10 aa, Homo Sapiens
RELDQQKLWL

SEQ ID NO: 99932 - protein, 10 aa, Homo Sapiens
RELEDMYLKL

SEQ ID NO: 99933 - protein, 10 aa, Homo Sapiens
RELEEEFYSL

SEQ ID NO: 99934 - protein, 10 aa, Homo Sapiens
RELEEIRAKL

SEQ ID NO: 99935 - protein, 10 aa, Homo Sapiens
RELEETNQKL

SEQ ID NO: 99936 - protein, 10 aa, Homo Sapiens
RELEIGQDCL

SEQ ID NO: 99937 - protein, 10 aa, Homo Sapiens
RELESQISEL

SEQ ID NO: 99938 - protein, 10 aa, Homo Sapiens
RELESQLHVL

SEQ ID NO: 99939 - protein, 10 aa, Homo Sapiens
RELESREAEL

SEQ ID NO: 99940 - protein, 10 aa, Homo Sapiens
RELETVRELL

SEQ ID NO: 99941 - protein, 10 aa, Homo Sapiens
RELFEPWNNL

SEQ ID NO: 99942 - protein, 10 aa, Homo Sapiens
RELGFSSNLL

SEQ ID NO: 99943 - protein, 10 aa, Homo Sapiens
RELHEKFEHL

SEQ ID NO: 99944 - protein, 10 aa, Homo Sapiens
RELKEKEATL

SEQ ID NO: 99945 - protein, 10 aa, Homo Sapiens
RELLESNFTL

SEQ ID NO: 99946 - protein, 10 aa, Homo Sapiens
RELLPGSVML

SEQ ID NO: 99947 - protein, 10 aa, Homo Sapiens
RELPETDADL

SEQ ID NO: 99948 - protein, 10 aa, Homo Sapiens
RELPGHTGYL

SEQ ID NO: 99949 - protein, 10 aa, Homo Sapiens
RELQAKFEHL

SEQ ID NO: 99950 - protein, 10 aa, Homo Sapiens
RELQEAPLSL

SEQ ID NO: 99951 - protein, 10 aa, Homo Sapiens
RELQELQDSL

SEQ ID NO: 99952 - protein, 10 aa, Homo Sapiens
RELQEVESTL

SEQ ID NO: 99953 - protein, 10 aa, Homo Sapiens
RELQGRHEQL

SEQ ID NO: 99954 - protein, 10 aa, Homo Sapiens
RELREREALL

SEQ ID NO: 99955 - protein, 10 aa, Homo Sapiens
RELRVEQESL

SEQ ID NO: 99956 - protein, 10 aa, Homo Sapiens
RELVEKNSQL

SEQ ID NO: 99957 - protein, 10 aa, Homo Sapiens
REMDESLANL

SEQ ID NO: 99958 - protein, 10 aa, Homo Sapiens
REMEEEAEKL

SEQ ID NO: 99959 - protein, 10 aa, Homo Sapiens
REMEEKVTLL

SEQ ID NO: 99960 - protein, 10 aa, Homo Sapiens
REMEQSMNML

SEQ ID NO: 99961 - protein, 10 aa, Homo Sapiens
REMESNWVSL

SEQ ID NO: 99962 - protein, 10 aa, Homo Sapiens
REMQEKLARL

SEQ ID NO: 99963 - protein, 10 aa, Homo Sapiens
RENEVLKVQL

SEQ ID NO: 99964 - protein, 10 aa, Homo Sapiens
RENVDQEALL

SEQ ID NO: 99965 - protein, 10 aa, Homo Sapiens
REPFPDGAEL

SEQ ID NO: 99966 - protein, 10 aa, Homo Sapiens
REPGENGTSL

SEQ ID NO: 99967 - protein, 10 aa, Homo Sapiens
REPLLVNESL

SEQ ID NO: 99968 - protein, 10 aa, Homo Sapiens
REQEAREPVL

SEQ ID NO: 99969 - protein, 10 aa, Homo Sapiens
REQHDAQVRL

SEQ ID NO: 99970 - protein, 10 aa, Homo Sapiens
REQWANLEQL

SEQ ID NO: 99971 - protein, 10 aa, Homo Sapiens
RESFDGRNIL

SEQ ID NO: 99972 - protein, 10 aa, Homo Sapiens
RESLETENVL

SEQ ID NO: 99973 - protein, 10 aa, Homo Sapiens
RETEKTLTEL

SEQ ID NO: 99974 - protein, 10 aa, Homo Sapiens
RETELSSVTL

SEQ ID NO: 99975 - protein, 10 aa, Homo Sapiens
RETLPAEQDL

SEQ ID NO: 99976 - protein, 10 aa, Homo Sapiens
RETQAINSSL

SEQ ID NO: 99977 - protein, 10 aa, Homo Sapiens
REVEEENRAL

SEQ ID NO: 99978 - protein, 10 aa, Homo Sapiens
REVEELKSEL

SEQ ID NO: 99979 - protein, 10 aa, Homo Sapiens
REVEGLKDLL

SEQ ID NO: 99980 - protein, 10 aa, Homo Sapiens
REVENPQNQL

SEQ ID NO: 99981 - protein, 10 aa, Homo Sapiens
REVLEKQPVL

SEQ ID NO: 99982 - protein, 10 aa, Homo Sapiens
REVLSALSQL

SEQ ID NO: 99983 - protein, 10 aa, Homo Sapiens
REVNLVELAL

SEQ ID NO: 99984 - protein, 10 aa, Homo Sapiens
REVQAEIGKL

SEQ ID NO: 99985 - protein, 10 aa, Homo Sapiens
REVSEEHNLL

SEQ ID NO: 99986 - protein, 10 aa, Homo Sapiens
REVSSLKNKL

SEQ ID NO: 99987 - protein, 10 aa, Homo Sapiens
REVVAGSHEL

SEQ ID NO: 99988 - protein, 10 aa, Homo Sapiens
REVWPEGDVF

SEQ ID NO: 99989 - protein, 10 aa, Homo Sapiens
REWGSGSDTL

SEQ ID NO: 99990 - protein, 10 aa, Homo Sapiens
REYEDGPLSL

SEQ ID NO: 99991 - protein, 10 aa, Homo Sapiens
REYRPEYERL

SEQ ID NO: 99992 - protein, 10 aa, Homo Sapiens
SEAAIRSVEL

SEQ ID NO: 99993 - protein, 10 aa, Homo Sapiens
SEAASSGISL

SEQ ID NO: 99994 - protein, 10 aa, Homo Sapiens
SEAEPGGGSL

SEQ ID NO: 99995 - protein, 10 aa, Homo Sapiens
SEAKPLAVCL

SEQ ID NO: 99996 - protein, 10 aa, Homo Sapiens
SEAPPSKMVL

SEQ ID NO: 99997 - protein, 10 aa, Homo Sapiens
SEAQLRQFTL

SEQ ID NO: 99998 - protein, 10 aa, Homo Sapiens
SEAREDMAAL

SEQ ID NO: 99999 - protein, 10 aa, Homo Sapiens
SEAVERLSVL

SEQ ID NO: 100000 - protein, 10 aa, Homo Sapiens
SEAYGQKDLL

SEQ ID NO: 100001 - protein, 10 aa, Homo Sapiens
SEDAAAGTVL

SEQ ID NO: 100002 - protein, 10 aa, Homo Sapiens
SEDGDAHVLL

SEQ ID NO: 100003 - protein, 10 aa, Homo Sapiens
SEDGDTLVHL

SEQ ID NO: 100004 - protein, 10 aa, Homo Sapiens
SEDKGALAKL

SEQ ID NO: 100005 - protein, 10 aa, Homo Sapiens
SEDKQLAVCL

SEQ ID NO: 100006 - protein, 10 aa, Homo Sapiens
SEDPGTKVLL

SEQ ID NO: 100007 - protein, 10 aa, Homo Sapiens
SEDPYGIFCL

SEQ ID NO: 100008 - protein, 10 aa, Homo Sapiens
SEDRNAGVIL

SEQ ID NO: 100009 - protein, 10 aa, Homo Sapiens
SEDRSVQEVL

SEQ ID NO: 100010 - protein, 10 aa, Homo Sapiens
SEDSSNVVQL

SEQ ID NO: 100011 - protein, 10 aa, Homo Sapiens
SEDTSKLYAL

SEQ ID NO: 100012 - protein, 10 aa, Homo Sapiens
SEEENSKVEL

SEQ ID NO: 100013 - protein, 10 aa, Homo Sapiens
SEEGITKSTL

SEQ ID NO: 100014 - protein, 10 aa, Homo Sapiens
SEEHIELVVL

SEQ ID NO: 100015 - protein, 10 aa, Homo Sapiens
SEEITSGCQL

SEQ ID NO: 100016 - protein, 10 aa, Homo Sapiens
SEEKGGVEVL

SEQ ID NO: 100017 - protein, 10 aa, Homo Sapiens
SEERETEISL

SEQ ID NO: 100018 - protein, 10 aa, Homo Sapiens
SEERPPAQAL

SEQ ID NO: 100019 - protein, 10 aa, Homo Sapiens
SEESVKSTTL

SEQ ID NO: 100020 - protein, 10 aa, Homo Sapiens
SEESYKDSTL

SEQ ID NO: 100021 - protein, 10 aa, Homo Sapiens
SEFDFKPQQL

SEQ ID NO: 100022 - protein, 10 aa, Homo Sapiens
SEFDIEREQL

SEQ ID NO: 100023 - protein, 10 aa, Homo Sapiens
SEFEARVISL

SEQ ID NO: 100024 - protein, 10 aa, Homo Sapiens
SEFGSKIILL

SEQ ID NO: 100025 - protein, 10 aa, Homo Sapiens
SEFHPNPDVL

SEQ ID NO: 100026 - protein, 10 aa, Homo Sapiens
SEFKGDLETL

SEQ ID NO: 100027 - protein, 10 aa, Homo Sapiens
SEFLLTHPVL

SEQ ID NO: 100028 - protein, 10 aa, Homo Sapiens
SEFQRVVEVL

SEQ ID NO: 100029 - protein, 10 aa, Homo Sapiens
SEFSGDVDSL

SEQ ID NO: 100030 - protein, 10 aa, Homo Sapiens
SEFTNSNNHL

SEQ ID NO: 100031 - protein, 10 aa, Homo Sapiens
SEHSGPPIVI

SEQ ID NO: 100032 - protein, 10 aa, Homo Sapiens
SEHTGAIDVL

SEQ ID NO: 100033 - protein, 10 aa, Homo Sapiens
SEHVASSPAL

SEQ ID NO: 100034 - protein, 10 aa, Homo Sapiens
SEHVVQGDAL

SEQ ID NO: 100035 - protein, 10 aa, Homo Sapiens
SEIEEFYQKL

SEQ ID NO: 100036 - protein, 10 aa, Homo Sapiens
SEIEQAVQSL

SEQ ID NO: 100037 - protein, 10 aa, Homo Sapiens
SEIFHSQSFL

SEQ ID NO: 100038 - protein, 10 aa, Homo Sapiens
SEIILRQEVL

SEQ ID NO: 100039 - protein, 10 aa, Homo Sapiens
SEIKELQLVL

SEQ ID NO: 100040 - protein, 10 aa, Homo Sapiens
SEIKGEVLYL

SEQ ID NO: 100041 - protein, 10 aa, Homo Sapiens
SEIKVPDVEL

SEQ ID NO: 100042 - protein, 10 aa, Homo Sapiens
SEILPTKETL

SEQ ID NO: 100043 - protein, 10 aa, Homo Sapiens
SEINSNSDSL

SEQ ID NO: 100044 - protein, 10 aa, Homo Sapiens
SEIPPKGGAL

SEQ ID NO: 100045 - protein, 10 aa, Homo Sapiens
SEIRSDLEQL

SEQ ID NO: 100046 - protein, 10 aa, Homo Sapiens
SEITDPESFL

SEQ ID NO: 100047 - protein, 10 aa, Homo Sapiens
SEIYIHGLGL

SEQ ID NO: 100048 - protein, 10 aa, Homo Sapiens
SEKDTKEEIL

SEQ ID NO: 100049 - protein, 10 aa, Homo Sapiens
SEKSLENETL

SEQ ID NO: 100050 - protein, 10 aa, Homo Sapiens
SELDDRADAL

SEQ ID NO: 100051 - protein, 10 aa, Homo Sapiens
SELDVPVEIL

SEQ ID NO: 100052 - protein, 10 aa, Homo Sapiens
SELEDGHTAL

SEQ ID NO: 100053 - protein, 10 aa, Homo Sapiens
SELEEEKQQL

SEQ ID NO: 100054 - protein, 10 aa, Homo Sapiens
SELEGDTITL

SEQ ID NO: 100055 - protein, 10 aa, Homo Sapiens
SELEHENAQL

SEQ ID NO: 100056 - protein, 10 aa, Homo Sapiens
SELESIQEVL

SEQ ID NO: 100057 - protein, 10 aa, Homo Sapiens
SELFESPVYL

SEQ ID NO: 100058 - protein, 10 aa, Homo Sapiens
SELILSKEQL

SEQ ID NO: 100059 - protein, 10 aa, Homo Sapiens
SELKSENESL

SEQ ID NO: 100060 - protein, 10 aa, Homo Sapiens
SELPIVTPAL

SEQ ID NO: 100061 - protein, 10 aa, Homo Sapiens
SELQAIKTEL

SEQ ID NO: 100062 - protein, 10 aa, Homo Sapiens
SELRETPSSL

SEQ ID NO: 100063 - protein, 10 aa, Homo Sapiens
SELRNQYVTL

SEQ ID NO: 100064 - protein, 10 aa, Homo Sapiens
SELVPGKEEL

SEQ ID NO: 100065 - protein, 10 aa, Homo Sapiens
SELYEESSDL

SEQ ID NO: 100066 - protein, 10 aa, Homo Sapiens
SEMEEEKSIL

SEQ ID NO: 100067 - protein, 10 aa, Homo Sapiens
SEMHVPSVAL

SEQ ID NO: 100068 - protein, 10 aa, Homo Sapiens
SEMPAEIVEL

SEQ ID NO: 100069 - protein, 10 aa, Homo Sapiens
SENKEEPVKL

SEQ ID NO: 100070 - protein, 10 aa, Homo Sapiens
SEPDAVHVVL

SEQ ID NO: 100071 - protein, 10 aa, Homo Sapiens
SEPDIAKVPL

SEQ ID NO: 100072 - protein, 10 aa, Homo Sapiens
SEPEIPEPSL

SEQ ID NO: 100073 - protein, 10 aa, Homo Sapiens
SEPQEHRYTL

SEQ ID NO: 100074 - protein, 10 aa, Homo Sapiens
SEQDILRQEL

SEQ ID NO: 100075 - protein, 10 aa, Homo Sapiens
SESAAVKEIL

SEQ ID NO: 100076 - protein, 10 aa, Homo Sapiens
SESAPGDFSL

SEQ ID NO: 100077 - protein, 10 aa, Homo Sapiens
SESEAVAVAL

SEQ ID NO: 100078 - protein, 10 aa, Homo Sapiens
SESGAIMTDL

SEQ ID NO: 100079 - protein, 10 aa, Homo Sapiens
SESKANITCL

SEQ ID NO: 100080 - protein, 10 aa, Homo Sapiens
SESQCRVVVL

SEQ ID NO: 100081 - protein, 10 aa, Homo Sapiens
SESQPHSSAL

SEQ ID NO: 100082 - protein, 10 aa, Homo Sapiens
SESRLEKAEL

SEQ ID NO: 100083 - protein, 10 aa, Homo Sapiens
SESSLSGEEL

SEQ ID NO: 100084 - protein, 10 aa, Homo Sapiens
SETEPEPVTL

SEQ ID NO: 100085 - protein, 10 aa, Homo Sapiens
SETHKAIQAL

SEQ ID NO: 100086 - protein, 10 aa, Homo Sapiens
SETLKGSFSL

SEQ ID NO: 100087 - protein, 10 aa, Homo Sapiens
SETNKGAFSL

SEQ ID NO: 100088 - protein, 10 aa, Homo Sapiens
SETYETKTAL

SEQ ID NO: 100089 - protein, 10 aa, Homo Sapiens
SEVDGNRMTL

SEQ ID NO: 100090 - protein, 10 aa, Homo Sapiens
SEVDKTKEEL

SEQ ID NO: 100091 - protein, 10 aa, Homo Sapiens
SEVEGGRTAL

SEQ ID NO: 100092 - protein, 10 aa, Homo Sapiens
SEVESTASIL

SEQ ID NO: 100093 - protein, 10 aa, Homo Sapiens
SEVESVKEFL

SEQ ID NO: 100094 - protein, 10 aa, Homo Sapiens
SEVHDLRVVL

SEQ ID NO: 100095 - protein, 10 aa, Homo Sapiens
SEVMSKEEIL

SEQ ID NO: 100096 - protein, 10 aa, Homo Sapiens
SEVRCSGQEL

SEQ ID NO: 100097 - protein, 10 aa, Homo Sapiens
SEVSQVKETL

SEQ ID NO: 100098 - protein, 10 aa, Homo Sapiens
SEVVLAGERL

SEQ ID NO: 100099 - protein, 10 aa, Homo Sapiens
SEVVVVKEEL

SEQ ID NO: 100100 - protein, 10 aa, Homo Sapiens
SEWKDTNYTL

SEQ ID NO: 100101 - protein, 10 aa, Homo Sapiens
SEYEKEITSL

SEQ ID NO: 100102 - protein, 10 aa, Homo Sapiens
SEYKTVHEEL

SEQ ID NO: 100103 - protein, 10 aa, Homo Sapiens
SEYSRSEITL

SEQ ID NO: 100104 - protein, 10 aa, Homo Sapiens
TEAAVPKVTL

SEQ ID NO: 100105 - protein, 10 aa, Homo Sapiens
TEADNTGCHL

SEQ ID NO: 100106 - protein, 10 aa, Homo Sapiens
TEAGALHVLL

SEQ ID NO: 100107 - protein, 10 aa, Homo Sapiens
TEANVIKEAL

SEQ ID NO: 100108 - protein, 10 aa, Homo Sapiens
TEATQEKYVL

SEQ ID NO: 100109 - protein, 10 aa, Homo Sapiens
TECDVREVEL

SEQ ID NO: 100110 - protein, 10 aa, Homo Sapiens
TEDECSFVSL

SEQ ID NO: 100111 - protein, 10 aa, Homo Sapiens
TEDVGSGVAL

SEQ ID NO: 100112 - protein, 10 aa, Homo Sapiens
TEEKLTPVLL

SEQ ID NO: 100113 - protein, 10 aa, Homo Sapiens
TEEPGTGVRL

SEQ ID NO: 100114 - protein, 10 aa, Homo Sapiens
TEFQGHKVIL

SEQ ID NO: 100115 - protein, 10 aa, Homo Sapiens
TEIAEERQYL

SEQ ID NO: 100116 - protein, 10 aa, Homo Sapiens
TEIDDLKTQL

SEQ ID NO: 100117 - protein, 10 aa, Homo Sapiens
TEIDGRSISL

SEQ ID NO: 100118 - protein, 10 aa, Homo Sapiens
TEIDSKWQEL

SEQ ID NO: 100119 - protein, 10 aa, Homo Sapiens
TEIEEELKSL

SEQ ID NO: 100120 - protein, 10 aa, Homo Sapiens
TEIFIHSLEL

SEQ ID NO: 100121 - protein, 10 aa, Homo Sapiens
TEIGEKGVNL

SEQ ID NO: 100122 - protein, 10 aa, Homo Sapiens
TEIGKDVIGL

SEQ ID NO: 100123 - protein, 10 aa, Homo Sapiens
TEIGQTLDLL

SEQ ID NO: 100124 - protein, 10 aa, Homo Sapiens
TEILERKTVL

SEQ ID NO: 100125 - protein, 10 aa, Homo Sapiens
TEIPPALISL

SEQ ID NO: 100126 - protein, 10 aa, Homo Sapiens
TEIQGENVTL

SEQ ID NO: 100127 - protein, 10 aa, Homo Sapiens
TEISLKDSTL

SEQ ID NO: 100128 - protein, 10 aa, Homo Sapiens
TELEAKLQVL

SEQ ID NO: 100129 - protein, 10 aa, Homo Sapiens
TELLWPGAAL

SEQ ID NO: 100130 - protein, 10 aa, Homo Sapiens
TELQGMNEYL

SEQ ID NO: 100131 - protein, 10 aa, Homo Sapiens
TEMEHEVACL

SEQ ID NO: 100132 - protein, 10 aa, Homo Sapiens
TEMESMKTTL

SEQ ID NO: 100133 - protein, 10 aa, Homo Sapiens
TENEIRGLCL

SEQ ID NO: 100134 - protein, 10 aa, Homo Sapiens
TENLNDDEKL

SEQ ID NO: 100135 - protein, 10 aa, Homo Sapiens
TESDPDNVVL

SEQ ID NO: 100136 - protein, 10 aa, Homo Sapiens
TETQAEKVVL

SEQ ID NO: 100137 - protein, 10 aa, Homo Sapiens
TEVDMKEVEL

SEQ ID NO: 100138 - protein, 10 aa, Homo Sapiens
TEVEIINQQL

SEQ ID NO: 100139 - protein, 10 aa, Homo Sapiens
TEVEIVDEKM

SEQ ID NO: 100140 - protein, 10 aa, Homo Sapiens
TEVGITNVDL

SEQ ID NO: 100141 - protein, 10 aa, Homo Sapiens
TEVLEEANTL

SEQ ID NO: 100142 - protein, 10 aa, Homo Sapiens
TEVLVTAEKL

SEQ ID NO: 100143 - protein, 10 aa, Homo Sapiens
TEYPEKEVTL

SEQ ID NO: 100144 - protein, 10 aa, Homo Sapiens
TLRGGEHEAI

SEQ ID NO: 100145 - protein, 10 aa, Homo Sapiens
VEAKDCLNVL

SEQ ID NO: 100146 - protein, 10 aa, Homo Sapiens
VEAKFVQDTL

SEQ ID NO: 100147 - protein, 10 aa, Homo Sapiens
VEALPYNTSL

SEQ ID NO: 100148 - protein, 10 aa, Homo Sapiens
VEDPTFLNQL

SEQ ID NO: 100149 - protein, 10 aa, Homo Sapiens
VEEGKISTSL

SEQ ID NO: 100150 - protein, 10 aa, Homo Sapiens
VEEPSDGTIL

SEQ ID NO: 100151 - protein, 10 aa, Homo Sapiens
VEESGEHVIL

SEQ ID NO: 100152 - protein, 10 aa, Homo Sapiens
VEFNHSGELL

SEQ ID NO: 100153 - protein, 10 aa, Homo Sapiens
VEFRNDYEEL

SEQ ID NO: 100154 - protein, 10 aa, Homo Sapiens
VEHDAFIFAL

SEQ ID NO: 100155 - protein, 10 aa, Homo Sapiens
VEHTDGQSVL

SEQ ID NO: 100156 - protein, 10 aa, Homo Sapiens
VEHVPGADIL

SEQ ID NO: 100157 - protein, 10 aa, Homo Sapiens
VEHWGLDQPL

SEQ ID NO: 100158 - protein, 10 aa, Homo Sapiens
VEIDGERIKI

SEQ ID NO: 100159 - protein, 10 aa, Homo Sapiens
VEIEERGVKL

SEQ ID NO: 100160 - protein, 10 aa, Homo Sapiens
VEIEQKVVAL

SEQ ID NO: 100161 - protein, 10 aa, Homo Sapiens
VEIGAHKDEL

SEQ ID NO: 100162 - protein, 10 aa, Homo Sapiens
VEIKELQGQL

SEQ ID NO: 100163 - protein, 10 aa, Homo Sapiens
VEINEKFTEL

SEQ ID NO: 100164 - protein, 10 aa, Homo Sapiens
VELDPEGVAL

SEQ ID NO: 100165 - protein, 10 aa, Homo Sapiens
VESSLDKVVL

SEQ ID NO: 100166 - protein, 10 aa, Homo Sapiens
VETDWHMITV

SEQ ID NO: 100167 - protein, 10 aa, Homo Sapiens
VETEIKELIL

SEQ ID NO: 100168 - protein, 10 aa, Homo Sapiens
VEVETQGDDL

SEQ ID NO: 100169 - protein, 10 aa, Homo Sapiens
VEVGGSGGCL

SEQ ID NO: 100170 - protein, 10 aa, Homo Sapiens
VEVINFGDCL

SEQ ID NO: 100171 - protein, 10 aa, Homo Sapiens
VEVQGPDWHL

SEQ ID NO: 100172 - protein, 10 aa, Homo Sapiens
VEVQLKDLIL

SEQ ID NO: 100173 - protein, 10 aa, Homo Sapiens
VSEASLVSSI

SEQ ID NO: 100174 - protein, 10 aa, Homo Sapiens
WEAGTHEELL

SEQ ID NO: 100175 - protein, 10 aa, Homo Sapiens
WEEAAHDLAL

SEQ ID NO: 100176 - protein, 10 aa, Homo Sapiens
WEEKPINTAL

SEQ ID NO: 100177 - protein, 10 aa, Homo Sapiens
WEGAFLDRVL

SEQ ID NO: 100178 - protein, 10 aa, Homo Sapiens
YEAAGEIVRL

SEQ ID NO: 100179 - protein, 10 aa, Homo Sapiens
YEAFPHDSQL

SEQ ID NO: 100180 - protein, 10 aa, Homo Sapiens
YEAYRTLAIL

SEQ ID NO: 100181 - protein, 10 aa, Homo Sapiens
YECEESFTTL

SEQ ID NO: 100182 - protein, 10 aa, Homo Sapiens
YEEQGKPEVL

SEQ ID NO: 100183 - protein, 10 aa, Homo Sapiens
YEGSPIKVTL

SEQ ID NO: 100184 - protein, 10 aa, Homo Sapiens
YEHNSIDSEL

SEQ ID NO: 100185 - protein, 10 aa, Homo Sapiens
YEIDMKQYTL

SEQ ID NO: 100186 - protein, 10 aa, Homo Sapiens
YEIERTIVQL

SEQ ID NO: 100187 - protein, 10 aa, Homo Sapiens
YELDLREPAL

SEQ ID NO: 100188 - protein, 10 aa, Homo Sapiens
YELLIKGLGL

SEQ ID NO: 100189 - protein, 10 aa, Homo Sapiens
YELQESNVQL

SEQ ID NO: 100190 - protein, 10 aa, Homo Sapiens
YELQESNVRL

SEQ ID NO: 100191 - protein, 10 aa, Homo Sapiens
YEVCKEGDVL

SEQ ID NO: 100192 - protein, 10 aa, Homo Sapiens
YEVKNKKDEL

SEQ ID NO: 100193 - protein, 10 aa, Homo Sapiens
YEVSDSAPHL

SEQ ID NO: 100194 - protein, 10 aa, Homo Sapiens
YEVVPQQPAL

SEQ ID NO: 100195 - protein, 11 aa, Homo Sapiens
AEAAEKGDVGL

SEQ ID NO: 100196 - protein, 11 aa, Homo Sapiens
AEAATGFLEQL

SEQ ID NO: 100197 - protein, 11 aa, Homo Sapiens
AEAEERGELAL

SEQ ID NO: 100198 - protein, 11 aa, Homo Sapiens
AEAFEAIPRAL

SEQ ID NO: 100199 - protein, 11 aa, Homo Sapiens
AEAGARCDFAL

SEQ ID NO: 100200 - protein, 11 aa, Homo Sapiens
AEAIIHGLSSL

SEQ ID NO: 100201 - protein, 11 aa, Homo Sapiens
AEALPRPNWEL

SEQ ID NO: 100202 - protein, 11 aa, Homo Sapiens
AEARQIACDEL

SEQ ID NO: 100203 - protein, 11 aa, Homo Sapiens
AECIDEAAERL

SEQ ID NO: 100204 - protein, 11 aa, Homo Sapiens
AECLEKFTVSL

SEQ ID NO: 100205 - protein, 11 aa, Homo Sapiens
AECQTSEKALL

SEQ ID NO: 100206 - protein, 11 aa, Homo Sapiens
AEDELRDAVLL

SEQ ID NO: 100207 - protein, 11 aa, Homo Sapiens
AEDPALKEIVL

SEQ ID NO: 100208 - protein, 11 aa, Homo Sapiens
AEEDMPQRVVL

SEQ ID NO: 100209 - protein, 11 aa, Homo Sapiens
AEEIANYRPTL

SEQ ID NO: 100210 - protein, 11 aa, Homo Sapiens
AEENGNVQALL

SEQ ID NO: 100211 - protein, 11 aa, Homo Sapiens
AEEQSGGQYEL

SEQ ID NO: 100212 - protein, 11 aa, Homo Sapiens
AEESKALIPSL

SEQ ID NO: 100213 - protein, 11 aa, Homo Sapiens
AEFAALHGPAL

SEQ ID NO: 100214 - protein, 11 aa, Homo Sapiens
AEFAERSVAKL

SEQ ID NO: 100215 - protein, 11 aa, Homo Sapiens
AEFAERTVAKL

SEQ ID NO: 100216 - protein, 11 aa, Homo Sapiens
AEFEKSAKENL

SEQ ID NO: 100217 - protein, 11 aa, Homo Sapiens
AEFLDDQETRL

SEQ ID NO: 100218 - protein, 11 aa, Homo Sapiens
AEHLRKYNEAL

SEQ ID NO: 100219 - protein, 11 aa, Homo Sapiens
AEHNPQYLIEL

SEQ ID NO: 100220 - protein, 11 aa, Homo Sapiens
AEIAHIALETL

SEQ ID NO: 100221 - protein, 11 aa, Homo Sapiens
AEIDASNIVSL

SEQ ID NO: 100222 - protein, 11 aa, Homo Sapiens
AEIDREMISSL

SEQ ID NO: 100223 - protein, 11 aa, Homo Sapiens
AEIEKFDKSKL

SEQ ID NO: 100224 - protein, 11 aa, Homo Sapiens
AEIENENGPTL

SEQ ID NO: 100225 - protein, 11 aa, Homo Sapiens
AEIKEKICDYL

SEQ ID NO: 100226 - protein, 11 aa, Homo Sapiens
AEIKTTNEVVL

SEQ ID NO: 100227 - protein, 11 aa, Homo Sapiens
AEIKVKELEVL

SEQ ID NO: 100228 - protein, 11 aa, Homo Sapiens
AEINSRTGSKL

SEQ ID NO: 100229 - protein, 11 aa, Homo Sapiens
AEIPLNEQTTL

SEQ ID NO: 100230 - protein, 11 aa, Homo Sapiens
AEIPNIKPDIL

SEQ ID NO: 100231 - protein, 11 aa, Homo Sapiens
AEIQNVEGQNL

SEQ ID NO: 100232 - protein, 11 aa, Homo Sapiens
AEIRDQMQQQL

SEQ ID NO: 100233 - protein, 11 aa, Homo Sapiens
AEIRETLTQGL

SEQ ID NO: 100234 - protein, 11 aa, Homo Sapiens
AEKWEVAEVVL

SEQ ID NO: 100235 - protein, 11 aa, Homo Sapiens
AELEELKQVLL

SEQ ID NO: 100236 - protein, 11 aa, Homo Sapiens
AELEGRQEELL

SEQ ID NO: 100237 - protein, 11 aa, Homo Sapiens
AELELLGLEKL

SEQ ID NO: 100238 - protein, 11 aa, Homo Sapiens
AELHDLKEVVL

SEQ ID NO: 100239 - protein, 11 aa, Homo Sapiens
AELIEEEVAKL

SEQ ID NO: 100240 - protein, 11 aa, Homo Sapiens
AELKGLDVDSL

SEQ ID NO: 100241 - protein, 11 aa, Homo Sapiens
AELKQIVDQSL

SEQ ID NO: 100242 - protein, 11 aa, Homo Sapiens
AELKTDVFQSL

SEQ ID NO: 100243 - protein, 11 aa, Homo Sapiens
AELLDATQHTL

SEQ ID NO: 100244 - protein, 11 aa, Homo Sapiens
AELLVSHGASL

SEQ ID NO: 100245 - protein, 11 aa, Homo Sapiens
AELPEPQQTAL

SEQ ID NO: 100246 - protein, 11 aa, Homo Sapiens
AELPGSSAVRL

SEQ ID NO: 100247 - protein, 11 aa, Homo Sapiens
AEMALFEQEVL

SEQ ID NO: 100248 - protein, 11 aa, Homo Sapiens
AEMDERFQQIL

SEQ ID NO: 100249 - protein, 11 aa, Homo Sapiens
AEMGSERALVL

SEQ ID NO: 100250 - protein, 11 aa, Homo Sapiens
AEMPDSAAALL

SEQ ID NO: 100251 - protein, 11 aa, Homo Sapiens
AENEKIQNEQL

SEQ ID NO: 100252 - protein, 11 aa, Homo Sapiens
AENEPPEKETL

SEQ ID NO: 100253 - protein, 11 aa, Homo Sapiens
AENKDEIALVL

SEQ ID NO: 100254 - protein, 11 aa, Homo Sapiens
AENPAMTRELL

SEQ ID NO: 100255 - protein, 11 aa, Homo Sapiens
AENRLTEMETL

SEQ ID NO: 100256 - protein, 11 aa, Homo Sapiens
AENTSEVSTVL

SEQ ID NO: 100257 - protein, 11 aa, Homo Sapiens
AEPDLEQAAHL

SEQ ID NO: 100258 - protein, 11 aa, Homo Sapiens
AEPEADKGTVL

SEQ ID NO: 100259 - protein, 11 aa, Homo Sapiens
AEPRNKKPSVL

SEQ ID NO: 100260 - protein, 11 aa, Homo Sapiens
AEPSSDLASKL

SEQ ID NO: 100261 - protein, 11 aa, Homo Sapiens
AEQPPDLHCVL

SEQ ID NO: 100262 - protein, 11 aa, Homo Sapiens
AERNVYTSEVL

SEQ ID NO: 100263 - protein, 11 aa, Homo Sapiens
AESDEGKLHVL

SEQ ID NO: 100264 - protein, 11 aa, Homo Sapiens
AESGAMEGETL

SEQ ID NO: 100265 - protein, 11 aa, Homo Sapiens
AESSPAKKDVL

SEQ ID NO: 100266 - protein, 11 aa, Homo Sapiens
AESTSGRGQCL

SEQ ID NO: 100267 - protein, 11 aa, Homo Sapiens
AETGQVQKIVL

SEQ ID NO: 100268 - protein, 11 aa, Homo Sapiens
AETKDIPAAIL

SEQ ID NO: 100269 - protein, 11 aa, Homo Sapiens
AEVAQREAETL

SEQ ID NO: 100270 - protein, 11 aa, Homo Sapiens
AEVEAQKAQQL

SEQ ID NO: 100271 - protein, 11 aa, Homo Sapiens
AEVEDVASHVL

SEQ ID NO: 100272 - protein, 11 aa, Homo Sapiens
AEVELKKGATL

SEQ ID NO: 100273 - protein, 11 aa, Homo Sapiens
AEVEVSIPAKL

SEQ ID NO: 100274 - protein, 11 aa, Homo Sapiens
AEVLEQSAQTL

SEQ ID NO: 100275 - protein, 11 aa, Homo Sapiens
AEVRGPAHCLL

SEQ ID NO: 100276 - protein, 11 aa, Homo Sapiens
AEVSPDAKTSL

SEQ ID NO: 100277 - protein, 11 aa, Homo Sapiens
AEVSQEVTRSL

SEQ ID NO: 100278 - protein, 11 aa, Homo Sapiens
AEVTTKSQIPL

SEQ ID NO: 100279 - protein, 11 aa, Homo Sapiens
AEYGAEALERM

SEQ ID NO: 100280 - protein, 11 aa, Homo Sapiens
AEYGEIKNIHL

SEQ ID NO: 100281 - protein, 11 aa, Homo Sapiens
AEYGGHDQIDL

SEQ ID NO: 100282 - protein, 11 aa, Homo Sapiens
AEYQELLDVKL

SEQ ID NO: 100283 - protein, 11 aa, Homo Sapiens
EASDPLPPTAL

SEQ ID NO: 100284 - protein, 11 aa, Homo Sapiens
EEFDRGIDVSL

SEQ ID NO: 100285 - protein, 11 aa, Homo Sapiens
EEFQNISPEEL

SEQ ID NO: 100286 - protein, 11 aa, Homo Sapiens
EELASLGLDRL

SEQ ID NO: 100287 - protein, 11 aa, Homo Sapiens
EEVNLNGSGKL

SEQ ID NO: 100288 - protein, 11 aa, Homo Sapiens
FEARLVQGSIL

SEQ ID NO: 100289 - protein, 11 aa, Homo Sapiens
FEEDKQRIELL

SEQ ID NO: 100290 - protein, 11 aa, Homo Sapiens
FEEKPEEPVVL

SEQ ID NO: 100291 - protein, 11 aa, Homo Sapiens
FELDYPKYEVL

SEQ ID NO: 100292 - protein, 11 aa, Homo Sapiens
GEADAQNITVL

SEQ ID NO: 100293 - protein, 11 aa, Homo Sapiens
GEAHQAETEVL

SEQ ID NO: 100294 - protein, 11 aa, Homo Sapiens
GEALPFSHLIL

SEQ ID NO: 100295 - protein, 11 aa, Homo Sapiens
GEALPHVVPTL

SEQ ID NO: 100296 - protein, 11 aa, Homo Sapiens
GEANAELCRYL

SEQ ID NO: 100297 - protein, 11 aa, Homo Sapiens
GEAPGAETPSL

SEQ ID NO: 100298 - protein, 11 aa, Homo Sapiens
GEAVRGLETAL

SEQ ID NO: 100299 - protein, 11 aa, Homo Sapiens
GECTDFKIPIL

SEQ ID NO: 100300 - protein, 11 aa, Homo Sapiens
GEDAECHAAKL

SEQ ID NO: 100301 - protein, 11 aa, Homo Sapiens
GEDAMGHTIVL

SEQ ID NO: 100302 - protein, 11 aa, Homo Sapiens
GEDGAWQGSQL

SEQ ID NO: 100303 - protein, 11 aa, Homo Sapiens
GEDNGQRGYLL

SEQ ID NO: 100304 - protein, 11 aa, Homo Sapiens
GEDREATGVLL

SEQ ID NO: 100305 - protein, 11 aa, Homo Sapiens
GEDSAVLMERL

SEQ ID NO: 100306 - protein, 11 aa, Homo Sapiens
GEDSSFLVVRL

SEQ ID NO: 100307 - protein, 11 aa, Homo Sapiens
GEEEFSYGYSL

SEQ ID NO: 100308 - protein, 11 aa, Homo Sapiens
GEEEGCASIRL

SEQ ID NO: 100309 - protein, 11 aa, Homo Sapiens
GEEENQKRYYL

SEQ ID NO: 100310 - protein, 11 aa, Homo Sapiens
GEEFFNNCEVL

SEQ ID NO: 100311 - protein, 11 aa, Homo Sapiens
GEEGSFRGSVL

SEQ ID NO: 100312 - protein, 11 aa, Homo Sapiens
GEEHYNCISAL

SEQ ID NO: 100313 - protein, 11 aa, Homo Sapiens
GEELPHPKSML

SEQ ID NO: 100314 - protein, 11 aa, Homo Sapiens
GEENIGGVEWL

SEQ ID NO: 100315 - protein, 11 aa, Homo Sapiens
GEEPAPEAEAL

SEQ ID NO: 100316 - protein, 11 aa, Homo Sapiens
GEEPGQSGASL

SEQ ID NO: 100317 - protein, 11 aa, Homo Sapiens
GEERATEAGSL

SEQ ID NO: 100318 - protein, 11 aa, Homo Sapiens
GEERQEASSSL

SEQ ID NO: 100319 - protein, 11 aa, Homo Sapiens
GEERVDSLVSL

SEQ ID NO: 100320 - protein, 11 aa, Homo Sapiens
GEESEGIHEVL

SEQ ID NO: 100321 - protein, 11 aa, Homo Sapiens
GEEYKLQNETL

SEQ ID NO: 100322 - protein, 11 aa, Homo Sapiens
GEFEKKYVATL

SEQ ID NO: 100323 - protein, 11 aa, Homo Sapiens
GEFGEIEAIEL

SEQ ID NO: 100324 - protein, 11 aa, Homo Sapiens
GEFGKKADGLL

SEQ ID NO: 100325 - protein, 11 aa, Homo Sapiens
GEFGYDKDTSL

SEQ ID NO: 100326 - protein, 11 aa, Homo Sapiens
GEFKKYLEVVL

SEQ ID NO: 100327 - protein, 11 aa, Homo Sapiens
GEFQIVNPHLL

SEQ ID NO: 100328 - protein, 11 aa, Homo Sapiens
GEFSGANKEKL

SEQ ID NO: 100329 - protein, 11 aa, Homo Sapiens
GEFSLHEQTVL

SEQ ID NO: 100330 - protein, 11 aa, Homo Sapiens
GEFSPNVPKSL

SEQ ID NO: 100331 - protein, 11 aa, Homo Sapiens
GEFTLHGRAIL

SEQ ID NO: 100332 - protein, 11 aa, Homo Sapiens
GEGDSVITQVL

SEQ ID NO: 100333 - protein, 11 aa, Homo Sapiens
GEGTQGPELSL

SEQ ID NO: 100334 - protein, 11 aa, Homo Sapiens
GEHHEKAVELL

SEQ ID NO: 100335 - protein, 11 aa, Homo Sapiens
GEHIIAGAGEL

SEQ ID NO: 100336 - protein, 11 aa, Homo Sapiens
GEHREHGTVLL

SEQ ID NO: 100337 - protein, 11 aa, Homo Sapiens
GEHSSRVVQEL

SEQ ID NO: 100338 - protein, 11 aa, Homo Sapiens
GEHVILGTGEL

SEQ ID NO: 100339 - protein, 11 aa, Homo Sapiens
GEIASFDKAKL

SEQ ID NO: 100340 - protein, 11 aa, Homo Sapiens
GEICEEGLHVL

SEQ ID NO: 100341 - protein, 11 aa, Homo Sapiens
GEIDEETDSAL

SEQ ID NO: 100342 - protein, 11 aa, Homo Sapiens
GEIEARYSTGL

SEQ ID NO: 100343 - protein, 11 aa, Homo Sapiens
GEIEELQQCLL

SEQ ID NO: 100344 - protein, 11 aa, Homo Sapiens
GEIKDGLEVML

SEQ ID NO: 100345 - protein, 11 aa, Homo Sapiens
GEIKRDFIATL

SEQ ID NO: 100346 - protein, 11 aa, Homo Sapiens
GEINVIGEPFL

SEQ ID NO: 100347 - protein, 11 aa, Homo Sapiens
GEIQEIVKTGL

SEQ ID NO: 100348 - protein, 11 aa, Homo Sapiens
GEIREQNGDSL

SEQ ID NO: 100349 - protein, 11 aa, Homo Sapiens
GEIVEKIGVHL

SEQ ID NO: 100350 - protein, 11 aa, Homo Sapiens
GEKFEDENFIL

SEQ ID NO: 100351 - protein, 11 aa, Homo Sapiens
GEKLLPGIEVL

SEQ ID NO: 100352 - protein, 11 aa, Homo Sapiens
GELANEVKVLL

SEQ ID NO: 100353 - protein, 11 aa, Homo Sapiens
GELDLDKQSEL

SEQ ID NO: 100354 - protein, 11 aa, Homo Sapiens
GELDLERAPAL

SEQ ID NO: 100355 - protein, 11 aa, Homo Sapiens
GELEAAKALVL

SEQ ID NO: 100356 - protein, 11 aa, Homo Sapiens
GELEAKLNENL

SEQ ID NO: 100357 - protein, 11 aa, Homo Sapiens
GELPTSPLHLL

SEQ ID NO: 100358 - protein, 11 aa, Homo Sapiens
GEMTLKSALAL

SEQ ID NO: 100359 - protein, 11 aa, Homo Sapiens
GENDETVQTTL

SEQ ID NO: 100360 - protein, 11 aa, Homo Sapiens
GENPASHSYVL

SEQ ID NO: 100361 - protein, 11 aa, Homo Sapiens
GEPAEVTTTVL

SEQ ID NO: 100362 - protein, 11 aa, Homo Sapiens
GEPHGLENMEL

SEQ ID NO: 100363 - protein, 11 aa, Homo Sapiens
GEPRYALTTTL

SEQ ID NO: 100364 - protein, 11 aa, Homo Sapiens
GEPVDDKSATL

SEQ ID NO: 100365 - protein, 11 aa, Homo Sapiens
GESHVSGTTTL

SEQ ID NO: 100366 - protein, 11 aa, Homo Sapiens
GETETRLECLL

SEQ ID NO: 100367 - protein, 11 aa, Homo Sapiens
GETLAMKGLTL

SEQ ID NO: 100368 - protein, 11 aa, Homo Sapiens
GETVAREATEL

SEQ ID NO: 100369 - protein, 11 aa, Homo Sapiens
GEVDGKAIPDL

SEQ ID NO: 100370 - protein, 11 aa, Homo Sapiens
GEVEGHPVWAL

SEQ ID NO: 100371 - protein, 11 aa, Homo Sapiens
GEVFPTTEVLL

SEQ ID NO: 100372 - protein, 11 aa, Homo Sapiens
GEVLEQEKGAL

SEQ ID NO: 100373 - protein, 11 aa, Homo Sapiens
GEVVDQGSTNL

SEQ ID NO: 100374 - protein, 11 aa, Homo Sapiens
GEVYSADREDL

SEQ ID NO: 100375 - protein, 11 aa, Homo Sapiens
GISLEDTQKEL

SEQ ID NO: 100376 - protein, 11 aa, Homo Sapiens
HEAPSLQEAAL

SEQ ID NO: 100377 - protein, 11 aa, Homo Sapiens
HEAQAVLGVLL

SEQ ID NO: 100378 - protein, 11 aa, Homo Sapiens
HEAQLSEKISL

SEQ ID NO: 100379 - protein, 11 aa, Homo Sapiens
HEAWQGLGEVL

SEQ ID NO: 100380 - protein, 11 aa, Homo Sapiens
HECLVKSGDLL

SEQ ID NO: 100381 - protein, 11 aa, Homo Sapiens
HEDYCGARTEL

SEQ ID NO: 100382 - protein, 11 aa, Homo Sapiens
HEEDHTLGNSL

SEQ ID NO: 100383 - protein, 11 aa, Homo Sapiens
HEELIGAATAL

SEQ ID NO: 100384 - protein, 11 aa, Homo Sapiens
HEILSRDPLLL

SEQ ID NO: 100385 - protein, 11 aa, Homo Sapiens
HEKLDNKKECL

SEQ ID NO: 100386 - protein, 11 aa, Homo Sapiens
HELLEGSEIYL

SEQ ID NO: 100387 - protein, 11 aa, Homo Sapiens
HELQENTICSL

SEQ ID NO: 100388 - protein, 11 aa, Homo Sapiens
HELQLLNTDYL

SEQ ID NO: 100389 - protein, 11 aa, Homo Sapiens
HELSGLNKEEL

SEQ ID NO: 100390 - protein, 11 aa, Homo Sapiens
HEMDTSNGVLL

SEQ ID NO: 100391 - protein, 11 aa, Homo Sapiens
HEMEIQLKDAL

SEQ ID NO: 100392 - protein, 11 aa, Homo Sapiens
HEMIESGVINL

SEQ ID NO: 100393 - protein, 11 aa, Homo Sapiens
HESACGRTVSL

SEQ ID NO: 100394 - protein, 11 aa, Homo Sapiens
HESGYDAGKAL

SEQ ID NO: 100395 - protein, 11 aa, Homo Sapiens
HETLEQRLLVT

SEQ ID NO: 100396 - protein, 11 aa, Homo Sapiens
HEVEVNGTDTL

SEQ ID NO: 100397 - protein, 11 aa, Homo Sapiens
HEVMEQGRVTI

SEQ ID NO: 100398 - protein, 11 aa, Homo Sapiens
HEVQEHFPEAL

SEQ ID NO: 100399 - protein, 11 aa, Homo Sapiens
HEWEESNVQIL

SEQ ID NO: 100400 - protein, 11 aa, Homo Sapiens
IEASNIDNVVL

SEQ ID NO: 100401 - protein, 11 aa, Homo Sapiens
IEELPTQISSL

SEQ ID NO: 100402 - protein, 11 aa, Homo Sapiens
IEEPSAKINVL

SEQ ID NO: 100403 - protein, 11 aa, Homo Sapiens
IEESIDRVYSL

SEQ ID NO: 100404 - protein, 11 aa, Homo Sapiens
IEFDPSKPFSL

SEQ ID NO: 100405 - protein, 11 aa, Homo Sapiens
IEFKETQALVL

SEQ ID NO: 100406 - protein, 11 aa, Homo Sapiens
IEHALGGSSAL

SEQ ID NO: 100407 - protein, 11 aa, Homo Sapiens
IELDPRFNDIL

SEQ ID NO: 100408 - protein, 11 aa, Homo Sapiens
IENRDVAKSVL

SEQ ID NO: 100409 - protein, 11 aa, Homo Sapiens
IENRDVAKTVL

SEQ ID NO: 100410 - protein, 11 aa, Homo Sapiens
IEVDPDTKEML

SEQ ID NO: 100411 - protein, 11 aa, Homo Sapiens
IEVIENRMAVL

SEQ ID NO: 100412 - protein, 11 aa, Homo Sapiens
KEAEPDLLAVL

SEQ ID NO: 100413 - protein, 11 aa, Homo Sapiens
KEALIAASETL

SEQ ID NO: 100414 - protein, 11 aa, Homo Sapiens
KEALTYDGALL

SEQ ID NO: 100415 - protein, 11 aa, Homo Sapiens
KEAPTPKEGTL

SEQ ID NO: 100416 - protein, 11 aa, Homo Sapiens
KEAQKTAAVAL

SEQ ID NO: 100417 - protein, 11 aa, Homo Sapiens
KECQEKLQAVL

SEQ ID NO: 100418 - protein, 11 aa, Homo Sapiens
KECQEKLQVAL

SEQ ID NO: 100419 - protein, 11 aa, Homo Sapiens
KEDEIPETVSL

SEQ ID NO: 100420 - protein, 11 aa, Homo Sapiens
KEDEQPQVVVL

SEQ ID NO: 100421 - protein, 11 aa, Homo Sapiens
KEDGAISTIVL

SEQ ID NO: 100422 - protein, 11 aa, Homo Sapiens
KEDNGIGILTL

SEQ ID NO: 100423 - protein, 11 aa, Homo Sapiens
KEDPMGWQSLL

SEQ ID NO: 100424 - protein, 11 aa, Homo Sapiens
KEEADGVHNTL

SEQ ID NO: 100425 - protein, 11 aa, Homo Sapiens
KEEESQQQAVL

SEQ ID NO: 100426 - protein, 11 aa, Homo Sapiens
KEEETNSVATL

SEQ ID NO: 100427 - protein, 11 aa, Homo Sapiens
KEEGAGLGFSL

SEQ ID NO: 100428 - protein, 11 aa, Homo Sapiens
KEELLECIQQL

SEQ ID NO: 100429 - protein, 11 aa, Homo Sapiens
KEENSTEEQAL

SEQ ID NO: 100430 - protein, 11 aa, Homo Sapiens
KEENTQEAAVL

SEQ ID NO: 100431 - protein, 11 aa, Homo Sapiens
KEENVGLHQTL

SEQ ID NO: 100432 - protein, 11 aa, Homo Sapiens
KEEQMDGTVTL

SEQ ID NO: 100433 - protein, 11 aa, Homo Sapiens
KEESIVSSLRL

SEQ ID NO: 100434 - protein, 11 aa, Homo Sapiens
KEFAGEDTSDL

SEQ ID NO: 100435 - protein, 11 aa, Homo Sapiens
KEFDGKSLVSV

SEQ ID NO: 100436 - protein, 11 aa, Homo Sapiens
KEFEENTQHLL

SEQ ID NO: 100437 - protein, 11 aa, Homo Sapiens
KEFMPPGLQEL

SEQ ID NO: 100438 - protein, 11 aa, Homo Sapiens
KEFNFPEEAVL

SEQ ID NO: 100439 - protein, 11 aa, Homo Sapiens
KEFSLQDIEVL

SEQ ID NO: 100440 - protein, 11 aa, Homo Sapiens
KEGEIQAGAKL

SEQ ID NO: 100441 - protein, 11 aa, Homo Sapiens
KEHEVEKMFTL

SEQ ID NO: 100442 - protein, 11 aa, Homo Sapiens
KEIAENQEAKL

SEQ ID NO: 100443 - protein, 11 aa, Homo Sapiens
KEIAFPKAEEL

SEQ ID NO: 100444 - protein, 11 aa, Homo Sapiens
KEIDMLLKEYL

SEQ ID NO: 100445 - protein, 11 aa, Homo Sapiens
KEIEDAEKYSF

SEQ ID NO: 100446 - protein, 11 aa, Homo Sapiens
KEIEQEAAVEL

SEQ ID NO: 100447 - protein, 11 aa, Homo Sapiens
KEISSVDCIAL

SEQ ID NO: 100448 - protein, 11 aa, Homo Sapiens
KEITEKTRVAL

SEQ ID NO: 100449 - protein, 11 aa, Homo Sapiens
KEIYNQVNVVL

SEQ ID NO: 100450 - protein, 11 aa, Homo Sapiens
KELDEEHSQEL

SEQ ID NO: 100451 - protein, 11 aa, Homo Sapiens
KELDSNPFASL

SEQ ID NO: 100452 - protein, 11 aa, Homo Sapiens
KELEDSLLARL

SEQ ID NO: 100453 - protein, 11 aa, Homo Sapiens
KELGLVDGQEL

SEQ ID NO: 100454 - protein, 11 aa, Homo Sapiens
KELILHNPVTL

SEQ ID NO: 100455 - protein, 11 aa, Homo Sapiens
KELKDAGAGLL

SEQ ID NO: 100456 - protein, 11 aa, Homo Sapiens
KELQAHGADEL

SEQ ID NO: 100457 - protein, 11 aa, Homo Sapiens
KEMGGHHIVAL

SEQ ID NO: 100458 - protein, 11 aa, Homo Sapiens
KEMQPTHPIRL

SEQ ID NO: 100459 - protein, 11 aa, Homo Sapiens
KENDAVTIQVL

SEQ ID NO: 100460 - protein, 11 aa, Homo Sapiens
KENLELNGSIL

SEQ ID NO: 100461 - protein, 11 aa, Homo Sapiens
KEPDRIVGEFL

SEQ ID NO: 100462 - protein, 11 aa, Homo Sapiens
KEQLEAEAQAL

SEQ ID NO: 100463 - protein, 11 aa, Homo Sapiens
KESEGVVNDEL

SEQ ID NO: 100464 - protein, 11 aa, Homo Sapiens
KESESSLDVSL

SEQ ID NO: 100465 - protein, 11 aa, Homo Sapiens
KETFLTSPEEL

SEQ ID NO: 100466 - protein, 11 aa, Homo Sapiens
KETSPLTAEKL

SEQ ID NO: 100467 - protein, 11 aa, Homo Sapiens
KEVDEDFDSKL

SEQ ID NO: 100468 - protein, 11 aa, Homo Sapiens
KEVDIEGTTVI

SEQ ID NO: 100469 - protein, 11 aa, Homo Sapiens
KEVEETIEGML

SEQ ID NO: 100470 - protein, 11 aa, Homo Sapiens
KEVEKNLKSCL

SEQ ID NO: 100471 - protein, 11 aa, Homo Sapiens
KEVFEDKQSVL

SEQ ID NO: 100472 - protein, 11 aa, Homo Sapiens
KEVYAAAAEVL

SEQ ID NO: 100473 - protein, 11 aa, Homo Sapiens
KEVYEGEVTEL

SEQ ID NO: 100474 - protein, 11 aa, Homo Sapiens
KEYEEKGGEYL

SEQ ID NO: 100475 - protein, 11 aa, Homo Sapiens
KEYESKSLEEL

SEQ ID NO: 100476 - protein, 11 aa, Homo Sapiens
KEYFSTFGEVL

SEQ ID NO: 100477 - protein, 11 aa, Homo Sapiens
KEYPNRGNTCL

SEQ ID NO: 100478 - protein, 11 aa, Homo Sapiens
KEYQNVHEEVL

SEQ ID NO: 100479 - protein, 11 aa, Homo Sapiens
KIENKIESIGL

SEQ ID NO: 100480 - protein, 11 aa, Homo Sapiens
LEAPVSGNQQL

SEQ ID NO: 100481 - protein, 11 aa, Homo Sapiens
LEDAETKNVAL

SEQ ID NO: 100482 - protein, 11 aa, Homo Sapiens
LEEPRGQQEVL

SEQ ID NO: 100483 - protein, 11 aa, Homo Sapiens
LEFDPAQRITL

SEQ ID NO: 100484 - protein, 11 aa, Homo Sapiens
LEHDPQYAVIL

SEQ ID NO: 100485 - protein, 11 aa, Homo Sapiens
LEMNSDLKAQL

SEQ ID NO: 100486 - protein, 11 aa, Homo Sapiens
LEVAEGGKAEL

SEQ ID NO: 100487 - protein, 11 aa, Homo Sapiens
LEYDPTQRITL

SEQ ID NO: 100488 - protein, 11 aa, Homo Sapiens
LLAENPQSTPQ

SEQ ID NO: 100489 - protein, 11 aa, Homo Sapiens
LVVPANCLAQL

SEQ ID NO: 100490 - protein, 11 aa, Homo Sapiens
MEAIGHAGTCL

SEQ ID NO: 100491 - protein, 11 aa, Homo Sapiens
MEENPGIFAVL

SEQ ID NO: 100492 - protein, 11 aa, Homo Sapiens
MELPTEKEVAL

SEQ ID NO: 100493 - protein, 11 aa, Homo Sapiens
MESKEKDRQVL

SEQ ID NO: 100494 - protein, 11 aa, Homo Sapiens
NEFKEKGIGTL

SEQ ID NO: 100495 - protein, 11 aa, Homo Sapiens
PVTDGAISTLL

SEQ ID NO: 100496 - protein, 11 aa, Homo Sapiens
QEACEAYLVGL

SEQ ID NO: 100497 - protein, 11 aa, Homo Sapiens
QEAPSSTSQEL

SEQ ID NO: 100498 - protein, 11 aa, Homo Sapiens
QEASEAYLVGL

SEQ ID NO: 100499 - protein, 11 aa, Homo Sapiens
QEDNVANKQTL

SEQ ID NO: 100500 - protein, 11 aa, Homo Sapiens
QEEDESPRSVL

SEQ ID NO: 100501 - protein, 11 aa, Homo Sapiens
QEEMDSNKVSL

SEQ ID NO: 100502 - protein, 11 aa, Homo Sapiens
QEFGVGDGSKL

SEQ ID NO: 100503 - protein, 11 aa, Homo Sapiens
QEFTSCLKETL

SEQ ID NO: 100504 - protein, 11 aa, Homo Sapiens
QEHPASAEFVL

SEQ ID NO: 100505 - protein, 11 aa, Homo Sapiens
QEIDPTKENQL

SEQ ID NO: 100506 - protein, 11 aa, Homo Sapiens
QELEDTKVTAL

SEQ ID NO: 100507 - protein, 11 aa, Homo Sapiens
QELNELSAISL

SEQ ID NO: 100508 - protein, 11 aa, Homo Sapiens
QEMGNGKANRL

SEQ ID NO: 100509 - protein, 11 aa, Homo Sapiens
QEPLEGTEQTL

SEQ ID NO: 100510 - protein, 11 aa, Homo Sapiens
QETADVKASVL

SEQ ID NO: 100511 - protein, 11 aa, Homo Sapiens
QEVGDGTNFVL

SEQ ID NO: 100512 - protein, 11 aa, Homo Sapiens
QFDDQGKAVIL

SEQ ID NO: 100513 - protein, 11 aa, Homo Sapiens
QREEAAEVASL

SEQ ID NO: 100514 - protein, 11 aa, Homo Sapiens
REAAAVFQETL

SEQ ID NO: 100515 - protein, 11 aa, Homo Sapiens
REAAEKAKCEL

SEQ ID NO: 100516 - protein, 11 aa, Homo Sapiens
REAATQAQQTL

SEQ ID NO: 100517 - protein, 11 aa, Homo Sapiens
REACETVGATL

SEQ ID NO: 100518 - protein, 11 aa, Homo Sapiens
READAALFSEL

SEQ ID NO: 100519 - protein, 11 aa, Homo Sapiens
REAIDSPVSFL

SEQ ID NO: 100520 - protein, 11 aa, Homo Sapiens
REANQAINPKL

SEQ ID NO: 100521 - protein, 11 aa, Homo Sapiens
REAQAELAQKL

SEQ ID NO: 100522 - protein, 11 aa, Homo Sapiens
REAQNDLEQVL

SEQ ID NO: 100523 - protein, 11 aa, Homo Sapiens
REASIYTGITL

SEQ ID NO: 100524 - protein, 11 aa, Homo Sapiens
REASLSILEQL

SEQ ID NO: 100525 - protein, 11 aa, Homo Sapiens
REATSTPEISL

SEQ ID NO: 100526 - protein, 11 aa, Homo Sapiens
REAVEAAGQEL

SEQ ID NO: 100527 - protein, 11 aa, Homo Sapiens
REAVVNTQELL

SEQ ID NO: 100528 - protein, 11 aa, Homo Sapiens
REDDPGEAASM

SEQ ID NO: 100529 - protein, 11 aa, Homo Sapiens
REDDSDKYCKL

SEQ ID NO: 100530 - protein, 11 aa, Homo Sapiens
REDDVGTGAGL

SEQ ID NO: 100531 - protein, 11 aa, Homo Sapiens
REDETDVKAVL

SEQ ID NO: 100532 - protein, 11 aa, Homo Sapiens
REDFKGKKIEL

SEQ ID NO: 100533 - protein, 11 aa, Homo Sapiens
REDGSFSFYSL

SEQ ID NO: 100534 - protein, 11 aa, Homo Sapiens
REDPSGVILTL

SEQ ID NO: 100535 - protein, 11 aa, Homo Sapiens
REDSLDSVLFL

SEQ ID NO: 100536 - protein, 11 aa, Homo Sapiens
REDSNLESSQL

SEQ ID NO: 100537 - protein, 11 aa, Homo Sapiens
REDSQRPGAHL

SEQ ID NO: 100538 - protein, 11 aa, Homo Sapiens
REDSVKPGAHL

SEQ ID NO: 100539 - protein, 11 aa, Homo Sapiens
REEAVALGVGL

SEQ ID NO: 100540 - protein, 11 aa, Homo Sapiens
REEEQAFLVSL

SEQ ID NO: 100541 - protein, 11 aa, Homo Sapiens
REEGFDRSTSL

SEQ ID NO: 100542 - protein, 11 aa, Homo Sapiens
REEGKENAFSL

SEQ ID NO: 100543 - protein, 11 aa, Homo Sapiens
REEKDGELNVL

SEQ ID NO: 100544 - protein, 11 aa, Homo Sapiens
REELSNVLAAM

SEQ ID NO: 100545 - protein, 11 aa, Homo Sapiens
REENNESEVSL

SEQ ID NO: 100546 - protein, 11 aa, Homo Sapiens
REEQGSGGYSL

SEQ ID NO: 100547 - protein, 11 aa, Homo Sapiens
REESDSLGQDL

SEQ ID NO: 100548 - protein, 11 aa, Homo Sapiens
REESLAEVVCL

SEQ ID NO: 100549 - protein, 11 aa, Homo Sapiens
REFEDQKLTML

SEQ ID NO: 100550 - protein, 11 aa, Homo Sapiens
REFFDSNGNFL

SEQ ID NO: 100551 - protein, 11 aa, Homo Sapiens
REFGEEALNSL

SEQ ID NO: 100552 - protein, 11 aa, Homo Sapiens
REFPEADAEKL

SEQ ID NO: 100553 - protein, 11 aa, Homo Sapiens
REFTDSAEAKL

SEQ ID NO: 100554 - protein, 11 aa, Homo Sapiens
REGDMPIHELL

SEQ ID NO: 100555 - protein, 11 aa, Homo Sapiens
REHEIGEWEAF

SEQ ID NO: 100556 - protein, 11 aa, Homo Sapiens
REHFTPEATQL

SEQ ID NO: 100557 - protein, 11 aa, Homo Sapiens
REHMGQLLHQL

SEQ ID NO: 100558 - protein, 11 aa, Homo Sapiens
REHSSLGHADL

SEQ ID NO: 100559 - protein, 11 aa, Homo Sapiens
REHSVHDSVEL

SEQ ID NO: 100560 - protein, 11 aa, Homo Sapiens
REHVEAIKIGL

SEQ ID NO: 100561 - protein, 11 aa, Homo Sapiens
REIAQDFKTDL

SEQ ID NO: 100562 - protein, 11 aa, Homo Sapiens
REIATEKKNSL

SEQ ID NO: 100563 - protein, 11 aa, Homo Sapiens
REIESSPQYRL

SEQ ID NO: 100564 - protein, 11 aa, Homo Sapiens
REIFLSQPILL

SEQ ID NO: 100565 - protein, 11 aa, Homo Sapiens
REILETLIKGL

SEQ ID NO: 100566 - protein, 11 aa, Homo Sapiens
REIRHPNIITL

SEQ ID NO: 100567 - protein, 11 aa, Homo Sapiens
REITDKKKINL

SEQ ID NO: 100568 - protein, 11 aa, Homo Sapiens
REITFENGEEL

SEQ ID NO: 100569 - protein, 11 aa, Homo Sapiens
REIVAISSAQL

SEQ ID NO: 100570 - protein, 11 aa, Homo Sapiens
REIVIGVLHQL

SEQ ID NO: 100571 - protein, 11 aa, Homo Sapiens
REIVRDIKEKL

SEQ ID NO: 100572 - protein, 11 aa, Homo Sapiens
REKAEGDVAAL

SEQ ID NO: 100573 - protein, 11 aa, Homo Sapiens
REKEAAYQERL

SEQ ID NO: 100574 - protein, 11 aa, Homo Sapiens
REKEDLVDLVL

SEQ ID NO: 100575 - protein, 11 aa, Homo Sapiens
REKLAEKKELL

SEQ ID NO: 100576 - protein, 11 aa, Homo Sapiens
REKLTSKEECL

SEQ ID NO: 100577 - protein, 11 aa, Homo Sapiens
REKQPMVPESL

SEQ ID NO: 100578 - protein, 11 aa, Homo Sapiens
REKVIKGAEIL

SEQ ID NO: 100579 - protein, 11 aa, Homo Sapiens
RELEDPESAML

SEQ ID NO: 100580 - protein, 11 aa, Homo Sapiens
RELEEKAMEEL

SEQ ID NO: 100581 - protein, 11 aa, Homo Sapiens
RELEEKEQERL

SEQ ID NO: 100582 - protein, 11 aa, Homo Sapiens
RELEGASDPLL

SEQ ID NO: 100583 - protein, 11 aa, Homo Sapiens
RELISDLEHRL

SEQ ID NO: 100584 - protein, 11 aa, Homo Sapiens
RELISNASDAL

SEQ ID NO: 100585 - protein, 11 aa, Homo Sapiens
RELREREGPSL

SEQ ID NO: 100586 - protein, 11 aa, Homo Sapiens
RELWNQGAGLL

SEQ ID NO: 100587 - protein, 11 aa, Homo Sapiens
REMTSKLLSDL

SEQ ID NO: 100588 - protein, 11 aa, Homo Sapiens
RENEVDWLTEL

SEQ ID NO: 100589 - protein, 11 aa, Homo Sapiens
RENGEATDTIL

SEQ ID NO: 100590 - protein, 11 aa, Homo Sapiens
RENIESLAHAL

SEQ ID NO: 100591 - protein, 11 aa, Homo Sapiens
RENLEEEAIIM

SEQ ID NO: 100592 - protein, 11 aa, Homo Sapiens
RENMAYTVECL

SEQ ID NO: 100593 - protein, 11 aa, Homo Sapiens
RENPGGSEESL

SEQ ID NO: 100594 - protein, 11 aa, Homo Sapiens
RENVVNFIDCL

SEQ ID NO: 100595 - protein, 11 aa, Homo Sapiens
RENYDRGYSSL

SEQ ID NO: 100596 - protein, 11 aa, Homo Sapiens
REQESKYIEEL

SEQ ID NO: 100597 - protein, 11 aa, Homo Sapiens
REQHGVAASCL

SEQ ID NO: 100598 - protein, 11 aa, Homo Sapiens
REQIDNLATEL

SEQ ID NO: 100599 - protein, 11 aa, Homo Sapiens
REQQAGKDVTL

SEQ ID NO: 100600 - protein, 11 aa, Homo Sapiens
RESDSAKPASL

SEQ ID NO: 100601 - protein, 11 aa, Homo Sapiens
RESEIETNTEL

SEQ ID NO: 100602 - protein, 11 aa, Homo Sapiens
RESIVLHGATL

SEQ ID NO: 100603 - protein, 11 aa, Homo Sapiens
RESQVSILQSL

SEQ ID NO: 100604 - protein, 11 aa, Homo Sapiens
RETAEALLQVL

SEQ ID NO: 100605 - protein, 11 aa, Homo Sapiens
RETDEETKQIL

SEQ ID NO: 100606 - protein, 11 aa, Homo Sapiens
RETVSEESNVL

SEQ ID NO: 100607 - protein, 11 aa, Homo Sapiens
REVDLKNGHNL

SEQ ID NO: 100608 - protein, 11 aa, Homo Sapiens
REVELDPDIQL

SEQ ID NO: 100609 - protein, 11 aa, Homo Sapiens
REVGIPPEQSL

SEQ ID NO: 100610 - protein, 11 aa, Homo Sapiens
REVLPEHVSVL

SEQ ID NO: 100611 - protein, 11 aa, Homo Sapiens
REVLPESLPVL

SEQ ID NO: 100612 - protein, 11 aa, Homo Sapiens
REVSPAHQYAL

SEQ ID NO: 100613 - protein, 11 aa, Homo Sapiens
REWGEELQAVL

SEQ ID NO: 100614 - protein, 11 aa, Homo Sapiens
REYEAELETQL

SEQ ID NO: 100615 - protein, 11 aa, Homo Sapiens
REYEDNDEVHI

SEQ ID NO: 100616 - protein, 11 aa, Homo Sapiens
REYNEVEPIIL

SEQ ID NO: 100617 - protein, 11 aa, Homo Sapiens
REYNEYENIKL

SEQ ID NO: 100618 - protein, 11 aa, Homo Sapiens
REYQDLLNVKM

SEQ ID NO: 100619 - protein, 11 aa, Homo Sapiens
REYQELMSVKL

SEQ ID NO: 100620 - protein, 11 aa, Homo Sapiens
SDTPLGTVALL

SEQ ID NO: 100621 - protein, 11 aa, Homo Sapiens
SEAADSKSLVL

SEQ ID NO: 100622 - protein, 11 aa, Homo Sapiens
SEAANRNNDAL

SEQ ID NO: 100623 - protein, 11 aa, Homo Sapiens
SEAPVDLASKL

SEQ ID NO: 100624 - protein, 11 aa, Homo Sapiens
SECNSNRDSVL

SEQ ID NO: 100625 - protein, 11 aa, Homo Sapiens
SECQTSVGTLL

SEQ ID NO: 100626 - protein, 11 aa, Homo Sapiens
SEDFRGSMTSL

SEQ ID NO: 100627 - protein, 11 aa, Homo Sapiens
SEDGGHIFCTL

SEQ ID NO: 100628 - protein, 11 aa, Homo Sapiens
SEDGLPEGIHL

SEQ ID NO: 100629 - protein, 11 aa, Homo Sapiens
SEDGSGKGAAL

SEQ ID NO: 100630 - protein, 11 aa, Homo Sapiens
SEDGSLHVFVL

SEQ ID NO: 100631 - protein, 11 aa, Homo Sapiens
SEDPSGKKAVL

SEQ ID NO: 100632 - protein, 11 aa, Homo Sapiens
SEDYIKSGALL

SEQ ID NO: 100633 - protein, 11 aa, Homo Sapiens
SEEEDSGKQAL

SEQ ID NO: 100634 - protein, 11 aa, Homo Sapiens
SEEKLDSACLL

SEQ ID NO: 100635 - protein, 11 aa, Homo Sapiens
SEEQNSQFQSL

SEQ ID NO: 100636 - protein, 11 aa, Homo Sapiens
SEFEQNLSEKL

SEQ ID NO: 100637 - protein, 11 aa, Homo Sapiens
SEFHEKLLNTL

SEQ ID NO: 100638 - protein, 11 aa, Homo Sapiens
SEFKYNKPAFL

SEQ ID NO: 100639 - protein, 11 aa, Homo Sapiens
SEFREDMPSIL

SEQ ID NO: 100640 - protein, 11 aa, Homo Sapiens
SEFTPLPREVL

SEQ ID NO: 100641 - protein, 11 aa, Homo Sapiens
SEHPDQAQAIL

SEQ ID NO: 100642 - protein, 11 aa, Homo Sapiens
SEHQSRTVATL

SEQ ID NO: 100643 - protein, 11 aa, Homo Sapiens
SEHSTEGSVSL

SEQ ID NO: 100644 - protein, 11 aa, Homo Sapiens
SEIDPRENPDL

SEQ ID NO: 100645 - protein, 11 aa, Homo Sapiens
SEIGEKQDTEL

SEQ ID NO: 100646 - protein, 11 aa, Homo Sapiens
SEIHSGNSVSL

SEQ ID NO: 100647 - protein, 11 aa, Homo Sapiens
SEILETSSTKL

SEQ ID NO: 100648 - protein, 11 aa, Homo Sapiens
SEILSKKQNEL

SEQ ID NO: 100649 - protein, 11 aa, Homo Sapiens
SEITGLSTAVL

SEQ ID NO: 100650 - protein, 11 aa, Homo Sapiens
SELDEEKKIRL

SEQ ID NO: 100651 - protein, 11 aa, Homo Sapiens
SELDLPLGTQL

SEQ ID NO: 100652 - protein, 11 aa, Homo Sapiens
SELISKSSEIL

SEQ ID NO: 100653 - protein, 11 aa, Homo Sapiens
SELPDSIESAL

SEQ ID NO: 100654 - protein, 11 aa, Homo Sapiens
SELQGERIVSL

SEQ ID NO: 100655 - protein, 11 aa, Homo Sapiens
SELREPLKVVL

SEQ ID NO: 100656 - protein, 11 aa, Homo Sapiens
SELRSICTTVL

SEQ ID NO: 100657 - protein, 11 aa, Homo Sapiens
SEMDPSTQISL

SEQ ID NO: 100658 - protein, 11 aa, Homo Sapiens
SEMEDKTTANL

SEQ ID NO: 100659 - protein, 11 aa, Homo Sapiens
SEMSEEKRAKL

SEQ ID NO: 100660 - protein, 11 aa, Homo Sapiens
SENQEKVKALL

SEQ ID NO: 100661 - protein, 11 aa, Homo Sapiens
SEPQDPAAVSL

SEQ ID NO: 100662 - protein, 11 aa, Homo Sapiens
SEQLSRDCDAL

SEQ ID NO: 100663 - protein, 11 aa, Homo Sapiens
SESDKTAVLTL

SEQ ID NO: 100664 - protein, 11 aa, Homo Sapiens
SESMATRDVVL

SEQ ID NO: 100665 - protein, 11 aa, Homo Sapiens
SETAVAKNQAL

SEQ ID NO: 100666 - protein, 11 aa, Homo Sapiens
SETETATSNAL

SEQ ID NO: 100667 - protein, 11 aa, Homo Sapiens
SETSGHTQESL

SEQ ID NO: 100668 - protein, 11 aa, Homo Sapiens
SETYETKTALL

SEQ ID NO: 100669 - protein, 11 aa, Homo Sapiens
SEVEPSVNADL

SEQ ID NO: 100670 - protein, 11 aa, Homo Sapiens
SEVKDEIRTSL

SEQ ID NO: 100671 - protein, 11 aa, Homo Sapiens
SEVKGLDAFVL

SEQ ID NO: 100672 - protein, 11 aa, Homo Sapiens
SEVSQDGKSLL

SEQ ID NO: 100673 - protein, 11 aa, Homo Sapiens
SEVTEPDHPVL

SEQ ID NO: 100674 - protein, 11 aa, Homo Sapiens
SEYLPEVKDLL

SEQ ID NO: 100675 - protein, 11 aa, Homo Sapiens
TEADVEEALRL

SEQ ID NO: 100676 - protein, 11 aa, Homo Sapiens
TEAEAAALEVL

SEQ ID NO: 100677 - protein, 11 aa, Homo Sapiens
TEAISCIKEVL

SEQ ID NO: 100678 - protein, 11 aa, Homo Sapiens
TEAQLRYGSAL

SEQ ID NO: 100679 - protein, 11 aa, Homo Sapiens
TEARTMAAEVL

SEQ ID NO: 100680 - protein, 11 aa, Homo Sapiens
TEAVEDLTTTL

SEQ ID NO: 100681 - protein, 11 aa, Homo Sapiens
TECVSDNQVHL

SEQ ID NO: 100682 - protein, 11 aa, Homo Sapiens
TEDEKSKLTVL

SEQ ID NO: 100683 - protein, 11 aa, Homo Sapiens
TEEEASKLTAL

SEQ ID NO: 100684 - protein, 11 aa, Homo Sapiens
TEEEVSERVTL

SEQ ID NO: 100685 - protein, 11 aa, Homo Sapiens
TEFEDTPTSQL

SEQ ID NO: 100686 - protein, 11 aa, Homo Sapiens
TEIAPTGIESL

SEQ ID NO: 100687 - protein, 11 aa, Homo Sapiens
TEIDEKEYISL

SEQ ID NO: 100688 - protein, 11 aa, Homo Sapiens
TEISSAEKVAL

SEQ ID NO: 100689 - protein, 11 aa, Homo Sapiens
TELESDFRDVL

SEQ ID NO: 100690 - protein, 11 aa, Homo Sapiens
TELLWPGAALL

SEQ ID NO: 100691 - protein, 11 aa, Homo Sapiens
TELRDICNDVL

SEQ ID NO: 100692 - protein, 11 aa, Homo Sapiens
TEMEEGKDLSL

SEQ ID NO: 100693 - protein, 11 aa, Homo Sapiens
TENQEAKRVAL

SEQ ID NO: 100694 - protein, 11 aa, Homo Sapiens
TEPTEDSGISL

SEQ ID NO: 100695 - protein, 11 aa, Homo Sapiens
TESDEKSSIAL

SEQ ID NO: 100696 - protein, 11 aa, Homo Sapiens
TETIDTSRVSL

SEQ ID NO: 100697 - protein, 11 aa, Homo Sapiens
TEVAPAKDVTL

SEQ ID NO: 100698 - protein, 11 aa, Homo Sapiens
TEVLEGNPTVL

SEQ ID NO: 100699 - protein, 11 aa, Homo Sapiens
TEVTPVTGASL

SEQ ID NO: 100700 - protein, 11 aa, Homo Sapiens
TEYLSNADERL

SEQ ID NO: 100701 - protein, 11 aa, Homo Sapiens
VEADIKEFTTL

SEQ ID NO: 100702 - protein, 11 aa, Homo Sapiens
VEALIQSADTL

SEQ ID NO: 100703 - protein, 11 aa, Homo Sapiens
VEDDARGTVVL

SEQ ID NO: 100704 - protein, 11 aa, Homo Sapiens
VEEAVATRTAL

SEQ ID NO: 100705 - protein, 11 aa, Homo Sapiens
VEENWTHLQSL

SEQ ID NO: 100706 - protein, 11 aa, Homo Sapiens
VEESVTGVHRL

SEQ ID NO: 100707 - protein, 11 aa, Homo Sapiens
VEFESQNKEFL

SEQ ID NO: 100708 - protein, 11 aa, Homo Sapiens
VEFFDEKLNSL

SEQ ID NO: 100709 - protein, 11 aa, Homo Sapiens
VEHLDDLPGAL

SEQ ID NO: 100710 - protein, 11 aa, Homo Sapiens
VEIGDSTFTVL

SEQ ID NO: 100711 - protein, 11 aa, Homo Sapiens
VEITEESKALL

SEQ ID NO: 100712 - protein, 11 aa, Homo Sapiens
VEIVKNDDGVI

SEQ ID NO: 100713 - protein, 11 aa, Homo Sapiens
VELDDLGKDEL

SEQ ID NO: 100714 - protein, 11 aa, Homo Sapiens
VENEDKKGVQL

SEQ ID NO: 100715 - protein, 11 aa, Homo Sapiens
VETPTGYIESL

SEQ ID NO: 100716 - protein, 11 aa, Homo Sapiens
VEVDDPLKAQM

SEQ ID NO: 100717 - protein, 11 aa, Homo Sapiens
WEEGKAALEQL

SEQ ID NO: 100718 - protein, 11 aa, Homo Sapiens
WEIDPKDLTFL

SEQ ID NO: 100719 - protein, 11 aa, Homo Sapiens
WESKSDALETL

SEQ ID NO: 100720 - protein, 11 aa, Homo Sapiens
YEADPLKKELL

SEQ ID NO: 100721 - protein, 11 aa, Homo Sapiens
YEALLNLAERL

SEQ ID NO: 100722 - protein, 11 aa, Homo Sapiens
YEAQDPEIASL

SEQ ID NO: 100723 - protein, 11 aa, Homo Sapiens
YEFDTKDLVCL

SEQ ID NO: 100724 - protein, 11 aa, Homo Sapiens
YEHEDIKKGIL

SEQ ID NO: 100725 - protein, 11 aa, Homo Sapiens
YEHETGRESTL

SEQ ID NO: 100726 - protein, 11 aa, Homo Sapiens
YEIDDRDVNKI

SEQ ID NO: 100727 - protein, 11 aa, Homo Sapiens
YEIHDGMNLEL

SEQ ID NO: 100728 - protein, 11 aa, Homo Sapiens
YEKEDSDEVHL

SEQ ID NO: 100729 - protein, 11 aa, Homo Sapiens
YELPTDSHASL

SEQ ID NO: 100730 - protein, 11 aa, Homo Sapiens
YEVDINGPEIL

SEQ ID NO: 100731 - protein, 11 aa, Homo Sapiens
YEVGDPGQRTL

SEQ ID NO: 100732 - protein, 8 aa, Homo Sapiens
ADAVAVTM

SEQ ID NO: 100733 - protein, 8 aa, Homo Sapiens
ADFETVRM

SEQ ID NO: 100734 - protein, 8 aa, Homo Sapiens
ADFPALVV

SEQ ID NO: 100735 - protein, 8 aa, Homo Sapiens
ADIIMEKL

SEQ ID NO: 100736 - protein, 8 aa, Homo Sapiens
ADVIIHEI

SEQ ID NO: 100737 - protein, 8 aa, Homo Sapiens
ADVIVHRL

SEQ ID NO: 100738 - protein, 8 aa, Homo Sapiens
ADVKVHIL

SEQ ID NO: 100739 - protein, 8 aa, Homo Sapiens
ADWAAKKL

SEQ ID NO: 100740 - protein, 8 aa, Homo Sapiens
ADYKPPAT

SEQ ID NO: 100741 - protein, 8 aa, Homo Sapiens
ADYLAHES

SEQ ID NO: 100742 - protein, 8 aa, Homo Sapiens
AEAVRTTL

SEQ ID NO: 100743 - protein, 8 aa, Homo Sapiens
AEAVSRVL

SEQ ID NO: 100744 - protein, 8 aa, Homo Sapiens
AECALEKL

SEQ ID NO: 100745 - protein, 8 aa, Homo Sapiens
AEDPKVTL

SEQ ID NO: 100746 - protein, 8 aa, Homo Sapiens
AEFEVPKL

SEQ ID NO: 100747 - protein, 8 aa, Homo Sapiens
AEFHVQRV

SEQ ID NO: 100748 - protein, 8 aa, Homo Sapiens
AEFKVRAL

SEQ ID NO: 100749 - protein, 8 aa, Homo Sapiens
AEFLLHML

SEQ ID NO: 100750 - protein, 8 aa, Homo Sapiens
AEGPAVSL

SEQ ID NO: 100751 - protein, 8 aa, Homo Sapiens
AEGPITAL

SEQ ID NO: 100752 - protein, 8 aa, Homo Sapiens
AEHHVATL

SEQ ID NO: 100753 - protein, 8 aa, Homo Sapiens
AEHKPLVL

SEQ ID NO: 100754 - protein, 8 aa, Homo Sapiens
AEHKVQSL

SEQ ID NO: 100755 - protein, 8 aa, Homo Sapiens
AEHPNVTL

SEQ ID NO: 100756 - protein, 8 aa, Homo Sapiens
AEIAKAEL

SEQ ID NO: 100757 - protein, 8 aa, Homo Sapiens
AEIAKVEL

SEQ ID NO: 100758 - protein, 8 aa, Homo Sapiens
AEIAVNAV

SEQ ID NO: 100759 - protein, 8 aa, Homo Sapiens
AEIDAHLV

SEQ ID NO: 100760 - protein, 8 aa, Homo Sapiens
AEIEHHEM

SEQ ID NO: 100761 - protein, 8 aa, Homo Sapiens
AEIEQYRL

SEQ ID NO: 100762 - protein, 8 aa, Homo Sapiens
AEIHVPTL

SEQ ID NO: 100763 - protein, 8 aa, Homo Sapiens
AEIPLRMV

SEQ ID NO: 100764 - protein, 8 aa, Homo Sapiens
AEIQKSAL

SEQ ID NO: 100765 - protein, 8 aa, Homo Sapiens
AEIRVHTV

SEQ ID NO: 100766 - protein, 8 aa, Homo Sapiens
AEIVLRSL

SEQ ID NO: 100767 - protein, 8 aa, Homo Sapiens
AEIVTKTI

SEQ ID NO: 100768 - protein, 8 aa, Homo Sapiens
AEKPEEEL

SEQ ID NO: 100769 - protein, 8 aa, Homo Sapiens
AELKIKRL

SEQ ID NO: 100770 - protein, 8 aa, Homo Sapiens
AELKQECL

SEQ ID NO: 100771 - protein, 8 aa, Homo Sapiens
AELLILKR

SEQ ID NO: 100772 - protein, 8 aa, Homo Sapiens
AEMAQNAV

SEQ ID NO: 100773 - protein, 8 aa, Homo Sapiens
AEMKAQEV

SEQ ID NO: 100774 - protein, 8 aa, Homo Sapiens
AEMTTRMV

SEQ ID NO: 100775 - protein, 8 aa, Homo Sapiens
AEMVRHAL

SEQ ID NO: 100776 - protein, 8 aa, Homo Sapiens
AEMYVAKF

SEQ ID NO: 100777 - protein, 8 aa, Homo Sapiens
AEQAKVVL

SEQ ID NO: 100778 - protein, 8 aa, Homo Sapiens
AEQIKHIL

SEQ ID NO: 100779 - protein, 8 aa, Homo Sapiens
AEQPSVKL

SEQ ID NO: 100780 - protein, 8 aa, Homo Sapiens
AERAIEKM

SEQ ID NO: 100781 - protein, 8 aa, Homo Sapiens
AERIKPVL

SEQ ID NO: 100782 - protein, 8 aa, Homo Sapiens
AETEARTL

SEQ ID NO: 100783 - protein, 8 aa, Homo Sapiens
AETKGVAL

SEQ ID NO: 100784 - protein, 8 aa, Homo Sapiens
AETKNVAL

SEQ ID NO: 100785 - protein, 8 aa, Homo Sapiens
AETPVYRF

SEQ ID NO: 100786 - protein, 8 aa, Homo Sapiens
AEVFIVKM

SEQ ID NO: 100787 - protein, 8 aa, Homo Sapiens
AEVIVRQL

SEQ ID NO: 100788 - protein, 8 aa, Homo Sapiens
AEVSQPRL

SEQ ID NO: 100789 - protein, 8 aa, Homo Sapiens
AEVTKVVV

SEQ ID NO: 100790 - protein, 8 aa, Homo Sapiens
AEWKATKL

SEQ ID NO: 100791 - protein, 8 aa, Homo Sapiens
AEYMPIKL

SEQ ID NO: 100792 - protein, 8 aa, Homo Sapiens
AEYPAVKF

SEQ ID NO: 100793 - protein, 8 aa, Homo Sapiens
AEYSAFKL

SEQ ID NO: 100794 - protein, 8 aa, Homo Sapiens
CRPLSKTV

SEQ ID NO: 100795 - protein, 8 aa, Homo Sapiens
DRQQQITV

SEQ ID NO: 100796 - protein, 8 aa, Homo Sapiens
EAHAKVRL

SEQ ID NO: 100797 - protein, 8 aa, Homo Sapiens
EAKKIERL

SEQ ID NO: 100798 - protein, 8 aa, Homo Sapiens
EATLLQKL

SEQ ID NO: 100799 - protein, 8 aa, Homo Sapiens
EEHEVAVL

SEQ ID NO: 100800 - protein, 8 aa, Homo Sapiens
EEQLQQIR

SEQ ID NO: 100801 - protein, 8 aa, Homo Sapiens
ESKNEEIL

SEQ ID NO: 100802 - protein, 8 aa, Homo Sapiens
ETAVLPKL

SEQ ID NO: 100803 - protein, 8 aa, Homo Sapiens
FEHKEEVL

SEQ ID NO: 100804 - protein, 8 aa, Homo Sapiens
FEKEQQQL

SEQ ID NO: 100805 - protein, 8 aa, Homo Sapiens
FETAVKKL

SEQ ID NO: 100806 - protein, 8 aa, Homo Sapiens
FETKVTTL

SEQ ID NO: 100807 - protein, 8 aa, Homo Sapiens
GEAKIEDL

SEQ ID NO: 100808 - protein, 8 aa, Homo Sapiens
GEAKVEQL

SEQ ID NO: 100809 - protein, 8 aa, Homo Sapiens
GEAPSKTL

SEQ ID NO: 100810 - protein, 8 aa, Homo Sapiens
GEEVVRVL

SEQ ID NO: 100811 - protein, 8 aa, Homo Sapiens
GEFKVHRV

SEQ ID NO: 100812 - protein, 8 aa, Homo Sapiens
GEFRTTTV

SEQ ID NO: 100813 - protein, 8 aa, Homo Sapiens
GEGKLFSL

SEQ ID NO: 100814 - protein, 8 aa, Homo Sapiens
GEGRPPVL

SEQ ID NO: 100815 - protein, 8 aa, Homo Sapiens
GEGRVEVL

SEQ ID NO: 100816 - protein, 8 aa, Homo Sapiens
GEHPGLSI

SEQ ID NO: 100817 - protein, 8 aa, Homo Sapiens
GEIDGNKV

SEQ ID NO: 100818 - protein, 8 aa, Homo Sapiens
GEIDLAKL

SEQ ID NO: 100819 - protein, 8 aa, Homo Sapiens
GEIKIHKM

SEQ ID NO: 100820 - protein, 8 aa, Homo Sapiens
GEIKSHDL

SEQ ID NO: 100821 - protein, 8 aa, Homo Sapiens
GEIPTYGL

SEQ ID NO: 100822 - protein, 8 aa, Homo Sapiens
GEIPVVAI

SEQ ID NO: 100823 - protein, 8 aa, Homo Sapiens
GEIRATAF

SEQ ID NO: 100824 - protein, 8 aa, Homo Sapiens
GELAKHAV

SEQ ID NO: 100825 - protein, 8 aa, Homo Sapiens
GELKITSV

SEQ ID NO: 100826 - protein, 8 aa, Homo Sapiens
GELKTVRL

SEQ ID NO: 100827 - protein, 8 aa, Homo Sapiens
GELKVYKT

SEQ ID NO: 100828 - protein, 8 aa, Homo Sapiens
GELRAMVL

SEQ ID NO: 100829 - protein, 8 aa, Homo Sapiens
GEMIIDRV

SEQ ID NO: 100830 - protein, 8 aa, Homo Sapiens
GERKVEHL

SEQ ID NO: 100831 - protein, 8 aa, Homo Sapiens
GETPQVAV

SEQ ID NO: 100832 - protein, 8 aa, Homo Sapiens
GETTILQL

SEQ ID NO: 100833 - protein, 8 aa, Homo Sapiens
GETTSHLM

SEQ ID NO: 100834 - protein, 8 aa, Homo Sapiens
GEVGGNTL

SEQ ID NO: 100835 - protein, 8 aa, Homo Sapiens
GEVHIKTM

SEQ ID NO: 100836 - protein, 8 aa, Homo Sapiens
GEVLISRV

SEQ ID NO: 100837 - protein, 8 aa, Homo Sapiens
GEVPVHKL

SEQ ID NO: 100838 - protein, 8 aa, Homo Sapiens
GEVRIWDL

SEQ ID NO: 100839 - protein, 8 aa, Homo Sapiens
GEVRIWNL

SEQ ID NO: 100840 - protein, 8 aa, Homo Sapiens
GEWEPPVI

SEQ ID NO: 100841 - protein, 8 aa, Homo Sapiens
GEYPLTAM

SEQ ID NO: 100842 - protein, 8 aa, Homo Sapiens
HDAEIVRL

SEQ ID NO: 100843 - protein, 8 aa, Homo Sapiens
HDFQAPYL

SEQ ID NO: 100844 - protein, 8 aa, Homo Sapiens
HDFVVVET

SEQ ID NO: 100845 - protein, 8 aa, Homo Sapiens
HDIGIVTM

SEQ ID NO: 100846 - protein, 8 aa, Homo Sapiens
HDILIRKF

SEQ ID NO: 100847 - protein, 8 aa, Homo Sapiens
HDIQIVST

SEQ ID NO: 100848 - protein, 8 aa, Homo Sapiens
HDKIVIVL

SEQ ID NO: 100849 - protein, 8 aa, Homo Sapiens
HDLLVHKA

SEQ ID NO: 100850 - protein, 8 aa, Homo Sapiens
HEAQIQEM

SEQ ID NO: 100851 - protein, 8 aa, Homo Sapiens
HEFHSPAL

SEQ ID NO: 100852 - protein, 8 aa, Homo Sapiens
HEFLQTEI

SEQ ID NO: 100853 - protein, 8 aa, Homo Sapiens
HEGPVWQV

SEQ ID NO: 100854 - protein, 8 aa, Homo Sapiens
HEHFVTSL

SEQ ID NO: 100855 - protein, 8 aa, Homo Sapiens
HEHQANLL

SEQ ID NO: 100856 - protein, 8 aa, Homo Sapiens
HEIAVLEL

SEQ ID NO: 100857 - protein, 8 aa, Homo Sapiens
HEIEVETI

SEQ ID NO: 100858 - protein, 8 aa, Homo Sapiens
HELRIARL

SEQ ID NO: 100859 - protein, 8 aa, Homo Sapiens
HELVIKTL

SEQ ID NO: 100860 - protein, 8 aa, Homo Sapiens
HEQVVERL

SEQ ID NO: 100861 - protein, 8 aa, Homo Sapiens
HERPEFIA

SEQ ID NO: 100862 - protein, 8 aa, Homo Sapiens
HESPAVKL

SEQ ID NO: 100863 - protein, 8 aa, Homo Sapiens
HETQPPSV

SEQ ID NO: 100864 - protein, 8 aa, Homo Sapiens
HETVTIEL

SEQ ID NO: 100865 - protein, 8 aa, Homo Sapiens
HEVFLQRL

SEQ ID NO: 100866 - protein, 8 aa, Homo Sapiens
HEVIVSAA

SEQ ID NO: 100867 - protein, 8 aa, Homo Sapiens
HEVKKVTL

SEQ ID NO: 100868 - protein, 8 aa, Homo Sapiens
IDITGPKV

SEQ ID NO: 100869 - protein, 8 aa, Homo Sapiens
IDKYTEVL

SEQ ID NO: 100870 - protein, 8 aa, Homo Sapiens
IDVSGPKV

SEQ ID NO: 100871 - protein, 8 aa, Homo Sapiens
IDYTGQQL

SEQ ID NO: 100872 - protein, 8 aa, Homo Sapiens
IEFVADRL

SEQ ID NO: 100873 - protein, 8 aa, Homo Sapiens
IEVETRSL

SEQ ID NO: 100874 - protein, 8 aa, Homo Sapiens
IEVGVVTV

SEQ ID NO: 100875 - protein, 8 aa, Homo Sapiens
KDFIIFEA

SEQ ID NO: 100876 - protein, 8 aa, Homo Sapiens
KDFRVQEL

SEQ ID NO: 100877 - protein, 8 aa, Homo Sapiens
KDFSIHRL

SEQ ID NO: 100878 - protein, 8 aa, Homo Sapiens
KDFSPEAL

SEQ ID NO: 100879 - protein, 8 aa, Homo Sapiens
KDLEIERL

SEQ ID NO: 100880 - protein, 8 aa, Homo Sapiens
KDVEMVRL

SEQ ID NO: 100881 - protein, 8 aa, Homo Sapiens
KDVLSVAF

SEQ ID NO: 100882 - protein, 8 aa, Homo Sapiens
KDVNIPTL

SEQ ID NO: 100883 - protein, 8 aa, Homo Sapiens
KDVNQQEF

SEQ ID NO: 100884 - protein, 8 aa, Homo Sapiens
KDVVIHRF

SEQ ID NO: 100885 - protein, 8 aa, Homo Sapiens
KEEIIKTL

SEQ ID NO: 100886 - protein, 8 aa, Homo Sapiens
KEFALHKL

SEQ ID NO: 100887 - protein, 8 aa, Homo Sapiens
KEFDGKSL

SEQ ID NO: 100888 - protein, 8 aa, Homo Sapiens
KEFEFSQL

SEQ ID NO: 100889 - protein, 8 aa, Homo Sapiens
KEFEGKTL

SEQ ID NO: 100890 - protein, 8 aa, Homo Sapiens
KEFQKIAM

SEQ ID NO: 100891 - protein, 8 aa, Homo Sapiens
KEGKIYRL

SEQ ID NO: 100892 - protein, 8 aa, Homo Sapiens
KEHVIEAL

SEQ ID NO: 100893 - protein, 8 aa, Homo Sapiens
KEIEKVAL

SEQ ID NO: 100894 - protein, 8 aa, Homo Sapiens
KEILIPVF

SEQ ID NO: 100895 - protein, 8 aa, Homo Sapiens
KEILQKEL

SEQ ID NO: 100896 - protein, 8 aa, Homo Sapiens
KEKLQPRL

SEQ ID NO: 100897 - protein, 8 aa, Homo Sapiens
KELEVLLM

SEQ ID NO: 100898 - protein, 8 aa, Homo Sapiens
KELEVPHF

SEQ ID NO: 100899 - protein, 8 aa, Homo Sapiens
KELEVRKL

SEQ ID NO: 100900 - protein, 8 aa, Homo Sapiens
KELGITAL

SEQ ID NO: 100901 - protein, 8 aa, Homo Sapiens
KELLTREL

SEQ ID NO: 100902 - protein, 8 aa, Homo Sapiens
KENPVVVA

SEQ ID NO: 100903 - protein, 8 aa, Homo Sapiens
KERSGVSL

SEQ ID NO: 100904 - protein, 8 aa, Homo Sapiens
KESEVKAL

SEQ ID NO: 100905 - protein, 8 aa, Homo Sapiens
KETIAKCI

SEQ ID NO: 100906 - protein, 8 aa, Homo Sapiens
KETQALVL

SEQ ID NO: 100907 - protein, 8 aa, Homo Sapiens
KEVAVKKL

SEQ ID NO: 100908 - protein, 8 aa, Homo Sapiens
KEVDIYTV

SEQ ID NO: 100909 - protein, 8 aa, Homo Sapiens
KEVEATKL

SEQ ID NO: 100910 - protein, 8 aa, Homo Sapiens
KEVPIHRV

SEQ ID NO: 100911 - protein, 8 aa, Homo Sapiens
KEVPNYKL

SEQ ID NO: 100912 - protein, 8 aa, Homo Sapiens
KEVQTNEL

SEQ ID NO: 100913 - protein, 8 aa, Homo Sapiens
KEWVAKQT

SEQ ID NO: 100914 - protein, 8 aa, Homo Sapiens
KEYAVNEV

SEQ ID NO: 100915 - protein, 8 aa, Homo Sapiens
KQLDEWLK

SEQ ID NO: 100916 - protein, 8 aa, Homo Sapiens
KQQLLQGI

SEQ ID NO: 100917 - protein, 8 aa, Homo Sapiens
LDIIIHSL

SEQ ID NO: 100918 - protein, 8 aa, Homo Sapiens
LDRETEEI

SEQ ID NO: 100919 - protein, 8 aa, Homo Sapiens
LDWPVRTL

SEQ ID NO: 100920 - protein, 8 aa, Homo Sapiens
LEANLAVL

SEQ ID NO: 100921 - protein, 8 aa, Homo Sapiens
LEARLVSL

SEQ ID NO: 100922 - protein, 8 aa, Homo Sapiens
LEQRVVEL

SEQ ID NO: 100923 - protein, 8 aa, Homo Sapiens
LERAIESL

SEQ ID NO: 100924 - protein, 8 aa, Homo Sapiens
LERAVEAL

SEQ ID NO: 100925 - protein, 8 aa, Homo Sapiens
LERKVESL

SEQ ID NO: 100926 - protein, 8 aa, Homo Sapiens
LERSLSKL

SEQ ID NO: 100927 - protein, 8 aa, Homo Sapiens
LESKTNTL

SEQ ID NO: 100928 - protein, 8 aa, Homo Sapiens
LPPAAPGK

SEQ ID NO: 100929 - protein, 8 aa, Homo Sapiens
LRELIRKL

SEQ ID NO: 100930 - protein, 8 aa, Homo Sapiens
MEIDGQKL

SEQ ID NO: 100931 - protein, 8 aa, Homo Sapiens
MEKIQPAL

SEQ ID NO: 100932 - protein, 8 aa, Homo Sapiens
NDIKVWDL

SEQ ID NO: 100933 - protein, 8 aa, Homo Sapiens
NDIVVKVL

SEQ ID NO: 100934 - protein, 8 aa, Homo Sapiens
NDWVAVHV

SEQ ID NO: 100935 - protein, 8 aa, Homo Sapiens
NEFLTREL

SEQ ID NO: 100936 - protein, 8 aa, Homo Sapiens
NEFTTHVM

SEQ ID NO: 100937 - protein, 8 aa, Homo Sapiens
NELITNAL

SEQ ID NO: 100938 - protein, 8 aa, Homo Sapiens
NEQPPVVL

SEQ ID NO: 100939 - protein, 8 aa, Homo Sapiens
NEVKIYSL

SEQ ID NO: 100940 - protein, 8 aa, Homo Sapiens
NEVPVKEL

SEQ ID NO: 100941 - protein, 8 aa, Homo Sapiens
NEYKGWVL

SEQ ID NO: 100942 - protein, 8 aa, Homo Sapiens
PVFNSVEL

SEQ ID NO: 100943 - protein, 8 aa, Homo Sapiens
QDFQIQAF

SEQ ID NO: 100944 - protein, 8 aa, Homo Sapiens
QDISVHKL

SEQ ID NO: 100945 - protein, 8 aa, Homo Sapiens
QEHQQQVL

SEQ ID NO: 100946 - protein, 8 aa, Homo Sapiens
QEIQVVKL

SEQ ID NO: 100947 - protein, 8 aa, Homo Sapiens
QEKPERPL

SEQ ID NO: 100948 - protein, 8 aa, Homo Sapiens
QELPSHGV

SEQ ID NO: 100949 - protein, 8 aa, Homo Sapiens
QELSLEKL

SEQ ID NO: 100950 - protein, 8 aa, Homo Sapiens
QEWEVKAL

SEQ ID NO: 100951 - protein, 8 aa, Homo Sapiens
RDFEGKVV

SEQ ID NO: 100952 - protein, 8 aa, Homo Sapiens
RDFKAYSL

SEQ ID NO: 100953 - protein, 8 aa, Homo Sapiens
RDFKGKVL

SEQ ID NO: 100954 - protein, 8 aa, Homo Sapiens
RDFKVVLL

SEQ ID NO: 100955 - protein, 8 aa, Homo Sapiens
RDFTVSAM

SEQ ID NO: 100956 - protein, 8 aa, Homo Sapiens
RDFVARNV

SEQ ID NO: 100957 - protein, 8 aa, Homo Sapiens
RDFVLVKL

SEQ ID NO: 100958 - protein, 8 aa, Homo Sapiens
RDMVSKKL

SEQ ID NO: 100959 - protein, 8 aa, Homo Sapiens
RDVIMREF

SEQ ID NO: 100960 - protein, 8 aa, Homo Sapiens
RDWFSSQL

SEQ ID NO: 100961 - protein, 8 aa, Homo Sapiens
RDWVLNEF

SEQ ID NO: 100962 - protein, 8 aa, Homo Sapiens
RDYVAPTA

SEQ ID NO: 100963 - protein, 8 aa, Homo Sapiens
REARDPSL

SEQ ID NO: 100964 - protein, 8 aa, Homo Sapiens
REDQKPVM

SEQ ID NO: 100965 - protein, 8 aa, Homo Sapiens
REELSNVL

SEQ ID NO: 100966 - protein, 8 aa, Homo Sapiens
REFKLSKV

SEQ ID NO: 100967 - protein, 8 aa, Homo Sapiens
REFQTSAI

SEQ ID NO: 100968 - protein, 8 aa, Homo Sapiens
REFQTSVV

SEQ ID NO: 100969 - protein, 8 aa, Homo Sapiens
REGNAVAV

SEQ ID NO: 100970 - protein, 8 aa, Homo Sapiens
REHEKEVL

SEQ ID NO: 100971 - protein, 8 aa, Homo Sapiens
REIEGDLL

SEQ ID NO: 100972 - protein, 8 aa, Homo Sapiens
REIEGRAI

SEQ ID NO: 100973 - protein, 8 aa, Homo Sapiens
REIIINAV

SEQ ID NO: 100974 - protein, 8 aa, Homo Sapiens
REKPDDPL

SEQ ID NO: 100975 - protein, 8 aa, Homo Sapiens
REKQAPEL

SEQ ID NO: 100976 - protein, 8 aa, Homo Sapiens
REKVESEL

SEQ ID NO: 100977 - protein, 8 aa, Homo Sapiens
RELDGRTL

SEQ ID NO: 100978 - protein, 8 aa, Homo Sapiens
RELKGAKL

SEQ ID NO: 100979 - protein, 8 aa, Homo Sapiens
RELRIRKL

SEQ ID NO: 100980 - protein, 8 aa, Homo Sapiens
RELVAHHL

SEQ ID NO: 100981 - protein, 8 aa, Homo Sapiens
RENTQTTI

SEQ ID NO: 100982 - protein, 8 aa, Homo Sapiens
REQLKHKL

SEQ ID NO: 100983 - protein, 8 aa, Homo Sapiens
RERAVELL

SEQ ID NO: 100984 - protein, 8 aa, Homo Sapiens
REVEKVKL

SEQ ID NO: 100985 - protein, 8 aa, Homo Sapiens
REVKVAQL

SEQ ID NO: 100986 - protein, 8 aa, Homo Sapiens
REVQTNDL

SEQ ID NO: 100987 - protein, 8 aa, Homo Sapiens
REVSVPTF

SEQ ID NO: 100988 - protein, 8 aa, Homo Sapiens
SDFEARQL

SEQ ID NO: 100989 - protein, 8 aa, Homo Sapiens
SDFPIHNL

SEQ ID NO: 100990 - protein, 8 aa, Homo Sapiens
SDFVVHEI

SEQ ID NO: 100991 - protein, 8 aa, Homo Sapiens
SDIKGSVL

SEQ ID NO: 100992 - protein, 8 aa, Homo Sapiens
SDIQIRRL

SEQ ID NO: 100993 - protein, 8 aa, Homo Sapiens
SDIQVHVT

SEQ ID NO: 100994 - protein, 8 aa, Homo Sapiens
SDIQVKEL

SEQ ID NO: 100995 - protein, 8 aa, Homo Sapiens
SDIVVHRL

SEQ ID NO: 100996 - protein, 8 aa, Homo Sapiens
SDKETYEL

SEQ ID NO: 100997 - protein, 8 aa, Homo Sapiens
SDLHAHKL

SEQ ID NO: 100998 - protein, 8 aa, Homo Sapiens
SDLKAEAL

SEQ ID NO: 100999 - protein, 8 aa, Homo Sapiens
SDLKVIVM

SEQ ID NO: 101000 - protein, 8 aa, Homo Sapiens
SDVKIYKV

SEQ ID NO: 101001 - protein, 8 aa, Homo Sapiens
SDYEIVRL

SEQ ID NO: 101002 - protein, 8 aa, Homo Sapiens
SDYIIRTL

SEQ ID NO: 101003 - protein, 8 aa, Homo Sapiens
SDYTPLSL

SEQ ID NO: 101004 - protein, 8 aa, Homo Sapiens
SEAGSHTI

SEQ ID NO: 101005 - protein, 8 aa, Homo Sapiens
SEARIQQL

SEQ ID NO: 101006 - protein, 8 aa, Homo Sapiens
SEAYLVGL

SEQ ID NO: 101007 - protein, 8 aa, Homo Sapiens
SEFKNITV

SEQ ID NO: 101008 - protein, 8 aa, Homo Sapiens
SEFPIRTL

SEQ ID NO: 101009 - protein, 8 aa, Homo Sapiens
SEFQIPTA

SEQ ID NO: 101010 - protein, 8 aa, Homo Sapiens
SEGKAYSL

SEQ ID NO: 101011 - protein, 8 aa, Homo Sapiens
SEGKCFSV

SEQ ID NO: 101012 - protein, 8 aa, Homo Sapiens
SEHPNVTL

SEQ ID NO: 101013 - protein, 8 aa, Homo Sapiens
SEIESVKI

SEQ ID NO: 101014 - protein, 8 aa, Homo Sapiens
SEIKGEVL

SEQ ID NO: 101015 - protein, 8 aa, Homo Sapiens
SEITTKDL

SEQ ID NO: 101016 - protein, 8 aa, Homo Sapiens
SEIYIHGL

SEQ ID NO: 101017 - protein, 8 aa, Homo Sapiens
SEKVSHVL

SEQ ID NO: 101018 - protein, 8 aa, Homo Sapiens
SELGICAV

SEQ ID NO: 101019 - protein, 8 aa, Homo Sapiens
SELITKAV

SEQ ID NO: 101020 - protein, 8 aa, Homo Sapiens
SELPAKRL

SEQ ID NO: 101021 - protein, 8 aa, Homo Sapiens
SELQVHSA

SEQ ID NO: 101022 - protein, 8 aa, Homo Sapiens
SELTQPKL

SEQ ID NO: 101023 - protein, 8 aa, Homo Sapiens
SELVLTRL

SEQ ID NO: 101024 - protein, 8 aa, Homo Sapiens
SENPAKRL

SEQ ID NO: 101025 - protein, 8 aa, Homo Sapiens
SEQAVWAL

SEQ ID NO: 101026 - protein, 8 aa, Homo Sapiens
SEQPIAAL

SEQ ID NO: 101027 - protein, 8 aa, Homo Sapiens
SESPVKAV

SEQ ID NO: 101028 - protein, 8 aa, Homo Sapiens
SETETPKL

SEQ ID NO: 101029 - protein, 8 aa, Homo Sapiens
SETHIYQV

SEQ ID NO: 101030 - protein, 8 aa, Homo Sapiens
SETKIFTA

SEQ ID NO: 101031 - protein, 8 aa, Homo Sapiens
SETKTRVL

SEQ ID NO: 101032 - protein, 8 aa, Homo Sapiens
SETKVFTA

SEQ ID NO: 101033 - protein, 8 aa, Homo Sapiens
SETLFQRL

SEQ ID NO: 101034 - protein, 8 aa, Homo Sapiens
SETQFSHL

SEQ ID NO: 101035 - protein, 8 aa, Homo Sapiens
SEVELMKV

SEQ ID NO: 101036 - protein, 8 aa, Homo Sapiens
SEWKPGSL

SEQ ID NO: 101037 - protein, 8 aa, Homo Sapiens
SEWTGASL

SEQ ID NO: 101038 - protein, 8 aa, Homo Sapiens
SEYITHEI

SEQ ID NO: 101039 - protein, 8 aa, Homo Sapiens
TDAVGIVL

SEQ ID NO: 101040 - protein, 8 aa, Homo Sapiens
TDFIAHLL

SEQ ID NO: 101041 - protein, 8 aa, Homo Sapiens
TDFISHLF

SEQ ID NO: 101042 - protein, 8 aa, Homo Sapiens
TDFKIPIL

SEQ ID NO: 101043 - protein, 8 aa, Homo Sapiens
TEELAYLK

SEQ ID NO: 101044 - protein, 8 aa, Homo Sapiens
TEFPGVVV

SEQ ID NO: 101045 - protein, 8 aa, Homo Sapiens
TEIFIHSL

SEQ ID NO: 101046 - protein, 8 aa, Homo Sapiens
TEIKKTEV

SEQ ID NO: 101047 - protein, 8 aa, Homo Sapiens
TEILLRKL

SEQ ID NO: 101048 - protein, 8 aa, Homo Sapiens
TEIRMARM

SEQ ID NO: 101049 - protein, 8 aa, Homo Sapiens
TESPVRTL

SEQ ID NO: 101050 - protein, 8 aa, Homo Sapiens
TETIAPKI

SEQ ID NO: 101051 - protein, 8 aa, Homo Sapiens
TETVVCAL

SEQ ID NO: 101052 - protein, 8 aa, Homo Sapiens
TEVFLHVV

SEQ ID NO: 101053 - protein, 8 aa, Homo Sapiens
TEVKSVEM

SEQ ID NO: 101054 - protein, 8 aa, Homo Sapiens
TEYPVEKL

SEQ ID NO: 101055 - protein, 8 aa, Homo Sapiens
TEYPVKIV

SEQ ID NO: 101056 - protein, 8 aa, Homo Sapiens
VDAKAQKL

SEQ ID NO: 101057 - protein, 8 aa, Homo Sapiens
VDIKGPKV

SEQ ID NO: 101058 - protein, 8 aa, Homo Sapiens
VDVEQHTL

SEQ ID NO: 101059 - protein, 8 aa, Homo Sapiens
VDVSGPKL

SEQ ID NO: 101060 - protein, 8 aa, Homo Sapiens
VDWLTEKM

SEQ ID NO: 101061 - protein, 8 aa, Homo Sapiens
VEAEVHRL

SEQ ID NO: 101062 - protein, 8 aa, Homo Sapiens
VEAPMPKL

SEQ ID NO: 101063 - protein, 8 aa, Homo Sapiens
VECQSHRL

SEQ ID NO: 101064 - protein, 8 aa, Homo Sapiens
VEFPVRNL

SEQ ID NO: 101065 - protein, 8 aa, Homo Sapiens
VEIAKQSV

SEQ ID NO: 101066 - protein, 8 aa, Homo Sapiens
VEIILHVV

SEQ ID NO: 101067 - protein, 8 aa, Homo Sapiens
VEKKVPLL

SEQ ID NO: 101068 - protein, 8 aa, Homo Sapiens
VEQPAQEL

SEQ ID NO: 101069 - protein, 8 aa, Homo Sapiens
VERVIQQL

SEQ ID NO: 101070 - protein, 8 aa, Homo Sapiens
VETAITCL

SEQ ID NO: 101071 - protein, 8 aa, Homo Sapiens
VETAITKV

SEQ ID NO: 101072 - protein, 8 aa, Homo Sapiens
VETPVQKL

SEQ ID NO: 101073 - protein, 8 aa, Homo Sapiens
YDPTAPTL

SEQ ID NO: 101074 - protein, 8 aa, Homo Sapiens
YDVRTILL

SEQ ID NO: 101075 - protein, 8 aa, Homo Sapiens
YEAVREVL

SEQ ID NO: 101076 - protein, 8 aa, Homo Sapiens
YEDIAQKS

SEQ ID NO: 101077 - protein, 8 aa, Homo Sapiens
YEEIVKEV

SEQ ID NO: 101078 - protein, 8 aa, Homo Sapiens
YEEQHPEL

SEQ ID NO: 101079 - protein, 8 aa, Homo Sapiens
YEEVARKL

SEQ ID NO: 101080 - protein, 8 aa, Homo Sapiens
YETKPPKL

SEQ ID NO: 101081 - protein, 8 aa, Homo Sapiens
YEVHHQKL

SEQ ID NO: 101082 - protein, 8 aa, Homo Sapiens
YEVKSENL

SEQ ID NO: 101083 - protein, 9 aa, Homo Sapiens
AAPAYSRAL

SEQ ID NO: 101084 - protein, 9 aa, Homo Sapiens
AAWLQVLPV

SEQ ID NO: 101085 - protein, 9 aa, Homo Sapiens
ADFAGVERL

SEQ ID NO: 101086 - protein, 9 aa, Homo Sapiens
ADFAKVLEL

SEQ ID NO: 101087 - protein, 9 aa, Homo Sapiens
ADFAVQPAV

SEQ ID NO: 101088 - protein, 9 aa, Homo Sapiens
ADFEAHNIL

SEQ ID NO: 101089 - protein, 9 aa, Homo Sapiens
ADFEIGHFL

SEQ ID NO: 101090 - protein, 9 aa, Homo Sapiens
ADFGLARAF

SEQ ID NO: 101091 - protein, 9 aa, Homo Sapiens
ADFKAGKAL

SEQ ID NO: 101092 - protein, 9 aa, Homo Sapiens
ADFREPVAV

SEQ ID NO: 101093 - protein, 9 aa, Homo Sapiens
ADILVQPTL

SEQ ID NO: 101094 - protein, 9 aa, Homo Sapiens
ADRMVGQVL

SEQ ID NO: 101095 - protein, 9 aa, Homo Sapiens
ADVIAKVAF

SEQ ID NO: 101096 - protein, 9 aa, Homo Sapiens
ADVINPMAL

SEQ ID NO: 101097 - protein, 9 aa, Homo Sapiens
ADVVLQPRL

SEQ ID NO: 101098 - protein, 9 aa, Homo Sapiens
AEAAALEVL

SEQ ID NO: 101099 - protein, 9 aa, Homo Sapiens
AEADKPRRL

SEQ ID NO: 101100 - protein, 9 aa, Homo Sapiens
AEADKTIKV

SEQ ID NO: 101101 - protein, 9 aa, Homo Sapiens
AEAEKIRKI

SEQ ID NO: 101102 - protein, 9 aa, Homo Sapiens
AEAEKKVQL

SEQ ID NO: 101103 - protein, 9 aa, Homo Sapiens
AEAFSPPRL

SEQ ID NO: 101104 - protein, 9 aa, Homo Sapiens
AEAFVRAFL

SEQ ID NO: 101105 - protein, 9 aa, Homo Sapiens
AEAGGMHTV

SEQ ID NO: 101106 - protein, 9 aa, Homo Sapiens
AEAGPLASV

SEQ ID NO: 101107 - protein, 9 aa, Homo Sapiens
AEAHAKVRL

SEQ ID NO: 101108 - protein, 9 aa, Homo Sapiens
AEAHARIHL

SEQ ID NO: 101109 - protein, 9 aa, Homo Sapiens
AEAHRIQQI

SEQ ID NO: 101110 - protein, 9 aa, Homo Sapiens
AEAIRILAA

SEQ ID NO: 101111 - protein, 9 aa, Homo Sapiens
AEAKEKIYL

SEQ ID NO: 101112 - protein, 9 aa, Homo Sapiens
AEAKKIERL

SEQ ID NO: 101113 - protein, 9 aa, Homo Sapiens
AEALATHIL

SEQ ID NO: 101114 - protein, 9 aa, Homo Sapiens
AEALIKHKP

SEQ ID NO: 101115 - protein, 9 aa, Homo Sapiens
AEALKEVSL

SEQ ID NO: 101116 - protein, 9 aa, Homo Sapiens
AEALKKLIL

SEQ ID NO: 101117 - protein, 9 aa, Homo Sapiens
AEALPKQSV

SEQ ID NO: 101118 - protein, 9 aa, Homo Sapiens
AEALRQPVL

SEQ ID NO: 101119 - protein, 9 aa, Homo Sapiens
AEALVSKGL

SEQ ID NO: 101120 - protein, 9 aa, Homo Sapiens
AEANHFIDL

SEQ ID NO: 101121 - protein, 9 aa, Homo Sapiens
AEAPAGPAL

SEQ ID NO: 101122 - protein, 9 aa, Homo Sapiens
AEAPGLVDV

SEQ ID NO: 101123 - protein, 9 aa, Homo Sapiens
AEAPHLVQV

SEQ ID NO: 101124 - protein, 9 aa, Homo Sapiens
AEAPPPSVV

SEQ ID NO: 101125 - protein, 9 aa, Homo Sapiens
AEAPSQVRL

SEQ ID NO: 101126 - protein, 9 aa, Homo Sapiens
AEAQGSTTL

SEQ ID NO: 101127 - protein, 9 aa, Homo Sapiens
AEAQQLITI

SEQ ID NO: 101128 - protein, 9 aa, Homo Sapiens
AEARHNPSI

SEQ ID NO: 101129 - protein, 9 aa, Homo Sapiens
AEARINAQL

SEQ ID NO: 101130 - protein, 9 aa, Homo Sapiens
AEARKIWCF

SEQ ID NO: 101131 - protein, 9 aa, Homo Sapiens
AEARKSPAL

SEQ ID NO: 101132 - protein, 9 aa, Homo Sapiens
AEASMISKL

SEQ ID NO: 101133 - protein, 9 aa, Homo Sapiens
AEASVDPSL

SEQ ID NO: 101134 - protein, 9 aa, Homo Sapiens
AEASVMTQL

SEQ ID NO: 101135 - protein, 9 aa, Homo Sapiens
AEAVFASEV

SEQ ID NO: 101136 - protein, 9 aa, Homo Sapiens
AEAVLYEHL

SEQ ID NO: 101137 - protein, 9 aa, Homo Sapiens
AECGAFRTG

SEQ ID NO: 101138 - protein, 9 aa, Homo Sapiens
AECGKVFRL

SEQ ID NO: 101139 - protein, 9 aa, Homo Sapiens
AECRVLQKL

SEQ ID NO: 101140 - protein, 9 aa, Homo Sapiens
AEDENKNVL

SEQ ID NO: 101141 - protein, 9 aa, Homo Sapiens
AEDGPRVVF

SEQ ID NO: 101142 - protein, 9 aa, Homo Sapiens
AEDKDTPAL

SEQ ID NO: 101143 - protein, 9 aa, Homo Sapiens
AEDKPRAQL

SEQ ID NO: 101144 - protein, 9 aa, Homo Sapiens
AEDPLVQSL

SEQ ID NO: 101145 - protein, 9 aa, Homo Sapiens
AEDTAHPKL

SEQ ID NO: 101146 - protein, 9 aa, Homo Sapiens
AEDTPVVQL

SEQ ID NO: 101147 - protein, 9 aa, Homo Sapiens
AEDVQHQIL

SEQ ID NO: 101148 - protein, 9 aa, Homo Sapiens
AEEAPKTPL

SEQ ID NO: 101149 - protein, 9 aa, Homo Sapiens
AEEFKVPAA

SEQ ID NO: 101150 - protein, 9 aa, Homo Sapiens
AEEKLPMTL

SEQ ID NO: 101151 - protein, 9 aa, Homo Sapiens
AEEKMPLSL

SEQ ID NO: 101152 - protein, 9 aa, Homo Sapiens
AEEKPAPQM

SEQ ID NO: 101153 - protein, 9 aa, Homo Sapiens
AEEKSIPTL

SEQ ID NO: 101154 - protein, 9 aa, Homo Sapiens
AEELLRIGL

SEQ ID NO: 101155 - protein, 9 aa, Homo Sapiens
AEEPKARVL

SEQ ID NO: 101156 - protein, 9 aa, Homo Sapiens
AEEPPTPAL

SEQ ID NO: 101157 - protein, 9 aa, Homo Sapiens
AEERPRIAL

SEQ ID NO: 101158 - protein, 9 aa, Homo Sapiens
AEERPRVAL

SEQ ID NO: 101159 - protein, 9 aa, Homo Sapiens
AEERRKYTL

SEQ ID NO: 101160 - protein, 9 aa, Homo Sapiens
AEFAERSVA

SEQ ID NO: 101161 - protein, 9 aa, Homo Sapiens
AEFAERTVA

SEQ ID NO: 101162 - protein, 9 aa, Homo Sapiens
AEFEDLDSL

SEQ ID NO: 101163 - protein, 9 aa, Homo Sapiens
AEFEEPRVI

SEQ ID NO: 101164 - protein, 9 aa, Homo Sapiens
AEFEKIQKL

SEQ ID NO: 101165 - protein, 9 aa, Homo Sapiens
AEFELPKTM

SEQ ID NO: 101166 - protein, 9 aa, Homo Sapiens
AEFEQGHQF

SEQ ID NO: 101167 - protein, 9 aa, Homo Sapiens
AEFEVVRTI

SEQ ID NO: 101168 - protein, 9 aa, Homo Sapiens
AEFEWENKV

SEQ ID NO: 101169 - protein, 9 aa, Homo Sapiens
AEFHQIEGV

SEQ ID NO: 101170 - protein, 9 aa, Homo Sapiens
AEFIKFTVI

SEQ ID NO: 101171 - protein, 9 aa, Homo Sapiens
AEFIVAKAI

SEQ ID NO: 101172 - protein, 9 aa, Homo Sapiens
AEFKEAFQL

SEQ ID NO: 101173 - protein, 9 aa, Homo Sapiens
AEFKEAFSL

SEQ ID NO: 101174 - protein, 9 aa, Homo Sapiens
AEFKLIPGL

SEQ ID NO: 101175 - protein, 9 aa, Homo Sapiens
AEFKRAVKV

SEQ ID NO: 101176 - protein, 9 aa, Homo Sapiens
AEFKTKYKL

SEQ ID NO: 101177 - protein, 9 aa, Homo Sapiens
AEFLDKHVT

SEQ ID NO: 101178 - protein, 9 aa, Homo Sapiens
AEFPLDPQL

SEQ ID NO: 101179 - protein, 9 aa, Homo Sapiens
AEFPLEPML

SEQ ID NO: 101180 - protein, 9 aa, Homo Sapiens
AEFQELLKV

SEQ ID NO: 101181 - protein, 9 aa, Homo Sapiens
AEFQRDIML

SEQ ID NO: 101182 - protein, 9 aa, Homo Sapiens
AEFSKTWEF

SEQ ID NO: 101183 - protein, 9 aa, Homo Sapiens
AEFVGVSHL

SEQ ID NO: 101184 - protein, 9 aa, Homo Sapiens
AEFVSTPEL

SEQ ID NO: 101185 - protein, 9 aa, Homo Sapiens
AEGAGLHAL

SEQ ID NO: 101186 - protein, 9 aa, Homo Sapiens
AEGDLIEHF

SEQ ID NO: 101187 - protein, 9 aa, Homo Sapiens
AEGDLVRLL

SEQ ID NO: 101188 - protein, 9 aa, Homo Sapiens
AEGEPRYAL

SEQ ID NO: 101189 - protein, 9 aa, Homo Sapiens
AEGHPAPQI

SEQ ID NO: 101190 - protein, 9 aa, Homo Sapiens
AEGHTKAVL

SEQ ID NO: 101191 - protein, 9 aa, Homo Sapiens
AEGLLQEAL

SEQ ID NO: 101192 - protein, 9 aa, Homo Sapiens
AEGPEVICA

SEQ ID NO: 101193 - protein, 9 aa, Homo Sapiens
AEGPPRLAI

SEQ ID NO: 101194 - protein, 9 aa, Homo Sapiens
AEGPVAVVV

SEQ ID NO: 101195 - protein, 9 aa, Homo Sapiens
AEGPVVEKI

SEQ ID NO: 101196 - protein, 9 aa, Homo Sapiens
AEGPYKIIL

SEQ ID NO: 101197 - protein, 9 aa, Homo Sapiens
AEGREAPAL

SEQ ID NO: 101198 - protein, 9 aa, Homo Sapiens
AEGRIIDVI

SEQ ID NO: 101199 - protein, 9 aa, Homo Sapiens
AEGTVVSNL

SEQ ID NO: 101200 - protein, 9 aa, Homo Sapiens
AEHADTVQL

SEQ ID NO: 101201 - protein, 9 aa, Homo Sapiens
AEHERELAL

SEQ ID NO: 101202 - protein, 9 aa, Homo Sapiens
AEHFLEQQM

SEQ ID NO: 101203 - protein, 9 aa, Homo Sapiens
AEHGETLAM

SEQ ID NO: 101204 - protein, 9 aa, Homo Sapiens
AEHIESRTL

SEQ ID NO: 101205 - protein, 9 aa, Homo Sapiens
AEHLEKSSL

SEQ ID NO: 101206 - protein, 9 aa, Homo Sapiens
AEHLKTLSL

SEQ ID NO: 101207 - protein, 9 aa, Homo Sapiens
AEHNFVAKA

SEQ ID NO: 101208 - protein, 9 aa, Homo Sapiens
AEHRTPDVL

SEQ ID NO: 101209 - protein, 9 aa, Homo Sapiens
AEHSTVITF

SEQ ID NO: 101210 - protein, 9 aa, Homo Sapiens
AEHVVQPKA

SEQ ID NO: 101211 - protein, 9 aa, Homo Sapiens
AEHYTETAL

SEQ ID NO: 101212 - protein, 9 aa, Homo Sapiens
AEIAAKDKL

SEQ ID NO: 101213 - protein, 9 aa, Homo Sapiens
AEIAHNVSS

SEQ ID NO: 101214 - protein, 9 aa, Homo Sapiens
AEIDAHLVA

SEQ ID NO: 101215 - protein, 9 aa, Homo Sapiens
AEIDDRKQL

SEQ ID NO: 101216 - protein, 9 aa, Homo Sapiens
AEIDRRISA

SEQ ID NO: 101217 - protein, 9 aa, Homo Sapiens
AEIDSIHQL

SEQ ID NO: 101218 - protein, 9 aa, Homo Sapiens
AEIEDIRVL

SEQ ID NO: 101219 - protein, 9 aa, Homo Sapiens
AEIEDPPIP

SEQ ID NO: 101220 - protein, 9 aa, Homo Sapiens
AEIEDVKPA

SEQ ID NO: 101221 - protein, 9 aa, Homo Sapiens
AEIEIVKDL

SEQ ID NO: 101222 - protein, 9 aa, Homo Sapiens
AEIGRNYSM

SEQ ID NO: 101223 - protein, 9 aa, Homo Sapiens
AEIIQHDQL

SEQ ID NO: 101224 - protein, 9 aa, Homo Sapiens
AEIKDGERL

SEQ ID NO: 101225 - protein, 9 aa, Homo Sapiens
AEIKTTNEV

SEQ ID NO: 101226 - protein, 9 aa, Homo Sapiens
AEILQESRM

SEQ ID NO: 101227 - protein, 9 aa, Homo Sapiens
AEINDLENL

SEQ ID NO: 101228 - protein, 9 aa, Homo Sapiens
AEINEIIRV

SEQ ID NO: 101229 - protein, 9 aa, Homo Sapiens
AEINNIIKI

SEQ ID NO: 101230 - protein, 9 aa, Homo Sapiens
AEINQKWNL

SEQ ID NO: 101231 - protein, 9 aa, Homo Sapiens
AEIPGVRSV

SEQ ID NO: 101232 - protein, 9 aa, Homo Sapiens
AEIQGVIDA

SEQ ID NO: 101233 - protein, 9 aa, Homo Sapiens
AEIRAINEA

SEQ ID NO: 101234 - protein, 9 aa, Homo Sapiens
AEIRHVLVT

SEQ ID NO: 101235 - protein, 9 aa, Homo Sapiens
AEIRRFSSV

SEQ ID NO: 101236 - protein, 9 aa, Homo Sapiens
AEISKYLTL

SEQ ID NO: 101237 - protein, 9 aa, Homo Sapiens
AEISQPPAL

SEQ ID NO: 101238 - protein, 9 aa, Homo Sapiens
AEITDKLGL

SEQ ID NO: 101239 - protein, 9 aa, Homo Sapiens
AEITKEQRL

SEQ ID NO: 101240 - protein, 9 aa, Homo Sapiens
AEIYGVTHT

SEQ ID NO: 101241 - protein, 9 aa, Homo Sapiens
AEKALFRAL

SEQ ID NO: 101242 - protein, 9 aa, Homo Sapiens
AEKAYHEQL

SEQ ID NO: 101243 - protein, 9 aa, Homo Sapiens
AEKELHEKF

SEQ ID NO: 101244 - protein, 9 aa, Homo Sapiens
AEKELVTII

SEQ ID NO: 101245 - protein, 9 aa, Homo Sapiens
AEKEPINKM

SEQ ID NO: 101246 - protein, 9 aa, Homo Sapiens
AEKGPMIVL

SEQ ID NO: 101247 - protein, 9 aa, Homo Sapiens
AEKGVARVV

SEQ ID NO: 101248 - protein, 9 aa, Homo Sapiens
AEKHYSNTL

SEQ ID NO: 101249 - protein, 9 aa, Homo Sapiens
AEKIPGEST

SEQ ID NO: 101250 - protein, 9 aa, Homo Sapiens
AEKIQTIIL

SEQ ID NO: 101251 - protein, 9 aa, Homo Sapiens
AEKKIEVVM

SEQ ID NO: 101252 - protein, 9 aa, Homo Sapiens
AEKKLRPHL

SEQ ID NO: 101253 - protein, 9 aa, Homo Sapiens
AEKLDEIYV

SEQ ID NO: 101254 - protein, 9 aa, Homo Sapiens
AEKLEALSV

SEQ ID NO: 101255 - protein, 9 aa, Homo Sapiens
AEKLGFAGL

SEQ ID NO: 101256 - protein, 9 aa, Homo Sapiens
AEKLGGSAV

SEQ ID NO: 101257 - protein, 9 aa, Homo Sapiens
AEKLITQTF

SEQ ID NO: 101258 - protein, 9 aa, Homo Sapiens
AEKLKDFKI

SEQ ID NO: 101259 - protein, 9 aa, Homo Sapiens
AEKLQRITV

SEQ ID NO: 101260 - protein, 9 aa, Homo Sapiens
AEKNFELVI

SEQ ID NO: 101261 - protein, 9 aa, Homo Sapiens
AEKPAVPET

SEQ ID NO: 101262 - protein, 9 aa, Homo Sapiens
AEKPKTVQL

SEQ ID NO: 101263 - protein, 9 aa, Homo Sapiens
AEKPVLTAV

SEQ ID NO: 101264 - protein, 9 aa, Homo Sapiens
AEKQLELRL

SEQ ID NO: 101265 - protein, 9 aa, Homo Sapiens
AEKSEQPTL

SEQ ID NO: 101266 - protein, 9 aa, Homo Sapiens
AEKSPQLGL

SEQ ID NO: 101267 - protein, 9 aa, Homo Sapiens
AEKTPYVVV

SEQ ID NO: 101268 - protein, 9 aa, Homo Sapiens
AEKVATRGL

SEQ ID NO: 101269 - protein, 9 aa, Homo Sapiens
AEKVEIATL

SEQ ID NO: 101270 - protein, 9 aa, Homo Sapiens
AEKVHMRAM

SEQ ID NO: 101271 - protein, 9 aa, Homo Sapiens
AEKYAKESL

SEQ ID NO: 101272 - protein, 9 aa, Homo Sapiens
AEKYQTVIA

SEQ ID NO: 101273 - protein, 9 aa, Homo Sapiens
AELATRAIP

SEQ ID NO: 101274 - protein, 9 aa, Homo Sapiens
AELDIPQSV

SEQ ID NO: 101275 - protein, 9 aa, Homo Sapiens
AELDTTNSL

SEQ ID NO: 101276 - protein, 9 aa, Homo Sapiens
AELEDRRQL

SEQ ID NO: 101277 - protein, 9 aa, Homo Sapiens
AELELQKQL

SEQ ID NO: 101278 - protein, 9 aa, Homo Sapiens
AELERNVAL

SEQ ID NO: 101279 - protein, 9 aa, Homo Sapiens
AELERQAVL

SEQ ID NO: 101280 - protein, 9 aa, Homo Sapiens
AELFAVVKT

SEQ ID NO: 101281 - protein, 9 aa, Homo Sapiens
AELGSSTSL

SEQ ID NO: 101282 - protein, 9 aa, Homo Sapiens
AELHQEHDL

SEQ ID NO: 101283 - protein, 9 aa, Homo Sapiens
AELILHDAL

SEQ ID NO: 101284 - protein, 9 aa, Homo Sapiens
AELIMSRCI

SEQ ID NO: 101285 - protein, 9 aa, Homo Sapiens
AELKEKIVL

SEQ ID NO: 101286 - protein, 9 aa, Homo Sapiens
AELKQAQTL

SEQ ID NO: 101287 - protein, 9 aa, Homo Sapiens
AELKQVQTL

SEQ ID NO: 101288 - protein, 9 aa, Homo Sapiens
AELLKKEKI

SEQ ID NO: 101289 - protein, 9 aa, Homo Sapiens
AELLLIPKV

SEQ ID NO: 101290 - protein, 9 aa, Homo Sapiens
AELLQKIEV

SEQ ID NO: 101291 - protein, 9 aa, Homo Sapiens
AELNKIFAL

SEQ ID NO: 101292 - protein, 9 aa, Homo Sapiens
AELPAKILV

SEQ ID NO: 101293 - protein, 9 aa, Homo Sapiens
AELPDQKQL

SEQ ID NO: 101294 - protein, 9 aa, Homo Sapiens
AELPGSSAV

SEQ ID NO: 101295 - protein, 9 aa, Homo Sapiens
AELPLDYKF

SEQ ID NO: 101296 - protein, 9 aa, Homo Sapiens
AELQEVVKV

SEQ ID NO: 101297 - protein, 9 aa, Homo Sapiens
AELQRVQKV

SEQ ID NO: 101298 - protein, 9 aa, Homo Sapiens
AELRLCNKL

SEQ ID NO: 101299 - protein, 9 aa, Homo Sapiens
AELRSTASL

SEQ ID NO: 101300 - protein, 9 aa, Homo Sapiens
AELTGDHQL

SEQ ID NO: 101301 - protein, 9 aa, Homo Sapiens
AELTKVFEI

SEQ ID NO: 101302 - protein, 9 aa, Homo Sapiens
AEMEKATEV

SEQ ID NO: 101303 - protein, 9 aa, Homo Sapiens
AEMGAYVSL

SEQ ID NO: 101304 - protein, 9 aa, Homo Sapiens
AEMLKENKV

SEQ ID NO: 101305 - protein, 9 aa, Homo Sapiens
AEMLKVNKT

SEQ ID NO: 101306 - protein, 9 aa, Homo Sapiens
AEMPDSAAA

SEQ ID NO: 101307 - protein, 9 aa, Homo Sapiens
AEMPEKGAL

SEQ ID NO: 101308 - protein, 9 aa, Homo Sapiens
AEMREKLRL

SEQ ID NO: 101309 - protein, 9 aa, Homo Sapiens
AENAGSYSL

SEQ ID NO: 101310 - protein, 9 aa, Homo Sapiens
AENEYQTAI

SEQ ID NO: 101311 - protein, 9 aa, Homo Sapiens
AENFAEHVL

SEQ ID NO: 101312 - protein, 9 aa, Homo Sapiens
AENGKAPHL

SEQ ID NO: 101313 - protein, 9 aa, Homo Sapiens
AENGKSNFL

SEQ ID NO: 101314 - protein, 9 aa, Homo Sapiens
AENGLTVRL

SEQ ID NO: 101315 - protein, 9 aa, Homo Sapiens
AENKDEIAL

SEQ ID NO: 101316 - protein, 9 aa, Homo Sapiens
AENKSAVEM

SEQ ID NO: 101317 - protein, 9 aa, Homo Sapiens
AENNIQPIF

SEQ ID NO: 101318 - protein, 9 aa, Homo Sapiens
AENPDTPAL

SEQ ID NO: 101319 - protein, 9 aa, Homo Sapiens
AENPFLTHL

SEQ ID NO: 101320 - protein, 9 aa, Homo Sapiens
AENPGKYNI

SEQ ID NO: 101321 - protein, 9 aa, Homo Sapiens
AENQRITAV

SEQ ID NO: 101322 - protein, 9 aa, Homo Sapiens
AENRRLHEL

SEQ ID NO: 101323 - protein, 9 aa, Homo Sapiens
AENVAVPEA

SEQ ID NO: 101324 - protein, 9 aa, Homo Sapiens
AEPAPVQSL

SEQ ID NO: 101325 - protein, 9 aa, Homo Sapiens
AEPDIIEQL

SEQ ID NO: 101326 - protein, 9 aa, Homo Sapiens
AEPEALQSL

SEQ ID NO: 101327 - protein, 9 aa, Homo Sapiens
AEPEKAPAL

SEQ ID NO: 101328 - protein, 9 aa, Homo Sapiens
AEPGPRPAL

SEQ ID NO: 101329 - protein, 9 aa, Homo Sapiens
AEPILPYAL

SEQ ID NO: 101330 - protein, 9 aa, Homo Sapiens
AEPKLAFVI

SEQ ID NO: 101331 - protein, 9 aa, Homo Sapiens
AEPKSIPAL

SEQ ID NO: 101332 - protein, 9 aa, Homo Sapiens
AEPPPIKSA

SEQ ID NO: 101333 - protein, 9 aa, Homo Sapiens
AEPTVTNIL

SEQ ID NO: 101334 - protein, 9 aa, Homo Sapiens
AEQASILSL

SEQ ID NO: 101335 - protein, 9 aa, Homo Sapiens
AEQDLIREL

SEQ ID NO: 101336 - protein, 9 aa, Homo Sapiens
AEQDLVQTL

SEQ ID NO: 101337 - protein, 9 aa, Homo Sapiens
AEQEKTLAL

SEQ ID NO: 101338 - protein, 9 aa, Homo Sapiens
AEQFKKTSL

SEQ ID NO: 101339 - protein, 9 aa, Homo Sapiens
AEQHKRVLL

SEQ ID NO: 101340 - protein, 9 aa, Homo Sapiens
AEQHVTQLM

SEQ ID NO: 101341 - protein, 9 aa, Homo Sapiens
AEQIGCVEL

SEQ ID NO: 101342 - protein, 9 aa, Homo Sapiens
AEQKLQQTL

SEQ ID NO: 101343 - protein, 9 aa, Homo Sapiens
AEQKVEYTL

SEQ ID NO: 101344 - protein, 9 aa, Homo Sapiens
AEQKVIAKL

SEQ ID NO: 101345 - protein, 9 aa, Homo Sapiens
AEQMRKIAL

SEQ ID NO: 101346 - protein, 9 aa, Homo Sapiens
AEQPTPQAL

SEQ ID NO: 101347 - protein, 9 aa, Homo Sapiens
AEQRVPLSV

SEQ ID NO: 101348 - protein, 9 aa, Homo Sapiens
AEQVYISSL

SEQ ID NO: 101349 - protein, 9 aa, Homo Sapiens
AEREEKRVL

SEQ ID NO: 101350 - protein, 9 aa, Homo Sapiens
AERENFHRL

SEQ ID NO: 101351 - protein, 9 aa, Homo Sapiens
AEREQALRL

SEQ ID NO: 101352 - protein, 9 aa, Homo Sapiens
AERFHFEAL

SEQ ID NO: 101353 - protein, 9 aa, Homo Sapiens
AERIGVDHV

SEQ ID NO: 101354 - protein, 9 aa, Homo Sapiens
AERLGLRSL

SEQ ID NO: 101355 - protein, 9 aa, Homo Sapiens
AERLGVTRL

SEQ ID NO: 101356 - protein, 9 aa, Homo Sapiens
AERPERQQL

SEQ ID NO: 101357 - protein, 9 aa, Homo Sapiens
AERPGEAAV

SEQ ID NO: 101358 - protein, 9 aa, Homo Sapiens
AERPQEWAM

SEQ ID NO: 101359 - protein, 9 aa, Homo Sapiens
AERPTVARI

SEQ ID NO: 101360 - protein, 9 aa, Homo Sapiens
AERQRQIQL

SEQ ID NO: 101361 - protein, 9 aa, Homo Sapiens
AERSIHDAL

SEQ ID NO: 101362 - protein, 9 aa, Homo Sapiens
AERVDDPEL

SEQ ID NO: 101363 - protein, 9 aa, Homo Sapiens
AERVGLHKV

SEQ ID NO: 101364 - protein, 9 aa, Homo Sapiens
AERVKQENL

SEQ ID NO: 101365 - protein, 9 aa, Homo Sapiens
AERVPAILM

SEQ ID NO: 101366 - protein, 9 aa, Homo Sapiens
AERYGINTT

SEQ ID NO: 101367 - protein, 9 aa, Homo Sapiens
AERYKLERL

SEQ ID NO: 101368 - protein, 9 aa, Homo Sapiens
AESAPAWRL

SEQ ID NO: 101369 - protein, 9 aa, Homo Sapiens
AESDKPVVI

SEQ ID NO: 101370 - protein, 9 aa, Homo Sapiens
AESGAKEEL

SEQ ID NO: 101371 - protein, 9 aa, Homo Sapiens
AESGRGQVM

SEQ ID NO: 101372 - protein, 9 aa, Homo Sapiens
AESHIILVL

SEQ ID NO: 101373 - protein, 9 aa, Homo Sapiens
AESISLLEL

SEQ ID NO: 101374 - protein, 9 aa, Homo Sapiens
AESLIAKKI

SEQ ID NO: 101375 - protein, 9 aa, Homo Sapiens
AESLPPPTL

SEQ ID NO: 101376 - protein, 9 aa, Homo Sapiens
AESPAGHSF

SEQ ID NO: 101377 - protein, 9 aa, Homo Sapiens
AESPSRDVV

SEQ ID NO: 101378 - protein, 9 aa, Homo Sapiens
AESPTPQAL

SEQ ID NO: 101379 - protein, 9 aa, Homo Sapiens
AESTSSRML

SEQ ID NO: 101380 - protein, 9 aa, Homo Sapiens
AESVVPARM

SEQ ID NO: 101381 - protein, 9 aa, Homo Sapiens
AETARLTSF

SEQ ID NO: 101382 - protein, 9 aa, Homo Sapiens
AETDHLFDL

SEQ ID NO: 101383 - protein, 9 aa, Homo Sapiens
AETDRLREI

SEQ ID NO: 101384 - protein, 9 aa, Homo Sapiens
AETEALSKL

SEQ ID NO: 101385 - protein, 9 aa, Homo Sapiens
AETEPIVKM

SEQ ID NO: 101386 - protein, 9 aa, Homo Sapiens
AETEQHIKV

SEQ ID NO: 101387 - protein, 9 aa, Homo Sapiens
AETFHTPSL

SEQ ID NO: 101388 - protein, 9 aa, Homo Sapiens
AETGCKIMV

SEQ ID NO: 101389 - protein, 9 aa, Homo Sapiens
AETGKVVII

SEQ ID NO: 101390 - protein, 9 aa, Homo Sapiens
AETGQVQKI

SEQ ID NO: 101391 - protein, 9 aa, Homo Sapiens
AETGSGKTL

SEQ ID NO: 101392 - protein, 9 aa, Homo Sapiens
AETGVGKTV

SEQ ID NO: 101393 - protein, 9 aa, Homo Sapiens
AETHIVLLF

SEQ ID NO: 101394 - protein, 9 aa, Homo Sapiens
AETHYQLGL

SEQ ID NO: 101395 - protein, 9 aa, Homo Sapiens
AETIIKDCL

SEQ ID NO: 101396 - protein, 9 aa, Homo Sapiens
AETLKKEKL

SEQ ID NO: 101397 - protein, 9 aa, Homo Sapiens
AETPARPGL

SEQ ID NO: 101398 - protein, 9 aa, Homo Sapiens
AETPDIKLF

SEQ ID NO: 101399 - protein, 9 aa, Homo Sapiens
AETPEGHAV

SEQ ID NO: 101400 - protein, 9 aa, Homo Sapiens
AETQQPPAA

SEQ ID NO: 101401 - protein, 9 aa, Homo Sapiens
AETRESTQL

SEQ ID NO: 101402 - protein, 9 aa, Homo Sapiens
AETVNLRSL

SEQ ID NO: 101403 - protein, 9 aa, Homo Sapiens
AETVRPEEV

SEQ ID NO: 101404 - protein, 9 aa, Homo Sapiens
AEVADEKML

SEQ ID NO: 101405 - protein, 9 aa, Homo Sapiens
AEVAGQFVI

SEQ ID NO: 101406 - protein, 9 aa, Homo Sapiens
AEVAKLLDL

SEQ ID NO: 101407 - protein, 9 aa, Homo Sapiens
AEVAPVKDM

SEQ ID NO: 101408 - protein, 9 aa, Homo Sapiens
AEVDKLELM

SEQ ID NO: 101409 - protein, 9 aa, Homo Sapiens
AEVDKVARL

SEQ ID NO: 101410 - protein, 9 aa, Homo Sapiens
AEVDYLEQF

SEQ ID NO: 101411 - protein, 9 aa, Homo Sapiens
AEVEGRLPA

SEQ ID NO: 101412 - protein, 9 aa, Homo Sapiens
AEVEHVVNA

SEQ ID NO: 101413 - protein, 9 aa, Homo Sapiens
AEVEKIIAV

SEQ ID NO: 101414 - protein, 9 aa, Homo Sapiens
AEVEPGVHL

SEQ ID NO: 101415 - protein, 9 aa, Homo Sapiens
AEVFPLKVF

SEQ ID NO: 101416 - protein, 9 aa, Homo Sapiens
AEVGRVLQV

SEQ ID NO: 101417 - protein, 9 aa, Homo Sapiens
AEVGVPVSV

SEQ ID NO: 101418 - protein, 9 aa, Homo Sapiens
AEVHRLVVV

SEQ ID NO: 101419 - protein, 9 aa, Homo Sapiens
AEVHSEEAL

SEQ ID NO: 101420 - protein, 9 aa, Homo Sapiens
AEVKERVTL

SEQ ID NO: 101421 - protein, 9 aa, Homo Sapiens
AEVKGVYQF

SEQ ID NO: 101422 - protein, 9 aa, Homo Sapiens
AEVKPILQA

SEQ ID NO: 101423 - protein, 9 aa, Homo Sapiens
AEVKSRTTL

SEQ ID NO: 101424 - protein, 9 aa, Homo Sapiens
AEVLNKHSL

SEQ ID NO: 101425 - protein, 9 aa, Homo Sapiens
AEVLRTMEL

SEQ ID NO: 101426 - protein, 9 aa, Homo Sapiens
AEVPDVTAT

SEQ ID NO: 101427 - protein, 9 aa, Homo Sapiens
AEVPGAGAV

SEQ ID NO: 101428 - protein, 9 aa, Homo Sapiens
AEVPHSTGV

SEQ ID NO: 101429 - protein, 9 aa, Homo Sapiens
AEVPVPSSL

SEQ ID NO: 101430 - protein, 9 aa, Homo Sapiens
AEVRKIIRV

SEQ ID NO: 101431 - protein, 9 aa, Homo Sapiens
AEVRVCTVL

SEQ ID NO: 101432 - protein, 9 aa, Homo Sapiens
AEVSPMYGV

SEQ ID NO: 101433 - protein, 9 aa, Homo Sapiens
AEVTPLLNL

SEQ ID NO: 101434 - protein, 9 aa, Homo Sapiens
AEVTTKSQI

SEQ ID NO: 101435 - protein, 9 aa, Homo Sapiens
AEVVKAPQV

SEQ ID NO: 101436 - protein, 9 aa, Homo Sapiens
AEVYKELRL

SEQ ID NO: 101437 - protein, 9 aa, Homo Sapiens
AEVYRILSV

SEQ ID NO: 101438 - protein, 9 aa, Homo Sapiens
AEWLGVLKA

SEQ ID NO: 101439 - protein, 9 aa, Homo Sapiens
AEWRHAHGM

SEQ ID NO: 101440 - protein, 9 aa, Homo Sapiens
AEYAGLKVA

SEQ ID NO: 101441 - protein, 9 aa, Homo Sapiens
AEYFCKPTV

SEQ ID NO: 101442 - protein, 9 aa, Homo Sapiens
AEYGEIKNI

SEQ ID NO: 101443 - protein, 9 aa, Homo Sapiens
AEYIRTEML

SEQ ID NO: 101444 - protein, 9 aa, Homo Sapiens
AEYKGRVTL

SEQ ID NO: 101445 - protein, 9 aa, Homo Sapiens
AEYPEGFEI

SEQ ID NO: 101446 - protein, 9 aa, Homo Sapiens
AEYRHLRKL

SEQ ID NO: 101447 - protein, 9 aa, Homo Sapiens
AEYRLGPLL

SEQ ID NO: 101448 - protein, 9 aa, Homo Sapiens
AEYTAKIAL

SEQ ID NO: 101449 - protein, 9 aa, Homo Sapiens
AKVKFEERY

SEQ ID NO: 101450 - protein, 9 aa, Homo Sapiens
AQAFIHNSL

SEQ ID NO: 101451 - protein, 9 aa, Homo Sapiens
AQFEHTILL

SEQ ID NO: 101452 - protein, 9 aa, Homo Sapiens
AQFKGTQSL

SEQ ID NO: 101453 - protein, 9 aa, Homo Sapiens
AQLKQRNTL

SEQ ID NO: 101454 - protein, 9 aa, Homo Sapiens
AQVGKLPCL

SEQ ID NO: 101455 - protein, 9 aa, Homo Sapiens
ASDKETYEL

SEQ ID NO: 101456 - protein, 9 aa, Homo Sapiens
ATASFPEAL

SEQ ID NO: 101457 - protein, 9 aa, Homo Sapiens
DAAPVAPSV

SEQ ID NO: 101458 - protein, 9 aa, Homo Sapiens
DATASIVMD

SEQ ID NO: 101459 - protein, 9 aa, Homo Sapiens
DECPHLIAL

SEQ ID NO: 101460 - protein, 9 aa, Homo Sapiens
DEHAGVISV

SEQ ID NO: 101461 - protein, 9 aa, Homo Sapiens
DEYEKLQVL

SEQ ID NO: 101462 - protein, 9 aa, Homo Sapiens
DEYQFVERL

SEQ ID NO: 101463 - protein, 9 aa, Homo Sapiens
DNLAIEGGI

SEQ ID NO: 101464 - protein, 9 aa, Homo Sapiens
DQLLRTLDI

SEQ ID NO: 101465 - protein, 9 aa, Homo Sapiens
DSDFPIHNL

SEQ ID NO: 101466 - protein, 9 aa, Homo Sapiens
DSDILVRKV

SEQ ID NO: 101467 - protein, 9 aa, Homo Sapiens
DTIVNVQQI

SEQ ID NO: 101468 - protein, 9 aa, Homo Sapiens
EDVKMITSL

SEQ ID NO: 101469 - protein, 9 aa, Homo Sapiens
EEAASAPAV

SEQ ID NO: 101470 - protein, 9 aa, Homo Sapiens
EEAPSRPAL

SEQ ID NO: 101471 - protein, 9 aa, Homo Sapiens
EEAPVQPIL

SEQ ID NO: 101472 - protein, 9 aa, Homo Sapiens
EEFKKIRSA

SEQ ID NO: 101473 - protein, 9 aa, Homo Sapiens
EEFLSKVSI

SEQ ID NO: 101474 - protein, 9 aa, Homo Sapiens
EEFNQPLSV

SEQ ID NO: 101475 - protein, 9 aa, Homo Sapiens
EEFPNTCKM

SEQ ID NO: 101476 - protein, 9 aa, Homo Sapiens
EEFQFIKKA

SEQ ID NO: 101477 - protein, 9 aa, Homo Sapiens
EEGPPVTTV

SEQ ID NO: 101478 - protein, 9 aa, Homo Sapiens
EEHNSMNEL

SEQ ID NO: 101479 - protein, 9 aa, Homo Sapiens
EEIAKVEKL

SEQ ID NO: 101480 - protein, 9 aa, Homo Sapiens
EEIIKAWSV

SEQ ID NO: 101481 - protein, 9 aa, Homo Sapiens
EEIKEMHGL

SEQ ID NO: 101482 - protein, 9 aa, Homo Sapiens
EEISGIVEV

SEQ ID NO: 101483 - protein, 9 aa, Homo Sapiens
EEKEIEHAL

SEQ ID NO: 101484 - protein, 9 aa, Homo Sapiens
EELIESPKL

SEQ ID NO: 101485 - protein, 9 aa, Homo Sapiens
EELPHIHAF

SEQ ID NO: 101486 - protein, 9 aa, Homo Sapiens
EELQGVRSL

SEQ ID NO: 101487 - protein, 9 aa, Homo Sapiens
EELQKRFIL

SEQ ID NO: 101488 - protein, 9 aa, Homo Sapiens
EELTGFREL

SEQ ID NO: 101489 - protein, 9 aa, Homo Sapiens
EELVVQPLL

SEQ ID NO: 101490 - protein, 9 aa, Homo Sapiens
EEREIKERI

SEQ ID NO: 101491 - protein, 9 aa, Homo Sapiens
EEREPTPVL

SEQ ID NO: 101492 - protein, 9 aa, Homo Sapiens
EERRVKEVV

SEQ ID NO: 101493 - protein, 9 aa, Homo Sapiens
EETQPPVAL

SEQ ID NO: 101494 - protein, 9 aa, Homo Sapiens
EEVQFLKTL

SEQ ID NO: 101495 - protein, 9 aa, Homo Sapiens
EEWNDPPAV

SEQ ID NO: 101496 - protein, 9 aa, Homo Sapiens
EEWPNPPTL

SEQ ID NO: 101497 - protein, 9 aa, Homo Sapiens
EEYGKILEV

SEQ ID NO: 101498 - protein, 9 aa, Homo Sapiens
EEYPNKPPT

SEQ ID NO: 101499 - protein, 9 aa, Homo Sapiens
EEYPSVSTL

SEQ ID NO: 101500 - protein, 9 aa, Homo Sapiens
EEYQNPHTV

SEQ ID NO: 101501 - protein, 9 aa, Homo Sapiens
EKLGETEKL

SEQ ID NO: 101502 - protein, 9 aa, Homo Sapiens
ELENRAPGL

SEQ ID NO: 101503 - protein, 9 aa, Homo Sapiens
ELIEGEREL

SEQ ID NO: 101504 - protein, 9 aa, Homo Sapiens
ELNEKLTPL

SEQ ID NO: 101505 - protein, 9 aa, Homo Sapiens
ETKLLASEI

SEQ ID NO: 101506 - protein, 9 aa, Homo Sapiens
FEAPDQKTL

SEQ ID NO: 101507 - protein, 9 aa, Homo Sapiens
FEAPNQEKV

SEQ ID NO: 101508 - protein, 9 aa, Homo Sapiens
FEAQGKPEL

SEQ ID NO: 101509 - protein, 9 aa, Homo Sapiens
FEDGQKIVV

SEQ ID NO: 101510 - protein, 9 aa, Homo Sapiens
FEDVGRQVL

SEQ ID NO: 101511 - protein, 9 aa, Homo Sapiens
FEEAQLPRL

SEQ ID NO: 101512 - protein, 9 aa, Homo Sapiens
FEEGKKISL

SEQ ID NO: 101513 - protein, 9 aa, Homo Sapiens
FEFEYQTKV

SEQ ID NO: 101514 - protein, 9 aa, Homo Sapiens
FEGAVIRTV

SEQ ID NO: 101515 - protein, 9 aa, Homo Sapiens
FEGILIKKL

SEQ ID NO: 101516 - protein, 9 aa, Homo Sapiens
FEGVSPKSL

SEQ ID NO: 101517 - protein, 9 aa, Homo Sapiens
FEHHGQVRL

SEQ ID NO: 101518 - protein, 9 aa, Homo Sapiens
FEHPNVVRL

SEQ ID NO: 101519 - protein, 9 aa, Homo Sapiens
FEHQRAPRV

SEQ ID NO: 101520 - protein, 9 aa, Homo Sapiens
FEIPIKVRL

SEQ ID NO: 101521 - protein, 9 aa, Homo Sapiens
FEITPPVVL

SEQ ID NO: 101522 - protein, 9 aa, Homo Sapiens
FEITQPPLL

SEQ ID NO: 101523 - protein, 9 aa, Homo Sapiens
FEKEWIECA

SEQ ID NO: 101524 - protein, 9 aa, Homo Sapiens
FEKIHQETF

SEQ ID NO: 101525 - protein, 9 aa, Homo Sapiens
FEKKYVATL

SEQ ID NO: 101526 - protein, 9 aa, Homo Sapiens
FELDLPTVH

SEQ ID NO: 101527 - protein, 9 aa, Homo Sapiens
FELEKSESL

SEQ ID NO: 101528 - protein, 9 aa, Homo Sapiens
FEMATRAAL

SEQ ID NO: 101529 - protein, 9 aa, Homo Sapiens
FENPKQGKL

SEQ ID NO: 101530 - protein, 9 aa, Homo Sapiens
FEQGGARVV

SEQ ID NO: 101531 - protein, 9 aa, Homo Sapiens
FEQQMVEKL

SEQ ID NO: 101532 - protein, 9 aa, Homo Sapiens
FEQVSGVTV

SEQ ID NO: 101533 - protein, 9 aa, Homo Sapiens
FERNKAIKV

SEQ ID NO: 101534 - protein, 9 aa, Homo Sapiens
FERPQYAEI

SEQ ID NO: 101535 - protein, 9 aa, Homo Sapiens
FESDLHSLL

SEQ ID NO: 101536 - protein, 9 aa, Homo Sapiens
FESGDVKAT

SEQ ID NO: 101537 - protein, 9 aa, Homo Sapiens
FESGISQAL

SEQ ID NO: 101538 - protein, 9 aa, Homo Sapiens
FESSGIHVA

SEQ ID NO: 101539 - protein, 9 aa, Homo Sapiens
FESSPDPEL

SEQ ID NO: 101540 - protein, 9 aa, Homo Sapiens
FETEPVSKL

SEQ ID NO: 101541 - protein, 9 aa, Homo Sapiens
FETIVKQQI

SEQ ID NO: 101542 - protein, 9 aa, Homo Sapiens
FEVEKQALL

SEQ ID NO: 101543 - protein, 9 aa, Homo Sapiens
FEVGKKICL

SEQ ID NO: 101544 - protein, 9 aa, Homo Sapiens
FEVGSSRQL

SEQ ID NO: 101545 - protein, 9 aa, Homo Sapiens
FEVKKWNAV

SEQ ID NO: 101546 - protein, 9 aa, Homo Sapiens
FEVTGQETV

SEQ ID NO: 101547 - protein, 9 aa, Homo Sapiens
FEWAKNSPL

SEQ ID NO: 101548 - protein, 9 aa, Homo Sapiens
FEWENKVTV

SEQ ID NO: 101549 - protein, 9 aa, Homo Sapiens
GDFKEISSV

SEQ ID NO: 101550 - protein, 9 aa, Homo Sapiens
GDYVPPEKL

SEQ ID NO: 101551 - protein, 9 aa, Homo Sapiens
GEAAKREIL

SEQ ID NO: 101552 - protein, 9 aa, Homo Sapiens
GEADPSIQL

SEQ ID NO: 101553 - protein, 9 aa, Homo Sapiens
GEAEGLMKV

SEQ ID NO: 101554 - protein, 9 aa, Homo Sapiens
GEAEYIQRL

SEQ ID NO: 101555 - protein, 9 aa, Homo Sapiens
GEAGPIHHL

SEQ ID NO: 101556 - protein, 9 aa, Homo Sapiens
GEAGPVGNM

SEQ ID NO: 101557 - protein, 9 aa, Homo Sapiens
GEAGSITHL

SEQ ID NO: 101558 - protein, 9 aa, Homo Sapiens
GEAHLKTIL

SEQ ID NO: 101559 - protein, 9 aa, Homo Sapiens
GEAKKMEFL

SEQ ID NO: 101560 - protein, 9 aa, Homo Sapiens
GEALAPRQV

SEQ ID NO: 101561 - protein, 9 aa, Homo Sapiens
GEALPFSHL

SEQ ID NO: 101562 - protein, 9 aa, Homo Sapiens
GEAPGVVRM

SEQ ID NO: 101563 - protein, 9 aa, Homo Sapiens
GEAPVPASV

SEQ ID NO: 101564 - protein, 9 aa, Homo Sapiens
GEAQKIDRM

SEQ ID NO: 101565 - protein, 9 aa, Homo Sapiens
GEARKQVEV

SEQ ID NO: 101566 - protein, 9 aa, Homo Sapiens
GEARVGSEL

SEQ ID NO: 101567 - protein, 9 aa, Homo Sapiens
GECAQTIRL

SEQ ID NO: 101568 - protein, 9 aa, Homo Sapiens
GECGKAFRV

SEQ ID NO: 101569 - protein, 9 aa, Homo Sapiens
GECGKAFTL

SEQ ID NO: 101570 - protein, 9 aa, Homo Sapiens
GECTKIHDL

SEQ ID NO: 101571 - protein, 9 aa, Homo Sapiens
GEDEPLHAL

SEQ ID NO: 101572 - protein, 9 aa, Homo Sapiens
GEDIPREML

SEQ ID NO: 101573 - protein, 9 aa, Homo Sapiens
GEDKGGYVI

SEQ ID NO: 101574 - protein, 9 aa, Homo Sapiens
GEDKGIKAL

SEQ ID NO: 101575 - protein, 9 aa, Homo Sapiens
GEDWFRPKL

SEQ ID NO: 101576 - protein, 9 aa, Homo Sapiens
GEEAVPVAL

SEQ ID NO: 101577 - protein, 9 aa, Homo Sapiens
GEEGYGRSL

SEQ ID NO: 101578 - protein, 9 aa, Homo Sapiens
GEEKLIASV

SEQ ID NO: 101579 - protein, 9 aa, Homo Sapiens
GEELQMEPV

SEQ ID NO: 101580 - protein, 9 aa, Homo Sapiens
GEELVTKPV

SEQ ID NO: 101581 - protein, 9 aa, Homo Sapiens
GEESKRPPL

SEQ ID NO: 101582 - protein, 9 aa, Homo Sapiens
GEEVPRPIL

SEQ ID NO: 101583 - protein, 9 aa, Homo Sapiens
GEEWKGYVV

SEQ ID NO: 101584 - protein, 9 aa, Homo Sapiens
GEFADPFKL

SEQ ID NO: 101585 - protein, 9 aa, Homo Sapiens
GEFDNAGAM

SEQ ID NO: 101586 - protein, 9 aa, Homo Sapiens
GEFEKKYVA

SEQ ID NO: 101587 - protein, 9 aa, Homo Sapiens
GEFGGFGSV

SEQ ID NO: 101588 - protein, 9 aa, Homo Sapiens
GEFGKPYFI

SEQ ID NO: 101589 - protein, 9 aa, Homo Sapiens
GEFIIGRVI

SEQ ID NO: 101590 - protein, 9 aa, Homo Sapiens
GEFILKTYV

SEQ ID NO: 101591 - protein, 9 aa, Homo Sapiens
GEFKKYLEV

SEQ ID NO: 101592 - protein, 9 aa, Homo Sapiens
GEFPDLHRT

SEQ ID NO: 101593 - protein, 9 aa, Homo Sapiens
GEFQELMKL

SEQ ID NO: 101594 - protein, 9 aa, Homo Sapiens
GEFRAVTEL

SEQ ID NO: 101595 - protein, 9 aa, Homo Sapiens
GEFSITYKP

SEQ ID NO: 101596 - protein, 9 aa, Homo Sapiens
GEFTSARAV

SEQ ID NO: 101597 - protein, 9 aa, Homo Sapiens
GEFVDDYTV

SEQ ID NO: 101598 - protein, 9 aa, Homo Sapiens
GEGDIVPKI

SEQ ID NO: 101599 - protein, 9 aa, Homo Sapiens
GEGDTHTAL

SEQ ID NO: 101600 - protein, 9 aa, Homo Sapiens
GEGEPVKEV

SEQ ID NO: 101601 - protein, 9 aa, Homo Sapiens
GEGGSFGEL

SEQ ID NO: 101602 - protein, 9 aa, Homo Sapiens
GEGKPTPAL

SEQ ID NO: 101603 - protein, 9 aa, Homo Sapiens
GEGLIIVKM

SEQ ID NO: 101604 - protein, 9 aa, Homo Sapiens
GEGLKRSAL

SEQ ID NO: 101605 - protein, 9 aa, Homo Sapiens
GEGPVITAL

SEQ ID NO: 101606 - protein, 9 aa, Homo Sapiens
GEGTFGRVV

SEQ ID NO: 101607 - protein, 9 aa, Homo Sapiens
GEHCDFTIL

SEQ ID NO: 101608 - protein, 9 aa, Homo Sapiens
GEHGLIIRV

SEQ ID NO: 101609 - protein, 9 aa, Homo Sapiens
GEHHSTPSL

SEQ ID NO: 101610 - protein, 9 aa, Homo Sapiens
GEHLHIREF

SEQ ID NO: 101611 - protein, 9 aa, Homo Sapiens
GEHLKTDLL

SEQ ID NO: 101612 - protein, 9 aa, Homo Sapiens
GEHTLLVTV

SEQ ID NO: 101613 - protein, 9 aa, Homo Sapiens
GEIASFDKA

SEQ ID NO: 101614 - protein, 9 aa, Homo Sapiens
GEIDKRVEV

SEQ ID NO: 101615 - protein, 9 aa, Homo Sapiens
GEIDRARAI

SEQ ID NO: 101616 - protein, 9 aa, Homo Sapiens
GEIDTRFSF

SEQ ID NO: 101617 - protein, 9 aa, Homo Sapiens
GEIERLINL

SEQ ID NO: 101618 - protein, 9 aa, Homo Sapiens
GEIETIARF

SEQ ID NO: 101619 - protein, 9 aa, Homo Sapiens
GEIETVKQL

SEQ ID NO: 101620 - protein, 9 aa, Homo Sapiens
GEIGTKTTL

SEQ ID NO: 101621 - protein, 9 aa, Homo Sapiens
GEIIGVKVL

SEQ ID NO: 101622 - protein, 9 aa, Homo Sapiens
GEIKHVSSL

SEQ ID NO: 101623 - protein, 9 aa, Homo Sapiens
GEIKVLQGF

SEQ ID NO: 101624 - protein, 9 aa, Homo Sapiens
GEIPKQVKV

SEQ ID NO: 101625 - protein, 9 aa, Homo Sapiens
GEIPTLKTL

SEQ ID NO: 101626 - protein, 9 aa, Homo Sapiens
GEIPVQEHL

SEQ ID NO: 101627 - protein, 9 aa, Homo Sapiens
GEIQAGAKL

SEQ ID NO: 101628 - protein, 9 aa, Homo Sapiens
GEIQEIVKT

SEQ ID NO: 101629 - protein, 9 aa, Homo Sapiens
GEIQNAKTL

SEQ ID NO: 101630 - protein, 9 aa, Homo Sapiens
GEIRELKQL

SEQ ID NO: 101631 - protein, 9 aa, Homo Sapiens
GEIRNLEKF

SEQ ID NO: 101632 - protein, 9 aa, Homo Sapiens
GEIRTITVV

SEQ ID NO: 101633 - protein, 9 aa, Homo Sapiens
GEISEKAKL

SEQ ID NO: 101634 - protein, 9 aa, Homo Sapiens
GEISTIDKV

SEQ ID NO: 101635 - protein, 9 aa, Homo Sapiens
GEITGEVRM

SEQ ID NO: 101636 - protein, 9 aa, Homo Sapiens
GEIVALKKV

SEQ ID NO: 101637 - protein, 9 aa, Homo Sapiens
GEIVEKIGV

SEQ ID NO: 101638 - protein, 9 aa, Homo Sapiens
GEIVQQVRV

SEQ ID NO: 101639 - protein, 9 aa, Homo Sapiens
GEKAVNPFL

SEQ ID NO: 101640 - protein, 9 aa, Homo Sapiens
GEKDLKQQL

SEQ ID NO: 101641 - protein, 9 aa, Homo Sapiens
GEKEPPTTL

SEQ ID NO: 101642 - protein, 9 aa, Homo Sapiens
GEKFEFSGL

SEQ ID NO: 101643 - protein, 9 aa, Homo Sapiens
GEKFHSEVA

SEQ ID NO: 101644 - protein, 9 aa, Homo Sapiens
GEKGAVKVL

SEQ ID NO: 101645 - protein, 9 aa, Homo Sapiens
GEKGEFHKL

SEQ ID NO: 101646 - protein, 9 aa, Homo Sapiens
GEKGIDIII

SEQ ID NO: 101647 - protein, 9 aa, Homo Sapiens
GEKGPVKVL

SEQ ID NO: 101648 - protein, 9 aa, Homo Sapiens
GEKHRELRL

SEQ ID NO: 101649 - protein, 9 aa, Homo Sapiens
GEKIGIAEF

SEQ ID NO: 101650 - protein, 9 aa, Homo Sapiens
GEKIIQEFL

SEQ ID NO: 101651 - protein, 9 aa, Homo Sapiens
GEKIRTRAI

SEQ ID NO: 101652 - protein, 9 aa, Homo Sapiens
GEKKAYVRL

SEQ ID NO: 101653 - protein, 9 aa, Homo Sapiens
GEKKDEVYL

SEQ ID NO: 101654 - protein, 9 aa, Homo Sapiens
GEKLLRPSL

SEQ ID NO: 101655 - protein, 9 aa, Homo Sapiens
GEKLQDLEL

SEQ ID NO: 101656 - protein, 9 aa, Homo Sapiens
GEKNVFEAL

SEQ ID NO: 101657 - protein, 9 aa, Homo Sapiens
GEKPFQCTF

SEQ ID NO: 101658 - protein, 9 aa, Homo Sapiens
GEKQPELQI

SEQ ID NO: 101659 - protein, 9 aa, Homo Sapiens
GEKSESISV

SEQ ID NO: 101660 - protein, 9 aa, Homo Sapiens
GEKSQAPTL

SEQ ID NO: 101661 - protein, 9 aa, Homo Sapiens
GEKTAGINV

SEQ ID NO: 101662 - protein, 9 aa, Homo Sapiens
GEKTISVVL

SEQ ID NO: 101663 - protein, 9 aa, Homo Sapiens
GEKTVAAVM

SEQ ID NO: 101664 - protein, 9 aa, Homo Sapiens
GEKVAHTSL

SEQ ID NO: 101665 - protein, 9 aa, Homo Sapiens
GEKVKQVLL

SEQ ID NO: 101666 - protein, 9 aa, Homo Sapiens
GEKVNIISV

SEQ ID NO: 101667 - protein, 9 aa, Homo Sapiens
GEKVVKTAL

SEQ ID NO: 101668 - protein, 9 aa, Homo Sapiens
GELANEVKV

SEQ ID NO: 101669 - protein, 9 aa, Homo Sapiens
GELAPSHGL

SEQ ID NO: 101670 - protein, 9 aa, Homo Sapiens
GELARAVVL

SEQ ID NO: 101671 - protein, 9 aa, Homo Sapiens
GELDHVVEI

SEQ ID NO: 101672 - protein, 9 aa, Homo Sapiens
GELEYATKI

SEQ ID NO: 101673 - protein, 9 aa, Homo Sapiens
GELFQVLKM

SEQ ID NO: 101674 - protein, 9 aa, Homo Sapiens
GELFSSPHL

SEQ ID NO: 101675 - protein, 9 aa, Homo Sapiens
GELHGHFML

SEQ ID NO: 101676 - protein, 9 aa, Homo Sapiens
GELIRPTTL

SEQ ID NO: 101677 - protein, 9 aa, Homo Sapiens
GELITQREL

SEQ ID NO: 101678 - protein, 9 aa, Homo Sapiens
GELKIAYQL

SEQ ID NO: 101679 - protein, 9 aa, Homo Sapiens
GELKRRLGL

SEQ ID NO: 101680 - protein, 9 aa, Homo Sapiens
GELKSPKVL

SEQ ID NO: 101681 - protein, 9 aa, Homo Sapiens
GELKSVPTT

SEQ ID NO: 101682 - protein, 9 aa, Homo Sapiens
GELLKQADL

SEQ ID NO: 101683 - protein, 9 aa, Homo Sapiens
GELLMHPVL

SEQ ID NO: 101684 - protein, 9 aa, Homo Sapiens
GELPEHAKI

SEQ ID NO: 101685 - protein, 9 aa, Homo Sapiens
GELPRQPTT

SEQ ID NO: 101686 - protein, 9 aa, Homo Sapiens
GELRHITKL

SEQ ID NO: 101687 - protein, 9 aa, Homo Sapiens
GELSKVTKV

SEQ ID NO: 101688 - protein, 9 aa, Homo Sapiens
GELSLPVHL

SEQ ID NO: 101689 - protein, 9 aa, Homo Sapiens
GELTDLHGL

SEQ ID NO: 101690 - protein, 9 aa, Homo Sapiens
GELVHPKAL

SEQ ID NO: 101691 - protein, 9 aa, Homo Sapiens
GELVKAIVV

SEQ ID NO: 101692 - protein, 9 aa, Homo Sapiens
GELYNEVKV

SEQ ID NO: 101693 - protein, 9 aa, Homo Sapiens
GEMQKQAQL

SEQ ID NO: 101694 - protein, 9 aa, Homo Sapiens
GEMRNAVCI

SEQ ID NO: 101695 - protein, 9 aa, Homo Sapiens
GENAHNVTL

SEQ ID NO: 101696 - protein, 9 aa, Homo Sapiens
GENDRGVSF

SEQ ID NO: 101697 - protein, 9 aa, Homo Sapiens
GENEDLLKL

SEQ ID NO: 101698 - protein, 9 aa, Homo Sapiens
GENKPRPSL

SEQ ID NO: 101699 - protein, 9 aa, Homo Sapiens
GENLKVLTV

SEQ ID NO: 101700 - protein, 9 aa, Homo Sapiens
GENPFACKV

SEQ ID NO: 101701 - protein, 9 aa, Homo Sapiens
GENPQRQGL

SEQ ID NO: 101702 - protein, 9 aa, Homo Sapiens
GENPQVPKL

SEQ ID NO: 101703 - protein, 9 aa, Homo Sapiens
GENPSGKSL

SEQ ID NO: 101704 - protein, 9 aa, Homo Sapiens
GENRPIATL

SEQ ID NO: 101705 - protein, 9 aa, Homo Sapiens
GENSRVARL

SEQ ID NO: 101706 - protein, 9 aa, Homo Sapiens
GENVFGVCH

SEQ ID NO: 101707 - protein, 9 aa, Homo Sapiens
GENVIISHF

SEQ ID NO: 101708 - protein, 9 aa, Homo Sapiens
GEPDHNEAL

SEQ ID NO: 101709 - protein, 9 aa, Homo Sapiens
GEPENTYIL

SEQ ID NO: 101710 - protein, 9 aa, Homo Sapiens
GEPEPTPVV

SEQ ID NO: 101711 - protein, 9 aa, Homo Sapiens
GEPFASHSL

SEQ ID NO: 101712 - protein, 9 aa, Homo Sapiens
GEPGAQPQL

SEQ ID NO: 101713 - protein, 9 aa, Homo Sapiens
GEPGPVRSV

SEQ ID NO: 101714 - protein, 9 aa, Homo Sapiens
GEPHSSPEL

SEQ ID NO: 101715 - protein, 9 aa, Homo Sapiens
GEPNIDSPL

SEQ ID NO: 101716 - protein, 9 aa, Homo Sapiens
GEPQVQFKL

SEQ ID NO: 101717 - protein, 9 aa, Homo Sapiens
GEPSLYNSL

SEQ ID NO: 101718 - protein, 9 aa, Homo Sapiens
GEQEDRPGL

SEQ ID NO: 101719 - protein, 9 aa, Homo Sapiens
GERIRLEKV

SEQ ID NO: 101720 - protein, 9 aa, Homo Sapiens
GERLNQDQL

SEQ ID NO: 101721 - protein, 9 aa, Homo Sapiens
GERLPRETL

SEQ ID NO: 101722 - protein, 9 aa, Homo Sapiens
GERPGGEEL

SEQ ID NO: 101723 - protein, 9 aa, Homo Sapiens
GERPPPKRL

SEQ ID NO: 101724 - protein, 9 aa, Homo Sapiens
GERVALNTL

SEQ ID NO: 101725 - protein, 9 aa, Homo Sapiens
GERVIVEHA

SEQ ID NO: 101726 - protein, 9 aa, Homo Sapiens
GESATLRSL

SEQ ID NO: 101727 - protein, 9 aa, Homo Sapiens
GESDPMKGV

SEQ ID NO: 101728 - protein, 9 aa, Homo Sapiens
GESEKLVRL

SEQ ID NO: 101729 - protein, 9 aa, Homo Sapiens
GESGIKVAV

SEQ ID NO: 101730 - protein, 9 aa, Homo Sapiens
GESGKSTIV

SEQ ID NO: 101731 - protein, 9 aa, Homo Sapiens
GESKYLMAL

SEQ ID NO: 101732 - protein, 9 aa, Homo Sapiens
GESLLIKTL

SEQ ID NO: 101733 - protein, 9 aa, Homo Sapiens
GESNKIPRL

SEQ ID NO: 101734 - protein, 9 aa, Homo Sapiens
GESQPVKMF

SEQ ID NO: 101735 - protein, 9 aa, Homo Sapiens
GESVKVHQL

SEQ ID NO: 101736 - protein, 9 aa, Homo Sapiens
GESVPVTKT

SEQ ID NO: 101737 - protein, 9 aa, Homo Sapiens
GESVTKLTL

SEQ ID NO: 101738 - protein, 9 aa, Homo Sapiens
GETAFAFHL

SEQ ID NO: 101739 - protein, 9 aa, Homo Sapiens
GETEKLYQL

SEQ ID NO: 101740 - protein, 9 aa, Homo Sapiens
GETELREYF

SEQ ID NO: 101741 - protein, 9 aa, Homo Sapiens
GETESVKTM

SEQ ID NO: 101742 - protein, 9 aa, Homo Sapiens
GETEVLKVI

SEQ ID NO: 101743 - protein, 9 aa, Homo Sapiens
GETGTLVDM

SEQ ID NO: 101744 - protein, 9 aa, Homo Sapiens
GETIHIPTM

SEQ ID NO: 101745 - protein, 9 aa, Homo Sapiens
GETKAKVLL

SEQ ID NO: 101746 - protein, 9 aa, Homo Sapiens
GETPEAAAL

SEQ ID NO: 101747 - protein, 9 aa, Homo Sapiens
GETPEQPGL

SEQ ID NO: 101748 - protein, 9 aa, Homo Sapiens
GETPKHFAV

SEQ ID NO: 101749 - protein, 9 aa, Homo Sapiens
GETPQVAVI

SEQ ID NO: 101750 - protein, 9 aa, Homo Sapiens
GETQDFHSL

SEQ ID NO: 101751 - protein, 9 aa, Homo Sapiens
GETQKTISL

SEQ ID NO: 101752 - protein, 9 aa, Homo Sapiens
GETSIAECL

SEQ ID NO: 101753 - protein, 9 aa, Homo Sapiens
GETSTDLKL

SEQ ID NO: 101754 - protein, 9 aa, Homo Sapiens
GETSTVEKL

SEQ ID NO: 101755 - protein, 9 aa, Homo Sapiens
GETYNGHLV

SEQ ID NO: 101756 - protein, 9 aa, Homo Sapiens
GEVDFKEFI

SEQ ID NO: 101757 - protein, 9 aa, Homo Sapiens
GEVDKRELI

SEQ ID NO: 101758 - protein, 9 aa, Homo Sapiens
GEVDPKVAL

SEQ ID NO: 101759 - protein, 9 aa, Homo Sapiens
GEVEGHPVW

SEQ ID NO: 101760 - protein, 9 aa, Homo Sapiens
GEVEKYQQL

SEQ ID NO: 101761 - protein, 9 aa, Homo Sapiens
GEVGATSAL

SEQ ID NO: 101762 - protein, 9 aa, Homo Sapiens
GEVGKTTGI

SEQ ID NO: 101763 - protein, 9 aa, Homo Sapiens
GEVHTGTTI

SEQ ID NO: 101764 - protein, 9 aa, Homo Sapiens
GEVIGVNTM

SEQ ID NO: 101765 - protein, 9 aa, Homo Sapiens
GEVIHVKIL

SEQ ID NO: 101766 - protein, 9 aa, Homo Sapiens
GEVKDFPDL

SEQ ID NO: 101767 - protein, 9 aa, Homo Sapiens
GEVKLCEKM

SEQ ID NO: 101768 - protein, 9 aa, Homo Sapiens
GEVLIDTHL

SEQ ID NO: 101769 - protein, 9 aa, Homo Sapiens
GEVNVLDNL

SEQ ID NO: 101770 - protein, 9 aa, Homo Sapiens
GEVPFNHEI

SEQ ID NO: 101771 - protein, 9 aa, Homo Sapiens
GEVPKFKAL

SEQ ID NO: 101772 - protein, 9 aa, Homo Sapiens
GEVRLGGSL

SEQ ID NO: 101773 - protein, 9 aa, Homo Sapiens
GEVRPVETL

SEQ ID NO: 101774 - protein, 9 aa, Homo Sapiens
GEVRTHIRV

SEQ ID NO: 101775 - protein, 9 aa, Homo Sapiens
GEVSARQEL

SEQ ID NO: 101776 - protein, 9 aa, Homo Sapiens
GEVTKQTVL

SEQ ID NO: 101777 - protein, 9 aa, Homo Sapiens
GEVTNVTTA

SEQ ID NO: 101778 - protein, 9 aa, Homo Sapiens
GEVVGKFYL

SEQ ID NO: 101779 - protein, 9 aa, Homo Sapiens
GEVYAIETF

SEQ ID NO: 101780 - protein, 9 aa, Homo Sapiens
GEWDKALSI

SEQ ID NO: 101781 - protein, 9 aa, Homo Sapiens
GEWERAAAV

SEQ ID NO: 101782 - protein, 9 aa, Homo Sapiens
GEWPDQPRI

SEQ ID NO: 101783 - protein, 9 aa, Homo Sapiens
GEWPTQLDV

SEQ ID NO: 101784 - protein, 9 aa, Homo Sapiens
GEYGKFFVT

SEQ ID NO: 101785 - protein, 9 aa, Homo Sapiens
GEYIAPEKI

SEQ ID NO: 101786 - protein, 9 aa, Homo Sapiens
GEYKDNALL

SEQ ID NO: 101787 - protein, 9 aa, Homo Sapiens
GEYPKLLRL

SEQ ID NO: 101788 - protein, 9 aa, Homo Sapiens
GEYQRMGVM

SEQ ID NO: 101789 - protein, 9 aa, Homo Sapiens
GEYSDPVTL

SEQ ID NO: 101790 - protein, 9 aa, Homo Sapiens
GGPGGVGGL

SEQ ID NO: 101791 - protein, 9 aa, Homo Sapiens
GQAPPGKAL

SEQ ID NO: 101792 - protein, 9 aa, Homo Sapiens
GQNPTEAEL

SEQ ID NO: 101793 - protein, 9 aa, Homo Sapiens
GQWKEEQKL

SEQ ID NO: 101794 - protein, 9 aa, Homo Sapiens
GQWKKGFVL

SEQ ID NO: 101795 - protein, 9 aa, Homo Sapiens
HDFKSVDHL

SEQ ID NO: 101796 - protein, 9 aa, Homo Sapiens
HDFQAPYLL

SEQ ID NO: 101797 - protein, 9 aa, Homo Sapiens
HDFVVVETV

SEQ ID NO: 101798 - protein, 9 aa, Homo Sapiens
HDITVPLEV

SEQ ID NO: 101799 - protein, 9 aa, Homo Sapiens
HDLALPLCL

SEQ ID NO: 101800 - protein, 9 aa, Homo Sapiens
HDLEVAQTT

SEQ ID NO: 101801 - protein, 9 aa, Homo Sapiens
HDVGICKAV

SEQ ID NO: 101802 - protein, 9 aa, Homo Sapiens
HDVVILDSL

SEQ ID NO: 101803 - protein, 9 aa, Homo Sapiens
HDVVVENNL

SEQ ID NO: 101804 - protein, 9 aa, Homo Sapiens
HEAAFPIAV

SEQ ID NO: 101805 - protein, 9 aa, Homo Sapiens
HEAATKAVL

SEQ ID NO: 101806 - protein, 9 aa, Homo Sapiens
HEADKTYML

SEQ ID NO: 101807 - protein, 9 aa, Homo Sapiens
HEADVDVLM

SEQ ID NO: 101808 - protein, 9 aa, Homo Sapiens
HEAEPVRTL

SEQ ID NO: 101809 - protein, 9 aa, Homo Sapiens
HEAERNIAL

SEQ ID NO: 101810 - protein, 9 aa, Homo Sapiens
HEAEVLKQL

SEQ ID NO: 101811 - protein, 9 aa, Homo Sapiens
HEAMEQQTI

SEQ ID NO: 101812 - protein, 9 aa, Homo Sapiens
HEASGKAVF

SEQ ID NO: 101813 - protein, 9 aa, Homo Sapiens
HEAVPLSVF

SEQ ID NO: 101814 - protein, 9 aa, Homo Sapiens
HEAWLIHKT

SEQ ID NO: 101815 - protein, 9 aa, Homo Sapiens
HECASINRI

SEQ ID NO: 101816 - protein, 9 aa, Homo Sapiens
HECQELQRL

SEQ ID NO: 101817 - protein, 9 aa, Homo Sapiens
HEDDHNFEL

SEQ ID NO: 101818 - protein, 9 aa, Homo Sapiens
HEDLGHVAL

SEQ ID NO: 101819 - protein, 9 aa, Homo Sapiens
HEDPGQATL

SEQ ID NO: 101820 - protein, 9 aa, Homo Sapiens
HEEKVFRAV

SEQ ID NO: 101821 - protein, 9 aa, Homo Sapiens
HEESREYSL

SEQ ID NO: 101822 - protein, 9 aa, Homo Sapiens
HEETNMPTM

SEQ ID NO: 101823 - protein, 9 aa, Homo Sapiens
HEFAENPGL

SEQ ID NO: 101824 - protein, 9 aa, Homo Sapiens
HEFDGDEEF

SEQ ID NO: 101825 - protein, 9 aa, Homo Sapiens
HEFDGRTGL

SEQ ID NO: 101826 - protein, 9 aa, Homo Sapiens
HEFFHILNL

SEQ ID NO: 101827 - protein, 9 aa, Homo Sapiens
HEFGAITFV

SEQ ID NO: 101828 - protein, 9 aa, Homo Sapiens
HEFHSQENL

SEQ ID NO: 101829 - protein, 9 aa, Homo Sapiens
HEFLVKPSF

SEQ ID NO: 101830 - protein, 9 aa, Homo Sapiens
HEFQAPFGM

SEQ ID NO: 101831 - protein, 9 aa, Homo Sapiens
HEFRDKLAA

SEQ ID NO: 101832 - protein, 9 aa, Homo Sapiens
HEFSKTEEL

SEQ ID NO: 101833 - protein, 9 aa, Homo Sapiens
HEFSREPSL

SEQ ID NO: 101834 - protein, 9 aa, Homo Sapiens
HEFSSPSHL

SEQ ID NO: 101835 - protein, 9 aa, Homo Sapiens
HEGDIILKI

SEQ ID NO: 101836 - protein, 9 aa, Homo Sapiens
HEGKVFISL

SEQ ID NO: 101837 - protein, 9 aa, Homo Sapiens
HEGLPGLAV

SEQ ID NO: 101838 - protein, 9 aa, Homo Sapiens
HEGTLVHAV

SEQ ID NO: 101839 - protein, 9 aa, Homo Sapiens
HEHIEILTV

SEQ ID NO: 101840 - protein, 9 aa, Homo Sapiens
HEHIHSCQF

SEQ ID NO: 101841 - protein, 9 aa, Homo Sapiens
HEHRLPHVL

SEQ ID NO: 101842 - protein, 9 aa, Homo Sapiens
HEIDRYTAI

SEQ ID NO: 101843 - protein, 9 aa, Homo Sapiens
HEIEALKSF

SEQ ID NO: 101844 - protein, 9 aa, Homo Sapiens
HEIGEWEAF

SEQ ID NO: 101845 - protein, 9 aa, Homo Sapiens
HEIGFGSKV

SEQ ID NO: 101846 - protein, 9 aa, Homo Sapiens
HEIGHIFGL

SEQ ID NO: 101847 - protein, 9 aa, Homo Sapiens
HEIITPEQF

SEQ ID NO: 101848 - protein, 9 aa, Homo Sapiens
HEIKSLEDL

SEQ ID NO: 101849 - protein, 9 aa, Homo Sapiens
HEILCKLSL

SEQ ID NO: 101850 - protein, 9 aa, Homo Sapiens
HEKDLVWKL

SEQ ID NO: 101851 - protein, 9 aa, Homo Sapiens
HEKVVRPAL

SEQ ID NO: 101852 - protein, 9 aa, Homo Sapiens
HELDQGQQL

SEQ ID NO: 101853 - protein, 9 aa, Homo Sapiens
HELEKKIEL

SEQ ID NO: 101854 - protein, 9 aa, Homo Sapiens
HELFTPPVI

SEQ ID NO: 101855 - protein, 9 aa, Homo Sapiens
HELLKTNAA

SEQ ID NO: 101856 - protein, 9 aa, Homo Sapiens
HELTIPNNL

SEQ ID NO: 101857 - protein, 9 aa, Homo Sapiens
HELVPEHVV

SEQ ID NO: 101858 - protein, 9 aa, Homo Sapiens
HEMEKAFAF

SEQ ID NO: 101859 - protein, 9 aa, Homo Sapiens
HENDAIHKI

SEQ ID NO: 101860 - protein, 9 aa, Homo Sapiens
HENEDIYKL

SEQ ID NO: 101861 - protein, 9 aa, Homo Sapiens
HENESVYKA

SEQ ID NO: 101862 - protein, 9 aa, Homo Sapiens
HENLLINEL

SEQ ID NO: 101863 - protein, 9 aa, Homo Sapiens
HENPKMQTM

SEQ ID NO: 101864 - protein, 9 aa, Homo Sapiens
HEPEKSFSL

SEQ ID NO: 101865 - protein, 9 aa, Homo Sapiens
HEPFIFHEV

SEQ ID NO: 101866 - protein, 9 aa, Homo Sapiens
HEQANVESL

SEQ ID NO: 101867 - protein, 9 aa, Homo Sapiens
HEQEEIFKL

SEQ ID NO: 101868 - protein, 9 aa, Homo Sapiens
HEQFIPIAA

SEQ ID NO: 101869 - protein, 9 aa, Homo Sapiens
HEQSGVYEL

SEQ ID NO: 101870 - protein, 9 aa, Homo Sapiens
HERAAILSV

SEQ ID NO: 101871 - protein, 9 aa, Homo Sapiens
HEREKEVVL

SEQ ID NO: 101872 - protein, 9 aa, Homo Sapiens
HERILAIGL

SEQ ID NO: 101873 - protein, 9 aa, Homo Sapiens
HESACGRTV

SEQ ID NO: 101874 - protein, 9 aa, Homo Sapiens
HESETTTSL

SEQ ID NO: 101875 - protein, 9 aa, Homo Sapiens
HESGASIKI

SEQ ID NO: 101876 - protein, 9 aa, Homo Sapiens
HESGHAIIA

SEQ ID NO: 101877 - protein, 9 aa, Homo Sapiens
HESPAVKLM

SEQ ID NO: 101878 - protein, 9 aa, Homo Sapiens
HESRQITQV

SEQ ID NO: 101879 - protein, 9 aa, Homo Sapiens
HETPKQPVV

SEQ ID NO: 101880 - protein, 9 aa, Homo Sapiens
HETQTLVKT

SEQ ID NO: 101881 - protein, 9 aa, Homo Sapiens
HETSKMKVL

SEQ ID NO: 101882 - protein, 9 aa, Homo Sapiens
HETSNINDF

SEQ ID NO: 101883 - protein, 9 aa, Homo Sapiens
HEVDKLYKV

SEQ ID NO: 101884 - protein, 9 aa, Homo Sapiens
HEVEKMFTL

SEQ ID NO: 101885 - protein, 9 aa, Homo Sapiens
HEVFNHREV

SEQ ID NO: 101886 - protein, 9 aa, Homo Sapiens
HEVGIGSVL

SEQ ID NO: 101887 - protein, 9 aa, Homo Sapiens
HEVKEAQTL

SEQ ID NO: 101888 - protein, 9 aa, Homo Sapiens
HEVMEQQTI

SEQ ID NO: 101889 - protein, 9 aa, Homo Sapiens
HEVNRILKV

SEQ ID NO: 101890 - protein, 9 aa, Homo Sapiens
HEVPGHQSV

SEQ ID NO: 101891 - protein, 9 aa, Homo Sapiens
HEVPSGNSL

SEQ ID NO: 101892 - protein, 9 aa, Homo Sapiens
HEVPYTTSF

SEQ ID NO: 101893 - protein, 9 aa, Homo Sapiens
HEVRIQPSL

SEQ ID NO: 101894 - protein, 9 aa, Homo Sapiens
HEWHKRVAL

SEQ ID NO: 101895 - protein, 9 aa, Homo Sapiens
HEWLQQHGI

SEQ ID NO: 101896 - protein, 9 aa, Homo Sapiens
HEWMKSEEL

SEQ ID NO: 101897 - protein, 9 aa, Homo Sapiens
HEYYQPTAL

SEQ ID NO: 101898 - protein, 9 aa, Homo Sapiens
HQYDGLVEL

SEQ ID NO: 101899 - protein, 9 aa, Homo Sapiens
HVGKTPIVG

SEQ ID NO: 101900 - protein, 9 aa, Homo Sapiens
IEAKFYEEV

SEQ ID NO: 101901 - protein, 9 aa, Homo Sapiens
IEATKQYAL

SEQ ID NO: 101902 - protein, 9 aa, Homo Sapiens
IEDNPHPRL

SEQ ID NO: 101903 - protein, 9 aa, Homo Sapiens
IEDPVRPEV

SEQ ID NO: 101904 - protein, 9 aa, Homo Sapiens
IEDRPMPKL

SEQ ID NO: 101905 - protein, 9 aa, Homo Sapiens
IEFKETQAL

SEQ ID NO: 101906 - protein, 9 aa, Homo Sapiens
IEFSDKESV

SEQ ID NO: 101907 - protein, 9 aa, Homo Sapiens
IEFSIPDSL

SEQ ID NO: 101908 - protein, 9 aa, Homo Sapiens
IEHDVVMKA

SEQ ID NO: 101909 - protein, 9 aa, Homo Sapiens
IEHEGQECL

SEQ ID NO: 101910 - protein, 9 aa, Homo Sapiens
IEHFIHIIT

SEQ ID NO: 101911 - protein, 9 aa, Homo Sapiens
IEHLIGKKL

SEQ ID NO: 101912 - protein, 9 aa, Homo Sapiens
IEHRNEAEL

SEQ ID NO: 101913 - protein, 9 aa, Homo Sapiens
IEIEKGEAV

SEQ ID NO: 101914 - protein, 9 aa, Homo Sapiens
IEKAQLKSL

SEQ ID NO: 101915 - protein, 9 aa, Homo Sapiens
IEKCGEAAL

SEQ ID NO: 101916 - protein, 9 aa, Homo Sapiens
IEKEGEFTL

SEQ ID NO: 101917 - protein, 9 aa, Homo Sapiens
IEKEHVEEI

SEQ ID NO: 101918 - protein, 9 aa, Homo Sapiens
IEKETKEYF

SEQ ID NO: 101919 - protein, 9 aa, Homo Sapiens
IEKFDKSKL

SEQ ID NO: 101920 - protein, 9 aa, Homo Sapiens
IEKKLKETL

SEQ ID NO: 101921 - protein, 9 aa, Homo Sapiens
IEKNLETPL

SEQ ID NO: 101922 - protein, 9 aa, Homo Sapiens
IEKPGGIIV

SEQ ID NO: 101923 - protein, 9 aa, Homo Sapiens
IEKQPPQVL

SEQ ID NO: 101924 - protein, 9 aa, Homo Sapiens
IEKSTQEKL

SEQ ID NO: 101925 - protein, 9 aa, Homo Sapiens
IEKTDPTTL

SEQ ID NO: 101926 - protein, 9 aa, Homo Sapiens
IEKVEHSDL

SEQ ID NO: 101927 - protein, 9 aa, Homo Sapiens
IELEGSQSL

SEQ ID NO: 101928 - protein, 9 aa, Homo Sapiens
IELPNIQKV

SEQ ID NO: 101929 - protein, 9 aa, Homo Sapiens
IEMETKTSI

SEQ ID NO: 101930 - protein, 9 aa, Homo Sapiens
IEMNEPVQL

SEQ ID NO: 101931 - protein, 9 aa, Homo Sapiens
IENGGVAVL

SEQ ID NO: 101932 - protein, 9 aa, Homo Sapiens
IENGHIFTV

SEQ ID NO: 101933 - protein, 9 aa, Homo Sapiens
IEPADAHVL

SEQ ID NO: 101934 - protein, 9 aa, Homo Sapiens
IEPGVSVSL

SEQ ID NO: 101935 - protein, 9 aa, Homo Sapiens
IEQEIRILL

SEQ ID NO: 101936 - protein, 9 aa, Homo Sapiens
IEQEKQRSL

SEQ ID NO: 101937 - protein, 9 aa, Homo Sapiens
IEQEKRSEI

SEQ ID NO: 101938 - protein, 9 aa, Homo Sapiens
IEQEQKLAL

SEQ ID NO: 101939 - protein, 9 aa, Homo Sapiens
IEQGNTKAL

SEQ ID NO: 101940 - protein, 9 aa, Homo Sapiens
IERALQPCI

SEQ ID NO: 101941 - protein, 9 aa, Homo Sapiens
IERENAAQL

SEQ ID NO: 101942 - protein, 9 aa, Homo Sapiens
IERPVTVFL

SEQ ID NO: 101943 - protein, 9 aa, Homo Sapiens
IERYPEETL

SEQ ID NO: 101944 - protein, 9 aa, Homo Sapiens
IESNHPIVL

SEQ ID NO: 101945 - protein, 9 aa, Homo Sapiens
IESPLFLKL

SEQ ID NO: 101946 - protein, 9 aa, Homo Sapiens
IESQDRPKL

SEQ ID NO: 101947 - protein, 9 aa, Homo Sapiens
IESSPQYRL

SEQ ID NO: 101948 - protein, 9 aa, Homo Sapiens
IESSVGKSL

SEQ ID NO: 101949 - protein, 9 aa, Homo Sapiens
IETINFHEV

SEQ ID NO: 101950 - protein, 9 aa, Homo Sapiens
IEVAKTQAL

SEQ ID NO: 101951 - protein, 9 aa, Homo Sapiens
IEVEKPFAI

SEQ ID NO: 101952 - protein, 9 aa, Homo Sapiens
IEVENKEVL

SEQ ID NO: 101953 - protein, 9 aa, Homo Sapiens
IEVENKNNL

SEQ ID NO: 101954 - protein, 9 aa, Homo Sapiens
IEYAKPTRL

SEQ ID NO: 101955 - protein, 9 aa, Homo Sapiens
IEYEHERDM

SEQ ID NO: 101956 - protein, 9 aa, Homo Sapiens
IEYEKKQTL

SEQ ID NO: 101957 - protein, 9 aa, Homo Sapiens
IEYENKEKL

SEQ ID NO: 101958 - protein, 9 aa, Homo Sapiens
IEYQEKPLL

SEQ ID NO: 101959 - protein, 9 aa, Homo Sapiens
IEYQSKPLL

SEQ ID NO: 101960 - protein, 9 aa, Homo Sapiens
IEYVKPSDL

SEQ ID NO: 101961 - protein, 9 aa, Homo Sapiens
IKADHVSTY

SEQ ID NO: 101962 - protein, 9 aa, Homo Sapiens
IKSWVIGAI

SEQ ID NO: 101963 - protein, 9 aa, Homo Sapiens
KDAYLPLRL

SEQ ID NO: 101964 - protein, 9 aa, Homo Sapiens
KDFEQLISI

SEQ ID NO: 101965 - protein, 9 aa, Homo Sapiens
KDFEQPLAI

SEQ ID NO: 101966 - protein, 9 aa, Homo Sapiens
KDILKPEIM

SEQ ID NO: 101967 - protein, 9 aa, Homo Sapiens
KDIPVVHQL

SEQ ID NO: 101968 - protein, 9 aa, Homo Sapiens
KDIQHWESL

SEQ ID NO: 101969 - protein, 9 aa, Homo Sapiens
KDLANQVSV

SEQ ID NO: 101970 - protein, 9 aa, Homo Sapiens
KDLVVPEKW

SEQ ID NO: 101971 - protein, 9 aa, Homo Sapiens
KDPKISTSL

SEQ ID NO: 101972 - protein, 9 aa, Homo Sapiens
KDSTLIMQL

SEQ ID NO: 101973 - protein, 9 aa, Homo Sapiens
KDTTLPASA

SEQ ID NO: 101974 - protein, 9 aa, Homo Sapiens
KDVDGAYMT

SEQ ID NO: 101975 - protein, 9 aa, Homo Sapiens
KDVKLPVQL

SEQ ID NO: 101976 - protein, 9 aa, Homo Sapiens
KDWEMHVHF

SEQ ID NO: 101977 - protein, 9 aa, Homo Sapiens
KEAALSTAL

SEQ ID NO: 101978 - protein, 9 aa, Homo Sapiens
KEAAVKTCL

SEQ ID NO: 101979 - protein, 9 aa, Homo Sapiens
KEAEFLQKL

SEQ ID NO: 101980 - protein, 9 aa, Homo Sapiens
KEAEILEVL

SEQ ID NO: 101981 - protein, 9 aa, Homo Sapiens
KEAEILSVL

SEQ ID NO: 101982 - protein, 9 aa, Homo Sapiens
KEAEKSPQL

SEQ ID NO: 101983 - protein, 9 aa, Homo Sapiens
KEAERDVSL

SEQ ID NO: 101984 - protein, 9 aa, Homo Sapiens
KEAETRAEF

SEQ ID NO: 101985 - protein, 9 aa, Homo Sapiens
KEAKFAQTL

SEQ ID NO: 101986 - protein, 9 aa, Homo Sapiens
KEALKQEVM

SEQ ID NO: 101987 - protein, 9 aa, Homo Sapiens
KEALVQVEV

SEQ ID NO: 101988 - protein, 9 aa, Homo Sapiens
KEAPAKVEV

SEQ ID NO: 101989 - protein, 9 aa, Homo Sapiens
KEAPAPPKA

SEQ ID NO: 101990 - protein, 9 aa, Homo Sapiens
KEAPPMEKP

SEQ ID NO: 101991 - protein, 9 aa, Homo Sapiens
KEAPPPVLL

SEQ ID NO: 101992 - protein, 9 aa, Homo Sapiens
KEAPTAYSL

SEQ ID NO: 101993 - protein, 9 aa, Homo Sapiens
KEAQRIMTL

SEQ ID NO: 101994 - protein, 9 aa, Homo Sapiens
KEASTTVRV

SEQ ID NO: 101995 - protein, 9 aa, Homo Sapiens
KEAVIKHSL

SEQ ID NO: 101996 - protein, 9 aa, Homo Sapiens
KECDFQTKF

SEQ ID NO: 101997 - protein, 9 aa, Homo Sapiens
KECGKAFTV

SEQ ID NO: 101998 - protein, 9 aa, Homo Sapiens
KECQKIIRL

SEQ ID NO: 101999 - protein, 9 aa, Homo Sapiens
KEDDPKAAL

SEQ ID NO: 102000 - protein, 9 aa, Homo Sapiens
KEDLPKVVV

SEQ ID NO: 102001 - protein, 9 aa, Homo Sapiens
KEDSKLIAL

SEQ ID NO: 102002 - protein, 9 aa, Homo Sapiens
KEEPPQPQL

SEQ ID NO: 102003 - protein, 9 aa, Homo Sapiens
KEEPVKLAV

SEQ ID NO: 102004 - protein, 9 aa, Homo Sapiens
KEESIVSSL

SEQ ID NO: 102005 - protein, 9 aa, Homo Sapiens
KEEVTPEQL

SEQ ID NO: 102006 - protein, 9 aa, Homo Sapiens
KEEYLKPVL

SEQ ID NO: 102007 - protein, 9 aa, Homo Sapiens
KEFAQIIKI

SEQ ID NO: 102008 - protein, 9 aa, Homo Sapiens
KEFDGKSLV

SEQ ID NO: 102009 - protein, 9 aa, Homo Sapiens
KEFEEKRGL

SEQ ID NO: 102010 - protein, 9 aa, Homo Sapiens
KEFEGKTLV

SEQ ID NO: 102011 - protein, 9 aa, Homo Sapiens
KEFEKEISA

SEQ ID NO: 102012 - protein, 9 aa, Homo Sapiens
KEFEKRKML

SEQ ID NO: 102013 - protein, 9 aa, Homo Sapiens
KEFETPEKA

SEQ ID NO: 102014 - protein, 9 aa, Homo Sapiens
KEFIKIVEA

SEQ ID NO: 102015 - protein, 9 aa, Homo Sapiens
KEFKNGYNL

SEQ ID NO: 102016 - protein, 9 aa, Homo Sapiens
KEFLKPEKF

SEQ ID NO: 102017 - protein, 9 aa, Homo Sapiens
KEFNEPRVL

SEQ ID NO: 102018 - protein, 9 aa, Homo Sapiens
KEFPEKQEL

SEQ ID NO: 102019 - protein, 9 aa, Homo Sapiens
KEFSEENVL

SEQ ID NO: 102020 - protein, 9 aa, Homo Sapiens
KEFSGHSSL

SEQ ID NO: 102021 - protein, 9 aa, Homo Sapiens
KEFVGKPTI

SEQ ID NO: 102022 - protein, 9 aa, Homo Sapiens
KEGDIVTLI

SEQ ID NO: 102023 - protein, 9 aa, Homo Sapiens
KEGEEQPVL

SEQ ID NO: 102024 - protein, 9 aa, Homo Sapiens
KEGEFVAQF

SEQ ID NO: 102025 - protein, 9 aa, Homo Sapiens
KEGEIIHLI

SEQ ID NO: 102026 - protein, 9 aa, Homo Sapiens
KEGFPITAI

SEQ ID NO: 102027 - protein, 9 aa, Homo Sapiens
KEGFPITSL

SEQ ID NO: 102028 - protein, 9 aa, Homo Sapiens
KEGIVFKSL

SEQ ID NO: 102029 - protein, 9 aa, Homo Sapiens
KEGKPPISV

SEQ ID NO: 102030 - protein, 9 aa, Homo Sapiens
KEGLPTRAL

SEQ ID NO: 102031 - protein, 9 aa, Homo Sapiens
KEGVFAKEV

SEQ ID NO: 102032 - protein, 9 aa, Homo Sapiens
KEGVVYVEV

SEQ ID NO: 102033 - protein, 9 aa, Homo Sapiens
KEHEAITKV

SEQ ID NO: 102034 - protein, 9 aa, Homo Sapiens
KEHEVTIFV

SEQ ID NO: 102035 - protein, 9 aa, Homo Sapiens
KEHLYFETV

SEQ ID NO: 102036 - protein, 9 aa, Homo Sapiens
KEHPFILNL

SEQ ID NO: 102037 - protein, 9 aa, Homo Sapiens
KEHPLFKKL

SEQ ID NO: 102038 - protein, 9 aa, Homo Sapiens
KEIDIYANL

SEQ ID NO: 102039 - protein, 9 aa, Homo Sapiens
KEIDKEEHL

SEQ ID NO: 102040 - protein, 9 aa, Homo Sapiens
KEIEDFDSL

SEQ ID NO: 102041 - protein, 9 aa, Homo Sapiens
KEIEGIFHA

SEQ ID NO: 102042 - protein, 9 aa, Homo Sapiens
KEIEGVTKT

SEQ ID NO: 102043 - protein, 9 aa, Homo Sapiens
KEIEKDLRL

SEQ ID NO: 102044 - protein, 9 aa, Homo Sapiens
KEIESRVVF

SEQ ID NO: 102045 - protein, 9 aa, Homo Sapiens
KEIFLRELI

SEQ ID NO: 102046 - protein, 9 aa, Homo Sapiens
KEIGADLVL

SEQ ID NO: 102047 - protein, 9 aa, Homo Sapiens
KEIGDIAGV

SEQ ID NO: 102048 - protein, 9 aa, Homo Sapiens
KEIGELTQL

SEQ ID NO: 102049 - protein, 9 aa, Homo Sapiens
KEIGTKQSF

SEQ ID NO: 102050 - protein, 9 aa, Homo Sapiens
KEIHIQPHL

SEQ ID NO: 102051 - protein, 9 aa, Homo Sapiens
KEIIQDVTL

SEQ ID NO: 102052 - protein, 9 aa, Homo Sapiens
KEIKEVIEL

SEQ ID NO: 102053 - protein, 9 aa, Homo Sapiens
KEILKEIGV

SEQ ID NO: 102054 - protein, 9 aa, Homo Sapiens
KEILKEREL

SEQ ID NO: 102055 - protein, 9 aa, Homo Sapiens
KEILPAAEI

SEQ ID NO: 102056 - protein, 9 aa, Homo Sapiens
KEISDLHYL

SEQ ID NO: 102057 - protein, 9 aa, Homo Sapiens
KEISITHHV

SEQ ID NO: 102058 - protein, 9 aa, Homo Sapiens
KEITEGKTV

SEQ ID NO: 102059 - protein, 9 aa, Homo Sapiens
KEIVGVVNV

SEQ ID NO: 102060 - protein, 9 aa, Homo Sapiens
KEKAEIERM

SEQ ID NO: 102061 - protein, 9 aa, Homo Sapiens
KEKASWSSL

SEQ ID NO: 102062 - protein, 9 aa, Homo Sapiens
KEKEFEETM

SEQ ID NO: 102063 - protein, 9 aa, Homo Sapiens
KEKEFQEEL

SEQ ID NO: 102064 - protein, 9 aa, Homo Sapiens
KEKEGIAKI

SEQ ID NO: 102065 - protein, 9 aa, Homo Sapiens
KEKELVTTV

SEQ ID NO: 102066 - protein, 9 aa, Homo Sapiens
KEKEPEEEL

SEQ ID NO: 102067 - protein, 9 aa, Homo Sapiens
KEKGSTLDL

SEQ ID NO: 102068 - protein, 9 aa, Homo Sapiens
KEKKDRLAL

SEQ ID NO: 102069 - protein, 9 aa, Homo Sapiens
KEKKEEQVI

SEQ ID NO: 102070 - protein, 9 aa, Homo Sapiens
KEKLCYVAL

SEQ ID NO: 102071 - protein, 9 aa, Homo Sapiens
KEKLFRERL

SEQ ID NO: 102072 - protein, 9 aa, Homo Sapiens
KEKPDIFQL

SEQ ID NO: 102073 - protein, 9 aa, Homo Sapiens
KEKPDPNNL

SEQ ID NO: 102074 - protein, 9 aa, Homo Sapiens
KEKPEEESL

SEQ ID NO: 102075 - protein, 9 aa, Homo Sapiens
KEKPGSEVL

SEQ ID NO: 102076 - protein, 9 aa, Homo Sapiens
KEKPNDPTL

SEQ ID NO: 102077 - protein, 9 aa, Homo Sapiens
KEKTIHLTL

SEQ ID NO: 102078 - protein, 9 aa, Homo Sapiens
KEKVIKAVV

SEQ ID NO: 102079 - protein, 9 aa, Homo Sapiens
KEKVLATVT

SEQ ID NO: 102080 - protein, 9 aa, Homo Sapiens
KEKVPGITI

SEQ ID NO: 102081 - protein, 9 aa, Homo Sapiens
KEKVTRIIL

SEQ ID NO: 102082 - protein, 9 aa, Homo Sapiens
KELATVRTI

SEQ ID NO: 102083 - protein, 9 aa, Homo Sapiens
KELDKFDNL

SEQ ID NO: 102084 - protein, 9 aa, Homo Sapiens
KELDPIQKL

SEQ ID NO: 102085 - protein, 9 aa, Homo Sapiens
KELEEEITL

SEQ ID NO: 102086 - protein, 9 aa, Homo Sapiens
KELEEQRKL

SEQ ID NO: 102087 - protein, 9 aa, Homo Sapiens
KELEKTLAL

SEQ ID NO: 102088 - protein, 9 aa, Homo Sapiens
KELEKTYSA

SEQ ID NO: 102089 - protein, 9 aa, Homo Sapiens
KELEPLKEM

SEQ ID NO: 102090 - protein, 9 aa, Homo Sapiens
KELERVTSL

SEQ ID NO: 102091 - protein, 9 aa, Homo Sapiens
KELIKPPTI

SEQ ID NO: 102092 - protein, 9 aa, Homo Sapiens
KELKLLQTI

SEQ ID NO: 102093 - protein, 9 aa, Homo Sapiens
KELLGPPEA

SEQ ID NO: 102094 - protein, 9 aa, Homo Sapiens
KELNILHEM

SEQ ID NO: 102095 - protein, 9 aa, Homo Sapiens
KELPEYYEL

SEQ ID NO: 102096 - protein, 9 aa, Homo Sapiens
KELSDSVTL

SEQ ID NO: 102097 - protein, 9 aa, Homo Sapiens
KEMEQLLEM

SEQ ID NO: 102098 - protein, 9 aa, Homo Sapiens
KEMEVSPSA

SEQ ID NO: 102099 - protein, 9 aa, Homo Sapiens
KEMGQMQVL

SEQ ID NO: 102100 - protein, 9 aa, Homo Sapiens
KEMPVKVEA

SEQ ID NO: 102101 - protein, 9 aa, Homo Sapiens
KENDPSVRL

SEQ ID NO: 102102 - protein, 9 aa, Homo Sapiens
KENEEKVCL

SEQ ID NO: 102103 - protein, 9 aa, Homo Sapiens
KENKKFPVF

SEQ ID NO: 102104 - protein, 9 aa, Homo Sapiens
KENKVLKTL

SEQ ID NO: 102105 - protein, 9 aa, Homo Sapiens
KENPSTVGV

SEQ ID NO: 102106 - protein, 9 aa, Homo Sapiens
KENQNIAYV

SEQ ID NO: 102107 - protein, 9 aa, Homo Sapiens
KENRGINTL

SEQ ID NO: 102108 - protein, 9 aa, Homo Sapiens
KENSLHRAL

SEQ ID NO: 102109 - protein, 9 aa, Homo Sapiens
KENSYVKKF

SEQ ID NO: 102110 - protein, 9 aa, Homo Sapiens
KENTIEHLL

SEQ ID NO: 102111 - protein, 9 aa, Homo Sapiens
KENVIRPIL

SEQ ID NO: 102112 - protein, 9 aa, Homo Sapiens
KENYQMLTL

SEQ ID NO: 102113 - protein, 9 aa, Homo Sapiens
KEPDVSEEL

SEQ ID NO: 102114 - protein, 9 aa, Homo Sapiens
KEPEINTTL

SEQ ID NO: 102115 - protein, 9 aa, Homo Sapiens
KEPELFQTV

SEQ ID NO: 102116 - protein, 9 aa, Homo Sapiens
KEPVTPSAL

SEQ ID NO: 102117 - protein, 9 aa, Homo Sapiens
KEQAQQAGL

SEQ ID NO: 102118 - protein, 9 aa, Homo Sapiens
KEQDKPPNL

SEQ ID NO: 102119 - protein, 9 aa, Homo Sapiens
KEQDVEKEL

SEQ ID NO: 102120 - protein, 9 aa, Homo Sapiens
KEQELQQTL

SEQ ID NO: 102121 - protein, 9 aa, Homo Sapiens
KEQEPMPTV

SEQ ID NO: 102122 - protein, 9 aa, Homo Sapiens
KEQERIFQL

SEQ ID NO: 102123 - protein, 9 aa, Homo Sapiens
KEQMKVESL

SEQ ID NO: 102124 - protein, 9 aa, Homo Sapiens
KEQVPPPAV

SEQ ID NO: 102125 - protein, 9 aa, Homo Sapiens
KESEKQLLL

SEQ ID NO: 102126 - protein, 9 aa, Homo Sapiens
KESEVFYEL

SEQ ID NO: 102127 - protein, 9 aa, Homo Sapiens
KESEVVMKF

SEQ ID NO: 102128 - protein, 9 aa, Homo Sapiens
KESEVYKML

SEQ ID NO: 102129 - protein, 9 aa, Homo Sapiens
KESGLKPTL

SEQ ID NO: 102130 - protein, 9 aa, Homo Sapiens
KESSTVFEL

SEQ ID NO: 102131 - protein, 9 aa, Homo Sapiens
KESTITRKL

SEQ ID NO: 102132 - protein, 9 aa, Homo Sapiens
KESTLHLVL

SEQ ID NO: 102133 - protein, 9 aa, Homo Sapiens
KETAVFINI

SEQ ID NO: 102134 - protein, 9 aa, Homo Sapiens
KETEIVKKL

SEQ ID NO: 102135 - protein, 9 aa, Homo Sapiens
KETGDIKEL

SEQ ID NO: 102136 - protein, 9 aa, Homo Sapiens
KETGGVEKL

SEQ ID NO: 102137 - protein, 9 aa, Homo Sapiens
KETGQIVAI

SEQ ID NO: 102138 - protein, 9 aa, Homo Sapiens
KETGTPISM

SEQ ID NO: 102139 - protein, 9 aa, Homo Sapiens
KETIDNNSV

SEQ ID NO: 102140 - protein, 9 aa, Homo Sapiens
KETKDVSAL

SEQ ID NO: 102141 - protein, 9 aa, Homo Sapiens
KETLKIDIL

SEQ ID NO: 102142 - protein, 9 aa, Homo Sapiens
KETPDKVEL

SEQ ID NO: 102143 - protein, 9 aa, Homo Sapiens
KETPQSLAF

SEQ ID NO: 102144 - protein, 9 aa, Homo Sapiens
KETTYYDVL

SEQ ID NO: 102145 - protein, 9 aa, Homo Sapiens
KEVAELTRL

SEQ ID NO: 102146 - protein, 9 aa, Homo Sapiens
KEVAQAVLL

SEQ ID NO: 102147 - protein, 9 aa, Homo Sapiens
KEVATVTKL

SEQ ID NO: 102148 - protein, 9 aa, Homo Sapiens
KEVDALLHL

SEQ ID NO: 102149 - protein, 9 aa, Homo Sapiens
KEVDVGLAA

SEQ ID NO: 102150 - protein, 9 aa, Homo Sapiens
KEVDVSKQL

SEQ ID NO: 102151 - protein, 9 aa, Homo Sapiens
KEVEEISLL

SEQ ID NO: 102152 - protein, 9 aa, Homo Sapiens
KEVEQFTQV

SEQ ID NO: 102153 - protein, 9 aa, Homo Sapiens
KEVERILGL

SEQ ID NO: 102154 - protein, 9 aa, Homo Sapiens
KEVFLDRKL

SEQ ID NO: 102155 - protein, 9 aa, Homo Sapiens
KEVKEVATL

SEQ ID NO: 102156 - protein, 9 aa, Homo Sapiens
KEVNETYKL

SEQ ID NO: 102157 - protein, 9 aa, Homo Sapiens
KEVNFTSEL

SEQ ID NO: 102158 - protein, 9 aa, Homo Sapiens
KEVQDGIEL

SEQ ID NO: 102159 - protein, 9 aa, Homo Sapiens
KEWEKVFEM

SEQ ID NO: 102160 - protein, 9 aa, Homo Sapiens
KEWETIRSF

SEQ ID NO: 102161 - protein, 9 aa, Homo Sapiens
KEWMPVTKL

SEQ ID NO: 102162 - protein, 9 aa, Homo Sapiens
KEWVTPKEF

SEQ ID NO: 102163 - protein, 9 aa, Homo Sapiens
KEYDSISRL

SEQ ID NO: 102164 - protein, 9 aa, Homo Sapiens
KEYIQPVQL

SEQ ID NO: 102165 - protein, 9 aa, Homo Sapiens
KEYVAPRVL

SEQ ID NO: 102166 - protein, 9 aa, Homo Sapiens
KEYVGIVRL

SEQ ID NO: 102167 - protein, 9 aa, Homo Sapiens
KQFEKQVEL

SEQ ID NO: 102168 - protein, 9 aa, Homo Sapiens
KQFGNILIL

SEQ ID NO: 102169 - protein, 9 aa, Homo Sapiens
KQLEDGRTL

SEQ ID NO: 102170 - protein, 9 aa, Homo Sapiens
KQQLELDSI

SEQ ID NO: 102171 - protein, 9 aa, Homo Sapiens
LEAAIPERV

SEQ ID NO: 102172 - protein, 9 aa, Homo Sapiens
LEADRMAAL

SEQ ID NO: 102173 - protein, 9 aa, Homo Sapiens
LEAEPQFSL

SEQ ID NO: 102174 - protein, 9 aa, Homo Sapiens
LEAHFVPLV

SEQ ID NO: 102175 - protein, 9 aa, Homo Sapiens
LEAKNTQTL

SEQ ID NO: 102176 - protein, 9 aa, Homo Sapiens
LECAKAYLL

SEQ ID NO: 102177 - protein, 9 aa, Homo Sapiens
LEGQIHPEL

SEQ ID NO: 102178 - protein, 9 aa, Homo Sapiens
LEHEGLVSL

SEQ ID NO: 102179 - protein, 9 aa, Homo Sapiens
LEHEYIQNF

SEQ ID NO: 102180 - protein, 9 aa, Homo Sapiens
LEHGADPTV

SEQ ID NO: 102181 - protein, 9 aa, Homo Sapiens
LEHIKTHEL

SEQ ID NO: 102182 - protein, 9 aa, Homo Sapiens
LEHKIIIRV

SEQ ID NO: 102183 - protein, 9 aa, Homo Sapiens
LEHLTNEAL

SEQ ID NO: 102184 - protein, 9 aa, Homo Sapiens
LEHQVFTVL

SEQ ID NO: 102185 - protein, 9 aa, Homo Sapiens
LEHVPDTVL

SEQ ID NO: 102186 - protein, 9 aa, Homo Sapiens
LEHVQPWSV

SEQ ID NO: 102187 - protein, 9 aa, Homo Sapiens
LEIQEKPAL

SEQ ID NO: 102188 - protein, 9 aa, Homo Sapiens
LEKAAEPTL

SEQ ID NO: 102189 - protein, 9 aa, Homo Sapiens
LEKAKAKEL

SEQ ID NO: 102190 - protein, 9 aa, Homo Sapiens
LEKAVQHCL

SEQ ID NO: 102191 - protein, 9 aa, Homo Sapiens
LEKAVVLEL

SEQ ID NO: 102192 - protein, 9 aa, Homo Sapiens
LEKDAQNRL

SEQ ID NO: 102193 - protein, 9 aa, Homo Sapiens
LEKERQEQL

SEQ ID NO: 102194 - protein, 9 aa, Homo Sapiens
LEKGKETLL

SEQ ID NO: 102195 - protein, 9 aa, Homo Sapiens
LEKGLATSL

SEQ ID NO: 102196 - protein, 9 aa, Homo Sapiens
LEKIADPTL

SEQ ID NO: 102197 - protein, 9 aa, Homo Sapiens
LEKKETPSL

SEQ ID NO: 102198 - protein, 9 aa, Homo Sapiens
LEKKFGIQL

SEQ ID NO: 102199 - protein, 9 aa, Homo Sapiens
LEKKIEQEL

SEQ ID NO: 102200 - protein, 9 aa, Homo Sapiens
LEKKIGKSI

SEQ ID NO: 102201 - protein, 9 aa, Homo Sapiens
LEKKKDYKL

SEQ ID NO: 102202 - protein, 9 aa, Homo Sapiens
LEKNIADLM

SEQ ID NO: 102203 - protein, 9 aa, Homo Sapiens
LEKNKIPAL

SEQ ID NO: 102204 - protein, 9 aa, Homo Sapiens
LELGPKPEV

SEQ ID NO: 102205 - protein, 9 aa, Homo Sapiens
LELPGQPSV

SEQ ID NO: 102206 - protein, 9 aa, Homo Sapiens
LEMIEPRTL

SEQ ID NO: 102207 - protein, 9 aa, Homo Sapiens
LEMIQQEKL

SEQ ID NO: 102208 - protein, 9 aa, Homo Sapiens
LENDGATAL

SEQ ID NO: 102209 - protein, 9 aa, Homo Sapiens
LENDKTIKL

SEQ ID NO: 102210 - protein, 9 aa, Homo Sapiens
LENMHIEQL

SEQ ID NO: 102211 - protein, 9 aa, Homo Sapiens
LENSKQPSV

SEQ ID NO: 102212 - protein, 9 aa, Homo Sapiens
LENVIRDAV

SEQ ID NO: 102213 - protein, 9 aa, Homo Sapiens
LEPHDSPVL

SEQ ID NO: 102214 - protein, 9 aa, Homo Sapiens
LEQEKTQAL

SEQ ID NO: 102215 - protein, 9 aa, Homo Sapiens
LEQKIQQEL

SEQ ID NO: 102216 - protein, 9 aa, Homo Sapiens
LEQQNKILL

SEQ ID NO: 102217 - protein, 9 aa, Homo Sapiens
LERDQTCKL

SEQ ID NO: 102218 - protein, 9 aa, Homo Sapiens
LERFVEECF

SEQ ID NO: 102219 - protein, 9 aa, Homo Sapiens
LERIEETAL

SEQ ID NO: 102220 - protein, 9 aa, Homo Sapiens
LERLGSLTL

SEQ ID NO: 102221 - protein, 9 aa, Homo Sapiens
LERLSELAL

SEQ ID NO: 102222 - protein, 9 aa, Homo Sapiens
LERMGANSL

SEQ ID NO: 102223 - protein, 9 aa, Homo Sapiens
LERNITIKL

SEQ ID NO: 102224 - protein, 9 aa, Homo Sapiens
LERQGQGQL

SEQ ID NO: 102225 - protein, 9 aa, Homo Sapiens
LESDNNTAL

SEQ ID NO: 102226 - protein, 9 aa, Homo Sapiens
LESEHPKVM

SEQ ID NO: 102227 - protein, 9 aa, Homo Sapiens
LESGGFRSL

SEQ ID NO: 102228 - protein, 9 aa, Homo Sapiens
LESKTYHAL

SEQ ID NO: 102229 - protein, 9 aa, Homo Sapiens
LETDSVQRL

SEQ ID NO: 102230 - protein, 9 aa, Homo Sapiens
LETLVSPKL

SEQ ID NO: 102231 - protein, 9 aa, Homo Sapiens
LETPWELTV

SEQ ID NO: 102232 - protein, 9 aa, Homo Sapiens
LETSTGHSL

SEQ ID NO: 102233 - protein, 9 aa, Homo Sapiens
LETTGGHSV

SEQ ID NO: 102234 - protein, 9 aa, Homo Sapiens
LEVECATQL

SEQ ID NO: 102235 - protein, 9 aa, Homo Sapiens
LEVEDRTSL

SEQ ID NO: 102236 - protein, 9 aa, Homo Sapiens
LEVEKSLVL

SEQ ID NO: 102237 - protein, 9 aa, Homo Sapiens
LEVGELAKL

SEQ ID NO: 102238 - protein, 9 aa, Homo Sapiens
LEVVQTEKL

SEQ ID NO: 102239 - protein, 9 aa, Homo Sapiens
LKERESILK

SEQ ID NO: 102240 - protein, 9 aa, Homo Sapiens
LQIDNARLA

SEQ ID NO: 102241 - protein, 9 aa, Homo Sapiens
LRELELQRR

SEQ ID NO: 102242 - protein, 9 aa, Homo Sapiens
LTQALKDNK

SEQ ID NO: 102243 - protein, 9 aa, Homo Sapiens
MEDETQKEL

SEQ ID NO: 102244 - protein, 9 aa, Homo Sapiens
MEFERQAEI

SEQ ID NO: 102245 - protein, 9 aa, Homo Sapiens
MEFKAVQQV

SEQ ID NO: 102246 - protein, 9 aa, Homo Sapiens
MEGKWLLCM

SEQ ID NO: 102247 - protein, 9 aa, Homo Sapiens
MEGPAPPVL

SEQ ID NO: 102248 - protein, 9 aa, Homo Sapiens
MEHGTVTVV

SEQ ID NO: 102249 - protein, 9 aa, Homo Sapiens
MEHPYFYTV

SEQ ID NO: 102250 - protein, 9 aa, Homo Sapiens
MEKEDGESL

SEQ ID NO: 102251 - protein, 9 aa, Homo Sapiens
MEKTDETRL

SEQ ID NO: 102252 - protein, 9 aa, Homo Sapiens
MENKIRSTL

SEQ ID NO: 102253 - protein, 9 aa, Homo Sapiens
MEQSIKSVL

SEQ ID NO: 102254 - protein, 9 aa, Homo Sapiens
MESGIEPSV

SEQ ID NO: 102255 - protein, 9 aa, Homo Sapiens
METLILKEL

SEQ ID NO: 102256 - protein, 9 aa, Homo Sapiens
MEVAGVTAL

SEQ ID NO: 102257 - protein, 9 aa, Homo Sapiens
NDVLVPKPF

SEQ ID NO: 102258 - protein, 9 aa, Homo Sapiens
NEASVLHNL

SEQ ID NO: 102259 - protein, 9 aa, Homo Sapiens
NECVVVIRV

SEQ ID NO: 102260 - protein, 9 aa, Homo Sapiens
NEFDAIQKA

SEQ ID NO: 102261 - protein, 9 aa, Homo Sapiens
NEFHSPIGL

SEQ ID NO: 102262 - protein, 9 aa, Homo Sapiens
NEFKNIPEI

SEQ ID NO: 102263 - protein, 9 aa, Homo Sapiens
NEFPEPIKL

SEQ ID NO: 102264 - protein, 9 aa, Homo Sapiens
NEFPVIVRL

SEQ ID NO: 102265 - protein, 9 aa, Homo Sapiens
NEFQGAEAM

SEQ ID NO: 102266 - protein, 9 aa, Homo Sapiens
NEFVHINNL

SEQ ID NO: 102267 - protein, 9 aa, Homo Sapiens
NEHHVNATL

SEQ ID NO: 102268 - protein, 9 aa, Homo Sapiens
NEIKDSVVA

SEQ ID NO: 102269 - protein, 9 aa, Homo Sapiens
NEIRTLIDL

SEQ ID NO: 102270 - protein, 9 aa, Homo Sapiens
NEITIPVTF

SEQ ID NO: 102271 - protein, 9 aa, Homo Sapiens
NEITKLTSL

SEQ ID NO: 102272 - protein, 9 aa, Homo Sapiens
NEIVTIERL

SEQ ID NO: 102273 - protein, 9 aa, Homo Sapiens
NEKQISQVL

SEQ ID NO: 102274 - protein, 9 aa, Homo Sapiens
NELEKLPSL

SEQ ID NO: 102275 - protein, 9 aa, Homo Sapiens
NELIRQEKL

SEQ ID NO: 102276 - protein, 9 aa, Homo Sapiens
NENSLFKSL

SEQ ID NO: 102277 - protein, 9 aa, Homo Sapiens
NENSNIQVL

SEQ ID NO: 102278 - protein, 9 aa, Homo Sapiens
NERDPIRAL

SEQ ID NO: 102279 - protein, 9 aa, Homo Sapiens
NERPIIFAL

SEQ ID NO: 102280 - protein, 9 aa, Homo Sapiens
NERYLHLAA

SEQ ID NO: 102281 - protein, 9 aa, Homo Sapiens
NETEIIKCL

SEQ ID NO: 102282 - protein, 9 aa, Homo Sapiens
NETTGLYSL

SEQ ID NO: 102283 - protein, 9 aa, Homo Sapiens
NEVEKQWRL

SEQ ID NO: 102284 - protein, 9 aa, Homo Sapiens
NEVEQRHTL

SEQ ID NO: 102285 - protein, 9 aa, Homo Sapiens
NEVIGIRQL

SEQ ID NO: 102286 - protein, 9 aa, Homo Sapiens
NEVVQVHAA

SEQ ID NO: 102287 - protein, 9 aa, Homo Sapiens
NEWIAVNTV

SEQ ID NO: 102288 - protein, 9 aa, Homo Sapiens
NEYFTNEVL

SEQ ID NO: 102289 - protein, 9 aa, Homo Sapiens
NEYGPVLHM

SEQ ID NO: 102290 - protein, 9 aa, Homo Sapiens
NEYLLPESV

SEQ ID NO: 102291 - protein, 9 aa, Homo Sapiens
PAYHSSLMD

SEQ ID NO: 102292 - protein, 9 aa, Homo Sapiens
PEAAEGPEV

SEQ ID NO: 102293 - protein, 9 aa, Homo Sapiens
PEFNLIHSL

SEQ ID NO: 102294 - protein, 9 aa, Homo Sapiens
PEYGEVIQL

SEQ ID NO: 102295 - protein, 9 aa, Homo Sapiens
PSIVHRKCF

SEQ ID NO: 102296 - protein, 9 aa, Homo Sapiens
QDRISLVSV

SEQ ID NO: 102297 - protein, 9 aa, Homo Sapiens
QDVVLNYPM

SEQ ID NO: 102298 - protein, 9 aa, Homo Sapiens
QDVVQPLTL

SEQ ID NO: 102299 - protein, 9 aa, Homo Sapiens
QEACEAYLV

SEQ ID NO: 102300 - protein, 9 aa, Homo Sapiens
QEADKCPTL

SEQ ID NO: 102301 - protein, 9 aa, Homo Sapiens
QEAPALVRL

SEQ ID NO: 102302 - protein, 9 aa, Homo Sapiens
QEASEAYLV

SEQ ID NO: 102303 - protein, 9 aa, Homo Sapiens
QECEKLKKL

SEQ ID NO: 102304 - protein, 9 aa, Homo Sapiens
QEENITRAL

SEQ ID NO: 102305 - protein, 9 aa, Homo Sapiens
QEEPLPHEL

SEQ ID NO: 102306 - protein, 9 aa, Homo Sapiens
QEEQRYQAL

SEQ ID NO: 102307 - protein, 9 aa, Homo Sapiens
QEETNFKSL

SEQ ID NO: 102308 - protein, 9 aa, Homo Sapiens
QEFGADVRL

SEQ ID NO: 102309 - protein, 9 aa, Homo Sapiens
QEFGILDKV

SEQ ID NO: 102310 - protein, 9 aa, Homo Sapiens
QEFPEHHKM

SEQ ID NO: 102311 - protein, 9 aa, Homo Sapiens
QEHAQEVVL

SEQ ID NO: 102312 - protein, 9 aa, Homo Sapiens
QEHLQLQNL

SEQ ID NO: 102313 - protein, 9 aa, Homo Sapiens
QEHPAIRTL

SEQ ID NO: 102314 - protein, 9 aa, Homo Sapiens
QEHPCLVEL

SEQ ID NO: 102315 - protein, 9 aa, Homo Sapiens
QEHPSIRTL

SEQ ID NO: 102316 - protein, 9 aa, Homo Sapiens
QEHQGHQTF

SEQ ID NO: 102317 - protein, 9 aa, Homo Sapiens
QEIEELTKI

SEQ ID NO: 102318 - protein, 9 aa, Homo Sapiens
QEIEKPVAV

SEQ ID NO: 102319 - protein, 9 aa, Homo Sapiens
QEIEQKLEV

SEQ ID NO: 102320 - protein, 9 aa, Homo Sapiens
QEIEVRPGI

SEQ ID NO: 102321 - protein, 9 aa, Homo Sapiens
QEIKDIYGL

SEQ ID NO: 102322 - protein, 9 aa, Homo Sapiens
QEIKTAHKL

SEQ ID NO: 102323 - protein, 9 aa, Homo Sapiens
QEIPEPLQL

SEQ ID NO: 102324 - protein, 9 aa, Homo Sapiens
QEIQDQLSL

SEQ ID NO: 102325 - protein, 9 aa, Homo Sapiens
QEITNRLSL

SEQ ID NO: 102326 - protein, 9 aa, Homo Sapiens
QEKAIPLAL

SEQ ID NO: 102327 - protein, 9 aa, Homo Sapiens
QEKEAIERL

SEQ ID NO: 102328 - protein, 9 aa, Homo Sapiens
QEKHHRISL

SEQ ID NO: 102329 - protein, 9 aa, Homo Sapiens
QEKHPGQAL

SEQ ID NO: 102330 - protein, 9 aa, Homo Sapiens
QEKKVVVYL

SEQ ID NO: 102331 - protein, 9 aa, Homo Sapiens
QEKLFIQKL

SEQ ID NO: 102332 - protein, 9 aa, Homo Sapiens
QEKPLLRAL

SEQ ID NO: 102333 - protein, 9 aa, Homo Sapiens
QEKQIEAKI

SEQ ID NO: 102334 - protein, 9 aa, Homo Sapiens
QELDSRPQL

SEQ ID NO: 102335 - protein, 9 aa, Homo Sapiens
QELENVKTL

SEQ ID NO: 102336 - protein, 9 aa, Homo Sapiens
QELGPRFTL

SEQ ID NO: 102337 - protein, 9 aa, Homo Sapiens
QELLKTEAL

SEQ ID NO: 102338 - protein, 9 aa, Homo Sapiens
QELPIPSKL

SEQ ID NO: 102339 - protein, 9 aa, Homo Sapiens
QELYFFHEL

SEQ ID NO: 102340 - protein, 9 aa, Homo Sapiens
QEMPWNVRM

SEQ ID NO: 102341 - protein, 9 aa, Homo Sapiens
QENAEIIKL

SEQ ID NO: 102342 - protein, 9 aa, Homo Sapiens
QENDRVVMV

SEQ ID NO: 102343 - protein, 9 aa, Homo Sapiens
QENGSLVEI

SEQ ID NO: 102344 - protein, 9 aa, Homo Sapiens
QENSRVIVM

SEQ ID NO: 102345 - protein, 9 aa, Homo Sapiens
QENTQTPTV

SEQ ID NO: 102346 - protein, 9 aa, Homo Sapiens
QENVVKTLL

SEQ ID NO: 102347 - protein, 9 aa, Homo Sapiens
QEQAAKAVL

SEQ ID NO: 102348 - protein, 9 aa, Homo Sapiens
QEQEIEHHL

SEQ ID NO: 102349 - protein, 9 aa, Homo Sapiens
QEQEIEQRL

SEQ ID NO: 102350 - protein, 9 aa, Homo Sapiens
QEQPGTACL

SEQ ID NO: 102351 - protein, 9 aa, Homo Sapiens
QERDVVIRL

SEQ ID NO: 102352 - protein, 9 aa, Homo Sapiens
QESLAQARL

SEQ ID NO: 102353 - protein, 9 aa, Homo Sapiens
QESNVQLKL

SEQ ID NO: 102354 - protein, 9 aa, Homo Sapiens
QESNVRLKL

SEQ ID NO: 102355 - protein, 9 aa, Homo Sapiens
QESRCQPKV

SEQ ID NO: 102356 - protein, 9 aa, Homo Sapiens
QETAVAPSL

SEQ ID NO: 102357 - protein, 9 aa, Homo Sapiens
QETDVRAQI

SEQ ID NO: 102358 - protein, 9 aa, Homo Sapiens
QETEEKILL

SEQ ID NO: 102359 - protein, 9 aa, Homo Sapiens
QETPYLVKL

SEQ ID NO: 102360 - protein, 9 aa, Homo Sapiens
QETSVIHKI

SEQ ID NO: 102361 - protein, 9 aa, Homo Sapiens
QEVEDRPEV

SEQ ID NO: 102362 - protein, 9 aa, Homo Sapiens
QEVENFKKV

SEQ ID NO: 102363 - protein, 9 aa, Homo Sapiens
QEVRDLFQM

SEQ ID NO: 102364 - protein, 9 aa, Homo Sapiens
QEYAQVIKM

SEQ ID NO: 102365 - protein, 9 aa, Homo Sapiens
QEYIDSQKL

SEQ ID NO: 102366 - protein, 9 aa, Homo Sapiens
QEYPDLIHI

SEQ ID NO: 102367 - protein, 9 aa, Homo Sapiens
QEYQAREQL

SEQ ID NO: 102368 - protein, 9 aa, Homo Sapiens
QEYSCVVKM

SEQ ID NO: 102369 - protein, 9 aa, Homo Sapiens
QEYVPSAHL

SEQ ID NO: 102370 - protein, 9 aa, Homo Sapiens
RAESTTPEL

SEQ ID NO: 102371 - protein, 9 aa, Homo Sapiens
RDAIVFVTV

SEQ ID NO: 102372 - protein, 9 aa, Homo Sapiens
RDFEVKDLL

SEQ ID NO: 102373 - protein, 9 aa, Homo Sapiens
RDFLLKPEL

SEQ ID NO: 102374 - protein, 9 aa, Homo Sapiens
RDFQHVEKL

SEQ ID NO: 102375 - protein, 9 aa, Homo Sapiens
RDHAVVVGV

SEQ ID NO: 102376 - protein, 9 aa, Homo Sapiens
RDIKIVKKL

SEQ ID NO: 102377 - protein, 9 aa, Homo Sapiens
RDIPIVHRV

SEQ ID NO: 102378 - protein, 9 aa, Homo Sapiens
RDLEWVERL

SEQ ID NO: 102379 - protein, 9 aa, Homo Sapiens
RDMDIIMKL

SEQ ID NO: 102380 - protein, 9 aa, Homo Sapiens
RDMTMFVTA

SEQ ID NO: 102381 - protein, 9 aa, Homo Sapiens
RDPDINPCL

SEQ ID NO: 102382 - protein, 9 aa, Homo Sapiens
RDTALETAL

SEQ ID NO: 102383 - protein, 9 aa, Homo Sapiens
RDTTLETAL

SEQ ID NO: 102384 - protein, 9 aa, Homo Sapiens
RDVQHIIVF

SEQ ID NO: 102385 - protein, 9 aa, Homo Sapiens
RDWQSGRAL

SEQ ID NO: 102386 - protein, 9 aa, Homo Sapiens
REAEFTKSI

SEQ ID NO: 102387 - protein, 9 aa, Homo Sapiens
REAEKIKTL

SEQ ID NO: 102388 - protein, 9 aa, Homo Sapiens
REAESFTQL

SEQ ID NO: 102389 - protein, 9 aa, Homo Sapiens
REAFPAHKV

SEQ ID NO: 102390 - protein, 9 aa, Homo Sapiens
REAGFQVKA

SEQ ID NO: 102391 - protein, 9 aa, Homo Sapiens
REAPERPSL

SEQ ID NO: 102392 - protein, 9 aa, Homo Sapiens
REAPNPIHL

SEQ ID NO: 102393 - protein, 9 aa, Homo Sapiens
REAQMAAKL

SEQ ID NO: 102394 - protein, 9 aa, Homo Sapiens
REAQVFVRL

SEQ ID NO: 102395 - protein, 9 aa, Homo Sapiens
REARITEKL

SEQ ID NO: 102396 - protein, 9 aa, Homo Sapiens
REAVRPGVL

SEQ ID NO: 102397 - protein, 9 aa, Homo Sapiens
REAVSKTAL

SEQ ID NO: 102398 - protein, 9 aa, Homo Sapiens
RECENQLVL

SEQ ID NO: 102399 - protein, 9 aa, Homo Sapiens
RECKLMKKL

SEQ ID NO: 102400 - protein, 9 aa, Homo Sapiens
RECTIEATA

SEQ ID NO: 102401 - protein, 9 aa, Homo Sapiens
REDEKPLVL

SEQ ID NO: 102402 - protein, 9 aa, Homo Sapiens
REDFCPRKL

SEQ ID NO: 102403 - protein, 9 aa, Homo Sapiens
REDKKLQCL

SEQ ID NO: 102404 - protein, 9 aa, Homo Sapiens
REDKVHLKL

SEQ ID NO: 102405 - protein, 9 aa, Homo Sapiens
REDNQTNRL

SEQ ID NO: 102406 - protein, 9 aa, Homo Sapiens
REDQINRLI

SEQ ID NO: 102407 - protein, 9 aa, Homo Sapiens
REEEKVSAV

SEQ ID NO: 102408 - protein, 9 aa, Homo Sapiens
REEGTPLTL

SEQ ID NO: 102409 - protein, 9 aa, Homo Sapiens
REEKVKAVL

SEQ ID NO: 102410 - protein, 9 aa, Homo Sapiens
REELFIQKL

SEQ ID NO: 102411 - protein, 9 aa, Homo Sapiens
REENKQIAL

SEQ ID NO: 102412 - protein, 9 aa, Homo Sapiens
REEWKFDTL

SEQ ID NO: 102413 - protein, 9 aa, Homo Sapiens
REEWKLDTL

SEQ ID NO: 102414 - protein, 9 aa, Homo Sapiens
REFAVVTDM

SEQ ID NO: 102415 - protein, 9 aa, Homo Sapiens
REFDFFNKI

SEQ ID NO: 102416 - protein, 9 aa, Homo Sapiens
REFEERRSL

SEQ ID NO: 102417 - protein, 9 aa, Homo Sapiens
REFGKALQL

SEQ ID NO: 102418 - protein, 9 aa, Homo Sapiens
REFGNLTRM

SEQ ID NO: 102419 - protein, 9 aa, Homo Sapiens
REFHNKLKL

SEQ ID NO: 102420 - protein, 9 aa, Homo Sapiens
REFIAPVTL

SEQ ID NO: 102421 - protein, 9 aa, Homo Sapiens
REFNEEGAL

SEQ ID NO: 102422 - protein, 9 aa, Homo Sapiens
REFQKTEDM

SEQ ID NO: 102423 - protein, 9 aa, Homo Sapiens
REFQNPPQL

SEQ ID NO: 102424 - protein, 9 aa, Homo Sapiens
REFQVIQDL

SEQ ID NO: 102425 - protein, 9 aa, Homo Sapiens
REFVEREVI

SEQ ID NO: 102426 - protein, 9 aa, Homo Sapiens
REFVRQYYT

SEQ ID NO: 102427 - protein, 9 aa, Homo Sapiens
REFWAKPKP

SEQ ID NO: 102428 - protein, 9 aa, Homo Sapiens
REGDLLFTV

SEQ ID NO: 102429 - protein, 9 aa, Homo Sapiens
REGDLTNLL

SEQ ID NO: 102430 - protein, 9 aa, Homo Sapiens
REGDVITII

SEQ ID NO: 102431 - protein, 9 aa, Homo Sapiens
REGEGGLSL

SEQ ID NO: 102432 - protein, 9 aa, Homo Sapiens
REGEIAQFL

SEQ ID NO: 102433 - protein, 9 aa, Homo Sapiens
REGEYSKVL

SEQ ID NO: 102434 - protein, 9 aa, Homo Sapiens
REGFFTNGL

SEQ ID NO: 102435 - protein, 9 aa, Homo Sapiens
REGKLEHTL

SEQ ID NO: 102436 - protein, 9 aa, Homo Sapiens
REGLLFTAL

SEQ ID NO: 102437 - protein, 9 aa, Homo Sapiens
REGPGGLVM

SEQ ID NO: 102438 - protein, 9 aa, Homo Sapiens
REGSFKETI

SEQ ID NO: 102439 - protein, 9 aa, Homo Sapiens
REHDIAIKF

SEQ ID NO: 102440 - protein, 9 aa, Homo Sapiens
REHEEYLKL

SEQ ID NO: 102441 - protein, 9 aa, Homo Sapiens
REHEPPGAL

SEQ ID NO: 102442 - protein, 9 aa, Homo Sapiens
REHIKVQQL

SEQ ID NO: 102443 - protein, 9 aa, Homo Sapiens
REHTALLKI

SEQ ID NO: 102444 - protein, 9 aa, Homo Sapiens
REHVEAIKI

SEQ ID NO: 102445 - protein, 9 aa, Homo Sapiens
REIAGKMDL

SEQ ID NO: 102446 - protein, 9 aa, Homo Sapiens
REIAQDFKT

SEQ ID NO: 102447 - protein, 9 aa, Homo Sapiens
REIEELHKL

SEQ ID NO: 102448 - protein, 9 aa, Homo Sapiens
REIEGDLLL

SEQ ID NO: 102449 - protein, 9 aa, Homo Sapiens
REIEIQAHL

SEQ ID NO: 102450 - protein, 9 aa, Homo Sapiens
REIENGNSF

SEQ ID NO: 102451 - protein, 9 aa, Homo Sapiens
REIENIEKT

SEQ ID NO: 102452 - protein, 9 aa, Homo Sapiens
REIFKPRQL

SEQ ID NO: 102453 - protein, 9 aa, Homo Sapiens
REIFRNEKL

SEQ ID NO: 102454 - protein, 9 aa, Homo Sapiens
REIIQKLML

SEQ ID NO: 102455 - protein, 9 aa, Homo Sapiens
REINGMTGL

SEQ ID NO: 102456 - protein, 9 aa, Homo Sapiens
REIPIVHRV

SEQ ID NO: 102457 - protein, 9 aa, Homo Sapiens
REIQEAIAV

SEQ ID NO: 102458 - protein, 9 aa, Homo Sapiens
REIQKVTKL

SEQ ID NO: 102459 - protein, 9 aa, Homo Sapiens
REIQTAVRL

SEQ ID NO: 102460 - protein, 9 aa, Homo Sapiens
REIRKELKI

SEQ ID NO: 102461 - protein, 9 aa, Homo Sapiens
REIVTSEGL

SEQ ID NO: 102462 - protein, 9 aa, Homo Sapiens
REKAEIIRF

SEQ ID NO: 102463 - protein, 9 aa, Homo Sapiens
REKASKTFL

SEQ ID NO: 102464 - protein, 9 aa, Homo Sapiens
REKDVERFF

SEQ ID NO: 102465 - protein, 9 aa, Homo Sapiens
REKEDLVDL

SEQ ID NO: 102466 - protein, 9 aa, Homo Sapiens
REKEIKSEL

SEQ ID NO: 102467 - protein, 9 aa, Homo Sapiens
REKELEARV

SEQ ID NO: 102468 - protein, 9 aa, Homo Sapiens
REKENVTVL

SEQ ID NO: 102469 - protein, 9 aa, Homo Sapiens
REKEPDLKL

SEQ ID NO: 102470 - protein, 9 aa, Homo Sapiens
REKEQFRKL

SEQ ID NO: 102471 - protein, 9 aa, Homo Sapiens
REKFPHVKL

SEQ ID NO: 102472 - protein, 9 aa, Homo Sapiens
REKFYEAKL

SEQ ID NO: 102473 - protein, 9 aa, Homo Sapiens
REKIDQERL

SEQ ID NO: 102474 - protein, 9 aa, Homo Sapiens
REKITAQSI

SEQ ID NO: 102475 - protein, 9 aa, Homo Sapiens
REKIVEVMF

SEQ ID NO: 102476 - protein, 9 aa, Homo Sapiens
REKIYNRSL

SEQ ID NO: 102477 - protein, 9 aa, Homo Sapiens
REKKPEELI

SEQ ID NO: 102478 - protein, 9 aa, Homo Sapiens
REKLKHPVM

SEQ ID NO: 102479 - protein, 9 aa, Homo Sapiens
REKLPPSKL

SEQ ID NO: 102480 - protein, 9 aa, Homo Sapiens
REKLQEEML

SEQ ID NO: 102481 - protein, 9 aa, Homo Sapiens
REKLQQKEL

SEQ ID NO: 102482 - protein, 9 aa, Homo Sapiens
REKMTQIMF

SEQ ID NO: 102483 - protein, 9 aa, Homo Sapiens
REKQSKFIL

SEQ ID NO: 102484 - protein, 9 aa, Homo Sapiens
REKSEKFAF

SEQ ID NO: 102485 - protein, 9 aa, Homo Sapiens
REKYGDKML

SEQ ID NO: 102486 - protein, 9 aa, Homo Sapiens
RELAKAEKL

SEQ ID NO: 102487 - protein, 9 aa, Homo Sapiens
RELDIYNNL

SEQ ID NO: 102488 - protein, 9 aa, Homo Sapiens
RELDKIKGL

SEQ ID NO: 102489 - protein, 9 aa, Homo Sapiens
RELDQKTWL

SEQ ID NO: 102490 - protein, 9 aa, Homo Sapiens
RELECIREI

SEQ ID NO: 102491 - protein, 9 aa, Homo Sapiens
RELEKLFQL

SEQ ID NO: 102492 - protein, 9 aa, Homo Sapiens
RELEVQHPA

SEQ ID NO: 102493 - protein, 9 aa, Homo Sapiens
RELGFSSNL

SEQ ID NO: 102494 - protein, 9 aa, Homo Sapiens
RELIPRSIL

SEQ ID NO: 102495 - protein, 9 aa, Homo Sapiens
RELLPVKKF

SEQ ID NO: 102496 - protein, 9 aa, Homo Sapiens
RELQGETKL

SEQ ID NO: 102497 - protein, 9 aa, Homo Sapiens
RELTHLSEM

SEQ ID NO: 102498 - protein, 9 aa, Homo Sapiens
RELVAIKKV

SEQ ID NO: 102499 - protein, 9 aa, Homo Sapiens
RELVKNWVP

SEQ ID NO: 102500 - protein, 9 aa, Homo Sapiens
RELYANVVL

SEQ ID NO: 102501 - protein, 9 aa, Homo Sapiens
REMDEQIRL

SEQ ID NO: 102502 - protein, 9 aa, Homo Sapiens
REMENYEKI

SEQ ID NO: 102503 - protein, 9 aa, Homo Sapiens
REMEVKCKP

SEQ ID NO: 102504 - protein, 9 aa, Homo Sapiens
REMIPFAVV

SEQ ID NO: 102505 - protein, 9 aa, Homo Sapiens
REMLIRVNM

SEQ ID NO: 102506 - protein, 9 aa, Homo Sapiens
REMLQQSKI

SEQ ID NO: 102507 - protein, 9 aa, Homo Sapiens
REMPVKVEA

SEQ ID NO: 102508 - protein, 9 aa, Homo Sapiens
RENDCIVRI

SEQ ID NO: 102509 - protein, 9 aa, Homo Sapiens
RENDIKSYF

SEQ ID NO: 102510 - protein, 9 aa, Homo Sapiens
RENEQKRIL

SEQ ID NO: 102511 - protein, 9 aa, Homo Sapiens
RENIATHHL

SEQ ID NO: 102512 - protein, 9 aa, Homo Sapiens
RENKTAVVV

SEQ ID NO: 102513 - protein, 9 aa, Homo Sapiens
RENVNLAQI

SEQ ID NO: 102514 - protein, 9 aa, Homo Sapiens
REPDQTFSL

SEQ ID NO: 102515 - protein, 9 aa, Homo Sapiens
REPKLFRAV

SEQ ID NO: 102516 - protein, 9 aa, Homo Sapiens
REPLVRQVL

SEQ ID NO: 102517 - protein, 9 aa, Homo Sapiens
REPNVLICF

SEQ ID NO: 102518 - protein, 9 aa, Homo Sapiens
REPRPFPKL

SEQ ID NO: 102519 - protein, 9 aa, Homo Sapiens
REPVQLETL

SEQ ID NO: 102520 - protein, 9 aa, Homo Sapiens
REQGAIPRL

SEQ ID NO: 102521 - protein, 9 aa, Homo Sapiens
RERDFLKKV

SEQ ID NO: 102522 - protein, 9 aa, Homo Sapiens
REREEFYRL

SEQ ID NO: 102523 - protein, 9 aa, Homo Sapiens
RERESVLRL

SEQ ID NO: 102524 - protein, 9 aa, Homo Sapiens
REREVEERL

SEQ ID NO: 102525 - protein, 9 aa, Homo Sapiens
RERIIPRSV

SEQ ID NO: 102526 - protein, 9 aa, Homo Sapiens
RERIVPRAV

SEQ ID NO: 102527 - protein, 9 aa, Homo Sapiens
RERVTVAKL

SEQ ID NO: 102528 - protein, 9 aa, Homo Sapiens
RESERQLRL

SEQ ID NO: 102529 - protein, 9 aa, Homo Sapiens
RESIKLVSI

SEQ ID NO: 102530 - protein, 9 aa, Homo Sapiens
RESLPIYKL

SEQ ID NO: 102531 - protein, 9 aa, Homo Sapiens
RESPCHVKL

SEQ ID NO: 102532 - protein, 9 aa, Homo Sapiens
RESPRPLQL

SEQ ID NO: 102533 - protein, 9 aa, Homo Sapiens
RESTKISSL

SEQ ID NO: 102534 - protein, 9 aa, Homo Sapiens
RETDDTLVL

SEQ ID NO: 102535 - protein, 9 aa, Homo Sapiens
RETEHCVSL

SEQ ID NO: 102536 - protein, 9 aa, Homo Sapiens
RETGVIEKL

SEQ ID NO: 102537 - protein, 9 aa, Homo Sapiens
RETGYPLAV

SEQ ID NO: 102538 - protein, 9 aa, Homo Sapiens
RETHEIVAL

SEQ ID NO: 102539 - protein, 9 aa, Homo Sapiens
RETIIMNQI

SEQ ID NO: 102540 - protein, 9 aa, Homo Sapiens
RETLQQHKL

SEQ ID NO: 102541 - protein, 9 aa, Homo Sapiens
RETPPKSKL

SEQ ID NO: 102542 - protein, 9 aa, Homo Sapiens
RETSEKFKL

SEQ ID NO: 102543 - protein, 9 aa, Homo Sapiens
RETSHVTMV

SEQ ID NO: 102544 - protein, 9 aa, Homo Sapiens
RETSQTKVL

SEQ ID NO: 102545 - protein, 9 aa, Homo Sapiens
RETVIKQTM

SEQ ID NO: 102546 - protein, 9 aa, Homo Sapiens
REVALLRRL

SEQ ID NO: 102547 - protein, 9 aa, Homo Sapiens
REVDEQHQL

SEQ ID NO: 102548 - protein, 9 aa, Homo Sapiens
REVDPNEQL

SEQ ID NO: 102549 - protein, 9 aa, Homo Sapiens
REVDQVKRL

SEQ ID NO: 102550 - protein, 9 aa, Homo Sapiens
REVEIQSHL

SEQ ID NO: 102551 - protein, 9 aa, Homo Sapiens
REVIQSDSL

SEQ ID NO: 102552 - protein, 9 aa, Homo Sapiens
REVLKSKEL

SEQ ID NO: 102553 - protein, 9 aa, Homo Sapiens
REVLPSTRL

SEQ ID NO: 102554 - protein, 9 aa, Homo Sapiens
REVLRLTKL

SEQ ID NO: 102555 - protein, 9 aa, Homo Sapiens
REVNYIDKI

SEQ ID NO: 102556 - protein, 9 aa, Homo Sapiens
REVRQKVQL

SEQ ID NO: 102557 - protein, 9 aa, Homo Sapiens
REVSEEHNL

SEQ ID NO: 102558 - protein, 9 aa, Homo Sapiens
REVVFVEDV

SEQ ID NO: 102559 - protein, 9 aa, Homo Sapiens
REVVNKDVL

SEQ ID NO: 102560 - protein, 9 aa, Homo Sapiens
REVYLQDSF

SEQ ID NO: 102561 - protein, 9 aa, Homo Sapiens
REWAIKKHL

SEQ ID NO: 102562 - protein, 9 aa, Homo Sapiens
REWKGIDRL

SEQ ID NO: 102563 - protein, 9 aa, Homo Sapiens
REWTEQETL

SEQ ID NO: 102564 - protein, 9 aa, Homo Sapiens
REWTGIDRL

SEQ ID NO: 102565 - protein, 9 aa, Homo Sapiens
REWVAPEKA

SEQ ID NO: 102566 - protein, 9 aa, Homo Sapiens
REYDVPYHI

SEQ ID NO: 102567 - protein, 9 aa, Homo Sapiens
REYEPDHNL

SEQ ID NO: 102568 - protein, 9 aa, Homo Sapiens
REYHTDTTV

SEQ ID NO: 102569 - protein, 9 aa, Homo Sapiens
REYQDLLNV

SEQ ID NO: 102570 - protein, 9 aa, Homo Sapiens
RMFGGPGTA

SEQ ID NO: 102571 - protein, 9 aa, Homo Sapiens
RQADFVQVL

SEQ ID NO: 102572 - protein, 9 aa, Homo Sapiens
RQAPPHIEL

SEQ ID NO: 102573 - protein, 9 aa, Homo Sapiens
RQIEEQKAL

SEQ ID NO: 102574 - protein, 9 aa, Homo Sapiens
RQNKLTYTM

SEQ ID NO: 102575 - protein, 9 aa, Homo Sapiens
SDFLTPKAI

SEQ ID NO: 102576 - protein, 9 aa, Homo Sapiens
SDFRMEESF

SEQ ID NO: 102577 - protein, 9 aa, Homo Sapiens
SDIIDPVAL

SEQ ID NO: 102578 - protein, 9 aa, Homo Sapiens
SDIPIHNAL

SEQ ID NO: 102579 - protein, 9 aa, Homo Sapiens
SDVAYHNSL

SEQ ID NO: 102580 - protein, 9 aa, Homo Sapiens
SDVEIPATV

SEQ ID NO: 102581 - protein, 9 aa, Homo Sapiens
SDVEVPASV

SEQ ID NO: 102582 - protein, 9 aa, Homo Sapiens
SDVVQPAAV

SEQ ID NO: 102583 - protein, 9 aa, Homo Sapiens
SDWSLPATA

SEQ ID NO: 102584 - protein, 9 aa, Homo Sapiens
SEADKIKVA

SEQ ID NO: 102585 - protein, 9 aa, Homo Sapiens
SEAEKVYIV

SEQ ID NO: 102586 - protein, 9 aa, Homo Sapiens
SEAERVSEL

SEQ ID NO: 102587 - protein, 9 aa, Homo Sapiens
SEAFVIKGL

SEQ ID NO: 102588 - protein, 9 aa, Homo Sapiens
SEAGQPQAL

SEQ ID NO: 102589 - protein, 9 aa, Homo Sapiens
SEAGSRIVL

SEQ ID NO: 102590 - protein, 9 aa, Homo Sapiens
SEAKGLVTL

SEQ ID NO: 102591 - protein, 9 aa, Homo Sapiens
SEALGFEHM

SEQ ID NO: 102592 - protein, 9 aa, Homo Sapiens
SEALHAQSL

SEQ ID NO: 102593 - protein, 9 aa, Homo Sapiens
SEAMGLFCL

SEQ ID NO: 102594 - protein, 9 aa, Homo Sapiens
SEAPATVEL

SEQ ID NO: 102595 - protein, 9 aa, Homo Sapiens
SEAPEAPLL

SEQ ID NO: 102596 - protein, 9 aa, Homo Sapiens
SEAPFLHYL

SEQ ID NO: 102597 - protein, 9 aa, Homo Sapiens
SEAPGQRAL

SEQ ID NO: 102598 - protein, 9 aa, Homo Sapiens
SEAPKPASL

SEQ ID NO: 102599 - protein, 9 aa, Homo Sapiens
SEAPPSKMV

SEQ ID NO: 102600 - protein, 9 aa, Homo Sapiens
SEAPSQPSL

SEQ ID NO: 102601 - protein, 9 aa, Homo Sapiens
SEASGFCYV

SEQ ID NO: 102602 - protein, 9 aa, Homo Sapiens
SEAVFKEEL

SEQ ID NO: 102603 - protein, 9 aa, Homo Sapiens
SECDILHTL

SEQ ID NO: 102604 - protein, 9 aa, Homo Sapiens
SECGKAFSI

SEQ ID NO: 102605 - protein, 9 aa, Homo Sapiens
SECGKLFSF

SEQ ID NO: 102606 - protein, 9 aa, Homo Sapiens
SECGKTFTV

SEQ ID NO: 102607 - protein, 9 aa, Homo Sapiens
SECKSRDVL

SEQ ID NO: 102608 - protein, 9 aa, Homo Sapiens
SEDAEKKVL

SEQ ID NO: 102609 - protein, 9 aa, Homo Sapiens
SEDDVKMAL

SEQ ID NO: 102610 - protein, 9 aa, Homo Sapiens
SEDEPTRSL

SEQ ID NO: 102611 - protein, 9 aa, Homo Sapiens
SEDEVKLAL

SEQ ID NO: 102612 - protein, 9 aa, Homo Sapiens
SEDFPRPLV

SEQ ID NO: 102613 - protein, 9 aa, Homo Sapiens
SEDLNKHVL

SEQ ID NO: 102614 - protein, 9 aa, Homo Sapiens
SEDPSHPSM

SEQ ID NO: 102615 - protein, 9 aa, Homo Sapiens
SEEDFIRSL

SEQ ID NO: 102616 - protein, 9 aa, Homo Sapiens
SEEEVKLAL

SEQ ID NO: 102617 - protein, 9 aa, Homo Sapiens
SEEGGHVAV

SEQ ID NO: 102618 - protein, 9 aa, Homo Sapiens
SEEGLRNAL

SEQ ID NO: 102619 - protein, 9 aa, Homo Sapiens
SEEKPVPAA

SEQ ID NO: 102620 - protein, 9 aa, Homo Sapiens
SEERAGAPL

SEQ ID NO: 102621 - protein, 9 aa, Homo Sapiens
SEERFRPSL

SEQ ID NO: 102622 - protein, 9 aa, Homo Sapiens
SEEVVSREV

SEQ ID NO: 102623 - protein, 9 aa, Homo Sapiens
SEFAKDPSL

SEQ ID NO: 102624 - protein, 9 aa, Homo Sapiens
SEFDDEPKF

SEQ ID NO: 102625 - protein, 9 aa, Homo Sapiens
SEFEGHKRI

SEQ ID NO: 102626 - protein, 9 aa, Homo Sapiens
SEFGAPVSV

SEQ ID NO: 102627 - protein, 9 aa, Homo Sapiens
SEFICRNTF

SEQ ID NO: 102628 - protein, 9 aa, Homo Sapiens
SEFIKEKSA

SEQ ID NO: 102629 - protein, 9 aa, Homo Sapiens
SEFKAMDSI

SEQ ID NO: 102630 - protein, 9 aa, Homo Sapiens
SEFLKEEKL

SEQ ID NO: 102631 - protein, 9 aa, Homo Sapiens
SEFQERHEV

SEQ ID NO: 102632 - protein, 9 aa, Homo Sapiens
SEFQKAVKL

SEQ ID NO: 102633 - protein, 9 aa, Homo Sapiens
SEFRAFSSF

SEQ ID NO: 102634 - protein, 9 aa, Homo Sapiens
SEFYEPEAL

SEQ ID NO: 102635 - protein, 9 aa, Homo Sapiens
SEFYKHIVL

SEQ ID NO: 102636 - protein, 9 aa, Homo Sapiens
SEGHNTPKL

SEQ ID NO: 102637 - protein, 9 aa, Homo Sapiens
SEGKCFSVL

SEQ ID NO: 102638 - protein, 9 aa, Homo Sapiens
SEGLPEPVL

SEQ ID NO: 102639 - protein, 9 aa, Homo Sapiens
SEGNITKQL

SEQ ID NO: 102640 - protein, 9 aa, Homo Sapiens
SEGPHHVAL

SEQ ID NO: 102641 - protein, 9 aa, Homo Sapiens
SEGPIVATL

SEQ ID NO: 102642 - protein, 9 aa, Homo Sapiens
SEGPKVVSV

SEQ ID NO: 102643 - protein, 9 aa, Homo Sapiens
SEGPLVGSV

SEQ ID NO: 102644 - protein, 9 aa, Homo Sapiens
SEGPPAPAL

SEQ ID NO: 102645 - protein, 9 aa, Homo Sapiens
SEGPPLTSF

SEQ ID NO: 102646 - protein, 9 aa, Homo Sapiens
SEGPQRPPL

SEQ ID NO: 102647 - protein, 9 aa, Homo Sapiens
SEGPSRPVL

SEQ ID NO: 102648 - protein, 9 aa, Homo Sapiens
SEGRPVGPA

SEQ ID NO: 102649 - protein, 9 aa, Homo Sapiens
SEGTFGIHV

SEQ ID NO: 102650 - protein, 9 aa, Homo Sapiens
SEGTPVNKL

SEQ ID NO: 102651 - protein, 9 aa, Homo Sapiens
SEGVQVPSV

SEQ ID NO: 102652 - protein, 9 aa, Homo Sapiens
SEGVRVNVV

SEQ ID NO: 102653 - protein, 9 aa, Homo Sapiens
SEGVVAVLL

SEQ ID NO: 102654 - protein, 9 aa, Homo Sapiens
SEHAVNKQL

SEQ ID NO: 102655 - protein, 9 aa, Homo Sapiens
SEHGINIDL

SEQ ID NO: 102656 - protein, 9 aa, Homo Sapiens
SEHGLVVIA

SEQ ID NO: 102657 - protein, 9 aa, Homo Sapiens
SEHGVGIYV

SEQ ID NO: 102658 - protein, 9 aa, Homo Sapiens
SEHGVPTSV

SEQ ID NO: 102659 - protein, 9 aa, Homo Sapiens
SEHLPLSKL

SEQ ID NO: 102660 - protein, 9 aa, Homo Sapiens
SEHPFVNGV

SEQ ID NO: 102661 - protein, 9 aa, Homo Sapiens
SEHRLSNKL

SEQ ID NO: 102662 - protein, 9 aa, Homo Sapiens
SEHSKVRLV

SEQ ID NO: 102663 - protein, 9 aa, Homo Sapiens
SEHSMDTLL

SEQ ID NO: 102664 - protein, 9 aa, Homo Sapiens
SEHSSINVL

SEQ ID NO: 102665 - protein, 9 aa, Homo Sapiens
SEHVKLEQL

SEQ ID NO: 102666 - protein, 9 aa, Homo Sapiens
SEHVMPYAA

SEQ ID NO: 102667 - protein, 9 aa, Homo Sapiens
SEIDMSVKA

SEQ ID NO: 102668 - protein, 9 aa, Homo Sapiens
SEIDQINKV

SEQ ID NO: 102669 - protein, 9 aa, Homo Sapiens
SEIDQLFRI

SEQ ID NO: 102670 - protein, 9 aa, Homo Sapiens
SEIEDVNTL

SEQ ID NO: 102671 - protein, 9 aa, Homo Sapiens
SEIEIKKEM

SEQ ID NO: 102672 - protein, 9 aa, Homo Sapiens
SEIENVHGF

SEQ ID NO: 102673 - protein, 9 aa, Homo Sapiens
SEIERQAQV

SEQ ID NO: 102674 - protein, 9 aa, Homo Sapiens
SEIGKNYSM

SEQ ID NO: 102675 - protein, 9 aa, Homo Sapiens
SEIGQKQKL

SEQ ID NO: 102676 - protein, 9 aa, Homo Sapiens
SEIHFKVKM

SEQ ID NO: 102677 - protein, 9 aa, Homo Sapiens
SEIHSGNSV

SEQ ID NO: 102678 - protein, 9 aa, Homo Sapiens
SEIIKPCSV

SEQ ID NO: 102679 - protein, 9 aa, Homo Sapiens
SEIKGVCSV

SEQ ID NO: 102680 - protein, 9 aa, Homo Sapiens
SEIKQINHL

SEQ ID NO: 102681 - protein, 9 aa, Homo Sapiens
SEIKRVMQM

SEQ ID NO: 102682 - protein, 9 aa, Homo Sapiens
SEIKSIPGV

SEQ ID NO: 102683 - protein, 9 aa, Homo Sapiens
SEILDGNQL

SEQ ID NO: 102684 - protein, 9 aa, Homo Sapiens
SEILPTKET

SEQ ID NO: 102685 - protein, 9 aa, Homo Sapiens
SEINSLPTI

SEQ ID NO: 102686 - protein, 9 aa, Homo Sapiens
SEIPKLPAV

SEQ ID NO: 102687 - protein, 9 aa, Homo Sapiens
SEIPQTERM

SEQ ID NO: 102688 - protein, 9 aa, Homo Sapiens
SEIQNVLGV

SEQ ID NO: 102689 - protein, 9 aa, Homo Sapiens
SEIQVLEHL

SEQ ID NO: 102690 - protein, 9 aa, Homo Sapiens
SEIRHLLTL

SEQ ID NO: 102691 - protein, 9 aa, Homo Sapiens
SEISSATKL

SEQ ID NO: 102692 - protein, 9 aa, Homo Sapiens
SEIVGSIKM

SEQ ID NO: 102693 - protein, 9 aa, Homo Sapiens
SEIVKQSVF

SEQ ID NO: 102694 - protein, 9 aa, Homo Sapiens
SEKDHMVTM

SEQ ID NO: 102695 - protein, 9 aa, Homo Sapiens
SEKDIGNQL

SEQ ID NO: 102696 - protein, 9 aa, Homo Sapiens
SEKDSVVSL

SEQ ID NO: 102697 - protein, 9 aa, Homo Sapiens
SEKDTKQIL

SEQ ID NO: 102698 - protein, 9 aa, Homo Sapiens
SEKDVQTAL

SEQ ID NO: 102699 - protein, 9 aa, Homo Sapiens
SEKEATPVV

SEQ ID NO: 102700 - protein, 9 aa, Homo Sapiens
SEKEEEARL

SEQ ID NO: 102701 - protein, 9 aa, Homo Sapiens
SEKFIKAAI

SEQ ID NO: 102702 - protein, 9 aa, Homo Sapiens
SEKGQVEVF

SEQ ID NO: 102703 - protein, 9 aa, Homo Sapiens
SEKHIEVEV

SEQ ID NO: 102704 - protein, 9 aa, Homo Sapiens
SEKILLLCV

SEQ ID NO: 102705 - protein, 9 aa, Homo Sapiens
SEKISNTAI

SEQ ID NO: 102706 - protein, 9 aa, Homo Sapiens
SEKKDPPQL

SEQ ID NO: 102707 - protein, 9 aa, Homo Sapiens
SEKKIFIGL

SEQ ID NO: 102708 - protein, 9 aa, Homo Sapiens
SEKNLKALL

SEQ ID NO: 102709 - protein, 9 aa, Homo Sapiens
SEKNMISKL

SEQ ID NO: 102710 - protein, 9 aa, Homo Sapiens
SEKNPVTLL

SEQ ID NO: 102711 - protein, 9 aa, Homo Sapiens
SEKPAGADL

SEQ ID NO: 102712 - protein, 9 aa, Homo Sapiens
SEKPETEAV

SEQ ID NO: 102713 - protein, 9 aa, Homo Sapiens
SEKPLSERL

SEQ ID NO: 102714 - protein, 9 aa, Homo Sapiens
SEKPTVQQL

SEQ ID NO: 102715 - protein, 9 aa, Homo Sapiens
SEKPTVTTV

SEQ ID NO: 102716 - protein, 9 aa, Homo Sapiens
SEKPYILEA

SEQ ID NO: 102717 - protein, 9 aa, Homo Sapiens
SEKSINSIL

SEQ ID NO: 102718 - protein, 9 aa, Homo Sapiens
SEKSTEQIL

SEQ ID NO: 102719 - protein, 9 aa, Homo Sapiens
SEKVAHNIL

SEQ ID NO: 102720 - protein, 9 aa, Homo Sapiens
SEKVDRAVL

SEQ ID NO: 102721 - protein, 9 aa, Homo Sapiens
SEKVHVNLL

SEQ ID NO: 102722 - protein, 9 aa, Homo Sapiens
SELAKERVV

SEQ ID NO: 102723 - protein, 9 aa, Homo Sapiens
SELDLISRL

SEQ ID NO: 102724 - protein, 9 aa, Homo Sapiens
SELEAARML

SEQ ID NO: 102725 - protein, 9 aa, Homo Sapiens
SELEKPQKV

SEQ ID NO: 102726 - protein, 9 aa, Homo Sapiens
SELEKTFNL

SEQ ID NO: 102727 - protein, 9 aa, Homo Sapiens
SELERPHKV

SEQ ID NO: 102728 - protein, 9 aa, Homo Sapiens
SELFDNKSL

SEQ ID NO: 102729 - protein, 9 aa, Homo Sapiens
SELGGIWSV

SEQ ID NO: 102730 - protein, 9 aa, Homo Sapiens
SELGKICSV

SEQ ID NO: 102731 - protein, 9 aa, Homo Sapiens
SELGPIVQF

SEQ ID NO: 102732 - protein, 9 aa, Homo Sapiens
SELIQVHKL

SEQ ID NO: 102733 - protein, 9 aa, Homo Sapiens
SELIRNVTL

SEQ ID NO: 102734 - protein, 9 aa, Homo Sapiens
SELITKAVA

SEQ ID NO: 102735 - protein, 9 aa, Homo Sapiens
SELITPHAI

SEQ ID NO: 102736 - protein, 9 aa, Homo Sapiens
SELKKEVTL

SEQ ID NO: 102737 - protein, 9 aa, Homo Sapiens
SELKKVVAL

SEQ ID NO: 102738 - protein, 9 aa, Homo Sapiens
SELLKRTAL

SEQ ID NO: 102739 - protein, 9 aa, Homo Sapiens
SELMDITKL

SEQ ID NO: 102740 - protein, 9 aa, Homo Sapiens
SELNGHHTL

SEQ ID NO: 102741 - protein, 9 aa, Homo Sapiens
SELPEQVQV

SEQ ID NO: 102742 - protein, 9 aa, Homo Sapiens
SELPGAFEA

SEQ ID NO: 102743 - protein, 9 aa, Homo Sapiens
SELPIVTPA

SEQ ID NO: 102744 - protein, 9 aa, Homo Sapiens
SELQAPPLM

SEQ ID NO: 102745 - protein, 9 aa, Homo Sapiens
SELQKIHKA

SEQ ID NO: 102746 - protein, 9 aa, Homo Sapiens
SELQLPFQA

SEQ ID NO: 102747 - protein, 9 aa, Homo Sapiens
SELQVHSAL

SEQ ID NO: 102748 - protein, 9 aa, Homo Sapiens
SELRSVEGL

SEQ ID NO: 102749 - protein, 9 aa, Homo Sapiens
SELVQKAKL

SEQ ID NO: 102750 - protein, 9 aa, Homo Sapiens
SELYLPSST

SEQ ID NO: 102751 - protein, 9 aa, Homo Sapiens
SEMAGPPQM

SEQ ID NO: 102752 - protein, 9 aa, Homo Sapiens
SEMDRVPFV

SEQ ID NO: 102753 - protein, 9 aa, Homo Sapiens
SEMFPKTSV

SEQ ID NO: 102754 - protein, 9 aa, Homo Sapiens
SEMPAAKRL

SEQ ID NO: 102755 - protein, 9 aa, Homo Sapiens
SEMRAPPAA

SEQ ID NO: 102756 - protein, 9 aa, Homo Sapiens
SEMRAVIKA

SEQ ID NO: 102757 - protein, 9 aa, Homo Sapiens
SEMRFVQDL

SEQ ID NO: 102758 - protein, 9 aa, Homo Sapiens
SEMSRVIRV

SEQ ID NO: 102759 - protein, 9 aa, Homo Sapiens
SEMTQVKEV

SEQ ID NO: 102760 - protein, 9 aa, Homo Sapiens
SEMVKLYDL

SEQ ID NO: 102761 - protein, 9 aa, Homo Sapiens
SENAIVWKI

SEQ ID NO: 102762 - protein, 9 aa, Homo Sapiens
SENASVPSL

SEQ ID NO: 102763 - protein, 9 aa, Homo Sapiens
SENEEFVEV

SEQ ID NO: 102764 - protein, 9 aa, Homo Sapiens
SENKLPAEL

SEQ ID NO: 102765 - protein, 9 aa, Homo Sapiens
SENNRIFTL

SEQ ID NO: 102766 - protein, 9 aa, Homo Sapiens
SENPERPFL

SEQ ID NO: 102767 - protein, 9 aa, Homo Sapiens
SENPVPLTV

SEQ ID NO: 102768 - protein, 9 aa, Homo Sapiens
SENQPFPSL

SEQ ID NO: 102769 - protein, 9 aa, Homo Sapiens
SENRDLKTV

SEQ ID NO: 102770 - protein, 9 aa, Homo Sapiens
SENSQPAHL

SEQ ID NO: 102771 - protein, 9 aa, Homo Sapiens
SENVLQVHL

SEQ ID NO: 102772 - protein, 9 aa, Homo Sapiens
SEPACAHAL

SEQ ID NO: 102773 - protein, 9 aa, Homo Sapiens
SEPDFVAKF

SEQ ID NO: 102774 - protein, 9 aa, Homo Sapiens
SEPHILETL

SEQ ID NO: 102775 - protein, 9 aa, Homo Sapiens
SEPRISESL

SEQ ID NO: 102776 - protein, 9 aa, Homo Sapiens
SEPVTPASL

SEQ ID NO: 102777 - protein, 9 aa, Homo Sapiens
SEQEHFLIV

SEQ ID NO: 102778 - protein, 9 aa, Homo Sapiens
SEQGLAKAV

SEQ ID NO: 102779 - protein, 9 aa, Homo Sapiens
SEQKFLIGL

SEQ ID NO: 102780 - protein, 9 aa, Homo Sapiens
SEQSLGQKL

SEQ ID NO: 102781 - protein, 9 aa, Homo Sapiens
SERALPWQL

SEQ ID NO: 102782 - protein, 9 aa, Homo Sapiens
SERELFNAV

SEQ ID NO: 102783 - protein, 9 aa, Homo Sapiens
SEREMRNTL

SEQ ID NO: 102784 - protein, 9 aa, Homo Sapiens
SERPKEIKV

SEQ ID NO: 102785 - protein, 9 aa, Homo Sapiens
SERPLPRAA

SEQ ID NO: 102786 - protein, 9 aa, Homo Sapiens
SERVTIEHA

SEQ ID NO: 102787 - protein, 9 aa, Homo Sapiens
SERVVQEAL

SEQ ID NO: 102788 - protein, 9 aa, Homo Sapiens
SESAQSKML

SEQ ID NO: 102789 - protein, 9 aa, Homo Sapiens
SESASPSAL

SEQ ID NO: 102790 - protein, 9 aa, Homo Sapiens
SESDKTAVL

SEQ ID NO: 102791 - protein, 9 aa, Homo Sapiens
SESEKQWKA

SEQ ID NO: 102792 - protein, 9 aa, Homo Sapiens
SESHRFTVL

SEQ ID NO: 102793 - protein, 9 aa, Homo Sapiens
SESIPKDSL

SEQ ID NO: 102794 - protein, 9 aa, Homo Sapiens
SESKIRVLL

SEQ ID NO: 102795 - protein, 9 aa, Homo Sapiens
SESLPVRTL

SEQ ID NO: 102796 - protein, 9 aa, Homo Sapiens
SESPIVVVL

SEQ ID NO: 102797 - protein, 9 aa, Homo Sapiens
SESPRPCSL

SEQ ID NO: 102798 - protein, 9 aa, Homo Sapiens
SESPRSTSL

SEQ ID NO: 102799 - protein, 9 aa, Homo Sapiens
SESPVITKA

SEQ ID NO: 102800 - protein, 9 aa, Homo Sapiens
SESQKIPGM

SEQ ID NO: 102801 - protein, 9 aa, Homo Sapiens
SESRIFNEL

SEQ ID NO: 102802 - protein, 9 aa, Homo Sapiens
SESRYPQAL

SEQ ID NO: 102803 - protein, 9 aa, Homo Sapiens
SESSPPKAM

SEQ ID NO: 102804 - protein, 9 aa, Homo Sapiens
SESSTVRTV

SEQ ID NO: 102805 - protein, 9 aa, Homo Sapiens
SESSVKVRL

SEQ ID NO: 102806 - protein, 9 aa, Homo Sapiens
SESTKQPKL

SEQ ID NO: 102807 - protein, 9 aa, Homo Sapiens
SESTNQRVL

SEQ ID NO: 102808 - protein, 9 aa, Homo Sapiens
SESVPVIAA

SEQ ID NO: 102809 - protein, 9 aa, Homo Sapiens
SETDMVRQI

SEQ ID NO: 102810 - protein, 9 aa, Homo Sapiens
SETEGTPKL

SEQ ID NO: 102811 - protein, 9 aa, Homo Sapiens
SETFLLPHL

SEQ ID NO: 102812 - protein, 9 aa, Homo Sapiens
SETGHVYTF

SEQ ID NO: 102813 - protein, 9 aa, Homo Sapiens
SETGKLIML

SEQ ID NO: 102814 - protein, 9 aa, Homo Sapiens
SETKDVFQL

SEQ ID NO: 102815 - protein, 9 aa, Homo Sapiens
SETPTFAKV

SEQ ID NO: 102816 - protein, 9 aa, Homo Sapiens
SETRVLVDI

SEQ ID NO: 102817 - protein, 9 aa, Homo Sapiens
SETTAAHSL

SEQ ID NO: 102818 - protein, 9 aa, Homo Sapiens
SETTPKAVV

SEQ ID NO: 102819 - protein, 9 aa, Homo Sapiens
SETTQIVKL

SEQ ID NO: 102820 - protein, 9 aa, Homo Sapiens
SEVDGLMDL

SEQ ID NO: 102821 - protein, 9 aa, Homo Sapiens
SEVDGLNSL

SEQ ID NO: 102822 - protein, 9 aa, Homo Sapiens
SEVDSPNVL

SEQ ID NO: 102823 - protein, 9 aa, Homo Sapiens
SEVEKGEAL

SEQ ID NO: 102824 - protein, 9 aa, Homo Sapiens
SEVELMKVA

SEQ ID NO: 102825 - protein, 9 aa, Homo Sapiens
SEVGKLLSA

SEQ ID NO: 102826 - protein, 9 aa, Homo Sapiens
SEVGKTPTL

SEQ ID NO: 102827 - protein, 9 aa, Homo Sapiens
SEVGPVVSF

SEQ ID NO: 102828 - protein, 9 aa, Homo Sapiens
SEVGSVVSF

SEQ ID NO: 102829 - protein, 9 aa, Homo Sapiens
SEVGTDHKL

SEQ ID NO: 102830 - protein, 9 aa, Homo Sapiens
SEVHSPPNV

SEQ ID NO: 102831 - protein, 9 aa, Homo Sapiens
SEVIFGHVL

SEQ ID NO: 102832 - protein, 9 aa, Homo Sapiens
SEVIGPVSL

SEQ ID NO: 102833 - protein, 9 aa, Homo Sapiens
SEVISQHLV

SEQ ID NO: 102834 - protein, 9 aa, Homo Sapiens
SEVKGLDAF

SEQ ID NO: 102835 - protein, 9 aa, Homo Sapiens
SEVKSRQTL

SEQ ID NO: 102836 - protein, 9 aa, Homo Sapiens
SEVMGEPHL

SEQ ID NO: 102837 - protein, 9 aa, Homo Sapiens
SEVNIPLSL

SEQ ID NO: 102838 - protein, 9 aa, Homo Sapiens
SEVNKLYKL

SEQ ID NO: 102839 - protein, 9 aa, Homo Sapiens
SEVPNGKEV

SEQ ID NO: 102840 - protein, 9 aa, Homo Sapiens
SEVQDRVML

SEQ ID NO: 102841 - protein, 9 aa, Homo Sapiens
SEVSKIVTV

SEQ ID NO: 102842 - protein, 9 aa, Homo Sapiens
SEVSTVLKL

SEQ ID NO: 102843 - protein, 9 aa, Homo Sapiens
SEVTAALRV

SEQ ID NO: 102844 - protein, 9 aa, Homo Sapiens
SEVTDPLSV

SEQ ID NO: 102845 - protein, 9 aa, Homo Sapiens
SEVVGSSTL

SEQ ID NO: 102846 - protein, 9 aa, Homo Sapiens
SEVVVNSVF

SEQ ID NO: 102847 - protein, 9 aa, Homo Sapiens
SEVYSNPCL

SEQ ID NO: 102848 - protein, 9 aa, Homo Sapiens
SEWDGIVTV

SEQ ID NO: 102849 - protein, 9 aa, Homo Sapiens
SEWKSGTKV

SEQ ID NO: 102850 - protein, 9 aa, Homo Sapiens
SEWNTVERL

SEQ ID NO: 102851 - protein, 9 aa, Homo Sapiens
SEWVSCVRF

SEQ ID NO: 102852 - protein, 9 aa, Homo Sapiens
SEYARPHVM

SEQ ID NO: 102853 - protein, 9 aa, Homo Sapiens
SEYDDPPGL

SEQ ID NO: 102854 - protein, 9 aa, Homo Sapiens
SEYFYQEEF

SEQ ID NO: 102855 - protein, 9 aa, Homo Sapiens
SEYRFPEEL

SEQ ID NO: 102856 - protein, 9 aa, Homo Sapiens
SEYRWHINF

SEQ ID NO: 102857 - protein, 9 aa, Homo Sapiens
SEYSQSPKM

SEQ ID NO: 102858 - protein, 9 aa, Homo Sapiens
SEYSVHSSL

SEQ ID NO: 102859 - protein, 9 aa, Homo Sapiens
SEYTSGHSV

SEQ ID NO: 102860 - protein, 9 aa, Homo Sapiens
SQANIAQVL

SEQ ID NO: 102861 - protein, 9 aa, Homo Sapiens
SQFGTEHVL

SEQ ID NO: 102862 - protein, 9 aa, Homo Sapiens
SQIPAQPSV

SEQ ID NO: 102863 - protein, 9 aa, Homo Sapiens
SSDVVVQVL

SEQ ID NO: 102864 - protein, 9 aa, Homo Sapiens
SSEFEAPSL

SEQ ID NO: 102865 - protein, 9 aa, Homo Sapiens
SSEFQIPTA

SEQ ID NO: 102866 - protein, 9 aa, Homo Sapiens
SSLLEKGLD

SEQ ID NO: 102867 - protein, 9 aa, Homo Sapiens
STKREIQEI

SEQ ID NO: 102868 - protein, 9 aa, Homo Sapiens
TDREDINSL

SEQ ID NO: 102869 - protein, 9 aa, Homo Sapiens
TEAETIQKL

SEQ ID NO: 102870 - protein, 9 aa, Homo Sapiens
TEAKIKQKL

SEQ ID NO: 102871 - protein, 9 aa, Homo Sapiens
TEALPVKLI

SEQ ID NO: 102872 - protein, 9 aa, Homo Sapiens
TEAPIAVVT

SEQ ID NO: 102873 - protein, 9 aa, Homo Sapiens
TEAPPIIFA

SEQ ID NO: 102874 - protein, 9 aa, Homo Sapiens
TEAPVPVSV

SEQ ID NO: 102875 - protein, 9 aa, Homo Sapiens
TEAQVTQEL

SEQ ID NO: 102876 - protein, 9 aa, Homo Sapiens
TEARCFYGF

SEQ ID NO: 102877 - protein, 9 aa, Homo Sapiens
TEASEQQAL

SEQ ID NO: 102878 - protein, 9 aa, Homo Sapiens
TEAVVKEKL

SEQ ID NO: 102879 - protein, 9 aa, Homo Sapiens
TEDRIQHAL

SEQ ID NO: 102880 - protein, 9 aa, Homo Sapiens
TEEERRAEL

SEQ ID NO: 102881 - protein, 9 aa, Homo Sapiens
TEFEKILKT

SEQ ID NO: 102882 - protein, 9 aa, Homo Sapiens
TEFEQQERL

SEQ ID NO: 102883 - protein, 9 aa, Homo Sapiens
TEFGHPAAI

SEQ ID NO: 102884 - protein, 9 aa, Homo Sapiens
TEFHELEKI

SEQ ID NO: 102885 - protein, 9 aa, Homo Sapiens
TEFHHVRTL

SEQ ID NO: 102886 - protein, 9 aa, Homo Sapiens
TEFQHPCFL

SEQ ID NO: 102887 - protein, 9 aa, Homo Sapiens
TEFQLGSKL

SEQ ID NO: 102888 - protein, 9 aa, Homo Sapiens
TEFRNIQKL

SEQ ID NO: 102889 - protein, 9 aa, Homo Sapiens
TEGDIICVF

SEQ ID NO: 102890 - protein, 9 aa, Homo Sapiens
TEGKVGYEL

SEQ ID NO: 102891 - protein, 9 aa, Homo Sapiens
TEHAHQVVV

SEQ ID NO: 102892 - protein, 9 aa, Homo Sapiens
TEHEKVAIL

SEQ ID NO: 102893 - protein, 9 aa, Homo Sapiens
TEHGVEVVL

SEQ ID NO: 102894 - protein, 9 aa, Homo Sapiens
TEHGVKVTA

SEQ ID NO: 102895 - protein, 9 aa, Homo Sapiens
TEHINIHQL

SEQ ID NO: 102896 - protein, 9 aa, Homo Sapiens
TEHPRSTEL

SEQ ID NO: 102897 - protein, 9 aa, Homo Sapiens
TEHPVPIIL

SEQ ID NO: 102898 - protein, 9 aa, Homo Sapiens
TEHYDIPKV

SEQ ID NO: 102899 - protein, 9 aa, Homo Sapiens
TEHYSPLSL

SEQ ID NO: 102900 - protein, 9 aa, Homo Sapiens
TEIDPICAL

SEQ ID NO: 102901 - protein, 9 aa, Homo Sapiens
TEIDPINAL

SEQ ID NO: 102902 - protein, 9 aa, Homo Sapiens
TEIEDMPTL

SEQ ID NO: 102903 - protein, 9 aa, Homo Sapiens
TEIEDSHTL

SEQ ID NO: 102904 - protein, 9 aa, Homo Sapiens
TEIEGTQKL

SEQ ID NO: 102905 - protein, 9 aa, Homo Sapiens
TEIEKARAV

SEQ ID NO: 102906 - protein, 9 aa, Homo Sapiens
TEIEKSISA

SEQ ID NO: 102907 - protein, 9 aa, Homo Sapiens
TEIGPMSCF

SEQ ID NO: 102908 - protein, 9 aa, Homo Sapiens
TEIGPRMTL

SEQ ID NO: 102909 - protein, 9 aa, Homo Sapiens
TEIGSIHSA

SEQ ID NO: 102910 - protein, 9 aa, Homo Sapiens
TEIHNINII

SEQ ID NO: 102911 - protein, 9 aa, Homo Sapiens
TEIKKTEVL

SEQ ID NO: 102912 - protein, 9 aa, Homo Sapiens
TEINFTQKL

SEQ ID NO: 102913 - protein, 9 aa, Homo Sapiens
TEIPTKITI

SEQ ID NO: 102914 - protein, 9 aa, Homo Sapiens
TEIQLVQSL

SEQ ID NO: 102915 - protein, 9 aa, Homo Sapiens
TEIQQQSAL

SEQ ID NO: 102916 - protein, 9 aa, Homo Sapiens
TEISLQQRL

SEQ ID NO: 102917 - protein, 9 aa, Homo Sapiens
TEISSAEKV

SEQ ID NO: 102918 - protein, 9 aa, Homo Sapiens
TEISWENKL

SEQ ID NO: 102919 - protein, 9 aa, Homo Sapiens
TEITHAVVI

SEQ ID NO: 102920 - protein, 9 aa, Homo Sapiens
TEKAPEPHV

SEQ ID NO: 102921 - protein, 9 aa, Homo Sapiens
TEKDFLEAV

SEQ ID NO: 102922 - protein, 9 aa, Homo Sapiens
TEKDLVTSL

SEQ ID NO: 102923 - protein, 9 aa, Homo Sapiens
TEKEDFIEL

SEQ ID NO: 102924 - protein, 9 aa, Homo Sapiens
TEKGNLEVL

SEQ ID NO: 102925 - protein, 9 aa, Homo Sapiens
TEKHFFHKV

SEQ ID NO: 102926 - protein, 9 aa, Homo Sapiens
TEKHVQVAV

SEQ ID NO: 102927 - protein, 9 aa, Homo Sapiens
TEKIISAEL

SEQ ID NO: 102928 - protein, 9 aa, Homo Sapiens
TEKKELCEL

SEQ ID NO: 102929 - protein, 9 aa, Homo Sapiens
TEKKIARAL

SEQ ID NO: 102930 - protein, 9 aa, Homo Sapiens
TEKKIPVVF

SEQ ID NO: 102931 - protein, 9 aa, Homo Sapiens
TEKNVIAAL

SEQ ID NO: 102932 - protein, 9 aa, Homo Sapiens
TEKQYIATI

SEQ ID NO: 102933 - protein, 9 aa, Homo Sapiens
TEKSPEVTL

SEQ ID NO: 102934 - protein, 9 aa, Homo Sapiens
TEKSPNPSL

SEQ ID NO: 102935 - protein, 9 aa, Homo Sapiens
TEKTKPEVL

SEQ ID NO: 102936 - protein, 9 aa, Homo Sapiens
TEKTVLVAL

SEQ ID NO: 102937 - protein, 9 aa, Homo Sapiens
TELEYIHAL

SEQ ID NO: 102938 - protein, 9 aa, Homo Sapiens
TELHHVRTL

SEQ ID NO: 102939 - protein, 9 aa, Homo Sapiens
TELIKVDKV

SEQ ID NO: 102940 - protein, 9 aa, Homo Sapiens
TELIQKAKL

SEQ ID NO: 102941 - protein, 9 aa, Homo Sapiens
TELKGLSKI

SEQ ID NO: 102942 - protein, 9 aa, Homo Sapiens
TELNIREST

SEQ ID NO: 102943 - protein, 9 aa, Homo Sapiens
TELTTKSSL

SEQ ID NO: 102944 - protein, 9 aa, Homo Sapiens
TEMEQDYQL

SEQ ID NO: 102945 - protein, 9 aa, Homo Sapiens
TEMESQKQL

SEQ ID NO: 102946 - protein, 9 aa, Homo Sapiens
TENAPCRPL

SEQ ID NO: 102947 - protein, 9 aa, Homo Sapiens
TENLVRELL

SEQ ID NO: 102948 - protein, 9 aa, Homo Sapiens
TENPHGARL

SEQ ID NO: 102949 - protein, 9 aa, Homo Sapiens
TENPVIMGL

SEQ ID NO: 102950 - protein, 9 aa, Homo Sapiens
TEQKQTSVL

SEQ ID NO: 102951 - protein, 9 aa, Homo Sapiens
TEQTVSQVL

SEQ ID NO: 102952 - protein, 9 aa, Homo Sapiens
TERAKDFSL

SEQ ID NO: 102953 - protein, 9 aa, Homo Sapiens
TERANSMGL

SEQ ID NO: 102954 - protein, 9 aa, Homo Sapiens
TERIEKERM

SEQ ID NO: 102955 - protein, 9 aa, Homo Sapiens
TERLIKHAV

SEQ ID NO: 102956 - protein, 9 aa, Homo Sapiens
TERPQPQTL

SEQ ID NO: 102957 - protein, 9 aa, Homo Sapiens
TERQKVHCL

SEQ ID NO: 102958 - protein, 9 aa, Homo Sapiens
TESGLNVTL

SEQ ID NO: 102959 - protein, 9 aa, Homo Sapiens
TESTARVEL

SEQ ID NO: 102960 - protein, 9 aa, Homo Sapiens
TESTPITAV

SEQ ID NO: 102961 - protein, 9 aa, Homo Sapiens
TETARIAQL

SEQ ID NO: 102962 - protein, 9 aa, Homo Sapiens
TETEPPVAL

SEQ ID NO: 102963 - protein, 9 aa, Homo Sapiens
TETHVERVL

SEQ ID NO: 102964 - protein, 9 aa, Homo Sapiens
TETLALTKL

SEQ ID NO: 102965 - protein, 9 aa, Homo Sapiens
TETNVYFKL

SEQ ID NO: 102966 - protein, 9 aa, Homo Sapiens
TETSIAKEL

SEQ ID NO: 102967 - protein, 9 aa, Homo Sapiens
TETTKFEKL

SEQ ID NO: 102968 - protein, 9 aa, Homo Sapiens
TETTVKKVV

SEQ ID NO: 102969 - protein, 9 aa, Homo Sapiens
TETVHIFKL

SEQ ID NO: 102970 - protein, 9 aa, Homo Sapiens
TETVLRQAI

SEQ ID NO: 102971 - protein, 9 aa, Homo Sapiens
TETVVTEYL

SEQ ID NO: 102972 - protein, 9 aa, Homo Sapiens
TEVDKILKV

SEQ ID NO: 102973 - protein, 9 aa, Homo Sapiens
TEVDTSHRL

SEQ ID NO: 102974 - protein, 9 aa, Homo Sapiens
TEVGEKIAL

SEQ ID NO: 102975 - protein, 9 aa, Homo Sapiens
TEVGPRFEL

SEQ ID NO: 102976 - protein, 9 aa, Homo Sapiens
TEVIHTGTL

SEQ ID NO: 102977 - protein, 9 aa, Homo Sapiens
TEVKKIYKL

SEQ ID NO: 102978 - protein, 9 aa, Homo Sapiens
TEVLKTHGL

SEQ ID NO: 102979 - protein, 9 aa, Homo Sapiens
TEVPVEPVL

SEQ ID NO: 102980 - protein, 9 aa, Homo Sapiens
TEVQKNQVL

SEQ ID NO: 102981 - protein, 9 aa, Homo Sapiens
TEVRVANEL

SEQ ID NO: 102982 - protein, 9 aa, Homo Sapiens
TEVSKVPSL

SEQ ID NO: 102983 - protein, 9 aa, Homo Sapiens
TEVTLPKSI

SEQ ID NO: 102984 - protein, 9 aa, Homo Sapiens
TEWEKVAQL

SEQ ID NO: 102985 - protein, 9 aa, Homo Sapiens
TEWERVARL

SEQ ID NO: 102986 - protein, 9 aa, Homo Sapiens
TEWIRAIQM

SEQ ID NO: 102987 - protein, 9 aa, Homo Sapiens
TEYETQVKV

SEQ ID NO: 102988 - protein, 9 aa, Homo Sapiens
TEYSFLKEV

SEQ ID NO: 102989 - protein, 9 aa, Homo Sapiens
VAPGKDLTK

SEQ ID NO: 102990 - protein, 9 aa, Homo Sapiens
VDFVIPKEL

SEQ ID NO: 102991 - protein, 9 aa, Homo Sapiens
VDITTPKAA

SEQ ID NO: 102992 - protein, 9 aa, Homo Sapiens
VDTAVRHVL

SEQ ID NO: 102993 - protein, 9 aa, Homo Sapiens
VDVQIPECF

SEQ ID NO: 102994 - protein, 9 aa, Homo Sapiens
VDYELERTL

SEQ ID NO: 102995 - protein, 9 aa, Homo Sapiens
VEAGGMQAL

SEQ ID NO: 102996 - protein, 9 aa, Homo Sapiens
VEAPPSVVL

SEQ ID NO: 102997 - protein, 9 aa, Homo Sapiens
VEAQKAQQL

SEQ ID NO: 102998 - protein, 9 aa, Homo Sapiens
VEEENIRVV

SEQ ID NO: 102999 - protein, 9 aa, Homo Sapiens
VEEPSRPSA

SEQ ID NO: 103000 - protein, 9 aa, Homo Sapiens
VEFDEVDSL

SEQ ID NO: 103001 - protein, 9 aa, Homo Sapiens
VEFEELLKA

SEQ ID NO: 103002 - protein, 9 aa, Homo Sapiens
VEFFHVEDL

SEQ ID NO: 103003 - protein, 9 aa, Homo Sapiens
VEFNGKLLA

SEQ ID NO: 103004 - protein, 9 aa, Homo Sapiens
VEFPHSPEI

SEQ ID NO: 103005 - protein, 9 aa, Homo Sapiens
VEFREVTEL

SEQ ID NO: 103006 - protein, 9 aa, Homo Sapiens
VEFSGKPAA

SEQ ID NO: 103007 - protein, 9 aa, Homo Sapiens
VEFVKSFNL

SEQ ID NO: 103008 - protein, 9 aa, Homo Sapiens
VEFVVEKAL

SEQ ID NO: 103009 - protein, 9 aa, Homo Sapiens
VEGDPIVAL

SEQ ID NO: 103010 - protein, 9 aa, Homo Sapiens
VEGPGGRPL

SEQ ID NO: 103011 - protein, 9 aa, Homo Sapiens
VEGQVPHSL

SEQ ID NO: 103012 - protein, 9 aa, Homo Sapiens
VEHANIIKV

SEQ ID NO: 103013 - protein, 9 aa, Homo Sapiens
VEHDHPHAL

SEQ ID NO: 103014 - protein, 9 aa, Homo Sapiens
VEHPAAKVL

SEQ ID NO: 103015 - protein, 9 aa, Homo Sapiens
VEHPGHPEV

SEQ ID NO: 103016 - protein, 9 aa, Homo Sapiens
VEIEREVLL

SEQ ID NO: 103017 - protein, 9 aa, Homo Sapiens
VEIGPRFVL

SEQ ID NO: 103018 - protein, 9 aa, Homo Sapiens
VEIQCPEQV

SEQ ID NO: 103019 - protein, 9 aa, Homo Sapiens
VEKEFEPLL

SEQ ID NO: 103020 - protein, 9 aa, Homo Sapiens
VEKEGIHVL

SEQ ID NO: 103021 - protein, 9 aa, Homo Sapiens
VEKEMRVTL

SEQ ID NO: 103022 - protein, 9 aa, Homo Sapiens
VEKFGDLIL

SEQ ID NO: 103023 - protein, 9 aa, Homo Sapiens
VEKGHFAEL

SEQ ID NO: 103024 - protein, 9 aa, Homo Sapiens
VEKHVVQSI

SEQ ID NO: 103025 - protein, 9 aa, Homo Sapiens
VEKIDFDSV

SEQ ID NO: 103026 - protein, 9 aa, Homo Sapiens
VEKKPLVAL

SEQ ID NO: 103027 - protein, 9 aa, Homo Sapiens
VEKKSVAKL

SEQ ID NO: 103028 - protein, 9 aa, Homo Sapiens
VEKLGAYEL

SEQ ID NO: 103029 - protein, 9 aa, Homo Sapiens
VEKPAETHL

SEQ ID NO: 103030 - protein, 9 aa, Homo Sapiens
VEKPLKLVL

SEQ ID NO: 103031 - protein, 9 aa, Homo Sapiens
VEKPSPLTL

SEQ ID NO: 103032 - protein, 9 aa, Homo Sapiens
VEKPVGVAA

SEQ ID NO: 103033 - protein, 9 aa, Homo Sapiens
VEKQPPQVL

SEQ ID NO: 103034 - protein, 9 aa, Homo Sapiens
VEKVPNPSL

SEQ ID NO: 103035 - protein, 9 aa, Homo Sapiens
VEKVVVVIL

SEQ ID NO: 103036 - protein, 9 aa, Homo Sapiens
VEKYIEEQL

SEQ ID NO: 103037 - protein, 9 aa, Homo Sapiens
VELEIRELL

SEQ ID NO: 103038 - protein, 9 aa, Homo Sapiens
VELPEQPAV

SEQ ID NO: 103039 - protein, 9 aa, Homo Sapiens
VEMGFSRSL

SEQ ID NO: 103040 - protein, 9 aa, Homo Sapiens
VEQNGKPSL

SEQ ID NO: 103041 - protein, 9 aa, Homo Sapiens
VERNKVKAL

SEQ ID NO: 103042 - protein, 9 aa, Homo Sapiens
VERQVSTAM

SEQ ID NO: 103043 - protein, 9 aa, Homo Sapiens
VERVIVVSM

SEQ ID NO: 103044 - protein, 9 aa, Homo Sapiens
VESHIQHSL

SEQ ID NO: 103045 - protein, 9 aa, Homo Sapiens
VESIISPKV

SEQ ID NO: 103046 - protein, 9 aa, Homo Sapiens
VESPVICKI

SEQ ID NO: 103047 - protein, 9 aa, Homo Sapiens
VETAKVYQL

SEQ ID NO: 103048 - protein, 9 aa, Homo Sapiens
VETGHLAAF

SEQ ID NO: 103049 - protein, 9 aa, Homo Sapiens
VEVPDGPTL

SEQ ID NO: 103050 - protein, 9 aa, Homo Sapiens
VEVPETPKA

SEQ ID NO: 103051 - protein, 9 aa, Homo Sapiens
VEVRSDWEV

SEQ ID NO: 103052 - protein, 9 aa, Homo Sapiens
VEVSIPAKL

SEQ ID NO: 103053 - protein, 9 aa, Homo Sapiens
VEVVKTFNL

SEQ ID NO: 103054 - protein, 9 aa, Homo Sapiens
VEWKGTSQL

SEQ ID NO: 103055 - protein, 9 aa, Homo Sapiens
VEWNKKEEL

SEQ ID NO: 103056 - protein, 9 aa, Homo Sapiens
VEYQMKSVL

SEQ ID NO: 103057 - protein, 9 aa, Homo Sapiens
VGTKSELII

SEQ ID NO: 103058 - protein, 9 aa, Homo Sapiens
WEEERQPIL

SEQ ID NO: 103059 - protein, 9 aa, Homo Sapiens
WEISQKTVL

SEQ ID NO: 103060 - protein, 9 aa, Homo Sapiens
WELEKKSAV

SEQ ID NO: 103061 - protein, 9 aa, Homo Sapiens
WEQGFSQSF

SEQ ID NO: 103062 - protein, 9 aa, Homo Sapiens
YEALPQHKL

SEQ ID NO: 103063 - protein, 9 aa, Homo Sapiens
YEASLPHQI

SEQ ID NO: 103064 - protein, 9 aa, Homo Sapiens
YEAYLPETF

SEQ ID NO: 103065 - protein, 9 aa, Homo Sapiens
YEDATKITV

SEQ ID NO: 103066 - protein, 9 aa, Homo Sapiens
YEDGSIRIF

SEQ ID NO: 103067 - protein, 9 aa, Homo Sapiens
YEDQTKPVL

SEQ ID NO: 103068 - protein, 9 aa, Homo Sapiens
YEEEVKKTL

SEQ ID NO: 103069 - protein, 9 aa, Homo Sapiens
YEEGPGKNL

SEQ ID NO: 103070 - protein, 9 aa, Homo Sapiens
YEELVRMVL

SEQ ID NO: 103071 - protein, 9 aa, Homo Sapiens
YEERVQAVV

SEQ ID NO: 103072 - protein, 9 aa, Homo Sapiens
YEETRQEVL

SEQ ID NO: 103073 - protein, 9 aa, Homo Sapiens
YEEVHVPAL

SEQ ID NO: 103074 - protein, 9 aa, Homo Sapiens
YEFERTTSI

SEQ ID NO: 103075 - protein, 9 aa, Homo Sapiens
YEGPAKIEV

SEQ ID NO: 103076 - protein, 9 aa, Homo Sapiens
YEHPKDLKL

SEQ ID NO: 103077 - protein, 9 aa, Homo Sapiens
YEHRYVELF

SEQ ID NO: 103078 - protein, 9 aa, Homo Sapiens
YEIDKTLGI

SEQ ID NO: 103079 - protein, 9 aa, Homo Sapiens
YEIHDGMNL

SEQ ID NO: 103080 - protein, 9 aa, Homo Sapiens
YEILNNPEL

SEQ ID NO: 103081 - protein, 9 aa, Homo Sapiens
YEITEQRKI

SEQ ID NO: 103082 - protein, 9 aa, Homo Sapiens
YEKDFQSCF

SEQ ID NO: 103083 - protein, 9 aa, Homo Sapiens
YEKIDLTLL

SEQ ID NO: 103084 - protein, 9 aa, Homo Sapiens
YEKIHKDHL

SEQ ID NO: 103085 - protein, 9 aa, Homo Sapiens
YEKILFTEA

SEQ ID NO: 103086 - protein, 9 aa, Homo Sapiens
YEKINVNEI

SEQ ID NO: 103087 - protein, 9 aa, Homo Sapiens
YEKPEAPEL

SEQ ID NO: 103088 - protein, 9 aa, Homo Sapiens
YEKTIAQMI

SEQ ID NO: 103089 - protein, 9 aa, Homo Sapiens
YEKTPFDQL

SEQ ID NO: 103090 - protein, 9 aa, Homo Sapiens
YELEKQKKL

SEQ ID NO: 103091 - protein, 9 aa, Homo Sapiens
YELGGPMTL

SEQ ID NO: 103092 - protein, 9 aa, Homo Sapiens
YELKEGRQI

SEQ ID NO: 103093 - protein, 9 aa, Homo Sapiens
YELLMPHRI

SEQ ID NO: 103094 - protein, 9 aa, Homo Sapiens
YELPDGQVI

SEQ ID NO: 103095 - protein, 9 aa, Homo Sapiens
YEMEVSQRL

SEQ ID NO: 103096 - protein, 9 aa, Homo Sapiens
YENEKLTKL

SEQ ID NO: 103097 - protein, 9 aa, Homo Sapiens
YENFKVQVL

SEQ ID NO: 103098 - protein, 9 aa, Homo Sapiens
YEPPVQESV

SEQ ID NO: 103099 - protein, 9 aa, Homo Sapiens
YEQILNTKL

SEQ ID NO: 103100 - protein, 9 aa, Homo Sapiens
YEQLLDVKI

SEQ ID NO: 103101 - protein, 9 aa, Homo Sapiens
YEQRKIVEF

SEQ ID NO: 103102 - protein, 9 aa, Homo Sapiens
YEQVSTPEI

SEQ ID NO: 103103 - protein, 9 aa, Homo Sapiens
YERDHAVVV

SEQ ID NO: 103104 - protein, 9 aa, Homo Sapiens
YESEKVGVA

SEQ ID NO: 103105 - protein, 9 aa, Homo Sapiens
YESHYALPL

SEQ ID NO: 103106 - protein, 9 aa, Homo Sapiens
YESPGKIFL

SEQ ID NO: 103107 - protein, 9 aa, Homo Sapiens
YETEGIRGL

SEQ ID NO: 103108 - protein, 9 aa, Homo Sapiens
YETNKQPGL

SEQ ID NO: 103109 - protein, 9 aa, Homo Sapiens
YETPTGIKV

SEQ ID NO: 103110 - protein, 9 aa, Homo Sapiens
YEVERCQQL

SEQ ID NO: 103111 - protein, 9 aa, Homo Sapiens
YEVGQRHGL

SEQ ID NO: 103112 - protein, 9 aa, Homo Sapiens
YEYKKRLTL

SEQ ID NO: 103113 - protein, 10 aa, Homo Sapiens
ADASIRLLKA

SEQ ID NO: 103114 - protein, 10 aa, Homo Sapiens
AEAAEVILRV

SEQ ID NO: 103115 - protein, 10 aa, Homo Sapiens
AEAECQRQQL

SEQ ID NO: 103116 - protein, 10 aa, Homo Sapiens
AEAEKLFKQA

SEQ ID NO: 103117 - protein, 10 aa, Homo Sapiens
AEAEKSQLIM

SEQ ID NO: 103118 - protein, 10 aa, Homo Sapiens
AEAENKAAAL

SEQ ID NO: 103119 - protein, 10 aa, Homo Sapiens
AEAILGQNAA

SEQ ID NO: 103120 - protein, 10 aa, Homo Sapiens
AEAKPITEML

SEQ ID NO: 103121 - protein, 10 aa, Homo Sapiens
AEAKQIVRKL

SEQ ID NO: 103122 - protein, 10 aa, Homo Sapiens
AEALKQGNAI

SEQ ID NO: 103123 - protein, 10 aa, Homo Sapiens
AEALRSLQQL

SEQ ID NO: 103124 - protein, 10 aa, Homo Sapiens
AEAPLPSPKL

SEQ ID NO: 103125 - protein, 10 aa, Homo Sapiens
AEAQAGTTTL

SEQ ID NO: 103126 - protein, 10 aa, Homo Sapiens
AEAQLRFIQA

SEQ ID NO: 103127 - protein, 10 aa, Homo Sapiens
AEARHIKAEM

SEQ ID NO: 103128 - protein, 10 aa, Homo Sapiens
AEASSVKNEL

SEQ ID NO: 103129 - protein, 10 aa, Homo Sapiens
AEATALVHTL

SEQ ID NO: 103130 - protein, 10 aa, Homo Sapiens
AEAVAGGRVL

SEQ ID NO: 103131 - protein, 10 aa, Homo Sapiens
AEAYLGKTVT

SEQ ID NO: 103132 - protein, 10 aa, Homo Sapiens
AECAGKLFLF

SEQ ID NO: 103133 - protein, 10 aa, Homo Sapiens
AECNAVRQAL

SEQ ID NO: 103134 - protein, 10 aa, Homo Sapiens
AECTERIHRL

SEQ ID NO: 103135 - protein, 10 aa, Homo Sapiens
AEDGSRVYVV

SEQ ID NO: 103136 - protein, 10 aa, Homo Sapiens
AEDITTGQVL

SEQ ID NO: 103137 - protein, 10 aa, Homo Sapiens
AEDPLGAIHL

SEQ ID NO: 103138 - protein, 10 aa, Homo Sapiens
AEDRQICPSL

SEQ ID NO: 103139 - protein, 10 aa, Homo Sapiens
AEEKAAVTSL

SEQ ID NO: 103140 - protein, 10 aa, Homo Sapiens
AEFDDRRGVL

SEQ ID NO: 103141 - protein, 10 aa, Homo Sapiens
AEFDTPGHTL

SEQ ID NO: 103142 - protein, 10 aa, Homo Sapiens
AEFEQKINRL

SEQ ID NO: 103143 - protein, 10 aa, Homo Sapiens
AEFHTELERL

SEQ ID NO: 103144 - protein, 10 aa, Homo Sapiens
AEFKEAFQLF

SEQ ID NO: 103145 - protein, 10 aa, Homo Sapiens
AEFKEAFSLF

SEQ ID NO: 103146 - protein, 10 aa, Homo Sapiens
AEFKEGKKEL

SEQ ID NO: 103147 - protein, 10 aa, Homo Sapiens
AEFLMKNSDL

SEQ ID NO: 103148 - protein, 10 aa, Homo Sapiens
AEFLPDPSAL

SEQ ID NO: 103149 - protein, 10 aa, Homo Sapiens
AEFNSTPAVF

SEQ ID NO: 103150 - protein, 10 aa, Homo Sapiens
AEFPGLPEAL

SEQ ID NO: 103151 - protein, 10 aa, Homo Sapiens
AEFQEHEHAL

SEQ ID NO: 103152 - protein, 10 aa, Homo Sapiens
AEFRDYPPVL

SEQ ID NO: 103153 - protein, 10 aa, Homo Sapiens
AEFSSAGHSL

SEQ ID NO: 103154 - protein, 10 aa, Homo Sapiens
AEFTKSIAKF

SEQ ID NO: 103155 - protein, 10 aa, Homo Sapiens
AEGDRVMVVL

SEQ ID NO: 103156 - protein, 10 aa, Homo Sapiens
AEGIVNGHTL

SEQ ID NO: 103157 - protein, 10 aa, Homo Sapiens
AEGKKQAQIL

SEQ ID NO: 103158 - protein, 10 aa, Homo Sapiens
AEHENMKAVL

SEQ ID NO: 103159 - protein, 10 aa, Homo Sapiens
AEHKEFITAL

SEQ ID NO: 103160 - protein, 10 aa, Homo Sapiens
AEHKIFPAAL

SEQ ID NO: 103161 - protein, 10 aa, Homo Sapiens
AEHNDLQYAA

SEQ ID NO: 103162 - protein, 10 aa, Homo Sapiens
AEHPAGHLVL

SEQ ID NO: 103163 - protein, 10 aa, Homo Sapiens
AEHPGDCLIF

SEQ ID NO: 103164 - protein, 10 aa, Homo Sapiens
AEHQVPVEKL

SEQ ID NO: 103165 - protein, 10 aa, Homo Sapiens
AEHRYYGKSL

SEQ ID NO: 103166 - protein, 10 aa, Homo Sapiens
AEHSESGQLV

SEQ ID NO: 103167 - protein, 10 aa, Homo Sapiens
AEIDAHLVAL

SEQ ID NO: 103168 - protein, 10 aa, Homo Sapiens
AEIDARNDSF

SEQ ID NO: 103169 - protein, 10 aa, Homo Sapiens
AEIDLRQGRL

SEQ ID NO: 103170 - protein, 10 aa, Homo Sapiens
AEIDSVKMTL

SEQ ID NO: 103171 - protein, 10 aa, Homo Sapiens
AEIEPPHHEL

SEQ ID NO: 103172 - protein, 10 aa, Homo Sapiens
AEIESHHPRL

SEQ ID NO: 103173 - protein, 10 aa, Homo Sapiens
AEIETRIAEL

SEQ ID NO: 103174 - protein, 10 aa, Homo Sapiens
AEIGQVKQEL

SEQ ID NO: 103175 - protein, 10 aa, Homo Sapiens
AEIKRINKEL

SEQ ID NO: 103176 - protein, 10 aa, Homo Sapiens
AEIKVKLIEA

SEQ ID NO: 103177 - protein, 10 aa, Homo Sapiens
AEILHEIAVL

SEQ ID NO: 103178 - protein, 10 aa, Homo Sapiens
AEINKSLLAL

SEQ ID NO: 103179 - protein, 10 aa, Homo Sapiens
AEINNIIKIV

SEQ ID NO: 103180 - protein, 10 aa, Homo Sapiens
AEIPRAIQSL

SEQ ID NO: 103181 - protein, 10 aa, Homo Sapiens
AEIQAELERL

SEQ ID NO: 103182 - protein, 10 aa, Homo Sapiens
AEIQDMKQEL

SEQ ID NO: 103183 - protein, 10 aa, Homo Sapiens
AEIQELHQSV

SEQ ID NO: 103184 - protein, 10 aa, Homo Sapiens
AEIQETITAL

SEQ ID NO: 103185 - protein, 10 aa, Homo Sapiens
AEIQGNINKV

SEQ ID NO: 103186 - protein, 10 aa, Homo Sapiens
AEIRHVLVTL

SEQ ID NO: 103187 - protein, 10 aa, Homo Sapiens
AEIRQQIPVF

SEQ ID NO: 103188 - protein, 10 aa, Homo Sapiens
AEISLLKQQL

SEQ ID NO: 103189 - protein, 10 aa, Homo Sapiens
AEITPKGRAL

SEQ ID NO: 103190 - protein, 10 aa, Homo Sapiens
AEKAVTKEEF

SEQ ID NO: 103191 - protein, 10 aa, Homo Sapiens
AEKCPNLTHL

SEQ ID NO: 103192 - protein, 10 aa, Homo Sapiens
AEKDNAEIRV

SEQ ID NO: 103193 - protein, 10 aa, Homo Sapiens
AEKLGETEKL

SEQ ID NO: 103194 - protein, 10 aa, Homo Sapiens
AEKLGGSAVI

SEQ ID NO: 103195 - protein, 10 aa, Homo Sapiens
AEKLPNLTHL

SEQ ID NO: 103196 - protein, 10 aa, Homo Sapiens
AEKNSNVETL

SEQ ID NO: 103197 - protein, 10 aa, Homo Sapiens
AEKPAVPETA

SEQ ID NO: 103198 - protein, 10 aa, Homo Sapiens
AEKVANAESL

SEQ ID NO: 103199 - protein, 10 aa, Homo Sapiens
AEKVQREPLL

SEQ ID NO: 103200 - protein, 10 aa, Homo Sapiens
AELAGEGISV

SEQ ID NO: 103201 - protein, 10 aa, Homo Sapiens
AELDEKISAL

SEQ ID NO: 103202 - protein, 10 aa, Homo Sapiens
AELDKRIEAL

SEQ ID NO: 103203 - protein, 10 aa, Homo Sapiens
AELDPGTISV

SEQ ID NO: 103204 - protein, 10 aa, Homo Sapiens
AELDPVEYTL

SEQ ID NO: 103205 - protein, 10 aa, Homo Sapiens
AELEGRQEEL

SEQ ID NO: 103206 - protein, 10 aa, Homo Sapiens
AELEKLQAEL

SEQ ID NO: 103207 - protein, 10 aa, Homo Sapiens
AELEREKEKL

SEQ ID NO: 103208 - protein, 10 aa, Homo Sapiens
AELESKTNTL

SEQ ID NO: 103209 - protein, 10 aa, Homo Sapiens
AELGLAPSAL

SEQ ID NO: 103210 - protein, 10 aa, Homo Sapiens
AELIRGICEM

SEQ ID NO: 103211 - protein, 10 aa, Homo Sapiens
AELKMTGNCL

SEQ ID NO: 103212 - protein, 10 aa, Homo Sapiens
AELKSSTVGL

SEQ ID NO: 103213 - protein, 10 aa, Homo Sapiens
AELLLKSSDL

SEQ ID NO: 103214 - protein, 10 aa, Homo Sapiens
AELLTELHQL

SEQ ID NO: 103215 - protein, 10 aa, Homo Sapiens
AELLVKGYEI

SEQ ID NO: 103216 - protein, 10 aa, Homo Sapiens
AELMQQVNVL

SEQ ID NO: 103217 - protein, 10 aa, Homo Sapiens
AELNLRSNEL

SEQ ID NO: 103218 - protein, 10 aa, Homo Sapiens
AELPASVHAL

SEQ ID NO: 103219 - protein, 10 aa, Homo Sapiens
AELQCEVAAL

SEQ ID NO: 103220 - protein, 10 aa, Homo Sapiens
AELQEKFLSL

SEQ ID NO: 103221 - protein, 10 aa, Homo Sapiens
AELQQQQAVL

SEQ ID NO: 103222 - protein, 10 aa, Homo Sapiens
AELQSRLAAL

SEQ ID NO: 103223 - protein, 10 aa, Homo Sapiens
AELRHVMTNL

SEQ ID NO: 103224 - protein, 10 aa, Homo Sapiens
AELRKRQAEL

SEQ ID NO: 103225 - protein, 10 aa, Homo Sapiens
AELRNASAVM

SEQ ID NO: 103226 - protein, 10 aa, Homo Sapiens
AELSPVEQKL

SEQ ID NO: 103227 - protein, 10 aa, Homo Sapiens
AELVKRKQEL

SEQ ID NO: 103228 - protein, 10 aa, Homo Sapiens
AELWKNPTAF

SEQ ID NO: 103229 - protein, 10 aa, Homo Sapiens
AEMAQNAVRL

SEQ ID NO: 103230 - protein, 10 aa, Homo Sapiens
AEMETQKEKI

SEQ ID NO: 103231 - protein, 10 aa, Homo Sapiens
AEMLYGLIHA

SEQ ID NO: 103232 - protein, 10 aa, Homo Sapiens
AEMPDSAAAL

SEQ ID NO: 103233 - protein, 10 aa, Homo Sapiens
AEMRPPLIET

SEQ ID NO: 103234 - protein, 10 aa, Homo Sapiens
AENDAQKPSL

SEQ ID NO: 103235 - protein, 10 aa, Homo Sapiens
AENELGVVVA

SEQ ID NO: 103236 - protein, 10 aa, Homo Sapiens
AENGFLPIHL

SEQ ID NO: 103237 - protein, 10 aa, Homo Sapiens
AENPFVVSMF

SEQ ID NO: 103238 - protein, 10 aa, Homo Sapiens
AENPGKYNIL

SEQ ID NO: 103239 - protein, 10 aa, Homo Sapiens
AENPHSEYGL

SEQ ID NO: 103240 - protein, 10 aa, Homo Sapiens
AEPARPQAVL

SEQ ID NO: 103241 - protein, 10 aa, Homo Sapiens
AEPDYVQPQL

SEQ ID NO: 103242 - protein, 10 aa, Homo Sapiens
AEPEDHYFLL

SEQ ID NO: 103243 - protein, 10 aa, Homo Sapiens
AEPELQYVAL

SEQ ID NO: 103244 - protein, 10 aa, Homo Sapiens
AEPLRPGPAL

SEQ ID NO: 103245 - protein, 10 aa, Homo Sapiens
AEPMKGPIAM

SEQ ID NO: 103246 - protein, 10 aa, Homo Sapiens
AEPVNLFQHL

SEQ ID NO: 103247 - protein, 10 aa, Homo Sapiens
AEQAKASPAL

SEQ ID NO: 103248 - protein, 10 aa, Homo Sapiens
AEQKRLKTVL

SEQ ID NO: 103249 - protein, 10 aa, Homo Sapiens
AEQQGKGVAL

SEQ ID NO: 103250 - protein, 10 aa, Homo Sapiens
AEQQKAQFTA

SEQ ID NO: 103251 - protein, 10 aa, Homo Sapiens
AEQSVAKASL

SEQ ID NO: 103252 - protein, 10 aa, Homo Sapiens
AEQSVLFKSL

SEQ ID NO: 103253 - protein, 10 aa, Homo Sapiens
AERDSALETL

SEQ ID NO: 103254 - protein, 10 aa, Homo Sapiens
AEREAEIRSL

SEQ ID NO: 103255 - protein, 10 aa, Homo Sapiens
AERFNVPVSL

SEQ ID NO: 103256 - protein, 10 aa, Homo Sapiens
AERIGETPEL

SEQ ID NO: 103257 - protein, 10 aa, Homo Sapiens
AERKNISQEL

SEQ ID NO: 103258 - protein, 10 aa, Homo Sapiens
AERPGEAAVA

SEQ ID NO: 103259 - protein, 10 aa, Homo Sapiens
AERQPLGHVT

SEQ ID NO: 103260 - protein, 10 aa, Homo Sapiens
AESEKWQQAL

SEQ ID NO: 103261 - protein, 10 aa, Homo Sapiens
AESGVERQVL

SEQ ID NO: 103262 - protein, 10 aa, Homo Sapiens
AESLIVPVRM

SEQ ID NO: 103263 - protein, 10 aa, Homo Sapiens
AESQELIYTF

SEQ ID NO: 103264 - protein, 10 aa, Homo Sapiens
AESWGTGRAV

SEQ ID NO: 103265 - protein, 10 aa, Homo Sapiens
AETAKATPRL

SEQ ID NO: 103266 - protein, 10 aa, Homo Sapiens
AETDRRTLQM

SEQ ID NO: 103267 - protein, 10 aa, Homo Sapiens
AETDVLFNKV

SEQ ID NO: 103268 - protein, 10 aa, Homo Sapiens
AETHFGFETV

SEQ ID NO: 103269 - protein, 10 aa, Homo Sapiens
AETPGHTPSL

SEQ ID NO: 103270 - protein, 10 aa, Homo Sapiens
AEVAAKNQSL

SEQ ID NO: 103271 - protein, 10 aa, Homo Sapiens
AEVAATEIKM

SEQ ID NO: 103272 - protein, 10 aa, Homo Sapiens
AEVARAQAAL

SEQ ID NO: 103273 - protein, 10 aa, Homo Sapiens
AEVCPTPARL

SEQ ID NO: 103274 - protein, 10 aa, Homo Sapiens
AEVDRIIAQL

SEQ ID NO: 103275 - protein, 10 aa, Homo Sapiens
AEVEGIGEAL

SEQ ID NO: 103276 - protein, 10 aa, Homo Sapiens
AEVEHLTEVL

SEQ ID NO: 103277 - protein, 10 aa, Homo Sapiens
AEVELKRDEA

SEQ ID NO: 103278 - protein, 10 aa, Homo Sapiens
AEVENVFHSL

SEQ ID NO: 103279 - protein, 10 aa, Homo Sapiens
AEVERVKDVL

SEQ ID NO: 103280 - protein, 10 aa, Homo Sapiens
AEVETRKVVL

SEQ ID NO: 103281 - protein, 10 aa, Homo Sapiens
AEVGDGTTSV

SEQ ID NO: 103282 - protein, 10 aa, Homo Sapiens
AEVGVKAHHL

SEQ ID NO: 103283 - protein, 10 aa, Homo Sapiens
AEVIAKNNSF

SEQ ID NO: 103284 - protein, 10 aa, Homo Sapiens
AEVKDMEQLL

SEQ ID NO: 103285 - protein, 10 aa, Homo Sapiens
AEVKIEKRTT

SEQ ID NO: 103286 - protein, 10 aa, Homo Sapiens
AEVKRPGESL

SEQ ID NO: 103287 - protein, 10 aa, Homo Sapiens
AEVKRVGDTL

SEQ ID NO: 103288 - protein, 10 aa, Homo Sapiens
AEVLIQQGGL

SEQ ID NO: 103289 - protein, 10 aa, Homo Sapiens
AEVLITTRTA

SEQ ID NO: 103290 - protein, 10 aa, Homo Sapiens
AEVLVKSNNL

SEQ ID NO: 103291 - protein, 10 aa, Homo Sapiens
AEVMPAQWEF

SEQ ID NO: 103292 - protein, 10 aa, Homo Sapiens
AEVRGPAHCL

SEQ ID NO: 103293 - protein, 10 aa, Homo Sapiens
AEVRVQQQTA

SEQ ID NO: 103294 - protein, 10 aa, Homo Sapiens
AEVSELETRL

SEQ ID NO: 103295 - protein, 10 aa, Homo Sapiens
AEVSNTFVRL

SEQ ID NO: 103296 - protein, 10 aa, Homo Sapiens
AEVSQNIEKL

SEQ ID NO: 103297 - protein, 10 aa, Homo Sapiens
AEWAAANHVL

SEQ ID NO: 103298 - protein, 10 aa, Homo Sapiens
AEWKKEEERL

SEQ ID NO: 103299 - protein, 10 aa, Homo Sapiens
AEWREALRAL

SEQ ID NO: 103300 - protein, 10 aa, Homo Sapiens
AEYAHPLETL

SEQ ID NO: 103301 - protein, 10 aa, Homo Sapiens
AEYDFRNDSV

SEQ ID NO: 103302 - protein, 10 aa, Homo Sapiens
AEYDNFFQHL

SEQ ID NO: 103303 - protein, 10 aa, Homo Sapiens
AEYENLTNKL

SEQ ID NO: 103304 - protein, 10 aa, Homo Sapiens
AEYHKLARKL

SEQ ID NO: 103305 - protein, 10 aa, Homo Sapiens
AEYIQKNVQL

SEQ ID NO: 103306 - protein, 10 aa, Homo Sapiens
AEYPGSSAQL

SEQ ID NO: 103307 - protein, 10 aa, Homo Sapiens
AEYSTKNNAL

SEQ ID NO: 103308 - protein, 10 aa, Homo Sapiens
EEGKNIIVIM

SEQ ID NO: 103309 - protein, 10 aa, Homo Sapiens
EEIANYRPTL

SEQ ID NO: 103310 - protein, 10 aa, Homo Sapiens
EEIKDFLLTA

SEQ ID NO: 103311 - protein, 10 aa, Homo Sapiens
EEMDSNKVSL

SEQ ID NO: 103312 - protein, 10 aa, Homo Sapiens
EEQLQQIRAE

SEQ ID NO: 103313 - protein, 10 aa, Homo Sapiens
EEVQSLPLPL

SEQ ID NO: 103314 - protein, 10 aa, Homo Sapiens
EEWHGHVTAL

SEQ ID NO: 103315 - protein, 10 aa, Homo Sapiens
EGDNEFERIL

SEQ ID NO: 103316 - protein, 10 aa, Homo Sapiens
ELAAPGQAKI

SEQ ID NO: 103317 - protein, 10 aa, Homo Sapiens
ELLKPTELVP

SEQ ID NO: 103318 - protein, 10 aa, Homo Sapiens
ELPQAAPPQI

SEQ ID NO: 103319 - protein, 10 aa, Homo Sapiens
EREKLASEIL

SEQ ID NO: 103320 - protein, 10 aa, Homo Sapiens
ESRLEKAELS

SEQ ID NO: 103321 - protein, 10 aa, Homo Sapiens
ETLDLSHNQL

SEQ ID NO: 103322 - protein, 10 aa, Homo Sapiens
FEFDEQGREL

SEQ ID NO: 103323 - protein, 10 aa, Homo Sapiens
FEFGSLDQKL

SEQ ID NO: 103324 - protein, 10 aa, Homo Sapiens
FEFTGSHLTV

SEQ ID NO: 103325 - protein, 10 aa, Homo Sapiens
FEISDIGAKI

SEQ ID NO: 103326 - protein, 10 aa, Homo Sapiens
FEREVGRQSV

SEQ ID NO: 103327 - protein, 10 aa, Homo Sapiens
FERPQYAEIL

SEQ ID NO: 103328 - protein, 10 aa, Homo Sapiens
FEWVAERVEL

SEQ ID NO: 103329 - protein, 10 aa, Homo Sapiens
GEAAAVFKTL

SEQ ID NO: 103330 - protein, 10 aa, Homo Sapiens
GEAELNWSRL

SEQ ID NO: 103331 - protein, 10 aa, Homo Sapiens
GEAGAKFIEV

SEQ ID NO: 103332 - protein, 10 aa, Homo Sapiens
GEAGPSAEAL

SEQ ID NO: 103333 - protein, 10 aa, Homo Sapiens
GEAKVKKQLV

SEQ ID NO: 103334 - protein, 10 aa, Homo Sapiens
GEALAPRQVL

SEQ ID NO: 103335 - protein, 10 aa, Homo Sapiens
GEANVPFITV

SEQ ID NO: 103336 - protein, 10 aa, Homo Sapiens
GEAPAKSSTL

SEQ ID NO: 103337 - protein, 10 aa, Homo Sapiens
GEAQVGKTSL

SEQ ID NO: 103338 - protein, 10 aa, Homo Sapiens
GEARKQVEVF

SEQ ID NO: 103339 - protein, 10 aa, Homo Sapiens
GEAVEVIHKL

SEQ ID NO: 103340 - protein, 10 aa, Homo Sapiens
GECDVFKEIL

SEQ ID NO: 103341 - protein, 10 aa, Homo Sapiens
GECGFRPTIF

SEQ ID NO: 103342 - protein, 10 aa, Homo Sapiens
GECRPLSKTV

SEQ ID NO: 103343 - protein, 10 aa, Homo Sapiens
GECYEKLNQL

SEQ ID NO: 103344 - protein, 10 aa, Homo Sapiens
GEDLNKWQAL

SEQ ID NO: 103345 - protein, 10 aa, Homo Sapiens
GEDPDKRISI

SEQ ID NO: 103346 - protein, 10 aa, Homo Sapiens
GEDPNKAEEL

SEQ ID NO: 103347 - protein, 10 aa, Homo Sapiens
GEDRSPPTAL

SEQ ID NO: 103348 - protein, 10 aa, Homo Sapiens
GEFDNAGAMM

SEQ ID NO: 103349 - protein, 10 aa, Homo Sapiens
GEFDNAGGMM

SEQ ID NO: 103350 - protein, 10 aa, Homo Sapiens
GEFEKGGKSV

SEQ ID NO: 103351 - protein, 10 aa, Homo Sapiens
GEFEKKYVAT

SEQ ID NO: 103352 - protein, 10 aa, Homo Sapiens
GEFGHIQKDC

SEQ ID NO: 103353 - protein, 10 aa, Homo Sapiens
GEFKLNQPEL

SEQ ID NO: 103354 - protein, 10 aa, Homo Sapiens
GEFKVSERYL

SEQ ID NO: 103355 - protein, 10 aa, Homo Sapiens
GEFNEQVLRL

SEQ ID NO: 103356 - protein, 10 aa, Homo Sapiens
GEFQIVNPHL

SEQ ID NO: 103357 - protein, 10 aa, Homo Sapiens
GEFRQGLISA

SEQ ID NO: 103358 - protein, 10 aa, Homo Sapiens
GEFRTGKTQI

SEQ ID NO: 103359 - protein, 10 aa, Homo Sapiens
GEFSDKLLSL

SEQ ID NO: 103360 - protein, 10 aa, Homo Sapiens
GEFSDTNAAV

SEQ ID NO: 103361 - protein, 10 aa, Homo Sapiens
GEFSLRGKEL

SEQ ID NO: 103362 - protein, 10 aa, Homo Sapiens
GEFTDLKQQL

SEQ ID NO: 103363 - protein, 10 aa, Homo Sapiens
GEGCVGKTSL

SEQ ID NO: 103364 - protein, 10 aa, Homo Sapiens
GEGKLFSLEL

SEQ ID NO: 103365 - protein, 10 aa, Homo Sapiens
GEGKNGTIEL

SEQ ID NO: 103366 - protein, 10 aa, Homo Sapiens
GEGMGISHEL

SEQ ID NO: 103367 - protein, 10 aa, Homo Sapiens
GEGNWSKILL

SEQ ID NO: 103368 - protein, 10 aa, Homo Sapiens
GEGQFGEVHL

SEQ ID NO: 103369 - protein, 10 aa, Homo Sapiens
GEGSFSTVVL

SEQ ID NO: 103370 - protein, 10 aa, Homo Sapiens
GEHDTTEYKL

SEQ ID NO: 103371 - protein, 10 aa, Homo Sapiens
GEHEIDYILL

SEQ ID NO: 103372 - protein, 10 aa, Homo Sapiens
GEHGDSSVAV

SEQ ID NO: 103373 - protein, 10 aa, Homo Sapiens
GEHGLIIRVK

SEQ ID NO: 103374 - protein, 10 aa, Homo Sapiens
GEHQINQIAL

SEQ ID NO: 103375 - protein, 10 aa, Homo Sapiens
GEIADAIKTL

SEQ ID NO: 103376 - protein, 10 aa, Homo Sapiens
GEIDGNKVTL

SEQ ID NO: 103377 - protein, 10 aa, Homo Sapiens
GEIDVPSHEL

SEQ ID NO: 103378 - protein, 10 aa, Homo Sapiens
GEIEGLNDTF

SEQ ID NO: 103379 - protein, 10 aa, Homo Sapiens
GEIFSEHSCL

SEQ ID NO: 103380 - protein, 10 aa, Homo Sapiens
GEIHDSKMRL

SEQ ID NO: 103381 - protein, 10 aa, Homo Sapiens
GEIINTHTLL

SEQ ID NO: 103382 - protein, 10 aa, Homo Sapiens
GEIKNIHLNL

SEQ ID NO: 103383 - protein, 10 aa, Homo Sapiens
GEIQQIPVQL

SEQ ID NO: 103384 - protein, 10 aa, Homo Sapiens
GEIRDLKTKT

SEQ ID NO: 103385 - protein, 10 aa, Homo Sapiens
GEIRNVGTGL

SEQ ID NO: 103386 - protein, 10 aa, Homo Sapiens
GEISDIHTKL

SEQ ID NO: 103387 - protein, 10 aa, Homo Sapiens
GEISKKVAQI

SEQ ID NO: 103388 - protein, 10 aa, Homo Sapiens
GEISLLKQQL

SEQ ID NO: 103389 - protein, 10 aa, Homo Sapiens
GEISMEKVKV

SEQ ID NO: 103390 - protein, 10 aa, Homo Sapiens
GEITTLNHKL

SEQ ID NO: 103391 - protein, 10 aa, Homo Sapiens
GEIVIGGQNI

SEQ ID NO: 103392 - protein, 10 aa, Homo Sapiens
GEIVTTIPTI

SEQ ID NO: 103393 - protein, 10 aa, Homo Sapiens
GEIVYCGQVF

SEQ ID NO: 103394 - protein, 10 aa, Homo Sapiens
GEKKPIDQRL

SEQ ID NO: 103395 - protein, 10 aa, Homo Sapiens
GEKNIAIEFL

SEQ ID NO: 103396 - protein, 10 aa, Homo Sapiens
GEKQFSEERI

SEQ ID NO: 103397 - protein, 10 aa, Homo Sapiens
GEKQINQEYL

SEQ ID NO: 103398 - protein, 10 aa, Homo Sapiens
GEKSPEPLGL

SEQ ID NO: 103399 - protein, 10 aa, Homo Sapiens
GELAANKSEM

SEQ ID NO: 103400 - protein, 10 aa, Homo Sapiens
GELDLPILKV

SEQ ID NO: 103401 - protein, 10 aa, Homo Sapiens
GELEAERQAL

SEQ ID NO: 103402 - protein, 10 aa, Homo Sapiens
GELEKENHQL

SEQ ID NO: 103403 - protein, 10 aa, Homo Sapiens
GELGNGNIKL

SEQ ID NO: 103404 - protein, 10 aa, Homo Sapiens
GELKDLTQKV

SEQ ID NO: 103405 - protein, 10 aa, Homo Sapiens
GELKHGPLAL

SEQ ID NO: 103406 - protein, 10 aa, Homo Sapiens
GELNVDSLIT

SEQ ID NO: 103407 - protein, 10 aa, Homo Sapiens
GELPQGFARL

SEQ ID NO: 103408 - protein, 10 aa, Homo Sapiens
GELQHASAVL

SEQ ID NO: 103409 - protein, 10 aa, Homo Sapiens
GELQKAILEL

SEQ ID NO: 103410 - protein, 10 aa, Homo Sapiens
GELQSLRPIL

SEQ ID NO: 103411 - protein, 10 aa, Homo Sapiens
GELREQLKAL

SEQ ID NO: 103412 - protein, 10 aa, Homo Sapiens
GELVSVAHAL

SEQ ID NO: 103413 - protein, 10 aa, Homo Sapiens
GEMKSGVPVL

SEQ ID NO: 103414 - protein, 10 aa, Homo Sapiens
GENKMGQLGL

SEQ ID NO: 103415 - protein, 10 aa, Homo Sapiens
GENPFATVKL

SEQ ID NO: 103416 - protein, 10 aa, Homo Sapiens
GENPHGVKAV

SEQ ID NO: 103417 - protein, 10 aa, Homo Sapiens
GEPEKLGQAL

SEQ ID NO: 103418 - protein, 10 aa, Homo Sapiens
GEPGFPLNAI

SEQ ID NO: 103419 - protein, 10 aa, Homo Sapiens
GEPRVKHFEA

SEQ ID NO: 103420 - protein, 10 aa, Homo Sapiens
GEPTNFVHTA

SEQ ID NO: 103421 - protein, 10 aa, Homo Sapiens
GEPVNGRHTL

SEQ ID NO: 103422 - protein, 10 aa, Homo Sapiens
GEQGGGKLVL

SEQ ID NO: 103423 - protein, 10 aa, Homo Sapiens
GERESGLRSL

SEQ ID NO: 103424 - protein, 10 aa, Homo Sapiens
GERESGVVAV

SEQ ID NO: 103425 - protein, 10 aa, Homo Sapiens
GERSGLKPPL

SEQ ID NO: 103426 - protein, 10 aa, Homo Sapiens
GESAVGKSSL

SEQ ID NO: 103427 - protein, 10 aa, Homo Sapiens
GESDDSILRL

SEQ ID NO: 103428 - protein, 10 aa, Homo Sapiens
GESGIKVAVL

SEQ ID NO: 103429 - protein, 10 aa, Homo Sapiens
GESGLGKSTL

SEQ ID NO: 103430 - protein, 10 aa, Homo Sapiens
GESGQSWPRL

SEQ ID NO: 103431 - protein, 10 aa, Homo Sapiens
GESHIGGVLL

SEQ ID NO: 103432 - protein, 10 aa, Homo Sapiens
GESIDIITRA

SEQ ID NO: 103433 - protein, 10 aa, Homo Sapiens
GESKLGGNEI

SEQ ID NO: 103434 - protein, 10 aa, Homo Sapiens
GESSGKNVTL

SEQ ID NO: 103435 - protein, 10 aa, Homo Sapiens
GESTVRTIAM

SEQ ID NO: 103436 - protein, 10 aa, Homo Sapiens
GETDKRQIAI

SEQ ID NO: 103437 - protein, 10 aa, Homo Sapiens
GETDWKLIAI

SEQ ID NO: 103438 - protein, 10 aa, Homo Sapiens
GETETRLECL

SEQ ID NO: 103439 - protein, 10 aa, Homo Sapiens
GETGIGKSTL

SEQ ID NO: 103440 - protein, 10 aa, Homo Sapiens
GETKISQSEL

SEQ ID NO: 103441 - protein, 10 aa, Homo Sapiens
GETPSGVKRL

SEQ ID NO: 103442 - protein, 10 aa, Homo Sapiens
GETREKSPKL

SEQ ID NO: 103443 - protein, 10 aa, Homo Sapiens
GETSVGKTSL

SEQ ID NO: 103444 - protein, 10 aa, Homo Sapiens
GEVDLRECVV

SEQ ID NO: 103445 - protein, 10 aa, Homo Sapiens
GEVDVEQHTL

SEQ ID NO: 103446 - protein, 10 aa, Homo Sapiens
GEVELLQQKL

SEQ ID NO: 103447 - protein, 10 aa, Homo Sapiens
GEVFRVVDTL

SEQ ID NO: 103448 - protein, 10 aa, Homo Sapiens
GEVHIGGVML

SEQ ID NO: 103449 - protein, 10 aa, Homo Sapiens
GEVHTGTTIM

SEQ ID NO: 103450 - protein, 10 aa, Homo Sapiens
GEVIPPMKEF

SEQ ID NO: 103451 - protein, 10 aa, Homo Sapiens
GEVIRTLPSL

SEQ ID NO: 103452 - protein, 10 aa, Homo Sapiens
GEVKPVLQKL

SEQ ID NO: 103453 - protein, 10 aa, Homo Sapiens
GEVLIDTHLF

SEQ ID NO: 103454 - protein, 10 aa, Homo Sapiens
GEVNLGPNKM

SEQ ID NO: 103455 - protein, 10 aa, Homo Sapiens
GEVPFNHEIL

SEQ ID NO: 103456 - protein, 10 aa, Homo Sapiens
GEVQDLLVRL

SEQ ID NO: 103457 - protein, 10 aa, Homo Sapiens
GEVSGLMRKV

SEQ ID NO: 103458 - protein, 10 aa, Homo Sapiens
GEWEESEVKL

SEQ ID NO: 103459 - protein, 10 aa, Homo Sapiens
GEWNRKSPNL

SEQ ID NO: 103460 - protein, 10 aa, Homo Sapiens
GEWTAPAPEF

SEQ ID NO: 103461 - protein, 10 aa, Homo Sapiens
GEWVERTQQL

SEQ ID NO: 103462 - protein, 10 aa, Homo Sapiens
GEWYIRGQTI

SEQ ID NO: 103463 - protein, 10 aa, Homo Sapiens
GEYDMTVPKL

SEQ ID NO: 103464 - protein, 10 aa, Homo Sapiens
GEYDVTMPKV

SEQ ID NO: 103465 - protein, 10 aa, Homo Sapiens
GEYDVTVPKL

SEQ ID NO: 103466 - protein, 10 aa, Homo Sapiens
GEYEKGVDHL

SEQ ID NO: 103467 - protein, 10 aa, Homo Sapiens
GEYFPGTGDL

SEQ ID NO: 103468 - protein, 10 aa, Homo Sapiens
GEYKKTLLKL

SEQ ID NO: 103469 - protein, 10 aa, Homo Sapiens
GEYPLTAMTL

SEQ ID NO: 103470 - protein, 10 aa, Homo Sapiens
GEYPSGINTW

SEQ ID NO: 103471 - protein, 10 aa, Homo Sapiens
GEYRGSDFTA

SEQ ID NO: 103472 - protein, 10 aa, Homo Sapiens
GEYTEHLHSA

SEQ ID NO: 103473 - protein, 10 aa, Homo Sapiens
GSDPVVIVSA

SEQ ID NO: 103474 - protein, 10 aa, Homo Sapiens
GVEARTLLKL

SEQ ID NO: 103475 - protein, 10 aa, Homo Sapiens
HEAAFPIAVV

SEQ ID NO: 103476 - protein, 10 aa, Homo Sapiens
HEAEDLKMLI

SEQ ID NO: 103477 - protein, 10 aa, Homo Sapiens
HEALKENGVT

SEQ ID NO: 103478 - protein, 10 aa, Homo Sapiens
HEAQHGVTSL

SEQ ID NO: 103479 - protein, 10 aa, Homo Sapiens
HEAQLKNGSL

SEQ ID NO: 103480 - protein, 10 aa, Homo Sapiens
HEASAILVHL

SEQ ID NO: 103481 - protein, 10 aa, Homo Sapiens
HEATLRCWAL

SEQ ID NO: 103482 - protein, 10 aa, Homo Sapiens
HEAVIEKHVF

SEQ ID NO: 103483 - protein, 10 aa, Homo Sapiens
HEFLHEVPAA

SEQ ID NO: 103484 - protein, 10 aa, Homo Sapiens
HEGEGNIRSV

SEQ ID NO: 103485 - protein, 10 aa, Homo Sapiens
HEHRGTPVGL

SEQ ID NO: 103486 - protein, 10 aa, Homo Sapiens
HEIESLYTKL

SEQ ID NO: 103487 - protein, 10 aa, Homo Sapiens
HEIESRILDL

SEQ ID NO: 103488 - protein, 10 aa, Homo Sapiens
HEIEVIDQRL

SEQ ID NO: 103489 - protein, 10 aa, Homo Sapiens
HEIEVIGGYL

SEQ ID NO: 103490 - protein, 10 aa, Homo Sapiens
HEIGELQQRL

SEQ ID NO: 103491 - protein, 10 aa, Homo Sapiens
HEIGHGIAAI

SEQ ID NO: 103492 - protein, 10 aa, Homo Sapiens
HEINGLLVGF

SEQ ID NO: 103493 - protein, 10 aa, Homo Sapiens
HEIQRTENSL

SEQ ID NO: 103494 - protein, 10 aa, Homo Sapiens
HEIQSDVLTI

SEQ ID NO: 103495 - protein, 10 aa, Homo Sapiens
HEIRTGVRTL

SEQ ID NO: 103496 - protein, 10 aa, Homo Sapiens
HEISEGNVAT

SEQ ID NO: 103497 - protein, 10 aa, Homo Sapiens
HEISNAVREM

SEQ ID NO: 103498 - protein, 10 aa, Homo Sapiens
HEKPEIFTEL

SEQ ID NO: 103499 - protein, 10 aa, Homo Sapiens
HEKQVYDIAA

SEQ ID NO: 103500 - protein, 10 aa, Homo Sapiens
HELVPEHVVM

SEQ ID NO: 103501 - protein, 10 aa, Homo Sapiens
HEMEEIRKKL

SEQ ID NO: 103502 - protein, 10 aa, Homo Sapiens
HEMQIQHPTA

SEQ ID NO: 103503 - protein, 10 aa, Homo Sapiens
HENPDIIIAT

SEQ ID NO: 103504 - protein, 10 aa, Homo Sapiens
HERNLQSDVL

SEQ ID NO: 103505 - protein, 10 aa, Homo Sapiens
HERTIHTDVL

SEQ ID NO: 103506 - protein, 10 aa, Homo Sapiens
HESAVTGLSL

SEQ ID NO: 103507 - protein, 10 aa, Homo Sapiens
HEVDELTQII

SEQ ID NO: 103508 - protein, 10 aa, Homo Sapiens
HEVEQGCAVL

SEQ ID NO: 103509 - protein, 10 aa, Homo Sapiens
HEVHPISSGL

SEQ ID NO: 103510 - protein, 10 aa, Homo Sapiens
HEWEERRDAL

SEQ ID NO: 103511 - protein, 10 aa, Homo Sapiens
HEYFPEMQIL

SEQ ID NO: 103512 - protein, 10 aa, Homo Sapiens
HEYKGPKADL

SEQ ID NO: 103513 - protein, 10 aa, Homo Sapiens
HEYNERVRTL

SEQ ID NO: 103514 - protein, 10 aa, Homo Sapiens
HEYSEELEKL

SEQ ID NO: 103515 - protein, 10 aa, Homo Sapiens
IEFVADRLML

SEQ ID NO: 103516 - protein, 10 aa, Homo Sapiens
IEKEGVEHQL

SEQ ID NO: 103517 - protein, 10 aa, Homo Sapiens
IEKKKGDFVL

SEQ ID NO: 103518 - protein, 10 aa, Homo Sapiens
IENGEKITSL

SEQ ID NO: 103519 - protein, 10 aa, Homo Sapiens
IEPFSSPPEL

SEQ ID NO: 103520 - protein, 10 aa, Homo Sapiens
IEVDGKQVEL

SEQ ID NO: 103521 - protein, 10 aa, Homo Sapiens
IEWRDRRITL

SEQ ID NO: 103522 - protein, 10 aa, Homo Sapiens
KEAADIIQKL

SEQ ID NO: 103523 - protein, 10 aa, Homo Sapiens
KEAAGEGPAL

SEQ ID NO: 103524 - protein, 10 aa, Homo Sapiens
KEAAIGVLVL

SEQ ID NO: 103525 - protein, 10 aa, Homo Sapiens
KEAEKIIKNL

SEQ ID NO: 103526 - protein, 10 aa, Homo Sapiens
KEAEKLERQL

SEQ ID NO: 103527 - protein, 10 aa, Homo Sapiens
KEAELKDLLL

SEQ ID NO: 103528 - protein, 10 aa, Homo Sapiens
KEAGNINRSL

SEQ ID NO: 103529 - protein, 10 aa, Homo Sapiens
KEAGNINTSL

SEQ ID NO: 103530 - protein, 10 aa, Homo Sapiens
KEAIETIVAA

SEQ ID NO: 103531 - protein, 10 aa, Homo Sapiens
KEALENCITL

SEQ ID NO: 103532 - protein, 10 aa, Homo Sapiens
KEALGIPAAA

SEQ ID NO: 103533 - protein, 10 aa, Homo Sapiens
KEANPAVPEV

SEQ ID NO: 103534 - protein, 10 aa, Homo Sapiens
KEAQLYAAQA

SEQ ID NO: 103535 - protein, 10 aa, Homo Sapiens
KEAVQCVQEL

SEQ ID NO: 103536 - protein, 10 aa, Homo Sapiens
KEDDVRQYVV

SEQ ID NO: 103537 - protein, 10 aa, Homo Sapiens
KEDRGRPYTL

SEQ ID NO: 103538 - protein, 10 aa, Homo Sapiens
KEEEAGVKEL

SEQ ID NO: 103539 - protein, 10 aa, Homo Sapiens
KEETQPPVAL

SEQ ID NO: 103540 - protein, 10 aa, Homo Sapiens
KEFDGKSLVS

SEQ ID NO: 103541 - protein, 10 aa, Homo Sapiens
KEFDGTKVFL

SEQ ID NO: 103542 - protein, 10 aa, Homo Sapiens
KEFEDAVRKV

SEQ ID NO: 103543 - protein, 10 aa, Homo Sapiens
KEFEDKKVEL

SEQ ID NO: 103544 - protein, 10 aa, Homo Sapiens
KEFEENTQHL

SEQ ID NO: 103545 - protein, 10 aa, Homo Sapiens
KEFEGKTLVS

SEQ ID NO: 103546 - protein, 10 aa, Homo Sapiens
KEFEKASKIL

SEQ ID NO: 103547 - protein, 10 aa, Homo Sapiens
KEFEQLAPVL

SEQ ID NO: 103548 - protein, 10 aa, Homo Sapiens
KEFETAETLL

SEQ ID NO: 103549 - protein, 10 aa, Homo Sapiens
KEFEVKDPEL

SEQ ID NO: 103550 - protein, 10 aa, Homo Sapiens
KEFGDDKVQL

SEQ ID NO: 103551 - protein, 10 aa, Homo Sapiens
KEFIEGVSQF

SEQ ID NO: 103552 - protein, 10 aa, Homo Sapiens
KEFLPEGQDI

SEQ ID NO: 103553 - protein, 10 aa, Homo Sapiens
KEFSGNPIKV

SEQ ID NO: 103554 - protein, 10 aa, Homo Sapiens
KEGANINKSL

SEQ ID NO: 103555 - protein, 10 aa, Homo Sapiens
KEGDFNNLTA

SEQ ID NO: 103556 - protein, 10 aa, Homo Sapiens
KEGEDLIQQL

SEQ ID NO: 103557 - protein, 10 aa, Homo Sapiens
KEIAAVIETV

SEQ ID NO: 103558 - protein, 10 aa, Homo Sapiens
KEIDGRLKEL

SEQ ID NO: 103559 - protein, 10 aa, Homo Sapiens
KEIEELQSQA

SEQ ID NO: 103560 - protein, 10 aa, Homo Sapiens
KEIELPSGQL

SEQ ID NO: 103561 - protein, 10 aa, Homo Sapiens
KEIENTYANV

SEQ ID NO: 103562 - protein, 10 aa, Homo Sapiens
KEIESTKGEL

SEQ ID NO: 103563 - protein, 10 aa, Homo Sapiens
KEIFFHYSEF

SEQ ID NO: 103564 - protein, 10 aa, Homo Sapiens
KEILGTAQSV

SEQ ID NO: 103565 - protein, 10 aa, Homo Sapiens
KEINEKSNIL

SEQ ID NO: 103566 - protein, 10 aa, Homo Sapiens
KEINKAQNAI

SEQ ID NO: 103567 - protein, 10 aa, Homo Sapiens
KEINTNQEAL

SEQ ID NO: 103568 - protein, 10 aa, Homo Sapiens
KEIQGFLDCA

SEQ ID NO: 103569 - protein, 10 aa, Homo Sapiens
KEIQGHQPRI

SEQ ID NO: 103570 - protein, 10 aa, Homo Sapiens
KEIQKLETEL

SEQ ID NO: 103571 - protein, 10 aa, Homo Sapiens
KEISYFVAEF

SEQ ID NO: 103572 - protein, 10 aa, Homo Sapiens
KEITQEMQTL

SEQ ID NO: 103573 - protein, 10 aa, Homo Sapiens
KEIYDDLQAL

SEQ ID NO: 103574 - protein, 10 aa, Homo Sapiens
KEKAIEVERI

SEQ ID NO: 103575 - protein, 10 aa, Homo Sapiens
KEKAILQATL

SEQ ID NO: 103576 - protein, 10 aa, Homo Sapiens
KEKDFSPEAL

SEQ ID NO: 103577 - protein, 10 aa, Homo Sapiens
KEKDNIDITL

SEQ ID NO: 103578 - protein, 10 aa, Homo Sapiens
KEKEGEVFTL

SEQ ID NO: 103579 - protein, 10 aa, Homo Sapiens
KEKELPGQTL

SEQ ID NO: 103580 - protein, 10 aa, Homo Sapiens
KEKEPDYVLL

SEQ ID NO: 103581 - protein, 10 aa, Homo Sapiens
KEKEPEYTLL

SEQ ID NO: 103582 - protein, 10 aa, Homo Sapiens
KEKGLEHVTV

SEQ ID NO: 103583 - protein, 10 aa, Homo Sapiens
KEKKLLEDRI

SEQ ID NO: 103584 - protein, 10 aa, Homo Sapiens
KEKKLVKEVI

SEQ ID NO: 103585 - protein, 10 aa, Homo Sapiens
KEKLIQEGKL

SEQ ID NO: 103586 - protein, 10 aa, Homo Sapiens
KEKSFLDLVV

SEQ ID NO: 103587 - protein, 10 aa, Homo Sapiens
KEKTLGKEVL

SEQ ID NO: 103588 - protein, 10 aa, Homo Sapiens
KEKYIDQEEL

SEQ ID NO: 103589 - protein, 10 aa, Homo Sapiens
KEKYPDAVYL

SEQ ID NO: 103590 - protein, 10 aa, Homo Sapiens
KELDQWIEQL

SEQ ID NO: 103591 - protein, 10 aa, Homo Sapiens
KELDSKTIRA

SEQ ID NO: 103592 - protein, 10 aa, Homo Sapiens
KELDVQIIGV

SEQ ID NO: 103593 - protein, 10 aa, Homo Sapiens
KELEAFREEL

SEQ ID NO: 103594 - protein, 10 aa, Homo Sapiens
KELEEKVMEL

SEQ ID NO: 103595 - protein, 10 aa, Homo Sapiens
KELEENKRSL

SEQ ID NO: 103596 - protein, 10 aa, Homo Sapiens
KELEGPQIAV

SEQ ID NO: 103597 - protein, 10 aa, Homo Sapiens
KELGLAEHQL

SEQ ID NO: 103598 - protein, 10 aa, Homo Sapiens
KELGSSTNAL

SEQ ID NO: 103599 - protein, 10 aa, Homo Sapiens
KELHIQGNRL

SEQ ID NO: 103600 - protein, 10 aa, Homo Sapiens
KELKAFNIRL

SEQ ID NO: 103601 - protein, 10 aa, Homo Sapiens
KELLGQGLLL

SEQ ID NO: 103602 - protein, 10 aa, Homo Sapiens
KELLLQPVTI

SEQ ID NO: 103603 - protein, 10 aa, Homo Sapiens
KELNEAVAAL

SEQ ID NO: 103604 - protein, 10 aa, Homo Sapiens
KELQDVGQSL

SEQ ID NO: 103605 - protein, 10 aa, Homo Sapiens
KELTLENSEL

SEQ ID NO: 103606 - protein, 10 aa, Homo Sapiens
KELYVPENKL

SEQ ID NO: 103607 - protein, 10 aa, Homo Sapiens
KEMDLSVVRL

SEQ ID NO: 103608 - protein, 10 aa, Homo Sapiens
KEMEVKPSSV

SEQ ID NO: 103609 - protein, 10 aa, Homo Sapiens
KEMGTPDVRI

SEQ ID NO: 103610 - protein, 10 aa, Homo Sapiens
KEMQDVQGAL

SEQ ID NO: 103611 - protein, 10 aa, Homo Sapiens
KEMSEYCSTL

SEQ ID NO: 103612 - protein, 10 aa, Homo Sapiens
KENDFDRLVL

SEQ ID NO: 103613 - protein, 10 aa, Homo Sapiens
KENQHVQQTL

SEQ ID NO: 103614 - protein, 10 aa, Homo Sapiens
KENRPGAYEL

SEQ ID NO: 103615 - protein, 10 aa, Homo Sapiens
KENSALKECL

SEQ ID NO: 103616 - protein, 10 aa, Homo Sapiens
KENSPEKFAL

SEQ ID NO: 103617 - protein, 10 aa, Homo Sapiens
KEPESILQVL

SEQ ID NO: 103618 - protein, 10 aa, Homo Sapiens
KERELDQQKL

SEQ ID NO: 103619 - protein, 10 aa, Homo Sapiens
KESAAINQIL

SEQ ID NO: 103620 - protein, 10 aa, Homo Sapiens
KESAEFQTQL

SEQ ID NO: 103621 - protein, 10 aa, Homo Sapiens
KESEKIIAEL

SEQ ID NO: 103622 - protein, 10 aa, Homo Sapiens
KESGAINTSL

SEQ ID NO: 103623 - protein, 10 aa, Homo Sapiens
KESHEMGQAL

SEQ ID NO: 103624 - protein, 10 aa, Homo Sapiens
KESQVYVHAL

SEQ ID NO: 103625 - protein, 10 aa, Homo Sapiens
KESSIIGVTL

SEQ ID NO: 103626 - protein, 10 aa, Homo Sapiens
KESTQGVSSL

SEQ ID NO: 103627 - protein, 10 aa, Homo Sapiens
KETEIKEITV

SEQ ID NO: 103628 - protein, 10 aa, Homo Sapiens
KEVDDLTAEL

SEQ ID NO: 103629 - protein, 10 aa, Homo Sapiens
KEVDIYTVKV

SEQ ID NO: 103630 - protein, 10 aa, Homo Sapiens
KEVDNFVDKL

SEQ ID NO: 103631 - protein, 10 aa, Homo Sapiens
KEVDPGTKTA

SEQ ID NO: 103632 - protein, 10 aa, Homo Sapiens
KEVDSKSQVI

SEQ ID NO: 103633 - protein, 10 aa, Homo Sapiens
KEVEASHLAL

SEQ ID NO: 103634 - protein, 10 aa, Homo Sapiens
KEVEIAYSDV

SEQ ID NO: 103635 - protein, 10 aa, Homo Sapiens
KEVEIRKKVL

SEQ ID NO: 103636 - protein, 10 aa, Homo Sapiens
KEVEQFTQVA

SEQ ID NO: 103637 - protein, 10 aa, Homo Sapiens
KEVIGGLCSL

SEQ ID NO: 103638 - protein, 10 aa, Homo Sapiens
KEVLLENTNL

SEQ ID NO: 103639 - protein, 10 aa, Homo Sapiens
KEVSMDDHKL

SEQ ID NO: 103640 - protein, 10 aa, Homo Sapiens
KEVTAAREAL

SEQ ID NO: 103641 - protein, 10 aa, Homo Sapiens
KEWKKKYVTL

SEQ ID NO: 103642 - protein, 10 aa, Homo Sapiens
KEYAVNEVVA

SEQ ID NO: 103643 - protein, 10 aa, Homo Sapiens
KEYEKTQTVL

SEQ ID NO: 103644 - protein, 10 aa, Homo Sapiens
KEYSDDKVQL

SEQ ID NO: 103645 - protein, 10 aa, Homo Sapiens
LEANLAVLKL

SEQ ID NO: 103646 - protein, 10 aa, Homo Sapiens
LEFEGDPHCL

SEQ ID NO: 103647 - protein, 10 aa, Homo Sapiens
LEFENQKTRL

SEQ ID NO: 103648 - protein, 10 aa, Homo Sapiens
LEFQKSLETL

SEQ ID NO: 103649 - protein, 10 aa, Homo Sapiens
LEIDGLEEKL

SEQ ID NO: 103650 - protein, 10 aa, Homo Sapiens
LEKAGVEHQL

SEQ ID NO: 103651 - protein, 10 aa, Homo Sapiens
LEKNGADEKL

SEQ ID NO: 103652 - protein, 10 aa, Homo Sapiens
LEKSGVLDTL

SEQ ID NO: 103653 - protein, 10 aa, Homo Sapiens
LENPHQPASL

SEQ ID NO: 103654 - protein, 10 aa, Homo Sapiens
LERAPGETAL

SEQ ID NO: 103655 - protein, 10 aa, Homo Sapiens
LERDISQDSL

SEQ ID NO: 103656 - protein, 10 aa, Homo Sapiens
LERGDGPICL

SEQ ID NO: 103657 - protein, 10 aa, Homo Sapiens
LERTEGLSVL

SEQ ID NO: 103658 - protein, 10 aa, Homo Sapiens
LEVDGHFVTM

SEQ ID NO: 103659 - protein, 10 aa, Homo Sapiens
LEVIIKDNSL

SEQ ID NO: 103660 - protein, 10 aa, Homo Sapiens
LEYQIKTNQL

SEQ ID NO: 103661 - protein, 10 aa, Homo Sapiens
LGEGKVKAIG

SEQ ID NO: 103662 - protein, 10 aa, Homo Sapiens
LSKPFLDIVL

SEQ ID NO: 103663 - protein, 10 aa, Homo Sapiens
MELLDGKQTL

SEQ ID NO: 103664 - protein, 10 aa, Homo Sapiens
MEVEVDGQKF

SEQ ID NO: 103665 - protein, 10 aa, Homo Sapiens
MEYKGYLVSV

SEQ ID NO: 103666 - protein, 10 aa, Homo Sapiens
MSIDALKDLL

SEQ ID NO: 103667 - protein, 10 aa, Homo Sapiens
NEIENLKNEL

SEQ ID NO: 103668 - protein, 10 aa, Homo Sapiens
NEIGVPLPRL

SEQ ID NO: 103669 - protein, 10 aa, Homo Sapiens
NEILNGIKVL

SEQ ID NO: 103670 - protein, 10 aa, Homo Sapiens
QATTFTLTGL

SEQ ID NO: 103671 - protein, 10 aa, Homo Sapiens
QEAEMAQNAV

SEQ ID NO: 103672 - protein, 10 aa, Homo Sapiens
QEAVAGAAVL

SEQ ID NO: 103673 - protein, 10 aa, Homo Sapiens
QECEGLIRQL

SEQ ID NO: 103674 - protein, 10 aa, Homo Sapiens
QEFAGRLNSV

SEQ ID NO: 103675 - protein, 10 aa, Homo Sapiens
QEFELPYVSV

SEQ ID NO: 103676 - protein, 10 aa, Homo Sapiens
QEGAKMAVRL

SEQ ID NO: 103677 - protein, 10 aa, Homo Sapiens
QEIDGKSLLL

SEQ ID NO: 103678 - protein, 10 aa, Homo Sapiens
QEIDGRFTSI

SEQ ID NO: 103679 - protein, 10 aa, Homo Sapiens
QEIDLTGVKL

SEQ ID NO: 103680 - protein, 10 aa, Homo Sapiens
QEIEEFKERL

SEQ ID NO: 103681 - protein, 10 aa, Homo Sapiens
QEIIIRDGSL

SEQ ID NO: 103682 - protein, 10 aa, Homo Sapiens
QEIKTKIKEL

SEQ ID NO: 103683 - protein, 10 aa, Homo Sapiens
QEIQTSVATL

SEQ ID NO: 103684 - protein, 10 aa, Homo Sapiens
QEIRLEPQEV

SEQ ID NO: 103685 - protein, 10 aa, Homo Sapiens
QEKDIKKEEI

SEQ ID NO: 103686 - protein, 10 aa, Homo Sapiens
QEKLPDEVVL

SEQ ID NO: 103687 - protein, 10 aa, Homo Sapiens
QELDLSNNHL

SEQ ID NO: 103688 - protein, 10 aa, Homo Sapiens
QENEIRGLCL

SEQ ID NO: 103689 - protein, 10 aa, Homo Sapiens
QENEPEPLSL

SEQ ID NO: 103690 - protein, 10 aa, Homo Sapiens
QESAAKLHAL

SEQ ID NO: 103691 - protein, 10 aa, Homo Sapiens
QESEARIQQL

SEQ ID NO: 103692 - protein, 10 aa, Homo Sapiens
QEVDAIGQTL

SEQ ID NO: 103693 - protein, 10 aa, Homo Sapiens
QEVKNLHQRL

SEQ ID NO: 103694 - protein, 10 aa, Homo Sapiens
QEVYHKSMTL

SEQ ID NO: 103695 - protein, 10 aa, Homo Sapiens
QEWDGKESTI

SEQ ID NO: 103696 - protein, 10 aa, Homo Sapiens
QEYEDIAVKL

SEQ ID NO: 103697 - protein, 10 aa, Homo Sapiens
REAAYNAITL

SEQ ID NO: 103698 - protein, 10 aa, Homo Sapiens
READFKETLL

SEQ ID NO: 103699 - protein, 10 aa, Homo Sapiens
REAEAAIYHL

SEQ ID NO: 103700 - protein, 10 aa, Homo Sapiens
REAEDMVQKV

SEQ ID NO: 103701 - protein, 10 aa, Homo Sapiens
REAEETQSTL

SEQ ID NO: 103702 - protein, 10 aa, Homo Sapiens
REAEFTKSIA

SEQ ID NO: 103703 - protein, 10 aa, Homo Sapiens
REAEHGYASL

SEQ ID NO: 103704 - protein, 10 aa, Homo Sapiens
REAEHLYHTL

SEQ ID NO: 103705 - protein, 10 aa, Homo Sapiens
REAEKVLHYL

SEQ ID NO: 103706 - protein, 10 aa, Homo Sapiens
REAELLRKQL

SEQ ID NO: 103707 - protein, 10 aa, Homo Sapiens
REAELRKQRL

SEQ ID NO: 103708 - protein, 10 aa, Homo Sapiens
REAEMRNSIL

SEQ ID NO: 103709 - protein, 10 aa, Homo Sapiens
REAEQRRAYL

SEQ ID NO: 103710 - protein, 10 aa, Homo Sapiens
REAFLVNSDL

SEQ ID NO: 103711 - protein, 10 aa, Homo Sapiens
REAGIQPSLL

SEQ ID NO: 103712 - protein, 10 aa, Homo Sapiens
REAGQCFESF

SEQ ID NO: 103713 - protein, 10 aa, Homo Sapiens
REAHAQSIGM

SEQ ID NO: 103714 - protein, 10 aa, Homo Sapiens
REANFTVSSM

SEQ ID NO: 103715 - protein, 10 aa, Homo Sapiens
REAPESAQCL

SEQ ID NO: 103716 - protein, 10 aa, Homo Sapiens
REASPSNSCL

SEQ ID NO: 103717 - protein, 10 aa, Homo Sapiens
REAVVNTQEL

SEQ ID NO: 103718 - protein, 10 aa, Homo Sapiens
RECEIKYTGF

SEQ ID NO: 103719 - protein, 10 aa, Homo Sapiens
RECENQLVLL

SEQ ID NO: 103720 - protein, 10 aa, Homo Sapiens
RECVGKTVTL

SEQ ID NO: 103721 - protein, 10 aa, Homo Sapiens
REDGSHILTV

SEQ ID NO: 103722 - protein, 10 aa, Homo Sapiens
REFDYVINDL

SEQ ID NO: 103723 - protein, 10 aa, Homo Sapiens
REFEKMNQSL

SEQ ID NO: 103724 - protein, 10 aa, Homo Sapiens
REFLDGTRKT

SEQ ID NO: 103725 - protein, 10 aa, Homo Sapiens
REFPTHRSVL

SEQ ID NO: 103726 - protein, 10 aa, Homo Sapiens
REGDLLFTVA

SEQ ID NO: 103727 - protein, 10 aa, Homo Sapiens
REGEKLIRLH

SEQ ID NO: 103728 - protein, 10 aa, Homo Sapiens
REGERREQVL

SEQ ID NO: 103729 - protein, 10 aa, Homo Sapiens
REGETMILTL

SEQ ID NO: 103730 - protein, 10 aa, Homo Sapiens
REGGSIPVTL

SEQ ID NO: 103731 - protein, 10 aa, Homo Sapiens
REGHTSVHTL

SEQ ID NO: 103732 - protein, 10 aa, Homo Sapiens
REGKIAGRAV

SEQ ID NO: 103733 - protein, 10 aa, Homo Sapiens
REGNAVAVRL

SEQ ID NO: 103734 - protein, 10 aa, Homo Sapiens
REGNVPNIII

SEQ ID NO: 103735 - protein, 10 aa, Homo Sapiens
REGSASTEVL

SEQ ID NO: 103736 - protein, 10 aa, Homo Sapiens
REGYCFTEVL

SEQ ID NO: 103737 - protein, 10 aa, Homo Sapiens
REHDIAIKFF

SEQ ID NO: 103738 - protein, 10 aa, Homo Sapiens
REHVTKTQIL

SEQ ID NO: 103739 - protein, 10 aa, Homo Sapiens
REIADKLIEL

SEQ ID NO: 103740 - protein, 10 aa, Homo Sapiens
REIAEVNKKL

SEQ ID NO: 103741 - protein, 10 aa, Homo Sapiens
REIDKKMNSI

SEQ ID NO: 103742 - protein, 10 aa, Homo Sapiens
REIEEKLHKL

SEQ ID NO: 103743 - protein, 10 aa, Homo Sapiens
REIEENQKRI

SEQ ID NO: 103744 - protein, 10 aa, Homo Sapiens
REIEGRAIRL

SEQ ID NO: 103745 - protein, 10 aa, Homo Sapiens
REIEGSQVTF

SEQ ID NO: 103746 - protein, 10 aa, Homo Sapiens
REIEIRFDQL

SEQ ID NO: 103747 - protein, 10 aa, Homo Sapiens
REIELKVMKF

SEQ ID NO: 103748 - protein, 10 aa, Homo Sapiens
REIFLSQPIL

SEQ ID NO: 103749 - protein, 10 aa, Homo Sapiens
REIKDTQAQL

SEQ ID NO: 103750 - protein, 10 aa, Homo Sapiens
REILVEESNV

SEQ ID NO: 103751 - protein, 10 aa, Homo Sapiens
REILVKELTT

SEQ ID NO: 103752 - protein, 10 aa, Homo Sapiens
REIMGTPEYL

SEQ ID NO: 103753 - protein, 10 aa, Homo Sapiens
REIQDAYLQL

SEQ ID NO: 103754 - protein, 10 aa, Homo Sapiens
REIQDDMQTL

SEQ ID NO: 103755 - protein, 10 aa, Homo Sapiens
REIQGKKAAL

SEQ ID NO: 103756 - protein, 10 aa, Homo Sapiens
REIQTAVRLL

SEQ ID NO: 103757 - protein, 10 aa, Homo Sapiens
REIRKDNQFL

SEQ ID NO: 103758 - protein, 10 aa, Homo Sapiens
REIRRKLREL

SEQ ID NO: 103759 - protein, 10 aa, Homo Sapiens
REISDHVLRM

SEQ ID NO: 103760 - protein, 10 aa, Homo Sapiens
REITKPLRPL

SEQ ID NO: 103761 - protein, 10 aa, Homo Sapiens
REKAVRVDKL

SEQ ID NO: 103762 - protein, 10 aa, Homo Sapiens
REKDDANFKL

SEQ ID NO: 103763 - protein, 10 aa, Homo Sapiens
REKDDDVVSL

SEQ ID NO: 103764 - protein, 10 aa, Homo Sapiens
REKDPKYSAL

SEQ ID NO: 103765 - protein, 10 aa, Homo Sapiens
REKELAKVTI

SEQ ID NO: 103766 - protein, 10 aa, Homo Sapiens
REKETKALSL

SEQ ID NO: 103767 - protein, 10 aa, Homo Sapiens
REKHPDGKIL

SEQ ID NO: 103768 - protein, 10 aa, Homo Sapiens
REKIATQQRL

SEQ ID NO: 103769 - protein, 10 aa, Homo Sapiens
REKKILEVHI

SEQ ID NO: 103770 - protein, 10 aa, Homo Sapiens
REKLPSSEVV

SEQ ID NO: 103771 - protein, 10 aa, Homo Sapiens
REKMKGELGM

SEQ ID NO: 103772 - protein, 10 aa, Homo Sapiens
REKPDDPLNY

SEQ ID NO: 103773 - protein, 10 aa, Homo Sapiens
REKQPPIDNI

SEQ ID NO: 103774 - protein, 10 aa, Homo Sapiens
REKTLITEKL

SEQ ID NO: 103775 - protein, 10 aa, Homo Sapiens
REKTLTEHAL

SEQ ID NO: 103776 - protein, 10 aa, Homo Sapiens
REKVIKGAEI

SEQ ID NO: 103777 - protein, 10 aa, Homo Sapiens
RELAQQIQKV

SEQ ID NO: 103778 - protein, 10 aa, Homo Sapiens
RELAQQVQQV

SEQ ID NO: 103779 - protein, 10 aa, Homo Sapiens
RELDATATVL

SEQ ID NO: 103780 - protein, 10 aa, Homo Sapiens
RELDLEENKL

SEQ ID NO: 103781 - protein, 10 aa, Homo Sapiens
RELDLYDNQI

SEQ ID NO: 103782 - protein, 10 aa, Homo Sapiens
RELDRERQKL

SEQ ID NO: 103783 - protein, 10 aa, Homo Sapiens
RELEDHIRKL

SEQ ID NO: 103784 - protein, 10 aa, Homo Sapiens
RELEETNQKL

SEQ ID NO: 103785 - protein, 10 aa, Homo Sapiens
RELEKAKVAA

SEQ ID NO: 103786 - protein, 10 aa, Homo Sapiens
RELENGNLEV

SEQ ID NO: 103787 - protein, 10 aa, Homo Sapiens
RELESQLHVL

SEQ ID NO: 103788 - protein, 10 aa, Homo Sapiens
RELEVQHPAA

SEQ ID NO: 103789 - protein, 10 aa, Homo Sapiens
RELGFSSNLL

SEQ ID NO: 103790 - protein, 10 aa, Homo Sapiens
RELLKPNASV

SEQ ID NO: 103791 - protein, 10 aa, Homo Sapiens
RELLNPVVEF

SEQ ID NO: 103792 - protein, 10 aa, Homo Sapiens
RELMGGIGKT

SEQ ID NO: 103793 - protein, 10 aa, Homo Sapiens
RELPAGINSI

SEQ ID NO: 103794 - protein, 10 aa, Homo Sapiens
RELQEAPLSL

SEQ ID NO: 103795 - protein, 10 aa, Homo Sapiens
RELQLQEVAL

SEQ ID NO: 103796 - protein, 10 aa, Homo Sapiens
RELQPGVKAV

SEQ ID NO: 103797 - protein, 10 aa, Homo Sapiens
RELQQENKEL

SEQ ID NO: 103798 - protein, 10 aa, Homo Sapiens
RELVEKNSQL

SEQ ID NO: 103799 - protein, 10 aa, Homo Sapiens
RELVSGGRSV

SEQ ID NO: 103800 - protein, 10 aa, Homo Sapiens
REMENIIATV

SEQ ID NO: 103801 - protein, 10 aa, Homo Sapiens
REMERLIKKL

SEQ ID NO: 103802 - protein, 10 aa, Homo Sapiens
REMKDLKEKM

SEQ ID NO: 103803 - protein, 10 aa, Homo Sapiens
REMQEKLARL

SEQ ID NO: 103804 - protein, 10 aa, Homo Sapiens
REMVATQQEM

SEQ ID NO: 103805 - protein, 10 aa, Homo Sapiens
RENEVLKVQL

SEQ ID NO: 103806 - protein, 10 aa, Homo Sapiens
RENGKTVIRV

SEQ ID NO: 103807 - protein, 10 aa, Homo Sapiens
RENNKPRTVL

SEQ ID NO: 103808 - protein, 10 aa, Homo Sapiens
RENPQLLQQI

SEQ ID NO: 103809 - protein, 10 aa, Homo Sapiens
RENPVVPIGC

SEQ ID NO: 103810 - protein, 10 aa, Homo Sapiens
RENTQTTIKL

SEQ ID NO: 103811 - protein, 10 aa, Homo Sapiens
REQEAREPVL

SEQ ID NO: 103812 - protein, 10 aa, Homo Sapiens
RERDLGAQRL

SEQ ID NO: 103813 - protein, 10 aa, Homo Sapiens
RERFLKGEGL

SEQ ID NO: 103814 - protein, 10 aa, Homo Sapiens
RERIIPRSVL

SEQ ID NO: 103815 - protein, 10 aa, Homo Sapiens
RERPPEEVAA

SEQ ID NO: 103816 - protein, 10 aa, Homo Sapiens
RERQDRISRL

SEQ ID NO: 103817 - protein, 10 aa, Homo Sapiens
RESEKTVRQF

SEQ ID NO: 103818 - protein, 10 aa, Homo Sapiens
RESPLIVNTM

SEQ ID NO: 103819 - protein, 10 aa, Homo Sapiens
RETADVIAKV

SEQ ID NO: 103820 - protein, 10 aa, Homo Sapiens
RETAQAIKGM

SEQ ID NO: 103821 - protein, 10 aa, Homo Sapiens
RETDFYLQSV

SEQ ID NO: 103822 - protein, 10 aa, Homo Sapiens
RETEKTLTEL

SEQ ID NO: 103823 - protein, 10 aa, Homo Sapiens
RETLTQGLEF

SEQ ID NO: 103824 - protein, 10 aa, Homo Sapiens
RETQAINSSL

SEQ ID NO: 103825 - protein, 10 aa, Homo Sapiens
RETVNKAVAL

SEQ ID NO: 103826 - protein, 10 aa, Homo Sapiens
REVEGLKDLL

SEQ ID NO: 103827 - protein, 10 aa, Homo Sapiens
REVENPQNQL

SEQ ID NO: 103828 - protein, 10 aa, Homo Sapiens
REVLEKQPVL

SEQ ID NO: 103829 - protein, 10 aa, Homo Sapiens
REVNKLKVQM

SEQ ID NO: 103830 - protein, 10 aa, Homo Sapiens
REVSSLKNKL

SEQ ID NO: 103831 - protein, 10 aa, Homo Sapiens
REVVAGSHEL

SEQ ID NO: 103832 - protein, 10 aa, Homo Sapiens
REVVIGTPTL

SEQ ID NO: 103833 - protein, 10 aa, Homo Sapiens
REWTEQETLL

SEQ ID NO: 103834 - protein, 10 aa, Homo Sapiens
REYDGNIRQA

SEQ ID NO: 103835 - protein, 10 aa, Homo Sapiens
REYEDGPLSL

SEQ ID NO: 103836 - protein, 10 aa, Homo Sapiens
REYEKIKSQL

SEQ ID NO: 103837 - protein, 10 aa, Homo Sapiens
REYELRKNNF

SEQ ID NO: 103838 - protein, 10 aa, Homo Sapiens
REYKVVGRCL

SEQ ID NO: 103839 - protein, 10 aa, Homo Sapiens
REYRPEYERL

SEQ ID NO: 103840 - protein, 10 aa, Homo Sapiens
RQADLKNWSL

SEQ ID NO: 103841 - protein, 10 aa, Homo Sapiens
RQFSGARNQL

SEQ ID NO: 103842 - protein, 10 aa, Homo Sapiens
SDFIAPLHSG

SEQ ID NO: 103843 - protein, 10 aa, Homo Sapiens
SEAAIRSVEL

SEQ ID NO: 103844 - protein, 10 aa, Homo Sapiens
SEAECQRQQL

SEQ ID NO: 103845 - protein, 10 aa, Homo Sapiens
SEAEGLKFSL

SEQ ID NO: 103846 - protein, 10 aa, Homo Sapiens
SEAKPAAVAA

SEQ ID NO: 103847 - protein, 10 aa, Homo Sapiens
SEAKPLAVCL

SEQ ID NO: 103848 - protein, 10 aa, Homo Sapiens
SEALEAARIC

SEQ ID NO: 103849 - protein, 10 aa, Homo Sapiens
SEAPPSKMVL

SEQ ID NO: 103850 - protein, 10 aa, Homo Sapiens
SEAQLRQFTL

SEQ ID NO: 103851 - protein, 10 aa, Homo Sapiens
SEARKGFSYL

SEQ ID NO: 103852 - protein, 10 aa, Homo Sapiens
SEASQGFRFL

SEQ ID NO: 103853 - protein, 10 aa, Homo Sapiens
SEDKRKTYSL

SEQ ID NO: 103854 - protein, 10 aa, Homo Sapiens
SEDRSVQEVL

SEQ ID NO: 103855 - protein, 10 aa, Homo Sapiens
SEFDFKPQQL

SEQ ID NO: 103856 - protein, 10 aa, Homo Sapiens
SEFEGGKSTV

SEQ ID NO: 103857 - protein, 10 aa, Homo Sapiens
SEFGSKIILL

SEQ ID NO: 103858 - protein, 10 aa, Homo Sapiens
SEFHQSSFLL

SEQ ID NO: 103859 - protein, 10 aa, Homo Sapiens
SEFKEFSQSF

SEQ ID NO: 103860 - protein, 10 aa, Homo Sapiens
SEFKGDLETL

SEQ ID NO: 103861 - protein, 10 aa, Homo Sapiens
SEFRPKIKST

SEQ ID NO: 103862 - protein, 10 aa, Homo Sapiens
SEFSGDVDSL

SEQ ID NO: 103863 - protein, 10 aa, Homo Sapiens
SEFTNSNNHL

SEQ ID NO: 103864 - protein, 10 aa, Homo Sapiens
SEHQAIVQHL

SEQ ID NO: 103865 - protein, 10 aa, Homo Sapiens
SEHSGPPIVI

SEQ ID NO: 103866 - protein, 10 aa, Homo Sapiens
SEIASQGREL

SEQ ID NO: 103867 - protein, 10 aa, Homo Sapiens
SEIDQLFRIF

SEQ ID NO: 103868 - protein, 10 aa, Homo Sapiens
SEIDQVVPAA

SEQ ID NO: 103869 - protein, 10 aa, Homo Sapiens
SEIEEFYQKL

SEQ ID NO: 103870 - protein, 10 aa, Homo Sapiens
SEIEQAVQSL

SEQ ID NO: 103871 - protein, 10 aa, Homo Sapiens
SEIESVKISA

SEQ ID NO: 103872 - protein, 10 aa, Homo Sapiens
SEIEVPREAL

SEQ ID NO: 103873 - protein, 10 aa, Homo Sapiens
SEIHNLQNKF

SEQ ID NO: 103874 - protein, 10 aa, Homo Sapiens
SEIHSLVHRL

SEQ ID NO: 103875 - protein, 10 aa, Homo Sapiens
SEIILRQEVL

SEQ ID NO: 103876 - protein, 10 aa, Homo Sapiens
SEIKGEVLYL

SEQ ID NO: 103877 - protein, 10 aa, Homo Sapiens
SEIKVPDVEL

SEQ ID NO: 103878 - protein, 10 aa, Homo Sapiens
SEILPTKETL

SEQ ID NO: 103879 - protein, 10 aa, Homo Sapiens
SEILQKEVYL

SEQ ID NO: 103880 - protein, 10 aa, Homo Sapiens
SEIRAPIVTV

SEQ ID NO: 103881 - protein, 10 aa, Homo Sapiens
SEIRDIILGM

SEQ ID NO: 103882 - protein, 10 aa, Homo Sapiens
SEIRSAWQAL

SEQ ID NO: 103883 - protein, 10 aa, Homo Sapiens
SEIYIHGLGL

SEQ ID NO: 103884 - protein, 10 aa, Homo Sapiens
SEKDTKEEIL

SEQ ID NO: 103885 - protein, 10 aa, Homo Sapiens
SEKENLTNEL

SEQ ID NO: 103886 - protein, 10 aa, Homo Sapiens
SEKGFQQISF

SEQ ID NO: 103887 - protein, 10 aa, Homo Sapiens
SEKHVRLEHL

SEQ ID NO: 103888 - protein, 10 aa, Homo Sapiens
SEKKVGIQEL

SEQ ID NO: 103889 - protein, 10 aa, Homo Sapiens
SEKKVVVEQL

SEQ ID NO: 103890 - protein, 10 aa, Homo Sapiens
SEKLFGETTL

SEQ ID NO: 103891 - protein, 10 aa, Homo Sapiens
SEKNPSEVTL

SEQ ID NO: 103892 - protein, 10 aa, Homo Sapiens
SEKSLENETL

SEQ ID NO: 103893 - protein, 10 aa, Homo Sapiens
SELEDGHTAL

SEQ ID NO: 103894 - protein, 10 aa, Homo Sapiens
SELEGNLQTL

SEQ ID NO: 103895 - protein, 10 aa, Homo Sapiens
SELEKKLVAI

SEQ ID NO: 103896 - protein, 10 aa, Homo Sapiens
SELITKAVAA

SEQ ID NO: 103897 - protein, 10 aa, Homo Sapiens
SELKIKNQQL

SEQ ID NO: 103898 - protein, 10 aa, Homo Sapiens
SELPIVTPAL

SEQ ID NO: 103899 - protein, 10 aa, Homo Sapiens
SELQAIKTEL

SEQ ID NO: 103900 - protein, 10 aa, Homo Sapiens
SELRNQYVTL

SEQ ID NO: 103901 - protein, 10 aa, Homo Sapiens
SELTQPKLAL

SEQ ID NO: 103902 - protein, 10 aa, Homo Sapiens
SEMEQLKQKL

SEQ ID NO: 103903 - protein, 10 aa, Homo Sapiens
SEMHVPSVAL

SEQ ID NO: 103904 - protein, 10 aa, Homo Sapiens
SEMRERQMAM

SEQ ID NO: 103905 - protein, 10 aa, Homo Sapiens
SENDKKIKAL

SEQ ID NO: 103906 - protein, 10 aa, Homo Sapiens
SENSKGVYCL

SEQ ID NO: 103907 - protein, 10 aa, Homo Sapiens
SEPDAVHVVL

SEQ ID NO: 103908 - protein, 10 aa, Homo Sapiens
SEPLHNVQVL

SEQ ID NO: 103909 - protein, 10 aa, Homo Sapiens
SEPVKGTGAL

SEQ ID NO: 103910 - protein, 10 aa, Homo Sapiens
SEQQIVSNTL

SEQ ID NO: 103911 - protein, 10 aa, Homo Sapiens
SEQRFPVATM

SEQ ID NO: 103912 - protein, 10 aa, Homo Sapiens
SERGPQEEVL

SEQ ID NO: 103913 - protein, 10 aa, Homo Sapiens
SESGSNLHAL

SEQ ID NO: 103914 - protein, 10 aa, Homo Sapiens
SESISRAYAL

SEQ ID NO: 103915 - protein, 10 aa, Homo Sapiens
SESQCRVVVL

SEQ ID NO: 103916 - protein, 10 aa, Homo Sapiens
SESRLEKAEL

SEQ ID NO: 103917 - protein, 10 aa, Homo Sapiens
SESVAGSHRL

SEQ ID NO: 103918 - protein, 10 aa, Homo Sapiens
SETHKAIQAL

SEQ ID NO: 103919 - protein, 10 aa, Homo Sapiens
SETTKGAYSL

SEQ ID NO: 103920 - protein, 10 aa, Homo Sapiens
SEVAQAGKAV

SEQ ID NO: 103921 - protein, 10 aa, Homo Sapiens
SEVDGNRMTL

SEQ ID NO: 103922 - protein, 10 aa, Homo Sapiens
SEVKPILEKL

SEQ ID NO: 103923 - protein, 10 aa, Homo Sapiens
SEVNKHETAL

SEQ ID NO: 103924 - protein, 10 aa, Homo Sapiens
SEVNPNTRVM

SEQ ID NO: 103925 - protein, 10 aa, Homo Sapiens
SEVQFGHAGA

SEQ ID NO: 103926 - protein, 10 aa, Homo Sapiens
SEVRCSGQEL

SEQ ID NO: 103927 - protein, 10 aa, Homo Sapiens
SEVTFALHSA

SEQ ID NO: 103928 - protein, 10 aa, Homo Sapiens
SEVTKPPPCL

SEQ ID NO: 103929 - protein, 10 aa, Homo Sapiens
SEWEGRTHAL

SEQ ID NO: 103930 - protein, 10 aa, Homo Sapiens
SEWKDTNYTL

SEQ ID NO: 103931 - protein, 10 aa, Homo Sapiens
SEWKEHKVAL

SEQ ID NO: 103932 - protein, 10 aa, Homo Sapiens
SEYDRGVNTF

SEQ ID NO: 103933 - protein, 10 aa, Homo Sapiens
SEYEKKLQAM

SEQ ID NO: 103934 - protein, 10 aa, Homo Sapiens
SEYHRIQHQL

SEQ ID NO: 103935 - protein, 10 aa, Homo Sapiens
SEYLRYEDTL

SEQ ID NO: 103936 - protein, 10 aa, Homo Sapiens
SEYMNNKEAL

SEQ ID NO: 103937 - protein, 10 aa, Homo Sapiens
SEYPIVDGKL

SEQ ID NO: 103938 - protein, 10 aa, Homo Sapiens
SEYSKQMQRF

SEQ ID NO: 103939 - protein, 10 aa, Homo Sapiens
TAAARLPPSV

SEQ ID NO: 103940 - protein, 10 aa, Homo Sapiens
TAKAAPLPSV

SEQ ID NO: 103941 - protein, 10 aa, Homo Sapiens
TEAAVPKVTL

SEQ ID NO: 103942 - protein, 10 aa, Homo Sapiens
TEAEVRGLCI

SEQ ID NO: 103943 - protein, 10 aa, Homo Sapiens
TEAHLPSQTL

SEQ ID NO: 103944 - protein, 10 aa, Homo Sapiens
TEAIGIISKM

SEQ ID NO: 103945 - protein, 10 aa, Homo Sapiens
TEAQANQISL

SEQ ID NO: 103946 - protein, 10 aa, Homo Sapiens
TECSNTFKSL

SEQ ID NO: 103947 - protein, 10 aa, Homo Sapiens
TEDSKRIAVV

SEQ ID NO: 103948 - protein, 10 aa, Homo Sapiens
TEFEQRHHCL

SEQ ID NO: 103949 - protein, 10 aa, Homo Sapiens
TEFGGVTQHL

SEQ ID NO: 103950 - protein, 10 aa, Homo Sapiens
TEFQGHKVIL

SEQ ID NO: 103951 - protein, 10 aa, Homo Sapiens
TEFRSLHHKL

SEQ ID NO: 103952 - protein, 10 aa, Homo Sapiens
TEGREVVPTF

SEQ ID NO: 103953 - protein, 10 aa, Homo Sapiens
TEIDGRSISL

SEQ ID NO: 103954 - protein, 10 aa, Homo Sapiens
TEIDSKWQEL

SEQ ID NO: 103955 - protein, 10 aa, Homo Sapiens
TEIEKKLPRL

SEQ ID NO: 103956 - protein, 10 aa, Homo Sapiens
TEIEQFAETL

SEQ ID NO: 103957 - protein, 10 aa, Homo Sapiens
TEIKEITVSF

SEQ ID NO: 103958 - protein, 10 aa, Homo Sapiens
TEIKELKETL

SEQ ID NO: 103959 - protein, 10 aa, Homo Sapiens
TEISLKDSTL

SEQ ID NO: 103960 - protein, 10 aa, Homo Sapiens
TEIYEFHKTL

SEQ ID NO: 103961 - protein, 10 aa, Homo Sapiens
TEKEVEDSEL

SEQ ID NO: 103962 - protein, 10 aa, Homo Sapiens
TEKSGICNVL

SEQ ID NO: 103963 - protein, 10 aa, Homo Sapiens
TEKWNTDNTL

SEQ ID NO: 103964 - protein, 10 aa, Homo Sapiens
TELILTNNSL

SEQ ID NO: 103965 - protein, 10 aa, Homo Sapiens
TELLWPGAAL

SEQ ID NO: 103966 - protein, 10 aa, Homo Sapiens
TEMESMKTTL

SEQ ID NO: 103967 - protein, 10 aa, Homo Sapiens
TENEIRGLCL

SEQ ID NO: 103968 - protein, 10 aa, Homo Sapiens
TENGVLLPSL

SEQ ID NO: 103969 - protein, 10 aa, Homo Sapiens
TENMPIKINL

SEQ ID NO: 103970 - protein, 10 aa, Homo Sapiens
TENPHGVKAV

SEQ ID NO: 103971 - protein, 10 aa, Homo Sapiens
TEPHHIWPTL

SEQ ID NO: 103972 - protein, 10 aa, Homo Sapiens
TEQHHTQPVL

SEQ ID NO: 103973 - protein, 10 aa, Homo Sapiens
TESYLKNVAL

SEQ ID NO: 103974 - protein, 10 aa, Homo Sapiens
TEVDMKEVEL

SEQ ID NO: 103975 - protein, 10 aa, Homo Sapiens
TEVEIINQQL

SEQ ID NO: 103976 - protein, 10 aa, Homo Sapiens
TEVKPNTPVL

SEQ ID NO: 103977 - protein, 10 aa, Homo Sapiens
TEVRICPVEF

SEQ ID NO: 103978 - protein, 10 aa, Homo Sapiens
TEWPGRTQVL

SEQ ID NO: 103979 - protein, 10 aa, Homo Sapiens
TEYRKKWDAL

SEQ ID NO: 103980 - protein, 10 aa, Homo Sapiens
TEYRRQVQSL

SEQ ID NO: 103981 - protein, 10 aa, Homo Sapiens
TEYSKSEEKL

SEQ ID NO: 103982 - protein, 10 aa, Homo Sapiens
TYTISSKYIL

SEQ ID NO: 103983 - protein, 10 aa, Homo Sapiens
VEGQRLVYQF

SEQ ID NO: 103984 - protein, 10 aa, Homo Sapiens
VEIQCPEQVV

SEQ ID NO: 103985 - protein, 10 aa, Homo Sapiens
VEKKGEKLIL

SEQ ID NO: 103986 - protein, 10 aa, Homo Sapiens
VEKPPDNQKL

SEQ ID NO: 103987 - protein, 10 aa, Homo Sapiens
VEKYIEEQLL

SEQ ID NO: 103988 - protein, 10 aa, Homo Sapiens
VENSGQRESL

SEQ ID NO: 103989 - protein, 10 aa, Homo Sapiens
VETPRGKPPL

SEQ ID NO: 103990 - protein, 10 aa, Homo Sapiens
VEVKDIELVM

SEQ ID NO: 103991 - protein, 10 aa, Homo Sapiens
YEAFPHDSQL

SEQ ID NO: 103992 - protein, 10 aa, Homo Sapiens
YEALKENEKL

SEQ ID NO: 103993 - protein, 10 aa, Homo Sapiens
YEDEDSLKTL

SEQ ID NO: 103994 - protein, 10 aa, Homo Sapiens
YEEGPGKNLP

SEQ ID NO: 103995 - protein, 10 aa, Homo Sapiens
YEGSPIKVTL

SEQ ID NO: 103996 - protein, 10 aa, Homo Sapiens
YEHDDIVSTV

SEQ ID NO: 103997 - protein, 10 aa, Homo Sapiens
YEIERTIVQL

SEQ ID NO: 103998 - protein, 10 aa, Homo Sapiens
YEIKQFLECA

SEQ ID NO: 103999 - protein, 10 aa, Homo Sapiens
YEIQHGDLKL

SEQ ID NO: 104000 - protein, 10 aa, Homo Sapiens
YEKEKLNERL

SEQ ID NO: 104001 - protein, 10 aa, Homo Sapiens
YELLFKEGVM

SEQ ID NO: 104002 - protein, 10 aa, Homo Sapiens
YELQESNVQL

SEQ ID NO: 104003 - protein, 10 aa, Homo Sapiens
YELQESNVRL

SEQ ID NO: 104004 - protein, 10 aa, Homo Sapiens
YESINHVVVF

SEQ ID NO: 104005 - protein, 10 aa, Homo Sapiens
YETERLIQEL

SEQ ID NO: 104006 - protein, 10 aa, Homo Sapiens
YEVCKEGDVL

SEQ ID NO: 104007 - protein, 10 aa, Homo Sapiens
YEVRLTQTVA

SEQ ID NO: 104008 - protein, 10 aa, Homo Sapiens
YEYEGGHIKT

SEQ ID NO: 104009 - protein, 10 aa, Homo Sapiens
YEYKDGSRKL

SEQ ID NO: 104010 - protein, 11 aa, Homo Sapiens
AEADRTAIHEV

SEQ ID NO: 104011 - protein, 11 aa, Homo Sapiens
AEAEERGELAL

SEQ ID NO: 104012 - protein, 11 aa, Homo Sapiens
AEAEGLSGTTL

SEQ ID NO: 104013 - protein, 11 aa, Homo Sapiens
AEAFEAIPRAL

SEQ ID NO: 104014 - protein, 11 aa, Homo Sapiens
AEAGHLEGHCL

SEQ ID NO: 104015 - protein, 11 aa, Homo Sapiens
AEAIIHGLSSL

SEQ ID NO: 104016 - protein, 11 aa, Homo Sapiens
AEALATHILSL

SEQ ID NO: 104017 - protein, 11 aa, Homo Sapiens
AEALIKHKPSV

SEQ ID NO: 104018 - protein, 11 aa, Homo Sapiens
AEALPRPNWEL

SEQ ID NO: 104019 - protein, 11 aa, Homo Sapiens
AEAPSESKPAA

SEQ ID NO: 104020 - protein, 11 aa, Homo Sapiens
AEASALYGRAL

SEQ ID NO: 104021 - protein, 11 aa, Homo Sapiens
AEAVSRVLNKL

SEQ ID NO: 104022 - protein, 11 aa, Homo Sapiens
AEDGSAGVRVL

SEQ ID NO: 104023 - protein, 11 aa, Homo Sapiens
AEDPALKEIVL

SEQ ID NO: 104024 - protein, 11 aa, Homo Sapiens
AEDPSKSYVKL

SEQ ID NO: 104025 - protein, 11 aa, Homo Sapiens
AEDSVSQRAVL

SEQ ID NO: 104026 - protein, 11 aa, Homo Sapiens
AEFAERSVAKL

SEQ ID NO: 104027 - protein, 11 aa, Homo Sapiens
AEFEKSAKENL

SEQ ID NO: 104028 - protein, 11 aa, Homo Sapiens
AEFGAAGVNRL

SEQ ID NO: 104029 - protein, 11 aa, Homo Sapiens
AEFHQIEGVVA

SEQ ID NO: 104030 - protein, 11 aa, Homo Sapiens
AEHLRKYNEAL

SEQ ID NO: 104031 - protein, 11 aa, Homo Sapiens
AEIDPKQLVDI

SEQ ID NO: 104032 - protein, 11 aa, Homo Sapiens
AEIDREMISSL

SEQ ID NO: 104033 - protein, 11 aa, Homo Sapiens
AEIEKFDKSKL

SEQ ID NO: 104034 - protein, 11 aa, Homo Sapiens
AEIGAAAQQSL

SEQ ID NO: 104035 - protein, 11 aa, Homo Sapiens
AEIKTTNEVVL

SEQ ID NO: 104036 - protein, 11 aa, Homo Sapiens
AEILELAGNAA

SEQ ID NO: 104037 - protein, 11 aa, Homo Sapiens
AEILNGKEISA

SEQ ID NO: 104038 - protein, 11 aa, Homo Sapiens
AEIPLNEQTTL

SEQ ID NO: 104039 - protein, 11 aa, Homo Sapiens
AEIQNVEGQNL

SEQ ID NO: 104040 - protein, 11 aa, Homo Sapiens
AEIRDQMQQQL

SEQ ID NO: 104041 - protein, 11 aa, Homo Sapiens
AEISSKSPVAV

SEQ ID NO: 104042 - protein, 11 aa, Homo Sapiens
AEIVKKDDFVL

SEQ ID NO: 104043 - protein, 11 aa, Homo Sapiens
AEKAAQTAERL

SEQ ID NO: 104044 - protein, 11 aa, Homo Sapiens
AEKFKVQGEAV

SEQ ID NO: 104045 - protein, 11 aa, Homo Sapiens
AEKILKEQERL

SEQ ID NO: 104046 - protein, 11 aa, Homo Sapiens
AEKRDPQELVA

SEQ ID NO: 104047 - protein, 11 aa, Homo Sapiens
AEKREHEKEVL

SEQ ID NO: 104048 - protein, 11 aa, Homo Sapiens
AELATRAIPEL

SEQ ID NO: 104049 - protein, 11 aa, Homo Sapiens
AELEKDAQNRL

SEQ ID NO: 104050 - protein, 11 aa, Homo Sapiens
AELFKGKKGVL

SEQ ID NO: 104051 - protein, 11 aa, Homo Sapiens
AELKGHTSRVL

SEQ ID NO: 104052 - protein, 11 aa, Homo Sapiens
AELKQIVDQSL

SEQ ID NO: 104053 - protein, 11 aa, Homo Sapiens
AELKTDVFQSL

SEQ ID NO: 104054 - protein, 11 aa, Homo Sapiens
AELLDATQHTL

SEQ ID NO: 104055 - protein, 11 aa, Homo Sapiens
AELLVSHGASL

SEQ ID NO: 104056 - protein, 11 aa, Homo Sapiens
AELPAKILVEF

SEQ ID NO: 104057 - protein, 11 aa, Homo Sapiens
AELRSHALPGA

SEQ ID NO: 104058 - protein, 11 aa, Homo Sapiens
AEMPDSAAALL

SEQ ID NO: 104059 - protein, 11 aa, Homo Sapiens
AEMVALVEQRA

SEQ ID NO: 104060 - protein, 11 aa, Homo Sapiens
AENNTLSKLQL

SEQ ID NO: 104061 - protein, 11 aa, Homo Sapiens
AENPAMTRELL

SEQ ID NO: 104062 - protein, 11 aa, Homo Sapiens
AEPEVGVPSSL

SEQ ID NO: 104063 - protein, 11 aa, Homo Sapiens
AERDVYTGDAL

SEQ ID NO: 104064 - protein, 11 aa, Homo Sapiens
AERNVYTSEVL

SEQ ID NO: 104065 - protein, 11 aa, Homo Sapiens
AESERVVQEAL

SEQ ID NO: 104066 - protein, 11 aa, Homo Sapiens
AESQGRSEILM

SEQ ID NO: 104067 - protein, 11 aa, Homo Sapiens
AETVVVSAHSL

SEQ ID NO: 104068 - protein, 11 aa, Homo Sapiens
AEVDASVVREI

SEQ ID NO: 104069 - protein, 11 aa, Homo Sapiens
AEVDPDTILKA

SEQ ID NO: 104070 - protein, 11 aa, Homo Sapiens
AEVEAQKAQQL

SEQ ID NO: 104071 - protein, 11 aa, Homo Sapiens
AEVELKKGATL

SEQ ID NO: 104072 - protein, 11 aa, Homo Sapiens
AEVEVSIPAKL

SEQ ID NO: 104073 - protein, 11 aa, Homo Sapiens
AEVLEQSAQTL

SEQ ID NO: 104074 - protein, 11 aa, Homo Sapiens
AEVNLKKKSYL

SEQ ID NO: 104075 - protein, 11 aa, Homo Sapiens
AEVNQETIQRL

SEQ ID NO: 104076 - protein, 11 aa, Homo Sapiens
AEVSPDAKTSL

SEQ ID NO: 104077 - protein, 11 aa, Homo Sapiens
AEVSQEVTRSL

SEQ ID NO: 104078 - protein, 11 aa, Homo Sapiens
AEVTTKSQIPL

SEQ ID NO: 104079 - protein, 11 aa, Homo Sapiens
AEWEESQTQKI

SEQ ID NO: 104080 - protein, 11 aa, Homo Sapiens
AEYGEIKNIHL

SEQ ID NO: 104081 - protein, 11 aa, Homo Sapiens
AEYNKTIVDAL

SEQ ID NO: 104082 - protein, 11 aa, Homo Sapiens
AVEAKKTYVRD

SEQ ID NO: 104083 - protein, 11 aa, Homo Sapiens
EEFNTGPLSVL

SEQ ID NO: 104084 - protein, 11 aa, Homo Sapiens
EEIEATKNHVL

SEQ ID NO: 104085 - protein, 11 aa, Homo Sapiens
EEVNLNGSGKL

SEQ ID NO: 104086 - protein, 11 aa, Homo Sapiens
EEYDDRTARVL

SEQ ID NO: 104087 - protein, 11 aa, Homo Sapiens
EEYGPELHVAL

SEQ ID NO: 104088 - protein, 11 aa, Homo Sapiens
EIMIPASKAGL

SEQ ID NO: 104089 - protein, 11 aa, Homo Sapiens
FEADPPGQVAA

SEQ ID NO: 104090 - protein, 11 aa, Homo Sapiens
GEADAQNITVL

SEQ ID NO: 104091 - protein, 11 aa, Homo Sapiens
GEAEFNRIMSL

SEQ ID NO: 104092 - protein, 11 aa, Homo Sapiens
GEALPHVVPTL

SEQ ID NO: 104093 - protein, 11 aa, Homo Sapiens
GEANAELCRYL

SEQ ID NO: 104094 - protein, 11 aa, Homo Sapiens
GEAPSKTLVET

SEQ ID NO: 104095 - protein, 11 aa, Homo Sapiens
GEDNGQRGYLL

SEQ ID NO: 104096 - protein, 11 aa, Homo Sapiens
GEFDYSGSQAI

SEQ ID NO: 104097 - protein, 11 aa, Homo Sapiens
GEFEKKYVATL

SEQ ID NO: 104098 - protein, 11 aa, Homo Sapiens
GEFEPDGCLKI

SEQ ID NO: 104099 - protein, 11 aa, Homo Sapiens
GEFGKPYFIKL

SEQ ID NO: 104100 - protein, 11 aa, Homo Sapiens
GEFHPDGCLQI

SEQ ID NO: 104101 - protein, 11 aa, Homo Sapiens
GEFPGEKSKRL

SEQ ID NO: 104102 - protein, 11 aa, Homo Sapiens
GEFQIVNPHLL

SEQ ID NO: 104103 - protein, 11 aa, Homo Sapiens
GEFSGANKEKL

SEQ ID NO: 104104 - protein, 11 aa, Homo Sapiens
GEFSPNVPKSL

SEQ ID NO: 104105 - protein, 11 aa, Homo Sapiens
GEFTLHGRAIL

SEQ ID NO: 104106 - protein, 11 aa, Homo Sapiens
GEGDSVITQVL

SEQ ID NO: 104107 - protein, 11 aa, Homo Sapiens
GEGGSFGELAL

SEQ ID NO: 104108 - protein, 11 aa, Homo Sapiens
GEHIIAGAGEL

SEQ ID NO: 104109 - protein, 11 aa, Homo Sapiens
GEIASFDKAKL

SEQ ID NO: 104110 - protein, 11 aa, Homo Sapiens
GEIGGTEEYKI

SEQ ID NO: 104111 - protein, 11 aa, Homo Sapiens
GEIKRDFIATL

SEQ ID NO: 104112 - protein, 11 aa, Homo Sapiens
GEIQEIVKTGL

SEQ ID NO: 104113 - protein, 11 aa, Homo Sapiens
GEISPGKINSV

SEQ ID NO: 104114 - protein, 11 aa, Homo Sapiens
GEKGTGKTLSL

SEQ ID NO: 104115 - protein, 11 aa, Homo Sapiens
GEKLLPGIEVL

SEQ ID NO: 104116 - protein, 11 aa, Homo Sapiens
GELDLERAPAL

SEQ ID NO: 104117 - protein, 11 aa, Homo Sapiens
GELEAAKALVL

SEQ ID NO: 104118 - protein, 11 aa, Homo Sapiens
GELEPKTRASL

SEQ ID NO: 104119 - protein, 11 aa, Homo Sapiens
GELKNNRGVKL

SEQ ID NO: 104120 - protein, 11 aa, Homo Sapiens
GELKPRQQQDL

SEQ ID NO: 104121 - protein, 11 aa, Homo Sapiens
GELSKYRVPNL

SEQ ID NO: 104122 - protein, 11 aa, Homo Sapiens
GELTDGHPLTL

SEQ ID NO: 104123 - protein, 11 aa, Homo Sapiens
GEMTLKSALAL

SEQ ID NO: 104124 - protein, 11 aa, Homo Sapiens
GENDRGVSFTF

SEQ ID NO: 104125 - protein, 11 aa, Homo Sapiens
GENPASHSYVL

SEQ ID NO: 104126 - protein, 11 aa, Homo Sapiens
GENSILGQLKA

SEQ ID NO: 104127 - protein, 11 aa, Homo Sapiens
GENVFGVCHIF

SEQ ID NO: 104128 - protein, 11 aa, Homo Sapiens
GEPHGLENMEL

SEQ ID NO: 104129 - protein, 11 aa, Homo Sapiens
GEQGAAGARVL

SEQ ID NO: 104130 - protein, 11 aa, Homo Sapiens
GERDEFNIQVL

SEQ ID NO: 104131 - protein, 11 aa, Homo Sapiens
GERDSQTQAIL

SEQ ID NO: 104132 - protein, 11 aa, Homo Sapiens
GESAGAASVSL

SEQ ID NO: 104133 - protein, 11 aa, Homo Sapiens
GESDDSILRLA

SEQ ID NO: 104134 - protein, 11 aa, Homo Sapiens
GESGLGKSTLI

SEQ ID NO: 104135 - protein, 11 aa, Homo Sapiens
GESHVSGTTTL

SEQ ID NO: 104136 - protein, 11 aa, Homo Sapiens
GETTPDKLFTL

SEQ ID NO: 104137 - protein, 11 aa, Homo Sapiens
GEVCIKGTNVF

SEQ ID NO: 104138 - protein, 11 aa, Homo Sapiens
GEVDGKAIPDL

SEQ ID NO: 104139 - protein, 11 aa, Homo Sapiens
GEVDHRVRTSV

SEQ ID NO: 104140 - protein, 11 aa, Homo Sapiens
GEVDKRELIAL

SEQ ID NO: 104141 - protein, 11 aa, Homo Sapiens
GEVEGHPVWAL

SEQ ID NO: 104142 - protein, 11 aa, Homo Sapiens
GEVIQRPANAI

SEQ ID NO: 104143 - protein, 11 aa, Homo Sapiens
GEVIVKGATSA

SEQ ID NO: 104144 - protein, 11 aa, Homo Sapiens
GEVPPQKLQAL

SEQ ID NO: 104145 - protein, 11 aa, Homo Sapiens
GEVSFINIKTL

SEQ ID NO: 104146 - protein, 11 aa, Homo Sapiens
GEVYPFGIVGM

SEQ ID NO: 104147 - protein, 11 aa, Homo Sapiens
GEWASGGVRSF

SEQ ID NO: 104148 - protein, 11 aa, Homo Sapiens
GEYQNQEIHNL

SEQ ID NO: 104149 - protein, 11 aa, Homo Sapiens
GEYSEAIPILR

SEQ ID NO: 104150 - protein, 11 aa, Homo Sapiens
GSIDFGKTVVS

SEQ ID NO: 104151 - protein, 11 aa, Homo Sapiens
GVTEVGLSAYA

SEQ ID NO: 104152 - protein, 11 aa, Homo Sapiens
HEAEKLYKNIL

SEQ ID NO: 104153 - protein, 11 aa, Homo Sapiens
HEAPSLQEAAL

SEQ ID NO: 104154 - protein, 11 aa, Homo Sapiens
HEAQLSEKISL

SEQ ID NO: 104155 - protein, 11 aa, Homo Sapiens
HEFKPQSGAEI

SEQ ID NO: 104156 - protein, 11 aa, Homo Sapiens
HEFSKTEELKL

SEQ ID NO: 104157 - protein, 11 aa, Homo Sapiens
HEFVEEKTKVA

SEQ ID NO: 104158 - protein, 11 aa, Homo Sapiens
HEGDDFGKLAL

SEQ ID NO: 104159 - protein, 11 aa, Homo Sapiens
HEKDPQVKEKL

SEQ ID NO: 104160 - protein, 11 aa, Homo Sapiens
HEKEDGAISTI

SEQ ID NO: 104161 - protein, 11 aa, Homo Sapiens
HELLEQQKRAA

SEQ ID NO: 104162 - protein, 11 aa, Homo Sapiens
HELQENTICSL

SEQ ID NO: 104163 - protein, 11 aa, Homo Sapiens
HEMDTSNGVLL

SEQ ID NO: 104164 - protein, 11 aa, Homo Sapiens
HENESVYKASL

SEQ ID NO: 104165 - protein, 11 aa, Homo Sapiens
HESAAHAIVSV

SEQ ID NO: 104166 - protein, 11 aa, Homo Sapiens
HESETTTSLVL

SEQ ID NO: 104167 - protein, 11 aa, Homo Sapiens
HEVDPEGDRTI

SEQ ID NO: 104168 - protein, 11 aa, Homo Sapiens
HEVGIGSVLSL

SEQ ID NO: 104169 - protein, 11 aa, Homo Sapiens
HEVPSVLGTPL

SEQ ID NO: 104170 - protein, 11 aa, Homo Sapiens
HEWEESNVQIL

SEQ ID NO: 104171 - protein, 11 aa, Homo Sapiens
HEYQVNGKRIL

SEQ ID NO: 104172 - protein, 11 aa, Homo Sapiens
IEATGIAVHAL

SEQ ID NO: 104173 - protein, 11 aa, Homo Sapiens
IEHNLSKIMKL

SEQ ID NO: 104174 - protein, 11 aa, Homo Sapiens
IENRDVAKTVL

SEQ ID NO: 104175 - protein, 11 aa, Homo Sapiens
IKNNLLSKKLP

SEQ ID NO: 104176 - protein, 11 aa, Homo Sapiens
KEADPSNFANF

SEQ ID NO: 104177 - protein, 11 aa, Homo Sapiens
KEAELRGSPSL

SEQ ID NO: 104178 - protein, 11 aa, Homo Sapiens
KEAEPDLLAVL

SEQ ID NO: 104179 - protein, 11 aa, Homo Sapiens
KEAIETIVAAM

SEQ ID NO: 104180 - protein, 11 aa, Homo Sapiens
KEAPVGVLASL

SEQ ID NO: 104181 - protein, 11 aa, Homo Sapiens
KEDATKGKFAF

SEQ ID NO: 104182 - protein, 11 aa, Homo Sapiens
KEDGAISTIVL

SEQ ID NO: 104183 - protein, 11 aa, Homo Sapiens
KEFDGKSLVSV

SEQ ID NO: 104184 - protein, 11 aa, Homo Sapiens
KEFEGKTLVSV

SEQ ID NO: 104185 - protein, 11 aa, Homo Sapiens
KEFMPPGLQEL

SEQ ID NO: 104186 - protein, 11 aa, Homo Sapiens
KEHEVEKMFTL

SEQ ID NO: 104187 - protein, 11 aa, Homo Sapiens
KEIADLKKQEL

SEQ ID NO: 104188 - protein, 11 aa, Homo Sapiens
KEIELPSGQLM

SEQ ID NO: 104189 - protein, 11 aa, Homo Sapiens
KEIENGHIFTV

SEQ ID NO: 104190 - protein, 11 aa, Homo Sapiens
KEIENTYANVA

SEQ ID NO: 104191 - protein, 11 aa, Homo Sapiens
KEIEQEAAVEL

SEQ ID NO: 104192 - protein, 11 aa, Homo Sapiens
KEIEVGGGRKA

SEQ ID NO: 104193 - protein, 11 aa, Homo Sapiens
KEIGTKQSFSL

SEQ ID NO: 104194 - protein, 11 aa, Homo Sapiens
KEIIGLEGVEL

SEQ ID NO: 104195 - protein, 11 aa, Homo Sapiens
KEIQGFLDCAA

SEQ ID NO: 104196 - protein, 11 aa, Homo Sapiens
KEITEKTRVAL

SEQ ID NO: 104197 - protein, 11 aa, Homo Sapiens
KEIYNQVNVVL

SEQ ID NO: 104198 - protein, 11 aa, Homo Sapiens
KEKEESMKETL

SEQ ID NO: 104199 - protein, 11 aa, Homo Sapiens
KEKEKVSTAVL

SEQ ID NO: 104200 - protein, 11 aa, Homo Sapiens
KEKLIKRQEEL

SEQ ID NO: 104201 - protein, 11 aa, Homo Sapiens
KELEFSKDKIL

SEQ ID NO: 104202 - protein, 11 aa, Homo Sapiens
KELEPLKEMTA

SEQ ID NO: 104203 - protein, 11 aa, Homo Sapiens
KELILHNPVTL

SEQ ID NO: 104204 - protein, 11 aa, Homo Sapiens
KELRHPNIVSL

SEQ ID NO: 104205 - protein, 11 aa, Homo Sapiens
KELSSSLHQKL

SEQ ID NO: 104206 - protein, 11 aa, Homo Sapiens
KEMFPIEAGAI

SEQ ID NO: 104207 - protein, 11 aa, Homo Sapiens
KEMGGHHIVAL

SEQ ID NO: 104208 - protein, 11 aa, Homo Sapiens
KEMPSVFQNVL

SEQ ID NO: 104209 - protein, 11 aa, Homo Sapiens
KEMQPTHPIRL

SEQ ID NO: 104210 - protein, 11 aa, Homo Sapiens
KENDAVTIQVL

SEQ ID NO: 104211 - protein, 11 aa, Homo Sapiens
KENGEPGTRVV

SEQ ID NO: 104212 - protein, 11 aa, Homo Sapiens
KENQNIAYVSL

SEQ ID NO: 104213 - protein, 11 aa, Homo Sapiens
KEPEKEIRPAL

SEQ ID NO: 104214 - protein, 11 aa, Homo Sapiens
KEQSPQTLLEL

SEQ ID NO: 104215 - protein, 11 aa, Homo Sapiens
KEREVVNKDVL

SEQ ID NO: 104216 - protein, 11 aa, Homo Sapiens
KERSGVSLAAL

SEQ ID NO: 104217 - protein, 11 aa, Homo Sapiens
KESDHIHIIAL

SEQ ID NO: 104218 - protein, 11 aa, Homo Sapiens
KESPVVKGNAL

SEQ ID NO: 104219 - protein, 11 aa, Homo Sapiens
KESTLHLVLRL

SEQ ID NO: 104220 - protein, 11 aa, Homo Sapiens
KETESLRKIAL

SEQ ID NO: 104221 - protein, 11 aa, Homo Sapiens
KETHVMDYRAL

SEQ ID NO: 104222 - protein, 11 aa, Homo Sapiens
KETSATGINSL

SEQ ID NO: 104223 - protein, 11 aa, Homo Sapiens
KEVDPQGLRTI

SEQ ID NO: 104224 - protein, 11 aa, Homo Sapiens
KEVEKNLKSCL

SEQ ID NO: 104225 - protein, 11 aa, Homo Sapiens
KEVTPEGLQMV

SEQ ID NO: 104226 - protein, 11 aa, Homo Sapiens
KEYEEDGARSI

SEQ ID NO: 104227 - protein, 11 aa, Homo Sapiens
KEYPNRGNTCL

SEQ ID NO: 104228 - protein, 11 aa, Homo Sapiens
KEYSEELVQQL

SEQ ID NO: 104229 - protein, 11 aa, Homo Sapiens
LEAAQRAVGVG

SEQ ID NO: 104230 - protein, 11 aa, Homo Sapiens
LEFDPAQRITL

SEQ ID NO: 104231 - protein, 11 aa, Homo Sapiens
LEKPNGATPVF

SEQ ID NO: 104232 - protein, 11 aa, Homo Sapiens
LEKSPCQTDVL

SEQ ID NO: 104233 - protein, 11 aa, Homo Sapiens
LEMNSDLKAQL

SEQ ID NO: 104234 - protein, 11 aa, Homo Sapiens
LERGLESATSL

SEQ ID NO: 104235 - protein, 11 aa, Homo Sapiens
LEWDQSGSRLL

SEQ ID NO: 104236 - protein, 11 aa, Homo Sapiens
LEWLDKSKSSF

SEQ ID NO: 104237 - protein, 11 aa, Homo Sapiens
LEYDPAKRITL

SEQ ID NO: 104238 - protein, 11 aa, Homo Sapiens
LTAEEGKNITI

SEQ ID NO: 104239 - protein, 11 aa, Homo Sapiens
MEAIGHAGTCL

SEQ ID NO: 104240 - protein, 11 aa, Homo Sapiens
MEDPRRAASSL

SEQ ID NO: 104241 - protein, 11 aa, Homo Sapiens
MEKQNIEYEAL

SEQ ID NO: 104242 - protein, 11 aa, Homo Sapiens
MESDPGVFTEL

SEQ ID NO: 104243 - protein, 11 aa, Homo Sapiens
MESKEKDRQVL

SEQ ID NO: 104244 - protein, 11 aa, Homo Sapiens
PPSLFTAVFVL

SEQ ID NO: 104245 - protein, 11 aa, Homo Sapiens
PVTDGAISTLL

SEQ ID NO: 104246 - protein, 11 aa, Homo Sapiens
QEALQRASTAL

SEQ ID NO: 104247 - protein, 11 aa, Homo Sapiens
QEFEEKSGRTF

SEQ ID NO: 104248 - protein, 11 aa, Homo Sapiens
QEFLTDMKQVF

SEQ ID NO: 104249 - protein, 11 aa, Homo Sapiens
QEHVADLSRSL

SEQ ID NO: 104250 - protein, 11 aa, Homo Sapiens
QELDPAGHKSL

SEQ ID NO: 104251 - protein, 11 aa, Homo Sapiens
QELKLIGEYGL

SEQ ID NO: 104252 - protein, 11 aa, Homo Sapiens
QEMDAQTIAKL

SEQ ID NO: 104253 - protein, 11 aa, Homo Sapiens
QESPLFNNVKL

SEQ ID NO: 104254 - protein, 11 aa, Homo Sapiens
QEVLLQTGRAL

SEQ ID NO: 104255 - protein, 11 aa, Homo Sapiens
QEYQEKGVRVL

SEQ ID NO: 104256 - protein, 11 aa, Homo Sapiens
REAAAVFQETL

SEQ ID NO: 104257 - protein, 11 aa, Homo Sapiens
REAATQAQQTL

SEQ ID NO: 104258 - protein, 11 aa, Homo Sapiens
REAATSNLKKL

SEQ ID NO: 104259 - protein, 11 aa, Homo Sapiens
READGTEKLVF

SEQ ID NO: 104260 - protein, 11 aa, Homo Sapiens
REAEAGRLRTL

SEQ ID NO: 104261 - protein, 11 aa, Homo Sapiens
REAEALKQKEL

SEQ ID NO: 104262 - protein, 11 aa, Homo Sapiens
REAESLIAKKI

SEQ ID NO: 104263 - protein, 11 aa, Homo Sapiens
REAGEGAVAAV

SEQ ID NO: 104264 - protein, 11 aa, Homo Sapiens
REAGITEKVVF

SEQ ID NO: 104265 - protein, 11 aa, Homo Sapiens
REAKVERPSTL

SEQ ID NO: 104266 - protein, 11 aa, Homo Sapiens
REANQAINPKL

SEQ ID NO: 104267 - protein, 11 aa, Homo Sapiens
REASIYTGITL

SEQ ID NO: 104268 - protein, 11 aa, Homo Sapiens
REASLGEASKL

SEQ ID NO: 104269 - protein, 11 aa, Homo Sapiens
REATKAAREAL

SEQ ID NO: 104270 - protein, 11 aa, Homo Sapiens
RECESVLVNDF

SEQ ID NO: 104271 - protein, 11 aa, Homo Sapiens
REDSQRPGAHL

SEQ ID NO: 104272 - protein, 11 aa, Homo Sapiens
REELREKDRLL

SEQ ID NO: 104273 - protein, 11 aa, Homo Sapiens
REFDKKKLISV

SEQ ID NO: 104274 - protein, 11 aa, Homo Sapiens
REFEALRSCFA

SEQ ID NO: 104275 - protein, 11 aa, Homo Sapiens
REFEDQKLTML

SEQ ID NO: 104276 - protein, 11 aa, Homo Sapiens
REFGEEALNSL

SEQ ID NO: 104277 - protein, 11 aa, Homo Sapiens
REFGNPNRPVA

SEQ ID NO: 104278 - protein, 11 aa, Homo Sapiens
REFLFNAIETM

SEQ ID NO: 104279 - protein, 11 aa, Homo Sapiens
REGGFLLLHTL

SEQ ID NO: 104280 - protein, 11 aa, Homo Sapiens
REHMGQLLHQL

SEQ ID NO: 104281 - protein, 11 aa, Homo Sapiens
REHVEAIKIGL

SEQ ID NO: 104282 - protein, 11 aa, Homo Sapiens
REHVVAASKAM

SEQ ID NO: 104283 - protein, 11 aa, Homo Sapiens
REIAQDFKTDL

SEQ ID NO: 104284 - protein, 11 aa, Homo Sapiens
REIATEKKNSL

SEQ ID NO: 104285 - protein, 11 aa, Homo Sapiens
REIDVRIDRNA

SEQ ID NO: 104286 - protein, 11 aa, Homo Sapiens
REIEQVNERVL

SEQ ID NO: 104287 - protein, 11 aa, Homo Sapiens
REIESSPQYRL

SEQ ID NO: 104288 - protein, 11 aa, Homo Sapiens
REIFLSQPILL

SEQ ID NO: 104289 - protein, 11 aa, Homo Sapiens
REIRHPNIITL

SEQ ID NO: 104290 - protein, 11 aa, Homo Sapiens
REIVAISSAQL

SEQ ID NO: 104291 - protein, 11 aa, Homo Sapiens
REIVIGVLHQL

SEQ ID NO: 104292 - protein, 11 aa, Homo Sapiens
REIVRDIKEKL

SEQ ID NO: 104293 - protein, 11 aa, Homo Sapiens
REKALEDVVVL

SEQ ID NO: 104294 - protein, 11 aa, Homo Sapiens
REKEAAYQERL

SEQ ID NO: 104295 - protein, 11 aa, Homo Sapiens
REKEDLVDLVL

SEQ ID NO: 104296 - protein, 11 aa, Homo Sapiens
REKEPNRLESL

SEQ ID NO: 104297 - protein, 11 aa, Homo Sapiens
REKIEASRNEL

SEQ ID NO: 104298 - protein, 11 aa, Homo Sapiens
REKLAEKKELL

SEQ ID NO: 104299 - protein, 11 aa, Homo Sapiens
REKLTSKEECL

SEQ ID NO: 104300 - protein, 11 aa, Homo Sapiens
REKPDDPLNYF

SEQ ID NO: 104301 - protein, 11 aa, Homo Sapiens
REKQHTKAIEL

SEQ ID NO: 104302 - protein, 11 aa, Homo Sapiens
REKQLAAENRL

SEQ ID NO: 104303 - protein, 11 aa, Homo Sapiens
REKQPMVPESL

SEQ ID NO: 104304 - protein, 11 aa, Homo Sapiens
REKVIKGAEIL

SEQ ID NO: 104305 - protein, 11 aa, Homo Sapiens
RELAQQVQQVA

SEQ ID NO: 104306 - protein, 11 aa, Homo Sapiens
RELDGDRSKQL

SEQ ID NO: 104307 - protein, 11 aa, Homo Sapiens
RELENLIGISC

SEQ ID NO: 104308 - protein, 11 aa, Homo Sapiens
RELEQYGQCVA

SEQ ID NO: 104309 - protein, 11 aa, Homo Sapiens
RELKPARIYGL

SEQ ID NO: 104310 - protein, 11 aa, Homo Sapiens
RELMGGIGKTM

SEQ ID NO: 104311 - protein, 11 aa, Homo Sapiens
REMRHKLKTAF

SEQ ID NO: 104312 - protein, 11 aa, Homo Sapiens
REMVELAAQRL

SEQ ID NO: 104313 - protein, 11 aa, Homo Sapiens
RENGKTVIRVL

SEQ ID NO: 104314 - protein, 11 aa, Homo Sapiens
RENLEEEAIIM

SEQ ID NO: 104315 - protein, 11 aa, Homo Sapiens
RENVFQEHQTL

SEQ ID NO: 104316 - protein, 11 aa, Homo Sapiens
RENYDRGYSSL

SEQ ID NO: 104317 - protein, 11 aa, Homo Sapiens
REPALDGGFQM

SEQ ID NO: 104318 - protein, 11 aa, Homo Sapiens
REQLKHKLEQL

SEQ ID NO: 104319 - protein, 11 aa, Homo Sapiens
REQTHTRHYEL

SEQ ID NO: 104320 - protein, 11 aa, Homo Sapiens
RERHPGSFDVV

SEQ ID NO: 104321 - protein, 11 aa, Homo Sapiens
RERITSEAEDL

SEQ ID NO: 104322 - protein, 11 aa, Homo Sapiens
RESNVGGIQQL

SEQ ID NO: 104323 - protein, 11 aa, Homo Sapiens
RESQVSILQSL

SEQ ID NO: 104324 - protein, 11 aa, Homo Sapiens
RESTGAQVQVA

SEQ ID NO: 104325 - protein, 11 aa, Homo Sapiens
RETEPPPKAAL

SEQ ID NO: 104326 - protein, 11 aa, Homo Sapiens
RETVSEESNVL

SEQ ID NO: 104327 - protein, 11 aa, Homo Sapiens
REVDLKNGHNL

SEQ ID NO: 104328 - protein, 11 aa, Homo Sapiens
REVDPDGRRTL

SEQ ID NO: 104329 - protein, 11 aa, Homo Sapiens
REVGIPPEQSL

SEQ ID NO: 104330 - protein, 11 aa, Homo Sapiens
REVLPEHVSVL

SEQ ID NO: 104331 - protein, 11 aa, Homo Sapiens
REVSPAHQYAL

SEQ ID NO: 104332 - protein, 11 aa, Homo Sapiens
REVTGSSQQTL

SEQ ID NO: 104333 - protein, 11 aa, Homo Sapiens
REWKEQGSKTF

SEQ ID NO: 104334 - protein, 11 aa, Homo Sapiens
REYDVPYHIRL

SEQ ID NO: 104335 - protein, 11 aa, Homo Sapiens
REYHTDTTVKF

SEQ ID NO: 104336 - protein, 11 aa, Homo Sapiens
REYNEVEPIIL

SEQ ID NO: 104337 - protein, 11 aa, Homo Sapiens
REYNEYENIKL

SEQ ID NO: 104338 - protein, 11 aa, Homo Sapiens
REYQDLLNVKM

SEQ ID NO: 104339 - protein, 11 aa, Homo Sapiens
RGFSLRKDGPL

SEQ ID NO: 104340 - protein, 11 aa, Homo Sapiens
SEAAAHAVATL

SEQ ID NO: 104341 - protein, 11 aa, Homo Sapiens
SEAARPATSTL

SEQ ID NO: 104342 - protein, 11 aa, Homo Sapiens
SEADPSGVASI

SEQ ID NO: 104343 - protein, 11 aa, Homo Sapiens
SEAEACVSRAL

SEQ ID NO: 104344 - protein, 11 aa, Homo Sapiens
SECAKKALEQL

SEQ ID NO: 104345 - protein, 11 aa, Homo Sapiens
SECNSNRDSVL

SEQ ID NO: 104346 - protein, 11 aa, Homo Sapiens
SEDGGHIFCTL

SEQ ID NO: 104347 - protein, 11 aa, Homo Sapiens
SEDPSHPSMAL

SEQ ID NO: 104348 - protein, 11 aa, Homo Sapiens
SEDRARASLVL

SEQ ID NO: 104349 - protein, 11 aa, Homo Sapiens
SEFDPPGPNVA

SEQ ID NO: 104350 - protein, 11 aa, Homo Sapiens
SEFKYNKPAFL

SEQ ID NO: 104351 - protein, 11 aa, Homo Sapiens
SEFLSTAPRSL

SEQ ID NO: 104352 - protein, 11 aa, Homo Sapiens
SEGVHTVDQVL

SEQ ID NO: 104353 - protein, 11 aa, Homo Sapiens
SEHPDQAQAIL

SEQ ID NO: 104354 - protein, 11 aa, Homo Sapiens
SEHSTEGSVSL

SEQ ID NO: 104355 - protein, 11 aa, Homo Sapiens
SEIEWNPATKL

SEQ ID NO: 104356 - protein, 11 aa, Homo Sapiens
SEIHSGNSVSL

SEQ ID NO: 104357 - protein, 11 aa, Homo Sapiens
SEIKISNPTEF

SEQ ID NO: 104358 - protein, 11 aa, Homo Sapiens
SEILSKKQNEL

SEQ ID NO: 104359 - protein, 11 aa, Homo Sapiens
SELNISEIQKL

SEQ ID NO: 104360 - protein, 11 aa, Homo Sapiens
SELSDLHAHKL

SEQ ID NO: 104361 - protein, 11 aa, Homo Sapiens
SEMPQTHHHAL

SEQ ID NO: 104362 - protein, 11 aa, Homo Sapiens
SEMSEEKRAKL

SEQ ID NO: 104363 - protein, 11 aa, Homo Sapiens
SENGDRSQHLL

SEQ ID NO: 104364 - protein, 11 aa, Homo Sapiens
SENQNRAYVTL

SEQ ID NO: 104365 - protein, 11 aa, Homo Sapiens
SESDKTAVLTL

SEQ ID NO: 104366 - protein, 11 aa, Homo Sapiens
SESGERPQITI

SEQ ID NO: 104367 - protein, 11 aa, Homo Sapiens
SESQKIPGMTL

SEQ ID NO: 104368 - protein, 11 aa, Homo Sapiens
SESSSSDRPVL

SEQ ID NO: 104369 - protein, 11 aa, Homo Sapiens
SETAVAKNQAL

SEQ ID NO: 104370 - protein, 11 aa, Homo Sapiens
SEVDLTRSFSF

SEQ ID NO: 104371 - protein, 11 aa, Homo Sapiens
SEVDPKLVSNL

SEQ ID NO: 104372 - protein, 11 aa, Homo Sapiens
SEVTVQPSPYL

SEQ ID NO: 104373 - protein, 11 aa, Homo Sapiens
SEWKAGKGRVL

SEQ ID NO: 104374 - protein, 11 aa, Homo Sapiens
SEYPAERKQAL

SEQ ID NO: 104375 - protein, 11 aa, Homo Sapiens
SEYWDRETRSA

SEQ ID NO: 104376 - protein, 11 aa, Homo Sapiens
SIGLALTVSAL

SEQ ID NO: 104377 - protein, 11 aa, Homo Sapiens
TADQPGLIPRL

SEQ ID NO: 104378 - protein, 11 aa, Homo Sapiens
TEASLLRQCPL

SEQ ID NO: 104379 - protein, 11 aa, Homo Sapiens
TEDFKHLARKL

SEQ ID NO: 104380 - protein, 11 aa, Homo Sapiens
TEFDARKLHKL

SEQ ID NO: 104381 - protein, 11 aa, Homo Sapiens
TEFGGSIYQKV

SEQ ID NO: 104382 - protein, 11 aa, Homo Sapiens
TEFTPPGCISL

SEQ ID NO: 104383 - protein, 11 aa, Homo Sapiens
TEFVHQNSQEI

SEQ ID NO: 104384 - protein, 11 aa, Homo Sapiens
TEIAPTGIESL

SEQ ID NO: 104385 - protein, 11 aa, Homo Sapiens
TEISSAEKVAL

SEQ ID NO: 104386 - protein, 11 aa, Homo Sapiens
TEMLPSILNQL

SEQ ID NO: 104387 - protein, 11 aa, Homo Sapiens
TENPHGARLSL

SEQ ID NO: 104388 - protein, 11 aa, Homo Sapiens
TERKKLPKETL

SEQ ID NO: 104389 - protein, 11 aa, Homo Sapiens
TESAAIACVKL

SEQ ID NO: 104390 - protein, 11 aa, Homo Sapiens
TETDLHGSLRV

SEQ ID NO: 104391 - protein, 11 aa, Homo Sapiens
TEVTPVTGASL

SEQ ID NO: 104392 - protein, 11 aa, Homo Sapiens
TEWLDGKHVVF

SEQ ID NO: 104393 - protein, 11 aa, Homo Sapiens
TEYENFKVQVL

SEQ ID NO: 104394 - protein, 11 aa, Homo Sapiens
VEDDARGTVVL

SEQ ID NO: 104395 - protein, 11 aa, Homo Sapiens
VEFFDEKLNSL

SEQ ID NO: 104396 - protein, 11 aa, Homo Sapiens
VEKQRVREEIL

SEQ ID NO: 104397 - protein, 11 aa, Homo Sapiens
VESDVKSQTIL

SEQ ID NO: 104398 - protein, 11 aa, Homo Sapiens
VEWDPTGRYVV

SEQ ID NO: 104399 - protein, 11 aa, Homo Sapiens
VEYDGERKKTL

SEQ ID NO: 104400 - protein, 11 aa, Homo Sapiens
VEYEVPEAAQL

SEQ ID NO: 104401 - protein, 11 aa, Homo Sapiens
VGAEDAMIQIL

SEQ ID NO: 104402 - protein, 11 aa, Homo Sapiens
WEQQEPGERKL

SEQ ID NO: 104403 - protein, 11 aa, Homo Sapiens
WEYDESHVITA

SEQ ID NO: 104404 - protein, 11 aa, Homo Sapiens
YEAPFDAQASL

SEQ ID NO: 104405 - protein, 11 aa, Homo Sapiens
YEKTSGSEMAL

SEQ ID NO: 104406 - protein, 11 aa, Homo Sapiens
YELPTDSHASL

SEQ ID NO: 104407 - protein, 11 aa, Homo Sapiens
YEVGDPGQRTL

SEQ ID NO: 104408 - protein, 11 aa, Homo Sapiens
YEVTPDDKRKA

SEQ ID NO: 104409 - protein, 11 aa, Homo Sapiens
YEWDVAEARKI

SEQ ID NO: 104410 - protein, 8 aa, Homo Sapiens
ADIQVSAA

SEQ ID NO: 104411 - protein, 8 aa, Homo Sapiens
ADIRGFVA

SEQ ID NO: 104412 - protein, 8 aa, Homo Sapiens
ADIRLWVN

SEQ ID NO: 104413 - protein, 8 aa, Homo Sapiens
ADYLAHES

SEQ ID NO: 104414 - protein, 8 aa, Homo Sapiens
AEARLISA

SEQ ID NO: 104415 - protein, 8 aa, Homo Sapiens
AEASMVIA

SEQ ID NO: 104416 - protein, 8 aa, Homo Sapiens
AEFAAKAA

SEQ ID NO: 104417 - protein, 8 aa, Homo Sapiens
AEFIVAKA

SEQ ID NO: 104418 - protein, 8 aa, Homo Sapiens
AEHPIVIV

SEQ ID NO: 104419 - protein, 8 aa, Homo Sapiens
AEHQQLIP

SEQ ID NO: 104420 - protein, 8 aa, Homo Sapiens
AEHVQYMA

SEQ ID NO: 104421 - protein, 8 aa, Homo Sapiens
AEIAHNVS

SEQ ID NO: 104422 - protein, 8 aa, Homo Sapiens
AEIKHFVS

SEQ ID NO: 104423 - protein, 8 aa, Homo Sapiens
AEIKLTMA

SEQ ID NO: 104424 - protein, 8 aa, Homo Sapiens
AEIKVREA

SEQ ID NO: 104425 - protein, 8 aa, Homo Sapiens
AEILHEIA

SEQ ID NO: 104426 - protein, 8 aa, Homo Sapiens
AEIRIIPA

SEQ ID NO: 104427 - protein, 8 aa, Homo Sapiens
AEIRVHTV

SEQ ID NO: 104428 - protein, 8 aa, Homo Sapiens
AEKVIPAA

SEQ ID NO: 104429 - protein, 8 aa, Homo Sapiens
AELILHDA

SEQ ID NO: 104430 - protein, 8 aa, Homo Sapiens
AELKQLVA

SEQ ID NO: 104431 - protein, 8 aa, Homo Sapiens
AELQLRAA

SEQ ID NO: 104432 - protein, 8 aa, Homo Sapiens
AESRVLSN

SEQ ID NO: 104433 - protein, 8 aa, Homo Sapiens
AETKVLQA

SEQ ID NO: 104434 - protein, 8 aa, Homo Sapiens
AETPIRSP

SEQ ID NO: 104435 - protein, 8 aa, Homo Sapiens
AETVVVSA

SEQ ID NO: 104436 - protein, 8 aa, Homo Sapiens
AEVLLRTA

SEQ ID NO: 104437 - protein, 8 aa, Homo Sapiens
AEVSQFAA

SEQ ID NO: 104438 - protein, 8 aa, Homo Sapiens
AEVTVHAA

SEQ ID NO: 104439 - protein, 8 aa, Homo Sapiens
AEWEPPEA

SEQ ID NO: 104440 - protein, 8 aa, Homo Sapiens
AEYLQPKA

SEQ ID NO: 104441 - protein, 8 aa, Homo Sapiens
EALIKHKP

SEQ ID NO: 104442 - protein, 8 aa, Homo Sapiens
EHNFVAKA

SEQ ID NO: 104443 - protein, 8 aa, Homo Sapiens
EIRAIRQA

SEQ ID NO: 104444 - protein, 8 aa, Homo Sapiens
FNEKSKEL

SEQ ID NO: 104445 - protein, 8 aa, Homo Sapiens
GDVKLPKA

SEQ ID NO: 104446 - protein, 8 aa, Homo Sapiens
GEALMYHT

SEQ ID NO: 104447 - protein, 8 aa, Homo Sapiens
GEFKQPIP

SEQ ID NO: 104448 - protein, 8 aa, Homo Sapiens
GEFSITYK

SEQ ID NO: 104449 - protein, 8 aa, Homo Sapiens
GEHIHYGA

SEQ ID NO: 104450 - protein, 8 aa, Homo Sapiens
GEIILHSV

SEQ ID NO: 104451 - protein, 8 aa, Homo Sapiens
GEIKQFVS

SEQ ID NO: 104452 - protein, 8 aa, Homo Sapiens
GELILHKV

SEQ ID NO: 104453 - protein, 8 aa, Homo Sapiens
GELKLVTA

SEQ ID NO: 104454 - protein, 8 aa, Homo Sapiens
GELNQYSA

SEQ ID NO: 104455 - protein, 8 aa, Homo Sapiens
GELVHPKA

SEQ ID NO: 104456 - protein, 8 aa, Homo Sapiens
GEMKPVAA

SEQ ID NO: 104457 - protein, 8 aa, Homo Sapiens
GETKLLQA

SEQ ID NO: 104458 - protein, 8 aa, Homo Sapiens
GETLLHIA

SEQ ID NO: 104459 - protein, 8 aa, Homo Sapiens
GETLLHRA

SEQ ID NO: 104460 - protein, 8 aa, Homo Sapiens
GETPLHTA

SEQ ID NO: 104461 - protein, 8 aa, Homo Sapiens
GETRQWQT

SEQ ID NO: 104462 - protein, 8 aa, Homo Sapiens
GEVAHVSA

SEQ ID NO: 104463 - protein, 8 aa, Homo Sapiens
GEVIQRPA

SEQ ID NO: 104464 - protein, 8 aa, Homo Sapiens
GEVIVKGA

SEQ ID NO: 104465 - protein, 8 aa, Homo Sapiens
GEVLMVQV

SEQ ID NO: 104466 - protein, 8 aa, Homo Sapiens
GEVVQIRP

SEQ ID NO: 104467 - protein, 8 aa, Homo Sapiens
GEYFAIKA

SEQ ID NO: 104468 - protein, 8 aa, Homo Sapiens
GEYKIMVA

SEQ ID NO: 104469 - protein, 8 aa, Homo Sapiens
HDITDWVV

SEQ ID NO: 104470 - protein, 8 aa, Homo Sapiens
HDLLVHKA

SEQ ID NO: 104471 - protein, 8 aa, Homo Sapiens
HEGPVYAV

SEQ ID NO: 104472 - protein, 8 aa, Homo Sapiens
HEHPLYRA

SEQ ID NO: 104473 - protein, 8 aa, Homo Sapiens
HEIIQHEV

SEQ ID NO: 104474 - protein, 8 aa, Homo Sapiens
HEMVIYEA

SEQ ID NO: 104475 - protein, 8 aa, Homo Sapiens
HEMVVYEA

SEQ ID NO: 104476 - protein, 8 aa, Homo Sapiens
HEQFIPIA

SEQ ID NO: 104477 - protein, 8 aa, Homo Sapiens
HETHLFTA

SEQ ID NO: 104478 - protein, 8 aa, Homo Sapiens
HEVIVSAA

SEQ ID NO: 104479 - protein, 8 aa, Homo Sapiens
HEVLLISA

SEQ ID NO: 104480 - protein, 8 aa, Homo Sapiens
HEWVVKES

SEQ ID NO: 104481 - protein, 8 aa, Homo Sapiens
IEFPVSEA

SEQ ID NO: 104482 - protein, 8 aa, Homo Sapiens
IEIPIHIV

SEQ ID NO: 104483 - protein, 8 aa, Homo Sapiens
KDFIIFEA

SEQ ID NO: 104484 - protein, 8 aa, Homo Sapiens
KDIAAYRA

SEQ ID NO: 104485 - protein, 8 aa, Homo Sapiens
KDINAVAA

SEQ ID NO: 104486 - protein, 8 aa, Homo Sapiens
KDIVINEA

SEQ ID NO: 104487 - protein, 8 aa, Homo Sapiens
KDVFISAA

SEQ ID NO: 104488 - protein, 8 aa, Homo Sapiens
KDYLAAIA

SEQ ID NO: 104489 - protein, 8 aa, Homo Sapiens
KEAILKEA

SEQ ID NO: 104490 - protein, 8 aa, Homo Sapiens
KEAPLHVA

SEQ ID NO: 104491 - protein, 8 aa, Homo Sapiens
KEAQLYAA

SEQ ID NO: 104492 - protein, 8 aa, Homo Sapiens
KEFKAYVS

SEQ ID NO: 104493 - protein, 8 aa, Homo Sapiens
KEFPITEA

SEQ ID NO: 104494 - protein, 8 aa, Homo Sapiens
KEFQVPMA

SEQ ID NO: 104495 - protein, 8 aa, Homo Sapiens
KEILAQVA

SEQ ID NO: 104496 - protein, 8 aa, Homo Sapiens
KEILLKAV

SEQ ID NO: 104497 - protein, 8 aa, Homo Sapiens
KEIRMEAA

SEQ ID NO: 104498 - protein, 8 aa, Homo Sapiens
KEIVVFEA

SEQ ID NO: 104499 - protein, 8 aa, Homo Sapiens
KEIYVISA

SEQ ID NO: 104500 - protein, 8 aa, Homo Sapiens
KELALNTA

SEQ ID NO: 104501 - protein, 8 aa, Homo Sapiens
KELKQLAA

SEQ ID NO: 104502 - protein, 8 aa, Homo Sapiens
KEMIQHCV

SEQ ID NO: 104503 - protein, 8 aa, Homo Sapiens
KENPVVVA

SEQ ID NO: 104504 - protein, 8 aa, Homo Sapiens
KEVKIHVA

SEQ ID NO: 104505 - protein, 8 aa, Homo Sapiens
KEVPIHRV

SEQ ID NO: 104506 - protein, 8 aa, Homo Sapiens
KEVVIVSA

SEQ ID NO: 104507 - protein, 8 aa, Homo Sapiens
LDVVHPAA

SEQ ID NO: 104508 - protein, 8 aa, Homo Sapiens
LEVQHPAA

SEQ ID NO: 104509 - protein, 8 aa, Homo Sapiens
MEVELPAA

SEQ ID NO: 104510 - protein, 8 aa, Homo Sapiens
NDVLAHQA

SEQ ID NO: 104511 - protein, 8 aa, Homo Sapiens
QEFPQVEA

SEQ ID NO: 104512 - protein, 8 aa, Homo Sapiens
QEVQITEA

SEQ ID NO: 104513 - protein, 8 aa, Homo Sapiens
RDFAARLV

SEQ ID NO: 104514 - protein, 8 aa, Homo Sapiens
RDFEGKVV

SEQ ID NO: 104515 - protein, 8 aa, Homo Sapiens
RDFVARNV

SEQ ID NO: 104516 - protein, 8 aa, Homo Sapiens
RDIVQFVP

SEQ ID NO: 104517 - protein, 8 aa, Homo Sapiens
RDYVAPTA

SEQ ID NO: 104518 - protein, 8 aa, Homo Sapiens
REFKLSKV

SEQ ID NO: 104519 - protein, 8 aa, Homo Sapiens
REFLAHSA

SEQ ID NO: 104520 - protein, 8 aa, Homo Sapiens
REFLTKTA

SEQ ID NO: 104521 - protein, 8 aa, Homo Sapiens
REFPQFEP

SEQ ID NO: 104522 - protein, 8 aa, Homo Sapiens
REFQTSVV

SEQ ID NO: 104523 - protein, 8 aa, Homo Sapiens
REFRLVAA

SEQ ID NO: 104524 - protein, 8 aa, Homo Sapiens
REFVMQEA

SEQ ID NO: 104525 - protein, 8 aa, Homo Sapiens
REIIINAV

SEQ ID NO: 104526 - protein, 8 aa, Homo Sapiens
REINITSA

SEQ ID NO: 104527 - protein, 8 aa, Homo Sapiens
REMLIRVN

SEQ ID NO: 104528 - protein, 8 aa, Homo Sapiens
RERIQEVA

SEQ ID NO: 104529 - protein, 8 aa, Homo Sapiens
RETLLNSA

SEQ ID NO: 104530 - protein, 8 aa, Homo Sapiens
RETTISKV

SEQ ID NO: 104531 - protein, 8 aa, Homo Sapiens
REVVVVGA

SEQ ID NO: 104532 - protein, 8 aa, Homo Sapiens
SEAVLWEA

SEQ ID NO: 104533 - protein, 8 aa, Homo Sapiens
SEFEIVKA

SEQ ID NO: 104534 - protein, 8 aa, Homo Sapiens
SEFQIPTA

SEQ ID NO: 104535 - protein, 8 aa, Homo Sapiens
SEIEMAKA

SEQ ID NO: 104536 - protein, 8 aa, Homo Sapiens
SEIEVAQA

SEQ ID NO: 104537 - protein, 8 aa, Homo Sapiens
SEIKMEQA

SEQ ID NO: 104538 - protein, 8 aa, Homo Sapiens
SEIPMKLA

SEQ ID NO: 104539 - protein, 8 aa, Homo Sapiens
SEIRVYSA

SEQ ID NO: 104540 - protein, 8 aa, Homo Sapiens
SELRAFVA

SEQ ID NO: 104541 - protein, 8 aa, Homo Sapiens
SETAMFSV

SEQ ID NO: 104542 - protein, 8 aa, Homo Sapiens
SETKIFTA

SEQ ID NO: 104543 - protein, 8 aa, Homo Sapiens
SETKVFTA

SEQ ID NO: 104544 - protein, 8 aa, Homo Sapiens
SEVKALCA

SEQ ID NO: 104545 - protein, 8 aa, Homo Sapiens
SEVVIHSA

SEQ ID NO: 104546 - protein, 8 aa, Homo Sapiens
SEWLIRPP

SEQ ID NO: 104547 - protein, 8 aa, Homo Sapiens
SEYRTFAA

SEQ ID NO: 104548 - protein, 8 aa, Homo Sapiens
TEFGHPAA

SEQ ID NO: 104549 - protein, 8 aa, Homo Sapiens
TEFLFHTA

SEQ ID NO: 104550 - protein, 8 aa, Homo Sapiens
TEFPGVVA

SEQ ID NO: 104551 - protein, 8 aa, Homo Sapiens
TELELFKA

SEQ ID NO: 104552 - protein, 8 aa, Homo Sapiens
TELIQHSA

SEQ ID NO: 104553 - protein, 8 aa, Homo Sapiens
TEVKIPKP

SEQ ID NO: 104554 - protein, 8 aa, Homo Sapiens
TVGNNKTL

SEQ ID NO: 104555 - protein, 8 aa, Homo Sapiens
VDFYAPTA

SEQ ID NO: 104556 - protein, 8 aa, Homo Sapiens
VDITTPKA

SEQ ID NO: 104557 - protein, 8 aa, Homo Sapiens
VDVTLPKA

SEQ ID NO: 104558 - protein, 8 aa, Homo Sapiens
VEALIHAA

SEQ ID NO: 104559 - protein, 8 aa, Homo Sapiens
VEFTIKEA

SEQ ID NO: 104560 - protein, 8 aa, Homo Sapiens
VEIILHVV

SEQ ID NO: 104561 - protein, 8 aa, Homo Sapiens
WEVPLPKV

SEQ ID NO: 104562 - protein, 8 aa, Homo Sapiens
YEILLHEV

SEQ ID NO: 104563 - protein, 8 aa, Homo Sapiens
YEKLLWTT

SEQ ID NO: 104564 - protein, 9 aa, Homo Sapiens
AAPAKKPYR

SEQ ID NO: 104565 - protein, 9 aa, Homo Sapiens
AAPAYSRAL

SEQ ID NO: 104566 - protein, 9 aa, Homo Sapiens
ADHVSTYAA

SEQ ID NO: 104567 - protein, 9 aa, Homo Sapiens
ADINTKWAA

SEQ ID NO: 104568 - protein, 9 aa, Homo Sapiens
ADLVFPSSA

SEQ ID NO: 104569 - protein, 9 aa, Homo Sapiens
ADTIFVTAP

SEQ ID NO: 104570 - protein, 9 aa, Homo Sapiens
AEAAAAVVA

SEQ ID NO: 104571 - protein, 9 aa, Homo Sapiens
AEAASKWAA

SEQ ID NO: 104572 - protein, 9 aa, Homo Sapiens
AEAAYQTGA

SEQ ID NO: 104573 - protein, 9 aa, Homo Sapiens
AEAFGKIVA

SEQ ID NO: 104574 - protein, 9 aa, Homo Sapiens
AEAFRLPTA

SEQ ID NO: 104575 - protein, 9 aa, Homo Sapiens
AEAGFIHCP

SEQ ID NO: 104576 - protein, 9 aa, Homo Sapiens
AEAGGMHTV

SEQ ID NO: 104577 - protein, 9 aa, Homo Sapiens
AEAIKAWTA

SEQ ID NO: 104578 - protein, 9 aa, Homo Sapiens
AEAIRILAA

SEQ ID NO: 104579 - protein, 9 aa, Homo Sapiens
AEAKFFTES

SEQ ID NO: 104580 - protein, 9 aa, Homo Sapiens
AEALIKHKP

SEQ ID NO: 104581 - protein, 9 aa, Homo Sapiens
AEALPSLAA

SEQ ID NO: 104582 - protein, 9 aa, Homo Sapiens
AEALQLPVV

SEQ ID NO: 104583 - protein, 9 aa, Homo Sapiens
AEAPNMAVV

SEQ ID NO: 104584 - protein, 9 aa, Homo Sapiens
AEAPPSVAP

SEQ ID NO: 104585 - protein, 9 aa, Homo Sapiens
AEAQLHTTA

SEQ ID NO: 104586 - protein, 9 aa, Homo Sapiens
AEAQPMAVV

SEQ ID NO: 104587 - protein, 9 aa, Homo Sapiens
AEAQVTPKP

SEQ ID NO: 104588 - protein, 9 aa, Homo Sapiens
AEAVAHFEA

SEQ ID NO: 104589 - protein, 9 aa, Homo Sapiens
AEAVFASEV

SEQ ID NO: 104590 - protein, 9 aa, Homo Sapiens
AEAVLKHIA

SEQ ID NO: 104591 - protein, 9 aa, Homo Sapiens
AEAYRSLAS

SEQ ID NO: 104592 - protein, 9 aa, Homo Sapiens
AECAGPPVP

SEQ ID NO: 104593 - protein, 9 aa, Homo Sapiens
AECGAFRTG

SEQ ID NO: 104594 - protein, 9 aa, Homo Sapiens
AECGLRILA

SEQ ID NO: 104595 - protein, 9 aa, Homo Sapiens
AECNILRKA

SEQ ID NO: 104596 - protein, 9 aa, Homo Sapiens
AEEFKVPAA

SEQ ID NO: 104597 - protein, 9 aa, Homo Sapiens
AEEFVIVKA

SEQ ID NO: 104598 - protein, 9 aa, Homo Sapiens
AEFAERSVA

SEQ ID NO: 104599 - protein, 9 aa, Homo Sapiens
AEFAERTVA

SEQ ID NO: 104600 - protein, 9 aa, Homo Sapiens
AEFEWENKV

SEQ ID NO: 104601 - protein, 9 aa, Homo Sapiens
AEFFLSQQA

SEQ ID NO: 104602 - protein, 9 aa, Homo Sapiens
AEFGLLQRT

SEQ ID NO: 104603 - protein, 9 aa, Homo Sapiens
AEFGQAESA

SEQ ID NO: 104604 - protein, 9 aa, Homo Sapiens
AEFGTLKKA

SEQ ID NO: 104605 - protein, 9 aa, Homo Sapiens
AEFHQIEGV

SEQ ID NO: 104606 - protein, 9 aa, Homo Sapiens
AEFIKFTVI

SEQ ID NO: 104607 - protein, 9 aa, Homo Sapiens
AEFKIDFPT

SEQ ID NO: 104608 - protein, 9 aa, Homo Sapiens
AEFKLIPGL

SEQ ID NO: 104609 - protein, 9 aa, Homo Sapiens
AEFKQIRSI

SEQ ID NO: 104610 - protein, 9 aa, Homo Sapiens
AEFKRAVKV

SEQ ID NO: 104611 - protein, 9 aa, Homo Sapiens
AEFLIGQGA

SEQ ID NO: 104612 - protein, 9 aa, Homo Sapiens
AEFLKQVKP

SEQ ID NO: 104613 - protein, 9 aa, Homo Sapiens
AEFLKVFIP

SEQ ID NO: 104614 - protein, 9 aa, Homo Sapiens
AEFLQKLLP

SEQ ID NO: 104615 - protein, 9 aa, Homo Sapiens
AEFNLVNNA

SEQ ID NO: 104616 - protein, 9 aa, Homo Sapiens
AEFPHSFLV

SEQ ID NO: 104617 - protein, 9 aa, Homo Sapiens
AEFQELLKV

SEQ ID NO: 104618 - protein, 9 aa, Homo Sapiens
AEFQVKITA

SEQ ID NO: 104619 - protein, 9 aa, Homo Sapiens
AEFVGVSHL

SEQ ID NO: 104620 - protein, 9 aa, Homo Sapiens
AEFVPQLEA

SEQ ID NO: 104621 - protein, 9 aa, Homo Sapiens
AEFYRQVAS

SEQ ID NO: 104622 - protein, 9 aa, Homo Sapiens
AEFYRQVSA

SEQ ID NO: 104623 - protein, 9 aa, Homo Sapiens
AEGAFPNLA

SEQ ID NO: 104624 - protein, 9 aa, Homo Sapiens
AEGEGISKV

SEQ ID NO: 104625 - protein, 9 aa, Homo Sapiens
AEGKFFHRS

SEQ ID NO: 104626 - protein, 9 aa, Homo Sapiens
AEGPEVICA

SEQ ID NO: 104627 - protein, 9 aa, Homo Sapiens
AEGPVAVVV

SEQ ID NO: 104628 - protein, 9 aa, Homo Sapiens
AEGQRLFSA

SEQ ID NO: 104629 - protein, 9 aa, Homo Sapiens
AEHENLRTP

SEQ ID NO: 104630 - protein, 9 aa, Homo Sapiens
AEHFSMIRA

SEQ ID NO: 104631 - protein, 9 aa, Homo Sapiens
AEHGIFLPP

SEQ ID NO: 104632 - protein, 9 aa, Homo Sapiens
AEHGSFRVT

SEQ ID NO: 104633 - protein, 9 aa, Homo Sapiens
AEHKEFITA

SEQ ID NO: 104634 - protein, 9 aa, Homo Sapiens
AEHNAALQA

SEQ ID NO: 104635 - protein, 9 aa, Homo Sapiens
AEHNFVAKA

SEQ ID NO: 104636 - protein, 9 aa, Homo Sapiens
AEHPGFMKT

SEQ ID NO: 104637 - protein, 9 aa, Homo Sapiens
AEHRPILCV

SEQ ID NO: 104638 - protein, 9 aa, Homo Sapiens
AEHVVQPKA

SEQ ID NO: 104639 - protein, 9 aa, Homo Sapiens
AEIAHLYIA

SEQ ID NO: 104640 - protein, 9 aa, Homo Sapiens
AEIAHNVSS

SEQ ID NO: 104641 - protein, 9 aa, Homo Sapiens
AEIAKLKAA

SEQ ID NO: 104642 - protein, 9 aa, Homo Sapiens
AEIDAHLVA

SEQ ID NO: 104643 - protein, 9 aa, Homo Sapiens
AEIDAITAP

SEQ ID NO: 104644 - protein, 9 aa, Homo Sapiens
AEIDARLKA

SEQ ID NO: 104645 - protein, 9 aa, Homo Sapiens
AEIDEEPVS

SEQ ID NO: 104646 - protein, 9 aa, Homo Sapiens
AEIDITNVA

SEQ ID NO: 104647 - protein, 9 aa, Homo Sapiens
AEIDLFRAA

SEQ ID NO: 104648 - protein, 9 aa, Homo Sapiens
AEIDRRISA

SEQ ID NO: 104649 - protein, 9 aa, Homo Sapiens
AEIEDPPIP

SEQ ID NO: 104650 - protein, 9 aa, Homo Sapiens
AEIEDVKPA

SEQ ID NO: 104651 - protein, 9 aa, Homo Sapiens
AEIEKFDKS

SEQ ID NO: 104652 - protein, 9 aa, Homo Sapiens
AEIIFNPSA

SEQ ID NO: 104653 - protein, 9 aa, Homo Sapiens
AEIINPKTA

SEQ ID NO: 104654 - protein, 9 aa, Homo Sapiens
AEIIQLVNA

SEQ ID NO: 104655 - protein, 9 aa, Homo Sapiens
AEIKIIREA

SEQ ID NO: 104656 - protein, 9 aa, Homo Sapiens
AEIKKCVTA

SEQ ID NO: 104657 - protein, 9 aa, Homo Sapiens
AEINGTMNA

SEQ ID NO: 104658 - protein, 9 aa, Homo Sapiens
AEINNIIKI

SEQ ID NO: 104659 - protein, 9 aa, Homo Sapiens
AEIPEGYVP

SEQ ID NO: 104660 - protein, 9 aa, Homo Sapiens
AEIPEHFGA

SEQ ID NO: 104661 - protein, 9 aa, Homo Sapiens
AEIQELHQS

SEQ ID NO: 104662 - protein, 9 aa, Homo Sapiens
AEIQETITA

SEQ ID NO: 104663 - protein, 9 aa, Homo Sapiens
AEIQGVIDA

SEQ ID NO: 104664 - protein, 9 aa, Homo Sapiens
AEIRAINEA

SEQ ID NO: 104665 - protein, 9 aa, Homo Sapiens
AEIRHVLVT

SEQ ID NO: 104666 - protein, 9 aa, Homo Sapiens
AEIRKDISA

SEQ ID NO: 104667 - protein, 9 aa, Homo Sapiens
AEIRRFIKA

SEQ ID NO: 104668 - protein, 9 aa, Homo Sapiens
AEISAMLKA

SEQ ID NO: 104669 - protein, 9 aa, Homo Sapiens
AEITNIRPS

SEQ ID NO: 104670 - protein, 9 aa, Homo Sapiens
AEIYEQHVT

SEQ ID NO: 104671 - protein, 9 aa, Homo Sapiens
AEKCFGTGA

SEQ ID NO: 104672 - protein, 9 aa, Homo Sapiens
AEKEPVPVP

SEQ ID NO: 104673 - protein, 9 aa, Homo Sapiens
AEKLEALSV

SEQ ID NO: 104674 - protein, 9 aa, Homo Sapiens
AEKPLQVAA

SEQ ID NO: 104675 - protein, 9 aa, Homo Sapiens
AEKSITQVA

SEQ ID NO: 104676 - protein, 9 aa, Homo Sapiens
AEKVEEIVA

SEQ ID NO: 104677 - protein, 9 aa, Homo Sapiens
AEKYEWDVA

SEQ ID NO: 104678 - protein, 9 aa, Homo Sapiens
AEKYQTVIA

SEQ ID NO: 104679 - protein, 9 aa, Homo Sapiens
AELATRAIP

SEQ ID NO: 104680 - protein, 9 aa, Homo Sapiens
AELDKLTSV

SEQ ID NO: 104681 - protein, 9 aa, Homo Sapiens
AELDQLLAV

SEQ ID NO: 104682 - protein, 9 aa, Homo Sapiens
AELEKAHLA

SEQ ID NO: 104683 - protein, 9 aa, Homo Sapiens
AELEKHMAA

SEQ ID NO: 104684 - protein, 9 aa, Homo Sapiens
AELETDIRA

SEQ ID NO: 104685 - protein, 9 aa, Homo Sapiens
AELGALHSA

SEQ ID NO: 104686 - protein, 9 aa, Homo Sapiens
AELGKLYSV

SEQ ID NO: 104687 - protein, 9 aa, Homo Sapiens
AELGLTRAA

SEQ ID NO: 104688 - protein, 9 aa, Homo Sapiens
AELGMEHQA

SEQ ID NO: 104689 - protein, 9 aa, Homo Sapiens
AELIHQIEA

SEQ ID NO: 104690 - protein, 9 aa, Homo Sapiens
AELLLIPKV

SEQ ID NO: 104691 - protein, 9 aa, Homo Sapiens
AELLPLVSA

SEQ ID NO: 104692 - protein, 9 aa, Homo Sapiens
AELLQKIEV

SEQ ID NO: 104693 - protein, 9 aa, Homo Sapiens
AELLRGFVA

SEQ ID NO: 104694 - protein, 9 aa, Homo Sapiens
AELLVKHGA

SEQ ID NO: 104695 - protein, 9 aa, Homo Sapiens
AELLVRHGA

SEQ ID NO: 104696 - protein, 9 aa, Homo Sapiens
AELLVSHGA

SEQ ID NO: 104697 - protein, 9 aa, Homo Sapiens
AELMGLKQV

SEQ ID NO: 104698 - protein, 9 aa, Homo Sapiens
AELPWAVKP

SEQ ID NO: 104699 - protein, 9 aa, Homo Sapiens
AELQARIQA

SEQ ID NO: 104700 - protein, 9 aa, Homo Sapiens
AELQEQLKA

SEQ ID NO: 104701 - protein, 9 aa, Homo Sapiens
AELQEQLRA

SEQ ID NO: 104702 - protein, 9 aa, Homo Sapiens
AELQKQWEV

SEQ ID NO: 104703 - protein, 9 aa, Homo Sapiens
AELQQHDVA

SEQ ID NO: 104704 - protein, 9 aa, Homo Sapiens
AELQRLVAA

SEQ ID NO: 104705 - protein, 9 aa, Homo Sapiens
AELSELHSA

SEQ ID NO: 104706 - protein, 9 aa, Homo Sapiens
AELSQPLTA

SEQ ID NO: 104707 - protein, 9 aa, Homo Sapiens
AELTCLNEA

SEQ ID NO: 104708 - protein, 9 aa, Homo Sapiens
AELVRLREA

SEQ ID NO: 104709 - protein, 9 aa, Homo Sapiens
AELWKNPTA

SEQ ID NO: 104710 - protein, 9 aa, Homo Sapiens
AELYFHDSA

SEQ ID NO: 104711 - protein, 9 aa, Homo Sapiens
AELYHIISS

SEQ ID NO: 104712 - protein, 9 aa, Homo Sapiens
AEMDGFKPN

SEQ ID NO: 104713 - protein, 9 aa, Homo Sapiens
AEMKAQEVA

SEQ ID NO: 104714 - protein, 9 aa, Homo Sapiens
AEMLEIVQA

SEQ ID NO: 104715 - protein, 9 aa, Homo Sapiens
AEMPDSAAA

SEQ ID NO: 104716 - protein, 9 aa, Homo Sapiens
AEMPQNYRP

SEQ ID NO: 104717 - protein, 9 aa, Homo Sapiens
AEMRLFYTT

SEQ ID NO: 104718 - protein, 9 aa, Homo Sapiens
AEMTTRMVA

SEQ ID NO: 104719 - protein, 9 aa, Homo Sapiens
AENPKLISA

SEQ ID NO: 104720 - protein, 9 aa, Homo Sapiens
AENQGFVAA

SEQ ID NO: 104721 - protein, 9 aa, Homo Sapiens
AENQRITAV

SEQ ID NO: 104722 - protein, 9 aa, Homo Sapiens
AENTIQNEA

SEQ ID NO: 104723 - protein, 9 aa, Homo Sapiens
AENVAVPEA

SEQ ID NO: 104724 - protein, 9 aa, Homo Sapiens
AENVTFWKA

SEQ ID NO: 104725 - protein, 9 aa, Homo Sapiens
AENYDIPSA

SEQ ID NO: 104726 - protein, 9 aa, Homo Sapiens
AENYLGHTA

SEQ ID NO: 104727 - protein, 9 aa, Homo Sapiens
AEPPPIKSA

SEQ ID NO: 104728 - protein, 9 aa, Homo Sapiens
AEQIVPLSA

SEQ ID NO: 104729 - protein, 9 aa, Homo Sapiens
AEQPYFIEA

SEQ ID NO: 104730 - protein, 9 aa, Homo Sapiens
AEQVVARVA

SEQ ID NO: 104731 - protein, 9 aa, Homo Sapiens
AERDFIHTA

SEQ ID NO: 104732 - protein, 9 aa, Homo Sapiens
AEREKEFVA

SEQ ID NO: 104733 - protein, 9 aa, Homo Sapiens
AERESAEVV

SEQ ID NO: 104734 - protein, 9 aa, Homo Sapiens
AERPGEAAV

SEQ ID NO: 104735 - protein, 9 aa, Homo Sapiens
AERPPSKPP

SEQ ID NO: 104736 - protein, 9 aa, Homo Sapiens
AERYDDMAA

SEQ ID NO: 104737 - protein, 9 aa, Homo Sapiens
AESKVSVAV

SEQ ID NO: 104738 - protein, 9 aa, Homo Sapiens
AESLGQYAA

SEQ ID NO: 104739 - protein, 9 aa, Homo Sapiens
AESLQPVAA

SEQ ID NO: 104740 - protein, 9 aa, Homo Sapiens
AESPGFSQA

SEQ ID NO: 104741 - protein, 9 aa, Homo Sapiens
AESPGVPVA

SEQ ID NO: 104742 - protein, 9 aa, Homo Sapiens
AESTVIAKV

SEQ ID NO: 104743 - protein, 9 aa, Homo Sapiens
AESVGIKST

SEQ ID NO: 104744 - protein, 9 aa, Homo Sapiens
AESVVKLTA

SEQ ID NO: 104745 - protein, 9 aa, Homo Sapiens
AETAVSVIP

SEQ ID NO: 104746 - protein, 9 aa, Homo Sapiens
AETDKIVVG

SEQ ID NO: 104747 - protein, 9 aa, Homo Sapiens
AETEFFSKA

SEQ ID NO: 104748 - protein, 9 aa, Homo Sapiens
AETELQRAA

SEQ ID NO: 104749 - protein, 9 aa, Homo Sapiens
AETILLKAV

SEQ ID NO: 104750 - protein, 9 aa, Homo Sapiens
AETKDIPAA

SEQ ID NO: 104751 - protein, 9 aa, Homo Sapiens
AETKDLLVA

SEQ ID NO: 104752 - protein, 9 aa, Homo Sapiens
AETLALLKA

SEQ ID NO: 104753 - protein, 9 aa, Homo Sapiens
AETPGVPSP

SEQ ID NO: 104754 - protein, 9 aa, Homo Sapiens
AETQNIAPS

SEQ ID NO: 104755 - protein, 9 aa, Homo Sapiens
AETQQPPAA

SEQ ID NO: 104756 - protein, 9 aa, Homo Sapiens
AETRFCHVV

SEQ ID NO: 104757 - protein, 9 aa, Homo Sapiens
AETRVFLEV

SEQ ID NO: 104758 - protein, 9 aa, Homo Sapiens
AETTKLSKP

SEQ ID NO: 104759 - protein, 9 aa, Homo Sapiens
AETYYQTAP

SEQ ID NO: 104760 - protein, 9 aa, Homo Sapiens
AEVAGILEP

SEQ ID NO: 104761 - protein, 9 aa, Homo Sapiens
AEVAGQFVI

SEQ ID NO: 104762 - protein, 9 aa, Homo Sapiens
AEVAPMLKA

SEQ ID NO: 104763 - protein, 9 aa, Homo Sapiens
AEVAPVISS

SEQ ID NO: 104764 - protein, 9 aa, Homo Sapiens
AEVDAAMAA

SEQ ID NO: 104765 - protein, 9 aa, Homo Sapiens
AEVDKLRAA

SEQ ID NO: 104766 - protein, 9 aa, Homo Sapiens
AEVEGRLPA

SEQ ID NO: 104767 - protein, 9 aa, Homo Sapiens
AEVEHVVNA

SEQ ID NO: 104768 - protein, 9 aa, Homo Sapiens
AEVEIQVKP

SEQ ID NO: 104769 - protein, 9 aa, Homo Sapiens
AEVEKIIAV

SEQ ID NO: 104770 - protein, 9 aa, Homo Sapiens
AEVELKKGA

SEQ ID NO: 104771 - protein, 9 aa, Homo Sapiens
AEVEPTPEA

SEQ ID NO: 104772 - protein, 9 aa, Homo Sapiens
AEVETRIEA

SEQ ID NO: 104773 - protein, 9 aa, Homo Sapiens
AEVGKWLQA

SEQ ID NO: 104774 - protein, 9 aa, Homo Sapiens
AEVHRLVVV

SEQ ID NO: 104775 - protein, 9 aa, Homo Sapiens
AEVIQAFSA

SEQ ID NO: 104776 - protein, 9 aa, Homo Sapiens
AEVIVDWRP

SEQ ID NO: 104777 - protein, 9 aa, Homo Sapiens
AEVKPILQA

SEQ ID NO: 104778 - protein, 9 aa, Homo Sapiens
AEVKQELAA

SEQ ID NO: 104779 - protein, 9 aa, Homo Sapiens
AEVKVEAIP

SEQ ID NO: 104780 - protein, 9 aa, Homo Sapiens
AEVLITTRT

SEQ ID NO: 104781 - protein, 9 aa, Homo Sapiens
AEVNGLKAS

SEQ ID NO: 104782 - protein, 9 aa, Homo Sapiens
AEVPNLWSV

SEQ ID NO: 104783 - protein, 9 aa, Homo Sapiens
AEVQGMQEA

SEQ ID NO: 104784 - protein, 9 aa, Homo Sapiens
AEVQVQAPP

SEQ ID NO: 104785 - protein, 9 aa, Homo Sapiens
AEVRVIAPP

SEQ ID NO: 104786 - protein, 9 aa, Homo Sapiens
AEVSPMYGV

SEQ ID NO: 104787 - protein, 9 aa, Homo Sapiens
AEVSTLKDT

SEQ ID NO: 104788 - protein, 9 aa, Homo Sapiens
AEVVKLGAA

SEQ ID NO: 104789 - protein, 9 aa, Homo Sapiens
AEVYRILSV

SEQ ID NO: 104790 - protein, 9 aa, Homo Sapiens
AEWDMVNTV

SEQ ID NO: 104791 - protein, 9 aa, Homo Sapiens
AEWKLCRSA

SEQ ID NO: 104792 - protein, 9 aa, Homo Sapiens
AEWLGVLKA

SEQ ID NO: 104793 - protein, 9 aa, Homo Sapiens
AEWREALRA

SEQ ID NO: 104794 - protein, 9 aa, Homo Sapiens
AEWVSLSKA

SEQ ID NO: 104795 - protein, 9 aa, Homo Sapiens
AEYAGLKVA

SEQ ID NO: 104796 - protein, 9 aa, Homo Sapiens
AEYAHPLET

SEQ ID NO: 104797 - protein, 9 aa, Homo Sapiens
AEYAYVLRV

SEQ ID NO: 104798 - protein, 9 aa, Homo Sapiens
AEYGEIKNI

SEQ ID NO: 104799 - protein, 9 aa, Homo Sapiens
AEYGHFVDI

SEQ ID NO: 104800 - protein, 9 aa, Homo Sapiens
AEYHQSILA

SEQ ID NO: 104801 - protein, 9 aa, Homo Sapiens
AEYINEAAA

SEQ ID NO: 104802 - protein, 9 aa, Homo Sapiens
AEYKNWVKA

SEQ ID NO: 104803 - protein, 9 aa, Homo Sapiens
AEYLQPKAA

SEQ ID NO: 104804 - protein, 9 aa, Homo Sapiens
AEYLYFFRV

SEQ ID NO: 104805 - protein, 9 aa, Homo Sapiens
AEYMAPEVV

SEQ ID NO: 104806 - protein, 9 aa, Homo Sapiens
AEYNGRLAA

SEQ ID NO: 104807 - protein, 9 aa, Homo Sapiens
AEYNSIKGT

SEQ ID NO: 104808 - protein, 9 aa, Homo Sapiens
AEYQAFREA

SEQ ID NO: 104809 - protein, 9 aa, Homo Sapiens
AEYQALVKA

SEQ ID NO: 104810 - protein, 9 aa, Homo Sapiens
AEYRHPTVP

SEQ ID NO: 104811 - protein, 9 aa, Homo Sapiens
AEYSYVKST

SEQ ID NO: 104812 - protein, 9 aa, Homo Sapiens
AEYVGHLRA

SEQ ID NO: 104813 - protein, 9 aa, Homo Sapiens
ASDFLSPEA

SEQ ID NO: 104814 - protein, 9 aa, Homo Sapiens
DAAPPSAPP

SEQ ID NO: 104815 - protein, 9 aa, Homo Sapiens
DEFEFLEKA

SEQ ID NO: 104816 - protein, 9 aa, Homo Sapiens
DEFHPFIEA

SEQ ID NO: 104817 - protein, 9 aa, Homo Sapiens
EEFDAITKA

SEQ ID NO: 104818 - protein, 9 aa, Homo Sapiens
EEFDHLPPP

SEQ ID NO: 104819 - protein, 9 aa, Homo Sapiens
EEFEKVMVA

SEQ ID NO: 104820 - protein, 9 aa, Homo Sapiens
EEFERIHQA

SEQ ID NO: 104821 - protein, 9 aa, Homo Sapiens
EEFKKIRSA

SEQ ID NO: 104822 - protein, 9 aa, Homo Sapiens
EEFPAFPRA

SEQ ID NO: 104823 - protein, 9 aa, Homo Sapiens
EEFQFIKKA

SEQ ID NO: 104824 - protein, 9 aa, Homo Sapiens
EEFQKILKA

SEQ ID NO: 104825 - protein, 9 aa, Homo Sapiens
EEFSFIPSA

SEQ ID NO: 104826 - protein, 9 aa, Homo Sapiens
EEFVFIHAV

SEQ ID NO: 104827 - protein, 9 aa, Homo Sapiens
EEFVFIPAA

SEQ ID NO: 104828 - protein, 9 aa, Homo Sapiens
EEHEWFIPA

SEQ ID NO: 104829 - protein, 9 aa, Homo Sapiens
EEHNIVFMP

SEQ ID NO: 104830 - protein, 9 aa, Homo Sapiens
EEIQIKEPA

SEQ ID NO: 104831 - protein, 9 aa, Homo Sapiens
EEISGIVEV

SEQ ID NO: 104832 - protein, 9 aa, Homo Sapiens
EELRDIPQA

SEQ ID NO: 104833 - protein, 9 aa, Homo Sapiens
EEMPQVHTP

SEQ ID NO: 104834 - protein, 9 aa, Homo Sapiens
EEVQSLPLP

SEQ ID NO: 104835 - protein, 9 aa, Homo Sapiens
EEWHGHVTA

SEQ ID NO: 104836 - protein, 9 aa, Homo Sapiens
EEYEWKETA

SEQ ID NO: 104837 - protein, 9 aa, Homo Sapiens
EEYGKILEV

SEQ ID NO: 104838 - protein, 9 aa, Homo Sapiens
ETISALLQA

SEQ ID NO: 104839 - protein, 9 aa, Homo Sapiens
ETKKINPTA

SEQ ID NO: 104840 - protein, 9 aa, Homo Sapiens
FEAPNQEKV

SEQ ID NO: 104841 - protein, 9 aa, Homo Sapiens
FEARIALLP

SEQ ID NO: 104842 - protein, 9 aa, Homo Sapiens
FEFDTKTSA

SEQ ID NO: 104843 - protein, 9 aa, Homo Sapiens
FEFEYQTKV

SEQ ID NO: 104844 - protein, 9 aa, Homo Sapiens
FEFKDMRVP

SEQ ID NO: 104845 - protein, 9 aa, Homo Sapiens
FEFKKPVRP

SEQ ID NO: 104846 - protein, 9 aa, Homo Sapiens
FEFLTKELA

SEQ ID NO: 104847 - protein, 9 aa, Homo Sapiens
FEFMQVEKP

SEQ ID NO: 104848 - protein, 9 aa, Homo Sapiens
FEFPDYCTP

SEQ ID NO: 104849 - protein, 9 aa, Homo Sapiens
FEFTHVEKP

SEQ ID NO: 104850 - protein, 9 aa, Homo Sapiens
FEGAVIRTV

SEQ ID NO: 104851 - protein, 9 aa, Homo Sapiens
FEHAHNMRV

SEQ ID NO: 104852 - protein, 9 aa, Homo Sapiens
FEIKKPPVS

SEQ ID NO: 104853 - protein, 9 aa, Homo Sapiens
FEKALEEKP

SEQ ID NO: 104854 - protein, 9 aa, Homo Sapiens
FEKEPLPPP

SEQ ID NO: 104855 - protein, 9 aa, Homo Sapiens
FEKEWIECA

SEQ ID NO: 104856 - protein, 9 aa, Homo Sapiens
FEKIEEVSA

SEQ ID NO: 104857 - protein, 9 aa, Homo Sapiens
FEKNEAIQA

SEQ ID NO: 104858 - protein, 9 aa, Homo Sapiens
FEKPFLWLA

SEQ ID NO: 104859 - protein, 9 aa, Homo Sapiens
FEKSPPVSA

SEQ ID NO: 104860 - protein, 9 aa, Homo Sapiens
FENLGIQPP

SEQ ID NO: 104861 - protein, 9 aa, Homo Sapiens
FENQDIHSA

SEQ ID NO: 104862 - protein, 9 aa, Homo Sapiens
FEQEMATAA

SEQ ID NO: 104863 - protein, 9 aa, Homo Sapiens
FESGDVKAT

SEQ ID NO: 104864 - protein, 9 aa, Homo Sapiens
FESHPAPSA

SEQ ID NO: 104865 - protein, 9 aa, Homo Sapiens
FESPNISVP

SEQ ID NO: 104866 - protein, 9 aa, Homo Sapiens
FESSGIHVA

SEQ ID NO: 104867 - protein, 9 aa, Homo Sapiens
FETPIGWHA

SEQ ID NO: 104868 - protein, 9 aa, Homo Sapiens
FEVALPKTA

SEQ ID NO: 104869 - protein, 9 aa, Homo Sapiens
FEVKKWNAV

SEQ ID NO: 104870 - protein, 9 aa, Homo Sapiens
FEWENKVTV

SEQ ID NO: 104871 - protein, 9 aa, Homo Sapiens
FEYILSHVA

SEQ ID NO: 104872 - protein, 9 aa, Homo Sapiens
FEYVKVPLA

SEQ ID NO: 104873 - protein, 9 aa, Homo Sapiens
GDRLIVGTA

SEQ ID NO: 104874 - protein, 9 aa, Homo Sapiens
GDRPEPLSA

SEQ ID NO: 104875 - protein, 9 aa, Homo Sapiens
GDVLTPEQA

SEQ ID NO: 104876 - protein, 9 aa, Homo Sapiens
GEAEGLMKV

SEQ ID NO: 104877 - protein, 9 aa, Homo Sapiens
GEALGLKQA

SEQ ID NO: 104878 - protein, 9 aa, Homo Sapiens
GEAPKVPVT

SEQ ID NO: 104879 - protein, 9 aa, Homo Sapiens
GEAPPGTPP

SEQ ID NO: 104880 - protein, 9 aa, Homo Sapiens
GEARPGPTA

SEQ ID NO: 104881 - protein, 9 aa, Homo Sapiens
GECGHAFSA

SEQ ID NO: 104882 - protein, 9 aa, Homo Sapiens
GECGKAFRV

SEQ ID NO: 104883 - protein, 9 aa, Homo Sapiens
GECGKAVVP

SEQ ID NO: 104884 - protein, 9 aa, Homo Sapiens
GEEGPQAVA

SEQ ID NO: 104885 - protein, 9 aa, Homo Sapiens
GEFAKLSKI

SEQ ID NO: 104886 - protein, 9 aa, Homo Sapiens
GEFEKKYVA

SEQ ID NO: 104887 - protein, 9 aa, Homo Sapiens
GEFGDINAV

SEQ ID NO: 104888 - protein, 9 aa, Homo Sapiens
GEFGGFGSV

SEQ ID NO: 104889 - protein, 9 aa, Homo Sapiens
GEFHKMREV

SEQ ID NO: 104890 - protein, 9 aa, Homo Sapiens
GEFHLWYQV

SEQ ID NO: 104891 - protein, 9 aa, Homo Sapiens
GEFKEQLQA

SEQ ID NO: 104892 - protein, 9 aa, Homo Sapiens
GEFKKYLEV

SEQ ID NO: 104893 - protein, 9 aa, Homo Sapiens
GEFKQPIPA

SEQ ID NO: 104894 - protein, 9 aa, Homo Sapiens
GEFLAFQTV

SEQ ID NO: 104895 - protein, 9 aa, Homo Sapiens
GEFLPIQPA

SEQ ID NO: 104896 - protein, 9 aa, Homo Sapiens
GEFLSQHKA

SEQ ID NO: 104897 - protein, 9 aa, Homo Sapiens
GEFPCQHSP

SEQ ID NO: 104898 - protein, 9 aa, Homo Sapiens
GEFPDLHRT

SEQ ID NO: 104899 - protein, 9 aa, Homo Sapiens
GEFPQAIKA

SEQ ID NO: 104900 - protein, 9 aa, Homo Sapiens
GEFPVRVQV

SEQ ID NO: 104901 - protein, 9 aa, Homo Sapiens
GEFQEVVRA

SEQ ID NO: 104902 - protein, 9 aa, Homo Sapiens
GEFQLIRQT

SEQ ID NO: 104903 - protein, 9 aa, Homo Sapiens
GEFREPRPP

SEQ ID NO: 104904 - protein, 9 aa, Homo Sapiens
GEFSDTNAA

SEQ ID NO: 104905 - protein, 9 aa, Homo Sapiens
GEFSITYKP

SEQ ID NO: 104906 - protein, 9 aa, Homo Sapiens
GEFTHEMQV

SEQ ID NO: 104907 - protein, 9 aa, Homo Sapiens
GEFTSARAV

SEQ ID NO: 104908 - protein, 9 aa, Homo Sapiens
GEFVDLYVP

SEQ ID NO: 104909 - protein, 9 aa, Homo Sapiens
GEGKFPSAA

SEQ ID NO: 104910 - protein, 9 aa, Homo Sapiens
GEGTFGRVV

SEQ ID NO: 104911 - protein, 9 aa, Homo Sapiens
GEHGLIIRV

SEQ ID NO: 104912 - protein, 9 aa, Homo Sapiens
GEHLNAVQA

SEQ ID NO: 104913 - protein, 9 aa, Homo Sapiens
GEHRLVTVT

SEQ ID NO: 104914 - protein, 9 aa, Homo Sapiens
GEHTIRNYP

SEQ ID NO: 104915 - protein, 9 aa, Homo Sapiens
GEHTLLVTV

SEQ ID NO: 104916 - protein, 9 aa, Homo Sapiens
GEIASFDKA

SEQ ID NO: 104917 - protein, 9 aa, Homo Sapiens
GEIDASLKA

SEQ ID NO: 104918 - protein, 9 aa, Homo Sapiens
GEIENIELP

SEQ ID NO: 104919 - protein, 9 aa, Homo Sapiens
GEIGLLPKA

SEQ ID NO: 104920 - protein, 9 aa, Homo Sapiens
GEIIPHIPA

SEQ ID NO: 104921 - protein, 9 aa, Homo Sapiens
GEILKKIIP

SEQ ID NO: 104922 - protein, 9 aa, Homo Sapiens
GEINPVKVA

SEQ ID NO: 104923 - protein, 9 aa, Homo Sapiens
GEINVIGEP

SEQ ID NO: 104924 - protein, 9 aa, Homo Sapiens
GEINVVVKV

SEQ ID NO: 104925 - protein, 9 aa, Homo Sapiens
GEIPKVLVA

SEQ ID NO: 104926 - protein, 9 aa, Homo Sapiens
GEIQEIVKT

SEQ ID NO: 104927 - protein, 9 aa, Homo Sapiens
GEIQHMSQA

SEQ ID NO: 104928 - protein, 9 aa, Homo Sapiens
GEIQRLKSA

SEQ ID NO: 104929 - protein, 9 aa, Homo Sapiens
GEIRGFETA

SEQ ID NO: 104930 - protein, 9 aa, Homo Sapiens
GEIRTITVV

SEQ ID NO: 104931 - protein, 9 aa, Homo Sapiens
GEISRMREV

SEQ ID NO: 104932 - protein, 9 aa, Homo Sapiens
GEISTIDKV

SEQ ID NO: 104933 - protein, 9 aa, Homo Sapiens
GEIVALKKV

SEQ ID NO: 104934 - protein, 9 aa, Homo Sapiens
GEIVRLTTP

SEQ ID NO: 104935 - protein, 9 aa, Homo Sapiens
GEKALLVSA

SEQ ID NO: 104936 - protein, 9 aa, Homo Sapiens
GEKFHSEVA

SEQ ID NO: 104937 - protein, 9 aa, Homo Sapiens
GEKGTWVQP

SEQ ID NO: 104938 - protein, 9 aa, Homo Sapiens
GEKKLFCIP

SEQ ID NO: 104939 - protein, 9 aa, Homo Sapiens
GEKPPPPPA

SEQ ID NO: 104940 - protein, 9 aa, Homo Sapiens
GEKRFADAA

SEQ ID NO: 104941 - protein, 9 aa, Homo Sapiens
GEKVLVKAA

SEQ ID NO: 104942 - protein, 9 aa, Homo Sapiens
GELERALSA

SEQ ID NO: 104943 - protein, 9 aa, Homo Sapiens
GELKEQYST

SEQ ID NO: 104944 - protein, 9 aa, Homo Sapiens
GELKSVPTT

SEQ ID NO: 104945 - protein, 9 aa, Homo Sapiens
GELKVVNGA

SEQ ID NO: 104946 - protein, 9 aa, Homo Sapiens
GELLFVHSA

SEQ ID NO: 104947 - protein, 9 aa, Homo Sapiens
GELLIKPCA

SEQ ID NO: 104948 - protein, 9 aa, Homo Sapiens
GELPRQPTT

SEQ ID NO: 104949 - protein, 9 aa, Homo Sapiens
GELREQLKA

SEQ ID NO: 104950 - protein, 9 aa, Homo Sapiens
GELRISVLP

SEQ ID NO: 104951 - protein, 9 aa, Homo Sapiens
GELSKVTKV

SEQ ID NO: 104952 - protein, 9 aa, Homo Sapiens
GEMEPPALP

SEQ ID NO: 104953 - protein, 9 aa, Homo Sapiens
GEMKEIERP

SEQ ID NO: 104954 - protein, 9 aa, Homo Sapiens
GEMKGSAIT

SEQ ID NO: 104955 - protein, 9 aa, Homo Sapiens
GEMPRHFAA

SEQ ID NO: 104956 - protein, 9 aa, Homo Sapiens
GEMVALPPV

SEQ ID NO: 104957 - protein, 9 aa, Homo Sapiens
GEMVPSRQA

SEQ ID NO: 104958 - protein, 9 aa, Homo Sapiens
GEMWNNTAA

SEQ ID NO: 104959 - protein, 9 aa, Homo Sapiens
GENHGVRPP

SEQ ID NO: 104960 - protein, 9 aa, Homo Sapiens
GENLLTHLP

SEQ ID NO: 104961 - protein, 9 aa, Homo Sapiens
GENPHPITP

SEQ ID NO: 104962 - protein, 9 aa, Homo Sapiens
GENPLQVLV

SEQ ID NO: 104963 - protein, 9 aa, Homo Sapiens
GENPYIRMT

SEQ ID NO: 104964 - protein, 9 aa, Homo Sapiens
GENTRIAQP

SEQ ID NO: 104965 - protein, 9 aa, Homo Sapiens
GENTRSVIP

SEQ ID NO: 104966 - protein, 9 aa, Homo Sapiens
GEPDPPPAA

SEQ ID NO: 104967 - protein, 9 aa, Homo Sapiens
GEPGTRVVA

SEQ ID NO: 104968 - protein, 9 aa, Homo Sapiens
GEQEPPPPP

SEQ ID NO: 104969 - protein, 9 aa, Homo Sapiens
GEQSRVPSA

SEQ ID NO: 104970 - protein, 9 aa, Homo Sapiens
GEQTLHYIA

SEQ ID NO: 104971 - protein, 9 aa, Homo Sapiens
GERDFGVKA

SEQ ID NO: 104972 - protein, 9 aa, Homo Sapiens
GERDFQTSA

SEQ ID NO: 104973 - protein, 9 aa, Homo Sapiens
GERLIGDAA

SEQ ID NO: 104974 - protein, 9 aa, Homo Sapiens
GERPELCRV

SEQ ID NO: 104975 - protein, 9 aa, Homo Sapiens
GERSGLKPP

SEQ ID NO: 104976 - protein, 9 aa, Homo Sapiens
GERVIVEHA

SEQ ID NO: 104977 - protein, 9 aa, Homo Sapiens
GESNRLLSA

SEQ ID NO: 104978 - protein, 9 aa, Homo Sapiens
GESPTHFKA

SEQ ID NO: 104979 - protein, 9 aa, Homo Sapiens
GESVLVHGA

SEQ ID NO: 104980 - protein, 9 aa, Homo Sapiens
GETDLIQKA

SEQ ID NO: 104981 - protein, 9 aa, Homo Sapiens
GETEILRKA

SEQ ID NO: 104982 - protein, 9 aa, Homo Sapiens
GETEVLKVI

SEQ ID NO: 104983 - protein, 9 aa, Homo Sapiens
GETFKFKEA

SEQ ID NO: 104984 - protein, 9 aa, Homo Sapiens
GETGRIILP

SEQ ID NO: 104985 - protein, 9 aa, Homo Sapiens
GETIFVERP

SEQ ID NO: 104986 - protein, 9 aa, Homo Sapiens
GETIFVTAP

SEQ ID NO: 104987 - protein, 9 aa, Homo Sapiens
GETLLQRAA

SEQ ID NO: 104988 - protein, 9 aa, Homo Sapiens
GETPKHFAV

SEQ ID NO: 104989 - protein, 9 aa, Homo Sapiens
GETPLIKAT

SEQ ID NO: 104990 - protein, 9 aa, Homo Sapiens
GETRQWQTA

SEQ ID NO: 104991 - protein, 9 aa, Homo Sapiens
GETSVRFTA

SEQ ID NO: 104992 - protein, 9 aa, Homo Sapiens
GETVFHYAV

SEQ ID NO: 104993 - protein, 9 aa, Homo Sapiens
GETVPAPSA

SEQ ID NO: 104994 - protein, 9 aa, Homo Sapiens
GEVAILNST

SEQ ID NO: 104995 - protein, 9 aa, Homo Sapiens
GEVGKKFSA

SEQ ID NO: 104996 - protein, 9 aa, Homo Sapiens
GEVGKLRIA

SEQ ID NO: 104997 - protein, 9 aa, Homo Sapiens
GEVGRQPEP

SEQ ID NO: 104998 - protein, 9 aa, Homo Sapiens
GEVPKIERA

SEQ ID NO: 104999 - protein, 9 aa, Homo Sapiens
GEVPTAVAP

SEQ ID NO: 105000 - protein, 9 aa, Homo Sapiens
GEVSKIVAS

SEQ ID NO: 105001 - protein, 9 aa, Homo Sapiens
GEVTNVTTA

SEQ ID NO: 105002 - protein, 9 aa, Homo Sapiens
GEWDKALSI

SEQ ID NO: 105003 - protein, 9 aa, Homo Sapiens
GEWDLAQKA

SEQ ID NO: 105004 - protein, 9 aa, Homo Sapiens
GEWERAAAV

SEQ ID NO: 105005 - protein, 9 aa, Homo Sapiens
GEWFGPNTV

SEQ ID NO: 105006 - protein, 9 aa, Homo Sapiens
GEWKGPQVS

SEQ ID NO: 105007 - protein, 9 aa, Homo Sapiens
GEWPDQPRI

SEQ ID NO: 105008 - protein, 9 aa, Homo Sapiens
GEWPTQLDV

SEQ ID NO: 105009 - protein, 9 aa, Homo Sapiens
GEWSDQPRI

SEQ ID NO: 105010 - protein, 9 aa, Homo Sapiens
GEYAKLEKI

SEQ ID NO: 105011 - protein, 9 aa, Homo Sapiens
GEYEWVHKP

SEQ ID NO: 105012 - protein, 9 aa, Homo Sapiens
GEYGGWYKA

SEQ ID NO: 105013 - protein, 9 aa, Homo Sapiens
GEYGKFFVT

SEQ ID NO: 105014 - protein, 9 aa, Homo Sapiens
GEYGNLVTI

SEQ ID NO: 105015 - protein, 9 aa, Homo Sapiens
GEYIKTWRP

SEQ ID NO: 105016 - protein, 9 aa, Homo Sapiens
GEYINQIAA

SEQ ID NO: 105017 - protein, 9 aa, Homo Sapiens
GEYKMILVV

SEQ ID NO: 105018 - protein, 9 aa, Homo Sapiens
GEYLEKIIP

SEQ ID NO: 105019 - protein, 9 aa, Homo Sapiens
GEYLPSKGA

SEQ ID NO: 105020 - protein, 9 aa, Homo Sapiens
GEYQGIPRA

SEQ ID NO: 105021 - protein, 9 aa, Homo Sapiens
GEYSKVLAI

SEQ ID NO: 105022 - protein, 9 aa, Homo Sapiens
HDITVPLEV

SEQ ID NO: 105023 - protein, 9 aa, Homo Sapiens
HDVLLPEEA

SEQ ID NO: 105024 - protein, 9 aa, Homo Sapiens
HEAAFPIAV

SEQ ID NO: 105025 - protein, 9 aa, Homo Sapiens
HEACLSISA

SEQ ID NO: 105026 - protein, 9 aa, Homo Sapiens
HEAPSLQEA

SEQ ID NO: 105027 - protein, 9 aa, Homo Sapiens
HEATAMMKA

SEQ ID NO: 105028 - protein, 9 aa, Homo Sapiens
HEAWLIHKT

SEQ ID NO: 105029 - protein, 9 aa, Homo Sapiens
HECFVSPVA

SEQ ID NO: 105030 - protein, 9 aa, Homo Sapiens
HEEAIHAVA

SEQ ID NO: 105031 - protein, 9 aa, Homo Sapiens
HEFDEQVAA

SEQ ID NO: 105032 - protein, 9 aa, Homo Sapiens
HEFGAITFV

SEQ ID NO: 105033 - protein, 9 aa, Homo Sapiens
HEFLHEVPA

SEQ ID NO: 105034 - protein, 9 aa, Homo Sapiens
HEFPMNFNP

SEQ ID NO: 105035 - protein, 9 aa, Homo Sapiens
HEFRDKLAA

SEQ ID NO: 105036 - protein, 9 aa, Homo Sapiens
HEHHTTIVA

SEQ ID NO: 105037 - protein, 9 aa, Homo Sapiens
HEHIEILTV

SEQ ID NO: 105038 - protein, 9 aa, Homo Sapiens
HEHYLVHKP

SEQ ID NO: 105039 - protein, 9 aa, Homo Sapiens
HEIDYILLV

SEQ ID NO: 105040 - protein, 9 aa, Homo Sapiens
HEIEVETIP

SEQ ID NO: 105041 - protein, 9 aa, Homo Sapiens
HEIGHGIAA

SEQ ID NO: 105042 - protein, 9 aa, Homo Sapiens
HEISEGNVA

SEQ ID NO: 105043 - protein, 9 aa, Homo Sapiens
HEKDVIGIA

SEQ ID NO: 105044 - protein, 9 aa, Homo Sapiens
HEKQVYDIA

SEQ ID NO: 105045 - protein, 9 aa, Homo Sapiens
HELDMQVAA

SEQ ID NO: 105046 - protein, 9 aa, Homo Sapiens
HELHFVEKA

SEQ ID NO: 105047 - protein, 9 aa, Homo Sapiens
HELITTERA

SEQ ID NO: 105048 - protein, 9 aa, Homo Sapiens
HELLAIREA

SEQ ID NO: 105049 - protein, 9 aa, Homo Sapiens
HELLKTNAA

SEQ ID NO: 105050 - protein, 9 aa, Homo Sapiens
HELPRIHKA

SEQ ID NO: 105051 - protein, 9 aa, Homo Sapiens
HELRVLTAP

SEQ ID NO: 105052 - protein, 9 aa, Homo Sapiens
HELVNIYCP

SEQ ID NO: 105053 - protein, 9 aa, Homo Sapiens
HEMDRQVAA

SEQ ID NO: 105054 - protein, 9 aa, Homo Sapiens
HEMQIQHPT

SEQ ID NO: 105055 - protein, 9 aa, Homo Sapiens
HEMVVYEAA

SEQ ID NO: 105056 - protein, 9 aa, Homo Sapiens
HENESVYKA

SEQ ID NO: 105057 - protein, 9 aa, Homo Sapiens
HENPDIIIA

SEQ ID NO: 105058 - protein, 9 aa, Homo Sapiens
HENPEWEKA

SEQ ID NO: 105059 - protein, 9 aa, Homo Sapiens
HEQFIPIAA

SEQ ID NO: 105060 - protein, 9 aa, Homo Sapiens
HEQQFAHPP

SEQ ID NO: 105061 - protein, 9 aa, Homo Sapiens
HESAAHAIV

SEQ ID NO: 105062 - protein, 9 aa, Homo Sapiens
HESGHAIIA

SEQ ID NO: 105063 - protein, 9 aa, Homo Sapiens
HESRQITQV

SEQ ID NO: 105064 - protein, 9 aa, Homo Sapiens
HEVDKLYKV

SEQ ID NO: 105065 - protein, 9 aa, Homo Sapiens
HEVDTQYSA

SEQ ID NO: 105066 - protein, 9 aa, Homo Sapiens
HEVGALVRA

SEQ ID NO: 105067 - protein, 9 aa, Homo Sapiens
HEVIVSFTP

SEQ ID NO: 105068 - protein, 9 aa, Homo Sapiens
HEVQMDHRP

SEQ ID NO: 105069 - protein, 9 aa, Homo Sapiens
HEVRIKIIA

SEQ ID NO: 105070 - protein, 9 aa, Homo Sapiens
HEVVAHWIA

SEQ ID NO: 105071 - protein, 9 aa, Homo Sapiens
HEVVGVFTV

SEQ ID NO: 105072 - protein, 9 aa, Homo Sapiens
HEYFALQHA

SEQ ID NO: 105073 - protein, 9 aa, Homo Sapiens
HEYNSQPSV

SEQ ID NO: 105074 - protein, 9 aa, Homo Sapiens
HEYPWILSA

SEQ ID NO: 105075 - protein, 9 aa, Homo Sapiens
HEYVPWVTV

SEQ ID NO: 105076 - protein, 9 aa, Homo Sapiens
IEFSRIREA

SEQ ID NO: 105077 - protein, 9 aa, Homo Sapiens
IEGDMIVCA

SEQ ID NO: 105078 - protein, 9 aa, Homo Sapiens
IEHDVVMKA

SEQ ID NO: 105079 - protein, 9 aa, Homo Sapiens
IEHFIHIIT

SEQ ID NO: 105080 - protein, 9 aa, Homo Sapiens
IEKFEKEAA

SEQ ID NO: 105081 - protein, 9 aa, Homo Sapiens
IEKPVDPPP

SEQ ID NO: 105082 - protein, 9 aa, Homo Sapiens
IEKQIVLPP

SEQ ID NO: 105083 - protein, 9 aa, Homo Sapiens
IELDMRTIA

SEQ ID NO: 105084 - protein, 9 aa, Homo Sapiens
IELPNIQKV

SEQ ID NO: 105085 - protein, 9 aa, Homo Sapiens
IELPSMAVA

SEQ ID NO: 105086 - protein, 9 aa, Homo Sapiens
IELRGAAAA

SEQ ID NO: 105087 - protein, 9 aa, Homo Sapiens
IEMHLPYTA

SEQ ID NO: 105088 - protein, 9 aa, Homo Sapiens
IENIQRVAA

SEQ ID NO: 105089 - protein, 9 aa, Homo Sapiens
IEPVIKWTA

SEQ ID NO: 105090 - protein, 9 aa, Homo Sapiens
IEQETPVSA

SEQ ID NO: 105091 - protein, 9 aa, Homo Sapiens
IESRTLAIA

SEQ ID NO: 105092 - protein, 9 aa, Homo Sapiens
IETENIRLT

SEQ ID NO: 105093 - protein, 9 aa, Homo Sapiens
IEVGICNEA

SEQ ID NO: 105094 - protein, 9 aa, Homo Sapiens
IEVSLPEAA

SEQ ID NO: 105095 - protein, 9 aa, Homo Sapiens
IEWDKPPVP

SEQ ID NO: 105096 - protein, 9 aa, Homo Sapiens
IEWNLSPVG

SEQ ID NO: 105097 - protein, 9 aa, Homo Sapiens
IEYIHQETA

SEQ ID NO: 105098 - protein, 9 aa, Homo Sapiens
IEYPTLHVV

SEQ ID NO: 105099 - protein, 9 aa, Homo Sapiens
KDFAQTTSA

SEQ ID NO: 105100 - protein, 9 aa, Homo Sapiens
KDFEAIIQA

SEQ ID NO: 105101 - protein, 9 aa, Homo Sapiens
KDFGGDVAA

SEQ ID NO: 105102 - protein, 9 aa, Homo Sapiens
KDFIIFEAA

SEQ ID NO: 105103 - protein, 9 aa, Homo Sapiens
KDTTLPASA

SEQ ID NO: 105104 - protein, 9 aa, Homo Sapiens
KEADLPMTA

SEQ ID NO: 105105 - protein, 9 aa, Homo Sapiens
KEAEQILAT

SEQ ID NO: 105106 - protein, 9 aa, Homo Sapiens
KEAFAIVSV

SEQ ID NO: 105107 - protein, 9 aa, Homo Sapiens
KEAGFLMGA

SEQ ID NO: 105108 - protein, 9 aa, Homo Sapiens
KEAGVVAQA

SEQ ID NO: 105109 - protein, 9 aa, Homo Sapiens
KEALGIPAA

SEQ ID NO: 105110 - protein, 9 aa, Homo Sapiens
KEANVKLRA

SEQ ID NO: 105111 - protein, 9 aa, Homo Sapiens
KEAPAPPKA

SEQ ID NO: 105112 - protein, 9 aa, Homo Sapiens
KEAPAQPAP

SEQ ID NO: 105113 - protein, 9 aa, Homo Sapiens
KEAPPMEKP

SEQ ID NO: 105114 - protein, 9 aa, Homo Sapiens
KEASEVKPP

SEQ ID NO: 105115 - protein, 9 aa, Homo Sapiens
KECGKAFRV

SEQ ID NO: 105116 - protein, 9 aa, Homo Sapiens
KECGKAFTV

SEQ ID NO: 105117 - protein, 9 aa, Homo Sapiens
KEFAAIVDV

SEQ ID NO: 105118 - protein, 9 aa, Homo Sapiens
KEFCENLSA

SEQ ID NO: 105119 - protein, 9 aa, Homo Sapiens
KEFDSPETA

SEQ ID NO: 105120 - protein, 9 aa, Homo Sapiens
KEFEGKTLV

SEQ ID NO: 105121 - protein, 9 aa, Homo Sapiens
KEFEKEISA

SEQ ID NO: 105122 - protein, 9 aa, Homo Sapiens
KEFENPEVP

SEQ ID NO: 105123 - protein, 9 aa, Homo Sapiens
KEFEQLRKV

SEQ ID NO: 105124 - protein, 9 aa, Homo Sapiens
KEFETPEKA

SEQ ID NO: 105125 - protein, 9 aa, Homo Sapiens
KEFGAVSKV

SEQ ID NO: 105126 - protein, 9 aa, Homo Sapiens
KEFGDQAEA

SEQ ID NO: 105127 - protein, 9 aa, Homo Sapiens
KEFHKQITA

SEQ ID NO: 105128 - protein, 9 aa, Homo Sapiens
KEFIKIVEA

SEQ ID NO: 105129 - protein, 9 aa, Homo Sapiens
KEFKEHIAA

SEQ ID NO: 105130 - protein, 9 aa, Homo Sapiens
KEFLEFRKA

SEQ ID NO: 105131 - protein, 9 aa, Homo Sapiens
KEFLGHRIV

SEQ ID NO: 105132 - protein, 9 aa, Homo Sapiens
KEFLMENRV

SEQ ID NO: 105133 - protein, 9 aa, Homo Sapiens
KEFLNPVAT

SEQ ID NO: 105134 - protein, 9 aa, Homo Sapiens
KEFLVVASV

SEQ ID NO: 105135 - protein, 9 aa, Homo Sapiens
KEFNFPEEA

SEQ ID NO: 105136 - protein, 9 aa, Homo Sapiens
KEFPITEAV

SEQ ID NO: 105137 - protein, 9 aa, Homo Sapiens
KEFPNQTGA

SEQ ID NO: 105138 - protein, 9 aa, Homo Sapiens
KEFQDLREV

SEQ ID NO: 105139 - protein, 9 aa, Homo Sapiens
KEFQKIAMA

SEQ ID NO: 105140 - protein, 9 aa, Homo Sapiens
KEFQKSLGA

SEQ ID NO: 105141 - protein, 9 aa, Homo Sapiens
KEFQLFQGV

SEQ ID NO: 105142 - protein, 9 aa, Homo Sapiens
KEFSQSFDA

SEQ ID NO: 105143 - protein, 9 aa, Homo Sapiens
KEFSVQSSA

SEQ ID NO: 105144 - protein, 9 aa, Homo Sapiens
KEFTEAVEA

SEQ ID NO: 105145 - protein, 9 aa, Homo Sapiens
KEFTKLEEV

SEQ ID NO: 105146 - protein, 9 aa, Homo Sapiens
KEFVGGNTP

SEQ ID NO: 105147 - protein, 9 aa, Homo Sapiens
KEGAVVSAP

SEQ ID NO: 105148 - protein, 9 aa, Homo Sapiens
KEGILPERA

SEQ ID NO: 105149 - protein, 9 aa, Homo Sapiens
KEGLVMVEV

SEQ ID NO: 105150 - protein, 9 aa, Homo Sapiens
KEGMNIVEA

SEQ ID NO: 105151 - protein, 9 aa, Homo Sapiens
KEGNVQITA

SEQ ID NO: 105152 - protein, 9 aa, Homo Sapiens
KEGPVASPP

SEQ ID NO: 105153 - protein, 9 aa, Homo Sapiens
KEGVFAKEV

SEQ ID NO: 105154 - protein, 9 aa, Homo Sapiens
KEHEAITKV

SEQ ID NO: 105155 - protein, 9 aa, Homo Sapiens
KEHEVTIFV

SEQ ID NO: 105156 - protein, 9 aa, Homo Sapiens
KEHEYRLLA

SEQ ID NO: 105157 - protein, 9 aa, Homo Sapiens
KEHGVVPQA

SEQ ID NO: 105158 - protein, 9 aa, Homo Sapiens
KEHLYFETV

SEQ ID NO: 105159 - protein, 9 aa, Homo Sapiens
KEHQVVVVA

SEQ ID NO: 105160 - protein, 9 aa, Homo Sapiens
KEHVKWVHA

SEQ ID NO: 105161 - protein, 9 aa, Homo Sapiens
KEIDVDAVA

SEQ ID NO: 105162 - protein, 9 aa, Homo Sapiens
KEIDVISIP

SEQ ID NO: 105163 - protein, 9 aa, Homo Sapiens
KEIEELSEA

SEQ ID NO: 105164 - protein, 9 aa, Homo Sapiens
KEIEGIFHA

SEQ ID NO: 105165 - protein, 9 aa, Homo Sapiens
KEIEIDIEP

SEQ ID NO: 105166 - protein, 9 aa, Homo Sapiens
KEIEKVALP

SEQ ID NO: 105167 - protein, 9 aa, Homo Sapiens
KEIESIVKA

SEQ ID NO: 105168 - protein, 9 aa, Homo Sapiens
KEIEYVETV

SEQ ID NO: 105169 - protein, 9 aa, Homo Sapiens
KEIFLRELI

SEQ ID NO: 105170 - protein, 9 aa, Homo Sapiens
KEIFQTTVP

SEQ ID NO: 105171 - protein, 9 aa, Homo Sapiens
KEIGDIAGV

SEQ ID NO: 105172 - protein, 9 aa, Homo Sapiens
KEIGGLTQV

SEQ ID NO: 105173 - protein, 9 aa, Homo Sapiens
KEILQVITS

SEQ ID NO: 105174 - protein, 9 aa, Homo Sapiens
KEILTIREA

SEQ ID NO: 105175 - protein, 9 aa, Homo Sapiens
KEINKIVAA

SEQ ID NO: 105176 - protein, 9 aa, Homo Sapiens
KEIPHLVAV

SEQ ID NO: 105177 - protein, 9 aa, Homo Sapiens
KEIQAPASA

SEQ ID NO: 105178 - protein, 9 aa, Homo Sapiens
KEIQETWTV

SEQ ID NO: 105179 - protein, 9 aa, Homo Sapiens
KEIQYGIRA

SEQ ID NO: 105180 - protein, 9 aa, Homo Sapiens
KEIRFTEAV

SEQ ID NO: 105181 - protein, 9 aa, Homo Sapiens
KEISAQIRA

SEQ ID NO: 105182 - protein, 9 aa, Homo Sapiens
KEISFAYEV

SEQ ID NO: 105183 - protein, 9 aa, Homo Sapiens
KEISITHHV

SEQ ID NO: 105184 - protein, 9 aa, Homo Sapiens
KEISLWFKP

SEQ ID NO: 105185 - protein, 9 aa, Homo Sapiens
KEKEEFAVP

SEQ ID NO: 105186 - protein, 9 aa, Homo Sapiens
KEKEIQWET

SEQ ID NO: 105187 - protein, 9 aa, Homo Sapiens
KEKSIFLVA

SEQ ID NO: 105188 - protein, 9 aa, Homo Sapiens
KELDKVVTT

SEQ ID NO: 105189 - protein, 9 aa, Homo Sapiens
KELEDLLSP

SEQ ID NO: 105190 - protein, 9 aa, Homo Sapiens
KELEEIVQP

SEQ ID NO: 105191 - protein, 9 aa, Homo Sapiens
KELEKQLVA

SEQ ID NO: 105192 - protein, 9 aa, Homo Sapiens
KELEKTYSA

SEQ ID NO: 105193 - protein, 9 aa, Homo Sapiens
KELEKVCNP

SEQ ID NO: 105194 - protein, 9 aa, Homo Sapiens
KELELPFEV

SEQ ID NO: 105195 - protein, 9 aa, Homo Sapiens
KELELVTKA

SEQ ID NO: 105196 - protein, 9 aa, Homo Sapiens
KELERLKSV

SEQ ID NO: 105197 - protein, 9 aa, Homo Sapiens
KELETILET

SEQ ID NO: 105198 - protein, 9 aa, Homo Sapiens
KELEYIVSV

SEQ ID NO: 105199 - protein, 9 aa, Homo Sapiens
KELFILDEA

SEQ ID NO: 105200 - protein, 9 aa, Homo Sapiens
KELGSLTTA

SEQ ID NO: 105201 - protein, 9 aa, Homo Sapiens
KELHHIWQS

SEQ ID NO: 105202 - protein, 9 aa, Homo Sapiens
KELIFEETA

SEQ ID NO: 105203 - protein, 9 aa, Homo Sapiens
KELIFQETA

SEQ ID NO: 105204 - protein, 9 aa, Homo Sapiens
KELKIDIIP

SEQ ID NO: 105205 - protein, 9 aa, Homo Sapiens
KELLGPPEA

SEQ ID NO: 105206 - protein, 9 aa, Homo Sapiens
KELNEAVAA

SEQ ID NO: 105207 - protein, 9 aa, Homo Sapiens
KELPQLVAS

SEQ ID NO: 105208 - protein, 9 aa, Homo Sapiens
KELPSHVQA

SEQ ID NO: 105209 - protein, 9 aa, Homo Sapiens
KELSRIEEA

SEQ ID NO: 105210 - protein, 9 aa, Homo Sapiens
KELTDLHKA

SEQ ID NO: 105211 - protein, 9 aa, Homo Sapiens
KELTGLNEA

SEQ ID NO: 105212 - protein, 9 aa, Homo Sapiens
KELVIPDSA

SEQ ID NO: 105213 - protein, 9 aa, Homo Sapiens
KEMEKSFEV

SEQ ID NO: 105214 - protein, 9 aa, Homo Sapiens
KEMENFEAP

SEQ ID NO: 105215 - protein, 9 aa, Homo Sapiens
KEMEVSPSA

SEQ ID NO: 105216 - protein, 9 aa, Homo Sapiens
KEMFLDYRA

SEQ ID NO: 105217 - protein, 9 aa, Homo Sapiens
KEMFPIEAG

SEQ ID NO: 105218 - protein, 9 aa, Homo Sapiens
KEMGGHHIV

SEQ ID NO: 105219 - protein, 9 aa, Homo Sapiens
KEMIFRDMA

SEQ ID NO: 105220 - protein, 9 aa, Homo Sapiens
KEMPVKVEA

SEQ ID NO: 105221 - protein, 9 aa, Homo Sapiens
KEMTEVPRV

SEQ ID NO: 105222 - protein, 9 aa, Homo Sapiens
KENQISVRA

SEQ ID NO: 105223 - protein, 9 aa, Homo Sapiens
KEQEPMPTV

SEQ ID NO: 105224 - protein, 9 aa, Homo Sapiens
KEQIIHHVA

SEQ ID NO: 105225 - protein, 9 aa, Homo Sapiens
KEQVSIKAA

SEQ ID NO: 105226 - protein, 9 aa, Homo Sapiens
KERPEISPP

SEQ ID NO: 105227 - protein, 9 aa, Homo Sapiens
KESDIVLYA

SEQ ID NO: 105228 - protein, 9 aa, Homo Sapiens
KESDIYIVA

SEQ ID NO: 105229 - protein, 9 aa, Homo Sapiens
KESDVGFIP

SEQ ID NO: 105230 - protein, 9 aa, Homo Sapiens
KESGVDIAA

SEQ ID NO: 105231 - protein, 9 aa, Homo Sapiens
KESQVYVHA

SEQ ID NO: 105232 - protein, 9 aa, Homo Sapiens
KETCLIPAV

SEQ ID NO: 105233 - protein, 9 aa, Homo Sapiens
KETLQLESA

SEQ ID NO: 105234 - protein, 9 aa, Homo Sapiens
KETLSIVAV

SEQ ID NO: 105235 - protein, 9 aa, Homo Sapiens
KETPCILSV

SEQ ID NO: 105236 - protein, 9 aa, Homo Sapiens
KETVFTKSP

SEQ ID NO: 105237 - protein, 9 aa, Homo Sapiens
KETVVTTQA

SEQ ID NO: 105238 - protein, 9 aa, Homo Sapiens
KEVDLIPKV

SEQ ID NO: 105239 - protein, 9 aa, Homo Sapiens
KEVDVGLAA

SEQ ID NO: 105240 - protein, 9 aa, Homo Sapiens
KEVEASHLA

SEQ ID NO: 105241 - protein, 9 aa, Homo Sapiens
KEVEPKLAA

SEQ ID NO: 105242 - protein, 9 aa, Homo Sapiens
KEVEQFDVA

SEQ ID NO: 105243 - protein, 9 aa, Homo Sapiens
KEVEQFTQV

SEQ ID NO: 105244 - protein, 9 aa, Homo Sapiens
KEVEVIGGA

SEQ ID NO: 105245 - protein, 9 aa, Homo Sapiens
KEVEYFTGA

SEQ ID NO: 105246 - protein, 9 aa, Homo Sapiens
KEVEYIVST

SEQ ID NO: 105247 - protein, 9 aa, Homo Sapiens
KEVLVLTSV

SEQ ID NO: 105248 - protein, 9 aa, Homo Sapiens
KEVNKFQMA

SEQ ID NO: 105249 - protein, 9 aa, Homo Sapiens
KEVNLFLQA

SEQ ID NO: 105250 - protein, 9 aa, Homo Sapiens
KEVPIHRVA

SEQ ID NO: 105251 - protein, 9 aa, Homo Sapiens
KEVPLAQTA

SEQ ID NO: 105252 - protein, 9 aa, Homo Sapiens
KEVQDLFEA

SEQ ID NO: 105253 - protein, 9 aa, Homo Sapiens
KEVSVVFIP

SEQ ID NO: 105254 - protein, 9 aa, Homo Sapiens
KEVVGTFKA

SEQ ID NO: 105255 - protein, 9 aa, Homo Sapiens
KEVVLSEKP

SEQ ID NO: 105256 - protein, 9 aa, Homo Sapiens
KEWDEFQKA

SEQ ID NO: 105257 - protein, 9 aa, Homo Sapiens
KEWIQIIQA

SEQ ID NO: 105258 - protein, 9 aa, Homo Sapiens
KEWIRPLAS

SEQ ID NO: 105259 - protein, 9 aa, Homo Sapiens
KEWPQTHQA

SEQ ID NO: 105260 - protein, 9 aa, Homo Sapiens
KEWTGLHDA

SEQ ID NO: 105261 - protein, 9 aa, Homo Sapiens
KEYAVNEVV

SEQ ID NO: 105262 - protein, 9 aa, Homo Sapiens
KEYDALKAA

SEQ ID NO: 105263 - protein, 9 aa, Homo Sapiens
KEYFGIVSV

SEQ ID NO: 105264 - protein, 9 aa, Homo Sapiens
KEYFPVQVV

SEQ ID NO: 105265 - protein, 9 aa, Homo Sapiens
KEYGQIESV

SEQ ID NO: 105266 - protein, 9 aa, Homo Sapiens
KEYILVEEA

SEQ ID NO: 105267 - protein, 9 aa, Homo Sapiens
KEYLAILKA

SEQ ID NO: 105268 - protein, 9 aa, Homo Sapiens
KEYLFYAEA

SEQ ID NO: 105269 - protein, 9 aa, Homo Sapiens
KEYLKALAA

SEQ ID NO: 105270 - protein, 9 aa, Homo Sapiens
KEYLQGLEA

SEQ ID NO: 105271 - protein, 9 aa, Homo Sapiens
KEYPFILDA

SEQ ID NO: 105272 - protein, 9 aa, Homo Sapiens
KQFAEMYVA

SEQ ID NO: 105273 - protein, 9 aa, Homo Sapiens
KQQAPPPPP

SEQ ID NO: 105274 - protein, 9 aa, Homo Sapiens
LDFLAPAKA

SEQ ID NO: 105275 - protein, 9 aa, Homo Sapiens
LEAHFVPLV

SEQ ID NO: 105276 - protein, 9 aa, Homo Sapiens
LEALPQIAA

SEQ ID NO: 105277 - protein, 9 aa, Homo Sapiens
LECSGAISA

SEQ ID NO: 105278 - protein, 9 aa, Homo Sapiens
LECSGVISA

SEQ ID NO: 105279 - protein, 9 aa, Homo Sapiens
LECTKQLAA

SEQ ID NO: 105280 - protein, 9 aa, Homo Sapiens
LEFEHQRAP

SEQ ID NO: 105281 - protein, 9 aa, Homo Sapiens
LEFENPHVT

SEQ ID NO: 105282 - protein, 9 aa, Homo Sapiens
LEFPQLIRV

SEQ ID NO: 105283 - protein, 9 aa, Homo Sapiens
LEFSKILCT

SEQ ID NO: 105284 - protein, 9 aa, Homo Sapiens
LEHDVPHQP

SEQ ID NO: 105285 - protein, 9 aa, Homo Sapiens
LEHKIIIRV

SEQ ID NO: 105286 - protein, 9 aa, Homo Sapiens
LEHQIQVRP

SEQ ID NO: 105287 - protein, 9 aa, Homo Sapiens
LEHYFHAVV

SEQ ID NO: 105288 - protein, 9 aa, Homo Sapiens
LEIAKANAA

SEQ ID NO: 105289 - protein, 9 aa, Homo Sapiens
LEIPRLPPP

SEQ ID NO: 105290 - protein, 9 aa, Homo Sapiens
LEIVNPQAA

SEQ ID NO: 105291 - protein, 9 aa, Homo Sapiens
LEKPNEPVP

SEQ ID NO: 105292 - protein, 9 aa, Homo Sapiens
LEKQDWEHA

SEQ ID NO: 105293 - protein, 9 aa, Homo Sapiens
LELDTNLPA

SEQ ID NO: 105294 - protein, 9 aa, Homo Sapiens
LELIGHAVA

SEQ ID NO: 105295 - protein, 9 aa, Homo Sapiens
LELPGQPVA

SEQ ID NO: 105296 - protein, 9 aa, Homo Sapiens
LELQSPPKA

SEQ ID NO: 105297 - protein, 9 aa, Homo Sapiens
LELVNIHAV

SEQ ID NO: 105298 - protein, 9 aa, Homo Sapiens
LEMEQVWRA

SEQ ID NO: 105299 - protein, 9 aa, Homo Sapiens
LENSKQPSV

SEQ ID NO: 105300 - protein, 9 aa, Homo Sapiens
LEQEKAYQA

SEQ ID NO: 105301 - protein, 9 aa, Homo Sapiens
LEQGGLRAA

SEQ ID NO: 105302 - protein, 9 aa, Homo Sapiens
LERDPIPAA

SEQ ID NO: 105303 - protein, 9 aa, Homo Sapiens
LESELIKSA

SEQ ID NO: 105304 - protein, 9 aa, Homo Sapiens
LETASILRS

SEQ ID NO: 105305 - protein, 9 aa, Homo Sapiens
LETDAGPAA

SEQ ID NO: 105306 - protein, 9 aa, Homo Sapiens
LETTVQKVA

SEQ ID NO: 105307 - protein, 9 aa, Homo Sapiens
LEVAKSLSA

SEQ ID NO: 105308 - protein, 9 aa, Homo Sapiens
LEVEKITTS

SEQ ID NO: 105309 - protein, 9 aa, Homo Sapiens
LEYHVPVTA

SEQ ID NO: 105310 - protein, 9 aa, Homo Sapiens
LEYTGIYRV

SEQ ID NO: 105311 - protein, 9 aa, Homo Sapiens
LEYTQILQT

SEQ ID NO: 105312 - protein, 9 aa, Homo Sapiens
LSEFMNPSP

SEQ ID NO: 105313 - protein, 9 aa, Homo Sapiens
LTQALKDNK

SEQ ID NO: 105314 - protein, 9 aa, Homo Sapiens
MEALPLLAA

SEQ ID NO: 105315 - protein, 9 aa, Homo Sapiens
MEFAQISRV

SEQ ID NO: 105316 - protein, 9 aa, Homo Sapiens
MEFKAVQQV

SEQ ID NO: 105317 - protein, 9 aa, Homo Sapiens
MEFPKIESV

SEQ ID NO: 105318 - protein, 9 aa, Homo Sapiens
MEFQRFVTP

SEQ ID NO: 105319 - protein, 9 aa, Homo Sapiens
MEHIHKLKA

SEQ ID NO: 105320 - protein, 9 aa, Homo Sapiens
MEHPYFYTV

SEQ ID NO: 105321 - protein, 9 aa, Homo Sapiens
MELERIVSA

SEQ ID NO: 105322 - protein, 9 aa, Homo Sapiens
MELITPISA

SEQ ID NO: 105323 - protein, 9 aa, Homo Sapiens
MELQRMIAA

SEQ ID NO: 105324 - protein, 9 aa, Homo Sapiens
MESCGIHET

SEQ ID NO: 105325 - protein, 9 aa, Homo Sapiens
MEVELPAAA

SEQ ID NO: 105326 - protein, 9 aa, Homo Sapiens
MEVNDIKKA

SEQ ID NO: 105327 - protein, 9 aa, Homo Sapiens
MEYKGYLVS

SEQ ID NO: 105328 - protein, 9 aa, Homo Sapiens
MEYPNFEET

SEQ ID NO: 105329 - protein, 9 aa, Homo Sapiens
NEFDAIQKA

SEQ ID NO: 105330 - protein, 9 aa, Homo Sapiens
NEFMRIPCV

SEQ ID NO: 105331 - protein, 9 aa, Homo Sapiens
NEFPFGCPP

SEQ ID NO: 105332 - protein, 9 aa, Homo Sapiens
NEFRENISA

SEQ ID NO: 105333 - protein, 9 aa, Homo Sapiens
NEFSILKSP

SEQ ID NO: 105334 - protein, 9 aa, Homo Sapiens
NEIGAIEKA

SEQ ID NO: 105335 - protein, 9 aa, Homo Sapiens
NEIIFPHCA

SEQ ID NO: 105336 - protein, 9 aa, Homo Sapiens
NEIKDSVVA

SEQ ID NO: 105337 - protein, 9 aa, Homo Sapiens
NELPQPPVP

SEQ ID NO: 105338 - protein, 9 aa, Homo Sapiens
NEVRHIFTA

SEQ ID NO: 105339 - protein, 9 aa, Homo Sapiens
NEVVQVHAA

SEQ ID NO: 105340 - protein, 9 aa, Homo Sapiens
NKPVFIVPP

SEQ ID NO: 105341 - protein, 9 aa, Homo Sapiens
PEFKFWHAA

SEQ ID NO: 105342 - protein, 9 aa, Homo Sapiens
PIRLLAAAA

SEQ ID NO: 105343 - protein, 9 aa, Homo Sapiens
PRIEPRLPP

SEQ ID NO: 105344 - protein, 9 aa, Homo Sapiens
QEAPPIHSS

SEQ ID NO: 105345 - protein, 9 aa, Homo Sapiens
QEAQKIFKA

SEQ ID NO: 105346 - protein, 9 aa, Homo Sapiens
QEFEAALKA

SEQ ID NO: 105347 - protein, 9 aa, Homo Sapiens
QEFLLSKSA

SEQ ID NO: 105348 - protein, 9 aa, Homo Sapiens
QEFNRLLEA

SEQ ID NO: 105349 - protein, 9 aa, Homo Sapiens
QEFPFPETP

SEQ ID NO: 105350 - protein, 9 aa, Homo Sapiens
QEFQRAQAA

SEQ ID NO: 105351 - protein, 9 aa, Homo Sapiens
QEFSFFDKV

SEQ ID NO: 105352 - protein, 9 aa, Homo Sapiens
QEFSNIVIP

SEQ ID NO: 105353 - protein, 9 aa, Homo Sapiens
QEFVRALAA

SEQ ID NO: 105354 - protein, 9 aa, Homo Sapiens
QEHPVVLLP

SEQ ID NO: 105355 - protein, 9 aa, Homo Sapiens
QEIADLKTA

SEQ ID NO: 105356 - protein, 9 aa, Homo Sapiens
QEIATVVVP

SEQ ID NO: 105357 - protein, 9 aa, Homo Sapiens
QEIDQLRNA

SEQ ID NO: 105358 - protein, 9 aa, Homo Sapiens
QEILMHHPP

SEQ ID NO: 105359 - protein, 9 aa, Homo Sapiens
QEIMTVPPP

SEQ ID NO: 105360 - protein, 9 aa, Homo Sapiens
QEINTLLEA

SEQ ID NO: 105361 - protein, 9 aa, Homo Sapiens
QELEFLRVA

SEQ ID NO: 105362 - protein, 9 aa, Homo Sapiens
QELGGLHSA

SEQ ID NO: 105363 - protein, 9 aa, Homo Sapiens
QELHFIEKA

SEQ ID NO: 105364 - protein, 9 aa, Homo Sapiens
QELPGLPAP

SEQ ID NO: 105365 - protein, 9 aa, Homo Sapiens
QELPGLPLV

SEQ ID NO: 105366 - protein, 9 aa, Homo Sapiens
QEMPVQFQV

SEQ ID NO: 105367 - protein, 9 aa, Homo Sapiens
QENTQTPTV

SEQ ID NO: 105368 - protein, 9 aa, Homo Sapiens
QESKLIILA

SEQ ID NO: 105369 - protein, 9 aa, Homo Sapiens
QETEFLSPP

SEQ ID NO: 105370 - protein, 9 aa, Homo Sapiens
QETISLVVV

SEQ ID NO: 105371 - protein, 9 aa, Homo Sapiens
QETLVKIQA

SEQ ID NO: 105372 - protein, 9 aa, Homo Sapiens
QETSFTKEA

SEQ ID NO: 105373 - protein, 9 aa, Homo Sapiens
QETSSIVSV

SEQ ID NO: 105374 - protein, 9 aa, Homo Sapiens
QETVAQIKA

SEQ ID NO: 105375 - protein, 9 aa, Homo Sapiens
QEVDRIKEA

SEQ ID NO: 105376 - protein, 9 aa, Homo Sapiens
QEVENLVRA

SEQ ID NO: 105377 - protein, 9 aa, Homo Sapiens
QEVLVITRA

SEQ ID NO: 105378 - protein, 9 aa, Homo Sapiens
QEVNGLYRA

SEQ ID NO: 105379 - protein, 9 aa, Homo Sapiens
QEVSRIPAS

SEQ ID NO: 105380 - protein, 9 aa, Homo Sapiens
QEVVLDKSA

SEQ ID NO: 105381 - protein, 9 aa, Homo Sapiens
QEVYIPFSA

SEQ ID NO: 105382 - protein, 9 aa, Homo Sapiens
QEYDALAKV

SEQ ID NO: 105383 - protein, 9 aa, Homo Sapiens
QEYEAIYLA

SEQ ID NO: 105384 - protein, 9 aa, Homo Sapiens
QEYFGSLAA

SEQ ID NO: 105385 - protein, 9 aa, Homo Sapiens
QEYNQFCVI

SEQ ID NO: 105386 - protein, 9 aa, Homo Sapiens
QEYPTLKVP

SEQ ID NO: 105387 - protein, 9 aa, Homo Sapiens
QTMLAPVAA

SEQ ID NO: 105388 - protein, 9 aa, Homo Sapiens
QVPNFLLAA

SEQ ID NO: 105389 - protein, 9 aa, Homo Sapiens
RAFKALIAA

SEQ ID NO: 105390 - protein, 9 aa, Homo Sapiens
RDFAARLVA

SEQ ID NO: 105391 - protein, 9 aa, Homo Sapiens
RDFDRFIGA

SEQ ID NO: 105392 - protein, 9 aa, Homo Sapiens
RDFLAPHRA

SEQ ID NO: 105393 - protein, 9 aa, Homo Sapiens
RDFLQRHRA

SEQ ID NO: 105394 - protein, 9 aa, Homo Sapiens
RDFLTHVSA

SEQ ID NO: 105395 - protein, 9 aa, Homo Sapiens
RDGSFTVSA

SEQ ID NO: 105396 - protein, 9 aa, Homo Sapiens
RDISIVFTP

SEQ ID NO: 105397 - protein, 9 aa, Homo Sapiens
RDKYEPAAV

SEQ ID NO: 105398 - protein, 9 aa, Homo Sapiens
RDLLQPRRA

SEQ ID NO: 105399 - protein, 9 aa, Homo Sapiens
RDMTMFVTA

SEQ ID NO: 105400 - protein, 9 aa, Homo Sapiens
RDVAIEFSP

SEQ ID NO: 105401 - protein, 9 aa, Homo Sapiens
RDWEQFHQP

SEQ ID NO: 105402 - protein, 9 aa, Homo Sapiens
RDYYQPLAA

SEQ ID NO: 105403 - protein, 9 aa, Homo Sapiens
READFARVA

SEQ ID NO: 105404 - protein, 9 aa, Homo Sapiens
READGILKP

SEQ ID NO: 105405 - protein, 9 aa, Homo Sapiens
READPMTKV

SEQ ID NO: 105406 - protein, 9 aa, Homo Sapiens
REAEARLAA

SEQ ID NO: 105407 - protein, 9 aa, Homo Sapiens
REAEILHKA

SEQ ID NO: 105408 - protein, 9 aa, Homo Sapiens
REAEIYQTV

SEQ ID NO: 105409 - protein, 9 aa, Homo Sapiens
REAELGARA

SEQ ID NO: 105410 - protein, 9 aa, Homo Sapiens
REAFGFEQA

SEQ ID NO: 105411 - protein, 9 aa, Homo Sapiens
REAGFQVKA

SEQ ID NO: 105412 - protein, 9 aa, Homo Sapiens
REALVKFEA

SEQ ID NO: 105413 - protein, 9 aa, Homo Sapiens
REANFTVSS

SEQ ID NO: 105414 - protein, 9 aa, Homo Sapiens
REAQFGTTA

SEQ ID NO: 105415 - protein, 9 aa, Homo Sapiens
REAQKFALA

SEQ ID NO: 105416 - protein, 9 aa, Homo Sapiens
REAQSFISA

SEQ ID NO: 105417 - protein, 9 aa, Homo Sapiens
RECEIKLEA

SEQ ID NO: 105418 - protein, 9 aa, Homo Sapiens
RECTIEATA

SEQ ID NO: 105419 - protein, 9 aa, Homo Sapiens
REEIIPVAA

SEQ ID NO: 105420 - protein, 9 aa, Homo Sapiens
REEKLLRDA

SEQ ID NO: 105421 - protein, 9 aa, Homo Sapiens
REESSIPRA

SEQ ID NO: 105422 - protein, 9 aa, Homo Sapiens
REFAFPPPV

SEQ ID NO: 105423 - protein, 9 aa, Homo Sapiens
REFAKALET

SEQ ID NO: 105424 - protein, 9 aa, Homo Sapiens
REFDFFNKI

SEQ ID NO: 105425 - protein, 9 aa, Homo Sapiens
REFDKRFTS

SEQ ID NO: 105426 - protein, 9 aa, Homo Sapiens
REFEERHIP

SEQ ID NO: 105427 - protein, 9 aa, Homo Sapiens
REFEIIWVT

SEQ ID NO: 105428 - protein, 9 aa, Homo Sapiens
REFEKMNQS

SEQ ID NO: 105429 - protein, 9 aa, Homo Sapiens
REFEPMLQV

SEQ ID NO: 105430 - protein, 9 aa, Homo Sapiens
REFGNPNRP

SEQ ID NO: 105431 - protein, 9 aa, Homo Sapiens
REFIERQHA

SEQ ID NO: 105432 - protein, 9 aa, Homo Sapiens
REFLQNLDA

SEQ ID NO: 105433 - protein, 9 aa, Homo Sapiens
REFPTHRSV

SEQ ID NO: 105434 - protein, 9 aa, Homo Sapiens
REFPVISVV

SEQ ID NO: 105435 - protein, 9 aa, Homo Sapiens
REFQWLRAN

SEQ ID NO: 105436 - protein, 9 aa, Homo Sapiens
REFRFTSEV

SEQ ID NO: 105437 - protein, 9 aa, Homo Sapiens
REFSDFIRV

SEQ ID NO: 105438 - protein, 9 aa, Homo Sapiens
REFVAVTGA

SEQ ID NO: 105439 - protein, 9 aa, Homo Sapiens
REFVGQLVA

SEQ ID NO: 105440 - protein, 9 aa, Homo Sapiens
REFVMQVKV

SEQ ID NO: 105441 - protein, 9 aa, Homo Sapiens
REFVRQYYT

SEQ ID NO: 105442 - protein, 9 aa, Homo Sapiens
REFVSGLSA

SEQ ID NO: 105443 - protein, 9 aa, Homo Sapiens
REFVSISSP

SEQ ID NO: 105444 - protein, 9 aa, Homo Sapiens
REFWAKPKP

SEQ ID NO: 105445 - protein, 9 aa, Homo Sapiens
REGDLLFTV

SEQ ID NO: 105446 - protein, 9 aa, Homo Sapiens
REGMFERIP

SEQ ID NO: 105447 - protein, 9 aa, Homo Sapiens
REGNLRYSA

SEQ ID NO: 105448 - protein, 9 aa, Homo Sapiens
REGTFALRA

SEQ ID NO: 105449 - protein, 9 aa, Homo Sapiens
REGWFSVTP

SEQ ID NO: 105450 - protein, 9 aa, Homo Sapiens
REHAPFLVA

SEQ ID NO: 105451 - protein, 9 aa, Homo Sapiens
REHCVLLKI

SEQ ID NO: 105452 - protein, 9 aa, Homo Sapiens
REHDIAIKF

SEQ ID NO: 105453 - protein, 9 aa, Homo Sapiens
REHEVLIHV

SEQ ID NO: 105454 - protein, 9 aa, Homo Sapiens
REHFFTSRA

SEQ ID NO: 105455 - protein, 9 aa, Homo Sapiens
REHFQHVAA

SEQ ID NO: 105456 - protein, 9 aa, Homo Sapiens
REHLNPQAA

SEQ ID NO: 105457 - protein, 9 aa, Homo Sapiens
REHPKLKAP

SEQ ID NO: 105458 - protein, 9 aa, Homo Sapiens
REHPVPLLP

SEQ ID NO: 105459 - protein, 9 aa, Homo Sapiens
REHPWEVMP

SEQ ID NO: 105460 - protein, 9 aa, Homo Sapiens
REHSVFTGV

SEQ ID NO: 105461 - protein, 9 aa, Homo Sapiens
REIAQDFKT

SEQ ID NO: 105462 - protein, 9 aa, Homo Sapiens
REIDDFFKA

SEQ ID NO: 105463 - protein, 9 aa, Homo Sapiens
REIEATNAV

SEQ ID NO: 105464 - protein, 9 aa, Homo Sapiens
REIEEQLRA

SEQ ID NO: 105465 - protein, 9 aa, Homo Sapiens
REIENIEKT

SEQ ID NO: 105466 - protein, 9 aa, Homo Sapiens
REIEWREKA

SEQ ID NO: 105467 - protein, 9 aa, Homo Sapiens
REIFFPETA

SEQ ID NO: 105468 - protein, 9 aa, Homo Sapiens
REIKFTVQA

SEQ ID NO: 105469 - protein, 9 aa, Homo Sapiens
REILRPWHA

SEQ ID NO: 105470 - protein, 9 aa, Homo Sapiens
REILVNQTA

SEQ ID NO: 105471 - protein, 9 aa, Homo Sapiens
REINTILKA

SEQ ID NO: 105472 - protein, 9 aa, Homo Sapiens
REINYILRV

SEQ ID NO: 105473 - protein, 9 aa, Homo Sapiens
REIPDPDSA

SEQ ID NO: 105474 - protein, 9 aa, Homo Sapiens
REIPIVHRV

SEQ ID NO: 105475 - protein, 9 aa, Homo Sapiens
REIPMDPEA

SEQ ID NO: 105476 - protein, 9 aa, Homo Sapiens
REIQEAIAV

SEQ ID NO: 105477 - protein, 9 aa, Homo Sapiens
REIQGQVQA

SEQ ID NO: 105478 - protein, 9 aa, Homo Sapiens
REIQVQHPA

SEQ ID NO: 105479 - protein, 9 aa, Homo Sapiens
REIRIYTDA

SEQ ID NO: 105480 - protein, 9 aa, Homo Sapiens
REITNQVVP

SEQ ID NO: 105481 - protein, 9 aa, Homo Sapiens
REIVAISSA

SEQ ID NO: 105482 - protein, 9 aa, Homo Sapiens
REKEEELEV

SEQ ID NO: 105483 - protein, 9 aa, Homo Sapiens
REKELIRQA

SEQ ID NO: 105484 - protein, 9 aa, Homo Sapiens
REKFPEKIP

SEQ ID NO: 105485 - protein, 9 aa, Homo Sapiens
REKKFSVEV

SEQ ID NO: 105486 - protein, 9 aa, Homo Sapiens
REKKLFVIA

SEQ ID NO: 105487 - protein, 9 aa, Homo Sapiens
REKPEEFQT

SEQ ID NO: 105488 - protein, 9 aa, Homo Sapiens
REKVEVFRA

SEQ ID NO: 105489 - protein, 9 aa, Homo Sapiens
RELANQLEA

SEQ ID NO: 105490 - protein, 9 aa, Homo Sapiens
RELAQPASV

SEQ ID NO: 105491 - protein, 9 aa, Homo Sapiens
RELECIREI

SEQ ID NO: 105492 - protein, 9 aa, Homo Sapiens
RELEKAKVA

SEQ ID NO: 105493 - protein, 9 aa, Homo Sapiens
RELEVQHPA

SEQ ID NO: 105494 - protein, 9 aa, Homo Sapiens
RELGEFRTT

SEQ ID NO: 105495 - protein, 9 aa, Homo Sapiens
RELGLIRKP

SEQ ID NO: 105496 - protein, 9 aa, Homo Sapiens
RELIAEHKP

SEQ ID NO: 105497 - protein, 9 aa, Homo Sapiens
RELKKLLVA

SEQ ID NO: 105498 - protein, 9 aa, Homo Sapiens
RELKTKISA

SEQ ID NO: 105499 - protein, 9 aa, Homo Sapiens
RELLNVHSA

SEQ ID NO: 105500 - protein, 9 aa, Homo Sapiens
RELLRIPQA

SEQ ID NO: 105501 - protein, 9 aa, Homo Sapiens
RELNQPASA

SEQ ID NO: 105502 - protein, 9 aa, Homo Sapiens
RELPFTKSA

SEQ ID NO: 105503 - protein, 9 aa, Homo Sapiens
RELPHFTEA

SEQ ID NO: 105504 - protein, 9 aa, Homo Sapiens
RELSFQSAP

SEQ ID NO: 105505 - protein, 9 aa, Homo Sapiens
RELTAQIAA

SEQ ID NO: 105506 - protein, 9 aa, Homo Sapiens
RELTSRVTA

SEQ ID NO: 105507 - protein, 9 aa, Homo Sapiens
RELVAIKKV

SEQ ID NO: 105508 - protein, 9 aa, Homo Sapiens
RELVKNWVP

SEQ ID NO: 105509 - protein, 9 aa, Homo Sapiens
REMDQTMAA

SEQ ID NO: 105510 - protein, 9 aa, Homo Sapiens
REMEENFAV

SEQ ID NO: 105511 - protein, 9 aa, Homo Sapiens
REMENIIAT

SEQ ID NO: 105512 - protein, 9 aa, Homo Sapiens
REMEVKCKP

SEQ ID NO: 105513 - protein, 9 aa, Homo Sapiens
REMFNPMYA

SEQ ID NO: 105514 - protein, 9 aa, Homo Sapiens
REMIPFAVV

SEQ ID NO: 105515 - protein, 9 aa, Homo Sapiens
REMIQKECA

SEQ ID NO: 105516 - protein, 9 aa, Homo Sapiens
REMPGVWGA

SEQ ID NO: 105517 - protein, 9 aa, Homo Sapiens
REMPVKVEA

SEQ ID NO: 105518 - protein, 9 aa, Homo Sapiens
REMRGLTSA

SEQ ID NO: 105519 - protein, 9 aa, Homo Sapiens
REMTILGSA

SEQ ID NO: 105520 - protein, 9 aa, Homo Sapiens
RENFFPVTV

SEQ ID NO: 105521 - protein, 9 aa, Homo Sapiens
RENKTAVVV

SEQ ID NO: 105522 - protein, 9 aa, Homo Sapiens
RENVFKLLP

SEQ ID NO: 105523 - protein, 9 aa, Homo Sapiens
REPPLNTAA

SEQ ID NO: 105524 - protein, 9 aa, Homo Sapiens
REQERQWRA

SEQ ID NO: 105525 - protein, 9 aa, Homo Sapiens
REQINKLEA

SEQ ID NO: 105526 - protein, 9 aa, Homo Sapiens
REQVLKICA

SEQ ID NO: 105527 - protein, 9 aa, Homo Sapiens
REQVLKVCA

SEQ ID NO: 105528 - protein, 9 aa, Homo Sapiens
RERADAPSV

SEQ ID NO: 105529 - protein, 9 aa, Homo Sapiens
REREVEERL

SEQ ID NO: 105530 - protein, 9 aa, Homo Sapiens
RERIIPRSV

SEQ ID NO: 105531 - protein, 9 aa, Homo Sapiens
RERLEQQVP

SEQ ID NO: 105532 - protein, 9 aa, Homo Sapiens
RERPEFQAV

SEQ ID NO: 105533 - protein, 9 aa, Homo Sapiens
RERPPEEVA

SEQ ID NO: 105534 - protein, 9 aa, Homo Sapiens
RERRDNYVP

SEQ ID NO: 105535 - protein, 9 aa, Homo Sapiens
RERWNFDFV

SEQ ID NO: 105536 - protein, 9 aa, Homo Sapiens
RESDKMWLV

SEQ ID NO: 105537 - protein, 9 aa, Homo Sapiens
RESFFRVVP

SEQ ID NO: 105538 - protein, 9 aa, Homo Sapiens
RESIVLHGA

SEQ ID NO: 105539 - protein, 9 aa, Homo Sapiens
RESKVVVPP

SEQ ID NO: 105540 - protein, 9 aa, Homo Sapiens
RESNNMVVP

SEQ ID NO: 105541 - protein, 9 aa, Homo Sapiens
RESPFSTSA

SEQ ID NO: 105542 - protein, 9 aa, Homo Sapiens
RESSFQPEA

SEQ ID NO: 105543 - protein, 9 aa, Homo Sapiens
RETAFTHAV

SEQ ID NO: 105544 - protein, 9 aa, Homo Sapiens
RETGQQFAV

SEQ ID NO: 105545 - protein, 9 aa, Homo Sapiens
RETHILRQV

SEQ ID NO: 105546 - protein, 9 aa, Homo Sapiens
RETQNLQVP

SEQ ID NO: 105547 - protein, 9 aa, Homo Sapiens
RETSHVTMV

SEQ ID NO: 105548 - protein, 9 aa, Homo Sapiens
RETVAYLQA

SEQ ID NO: 105549 - protein, 9 aa, Homo Sapiens
RETYGHLGA

SEQ ID NO: 105550 - protein, 9 aa, Homo Sapiens
RETYGHLSA

SEQ ID NO: 105551 - protein, 9 aa, Homo Sapiens
REVAAAVRA

SEQ ID NO: 105552 - protein, 9 aa, Homo Sapiens
REVDAEYEA

SEQ ID NO: 105553 - protein, 9 aa, Homo Sapiens
REVEHFLKA

SEQ ID NO: 105554 - protein, 9 aa, Homo Sapiens
REVEILNKT

SEQ ID NO: 105555 - protein, 9 aa, Homo Sapiens
REVEMLYQC

SEQ ID NO: 105556 - protein, 9 aa, Homo Sapiens
REVEVFKSS

SEQ ID NO: 105557 - protein, 9 aa, Homo Sapiens
REVIHPLAT

SEQ ID NO: 105558 - protein, 9 aa, Homo Sapiens
REVIQKECA

SEQ ID NO: 105559 - protein, 9 aa, Homo Sapiens
REVLPLNQA

SEQ ID NO: 105560 - protein, 9 aa, Homo Sapiens
REVTIVEKA

SEQ ID NO: 105561 - protein, 9 aa, Homo Sapiens
REVVFVEDV

SEQ ID NO: 105562 - protein, 9 aa, Homo Sapiens
REVWLYEQV

SEQ ID NO: 105563 - protein, 9 aa, Homo Sapiens
REWAHPRSI

SEQ ID NO: 105564 - protein, 9 aa, Homo Sapiens
REWERPPMA

SEQ ID NO: 105565 - protein, 9 aa, Homo Sapiens
REWGEELQA

SEQ ID NO: 105566 - protein, 9 aa, Homo Sapiens
REWHHFLVV

SEQ ID NO: 105567 - protein, 9 aa, Homo Sapiens
REWKGIDRL

SEQ ID NO: 105568 - protein, 9 aa, Homo Sapiens
REWLRVTTV

SEQ ID NO: 105569 - protein, 9 aa, Homo Sapiens
REWVAPEKA

SEQ ID NO: 105570 - protein, 9 aa, Homo Sapiens
REYIEIITS

SEQ ID NO: 105571 - protein, 9 aa, Homo Sapiens
REYKTSFHA

SEQ ID NO: 105572 - protein, 9 aa, Homo Sapiens
REYLRVNVV

SEQ ID NO: 105573 - protein, 9 aa, Homo Sapiens
REYMGFIQA

SEQ ID NO: 105574 - protein, 9 aa, Homo Sapiens
REYPNLVTI

SEQ ID NO: 105575 - protein, 9 aa, Homo Sapiens
REYPRMQVT

SEQ ID NO: 105576 - protein, 9 aa, Homo Sapiens
REYQDLLNV

SEQ ID NO: 105577 - protein, 9 aa, Homo Sapiens
REYQELMSV

SEQ ID NO: 105578 - protein, 9 aa, Homo Sapiens
REYQLVVQT

SEQ ID NO: 105579 - protein, 9 aa, Homo Sapiens
REYQVKLQA

SEQ ID NO: 105580 - protein, 9 aa, Homo Sapiens
REYSRYLHA

SEQ ID NO: 105581 - protein, 9 aa, Homo Sapiens
REYSVAVEA

SEQ ID NO: 105582 - protein, 9 aa, Homo Sapiens
REYWNEQSA

SEQ ID NO: 105583 - protein, 9 aa, Homo Sapiens
RGYAFNHSA

SEQ ID NO: 105584 - protein, 9 aa, Homo Sapiens
RGYSFTTTA

SEQ ID NO: 105585 - protein, 9 aa, Homo Sapiens
RPEAPPPPP

SEQ ID NO: 105586 - protein, 9 aa, Homo Sapiens
RPMSPPPPP

SEQ ID NO: 105587 - protein, 9 aa, Homo Sapiens
SADLRDLAT

SEQ ID NO: 105588 - protein, 9 aa, Homo Sapiens
SDPVVIVSA

SEQ ID NO: 105589 - protein, 9 aa, Homo Sapiens
SEADKIKVA

SEQ ID NO: 105590 - protein, 9 aa, Homo Sapiens
SEAEIQAKA

SEQ ID NO: 105591 - protein, 9 aa, Homo Sapiens
SEAEKVYIV

SEQ ID NO: 105592 - protein, 9 aa, Homo Sapiens
SEAKIIQQA

SEQ ID NO: 105593 - protein, 9 aa, Homo Sapiens
SEAKQMPRA

SEQ ID NO: 105594 - protein, 9 aa, Homo Sapiens
SEAKSVPKP

SEQ ID NO: 105595 - protein, 9 aa, Homo Sapiens
SEAPLEHKP

SEQ ID NO: 105596 - protein, 9 aa, Homo Sapiens
SEAQPQPEV

SEQ ID NO: 105597 - protein, 9 aa, Homo Sapiens
SECGIIEKA

SEQ ID NO: 105598 - protein, 9 aa, Homo Sapiens
SECGKTFTV

SEQ ID NO: 105599 - protein, 9 aa, Homo Sapiens
SEEKPVPAA

SEQ ID NO: 105600 - protein, 9 aa, Homo Sapiens
SEFASIPAN

SEQ ID NO: 105601 - protein, 9 aa, Homo Sapiens
SEFGAPVSV

SEQ ID NO: 105602 - protein, 9 aa, Homo Sapiens
SEFGKLERV

SEQ ID NO: 105603 - protein, 9 aa, Homo Sapiens
SEFIKEKSA

SEQ ID NO: 105604 - protein, 9 aa, Homo Sapiens
SEFKDLILP

SEQ ID NO: 105605 - protein, 9 aa, Homo Sapiens
SEFKEFSQS

SEQ ID NO: 105606 - protein, 9 aa, Homo Sapiens
SEFKSIKKT

SEQ ID NO: 105607 - protein, 9 aa, Homo Sapiens
SEFKTLPET

SEQ ID NO: 105608 - protein, 9 aa, Homo Sapiens
SEFKYNKPA

SEQ ID NO: 105609 - protein, 9 aa, Homo Sapiens
SEFMFEKAP

SEQ ID NO: 105610 - protein, 9 aa, Homo Sapiens
SEFMKWKEA

SEQ ID NO: 105611 - protein, 9 aa, Homo Sapiens
SEFPDNYEA

SEQ ID NO: 105612 - protein, 9 aa, Homo Sapiens
SEFPGHTGP

SEQ ID NO: 105613 - protein, 9 aa, Homo Sapiens
SEFVKIMEP

SEQ ID NO: 105614 - protein, 9 aa, Homo Sapiens
SEFYTLHEV

SEQ ID NO: 105615 - protein, 9 aa, Homo Sapiens
SEGNVVNKP

SEQ ID NO: 105616 - protein, 9 aa, Homo Sapiens
SEGRPVGPA

SEQ ID NO: 105617 - protein, 9 aa, Homo Sapiens
SEHASSPVP

SEQ ID NO: 105618 - protein, 9 aa, Homo Sapiens
SEHGLVVIA

SEQ ID NO: 105619 - protein, 9 aa, Homo Sapiens
SEHPFVNGV

SEQ ID NO: 105620 - protein, 9 aa, Homo Sapiens
SEHSKAILA

SEQ ID NO: 105621 - protein, 9 aa, Homo Sapiens
SEHSVIKPP

SEQ ID NO: 105622 - protein, 9 aa, Homo Sapiens
SEHVIAIRA

SEQ ID NO: 105623 - protein, 9 aa, Homo Sapiens
SEHVMPYAA

SEQ ID NO: 105624 - protein, 9 aa, Homo Sapiens
SEHWLVLVP

SEQ ID NO: 105625 - protein, 9 aa, Homo Sapiens
SEIAFHTIP

SEQ ID NO: 105626 - protein, 9 aa, Homo Sapiens
SEIDMSVKA

SEQ ID NO: 105627 - protein, 9 aa, Homo Sapiens
SEIDQINKV

SEQ ID NO: 105628 - protein, 9 aa, Homo Sapiens
SEIDQVVPA

SEQ ID NO: 105629 - protein, 9 aa, Homo Sapiens
SEIEARIAA

SEQ ID NO: 105630 - protein, 9 aa, Homo Sapiens
SEIEKLSAA

SEQ ID NO: 105631 - protein, 9 aa, Homo Sapiens
SEIERQAQV

SEQ ID NO: 105632 - protein, 9 aa, Homo Sapiens
SEIEVPREA

SEQ ID NO: 105633 - protein, 9 aa, Homo Sapiens
SEIFPLFRA

SEQ ID NO: 105634 - protein, 9 aa, Homo Sapiens
SEIHIKVKP

SEQ ID NO: 105635 - protein, 9 aa, Homo Sapiens
SEIKGVCSV

SEQ ID NO: 105636 - protein, 9 aa, Homo Sapiens
SEIKSIPGV

SEQ ID NO: 105637 - protein, 9 aa, Homo Sapiens
SEINSLPTI

SEQ ID NO: 105638 - protein, 9 aa, Homo Sapiens
SEIPKLPAV

SEQ ID NO: 105639 - protein, 9 aa, Homo Sapiens
SEIRAIRQA

SEQ ID NO: 105640 - protein, 9 aa, Homo Sapiens
SEIRLPLKA

SEQ ID NO: 105641 - protein, 9 aa, Homo Sapiens
SEIRSAWQA

SEQ ID NO: 105642 - protein, 9 aa, Homo Sapiens
SEITGLSTA

SEQ ID NO: 105643 - protein, 9 aa, Homo Sapiens
SEIYGLMKA

SEQ ID NO: 105644 - protein, 9 aa, Homo Sapiens
SEKEATPVV

SEQ ID NO: 105645 - protein, 9 aa, Homo Sapiens
SEKHIEVEV

SEQ ID NO: 105646 - protein, 9 aa, Homo Sapiens
SEKKAEIPP

SEQ ID NO: 105647 - protein, 9 aa, Homo Sapiens
SEKLASYQA

SEQ ID NO: 105648 - protein, 9 aa, Homo Sapiens
SELAFPITA

SEQ ID NO: 105649 - protein, 9 aa, Homo Sapiens
SELATAVKA

SEQ ID NO: 105650 - protein, 9 aa, Homo Sapiens
SELAVILKA

SEQ ID NO: 105651 - protein, 9 aa, Homo Sapiens
SELEKTQVA

SEQ ID NO: 105652 - protein, 9 aa, Homo Sapiens
SELEQYFTA

SEQ ID NO: 105653 - protein, 9 aa, Homo Sapiens
SELERLIVP

SEQ ID NO: 105654 - protein, 9 aa, Homo Sapiens
SELGGIWSV

SEQ ID NO: 105655 - protein, 9 aa, Homo Sapiens
SELGKICSV

SEQ ID NO: 105656 - protein, 9 aa, Homo Sapiens
SELILLPVT

SEQ ID NO: 105657 - protein, 9 aa, Homo Sapiens
SELIQLVAV

SEQ ID NO: 105658 - protein, 9 aa, Homo Sapiens
SELITKAVA

SEQ ID NO: 105659 - protein, 9 aa, Homo Sapiens
SELKAIRPP

SEQ ID NO: 105660 - protein, 9 aa, Homo Sapiens
SELPGAFEA

SEQ ID NO: 105661 - protein, 9 aa, Homo Sapiens
SELPIVTPA

SEQ ID NO: 105662 - protein, 9 aa, Homo Sapiens
SELPPKPAA

SEQ ID NO: 105663 - protein, 9 aa, Homo Sapiens
SELPTQSKA

SEQ ID NO: 105664 - protein, 9 aa, Homo Sapiens
SELPVSEVA

SEQ ID NO: 105665 - protein, 9 aa, Homo Sapiens
SELQKIHKA

SEQ ID NO: 105666 - protein, 9 aa, Homo Sapiens
SELQKIHRA

SEQ ID NO: 105667 - protein, 9 aa, Homo Sapiens
SELQLPFQA

SEQ ID NO: 105668 - protein, 9 aa, Homo Sapiens
SELRAMAKA

SEQ ID NO: 105669 - protein, 9 aa, Homo Sapiens
SELREFPAA

SEQ ID NO: 105670 - protein, 9 aa, Homo Sapiens
SELRSLPPP

SEQ ID NO: 105671 - protein, 9 aa, Homo Sapiens
SELSRSPVA

SEQ ID NO: 105672 - protein, 9 aa, Homo Sapiens
SELSRTYLP

SEQ ID NO: 105673 - protein, 9 aa, Homo Sapiens
SELSSNPAA

SEQ ID NO: 105674 - protein, 9 aa, Homo Sapiens
SELTPMLAA

SEQ ID NO: 105675 - protein, 9 aa, Homo Sapiens
SEMAPVCAV

SEQ ID NO: 105676 - protein, 9 aa, Homo Sapiens
SEMDRVPFV

SEQ ID NO: 105677 - protein, 9 aa, Homo Sapiens
SEMRAPPAA

SEQ ID NO: 105678 - protein, 9 aa, Homo Sapiens
SEMRAVIKA

SEQ ID NO: 105679 - protein, 9 aa, Homo Sapiens
SEMSKVSKP

SEQ ID NO: 105680 - protein, 9 aa, Homo Sapiens
SENAHIIEA

SEQ ID NO: 105681 - protein, 9 aa, Homo Sapiens
SENAIGVAA

SEQ ID NO: 105682 - protein, 9 aa, Homo Sapiens
SENEYIMKA

SEQ ID NO: 105683 - protein, 9 aa, Homo Sapiens
SENPSVYVP

SEQ ID NO: 105684 - protein, 9 aa, Homo Sapiens
SENQHLVSP

SEQ ID NO: 105685 - protein, 9 aa, Homo Sapiens
SENVYVNTA

SEQ ID NO: 105686 - protein, 9 aa, Homo Sapiens
SEQIMKTGA

SEQ ID NO: 105687 - protein, 9 aa, Homo Sapiens
SEQPTLVTA

SEQ ID NO: 105688 - protein, 9 aa, Homo Sapiens
SERDPIQPP

SEQ ID NO: 105689 - protein, 9 aa, Homo Sapiens
SERIIVRAS

SEQ ID NO: 105690 - protein, 9 aa, Homo Sapiens
SERPLPRAA

SEQ ID NO: 105691 - protein, 9 aa, Homo Sapiens
SERVEVVSP

SEQ ID NO: 105692 - protein, 9 aa, Homo Sapiens
SERVTIEHA

SEQ ID NO: 105693 - protein, 9 aa, Homo Sapiens
SESEKQWKA

SEQ ID NO: 105694 - protein, 9 aa, Homo Sapiens
SESFIQHIV

SEQ ID NO: 105695 - protein, 9 aa, Homo Sapiens
SESGIQMVP

SEQ ID NO: 105696 - protein, 9 aa, Homo Sapiens
SESPVITKA

SEQ ID NO: 105697 - protein, 9 aa, Homo Sapiens
SESRFFVSS

SEQ ID NO: 105698 - protein, 9 aa, Homo Sapiens
SESSTILVV

SEQ ID NO: 105699 - protein, 9 aa, Homo Sapiens
SESVNLRIA

SEQ ID NO: 105700 - protein, 9 aa, Homo Sapiens
SETALIHIA

SEQ ID NO: 105701 - protein, 9 aa, Homo Sapiens
SETANYISA

SEQ ID NO: 105702 - protein, 9 aa, Homo Sapiens
SETDFKVMA

SEQ ID NO: 105703 - protein, 9 aa, Homo Sapiens
SETKVFTAS

SEQ ID NO: 105704 - protein, 9 aa, Homo Sapiens
SETPAICPP

SEQ ID NO: 105705 - protein, 9 aa, Homo Sapiens
SETPQLFTV

SEQ ID NO: 105706 - protein, 9 aa, Homo Sapiens
SETSALPRP

SEQ ID NO: 105707 - protein, 9 aa, Homo Sapiens
SETSGIARP

SEQ ID NO: 105708 - protein, 9 aa, Homo Sapiens
SETSLIGTA

SEQ ID NO: 105709 - protein, 9 aa, Homo Sapiens
SETSNWIAA

SEQ ID NO: 105710 - protein, 9 aa, Homo Sapiens
SETVMVHQA

SEQ ID NO: 105711 - protein, 9 aa, Homo Sapiens
SEVCKFLSA

SEQ ID NO: 105712 - protein, 9 aa, Homo Sapiens
SEVELMKVA

SEQ ID NO: 105713 - protein, 9 aa, Homo Sapiens
SEVENKNVP

SEQ ID NO: 105714 - protein, 9 aa, Homo Sapiens
SEVESLRPP

SEQ ID NO: 105715 - protein, 9 aa, Homo Sapiens
SEVEVIHVP

SEQ ID NO: 105716 - protein, 9 aa, Homo Sapiens
SEVGKLLSA

SEQ ID NO: 105717 - protein, 9 aa, Homo Sapiens
SEVILPVPA

SEQ ID NO: 105718 - protein, 9 aa, Homo Sapiens
SEVKFAVQA

SEQ ID NO: 105719 - protein, 9 aa, Homo Sapiens
SEVLLRHIA

SEQ ID NO: 105720 - protein, 9 aa, Homo Sapiens
SEVNLFLVP

SEQ ID NO: 105721 - protein, 9 aa, Homo Sapiens
SEVQDLHLA

SEQ ID NO: 105722 - protein, 9 aa, Homo Sapiens
SEVRVETSA

SEQ ID NO: 105723 - protein, 9 aa, Homo Sapiens
SEVSIDHKA

SEQ ID NO: 105724 - protein, 9 aa, Homo Sapiens
SEVSKIVTV

SEQ ID NO: 105725 - protein, 9 aa, Homo Sapiens
SEVTVQPSP

SEQ ID NO: 105726 - protein, 9 aa, Homo Sapiens
SEWDGIVTV

SEQ ID NO: 105727 - protein, 9 aa, Homo Sapiens
SEWEKMRQS

SEQ ID NO: 105728 - protein, 9 aa, Homo Sapiens
SEWLGVLKA

SEQ ID NO: 105729 - protein, 9 aa, Homo Sapiens
SEYEGILDA

SEQ ID NO: 105730 - protein, 9 aa, Homo Sapiens
SEYEIQRQA

SEQ ID NO: 105731 - protein, 9 aa, Homo Sapiens
SEYEKLLHS

SEQ ID NO: 105732 - protein, 9 aa, Homo Sapiens
SEYEKPEAP

SEQ ID NO: 105733 - protein, 9 aa, Homo Sapiens
SEYERIEIP

SEQ ID NO: 105734 - protein, 9 aa, Homo Sapiens
SEYLCKQVA

SEQ ID NO: 105735 - protein, 9 aa, Homo Sapiens
SEYLQQHVA

SEQ ID NO: 105736 - protein, 9 aa, Homo Sapiens
SEYNMLWHA

SEQ ID NO: 105737 - protein, 9 aa, Homo Sapiens
SEYQWITSP

SEQ ID NO: 105738 - protein, 9 aa, Homo Sapiens
SEYTGPTSA

SEQ ID NO: 105739 - protein, 9 aa, Homo Sapiens
SSDFQSNIA

SEQ ID NO: 105740 - protein, 9 aa, Homo Sapiens
SSEFQIPTA

SEQ ID NO: 105741 - protein, 9 aa, Homo Sapiens
SSEVVIHSA

SEQ ID NO: 105742 - protein, 9 aa, Homo Sapiens
TEADIFHQA

SEQ ID NO: 105743 - protein, 9 aa, Homo Sapiens
TEADLQFRP

SEQ ID NO: 105744 - protein, 9 aa, Homo Sapiens
TEAKPAVVA

SEQ ID NO: 105745 - protein, 9 aa, Homo Sapiens
TEALHFVAA

SEQ ID NO: 105746 - protein, 9 aa, Homo Sapiens
TEAPLNPKA

SEQ ID NO: 105747 - protein, 9 aa, Homo Sapiens
TEAPPIIFA

SEQ ID NO: 105748 - protein, 9 aa, Homo Sapiens
TEFDRQAEV

SEQ ID NO: 105749 - protein, 9 aa, Homo Sapiens
TEFEDIKSG

SEQ ID NO: 105750 - protein, 9 aa, Homo Sapiens
TEFEKILKT

SEQ ID NO: 105751 - protein, 9 aa, Homo Sapiens
TEFIHLISS

SEQ ID NO: 105752 - protein, 9 aa, Homo Sapiens
TEFQGKITP

SEQ ID NO: 105753 - protein, 9 aa, Homo Sapiens
TEHAHQVVV

SEQ ID NO: 105754 - protein, 9 aa, Homo Sapiens
TEHGVKVTA

SEQ ID NO: 105755 - protein, 9 aa, Homo Sapiens
TEIAINVKA

SEQ ID NO: 105756 - protein, 9 aa, Homo Sapiens
TEIEKSISA

SEQ ID NO: 105757 - protein, 9 aa, Homo Sapiens
TEIGSIHSA

SEQ ID NO: 105758 - protein, 9 aa, Homo Sapiens
TEIGVLAKA

SEQ ID NO: 105759 - protein, 9 aa, Homo Sapiens
TEINRLPSA

SEQ ID NO: 105760 - protein, 9 aa, Homo Sapiens
TEIPEQLVP

SEQ ID NO: 105761 - protein, 9 aa, Homo Sapiens
TEIRALVAA

SEQ ID NO: 105762 - protein, 9 aa, Homo Sapiens
TEKALPLSA

SEQ ID NO: 105763 - protein, 9 aa, Homo Sapiens
TEKAVELAA

SEQ ID NO: 105764 - protein, 9 aa, Homo Sapiens
TEKLQEPPA

SEQ ID NO: 105765 - protein, 9 aa, Homo Sapiens
TEKNKEFLP

SEQ ID NO: 105766 - protein, 9 aa, Homo Sapiens
TEKRDFVSA

SEQ ID NO: 105767 - protein, 9 aa, Homo Sapiens
TELDKIRQA

SEQ ID NO: 105768 - protein, 9 aa, Homo Sapiens
TELDRVHIV

SEQ ID NO: 105769 - protein, 9 aa, Homo Sapiens
TELELFKAA

SEQ ID NO: 105770 - protein, 9 aa, Homo Sapiens
TEMEISRAA

SEQ ID NO: 105771 - protein, 9 aa, Homo Sapiens
TERLIGDAA

SEQ ID NO: 105772 - protein, 9 aa, Homo Sapiens
TESQALVSA

SEQ ID NO: 105773 - protein, 9 aa, Homo Sapiens
TESSHFYSA

SEQ ID NO: 105774 - protein, 9 aa, Homo Sapiens
TETDSLVSA

SEQ ID NO: 105775 - protein, 9 aa, Homo Sapiens
TETYVRWSP

SEQ ID NO: 105776 - protein, 9 aa, Homo Sapiens
TEVANIPVA

SEQ ID NO: 105777 - protein, 9 aa, Homo Sapiens
TEVAPLKEA

SEQ ID NO: 105778 - protein, 9 aa, Homo Sapiens
TEVAPPPPP

SEQ ID NO: 105779 - protein, 9 aa, Homo Sapiens
TEVDKILKV

SEQ ID NO: 105780 - protein, 9 aa, Homo Sapiens
TEVKDLPGA

SEQ ID NO: 105781 - protein, 9 aa, Homo Sapiens
TEVSKTPEA

SEQ ID NO: 105782 - protein, 9 aa, Homo Sapiens
TEWDDIHVV

SEQ ID NO: 105783 - protein, 9 aa, Homo Sapiens
TEWLEPLEA

SEQ ID NO: 105784 - protein, 9 aa, Homo Sapiens
TEYEVKDQA

SEQ ID NO: 105785 - protein, 9 aa, Homo Sapiens
TEYSFLKEV

SEQ ID NO: 105786 - protein, 9 aa, Homo Sapiens
TEYTKLWTP

SEQ ID NO: 105787 - protein, 9 aa, Homo Sapiens
VDITTPKAA

SEQ ID NO: 105788 - protein, 9 aa, Homo Sapiens
VEAFLKEAA

SEQ ID NO: 105789 - protein, 9 aa, Homo Sapiens
VEFAKQLAT

SEQ ID NO: 105790 - protein, 9 aa, Homo Sapiens
VEFATHEEA

SEQ ID NO: 105791 - protein, 9 aa, Homo Sapiens
VEFDSVQSA

SEQ ID NO: 105792 - protein, 9 aa, Homo Sapiens
VEFEDVLGA

SEQ ID NO: 105793 - protein, 9 aa, Homo Sapiens
VEFEELLKA

SEQ ID NO: 105794 - protein, 9 aa, Homo Sapiens
VEFETKEQA

SEQ ID NO: 105795 - protein, 9 aa, Homo Sapiens
VEFGNHMES

SEQ ID NO: 105796 - protein, 9 aa, Homo Sapiens
VEFHRLWSA

SEQ ID NO: 105797 - protein, 9 aa, Homo Sapiens
VEFMHYIIA

SEQ ID NO: 105798 - protein, 9 aa, Homo Sapiens
VEFNGKLLA

SEQ ID NO: 105799 - protein, 9 aa, Homo Sapiens
VEFSGKPAA

SEQ ID NO: 105800 - protein, 9 aa, Homo Sapiens
VEHGGFYRT

SEQ ID NO: 105801 - protein, 9 aa, Homo Sapiens
VEHNIRIMA

SEQ ID NO: 105802 - protein, 9 aa, Homo Sapiens
VEIAIDNTA

SEQ ID NO: 105803 - protein, 9 aa, Homo Sapiens
VEIKKIMKA

SEQ ID NO: 105804 - protein, 9 aa, Homo Sapiens
VEILIPVAA

SEQ ID NO: 105805 - protein, 9 aa, Homo Sapiens
VEKPPHLAA

SEQ ID NO: 105806 - protein, 9 aa, Homo Sapiens
VEKPVGVAA

SEQ ID NO: 105807 - protein, 9 aa, Homo Sapiens
VELNKIPTV

SEQ ID NO: 105808 - protein, 9 aa, Homo Sapiens
VELSQLRVA

SEQ ID NO: 105809 - protein, 9 aa, Homo Sapiens
VENPGGYVA

SEQ ID NO: 105810 - protein, 9 aa, Homo Sapiens
VERPAEPVA

SEQ ID NO: 105811 - protein, 9 aa, Homo Sapiens
VERVEELRR

SEQ ID NO: 105812 - protein, 9 aa, Homo Sapiens
VERVIEFAA

SEQ ID NO: 105813 - protein, 9 aa, Homo Sapiens
VETDHIVAA

SEQ ID NO: 105814 - protein, 9 aa, Homo Sapiens
VETNKVPVA

SEQ ID NO: 105815 - protein, 9 aa, Homo Sapiens
VETSKKWAA

SEQ ID NO: 105816 - protein, 9 aa, Homo Sapiens
VEVPETPKA

SEQ ID NO: 105817 - protein, 9 aa, Homo Sapiens
VEVRFVSSA

SEQ ID NO: 105818 - protein, 9 aa, Homo Sapiens
VEVVVKHEA

SEQ ID NO: 105819 - protein, 9 aa, Homo Sapiens
VEWDYKLVP

SEQ ID NO: 105820 - protein, 9 aa, Homo Sapiens
VEYEVPEAA

SEQ ID NO: 105821 - protein, 9 aa, Homo Sapiens
VEYKGLRAG

SEQ ID NO: 105822 - protein, 9 aa, Homo Sapiens
WEIENNPTV

SEQ ID NO: 105823 - protein, 9 aa, Homo Sapiens
WEKPDDFIP

SEQ ID NO: 105824 - protein, 9 aa, Homo Sapiens
WELGSISKP

SEQ ID NO: 105825 - protein, 9 aa, Homo Sapiens
WEMNNIHSV

SEQ ID NO: 105826 - protein, 9 aa, Homo Sapiens
WENISRPEA

SEQ ID NO: 105827 - protein, 9 aa, Homo Sapiens
WEVYLRETA

SEQ ID NO: 105828 - protein, 9 aa, Homo Sapiens
WEYGDPHSP

SEQ ID NO: 105829 - protein, 9 aa, Homo Sapiens
YDYKAEAAA

SEQ ID NO: 105830 - protein, 9 aa, Homo Sapiens
YEAPGVREA

SEQ ID NO: 105831 - protein, 9 aa, Homo Sapiens
YEFAPKKAA

SEQ ID NO: 105832 - protein, 9 aa, Homo Sapiens
YEFGQIINA

SEQ ID NO: 105833 - protein, 9 aa, Homo Sapiens
YEFKGLHKV

SEQ ID NO: 105834 - protein, 9 aa, Homo Sapiens
YEFLKSWTV

SEQ ID NO: 105835 - protein, 9 aa, Homo Sapiens
YEFLVGKPP

SEQ ID NO: 105836 - protein, 9 aa, Homo Sapiens
YEFSKLIFT

SEQ ID NO: 105837 - protein, 9 aa, Homo Sapiens
YEFSQRLEA

SEQ ID NO: 105838 - protein, 9 aa, Homo Sapiens
YEHDDIVST

SEQ ID NO: 105839 - protein, 9 aa, Homo Sapiens
YEHIQVSRA

SEQ ID NO: 105840 - protein, 9 aa, Homo Sapiens
YEKEGEFVA

SEQ ID NO: 105841 - protein, 9 aa, Homo Sapiens
YEKEKELCV

SEQ ID NO: 105842 - protein, 9 aa, Homo Sapiens
YEKILFTEA

SEQ ID NO: 105843 - protein, 9 aa, Homo Sapiens
YEKLTEIIP

SEQ ID NO: 105844 - protein, 9 aa, Homo Sapiens
YELLFKEGV

SEQ ID NO: 105845 - protein, 9 aa, Homo Sapiens
YELLKHAEA

SEQ ID NO: 105846 - protein, 9 aa, Homo Sapiens
YENVPIPCV

SEQ ID NO: 105847 - protein, 9 aa, Homo Sapiens
YERDHAVVV

SEQ ID NO: 105848 - protein, 9 aa, Homo Sapiens
YEREQVIAA

SEQ ID NO: 105849 - protein, 9 aa, Homo Sapiens
YERIYNEIP

SEQ ID NO: 105850 - protein, 9 aa, Homo Sapiens
YERKLIEVA

SEQ ID NO: 105851 - protein, 9 aa, Homo Sapiens
YESEKVGVA

SEQ ID NO: 105852 - protein, 9 aa, Homo Sapiens
YESLVHAVA

SEQ ID NO: 105853 - protein, 9 aa, Homo Sapiens
YETLTITQA

SEQ ID NO: 105854 - protein, 9 aa, Homo Sapiens
YETVVKVKP

SEQ ID NO: 105855 - protein, 9 aa, Homo Sapiens
YEVAVRKSA

SEQ ID NO: 105856 - protein, 9 aa, Homo Sapiens
YEVIYLTEP

SEQ ID NO: 105857 - protein, 9 aa, Homo Sapiens
YEVKELYVP

SEQ ID NO: 105858 - protein, 9 aa, Homo Sapiens
YEVQQVPKV

SEQ ID NO: 105859 - protein, 9 aa, Homo Sapiens
YEVRLTQTV

SEQ ID NO: 105860 - protein, 9 aa, Homo Sapiens
YEWARDHRA

SEQ ID NO: 105861 - protein, 9 aa, Homo Sapiens
YPGPDEKAP

SEQ ID NO: 105862 - protein, 10 aa, Homo Sapiens
AAGPPISEGK

SEQ ID NO: 105863 - protein, 10 aa, Homo Sapiens
AEAAAAVVAA

SEQ ID NO: 105864 - protein, 10 aa, Homo Sapiens
AEAEKLFKQA

SEQ ID NO: 105865 - protein, 10 aa, Homo Sapiens
AEAEPGADPP

SEQ ID NO: 105866 - protein, 10 aa, Homo Sapiens
AEAFEAIPRA

SEQ ID NO: 105867 - protein, 10 aa, Homo Sapiens
AEAFLRQQQA

SEQ ID NO: 105868 - protein, 10 aa, Homo Sapiens
AEAGALPAAA

SEQ ID NO: 105869 - protein, 10 aa, Homo Sapiens
AEAILGQNAA

SEQ ID NO: 105870 - protein, 10 aa, Homo Sapiens
AEALLHPFFA

SEQ ID NO: 105871 - protein, 10 aa, Homo Sapiens
AEALLKKHEA

SEQ ID NO: 105872 - protein, 10 aa, Homo Sapiens
AEALNVFQQA

SEQ ID NO: 105873 - protein, 10 aa, Homo Sapiens
AEALVREAEA

SEQ ID NO: 105874 - protein, 10 aa, Homo Sapiens
AEAMALGREA

SEQ ID NO: 105875 - protein, 10 aa, Homo Sapiens
AEANLVGREA

SEQ ID NO: 105876 - protein, 10 aa, Homo Sapiens
AEAQCIANQV

SEQ ID NO: 105877 - protein, 10 aa, Homo Sapiens
AEAQLRFIQA

SEQ ID NO: 105878 - protein, 10 aa, Homo Sapiens
AEAQLRIDSA

SEQ ID NO: 105879 - protein, 10 aa, Homo Sapiens
AEAQVLSVVA

SEQ ID NO: 105880 - protein, 10 aa, Homo Sapiens
AEATLKLLQA

SEQ ID NO: 105881 - protein, 10 aa, Homo Sapiens
AEAYLGKTVT

SEQ ID NO: 105882 - protein, 10 aa, Homo Sapiens
AECGAFRTGP

SEQ ID NO: 105883 - protein, 10 aa, Homo Sapiens
AECGKAFVES

SEQ ID NO: 105884 - protein, 10 aa, Homo Sapiens
AEDGSRVYVV

SEQ ID NO: 105885 - protein, 10 aa, Homo Sapiens
AEEGPGVPAA

SEQ ID NO: 105886 - protein, 10 aa, Homo Sapiens
AEERIEGRVA

SEQ ID NO: 105887 - protein, 10 aa, Homo Sapiens
AEFKEAFQLF

SEQ ID NO: 105888 - protein, 10 aa, Homo Sapiens
AEFKEAFSLF

SEQ ID NO: 105889 - protein, 10 aa, Homo Sapiens
AEFLEKRRAA

SEQ ID NO: 105890 - protein, 10 aa, Homo Sapiens
AEFLTSKLIA

SEQ ID NO: 105891 - protein, 10 aa, Homo Sapiens
AEFNSTPAVF

SEQ ID NO: 105892 - protein, 10 aa, Homo Sapiens
AEFPGLPEAL

SEQ ID NO: 105893 - protein, 10 aa, Homo Sapiens
AEFTVETRSA

SEQ ID NO: 105894 - protein, 10 aa, Homo Sapiens
AEGEFFIHDA

SEQ ID NO: 105895 - protein, 10 aa, Homo Sapiens
AEGKGGFIRA

SEQ ID NO: 105896 - protein, 10 aa, Homo Sapiens
AEGTGLQIPP

SEQ ID NO: 105897 - protein, 10 aa, Homo Sapiens
AEHNDLQYAA

SEQ ID NO: 105898 - protein, 10 aa, Homo Sapiens
AEIASSLPAA

SEQ ID NO: 105899 - protein, 10 aa, Homo Sapiens
AEIDALYKDL

SEQ ID NO: 105900 - protein, 10 aa, Homo Sapiens
AEIDLGVPPP

SEQ ID NO: 105901 - protein, 10 aa, Homo Sapiens
AEIDMLDIRA

SEQ ID NO: 105902 - protein, 10 aa, Homo Sapiens
AEIEELTASA

SEQ ID NO: 105903 - protein, 10 aa, Homo Sapiens
AEIEIVKDLA

SEQ ID NO: 105904 - protein, 10 aa, Homo Sapiens
AEIELPDVEP

SEQ ID NO: 105905 - protein, 10 aa, Homo Sapiens
AEIGKLRAQA

SEQ ID NO: 105906 - protein, 10 aa, Homo Sapiens
AEIKAIIKKA

SEQ ID NO: 105907 - protein, 10 aa, Homo Sapiens
AEIKMLYEQL

SEQ ID NO: 105908 - protein, 10 aa, Homo Sapiens
AEIKNLFTKT

SEQ ID NO: 105909 - protein, 10 aa, Homo Sapiens
AEIKQGIREV

SEQ ID NO: 105910 - protein, 10 aa, Homo Sapiens
AEIKSGLCVP

SEQ ID NO: 105911 - protein, 10 aa, Homo Sapiens
AEIKVKLIEA

SEQ ID NO: 105912 - protein, 10 aa, Homo Sapiens
AEILKEIREA

SEQ ID NO: 105913 - protein, 10 aa, Homo Sapiens
AEILLSNHYT

SEQ ID NO: 105914 - protein, 10 aa, Homo Sapiens
AEINNIIKIV

SEQ ID NO: 105915 - protein, 10 aa, Homo Sapiens
AEINQKLPVA

SEQ ID NO: 105916 - protein, 10 aa, Homo Sapiens
AEIQELHQSV

SEQ ID NO: 105917 - protein, 10 aa, Homo Sapiens
AEIQGNINKV

SEQ ID NO: 105918 - protein, 10 aa, Homo Sapiens
AEIQRFAFSA

SEQ ID NO: 105919 - protein, 10 aa, Homo Sapiens
AEIRLDKVVP

SEQ ID NO: 105920 - protein, 10 aa, Homo Sapiens
AEIRSVCTEA

SEQ ID NO: 105921 - protein, 10 aa, Homo Sapiens
AEISSKSPVA

SEQ ID NO: 105922 - protein, 10 aa, Homo Sapiens
AEITELIHIA

SEQ ID NO: 105923 - protein, 10 aa, Homo Sapiens
AEITELILKA

SEQ ID NO: 105924 - protein, 10 aa, Homo Sapiens
AEIVPVTTTV

SEQ ID NO: 105925 - protein, 10 aa, Homo Sapiens
AEKHPEVLPA

SEQ ID NO: 105926 - protein, 10 aa, Homo Sapiens
AEKIDGVFAA

SEQ ID NO: 105927 - protein, 10 aa, Homo Sapiens
AEKKFIDIAA

SEQ ID NO: 105928 - protein, 10 aa, Homo Sapiens
AEKPAVPETA

SEQ ID NO: 105929 - protein, 10 aa, Homo Sapiens
AELADVLTEA

SEQ ID NO: 105930 - protein, 10 aa, Homo Sapiens
AELDSVFSSA

SEQ ID NO: 105931 - protein, 10 aa, Homo Sapiens
AELEEKLPVA

SEQ ID NO: 105932 - protein, 10 aa, Homo Sapiens
AELEGREQVA

SEQ ID NO: 105933 - protein, 10 aa, Homo Sapiens
AELEKHMAAA

SEQ ID NO: 105934 - protein, 10 aa, Homo Sapiens
AELENLVNQA

SEQ ID NO: 105935 - protein, 10 aa, Homo Sapiens
AELEVVPIIA

SEQ ID NO: 105936 - protein, 10 aa, Homo Sapiens
AELLINHAQA

SEQ ID NO: 105937 - protein, 10 aa, Homo Sapiens
AELNAQIITA

SEQ ID NO: 105938 - protein, 10 aa, Homo Sapiens
AELPAIMTHA

SEQ ID NO: 105939 - protein, 10 aa, Homo Sapiens
AELQRRFQAA

SEQ ID NO: 105940 - protein, 10 aa, Homo Sapiens
AELYGPFTSA

SEQ ID NO: 105941 - protein, 10 aa, Homo Sapiens
AEMGKNLKEA

SEQ ID NO: 105942 - protein, 10 aa, Homo Sapiens
AEMLYGLIHA

SEQ ID NO: 105943 - protein, 10 aa, Homo Sapiens
AEMNGKLIAA

SEQ ID NO: 105944 - protein, 10 aa, Homo Sapiens
AEMTTRMVAS

SEQ ID NO: 105945 - protein, 10 aa, Homo Sapiens
AEMYVAKFAA

SEQ ID NO: 105946 - protein, 10 aa, Homo Sapiens
AENAGLSSTA

SEQ ID NO: 105947 - protein, 10 aa, Homo Sapiens
AENELGVVVA

SEQ ID NO: 105948 - protein, 10 aa, Homo Sapiens
AENNVFHLVA

SEQ ID NO: 105949 - protein, 10 aa, Homo Sapiens
AEPSFPFQVA

SEQ ID NO: 105950 - protein, 10 aa, Homo Sapiens
AEPYMIFKEA

SEQ ID NO: 105951 - protein, 10 aa, Homo Sapiens
AEQAGCMVSA

SEQ ID NO: 105952 - protein, 10 aa, Homo Sapiens
AEQPSELVSA

SEQ ID NO: 105953 - protein, 10 aa, Homo Sapiens
AEQQKAQFTA

SEQ ID NO: 105954 - protein, 10 aa, Homo Sapiens
AEQRLKAIVA

SEQ ID NO: 105955 - protein, 10 aa, Homo Sapiens
AERIGVDHVA

SEQ ID NO: 105956 - protein, 10 aa, Homo Sapiens
AERLFPANVA

SEQ ID NO: 105957 - protein, 10 aa, Homo Sapiens
AERPGEAAVA

SEQ ID NO: 105958 - protein, 10 aa, Homo Sapiens
AESGCKIQIA

SEQ ID NO: 105959 - protein, 10 aa, Homo Sapiens
AESYHQHFAA

SEQ ID NO: 105960 - protein, 10 aa, Homo Sapiens
AETDVLFNKV

SEQ ID NO: 105961 - protein, 10 aa, Homo Sapiens
AETHYQLGLA

SEQ ID NO: 105962 - protein, 10 aa, Homo Sapiens
AETKDLLVAA

SEQ ID NO: 105963 - protein, 10 aa, Homo Sapiens
AETLFDILVA

SEQ ID NO: 105964 - protein, 10 aa, Homo Sapiens
AETSAVCTAA

SEQ ID NO: 105965 - protein, 10 aa, Homo Sapiens
AETTHALPIP

SEQ ID NO: 105966 - protein, 10 aa, Homo Sapiens
AEVAKITAEA

SEQ ID NO: 105967 - protein, 10 aa, Homo Sapiens
AEVAPVISSA

SEQ ID NO: 105968 - protein, 10 aa, Homo Sapiens
AEVAPVKDMA

SEQ ID NO: 105969 - protein, 10 aa, Homo Sapiens
AEVELKRDEA

SEQ ID NO: 105970 - protein, 10 aa, Homo Sapiens
AEVIILPKKH

SEQ ID NO: 105971 - protein, 10 aa, Homo Sapiens
AEVILKKQQA

SEQ ID NO: 105972 - protein, 10 aa, Homo Sapiens
AEVKGVCTEA

SEQ ID NO: 105973 - protein, 10 aa, Homo Sapiens
AEVLEVFHPT

SEQ ID NO: 105974 - protein, 10 aa, Homo Sapiens
AEVLITTRTA

SEQ ID NO: 105975 - protein, 10 aa, Homo Sapiens
AEVNGGLPSA

SEQ ID NO: 105976 - protein, 10 aa, Homo Sapiens
AEVPDVTATP

SEQ ID NO: 105977 - protein, 10 aa, Homo Sapiens
AEVRVQQQTA

SEQ ID NO: 105978 - protein, 10 aa, Homo Sapiens
AEWEGKGTAS

SEQ ID NO: 105979 - protein, 10 aa, Homo Sapiens
AEWEPPEARA

SEQ ID NO: 105980 - protein, 10 aa, Homo Sapiens
AEWKDGLNEA

SEQ ID NO: 105981 - protein, 10 aa, Homo Sapiens
AEYALKRQEA

SEQ ID NO: 105982 - protein, 10 aa, Homo Sapiens
AEYDNFFQHL

SEQ ID NO: 105983 - protein, 10 aa, Homo Sapiens
AEYDRPNLLP

SEQ ID NO: 105984 - protein, 10 aa, Homo Sapiens
AEYHKLARKL

SEQ ID NO: 105985 - protein, 10 aa, Homo Sapiens
AEYIPLTPAA

SEQ ID NO: 105986 - protein, 10 aa, Homo Sapiens
AEYLLGPLYA

SEQ ID NO: 105987 - protein, 10 aa, Homo Sapiens
AEYNPKRFAA

SEQ ID NO: 105988 - protein, 10 aa, Homo Sapiens
EAKDLQEFIP

SEQ ID NO: 105989 - protein, 10 aa, Homo Sapiens
EEIKDFLLTA

SEQ ID NO: 105990 - protein, 10 aa, Homo Sapiens
EEINLQRNIA

SEQ ID NO: 105991 - protein, 10 aa, Homo Sapiens
EEIQKKLEAA

SEQ ID NO: 105992 - protein, 10 aa, Homo Sapiens
EKLDVREKSK

SEQ ID NO: 105993 - protein, 10 aa, Homo Sapiens
FEANFGKIQA

SEQ ID NO: 105994 - protein, 10 aa, Homo Sapiens
FEAPATINSA

SEQ ID NO: 105995 - protein, 10 aa, Homo Sapiens
FEFTGSHLTV

SEQ ID NO: 105996 - protein, 10 aa, Homo Sapiens
FESEDVAKIV

SEQ ID NO: 105997 - protein, 10 aa, Homo Sapiens
FESSGIHVAA

SEQ ID NO: 105998 - protein, 10 aa, Homo Sapiens
FEVAMQKMIP

SEQ ID NO: 105999 - protein, 10 aa, Homo Sapiens
FEVCDLPVRA

SEQ ID NO: 106000 - protein, 10 aa, Homo Sapiens
FEVKKWNAVA

SEQ ID NO: 106001 - protein, 10 aa, Homo Sapiens
FEVTGQETVA

SEQ ID NO: 106002 - protein, 10 aa, Homo Sapiens
GAEMIRAAPP

SEQ ID NO: 106003 - protein, 10 aa, Homo Sapiens
GEADVPFYYA

SEQ ID NO: 106004 - protein, 10 aa, Homo Sapiens
GEAEAFAIGA

SEQ ID NO: 106005 - protein, 10 aa, Homo Sapiens
GEAFRSLVPA

SEQ ID NO: 106006 - protein, 10 aa, Homo Sapiens
GEALFALPCA

SEQ ID NO: 106007 - protein, 10 aa, Homo Sapiens
GEASAVLAKA

SEQ ID NO: 106008 - protein, 10 aa, Homo Sapiens
GECGFTSQTA

SEQ ID NO: 106009 - protein, 10 aa, Homo Sapiens
GECRPLSKTV

SEQ ID NO: 106010 - protein, 10 aa, Homo Sapiens
GEFEKKYVAT

SEQ ID NO: 106011 - protein, 10 aa, Homo Sapiens
GEFFLKNLVA

SEQ ID NO: 106012 - protein, 10 aa, Homo Sapiens
GEFGGFGSVT

SEQ ID NO: 106013 - protein, 10 aa, Homo Sapiens
GEFGHIQKDC

SEQ ID NO: 106014 - protein, 10 aa, Homo Sapiens
GEFGTIPLVL

SEQ ID NO: 106015 - protein, 10 aa, Homo Sapiens
GEFREAFKEA

SEQ ID NO: 106016 - protein, 10 aa, Homo Sapiens
GEFRQGLISA

SEQ ID NO: 106017 - protein, 10 aa, Homo Sapiens
GEFSFEEIRA

SEQ ID NO: 106018 - protein, 10 aa, Homo Sapiens
GEHERPEFIA

SEQ ID NO: 106019 - protein, 10 aa, Homo Sapiens
GEIALLMNRP

SEQ ID NO: 106020 - protein, 10 aa, Homo Sapiens
GEIDASLKAP

SEQ ID NO: 106021 - protein, 10 aa, Homo Sapiens
GEIESKFNQA

SEQ ID NO: 106022 - protein, 10 aa, Homo Sapiens
GEIPAELRAA

SEQ ID NO: 106023 - protein, 10 aa, Homo Sapiens
GEIQQIPVQL

SEQ ID NO: 106024 - protein, 10 aa, Homo Sapiens
GEIRDLKTKT

SEQ ID NO: 106025 - protein, 10 aa, Homo Sapiens
GEITQLLVPP

SEQ ID NO: 106026 - protein, 10 aa, Homo Sapiens
GEKNNAFIVA

SEQ ID NO: 106027 - protein, 10 aa, Homo Sapiens
GELAGERVAA

SEQ ID NO: 106028 - protein, 10 aa, Homo Sapiens
GELKTQMTSA

SEQ ID NO: 106029 - protein, 10 aa, Homo Sapiens
GELLFVVPRA

SEQ ID NO: 106030 - protein, 10 aa, Homo Sapiens
GELNVDSLIT

SEQ ID NO: 106031 - protein, 10 aa, Homo Sapiens
GELRSYLVSV

SEQ ID NO: 106032 - protein, 10 aa, Homo Sapiens
GELSDTIPVV

SEQ ID NO: 106033 - protein, 10 aa, Homo Sapiens
GEMDPNFISV

SEQ ID NO: 106034 - protein, 10 aa, Homo Sapiens
GEMKPVAAGA

SEQ ID NO: 106035 - protein, 10 aa, Homo Sapiens
GEMKSGVPVL

SEQ ID NO: 106036 - protein, 10 aa, Homo Sapiens
GEMLGRHIVA

SEQ ID NO: 106037 - protein, 10 aa, Homo Sapiens
GEMMVEQRAA

SEQ ID NO: 106038 - protein, 10 aa, Homo Sapiens
GENPHGVKAV

SEQ ID NO: 106039 - protein, 10 aa, Homo Sapiens
GEPRVKHFEA

SEQ ID NO: 106040 - protein, 10 aa, Homo Sapiens
GEPTNFVHTA

SEQ ID NO: 106041 - protein, 10 aa, Homo Sapiens
GEQEGAMVAA

SEQ ID NO: 106042 - protein, 10 aa, Homo Sapiens
GEQRFASIVA

SEQ ID NO: 106043 - protein, 10 aa, Homo Sapiens
GESIDIITRA

SEQ ID NO: 106044 - protein, 10 aa, Homo Sapiens
GETPQVAVIV

SEQ ID NO: 106045 - protein, 10 aa, Homo Sapiens
GETSYIRVYP

SEQ ID NO: 106046 - protein, 10 aa, Homo Sapiens
GEVDLRECVV

SEQ ID NO: 106047 - protein, 10 aa, Homo Sapiens
GEVGDGFKVA

SEQ ID NO: 106048 - protein, 10 aa, Homo Sapiens
GEVIVTKDDA

SEQ ID NO: 106049 - protein, 10 aa, Homo Sapiens
GEVNVLDNLA

SEQ ID NO: 106050 - protein, 10 aa, Homo Sapiens
GEVPCTVTSA

SEQ ID NO: 106051 - protein, 10 aa, Homo Sapiens
GEYDVTMPKV

SEQ ID NO: 106052 - protein, 10 aa, Homo Sapiens
GEYIPGACSA

SEQ ID NO: 106053 - protein, 10 aa, Homo Sapiens
GEYRGSDFTA

SEQ ID NO: 106054 - protein, 10 aa, Homo Sapiens
GEYTDHLHSA

SEQ ID NO: 106055 - protein, 10 aa, Homo Sapiens
GEYTEHLHSA

SEQ ID NO: 106056 - protein, 10 aa, Homo Sapiens
HEAAFPIAVV

SEQ ID NO: 106057 - protein, 10 aa, Homo Sapiens
HEAKGLPRAA

SEQ ID NO: 106058 - protein, 10 aa, Homo Sapiens
HEFLHEVPAA

SEQ ID NO: 106059 - protein, 10 aa, Homo Sapiens
HEIDRYTAIA

SEQ ID NO: 106060 - protein, 10 aa, Homo Sapiens
HEIESLYTKL

SEQ ID NO: 106061 - protein, 10 aa, Homo Sapiens
HEIGPSLYAA

SEQ ID NO: 106062 - protein, 10 aa, Homo Sapiens
HEISNLKNLV

SEQ ID NO: 106063 - protein, 10 aa, Homo Sapiens
HEKQVYDIAA

SEQ ID NO: 106064 - protein, 10 aa, Homo Sapiens
HEMFPAVHAA

SEQ ID NO: 106065 - protein, 10 aa, Homo Sapiens
HEMQIQHPTA

SEQ ID NO: 106066 - protein, 10 aa, Homo Sapiens
HEMQPLAHGA

SEQ ID NO: 106067 - protein, 10 aa, Homo Sapiens
HENILGFIAA

SEQ ID NO: 106068 - protein, 10 aa, Homo Sapiens
HEQEYKNNIA

SEQ ID NO: 106069 - protein, 10 aa, Homo Sapiens
HEVACLDITP

SEQ ID NO: 106070 - protein, 10 aa, Homo Sapiens
HEVEDLIKTA

SEQ ID NO: 106071 - protein, 10 aa, Homo Sapiens
HEVTICNYEA

SEQ ID NO: 106072 - protein, 10 aa, Homo Sapiens
HEVVGVFTVP

SEQ ID NO: 106073 - protein, 10 aa, Homo Sapiens
HEYVHGDIKA

SEQ ID NO: 106074 - protein, 10 aa, Homo Sapiens
HNPADILLHP

SEQ ID NO: 106075 - protein, 10 aa, Homo Sapiens
IEAHLKENAA

SEQ ID NO: 106076 - protein, 10 aa, Homo Sapiens
IEGKDVFREA

SEQ ID NO: 106077 - protein, 10 aa, Homo Sapiens
IEGQGVFREA

SEQ ID NO: 106078 - protein, 10 aa, Homo Sapiens
IEHIIENIVA

SEQ ID NO: 106079 - protein, 10 aa, Homo Sapiens
IEVSLPEAAA

SEQ ID NO: 106080 - protein, 10 aa, Homo Sapiens
KEADFLAQEA

SEQ ID NO: 106081 - protein, 10 aa, Homo Sapiens
KEADLPMTAA

SEQ ID NO: 106082 - protein, 10 aa, Homo Sapiens
KEAEPIPETV

SEQ ID NO: 106083 - protein, 10 aa, Homo Sapiens
KEAEQILATA

SEQ ID NO: 106084 - protein, 10 aa, Homo Sapiens
KEAGFCIQEA

SEQ ID NO: 106085 - protein, 10 aa, Homo Sapiens
KEAIETIVAA

SEQ ID NO: 106086 - protein, 10 aa, Homo Sapiens
KEALGIPAAA

SEQ ID NO: 106087 - protein, 10 aa, Homo Sapiens
KEAQLYAAQA

SEQ ID NO: 106088 - protein, 10 aa, Homo Sapiens
KEAVLNGLVA

SEQ ID NO: 106089 - protein, 10 aa, Homo Sapiens
KEAYVNANQA

SEQ ID NO: 106090 - protein, 10 aa, Homo Sapiens
KECEGIVPVP

SEQ ID NO: 106091 - protein, 10 aa, Homo Sapiens
KEFDGKSLVS

SEQ ID NO: 106092 - protein, 10 aa, Homo Sapiens
KEFEGKTLVS

SEQ ID NO: 106093 - protein, 10 aa, Homo Sapiens
KEFEQLAPVL

SEQ ID NO: 106094 - protein, 10 aa, Homo Sapiens
KEFGDQAEAA

SEQ ID NO: 106095 - protein, 10 aa, Homo Sapiens
KEFKGFGTEV

SEQ ID NO: 106096 - protein, 10 aa, Homo Sapiens
KEFSQSFDAA

SEQ ID NO: 106097 - protein, 10 aa, Homo Sapiens
KEGDFNNLTA

SEQ ID NO: 106098 - protein, 10 aa, Homo Sapiens
KEGDLIAAQA

SEQ ID NO: 106099 - protein, 10 aa, Homo Sapiens
KEGQFKDIIT

SEQ ID NO: 106100 - protein, 10 aa, Homo Sapiens
KEHEEFQITA

SEQ ID NO: 106101 - protein, 10 aa, Homo Sapiens
KEHEVTIFVR

SEQ ID NO: 106102 - protein, 10 aa, Homo Sapiens
KEIAAVIETV

SEQ ID NO: 106103 - protein, 10 aa, Homo Sapiens
KEICADPRVP

SEQ ID NO: 106104 - protein, 10 aa, Homo Sapiens
KEIDAYIVQA

SEQ ID NO: 106105 - protein, 10 aa, Homo Sapiens
KEIEELQSQA

SEQ ID NO: 106106 - protein, 10 aa, Homo Sapiens
KEIEEYIHKP

SEQ ID NO: 106107 - protein, 10 aa, Homo Sapiens
KEIEGIFHAT

SEQ ID NO: 106108 - protein, 10 aa, Homo Sapiens
KEIEQGDVTA

SEQ ID NO: 106109 - protein, 10 aa, Homo Sapiens
KEIFLRELIS

SEQ ID NO: 106110 - protein, 10 aa, Homo Sapiens
KEIGDVENWA

SEQ ID NO: 106111 - protein, 10 aa, Homo Sapiens
KEIHIQPHLA

SEQ ID NO: 106112 - protein, 10 aa, Homo Sapiens
KEIQGFLDCA

SEQ ID NO: 106113 - protein, 10 aa, Homo Sapiens
KEIQSAFVSV

SEQ ID NO: 106114 - protein, 10 aa, Homo Sapiens
KEISKLYQDM

SEQ ID NO: 106115 - protein, 10 aa, Homo Sapiens
KEIYPGQFQP

SEQ ID NO: 106116 - protein, 10 aa, Homo Sapiens
KEKDPKVPSA

SEQ ID NO: 106117 - protein, 10 aa, Homo Sapiens
KEKYIDQEEL

SEQ ID NO: 106118 - protein, 10 aa, Homo Sapiens
KELASALKSA

SEQ ID NO: 106119 - protein, 10 aa, Homo Sapiens
KELDSKTIRA

SEQ ID NO: 106120 - protein, 10 aa, Homo Sapiens
KELEALMPSA

SEQ ID NO: 106121 - protein, 10 aa, Homo Sapiens
KELEGPQIAV

SEQ ID NO: 106122 - protein, 10 aa, Homo Sapiens
KELEGVITKA

SEQ ID NO: 106123 - protein, 10 aa, Homo Sapiens
KELEKILTTA

SEQ ID NO: 106124 - protein, 10 aa, Homo Sapiens
KELTGLLTTA

SEQ ID NO: 106125 - protein, 10 aa, Homo Sapiens
KELYADFIAA

SEQ ID NO: 106126 - protein, 10 aa, Homo Sapiens
KELYKGINQA

SEQ ID NO: 106127 - protein, 10 aa, Homo Sapiens
KELYPGQFKP

SEQ ID NO: 106128 - protein, 10 aa, Homo Sapiens
KEMEAFLVSV

SEQ ID NO: 106129 - protein, 10 aa, Homo Sapiens
KEMEHNTVCA

SEQ ID NO: 106130 - protein, 10 aa, Homo Sapiens
KEMEKSFEVV

SEQ ID NO: 106131 - protein, 10 aa, Homo Sapiens
KEMELPAKEA

SEQ ID NO: 106132 - protein, 10 aa, Homo Sapiens
KEMGLPVGTA

SEQ ID NO: 106133 - protein, 10 aa, Homo Sapiens
KENDRIFVSV

SEQ ID NO: 106134 - protein, 10 aa, Homo Sapiens
KEPELFQTVA

SEQ ID NO: 106135 - protein, 10 aa, Homo Sapiens
KEPEYVPWTA

SEQ ID NO: 106136 - protein, 10 aa, Homo Sapiens
KEQDHIIIIP

SEQ ID NO: 106137 - protein, 10 aa, Homo Sapiens
KESEVKALCA

SEQ ID NO: 106138 - protein, 10 aa, Homo Sapiens
KETDSLKVAA

SEQ ID NO: 106139 - protein, 10 aa, Homo Sapiens
KETELNKVIA

SEQ ID NO: 106140 - protein, 10 aa, Homo Sapiens
KETPFELIEA

SEQ ID NO: 106141 - protein, 10 aa, Homo Sapiens
KEVATAIRGA

SEQ ID NO: 106142 - protein, 10 aa, Homo Sapiens
KEVDWSQNTA

SEQ ID NO: 106143 - protein, 10 aa, Homo Sapiens
KEVEQFTQVA

SEQ ID NO: 106144 - protein, 10 aa, Homo Sapiens
KEVIVKAISA

SEQ ID NO: 106145 - protein, 10 aa, Homo Sapiens
KEWAHATIIP

SEQ ID NO: 106146 - protein, 10 aa, Homo Sapiens
KEWEKFQEEA

SEQ ID NO: 106147 - protein, 10 aa, Homo Sapiens
KEWSQHINGA

SEQ ID NO: 106148 - protein, 10 aa, Homo Sapiens
KEYAAFVLGA

SEQ ID NO: 106149 - protein, 10 aa, Homo Sapiens
KEYAVNEVVA

SEQ ID NO: 106150 - protein, 10 aa, Homo Sapiens
KEYDGFTITI

SEQ ID NO: 106151 - protein, 10 aa, Homo Sapiens
LEAANLSHAA

SEQ ID NO: 106152 - protein, 10 aa, Homo Sapiens
LEAIITPPPA

SEQ ID NO: 106153 - protein, 10 aa, Homo Sapiens
LEGENIVSAA

SEQ ID NO: 106154 - protein, 10 aa, Homo Sapiens
LEHYFHAVVA

SEQ ID NO: 106155 - protein, 10 aa, Homo Sapiens
LEIEFKETQA

SEQ ID NO: 106156 - protein, 10 aa, Homo Sapiens
LEKITEGQAA

SEQ ID NO: 106157 - protein, 10 aa, Homo Sapiens
LEKSEGGLSA

SEQ ID NO: 106158 - protein, 10 aa, Homo Sapiens
LELEDAIHTA

SEQ ID NO: 106159 - protein, 10 aa, Homo Sapiens
LELQLHQIAA

SEQ ID NO: 106160 - protein, 10 aa, Homo Sapiens
LEMDLKDLEA

SEQ ID NO: 106161 - protein, 10 aa, Homo Sapiens
LENSRKLLSA

SEQ ID NO: 106162 - protein, 10 aa, Homo Sapiens
LETTALFVAA

SEQ ID NO: 106163 - protein, 10 aa, Homo Sapiens
MEFAPCQVEA

SEQ ID NO: 106164 - protein, 10 aa, Homo Sapiens
MEVKPSSVTA

SEQ ID NO: 106165 - protein, 10 aa, Homo Sapiens
MEYKGYLVSV

SEQ ID NO: 106166 - protein, 10 aa, Homo Sapiens
NEAWNGFVAA

SEQ ID NO: 106167 - protein, 10 aa, Homo Sapiens
NEINGNWISA

SEQ ID NO: 106168 - protein, 10 aa, Homo Sapiens
NEVFLAKLIA

SEQ ID NO: 106169 - protein, 10 aa, Homo Sapiens
NEYRFAWVEA

SEQ ID NO: 106170 - protein, 10 aa, Homo Sapiens
PARLATAPAP

SEQ ID NO: 106171 - protein, 10 aa, Homo Sapiens
PQEAGLPAGA

SEQ ID NO: 106172 - protein, 10 aa, Homo Sapiens
QECRNIVWIA

SEQ ID NO: 106173 - protein, 10 aa, Homo Sapiens
QEFAEGFVKA

SEQ ID NO: 106174 - protein, 10 aa, Homo Sapiens
QEFDYQPIAA

SEQ ID NO: 106175 - protein, 10 aa, Homo Sapiens
QELDVKRREA

SEQ ID NO: 106176 - protein, 10 aa, Homo Sapiens
QEVDASIFKA

SEQ ID NO: 106177 - protein, 10 aa, Homo Sapiens
QEWPGAGSSA

SEQ ID NO: 106178 - protein, 10 aa, Homo Sapiens
QEYDFKMAQA

SEQ ID NO: 106179 - protein, 10 aa, Homo Sapiens
QEYPMSIQQA

SEQ ID NO: 106180 - protein, 10 aa, Homo Sapiens
REAAEGLRMA

SEQ ID NO: 106181 - protein, 10 aa, Homo Sapiens
REAAKVALSA

SEQ ID NO: 106182 - protein, 10 aa, Homo Sapiens
READLDHYSA

SEQ ID NO: 106183 - protein, 10 aa, Homo Sapiens
REAEFTKSIA

SEQ ID NO: 106184 - protein, 10 aa, Homo Sapiens
REAEHLYHTL

SEQ ID NO: 106185 - protein, 10 aa, Homo Sapiens
REAERLVRQA

SEQ ID NO: 106186 - protein, 10 aa, Homo Sapiens
REAFEAIKAA

SEQ ID NO: 106187 - protein, 10 aa, Homo Sapiens
REALFNEFVA

SEQ ID NO: 106188 - protein, 10 aa, Homo Sapiens
REALRALRAA

SEQ ID NO: 106189 - protein, 10 aa, Homo Sapiens
REALVKKFGA

SEQ ID NO: 106190 - protein, 10 aa, Homo Sapiens
REAPPLPTVA

SEQ ID NO: 106191 - protein, 10 aa, Homo Sapiens
REAQPPCPEA

SEQ ID NO: 106192 - protein, 10 aa, Homo Sapiens
REAQRGFNKV

SEQ ID NO: 106193 - protein, 10 aa, Homo Sapiens
REARDVFAQV

SEQ ID NO: 106194 - protein, 10 aa, Homo Sapiens
REASDLQIAA

SEQ ID NO: 106195 - protein, 10 aa, Homo Sapiens
RECEIKLEAA

SEQ ID NO: 106196 - protein, 10 aa, Homo Sapiens
RECLNQAITA

SEQ ID NO: 106197 - protein, 10 aa, Homo Sapiens
RECVAGPNIA

SEQ ID NO: 106198 - protein, 10 aa, Homo Sapiens
REFDAFVETL

SEQ ID NO: 106199 - protein, 10 aa, Homo Sapiens
REFDELNPSA

SEQ ID NO: 106200 - protein, 10 aa, Homo Sapiens
REFDKRFTSV

SEQ ID NO: 106201 - protein, 10 aa, Homo Sapiens
REFDVGRHIA

SEQ ID NO: 106202 - protein, 10 aa, Homo Sapiens
REFESAIVEA

SEQ ID NO: 106203 - protein, 10 aa, Homo Sapiens
REFEVEKQTA

SEQ ID NO: 106204 - protein, 10 aa, Homo Sapiens
REFGNLHNTV

SEQ ID NO: 106205 - protein, 10 aa, Homo Sapiens
REFKPGPRIP

SEQ ID NO: 106206 - protein, 10 aa, Homo Sapiens
REFLFNAIET

SEQ ID NO: 106207 - protein, 10 aa, Homo Sapiens
REFNFEKWNA

SEQ ID NO: 106208 - protein, 10 aa, Homo Sapiens
REFSDFIQAV

SEQ ID NO: 106209 - protein, 10 aa, Homo Sapiens
REFTYHFRVA

SEQ ID NO: 106210 - protein, 10 aa, Homo Sapiens
REGDKIIYQA

SEQ ID NO: 106211 - protein, 10 aa, Homo Sapiens
REGDLLFTVA

SEQ ID NO: 106212 - protein, 10 aa, Homo Sapiens
REGDREAIVA

SEQ ID NO: 106213 - protein, 10 aa, Homo Sapiens
REGSFKVLVA

SEQ ID NO: 106214 - protein, 10 aa, Homo Sapiens
REGSFRVTTA

SEQ ID NO: 106215 - protein, 10 aa, Homo Sapiens
REHAIDAFRP

SEQ ID NO: 106216 - protein, 10 aa, Homo Sapiens
REHDIAIKFF

SEQ ID NO: 106217 - protein, 10 aa, Homo Sapiens
REHEIGEWEA

SEQ ID NO: 106218 - protein, 10 aa, Homo Sapiens
REHGIRLLEA

SEQ ID NO: 106219 - protein, 10 aa, Homo Sapiens
REHMGNVVEA

SEQ ID NO: 106220 - protein, 10 aa, Homo Sapiens
REHQFYETLP

SEQ ID NO: 106221 - protein, 10 aa, Homo Sapiens
REIAVQIHSV

SEQ ID NO: 106222 - protein, 10 aa, Homo Sapiens
REIDDYIVQA

SEQ ID NO: 106223 - protein, 10 aa, Homo Sapiens
REIEATGLQT

SEQ ID NO: 106224 - protein, 10 aa, Homo Sapiens
REIEEGQPEA

SEQ ID NO: 106225 - protein, 10 aa, Homo Sapiens
REIEELLAEA

SEQ ID NO: 106226 - protein, 10 aa, Homo Sapiens
REIELKVMKF

SEQ ID NO: 106227 - protein, 10 aa, Homo Sapiens
REIFDKARQA

SEQ ID NO: 106228 - protein, 10 aa, Homo Sapiens
REIKDFFEVA

SEQ ID NO: 106229 - protein, 10 aa, Homo Sapiens
REIKDIFYKA

SEQ ID NO: 106230 - protein, 10 aa, Homo Sapiens
REIKSVMNTA

SEQ ID NO: 106231 - protein, 10 aa, Homo Sapiens
REILAGKPAA

SEQ ID NO: 106232 - protein, 10 aa, Homo Sapiens
REILHHVNQA

SEQ ID NO: 106233 - protein, 10 aa, Homo Sapiens
REILLETPAP

SEQ ID NO: 106234 - protein, 10 aa, Homo Sapiens
REILVKELTT

SEQ ID NO: 106235 - protein, 10 aa, Homo Sapiens
REIMPVSTQA

SEQ ID NO: 106236 - protein, 10 aa, Homo Sapiens
REIQDAVARA

SEQ ID NO: 106237 - protein, 10 aa, Homo Sapiens
REIQGLFDEL

SEQ ID NO: 106238 - protein, 10 aa, Homo Sapiens
REIQVQHPAA

SEQ ID NO: 106239 - protein, 10 aa, Homo Sapiens
REKGPVKEVP

SEQ ID NO: 106240 - protein, 10 aa, Homo Sapiens
REKLIQDHMA

SEQ ID NO: 106241 - protein, 10 aa, Homo Sapiens
RELACAGNVA

SEQ ID NO: 106242 - protein, 10 aa, Homo Sapiens
RELDPSLVSA

SEQ ID NO: 106243 - protein, 10 aa, Homo Sapiens
RELEDATETA

SEQ ID NO: 106244 - protein, 10 aa, Homo Sapiens
RELEDLIIEA

SEQ ID NO: 106245 - protein, 10 aa, Homo Sapiens
RELEKAKVAA

SEQ ID NO: 106246 - protein, 10 aa, Homo Sapiens
RELELLPPPP

SEQ ID NO: 106247 - protein, 10 aa, Homo Sapiens
RELENGNLEV

SEQ ID NO: 106248 - protein, 10 aa, Homo Sapiens
RELENIIQET

SEQ ID NO: 106249 - protein, 10 aa, Homo Sapiens
RELENSLHEA

SEQ ID NO: 106250 - protein, 10 aa, Homo Sapiens
RELEVQHPAA

SEQ ID NO: 106251 - protein, 10 aa, Homo Sapiens
RELGVKIAKA

SEQ ID NO: 106252 - protein, 10 aa, Homo Sapiens
RELHLMRNEA

SEQ ID NO: 106253 - protein, 10 aa, Homo Sapiens
RELLIIGGVA

SEQ ID NO: 106254 - protein, 10 aa, Homo Sapiens
RELMGGIGKT

SEQ ID NO: 106255 - protein, 10 aa, Homo Sapiens
RELQGLQNFP

SEQ ID NO: 106256 - protein, 10 aa, Homo Sapiens
RELQICPATA

SEQ ID NO: 106257 - protein, 10 aa, Homo Sapiens
RELQPGVKAV

SEQ ID NO: 106258 - protein, 10 aa, Homo Sapiens
RELQSQIQEA

SEQ ID NO: 106259 - protein, 10 aa, Homo Sapiens
RELQTKINEA

SEQ ID NO: 106260 - protein, 10 aa, Homo Sapiens
RELSEQIQRA

SEQ ID NO: 106261 - protein, 10 aa, Homo Sapiens
REMENIIATV

SEQ ID NO: 106262 - protein, 10 aa, Homo Sapiens
REMILADFQA

SEQ ID NO: 106263 - protein, 10 aa, Homo Sapiens
RENGFHGLVA

SEQ ID NO: 106264 - protein, 10 aa, Homo Sapiens
REQEITAVQA

SEQ ID NO: 106265 - protein, 10 aa, Homo Sapiens
REQGEVRFSA

SEQ ID NO: 106266 - protein, 10 aa, Homo Sapiens
RERFIEQEKA

SEQ ID NO: 106267 - protein, 10 aa, Homo Sapiens
RERFLEDLVA

SEQ ID NO: 106268 - protein, 10 aa, Homo Sapiens
RERGPPQPLP

SEQ ID NO: 106269 - protein, 10 aa, Homo Sapiens
RERPPEEVAA

SEQ ID NO: 106270 - protein, 10 aa, Homo Sapiens
RERVFSEDRA

SEQ ID NO: 106271 - protein, 10 aa, Homo Sapiens
RESACVKVVA

SEQ ID NO: 106272 - protein, 10 aa, Homo Sapiens
RESCIPAQVV

SEQ ID NO: 106273 - protein, 10 aa, Homo Sapiens
RESELQVHSA

SEQ ID NO: 106274 - protein, 10 aa, Homo Sapiens
RESIVKDFAA

SEQ ID NO: 106275 - protein, 10 aa, Homo Sapiens
RETLLAQPAA

SEQ ID NO: 106276 - protein, 10 aa, Homo Sapiens
RETQALILAP

SEQ ID NO: 106277 - protein, 10 aa, Homo Sapiens
REVDIGIPDA

SEQ ID NO: 106278 - protein, 10 aa, Homo Sapiens
REVDPLRIPP

SEQ ID NO: 106279 - protein, 10 aa, Homo Sapiens
REVERVAMTA

SEQ ID NO: 106280 - protein, 10 aa, Homo Sapiens
REVIITPNSA

SEQ ID NO: 106281 - protein, 10 aa, Homo Sapiens
REVIKAMTKA

SEQ ID NO: 106282 - protein, 10 aa, Homo Sapiens
REVQSALSTA

SEQ ID NO: 106283 - protein, 10 aa, Homo Sapiens
REVQYLLNKA

SEQ ID NO: 106284 - protein, 10 aa, Homo Sapiens
REVSDGIIAP

SEQ ID NO: 106285 - protein, 10 aa, Homo Sapiens
REVSQHFNQA

SEQ ID NO: 106286 - protein, 10 aa, Homo Sapiens
REVTVKGIDA

SEQ ID NO: 106287 - protein, 10 aa, Homo Sapiens
REVYVKGLLA

SEQ ID NO: 106288 - protein, 10 aa, Homo Sapiens
REWEAQDMRV

SEQ ID NO: 106289 - protein, 10 aa, Homo Sapiens
REWEEAERQA

SEQ ID NO: 106290 - protein, 10 aa, Homo Sapiens
REYDGNIRQA

SEQ ID NO: 106291 - protein, 10 aa, Homo Sapiens
REYDTSKIEA

SEQ ID NO: 106292 - protein, 10 aa, Homo Sapiens
REYEIEFIYA

SEQ ID NO: 106293 - protein, 10 aa, Homo Sapiens
REYEKYVQDV

SEQ ID NO: 106294 - protein, 10 aa, Homo Sapiens
REYLIKKINA

SEQ ID NO: 106295 - protein, 10 aa, Homo Sapiens
REYMGFIQAM

SEQ ID NO: 106296 - protein, 10 aa, Homo Sapiens
REYQAGDFEA

SEQ ID NO: 106297 - protein, 10 aa, Homo Sapiens
REYQLNDSAA

SEQ ID NO: 106298 - protein, 10 aa, Homo Sapiens
SEAAELRSTA

SEQ ID NO: 106299 - protein, 10 aa, Homo Sapiens
SEADIRGFVA

SEQ ID NO: 106300 - protein, 10 aa, Homo Sapiens
SEADMRFYAA

SEQ ID NO: 106301 - protein, 10 aa, Homo Sapiens
SEAKMRLKAA

SEQ ID NO: 106302 - protein, 10 aa, Homo Sapiens
SEAKPAAVAA

SEQ ID NO: 106303 - protein, 10 aa, Homo Sapiens
SEARGRIPVA

SEQ ID NO: 106304 - protein, 10 aa, Homo Sapiens
SECRDAIQVV

SEQ ID NO: 106305 - protein, 10 aa, Homo Sapiens
SEFGQFLPEA

SEQ ID NO: 106306 - protein, 10 aa, Homo Sapiens
SEFINSKLTA

SEQ ID NO: 106307 - protein, 10 aa, Homo Sapiens
SEFLPSMQSA

SEQ ID NO: 106308 - protein, 10 aa, Homo Sapiens
SEFQPSFHQA

SEQ ID NO: 106309 - protein, 10 aa, Homo Sapiens
SEFSFEELRA

SEQ ID NO: 106310 - protein, 10 aa, Homo Sapiens
SEGARNIVAA

SEQ ID NO: 106311 - protein, 10 aa, Homo Sapiens
SEGFAVIKEA

SEQ ID NO: 106312 - protein, 10 aa, Homo Sapiens
SEGTFGIHVA

SEQ ID NO: 106313 - protein, 10 aa, Homo Sapiens
SEHGLVVIAP

SEQ ID NO: 106314 - protein, 10 aa, Homo Sapiens
SEHKIKQLSA

SEQ ID NO: 106315 - protein, 10 aa, Homo Sapiens
SEIAALLVKP

SEQ ID NO: 106316 - protein, 10 aa, Homo Sapiens
SEIDQVVPAA

SEQ ID NO: 106317 - protein, 10 aa, Homo Sapiens
SEIERQAQVA

SEQ ID NO: 106318 - protein, 10 aa, Homo Sapiens
SEIESKVREA

SEQ ID NO: 106319 - protein, 10 aa, Homo Sapiens
SEIESVKISA

SEQ ID NO: 106320 - protein, 10 aa, Homo Sapiens
SEILDKPHEA

SEQ ID NO: 106321 - protein, 10 aa, Homo Sapiens
SEILMQNWDA

SEQ ID NO: 106322 - protein, 10 aa, Homo Sapiens
SEIPKKILSA

SEQ ID NO: 106323 - protein, 10 aa, Homo Sapiens
SEKSAPEVTA

SEQ ID NO: 106324 - protein, 10 aa, Homo Sapiens
SELGKGPLAA

SEQ ID NO: 106325 - protein, 10 aa, Homo Sapiens
SELITKAVAA

SEQ ID NO: 106326 - protein, 10 aa, Homo Sapiens
SELLKGIPLA

SEQ ID NO: 106327 - protein, 10 aa, Homo Sapiens
SELPGAFEAA

SEQ ID NO: 106328 - protein, 10 aa, Homo Sapiens
SELRAMAKAA

SEQ ID NO: 106329 - protein, 10 aa, Homo Sapiens
SELSGVISSA

SEQ ID NO: 106330 - protein, 10 aa, Homo Sapiens
SETDALRSSA

SEQ ID NO: 106331 - protein, 10 aa, Homo Sapiens
SETDLSLLTA

SEQ ID NO: 106332 - protein, 10 aa, Homo Sapiens
SETSLIGTAA

SEQ ID NO: 106333 - protein, 10 aa, Homo Sapiens
SEVAELKIVA

SEQ ID NO: 106334 - protein, 10 aa, Homo Sapiens
SEVIVRDWLV

SEQ ID NO: 106335 - protein, 10 aa, Homo Sapiens
SEVKALCAKA

SEQ ID NO: 106336 - protein, 10 aa, Homo Sapiens
SEVKNIIDKA

SEQ ID NO: 106337 - protein, 10 aa, Homo Sapiens
SEVQFGHAGA

SEQ ID NO: 106338 - protein, 10 aa, Homo Sapiens
SEVTFALHSA

SEQ ID NO: 106339 - protein, 10 aa, Homo Sapiens
SEWKFTITPP

SEQ ID NO: 106340 - protein, 10 aa, Homo Sapiens
SEYNFEDLSA

SEQ ID NO: 106341 - protein, 10 aa, Homo Sapiens
SEYRNFQACL

SEQ ID NO: 106342 - protein, 10 aa, Homo Sapiens
SEYTPGNPEA

SEQ ID NO: 106343 - protein, 10 aa, Homo Sapiens
TATPGAPAQP

SEQ ID NO: 106344 - protein, 10 aa, Homo Sapiens
TEINSQRIAA

SEQ ID NO: 106345 - protein, 10 aa, Homo Sapiens
TEMDAKTVTA

SEQ ID NO: 106346 - protein, 10 aa, Homo Sapiens
TEVQSLYREI

SEQ ID NO: 106347 - protein, 10 aa, Homo Sapiens
TISSNVASKA

SEQ ID NO: 106348 - protein, 10 aa, Homo Sapiens
TTPTIVPVIP

SEQ ID NO: 106349 - protein, 10 aa, Homo Sapiens
VEAVLAGHEA

SEQ ID NO: 106350 - protein, 10 aa, Homo Sapiens
VEFMHYIIAA

SEQ ID NO: 106351 - protein, 10 aa, Homo Sapiens
VEFNGKLLAS

SEQ ID NO: 106352 - protein, 10 aa, Homo Sapiens
VEIDAHIGCA

SEQ ID NO: 106353 - protein, 10 aa, Homo Sapiens
VEIRSGFLAA

SEQ ID NO: 106354 - protein, 10 aa, Homo Sapiens
VEVDMEKIAA

SEQ ID NO: 106355 - protein, 10 aa, Homo Sapiens
VLSAADKGNV

SEQ ID NO: 106356 - protein, 10 aa, Homo Sapiens
WEVDVQGSKA

SEQ ID NO: 106357 - protein, 10 aa, Homo Sapiens
WEVDVSKKTA

SEQ ID NO: 106358 - protein, 10 aa, Homo Sapiens
WEVDVTGKEA

SEQ ID NO: 106359 - protein, 10 aa, Homo Sapiens
YEAADKWVAA

SEQ ID NO: 106360 - protein, 10 aa, Homo Sapiens
YEGKDLIAQA

SEQ ID NO: 106361 - protein, 10 aa, Homo Sapiens
YEIEKRLSTA

SEQ ID NO: 106362 - protein, 10 aa, Homo Sapiens
YEIKQFLECA

SEQ ID NO: 106363 - protein, 10 aa, Homo Sapiens
YEIQNAPEQA

SEQ ID NO: 106364 - protein, 10 aa, Homo Sapiens
YELGQGHAQA

SEQ ID NO: 106365 - protein, 10 aa, Homo Sapiens
YEQSLHIKSA

SEQ ID NO: 106366 - protein, 10 aa, Homo Sapiens
YESQPIRQTA

SEQ ID NO: 106367 - protein, 10 aa, Homo Sapiens
YETPTGIKVV

SEQ ID NO: 106368 - protein, 10 aa, Homo Sapiens
YETVLPVVEK

SEQ ID NO: 106369 - protein, 10 aa, Homo Sapiens
YEVEILDAKT

SEQ ID NO: 106370 - protein, 10 aa, Homo Sapiens
YEVRLTQTVA

SEQ ID NO: 106371 - protein, 10 aa, Homo Sapiens
YEWSLGIKSV

SEQ ID NO: 106372 - protein, 11 aa, Homo Sapiens
ADAAPDEKVLD

SEQ ID NO: 106373 - protein, 11 aa, Homo Sapiens
AEAALGGLVNA

SEQ ID NO: 106374 - protein, 11 aa, Homo Sapiens
AEADKIGLLLA

SEQ ID NO: 106375 - protein, 11 aa, Homo Sapiens
AEADRTAIHEV

SEQ ID NO: 106376 - protein, 11 aa, Homo Sapiens
AEAEFYRQVSA

SEQ ID NO: 106377 - protein, 11 aa, Homo Sapiens
AEAGPLASVPA

SEQ ID NO: 106378 - protein, 11 aa, Homo Sapiens
AEAKPITEMLP

SEQ ID NO: 106379 - protein, 11 aa, Homo Sapiens
AEASCAALVKA

SEQ ID NO: 106380 - protein, 11 aa, Homo Sapiens
AEEAGAALRTA

SEQ ID NO: 106381 - protein, 11 aa, Homo Sapiens
AEFHQIEGVVA

SEQ ID NO: 106382 - protein, 11 aa, Homo Sapiens
AEFLLEKGYEV

SEQ ID NO: 106383 - protein, 11 aa, Homo Sapiens
AEFPLGPVTTA

SEQ ID NO: 106384 - protein, 11 aa, Homo Sapiens
AEFVSTPELAA

SEQ ID NO: 106385 - protein, 11 aa, Homo Sapiens
AEGPYKIILTA

SEQ ID NO: 106386 - protein, 11 aa, Homo Sapiens
AEHDSILAEKA

SEQ ID NO: 106387 - protein, 11 aa, Homo Sapiens
AEHPLSRAEAA

SEQ ID NO: 106388 - protein, 11 aa, Homo Sapiens
AEIDAHLVALA

SEQ ID NO: 106389 - protein, 11 aa, Homo Sapiens
AEIDSIHQLVV

SEQ ID NO: 106390 - protein, 11 aa, Homo Sapiens
AEIIEKNLKSA

SEQ ID NO: 106391 - protein, 11 aa, Homo Sapiens
AEILELAGNAA

SEQ ID NO: 106392 - protein, 11 aa, Homo Sapiens
AEILNGKEISA

SEQ ID NO: 106393 - protein, 11 aa, Homo Sapiens
AEINKSDHVAA

SEQ ID NO: 106394 - protein, 11 aa, Homo Sapiens
AEIPAGPGREP

SEQ ID NO: 106395 - protein, 11 aa, Homo Sapiens
AEITNACFEPA

SEQ ID NO: 106396 - protein, 11 aa, Homo Sapiens
AEKRDPQELVA

SEQ ID NO: 106397 - protein, 11 aa, Homo Sapiens
AELENLVNQAA

SEQ ID NO: 106398 - protein, 11 aa, Homo Sapiens
AELKALLQSSA

SEQ ID NO: 106399 - protein, 11 aa, Homo Sapiens
AELLFNTIQAA

SEQ ID NO: 106400 - protein, 11 aa, Homo Sapiens
AELLQSQGSQA

SEQ ID NO: 106401 - protein, 11 aa, Homo Sapiens
AELNSYVPVTA

SEQ ID NO: 106402 - protein, 11 aa, Homo Sapiens
AELPAAAQPSA

SEQ ID NO: 106403 - protein, 11 aa, Homo Sapiens
AELRRMQEMIA

SEQ ID NO: 106404 - protein, 11 aa, Homo Sapiens
AEMDKVEGHVA

SEQ ID NO: 106405 - protein, 11 aa, Homo Sapiens
AEMPADSGYPA

SEQ ID NO: 106406 - protein, 11 aa, Homo Sapiens
AEMVALVEQRA

SEQ ID NO: 106407 - protein, 11 aa, Homo Sapiens
AENRRLHELRI

SEQ ID NO: 106408 - protein, 11 aa, Homo Sapiens
AERDLERAEVA

SEQ ID NO: 106409 - protein, 11 aa, Homo Sapiens
AERNSNLVGAA

SEQ ID NO: 106410 - protein, 11 aa, Homo Sapiens
AESGELSRLRA

SEQ ID NO: 106411 - protein, 11 aa, Homo Sapiens
AETDKITLEVA

SEQ ID NO: 106412 - protein, 11 aa, Homo Sapiens
AETKDIPAAIL

SEQ ID NO: 106413 - protein, 11 aa, Homo Sapiens
AETKQLTEMLP

SEQ ID NO: 106414 - protein, 11 aa, Homo Sapiens
AEVDPDTILKA

SEQ ID NO: 106415 - protein, 11 aa, Homo Sapiens
AEVEGLGKGVA

SEQ ID NO: 106416 - protein, 11 aa, Homo Sapiens
AEVLITTRTAA

SEQ ID NO: 106417 - protein, 11 aa, Homo Sapiens
AEVSVPKELVA

SEQ ID NO: 106418 - protein, 11 aa, Homo Sapiens
AEWEIKTITSA

SEQ ID NO: 106419 - protein, 11 aa, Homo Sapiens
AEYIPLTPAAA

SEQ ID NO: 106420 - protein, 11 aa, Homo Sapiens
FEADPPGQVAA

SEQ ID NO: 106421 - protein, 11 aa, Homo Sapiens
FEALVGTLKAA

SEQ ID NO: 106422 - protein, 11 aa, Homo Sapiens
FECDTKLYTSA

SEQ ID NO: 106423 - protein, 11 aa, Homo Sapiens
FEHAVGYALLA

SEQ ID NO: 106424 - protein, 11 aa, Homo Sapiens
FELDADKICRA

SEQ ID NO: 106425 - protein, 11 aa, Homo Sapiens
FEMATRAALQA

SEQ ID NO: 106426 - protein, 11 aa, Homo Sapiens
FEVNIPTDLRA

SEQ ID NO: 106427 - protein, 11 aa, Homo Sapiens
GEALASISHVA

SEQ ID NO: 106428 - protein, 11 aa, Homo Sapiens
GEAPSKTLVET

SEQ ID NO: 106429 - protein, 11 aa, Homo Sapiens
GEARVGSELCA

SEQ ID NO: 106430 - protein, 11 aa, Homo Sapiens
GEAYAPQGWIA

SEQ ID NO: 106431 - protein, 11 aa, Homo Sapiens
GEFAKLSKIEL

SEQ ID NO: 106432 - protein, 11 aa, Homo Sapiens
GEFEIIDDHRA

SEQ ID NO: 106433 - protein, 11 aa, Homo Sapiens
GEFGEIEAIEL

SEQ ID NO: 106434 - protein, 11 aa, Homo Sapiens
GEFGGFGSVTG

SEQ ID NO: 106435 - protein, 11 aa, Homo Sapiens
GEFIIGRVIKA

SEQ ID NO: 106436 - protein, 11 aa, Homo Sapiens
GEFLSQHKAEA

SEQ ID NO: 106437 - protein, 11 aa, Homo Sapiens
GEFPDLHRTIV

SEQ ID NO: 106438 - protein, 11 aa, Homo Sapiens
GEGSFGKAILV

SEQ ID NO: 106439 - protein, 11 aa, Homo Sapiens
GEIIIDGINIA

SEQ ID NO: 106440 - protein, 11 aa, Homo Sapiens
GEIPAELRAAA

SEQ ID NO: 106441 - protein, 11 aa, Homo Sapiens
GEIPVVAIRTA

SEQ ID NO: 106442 - protein, 11 aa, Homo Sapiens
GEIRVGPSHQA

SEQ ID NO: 106443 - protein, 11 aa, Homo Sapiens
GEITLRGLVLP

SEQ ID NO: 106444 - protein, 11 aa, Homo Sapiens
GEITTGPRVSA

SEQ ID NO: 106445 - protein, 11 aa, Homo Sapiens
GEIWVNSPHTA

SEQ ID NO: 106446 - protein, 11 aa, Homo Sapiens
GEKGIGGAVTA

SEQ ID NO: 106447 - protein, 11 aa, Homo Sapiens
GELHDLRGQVA

SEQ ID NO: 106448 - protein, 11 aa, Homo Sapiens
GELKLADFGLA

SEQ ID NO: 106449 - protein, 11 aa, Homo Sapiens
GELKVVNGAAA

SEQ ID NO: 106450 - protein, 11 aa, Homo Sapiens
GELLFVVPRAA

SEQ ID NO: 106451 - protein, 11 aa, Homo Sapiens
GEMASAQYITA

SEQ ID NO: 106452 - protein, 11 aa, Homo Sapiens
GEMKGSAITGP

SEQ ID NO: 106453 - protein, 11 aa, Homo Sapiens
GENSILGQLKA

SEQ ID NO: 106454 - protein, 11 aa, Homo Sapiens
GERIITQGEKA

SEQ ID NO: 106455 - protein, 11 aa, Homo Sapiens
GESDDSILRLA

SEQ ID NO: 106456 - protein, 11 aa, Homo Sapiens
GESIASSHVKA

SEQ ID NO: 106457 - protein, 11 aa, Homo Sapiens
GETPQVAVIVR

SEQ ID NO: 106458 - protein, 11 aa, Homo Sapiens
GEVDLRECVVA

SEQ ID NO: 106459 - protein, 11 aa, Homo Sapiens
GEVIVKGATSA

SEQ ID NO: 106460 - protein, 11 aa, Homo Sapiens
GEVNVLDNLAA

SEQ ID NO: 106461 - protein, 11 aa, Homo Sapiens
GEYAGLATIRA

SEQ ID NO: 106462 - protein, 11 aa, Homo Sapiens
GEYRGSDFTAA

SEQ ID NO: 106463 - protein, 11 aa, Homo Sapiens
GEYVSLGKVEA

SEQ ID NO: 106464 - protein, 11 aa, Homo Sapiens
GLSSEFQIPTA

SEQ ID NO: 106465 - protein, 11 aa, Homo Sapiens
GSIDFGKTVVS

SEQ ID NO: 106466 - protein, 11 aa, Homo Sapiens
HEAAFPIAVVA

SEQ ID NO: 106467 - protein, 11 aa, Homo Sapiens
HEAEPPLFQTA

SEQ ID NO: 106468 - protein, 11 aa, Homo Sapiens
HEASGTTAITA

SEQ ID NO: 106469 - protein, 11 aa, Homo Sapiens
HEFADLNLVQA

SEQ ID NO: 106470 - protein, 11 aa, Homo Sapiens
HEFANLNLVQA

SEQ ID NO: 106471 - protein, 11 aa, Homo Sapiens
HEFQAPFGMEA

SEQ ID NO: 106472 - protein, 11 aa, Homo Sapiens
HEFTDLNLVQA

SEQ ID NO: 106473 - protein, 11 aa, Homo Sapiens
HEFVEEKTKVA

SEQ ID NO: 106474 - protein, 11 aa, Homo Sapiens
HEIEVIGGYLA

SEQ ID NO: 106475 - protein, 11 aa, Homo Sapiens
HEISEGNVATA

SEQ ID NO: 106476 - protein, 11 aa, Homo Sapiens
HELLEQQKRAA

SEQ ID NO: 106477 - protein, 11 aa, Homo Sapiens
HENDAIHKICA

SEQ ID NO: 106478 - protein, 11 aa, Homo Sapiens
HESGELNQYSA

SEQ ID NO: 106479 - protein, 11 aa, Homo Sapiens
HETDLHSSHTP

SEQ ID NO: 106480 - protein, 11 aa, Homo Sapiens
HETPKQPVVRF

SEQ ID NO: 106481 - protein, 11 aa, Homo Sapiens
IELTPPKGYEA

SEQ ID NO: 106482 - protein, 11 aa, Homo Sapiens
IEYARQLEMIV

SEQ ID NO: 106483 - protein, 11 aa, Homo Sapiens
KEAEAQLWWAA

SEQ ID NO: 106484 - protein, 11 aa, Homo Sapiens
KEAEFLQKLLP

SEQ ID NO: 106485 - protein, 11 aa, Homo Sapiens
KEAGDFHFQPA

SEQ ID NO: 106486 - protein, 11 aa, Homo Sapiens
KEAPAPPKAEA

SEQ ID NO: 106487 - protein, 11 aa, Homo Sapiens
KEARIFDRAVA

SEQ ID NO: 106488 - protein, 11 aa, Homo Sapiens
KEATYGERVVA

SEQ ID NO: 106489 - protein, 11 aa, Homo Sapiens
KEFAPVYPIMV

SEQ ID NO: 106490 - protein, 11 aa, Homo Sapiens
KEFDGKSLVSV

SEQ ID NO: 106491 - protein, 11 aa, Homo Sapiens
KEFEGKTLVSV

SEQ ID NO: 106492 - protein, 11 aa, Homo Sapiens
KEFGAVSKVDF

SEQ ID NO: 106493 - protein, 11 aa, Homo Sapiens
KEFGLLKPTSA

SEQ ID NO: 106494 - protein, 11 aa, Homo Sapiens
KEFIGNMITTA

SEQ ID NO: 106495 - protein, 11 aa, Homo Sapiens
KEFKGDEILAA

SEQ ID NO: 106496 - protein, 11 aa, Homo Sapiens
KEFKPLPGRTA

SEQ ID NO: 106497 - protein, 11 aa, Homo Sapiens
KEGDFNNLTAA

SEQ ID NO: 106498 - protein, 11 aa, Homo Sapiens
KEIDAEGKYMA

SEQ ID NO: 106499 - protein, 11 aa, Homo Sapiens
KEIENGHIFTV

SEQ ID NO: 106500 - protein, 11 aa, Homo Sapiens
KEIENTYANVA

SEQ ID NO: 106501 - protein, 11 aa, Homo Sapiens
KEIESRVVFQA

SEQ ID NO: 106502 - protein, 11 aa, Homo Sapiens
KEIEVGGGRKA

SEQ ID NO: 106503 - protein, 11 aa, Homo Sapiens
KEIFISNITQA

SEQ ID NO: 106504 - protein, 11 aa, Homo Sapiens
KEIQGFLDCAA

SEQ ID NO: 106505 - protein, 11 aa, Homo Sapiens
KEIQSSNLETA

SEQ ID NO: 106506 - protein, 11 aa, Homo Sapiens
KELDYGSMTEA

SEQ ID NO: 106507 - protein, 11 aa, Homo Sapiens
KELEPLKEMTA

SEQ ID NO: 106508 - protein, 11 aa, Homo Sapiens
KELEVTNDIIA

SEQ ID NO: 106509 - protein, 11 aa, Homo Sapiens
KELHESAIVKA

SEQ ID NO: 106510 - protein, 11 aa, Homo Sapiens
KENPNQYNYIA

SEQ ID NO: 106511 - protein, 11 aa, Homo Sapiens
KEPSSGTIPQA

SEQ ID NO: 106512 - protein, 11 aa, Homo Sapiens
KESWPKPLAVP

SEQ ID NO: 106513 - protein, 11 aa, Homo Sapiens
KETPCILSVNV

SEQ ID NO: 106514 - protein, 11 aa, Homo Sapiens
KEVEASHLALA

SEQ ID NO: 106515 - protein, 11 aa, Homo Sapiens
KEVEIAYSDVA

SEQ ID NO: 106516 - protein, 11 aa, Homo Sapiens
KEVEILKDIRA

SEQ ID NO: 106517 - protein, 11 aa, Homo Sapiens
KEVFDSAILSA

SEQ ID NO: 106518 - protein, 11 aa, Homo Sapiens
KEYGQIESVRF

SEQ ID NO: 106519 - protein, 11 aa, Homo Sapiens
KEYSFDSRHKP

SEQ ID NO: 106520 - protein, 11 aa, Homo Sapiens
LADKEAGAVAA

SEQ ID NO: 106521 - protein, 11 aa, Homo Sapiens
LAGEYFLQAEL

SEQ ID NO: 106522 - protein, 11 aa, Homo Sapiens
LDLGNNNIATV

SEQ ID NO: 106523 - protein, 11 aa, Homo Sapiens
LEAEKAAVGYS

SEQ ID NO: 106524 - protein, 11 aa, Homo Sapiens
LEFADQENQVA

SEQ ID NO: 106525 - protein, 11 aa, Homo Sapiens
LEIAPHALLQA

SEQ ID NO: 106526 - protein, 11 aa, Homo Sapiens
LEIIMKNGSTA

SEQ ID NO: 106527 - protein, 11 aa, Homo Sapiens
LELDVDKRLTA

SEQ ID NO: 106528 - protein, 11 aa, Homo Sapiens
LELEMNSDLKA

SEQ ID NO: 106529 - protein, 11 aa, Homo Sapiens
LEMLTGQERVA

SEQ ID NO: 106530 - protein, 11 aa, Homo Sapiens
LEVKIGDFGLA

SEQ ID NO: 106531 - protein, 11 aa, Homo Sapiens
LEYDPLSNYSA

SEQ ID NO: 106532 - protein, 11 aa, Homo Sapiens
MEIDQKKPLSA

SEQ ID NO: 106533 - protein, 11 aa, Homo Sapiens
MEIQVNGGTVA

SEQ ID NO: 106534 - protein, 11 aa, Homo Sapiens
NERAIAGALIA

SEQ ID NO: 106535 - protein, 11 aa, Homo Sapiens
NNGSFLAIKAA

SEQ ID NO: 106536 - protein, 11 aa, Homo Sapiens
QEFEIPTGREA

SEQ ID NO: 106537 - protein, 11 aa, Homo Sapiens
QEHMSISGSSA

SEQ ID NO: 106538 - protein, 11 aa, Homo Sapiens
REAAAVRALVA

SEQ ID NO: 106539 - protein, 11 aa, Homo Sapiens
REAELKKLQEA

SEQ ID NO: 106540 - protein, 11 aa, Homo Sapiens
REAEMRNSILA

SEQ ID NO: 106541 - protein, 11 aa, Homo Sapiens
REAEREALLAA

SEQ ID NO: 106542 - protein, 11 aa, Homo Sapiens
REAGEGAVAAV

SEQ ID NO: 106543 - protein, 11 aa, Homo Sapiens
REALFNEFVAA

SEQ ID NO: 106544 - protein, 11 aa, Homo Sapiens
REALTHRKIIA

SEQ ID NO: 106545 - protein, 11 aa, Homo Sapiens
REAPAGALAAV

SEQ ID NO: 106546 - protein, 11 aa, Homo Sapiens
REASSEELKAA

SEQ ID NO: 106547 - protein, 11 aa, Homo Sapiens
REFEALRSCFA

SEQ ID NO: 106548 - protein, 11 aa, Homo Sapiens
REFEPASAREA

SEQ ID NO: 106549 - protein, 11 aa, Homo Sapiens
REFGNPNRPVA

SEQ ID NO: 106550 - protein, 11 aa, Homo Sapiens
REFLWQEGHSA

SEQ ID NO: 106551 - protein, 11 aa, Homo Sapiens
REGNVPNIIIA

SEQ ID NO: 106552 - protein, 11 aa, Homo Sapiens
REIDVRIDRNA

SEQ ID NO: 106553 - protein, 11 aa, Homo Sapiens
REIFLSQPILL

SEQ ID NO: 106554 - protein, 11 aa, Homo Sapiens
REITDQEHNVA

SEQ ID NO: 106555 - protein, 11 aa, Homo Sapiens
REKEPNRLESL

SEQ ID NO: 106556 - protein, 11 aa, Homo Sapiens
REKNPDGFLSA

SEQ ID NO: 106557 - protein, 11 aa, Homo Sapiens
RELAQQVQQVA

SEQ ID NO: 106558 - protein, 11 aa, Homo Sapiens
RELDVEEAHAA

SEQ ID NO: 106559 - protein, 11 aa, Homo Sapiens
RELEAERQIVA

SEQ ID NO: 106560 - protein, 11 aa, Homo Sapiens
RELENLIGISC

SEQ ID NO: 106561 - protein, 11 aa, Homo Sapiens
RELEQTAENKP

SEQ ID NO: 106562 - protein, 11 aa, Homo Sapiens
RELEQYGQCVA

SEQ ID NO: 106563 - protein, 11 aa, Homo Sapiens
RELEVERQIVA

SEQ ID NO: 106564 - protein, 11 aa, Homo Sapiens
RELGFSSNLLC

SEQ ID NO: 106565 - protein, 11 aa, Homo Sapiens
RELIEKGHTAA

SEQ ID NO: 106566 - protein, 11 aa, Homo Sapiens
RELLIIGGVAA

SEQ ID NO: 106567 - protein, 11 aa, Homo Sapiens
RELNRGVIKQV

SEQ ID NO: 106568 - protein, 11 aa, Homo Sapiens
RELQSKEFLSA

SEQ ID NO: 106569 - protein, 11 aa, Homo Sapiens
RELVPQDLWAA

SEQ ID NO: 106570 - protein, 11 aa, Homo Sapiens
REMANLPVPSL

SEQ ID NO: 106571 - protein, 11 aa, Homo Sapiens
REMEEKYIVSA

SEQ ID NO: 106572 - protein, 11 aa, Homo Sapiens
REMEENFAVEA

SEQ ID NO: 106573 - protein, 11 aa, Homo Sapiens
REMSPLVDNIA

SEQ ID NO: 106574 - protein, 11 aa, Homo Sapiens
REMSWIADTYA

SEQ ID NO: 106575 - protein, 11 aa, Homo Sapiens
RENVIMSQILP

SEQ ID NO: 106576 - protein, 11 aa, Homo Sapiens
REPPADVWTPP

SEQ ID NO: 106577 - protein, 11 aa, Homo Sapiens
RERHPGSFDVV

SEQ ID NO: 106578 - protein, 11 aa, Homo Sapiens
RERNPQARISA

SEQ ID NO: 106579 - protein, 11 aa, Homo Sapiens
RESAFAYAIAA

SEQ ID NO: 106580 - protein, 11 aa, Homo Sapiens
RESCIPAQVVA

SEQ ID NO: 106581 - protein, 11 aa, Homo Sapiens
RESEAFHLIKA

SEQ ID NO: 106582 - protein, 11 aa, Homo Sapiens
RESELSSNPAA

SEQ ID NO: 106583 - protein, 11 aa, Homo Sapiens
RESEVVSTITA

SEQ ID NO: 106584 - protein, 11 aa, Homo Sapiens
RESSLILAVTP

SEQ ID NO: 106585 - protein, 11 aa, Homo Sapiens
RESTGAQVQVA

SEQ ID NO: 106586 - protein, 11 aa, Homo Sapiens
RESTKISSLLA

SEQ ID NO: 106587 - protein, 11 aa, Homo Sapiens
RETEGGTVLTA

SEQ ID NO: 106588 - protein, 11 aa, Homo Sapiens
RETGVIEKLLT

SEQ ID NO: 106589 - protein, 11 aa, Homo Sapiens
RETIIMNQILP

SEQ ID NO: 106590 - protein, 11 aa, Homo Sapiens
RETSHVTMVVA

SEQ ID NO: 106591 - protein, 11 aa, Homo Sapiens
REVADFAVQPA

SEQ ID NO: 106592 - protein, 11 aa, Homo Sapiens
REVDDLEQWIA

SEQ ID NO: 106593 - protein, 11 aa, Homo Sapiens
REVDSIGLEEA

SEQ ID NO: 106594 - protein, 11 aa, Homo Sapiens
REVKTGALLSA

SEQ ID NO: 106595 - protein, 11 aa, Homo Sapiens
REVLPVDITTA

SEQ ID NO: 106596 - protein, 11 aa, Homo Sapiens
REVLVDHVVEF

SEQ ID NO: 106597 - protein, 11 aa, Homo Sapiens
REVSTGTTIMA

SEQ ID NO: 106598 - protein, 11 aa, Homo Sapiens
REWYSAKITIA

SEQ ID NO: 106599 - protein, 11 aa, Homo Sapiens
REYDRFYVINY

SEQ ID NO: 106600 - protein, 11 aa, Homo Sapiens
REYDTSKIEAA

SEQ ID NO: 106601 - protein, 11 aa, Homo Sapiens
REYEIPSNLTP

SEQ ID NO: 106602 - protein, 11 aa, Homo Sapiens
REYELVTPVST

SEQ ID NO: 106603 - protein, 11 aa, Homo Sapiens
REYNEVEPIIL

SEQ ID NO: 106604 - protein, 11 aa, Homo Sapiens
REYNWNVKNKA

SEQ ID NO: 106605 - protein, 11 aa, Homo Sapiens
REYQAGDFEAA

SEQ ID NO: 106606 - protein, 11 aa, Homo Sapiens
RMWATQGLAVA

SEQ ID NO: 106607 - protein, 11 aa, Homo Sapiens
SEADIRGFVAA

SEQ ID NO: 106608 - protein, 11 aa, Homo Sapiens
SEAELLTKTLP

SEQ ID NO: 106609 - protein, 11 aa, Homo Sapiens
SEAHSEFLKAA

SEQ ID NO: 106610 - protein, 11 aa, Homo Sapiens
SEALALTQTWA

SEQ ID NO: 106611 - protein, 11 aa, Homo Sapiens
SEFDPPGPNVA

SEQ ID NO: 106612 - protein, 11 aa, Homo Sapiens
SEFLGKRPWFA

SEQ ID NO: 106613 - protein, 11 aa, Homo Sapiens
SEHVFDHPWET

SEQ ID NO: 106614 - protein, 11 aa, Homo Sapiens
SEIAPPGVRGA

SEQ ID NO: 106615 - protein, 11 aa, Homo Sapiens
SEIDESVKLIP

SEQ ID NO: 106616 - protein, 11 aa, Homo Sapiens
SEINLPGNCVA

SEQ ID NO: 106617 - protein, 11 aa, Homo Sapiens
SEIPEKVIQVA

SEQ ID NO: 106618 - protein, 11 aa, Homo Sapiens
SEIQASEVLVA

SEQ ID NO: 106619 - protein, 11 aa, Homo Sapiens
SESRIFNELKT

SEQ ID NO: 106620 - protein, 11 aa, Homo Sapiens
SETLSQAGQKA

SEQ ID NO: 106621 - protein, 11 aa, Homo Sapiens
SEVCLPGAWQA

SEQ ID NO: 106622 - protein, 11 aa, Homo Sapiens
SEVKPPRDITA

SEQ ID NO: 106623 - protein, 11 aa, Homo Sapiens
SEVQLGKTTTA

SEQ ID NO: 106624 - protein, 11 aa, Homo Sapiens
SEVSAENILTV

SEQ ID NO: 106625 - protein, 11 aa, Homo Sapiens
SEWMATGKSTA

SEQ ID NO: 106626 - protein, 11 aa, Homo Sapiens
SEYNNFKSMVV

SEQ ID NO: 106627 - protein, 11 aa, Homo Sapiens
SEYQQYQDATA

SEQ ID NO: 106628 - protein, 11 aa, Homo Sapiens
SEYWDRETRSA

SEQ ID NO: 106629 - protein, 11 aa, Homo Sapiens
TEADPEMIKRA

SEQ ID NO: 106630 - protein, 11 aa, Homo Sapiens
TEAPPIIFATP

SEQ ID NO: 106631 - protein, 11 aa, Homo Sapiens
TEFEQQERLLA

SEQ ID NO: 106632 - protein, 11 aa, Homo Sapiens
TEGNGTESLNS

SEQ ID NO: 106633 - protein, 11 aa, Homo Sapiens
TEIALPGEVSA

SEQ ID NO: 106634 - protein, 11 aa, Homo Sapiens
TEIDPICALQA

SEQ ID NO: 106635 - protein, 11 aa, Homo Sapiens
TEIDPINALQA

SEQ ID NO: 106636 - protein, 11 aa, Homo Sapiens
TELRTEEKVVA

SEQ ID NO: 106637 - protein, 11 aa, Homo Sapiens
TELSFSREYTA

SEQ ID NO: 106638 - protein, 11 aa, Homo Sapiens
TETDLHGSLRV

SEQ ID NO: 106639 - protein, 11 aa, Homo Sapiens
VEFATHEEAVA

SEQ ID NO: 106640 - protein, 11 aa, Homo Sapiens
VEFQHIIPISA

SEQ ID NO: 106641 - protein, 11 aa, Homo Sapiens
VEIDPSMLEVA

SEQ ID NO: 106642 - protein, 11 aa, Homo Sapiens
VESASETIRSA

SEQ ID NO: 106643 - protein, 11 aa, Homo Sapiens
WEREIDERNRP

SEQ ID NO: 106644 - protein, 11 aa, Homo Sapiens
WEYDESHVITA

SEQ ID NO: 106645 - protein, 11 aa, Homo Sapiens
YEAALNSKDAA

SEQ ID NO: 106646 - protein, 11 aa, Homo Sapiens
YEFGESDLRSA

SEQ ID NO: 106647 - protein, 11 aa, Homo Sapiens
YEKEEDWRNAA

SEQ ID NO: 106648 - protein, 11 aa, Homo Sapiens
YELDLGLNHVV

SEQ ID NO: 106649 - protein, 11 aa, Homo Sapiens
YELGEDTIRQA

SEQ ID NO: 106650 - protein, 11 aa, Homo Sapiens
YESLVHAVAGA

SEQ ID NO: 106651 - protein, 11 aa, Homo Sapiens
YEVTPDDKRKA

SEQ ID NO: 106652 - protein, 11 aa, Homo Sapiens
YEYEGGHIKGA

SEQ ID NO: 106653 - protein, 11 aa, Homo Sapiens
YEYEGGHIKTA

SEQ ID NO: 106654 - protein, 8 aa, Homo Sapiens
APAPRPSL

SEQ ID NO: 106655 - protein, 8 aa, Homo Sapiens
APEEHPVL

SEQ ID NO: 106656 - protein, 8 aa, Homo Sapiens
APILKRAL

SEQ ID NO: 106657 - protein, 8 aa, Homo Sapiens
APKDSFAL

SEQ ID NO: 106658 - protein, 8 aa, Homo Sapiens
APLALHLL

SEQ ID NO: 106659 - protein, 8 aa, Homo Sapiens
APLLRWVL

SEQ ID NO: 106660 - protein, 8 aa, Homo Sapiens
APQLLIVL

SEQ ID NO: 106661 - protein, 8 aa, Homo Sapiens
APQTHLGL

SEQ ID NO: 106662 - protein, 8 aa, Homo Sapiens
APRIPVTL

SEQ ID NO: 106663 - protein, 8 aa, Homo Sapiens
APTPVPAL

SEQ ID NO: 106664 - protein, 8 aa, Homo Sapiens
APVQRPKL

SEQ ID NO: 106665 - protein, 8 aa, Homo Sapiens
APYERRAM

SEQ ID NO: 106666 - protein, 8 aa, Homo Sapiens
APYFKPKV

SEQ ID NO: 106667 - protein, 8 aa, Homo Sapiens
APYGRITL

SEQ ID NO: 106668 - protein, 8 aa, Homo Sapiens
APYMRSMM

SEQ ID NO: 106669 - protein, 8 aa, Homo Sapiens
APYNKPSL

SEQ ID NO: 106670 - protein, 8 aa, Homo Sapiens
APYPSPVL

SEQ ID NO: 106671 - protein, 8 aa, Homo Sapiens
CPNHFEGL

SEQ ID NO: 106672 - protein, 8 aa, Homo Sapiens
CPRPGVVL

SEQ ID NO: 106673 - protein, 8 aa, Homo Sapiens
EIAALVID

SEQ ID NO: 106674 - protein, 8 aa, Homo Sapiens
ETYVPKEF

SEQ ID NO: 106675 - protein, 8 aa, Homo Sapiens
FPHPLPSL

SEQ ID NO: 106676 - protein, 8 aa, Homo Sapiens
FPKAVSVF

SEQ ID NO: 106677 - protein, 8 aa, Homo Sapiens
FPKEPVEL

SEQ ID NO: 106678 - protein, 8 aa, Homo Sapiens
FPKKLLEL

SEQ ID NO: 106679 - protein, 8 aa, Homo Sapiens
GPKKGSVL

SEQ ID NO: 106680 - protein, 8 aa, Homo Sapiens
GPKVGVEV

SEQ ID NO: 106681 - protein, 8 aa, Homo Sapiens
HEVKKVTL

SEQ ID NO: 106682 - protein, 8 aa, Homo Sapiens
HPKPVPGF

SEQ ID NO: 106683 - protein, 8 aa, Homo Sapiens
HPMYGNIL

SEQ ID NO: 106684 - protein, 8 aa, Homo Sapiens
HPNVLPVL

SEQ ID NO: 106685 - protein, 8 aa, Homo Sapiens
HPPSHWPL

SEQ ID NO: 106686 - protein, 8 aa, Homo Sapiens
ILKDNLAI

SEQ ID NO: 106687 - protein, 8 aa, Homo Sapiens
IPHIHKSL

SEQ ID NO: 106688 - protein, 8 aa, Homo Sapiens
IPKDPRQW

SEQ ID NO: 106689 - protein, 8 aa, Homo Sapiens
IPMLPHLL

SEQ ID NO: 106690 - protein, 8 aa, Homo Sapiens
IPNARIEL

SEQ ID NO: 106691 - protein, 8 aa, Homo Sapiens
IPPPIKSF

SEQ ID NO: 106692 - protein, 8 aa, Homo Sapiens
IPWNHIRL

SEQ ID NO: 106693 - protein, 8 aa, Homo Sapiens
IPYAGETL

SEQ ID NO: 106694 - protein, 8 aa, Homo Sapiens
IPYAQPPL

SEQ ID NO: 106695 - protein, 8 aa, Homo Sapiens
KPFLGIGL

SEQ ID NO: 106696 - protein, 8 aa, Homo Sapiens
KPKDPVEV

SEQ ID NO: 106697 - protein, 8 aa, Homo Sapiens
KPKGGVIF

SEQ ID NO: 106698 - protein, 8 aa, Homo Sapiens
KPKSWVRL

SEQ ID NO: 106699 - protein, 8 aa, Homo Sapiens
KPRPPQGL

SEQ ID NO: 106700 - protein, 8 aa, Homo Sapiens
KPVNRISL

SEQ ID NO: 106701 - protein, 8 aa, Homo Sapiens
KPYIRTSL

SEQ ID NO: 106702 - protein, 8 aa, Homo Sapiens
KPYQKVGL

SEQ ID NO: 106703 - protein, 8 aa, Homo Sapiens
KPYVRVTM

SEQ ID NO: 106704 - protein, 8 aa, Homo Sapiens
LKMRPSLL

SEQ ID NO: 106705 - protein, 8 aa, Homo Sapiens
LLTTAKNL

SEQ ID NO: 106706 - protein, 8 aa, Homo Sapiens
LMEHIHKL

SEQ ID NO: 106707 - protein, 8 aa, Homo Sapiens
LPAPLPGL

SEQ ID NO: 106708 - protein, 8 aa, Homo Sapiens
LPHSTAAL

SEQ ID NO: 106709 - protein, 8 aa, Homo Sapiens
LPIVTPAL

SEQ ID NO: 106710 - protein, 8 aa, Homo Sapiens
LPKKLALL

SEQ ID NO: 106711 - protein, 8 aa, Homo Sapiens
LPKKPVGL

SEQ ID NO: 106712 - protein, 8 aa, Homo Sapiens
LPKLPISL

SEQ ID NO: 106713 - protein, 8 aa, Homo Sapiens
LPKQPVIV

SEQ ID NO: 106714 - protein, 8 aa, Homo Sapiens
LPKYGVKV

SEQ ID NO: 106715 - protein, 8 aa, Homo Sapiens
LPMTTEVL

SEQ ID NO: 106716 - protein, 8 aa, Homo Sapiens
LPPPPKLL

SEQ ID NO: 106717 - protein, 8 aa, Homo Sapiens
LPQRKPSL

SEQ ID NO: 106718 - protein, 8 aa, Homo Sapiens
LPRKFPSL

SEQ ID NO: 106719 - protein, 8 aa, Homo Sapiens
LPSEWRPL

SEQ ID NO: 106720 - protein, 8 aa, Homo Sapiens
LPTNFRDL

SEQ ID NO: 106721 - protein, 8 aa, Homo Sapiens
LPWVGKEL

SEQ ID NO: 106722 - protein, 8 aa, Homo Sapiens
LPYNGVVL

SEQ ID NO: 106723 - protein, 8 aa, Homo Sapiens
LQAPVLVA

SEQ ID NO: 106724 - protein, 8 aa, Homo Sapiens
MPESGVAL

SEQ ID NO: 106725 - protein, 8 aa, Homo Sapiens
MPGALPSL

SEQ ID NO: 106726 - protein, 8 aa, Homo Sapiens
MPKPPITL

SEQ ID NO: 106727 - protein, 8 aa, Homo Sapiens
MPMKVKQL

SEQ ID NO: 106728 - protein, 8 aa, Homo Sapiens
MPRIGCGL

SEQ ID NO: 106729 - protein, 8 aa, Homo Sapiens
NPKTGPTL

SEQ ID NO: 106730 - protein, 8 aa, Homo Sapiens
NPKVQASL

SEQ ID NO: 106731 - protein, 8 aa, Homo Sapiens
NPRQGYSL

SEQ ID NO: 106732 - protein, 8 aa, Homo Sapiens
PAAKRVKL

SEQ ID NO: 106733 - protein, 8 aa, Homo Sapiens
PAEPKLAF

SEQ ID NO: 106734 - protein, 8 aa, Homo Sapiens
PAKLHNSL

SEQ ID NO: 106735 - protein, 8 aa, Homo Sapiens
PASKRPPL

SEQ ID NO: 106736 - protein, 8 aa, Homo Sapiens
PDGQVITI

SEQ ID NO: 106737 - protein, 8 aa, Homo Sapiens
PEAKKPRL

SEQ ID NO: 106738 - protein, 8 aa, Homo Sapiens
PFSFHHVL

SEQ ID NO: 106739 - protein, 8 aa, Homo Sapiens
PHLVGPHL

SEQ ID NO: 106740 - protein, 8 aa, Homo Sapiens
PINGNGKQ

SEQ ID NO: 106741 - protein, 8 aa, Homo Sapiens
PKLHIVKV

SEQ ID NO: 106742 - protein, 8 aa, Homo Sapiens
PKPKAKTL

SEQ ID NO: 106743 - protein, 8 aa, Homo Sapiens
PKRPPSAF

SEQ ID NO: 106744 - protein, 8 aa, Homo Sapiens
PKSAVGEL

SEQ ID NO: 106745 - protein, 8 aa, Homo Sapiens
PLDSIHSL

SEQ ID NO: 106746 - protein, 8 aa, Homo Sapiens
PLSKIKTL

SEQ ID NO: 106747 - protein, 8 aa, Homo Sapiens
PPEVSKKL

SEQ ID NO: 106748 - protein, 8 aa, Homo Sapiens
PPPPHRLP

SEQ ID NO: 106749 - protein, 8 aa, Homo Sapiens
PQAKKIKL

SEQ ID NO: 106750 - protein, 8 aa, Homo Sapiens
PQKPHLKL

SEQ ID NO: 106751 - protein, 8 aa, Homo Sapiens
PQRVRVTL

SEQ ID NO: 106752 - protein, 8 aa, Homo Sapiens
PRGFARGL

SEQ ID NO: 106753 - protein, 8 aa, Homo Sapiens
PRPPHGEL

SEQ ID NO: 106754 - protein, 8 aa, Homo Sapiens
PRPPPKPM

SEQ ID NO: 106755 - protein, 8 aa, Homo Sapiens
PRSPPRAL

SEQ ID NO: 106756 - protein, 8 aa, Homo Sapiens
PRSPQPEL

SEQ ID NO: 106757 - protein, 8 aa, Homo Sapiens
PSGSKKVI

SEQ ID NO: 106758 - protein, 8 aa, Homo Sapiens
PYSRPKQL

SEQ ID NO: 106759 - protein, 8 aa, Homo Sapiens
QPYAGFVL

SEQ ID NO: 106760 - protein, 8 aa, Homo Sapiens
QPYLTHRL

SEQ ID NO: 106761 - protein, 8 aa, Homo Sapiens
RPFLLRRI

SEQ ID NO: 106762 - protein, 8 aa, Homo Sapiens
RPHNLPVV

SEQ ID NO: 106763 - protein, 8 aa, Homo Sapiens
RPKIQQQF

SEQ ID NO: 106764 - protein, 8 aa, Homo Sapiens
RPKMQEVV

SEQ ID NO: 106765 - protein, 8 aa, Homo Sapiens
RPKVGLGA

SEQ ID NO: 106766 - protein, 8 aa, Homo Sapiens
RPKVLMRL

SEQ ID NO: 106767 - protein, 8 aa, Homo Sapiens
RPLKRPRL

SEQ ID NO: 106768 - protein, 8 aa, Homo Sapiens
RPRDSPTL

SEQ ID NO: 106769 - protein, 8 aa, Homo Sapiens
RPRKAFLL

SEQ ID NO: 106770 - protein, 8 aa, Homo Sapiens
RPRLPRKL

SEQ ID NO: 106771 - protein, 8 aa, Homo Sapiens
RPRPGTGL

SEQ ID NO: 106772 - protein, 8 aa, Homo Sapiens
RPRPPRQL

SEQ ID NO: 106773 - protein, 8 aa, Homo Sapiens
RPRPPTLL

SEQ ID NO: 106774 - protein, 8 aa, Homo Sapiens
RPRTEVSL

SEQ ID NO: 106775 - protein, 8 aa, Homo Sapiens
RPSERPSL

SEQ ID NO: 106776 - protein, 8 aa, Homo Sapiens
RPTCKAVL

SEQ ID NO: 106777 - protein, 8 aa, Homo Sapiens
RPTTGNTL

SEQ ID NO: 106778 - protein, 8 aa, Homo Sapiens
RPVKLFRV

SEQ ID NO: 106779 - protein, 8 aa, Homo Sapiens
RPYAKHWL

SEQ ID NO: 106780 - protein, 8 aa, Homo Sapiens
RPYEKGRL

SEQ ID NO: 106781 - protein, 8 aa, Homo Sapiens
RPYKLQVL

SEQ ID NO: 106782 - protein, 8 aa, Homo Sapiens
RPYKPVVL

SEQ ID NO: 106783 - protein, 8 aa, Homo Sapiens
RPYVRVEL

SEQ ID NO: 106784 - protein, 8 aa, Homo Sapiens
SPAILPPL

SEQ ID NO: 106785 - protein, 8 aa, Homo Sapiens
SPAKLHEL

SEQ ID NO: 106786 - protein, 8 aa, Homo Sapiens
SPAPRTAL

SEQ ID NO: 106787 - protein, 8 aa, Homo Sapiens
SPAVLRPI

SEQ ID NO: 106788 - protein, 8 aa, Homo Sapiens
SPCGHIGL

SEQ ID NO: 106789 - protein, 8 aa, Homo Sapiens
SPFLQPKL

SEQ ID NO: 106790 - protein, 8 aa, Homo Sapiens
SPFPLEAV

SEQ ID NO: 106791 - protein, 8 aa, Homo Sapiens
SPHLLEAL

SEQ ID NO: 106792 - protein, 8 aa, Homo Sapiens
SPHLQVML

SEQ ID NO: 106793 - protein, 8 aa, Homo Sapiens
SPKASLEL

SEQ ID NO: 106794 - protein, 8 aa, Homo Sapiens
SPKEPEQL

SEQ ID NO: 106795 - protein, 8 aa, Homo Sapiens
SPKLLHKF

SEQ ID NO: 106796 - protein, 8 aa, Homo Sapiens
SPKPPVAV

SEQ ID NO: 106797 - protein, 8 aa, Homo Sapiens
SPKQGVSL

SEQ ID NO: 106798 - protein, 8 aa, Homo Sapiens
SPKSDPTL

SEQ ID NO: 106799 - protein, 8 aa, Homo Sapiens
SPKVDPSL

SEQ ID NO: 106800 - protein, 8 aa, Homo Sapiens
SPKVPRTL

SEQ ID NO: 106801 - protein, 8 aa, Homo Sapiens
SPLGSPEL

SEQ ID NO: 106802 - protein, 8 aa, Homo Sapiens
SPNGLYVL

SEQ ID NO: 106803 - protein, 8 aa, Homo Sapiens
SPNKLYTL

SEQ ID NO: 106804 - protein, 8 aa, Homo Sapiens
SPPPVKEL

SEQ ID NO: 106805 - protein, 8 aa, Homo Sapiens
SPQELYEL

SEQ ID NO: 106806 - protein, 8 aa, Homo Sapiens
SPTLLNCL

SEQ ID NO: 106807 - protein, 8 aa, Homo Sapiens
SPTQLPIL

SEQ ID NO: 106808 - protein, 8 aa, Homo Sapiens
SPVVHSVL

SEQ ID NO: 106809 - protein, 8 aa, Homo Sapiens
SPVVRVAV

SEQ ID NO: 106810 - protein, 8 aa, Homo Sapiens
SPYIRTKL

SEQ ID NO: 106811 - protein, 8 aa, Homo Sapiens
SPYYRTKL

SEQ ID NO: 106812 - protein, 8 aa, Homo Sapiens
SVKKGFEF

SEQ ID NO: 106813 - protein, 8 aa, Homo Sapiens
SVKRGFEF

SEQ ID NO: 106814 - protein, 8 aa, Homo Sapiens
TAKRQPIL

SEQ ID NO: 106815 - protein, 8 aa, Homo Sapiens
TPAALAAL

SEQ ID NO: 106816 - protein, 8 aa, Homo Sapiens
TPATLHIL

SEQ ID NO: 106817 - protein, 8 aa, Homo Sapiens
TPAVHASL

SEQ ID NO: 106818 - protein, 8 aa, Homo Sapiens
TPFIRPVM

SEQ ID NO: 106819 - protein, 8 aa, Homo Sapiens
TPHLHSIL

SEQ ID NO: 106820 - protein, 8 aa, Homo Sapiens
TPKPGTCV

SEQ ID NO: 106821 - protein, 8 aa, Homo Sapiens
TPKPIPIL

SEQ ID NO: 106822 - protein, 8 aa, Homo Sapiens
TPLHLAVI

SEQ ID NO: 106823 - protein, 8 aa, Homo Sapiens
TPLLMQAL

SEQ ID NO: 106824 - protein, 8 aa, Homo Sapiens
TPMLLRAL

SEQ ID NO: 106825 - protein, 8 aa, Homo Sapiens
TPQKLPSL

SEQ ID NO: 106826 - protein, 8 aa, Homo Sapiens
TPQRLFAL

SEQ ID NO: 106827 - protein, 8 aa, Homo Sapiens
TPRPGQEL

SEQ ID NO: 106828 - protein, 8 aa, Homo Sapiens
TPTQGSVL

SEQ ID NO: 106829 - protein, 8 aa, Homo Sapiens
VKPVKVSA

SEQ ID NO: 106830 - protein, 8 aa, Homo Sapiens
VPFNHEIL

SEQ ID NO: 106831 - protein, 8 aa, Homo Sapiens
VPHDPVAL

SEQ ID NO: 106832 - protein, 8 aa, Homo Sapiens
VPKEGKVV

SEQ ID NO: 106833 - protein, 8 aa, Homo Sapiens
VPKLQPQI

SEQ ID NO: 106834 - protein, 8 aa, Homo Sapiens
VPKTHLEL

SEQ ID NO: 106835 - protein, 8 aa, Homo Sapiens
VPLKQPTL

SEQ ID NO: 106836 - protein, 8 aa, Homo Sapiens
VPNVHGAL

SEQ ID NO: 106837 - protein, 8 aa, Homo Sapiens
VPPYGVAL

SEQ ID NO: 106838 - protein, 8 aa, Homo Sapiens
VPQALTGL

SEQ ID NO: 106839 - protein, 8 aa, Homo Sapiens
VPRNTRAL

SEQ ID NO: 106840 - protein, 8 aa, Homo Sapiens
VPRPPATL

SEQ ID NO: 106841 - protein, 8 aa, Homo Sapiens
VPSPKVVL

SEQ ID NO: 106842 - protein, 8 aa, Homo Sapiens
VPWKEVLL

SEQ ID NO: 106843 - protein, 8 aa, Homo Sapiens
VQVHIEVL

SEQ ID NO: 106844 - protein, 8 aa, Homo Sapiens
WISKQEYD

SEQ ID NO: 106845 - protein, 8 aa, Homo Sapiens
YPHLLEQL

SEQ ID NO: 106846 - protein, 8 aa, Homo Sapiens
YPLILKEL

SEQ ID NO: 106847 - protein, 8 aa, Homo Sapiens
YPNPLPVL

SEQ ID NO: 106848 - protein, 8 aa, Homo Sapiens
YPYRYPAL

SEQ ID NO: 106849 - protein, 9 aa, Homo Sapiens
AAKAAGVSF

SEQ ID NO: 106850 - protein, 9 aa, Homo Sapiens
AAKAGLLAL

SEQ ID NO: 106851 - protein, 9 aa, Homo Sapiens
AAKDPSPSV

SEQ ID NO: 106852 - protein, 9 aa, Homo Sapiens
AAKLVSEKL

SEQ ID NO: 106853 - protein, 9 aa, Homo Sapiens
AAKRSGLAV

SEQ ID NO: 106854 - protein, 9 aa, Homo Sapiens
AAKTVFEAL

SEQ ID NO: 106855 - protein, 9 aa, Homo Sapiens
AARPATSTL

SEQ ID NO: 106856 - protein, 9 aa, Homo Sapiens
AAYLRALSL

SEQ ID NO: 106857 - protein, 9 aa, Homo Sapiens
AIKNVNTAL

SEQ ID NO: 106858 - protein, 9 aa, Homo Sapiens
ALGRPSPTL

SEQ ID NO: 106859 - protein, 9 aa, Homo Sapiens
ALKKAGLSL

SEQ ID NO: 106860 - protein, 9 aa, Homo Sapiens
ALKNVTVSF

SEQ ID NO: 106861 - protein, 9 aa, Homo Sapiens
APAAAGAAL

SEQ ID NO: 106862 - protein, 9 aa, Homo Sapiens
APAAAPSSL

SEQ ID NO: 106863 - protein, 9 aa, Homo Sapiens
APAAATVAV

SEQ ID NO: 106864 - protein, 9 aa, Homo Sapiens
APAAAVPTL

SEQ ID NO: 106865 - protein, 9 aa, Homo Sapiens
APAAPGLSL

SEQ ID NO: 106866 - protein, 9 aa, Homo Sapiens
APADTSDPL

SEQ ID NO: 106867 - protein, 9 aa, Homo Sapiens
APADYFRIL

SEQ ID NO: 106868 - protein, 9 aa, Homo Sapiens
APAERQIDL

SEQ ID NO: 106869 - protein, 9 aa, Homo Sapiens
APAGSLPKI

SEQ ID NO: 106870 - protein, 9 aa, Homo Sapiens
APALPGPAL

SEQ ID NO: 106871 - protein, 9 aa, Homo Sapiens
APALPGPQF

SEQ ID NO: 106872 - protein, 9 aa, Homo Sapiens
APALVSKKL

SEQ ID NO: 106873 - protein, 9 aa, Homo Sapiens
APAPAAHVA

SEQ ID NO: 106874 - protein, 9 aa, Homo Sapiens
APAPASISL

SEQ ID NO: 106875 - protein, 9 aa, Homo Sapiens
APAPIHNQF

SEQ ID NO: 106876 - protein, 9 aa, Homo Sapiens
APAPKAYVL

SEQ ID NO: 106877 - protein, 9 aa, Homo Sapiens
APAPPKAEA

SEQ ID NO: 106878 - protein, 9 aa, Homo Sapiens
APAPPSKVI

SEQ ID NO: 106879 - protein, 9 aa, Homo Sapiens
APAPTAVVL

SEQ ID NO: 106880 - protein, 9 aa, Homo Sapiens
APAPVQPPM

SEQ ID NO: 106881 - protein, 9 aa, Homo Sapiens
APAQPQPQL

SEQ ID NO: 106882 - protein, 9 aa, Homo Sapiens
APARAVSAV

SEQ ID NO: 106883 - protein, 9 aa, Homo Sapiens
APASRLLAL

SEQ ID NO: 106884 - protein, 9 aa, Homo Sapiens
APASVHSEI

SEQ ID NO: 106885 - protein, 9 aa, Homo Sapiens
APATVGLAF

SEQ ID NO: 106886 - protein, 9 aa, Homo Sapiens
APAYLPRSL

SEQ ID NO: 106887 - protein, 9 aa, Homo Sapiens
APCEVTVPA

SEQ ID NO: 106888 - protein, 9 aa, Homo Sapiens
APCKQRISV

SEQ ID NO: 106889 - protein, 9 aa, Homo Sapiens
APDAKSFVL

SEQ ID NO: 106890 - protein, 9 aa, Homo Sapiens
APDEAAEAL

SEQ ID NO: 106891 - protein, 9 aa, Homo Sapiens
APEDKKEIL

SEQ ID NO: 106892 - protein, 9 aa, Homo Sapiens
APEERPAAL

SEQ ID NO: 106893 - protein, 9 aa, Homo Sapiens
APELLRALL

SEQ ID NO: 106894 - protein, 9 aa, Homo Sapiens
APELPIKIL

SEQ ID NO: 106895 - protein, 9 aa, Homo Sapiens
APELQRHEL

SEQ ID NO: 106896 - protein, 9 aa, Homo Sapiens
APEVTREEL

SEQ ID NO: 106897 - protein, 9 aa, Homo Sapiens
APFCQGHEM

SEQ ID NO: 106898 - protein, 9 aa, Homo Sapiens
APFGPIKSI

SEQ ID NO: 106899 - protein, 9 aa, Homo Sapiens
APFKFDMEL

SEQ ID NO: 106900 - protein, 9 aa, Homo Sapiens
APFLRNVEL

SEQ ID NO: 106901 - protein, 9 aa, Homo Sapiens
APFLRQEFI

SEQ ID NO: 106902 - protein, 9 aa, Homo Sapiens
APFRSEVCF

SEQ ID NO: 106903 - protein, 9 aa, Homo Sapiens
APFTAGTSL

SEQ ID NO: 106904 - protein, 9 aa, Homo Sapiens
APGEVGSVL

SEQ ID NO: 106905 - protein, 9 aa, Homo Sapiens
APGGAIASV

SEQ ID NO: 106906 - protein, 9 aa, Homo Sapiens
APGIRSWSL

SEQ ID NO: 106907 - protein, 9 aa, Homo Sapiens
APGLGPRAV

SEQ ID NO: 106908 - protein, 9 aa, Homo Sapiens
APGLIGNVM

SEQ ID NO: 106909 - protein, 9 aa, Homo Sapiens
APGPGRKEL

SEQ ID NO: 106910 - protein, 9 aa, Homo Sapiens
APGPINFTM

SEQ ID NO: 106911 - protein, 9 aa, Homo Sapiens
APGPPGRSM

SEQ ID NO: 106912 - protein, 9 aa, Homo Sapiens
APGPSGQSV

SEQ ID NO: 106913 - protein, 9 aa, Homo Sapiens
APGSARRPL

SEQ ID NO: 106914 - protein, 9 aa, Homo Sapiens
APGYLPTSL

SEQ ID NO: 106915 - protein, 9 aa, Homo Sapiens
APHAPGPPA

SEQ ID NO: 106916 - protein, 9 aa, Homo Sapiens
APHEILIQI

SEQ ID NO: 106917 - protein, 9 aa, Homo Sapiens
APHEPVKTL

SEQ ID NO: 106918 - protein, 9 aa, Homo Sapiens
APHLSKVSM

SEQ ID NO: 106919 - protein, 9 aa, Homo Sapiens
APHLTHHTL

SEQ ID NO: 106920 - protein, 9 aa, Homo Sapiens
APHLVGPHL

SEQ ID NO: 106921 - protein, 9 aa, Homo Sapiens
APHWRMKQL

SEQ ID NO: 106922 - protein, 9 aa, Homo Sapiens
APIASIHSF

SEQ ID NO: 106923 - protein, 9 aa, Homo Sapiens
APIEAQVRL

SEQ ID NO: 106924 - protein, 9 aa, Homo Sapiens
APISVRVEL

SEQ ID NO: 106925 - protein, 9 aa, Homo Sapiens
APKAGPGVV

SEQ ID NO: 106926 - protein, 9 aa, Homo Sapiens
APKEINIDF

SEQ ID NO: 106927 - protein, 9 aa, Homo Sapiens
APKIGPLGL

SEQ ID NO: 106928 - protein, 9 aa, Homo Sapiens
APKIIDEQL

SEQ ID NO: 106929 - protein, 9 aa, Homo Sapiens
APKKSATQF

SEQ ID NO: 106930 - protein, 9 aa, Homo Sapiens
APKLDPEEM

SEQ ID NO: 106931 - protein, 9 aa, Homo Sapiens
APKPGGLSL

SEQ ID NO: 106932 - protein, 9 aa, Homo Sapiens
APKPKWTQL

SEQ ID NO: 106933 - protein, 9 aa, Homo Sapiens
APKPPFQSH

SEQ ID NO: 106934 - protein, 9 aa, Homo Sapiens
APKPQGPAF

SEQ ID NO: 106935 - protein, 9 aa, Homo Sapiens
APKPQGTKI

SEQ ID NO: 106936 - protein, 9 aa, Homo Sapiens
APKPRLNQL

SEQ ID NO: 106937 - protein, 9 aa, Homo Sapiens
APKPTLLWL

SEQ ID NO: 106938 - protein, 9 aa, Homo Sapiens
APKQLSSCL

SEQ ID NO: 106939 - protein, 9 aa, Homo Sapiens
APKRPPLAF

SEQ ID NO: 106940 - protein, 9 aa, Homo Sapiens
APKRPPSAF

SEQ ID NO: 106941 - protein, 9 aa, Homo Sapiens
APKRPPSGF

SEQ ID NO: 106942 - protein, 9 aa, Homo Sapiens
APKSMQSAI

SEQ ID NO: 106943 - protein, 9 aa, Homo Sapiens
APKSPSQDV

SEQ ID NO: 106944 - protein, 9 aa, Homo Sapiens
APKSQIVML

SEQ ID NO: 106945 - protein, 9 aa, Homo Sapiens
APKVSPEAV

SEQ ID NO: 106946 - protein, 9 aa, Homo Sapiens
APKYILEQF

SEQ ID NO: 106947 - protein, 9 aa, Homo Sapiens
APLAVFQML

SEQ ID NO: 106948 - protein, 9 aa, Homo Sapiens
APLDSIHSL

SEQ ID NO: 106949 - protein, 9 aa, Homo Sapiens
APLFTAEAL

SEQ ID NO: 106950 - protein, 9 aa, Homo Sapiens
APLGGTPTL

SEQ ID NO: 106951 - protein, 9 aa, Homo Sapiens
APLGQFVSL

SEQ ID NO: 106952 - protein, 9 aa, Homo Sapiens
APLLKKQTL

SEQ ID NO: 106953 - protein, 9 aa, Homo Sapiens
APLPGMTSL

SEQ ID NO: 106954 - protein, 9 aa, Homo Sapiens
APLPSIKEI

SEQ ID NO: 106955 - protein, 9 aa, Homo Sapiens
APLQHRHVL

SEQ ID NO: 106956 - protein, 9 aa, Homo Sapiens
APLQRSQSL

SEQ ID NO: 106957 - protein, 9 aa, Homo Sapiens
APMIKKIAF

SEQ ID NO: 106958 - protein, 9 aa, Homo Sapiens
APMKAPKRM

SEQ ID NO: 106959 - protein, 9 aa, Homo Sapiens
APMMVSNIL

SEQ ID NO: 106960 - protein, 9 aa, Homo Sapiens
APMNVRRGL

SEQ ID NO: 106961 - protein, 9 aa, Homo Sapiens
APMPPIIHA

SEQ ID NO: 106962 - protein, 9 aa, Homo Sapiens
APMQEKVTL

SEQ ID NO: 106963 - protein, 9 aa, Homo Sapiens
APMSAAHQL

SEQ ID NO: 106964 - protein, 9 aa, Homo Sapiens
APMSEPRVL

SEQ ID NO: 106965 - protein, 9 aa, Homo Sapiens
APMSPSTAL

SEQ ID NO: 106966 - protein, 9 aa, Homo Sapiens
APMTPKQIL

SEQ ID NO: 106967 - protein, 9 aa, Homo Sapiens
APNEKMKQV

SEQ ID NO: 106968 - protein, 9 aa, Homo Sapiens
APNERPYSL

SEQ ID NO: 106969 - protein, 9 aa, Homo Sapiens
APNGAGLVL

SEQ ID NO: 106970 - protein, 9 aa, Homo Sapiens
APNYRLKSL

SEQ ID NO: 106971 - protein, 9 aa, Homo Sapiens
APPDVWKKV

SEQ ID NO: 106972 - protein, 9 aa, Homo Sapiens
APPPGGWPL

SEQ ID NO: 106973 - protein, 9 aa, Homo Sapiens
APPRPGSSF

SEQ ID NO: 106974 - protein, 9 aa, Homo Sapiens
APPTETKSL

SEQ ID NO: 106975 - protein, 9 aa, Homo Sapiens
APQGGMAAL

SEQ ID NO: 106976 - protein, 9 aa, Homo Sapiens
APQLPNPEV

SEQ ID NO: 106977 - protein, 9 aa, Homo Sapiens
APQPAKPRL

SEQ ID NO: 106978 - protein, 9 aa, Homo Sapiens
APQPAQVAL

SEQ ID NO: 106979 - protein, 9 aa, Homo Sapiens
APQPGKYVI

SEQ ID NO: 106980 - protein, 9 aa, Homo Sapiens
APQRAHEVL

SEQ ID NO: 106981 - protein, 9 aa, Homo Sapiens
APQRVRVTL

SEQ ID NO: 106982 - protein, 9 aa, Homo Sapiens
APQSFRAEL

SEQ ID NO: 106983 - protein, 9 aa, Homo Sapiens
APQSNKERL

SEQ ID NO: 106984 - protein, 9 aa, Homo Sapiens
APQTSTPSL

SEQ ID NO: 106985 - protein, 9 aa, Homo Sapiens
APQVHIFSL

SEQ ID NO: 106986 - protein, 9 aa, Homo Sapiens
APRAAREAL

SEQ ID NO: 106987 - protein, 9 aa, Homo Sapiens
APRAVFPSI

SEQ ID NO: 106988 - protein, 9 aa, Homo Sapiens
APRDGRVVF

SEQ ID NO: 106989 - protein, 9 aa, Homo Sapiens
APRDPIPYL

SEQ ID NO: 106990 - protein, 9 aa, Homo Sapiens
APRDSLRSL

SEQ ID NO: 106991 - protein, 9 aa, Homo Sapiens
APRDSYHLV

SEQ ID NO: 106992 - protein, 9 aa, Homo Sapiens
APRELGLGL

SEQ ID NO: 106993 - protein, 9 aa, Homo Sapiens
APRGDKEEL

SEQ ID NO: 106994 - protein, 9 aa, Homo Sapiens
APRGPGAEL

SEQ ID NO: 106995 - protein, 9 aa, Homo Sapiens
APRHGLQSL

SEQ ID NO: 106996 - protein, 9 aa, Homo Sapiens
APRKPDWDL

SEQ ID NO: 106997 - protein, 9 aa, Homo Sapiens
APRLPITGL

SEQ ID NO: 106998 - protein, 9 aa, Homo Sapiens
APRLQSEVA

SEQ ID NO: 106999 - protein, 9 aa, Homo Sapiens
APRPAGSYL

SEQ ID NO: 107000 - protein, 9 aa, Homo Sapiens
APRPGPRAV

SEQ ID NO: 107001 - protein, 9 aa, Homo Sapiens
APRPPPARL

SEQ ID NO: 107002 - protein, 9 aa, Homo Sapiens
APRPPPKPM

SEQ ID NO: 107003 - protein, 9 aa, Homo Sapiens
APRPPVSAA

SEQ ID NO: 107004 - protein, 9 aa, Homo Sapiens
APRQPGLMA

SEQ ID NO: 107005 - protein, 9 aa, Homo Sapiens
APRSEVEAL

SEQ ID NO: 107006 - protein, 9 aa, Homo Sapiens
APRSTEESL

SEQ ID NO: 107007 - protein, 9 aa, Homo Sapiens
APRVKEGPL

SEQ ID NO: 107008 - protein, 9 aa, Homo Sapiens
APRVPVQAL

SEQ ID NO: 107009 - protein, 9 aa, Homo Sapiens
APRYSAPVI

SEQ ID NO: 107010 - protein, 9 aa, Homo Sapiens
APSAKVKLL

SEQ ID NO: 107011 - protein, 9 aa, Homo Sapiens
APSESFVVL

SEQ ID NO: 107012 - protein, 9 aa, Homo Sapiens
APSGIGSIF

SEQ ID NO: 107013 - protein, 9 aa, Homo Sapiens
APSLKQFSL

SEQ ID NO: 107014 - protein, 9 aa, Homo Sapiens
APSLVAPAL

SEQ ID NO: 107015 - protein, 9 aa, Homo Sapiens
APSPLQPAL

SEQ ID NO: 107016 - protein, 9 aa, Homo Sapiens
APSPLSSSL

SEQ ID NO: 107017 - protein, 9 aa, Homo Sapiens
APSPPLRAL

SEQ ID NO: 107018 - protein, 9 aa, Homo Sapiens
APSPRPLSL

SEQ ID NO: 107019 - protein, 9 aa, Homo Sapiens
APSPVIPRL

SEQ ID NO: 107020 - protein, 9 aa, Homo Sapiens
APSRSLNEL

SEQ ID NO: 107021 - protein, 9 aa, Homo Sapiens
APSSPRPAL

SEQ ID NO: 107022 - protein, 9 aa, Homo Sapiens
APSTIIFHL

SEQ ID NO: 107023 - protein, 9 aa, Homo Sapiens
APSYPMASL

SEQ ID NO: 107024 - protein, 9 aa, Homo Sapiens
APTDVLEAL

SEQ ID NO: 107025 - protein, 9 aa, Homo Sapiens
APTGSGKTI

SEQ ID NO: 107026 - protein, 9 aa, Homo Sapiens
APTPARPVL

SEQ ID NO: 107027 - protein, 9 aa, Homo Sapiens
APTPLRPGF

SEQ ID NO: 107028 - protein, 9 aa, Homo Sapiens
APVAPHFAL

SEQ ID NO: 107029 - protein, 9 aa, Homo Sapiens
APVFRDYVF

SEQ ID NO: 107030 - protein, 9 aa, Homo Sapiens
APVGIRHRL

SEQ ID NO: 107031 - protein, 9 aa, Homo Sapiens
APVGSGSAL

SEQ ID NO: 107032 - protein, 9 aa, Homo Sapiens
APVGVHPSL

SEQ ID NO: 107033 - protein, 9 aa, Homo Sapiens
APVLPHTAV

SEQ ID NO: 107034 - protein, 9 aa, Homo Sapiens
APVSPRPGL

SEQ ID NO: 107035 - protein, 9 aa, Homo Sapiens
APVYFPEEL

SEQ ID NO: 107036 - protein, 9 aa, Homo Sapiens
APVYLAAVI

SEQ ID NO: 107037 - protein, 9 aa, Homo Sapiens
APWARVDEM

SEQ ID NO: 107038 - protein, 9 aa, Homo Sapiens
APWDRVVDL

SEQ ID NO: 107039 - protein, 9 aa, Homo Sapiens
APWEKRVDL

SEQ ID NO: 107040 - protein, 9 aa, Homo Sapiens
APYFKGTAV

SEQ ID NO: 107041 - protein, 9 aa, Homo Sapiens
APYGGPIAL

SEQ ID NO: 107042 - protein, 9 aa, Homo Sapiens
APYSRPKQL

SEQ ID NO: 107043 - protein, 9 aa, Homo Sapiens
ASVKKPHTL

SEQ ID NO: 107044 - protein, 9 aa, Homo Sapiens
ATKRIFSAL

SEQ ID NO: 107045 - protein, 9 aa, Homo Sapiens
AVEPGRPPL

SEQ ID NO: 107046 - protein, 9 aa, Homo Sapiens
AVKDVAKAL

SEQ ID NO: 107047 - protein, 9 aa, Homo Sapiens
AVKEKSPSL

SEQ ID NO: 107048 - protein, 9 aa, Homo Sapiens
AVKESTITL

SEQ ID NO: 107049 - protein, 9 aa, Homo Sapiens
AVKKVIASM

SEQ ID NO: 107050 - protein, 9 aa, Homo Sapiens
AVKPAVTTL

SEQ ID NO: 107051 - protein, 9 aa, Homo Sapiens
AVKPSVTCV

SEQ ID NO: 107052 - protein, 9 aa, Homo Sapiens
AVKQRGISL

SEQ ID NO: 107053 - protein, 9 aa, Homo Sapiens
AVPRPGAPA

SEQ ID NO: 107054 - protein, 9 aa, Homo Sapiens
AVRKPAISL

SEQ ID NO: 107055 - protein, 9 aa, Homo Sapiens
CPRPGVVLL

SEQ ID NO: 107056 - protein, 9 aa, Homo Sapiens
DAIKLNPRL

SEQ ID NO: 107057 - protein, 9 aa, Homo Sapiens
DPKSKFFEL

SEQ ID NO: 107058 - protein, 9 aa, Homo Sapiens
EPCGLRGAL

SEQ ID NO: 107059 - protein, 9 aa, Homo Sapiens
EPCNGRTAL

SEQ ID NO: 107060 - protein, 9 aa, Homo Sapiens
EPLRPGPAL

SEQ ID NO: 107061 - protein, 9 aa, Homo Sapiens
EPPDIVKKL

SEQ ID NO: 107062 - protein, 9 aa, Homo Sapiens
EPPEKKMAL

SEQ ID NO: 107063 - protein, 9 aa, Homo Sapiens
EPPPVKIAW

SEQ ID NO: 107064 - protein, 9 aa, Homo Sapiens
EPQAKNISV

SEQ ID NO: 107065 - protein, 9 aa, Homo Sapiens
EPQGPRPVL

SEQ ID NO: 107066 - protein, 9 aa, Homo Sapiens
EPQPERSSV

SEQ ID NO: 107067 - protein, 9 aa, Homo Sapiens
EPQPPHSVL

SEQ ID NO: 107068 - protein, 9 aa, Homo Sapiens
EPRHEFPEL

SEQ ID NO: 107069 - protein, 9 aa, Homo Sapiens
EPRPAEPPA

SEQ ID NO: 107070 - protein, 9 aa, Homo Sapiens
EPRPNEECL

SEQ ID NO: 107071 - protein, 9 aa, Homo Sapiens
EPRPPHGEL

SEQ ID NO: 107072 - protein, 9 aa, Homo Sapiens
EPRYPPHSL

SEQ ID NO: 107073 - protein, 9 aa, Homo Sapiens
EPSDAIRVV

SEQ ID NO: 107074 - protein, 9 aa, Homo Sapiens
EVKPNTPVL

SEQ ID NO: 107075 - protein, 9 aa, Homo Sapiens
EVKPVGPDL

SEQ ID NO: 107076 - protein, 9 aa, Homo Sapiens
EVKPYSIEM

SEQ ID NO: 107077 - protein, 9 aa, Homo Sapiens
EVKRPGESL

SEQ ID NO: 107078 - protein, 9 aa, Homo Sapiens
FPAGIVRVF

SEQ ID NO: 107079 - protein, 9 aa, Homo Sapiens
FPAPDRKKL

SEQ ID NO: 107080 - protein, 9 aa, Homo Sapiens
FPCEPFKFL

SEQ ID NO: 107081 - protein, 9 aa, Homo Sapiens
FPEPSRPPL

SEQ ID NO: 107082 - protein, 9 aa, Homo Sapiens
FPESERPEM

SEQ ID NO: 107083 - protein, 9 aa, Homo Sapiens
FPFSRPELL

SEQ ID NO: 107084 - protein, 9 aa, Homo Sapiens
FPGISVKSV

SEQ ID NO: 107085 - protein, 9 aa, Homo Sapiens
FPGVTPRVL

SEQ ID NO: 107086 - protein, 9 aa, Homo Sapiens
FPHKRLQQL

SEQ ID NO: 107087 - protein, 9 aa, Homo Sapiens
FPHLVHAEL

SEQ ID NO: 107088 - protein, 9 aa, Homo Sapiens
FPIEVRHYL

SEQ ID NO: 107089 - protein, 9 aa, Homo Sapiens
FPIHVQTSL

SEQ ID NO: 107090 - protein, 9 aa, Homo Sapiens
FPKAAIKRL

SEQ ID NO: 107091 - protein, 9 aa, Homo Sapiens
FPKAVSVFF

SEQ ID NO: 107092 - protein, 9 aa, Homo Sapiens
FPKDPVYTF

SEQ ID NO: 107093 - protein, 9 aa, Homo Sapiens
FPKGFSVEL

SEQ ID NO: 107094 - protein, 9 aa, Homo Sapiens
FPKGSRSVV

SEQ ID NO: 107095 - protein, 9 aa, Homo Sapiens
FPKIPPHSL

SEQ ID NO: 107096 - protein, 9 aa, Homo Sapiens
FPKRPKHML

SEQ ID NO: 107097 - protein, 9 aa, Homo Sapiens
FPKWFHEGL

SEQ ID NO: 107098 - protein, 9 aa, Homo Sapiens
FPMEIRQYL

SEQ ID NO: 107099 - protein, 9 aa, Homo Sapiens
FPMELRQFL

SEQ ID NO: 107100 - protein, 9 aa, Homo Sapiens
FPMSPVTSV

SEQ ID NO: 107101 - protein, 9 aa, Homo Sapiens
FPNAIEHTL

SEQ ID NO: 107102 - protein, 9 aa, Homo Sapiens
FPNIPGKSL

SEQ ID NO: 107103 - protein, 9 aa, Homo Sapiens
FPNKQGYVL

SEQ ID NO: 107104 - protein, 9 aa, Homo Sapiens
FPPKKLFSL

SEQ ID NO: 107105 - protein, 9 aa, Homo Sapiens
FPPPVSPRL

SEQ ID NO: 107106 - protein, 9 aa, Homo Sapiens
FPQEGMHQM

SEQ ID NO: 107107 - protein, 9 aa, Homo Sapiens
FPQEIRQDL

SEQ ID NO: 107108 - protein, 9 aa, Homo Sapiens
FPQEVKDLL

SEQ ID NO: 107109 - protein, 9 aa, Homo Sapiens
FPQHLRHLL

SEQ ID NO: 107110 - protein, 9 aa, Homo Sapiens
FPQHTIASL

SEQ ID NO: 107111 - protein, 9 aa, Homo Sapiens
FPQVGRTAL

SEQ ID NO: 107112 - protein, 9 aa, Homo Sapiens
FPRDKLAEL

SEQ ID NO: 107113 - protein, 9 aa, Homo Sapiens
FPRDPEIEM

SEQ ID NO: 107114 - protein, 9 aa, Homo Sapiens
FPREPRPKL

SEQ ID NO: 107115 - protein, 9 aa, Homo Sapiens
FPRFPHRGL

SEQ ID NO: 107116 - protein, 9 aa, Homo Sapiens
FPRHIEPEL

SEQ ID NO: 107117 - protein, 9 aa, Homo Sapiens
FPRRAQPKM

SEQ ID NO: 107118 - protein, 9 aa, Homo Sapiens
FPRTPARSV

SEQ ID NO: 107119 - protein, 9 aa, Homo Sapiens
FPSNFIKEL

SEQ ID NO: 107120 - protein, 9 aa, Homo Sapiens
FPTGNIHMF

SEQ ID NO: 107121 - protein, 9 aa, Homo Sapiens
FPTVQHQEL

SEQ ID NO: 107122 - protein, 9 aa, Homo Sapiens
FPVGRVHRL

SEQ ID NO: 107123 - protein, 9 aa, Homo Sapiens
FPWEKPTTL

SEQ ID NO: 107124 - protein, 9 aa, Homo Sapiens
FPWEVPKKL

SEQ ID NO: 107125 - protein, 9 aa, Homo Sapiens
FPYMTHPSV

SEQ ID NO: 107126 - protein, 9 aa, Homo Sapiens
FSKPPNPAL

SEQ ID NO: 107127 - protein, 9 aa, Homo Sapiens
FVKKIGGIF

SEQ ID NO: 107128 - protein, 9 aa, Homo Sapiens
GEYKFQNAL

SEQ ID NO: 107129 - protein, 9 aa, Homo Sapiens
GIKEYFNVM

SEQ ID NO: 107130 - protein, 9 aa, Homo Sapiens
GPAPSRPAL

SEQ ID NO: 107131 - protein, 9 aa, Homo Sapiens
GPASDHPSL

SEQ ID NO: 107132 - protein, 9 aa, Homo Sapiens
GPESRTISL

SEQ ID NO: 107133 - protein, 9 aa, Homo Sapiens
GPFFRTEQL

SEQ ID NO: 107134 - protein, 9 aa, Homo Sapiens
GPIYPGHGM

SEQ ID NO: 107135 - protein, 9 aa, Homo Sapiens
GPKAHIRKL

SEQ ID NO: 107136 - protein, 9 aa, Homo Sapiens
GPKDAIRAL

SEQ ID NO: 107137 - protein, 9 aa, Homo Sapiens
GPKGTMKML

SEQ ID NO: 107138 - protein, 9 aa, Homo Sapiens
GPKPKTFLL

SEQ ID NO: 107139 - protein, 9 aa, Homo Sapiens
GPKPLFRRM

SEQ ID NO: 107140 - protein, 9 aa, Homo Sapiens
GPKPTEVVL

SEQ ID NO: 107141 - protein, 9 aa, Homo Sapiens
GPKQQFSTL

SEQ ID NO: 107142 - protein, 9 aa, Homo Sapiens
GPLPPHLAL

SEQ ID NO: 107143 - protein, 9 aa, Homo Sapiens
GPMPKHIAF

SEQ ID NO: 107144 - protein, 9 aa, Homo Sapiens
GPNAVIFTL

SEQ ID NO: 107145 - protein, 9 aa, Homo Sapiens
GPNSNIRTV

SEQ ID NO: 107146 - protein, 9 aa, Homo Sapiens
GPPGTGKTI

SEQ ID NO: 107147 - protein, 9 aa, Homo Sapiens
GPQAVRAAL

SEQ ID NO: 107148 - protein, 9 aa, Homo Sapiens
GPQEKKVVV

SEQ ID NO: 107149 - protein, 9 aa, Homo Sapiens
GPRAPGPSL

SEQ ID NO: 107150 - protein, 9 aa, Homo Sapiens
GPREAFRQL

SEQ ID NO: 107151 - protein, 9 aa, Homo Sapiens
GPREQEPEL

SEQ ID NO: 107152 - protein, 9 aa, Homo Sapiens
GPRGMGTAL

SEQ ID NO: 107153 - protein, 9 aa, Homo Sapiens
GPRSSLRVL

SEQ ID NO: 107154 - protein, 9 aa, Homo Sapiens
GPRWADPQI

SEQ ID NO: 107155 - protein, 9 aa, Homo Sapiens
GPSNVFKIV

SEQ ID NO: 107156 - protein, 9 aa, Homo Sapiens
GVKKPTKAL

SEQ ID NO: 107157 - protein, 9 aa, Homo Sapiens
GVRPPAPSL

SEQ ID NO: 107158 - protein, 9 aa, Homo Sapiens
HAKEYIQQL

SEQ ID NO: 107159 - protein, 9 aa, Homo Sapiens
HAKMIFMEL

SEQ ID NO: 107160 - protein, 9 aa, Homo Sapiens
HAKPPTPSL

SEQ ID NO: 107161 - protein, 9 aa, Homo Sapiens
HIKDSFHSL

SEQ ID NO: 107162 - protein, 9 aa, Homo Sapiens
HLKPISREL

SEQ ID NO: 107163 - protein, 9 aa, Homo Sapiens
HLKPLVPSL

SEQ ID NO: 107164 - protein, 9 aa, Homo Sapiens
HPAAFPLPV

SEQ ID NO: 107165 - protein, 9 aa, Homo Sapiens
HPAAKMIVM

SEQ ID NO: 107166 - protein, 9 aa, Homo Sapiens
HPADSVVSV

SEQ ID NO: 107167 - protein, 9 aa, Homo Sapiens
HPAGPRTVF

SEQ ID NO: 107168 - protein, 9 aa, Homo Sapiens
HPDQAQAIL

SEQ ID NO: 107169 - protein, 9 aa, Homo Sapiens
HPEPPKAEL

SEQ ID NO: 107170 - protein, 9 aa, Homo Sapiens
HPEQCIKVL

SEQ ID NO: 107171 - protein, 9 aa, Homo Sapiens
HPESERISM

SEQ ID NO: 107172 - protein, 9 aa, Homo Sapiens
HPESVSQSL

SEQ ID NO: 107173 - protein, 9 aa, Homo Sapiens
HPFFGRVVL

SEQ ID NO: 107174 - protein, 9 aa, Homo Sapiens
HPFFKDMSL

SEQ ID NO: 107175 - protein, 9 aa, Homo Sapiens
HPFHILIAL

SEQ ID NO: 107176 - protein, 9 aa, Homo Sapiens
HPFLQRQQL

SEQ ID NO: 107177 - protein, 9 aa, Homo Sapiens
HPFPFHPSL

SEQ ID NO: 107178 - protein, 9 aa, Homo Sapiens
HPGPVNSEL

SEQ ID NO: 107179 - protein, 9 aa, Homo Sapiens
HPHGSYSRL

SEQ ID NO: 107180 - protein, 9 aa, Homo Sapiens
HPHLVAEAF

SEQ ID NO: 107181 - protein, 9 aa, Homo Sapiens
HPINPRVAL

SEQ ID NO: 107182 - protein, 9 aa, Homo Sapiens
HPIRVVNAL

SEQ ID NO: 107183 - protein, 9 aa, Homo Sapiens
HPISNNNSL

SEQ ID NO: 107184 - protein, 9 aa, Homo Sapiens
HPIYNIKSL

SEQ ID NO: 107185 - protein, 9 aa, Homo Sapiens
HPKCLIVDF

SEQ ID NO: 107186 - protein, 9 aa, Homo Sapiens
HPKDNLIKL

SEQ ID NO: 107187 - protein, 9 aa, Homo Sapiens
HPKENIIAV

SEQ ID NO: 107188 - protein, 9 aa, Homo Sapiens
HPKFVGKTL

SEQ ID NO: 107189 - protein, 9 aa, Homo Sapiens
HPKKPGPSL

SEQ ID NO: 107190 - protein, 9 aa, Homo Sapiens
HPKNPEVGL

SEQ ID NO: 107191 - protein, 9 aa, Homo Sapiens
HPKPEGLAA

SEQ ID NO: 107192 - protein, 9 aa, Homo Sapiens
HPKPSDLHL

SEQ ID NO: 107193 - protein, 9 aa, Homo Sapiens
HPKPTQRTF

SEQ ID NO: 107194 - protein, 9 aa, Homo Sapiens
HPKRPLLAF

SEQ ID NO: 107195 - protein, 9 aa, Homo Sapiens
HPKSVIVGL

SEQ ID NO: 107196 - protein, 9 aa, Homo Sapiens
HPKTGRISV

SEQ ID NO: 107197 - protein, 9 aa, Homo Sapiens
HPKVGRVSI

SEQ ID NO: 107198 - protein, 9 aa, Homo Sapiens
HPKYGSIPK

SEQ ID NO: 107199 - protein, 9 aa, Homo Sapiens
HPLDPIGCL

SEQ ID NO: 107200 - protein, 9 aa, Homo Sapiens
HPLEGTHEL

SEQ ID NO: 107201 - protein, 9 aa, Homo Sapiens
HPLINPVAF

SEQ ID NO: 107202 - protein, 9 aa, Homo Sapiens
HPLSNPAEL

SEQ ID NO: 107203 - protein, 9 aa, Homo Sapiens
HPMAYQLQL

SEQ ID NO: 107204 - protein, 9 aa, Homo Sapiens
HPMGGLNAM

SEQ ID NO: 107205 - protein, 9 aa, Homo Sapiens
HPMNSISSL

SEQ ID NO: 107206 - protein, 9 aa, Homo Sapiens
HPMPRVNEI

SEQ ID NO: 107207 - protein, 9 aa, Homo Sapiens
HPNFTEKTI

SEQ ID NO: 107208 - protein, 9 aa, Homo Sapiens
HPNGNITEL

SEQ ID NO: 107209 - protein, 9 aa, Homo Sapiens
HPNLHGPEI

SEQ ID NO: 107210 - protein, 9 aa, Homo Sapiens
HPNSLMKKI

SEQ ID NO: 107211 - protein, 9 aa, Homo Sapiens
HPQPGAVEL

SEQ ID NO: 107212 - protein, 9 aa, Homo Sapiens
HPQTHETAL

SEQ ID NO: 107213 - protein, 9 aa, Homo Sapiens
HPRAYFMQL

SEQ ID NO: 107214 - protein, 9 aa, Homo Sapiens
HPRDFFSRL

SEQ ID NO: 107215 - protein, 9 aa, Homo Sapiens
HPRDPNLLL

SEQ ID NO: 107216 - protein, 9 aa, Homo Sapiens
HPRLVVIVL

SEQ ID NO: 107217 - protein, 9 aa, Homo Sapiens
HPRPYFKSV

SEQ ID NO: 107218 - protein, 9 aa, Homo Sapiens
HPRSPTPTL

SEQ ID NO: 107219 - protein, 9 aa, Homo Sapiens
HPRTCPRPL

SEQ ID NO: 107220 - protein, 9 aa, Homo Sapiens
HPRYFGPNL

SEQ ID NO: 107221 - protein, 9 aa, Homo Sapiens
HPRYNLIVV

SEQ ID NO: 107222 - protein, 9 aa, Homo Sapiens
HPSASYNQL

SEQ ID NO: 107223 - protein, 9 aa, Homo Sapiens
HPSDIEVDL

SEQ ID NO: 107224 - protein, 9 aa, Homo Sapiens
HPSFQVKEL

SEQ ID NO: 107225 - protein, 9 aa, Homo Sapiens
HPSGATPTL

SEQ ID NO: 107226 - protein, 9 aa, Homo Sapiens
HPSLPASSL

SEQ ID NO: 107227 - protein, 9 aa, Homo Sapiens
HPSNVLHFF

SEQ ID NO: 107228 - protein, 9 aa, Homo Sapiens
HPSSYTKVI

SEQ ID NO: 107229 - protein, 9 aa, Homo Sapiens
HPTAAVKML

SEQ ID NO: 107230 - protein, 9 aa, Homo Sapiens
HPTDERVAL

SEQ ID NO: 107231 - protein, 9 aa, Homo Sapiens
HPTFNLKSL

SEQ ID NO: 107232 - protein, 9 aa, Homo Sapiens
HPTGKMFIL

SEQ ID NO: 107233 - protein, 9 aa, Homo Sapiens
HPVNAFKLM

SEQ ID NO: 107234 - protein, 9 aa, Homo Sapiens
HPVSREWTL

SEQ ID NO: 107235 - protein, 9 aa, Homo Sapiens
HPYIQYNVL

SEQ ID NO: 107236 - protein, 9 aa, Homo Sapiens
HPYLFPVAA

SEQ ID NO: 107237 - protein, 9 aa, Homo Sapiens
HPYNKLWSL

SEQ ID NO: 107238 - protein, 9 aa, Homo Sapiens
HPYNPHPGF

SEQ ID NO: 107239 - protein, 9 aa, Homo Sapiens
HPYQRIVTA

SEQ ID NO: 107240 - protein, 9 aa, Homo Sapiens
HVNCTIKEL

SEQ ID NO: 107241 - protein, 9 aa, Homo Sapiens
HVQQNRAVL

SEQ ID NO: 107242 - protein, 9 aa, Homo Sapiens
IAEMVRHAL

SEQ ID NO: 107243 - protein, 9 aa, Homo Sapiens
IAHAKAVAA

SEQ ID NO: 107244 - protein, 9 aa, Homo Sapiens
IANAVVKEL

SEQ ID NO: 107245 - protein, 9 aa, Homo Sapiens
IARLPSSTL

SEQ ID NO: 107246 - protein, 9 aa, Homo Sapiens
IIRENSISL

SEQ ID NO: 107247 - protein, 9 aa, Homo Sapiens
ILKKVLEAL

SEQ ID NO: 107248 - protein, 9 aa, Homo Sapiens
ILKPTGNQL

SEQ ID NO: 107249 - protein, 9 aa, Homo Sapiens
ILMEHIHKL

SEQ ID NO: 107250 - protein, 9 aa, Homo Sapiens
ILPRSLALI

SEQ ID NO: 107251 - protein, 9 aa, Homo Sapiens
IPAAPVPSL

SEQ ID NO: 107252 - protein, 9 aa, Homo Sapiens
IPADTFAAL

SEQ ID NO: 107253 - protein, 9 aa, Homo Sapiens
IPAEGRVAL

SEQ ID NO: 107254 - protein, 9 aa, Homo Sapiens
IPAIRDITL

SEQ ID NO: 107255 - protein, 9 aa, Homo Sapiens
IPAKKYVKL

SEQ ID NO: 107256 - protein, 9 aa, Homo Sapiens
IPAKLHNSL

SEQ ID NO: 107257 - protein, 9 aa, Homo Sapiens
IPAKPPVSF

SEQ ID NO: 107258 - protein, 9 aa, Homo Sapiens
IPALRDISI

SEQ ID NO: 107259 - protein, 9 aa, Homo Sapiens
IPANPPMAF

SEQ ID NO: 107260 - protein, 9 aa, Homo Sapiens
IPAPKRVCL

SEQ ID NO: 107261 - protein, 9 aa, Homo Sapiens
IPASGLHLF

SEQ ID NO: 107262 - protein, 9 aa, Homo Sapiens
IPASKVFSL

SEQ ID NO: 107263 - protein, 9 aa, Homo Sapiens
IPAYKLETL

SEQ ID NO: 107264 - protein, 9 aa, Homo Sapiens
IPCPTVVLL

SEQ ID NO: 107265 - protein, 9 aa, Homo Sapiens
IPDHFRPPL

SEQ ID NO: 107266 - protein, 9 aa, Homo Sapiens
IPDSSKISL

SEQ ID NO: 107267 - protein, 9 aa, Homo Sapiens
IPEAGKALL

SEQ ID NO: 107268 - protein, 9 aa, Homo Sapiens
IPEELKPWL

SEQ ID NO: 107269 - protein, 9 aa, Homo Sapiens
IPEKFQHIL

SEQ ID NO: 107270 - protein, 9 aa, Homo Sapiens
IPELHRPVV

SEQ ID NO: 107271 - protein, 9 aa, Homo Sapiens
IPELPDPSL

SEQ ID NO: 107272 - protein, 9 aa, Homo Sapiens
IPESKLTSL

SEQ ID NO: 107273 - protein, 9 aa, Homo Sapiens
IPFAAPTAL

SEQ ID NO: 107274 - protein, 9 aa, Homo Sapiens
IPFEFPLHL

SEQ ID NO: 107275 - protein, 9 aa, Homo Sapiens
IPFEKKPAL

SEQ ID NO: 107276 - protein, 9 aa, Homo Sapiens
IPFWRNTAV

SEQ ID NO: 107277 - protein, 9 aa, Homo Sapiens
IPGEPGFPL

SEQ ID NO: 107278 - protein, 9 aa, Homo Sapiens
IPGLNLNAL

SEQ ID NO: 107279 - protein, 9 aa, Homo Sapiens
IPGMGGNSL

SEQ ID NO: 107280 - protein, 9 aa, Homo Sapiens
IPHMDIEAL

SEQ ID NO: 107281 - protein, 9 aa, Homo Sapiens
IPIKKSDPV

SEQ ID NO: 107282 - protein, 9 aa, Homo Sapiens
IPISLHTSL

SEQ ID NO: 107283 - protein, 9 aa, Homo Sapiens
IPKDNRLYL

SEQ ID NO: 107284 - protein, 9 aa, Homo Sapiens
IPKEHHRFV

SEQ ID NO: 107285 - protein, 9 aa, Homo Sapiens
IPKEIIEKL

SEQ ID NO: 107286 - protein, 9 aa, Homo Sapiens
IPKEKFWKI

SEQ ID NO: 107287 - protein, 9 aa, Homo Sapiens
IPKENFSCL

SEQ ID NO: 107288 - protein, 9 aa, Homo Sapiens
IPKEVADIF

SEQ ID NO: 107289 - protein, 9 aa, Homo Sapiens
IPKFAVATL

SEQ ID NO: 107290 - protein, 9 aa, Homo Sapiens
IPKGRPPKL

SEQ ID NO: 107291 - protein, 9 aa, Homo Sapiens
IPKGVSRKL

SEQ ID NO: 107292 - protein, 9 aa, Homo Sapiens
IPKHINPVA

SEQ ID NO: 107293 - protein, 9 aa, Homo Sapiens
IPKKEIHTV

SEQ ID NO: 107294 - protein, 9 aa, Homo Sapiens
IPKKEKPEL

SEQ ID NO: 107295 - protein, 9 aa, Homo Sapiens
IPKKGFVEV

SEQ ID NO: 107296 - protein, 9 aa, Homo Sapiens
IPKKHISQI

SEQ ID NO: 107297 - protein, 9 aa, Homo Sapiens
IPKKPIPRI

SEQ ID NO: 107298 - protein, 9 aa, Homo Sapiens
IPKNNPPTL

SEQ ID NO: 107299 - protein, 9 aa, Homo Sapiens
IPKNPPSGF

SEQ ID NO: 107300 - protein, 9 aa, Homo Sapiens
IPKNSPPTL

SEQ ID NO: 107301 - protein, 9 aa, Homo Sapiens
IPKNVATET

SEQ ID NO: 107302 - protein, 9 aa, Homo Sapiens
IPKPLNPAL

SEQ ID NO: 107303 - protein, 9 aa, Homo Sapiens
IPKPPVPEI

SEQ ID NO: 107304 - protein, 9 aa, Homo Sapiens
IPKPVHTRF

SEQ ID NO: 107305 - protein, 9 aa, Homo Sapiens
IPKRPIPTI

SEQ ID NO: 107306 - protein, 9 aa, Homo Sapiens
IPKSAIRVI

SEQ ID NO: 107307 - protein, 9 aa, Homo Sapiens
IPKSAVGEL

SEQ ID NO: 107308 - protein, 9 aa, Homo Sapiens
IPKSAVGTL

SEQ ID NO: 107309 - protein, 9 aa, Homo Sapiens
IPKSSDPEM

SEQ ID NO: 107310 - protein, 9 aa, Homo Sapiens
IPKVAVEVF

SEQ ID NO: 107311 - protein, 9 aa, Homo Sapiens
IPKVEWSAF

SEQ ID NO: 107312 - protein, 9 aa, Homo Sapiens
IPLADQPHL

SEQ ID NO: 107313 - protein, 9 aa, Homo Sapiens
IPLAKRVAL

SEQ ID NO: 107314 - protein, 9 aa, Homo Sapiens
IPLPLVKSL

SEQ ID NO: 107315 - protein, 9 aa, Homo Sapiens
IPLQTPHKL

SEQ ID NO: 107316 - protein, 9 aa, Homo Sapiens
IPLSGRNPL

SEQ ID NO: 107317 - protein, 9 aa, Homo Sapiens
IPLSKIKTL

SEQ ID NO: 107318 - protein, 9 aa, Homo Sapiens
IPMAKSYVL

SEQ ID NO: 107319 - protein, 9 aa, Homo Sapiens
IPMEFVNKM

SEQ ID NO: 107320 - protein, 9 aa, Homo Sapiens
IPMSDPQVL

SEQ ID NO: 107321 - protein, 9 aa, Homo Sapiens
IPMTGKPSL

SEQ ID NO: 107322 - protein, 9 aa, Homo Sapiens
IPMTPTSSF

SEQ ID NO: 107323 - protein, 9 aa, Homo Sapiens
IPNEIIHAL

SEQ ID NO: 107324 - protein, 9 aa, Homo Sapiens
IPNERTMQL

SEQ ID NO: 107325 - protein, 9 aa, Homo Sapiens
IPNFPRSTV

SEQ ID NO: 107326 - protein, 9 aa, Homo Sapiens
IPNGSSITV

SEQ ID NO: 107327 - protein, 9 aa, Homo Sapiens
IPNHYAEDL

SEQ ID NO: 107328 - protein, 9 aa, Homo Sapiens
IPNNVKTAV

SEQ ID NO: 107329 - protein, 9 aa, Homo Sapiens
IPNTQIKAL

SEQ ID NO: 107330 - protein, 9 aa, Homo Sapiens
IPPEHGKRL

SEQ ID NO: 107331 - protein, 9 aa, Homo Sapiens
IPPGTHEAL

SEQ ID NO: 107332 - protein, 9 aa, Homo Sapiens
IPPPGGTSL

SEQ ID NO: 107333 - protein, 9 aa, Homo Sapiens
IPPPPPPAM

SEQ ID NO: 107334 - protein, 9 aa, Homo Sapiens
IPPVKATPL

SEQ ID NO: 107335 - protein, 9 aa, Homo Sapiens
IPPYPASSL

SEQ ID NO: 107336 - protein, 9 aa, Homo Sapiens
IPQEFQKTV

SEQ ID NO: 107337 - protein, 9 aa, Homo Sapiens
IPQIRNPSL

SEQ ID NO: 107338 - protein, 9 aa, Homo Sapiens
IPQKFHRSV

SEQ ID NO: 107339 - protein, 9 aa, Homo Sapiens
IPQKPSQPA

SEQ ID NO: 107340 - protein, 9 aa, Homo Sapiens
IPQPPILQL

SEQ ID NO: 107341 - protein, 9 aa, Homo Sapiens
IPQPTPASL

SEQ ID NO: 107342 - protein, 9 aa, Homo Sapiens
IPQQLLTTL

SEQ ID NO: 107343 - protein, 9 aa, Homo Sapiens
IPQSIIECV

SEQ ID NO: 107344 - protein, 9 aa, Homo Sapiens
IPQVKYICL

SEQ ID NO: 107345 - protein, 9 aa, Homo Sapiens
IPRAKAEEM

SEQ ID NO: 107346 - protein, 9 aa, Homo Sapiens
IPREVSETL

SEQ ID NO: 107347 - protein, 9 aa, Homo Sapiens
IPRILGPGL

SEQ ID NO: 107348 - protein, 9 aa, Homo Sapiens
IPRKPDGKM

SEQ ID NO: 107349 - protein, 9 aa, Homo Sapiens
IPRNPPPRL

SEQ ID NO: 107350 - protein, 9 aa, Homo Sapiens
IPRNQLQSV

SEQ ID NO: 107351 - protein, 9 aa, Homo Sapiens
IPRQVAQTL

SEQ ID NO: 107352 - protein, 9 aa, Homo Sapiens
IPSEWHIEL

SEQ ID NO: 107353 - protein, 9 aa, Homo Sapiens
IPSGSVTAL

SEQ ID NO: 107354 - protein, 9 aa, Homo Sapiens
IPSPSLVSL

SEQ ID NO: 107355 - protein, 9 aa, Homo Sapiens
IPSPVLVKL

SEQ ID NO: 107356 - protein, 9 aa, Homo Sapiens
IPSSHPVSL

SEQ ID NO: 107357 - protein, 9 aa, Homo Sapiens
IPTGEGPPL

SEQ ID NO: 107358 - protein, 9 aa, Homo Sapiens
IPTVNPVAI

SEQ ID NO: 107359 - protein, 9 aa, Homo Sapiens
IPVEVKPCL

SEQ ID NO: 107360 - protein, 9 aa, Homo Sapiens
IPVKKRMAL

SEQ ID NO: 107361 - protein, 9 aa, Homo Sapiens
IPWVAPECL

SEQ ID NO: 107362 - protein, 9 aa, Homo Sapiens
IPYEGFASL

SEQ ID NO: 107363 - protein, 9 aa, Homo Sapiens
IPYGERITL

SEQ ID NO: 107364 - protein, 9 aa, Homo Sapiens
IPYKPNYSL

SEQ ID NO: 107365 - protein, 9 aa, Homo Sapiens
IPYKREESL

SEQ ID NO: 107366 - protein, 9 aa, Homo Sapiens
IPYMKKYKI

SEQ ID NO: 107367 - protein, 9 aa, Homo Sapiens
IPYPKREFL

SEQ ID NO: 107368 - protein, 9 aa, Homo Sapiens
IPYPRPIHL

SEQ ID NO: 107369 - protein, 9 aa, Homo Sapiens
IRSHSKAVL

SEQ ID NO: 107370 - protein, 9 aa, Homo Sapiens
ISKQFHHQL

SEQ ID NO: 107371 - protein, 9 aa, Homo Sapiens
ISLSKDLEL

SEQ ID NO: 107372 - protein, 9 aa, Homo Sapiens
ITKMPCQSL

SEQ ID NO: 107373 - protein, 9 aa, Homo Sapiens
ITKPPDGSA

SEQ ID NO: 107374 - protein, 9 aa, Homo Sapiens
IVIGVLHQL

SEQ ID NO: 107375 - protein, 9 aa, Homo Sapiens
IVKEIHEQL

SEQ ID NO: 107376 - protein, 9 aa, Homo Sapiens
IVKEVSTYI

SEQ ID NO: 107377 - protein, 9 aa, Homo Sapiens
IVKGPRGTL

SEQ ID NO: 107378 - protein, 9 aa, Homo Sapiens
IVKKQIVKL

SEQ ID NO: 107379 - protein, 9 aa, Homo Sapiens
IVKMVMISL

SEQ ID NO: 107380 - protein, 9 aa, Homo Sapiens
IVKPKPRAL

SEQ ID NO: 107381 - protein, 9 aa, Homo Sapiens
IVKPPVRKL

SEQ ID NO: 107382 - protein, 9 aa, Homo Sapiens
IVKPVKVSA

SEQ ID NO: 107383 - protein, 9 aa, Homo Sapiens
KAASVRPVL

SEQ ID NO: 107384 - protein, 9 aa, Homo Sapiens
KAFARPWSL

SEQ ID NO: 107385 - protein, 9 aa, Homo Sapiens
KAKDPFAHL

SEQ ID NO: 107386 - protein, 9 aa, Homo Sapiens
KAKPVTTNL

SEQ ID NO: 107387 - protein, 9 aa, Homo Sapiens
KAYERGISL

SEQ ID NO: 107388 - protein, 9 aa, Homo Sapiens
KAYFKRYQV

SEQ ID NO: 107389 - protein, 9 aa, Homo Sapiens
KAYLKKISM

SEQ ID NO: 107390 - protein, 9 aa, Homo Sapiens
KIKDNINCL

SEQ ID NO: 107391 - protein, 9 aa, Homo Sapiens
KIKNGTPPM

SEQ ID NO: 107392 - protein, 9 aa, Homo Sapiens
KIKNVVHEL

SEQ ID NO: 107393 - protein, 9 aa, Homo Sapiens
KIKPVSLTF

SEQ ID NO: 107394 - protein, 9 aa, Homo Sapiens
KIRDVTKCL

SEQ ID NO: 107395 - protein, 9 aa, Homo Sapiens
KIRPHIATL

SEQ ID NO: 107396 - protein, 9 aa, Homo Sapiens
KIRPHITTL

SEQ ID NO: 107397 - protein, 9 aa, Homo Sapiens
KLKENYQML

SEQ ID NO: 107398 - protein, 9 aa, Homo Sapiens
KLNPYAKTM

SEQ ID NO: 107399 - protein, 9 aa, Homo Sapiens
KPADLARHL

SEQ ID NO: 107400 - protein, 9 aa, Homo Sapiens
KPAEVVKIL

SEQ ID NO: 107401 - protein, 9 aa, Homo Sapiens
KPAHLIVSL

SEQ ID NO: 107402 - protein, 9 aa, Homo Sapiens
KPAKPQPKL

SEQ ID NO: 107403 - protein, 9 aa, Homo Sapiens
KPAKVKVEL

SEQ ID NO: 107404 - protein, 9 aa, Homo Sapiens
KPANVFITA

SEQ ID NO: 107405 - protein, 9 aa, Homo Sapiens
KPASVFVQL

SEQ ID NO: 107406 - protein, 9 aa, Homo Sapiens
KPATKTAEL

SEQ ID NO: 107407 - protein, 9 aa, Homo Sapiens
KPEGKDYAL

SEQ ID NO: 107408 - protein, 9 aa, Homo Sapiens
KPEIRVTSL

SEQ ID NO: 107409 - protein, 9 aa, Homo Sapiens
KPESKVAKL

SEQ ID NO: 107410 - protein, 9 aa, Homo Sapiens
KPESKYVSL

SEQ ID NO: 107411 - protein, 9 aa, Homo Sapiens
KPEVPREKL

SEQ ID NO: 107412 - protein, 9 aa, Homo Sapiens
KPEYGRPNV

SEQ ID NO: 107413 - protein, 9 aa, Homo Sapiens
KPFAEVRIL

SEQ ID NO: 107414 - protein, 9 aa, Homo Sapiens
KPFAGRPMI

SEQ ID NO: 107415 - protein, 9 aa, Homo Sapiens
KPFYVNVEF

SEQ ID NO: 107416 - protein, 9 aa, Homo Sapiens
KPGDFIHTL

SEQ ID NO: 107417 - protein, 9 aa, Homo Sapiens
KPGPVGPEL

SEQ ID NO: 107418 - protein, 9 aa, Homo Sapiens
KPGTFPKAL

SEQ ID NO: 107419 - protein, 9 aa, Homo Sapiens
KPGVSSKKF

SEQ ID NO: 107420 - protein, 9 aa, Homo Sapiens
KPHLITHGF

SEQ ID NO: 107421 - protein, 9 aa, Homo Sapiens
KPHNPGFGM

SEQ ID NO: 107422 - protein, 9 aa, Homo Sapiens
KPHSGFHVA

SEQ ID NO: 107423 - protein, 9 aa, Homo Sapiens
KPHVLPAVL

SEQ ID NO: 107424 - protein, 9 aa, Homo Sapiens
KPIEPRREL

SEQ ID NO: 107425 - protein, 9 aa, Homo Sapiens
KPILSTRSL

SEQ ID NO: 107426 - protein, 9 aa, Homo Sapiens
KPINFSVIL

SEQ ID NO: 107427 - protein, 9 aa, Homo Sapiens
KPIPSKPQL

SEQ ID NO: 107428 - protein, 9 aa, Homo Sapiens
KPIQPKPTV

SEQ ID NO: 107429 - protein, 9 aa, Homo Sapiens
KPIQRTILM

SEQ ID NO: 107430 - protein, 9 aa, Homo Sapiens
KPKAPPPSL

SEQ ID NO: 107431 - protein, 9 aa, Homo Sapiens
KPKEPASCL

SEQ ID NO: 107432 - protein, 9 aa, Homo Sapiens
KPKEPITDV

SEQ ID NO: 107433 - protein, 9 aa, Homo Sapiens
KPKEPQPEV

SEQ ID NO: 107434 - protein, 9 aa, Homo Sapiens
KPKFILSVL

SEQ ID NO: 107435 - protein, 9 aa, Homo Sapiens
KPKGKVTIL

SEQ ID NO: 107436 - protein, 9 aa, Homo Sapiens
KPKHQPYKL

SEQ ID NO: 107437 - protein, 9 aa, Homo Sapiens
KPKIATANL

SEQ ID NO: 107438 - protein, 9 aa, Homo Sapiens
KPKIQHVGL

SEQ ID NO: 107439 - protein, 9 aa, Homo Sapiens
KPKITPVTV

SEQ ID NO: 107440 - protein, 9 aa, Homo Sapiens
KPKKGIQFL

SEQ ID NO: 107441 - protein, 9 aa, Homo Sapiens
KPKMNYEKL

SEQ ID NO: 107442 - protein, 9 aa, Homo Sapiens
KPKNAIHTF

SEQ ID NO: 107443 - protein, 9 aa, Homo Sapiens
KPKNIVEKI

SEQ ID NO: 107444 - protein, 9 aa, Homo Sapiens
KPKNTIAIF

SEQ ID NO: 107445 - protein, 9 aa, Homo Sapiens
KPKPEDPKF

SEQ ID NO: 107446 - protein, 9 aa, Homo Sapiens
KPKPGNMPF

SEQ ID NO: 107447 - protein, 9 aa, Homo Sapiens
KPKPIDVQV

SEQ ID NO: 107448 - protein, 9 aa, Homo Sapiens
KPKPIGKLA

SEQ ID NO: 107449 - protein, 9 aa, Homo Sapiens
KPKPKKPTL

SEQ ID NO: 107450 - protein, 9 aa, Homo Sapiens
KPKPPEPSW

SEQ ID NO: 107451 - protein, 9 aa, Homo Sapiens
KPKPQINQW

SEQ ID NO: 107452 - protein, 9 aa, Homo Sapiens
KPKRSTWRF

SEQ ID NO: 107453 - protein, 9 aa, Homo Sapiens
KPKSLWKSV

SEQ ID NO: 107454 - protein, 9 aa, Homo Sapiens
KPKSSLPAV

SEQ ID NO: 107455 - protein, 9 aa, Homo Sapiens
KPKTFQAYL

SEQ ID NO: 107456 - protein, 9 aa, Homo Sapiens
KPKTGRSLL

SEQ ID NO: 107457 - protein, 9 aa, Homo Sapiens
KPKTTEPTF

SEQ ID NO: 107458 - protein, 9 aa, Homo Sapiens
KPLEPVSTV

SEQ ID NO: 107459 - protein, 9 aa, Homo Sapiens
KPLGIKTAL

SEQ ID NO: 107460 - protein, 9 aa, Homo Sapiens
KPLSIPKRL

SEQ ID NO: 107461 - protein, 9 aa, Homo Sapiens
KPLSNMKIL

SEQ ID NO: 107462 - protein, 9 aa, Homo Sapiens
KPMEGWIAV

SEQ ID NO: 107463 - protein, 9 aa, Homo Sapiens
KPMEKLLGL

SEQ ID NO: 107464 - protein, 9 aa, Homo Sapiens
KPMKSVLVV

SEQ ID NO: 107465 - protein, 9 aa, Homo Sapiens
KPMLNNNSF

SEQ ID NO: 107466 - protein, 9 aa, Homo Sapiens
KPMMKEFRF

SEQ ID NO: 107467 - protein, 9 aa, Homo Sapiens
KPNANRIAL

SEQ ID NO: 107468 - protein, 9 aa, Homo Sapiens
KPNGATPVF

SEQ ID NO: 107469 - protein, 9 aa, Homo Sapiens
KPNHTLVLL

SEQ ID NO: 107470 - protein, 9 aa, Homo Sapiens
KPPALSKGL

SEQ ID NO: 107471 - protein, 9 aa, Homo Sapiens
KPPKPVSKM

SEQ ID NO: 107472 - protein, 9 aa, Homo Sapiens
KPPPPPPAP

SEQ ID NO: 107473 - protein, 9 aa, Homo Sapiens
KPPPSKEEL

SEQ ID NO: 107474 - protein, 9 aa, Homo Sapiens
KPPSPGTVL

SEQ ID NO: 107475 - protein, 9 aa, Homo Sapiens
KPQDYKKRL

SEQ ID NO: 107476 - protein, 9 aa, Homo Sapiens
KPQGPRGFL

SEQ ID NO: 107477 - protein, 9 aa, Homo Sapiens
KPQHVFSVL

SEQ ID NO: 107478 - protein, 9 aa, Homo Sapiens
KPQHVTETF

SEQ ID NO: 107479 - protein, 9 aa, Homo Sapiens
KPQPRPQTL

SEQ ID NO: 107480 - protein, 9 aa, Homo Sapiens
KPQVDRYRL

SEQ ID NO: 107481 - protein, 9 aa, Homo Sapiens
KPRDSSVEV

SEQ ID NO: 107482 - protein, 9 aa, Homo Sapiens
KPRGFARGL

SEQ ID NO: 107483 - protein, 9 aa, Homo Sapiens
KPRGLFITI

SEQ ID NO: 107484 - protein, 9 aa, Homo Sapiens
KPRKLVNTI

SEQ ID NO: 107485 - protein, 9 aa, Homo Sapiens
KPRKPITFV

SEQ ID NO: 107486 - protein, 9 aa, Homo Sapiens
KPRPIIPML

SEQ ID NO: 107487 - protein, 9 aa, Homo Sapiens
KPRPPLHLL

SEQ ID NO: 107488 - protein, 9 aa, Homo Sapiens
KPRPPPSQL

SEQ ID NO: 107489 - protein, 9 aa, Homo Sapiens
KPRPVSQLV

SEQ ID NO: 107490 - protein, 9 aa, Homo Sapiens
KPRSPDHVL

SEQ ID NO: 107491 - protein, 9 aa, Homo Sapiens
KPRSPPRAL

SEQ ID NO: 107492 - protein, 9 aa, Homo Sapiens
KPRVTPVEV

SEQ ID NO: 107493 - protein, 9 aa, Homo Sapiens
KPSATGKVI

SEQ ID NO: 107494 - protein, 9 aa, Homo Sapiens
KPSFARTVL

SEQ ID NO: 107495 - protein, 9 aa, Homo Sapiens
KPSGVSAAL

SEQ ID NO: 107496 - protein, 9 aa, Homo Sapiens
KPSLPFTSL

SEQ ID NO: 107497 - protein, 9 aa, Homo Sapiens
KPSSTTPRL

SEQ ID NO: 107498 - protein, 9 aa, Homo Sapiens
KPSVVYRFF

SEQ ID NO: 107499 - protein, 9 aa, Homo Sapiens
KPTDKLRAL

SEQ ID NO: 107500 - protein, 9 aa, Homo Sapiens
KPTGTPKAL

SEQ ID NO: 107501 - protein, 9 aa, Homo Sapiens
KPTHVVVTL

SEQ ID NO: 107502 - protein, 9 aa, Homo Sapiens
KPTSKDQVL

SEQ ID NO: 107503 - protein, 9 aa, Homo Sapiens
KPVEKNYAF

SEQ ID NO: 107504 - protein, 9 aa, Homo Sapiens
KPVFLPRNL

SEQ ID NO: 107505 - protein, 9 aa, Homo Sapiens
KPVIPAAAL

SEQ ID NO: 107506 - protein, 9 aa, Homo Sapiens
KPVKPHSSF

SEQ ID NO: 107507 - protein, 9 aa, Homo Sapiens
KPVSLGQAL

SEQ ID NO: 107508 - protein, 9 aa, Homo Sapiens
KPVYPGQTL

SEQ ID NO: 107509 - protein, 9 aa, Homo Sapiens
KPWEKSPIL

SEQ ID NO: 107510 - protein, 9 aa, Homo Sapiens
KPYAFDRVF

SEQ ID NO: 107511 - protein, 9 aa, Homo Sapiens
KPYCRKDFL

SEQ ID NO: 107512 - protein, 9 aa, Homo Sapiens
KPYEGRPSF

SEQ ID NO: 107513 - protein, 9 aa, Homo Sapiens
KPYLPSRAL

SEQ ID NO: 107514 - protein, 9 aa, Homo Sapiens
KPYQGNPTF

SEQ ID NO: 107515 - protein, 9 aa, Homo Sapiens
KPYSGGLCL

SEQ ID NO: 107516 - protein, 9 aa, Homo Sapiens
KSKNPGEAL

SEQ ID NO: 107517 - protein, 9 aa, Homo Sapiens
KTKDPTAAL

SEQ ID NO: 107518 - protein, 9 aa, Homo Sapiens
KVHSLQSSL

SEQ ID NO: 107519 - protein, 9 aa, Homo Sapiens
KVKAEGPGL

SEQ ID NO: 107520 - protein, 9 aa, Homo Sapiens
KVKAFIVTL

SEQ ID NO: 107521 - protein, 9 aa, Homo Sapiens
KVKASGPGL

SEQ ID NO: 107522 - protein, 9 aa, Homo Sapiens
KVKEFCENL

SEQ ID NO: 107523 - protein, 9 aa, Homo Sapiens
KVKEFFEKL

SEQ ID NO: 107524 - protein, 9 aa, Homo Sapiens
KVKEKFQQL

SEQ ID NO: 107525 - protein, 9 aa, Homo Sapiens
KVKNSLLSL

SEQ ID NO: 107526 - protein, 9 aa, Homo Sapiens
KVKNVGIFL

SEQ ID NO: 107527 - protein, 9 aa, Homo Sapiens
KVKQLFNSL

SEQ ID NO: 107528 - protein, 9 aa, Homo Sapiens
KVKSILNSL

SEQ ID NO: 107529 - protein, 9 aa, Homo Sapiens
KVKSYIHEV

SEQ ID NO: 107530 - protein, 9 aa, Homo Sapiens
KVRDHMVTL

SEQ ID NO: 107531 - protein, 9 aa, Homo Sapiens
KVRVPRQSL

SEQ ID NO: 107532 - protein, 9 aa, Homo Sapiens
KVSGVLKKL

SEQ ID NO: 107533 - protein, 9 aa, Homo Sapiens
KVSYVIKKL

SEQ ID NO: 107534 - protein, 9 aa, Homo Sapiens
LAKNFFNEL

SEQ ID NO: 107535 - protein, 9 aa, Homo Sapiens
LAKPPVVSV

SEQ ID NO: 107536 - protein, 9 aa, Homo Sapiens
LAKTQGNVF

SEQ ID NO: 107537 - protein, 9 aa, Homo Sapiens
LANKDRPAL

SEQ ID NO: 107538 - protein, 9 aa, Homo Sapiens
LARPASAAL

SEQ ID NO: 107539 - protein, 9 aa, Homo Sapiens
LAYLQRIAL

SEQ ID NO: 107540 - protein, 9 aa, Homo Sapiens
LDPVLQNPL

SEQ ID NO: 107541 - protein, 9 aa, Homo Sapiens
LIKEGGVQL

SEQ ID NO: 107542 - protein, 9 aa, Homo Sapiens
LKERDFEIK

SEQ ID NO: 107543 - protein, 9 aa, Homo Sapiens
LLKDSIVQL

SEQ ID NO: 107544 - protein, 9 aa, Homo Sapiens
LPAAPASSL

SEQ ID NO: 107545 - protein, 9 aa, Homo Sapiens
LPAEFFEVL

SEQ ID NO: 107546 - protein, 9 aa, Homo Sapiens
LPAEGVKEL

SEQ ID NO: 107547 - protein, 9 aa, Homo Sapiens
LPAEQHPVL

SEQ ID NO: 107548 - protein, 9 aa, Homo Sapiens
LPAEVKEQI

SEQ ID NO: 107549 - protein, 9 aa, Homo Sapiens
LPAGIVAVL

SEQ ID NO: 107550 - protein, 9 aa, Homo Sapiens
LPAGSRVEL

SEQ ID NO: 107551 - protein, 9 aa, Homo Sapiens
LPAKFKKLL

SEQ ID NO: 107552 - protein, 9 aa, Homo Sapiens
LPAKILVEF

SEQ ID NO: 107553 - protein, 9 aa, Homo Sapiens
LPALPLAEL

SEQ ID NO: 107554 - protein, 9 aa, Homo Sapiens
LPALPTQAL

SEQ ID NO: 107555 - protein, 9 aa, Homo Sapiens
LPALRSIGL

SEQ ID NO: 107556 - protein, 9 aa, Homo Sapiens
LPAPKGPAL

SEQ ID NO: 107557 - protein, 9 aa, Homo Sapiens
LPAPPHIDV

SEQ ID NO: 107558 - protein, 9 aa, Homo Sapiens
LPAPPKIYF

SEQ ID NO: 107559 - protein, 9 aa, Homo Sapiens
LPAPPTQNM

SEQ ID NO: 107560 - protein, 9 aa, Homo Sapiens
LPARFYQAL

SEQ ID NO: 107561 - protein, 9 aa, Homo Sapiens
LPASGQIAL

SEQ ID NO: 107562 - protein, 9 aa, Homo Sapiens
LPASIPHVI

SEQ ID NO: 107563 - protein, 9 aa, Homo Sapiens
LPASPRARL

SEQ ID NO: 107564 - protein, 9 aa, Homo Sapiens
LPASVHPQL

SEQ ID NO: 107565 - protein, 9 aa, Homo Sapiens
LPATATMSL

SEQ ID NO: 107566 - protein, 9 aa, Homo Sapiens
LPATEKPVL

SEQ ID NO: 107567 - protein, 9 aa, Homo Sapiens
LPAWPHRGL

SEQ ID NO: 107568 - protein, 9 aa, Homo Sapiens
LPCPGKATL

SEQ ID NO: 107569 - protein, 9 aa, Homo Sapiens
LPDERTISL

SEQ ID NO: 107570 - protein, 9 aa, Homo Sapiens
LPDGQVITI

SEQ ID NO: 107571 - protein, 9 aa, Homo Sapiens
LPEAKKPRL

SEQ ID NO: 107572 - protein, 9 aa, Homo Sapiens
LPEDVGHCF

SEQ ID NO: 107573 - protein, 9 aa, Homo Sapiens
LPEEFMKTL

SEQ ID NO: 107574 - protein, 9 aa, Homo Sapiens
LPEEPVSQL

SEQ ID NO: 107575 - protein, 9 aa, Homo Sapiens
LPEKKGNTL

SEQ ID NO: 107576 - protein, 9 aa, Homo Sapiens
LPEKNRQML

SEQ ID NO: 107577 - protein, 9 aa, Homo Sapiens
LPFCKGDVL

SEQ ID NO: 107578 - protein, 9 aa, Homo Sapiens
LPFKKGEIL

SEQ ID NO: 107579 - protein, 9 aa, Homo Sapiens
LPFLRITSL

SEQ ID NO: 107580 - protein, 9 aa, Homo Sapiens
LPFPPGVPT

SEQ ID NO: 107581 - protein, 9 aa, Homo Sapiens
LPGELFHVV

SEQ ID NO: 107582 - protein, 9 aa, Homo Sapiens
LPHAPGVQM

SEQ ID NO: 107583 - protein, 9 aa, Homo Sapiens
LPHDIRWEL

SEQ ID NO: 107584 - protein, 9 aa, Homo Sapiens
LPHHRVIEV

SEQ ID NO: 107585 - protein, 9 aa, Homo Sapiens
LPHLPSLEI

SEQ ID NO: 107586 - protein, 9 aa, Homo Sapiens
LPHNRLVSL

SEQ ID NO: 107587 - protein, 9 aa, Homo Sapiens
LPHSATVTL

SEQ ID NO: 107588 - protein, 9 aa, Homo Sapiens
LPIAASSSL

SEQ ID NO: 107589 - protein, 9 aa, Homo Sapiens
LPIDCSPAL

SEQ ID NO: 107590 - protein, 9 aa, Homo Sapiens
LPIFHKNVF

SEQ ID NO: 107591 - protein, 9 aa, Homo Sapiens
LPKAKLITL

SEQ ID NO: 107592 - protein, 9 aa, Homo Sapiens
LPKAPGLEH

SEQ ID NO: 107593 - protein, 9 aa, Homo Sapiens
LPKARPMSL

SEQ ID NO: 107594 - protein, 9 aa, Homo Sapiens
LPKATILDL

SEQ ID NO: 107595 - protein, 9 aa, Homo Sapiens
LPKDAVKHL

SEQ ID NO: 107596 - protein, 9 aa, Homo Sapiens
LPKDKPRYL

SEQ ID NO: 107597 - protein, 9 aa, Homo Sapiens
LPKDQGITL

SEQ ID NO: 107598 - protein, 9 aa, Homo Sapiens
LPKEDPTAV

SEQ ID NO: 107599 - protein, 9 aa, Homo Sapiens
LPKEGIFAV

SEQ ID NO: 107600 - protein, 9 aa, Homo Sapiens
LPKEHAASL

SEQ ID NO: 107601 - protein, 9 aa, Homo Sapiens
LPKEKQPVA

SEQ ID NO: 107602 - protein, 9 aa, Homo Sapiens
LPKEKRHVL

SEQ ID NO: 107603 - protein, 9 aa, Homo Sapiens
LPKEPQGII

SEQ ID NO: 107604 - protein, 9 aa, Homo Sapiens
LPKESVKIL

SEQ ID NO: 107605 - protein, 9 aa, Homo Sapiens
LPKGKALEL

SEQ ID NO: 107606 - protein, 9 aa, Homo Sapiens
LPKGVVLKL

SEQ ID NO: 107607 - protein, 9 aa, Homo Sapiens
LPKHLLHSV

SEQ ID NO: 107608 - protein, 9 aa, Homo Sapiens
LPKKDIIKF

SEQ ID NO: 107609 - protein, 9 aa, Homo Sapiens
LPKKFIATI

SEQ ID NO: 107610 - protein, 9 aa, Homo Sapiens
LPKKGVTSI

SEQ ID NO: 107611 - protein, 9 aa, Homo Sapiens
LPKKNGLYL

SEQ ID NO: 107612 - protein, 9 aa, Homo Sapiens
LPKKPCKNL

SEQ ID NO: 107613 - protein, 9 aa, Homo Sapiens
LPKLGVHKV

SEQ ID NO: 107614 - protein, 9 aa, Homo Sapiens
LPKLHIVKV

SEQ ID NO: 107615 - protein, 9 aa, Homo Sapiens
LPKLHIVQV

SEQ ID NO: 107616 - protein, 9 aa, Homo Sapiens
LPKLPMNLL

SEQ ID NO: 107617 - protein, 9 aa, Homo Sapiens
LPKNPDLRI

SEQ ID NO: 107618 - protein, 9 aa, Homo Sapiens
LPKPFFRLL

SEQ ID NO: 107619 - protein, 9 aa, Homo Sapiens
LPKPKAKTL

SEQ ID NO: 107620 - protein, 9 aa, Homo Sapiens
LPKPPFGML

SEQ ID NO: 107621 - protein, 9 aa, Homo Sapiens
LPKPPGRGV

SEQ ID NO: 107622 - protein, 9 aa, Homo Sapiens
LPKPPKPVS

SEQ ID NO: 107623 - protein, 9 aa, Homo Sapiens
LPKPSSHGL

SEQ ID NO: 107624 - protein, 9 aa, Homo Sapiens
LPKPTEPPM

SEQ ID NO: 107625 - protein, 9 aa, Homo Sapiens
LPKQPPLAL

SEQ ID NO: 107626 - protein, 9 aa, Homo Sapiens
LPKQPPLML

SEQ ID NO: 107627 - protein, 9 aa, Homo Sapiens
LPKSIYSQI

SEQ ID NO: 107628 - protein, 9 aa, Homo Sapiens
LPKSPNPSF

SEQ ID NO: 107629 - protein, 9 aa, Homo Sapiens
LPKSTVNGV

SEQ ID NO: 107630 - protein, 9 aa, Homo Sapiens
LPKSVQNKL

SEQ ID NO: 107631 - protein, 9 aa, Homo Sapiens
LPKTCDISF

SEQ ID NO: 107632 - protein, 9 aa, Homo Sapiens
LPKTGTVSL

SEQ ID NO: 107633 - protein, 9 aa, Homo Sapiens
LPKTGVSQL

SEQ ID NO: 107634 - protein, 9 aa, Homo Sapiens
LPKTHIEQI

SEQ ID NO: 107635 - protein, 9 aa, Homo Sapiens
LPKTTALEL

SEQ ID NO: 107636 - protein, 9 aa, Homo Sapiens
LPKVQSIQL

SEQ ID NO: 107637 - protein, 9 aa, Homo Sapiens
LPLAHVLEL

SEQ ID NO: 107638 - protein, 9 aa, Homo Sapiens
LPLHKVKSL

SEQ ID NO: 107639 - protein, 9 aa, Homo Sapiens
LPLLSPVTF

SEQ ID NO: 107640 - protein, 9 aa, Homo Sapiens
LPNAKIKEL

SEQ ID NO: 107641 - protein, 9 aa, Homo Sapiens
LPNDVISSL

SEQ ID NO: 107642 - protein, 9 aa, Homo Sapiens
LPNEQTKTL

SEQ ID NO: 107643 - protein, 9 aa, Homo Sapiens
LPNGMIVTL

SEQ ID NO: 107644 - protein, 9 aa, Homo Sapiens
LPNNMIHQV

SEQ ID NO: 107645 - protein, 9 aa, Homo Sapiens
LPNQVLKSI

SEQ ID NO: 107646 - protein, 9 aa, Homo Sapiens
LPNVPSIAL

SEQ ID NO: 107647 - protein, 9 aa, Homo Sapiens
LPPDEIKEL

SEQ ID NO: 107648 - protein, 9 aa, Homo Sapiens
LPPGKIVAL

SEQ ID NO: 107649 - protein, 9 aa, Homo Sapiens
LPPMTPKTM

SEQ ID NO: 107650 - protein, 9 aa, Homo Sapiens
LPPPAAKTV

SEQ ID NO: 107651 - protein, 9 aa, Homo Sapiens
LPPPPHPSV

SEQ ID NO: 107652 - protein, 9 aa, Homo Sapiens
LPPPPPHAL

SEQ ID NO: 107653 - protein, 9 aa, Homo Sapiens
LPPSVANEL

SEQ ID NO: 107654 - protein, 9 aa, Homo Sapiens
LPQANRDTL

SEQ ID NO: 107655 - protein, 9 aa, Homo Sapiens
LPQEDLEAL

SEQ ID NO: 107656 - protein, 9 aa, Homo Sapiens
LPQEQKAKI

SEQ ID NO: 107657 - protein, 9 aa, Homo Sapiens
LPQGIVPAL

SEQ ID NO: 107658 - protein, 9 aa, Homo Sapiens
LPQGIVREL

SEQ ID NO: 107659 - protein, 9 aa, Homo Sapiens
LPQKPHLKL

SEQ ID NO: 107660 - protein, 9 aa, Homo Sapiens
LPQLAQPTL

SEQ ID NO: 107661 - protein, 9 aa, Homo Sapiens
LPQLTGPVL

SEQ ID NO: 107662 - protein, 9 aa, Homo Sapiens
LPQNEPKTL

SEQ ID NO: 107663 - protein, 9 aa, Homo Sapiens
LPQPDKKGL

SEQ ID NO: 107664 - protein, 9 aa, Homo Sapiens
LPQPPRDVL

SEQ ID NO: 107665 - protein, 9 aa, Homo Sapiens
LPRFQPRVL

SEQ ID NO: 107666 - protein, 9 aa, Homo Sapiens
LPRGKGIRL

SEQ ID NO: 107667 - protein, 9 aa, Homo Sapiens
LPRGSSRLL

SEQ ID NO: 107668 - protein, 9 aa, Homo Sapiens
LPRKQGSIL

SEQ ID NO: 107669 - protein, 9 aa, Homo Sapiens
LPRNAQVAL

SEQ ID NO: 107670 - protein, 9 aa, Homo Sapiens
LPRPPPPEM

SEQ ID NO: 107671 - protein, 9 aa, Homo Sapiens
LPRPVPQNL

SEQ ID NO: 107672 - protein, 9 aa, Homo Sapiens
LPRQPPMSL

SEQ ID NO: 107673 - protein, 9 aa, Homo Sapiens
LPRREGYEF

SEQ ID NO: 107674 - protein, 9 aa, Homo Sapiens
LPRRPLPPA

SEQ ID NO: 107675 - protein, 9 aa, Homo Sapiens
LPRRPLRAF

SEQ ID NO: 107676 - protein, 9 aa, Homo Sapiens
LPSAPGVVL

SEQ ID NO: 107677 - protein, 9 aa, Homo Sapiens
LPSEHQTIL

SEQ ID NO: 107678 - protein, 9 aa, Homo Sapiens
LPSESMKVV

SEQ ID NO: 107679 - protein, 9 aa, Homo Sapiens
LPSGSKKVI

SEQ ID NO: 107680 - protein, 9 aa, Homo Sapiens
LPSGVTRVV

SEQ ID NO: 107681 - protein, 9 aa, Homo Sapiens
LPSKPSSTL

SEQ ID NO: 107682 - protein, 9 aa, Homo Sapiens
LPSLPTAEL

SEQ ID NO: 107683 - protein, 9 aa, Homo Sapiens
LPSMPEPAL

SEQ ID NO: 107684 - protein, 9 aa, Homo Sapiens
LPSPFLRAL

SEQ ID NO: 107685 - protein, 9 aa, Homo Sapiens
LPSPPAVAV

SEQ ID NO: 107686 - protein, 9 aa, Homo Sapiens
LPSQKTASL

SEQ ID NO: 107687 - protein, 9 aa, Homo Sapiens
LPSQLAHRL

SEQ ID NO: 107688 - protein, 9 aa, Homo Sapiens
LPSQMGSVL

SEQ ID NO: 107689 - protein, 9 aa, Homo Sapiens
LPSQVSRVV

SEQ ID NO: 107690 - protein, 9 aa, Homo Sapiens
LPSRKLVAL

SEQ ID NO: 107691 - protein, 9 aa, Homo Sapiens
LPSSGRSSL

SEQ ID NO: 107692 - protein, 9 aa, Homo Sapiens
LPSSIMRNL

SEQ ID NO: 107693 - protein, 9 aa, Homo Sapiens
LPSSIYRLL

SEQ ID NO: 107694 - protein, 9 aa, Homo Sapiens
LPSSVISAI

SEQ ID NO: 107695 - protein, 9 aa, Homo Sapiens
LPSSVLHII

SEQ ID NO: 107696 - protein, 9 aa, Homo Sapiens
LPSTVKQAV

SEQ ID NO: 107697 - protein, 9 aa, Homo Sapiens
LPSWGRAEL

SEQ ID NO: 107698 - protein, 9 aa, Homo Sapiens
LPTDTLQEL

SEQ ID NO: 107699 - protein, 9 aa, Homo Sapiens
LPTPVVKTT

SEQ ID NO: 107700 - protein, 9 aa, Homo Sapiens
LPTSFVKEI

SEQ ID NO: 107701 - protein, 9 aa, Homo Sapiens
LPTSPGPAL

SEQ ID NO: 107702 - protein, 9 aa, Homo Sapiens
LPWASTHSL

SEQ ID NO: 107703 - protein, 9 aa, Homo Sapiens
LPWGGGTAL

SEQ ID NO: 107704 - protein, 9 aa, Homo Sapiens
LPWKRIVAV

SEQ ID NO: 107705 - protein, 9 aa, Homo Sapiens
LPWPARPAL

SEQ ID NO: 107706 - protein, 9 aa, Homo Sapiens
LPYAGDVSM

SEQ ID NO: 107707 - protein, 9 aa, Homo Sapiens
LPYCPGKTL

SEQ ID NO: 107708 - protein, 9 aa, Homo Sapiens
LPYGREDVL

SEQ ID NO: 107709 - protein, 9 aa, Homo Sapiens
LPYKAGLSL

SEQ ID NO: 107710 - protein, 9 aa, Homo Sapiens
LPYRRSVPT

SEQ ID NO: 107711 - protein, 9 aa, Homo Sapiens
LPYSVGRVL

SEQ ID NO: 107712 - protein, 9 aa, Homo Sapiens
LPYVSVTSL

SEQ ID NO: 107713 - protein, 9 aa, Homo Sapiens
LSKAAGPEL

SEQ ID NO: 107714 - protein, 9 aa, Homo Sapiens
LTPMLAPAL

SEQ ID NO: 107715 - protein, 9 aa, Homo Sapiens
LVKDALRQL

SEQ ID NO: 107716 - protein, 9 aa, Homo Sapiens
LVKDVFISA

SEQ ID NO: 107717 - protein, 9 aa, Homo Sapiens
LVKEYIIQL

SEQ ID NO: 107718 - protein, 9 aa, Homo Sapiens
LVKKYMNSL

SEQ ID NO: 107719 - protein, 9 aa, Homo Sapiens
LVKPEVWTL

SEQ ID NO: 107720 - protein, 9 aa, Homo Sapiens
LVKPVTINV

SEQ ID NO: 107721 - protein, 9 aa, Homo Sapiens
LVKSVDPTL

SEQ ID NO: 107722 - protein, 9 aa, Homo Sapiens
LVKVPDPQM

SEQ ID NO: 107723 - protein, 9 aa, Homo Sapiens
LVMAPRTVL

SEQ ID NO: 107724 - protein, 9 aa, Homo Sapiens
LVQENRPTL

SEQ ID NO: 107725 - protein, 9 aa, Homo Sapiens
LVRDVVSSL

SEQ ID NO: 107726 - protein, 9 aa, Homo Sapiens
LVRPPASSL

SEQ ID NO: 107727 - protein, 9 aa, Homo Sapiens
MAPLKMLAL

SEQ ID NO: 107728 - protein, 9 aa, Homo Sapiens
MIKGVTLGF

SEQ ID NO: 107729 - protein, 9 aa, Homo Sapiens
MIQNSRPSL

SEQ ID NO: 107730 - protein, 9 aa, Homo Sapiens
MIRAAPPPL

SEQ ID NO: 107731 - protein, 9 aa, Homo Sapiens
MPAAKKQKL

SEQ ID NO: 107732 - protein, 9 aa, Homo Sapiens
MPACAASSL

SEQ ID NO: 107733 - protein, 9 aa, Homo Sapiens
MPADSGYPA

SEQ ID NO: 107734 - protein, 9 aa, Homo Sapiens
MPADTNKAF

SEQ ID NO: 107735 - protein, 9 aa, Homo Sapiens
MPAFLRSAL

SEQ ID NO: 107736 - protein, 9 aa, Homo Sapiens
MPALRSINL

SEQ ID NO: 107737 - protein, 9 aa, Homo Sapiens
MPANSGLAL

SEQ ID NO: 107738 - protein, 9 aa, Homo Sapiens
MPEEPKLTL

SEQ ID NO: 107739 - protein, 9 aa, Homo Sapiens
MPEKPTTTV

SEQ ID NO: 107740 - protein, 9 aa, Homo Sapiens
MPEPASRCL

SEQ ID NO: 107741 - protein, 9 aa, Homo Sapiens
MPEPTVLSL

SEQ ID NO: 107742 - protein, 9 aa, Homo Sapiens
MPFGNVISA

SEQ ID NO: 107743 - protein, 9 aa, Homo Sapiens
MPFGNVVSA

SEQ ID NO: 107744 - protein, 9 aa, Homo Sapiens
MPFYNPAQL

SEQ ID NO: 107745 - protein, 9 aa, Homo Sapiens
MPGKTAIEL

SEQ ID NO: 107746 - protein, 9 aa, Homo Sapiens
MPHEKHYTL

SEQ ID NO: 107747 - protein, 9 aa, Homo Sapiens
MPHHTPHQL

SEQ ID NO: 107748 - protein, 9 aa, Homo Sapiens
MPHSSSAKL

SEQ ID NO: 107749 - protein, 9 aa, Homo Sapiens
MPHVPITTL

SEQ ID NO: 107750 - protein, 9 aa, Homo Sapiens
MPIQGQPCF

SEQ ID NO: 107751 - protein, 9 aa, Homo Sapiens
MPISSHVDL

SEQ ID NO: 107752 - protein, 9 aa, Homo Sapiens
MPKAEKNAV

SEQ ID NO: 107753 - protein, 9 aa, Homo Sapiens
MPKFSMPGF

SEQ ID NO: 107754 - protein, 9 aa, Homo Sapiens
MPKFSMPSL

SEQ ID NO: 107755 - protein, 9 aa, Homo Sapiens
MPKFSVPGF

SEQ ID NO: 107756 - protein, 9 aa, Homo Sapiens
MPKFSVSGL

SEQ ID NO: 107757 - protein, 9 aa, Homo Sapiens
MPKISMPGF

SEQ ID NO: 107758 - protein, 9 aa, Homo Sapiens
MPKKDARTL

SEQ ID NO: 107759 - protein, 9 aa, Homo Sapiens
MPKKDPVKI

SEQ ID NO: 107760 - protein, 9 aa, Homo Sapiens
MPKKNRIAI

SEQ ID NO: 107761 - protein, 9 aa, Homo Sapiens
MPKKSIKKL

SEQ ID NO: 107762 - protein, 9 aa, Homo Sapiens
MPKKSSVVL

SEQ ID NO: 107763 - protein, 9 aa, Homo Sapiens
MPKLKPVEL

SEQ ID NO: 107764 - protein, 9 aa, Homo Sapiens
MPKMDQDSL

SEQ ID NO: 107765 - protein, 9 aa, Homo Sapiens
MPKMKMPKF

SEQ ID NO: 107766 - protein, 9 aa, Homo Sapiens
MPKMKMPTF

SEQ ID NO: 107767 - protein, 9 aa, Homo Sapiens
MPKPNHDTL

SEQ ID NO: 107768 - protein, 9 aa, Homo Sapiens
MPKPPNLIM

SEQ ID NO: 107769 - protein, 9 aa, Homo Sapiens
MPKVKMPKF

SEQ ID NO: 107770 - protein, 9 aa, Homo Sapiens
MPKVKTIEL

SEQ ID NO: 107771 - protein, 9 aa, Homo Sapiens
MPKVSGPDL

SEQ ID NO: 107772 - protein, 9 aa, Homo Sapiens
MPLGTIHCI

SEQ ID NO: 107773 - protein, 9 aa, Homo Sapiens
MPLLKSEVA

SEQ ID NO: 107774 - protein, 9 aa, Homo Sapiens
MPLPGTKAL

SEQ ID NO: 107775 - protein, 9 aa, Homo Sapiens
MPLSTIREV

SEQ ID NO: 107776 - protein, 9 aa, Homo Sapiens
MPMERQMSV

SEQ ID NO: 107777 - protein, 9 aa, Homo Sapiens
MPNENIPEL

SEQ ID NO: 107778 - protein, 9 aa, Homo Sapiens
MPNGTVQRF

SEQ ID NO: 107779 - protein, 9 aa, Homo Sapiens
MPNSPAPHF

SEQ ID NO: 107780 - protein, 9 aa, Homo Sapiens
MPNVAPAAI

SEQ ID NO: 107781 - protein, 9 aa, Homo Sapiens
MPPFQRKTL

SEQ ID NO: 107782 - protein, 9 aa, Homo Sapiens
MPPLQPKHM

SEQ ID NO: 107783 - protein, 9 aa, Homo Sapiens
MPPPINPIL

SEQ ID NO: 107784 - protein, 9 aa, Homo Sapiens
MPPPVGMVA

SEQ ID NO: 107785 - protein, 9 aa, Homo Sapiens
MPQDLRSPA

SEQ ID NO: 107786 - protein, 9 aa, Homo Sapiens
MPQDLSEAL

SEQ ID NO: 107787 - protein, 9 aa, Homo Sapiens
MPQHIMAIL

SEQ ID NO: 107788 - protein, 9 aa, Homo Sapiens
MPQIPVASV

SEQ ID NO: 107789 - protein, 9 aa, Homo Sapiens
MPQKERESI

SEQ ID NO: 107790 - protein, 9 aa, Homo Sapiens
MPRHFAAKL

SEQ ID NO: 107791 - protein, 9 aa, Homo Sapiens
MPRHFATKL

SEQ ID NO: 107792 - protein, 9 aa, Homo Sapiens
MPRHNLHKI

SEQ ID NO: 107793 - protein, 9 aa, Homo Sapiens
MPRNLREYM

SEQ ID NO: 107794 - protein, 9 aa, Homo Sapiens
MPRPLPYHL

SEQ ID NO: 107795 - protein, 9 aa, Homo Sapiens
MPRPPETFL

SEQ ID NO: 107796 - protein, 9 aa, Homo Sapiens
MPSDVLEVT

SEQ ID NO: 107797 - protein, 9 aa, Homo Sapiens
MPSPVSPKL

SEQ ID NO: 107798 - protein, 9 aa, Homo Sapiens
MPSQFRDIL

SEQ ID NO: 107799 - protein, 9 aa, Homo Sapiens
MPSSAVRVL

SEQ ID NO: 107800 - protein, 9 aa, Homo Sapiens
MPSSRAYGL

SEQ ID NO: 107801 - protein, 9 aa, Homo Sapiens
MPSVFQNVL

SEQ ID NO: 107802 - protein, 9 aa, Homo Sapiens
MPTGGGKSL

SEQ ID NO: 107803 - protein, 9 aa, Homo Sapiens
MPTIPALAL

SEQ ID NO: 107804 - protein, 9 aa, Homo Sapiens
MPTIQITAL

SEQ ID NO: 107805 - protein, 9 aa, Homo Sapiens
MPTLPPPSV

SEQ ID NO: 107806 - protein, 9 aa, Homo Sapiens
MPTMRLLSF

SEQ ID NO: 107807 - protein, 9 aa, Homo Sapiens
MPTPVIKAF

SEQ ID NO: 107808 - protein, 9 aa, Homo Sapiens
MPTRPHQHL

SEQ ID NO: 107809 - protein, 9 aa, Homo Sapiens
MPVEKNITL

SEQ ID NO: 107810 - protein, 9 aa, Homo Sapiens
MPWFKGWKV

SEQ ID NO: 107811 - protein, 9 aa, Homo Sapiens
MPYHIQRTI

SEQ ID NO: 107812 - protein, 9 aa, Homo Sapiens
MPYLSHQQL

SEQ ID NO: 107813 - protein, 9 aa, Homo Sapiens
MPYTRPVKF

SEQ ID NO: 107814 - protein, 9 aa, Homo Sapiens
MTKPPVQEM

SEQ ID NO: 107815 - protein, 9 aa, Homo Sapiens
MTQQPRPVL

SEQ ID NO: 107816 - protein, 9 aa, Homo Sapiens
NAKDFFRVL

SEQ ID NO: 107817 - protein, 9 aa, Homo Sapiens
NIKAHIHML

SEQ ID NO: 107818 - protein, 9 aa, Homo Sapiens
NLKAHVVAV

SEQ ID NO: 107819 - protein, 9 aa, Homo Sapiens
NPAENFRVL

SEQ ID NO: 107820 - protein, 9 aa, Homo Sapiens
NPAPPIDAV

SEQ ID NO: 107821 - protein, 9 aa, Homo Sapiens
NPASKVIAL

SEQ ID NO: 107822 - protein, 9 aa, Homo Sapiens
NPEKRYNVL

SEQ ID NO: 107823 - protein, 9 aa, Homo Sapiens
NPEVRRAVL

SEQ ID NO: 107824 - protein, 9 aa, Homo Sapiens
NPHDRVVAL

SEQ ID NO: 107825 - protein, 9 aa, Homo Sapiens
NPHEPWNRL

SEQ ID NO: 107826 - protein, 9 aa, Homo Sapiens
NPHGARLSL

SEQ ID NO: 107827 - protein, 9 aa, Homo Sapiens
NPIPTHLSL

SEQ ID NO: 107828 - protein, 9 aa, Homo Sapiens
NPISTVTEL

SEQ ID NO: 107829 - protein, 9 aa, Homo Sapiens
NPKEAGQRL

SEQ ID NO: 107830 - protein, 9 aa, Homo Sapiens
NPKEFFWNV

SEQ ID NO: 107831 - protein, 9 aa, Homo Sapiens
NPKEFYHEV

SEQ ID NO: 107832 - protein, 9 aa, Homo Sapiens
NPKESSSSL

SEQ ID NO: 107833 - protein, 9 aa, Homo Sapiens
NPKFNDPHV

SEQ ID NO: 107834 - protein, 9 aa, Homo Sapiens
NPKGRIWTM

SEQ ID NO: 107835 - protein, 9 aa, Homo Sapiens
NPKIAVSKM

SEQ ID NO: 107836 - protein, 9 aa, Homo Sapiens
NPKKPITEI

SEQ ID NO: 107837 - protein, 9 aa, Homo Sapiens
NPKKPNANL

SEQ ID NO: 107838 - protein, 9 aa, Homo Sapiens
NPKNPGLWL

SEQ ID NO: 107839 - protein, 9 aa, Homo Sapiens
NPKNQSETL

SEQ ID NO: 107840 - protein, 9 aa, Homo Sapiens
NPKNVNRVL

SEQ ID NO: 107841 - protein, 9 aa, Homo Sapiens
NPKPASPRF

SEQ ID NO: 107842 - protein, 9 aa, Homo Sapiens
NPKPKFFVL

SEQ ID NO: 107843 - protein, 9 aa, Homo Sapiens
NPKRQTLVF

SEQ ID NO: 107844 - protein, 9 aa, Homo Sapiens
NPKSHILSI

SEQ ID NO: 107845 - protein, 9 aa, Homo Sapiens
NPKSLTTSL

SEQ ID NO: 107846 - protein, 9 aa, Homo Sapiens
NPKSSFWKL

SEQ ID NO: 107847 - protein, 9 aa, Homo Sapiens
NPKVQVEAI

SEQ ID NO: 107848 - protein, 9 aa, Homo Sapiens
NPLPSKETI

SEQ ID NO: 107849 - protein, 9 aa, Homo Sapiens
NPNHRTPTL

SEQ ID NO: 107850 - protein, 9 aa, Homo Sapiens
NPNKTQPIL

SEQ ID NO: 107851 - protein, 9 aa, Homo Sapiens
NPNLRKNVL

SEQ ID NO: 107852 - protein, 9 aa, Homo Sapiens
NPNLSGHLL

SEQ ID NO: 107853 - protein, 9 aa, Homo Sapiens
NPPDICQVV

SEQ ID NO: 107854 - protein, 9 aa, Homo Sapiens
NPPPIIKYL

SEQ ID NO: 107855 - protein, 9 aa, Homo Sapiens
NPQERTLTL

SEQ ID NO: 107856 - protein, 9 aa, Homo Sapiens
NPQEVGPLL

SEQ ID NO: 107857 - protein, 9 aa, Homo Sapiens
NPQKEKVRL

SEQ ID NO: 107858 - protein, 9 aa, Homo Sapiens
NPRIPYTEL

SEQ ID NO: 107859 - protein, 9 aa, Homo Sapiens
NPRKHITSL

SEQ ID NO: 107860 - protein, 9 aa, Homo Sapiens
NPRKYLRSV

SEQ ID NO: 107861 - protein, 9 aa, Homo Sapiens
NPRPTAQDL

SEQ ID NO: 107862 - protein, 9 aa, Homo Sapiens
NPRQAAYEM

SEQ ID NO: 107863 - protein, 9 aa, Homo Sapiens
NPRQINWTV

SEQ ID NO: 107864 - protein, 9 aa, Homo Sapiens
NPRQVFNLL

SEQ ID NO: 107865 - protein, 9 aa, Homo Sapiens
NPSSVIHVV

SEQ ID NO: 107866 - protein, 9 aa, Homo Sapiens
NPTATVKML

SEQ ID NO: 107867 - protein, 9 aa, Homo Sapiens
NPTWKRFSV

SEQ ID NO: 107868 - protein, 9 aa, Homo Sapiens
NPWKREVKL

SEQ ID NO: 107869 - protein, 9 aa, Homo Sapiens
NPYFENKVL

SEQ ID NO: 107870 - protein, 9 aa, Homo Sapiens
NPYFRNEGL

SEQ ID NO: 107871 - protein, 9 aa, Homo Sapiens
NPYIPHPGM

SEQ ID NO: 107872 - protein, 9 aa, Homo Sapiens
NVKNIIIAL

SEQ ID NO: 107873 - protein, 9 aa, Homo Sapiens
PASSKPISI

SEQ ID NO: 107874 - protein, 9 aa, Homo Sapiens
PAYHSSLMD

SEQ ID NO: 107875 - protein, 9 aa, Homo Sapiens
PDRSHPKLL

SEQ ID NO: 107876 - protein, 9 aa, Homo Sapiens
PKPGAGSKL

SEQ ID NO: 107877 - protein, 9 aa, Homo Sapiens
PKPGGAHSL

SEQ ID NO: 107878 - protein, 9 aa, Homo Sapiens
PKPSSRPSL

SEQ ID NO: 107879 - protein, 9 aa, Homo Sapiens
PKRIAKAVN

SEQ ID NO: 107880 - protein, 9 aa, Homo Sapiens
PKYGVKVGL

SEQ ID NO: 107881 - protein, 9 aa, Homo Sapiens
PLYKDSWLL

SEQ ID NO: 107882 - protein, 9 aa, Homo Sapiens
PPLPKRPAL

SEQ ID NO: 107883 - protein, 9 aa, Homo Sapiens
PPNHVGKPL

SEQ ID NO: 107884 - protein, 9 aa, Homo Sapiens
PREKKISIL

SEQ ID NO: 107885 - protein, 9 aa, Homo Sapiens
PSEERVREI

SEQ ID NO: 107886 - protein, 9 aa, Homo Sapiens
PSESTVVST

SEQ ID NO: 107887 - protein, 9 aa, Homo Sapiens
PSIVHRKCF

SEQ ID NO: 107888 - protein, 9 aa, Homo Sapiens
PSRTLFPSL

SEQ ID NO: 107889 - protein, 9 aa, Homo Sapiens
PSSKLIRIL

SEQ ID NO: 107890 - protein, 9 aa, Homo Sapiens
QAIKNGQAL

SEQ ID NO: 107891 - protein, 9 aa, Homo Sapiens
QAQPTKPAL

SEQ ID NO: 107892 - protein, 9 aa, Homo Sapiens
QAQTDRVSL

SEQ ID NO: 107893 - protein, 9 aa, Homo Sapiens
QAVKIGQSL

SEQ ID NO: 107894 - protein, 9 aa, Homo Sapiens
QIKPVNPVF

SEQ ID NO: 107895 - protein, 9 aa, Homo Sapiens
QISEVKPVL

SEQ ID NO: 107896 - protein, 9 aa, Homo Sapiens
QLKMPVRAL

SEQ ID NO: 107897 - protein, 9 aa, Homo Sapiens
QLQEERPEL

SEQ ID NO: 107898 - protein, 9 aa, Homo Sapiens
QPACKRLTL

SEQ ID NO: 107899 - protein, 9 aa, Homo Sapiens
QPAEMAAEL

SEQ ID NO: 107900 - protein, 9 aa, Homo Sapiens
QPAERHQLL

SEQ ID NO: 107901 - protein, 9 aa, Homo Sapiens
QPAGHRPAL

SEQ ID NO: 107902 - protein, 9 aa, Homo Sapiens
QPAPISPHL

SEQ ID NO: 107903 - protein, 9 aa, Homo Sapiens
QPASFAVSL

SEQ ID NO: 107904 - protein, 9 aa, Homo Sapiens
QPDPESVVL

SEQ ID NO: 107905 - protein, 9 aa, Homo Sapiens
QPFHREDQL

SEQ ID NO: 107906 - protein, 9 aa, Homo Sapiens
QPFSKGDRL

SEQ ID NO: 107907 - protein, 9 aa, Homo Sapiens
QPGRPLRVV

SEQ ID NO: 107908 - protein, 9 aa, Homo Sapiens
QPGSTVHVL

SEQ ID NO: 107909 - protein, 9 aa, Homo Sapiens
QPHLSRQDL

SEQ ID NO: 107910 - protein, 9 aa, Homo Sapiens
QPHRVSQVL

SEQ ID NO: 107911 - protein, 9 aa, Homo Sapiens
QPHTILRVV

SEQ ID NO: 107912 - protein, 9 aa, Homo Sapiens
QPITPGPSI

SEQ ID NO: 107913 - protein, 9 aa, Homo Sapiens
QPKLPITVL

SEQ ID NO: 107914 - protein, 9 aa, Homo Sapiens
QPKLPMRTL

SEQ ID NO: 107915 - protein, 9 aa, Homo Sapiens
QPKQRGFRF

SEQ ID NO: 107916 - protein, 9 aa, Homo Sapiens
QPKQRGMRF

SEQ ID NO: 107917 - protein, 9 aa, Homo Sapiens
QPKRHREFL

SEQ ID NO: 107918 - protein, 9 aa, Homo Sapiens
QPKVSTPVV

SEQ ID NO: 107919 - protein, 9 aa, Homo Sapiens
QPLARPNTL

SEQ ID NO: 107920 - protein, 9 aa, Homo Sapiens
QPLKAKTSL

SEQ ID NO: 107921 - protein, 9 aa, Homo Sapiens
QPMDIHVEL

SEQ ID NO: 107922 - protein, 9 aa, Homo Sapiens
QPNKPSKEL

SEQ ID NO: 107923 - protein, 9 aa, Homo Sapiens
QPNTTGKQL

SEQ ID NO: 107924 - protein, 9 aa, Homo Sapiens
QPPELGRPL

SEQ ID NO: 107925 - protein, 9 aa, Homo Sapiens
QPPGPGQEL

SEQ ID NO: 107926 - protein, 9 aa, Homo Sapiens
QPPGPVKEM

SEQ ID NO: 107927 - protein, 9 aa, Homo Sapiens
QPPKPLSSL

SEQ ID NO: 107928 - protein, 9 aa, Homo Sapiens
QPPYHLKAF

SEQ ID NO: 107929 - protein, 9 aa, Homo Sapiens
QPQAKIIVL

SEQ ID NO: 107930 - protein, 9 aa, Homo Sapiens
QPQDRNQAL

SEQ ID NO: 107931 - protein, 9 aa, Homo Sapiens
QPQFQRQGL

SEQ ID NO: 107932 - protein, 9 aa, Homo Sapiens
QPQHAFNAL

SEQ ID NO: 107933 - protein, 9 aa, Homo Sapiens
QPQPKHIKL

SEQ ID NO: 107934 - protein, 9 aa, Homo Sapiens
QPQPQPYAV

SEQ ID NO: 107935 - protein, 9 aa, Homo Sapiens
QPQSHETAL

SEQ ID NO: 107936 - protein, 9 aa, Homo Sapiens
QPRIQNPKF

SEQ ID NO: 107937 - protein, 9 aa, Homo Sapiens
QPRYPVNSV

SEQ ID NO: 107938 - protein, 9 aa, Homo Sapiens
QPSEVLRTV

SEQ ID NO: 107939 - protein, 9 aa, Homo Sapiens
QPSPMQHQF

SEQ ID NO: 107940 - protein, 9 aa, Homo Sapiens
QPTFTEHLL

SEQ ID NO: 107941 - protein, 9 aa, Homo Sapiens
QPTIERVAL

SEQ ID NO: 107942 - protein, 9 aa, Homo Sapiens
QPTVRITEL

SEQ ID NO: 107943 - protein, 9 aa, Homo Sapiens
QPVAGRPSL

SEQ ID NO: 107944 - protein, 9 aa, Homo Sapiens
QPVARPVSV

SEQ ID NO: 107945 - protein, 9 aa, Homo Sapiens
QPYNSRPAV

SEQ ID NO: 107946 - protein, 9 aa, Homo Sapiens
QPYRRPLNF

SEQ ID NO: 107947 - protein, 9 aa, Homo Sapiens
QPYSKDSPF

SEQ ID NO: 107948 - protein, 9 aa, Homo Sapiens
QVKEMNPAL

SEQ ID NO: 107949 - protein, 9 aa, Homo Sapiens
QVKYPVNSL

SEQ ID NO: 107950 - protein, 9 aa, Homo Sapiens
QVQGPRPVL

SEQ ID NO: 107951 - protein, 9 aa, Homo Sapiens
QVRPVTEKL

SEQ ID NO: 107952 - protein, 9 aa, Homo Sapiens
RAAPHRISL

SEQ ID NO: 107953 - protein, 9 aa, Homo Sapiens
RAARGAPPL

SEQ ID NO: 107954 - protein, 9 aa, Homo Sapiens
RAKEIRLSL

SEQ ID NO: 107955 - protein, 9 aa, Homo Sapiens
RAKELFHEL

SEQ ID NO: 107956 - protein, 9 aa, Homo Sapiens
RAKKPDPGL

SEQ ID NO: 107957 - protein, 9 aa, Homo Sapiens
RAKPDFKEL

SEQ ID NO: 107958 - protein, 9 aa, Homo Sapiens
RIKDTVQKL

SEQ ID NO: 107959 - protein, 9 aa, Homo Sapiens
RIKLGIKSL

SEQ ID NO: 107960 - protein, 9 aa, Homo Sapiens
RIKLYSESL

SEQ ID NO: 107961 - protein, 9 aa, Homo Sapiens
RIKNNDPKL

SEQ ID NO: 107962 - protein, 9 aa, Homo Sapiens
RLKAFKVAL

SEQ ID NO: 107963 - protein, 9 aa, Homo Sapiens
RLKPPSNVV

SEQ ID NO: 107964 - protein, 9 aa, Homo Sapiens
RLRNHMAVA

SEQ ID NO: 107965 - protein, 9 aa, Homo Sapiens
RPAANPIQF

SEQ ID NO: 107966 - protein, 9 aa, Homo Sapiens
RPADYLFML

SEQ ID NO: 107967 - protein, 9 aa, Homo Sapiens
RPAERLDYL

SEQ ID NO: 107968 - protein, 9 aa, Homo Sapiens
RPAFFAERL

SEQ ID NO: 107969 - protein, 9 aa, Homo Sapiens
RPAFPVKKL

SEQ ID NO: 107970 - protein, 9 aa, Homo Sapiens
RPALFANLF

SEQ ID NO: 107971 - protein, 9 aa, Homo Sapiens
RPALPRSEL

SEQ ID NO: 107972 - protein, 9 aa, Homo Sapiens
RPAPARPTM

SEQ ID NO: 107973 - protein, 9 aa, Homo Sapiens
RPAPLSAEL

SEQ ID NO: 107974 - protein, 9 aa, Homo Sapiens
RPAPPAQSL

SEQ ID NO: 107975 - protein, 9 aa, Homo Sapiens
RPAPPPEAL

SEQ ID NO: 107976 - protein, 9 aa, Homo Sapiens
RPAPPREEI

SEQ ID NO: 107977 - protein, 9 aa, Homo Sapiens
RPAPVAVAA

SEQ ID NO: 107978 - protein, 9 aa, Homo Sapiens
RPAQKHWVL

SEQ ID NO: 107979 - protein, 9 aa, Homo Sapiens
RPAQLHIGF

SEQ ID NO: 107980 - protein, 9 aa, Homo Sapiens
RPAQVSQPF

SEQ ID NO: 107981 - protein, 9 aa, Homo Sapiens
RPAVIGDVL

SEQ ID NO: 107982 - protein, 9 aa, Homo Sapiens
RPAYRKVFL

SEQ ID NO: 107983 - protein, 9 aa, Homo Sapiens
RPCDISRQL

SEQ ID NO: 107984 - protein, 9 aa, Homo Sapiens
RPDLRMAAI

SEQ ID NO: 107985 - protein, 9 aa, Homo Sapiens
RPDTLDPAL

SEQ ID NO: 107986 - protein, 9 aa, Homo Sapiens
RPEEGRPVV

SEQ ID NO: 107987 - protein, 9 aa, Homo Sapiens
RPEKAQPSL

SEQ ID NO: 107988 - protein, 9 aa, Homo Sapiens
RPENRSFYL

SEQ ID NO: 107989 - protein, 9 aa, Homo Sapiens
RPENYREAL

SEQ ID NO: 107990 - protein, 9 aa, Homo Sapiens
RPEQRLALL

SEQ ID NO: 107991 - protein, 9 aa, Homo Sapiens
RPFDKLEQL

SEQ ID NO: 107992 - protein, 9 aa, Homo Sapiens
RPFEDQTSL

SEQ ID NO: 107993 - protein, 9 aa, Homo Sapiens
RPFERTITM

SEQ ID NO: 107994 - protein, 9 aa, Homo Sapiens
RPFGTIRPM

SEQ ID NO: 107995 - protein, 9 aa, Homo Sapiens
RPFHGWTSL

SEQ ID NO: 107996 - protein, 9 aa, Homo Sapiens
RPFLRPNII

SEQ ID NO: 107997 - protein, 9 aa, Homo Sapiens
RPFPKLRIL

SEQ ID NO: 107998 - protein, 9 aa, Homo Sapiens
RPFPPHIQL

SEQ ID NO: 107999 - protein, 9 aa, Homo Sapiens
RPFWREEHI

SEQ ID NO: 108000 - protein, 9 aa, Homo Sapiens
RPGDLHVVL

SEQ ID NO: 108001 - protein, 9 aa, Homo Sapiens
RPGHKPSIL

SEQ ID NO: 108002 - protein, 9 aa, Homo Sapiens
RPGLEGYAL

SEQ ID NO: 108003 - protein, 9 aa, Homo Sapiens
RPGLLNSKL

SEQ ID NO: 108004 - protein, 9 aa, Homo Sapiens
RPGLVSETL

SEQ ID NO: 108005 - protein, 9 aa, Homo Sapiens
RPGPVLPAV

SEQ ID NO: 108006 - protein, 9 aa, Homo Sapiens
RPGRADPRF

SEQ ID NO: 108007 - protein, 9 aa, Homo Sapiens
RPGYCYTAL

SEQ ID NO: 108008 - protein, 9 aa, Homo Sapiens
RPHAFQVIL

SEQ ID NO: 108009 - protein, 9 aa, Homo Sapiens
RPHAPGRPA

SEQ ID NO: 108010 - protein, 9 aa, Homo Sapiens
RPHGRTVRL

SEQ ID NO: 108011 - protein, 9 aa, Homo Sapiens
RPHHKILDM

SEQ ID NO: 108012 - protein, 9 aa, Homo Sapiens
RPHIPISKL

SEQ ID NO: 108013 - protein, 9 aa, Homo Sapiens
RPHKPGLYL

SEQ ID NO: 108014 - protein, 9 aa, Homo Sapiens
RPHMFPKML

SEQ ID NO: 108015 - protein, 9 aa, Homo Sapiens
RPHPKPKQF

SEQ ID NO: 108016 - protein, 9 aa, Homo Sapiens
RPHRGILAV

SEQ ID NO: 108017 - protein, 9 aa, Homo Sapiens
RPHSSLREL

SEQ ID NO: 108018 - protein, 9 aa, Homo Sapiens
RPHTNETSL

SEQ ID NO: 108019 - protein, 9 aa, Homo Sapiens
RPHTVLTVI

SEQ ID NO: 108020 - protein, 9 aa, Homo Sapiens
RPHVAQPTL

SEQ ID NO: 108021 - protein, 9 aa, Homo Sapiens
RPHVTWCKL

SEQ ID NO: 108022 - protein, 9 aa, Homo Sapiens
RPHYSLRTL

SEQ ID NO: 108023 - protein, 9 aa, Homo Sapiens
RPIASGPVV

SEQ ID NO: 108024 - protein, 9 aa, Homo Sapiens
RPIDILEML

SEQ ID NO: 108025 - protein, 9 aa, Homo Sapiens
RPILIIVTL

SEQ ID NO: 108026 - protein, 9 aa, Homo Sapiens
RPILTIITL

SEQ ID NO: 108027 - protein, 9 aa, Homo Sapiens
RPINALDEL

SEQ ID NO: 108028 - protein, 9 aa, Homo Sapiens
RPIQPIAGL

SEQ ID NO: 108029 - protein, 9 aa, Homo Sapiens
RPITDSPVL

SEQ ID NO: 108030 - protein, 9 aa, Homo Sapiens
RPKALTQVL

SEQ ID NO: 108031 - protein, 9 aa, Homo Sapiens
RPKDFLSKF

SEQ ID NO: 108032 - protein, 9 aa, Homo Sapiens
RPKDPNNLL

SEQ ID NO: 108033 - protein, 9 aa, Homo Sapiens
RPKDYANTL

SEQ ID NO: 108034 - protein, 9 aa, Homo Sapiens
RPKEGTSTL

SEQ ID NO: 108035 - protein, 9 aa, Homo Sapiens
RPKEKRVTL

SEQ ID NO: 108036 - protein, 9 aa, Homo Sapiens
RPKEKSLVL

SEQ ID NO: 108037 - protein, 9 aa, Homo Sapiens
RPKELVEVI

SEQ ID NO: 108038 - protein, 9 aa, Homo Sapiens
RPKESMYSW

SEQ ID NO: 108039 - protein, 9 aa, Homo Sapiens
RPKEYTVRF

SEQ ID NO: 108040 - protein, 9 aa, Homo Sapiens
RPKFEQVNL

SEQ ID NO: 108041 - protein, 9 aa, Homo Sapiens
RPKGFYVET

SEQ ID NO: 108042 - protein, 9 aa, Homo Sapiens
RPKGLGVFF

SEQ ID NO: 108043 - protein, 9 aa, Homo Sapiens
RPKIKVSLI

SEQ ID NO: 108044 - protein, 9 aa, Homo Sapiens
RPKKPGQSF

SEQ ID NO: 108045 - protein, 9 aa, Homo Sapiens
RPKLIGEEL

SEQ ID NO: 108046 - protein, 9 aa, Homo Sapiens
RPKLNRENF

SEQ ID NO: 108047 - protein, 9 aa, Homo Sapiens
RPKLPDNEV

SEQ ID NO: 108048 - protein, 9 aa, Homo Sapiens
RPKLPLLKI

SEQ ID NO: 108049 - protein, 9 aa, Homo Sapiens
RPKLSSPAL

SEQ ID NO: 108050 - protein, 9 aa, Homo Sapiens
RPKLYIVNL

SEQ ID NO: 108051 - protein, 9 aa, Homo Sapiens
RPKMPGRRL

SEQ ID NO: 108052 - protein, 9 aa, Homo Sapiens
RPKMQEVVA

SEQ ID NO: 108053 - protein, 9 aa, Homo Sapiens
RPKNLMQTL

SEQ ID NO: 108054 - protein, 9 aa, Homo Sapiens
RPKNSLFKF

SEQ ID NO: 108055 - protein, 9 aa, Homo Sapiens
RPKNVVLRL

SEQ ID NO: 108056 - protein, 9 aa, Homo Sapiens
RPKPDYFAV

SEQ ID NO: 108057 - protein, 9 aa, Homo Sapiens
RPKPESQGI

SEQ ID NO: 108058 - protein, 9 aa, Homo Sapiens
RPKPIITSV

SEQ ID NO: 108059 - protein, 9 aa, Homo Sapiens
RPKPKIIQT

SEQ ID NO: 108060 - protein, 9 aa, Homo Sapiens
RPKPPNVRT

SEQ ID NO: 108061 - protein, 9 aa, Homo Sapiens
RPKSAFKVQ

SEQ ID NO: 108062 - protein, 9 aa, Homo Sapiens
RPKSNIVLL

SEQ ID NO: 108063 - protein, 9 aa, Homo Sapiens
RPKSYIYRT

SEQ ID NO: 108064 - protein, 9 aa, Homo Sapiens
RPKTFGMDM

SEQ ID NO: 108065 - protein, 9 aa, Homo Sapiens
RPKTGVRGL

SEQ ID NO: 108066 - protein, 9 aa, Homo Sapiens
RPKTPFKAW

SEQ ID NO: 108067 - protein, 9 aa, Homo Sapiens
RPKTPPVVI

SEQ ID NO: 108068 - protein, 9 aa, Homo Sapiens
RPKTVRDTL

SEQ ID NO: 108069 - protein, 9 aa, Homo Sapiens
RPKVPVLQL

SEQ ID NO: 108070 - protein, 9 aa, Homo Sapiens
RPKYAGYSF

SEQ ID NO: 108071 - protein, 9 aa, Homo Sapiens
RPKYPGIKF

SEQ ID NO: 108072 - protein, 9 aa, Homo Sapiens
RPKYQFLSL

SEQ ID NO: 108073 - protein, 9 aa, Homo Sapiens
RPLGKAASL

SEQ ID NO: 108074 - protein, 9 aa, Homo Sapiens
RPLKGRINL

SEQ ID NO: 108075 - protein, 9 aa, Homo Sapiens
RPLLKAITA

SEQ ID NO: 108076 - protein, 9 aa, Homo Sapiens
RPLPAQDLF

SEQ ID NO: 108077 - protein, 9 aa, Homo Sapiens
RPLPPPDTL

SEQ ID NO: 108078 - protein, 9 aa, Homo Sapiens
RPLSKTVRF

SEQ ID NO: 108079 - protein, 9 aa, Homo Sapiens
RPLTSPESL

SEQ ID NO: 108080 - protein, 9 aa, Homo Sapiens
RPLVKPKIV

SEQ ID NO: 108081 - protein, 9 aa, Homo Sapiens
RPLVVIHEL

SEQ ID NO: 108082 - protein, 9 aa, Homo Sapiens
RPLYKNIVL

SEQ ID NO: 108083 - protein, 9 aa, Homo Sapiens
RPMGAGEAL

SEQ ID NO: 108084 - protein, 9 aa, Homo Sapiens
RPMKVGHVT

SEQ ID NO: 108085 - protein, 9 aa, Homo Sapiens
RPMNENVQM

SEQ ID NO: 108086 - protein, 9 aa, Homo Sapiens
RPMQQVDTL

SEQ ID NO: 108087 - protein, 9 aa, Homo Sapiens
RPMYSKPSI

SEQ ID NO: 108088 - protein, 9 aa, Homo Sapiens
RPNDIMAEV

SEQ ID NO: 108089 - protein, 9 aa, Homo Sapiens
RPNDIYVNM

SEQ ID NO: 108090 - protein, 9 aa, Homo Sapiens
RPNFNIKGI

SEQ ID NO: 108091 - protein, 9 aa, Homo Sapiens
RPNGVITGL

SEQ ID NO: 108092 - protein, 9 aa, Homo Sapiens
RPNNAYTAM

SEQ ID NO: 108093 - protein, 9 aa, Homo Sapiens
RPNPGFSML

SEQ ID NO: 108094 - protein, 9 aa, Homo Sapiens
RPNPILARL

SEQ ID NO: 108095 - protein, 9 aa, Homo Sapiens
RPNPITVIL

SEQ ID NO: 108096 - protein, 9 aa, Homo Sapiens
RPNPPPVSV

SEQ ID NO: 108097 - protein, 9 aa, Homo Sapiens
RPNSIDPAL

SEQ ID NO: 108098 - protein, 9 aa, Homo Sapiens
RPPDPGPTL

SEQ ID NO: 108099 - protein, 9 aa, Homo Sapiens
RPPDTKATL

SEQ ID NO: 108100 - protein, 9 aa, Homo Sapiens
RPPGSIKAL

SEQ ID NO: 108101 - protein, 9 aa, Homo Sapiens
RPPLKKYSF

SEQ ID NO: 108102 - protein, 9 aa, Homo Sapiens
RPPLNPVSA

SEQ ID NO: 108103 - protein, 9 aa, Homo Sapiens
RPPNIVLIF

SEQ ID NO: 108104 - protein, 9 aa, Homo Sapiens
RPPPIGAEV

SEQ ID NO: 108105 - protein, 9 aa, Homo Sapiens
RPPPVGHSF

SEQ ID NO: 108106 - protein, 9 aa, Homo Sapiens
RPPQRQVVL

SEQ ID NO: 108107 - protein, 9 aa, Homo Sapiens
RPPSVGDVF

SEQ ID NO: 108108 - protein, 9 aa, Homo Sapiens
RPQDDYSVL

SEQ ID NO: 108109 - protein, 9 aa, Homo Sapiens
RPQDGVAVL

SEQ ID NO: 108110 - protein, 9 aa, Homo Sapiens
RPQDQTVVF

SEQ ID NO: 108111 - protein, 9 aa, Homo Sapiens
RPQEVSAYL

SEQ ID NO: 108112 - protein, 9 aa, Homo Sapiens
RPQIHGYDL

SEQ ID NO: 108113 - protein, 9 aa, Homo Sapiens
RPQKVCSFL

SEQ ID NO: 108114 - protein, 9 aa, Homo Sapiens
RPQLKGVVL

SEQ ID NO: 108115 - protein, 9 aa, Homo Sapiens
RPQLLKNAL

SEQ ID NO: 108116 - protein, 9 aa, Homo Sapiens
RPQLQRQVL

SEQ ID NO: 108117 - protein, 9 aa, Homo Sapiens
RPQLRSVLL

SEQ ID NO: 108118 - protein, 9 aa, Homo Sapiens
RPQPQTLQL

SEQ ID NO: 108119 - protein, 9 aa, Homo Sapiens
RPQPVLPLL

SEQ ID NO: 108120 - protein, 9 aa, Homo Sapiens
RPQVAKTLL

SEQ ID NO: 108121 - protein, 9 aa, Homo Sapiens
RPQVKSLGM

SEQ ID NO: 108122 - protein, 9 aa, Homo Sapiens
RPRAPIIAV

SEQ ID NO: 108123 - protein, 9 aa, Homo Sapiens
RPRDALPRL

SEQ ID NO: 108124 - protein, 9 aa, Homo Sapiens
RPRDPTPSF

SEQ ID NO: 108125 - protein, 9 aa, Homo Sapiens
RPRDYTVNL

SEQ ID NO: 108126 - protein, 9 aa, Homo Sapiens
RPREAEVRF

SEQ ID NO: 108127 - protein, 9 aa, Homo Sapiens
RPREEVRAL

SEQ ID NO: 108128 - protein, 9 aa, Homo Sapiens
RPREKKLGL

SEQ ID NO: 108129 - protein, 9 aa, Homo Sapiens
RPREVTVSL

SEQ ID NO: 108130 - protein, 9 aa, Homo Sapiens
RPRGPGLEF

SEQ ID NO: 108131 - protein, 9 aa, Homo Sapiens
RPRHQGVMV

SEQ ID NO: 108132 - protein, 9 aa, Homo Sapiens
RPRLALNVM

SEQ ID NO: 108133 - protein, 9 aa, Homo Sapiens
RPRLGATCL

SEQ ID NO: 108134 - protein, 9 aa, Homo Sapiens
RPRNALLLL

SEQ ID NO: 108135 - protein, 9 aa, Homo Sapiens
RPRPGNILL

SEQ ID NO: 108136 - protein, 9 aa, Homo Sapiens
RPRPPARSL

SEQ ID NO: 108137 - protein, 9 aa, Homo Sapiens
RPRPPITLL

SEQ ID NO: 108138 - protein, 9 aa, Homo Sapiens
RPRPPQKAL

SEQ ID NO: 108139 - protein, 9 aa, Homo Sapiens
RPRPPVLSV

SEQ ID NO: 108140 - protein, 9 aa, Homo Sapiens
RPRPSEDTF

SEQ ID NO: 108141 - protein, 9 aa, Homo Sapiens
RPRPTEATV

SEQ ID NO: 108142 - protein, 9 aa, Homo Sapiens
RPRPTWEEV

SEQ ID NO: 108143 - protein, 9 aa, Homo Sapiens
RPRPVLRSV

SEQ ID NO: 108144 - protein, 9 aa, Homo Sapiens
RPRQQDPHL

SEQ ID NO: 108145 - protein, 9 aa, Homo Sapiens
RPRTPPEAI

SEQ ID NO: 108146 - protein, 9 aa, Homo Sapiens
RPSAAGINL

SEQ ID NO: 108147 - protein, 9 aa, Homo Sapiens
RPSGPGPEL

SEQ ID NO: 108148 - protein, 9 aa, Homo Sapiens
RPSGPSKAL

SEQ ID NO: 108149 - protein, 9 aa, Homo Sapiens
RPSLRLQLL

SEQ ID NO: 108150 - protein, 9 aa, Homo Sapiens
RPSPPVQSV

SEQ ID NO: 108151 - protein, 9 aa, Homo Sapiens
RPSQFPHSL

SEQ ID NO: 108152 - protein, 9 aa, Homo Sapiens
RPSQLGQVF

SEQ ID NO: 108153 - protein, 9 aa, Homo Sapiens
RPSQVVAET

SEQ ID NO: 108154 - protein, 9 aa, Homo Sapiens
RPSTTVRVH

SEQ ID NO: 108155 - protein, 9 aa, Homo Sapiens
RPSVGVQSL

SEQ ID NO: 108156 - protein, 9 aa, Homo Sapiens
RPTDVAISF

SEQ ID NO: 108157 - protein, 9 aa, Homo Sapiens
RPTFFARKF

SEQ ID NO: 108158 - protein, 9 aa, Homo Sapiens
RPTLPVKSL

SEQ ID NO: 108159 - protein, 9 aa, Homo Sapiens
RPVPPPPSL

SEQ ID NO: 108160 - protein, 9 aa, Homo Sapiens
RPVQKLIRL

SEQ ID NO: 108161 - protein, 9 aa, Homo Sapiens
RPWLRPAAL

SEQ ID NO: 108162 - protein, 9 aa, Homo Sapiens
RPWSNSRGL

SEQ ID NO: 108163 - protein, 9 aa, Homo Sapiens
RPWTVMESL

SEQ ID NO: 108164 - protein, 9 aa, Homo Sapiens
RPYEPINSI

SEQ ID NO: 108165 - protein, 9 aa, Homo Sapiens
RPYQPLGAL

SEQ ID NO: 108166 - protein, 9 aa, Homo Sapiens
RPYSQVNVL

SEQ ID NO: 108167 - protein, 9 aa, Homo Sapiens
RPYYPRKAL

SEQ ID NO: 108168 - protein, 9 aa, Homo Sapiens
RTKASVHTL

SEQ ID NO: 108169 - protein, 9 aa, Homo Sapiens
RVKAPNKSL

SEQ ID NO: 108170 - protein, 9 aa, Homo Sapiens
RVKEIGSTM

SEQ ID NO: 108171 - protein, 9 aa, Homo Sapiens
RVKEPVKEL

SEQ ID NO: 108172 - protein, 9 aa, Homo Sapiens
RVKKLSLSL

SEQ ID NO: 108173 - protein, 9 aa, Homo Sapiens
RVKLPSKAL

SEQ ID NO: 108174 - protein, 9 aa, Homo Sapiens
RVKPAVFDL

SEQ ID NO: 108175 - protein, 9 aa, Homo Sapiens
RVKVFNIDL

SEQ ID NO: 108176 - protein, 9 aa, Homo Sapiens
RVKYNLNSL

SEQ ID NO: 108177 - protein, 9 aa, Homo Sapiens
RVMNVHKML

SEQ ID NO: 108178 - protein, 9 aa, Homo Sapiens
RVSSHLKHL

SEQ ID NO: 108179 - protein, 9 aa, Homo Sapiens
SAKPYAHIL

SEQ ID NO: 108180 - protein, 9 aa, Homo Sapiens
SAKTPGFSV

SEQ ID NO: 108181 - protein, 9 aa, Homo Sapiens
SAPPPKKSL

SEQ ID NO: 108182 - protein, 9 aa, Homo Sapiens
SARTPGPAV

SEQ ID NO: 108183 - protein, 9 aa, Homo Sapiens
SHKEILQVI

SEQ ID NO: 108184 - protein, 9 aa, Homo Sapiens
SIKDYFLEF

SEQ ID NO: 108185 - protein, 9 aa, Homo Sapiens
SPADIVKNL

SEQ ID NO: 108186 - protein, 9 aa, Homo Sapiens
SPAFRILSV

SEQ ID NO: 108187 - protein, 9 aa, Homo Sapiens
SPAFSTRVL

SEQ ID NO: 108188 - protein, 9 aa, Homo Sapiens
SPAGKTNAL

SEQ ID NO: 108189 - protein, 9 aa, Homo Sapiens
SPAGPGLSL

SEQ ID NO: 108190 - protein, 9 aa, Homo Sapiens
SPAGPILSI

SEQ ID NO: 108191 - protein, 9 aa, Homo Sapiens
SPAGVSATL

SEQ ID NO: 108192 - protein, 9 aa, Homo Sapiens
SPAHAVDAV

SEQ ID NO: 108193 - protein, 9 aa, Homo Sapiens
SPAHPKQTL

SEQ ID NO: 108194 - protein, 9 aa, Homo Sapiens
SPALKTTRL

SEQ ID NO: 108195 - protein, 9 aa, Homo Sapiens
SPALPGLKL

SEQ ID NO: 108196 - protein, 9 aa, Homo Sapiens
SPANPAHIL

SEQ ID NO: 108197 - protein, 9 aa, Homo Sapiens
SPAPPRPSL

SEQ ID NO: 108198 - protein, 9 aa, Homo Sapiens
SPAPTHNSL

SEQ ID NO: 108199 - protein, 9 aa, Homo Sapiens
SPAPTITSL

SEQ ID NO: 108200 - protein, 9 aa, Homo Sapiens
SPAQVKTSV

SEQ ID NO: 108201 - protein, 9 aa, Homo Sapiens
SPASPKISL

SEQ ID NO: 108202 - protein, 9 aa, Homo Sapiens
SPASRSISL

SEQ ID NO: 108203 - protein, 9 aa, Homo Sapiens
SPAYRDLAA

SEQ ID NO: 108204 - protein, 9 aa, Homo Sapiens
SPCFRDVQI

SEQ ID NO: 108205 - protein, 9 aa, Homo Sapiens
SPCLHPTDL

SEQ ID NO: 108206 - protein, 9 aa, Homo Sapiens
SPCLKVFEL

SEQ ID NO: 108207 - protein, 9 aa, Homo Sapiens
SPCQDVKQL

SEQ ID NO: 108208 - protein, 9 aa, Homo Sapiens
SPCTSRPML

SEQ ID NO: 108209 - protein, 9 aa, Homo Sapiens
SPDTKKIAL

SEQ ID NO: 108210 - protein, 9 aa, Homo Sapiens
SPDTVSPSL

SEQ ID NO: 108211 - protein, 9 aa, Homo Sapiens
SPEAPKPQL

SEQ ID NO: 108212 - protein, 9 aa, Homo Sapiens
SPEAQPKTL

SEQ ID NO: 108213 - protein, 9 aa, Homo Sapiens
SPEAVGPEL

SEQ ID NO: 108214 - protein, 9 aa, Homo Sapiens
SPEAYIRCL

SEQ ID NO: 108215 - protein, 9 aa, Homo Sapiens
SPEDPGAEV

SEQ ID NO: 108216 - protein, 9 aa, Homo Sapiens
SPEDRGSSL

SEQ ID NO: 108217 - protein, 9 aa, Homo Sapiens
SPEEKQEML

SEQ ID NO: 108218 - protein, 9 aa, Homo Sapiens
SPEETRAAL

SEQ ID NO: 108219 - protein, 9 aa, Homo Sapiens
SPEPSKIML

SEQ ID NO: 108220 - protein, 9 aa, Homo Sapiens
SPEPTREQL

SEQ ID NO: 108221 - protein, 9 aa, Homo Sapiens
SPEQSRNVL

SEQ ID NO: 108222 - protein, 9 aa, Homo Sapiens
SPETRENAL

SEQ ID NO: 108223 - protein, 9 aa, Homo Sapiens
SPEVPKPAL

SEQ ID NO: 108224 - protein, 9 aa, Homo Sapiens
SPFARGNVF

SEQ ID NO: 108225 - protein, 9 aa, Homo Sapiens
SPFKRQLSL

SEQ ID NO: 108226 - protein, 9 aa, Homo Sapiens
SPFLTITSM

SEQ ID NO: 108227 - protein, 9 aa, Homo Sapiens
SPFNDRFPL

SEQ ID NO: 108228 - protein, 9 aa, Homo Sapiens
SPFPSHPSL

SEQ ID NO: 108229 - protein, 9 aa, Homo Sapiens
SPFPTSTPL

SEQ ID NO: 108230 - protein, 9 aa, Homo Sapiens
SPFSFHHVL

SEQ ID NO: 108231 - protein, 9 aa, Homo Sapiens
SPFYLKEAF

SEQ ID NO: 108232 - protein, 9 aa, Homo Sapiens
SPGDFSISV

SEQ ID NO: 108233 - protein, 9 aa, Homo Sapiens
SPGEFSVSV

SEQ ID NO: 108234 - protein, 9 aa, Homo Sapiens
SPGKGVVSL

SEQ ID NO: 108235 - protein, 9 aa, Homo Sapiens
SPGLLPHLL

SEQ ID NO: 108236 - protein, 9 aa, Homo Sapiens
SPGLRDVAL

SEQ ID NO: 108237 - protein, 9 aa, Homo Sapiens
SPGNIGKLL

SEQ ID NO: 108238 - protein, 9 aa, Homo Sapiens
SPGPEKMAL

SEQ ID NO: 108239 - protein, 9 aa, Homo Sapiens
SPGPSRPGL

SEQ ID NO: 108240 - protein, 9 aa, Homo Sapiens
SPGQRSISL

SEQ ID NO: 108241 - protein, 9 aa, Homo Sapiens
SPGSPRPAL

SEQ ID NO: 108242 - protein, 9 aa, Homo Sapiens
SPGWVRLAL

SEQ ID NO: 108243 - protein, 9 aa, Homo Sapiens
SPHATAQGL

SEQ ID NO: 108244 - protein, 9 aa, Homo Sapiens
SPHDISNVL

SEQ ID NO: 108245 - protein, 9 aa, Homo Sapiens
SPHDVSSVL

SEQ ID NO: 108246 - protein, 9 aa, Homo Sapiens
SPHFKSGSL

SEQ ID NO: 108247 - protein, 9 aa, Homo Sapiens
SPHGHILVL

SEQ ID NO: 108248 - protein, 9 aa, Homo Sapiens
SPHGPSAKF

SEQ ID NO: 108249 - protein, 9 aa, Homo Sapiens
SPHLGPAPA

SEQ ID NO: 108250 - protein, 9 aa, Homo Sapiens
SPHLQYIAF

SEQ ID NO: 108251 - protein, 9 aa, Homo Sapiens
SPHPAATAL

SEQ ID NO: 108252 - protein, 9 aa, Homo Sapiens
SPHPQPTHL

SEQ ID NO: 108253 - protein, 9 aa, Homo Sapiens
SPHSVINIF

SEQ ID NO: 108254 - protein, 9 aa, Homo Sapiens
SPIEKSGVL

SEQ ID NO: 108255 - protein, 9 aa, Homo Sapiens
SPIERNEQL

SEQ ID NO: 108256 - protein, 9 aa, Homo Sapiens
SPIERQKSL

SEQ ID NO: 108257 - protein, 9 aa, Homo Sapiens
SPIKDQPVM

SEQ ID NO: 108258 - protein, 9 aa, Homo Sapiens
SPIKRALGL

SEQ ID NO: 108259 - protein, 9 aa, Homo Sapiens
SPILVATAV

SEQ ID NO: 108260 - protein, 9 aa, Homo Sapiens
SPINRIVQI

SEQ ID NO: 108261 - protein, 9 aa, Homo Sapiens
SPISHFLDL

SEQ ID NO: 108262 - protein, 9 aa, Homo Sapiens
SPITARDAL

SEQ ID NO: 108263 - protein, 9 aa, Homo Sapiens
SPITGRSKL

SEQ ID NO: 108264 - protein, 9 aa, Homo Sapiens
SPKADVKNL

SEQ ID NO: 108265 - protein, 9 aa, Homo Sapiens
SPKDKFSYI

SEQ ID NO: 108266 - protein, 9 aa, Homo Sapiens
SPKDNPSIF

SEQ ID NO: 108267 - protein, 9 aa, Homo Sapiens
SPKDVILKV

SEQ ID NO: 108268 - protein, 9 aa, Homo Sapiens
SPKELVVVL

SEQ ID NO: 108269 - protein, 9 aa, Homo Sapiens
SPKFPIWIV

SEQ ID NO: 108270 - protein, 9 aa, Homo Sapiens
SPKFSELVM

SEQ ID NO: 108271 - protein, 9 aa, Homo Sapiens
SPKGASVSI

SEQ ID NO: 108272 - protein, 9 aa, Homo Sapiens
SPKGCGTVL

SEQ ID NO: 108273 - protein, 9 aa, Homo Sapiens
SPKGHLTRL

SEQ ID NO: 108274 - protein, 9 aa, Homo Sapiens
SPKGKFSLF

SEQ ID NO: 108275 - protein, 9 aa, Homo Sapiens
SPKGTIENI

SEQ ID NO: 108276 - protein, 9 aa, Homo Sapiens
SPKHALMVF

SEQ ID NO: 108277 - protein, 9 aa, Homo Sapiens
SPKHGFTIM

SEQ ID NO: 108278 - protein, 9 aa, Homo Sapiens
SPKIASHQF

SEQ ID NO: 108279 - protein, 9 aa, Homo Sapiens
SPKIEVHFL

SEQ ID NO: 108280 - protein, 9 aa, Homo Sapiens
SPKIHARVF

SEQ ID NO: 108281 - protein, 9 aa, Homo Sapiens
SPKIRSHAV

SEQ ID NO: 108282 - protein, 9 aa, Homo Sapiens
SPKITTSLL

SEQ ID NO: 108283 - protein, 9 aa, Homo Sapiens
SPKKPVIVF

SEQ ID NO: 108284 - protein, 9 aa, Homo Sapiens
SPKLGLLMV

SEQ ID NO: 108285 - protein, 9 aa, Homo Sapiens
SPKLHAEAI

SEQ ID NO: 108286 - protein, 9 aa, Homo Sapiens
SPKLPVSSL

SEQ ID NO: 108287 - protein, 9 aa, Homo Sapiens
SPKLSNKEL

SEQ ID NO: 108288 - protein, 9 aa, Homo Sapiens
SPKMPLKTL

SEQ ID NO: 108289 - protein, 9 aa, Homo Sapiens
SPKNTVISV

SEQ ID NO: 108290 - protein, 9 aa, Homo Sapiens
SPKPAIKSI

SEQ ID NO: 108291 - protein, 9 aa, Homo Sapiens
SPKPAVVET

SEQ ID NO: 108292 - protein, 9 aa, Homo Sapiens
SPKPLLTGL

SEQ ID NO: 108293 - protein, 9 aa, Homo Sapiens
SPKPNGPVL

SEQ ID NO: 108294 - protein, 9 aa, Homo Sapiens
SPKPPSQQL

SEQ ID NO: 108295 - protein, 9 aa, Homo Sapiens
SPKPPTSMF

SEQ ID NO: 108296 - protein, 9 aa, Homo Sapiens
SPKPPVAVK

SEQ ID NO: 108297 - protein, 9 aa, Homo Sapiens
SPKPQIQAF

SEQ ID NO: 108298 - protein, 9 aa, Homo Sapiens
SPKPVSSTV

SEQ ID NO: 108299 - protein, 9 aa, Homo Sapiens
SPKPWIPVL

SEQ ID NO: 108300 - protein, 9 aa, Homo Sapiens
SPKQIGEHL

SEQ ID NO: 108301 - protein, 9 aa, Homo Sapiens
SPKQILDPA

SEQ ID NO: 108302 - protein, 9 aa, Homo Sapiens
SPKRDLIAL

SEQ ID NO: 108303 - protein, 9 aa, Homo Sapiens
SPKRPRLQL

SEQ ID NO: 108304 - protein, 9 aa, Homo Sapiens
SPKSFTLDF

SEQ ID NO: 108305 - protein, 9 aa, Homo Sapiens
SPKSMSNKL

SEQ ID NO: 108306 - protein, 9 aa, Homo Sapiens
SPKSPGLKA

SEQ ID NO: 108307 - protein, 9 aa, Homo Sapiens
SPKSPTAAL

SEQ ID NO: 108308 - protein, 9 aa, Homo Sapiens
SPKSTVESF

SEQ ID NO: 108309 - protein, 9 aa, Homo Sapiens
SPKSVVTLL

SEQ ID NO: 108310 - protein, 9 aa, Homo Sapiens
SPKSYLEIL

SEQ ID NO: 108311 - protein, 9 aa, Homo Sapiens
SPKTKVTTV

SEQ ID NO: 108312 - protein, 9 aa, Homo Sapiens
SPKTTISVA

SEQ ID NO: 108313 - protein, 9 aa, Homo Sapiens
SPKTTITMA

SEQ ID NO: 108314 - protein, 9 aa, Homo Sapiens
SPKVEPRAL

SEQ ID NO: 108315 - protein, 9 aa, Homo Sapiens
SPKVNKDTL

SEQ ID NO: 108316 - protein, 9 aa, Homo Sapiens
SPKVPRTLL

SEQ ID NO: 108317 - protein, 9 aa, Homo Sapiens
SPKVVIQTI

SEQ ID NO: 108318 - protein, 9 aa, Homo Sapiens
SPKYSLYEV

SEQ ID NO: 108319 - protein, 9 aa, Homo Sapiens
SPLAFEHVM

SEQ ID NO: 108320 - protein, 9 aa, Homo Sapiens
SPLAVDEAL

SEQ ID NO: 108321 - protein, 9 aa, Homo Sapiens
SPLDSIHTI

SEQ ID NO: 108322 - protein, 9 aa, Homo Sapiens
SPLFNNVKL

SEQ ID NO: 108323 - protein, 9 aa, Homo Sapiens
SPLGHRMQL

SEQ ID NO: 108324 - protein, 9 aa, Homo Sapiens
SPLGKEDTL

SEQ ID NO: 108325 - protein, 9 aa, Homo Sapiens
SPLKKEQPL

SEQ ID NO: 108326 - protein, 9 aa, Homo Sapiens
SPLLKQYIL

SEQ ID NO: 108327 - protein, 9 aa, Homo Sapiens
SPLNSSSAL

SEQ ID NO: 108328 - protein, 9 aa, Homo Sapiens
SPLPAGNAL

SEQ ID NO: 108329 - protein, 9 aa, Homo Sapiens
SPLPSPSAM

SEQ ID NO: 108330 - protein, 9 aa, Homo Sapiens
SPLQASSAL

SEQ ID NO: 108331 - protein, 9 aa, Homo Sapiens
SPLRPQNYL

SEQ ID NO: 108332 - protein, 9 aa, Homo Sapiens
SPLSSHPVV

SEQ ID NO: 108333 - protein, 9 aa, Homo Sapiens
SPLTKSISL

SEQ ID NO: 108334 - protein, 9 aa, Homo Sapiens
SPLYLAHEV

SEQ ID NO: 108335 - protein, 9 aa, Homo Sapiens
SPLYSPVSF

SEQ ID NO: 108336 - protein, 9 aa, Homo Sapiens
SPMADRSMM

SEQ ID NO: 108337 - protein, 9 aa, Homo Sapiens
SPMAERSMM

SEQ ID NO: 108338 - protein, 9 aa, Homo Sapiens
SPMEEREKL

SEQ ID NO: 108339 - protein, 9 aa, Homo Sapiens
SPMEMEDAL

SEQ ID NO: 108340 - protein, 9 aa, Homo Sapiens
SPMEVGKKL

SEQ ID NO: 108341 - protein, 9 aa, Homo Sapiens
SPMIPSIVV

SEQ ID NO: 108342 - protein, 9 aa, Homo Sapiens
SPMRDAPCL

SEQ ID NO: 108343 - protein, 9 aa, Homo Sapiens
SPMSVNAVM

SEQ ID NO: 108344 - protein, 9 aa, Homo Sapiens
SPNAEIHIL

SEQ ID NO: 108345 - protein, 9 aa, Homo Sapiens
SPNAIFKAL

SEQ ID NO: 108346 - protein, 9 aa, Homo Sapiens
SPNDFSVSL

SEQ ID NO: 108347 - protein, 9 aa, Homo Sapiens
SPNEFKVYM

SEQ ID NO: 108348 - protein, 9 aa, Homo Sapiens
SPNENFKTV

SEQ ID NO: 108349 - protein, 9 aa, Homo Sapiens
SPNGHRPQL

SEQ ID NO: 108350 - protein, 9 aa, Homo Sapiens
SPNKKPFSL

SEQ ID NO: 108351 - protein, 9 aa, Homo Sapiens
SPNLRLLDL

SEQ ID NO: 108352 - protein, 9 aa, Homo Sapiens
SPNPEIPAL

SEQ ID NO: 108353 - protein, 9 aa, Homo Sapiens
SPNRSFTEM

SEQ ID NO: 108354 - protein, 9 aa, Homo Sapiens
SPNSILKAA

SEQ ID NO: 108355 - protein, 9 aa, Homo Sapiens
SPNSKVNTL

SEQ ID NO: 108356 - protein, 9 aa, Homo Sapiens
SPNSVKPEM

SEQ ID NO: 108357 - protein, 9 aa, Homo Sapiens
SPNSYFMDV

SEQ ID NO: 108358 - protein, 9 aa, Homo Sapiens
SPNSYVVIM

SEQ ID NO: 108359 - protein, 9 aa, Homo Sapiens
SPNTDREVL

SEQ ID NO: 108360 - protein, 9 aa, Homo Sapiens
SPNVPSRCL

SEQ ID NO: 108361 - protein, 9 aa, Homo Sapiens
SPNYDHVVL

SEQ ID NO: 108362 - protein, 9 aa, Homo Sapiens
SPPAPHPTL

SEQ ID NO: 108363 - protein, 9 aa, Homo Sapiens
SPPATSKAL

SEQ ID NO: 108364 - protein, 9 aa, Homo Sapiens
SPPDLKLEL

SEQ ID NO: 108365 - protein, 9 aa, Homo Sapiens
SPPGPKPGF

SEQ ID NO: 108366 - protein, 9 aa, Homo Sapiens
SPPKAMKKF

SEQ ID NO: 108367 - protein, 9 aa, Homo Sapiens
SPPKIHVSA

SEQ ID NO: 108368 - protein, 9 aa, Homo Sapiens
SPPLHEHPL

SEQ ID NO: 108369 - protein, 9 aa, Homo Sapiens
SPPPPAIAV

SEQ ID NO: 108370 - protein, 9 aa, Homo Sapiens
SPPRPQPAF

SEQ ID NO: 108371 - protein, 9 aa, Homo Sapiens
SPPTKFLEL

SEQ ID NO: 108372 - protein, 9 aa, Homo Sapiens
SPPTPTVTL

SEQ ID NO: 108373 - protein, 9 aa, Homo Sapiens
SPQAEQPSL

SEQ ID NO: 108374 - protein, 9 aa, Homo Sapiens
SPQANRTYV

SEQ ID NO: 108375 - protein, 9 aa, Homo Sapiens
SPQAPTHFL

SEQ ID NO: 108376 - protein, 9 aa, Homo Sapiens
SPQASIIAM

SEQ ID NO: 108377 - protein, 9 aa, Homo Sapiens
SPQDKRTLL

SEQ ID NO: 108378 - protein, 9 aa, Homo Sapiens
SPQDLRRRL

SEQ ID NO: 108379 - protein, 9 aa, Homo Sapiens
SPQDSRLYL

SEQ ID NO: 108380 - protein, 9 aa, Homo Sapiens
SPQDTFEAL

SEQ ID NO: 108381 - protein, 9 aa, Homo Sapiens
SPQEARNML

SEQ ID NO: 108382 - protein, 9 aa, Homo Sapiens
SPQEDGVEL

SEQ ID NO: 108383 - protein, 9 aa, Homo Sapiens
SPQEFIHEL

SEQ ID NO: 108384 - protein, 9 aa, Homo Sapiens
SPQGLKPVV

SEQ ID NO: 108385 - protein, 9 aa, Homo Sapiens
SPQGPGALF

SEQ ID NO: 108386 - protein, 9 aa, Homo Sapiens
SPQGRVMTI

SEQ ID NO: 108387 - protein, 9 aa, Homo Sapiens
SPQGVSKTL

SEQ ID NO: 108388 - protein, 9 aa, Homo Sapiens
SPQKTMSVL

SEQ ID NO: 108389 - protein, 9 aa, Homo Sapiens
SPQKVTLYL

SEQ ID NO: 108390 - protein, 9 aa, Homo Sapiens
SPQPAQQKL

SEQ ID NO: 108391 - protein, 9 aa, Homo Sapiens
SPQPQRAQL

SEQ ID NO: 108392 - protein, 9 aa, Homo Sapiens
SPQPRLIYL

SEQ ID NO: 108393 - protein, 9 aa, Homo Sapiens
SPQPWGHML

SEQ ID NO: 108394 - protein, 9 aa, Homo Sapiens
SPQQKLVCL

SEQ ID NO: 108395 - protein, 9 aa, Homo Sapiens
SPQQVSAQL

SEQ ID NO: 108396 - protein, 9 aa, Homo Sapiens
SPQRPRPTL

SEQ ID NO: 108397 - protein, 9 aa, Homo Sapiens
SPQSNSPVL

SEQ ID NO: 108398 - protein, 9 aa, Homo Sapiens
SPQSPGDAL

SEQ ID NO: 108399 - protein, 9 aa, Homo Sapiens
SPQVCLKRL

SEQ ID NO: 108400 - protein, 9 aa, Homo Sapiens
SPQVQRPSF

SEQ ID NO: 108401 - protein, 9 aa, Homo Sapiens
SPRAPVQVI

SEQ ID NO: 108402 - protein, 9 aa, Homo Sapiens
SPRDKIYTI

SEQ ID NO: 108403 - protein, 9 aa, Homo Sapiens
SPRDPVLTL

SEQ ID NO: 108404 - protein, 9 aa, Homo Sapiens
SPREAARVL

SEQ ID NO: 108405 - protein, 9 aa, Homo Sapiens
SPREEQQLL

SEQ ID NO: 108406 - protein, 9 aa, Homo Sapiens
SPREVFFRV

SEQ ID NO: 108407 - protein, 9 aa, Homo Sapiens
SPRFPAQYL

SEQ ID NO: 108408 - protein, 9 aa, Homo Sapiens
SPRGSTDSL

SEQ ID NO: 108409 - protein, 9 aa, Homo Sapiens
SPRHSFNNL

SEQ ID NO: 108410 - protein, 9 aa, Homo Sapiens
SPRIYSNSL

SEQ ID NO: 108411 - protein, 9 aa, Homo Sapiens
SPRKLPTSL

SEQ ID NO: 108412 - protein, 9 aa, Homo Sapiens
SPRKPIDSL

SEQ ID NO: 108413 - protein, 9 aa, Homo Sapiens
SPRLMSNAL

SEQ ID NO: 108414 - protein, 9 aa, Homo Sapiens
SPRLPAREL

SEQ ID NO: 108415 - protein, 9 aa, Homo Sapiens
SPRLPVGGF

SEQ ID NO: 108416 - protein, 9 aa, Homo Sapiens
SPRNEVEAL

SEQ ID NO: 108417 - protein, 9 aa, Homo Sapiens
SPRPGGPYL

SEQ ID NO: 108418 - protein, 9 aa, Homo Sapiens
SPRPKMDAI

SEQ ID NO: 108419 - protein, 9 aa, Homo Sapiens
SPRPPAEGF

SEQ ID NO: 108420 - protein, 9 aa, Homo Sapiens
SPRPQPESV

SEQ ID NO: 108421 - protein, 9 aa, Homo Sapiens
SPRPTGSDL

SEQ ID NO: 108422 - protein, 9 aa, Homo Sapiens
SPRPVVVET

SEQ ID NO: 108423 - protein, 9 aa, Homo Sapiens
SPRSVIHHL

SEQ ID NO: 108424 - protein, 9 aa, Homo Sapiens
SPRSVLEEM

SEQ ID NO: 108425 - protein, 9 aa, Homo Sapiens
SPRTPSTRL

SEQ ID NO: 108426 - protein, 9 aa, Homo Sapiens
SPRVPASET

SEQ ID NO: 108427 - protein, 9 aa, Homo Sapiens
SPRVPNSSV

SEQ ID NO: 108428 - protein, 9 aa, Homo Sapiens
SPRVYWLGL

SEQ ID NO: 108429 - protein, 9 aa, Homo Sapiens
SPRYIFTML

SEQ ID NO: 108430 - protein, 9 aa, Homo Sapiens
SPSATLAAL

SEQ ID NO: 108431 - protein, 9 aa, Homo Sapiens
SPSDFSVSL

SEQ ID NO: 108432 - protein, 9 aa, Homo Sapiens
SPSDPSSSL

SEQ ID NO: 108433 - protein, 9 aa, Homo Sapiens
SPSDRPLSL

SEQ ID NO: 108434 - protein, 9 aa, Homo Sapiens
SPSDSFSVL

SEQ ID NO: 108435 - protein, 9 aa, Homo Sapiens
SPSEILQEL

SEQ ID NO: 108436 - protein, 9 aa, Homo Sapiens
SPSEIMESL

SEQ ID NO: 108437 - protein, 9 aa, Homo Sapiens
SPSEIVKQI

SEQ ID NO: 108438 - protein, 9 aa, Homo Sapiens
SPSETVSSL

SEQ ID NO: 108439 - protein, 9 aa, Homo Sapiens
SPSFPRPSL

SEQ ID NO: 108440 - protein, 9 aa, Homo Sapiens
SPSGAMSNL

SEQ ID NO: 108441 - protein, 9 aa, Homo Sapiens
SPSHAIFKL

SEQ ID NO: 108442 - protein, 9 aa, Homo Sapiens
SPSHNLKSL

SEQ ID NO: 108443 - protein, 9 aa, Homo Sapiens
SPSIKDLPA

SEQ ID NO: 108444 - protein, 9 aa, Homo Sapiens
SPSKPNPVF

SEQ ID NO: 108445 - protein, 9 aa, Homo Sapiens
SPSLPKKSL

SEQ ID NO: 108446 - protein, 9 aa, Homo Sapiens
SPSLPNITL

SEQ ID NO: 108447 - protein, 9 aa, Homo Sapiens
SPSLPTASL

SEQ ID NO: 108448 - protein, 9 aa, Homo Sapiens
SPSPAHPQL

SEQ ID NO: 108449 - protein, 9 aa, Homo Sapiens
SPSPRLKSV

SEQ ID NO: 108450 - protein, 9 aa, Homo Sapiens
SPSPSDPVL

SEQ ID NO: 108451 - protein, 9 aa, Homo Sapiens
SPSQPRDAL

SEQ ID NO: 108452 - protein, 9 aa, Homo Sapiens
SPSRPPPSL

SEQ ID NO: 108453 - protein, 9 aa, Homo Sapiens
SPSSILSTL

SEQ ID NO: 108454 - protein, 9 aa, Homo Sapiens
SPSSSATSL

SEQ ID NO: 108455 - protein, 9 aa, Homo Sapiens
SPTCTNKEL

SEQ ID NO: 108456 - protein, 9 aa, Homo Sapiens
SPTDVHRQF

SEQ ID NO: 108457 - protein, 9 aa, Homo Sapiens
SPTENSFTL

SEQ ID NO: 108458 - protein, 9 aa, Homo Sapiens
SPTQVVSQL

SEQ ID NO: 108459 - protein, 9 aa, Homo Sapiens
SPTTAFTVL

SEQ ID NO: 108460 - protein, 9 aa, Homo Sapiens
SPVFRLETL

SEQ ID NO: 108461 - protein, 9 aa, Homo Sapiens
SPWADNTAL

SEQ ID NO: 108462 - protein, 9 aa, Homo Sapiens
SPWKRQIDL

SEQ ID NO: 108463 - protein, 9 aa, Homo Sapiens
SPWLHAPSL

SEQ ID NO: 108464 - protein, 9 aa, Homo Sapiens
SPWLLRVEL

SEQ ID NO: 108465 - protein, 9 aa, Homo Sapiens
SPWSGLMAL

SEQ ID NO: 108466 - protein, 9 aa, Homo Sapiens
SPYERQLNL

SEQ ID NO: 108467 - protein, 9 aa, Homo Sapiens
SPYIRALGF

SEQ ID NO: 108468 - protein, 9 aa, Homo Sapiens
SPYKRDNTF

SEQ ID NO: 108469 - protein, 9 aa, Homo Sapiens
SPYQNIKIL

SEQ ID NO: 108470 - protein, 9 aa, Homo Sapiens
SPYQRKAGL

SEQ ID NO: 108471 - protein, 9 aa, Homo Sapiens
SPYVQPVCL

SEQ ID NO: 108472 - protein, 9 aa, Homo Sapiens
STLGICQTI

SEQ ID NO: 108473 - protein, 9 aa, Homo Sapiens
SVKAQVTSL

SEQ ID NO: 108474 - protein, 9 aa, Homo Sapiens
SVKEVLQSL

SEQ ID NO: 108475 - protein, 9 aa, Homo Sapiens
SVKPASSSF

SEQ ID NO: 108476 - protein, 9 aa, Homo Sapiens
SVKSPNQSL

SEQ ID NO: 108477 - protein, 9 aa, Homo Sapiens
SVKTKFYVL

SEQ ID NO: 108478 - protein, 9 aa, Homo Sapiens
SVKTPKISM

SEQ ID NO: 108479 - protein, 9 aa, Homo Sapiens
SVSPVVRVA

SEQ ID NO: 108480 - protein, 9 aa, Homo Sapiens
TAAAVGAVF

SEQ ID NO: 108481 - protein, 9 aa, Homo Sapiens
TAAPPAQPL

SEQ ID NO: 108482 - protein, 9 aa, Homo Sapiens
TAKATVAAF

SEQ ID NO: 108483 - protein, 9 aa, Homo Sapiens
TAKAVAVTL

SEQ ID NO: 108484 - protein, 9 aa, Homo Sapiens
TAKDSDPEL

SEQ ID NO: 108485 - protein, 9 aa, Homo Sapiens
TAKEVEESL

SEQ ID NO: 108486 - protein, 9 aa, Homo Sapiens
TAKFHFVDL

SEQ ID NO: 108487 - protein, 9 aa, Homo Sapiens
TAKGHIVLL

SEQ ID NO: 108488 - protein, 9 aa, Homo Sapiens
TAKRSGAVF

SEQ ID NO: 108489 - protein, 9 aa, Homo Sapiens
TAKSPQQVM

SEQ ID NO: 108490 - protein, 9 aa, Homo Sapiens
TAMKKGETL

SEQ ID NO: 108491 - protein, 9 aa, Homo Sapiens
TAPNTFKTL

SEQ ID NO: 108492 - protein, 9 aa, Homo Sapiens
TARPPGYEF

SEQ ID NO: 108493 - protein, 9 aa, Homo Sapiens
TASPVIKAV

SEQ ID NO: 108494 - protein, 9 aa, Homo Sapiens
TAYTRQQVL

SEQ ID NO: 108495 - protein, 9 aa, Homo Sapiens
TIKDMMFQL

SEQ ID NO: 108496 - protein, 9 aa, Homo Sapiens
TIRDKFARL

SEQ ID NO: 108497 - protein, 9 aa, Homo Sapiens
TIRSKRPAL

SEQ ID NO: 108498 - protein, 9 aa, Homo Sapiens
TISPIIKLL

SEQ ID NO: 108499 - protein, 9 aa, Homo Sapiens
TITQVIKVL

SEQ ID NO: 108500 - protein, 9 aa, Homo Sapiens
TLLPPIKVL

SEQ ID NO: 108501 - protein, 9 aa, Homo Sapiens
TLNSFIHVL

SEQ ID NO: 108502 - protein, 9 aa, Homo Sapiens
TPADGFTVL

SEQ ID NO: 108503 - protein, 9 aa, Homo Sapiens
TPAEVRQVL

SEQ ID NO: 108504 - protein, 9 aa, Homo Sapiens
TPAGNFVTL

SEQ ID NO: 108505 - protein, 9 aa, Homo Sapiens
TPAGQKTCL

SEQ ID NO: 108506 - protein, 9 aa, Homo Sapiens
TPAGVQVIL

SEQ ID NO: 108507 - protein, 9 aa, Homo Sapiens
TPAIKRSIL

SEQ ID NO: 108508 - protein, 9 aa, Homo Sapiens
TPAKAIAAV

SEQ ID NO: 108509 - protein, 9 aa, Homo Sapiens
TPAPPGPAT

SEQ ID NO: 108510 - protein, 9 aa, Homo Sapiens
TPAPPKAVL

SEQ ID NO: 108511 - protein, 9 aa, Homo Sapiens
TPAPPKKDI

SEQ ID NO: 108512 - protein, 9 aa, Homo Sapiens
TPAPPTHAL

SEQ ID NO: 108513 - protein, 9 aa, Homo Sapiens
TPAPVPTSL

SEQ ID NO: 108514 - protein, 9 aa, Homo Sapiens
TPARKEISL

SEQ ID NO: 108515 - protein, 9 aa, Homo Sapiens
TPASAGHVW

SEQ ID NO: 108516 - protein, 9 aa, Homo Sapiens
TPATTLHLL

SEQ ID NO: 108517 - protein, 9 aa, Homo Sapiens
TPAVGRLEV

SEQ ID NO: 108518 - protein, 9 aa, Homo Sapiens
TPAWVRQVL

SEQ ID NO: 108519 - protein, 9 aa, Homo Sapiens
TPCHFISSL

SEQ ID NO: 108520 - protein, 9 aa, Homo Sapiens
TPCHPLRSL

SEQ ID NO: 108521 - protein, 9 aa, Homo Sapiens
TPCTKRFEM

SEQ ID NO: 108522 - protein, 9 aa, Homo Sapiens
TPDPQRVPL

SEQ ID NO: 108523 - protein, 9 aa, Homo Sapiens
TPEEAKYKL

SEQ ID NO: 108524 - protein, 9 aa, Homo Sapiens
TPEEKLAAL

SEQ ID NO: 108525 - protein, 9 aa, Homo Sapiens
TPEERYQKL

SEQ ID NO: 108526 - protein, 9 aa, Homo Sapiens
TPEEVRLPL

SEQ ID NO: 108527 - protein, 9 aa, Homo Sapiens
TPETVRMVL

SEQ ID NO: 108528 - protein, 9 aa, Homo Sapiens
TPFPFRTGL

SEQ ID NO: 108529 - protein, 9 aa, Homo Sapiens
TPGEHQICL

SEQ ID NO: 108530 - protein, 9 aa, Homo Sapiens
TPGGSHPAL

SEQ ID NO: 108531 - protein, 9 aa, Homo Sapiens
TPGLVSPAL

SEQ ID NO: 108532 - protein, 9 aa, Homo Sapiens
TPGNFFHVL

SEQ ID NO: 108533 - protein, 9 aa, Homo Sapiens
TPGPVGLAL

SEQ ID NO: 108534 - protein, 9 aa, Homo Sapiens
TPHARIIEL

SEQ ID NO: 108535 - protein, 9 aa, Homo Sapiens
TPHAVGVLL

SEQ ID NO: 108536 - protein, 9 aa, Homo Sapiens
TPHFSGLAA

SEQ ID NO: 108537 - protein, 9 aa, Homo Sapiens
TPHLRNLAV

SEQ ID NO: 108538 - protein, 9 aa, Homo Sapiens
TPHQTFVRL

SEQ ID NO: 108539 - protein, 9 aa, Homo Sapiens
TPILKPVSL

SEQ ID NO: 108540 - protein, 9 aa, Homo Sapiens
TPINKRPVL

SEQ ID NO: 108541 - protein, 9 aa, Homo Sapiens
TPINRIPIM

SEQ ID NO: 108542 - protein, 9 aa, Homo Sapiens
TPIPGTIEM

SEQ ID NO: 108543 - protein, 9 aa, Homo Sapiens
TPIQGTSEL

SEQ ID NO: 108544 - protein, 9 aa, Homo Sapiens
TPIREQHVL

SEQ ID NO: 108545 - protein, 9 aa, Homo Sapiens
TPISRLVAL

SEQ ID NO: 108546 - protein, 9 aa, Homo Sapiens
TPKAESEQL

SEQ ID NO: 108547 - protein, 9 aa, Homo Sapiens
TPKEAFRQL

SEQ ID NO: 108548 - protein, 9 aa, Homo Sapiens
TPKEEAQSL

SEQ ID NO: 108549 - protein, 9 aa, Homo Sapiens
TPKGETRQL

SEQ ID NO: 108550 - protein, 9 aa, Homo Sapiens
TPKGLSPAM

SEQ ID NO: 108551 - protein, 9 aa, Homo Sapiens
TPKHISESL

SEQ ID NO: 108552 - protein, 9 aa, Homo Sapiens
TPKKPEAKF

SEQ ID NO: 108553 - protein, 9 aa, Homo Sapiens
TPKKTTPIL

SEQ ID NO: 108554 - protein, 9 aa, Homo Sapiens
TPKLFHEVV

SEQ ID NO: 108555 - protein, 9 aa, Homo Sapiens
TPKMPGQSV

SEQ ID NO: 108556 - protein, 9 aa, Homo Sapiens
TPKNTSVSL

SEQ ID NO: 108557 - protein, 9 aa, Homo Sapiens
TPKPMIRAF

SEQ ID NO: 108558 - protein, 9 aa, Homo Sapiens
TPKPQTKEL

SEQ ID NO: 108559 - protein, 9 aa, Homo Sapiens
TPKPSFFDF

SEQ ID NO: 108560 - protein, 9 aa, Homo Sapiens
TPKPVEPAA

SEQ ID NO: 108561 - protein, 9 aa, Homo Sapiens
TPKQEIQHL

SEQ ID NO: 108562 - protein, 9 aa, Homo Sapiens
TPKQPVVRF

SEQ ID NO: 108563 - protein, 9 aa, Homo Sapiens
TPKSQVGTL

SEQ ID NO: 108564 - protein, 9 aa, Homo Sapiens
TPKTNNDIL

SEQ ID NO: 108565 - protein, 9 aa, Homo Sapiens
TPKWITPVL

SEQ ID NO: 108566 - protein, 9 aa, Homo Sapiens
TPLARGDTL

SEQ ID NO: 108567 - protein, 9 aa, Homo Sapiens
TPLARIVAF

SEQ ID NO: 108568 - protein, 9 aa, Homo Sapiens
TPLASFKIL

SEQ ID NO: 108569 - protein, 9 aa, Homo Sapiens
TPLCPRPAL

SEQ ID NO: 108570 - protein, 9 aa, Homo Sapiens
TPLDFLHIF

SEQ ID NO: 108571 - protein, 9 aa, Homo Sapiens
TPLPAGHMI

SEQ ID NO: 108572 - protein, 9 aa, Homo Sapiens
TPLSSTVTL

SEQ ID NO: 108573 - protein, 9 aa, Homo Sapiens
TPLYKKKEL

SEQ ID NO: 108574 - protein, 9 aa, Homo Sapiens
TPMFREYSL

SEQ ID NO: 108575 - protein, 9 aa, Homo Sapiens
TPMGPGRTV

SEQ ID NO: 108576 - protein, 9 aa, Homo Sapiens
TPMHPPSSL

SEQ ID NO: 108577 - protein, 9 aa, Homo Sapiens
TPMNPANTI

SEQ ID NO: 108578 - protein, 9 aa, Homo Sapiens
TPMPSRPST

SEQ ID NO: 108579 - protein, 9 aa, Homo Sapiens
TPMQVVTCL

SEQ ID NO: 108580 - protein, 9 aa, Homo Sapiens
TPNENRQKL

SEQ ID NO: 108581 - protein, 9 aa, Homo Sapiens
TPNETISTL

SEQ ID NO: 108582 - protein, 9 aa, Homo Sapiens
TPNEYIKTL

SEQ ID NO: 108583 - protein, 9 aa, Homo Sapiens
TPNKAGPKL

SEQ ID NO: 108584 - protein, 9 aa, Homo Sapiens
TPNRATFVV

SEQ ID NO: 108585 - protein, 9 aa, Homo Sapiens
TPPAVSSVL

SEQ ID NO: 108586 - protein, 9 aa, Homo Sapiens
TPPEVSKKL

SEQ ID NO: 108587 - protein, 9 aa, Homo Sapiens
TPPIPKITI

SEQ ID NO: 108588 - protein, 9 aa, Homo Sapiens
TPPPVKEYL

SEQ ID NO: 108589 - protein, 9 aa, Homo Sapiens
TPQAKKIKL

SEQ ID NO: 108590 - protein, 9 aa, Homo Sapiens
TPQAQAQSL

SEQ ID NO: 108591 - protein, 9 aa, Homo Sapiens
TPQEPRCGF

SEQ ID NO: 108592 - protein, 9 aa, Homo Sapiens
TPQGFRSTL

SEQ ID NO: 108593 - protein, 9 aa, Homo Sapiens
TPQLNKNTL

SEQ ID NO: 108594 - protein, 9 aa, Homo Sapiens
TPQMPTQAM

SEQ ID NO: 108595 - protein, 9 aa, Homo Sapiens
TPQNGRYQI

SEQ ID NO: 108596 - protein, 9 aa, Homo Sapiens
TPQNKITVV

SEQ ID NO: 108597 - protein, 9 aa, Homo Sapiens
TPQQKGWPM

SEQ ID NO: 108598 - protein, 9 aa, Homo Sapiens
TPQSNRPVM

SEQ ID NO: 108599 - protein, 9 aa, Homo Sapiens
TPRHKQPTL

SEQ ID NO: 108600 - protein, 9 aa, Homo Sapiens
TPRHLDPSL

SEQ ID NO: 108601 - protein, 9 aa, Homo Sapiens
TPRLPQRNL

SEQ ID NO: 108602 - protein, 9 aa, Homo Sapiens
TPRPGSHTI

SEQ ID NO: 108603 - protein, 9 aa, Homo Sapiens
TPRPKFSVC

SEQ ID NO: 108604 - protein, 9 aa, Homo Sapiens
TPRPMTAEL

SEQ ID NO: 108605 - protein, 9 aa, Homo Sapiens
TPRPPGPGL

SEQ ID NO: 108606 - protein, 9 aa, Homo Sapiens
TPRPTAAEL

SEQ ID NO: 108607 - protein, 9 aa, Homo Sapiens
TPRRPAGLL

SEQ ID NO: 108608 - protein, 9 aa, Homo Sapiens
TPRVPDNSL

SEQ ID NO: 108609 - protein, 9 aa, Homo Sapiens
TPSAGKAML

SEQ ID NO: 108610 - protein, 9 aa, Homo Sapiens
TPSAQVKPI

SEQ ID NO: 108611 - protein, 9 aa, Homo Sapiens
TPSASRKSL

SEQ ID NO: 108612 - protein, 9 aa, Homo Sapiens
TPSAVFRVW

SEQ ID NO: 108613 - protein, 9 aa, Homo Sapiens
TPSDGRPEL

SEQ ID NO: 108614 - protein, 9 aa, Homo Sapiens
TPSEPHPVL

SEQ ID NO: 108615 - protein, 9 aa, Homo Sapiens
TPSERITSL

SEQ ID NO: 108616 - protein, 9 aa, Homo Sapiens
TPSNIAIVL

SEQ ID NO: 108617 - protein, 9 aa, Homo Sapiens
TPSPAPRTL

SEQ ID NO: 108618 - protein, 9 aa, Homo Sapiens
TPSPIIQQL

SEQ ID NO: 108619 - protein, 9 aa, Homo Sapiens
TPSPTRYSL

SEQ ID NO: 108620 - protein, 9 aa, Homo Sapiens
TPSPVIRST

SEQ ID NO: 108621 - protein, 9 aa, Homo Sapiens
TPSSRPASL

SEQ ID NO: 108622 - protein, 9 aa, Homo Sapiens
TPSSVRKQL

SEQ ID NO: 108623 - protein, 9 aa, Homo Sapiens
TPTEKPKLL

SEQ ID NO: 108624 - protein, 9 aa, Homo Sapiens
TPTGYIESL

SEQ ID NO: 108625 - protein, 9 aa, Homo Sapiens
TPTPFFHTF

SEQ ID NO: 108626 - protein, 9 aa, Homo Sapiens
TPTRPVQAL

SEQ ID NO: 108627 - protein, 9 aa, Homo Sapiens
TPTSVIRKM

SEQ ID NO: 108628 - protein, 9 aa, Homo Sapiens
TPTTIIKQV

SEQ ID NO: 108629 - protein, 9 aa, Homo Sapiens
TPVAGSQSL

SEQ ID NO: 108630 - protein, 9 aa, Homo Sapiens
TPVASRQSL

SEQ ID NO: 108631 - protein, 9 aa, Homo Sapiens
TPVDDRISL

SEQ ID NO: 108632 - protein, 9 aa, Homo Sapiens
TPWFKIIAA

SEQ ID NO: 108633 - protein, 9 aa, Homo Sapiens
TPYGRPANI

SEQ ID NO: 108634 - protein, 9 aa, Homo Sapiens
TPYIKKPSL

SEQ ID NO: 108635 - protein, 9 aa, Homo Sapiens
TPYNGTEAL

SEQ ID NO: 108636 - protein, 9 aa, Homo Sapiens
TPYNYPVPV

SEQ ID NO: 108637 - protein, 9 aa, Homo Sapiens
TTKPVGLLL

SEQ ID NO: 108638 - protein, 9 aa, Homo Sapiens
TVKATGPAL

SEQ ID NO: 108639 - protein, 9 aa, Homo Sapiens
TVKEVLPAL

SEQ ID NO: 108640 - protein, 9 aa, Homo Sapiens
TVKKPGPNL

SEQ ID NO: 108641 - protein, 9 aa, Homo Sapiens
TVKPLTLEL

SEQ ID NO: 108642 - protein, 9 aa, Homo Sapiens
TVKPPTSVA

SEQ ID NO: 108643 - protein, 9 aa, Homo Sapiens
TVKPYCNEI

SEQ ID NO: 108644 - protein, 9 aa, Homo Sapiens
TVKTHLTSL

SEQ ID NO: 108645 - protein, 9 aa, Homo Sapiens
TVKVHVVAL

SEQ ID NO: 108646 - protein, 9 aa, Homo Sapiens
TVRAVIATL

SEQ ID NO: 108647 - protein, 9 aa, Homo Sapiens
TVRDHVHCL

SEQ ID NO: 108648 - protein, 9 aa, Homo Sapiens
TVSDSIKKL

SEQ ID NO: 108649 - protein, 9 aa, Homo Sapiens
TVYLRDIAL

SEQ ID NO: 108650 - protein, 9 aa, Homo Sapiens
VAKAPSQAL

SEQ ID NO: 108651 - protein, 9 aa, Homo Sapiens
VAKAVTQAL

SEQ ID NO: 108652 - protein, 9 aa, Homo Sapiens
VAKEIIYTL

SEQ ID NO: 108653 - protein, 9 aa, Homo Sapiens
VAKPPVMSF

SEQ ID NO: 108654 - protein, 9 aa, Homo Sapiens
VARPLSTAL

SEQ ID NO: 108655 - protein, 9 aa, Homo Sapiens
VPAAVFGSL

SEQ ID NO: 108656 - protein, 9 aa, Homo Sapiens
VPADVLEAL

SEQ ID NO: 108657 - protein, 9 aa, Homo Sapiens
VPAEHQVAM

SEQ ID NO: 108658 - protein, 9 aa, Homo Sapiens
VPAENKSVL

SEQ ID NO: 108659 - protein, 9 aa, Homo Sapiens
VPAEPKLAF

SEQ ID NO: 108660 - protein, 9 aa, Homo Sapiens
VPAEPSSLL

SEQ ID NO: 108661 - protein, 9 aa, Homo Sapiens
VPAESAAVL

SEQ ID NO: 108662 - protein, 9 aa, Homo Sapiens
VPAFRDEHL

SEQ ID NO: 108663 - protein, 9 aa, Homo Sapiens
VPAGGAVAV

SEQ ID NO: 108664 - protein, 9 aa, Homo Sapiens
VPAKKITAA

SEQ ID NO: 108665 - protein, 9 aa, Homo Sapiens
VPAPLPKKI

SEQ ID NO: 108666 - protein, 9 aa, Homo Sapiens
VPAQSRPCV

SEQ ID NO: 108667 - protein, 9 aa, Homo Sapiens
VPASFRLQM

SEQ ID NO: 108668 - protein, 9 aa, Homo Sapiens
VPASKRPPL

SEQ ID NO: 108669 - protein, 9 aa, Homo Sapiens
VPASLMVSL

SEQ ID NO: 108670 - protein, 9 aa, Homo Sapiens
VPATDRNAL

SEQ ID NO: 108671 - protein, 9 aa, Homo Sapiens
VPATPRLPA

SEQ ID NO: 108672 - protein, 9 aa, Homo Sapiens
VPCGNIVGL

SEQ ID NO: 108673 - protein, 9 aa, Homo Sapiens
VPCTPVARL

SEQ ID NO: 108674 - protein, 9 aa, Homo Sapiens
VPDEHFSTL

SEQ ID NO: 108675 - protein, 9 aa, Homo Sapiens
VPDERRYSL

SEQ ID NO: 108676 - protein, 9 aa, Homo Sapiens
VPDGFLSEL

SEQ ID NO: 108677 - protein, 9 aa, Homo Sapiens
VPDQPHPEI

SEQ ID NO: 108678 - protein, 9 aa, Homo Sapiens
VPEEARPAL

SEQ ID NO: 108679 - protein, 9 aa, Homo Sapiens
VPEKPRPAL

SEQ ID NO: 108680 - protein, 9 aa, Homo Sapiens
VPELPGPSV

SEQ ID NO: 108681 - protein, 9 aa, Homo Sapiens
VPENKGISL

SEQ ID NO: 108682 - protein, 9 aa, Homo Sapiens
VPERPVTCM

SEQ ID NO: 108683 - protein, 9 aa, Homo Sapiens
VPFERPAVI

SEQ ID NO: 108684 - protein, 9 aa, Homo Sapiens
VPFFPARVL

SEQ ID NO: 108685 - protein, 9 aa, Homo Sapiens
VPFGPHRGL

SEQ ID NO: 108686 - protein, 9 aa, Homo Sapiens
VPFHLHINL

SEQ ID NO: 108687 - protein, 9 aa, Homo Sapiens
VPFHRVDTI

SEQ ID NO: 108688 - protein, 9 aa, Homo Sapiens
VPFLKKVGF

SEQ ID NO: 108689 - protein, 9 aa, Homo Sapiens
VPFPRLHFF

SEQ ID NO: 108690 - protein, 9 aa, Homo Sapiens
VPGKIQHIL

SEQ ID NO: 108691 - protein, 9 aa, Homo Sapiens
VPHGAGYEL

SEQ ID NO: 108692 - protein, 9 aa, Homo Sapiens
VPHGHITSL

SEQ ID NO: 108693 - protein, 9 aa, Homo Sapiens
VPHPVSRPL

SEQ ID NO: 108694 - protein, 9 aa, Homo Sapiens
VPIDITVKL

SEQ ID NO: 108695 - protein, 9 aa, Homo Sapiens
VPIPVKESI

SEQ ID NO: 108696 - protein, 9 aa, Homo Sapiens
VPIQSSVVL

SEQ ID NO: 108697 - protein, 9 aa, Homo Sapiens
VPKAHVDEF

SEQ ID NO: 108698 - protein, 9 aa, Homo Sapiens
VPKAQKETV

SEQ ID NO: 108699 - protein, 9 aa, Homo Sapiens
VPKDLTQPT

SEQ ID NO: 108700 - protein, 9 aa, Homo Sapiens
VPKEPPPEF

SEQ ID NO: 108701 - protein, 9 aa, Homo Sapiens
VPKESLVYF

SEQ ID NO: 108702 - protein, 9 aa, Homo Sapiens
VPKIAPDVL

SEQ ID NO: 108703 - protein, 9 aa, Homo Sapiens
VPKKAWRKL

SEQ ID NO: 108704 - protein, 9 aa, Homo Sapiens
VPKLKVCAL

SEQ ID NO: 108705 - protein, 9 aa, Homo Sapiens
VPKLVKEEV

SEQ ID NO: 108706 - protein, 9 aa, Homo Sapiens
VPKMKVPKF

SEQ ID NO: 108707 - protein, 9 aa, Homo Sapiens
VPKNYVTVM

SEQ ID NO: 108708 - protein, 9 aa, Homo Sapiens
VPKNYVVVL

SEQ ID NO: 108709 - protein, 9 aa, Homo Sapiens
VPKPFRPIL

SEQ ID NO: 108710 - protein, 9 aa, Homo Sapiens
VPKPGAFDL

SEQ ID NO: 108711 - protein, 9 aa, Homo Sapiens
VPKPIGGVV

SEQ ID NO: 108712 - protein, 9 aa, Homo Sapiens
VPKPLPKQL

SEQ ID NO: 108713 - protein, 9 aa, Homo Sapiens
VPKQPPKTL

SEQ ID NO: 108714 - protein, 9 aa, Homo Sapiens
VPKRPDACF

SEQ ID NO: 108715 - protein, 9 aa, Homo Sapiens
VPKSAVQQV

SEQ ID NO: 108716 - protein, 9 aa, Homo Sapiens
VPKSGTPQL

SEQ ID NO: 108717 - protein, 9 aa, Homo Sapiens
VPKSLVSNL

SEQ ID NO: 108718 - protein, 9 aa, Homo Sapiens
VPKSMRVKL

SEQ ID NO: 108719 - protein, 9 aa, Homo Sapiens
VPKSSVSRV

SEQ ID NO: 108720 - protein, 9 aa, Homo Sapiens
VPKTASTSF

SEQ ID NO: 108721 - protein, 9 aa, Homo Sapiens
VPKTQSPCF

SEQ ID NO: 108722 - protein, 9 aa, Homo Sapiens
VPKTVVSSW

SEQ ID NO: 108723 - protein, 9 aa, Homo Sapiens
VPKVMKVKL

SEQ ID NO: 108724 - protein, 9 aa, Homo Sapiens
VPKVVGSAV

SEQ ID NO: 108725 - protein, 9 aa, Homo Sapiens
VPKYWGSGL

SEQ ID NO: 108726 - protein, 9 aa, Homo Sapiens
VPLAQAQAL

SEQ ID NO: 108727 - protein, 9 aa, Homo Sapiens
VPLEQSPVL

SEQ ID NO: 108728 - protein, 9 aa, Homo Sapiens
VPLGAGIAL

SEQ ID NO: 108729 - protein, 9 aa, Homo Sapiens
VPLKQGRSL

SEQ ID NO: 108730 - protein, 9 aa, Homo Sapiens
VPLPVKVCF

SEQ ID NO: 108731 - protein, 9 aa, Homo Sapiens
VPLVREITF

SEQ ID NO: 108732 - protein, 9 aa, Homo Sapiens
VPLVRPVTM

SEQ ID NO: 108733 - protein, 9 aa, Homo Sapiens
VPMFRNVSL

SEQ ID NO: 108734 - protein, 9 aa, Homo Sapiens
VPMNSLRFL

SEQ ID NO: 108735 - protein, 9 aa, Homo Sapiens
VPMTPLRTV

SEQ ID NO: 108736 - protein, 9 aa, Homo Sapiens
VPMVQGECL

SEQ ID NO: 108737 - protein, 9 aa, Homo Sapiens
VPNATIRNV

SEQ ID NO: 108738 - protein, 9 aa, Homo Sapiens
VPNDIQSEL

SEQ ID NO: 108739 - protein, 9 aa, Homo Sapiens
VPNGDCKTF

SEQ ID NO: 108740 - protein, 9 aa, Homo Sapiens
VPNKVIQCF

SEQ ID NO: 108741 - protein, 9 aa, Homo Sapiens
VPNNKITVV

SEQ ID NO: 108742 - protein, 9 aa, Homo Sapiens
VPNPDPVTM

SEQ ID NO: 108743 - protein, 9 aa, Homo Sapiens
VPNPSLKTF

SEQ ID NO: 108744 - protein, 9 aa, Homo Sapiens
VPNQKRLTL

SEQ ID NO: 108745 - protein, 9 aa, Homo Sapiens
VPPEQAKVV

SEQ ID NO: 108746 - protein, 9 aa, Homo Sapiens
VPPLPGKAF

SEQ ID NO: 108747 - protein, 9 aa, Homo Sapiens
VPPLVPKVL

SEQ ID NO: 108748 - protein, 9 aa, Homo Sapiens
VPPPLAKAI

SEQ ID NO: 108749 - protein, 9 aa, Homo Sapiens
VPPPPEKSL

SEQ ID NO: 108750 - protein, 9 aa, Homo Sapiens
VPPPPHRPL

SEQ ID NO: 108751 - protein, 9 aa, Homo Sapiens
VPPPPKETL

SEQ ID NO: 108752 - protein, 9 aa, Homo Sapiens
VPPPPPVAL

SEQ ID NO: 108753 - protein, 9 aa, Homo Sapiens
VPPPVMKTF

SEQ ID NO: 108754 - protein, 9 aa, Homo Sapiens
VPPQKLQAL

SEQ ID NO: 108755 - protein, 9 aa, Homo Sapiens
VPPVQVSPL

SEQ ID NO: 108756 - protein, 9 aa, Homo Sapiens
VPQAKPVAV

SEQ ID NO: 108757 - protein, 9 aa, Homo Sapiens
VPQDTKLVL

SEQ ID NO: 108758 - protein, 9 aa, Homo Sapiens
VPQERTDHL

SEQ ID NO: 108759 - protein, 9 aa, Homo Sapiens
VPQESRFNL

SEQ ID NO: 108760 - protein, 9 aa, Homo Sapiens
VPQPHPQTL

SEQ ID NO: 108761 - protein, 9 aa, Homo Sapiens
VPQQPHPGF

SEQ ID NO: 108762 - protein, 9 aa, Homo Sapiens
VPQSGVPAL

SEQ ID NO: 108763 - protein, 9 aa, Homo Sapiens
VPQSVTECV

SEQ ID NO: 108764 - protein, 9 aa, Homo Sapiens
VPRAILVDL

SEQ ID NO: 108765 - protein, 9 aa, Homo Sapiens
VPRENMEAI

SEQ ID NO: 108766 - protein, 9 aa, Homo Sapiens
VPREPPVSL

SEQ ID NO: 108767 - protein, 9 aa, Homo Sapiens
VPRFQAVQI

SEQ ID NO: 108768 - protein, 9 aa, Homo Sapiens
VPRFYIRIL

SEQ ID NO: 108769 - protein, 9 aa, Homo Sapiens
VPRGQGSQF

SEQ ID NO: 108770 - protein, 9 aa, Homo Sapiens
VPRIQPQSL

SEQ ID NO: 108771 - protein, 9 aa, Homo Sapiens
VPRLFSLTL

SEQ ID NO: 108772 - protein, 9 aa, Homo Sapiens
VPRLKTWLL

SEQ ID NO: 108773 - protein, 9 aa, Homo Sapiens
VPRLPATAA

SEQ ID NO: 108774 - protein, 9 aa, Homo Sapiens
VPRLPGETL

SEQ ID NO: 108775 - protein, 9 aa, Homo Sapiens
VPRNYDPAL

SEQ ID NO: 108776 - protein, 9 aa, Homo Sapiens
VPRPASVSA

SEQ ID NO: 108777 - protein, 9 aa, Homo Sapiens
VPRPGKAAF

SEQ ID NO: 108778 - protein, 9 aa, Homo Sapiens
VPRPPQTSL

SEQ ID NO: 108779 - protein, 9 aa, Homo Sapiens
VPRPVLRAL

SEQ ID NO: 108780 - protein, 9 aa, Homo Sapiens
VPRQNVPVI

SEQ ID NO: 108781 - protein, 9 aa, Homo Sapiens
VPRSPVREL

SEQ ID NO: 108782 - protein, 9 aa, Homo Sapiens
VPRTIGAEL

SEQ ID NO: 108783 - protein, 9 aa, Homo Sapiens
VPRVLGSSV

SEQ ID NO: 108784 - protein, 9 aa, Homo Sapiens
VPRVPTHTL

SEQ ID NO: 108785 - protein, 9 aa, Homo Sapiens
VPSAAGYAL

SEQ ID NO: 108786 - protein, 9 aa, Homo Sapiens
VPSEGKKSL

SEQ ID NO: 108787 - protein, 9 aa, Homo Sapiens
VPSEPGGVL

SEQ ID NO: 108788 - protein, 9 aa, Homo Sapiens
VPSEPKLSL

SEQ ID NO: 108789 - protein, 9 aa, Homo Sapiens
VPSFRPYLL

SEQ ID NO: 108790 - protein, 9 aa, Homo Sapiens
VPSKPPMSL

SEQ ID NO: 108791 - protein, 9 aa, Homo Sapiens
VPSPAVPKL

SEQ ID NO: 108792 - protein, 9 aa, Homo Sapiens
VPSPYLSSL

SEQ ID NO: 108793 - protein, 9 aa, Homo Sapiens
VPSTAIREI

SEQ ID NO: 108794 - protein, 9 aa, Homo Sapiens
VPTPIHPIF

SEQ ID NO: 108795 - protein, 9 aa, Homo Sapiens
VPTPIQPTF

SEQ ID NO: 108796 - protein, 9 aa, Homo Sapiens
VPVAKTAEL

SEQ ID NO: 108797 - protein, 9 aa, Homo Sapiens
VPVGPHLSL

SEQ ID NO: 108798 - protein, 9 aa, Homo Sapiens
VPVLPKISL

SEQ ID NO: 108799 - protein, 9 aa, Homo Sapiens
VPVNHTQVM

SEQ ID NO: 108800 - protein, 9 aa, Homo Sapiens
VPVPHTTAL

SEQ ID NO: 108801 - protein, 9 aa, Homo Sapiens
VPVPPNVAF

SEQ ID NO: 108802 - protein, 9 aa, Homo Sapiens
VPYEKGFAL

SEQ ID NO: 108803 - protein, 9 aa, Homo Sapiens
VPYGTPLSV

SEQ ID NO: 108804 - protein, 9 aa, Homo Sapiens
VPYLKIFTV

SEQ ID NO: 108805 - protein, 9 aa, Homo Sapiens
VPYSTSASL

SEQ ID NO: 108806 - protein, 9 aa, Homo Sapiens
VTRLPDGPA

SEQ ID NO: 108807 - protein, 9 aa, Homo Sapiens
VVKMPSGEF

SEQ ID NO: 108808 - protein, 9 aa, Homo Sapiens
VVKNVGLTL

SEQ ID NO: 108809 - protein, 9 aa, Homo Sapiens
VVKPPGQDL

SEQ ID NO: 108810 - protein, 9 aa, Homo Sapiens
VVKPPGSSL

SEQ ID NO: 108811 - protein, 9 aa, Homo Sapiens
VVMNVVHQL

SEQ ID NO: 108812 - protein, 9 aa, Homo Sapiens
WAMDLRPEL

SEQ ID NO: 108813 - protein, 9 aa, Homo Sapiens
WIKEKIYVL

SEQ ID NO: 108814 - protein, 9 aa, Homo Sapiens
WPQPDKPMF

SEQ ID NO: 108815 - protein, 9 aa, Homo Sapiens
WVKEKVVAL

SEQ ID NO: 108816 - protein, 9 aa, Homo Sapiens
YAKKRGWVL

SEQ ID NO: 108817 - protein, 9 aa, Homo Sapiens
YAKRPGIGL

SEQ ID NO: 108818 - protein, 9 aa, Homo Sapiens
YPAAKRVKL

SEQ ID NO: 108819 - protein, 9 aa, Homo Sapiens
YPAAVPQAL

SEQ ID NO: 108820 - protein, 9 aa, Homo Sapiens
YPAERKQAL

SEQ ID NO: 108821 - protein, 9 aa, Homo Sapiens
YPASAGTSL

SEQ ID NO: 108822 - protein, 9 aa, Homo Sapiens
YPAYLGARL

SEQ ID NO: 108823 - protein, 9 aa, Homo Sapiens
YPDEKSVCL

SEQ ID NO: 108824 - protein, 9 aa, Homo Sapiens
YPEELKPVL

SEQ ID NO: 108825 - protein, 9 aa, Homo Sapiens
YPGQPHPAL

SEQ ID NO: 108826 - protein, 9 aa, Homo Sapiens
YPHEPTAVF

SEQ ID NO: 108827 - protein, 9 aa, Homo Sapiens
YPHLHNAEL

SEQ ID NO: 108828 - protein, 9 aa, Homo Sapiens
YPKANIVAY

SEQ ID NO: 108829 - protein, 9 aa, Homo Sapiens
YPKFKYALL

SEQ ID NO: 108830 - protein, 9 aa, Homo Sapiens
YPKGAGEML

SEQ ID NO: 108831 - protein, 9 aa, Homo Sapiens
YPKLKTDVL

SEQ ID NO: 108832 - protein, 9 aa, Homo Sapiens
YPKLPVWVV

SEQ ID NO: 108833 - protein, 9 aa, Homo Sapiens
YPKQGIFSV

SEQ ID NO: 108834 - protein, 9 aa, Homo Sapiens
YPKQSFTMV

SEQ ID NO: 108835 - protein, 9 aa, Homo Sapiens
YPKRPLLGL

SEQ ID NO: 108836 - protein, 9 aa, Homo Sapiens
YPLEKGHLF

SEQ ID NO: 108837 - protein, 9 aa, Homo Sapiens
YPLESRPSL

SEQ ID NO: 108838 - protein, 9 aa, Homo Sapiens
YPLLKNISM

SEQ ID NO: 108839 - protein, 9 aa, Homo Sapiens
YPNERFELL

SEQ ID NO: 108840 - protein, 9 aa, Homo Sapiens
YPNPKPEVL

SEQ ID NO: 108841 - protein, 9 aa, Homo Sapiens
YPNSHTHYF

SEQ ID NO: 108842 - protein, 9 aa, Homo Sapiens
YPNSYFTGL

SEQ ID NO: 108843 - protein, 9 aa, Homo Sapiens
YPNVNIHNF

SEQ ID NO: 108844 - protein, 9 aa, Homo Sapiens
YPNYLIRKF

SEQ ID NO: 108845 - protein, 9 aa, Homo Sapiens
YPPWPGKIV

SEQ ID NO: 108846 - protein, 9 aa, Homo Sapiens
YPQCLQKVL

SEQ ID NO: 108847 - protein, 9 aa, Homo Sapiens
YPQEVIPTF

SEQ ID NO: 108848 - protein, 9 aa, Homo Sapiens
YPQGQAPPL

SEQ ID NO: 108849 - protein, 9 aa, Homo Sapiens
YPRKGRIAV

SEQ ID NO: 108850 - protein, 9 aa, Homo Sapiens
YPRSLFPSL

SEQ ID NO: 108851 - protein, 9 aa, Homo Sapiens
YPSAYIKVF

SEQ ID NO: 108852 - protein, 9 aa, Homo Sapiens
YPTDERKLL

SEQ ID NO: 108853 - protein, 9 aa, Homo Sapiens
YPTISLHAL

SEQ ID NO: 108854 - protein, 9 aa, Homo Sapiens
YPYEHSYGL

SEQ ID NO: 108855 - protein, 9 aa, Homo Sapiens
YPYLGPSTL

SEQ ID NO: 108856 - protein, 9 aa, Homo Sapiens
YPYPYPHTL

SEQ ID NO: 108857 - protein, 9 aa, Homo Sapiens
YVALVHPDL

SEQ ID NO: 108858 - protein, 9 aa, Homo Sapiens
YVMDTRPKL

SEQ ID NO: 108859 - protein, 9 aa, Homo Sapiens
YVNLPTIAL

SEQ ID NO: 108860 - protein, 10 aa, Homo Sapiens
ADPLKVYPPL

SEQ ID NO: 108861 - protein, 10 aa, Homo Sapiens
AGIKEYFNVM

SEQ ID NO: 108862 - protein, 10 aa, Homo Sapiens
AGPARLSPAA

SEQ ID NO: 108863 - protein, 10 aa, Homo Sapiens
APAAGAGRLL

SEQ ID NO: 108864 - protein, 10 aa, Homo Sapiens
APAAGAVRAL

SEQ ID NO: 108865 - protein, 10 aa, Homo Sapiens
APAARAPQAL

SEQ ID NO: 108866 - protein, 10 aa, Homo Sapiens
APAEKVGGVL

SEQ ID NO: 108867 - protein, 10 aa, Homo Sapiens
APAPAEKTPV

SEQ ID NO: 108868 - protein, 10 aa, Homo Sapiens
APAPRSGECL

SEQ ID NO: 108869 - protein, 10 aa, Homo Sapiens
APAPSKGQTL

SEQ ID NO: 108870 - protein, 10 aa, Homo Sapiens
APDGSQRAVL

SEQ ID NO: 108871 - protein, 10 aa, Homo Sapiens
APFDREPFTL

SEQ ID NO: 108872 - protein, 10 aa, Homo Sapiens
APFDRRATSL

SEQ ID NO: 108873 - protein, 10 aa, Homo Sapiens
APFQGDQRSL

SEQ ID NO: 108874 - protein, 10 aa, Homo Sapiens
APHALLQAVL

SEQ ID NO: 108875 - protein, 10 aa, Homo Sapiens
APHARNGLSL

SEQ ID NO: 108876 - protein, 10 aa, Homo Sapiens
APHEPDGVAL

SEQ ID NO: 108877 - protein, 10 aa, Homo Sapiens
APHPFPHPAF

SEQ ID NO: 108878 - protein, 10 aa, Homo Sapiens
APIDRVGQTI

SEQ ID NO: 108879 - protein, 10 aa, Homo Sapiens
APIGPHLQSM

SEQ ID NO: 108880 - protein, 10 aa, Homo Sapiens
APIIRVGGAL

SEQ ID NO: 108881 - protein, 10 aa, Homo Sapiens
APIQGNREEL

SEQ ID NO: 108882 - protein, 10 aa, Homo Sapiens
APKANATIEV

SEQ ID NO: 108883 - protein, 10 aa, Homo Sapiens
APKASLRLGF

SEQ ID NO: 108884 - protein, 10 aa, Homo Sapiens
APKAVWLPAM

SEQ ID NO: 108885 - protein, 10 aa, Homo Sapiens
APKFPTPVIL

SEQ ID NO: 108886 - protein, 10 aa, Homo Sapiens
APKHFLPEML

SEQ ID NO: 108887 - protein, 10 aa, Homo Sapiens
APKHPISEEL

SEQ ID NO: 108888 - protein, 10 aa, Homo Sapiens
APKKPTGVDL

SEQ ID NO: 108889 - protein, 10 aa, Homo Sapiens
APKLPERTVL

SEQ ID NO: 108890 - protein, 10 aa, Homo Sapiens
APKMPVVTSV

SEQ ID NO: 108891 - protein, 10 aa, Homo Sapiens
APKPAAPTTL

SEQ ID NO: 108892 - protein, 10 aa, Homo Sapiens
APKPEASPSM

SEQ ID NO: 108893 - protein, 10 aa, Homo Sapiens
APKPEENPSL

SEQ ID NO: 108894 - protein, 10 aa, Homo Sapiens
APKPPFQSHF

SEQ ID NO: 108895 - protein, 10 aa, Homo Sapiens
APKPSSRPSL

SEQ ID NO: 108896 - protein, 10 aa, Homo Sapiens
APKQELPSAL

SEQ ID NO: 108897 - protein, 10 aa, Homo Sapiens
APKRPPSAFF

SEQ ID NO: 108898 - protein, 10 aa, Homo Sapiens
APKSGNTGEL

SEQ ID NO: 108899 - protein, 10 aa, Homo Sapiens
APKSMQSAIM

SEQ ID NO: 108900 - protein, 10 aa, Homo Sapiens
APKSPSSEWL

SEQ ID NO: 108901 - protein, 10 aa, Homo Sapiens
APKYGSYNVF

SEQ ID NO: 108902 - protein, 10 aa, Homo Sapiens
APLNEAMAVL

SEQ ID NO: 108903 - protein, 10 aa, Homo Sapiens
APMPCNLIKL

SEQ ID NO: 108904 - protein, 10 aa, Homo Sapiens
APNEKMKQVL

SEQ ID NO: 108905 - protein, 10 aa, Homo Sapiens
APPEYHRKAV

SEQ ID NO: 108906 - protein, 10 aa, Homo Sapiens
APPVLKRPIL

SEQ ID NO: 108907 - protein, 10 aa, Homo Sapiens
APQADPRPSM

SEQ ID NO: 108908 - protein, 10 aa, Homo Sapiens
APQPIRNIVF

SEQ ID NO: 108909 - protein, 10 aa, Homo Sapiens
APQTQHVSPM

SEQ ID NO: 108910 - protein, 10 aa, Homo Sapiens
APRAALVFAL

SEQ ID NO: 108911 - protein, 10 aa, Homo Sapiens
APRAASTESL

SEQ ID NO: 108912 - protein, 10 aa, Homo Sapiens
APRDAYWIAM

SEQ ID NO: 108913 - protein, 10 aa, Homo Sapiens
APREPFAHSL

SEQ ID NO: 108914 - protein, 10 aa, Homo Sapiens
APREPPPVEL

SEQ ID NO: 108915 - protein, 10 aa, Homo Sapiens
APRGTGIVSA

SEQ ID NO: 108916 - protein, 10 aa, Homo Sapiens
APRHPSTNSL

SEQ ID NO: 108917 - protein, 10 aa, Homo Sapiens
APRIALHTAL

SEQ ID NO: 108918 - protein, 10 aa, Homo Sapiens
APRPVDEPAM

SEQ ID NO: 108919 - protein, 10 aa, Homo Sapiens
APRSFHPPAA

SEQ ID NO: 108920 - protein, 10 aa, Homo Sapiens
APRSVAVSSI

SEQ ID NO: 108921 - protein, 10 aa, Homo Sapiens
APRTVALTAL

SEQ ID NO: 108922 - protein, 10 aa, Homo Sapiens
APRWGNPRAL

SEQ ID NO: 108923 - protein, 10 aa, Homo Sapiens
APSAARELSL

SEQ ID NO: 108924 - protein, 10 aa, Homo Sapiens
APSEKLEQIL

SEQ ID NO: 108925 - protein, 10 aa, Homo Sapiens
APSGSLAVPL

SEQ ID NO: 108926 - protein, 10 aa, Homo Sapiens
APSMKELQVL

SEQ ID NO: 108927 - protein, 10 aa, Homo Sapiens
APSPTHVAEL

SEQ ID NO: 108928 - protein, 10 aa, Homo Sapiens
APSSETGTSL

SEQ ID NO: 108929 - protein, 10 aa, Homo Sapiens
APSSPRPALP

SEQ ID NO: 108930 - protein, 10 aa, Homo Sapiens
APSWREPEVL

SEQ ID NO: 108931 - protein, 10 aa, Homo Sapiens
APTNRQIEIL

SEQ ID NO: 108932 - protein, 10 aa, Homo Sapiens
APTVTMVRVV

SEQ ID NO: 108933 - protein, 10 aa, Homo Sapiens
APVGRDAETL

SEQ ID NO: 108934 - protein, 10 aa, Homo Sapiens
APVPYVRPAI

SEQ ID NO: 108935 - protein, 10 aa, Homo Sapiens
APWSGRFYSL

SEQ ID NO: 108936 - protein, 10 aa, Homo Sapiens
APYERRAMEL

SEQ ID NO: 108937 - protein, 10 aa, Homo Sapiens
APYFKGTAVV

SEQ ID NO: 108938 - protein, 10 aa, Homo Sapiens
APYFLPEHIF

SEQ ID NO: 108939 - protein, 10 aa, Homo Sapiens
ASPKSPTAAL

SEQ ID NO: 108940 - protein, 10 aa, Homo Sapiens
AVDPNRAVPL

SEQ ID NO: 108941 - protein, 10 aa, Homo Sapiens
DTNADKQLSF

SEQ ID NO: 108942 - protein, 10 aa, Homo Sapiens
EPAPASVTAL

SEQ ID NO: 108943 - protein, 10 aa, Homo Sapiens
EPKVQPGVAM

SEQ ID NO: 108944 - protein, 10 aa, Homo Sapiens
EPNRRVLETL

SEQ ID NO: 108945 - protein, 10 aa, Homo Sapiens
FPAKPGSLTL

SEQ ID NO: 108946 - protein, 10 aa, Homo Sapiens
FPAPGKTVTL

SEQ ID NO: 108947 - protein, 10 aa, Homo Sapiens
FPEADKVRTM

SEQ ID NO: 108948 - protein, 10 aa, Homo Sapiens
FPHPVNQVTF

SEQ ID NO: 108949 - protein, 10 aa, Homo Sapiens
FPKGYRHPAL

SEQ ID NO: 108950 - protein, 10 aa, Homo Sapiens
FPKKALVVTI

SEQ ID NO: 108951 - protein, 10 aa, Homo Sapiens
FPQKLRPRLL

SEQ ID NO: 108952 - protein, 10 aa, Homo Sapiens
FPQLKSLETL

SEQ ID NO: 108953 - protein, 10 aa, Homo Sapiens
FPRPDQQHSV

SEQ ID NO: 108954 - protein, 10 aa, Homo Sapiens
GAAVRIGSVL

SEQ ID NO: 108955 - protein, 10 aa, Homo Sapiens
GPKPGGGPGL

SEQ ID NO: 108956 - protein, 10 aa, Homo Sapiens
GPRAPGPSLL

SEQ ID NO: 108957 - protein, 10 aa, Homo Sapiens
GPSIVHRKCF

SEQ ID NO: 108958 - protein, 10 aa, Homo Sapiens
GPWRDKDPAL

SEQ ID NO: 108959 - protein, 10 aa, Homo Sapiens
GVSSSHVRVL

SEQ ID NO: 108960 - protein, 10 aa, Homo Sapiens
GVSVKKGHEL

SEQ ID NO: 108961 - protein, 10 aa, Homo Sapiens
HPAARMLVEL

SEQ ID NO: 108962 - protein, 10 aa, Homo Sapiens
HPAGPRTVFF

SEQ ID NO: 108963 - protein, 10 aa, Homo Sapiens
HPFPESKPVL

SEQ ID NO: 108964 - protein, 10 aa, Homo Sapiens
HPFYTRAATM

SEQ ID NO: 108965 - protein, 10 aa, Homo Sapiens
HPHAVNEIAL

SEQ ID NO: 108966 - protein, 10 aa, Homo Sapiens
HPIDGFLQSL

SEQ ID NO: 108967 - protein, 10 aa, Homo Sapiens
HPIQGHRVEV

SEQ ID NO: 108968 - protein, 10 aa, Homo Sapiens
HPISDHEATL

SEQ ID NO: 108969 - protein, 10 aa, Homo Sapiens
HPKEDIFISV

SEQ ID NO: 108970 - protein, 10 aa, Homo Sapiens
HPKFQKPKQL

SEQ ID NO: 108971 - protein, 10 aa, Homo Sapiens
HPKLGSYTKI

SEQ ID NO: 108972 - protein, 10 aa, Homo Sapiens
HPKLSKENVI

SEQ ID NO: 108973 - protein, 10 aa, Homo Sapiens
HPKNPHAPTI

SEQ ID NO: 108974 - protein, 10 aa, Homo Sapiens
HPKPSGKPLP

SEQ ID NO: 108975 - protein, 10 aa, Homo Sapiens
HPKPVPGFQV

SEQ ID NO: 108976 - protein, 10 aa, Homo Sapiens
HPKRPMHILL

SEQ ID NO: 108977 - protein, 10 aa, Homo Sapiens
HPKTPLPPEL

SEQ ID NO: 108978 - protein, 10 aa, Homo Sapiens
HPKYGSIPKL

SEQ ID NO: 108979 - protein, 10 aa, Homo Sapiens
HPKYPDGKTF

SEQ ID NO: 108980 - protein, 10 aa, Homo Sapiens
HPMKPHRLAL

SEQ ID NO: 108981 - protein, 10 aa, Homo Sapiens
HPMYGAGHKF

SEQ ID NO: 108982 - protein, 10 aa, Homo Sapiens
HPNKPKDHVF

SEQ ID NO: 108983 - protein, 10 aa, Homo Sapiens
HPNSNIYNTL

SEQ ID NO: 108984 - protein, 10 aa, Homo Sapiens
HPNTRIGVFL

SEQ ID NO: 108985 - protein, 10 aa, Homo Sapiens
HPPPASPSSL

SEQ ID NO: 108986 - protein, 10 aa, Homo Sapiens
HPPYLVSKEL

SEQ ID NO: 108987 - protein, 10 aa, Homo Sapiens
HPQPGSANSL

SEQ ID NO: 108988 - protein, 10 aa, Homo Sapiens
HPREPLPPIQ

SEQ ID NO: 108989 - protein, 10 aa, Homo Sapiens
HPRGGVIQSV

SEQ ID NO: 108990 - protein, 10 aa, Homo Sapiens
HPRPAHKAIL

SEQ ID NO: 108991 - protein, 10 aa, Homo Sapiens
HPRPPIPLSL

SEQ ID NO: 108992 - protein, 10 aa, Homo Sapiens
HPRSPNVLSV

SEQ ID NO: 108993 - protein, 10 aa, Homo Sapiens
HPRTSITVVL

SEQ ID NO: 108994 - protein, 10 aa, Homo Sapiens
HPVVRNLAVL

SEQ ID NO: 108995 - protein, 10 aa, Homo Sapiens
HVKDANGNSF

SEQ ID NO: 108996 - protein, 10 aa, Homo Sapiens
IAKAYPPTSM

SEQ ID NO: 108997 - protein, 10 aa, Homo Sapiens
IAKRPPLQSL

SEQ ID NO: 108998 - protein, 10 aa, Homo Sapiens
IPAPGSGVSF

SEQ ID NO: 108999 - protein, 10 aa, Homo Sapiens
IPAVELIVKL

SEQ ID NO: 109000 - protein, 10 aa, Homo Sapiens
IPFERDQEIL

SEQ ID NO: 109001 - protein, 10 aa, Homo Sapiens
IPGLLSPHPL

SEQ ID NO: 109002 - protein, 10 aa, Homo Sapiens
IPKDYKTMAA

SEQ ID NO: 109003 - protein, 10 aa, Homo Sapiens
IPKEVDKIVF

SEQ ID NO: 109004 - protein, 10 aa, Homo Sapiens
IPKHINPVAA

SEQ ID NO: 109005 - protein, 10 aa, Homo Sapiens
IPKKNILLTI

SEQ ID NO: 109006 - protein, 10 aa, Homo Sapiens
IPKSILEPAL

SEQ ID NO: 109007 - protein, 10 aa, Homo Sapiens
IPKVQHVIHY

SEQ ID NO: 109008 - protein, 10 aa, Homo Sapiens
IPKVTKTSAL

SEQ ID NO: 109009 - protein, 10 aa, Homo Sapiens
IPLFHGTLAL

SEQ ID NO: 109010 - protein, 10 aa, Homo Sapiens
IPLPHGTHTF

SEQ ID NO: 109011 - protein, 10 aa, Homo Sapiens
IPMDPEHVEL

SEQ ID NO: 109012 - protein, 10 aa, Homo Sapiens
IPMPGHPVNF

SEQ ID NO: 109013 - protein, 10 aa, Homo Sapiens
IPNERTMQLL

SEQ ID NO: 109014 - protein, 10 aa, Homo Sapiens
IPNVRIQAVL

SEQ ID NO: 109015 - protein, 10 aa, Homo Sapiens
IPPPPPPVGF

SEQ ID NO: 109016 - protein, 10 aa, Homo Sapiens
IPPYALGKSL

SEQ ID NO: 109017 - protein, 10 aa, Homo Sapiens
IPQERGLSSL

SEQ ID NO: 109018 - protein, 10 aa, Homo Sapiens
IPQKQREITL

SEQ ID NO: 109019 - protein, 10 aa, Homo Sapiens
IPRDPSQQEL

SEQ ID NO: 109020 - protein, 10 aa, Homo Sapiens
IPRGVNVSAL

SEQ ID NO: 109021 - protein, 10 aa, Homo Sapiens
IPSANPAKTM

SEQ ID NO: 109022 - protein, 10 aa, Homo Sapiens
IPVSRDWELL

SEQ ID NO: 109023 - protein, 10 aa, Homo Sapiens
IPYMFEAREF

SEQ ID NO: 109024 - protein, 10 aa, Homo Sapiens
IPYMKKYKIQ

SEQ ID NO: 109025 - protein, 10 aa, Homo Sapiens
IVKECVDGVL

SEQ ID NO: 109026 - protein, 10 aa, Homo Sapiens
IVKGGRIVAM

SEQ ID NO: 109027 - protein, 10 aa, Homo Sapiens
IVSNTLVRAL

SEQ ID NO: 109028 - protein, 10 aa, Homo Sapiens
KPADRVNVTV

SEQ ID NO: 109029 - protein, 10 aa, Homo Sapiens
KPADVIGKSM

SEQ ID NO: 109030 - protein, 10 aa, Homo Sapiens
KPEERYFISH

SEQ ID NO: 109031 - protein, 10 aa, Homo Sapiens
KPFDQTTISL

SEQ ID NO: 109032 - protein, 10 aa, Homo Sapiens
KPFLPSIIAL

SEQ ID NO: 109033 - protein, 10 aa, Homo Sapiens
KPFSQHVRKL

SEQ ID NO: 109034 - protein, 10 aa, Homo Sapiens
KPHEGIIHSL

SEQ ID NO: 109035 - protein, 10 aa, Homo Sapiens
KPHSGFHVAF

SEQ ID NO: 109036 - protein, 10 aa, Homo Sapiens
KPHWNDGAIL

SEQ ID NO: 109037 - protein, 10 aa, Homo Sapiens
KPIEPRRELL

SEQ ID NO: 109038 - protein, 10 aa, Homo Sapiens
KPIFSKIVSL

SEQ ID NO: 109039 - protein, 10 aa, Homo Sapiens
KPIGSLHPGL

SEQ ID NO: 109040 - protein, 10 aa, Homo Sapiens
KPINVRVTTM

SEQ ID NO: 109041 - protein, 10 aa, Homo Sapiens
KPIVRKKLSL

SEQ ID NO: 109042 - protein, 10 aa, Homo Sapiens
KPKATAKAAL

SEQ ID NO: 109043 - protein, 10 aa, Homo Sapiens
KPKCGRMISF

SEQ ID NO: 109044 - protein, 10 aa, Homo Sapiens
KPKDMGFTRL

SEQ ID NO: 109045 - protein, 10 aa, Homo Sapiens
KPKDPLKISL

SEQ ID NO: 109046 - protein, 10 aa, Homo Sapiens
KPKEHKKLFL

SEQ ID NO: 109047 - protein, 10 aa, Homo Sapiens
KPKEPASCLL

SEQ ID NO: 109048 - protein, 10 aa, Homo Sapiens
KPKEVTTVKV

SEQ ID NO: 109049 - protein, 10 aa, Homo Sapiens
KPKFSGVEKI

SEQ ID NO: 109050 - protein, 10 aa, Homo Sapiens
KPKGFAFITF

SEQ ID NO: 109051 - protein, 10 aa, Homo Sapiens
KPKLTPQEKL

SEQ ID NO: 109052 - protein, 10 aa, Homo Sapiens
KPKNTIAIFC

SEQ ID NO: 109053 - protein, 10 aa, Homo Sapiens
KPKPAGVLGA

SEQ ID NO: 109054 - protein, 10 aa, Homo Sapiens
KPKPGHTPIF

SEQ ID NO: 109055 - protein, 10 aa, Homo Sapiens
KPKPIDVQVI

SEQ ID NO: 109056 - protein, 10 aa, Homo Sapiens
KPKPPAPEDL

SEQ ID NO: 109057 - protein, 10 aa, Homo Sapiens
KPKPTNPVEI

SEQ ID NO: 109058 - protein, 10 aa, Homo Sapiens
KPKPVKPVTF

SEQ ID NO: 109059 - protein, 10 aa, Homo Sapiens
KPKSAPWNSF

SEQ ID NO: 109060 - protein, 10 aa, Homo Sapiens
KPLVPREHQF

SEQ ID NO: 109061 - protein, 10 aa, Homo Sapiens
KPMEGNFEEI

SEQ ID NO: 109062 - protein, 10 aa, Homo Sapiens
KPMQPGPHVV

SEQ ID NO: 109063 - protein, 10 aa, Homo Sapiens
KPNEGAIVEV

SEQ ID NO: 109064 - protein, 10 aa, Homo Sapiens
KPNPNQIISV

SEQ ID NO: 109065 - protein, 10 aa, Homo Sapiens
KPNQISGTVF

SEQ ID NO: 109066 - protein, 10 aa, Homo Sapiens
KPPEPVKPEV

SEQ ID NO: 109067 - protein, 10 aa, Homo Sapiens
KPPSAEYKVV

SEQ ID NO: 109068 - protein, 10 aa, Homo Sapiens
KPRDVSSVEL

SEQ ID NO: 109069 - protein, 10 aa, Homo Sapiens
KPRNVQILNM

SEQ ID NO: 109070 - protein, 10 aa, Homo Sapiens
KPRNVVFVDM

SEQ ID NO: 109071 - protein, 10 aa, Homo Sapiens
KPRPDVTNEL

SEQ ID NO: 109072 - protein, 10 aa, Homo Sapiens
KPRTEGKITL

SEQ ID NO: 109073 - protein, 10 aa, Homo Sapiens
KPRVPPATAF

SEQ ID NO: 109074 - protein, 10 aa, Homo Sapiens
KPSDVMLVHF

SEQ ID NO: 109075 - protein, 10 aa, Homo Sapiens
KPSEERVREI

SEQ ID NO: 109076 - protein, 10 aa, Homo Sapiens
KPSESIYSAL

SEQ ID NO: 109077 - protein, 10 aa, Homo Sapiens
KPSPPPVKEL

SEQ ID NO: 109078 - protein, 10 aa, Homo Sapiens
KPSQITGTVF

SEQ ID NO: 109079 - protein, 10 aa, Homo Sapiens
KPTSERKVSL

SEQ ID NO: 109080 - protein, 10 aa, Homo Sapiens
KPYKNDPEIL

SEQ ID NO: 109081 - protein, 10 aa, Homo Sapiens
KVKQVHKEVL

SEQ ID NO: 109082 - protein, 10 aa, Homo Sapiens
KVPQLEIVPN

SEQ ID NO: 109083 - protein, 10 aa, Homo Sapiens
LIMGFLVLGL

SEQ ID NO: 109084 - protein, 10 aa, Homo Sapiens
LPAAAMARAM

SEQ ID NO: 109085 - protein, 10 aa, Homo Sapiens
LPAEFPDKVF

SEQ ID NO: 109086 - protein, 10 aa, Homo Sapiens
LPAPCTPLSL

SEQ ID NO: 109087 - protein, 10 aa, Homo Sapiens
LPCSFVTHAL

SEQ ID NO: 109088 - protein, 10 aa, Homo Sapiens
LPDSGHLHPL

SEQ ID NO: 109089 - protein, 10 aa, Homo Sapiens
LPFDHSRVIL

SEQ ID NO: 109090 - protein, 10 aa, Homo Sapiens
LPIPRPGEVL

SEQ ID NO: 109091 - protein, 10 aa, Homo Sapiens
LPKDQQITAL

SEQ ID NO: 109092 - protein, 10 aa, Homo Sapiens
LPKETCLITF

SEQ ID NO: 109093 - protein, 10 aa, Homo Sapiens
LPKIPSNATL

SEQ ID NO: 109094 - protein, 10 aa, Homo Sapiens
LPKKPCKNLL

SEQ ID NO: 109095 - protein, 10 aa, Homo Sapiens
LPKKPCKNLM

SEQ ID NO: 109096 - protein, 10 aa, Homo Sapiens
LPKKPKKVAF

SEQ ID NO: 109097 - protein, 10 aa, Homo Sapiens
LPKKSIDTGM

SEQ ID NO: 109098 - protein, 10 aa, Homo Sapiens
LPKPGGAHSL

SEQ ID NO: 109099 - protein, 10 aa, Homo Sapiens
LPKPHGIRAL

SEQ ID NO: 109100 - protein, 10 aa, Homo Sapiens
LPKPPPGVGL

SEQ ID NO: 109101 - protein, 10 aa, Homo Sapiens
LPKQEKRHVL

SEQ ID NO: 109102 - protein, 10 aa, Homo Sapiens
LPKRTIQEVL

SEQ ID NO: 109103 - protein, 10 aa, Homo Sapiens
LPKSPPYTAF

SEQ ID NO: 109104 - protein, 10 aa, Homo Sapiens
LPKSQVTDTL

SEQ ID NO: 109105 - protein, 10 aa, Homo Sapiens
LPKYGVKVGL

SEQ ID NO: 109106 - protein, 10 aa, Homo Sapiens
LPLDKITECL

SEQ ID NO: 109107 - protein, 10 aa, Homo Sapiens
LPLGPGREAL

SEQ ID NO: 109108 - protein, 10 aa, Homo Sapiens
LPLSAANITL

SEQ ID NO: 109109 - protein, 10 aa, Homo Sapiens
LPNYRWTQTL

SEQ ID NO: 109110 - protein, 10 aa, Homo Sapiens
LPPGLAVKEL

SEQ ID NO: 109111 - protein, 10 aa, Homo Sapiens
LPPLPKRPAL

SEQ ID NO: 109112 - protein, 10 aa, Homo Sapiens
LPQDKKEYRL

SEQ ID NO: 109113 - protein, 10 aa, Homo Sapiens
LPQQPLHPCM

SEQ ID NO: 109114 - protein, 10 aa, Homo Sapiens
LPQYKEREVV

SEQ ID NO: 109115 - protein, 10 aa, Homo Sapiens
LPRAVGTQTL

SEQ ID NO: 109116 - protein, 10 aa, Homo Sapiens
LPRGRKQLAL

SEQ ID NO: 109117 - protein, 10 aa, Homo Sapiens
LPRGSIPRSL

SEQ ID NO: 109118 - protein, 10 aa, Homo Sapiens
LPRPHASIMF

SEQ ID NO: 109119 - protein, 10 aa, Homo Sapiens
LPSALVSHVL

SEQ ID NO: 109120 - protein, 10 aa, Homo Sapiens
LPSDLRTISL

SEQ ID NO: 109121 - protein, 10 aa, Homo Sapiens
LPSEELNRQL

SEQ ID NO: 109122 - protein, 10 aa, Homo Sapiens
LPSNTKFVAL

SEQ ID NO: 109123 - protein, 10 aa, Homo Sapiens
LPSSKLIRIL

SEQ ID NO: 109124 - protein, 10 aa, Homo Sapiens
LPTSVQGHVL

SEQ ID NO: 109125 - protein, 10 aa, Homo Sapiens
LPVDHKGELL

SEQ ID NO: 109126 - protein, 10 aa, Homo Sapiens
LVKGLGILSL

SEQ ID NO: 109127 - protein, 10 aa, Homo Sapiens
LVRPHIDISF

SEQ ID NO: 109128 - protein, 10 aa, Homo Sapiens
MPALFSDHTF

SEQ ID NO: 109129 - protein, 10 aa, Homo Sapiens
MPANMDKHAL

SEQ ID NO: 109130 - protein, 10 aa, Homo Sapiens
MPCQALVRML

SEQ ID NO: 109131 - protein, 10 aa, Homo Sapiens
MPEEKLVEAL

SEQ ID NO: 109132 - protein, 10 aa, Homo Sapiens
MPEQAHKVCV

SEQ ID NO: 109133 - protein, 10 aa, Homo Sapiens
MPFKDRATSM

SEQ ID NO: 109134 - protein, 10 aa, Homo Sapiens
MPFQRAGVNF

SEQ ID NO: 109135 - protein, 10 aa, Homo Sapiens
MPHPATGKTV

SEQ ID NO: 109136 - protein, 10 aa, Homo Sapiens
MPHRGRLNVL

SEQ ID NO: 109137 - protein, 10 aa, Homo Sapiens
MPKDGTVHEL

SEQ ID NO: 109138 - protein, 10 aa, Homo Sapiens
MPKEPHIREM

SEQ ID NO: 109139 - protein, 10 aa, Homo Sapiens
MPKKDARTLL

SEQ ID NO: 109140 - protein, 10 aa, Homo Sapiens
MPKKGGRWWF

SEQ ID NO: 109141 - protein, 10 aa, Homo Sapiens
MPKKSGRWWF

SEQ ID NO: 109142 - protein, 10 aa, Homo Sapiens
MPKMNFANVF

SEQ ID NO: 109143 - protein, 10 aa, Homo Sapiens
MPKRIVNAKI

SEQ ID NO: 109144 - protein, 10 aa, Homo Sapiens
MPNGDHIVSA

SEQ ID NO: 109145 - protein, 10 aa, Homo Sapiens
MPNNSLTPSL

SEQ ID NO: 109146 - protein, 10 aa, Homo Sapiens
MPPEKVHKEL

SEQ ID NO: 109147 - protein, 10 aa, Homo Sapiens
MPPPANLPSL

SEQ ID NO: 109148 - protein, 10 aa, Homo Sapiens
MPQNPHIIAT

SEQ ID NO: 109149 - protein, 10 aa, Homo Sapiens
MPQSGTGVSV

SEQ ID NO: 109150 - protein, 10 aa, Homo Sapiens
MPRGIYHSAL

SEQ ID NO: 109151 - protein, 10 aa, Homo Sapiens
MPRQPSATRL

SEQ ID NO: 109152 - protein, 10 aa, Homo Sapiens
MPSASRVILL

SEQ ID NO: 109153 - protein, 10 aa, Homo Sapiens
MPSLKHIVEL

SEQ ID NO: 109154 - protein, 10 aa, Homo Sapiens
MPYDSNRVVL

SEQ ID NO: 109155 - protein, 10 aa, Homo Sapiens
MPYGSRENSL

SEQ ID NO: 109156 - protein, 10 aa, Homo Sapiens
MPYSNGRPAL

SEQ ID NO: 109157 - protein, 10 aa, Homo Sapiens
NPKDATSIHL

SEQ ID NO: 109158 - protein, 10 aa, Homo Sapiens
NPKPASPRFL

SEQ ID NO: 109159 - protein, 10 aa, Homo Sapiens
NPLFIPVAVM

SEQ ID NO: 109160 - protein, 10 aa, Homo Sapiens
NPLPNIDHEL

SEQ ID NO: 109161 - protein, 10 aa, Homo Sapiens
NPNQNKNVAL

SEQ ID NO: 109162 - protein, 10 aa, Homo Sapiens
PGSPFKAHVV

SEQ ID NO: 109163 - protein, 10 aa, Homo Sapiens
PHPKKPEHTL

SEQ ID NO: 109164 - protein, 10 aa, Homo Sapiens
PKTAENFRAL

SEQ ID NO: 109165 - protein, 10 aa, Homo Sapiens
PMLVAGLKGL

SEQ ID NO: 109166 - protein, 10 aa, Homo Sapiens
PRPSTGPHKL

SEQ ID NO: 109167 - protein, 10 aa, Homo Sapiens
PSITHGPRLS

SEQ ID NO: 109168 - protein, 10 aa, Homo Sapiens
PSVGQLAHKL

SEQ ID NO: 109169 - protein, 10 aa, Homo Sapiens
QPADRPREPL

SEQ ID NO: 109170 - protein, 10 aa, Homo Sapiens
QPANCKVESL

SEQ ID NO: 109171 - protein, 10 aa, Homo Sapiens
QPAPPREAHF

SEQ ID NO: 109172 - protein, 10 aa, Homo Sapiens
QPDQTRIVAL

SEQ ID NO: 109173 - protein, 10 aa, Homo Sapiens
QPFFQKRSEL

SEQ ID NO: 109174 - protein, 10 aa, Homo Sapiens
QPFSAKDLSI

SEQ ID NO: 109175 - protein, 10 aa, Homo Sapiens
QPIPFPKEAL

SEQ ID NO: 109176 - protein, 10 aa, Homo Sapiens
QPKKVKGVGF

SEQ ID NO: 109177 - protein, 10 aa, Homo Sapiens
QPKQKIRVAL

SEQ ID NO: 109178 - protein, 10 aa, Homo Sapiens
QPMQPHPQHL

SEQ ID NO: 109179 - protein, 10 aa, Homo Sapiens
QPMQPLPESL

SEQ ID NO: 109180 - protein, 10 aa, Homo Sapiens
QPNEQHPVSL

SEQ ID NO: 109181 - protein, 10 aa, Homo Sapiens
QPNGKVFKKL

SEQ ID NO: 109182 - protein, 10 aa, Homo Sapiens
QPNRYTNRVV

SEQ ID NO: 109183 - protein, 10 aa, Homo Sapiens
QPPDAVKPAI

SEQ ID NO: 109184 - protein, 10 aa, Homo Sapiens
QPPGAAKPAL

SEQ ID NO: 109185 - protein, 10 aa, Homo Sapiens
QPRNDFGNFF

SEQ ID NO: 109186 - protein, 10 aa, Homo Sapiens
QPRTEPMPSL

SEQ ID NO: 109187 - protein, 10 aa, Homo Sapiens
QPSPVSNQSL

SEQ ID NO: 109188 - protein, 10 aa, Homo Sapiens
QPYEKKAAKL

SEQ ID NO: 109189 - protein, 10 aa, Homo Sapiens
QPYLARRPKL

SEQ ID NO: 109190 - protein, 10 aa, Homo Sapiens
RAKPEDRESL

SEQ ID NO: 109191 - protein, 10 aa, Homo Sapiens
RLKPPPPVAI

SEQ ID NO: 109192 - protein, 10 aa, Homo Sapiens
RNKEVTWEVL

SEQ ID NO: 109193 - protein, 10 aa, Homo Sapiens
RPAAPGQTPL

SEQ ID NO: 109194 - protein, 10 aa, Homo Sapiens
RPADSMLNVL

SEQ ID NO: 109195 - protein, 10 aa, Homo Sapiens
RPADVIFATV

SEQ ID NO: 109196 - protein, 10 aa, Homo Sapiens
RPAELYTQII

SEQ ID NO: 109197 - protein, 10 aa, Homo Sapiens
RPAEVGGMQL

SEQ ID NO: 109198 - protein, 10 aa, Homo Sapiens
RPALQHVVKV

SEQ ID NO: 109199 - protein, 10 aa, Homo Sapiens
RPANHRQLTF

SEQ ID NO: 109200 - protein, 10 aa, Homo Sapiens
RPAPPLRPSA

SEQ ID NO: 109201 - protein, 10 aa, Homo Sapiens
RPAQPQEHPF

SEQ ID NO: 109202 - protein, 10 aa, Homo Sapiens
RPAVALIRKL

SEQ ID NO: 109203 - protein, 10 aa, Homo Sapiens
RPDDKRILEF

SEQ ID NO: 109204 - protein, 10 aa, Homo Sapiens
RPDERRFAVF

SEQ ID NO: 109205 - protein, 10 aa, Homo Sapiens
RPEILTDESL

SEQ ID NO: 109206 - protein, 10 aa, Homo Sapiens
RPEPATGYTL

SEQ ID NO: 109207 - protein, 10 aa, Homo Sapiens
RPFHNGVKCL

SEQ ID NO: 109208 - protein, 10 aa, Homo Sapiens
RPGGDYNTSL

SEQ ID NO: 109209 - protein, 10 aa, Homo Sapiens
RPHKVDGRVV

SEQ ID NO: 109210 - protein, 10 aa, Homo Sapiens
RPHNLKVHIL

SEQ ID NO: 109211 - protein, 10 aa, Homo Sapiens
RPHSIDGRVV

SEQ ID NO: 109212 - protein, 10 aa, Homo Sapiens
RPHVSPRHSF

SEQ ID NO: 109213 - protein, 10 aa, Homo Sapiens
RPHYGKLKEI

SEQ ID NO: 109214 - protein, 10 aa, Homo Sapiens
RPIFPGKHYL

SEQ ID NO: 109215 - protein, 10 aa, Homo Sapiens
RPIPNQPPTA

SEQ ID NO: 109216 - protein, 10 aa, Homo Sapiens
RPKAAIMETL

SEQ ID NO: 109217 - protein, 10 aa, Homo Sapiens
RPKAISPYHL

SEQ ID NO: 109218 - protein, 10 aa, Homo Sapiens
RPKAVREQLL

SEQ ID NO: 109219 - protein, 10 aa, Homo Sapiens
RPKCVDEVAF

SEQ ID NO: 109220 - protein, 10 aa, Homo Sapiens
RPKDMDPRLI

SEQ ID NO: 109221 - protein, 10 aa, Homo Sapiens
RPKEDTQKLL

SEQ ID NO: 109222 - protein, 10 aa, Homo Sapiens
RPKEIKVSKM

SEQ ID NO: 109223 - protein, 10 aa, Homo Sapiens
RPKEPQLSLL

SEQ ID NO: 109224 - protein, 10 aa, Homo Sapiens
RPKGESKDLL

SEQ ID NO: 109225 - protein, 10 aa, Homo Sapiens
RPKGFYVETV

SEQ ID NO: 109226 - protein, 10 aa, Homo Sapiens
RPKIPDPEAV

SEQ ID NO: 109227 - protein, 10 aa, Homo Sapiens
RPKLPEDPLL

SEQ ID NO: 109228 - protein, 10 aa, Homo Sapiens
RPKPKTLHEL

SEQ ID NO: 109229 - protein, 10 aa, Homo Sapiens
RPKPPNVRTA

SEQ ID NO: 109230 - protein, 10 aa, Homo Sapiens
RPKPSASEVL

SEQ ID NO: 109231 - protein, 10 aa, Homo Sapiens
RPKPSSSPVI

SEQ ID NO: 109232 - protein, 10 aa, Homo Sapiens
RPKQEKAFSL

SEQ ID NO: 109233 - protein, 10 aa, Homo Sapiens
RPKQPGPVKL

SEQ ID NO: 109234 - protein, 10 aa, Homo Sapiens
RPKSFILPKL

SEQ ID NO: 109235 - protein, 10 aa, Homo Sapiens
RPKSNIVLLS

SEQ ID NO: 109236 - protein, 10 aa, Homo Sapiens
RPKSSSPIRL

SEQ ID NO: 109237 - protein, 10 aa, Homo Sapiens
RPKSVDFDSL

SEQ ID NO: 109238 - protein, 10 aa, Homo Sapiens
RPKTVRDTLL

SEQ ID NO: 109239 - protein, 10 aa, Homo Sapiens
RPMAFLREYF

SEQ ID NO: 109240 - protein, 10 aa, Homo Sapiens
RPMPPEARRL

SEQ ID NO: 109241 - protein, 10 aa, Homo Sapiens
RPNGTKVAVL

SEQ ID NO: 109242 - protein, 10 aa, Homo Sapiens
RPNPILARLL

SEQ ID NO: 109243 - protein, 10 aa, Homo Sapiens
RPNQHNTVKL

SEQ ID NO: 109244 - protein, 10 aa, Homo Sapiens
RPPKVKITEL

SEQ ID NO: 109245 - protein, 10 aa, Homo Sapiens
RPQAPATVGL

SEQ ID NO: 109246 - protein, 10 aa, Homo Sapiens
RPQASAWKKL

SEQ ID NO: 109247 - protein, 10 aa, Homo Sapiens
RPQELDEAVL

SEQ ID NO: 109248 - protein, 10 aa, Homo Sapiens
RPQEVPAEAL

SEQ ID NO: 109249 - protein, 10 aa, Homo Sapiens
RPQLHKNTVL

SEQ ID NO: 109250 - protein, 10 aa, Homo Sapiens
RPQRATSNVF

SEQ ID NO: 109251 - protein, 10 aa, Homo Sapiens
RPRDASTLGL

SEQ ID NO: 109252 - protein, 10 aa, Homo Sapiens
RPRDKQMELL

SEQ ID NO: 109253 - protein, 10 aa, Homo Sapiens
RPRDSQLYAV

SEQ ID NO: 109254 - protein, 10 aa, Homo Sapiens
RPREAEVRFL

SEQ ID NO: 109255 - protein, 10 aa, Homo Sapiens
RPRGFAYVQF

SEQ ID NO: 109256 - protein, 10 aa, Homo Sapiens
RPRKAFLLLL

SEQ ID NO: 109257 - protein, 10 aa, Homo Sapiens
RPRLQHSFSF

SEQ ID NO: 109258 - protein, 10 aa, Homo Sapiens
RPRPDEERPL

SEQ ID NO: 109259 - protein, 10 aa, Homo Sapiens
RPRPDPSPEI

SEQ ID NO: 109260 - protein, 10 aa, Homo Sapiens
RPRPEYVAIF

SEQ ID NO: 109261 - protein, 10 aa, Homo Sapiens
RPRPHSAPSL

SEQ ID NO: 109262 - protein, 10 aa, Homo Sapiens
RPRPNTFVIR

SEQ ID NO: 109263 - protein, 10 aa, Homo Sapiens
RPRPPPVEQV

SEQ ID NO: 109264 - protein, 10 aa, Homo Sapiens
RPRPSEDTFL

SEQ ID NO: 109265 - protein, 10 aa, Homo Sapiens
RPRPSGEEVL

SEQ ID NO: 109266 - protein, 10 aa, Homo Sapiens
RPRPWRGNTL

SEQ ID NO: 109267 - protein, 10 aa, Homo Sapiens
RPRSWRELPL

SEQ ID NO: 109268 - protein, 10 aa, Homo Sapiens
RPRVALQQSF

SEQ ID NO: 109269 - protein, 10 aa, Homo Sapiens
RPSDEVIREL

SEQ ID NO: 109270 - protein, 10 aa, Homo Sapiens
RPSEKNQHIM

SEQ ID NO: 109271 - protein, 10 aa, Homo Sapiens
RPSGEAFVEL

SEQ ID NO: 109272 - protein, 10 aa, Homo Sapiens
RPSLNIATVL

SEQ ID NO: 109273 - protein, 10 aa, Homo Sapiens
RPSQNNTIGL

SEQ ID NO: 109274 - protein, 10 aa, Homo Sapiens
RPSSKKTYSL

SEQ ID NO: 109275 - protein, 10 aa, Homo Sapiens
RPSSQYIVAL

SEQ ID NO: 109276 - protein, 10 aa, Homo Sapiens
RPSTPHTITL

SEQ ID NO: 109277 - protein, 10 aa, Homo Sapiens
RPSTRIQQQL

SEQ ID NO: 109278 - protein, 10 aa, Homo Sapiens
RPVAPSGTAL

SEQ ID NO: 109279 - protein, 10 aa, Homo Sapiens
RPWEKNSTTL

SEQ ID NO: 109280 - protein, 10 aa, Homo Sapiens
RPWLEGRHTL

SEQ ID NO: 109281 - protein, 10 aa, Homo Sapiens
RPWVSGHRKL

SEQ ID NO: 109282 - protein, 10 aa, Homo Sapiens
RPYAAGGKKL

SEQ ID NO: 109283 - protein, 10 aa, Homo Sapiens
RPYPSPGAVL

SEQ ID NO: 109284 - protein, 10 aa, Homo Sapiens
RVAPEEHPVL

SEQ ID NO: 109285 - protein, 10 aa, Homo Sapiens
RVKEPVKELL

SEQ ID NO: 109286 - protein, 10 aa, Homo Sapiens
RVKGNNVYCL

SEQ ID NO: 109287 - protein, 10 aa, Homo Sapiens
RVKPYIRTSL

SEQ ID NO: 109288 - protein, 10 aa, Homo Sapiens
SARPADEIAV

SEQ ID NO: 109289 - protein, 10 aa, Homo Sapiens
SASVKKPHTL

SEQ ID NO: 109290 - protein, 10 aa, Homo Sapiens
SPAAPSPLAL

SEQ ID NO: 109291 - protein, 10 aa, Homo Sapiens
SPAGSIVHEL

SEQ ID NO: 109292 - protein, 10 aa, Homo Sapiens
SPALTISKVL

SEQ ID NO: 109293 - protein, 10 aa, Homo Sapiens
SPAPGRRLSL

SEQ ID NO: 109294 - protein, 10 aa, Homo Sapiens
SPASRSISLL

SEQ ID NO: 109295 - protein, 10 aa, Homo Sapiens
SPATTVVRTL

SEQ ID NO: 109296 - protein, 10 aa, Homo Sapiens
SPCERYLVTF

SEQ ID NO: 109297 - protein, 10 aa, Homo Sapiens
SPCQDFGKRM

SEQ ID NO: 109298 - protein, 10 aa, Homo Sapiens
SPDYERIINL

SEQ ID NO: 109299 - protein, 10 aa, Homo Sapiens
SPEGPSKPSL

SEQ ID NO: 109300 - protein, 10 aa, Homo Sapiens
SPGVVHLVAF

SEQ ID NO: 109301 - protein, 10 aa, Homo Sapiens
SPHPGVGVPT

SEQ ID NO: 109302 - protein, 10 aa, Homo Sapiens
SPIPAGSKKI

SEQ ID NO: 109303 - protein, 10 aa, Homo Sapiens
SPIRREKLAL

SEQ ID NO: 109304 - protein, 10 aa, Homo Sapiens
SPKAALRYAA

SEQ ID NO: 109305 - protein, 10 aa, Homo Sapiens
SPKAPDPEGL

SEQ ID NO: 109306 - protein, 10 aa, Homo Sapiens
SPKETFNASF

SEQ ID NO: 109307 - protein, 10 aa, Homo Sapiens
SPKGCGTVLL

SEQ ID NO: 109308 - protein, 10 aa, Homo Sapiens
SPKGTIENIL

SEQ ID NO: 109309 - protein, 10 aa, Homo Sapiens
SPKGTYLATF

SEQ ID NO: 109310 - protein, 10 aa, Homo Sapiens
SPKKPVIVFV

SEQ ID NO: 109311 - protein, 10 aa, Homo Sapiens
SPKPALCVTL

SEQ ID NO: 109312 - protein, 10 aa, Homo Sapiens
SPKPNNSYMF

SEQ ID NO: 109313 - protein, 10 aa, Homo Sapiens
SPKQILDPAA

SEQ ID NO: 109314 - protein, 10 aa, Homo Sapiens
SPKTPGCSDL

SEQ ID NO: 109315 - protein, 10 aa, Homo Sapiens
SPLCRSLQVL

SEQ ID NO: 109316 - protein, 10 aa, Homo Sapiens
SPLDMKDGFL

SEQ ID NO: 109317 - protein, 10 aa, Homo Sapiens
SPLSAARAAL

SEQ ID NO: 109318 - protein, 10 aa, Homo Sapiens
SPMDDGFVSL

SEQ ID NO: 109319 - protein, 10 aa, Homo Sapiens
SPMDGTSSAL

SEQ ID NO: 109320 - protein, 10 aa, Homo Sapiens
SPMEGTGISL

SEQ ID NO: 109321 - protein, 10 aa, Homo Sapiens
SPMPGTLTAL

SEQ ID NO: 109322 - protein, 10 aa, Homo Sapiens
SPMPWKGVTV

SEQ ID NO: 109323 - protein, 10 aa, Homo Sapiens
SPNACGGIAL

SEQ ID NO: 109324 - protein, 10 aa, Homo Sapiens
SPNEPKAATL

SEQ ID NO: 109325 - protein, 10 aa, Homo Sapiens
SPNGNLIRML

SEQ ID NO: 109326 - protein, 10 aa, Homo Sapiens
SPNPARGHSV

SEQ ID NO: 109327 - protein, 10 aa, Homo Sapiens
SPNPDREAIL

SEQ ID NO: 109328 - protein, 10 aa, Homo Sapiens
SPNSAHAVSL

SEQ ID NO: 109329 - protein, 10 aa, Homo Sapiens
SPNTAGLRSL

SEQ ID NO: 109330 - protein, 10 aa, Homo Sapiens
SPPELKRPRL

SEQ ID NO: 109331 - protein, 10 aa, Homo Sapiens
SPPPAKKLAL

SEQ ID NO: 109332 - protein, 10 aa, Homo Sapiens
SPPPTKFIVM

SEQ ID NO: 109333 - protein, 10 aa, Homo Sapiens
SPPSAARHSL

SEQ ID NO: 109334 - protein, 10 aa, Homo Sapiens
SPQKKNHLVL

SEQ ID NO: 109335 - protein, 10 aa, Homo Sapiens
SPQPPKKDSL

SEQ ID NO: 109336 - protein, 10 aa, Homo Sapiens
SPQSGNFRQL

SEQ ID NO: 109337 - protein, 10 aa, Homo Sapiens
SPQYRLRIAM

SEQ ID NO: 109338 - protein, 10 aa, Homo Sapiens
SPRDSPAVSL

SEQ ID NO: 109339 - protein, 10 aa, Homo Sapiens
SPREEPRAPW

SEQ ID NO: 109340 - protein, 10 aa, Homo Sapiens
SPRELTQNPL

SEQ ID NO: 109341 - protein, 10 aa, Homo Sapiens
SPRPALPALL

SEQ ID NO: 109342 - protein, 10 aa, Homo Sapiens
SPRPNHSYIF

SEQ ID NO: 109343 - protein, 10 aa, Homo Sapiens
SPRPPLGSSL

SEQ ID NO: 109344 - protein, 10 aa, Homo Sapiens
SPRRTLEHYF

SEQ ID NO: 109345 - protein, 10 aa, Homo Sapiens
SPRSPTQHCL

SEQ ID NO: 109346 - protein, 10 aa, Homo Sapiens
SPRSSTVHIL

SEQ ID NO: 109347 - protein, 10 aa, Homo Sapiens
SPSSVTGNAL

SEQ ID NO: 109348 - protein, 10 aa, Homo Sapiens
SPTPVSWHVM

SEQ ID NO: 109349 - protein, 10 aa, Homo Sapiens
SPVSYLRVSM

SEQ ID NO: 109350 - protein, 10 aa, Homo Sapiens
SPYDHSRVKL

SEQ ID NO: 109351 - protein, 10 aa, Homo Sapiens
SPYSKSGPAL

SEQ ID NO: 109352 - protein, 10 aa, Homo Sapiens
SSALRVNPAL

SEQ ID NO: 109353 - protein, 10 aa, Homo Sapiens
SSPKLPVSSL

SEQ ID NO: 109354 - protein, 10 aa, Homo Sapiens
SVMDKQYEIL

SEQ ID NO: 109355 - protein, 10 aa, Homo Sapiens
TAKPQQIQAL

SEQ ID NO: 109356 - protein, 10 aa, Homo Sapiens
TAKPQSTTSL

SEQ ID NO: 109357 - protein, 10 aa, Homo Sapiens
TDAIKLNPRL

SEQ ID NO: 109358 - protein, 10 aa, Homo Sapiens
TPAPPGPATM

SEQ ID NO: 109359 - protein, 10 aa, Homo Sapiens
TPAPSRTASF

SEQ ID NO: 109360 - protein, 10 aa, Homo Sapiens
TPDQGKARLL

SEQ ID NO: 109361 - protein, 10 aa, Homo Sapiens
TPHDFIEHIL

SEQ ID NO: 109362 - protein, 10 aa, Homo Sapiens
TPIGVQAEAL

SEQ ID NO: 109363 - protein, 10 aa, Homo Sapiens
TPKIGAISSL

SEQ ID NO: 109364 - protein, 10 aa, Homo Sapiens
TPKPQTKELM

SEQ ID NO: 109365 - protein, 10 aa, Homo Sapiens
TPKQKPKTPF

SEQ ID NO: 109366 - protein, 10 aa, Homo Sapiens
TPKSSASSTF

SEQ ID NO: 109367 - protein, 10 aa, Homo Sapiens
TPKTVFFESL

SEQ ID NO: 109368 - protein, 10 aa, Homo Sapiens
TPKWITPVLL

SEQ ID NO: 109369 - protein, 10 aa, Homo Sapiens
TPKYSQVLGL

SEQ ID NO: 109370 - protein, 10 aa, Homo Sapiens
TPLASTSNSL

SEQ ID NO: 109371 - protein, 10 aa, Homo Sapiens
TPLLMQALPM

SEQ ID NO: 109372 - protein, 10 aa, Homo Sapiens
TPLPQPNRAL

SEQ ID NO: 109373 - protein, 10 aa, Homo Sapiens
TPMSSHGRVL

SEQ ID NO: 109374 - protein, 10 aa, Homo Sapiens
TPNEHHDHLL

SEQ ID NO: 109375 - protein, 10 aa, Homo Sapiens
TPNPGYQPSM

SEQ ID NO: 109376 - protein, 10 aa, Homo Sapiens
TPPPLPKPAL

SEQ ID NO: 109377 - protein, 10 aa, Homo Sapiens
TPQALRFEEL

SEQ ID NO: 109378 - protein, 10 aa, Homo Sapiens
TPQERVEEVL

SEQ ID NO: 109379 - protein, 10 aa, Homo Sapiens
TPREPNRWAV

SEQ ID NO: 109380 - protein, 10 aa, Homo Sapiens
TPRGPDPALL

SEQ ID NO: 109381 - protein, 10 aa, Homo Sapiens
TPRPDDPSPL

SEQ ID NO: 109382 - protein, 10 aa, Homo Sapiens
TPRSYVGVTL

SEQ ID NO: 109383 - protein, 10 aa, Homo Sapiens
TPSLGKCRAL

SEQ ID NO: 109384 - protein, 10 aa, Homo Sapiens
TPSNNVHTSL

SEQ ID NO: 109385 - protein, 10 aa, Homo Sapiens
TPSPYDHDSL

SEQ ID NO: 109386 - protein, 10 aa, Homo Sapiens
TPSSSKKVTF

SEQ ID NO: 109387 - protein, 10 aa, Homo Sapiens
TPTSAPRSVM

SEQ ID NO: 109388 - protein, 10 aa, Homo Sapiens
TPVPIKDMEI

SEQ ID NO: 109389 - protein, 10 aa, Homo Sapiens
TVKDVNQQEF

SEQ ID NO: 109390 - protein, 10 aa, Homo Sapiens
TVKPHIGEVF

SEQ ID NO: 109391 - protein, 10 aa, Homo Sapiens
VLSAADKGNV

SEQ ID NO: 109392 - protein, 10 aa, Homo Sapiens
VPAAREPEVL

SEQ ID NO: 109393 - protein, 10 aa, Homo Sapiens
VPAARSILAL

SEQ ID NO: 109394 - protein, 10 aa, Homo Sapiens
VPAGIRPQSI

SEQ ID NO: 109395 - protein, 10 aa, Homo Sapiens
VPAPGKLFAL

SEQ ID NO: 109396 - protein, 10 aa, Homo Sapiens
VPAPSANKEL

SEQ ID NO: 109397 - protein, 10 aa, Homo Sapiens
VPAPVPLMSL

SEQ ID NO: 109398 - protein, 10 aa, Homo Sapiens
VPASQKLRQL

SEQ ID NO: 109399 - protein, 10 aa, Homo Sapiens
VPFSVPKIPL

SEQ ID NO: 109400 - protein, 10 aa, Homo Sapiens
VPIPRSPYTV

SEQ ID NO: 109401 - protein, 10 aa, Homo Sapiens
VPKADSGAFL

SEQ ID NO: 109402 - protein, 10 aa, Homo Sapiens
VPKAPGFAQM

SEQ ID NO: 109403 - protein, 10 aa, Homo Sapiens
VPKGNTAVSV

SEQ ID NO: 109404 - protein, 10 aa, Homo Sapiens
VPKIFMKPDF

SEQ ID NO: 109405 - protein, 10 aa, Homo Sapiens
VPKKISFKSL

SEQ ID NO: 109406 - protein, 10 aa, Homo Sapiens
VPKKPGPPVL

SEQ ID NO: 109407 - protein, 10 aa, Homo Sapiens
VPKLVKEEVF

SEQ ID NO: 109408 - protein, 10 aa, Homo Sapiens
VPKNFIDIQF

SEQ ID NO: 109409 - protein, 10 aa, Homo Sapiens
VPKNYKLVAA

SEQ ID NO: 109410 - protein, 10 aa, Homo Sapiens
VPKPGAGSKL

SEQ ID NO: 109411 - protein, 10 aa, Homo Sapiens
VPKPGKGADL

SEQ ID NO: 109412 - protein, 10 aa, Homo Sapiens
VPKPIGGVVV

SEQ ID NO: 109413 - protein, 10 aa, Homo Sapiens
VPKPPSIEEF

SEQ ID NO: 109414 - protein, 10 aa, Homo Sapiens
VPKPPVPAVL

SEQ ID NO: 109415 - protein, 10 aa, Homo Sapiens
VPKSALIPVI

SEQ ID NO: 109416 - protein, 10 aa, Homo Sapiens
VPLPPGKPAL

SEQ ID NO: 109417 - protein, 10 aa, Homo Sapiens
VPLPPKGRVL

SEQ ID NO: 109418 - protein, 10 aa, Homo Sapiens
VPMKCLQQAL

SEQ ID NO: 109419 - protein, 10 aa, Homo Sapiens
VPNGALKKSL

SEQ ID NO: 109420 - protein, 10 aa, Homo Sapiens
VPNPMVHPSF

SEQ ID NO: 109421 - protein, 10 aa, Homo Sapiens
VPPAVTGITF

SEQ ID NO: 109422 - protein, 10 aa, Homo Sapiens
VPPNHVGKPL

SEQ ID NO: 109423 - protein, 10 aa, Homo Sapiens
VPPREKSVAL

SEQ ID NO: 109424 - protein, 10 aa, Homo Sapiens
VPRFLMSSTM

SEQ ID NO: 109425 - protein, 10 aa, Homo Sapiens
VPRPAARVAL

SEQ ID NO: 109426 - protein, 10 aa, Homo Sapiens
VPRPPDTVST

SEQ ID NO: 109427 - protein, 10 aa, Homo Sapiens
VPRPPPLYSH

SEQ ID NO: 109428 - protein, 10 aa, Homo Sapiens
VPRPPSNPPA

SEQ ID NO: 109429 - protein, 10 aa, Homo Sapiens
VPRQPTVTSV

SEQ ID NO: 109430 - protein, 10 aa, Homo Sapiens
VPSLIKQQVL

SEQ ID NO: 109431 - protein, 10 aa, Homo Sapiens
VPSPAHIEKL

SEQ ID NO: 109432 - protein, 10 aa, Homo Sapiens
VPSPALPRSL

SEQ ID NO: 109433 - protein, 10 aa, Homo Sapiens
VPVGWESHLA

SEQ ID NO: 109434 - protein, 10 aa, Homo Sapiens
VPVLNTKKAL

SEQ ID NO: 109435 - protein, 10 aa, Homo Sapiens
VPVSTINHAF

SEQ ID NO: 109436 - protein, 10 aa, Homo Sapiens
VPVSVGAYFF

SEQ ID NO: 109437 - protein, 10 aa, Homo Sapiens
VPYPRIHFPL

SEQ ID NO: 109438 - protein, 10 aa, Homo Sapiens
VVPPFLQPEV

SEQ ID NO: 109439 - protein, 10 aa, Homo Sapiens
WPKDVGIVAL

SEQ ID NO: 109440 - protein, 10 aa, Homo Sapiens
YPFKPPKVAF

SEQ ID NO: 109441 - protein, 10 aa, Homo Sapiens
YPFKPPKVTF

SEQ ID NO: 109442 - protein, 10 aa, Homo Sapiens
YPIALTRAEM

SEQ ID NO: 109443 - protein, 10 aa, Homo Sapiens
YPKGIHVETL

SEQ ID NO: 109444 - protein, 10 aa, Homo Sapiens
YPKKPKDEAF

SEQ ID NO: 109445 - protein, 10 aa, Homo Sapiens
YPLERGFIYV

SEQ ID NO: 109446 - protein, 10 aa, Homo Sapiens
YPMDLGGRNF

SEQ ID NO: 109447 - protein, 10 aa, Homo Sapiens
YPNGVVVHYF

SEQ ID NO: 109448 - protein, 10 aa, Homo Sapiens
YPNPYSKHVL

SEQ ID NO: 109449 - protein, 10 aa, Homo Sapiens
YPSLPKSLPL

SEQ ID NO: 109450 - protein, 10 aa, Homo Sapiens
YPVKSEGKEL

SEQ ID NO: 109451 - protein, 10 aa, Homo Sapiens
YSKYYKTIDD

SEQ ID NO: 109452 - protein, 11 aa, Homo Sapiens
AAQDKPSAEVL

SEQ ID NO: 109453 - protein, 11 aa, Homo Sapiens
AASKERSGVSL

SEQ ID NO: 109454 - protein, 11 aa, Homo Sapiens
AGAAVRIGSVL

SEQ ID NO: 109455 - protein, 11 aa, Homo Sapiens
ALPHAILRLDL

SEQ ID NO: 109456 - protein, 11 aa, Homo Sapiens
APAAYPREVAL

SEQ ID NO: 109457 - protein, 11 aa, Homo Sapiens
APAGGLTEQEL

SEQ ID NO: 109458 - protein, 11 aa, Homo Sapiens
APAKHLIASML

SEQ ID NO: 109459 - protein, 11 aa, Homo Sapiens
APALARTLQSL

SEQ ID NO: 109460 - protein, 11 aa, Homo Sapiens
APAPQGCAVAL

SEQ ID NO: 109461 - protein, 11 aa, Homo Sapiens
APCSVAPGKSL

SEQ ID NO: 109462 - protein, 11 aa, Homo Sapiens
APDAAPAPASI

SEQ ID NO: 109463 - protein, 11 aa, Homo Sapiens
APDSIRGSFGL

SEQ ID NO: 109464 - protein, 11 aa, Homo Sapiens
APEPASQARVL

SEQ ID NO: 109465 - protein, 11 aa, Homo Sapiens
APESVQKAKMM

SEQ ID NO: 109466 - protein, 11 aa, Homo Sapiens
APGPEFSGHSL

SEQ ID NO: 109467 - protein, 11 aa, Homo Sapiens
APKCSQDQGVL

SEQ ID NO: 109468 - protein, 11 aa, Homo Sapiens
APKGLWSQNQL

SEQ ID NO: 109469 - protein, 11 aa, Homo Sapiens
APKGPSRESVV

SEQ ID NO: 109470 - protein, 11 aa, Homo Sapiens
APKGTKRDPAL

SEQ ID NO: 109471 - protein, 11 aa, Homo Sapiens
APKIGSNGVEM

SEQ ID NO: 109472 - protein, 11 aa, Homo Sapiens
APKPYHKFMAF

SEQ ID NO: 109473 - protein, 11 aa, Homo Sapiens
APKSRQELIAL

SEQ ID NO: 109474 - protein, 11 aa, Homo Sapiens
APLPPYFSRTL

SEQ ID NO: 109475 - protein, 11 aa, Homo Sapiens
APMGREGVTAM

SEQ ID NO: 109476 - protein, 11 aa, Homo Sapiens
APNLGRSFHIL

SEQ ID NO: 109477 - protein, 11 aa, Homo Sapiens
APNPAKATVTA

SEQ ID NO: 109478 - protein, 11 aa, Homo Sapiens
APNPYRSENCL

SEQ ID NO: 109479 - protein, 11 aa, Homo Sapiens
APPPVVGAKRL

SEQ ID NO: 109480 - protein, 11 aa, Homo Sapiens
APQAPGDNHVV

SEQ ID NO: 109481 - protein, 11 aa, Homo Sapiens
APQPGKYVICV

SEQ ID NO: 109482 - protein, 11 aa, Homo Sapiens
APQPHRHVLEI

SEQ ID NO: 109483 - protein, 11 aa, Homo Sapiens
APRADEITRRL

SEQ ID NO: 109484 - protein, 11 aa, Homo Sapiens
APREALAQTVL

SEQ ID NO: 109485 - protein, 11 aa, Homo Sapiens
APRHPSTNSLL

SEQ ID NO: 109486 - protein, 11 aa, Homo Sapiens
APRPDSRHHSL

SEQ ID NO: 109487 - protein, 11 aa, Homo Sapiens
APRPSTGPHKL

SEQ ID NO: 109488 - protein, 11 aa, Homo Sapiens
APRQPGLMAQM

SEQ ID NO: 109489 - protein, 11 aa, Homo Sapiens
APSAAKLLVQL

SEQ ID NO: 109490 - protein, 11 aa, Homo Sapiens
APSGLRSQVQF

SEQ ID NO: 109491 - protein, 11 aa, Homo Sapiens
APSGQHSQAQL

SEQ ID NO: 109492 - protein, 11 aa, Homo Sapiens
APSHLMALLTL

SEQ ID NO: 109493 - protein, 11 aa, Homo Sapiens
APSSSGPGHLV

SEQ ID NO: 109494 - protein, 11 aa, Homo Sapiens
APTQEKIFAVL

SEQ ID NO: 109495 - protein, 11 aa, Homo Sapiens
APYERRAMELL

SEQ ID NO: 109496 - protein, 11 aa, Homo Sapiens
APYGKNQVQAL

SEQ ID NO: 109497 - protein, 11 aa, Homo Sapiens
APYHSRSAYIA

SEQ ID NO: 109498 - protein, 11 aa, Homo Sapiens
APYMRSMMQSL

SEQ ID NO: 109499 - protein, 11 aa, Homo Sapiens
APYMRSMMQTL

SEQ ID NO: 109500 - protein, 11 aa, Homo Sapiens
DMEKIWHHTFY

SEQ ID NO: 109501 - protein, 11 aa, Homo Sapiens
EPEEFVVEKVL

SEQ ID NO: 109502 - protein, 11 aa, Homo Sapiens
EPREASPLHSL

SEQ ID NO: 109503 - protein, 11 aa, Homo Sapiens
EPRPFPKLRIL

SEQ ID NO: 109504 - protein, 11 aa, Homo Sapiens
EPRVATVTRIL

SEQ ID NO: 109505 - protein, 11 aa, Homo Sapiens
EPSRELAEQTL

SEQ ID NO: 109506 - protein, 11 aa, Homo Sapiens
FAKPVYPGQTL

SEQ ID NO: 109507 - protein, 11 aa, Homo Sapiens
FASKEIAENAL

SEQ ID NO: 109508 - protein, 11 aa, Homo Sapiens
FPETNNILKIV

SEQ ID NO: 109509 - protein, 11 aa, Homo Sapiens
FPISRGIPNML

SEQ ID NO: 109510 - protein, 11 aa, Homo Sapiens
FPKPGTLVQCL

SEQ ID NO: 109511 - protein, 11 aa, Homo Sapiens
FPMGDRLYIGL

SEQ ID NO: 109512 - protein, 11 aa, Homo Sapiens
FPNIVIKGSEL

SEQ ID NO: 109513 - protein, 11 aa, Homo Sapiens
FPPPSLPSKSV

SEQ ID NO: 109514 - protein, 11 aa, Homo Sapiens
FPRSYVQPVHL

SEQ ID NO: 109515 - protein, 11 aa, Homo Sapiens
FPRTAAPGHDL

SEQ ID NO: 109516 - protein, 11 aa, Homo Sapiens
FPTQVIPLKTL

SEQ ID NO: 109517 - protein, 11 aa, Homo Sapiens
FSASVKKPHTL

SEQ ID NO: 109518 - protein, 11 aa, Homo Sapiens
GMGQKDSYVGD

SEQ ID NO: 109519 - protein, 11 aa, Homo Sapiens
GPMPQTREHLL

SEQ ID NO: 109520 - protein, 11 aa, Homo Sapiens
GPSGAAAMRSM

SEQ ID NO: 109521 - protein, 11 aa, Homo Sapiens
GPSRSNVVKIL

SEQ ID NO: 109522 - protein, 11 aa, Homo Sapiens
GPYLTHQQKVL

SEQ ID NO: 109523 - protein, 11 aa, Homo Sapiens
HESEQLGSISV

SEQ ID NO: 109524 - protein, 11 aa, Homo Sapiens
HLAAPKLGVAL

SEQ ID NO: 109525 - protein, 11 aa, Homo Sapiens
HPADPGSRPHL

SEQ ID NO: 109526 - protein, 11 aa, Homo Sapiens
HPAPLCTIRTL

SEQ ID NO: 109527 - protein, 11 aa, Homo Sapiens
HPHSGSGRSVL

SEQ ID NO: 109528 - protein, 11 aa, Homo Sapiens
HPIPRVFQNRF

SEQ ID NO: 109529 - protein, 11 aa, Homo Sapiens
HPISSEELLSL

SEQ ID NO: 109530 - protein, 11 aa, Homo Sapiens
HPKGRDNIIDL

SEQ ID NO: 109531 - protein, 11 aa, Homo Sapiens
HPKPSACRNLF

SEQ ID NO: 109532 - protein, 11 aa, Homo Sapiens
HPKRPWILTSL

SEQ ID NO: 109533 - protein, 11 aa, Homo Sapiens
HPKVNVPGSQA

SEQ ID NO: 109534 - protein, 11 aa, Homo Sapiens
HPNKPKDHVFL

SEQ ID NO: 109535 - protein, 11 aa, Homo Sapiens
HPPLKIDGKTI

SEQ ID NO: 109536 - protein, 11 aa, Homo Sapiens
HPPLTIDGKTI

SEQ ID NO: 109537 - protein, 11 aa, Homo Sapiens
HPPTSGVEKVL

SEQ ID NO: 109538 - protein, 11 aa, Homo Sapiens
HPRDPNLLLSV

SEQ ID NO: 109539 - protein, 11 aa, Homo Sapiens
HPSASLIDRTI

SEQ ID NO: 109540 - protein, 11 aa, Homo Sapiens
HPSETRTLVAV

SEQ ID NO: 109541 - protein, 11 aa, Homo Sapiens
HPYGHRKFITM

SEQ ID NO: 109542 - protein, 11 aa, Homo Sapiens
HPYPPGPGVAL

SEQ ID NO: 109543 - protein, 11 aa, Homo Sapiens
IPCNNKGAHSV

SEQ ID NO: 109544 - protein, 11 aa, Homo Sapiens
IPDASKLQFIL

SEQ ID NO: 109545 - protein, 11 aa, Homo Sapiens
IPKDYKTMAAL

SEQ ID NO: 109546 - protein, 11 aa, Homo Sapiens
IPKDYKTMTAL

SEQ ID NO: 109547 - protein, 11 aa, Homo Sapiens
IPKFFKHFPEL

SEQ ID NO: 109548 - protein, 11 aa, Homo Sapiens
IPKKMENPHSL

SEQ ID NO: 109549 - protein, 11 aa, Homo Sapiens
IPKNVATETQL

SEQ ID NO: 109550 - protein, 11 aa, Homo Sapiens
IPKPSKDGVTV

SEQ ID NO: 109551 - protein, 11 aa, Homo Sapiens
IPKSKTKEQIL

SEQ ID NO: 109552 - protein, 11 aa, Homo Sapiens
IPLAKDFYVAF

SEQ ID NO: 109553 - protein, 11 aa, Homo Sapiens
IPLKPSPSKKF

SEQ ID NO: 109554 - protein, 11 aa, Homo Sapiens
IPNSHHHHQMM

SEQ ID NO: 109555 - protein, 11 aa, Homo Sapiens
IPPPYDKKKRM

SEQ ID NO: 109556 - protein, 11 aa, Homo Sapiens
IPPSYKSTVTL

SEQ ID NO: 109557 - protein, 11 aa, Homo Sapiens
IPQGGRGAIQF

SEQ ID NO: 109558 - protein, 11 aa, Homo Sapiens
IPQQSQSVKQL

SEQ ID NO: 109559 - protein, 11 aa, Homo Sapiens
IPQVTSDGKRL

SEQ ID NO: 109560 - protein, 11 aa, Homo Sapiens
IPRRQEHDISL

SEQ ID NO: 109561 - protein, 11 aa, Homo Sapiens
IPSADRHKSKL

SEQ ID NO: 109562 - protein, 11 aa, Homo Sapiens
IPSEDIARNLM

SEQ ID NO: 109563 - protein, 11 aa, Homo Sapiens
IPSPGQLQHRV

SEQ ID NO: 109564 - protein, 11 aa, Homo Sapiens
IPSSSHVSNNM

SEQ ID NO: 109565 - protein, 11 aa, Homo Sapiens
IPSSVIHPAMV

SEQ ID NO: 109566 - protein, 11 aa, Homo Sapiens
IPSTELAKQVI

SEQ ID NO: 109567 - protein, 11 aa, Homo Sapiens
IPYHSEVPVSL

SEQ ID NO: 109568 - protein, 11 aa, Homo Sapiens
IVSQKKADEVL

SEQ ID NO: 109569 - protein, 11 aa, Homo Sapiens
KIKPNNPKHTL

SEQ ID NO: 109570 - protein, 11 aa, Homo Sapiens
KLKPTSKDQVL

SEQ ID NO: 109571 - protein, 11 aa, Homo Sapiens
KPAASATPFAL

SEQ ID NO: 109572 - protein, 11 aa, Homo Sapiens
KPANAVLHKVL

SEQ ID NO: 109573 - protein, 11 aa, Homo Sapiens
KPFDKFQFERL

SEQ ID NO: 109574 - protein, 11 aa, Homo Sapiens
KPHFRNTVERM

SEQ ID NO: 109575 - protein, 11 aa, Homo Sapiens
KPIAGKVIHAL

SEQ ID NO: 109576 - protein, 11 aa, Homo Sapiens
KPKDPKVISEL

SEQ ID NO: 109577 - protein, 11 aa, Homo Sapiens
KPKENNFKAVL

SEQ ID NO: 109578 - protein, 11 aa, Homo Sapiens
KPKGPTSAELL

SEQ ID NO: 109579 - protein, 11 aa, Homo Sapiens
KPKKTEITDKL

SEQ ID NO: 109580 - protein, 11 aa, Homo Sapiens
KPKNPEFTSGL

SEQ ID NO: 109581 - protein, 11 aa, Homo Sapiens
KPKPFGSEEQL

SEQ ID NO: 109582 - protein, 11 aa, Homo Sapiens
KPKSEMTPEEL

SEQ ID NO: 109583 - protein, 11 aa, Homo Sapiens
KPKTPSLTVFL

SEQ ID NO: 109584 - protein, 11 aa, Homo Sapiens
KPKWNHLVHKF

SEQ ID NO: 109585 - protein, 11 aa, Homo Sapiens
KPNDSRALQLM

SEQ ID NO: 109586 - protein, 11 aa, Homo Sapiens
KPNDVSVFTTL

SEQ ID NO: 109587 - protein, 11 aa, Homo Sapiens
KPNEFASQINL

SEQ ID NO: 109588 - protein, 11 aa, Homo Sapiens
KPNGKVASVEM

SEQ ID NO: 109589 - protein, 11 aa, Homo Sapiens
KPNSFVKFRCM

SEQ ID NO: 109590 - protein, 11 aa, Homo Sapiens
KPPNPALGKTA

SEQ ID NO: 109591 - protein, 11 aa, Homo Sapiens
KPPPQKSLKEL

SEQ ID NO: 109592 - protein, 11 aa, Homo Sapiens
KPPPSECNPAL

SEQ ID NO: 109593 - protein, 11 aa, Homo Sapiens
KPPVSITKKKL

SEQ ID NO: 109594 - protein, 11 aa, Homo Sapiens
KPQDYKKRLSV

SEQ ID NO: 109595 - protein, 11 aa, Homo Sapiens
KPSAMKVGEKL

SEQ ID NO: 109596 - protein, 11 aa, Homo Sapiens
KPSLAQSIAKI

SEQ ID NO: 109597 - protein, 11 aa, Homo Sapiens
KPSNSKSETTL

SEQ ID NO: 109598 - protein, 11 aa, Homo Sapiens
KPSPLLVGREF

SEQ ID NO: 109599 - protein, 11 aa, Homo Sapiens
KPTPVKPNYAL

SEQ ID NO: 109600 - protein, 11 aa, Homo Sapiens
LPAAANSRKQF

SEQ ID NO: 109601 - protein, 11 aa, Homo Sapiens
LPDLQRSKQAL

SEQ ID NO: 109602 - protein, 11 aa, Homo Sapiens
LPDSGGVAKTM

SEQ ID NO: 109603 - protein, 11 aa, Homo Sapiens
LPESNNQVKTL

SEQ ID NO: 109604 - protein, 11 aa, Homo Sapiens
LPIERVKKNLL

SEQ ID NO: 109605 - protein, 11 aa, Homo Sapiens
LPKEIGELTQL

SEQ ID NO: 109606 - protein, 11 aa, Homo Sapiens
LPKKVGKWYQL

SEQ ID NO: 109607 - protein, 11 aa, Homo Sapiens
LPKPPKPVSKM

SEQ ID NO: 109608 - protein, 11 aa, Homo Sapiens
LPLFPEPLHVF

SEQ ID NO: 109609 - protein, 11 aa, Homo Sapiens
LPLPLRKPTTL

SEQ ID NO: 109610 - protein, 11 aa, Homo Sapiens
LPMGALPQGPM

SEQ ID NO: 109611 - protein, 11 aa, Homo Sapiens
LPMGRDSREML

SEQ ID NO: 109612 - protein, 11 aa, Homo Sapiens
LPQRVLEQHKL

SEQ ID NO: 109613 - protein, 11 aa, Homo Sapiens
LPQSTDPLRTF

SEQ ID NO: 109614 - protein, 11 aa, Homo Sapiens
LPRKNLPERLL

SEQ ID NO: 109615 - protein, 11 aa, Homo Sapiens
LPSDSHFKITF

SEQ ID NO: 109616 - protein, 11 aa, Homo Sapiens
LPSGDRVAVSV

SEQ ID NO: 109617 - protein, 11 aa, Homo Sapiens
LPSGNNNGKVL

SEQ ID NO: 109618 - protein, 11 aa, Homo Sapiens
LPSQSRNKETL

SEQ ID NO: 109619 - protein, 11 aa, Homo Sapiens
LPSRSLSVNTL

SEQ ID NO: 109620 - protein, 11 aa, Homo Sapiens
LPTAGTVGRVL

SEQ ID NO: 109621 - protein, 11 aa, Homo Sapiens
LPTTTGSAHAL

SEQ ID NO: 109622 - protein, 11 aa, Homo Sapiens
LPVGRSVDETL

SEQ ID NO: 109623 - protein, 11 aa, Homo Sapiens
LPVGRSVEETL

SEQ ID NO: 109624 - protein, 11 aa, Homo Sapiens
LPYDRNISNYF

SEQ ID NO: 109625 - protein, 11 aa, Homo Sapiens
LPYNNKDRDAL

SEQ ID NO: 109626 - protein, 11 aa, Homo Sapiens
LPYTERHFQRL

SEQ ID NO: 109627 - protein, 11 aa, Homo Sapiens
LSSPKLPVSSL

SEQ ID NO: 109628 - protein, 11 aa, Homo Sapiens
MAPSETQFSHL

SEQ ID NO: 109629 - protein, 11 aa, Homo Sapiens
MPAFSKIGGIL

SEQ ID NO: 109630 - protein, 11 aa, Homo Sapiens
MPDSLRSGEYL

SEQ ID NO: 109631 - protein, 11 aa, Homo Sapiens
MPDVGRSMQQL

SEQ ID NO: 109632 - protein, 11 aa, Homo Sapiens
MPKKSIKKLVL

SEQ ID NO: 109633 - protein, 11 aa, Homo Sapiens
MPKVSGPDLDL

SEQ ID NO: 109634 - protein, 11 aa, Homo Sapiens
MPNPQLNIKAL

SEQ ID NO: 109635 - protein, 11 aa, Homo Sapiens
MPNPSLAQVKI

SEQ ID NO: 109636 - protein, 11 aa, Homo Sapiens
MPPAHYDAKQL

SEQ ID NO: 109637 - protein, 11 aa, Homo Sapiens
MPQNRTIYVTL

SEQ ID NO: 109638 - protein, 11 aa, Homo Sapiens
MPRAPGGFECF

SEQ ID NO: 109639 - protein, 11 aa, Homo Sapiens
MPRLPEHCIEY

SEQ ID NO: 109640 - protein, 11 aa, Homo Sapiens
MPRPDTCPPEL

SEQ ID NO: 109641 - protein, 11 aa, Homo Sapiens
MPSPIMHPLIL

SEQ ID NO: 109642 - protein, 11 aa, Homo Sapiens
MPSSHRILHKL

SEQ ID NO: 109643 - protein, 11 aa, Homo Sapiens
MPSSSGSARSL

SEQ ID NO: 109644 - protein, 11 aa, Homo Sapiens
MPSSSKTKPVL

SEQ ID NO: 109645 - protein, 11 aa, Homo Sapiens
MPSTDLLMLKA

SEQ ID NO: 109646 - protein, 11 aa, Homo Sapiens
NADPLKVYPPL

SEQ ID NO: 109647 - protein, 11 aa, Homo Sapiens
NPDGVRIMHSL

SEQ ID NO: 109648 - protein, 11 aa, Homo Sapiens
NPISTHIGNEL

SEQ ID NO: 109649 - protein, 11 aa, Homo Sapiens
NPKFAEHGETL

SEQ ID NO: 109650 - protein, 11 aa, Homo Sapiens
NPKQAATQSEL

SEQ ID NO: 109651 - protein, 11 aa, Homo Sapiens
NPNAQQTKAVL

SEQ ID NO: 109652 - protein, 11 aa, Homo Sapiens
NPNGDKTKVMV

SEQ ID NO: 109653 - protein, 11 aa, Homo Sapiens
NPNSNTLGHIL

SEQ ID NO: 109654 - protein, 11 aa, Homo Sapiens
NPNTSEPQHLL

SEQ ID NO: 109655 - protein, 11 aa, Homo Sapiens
NPQKVGKDHTL

SEQ ID NO: 109656 - protein, 11 aa, Homo Sapiens
NPRQPLPASGL

SEQ ID NO: 109657 - protein, 11 aa, Homo Sapiens
PKFEVIEKPQA

SEQ ID NO: 109658 - protein, 11 aa, Homo Sapiens
PLKYPSSSTLI

SEQ ID NO: 109659 - protein, 11 aa, Homo Sapiens
QAAVRPKGEAA

SEQ ID NO: 109660 - protein, 11 aa, Homo Sapiens
QPCPSLAQHSL

SEQ ID NO: 109661 - protein, 11 aa, Homo Sapiens
QPFLQRYYEVL

SEQ ID NO: 109662 - protein, 11 aa, Homo Sapiens
QPHADRRREIL

SEQ ID NO: 109663 - protein, 11 aa, Homo Sapiens
QPIPILYEHQL

SEQ ID NO: 109664 - protein, 11 aa, Homo Sapiens
QPITTPQYHQL

SEQ ID NO: 109665 - protein, 11 aa, Homo Sapiens
QPKIVKWDRDM

SEQ ID NO: 109666 - protein, 11 aa, Homo Sapiens
QPLGTLPQAVM

SEQ ID NO: 109667 - protein, 11 aa, Homo Sapiens
QPNERQVRIQL

SEQ ID NO: 109668 - protein, 11 aa, Homo Sapiens
QPQAAAGSHQL

SEQ ID NO: 109669 - protein, 11 aa, Homo Sapiens
QPQNPDMTHVI

SEQ ID NO: 109670 - protein, 11 aa, Homo Sapiens
QPSSSLSARMM

SEQ ID NO: 109671 - protein, 11 aa, Homo Sapiens
QPYSKLPGVSL

SEQ ID NO: 109672 - protein, 11 aa, Homo Sapiens
QVAVHKIYQQL

SEQ ID NO: 109673 - protein, 11 aa, Homo Sapiens
RPADVYSYKQV

SEQ ID NO: 109674 - protein, 11 aa, Homo Sapiens
RPAGKDMMRKL

SEQ ID NO: 109675 - protein, 11 aa, Homo Sapiens
RPALQHVVKVL

SEQ ID NO: 109676 - protein, 11 aa, Homo Sapiens
RPAPQKALYST

SEQ ID NO: 109677 - protein, 11 aa, Homo Sapiens
RPASEATFNVF

SEQ ID NO: 109678 - protein, 11 aa, Homo Sapiens
RPDDRSQGAII

SEQ ID NO: 109679 - protein, 11 aa, Homo Sapiens
RPDDVHVNIRL

SEQ ID NO: 109680 - protein, 11 aa, Homo Sapiens
RPEERPTFEFL

SEQ ID NO: 109681 - protein, 11 aa, Homo Sapiens
RPFGSISRIYL

SEQ ID NO: 109682 - protein, 11 aa, Homo Sapiens
RPFHGISTVSL

SEQ ID NO: 109683 - protein, 11 aa, Homo Sapiens
RPGAHLTVKKI

SEQ ID NO: 109684 - protein, 11 aa, Homo Sapiens
RPGWRSIEEVL

SEQ ID NO: 109685 - protein, 11 aa, Homo Sapiens
RPHAPHSPIKF

SEQ ID NO: 109686 - protein, 11 aa, Homo Sapiens
RPHPLRPEAEL

SEQ ID NO: 109687 - protein, 11 aa, Homo Sapiens
RPIDTSRLTKI

SEQ ID NO: 109688 - protein, 11 aa, Homo Sapiens
RPIKTEMAHQL

SEQ ID NO: 109689 - protein, 11 aa, Homo Sapiens
RPITPGTLRQL

SEQ ID NO: 109690 - protein, 11 aa, Homo Sapiens
RPIYIDGRPVL

SEQ ID NO: 109691 - protein, 11 aa, Homo Sapiens
RPKASGATERL

SEQ ID NO: 109692 - protein, 11 aa, Homo Sapiens
RPKCPLDPYFI

SEQ ID NO: 109693 - protein, 11 aa, Homo Sapiens
RPKEAPEPMEL

SEQ ID NO: 109694 - protein, 11 aa, Homo Sapiens
RPKGSEMKYAL

SEQ ID NO: 109695 - protein, 11 aa, Homo Sapiens
RPKIDDVLHTL

SEQ ID NO: 109696 - protein, 11 aa, Homo Sapiens
RPKLNEGVVEF

SEQ ID NO: 109697 - protein, 11 aa, Homo Sapiens
RPKLQHSTSIL

SEQ ID NO: 109698 - protein, 11 aa, Homo Sapiens
RPKMQEVVANL

SEQ ID NO: 109699 - protein, 11 aa, Homo Sapiens
RPKPSSSPVIF

SEQ ID NO: 109700 - protein, 11 aa, Homo Sapiens
RPKQENHLHSL

SEQ ID NO: 109701 - protein, 11 aa, Homo Sapiens
RPKQPDKEGKL

SEQ ID NO: 109702 - protein, 11 aa, Homo Sapiens
RPKRFEVATSL

SEQ ID NO: 109703 - protein, 11 aa, Homo Sapiens
RPKRPPLKEFF

SEQ ID NO: 109704 - protein, 11 aa, Homo Sapiens
RPKSNIVLLSA

SEQ ID NO: 109705 - protein, 11 aa, Homo Sapiens
RPKSSQIGAVV

SEQ ID NO: 109706 - protein, 11 aa, Homo Sapiens
RPKSTVNTHYF

SEQ ID NO: 109707 - protein, 11 aa, Homo Sapiens
RPKVPAGVQEL

SEQ ID NO: 109708 - protein, 11 aa, Homo Sapiens
RPLEMIEPRTL

SEQ ID NO: 109709 - protein, 11 aa, Homo Sapiens
RPLEQQQPHHI

SEQ ID NO: 109710 - protein, 11 aa, Homo Sapiens
RPMSYDEKRQL

SEQ ID NO: 109711 - protein, 11 aa, Homo Sapiens
RPNDSRMLVAL

SEQ ID NO: 109712 - protein, 11 aa, Homo Sapiens
RPNFNIKGIRF

SEQ ID NO: 109713 - protein, 11 aa, Homo Sapiens
RPNGTKVAVLL

SEQ ID NO: 109714 - protein, 11 aa, Homo Sapiens
RPNMAYKVKVL

SEQ ID NO: 109715 - protein, 11 aa, Homo Sapiens
RPNTSEILRTL

SEQ ID NO: 109716 - protein, 11 aa, Homo Sapiens
RPPAYCDAKEI

SEQ ID NO: 109717 - protein, 11 aa, Homo Sapiens
RPPEITGQVSL

SEQ ID NO: 109718 - protein, 11 aa, Homo Sapiens
RPQAVQGGKAL

SEQ ID NO: 109719 - protein, 11 aa, Homo Sapiens
RPQCPVGFNTL

SEQ ID NO: 109720 - protein, 11 aa, Homo Sapiens
RPQIKDFKEKI

SEQ ID NO: 109721 - protein, 11 aa, Homo Sapiens
RPQSKAPDSTL

SEQ ID NO: 109722 - protein, 11 aa, Homo Sapiens
RPRAGASISTL

SEQ ID NO: 109723 - protein, 11 aa, Homo Sapiens
RPRHQGVMVGM

SEQ ID NO: 109724 - protein, 11 aa, Homo Sapiens
RPRNPAGRTGL

SEQ ID NO: 109725 - protein, 11 aa, Homo Sapiens
RPRPGNILLQL

SEQ ID NO: 109726 - protein, 11 aa, Homo Sapiens
RPRPTEATVSL

SEQ ID NO: 109727 - protein, 11 aa, Homo Sapiens
RPRQTPFAEKL

SEQ ID NO: 109728 - protein, 11 aa, Homo Sapiens
RPRTPPEAIAL

SEQ ID NO: 109729 - protein, 11 aa, Homo Sapiens
RPSGLHGDVSL

SEQ ID NO: 109730 - protein, 11 aa, Homo Sapiens
RPSHFLNFALL

SEQ ID NO: 109731 - protein, 11 aa, Homo Sapiens
RPSSCLTNFLL

SEQ ID NO: 109732 - protein, 11 aa, Homo Sapiens
RPSTGLLRHIL

SEQ ID NO: 109733 - protein, 11 aa, Homo Sapiens
RVFNRPRIETL

SEQ ID NO: 109734 - protein, 11 aa, Homo Sapiens
RVQGDKRLSSL

SEQ ID NO: 109735 - protein, 11 aa, Homo Sapiens
RVSHSHVGYTL

SEQ ID NO: 109736 - protein, 11 aa, Homo Sapiens
SDPILYRPVAV

SEQ ID NO: 109737 - protein, 11 aa, Homo Sapiens
SGPSIVHRKCF

SEQ ID NO: 109738 - protein, 11 aa, Homo Sapiens
SPADHRGYASL

SEQ ID NO: 109739 - protein, 11 aa, Homo Sapiens
SPADLRTNHTL

SEQ ID NO: 109740 - protein, 11 aa, Homo Sapiens
SPARHQLDHVF

SEQ ID NO: 109741 - protein, 11 aa, Homo Sapiens
SPASSTTARVI

SEQ ID NO: 109742 - protein, 11 aa, Homo Sapiens
SPCISGTTHTL

SEQ ID NO: 109743 - protein, 11 aa, Homo Sapiens
SPCQSSTVKEL

SEQ ID NO: 109744 - protein, 11 aa, Homo Sapiens
SPDHYLVDHTL

SEQ ID NO: 109745 - protein, 11 aa, Homo Sapiens
SPDLGKNLQTL

SEQ ID NO: 109746 - protein, 11 aa, Homo Sapiens
SPDPHKGLVLL

SEQ ID NO: 109747 - protein, 11 aa, Homo Sapiens
SPDPLRPLEFL

SEQ ID NO: 109748 - protein, 11 aa, Homo Sapiens
SPDVKRCLNAL

SEQ ID NO: 109749 - protein, 11 aa, Homo Sapiens
SPEARPAQEAL

SEQ ID NO: 109750 - protein, 11 aa, Homo Sapiens
SPEQPPKAKFL

SEQ ID NO: 109751 - protein, 11 aa, Homo Sapiens
SPFLPGFSQSL

SEQ ID NO: 109752 - protein, 11 aa, Homo Sapiens
SPILAHGGVRF

SEQ ID NO: 109753 - protein, 11 aa, Homo Sapiens
SPISSNSHRSL

SEQ ID NO: 109754 - protein, 11 aa, Homo Sapiens
SPKAALRYAAV

SEQ ID NO: 109755 - protein, 11 aa, Homo Sapiens
SPKASSKLAIM

SEQ ID NO: 109756 - protein, 11 aa, Homo Sapiens
SPKATSSPLYL

SEQ ID NO: 109757 - protein, 11 aa, Homo Sapiens
SPKEPPNGNAF

SEQ ID NO: 109758 - protein, 11 aa, Homo Sapiens
SPKFPDSQNQL

SEQ ID NO: 109759 - protein, 11 aa, Homo Sapiens
SPKKPGREIEL

SEQ ID NO: 109760 - protein, 11 aa, Homo Sapiens
SPKLPVSSLGL

SEQ ID NO: 109761 - protein, 11 aa, Homo Sapiens
SPKPGTGEPVL

SEQ ID NO: 109762 - protein, 11 aa, Homo Sapiens
SPKPPPQRVTL

SEQ ID NO: 109763 - protein, 11 aa, Homo Sapiens
SPKQWLPLEVL

SEQ ID NO: 109764 - protein, 11 aa, Homo Sapiens
SPKRPPSPIKF

SEQ ID NO: 109765 - protein, 11 aa, Homo Sapiens
SPKSALGSSAL

SEQ ID NO: 109766 - protein, 11 aa, Homo Sapiens
SPKSGEEAAVL

SEQ ID NO: 109767 - protein, 11 aa, Homo Sapiens
SPKSTAQEGTL

SEQ ID NO: 109768 - protein, 11 aa, Homo Sapiens
SPKSTGPRPSL

SEQ ID NO: 109769 - protein, 11 aa, Homo Sapiens
SPKSTGSVRQL

SEQ ID NO: 109770 - protein, 11 aa, Homo Sapiens
SPKVTKDGVTV

SEQ ID NO: 109771 - protein, 11 aa, Homo Sapiens
SPLTQTPEHRL

SEQ ID NO: 109772 - protein, 11 aa, Homo Sapiens
SPMERRLVEQL

SEQ ID NO: 109773 - protein, 11 aa, Homo Sapiens
SPMKEKGNIQL

SEQ ID NO: 109774 - protein, 11 aa, Homo Sapiens
SPMSADRVVAF

SEQ ID NO: 109775 - protein, 11 aa, Homo Sapiens
SPMSDVVSREL

SEQ ID NO: 109776 - protein, 11 aa, Homo Sapiens
SPNLSKCGEEL

SEQ ID NO: 109777 - protein, 11 aa, Homo Sapiens
SPNNDKQKYTL

SEQ ID NO: 109778 - protein, 11 aa, Homo Sapiens
SPNNPFSRVAL

SEQ ID NO: 109779 - protein, 11 aa, Homo Sapiens
SPNQARAQAAL

SEQ ID NO: 109780 - protein, 11 aa, Homo Sapiens
SPNQKLLAVSL

SEQ ID NO: 109781 - protein, 11 aa, Homo Sapiens
SPNSTSRPTLP

SEQ ID NO: 109782 - protein, 11 aa, Homo Sapiens
SPNYEGPLHSL

SEQ ID NO: 109783 - protein, 11 aa, Homo Sapiens
SPPDNPQVKEI

SEQ ID NO: 109784 - protein, 11 aa, Homo Sapiens
SPPPADLCHAL

SEQ ID NO: 109785 - protein, 11 aa, Homo Sapiens
SPPPSHPLKAV

SEQ ID NO: 109786 - protein, 11 aa, Homo Sapiens
SPQQIDHAKQL

SEQ ID NO: 109787 - protein, 11 aa, Homo Sapiens
SPQTSFPYKIM

SEQ ID NO: 109788 - protein, 11 aa, Homo Sapiens
SPRQGNSKNVL

SEQ ID NO: 109789 - protein, 11 aa, Homo Sapiens
SPSDRDFMETL

SEQ ID NO: 109790 - protein, 11 aa, Homo Sapiens
SPSPATDGKVF

SEQ ID NO: 109791 - protein, 11 aa, Homo Sapiens
SPSPINSSQAL

SEQ ID NO: 109792 - protein, 11 aa, Homo Sapiens
SPSYENSLHSL

SEQ ID NO: 109793 - protein, 11 aa, Homo Sapiens
SPTGNHVNEIL

SEQ ID NO: 109794 - protein, 11 aa, Homo Sapiens
SPVDNTPSHQL

SEQ ID NO: 109795 - protein, 11 aa, Homo Sapiens
SPVPSHWMVAL

SEQ ID NO: 109796 - protein, 11 aa, Homo Sapiens
TPAPHEPVKTL

SEQ ID NO: 109797 - protein, 11 aa, Homo Sapiens
TPAPVKKSGKL

SEQ ID NO: 109798 - protein, 11 aa, Homo Sapiens
TPDAMKAAMAL

SEQ ID NO: 109799 - protein, 11 aa, Homo Sapiens
TPEERDARTVF

SEQ ID NO: 109800 - protein, 11 aa, Homo Sapiens
TPGMLHAGQSL

SEQ ID NO: 109801 - protein, 11 aa, Homo Sapiens
TPGTSTTPGLR

SEQ ID NO: 109802 - protein, 11 aa, Homo Sapiens
TPHLRNLAVAM

SEQ ID NO: 109803 - protein, 11 aa, Homo Sapiens
TPIEGMLSHQL

SEQ ID NO: 109804 - protein, 11 aa, Homo Sapiens
TPIQRTPHEIM

SEQ ID NO: 109805 - protein, 11 aa, Homo Sapiens
TPIQWLPGHDL

SEQ ID NO: 109806 - protein, 11 aa, Homo Sapiens
TPKEAIEGTYI

SEQ ID NO: 109807 - protein, 11 aa, Homo Sapiens
TPKEVGDVIAL

SEQ ID NO: 109808 - protein, 11 aa, Homo Sapiens
TPKPSVGSISL

SEQ ID NO: 109809 - protein, 11 aa, Homo Sapiens
TPKRPSTSQTV

SEQ ID NO: 109810 - protein, 11 aa, Homo Sapiens
TPKSERYEHVL

SEQ ID NO: 109811 - protein, 11 aa, Homo Sapiens
TPKTPKGPSSV

SEQ ID NO: 109812 - protein, 11 aa, Homo Sapiens
TPKTTGARVEL

SEQ ID NO: 109813 - protein, 11 aa, Homo Sapiens
TPKVTQALNVL

SEQ ID NO: 109814 - protein, 11 aa, Homo Sapiens
TPMLKEGGISM

SEQ ID NO: 109815 - protein, 11 aa, Homo Sapiens
TPMPKDVRQSL

SEQ ID NO: 109816 - protein, 11 aa, Homo Sapiens
TPPTTVSGKVM

SEQ ID NO: 109817 - protein, 11 aa, Homo Sapiens
TPQEKEAIERL

SEQ ID NO: 109818 - protein, 11 aa, Homo Sapiens
TPQSVNSGKTF

SEQ ID NO: 109819 - protein, 11 aa, Homo Sapiens
TPRCYVGATVL

SEQ ID NO: 109820 - protein, 11 aa, Homo Sapiens
TPRPATEAELL

SEQ ID NO: 109821 - protein, 11 aa, Homo Sapiens
TPRPGSAESAL

SEQ ID NO: 109822 - protein, 11 aa, Homo Sapiens
TPRPGSHTIEF

SEQ ID NO: 109823 - protein, 11 aa, Homo Sapiens
TPRPPPVGHSF

SEQ ID NO: 109824 - protein, 11 aa, Homo Sapiens
TPSASTPYRQL

SEQ ID NO: 109825 - protein, 11 aa, Homo Sapiens
TPSLVKSTSQL

SEQ ID NO: 109826 - protein, 11 aa, Homo Sapiens
TPSTQQHLKKV

SEQ ID NO: 109827 - protein, 11 aa, Homo Sapiens
TPTQNNIFKVL

SEQ ID NO: 109828 - protein, 11 aa, Homo Sapiens
TPVMNSEAKVL

SEQ ID NO: 109829 - protein, 11 aa, Homo Sapiens
TVKPASGSQTL

SEQ ID NO: 109830 - protein, 11 aa, Homo Sapiens
TVKPNANRIAL

SEQ ID NO: 109831 - protein, 11 aa, Homo Sapiens
TVSSVGALHAL

SEQ ID NO: 109832 - protein, 11 aa, Homo Sapiens
TVWTRPGPEVL

SEQ ID NO: 109833 - protein, 11 aa, Homo Sapiens
VPAKSTLLQVL

SEQ ID NO: 109834 - protein, 11 aa, Homo Sapiens
VPCLENAVTAL

SEQ ID NO: 109835 - protein, 11 aa, Homo Sapiens
VPDSSGPERIL

SEQ ID NO: 109836 - protein, 11 aa, Homo Sapiens
VPDTSRIYVAL

SEQ ID NO: 109837 - protein, 11 aa, Homo Sapiens
VPFEKKDFVGL

SEQ ID NO: 109838 - protein, 11 aa, Homo Sapiens
VPHLSKPNHTL

SEQ ID NO: 109839 - protein, 11 aa, Homo Sapiens
VPHPKKPEHTL

SEQ ID NO: 109840 - protein, 11 aa, Homo Sapiens
VPHPKKPGHIL

SEQ ID NO: 109841 - protein, 11 aa, Homo Sapiens
VPHPNWPNHTL

SEQ ID NO: 109842 - protein, 11 aa, Homo Sapiens
VPIDVVSQHLM

SEQ ID NO: 109843 - protein, 11 aa, Homo Sapiens
VPIPNSPFKVA

SEQ ID NO: 109844 - protein, 11 aa, Homo Sapiens
VPKAPGFAQML

SEQ ID NO: 109845 - protein, 11 aa, Homo Sapiens
VPKGNTAVSVL

SEQ ID NO: 109846 - protein, 11 aa, Homo Sapiens
VPKLQPQITMI

SEQ ID NO: 109847 - protein, 11 aa, Homo Sapiens
VPKPGTAPTSL

SEQ ID NO: 109848 - protein, 11 aa, Homo Sapiens
VPKPIGGVVVF

SEQ ID NO: 109849 - protein, 11 aa, Homo Sapiens
VPKQVVTGTVL

SEQ ID NO: 109850 - protein, 11 aa, Homo Sapiens
VPKSPDASSAF

SEQ ID NO: 109851 - protein, 11 aa, Homo Sapiens
VPKTAENFRAL

SEQ ID NO: 109852 - protein, 11 aa, Homo Sapiens
VPKTTGEGTSL

SEQ ID NO: 109853 - protein, 11 aa, Homo Sapiens
VPKTVDNFVAL

SEQ ID NO: 109854 - protein, 11 aa, Homo Sapiens
VPLPISHKRVL

SEQ ID NO: 109855 - protein, 11 aa, Homo Sapiens
VPMEIKPGISL

SEQ ID NO: 109856 - protein, 11 aa, Homo Sapiens
VPMTAENFRCL

SEQ ID NO: 109857 - protein, 11 aa, Homo Sapiens
VPNAGRGLVRL

SEQ ID NO: 109858 - protein, 11 aa, Homo Sapiens
VPNDRPTWHIL

SEQ ID NO: 109859 - protein, 11 aa, Homo Sapiens
VPNKFLVTAEI

SEQ ID NO: 109860 - protein, 11 aa, Homo Sapiens
VPNLRGSEERL

SEQ ID NO: 109861 - protein, 11 aa, Homo Sapiens
VPNPRIKLIDF

SEQ ID NO: 109862 - protein, 11 aa, Homo Sapiens
VPNSAIYKRVL

SEQ ID NO: 109863 - protein, 11 aa, Homo Sapiens
VPQERQPEAEL

SEQ ID NO: 109864 - protein, 11 aa, Homo Sapiens
VPQQAIDSHSV

SEQ ID NO: 109865 - protein, 11 aa, Homo Sapiens
VPRIASKPIIV

SEQ ID NO: 109866 - protein, 11 aa, Homo Sapiens
VPRPAPYSKAL

SEQ ID NO: 109867 - protein, 11 aa, Homo Sapiens
VPRPVLRALSF

SEQ ID NO: 109868 - protein, 11 aa, Homo Sapiens
VPRTAENFRAL

SEQ ID NO: 109869 - protein, 11 aa, Homo Sapiens
VPSAGLRLFAL

SEQ ID NO: 109870 - protein, 11 aa, Homo Sapiens
VPSKVPTSMVL

SEQ ID NO: 109871 - protein, 11 aa, Homo Sapiens
VPSNSHLVLVL

SEQ ID NO: 109872 - protein, 11 aa, Homo Sapiens
VPSVSSISRIL

SEQ ID NO: 109873 - protein, 11 aa, Homo Sapiens
VPSWSKVNQGL

SEQ ID NO: 109874 - protein, 11 aa, Homo Sapiens
VPYKKDVGKTL

SEQ ID NO: 109875 - protein, 11 aa, Homo Sapiens
VSKPDMGLVAL

SEQ ID NO: 109876 - protein, 11 aa, Homo Sapiens
VVSEVDIAKAD

SEQ ID NO: 109877 - protein, 11 aa, Homo Sapiens
YPKEDKENRIL

SEQ ID NO: 109878 - protein, 11 aa, Homo Sapiens
YPKRPLLGLVL

SEQ ID NO: 109879 - protein, 11 aa, Homo Sapiens
YPMDLGGRNFL

SEQ ID NO: 109880 - protein, 11 aa, Homo Sapiens
YPMKSEKIHGL

SEQ ID NO: 109881 - protein, 11 aa, Homo Sapiens
YPNFAGPHAAL

SEQ ID NO: 109882 - protein, 11 aa, Homo Sapiens
YPSETTVKYVF

SEQ ID NO: 109883 - protein, 11 aa, Homo Sapiens
YPSVENVRTSL

SEQ ID NO: 109884 - protein, 11 aa, Homo Sapiens
YPSVGQLAHKL

SEQ ID NO: 109885 - protein, 11 aa, Homo Sapiens
YPVPASKRPPL

SEQ ID NO: 109886 - protein, 8 aa, Homo Sapiens
AEGLGFSY

SEQ ID NO: 109887 - protein, 8 aa, Homo Sapiens
AEIIASHW

SEQ ID NO: 109888 - protein, 8 aa, Homo Sapiens
NELPGLKW

SEQ ID NO: 109889 - protein, 8 aa, Homo Sapiens
RDFLGTNW

SEQ ID NO: 109890 - protein, 8 aa, Homo Sapiens
SDNLARLW

SEQ ID NO: 109891 - protein, 9 aa, Homo Sapiens
AAQDFFQRW

SEQ ID NO: 109892 - protein, 9 aa, Homo Sapiens
AEADKIYSF

SEQ ID NO: 109893 - protein, 9 aa, Homo Sapiens
AEADLRALL

SEQ ID NO: 109894 - protein, 9 aa, Homo Sapiens
AEAEIIQLL

SEQ ID NO: 109895 - protein, 9 aa, Homo Sapiens
AEAEQTLRF

SEQ ID NO: 109896 - protein, 9 aa, Homo Sapiens
AEAFLEHLW

SEQ ID NO: 109897 - protein, 9 aa, Homo Sapiens
AEAFLLRLY

SEQ ID NO: 109898 - protein, 9 aa, Homo Sapiens
AEAFLVHLF

SEQ ID NO: 109899 - protein, 9 aa, Homo Sapiens
AEAIVPTLF

SEQ ID NO: 109900 - protein, 9 aa, Homo Sapiens
AEALATHIL

SEQ ID NO: 109901 - protein, 9 aa, Homo Sapiens
AEALLHPFF

SEQ ID NO: 109902 - protein, 9 aa, Homo Sapiens
AEASVLILF

SEQ ID NO: 109903 - protein, 9 aa, Homo Sapiens
AEAYHFFIL

SEQ ID NO: 109904 - protein, 9 aa, Homo Sapiens
AEDELFNRY

SEQ ID NO: 109905 - protein, 9 aa, Homo Sapiens
AEDFTIKLI

SEQ ID NO: 109906 - protein, 9 aa, Homo Sapiens
AEDLVANFF

SEQ ID NO: 109907 - protein, 9 aa, Homo Sapiens
AEDRFMLLF

SEQ ID NO: 109908 - protein, 9 aa, Homo Sapiens
AEEEFVQRF

SEQ ID NO: 109909 - protein, 9 aa, Homo Sapiens
AEEFLYRFL

SEQ ID NO: 109910 - protein, 9 aa, Homo Sapiens
AEELLRIGL

SEQ ID NO: 109911 - protein, 9 aa, Homo Sapiens
AEELSILKW

SEQ ID NO: 109912 - protein, 9 aa, Homo Sapiens
AEENLFKLI

SEQ ID NO: 109913 - protein, 9 aa, Homo Sapiens
AEESLFRVF

SEQ ID NO: 109914 - protein, 9 aa, Homo Sapiens
AEFAISIKY

SEQ ID NO: 109915 - protein, 9 aa, Homo Sapiens
AEFAQVTNW

SEQ ID NO: 109916 - protein, 9 aa, Homo Sapiens
AEFELPKTM

SEQ ID NO: 109917 - protein, 9 aa, Homo Sapiens
AEFEVVRTI

SEQ ID NO: 109918 - protein, 9 aa, Homo Sapiens
AEFIRELGF

SEQ ID NO: 109919 - protein, 9 aa, Homo Sapiens
AEFIVAKAI

SEQ ID NO: 109920 - protein, 9 aa, Homo Sapiens
AEFKEAFQL

SEQ ID NO: 109921 - protein, 9 aa, Homo Sapiens
AEFLYQVLI

SEQ ID NO: 109922 - protein, 9 aa, Homo Sapiens
AEFNLRHDW

SEQ ID NO: 109923 - protein, 9 aa, Homo Sapiens
AEGDLIEHF

SEQ ID NO: 109924 - protein, 9 aa, Homo Sapiens
AEGDLVRLL

SEQ ID NO: 109925 - protein, 9 aa, Homo Sapiens
AEGDLYLHF

SEQ ID NO: 109926 - protein, 9 aa, Homo Sapiens
AEGITFIKF

SEQ ID NO: 109927 - protein, 9 aa, Homo Sapiens
AEGKFWTHW

SEQ ID NO: 109928 - protein, 9 aa, Homo Sapiens
AEGLLSHYL

SEQ ID NO: 109929 - protein, 9 aa, Homo Sapiens
AEGPPRLAI

SEQ ID NO: 109930 - protein, 9 aa, Homo Sapiens
AEGVIVGHW

SEQ ID NO: 109931 - protein, 9 aa, Homo Sapiens
AEIAALRFL

SEQ ID NO: 109932 - protein, 9 aa, Homo Sapiens
AEIDSIHQL

SEQ ID NO: 109933 - protein, 9 aa, Homo Sapiens
AEIEDIRVL

SEQ ID NO: 109934 - protein, 9 aa, Homo Sapiens
AEIEIVKDL

SEQ ID NO: 109935 - protein, 9 aa, Homo Sapiens
AEIELLQNL

SEQ ID NO: 109936 - protein, 9 aa, Homo Sapiens
AEIIKEDLW

SEQ ID NO: 109937 - protein, 9 aa, Homo Sapiens
AEIIKGELW

SEQ ID NO: 109938 - protein, 9 aa, Homo Sapiens
AEIIKNDLW

SEQ ID NO: 109939 - protein, 9 aa, Homo Sapiens
AEILLSNHY

SEQ ID NO: 109940 - protein, 9 aa, Homo Sapiens
AEIMAVLFF

SEQ ID NO: 109941 - protein, 9 aa, Homo Sapiens
AEINNIIKI

SEQ ID NO: 109942 - protein, 9 aa, Homo Sapiens
AEINYGIRF

SEQ ID NO: 109943 - protein, 9 aa, Homo Sapiens
AEIQFAQRL

SEQ ID NO: 109944 - protein, 9 aa, Homo Sapiens
AEIRSLVTW

SEQ ID NO: 109945 - protein, 9 aa, Homo Sapiens
AEKDNFLEW

SEQ ID NO: 109946 - protein, 9 aa, Homo Sapiens
AELAIFRVF

SEQ ID NO: 109947 - protein, 9 aa, Homo Sapiens
AELAVILKF

SEQ ID NO: 109948 - protein, 9 aa, Homo Sapiens
AELELLRQF

SEQ ID NO: 109949 - protein, 9 aa, Homo Sapiens
AELIISEVF

SEQ ID NO: 109950 - protein, 9 aa, Homo Sapiens
AELMQTLRF

SEQ ID NO: 109951 - protein, 9 aa, Homo Sapiens
AELNFFQRI

SEQ ID NO: 109952 - protein, 9 aa, Homo Sapiens
AELNKIFAL

SEQ ID NO: 109953 - protein, 9 aa, Homo Sapiens
AELPGVSRW

SEQ ID NO: 109954 - protein, 9 aa, Homo Sapiens
AEMEIIGQF

SEQ ID NO: 109955 - protein, 9 aa, Homo Sapiens
AEMGAFTFF

SEQ ID NO: 109956 - protein, 9 aa, Homo Sapiens
AEMLRSISF

SEQ ID NO: 109957 - protein, 9 aa, Homo Sapiens
AEMPLFKLY

SEQ ID NO: 109958 - protein, 9 aa, Homo Sapiens
AEMQWKRDY

SEQ ID NO: 109959 - protein, 9 aa, Homo Sapiens
AEMWLIRTY

SEQ ID NO: 109960 - protein, 9 aa, Homo Sapiens
AENDFLHSL

SEQ ID NO: 109961 - protein, 9 aa, Homo Sapiens
AENFAEHVL

SEQ ID NO: 109962 - protein, 9 aa, Homo Sapiens
AENGLTVRL

SEQ ID NO: 109963 - protein, 9 aa, Homo Sapiens
AENILQQDF

SEQ ID NO: 109964 - protein, 9 aa, Homo Sapiens
AENLFRAFL

SEQ ID NO: 109965 - protein, 9 aa, Homo Sapiens
AENMIQLQF

SEQ ID NO: 109966 - protein, 9 aa, Homo Sapiens
AENNEFITW

SEQ ID NO: 109967 - protein, 9 aa, Homo Sapiens
AENNIQPIF

SEQ ID NO: 109968 - protein, 9 aa, Homo Sapiens
AENPFLTHL

SEQ ID NO: 109969 - protein, 9 aa, Homo Sapiens
AENPSIQLL

SEQ ID NO: 109970 - protein, 9 aa, Homo Sapiens
AENQLALEL

SEQ ID NO: 109971 - protein, 9 aa, Homo Sapiens
AENTLSKLL

SEQ ID NO: 109972 - protein, 9 aa, Homo Sapiens
AENVSMWIF

SEQ ID NO: 109973 - protein, 9 aa, Homo Sapiens
AEPGSVISW

SEQ ID NO: 109974 - protein, 9 aa, Homo Sapiens
AEPIDIQTW

SEQ ID NO: 109975 - protein, 9 aa, Homo Sapiens
AEQDFISKF

SEQ ID NO: 109976 - protein, 9 aa, Homo Sapiens
AEQDLIREL

SEQ ID NO: 109977 - protein, 9 aa, Homo Sapiens
AEQDLVQTL

SEQ ID NO: 109978 - protein, 9 aa, Homo Sapiens
AEQFRLEQI

SEQ ID NO: 109979 - protein, 9 aa, Homo Sapiens
AEQIIFDHF

SEQ ID NO: 109980 - protein, 9 aa, Homo Sapiens
AEQIIQEIY

SEQ ID NO: 109981 - protein, 9 aa, Homo Sapiens
AEQLFHLNF

SEQ ID NO: 109982 - protein, 9 aa, Homo Sapiens
AERQLQVQW

SEQ ID NO: 109983 - protein, 9 aa, Homo Sapiens
AESALQLLY

SEQ ID NO: 109984 - protein, 9 aa, Homo Sapiens
AESFMFRTW

SEQ ID NO: 109985 - protein, 9 aa, Homo Sapiens
AESGLWQSF

SEQ ID NO: 109986 - protein, 9 aa, Homo Sapiens
AESHIILVL

SEQ ID NO: 109987 - protein, 9 aa, Homo Sapiens
AESLIAKKI

SEQ ID NO: 109988 - protein, 9 aa, Homo Sapiens
AESLYEIRF

SEQ ID NO: 109989 - protein, 9 aa, Homo Sapiens
AESPPRFYF

SEQ ID NO: 109990 - protein, 9 aa, Homo Sapiens
AESVSTLIW

SEQ ID NO: 109991 - protein, 9 aa, Homo Sapiens
AETAVQLFI

SEQ ID NO: 109992 - protein, 9 aa, Homo Sapiens
AETDAIRFL

SEQ ID NO: 109993 - protein, 9 aa, Homo Sapiens
AETFSPDVW

SEQ ID NO: 109994 - protein, 9 aa, Homo Sapiens
AETHIVLLF

SEQ ID NO: 109995 - protein, 9 aa, Homo Sapiens
AETLIFVKY

SEQ ID NO: 109996 - protein, 9 aa, Homo Sapiens
AETPDIKLF

SEQ ID NO: 109997 - protein, 9 aa, Homo Sapiens
AETQILTDW

SEQ ID NO: 109998 - protein, 9 aa, Homo Sapiens
AEVFPLKVF

SEQ ID NO: 109999 - protein, 9 aa, Homo Sapiens
AEVGFVRFF

SEQ ID NO: 110000 - protein, 9 aa, Homo Sapiens
AEVIDTPVF

SEQ ID NO: 110001 - protein, 9 aa, Homo Sapiens
AEVPFFETW

SEQ ID NO: 110002 - protein, 9 aa, Homo Sapiens
AEVTLKTYW

SEQ ID NO: 110003 - protein, 9 aa, Homo Sapiens
AEWEWKAGF

SEQ ID NO: 110004 - protein, 9 aa, Homo Sapiens
AEWLFPLAF

SEQ ID NO: 110005 - protein, 9 aa, Homo Sapiens
AEYLIKEGY

SEQ ID NO: 110006 - protein, 9 aa, Homo Sapiens
AEYLILHLI

SEQ ID NO: 110007 - protein, 9 aa, Homo Sapiens
AEYTGPKLF

SEQ ID NO: 110008 - protein, 9 aa, Homo Sapiens
AQLRFIQAW

SEQ ID NO: 110009 - protein, 9 aa, Homo Sapiens
DEEETYRLW

SEQ ID NO: 110010 - protein, 9 aa, Homo Sapiens
DEEQVFHFY

SEQ ID NO: 110011 - protein, 9 aa, Homo Sapiens
DELIQQSQW

SEQ ID NO: 110012 - protein, 9 aa, Homo Sapiens
DEMAAVMGF

SEQ ID NO: 110013 - protein, 9 aa, Homo Sapiens
DENGLIIVW

SEQ ID NO: 110014 - protein, 9 aa, Homo Sapiens
DENIKSFIW

SEQ ID NO: 110015 - protein, 9 aa, Homo Sapiens
DENPQQLKL

SEQ ID NO: 110016 - protein, 9 aa, Homo Sapiens
DENSVIKSF

SEQ ID NO: 110017 - protein, 9 aa, Homo Sapiens
EDAALFKAW

SEQ ID NO: 110018 - protein, 9 aa, Homo Sapiens
EDWIRGVEW

SEQ ID NO: 110019 - protein, 9 aa, Homo Sapiens
EEAEIIRKY

SEQ ID NO: 110020 - protein, 9 aa, Homo Sapiens
EEAEWQTRW

SEQ ID NO: 110021 - protein, 9 aa, Homo Sapiens
EEAFTSEHW

SEQ ID NO: 110022 - protein, 9 aa, Homo Sapiens
EEAGIFKLL

SEQ ID NO: 110023 - protein, 9 aa, Homo Sapiens
EEAPKFLAF

SEQ ID NO: 110024 - protein, 9 aa, Homo Sapiens
EEAPPPPLL

SEQ ID NO: 110025 - protein, 9 aa, Homo Sapiens
EEASIYSRW

SEQ ID NO: 110026 - protein, 9 aa, Homo Sapiens
EEASLLHQF

SEQ ID NO: 110027 - protein, 9 aa, Homo Sapiens
EEDRFYLVF

SEQ ID NO: 110028 - protein, 9 aa, Homo Sapiens
EEEFIERCF

SEQ ID NO: 110029 - protein, 9 aa, Homo Sapiens
EEFDFHVRW

SEQ ID NO: 110030 - protein, 9 aa, Homo Sapiens
EEFDSFRIF

SEQ ID NO: 110031 - protein, 9 aa, Homo Sapiens
EEFETIERF

SEQ ID NO: 110032 - protein, 9 aa, Homo Sapiens
EEFGQAFSF

SEQ ID NO: 110033 - protein, 9 aa, Homo Sapiens
EEFGRFASF

SEQ ID NO: 110034 - protein, 9 aa, Homo Sapiens
EEFHQSLQW

SEQ ID NO: 110035 - protein, 9 aa, Homo Sapiens
EEFISNTLF

SEQ ID NO: 110036 - protein, 9 aa, Homo Sapiens
EEGPDVLRW

SEQ ID NO: 110037 - protein, 9 aa, Homo Sapiens
EEHPLVFLF

SEQ ID NO: 110038 - protein, 9 aa, Homo Sapiens
EEIEILLRY

SEQ ID NO: 110039 - protein, 9 aa, Homo Sapiens
EEIFGTIGM

SEQ ID NO: 110040 - protein, 9 aa, Homo Sapiens
EEIFSLHGF

SEQ ID NO: 110041 - protein, 9 aa, Homo Sapiens
EEIIRGQVF

SEQ ID NO: 110042 - protein, 9 aa, Homo Sapiens
EEIPFEQSF

SEQ ID NO: 110043 - protein, 9 aa, Homo Sapiens
EEIPKIFQI

SEQ ID NO: 110044 - protein, 9 aa, Homo Sapiens
EEIPKNYSI

SEQ ID NO: 110045 - protein, 9 aa, Homo Sapiens
EEIPVHEEF

SEQ ID NO: 110046 - protein, 9 aa, Homo Sapiens
EEITVGQLI

SEQ ID NO: 110047 - protein, 9 aa, Homo Sapiens
EEKYAFVNW

SEQ ID NO: 110048 - protein, 9 aa, Homo Sapiens
EELDLPAVF

SEQ ID NO: 110049 - protein, 9 aa, Homo Sapiens
EELDVLKFL

SEQ ID NO: 110050 - protein, 9 aa, Homo Sapiens
EELERILVY

SEQ ID NO: 110051 - protein, 9 aa, Homo Sapiens
EELGFRPEY

SEQ ID NO: 110052 - protein, 9 aa, Homo Sapiens
EELGLVTHL

SEQ ID NO: 110053 - protein, 9 aa, Homo Sapiens
EELLGLVVW

SEQ ID NO: 110054 - protein, 9 aa, Homo Sapiens
EELPHIHAF

SEQ ID NO: 110055 - protein, 9 aa, Homo Sapiens
EELPTLLHF

SEQ ID NO: 110056 - protein, 9 aa, Homo Sapiens
EELPYSEYF

SEQ ID NO: 110057 - protein, 9 aa, Homo Sapiens
EELYTKKLW

SEQ ID NO: 110058 - protein, 9 aa, Homo Sapiens
EEMDFPQLM

SEQ ID NO: 110059 - protein, 9 aa, Homo Sapiens
EEMDLFTKY

SEQ ID NO: 110060 - protein, 9 aa, Homo Sapiens
EEMEWFNNY

SEQ ID NO: 110061 - protein, 9 aa, Homo Sapiens
EEMGFTIDI

SEQ ID NO: 110062 - protein, 9 aa, Homo Sapiens
EEMIFQIPW

SEQ ID NO: 110063 - protein, 9 aa, Homo Sapiens
EEMLEIRQL

SEQ ID NO: 110064 - protein, 9 aa, Homo Sapiens
EEMLLPRFF

SEQ ID NO: 110065 - protein, 9 aa, Homo Sapiens
EEMQWIQFF

SEQ ID NO: 110066 - protein, 9 aa, Homo Sapiens
EEMRFLREW

SEQ ID NO: 110067 - protein, 9 aa, Homo Sapiens
EENIQTLLI

SEQ ID NO: 110068 - protein, 9 aa, Homo Sapiens
EENPIVLEF

SEQ ID NO: 110069 - protein, 9 aa, Homo Sapiens
EENQKIFLL

SEQ ID NO: 110070 - protein, 9 aa, Homo Sapiens
EEPESFFTW

SEQ ID NO: 110071 - protein, 9 aa, Homo Sapiens
EEPHYIEIW

SEQ ID NO: 110072 - protein, 9 aa, Homo Sapiens
EEPPTTLLW

SEQ ID NO: 110073 - protein, 9 aa, Homo Sapiens
EEQDLVWKF

SEQ ID NO: 110074 - protein, 9 aa, Homo Sapiens
EEQGIGLQW

SEQ ID NO: 110075 - protein, 9 aa, Homo Sapiens
EEQLIAAKF

SEQ ID NO: 110076 - protein, 9 aa, Homo Sapiens
EESAVTVMF

SEQ ID NO: 110077 - protein, 9 aa, Homo Sapiens
EESFFILKY

SEQ ID NO: 110078 - protein, 9 aa, Homo Sapiens
EESQIRIEL

SEQ ID NO: 110079 - protein, 9 aa, Homo Sapiens
EESRIQIWF

SEQ ID NO: 110080 - protein, 9 aa, Homo Sapiens
EESRLLQLL

SEQ ID NO: 110081 - protein, 9 aa, Homo Sapiens
EESWFPKYI

SEQ ID NO: 110082 - protein, 9 aa, Homo Sapiens
EETFQLSRW

SEQ ID NO: 110083 - protein, 9 aa, Homo Sapiens
EETLLDQSF

SEQ ID NO: 110084 - protein, 9 aa, Homo Sapiens
EETPVVLQL

SEQ ID NO: 110085 - protein, 9 aa, Homo Sapiens
EETPYLVKI

SEQ ID NO: 110086 - protein, 9 aa, Homo Sapiens
EETVVPKTF

SEQ ID NO: 110087 - protein, 9 aa, Homo Sapiens
EEVALVQLF

SEQ ID NO: 110088 - protein, 9 aa, Homo Sapiens
EEVDMPVFF

SEQ ID NO: 110089 - protein, 9 aa, Homo Sapiens
EEVDVTPTF

SEQ ID NO: 110090 - protein, 9 aa, Homo Sapiens
EEVFRSYVF

SEQ ID NO: 110091 - protein, 9 aa, Homo Sapiens
EEWLPRELW

SEQ ID NO: 110092 - protein, 9 aa, Homo Sapiens
EEYLLRQVF

SEQ ID NO: 110093 - protein, 9 aa, Homo Sapiens
EEYLRLVIF

SEQ ID NO: 110094 - protein, 9 aa, Homo Sapiens
EEYLVIIRF

SEQ ID NO: 110095 - protein, 9 aa, Homo Sapiens
EEYQGVIAW

SEQ ID NO: 110096 - protein, 9 aa, Homo Sapiens
FEFEYASRW

SEQ ID NO: 110097 - protein, 9 aa, Homo Sapiens
FENEIILKL

SEQ ID NO: 110098 - protein, 9 aa, Homo Sapiens
FEYEYSQRW

SEQ ID NO: 110099 - protein, 9 aa, Homo Sapiens
GEAVVNRVF

SEQ ID NO: 110100 - protein, 9 aa, Homo Sapiens
GEDLGVAFW

SEQ ID NO: 110101 - protein, 9 aa, Homo Sapiens
GEDSTYKFF

SEQ ID NO: 110102 - protein, 9 aa, Homo Sapiens
GEDTFVHIW

SEQ ID NO: 110103 - protein, 9 aa, Homo Sapiens
GEFKALQEW

SEQ ID NO: 110104 - protein, 9 aa, Homo Sapiens
GEIDTRFSF

SEQ ID NO: 110105 - protein, 9 aa, Homo Sapiens
GEIETIARF

SEQ ID NO: 110106 - protein, 9 aa, Homo Sapiens
GEIQYLIKW

SEQ ID NO: 110107 - protein, 9 aa, Homo Sapiens
GELDILKDW

SEQ ID NO: 110108 - protein, 9 aa, Homo Sapiens
GELFLTKEF

SEQ ID NO: 110109 - protein, 9 aa, Homo Sapiens
GELMFLMKW

SEQ ID NO: 110110 - protein, 9 aa, Homo Sapiens
GELQLIKIF

SEQ ID NO: 110111 - protein, 9 aa, Homo Sapiens
GEMIIVLHF

SEQ ID NO: 110112 - protein, 9 aa, Homo Sapiens
GENHLTVTW

SEQ ID NO: 110113 - protein, 9 aa, Homo Sapiens
GENLPPLTY

SEQ ID NO: 110114 - protein, 9 aa, Homo Sapiens
GENPIPIFF

SEQ ID NO: 110115 - protein, 9 aa, Homo Sapiens
GEQELFVQF

SEQ ID NO: 110116 - protein, 9 aa, Homo Sapiens
GEQGYIRLI

SEQ ID NO: 110117 - protein, 9 aa, Homo Sapiens
GESKAILLW

SEQ ID NO: 110118 - protein, 9 aa, Homo Sapiens
GESVTFHLF

SEQ ID NO: 110119 - protein, 9 aa, Homo Sapiens
GETSYIRVY

SEQ ID NO: 110120 - protein, 9 aa, Homo Sapiens
GEVEGHPVW

SEQ ID NO: 110121 - protein, 9 aa, Homo Sapiens
GEVLISRVY

SEQ ID NO: 110122 - protein, 9 aa, Homo Sapiens
GEWERYIQW

SEQ ID NO: 110123 - protein, 9 aa, Homo Sapiens
HEAEVLKQL

SEQ ID NO: 110124 - protein, 9 aa, Homo Sapiens
HEFPLILIF

SEQ ID NO: 110125 - protein, 9 aa, Homo Sapiens
HEGEILQAF

SEQ ID NO: 110126 - protein, 9 aa, Homo Sapiens
HEIEALKSF

SEQ ID NO: 110127 - protein, 9 aa, Homo Sapiens
HEIIETIRW

SEQ ID NO: 110128 - protein, 9 aa, Homo Sapiens
HEVPYTTSF

SEQ ID NO: 110129 - protein, 9 aa, Homo Sapiens
HLLFWGVLA

SEQ ID NO: 110130 - protein, 9 aa, Homo Sapiens
IEFNKPQYF

SEQ ID NO: 110131 - protein, 9 aa, Homo Sapiens
IEIENFKSY

SEQ ID NO: 110132 - protein, 9 aa, Homo Sapiens
IEIFRYSFY

SEQ ID NO: 110133 - protein, 9 aa, Homo Sapiens
IEMPYVIEF

SEQ ID NO: 110134 - protein, 9 aa, Homo Sapiens
IENPALLRW

SEQ ID NO: 110135 - protein, 9 aa, Homo Sapiens
IENSFITKW

SEQ ID NO: 110136 - protein, 9 aa, Homo Sapiens
IESVIKELW

SEQ ID NO: 110137 - protein, 9 aa, Homo Sapiens
IETILVQSW

SEQ ID NO: 110138 - protein, 9 aa, Homo Sapiens
IEVNGKQSW

SEQ ID NO: 110139 - protein, 9 aa, Homo Sapiens
KDEIFQVHW

SEQ ID NO: 110140 - protein, 9 aa, Homo Sapiens
KDEIFQVQW

SEQ ID NO: 110141 - protein, 9 aa, Homo Sapiens
KEAFVVEEW

SEQ ID NO: 110142 - protein, 9 aa, Homo Sapiens
KEDLVFIFW

SEQ ID NO: 110143 - protein, 9 aa, Homo Sapiens
KEEDLLQAW

SEQ ID NO: 110144 - protein, 9 aa, Homo Sapiens
KEEELLLFW

SEQ ID NO: 110145 - protein, 9 aa, Homo Sapiens
KEEQVIQVW

SEQ ID NO: 110146 - protein, 9 aa, Homo Sapiens
KEIDLESIF

SEQ ID NO: 110147 - protein, 9 aa, Homo Sapiens
KEMWLQDYW

SEQ ID NO: 110148 - protein, 9 aa, Homo Sapiens
KETDLILTF

SEQ ID NO: 110149 - protein, 9 aa, Homo Sapiens
KETDLLILF

SEQ ID NO: 110150 - protein, 9 aa, Homo Sapiens
KETIIAFAW

SEQ ID NO: 110151 - protein, 9 aa, Homo Sapiens
KETNIAVFW

SEQ ID NO: 110152 - protein, 9 aa, Homo Sapiens
LEAILLQEL

SEQ ID NO: 110153 - protein, 9 aa, Homo Sapiens
LEFIKEIGY

SEQ ID NO: 110154 - protein, 9 aa, Homo Sapiens
LEHEYIQNF

SEQ ID NO: 110155 - protein, 9 aa, Homo Sapiens
LELGFSKVF

SEQ ID NO: 110156 - protein, 9 aa, Homo Sapiens
LENDIRTFF

SEQ ID NO: 110157 - protein, 9 aa, Homo Sapiens
LENGVFPRW

SEQ ID NO: 110158 - protein, 9 aa, Homo Sapiens
LESFIRQDF

SEQ ID NO: 110159 - protein, 9 aa, Homo Sapiens
MEEALFQHF

SEQ ID NO: 110160 - protein, 9 aa, Homo Sapiens
MEIDIPHVW

SEQ ID NO: 110161 - protein, 9 aa, Homo Sapiens
MELPDYRQW

SEQ ID NO: 110162 - protein, 9 aa, Homo Sapiens
MENDVRDFF

SEQ ID NO: 110163 - protein, 9 aa, Homo Sapiens
MENGIVRNW

SEQ ID NO: 110164 - protein, 9 aa, Homo Sapiens
MENLPLPEY

SEQ ID NO: 110165 - protein, 9 aa, Homo Sapiens
MEQSLFTRF

SEQ ID NO: 110166 - protein, 9 aa, Homo Sapiens
MEQVIFKYL

SEQ ID NO: 110167 - protein, 9 aa, Homo Sapiens
METAVPVYF

SEQ ID NO: 110168 - protein, 9 aa, Homo Sapiens
METDLYKLL

SEQ ID NO: 110169 - protein, 9 aa, Homo Sapiens
MEVFLPQSY

SEQ ID NO: 110170 - protein, 9 aa, Homo Sapiens
MEWDKIWAF

SEQ ID NO: 110171 - protein, 9 aa, Homo Sapiens
MEYVKSWFW

SEQ ID NO: 110172 - protein, 9 aa, Homo Sapiens
NEEGFVRLY

SEQ ID NO: 110173 - protein, 9 aa, Homo Sapiens
NEENYISLW

SEQ ID NO: 110174 - protein, 9 aa, Homo Sapiens
NEIGIPMVF

SEQ ID NO: 110175 - protein, 9 aa, Homo Sapiens
NEIIEPVYF

SEQ ID NO: 110176 - protein, 9 aa, Homo Sapiens
NEILGSLRW

SEQ ID NO: 110177 - protein, 9 aa, Homo Sapiens
NEILSQQLF

SEQ ID NO: 110178 - protein, 9 aa, Homo Sapiens
NEINEVLSW

SEQ ID NO: 110179 - protein, 9 aa, Homo Sapiens
NEITIPVTF

SEQ ID NO: 110180 - protein, 9 aa, Homo Sapiens
NEIVQSNLF

SEQ ID NO: 110181 - protein, 9 aa, Homo Sapiens
NELERNITI

SEQ ID NO: 110182 - protein, 9 aa, Homo Sapiens
NELIRFEEF

SEQ ID NO: 110183 - protein, 9 aa, Homo Sapiens
NELVSTHGY

SEQ ID NO: 110184 - protein, 9 aa, Homo Sapiens
NEMALVQEL

SEQ ID NO: 110185 - protein, 9 aa, Homo Sapiens
NEMPISQLL

SEQ ID NO: 110186 - protein, 9 aa, Homo Sapiens
NENDIITHF

SEQ ID NO: 110187 - protein, 9 aa, Homo Sapiens
NENPLRALY

SEQ ID NO: 110188 - protein, 9 aa, Homo Sapiens
NENSLFKSL

SEQ ID NO: 110189 - protein, 9 aa, Homo Sapiens
NEPYIFKVF

SEQ ID NO: 110190 - protein, 9 aa, Homo Sapiens
NEQPRQLFW

SEQ ID NO: 110191 - protein, 9 aa, Homo Sapiens
NESAIFHGW

SEQ ID NO: 110192 - protein, 9 aa, Homo Sapiens
NESIIVALF

SEQ ID NO: 110193 - protein, 9 aa, Homo Sapiens
NETLIVSKF

SEQ ID NO: 110194 - protein, 9 aa, Homo Sapiens
NEVFLAKLI

SEQ ID NO: 110195 - protein, 9 aa, Homo Sapiens
NEVIMTIGF

SEQ ID NO: 110196 - protein, 9 aa, Homo Sapiens
NEWARYLYY

SEQ ID NO: 110197 - protein, 9 aa, Homo Sapiens
QEAFILRLF

SEQ ID NO: 110198 - protein, 9 aa, Homo Sapiens
QEAIGFIDW

SEQ ID NO: 110199 - protein, 9 aa, Homo Sapiens
QEALIRTVF

SEQ ID NO: 110200 - protein, 9 aa, Homo Sapiens
QEALVNRLW

SEQ ID NO: 110201 - protein, 9 aa, Homo Sapiens
QEDLRTFSW

SEQ ID NO: 110202 - protein, 9 aa, Homo Sapiens
QEELITQYL

SEQ ID NO: 110203 - protein, 9 aa, Homo Sapiens
QEFDFIKSY

SEQ ID NO: 110204 - protein, 9 aa, Homo Sapiens
QEFGVPHQY

SEQ ID NO: 110205 - protein, 9 aa, Homo Sapiens
QEFIDNPKW

SEQ ID NO: 110206 - protein, 9 aa, Homo Sapiens
QEFIRVGYY

SEQ ID NO: 110207 - protein, 9 aa, Homo Sapiens
QEFNLPVRY

SEQ ID NO: 110208 - protein, 9 aa, Homo Sapiens
QEFVLEMRF

SEQ ID NO: 110209 - protein, 9 aa, Homo Sapiens
QEGDIILVL

SEQ ID NO: 110210 - protein, 9 aa, Homo Sapiens
QEGPQYWEW

SEQ ID NO: 110211 - protein, 9 aa, Homo Sapiens
QEIDILEDW

SEQ ID NO: 110212 - protein, 9 aa, Homo Sapiens
QEIEVRPGI

SEQ ID NO: 110213 - protein, 9 aa, Homo Sapiens
QELDDILKF

SEQ ID NO: 110214 - protein, 9 aa, Homo Sapiens
QELFFFHEL

SEQ ID NO: 110215 - protein, 9 aa, Homo Sapiens
QELFLAHIL

SEQ ID NO: 110216 - protein, 9 aa, Homo Sapiens
QELLLANNW

SEQ ID NO: 110217 - protein, 9 aa, Homo Sapiens
QELLQTQDF

SEQ ID NO: 110218 - protein, 9 aa, Homo Sapiens
QELYFFHEL

SEQ ID NO: 110219 - protein, 9 aa, Homo Sapiens
QENQWVTCF

SEQ ID NO: 110220 - protein, 9 aa, Homo Sapiens
QEQEIEQRL

SEQ ID NO: 110221 - protein, 9 aa, Homo Sapiens
QEQFLELSY

SEQ ID NO: 110222 - protein, 9 aa, Homo Sapiens
QEQLIRSLY

SEQ ID NO: 110223 - protein, 9 aa, Homo Sapiens
QESALIRKL

SEQ ID NO: 110224 - protein, 9 aa, Homo Sapiens
QESNVQLKL

SEQ ID NO: 110225 - protein, 9 aa, Homo Sapiens
QEVDFFQRY

SEQ ID NO: 110226 - protein, 9 aa, Homo Sapiens
QEVDLQQLI

SEQ ID NO: 110227 - protein, 9 aa, Homo Sapiens
QEVFRFAYY

SEQ ID NO: 110228 - protein, 9 aa, Homo Sapiens
QEVIKAYGF

SEQ ID NO: 110229 - protein, 9 aa, Homo Sapiens
QEVPIIIVF

SEQ ID NO: 110230 - protein, 9 aa, Homo Sapiens
REAEFTKSI

SEQ ID NO: 110231 - protein, 9 aa, Homo Sapiens
REAFLQEVW

SEQ ID NO: 110232 - protein, 9 aa, Homo Sapiens
REELQQITW

SEQ ID NO: 110233 - protein, 9 aa, Homo Sapiens
REFWPQEVW

SEQ ID NO: 110234 - protein, 9 aa, Homo Sapiens
REFYLSVYF

SEQ ID NO: 110235 - protein, 9 aa, Homo Sapiens
REGEIAQFL

SEQ ID NO: 110236 - protein, 9 aa, Homo Sapiens
REHDIAIKF

SEQ ID NO: 110237 - protein, 9 aa, Homo Sapiens
RELDLQRNY

SEQ ID NO: 110238 - protein, 9 aa, Homo Sapiens
RELELAVFW

SEQ ID NO: 110239 - protein, 9 aa, Homo Sapiens
RENDIKSYF

SEQ ID NO: 110240 - protein, 9 aa, Homo Sapiens
RENEVLEAW

SEQ ID NO: 110241 - protein, 9 aa, Homo Sapiens
RENFLQQLY

SEQ ID NO: 110242 - protein, 9 aa, Homo Sapiens
RENLPLIVW

SEQ ID NO: 110243 - protein, 9 aa, Homo Sapiens
REQDFTLIF

SEQ ID NO: 110244 - protein, 9 aa, Homo Sapiens
RETDLQELF

SEQ ID NO: 110245 - protein, 9 aa, Homo Sapiens
SDFETPIGW

SEQ ID NO: 110246 - protein, 9 aa, Homo Sapiens
SDVVLLNHW

SEQ ID NO: 110247 - protein, 9 aa, Homo Sapiens
SDWVRDVAW

SEQ ID NO: 110248 - protein, 9 aa, Homo Sapiens
SEAFVIKGL

SEQ ID NO: 110249 - protein, 9 aa, Homo Sapiens
SEANVREIF

SEQ ID NO: 110250 - protein, 9 aa, Homo Sapiens
SEAPEAPLL

SEQ ID NO: 110251 - protein, 9 aa, Homo Sapiens
SEAPFLHYL

SEQ ID NO: 110252 - protein, 9 aa, Homo Sapiens
SEAQVQKFL

SEQ ID NO: 110253 - protein, 9 aa, Homo Sapiens
SEAVIAQFY

SEQ ID NO: 110254 - protein, 9 aa, Homo Sapiens
SEDFTVQLW

SEQ ID NO: 110255 - protein, 9 aa, Homo Sapiens
SEDGKVFFW

SEQ ID NO: 110256 - protein, 9 aa, Homo Sapiens
SEDGLLKLW

SEQ ID NO: 110257 - protein, 9 aa, Homo Sapiens
SEDGSLWHW

SEQ ID NO: 110258 - protein, 9 aa, Homo Sapiens
SEDGTLRLW

SEQ ID NO: 110259 - protein, 9 aa, Homo Sapiens
SEDGTVRIW

SEQ ID NO: 110260 - protein, 9 aa, Homo Sapiens
SEDGWISLW

SEQ ID NO: 110261 - protein, 9 aa, Homo Sapiens
SEDLPLPTF

SEQ ID NO: 110262 - protein, 9 aa, Homo Sapiens
SEDNIMQIW

SEQ ID NO: 110263 - protein, 9 aa, Homo Sapiens
SEDNIMQVW

SEQ ID NO: 110264 - protein, 9 aa, Homo Sapiens
SEDNLVYIW

SEQ ID NO: 110265 - protein, 9 aa, Homo Sapiens
SEDNRILLW

SEQ ID NO: 110266 - protein, 9 aa, Homo Sapiens
SEEDLKVLF

SEQ ID NO: 110267 - protein, 9 aa, Homo Sapiens
SEEGLLRLY

SEQ ID NO: 110268 - protein, 9 aa, Homo Sapiens
SEENVIREF

SEQ ID NO: 110269 - protein, 9 aa, Homo Sapiens
SEEPILKWY

SEQ ID NO: 110270 - protein, 9 aa, Homo Sapiens
SEFALRPTF

SEQ ID NO: 110271 - protein, 9 aa, Homo Sapiens
SEFEIVKAI

SEQ ID NO: 110272 - protein, 9 aa, Homo Sapiens
SEFELLRSY

SEQ ID NO: 110273 - protein, 9 aa, Homo Sapiens
SEFGLKISF

SEQ ID NO: 110274 - protein, 9 aa, Homo Sapiens
SEFQRLLGF

SEQ ID NO: 110275 - protein, 9 aa, Homo Sapiens
SEFSEPSFI

SEQ ID NO: 110276 - protein, 9 aa, Homo Sapiens
SEFTGVWKY

SEQ ID NO: 110277 - protein, 9 aa, Homo Sapiens
SEGLIKALF

SEQ ID NO: 110278 - protein, 9 aa, Homo Sapiens
SEGPPLTSF

SEQ ID NO: 110279 - protein, 9 aa, Homo Sapiens
SEIEGIQSL

SEQ ID NO: 110280 - protein, 9 aa, Homo Sapiens
SEIELFRVF

SEQ ID NO: 110281 - protein, 9 aa, Homo Sapiens
SEIEYYAML

SEQ ID NO: 110282 - protein, 9 aa, Homo Sapiens
SEIKDVLVW

SEQ ID NO: 110283 - protein, 9 aa, Homo Sapiens
SEISQVFEI

SEQ ID NO: 110284 - protein, 9 aa, Homo Sapiens
SEKGVIQVY

SEQ ID NO: 110285 - protein, 9 aa, Homo Sapiens
SELDLAVPF

SEQ ID NO: 110286 - protein, 9 aa, Homo Sapiens
SELDLISRL

SEQ ID NO: 110287 - protein, 9 aa, Homo Sapiens
SELDQIQRY

SEQ ID NO: 110288 - protein, 9 aa, Homo Sapiens
SELEKTFGW

SEQ ID NO: 110289 - protein, 9 aa, Homo Sapiens
SELERVFLW

SEQ ID NO: 110290 - protein, 9 aa, Homo Sapiens
SELFLMKLI

SEQ ID NO: 110291 - protein, 9 aa, Homo Sapiens
SELLDKFTW

SEQ ID NO: 110292 - protein, 9 aa, Homo Sapiens
SELLSDVRF

SEQ ID NO: 110293 - protein, 9 aa, Homo Sapiens
SEMILVLEY

SEQ ID NO: 110294 - protein, 9 aa, Homo Sapiens
SEMRFVQDL

SEQ ID NO: 110295 - protein, 9 aa, Homo Sapiens
SENAIVWKI

SEQ ID NO: 110296 - protein, 9 aa, Homo Sapiens
SENDVIRLI

SEQ ID NO: 110297 - protein, 9 aa, Homo Sapiens
SENLLGKQF

SEQ ID NO: 110298 - protein, 9 aa, Homo Sapiens
SENNRIFTL

SEQ ID NO: 110299 - protein, 9 aa, Homo Sapiens
SENPMVQLF

SEQ ID NO: 110300 - protein, 9 aa, Homo Sapiens
SENSLIILL

SEQ ID NO: 110301 - protein, 9 aa, Homo Sapiens
SENVLQVHL

SEQ ID NO: 110302 - protein, 9 aa, Homo Sapiens
SEPDFVAKF

SEQ ID NO: 110303 - protein, 9 aa, Homo Sapiens
SEQEYQLYL

SEQ ID NO: 110304 - protein, 9 aa, Homo Sapiens
SEQGSLQLW

SEQ ID NO: 110305 - protein, 9 aa, Homo Sapiens
SESELTRLL

SEQ ID NO: 110306 - protein, 9 aa, Homo Sapiens
SESFISRLL

SEQ ID NO: 110307 - protein, 9 aa, Homo Sapiens
SESLVHESW

SEQ ID NO: 110308 - protein, 9 aa, Homo Sapiens
SESPIVVVL

SEQ ID NO: 110309 - protein, 9 aa, Homo Sapiens
SESQLELNW

SEQ ID NO: 110310 - protein, 9 aa, Homo Sapiens
SESRIFNEL

SEQ ID NO: 110311 - protein, 9 aa, Homo Sapiens
SETGDIYIW

SEQ ID NO: 110312 - protein, 9 aa, Homo Sapiens
SEVGGLFFW

SEQ ID NO: 110313 - protein, 9 aa, Homo Sapiens
SEVILHHEY

SEQ ID NO: 110314 - protein, 9 aa, Homo Sapiens
SEVNLSKLF

SEQ ID NO: 110315 - protein, 9 aa, Homo Sapiens
SEWSHPIHW

SEQ ID NO: 110316 - protein, 9 aa, Homo Sapiens
SLSTFQQMW

SEQ ID NO: 110317 - protein, 9 aa, Homo Sapiens
TEALILQLF

SEQ ID NO: 110318 - protein, 9 aa, Homo Sapiens
TEALYPAFW

SEQ ID NO: 110319 - protein, 9 aa, Homo Sapiens
TEFPIIKMY

SEQ ID NO: 110320 - protein, 9 aa, Homo Sapiens
TEFQMRLLW

SEQ ID NO: 110321 - protein, 9 aa, Homo Sapiens
TEFRNFIVW

SEQ ID NO: 110322 - protein, 9 aa, Homo Sapiens
TEHWLVRIY

SEQ ID NO: 110323 - protein, 9 aa, Homo Sapiens
TEIERLITW

SEQ ID NO: 110324 - protein, 9 aa, Homo Sapiens
TEINFTQKL

SEQ ID NO: 110325 - protein, 9 aa, Homo Sapiens
TEIQLVQSL

SEQ ID NO: 110326 - protein, 9 aa, Homo Sapiens
TELPKAEKW

SEQ ID NO: 110327 - protein, 9 aa, Homo Sapiens
TENDIANFF

SEQ ID NO: 110328 - protein, 9 aa, Homo Sapiens
TENDIRVMF

SEQ ID NO: 110329 - protein, 9 aa, Homo Sapiens
TENDIYNFF

SEQ ID NO: 110330 - protein, 9 aa, Homo Sapiens
TENKLYLVF

SEQ ID NO: 110331 - protein, 9 aa, Homo Sapiens
TENPVIMGL

SEQ ID NO: 110332 - protein, 9 aa, Homo Sapiens
TEQDLKEYF

SEQ ID NO: 110333 - protein, 9 aa, Homo Sapiens
TEQELELLI

SEQ ID NO: 110334 - protein, 9 aa, Homo Sapiens
TEQELNQIF

SEQ ID NO: 110335 - protein, 9 aa, Homo Sapiens
TESLLRLEW

SEQ ID NO: 110336 - protein, 9 aa, Homo Sapiens
TESQQIRYF

SEQ ID NO: 110337 - protein, 9 aa, Homo Sapiens
TEVDNYHFY

SEQ ID NO: 110338 - protein, 9 aa, Homo Sapiens
TEWTIYQDW

SEQ ID NO: 110339 - protein, 9 aa, Homo Sapiens
VEIINEELW

SEQ ID NO: 110340 - protein, 9 aa, Homo Sapiens
VEINIDHKF

SEQ ID NO: 110341 - protein, 9 aa, Homo Sapiens
VELTVVQRF

SEQ ID NO: 110342 - protein, 9 aa, Homo Sapiens
VELVTQQMW

SEQ ID NO: 110343 - protein, 9 aa, Homo Sapiens
VENNLILKM

SEQ ID NO: 110344 - protein, 9 aa, Homo Sapiens
VEQSFFNDW

SEQ ID NO: 110345 - protein, 9 aa, Homo Sapiens
VERPFYDLW

SEQ ID NO: 110346 - protein, 9 aa, Homo Sapiens
WEQGFSQSF

SEQ ID NO: 110347 - protein, 9 aa, Homo Sapiens
YEIDKTLGI

SEQ ID NO: 110348 - protein, 9 aa, Homo Sapiens
YEMEVSQRL

SEQ ID NO: 110349 - protein, 9 aa, Homo Sapiens
YEWSVKLNW

SEQ ID NO: 110350 - protein, 10 aa, Homo Sapiens
AEADEIFQEL

SEQ ID NO: 110351 - protein, 10 aa, Homo Sapiens
AEADKIGLLL

SEQ ID NO: 110352 - protein, 10 aa, Homo Sapiens
AEAEAVREVY

SEQ ID NO: 110353 - protein, 10 aa, Homo Sapiens
AEAEELKPFF

SEQ ID NO: 110354 - protein, 10 aa, Homo Sapiens
AEAESFAIQF

SEQ ID NO: 110355 - protein, 10 aa, Homo Sapiens
AEAGVAVFAW

SEQ ID NO: 110356 - protein, 10 aa, Homo Sapiens
AEAMPFPLNF

SEQ ID NO: 110357 - protein, 10 aa, Homo Sapiens
AEAWLNYPCF

SEQ ID NO: 110358 - protein, 10 aa, Homo Sapiens
AEDFADQFLR

SEQ ID NO: 110359 - protein, 10 aa, Homo Sapiens
AEDGLLFKFL

SEQ ID NO: 110360 - protein, 10 aa, Homo Sapiens
AEDKPYAELW

SEQ ID NO: 110361 - protein, 10 aa, Homo Sapiens
AEDPLGAIHL

SEQ ID NO: 110362 - protein, 10 aa, Homo Sapiens
AEEALKYIGF

SEQ ID NO: 110363 - protein, 10 aa, Homo Sapiens
AEEKAIVQQW

SEQ ID NO: 110364 - protein, 10 aa, Homo Sapiens
AEEKPIEIQW

SEQ ID NO: 110365 - protein, 10 aa, Homo Sapiens
AEELPHIHAF

SEQ ID NO: 110366 - protein, 10 aa, Homo Sapiens
AEESAIRVGF

SEQ ID NO: 110367 - protein, 10 aa, Homo Sapiens
AEFERLVAEF

SEQ ID NO: 110368 - protein, 10 aa, Homo Sapiens
AEFKEAFQLF

SEQ ID NO: 110369 - protein, 10 aa, Homo Sapiens
AEFKEAFSLF

SEQ ID NO: 110370 - protein, 10 aa, Homo Sapiens
AEFLERLHLF

SEQ ID NO: 110371 - protein, 10 aa, Homo Sapiens
AEFSRFFDAW

SEQ ID NO: 110372 - protein, 10 aa, Homo Sapiens
AEGDLYLHFF

SEQ ID NO: 110373 - protein, 10 aa, Homo Sapiens
AEGEVVQVKW

SEQ ID NO: 110374 - protein, 10 aa, Homo Sapiens
AEGEVVQVRW

SEQ ID NO: 110375 - protein, 10 aa, Homo Sapiens
AEGINLIKVF

SEQ ID NO: 110376 - protein, 10 aa, Homo Sapiens
AEGWFEDQVF

SEQ ID NO: 110377 - protein, 10 aa, Homo Sapiens
AEGWIWRWGW

SEQ ID NO: 110378 - protein, 10 aa, Homo Sapiens
AEHPTIKIFW

SEQ ID NO: 110379 - protein, 10 aa, Homo Sapiens
AEIDAHLVAL

SEQ ID NO: 110380 - protein, 10 aa, Homo Sapiens
AEIDARNDSF

SEQ ID NO: 110381 - protein, 10 aa, Homo Sapiens
AEIDFRLVSF

SEQ ID NO: 110382 - protein, 10 aa, Homo Sapiens
AEIDVIFKDF

SEQ ID NO: 110383 - protein, 10 aa, Homo Sapiens
AEIEETYANF

SEQ ID NO: 110384 - protein, 10 aa, Homo Sapiens
AEIEIVKEEF

SEQ ID NO: 110385 - protein, 10 aa, Homo Sapiens
AEIIRFLTNY

SEQ ID NO: 110386 - protein, 10 aa, Homo Sapiens
AEIKELFQYI

SEQ ID NO: 110387 - protein, 10 aa, Homo Sapiens
AEILEVLHSL

SEQ ID NO: 110388 - protein, 10 aa, Homo Sapiens
AEIMRLLDDF

SEQ ID NO: 110389 - protein, 10 aa, Homo Sapiens
AEIPDQLVSY

SEQ ID NO: 110390 - protein, 10 aa, Homo Sapiens
AEIPGLSINF

SEQ ID NO: 110391 - protein, 10 aa, Homo Sapiens
AEIPQQVVGY

SEQ ID NO: 110392 - protein, 10 aa, Homo Sapiens
AEITHEIIGF

SEQ ID NO: 110393 - protein, 10 aa, Homo Sapiens
AEKAPTNIVY

SEQ ID NO: 110394 - protein, 10 aa, Homo Sapiens
AEKLEQVLQW

SEQ ID NO: 110395 - protein, 10 aa, Homo Sapiens
AELAEIQEKW

SEQ ID NO: 110396 - protein, 10 aa, Homo Sapiens
AELAVGSRWY

SEQ ID NO: 110397 - protein, 10 aa, Homo Sapiens
AELGALHSAW

SEQ ID NO: 110398 - protein, 10 aa, Homo Sapiens
AELGGLLKYV

SEQ ID NO: 110399 - protein, 10 aa, Homo Sapiens
AELGTFPRAF

SEQ ID NO: 110400 - protein, 10 aa, Homo Sapiens
AELPKLQVGF

SEQ ID NO: 110401 - protein, 10 aa, Homo Sapiens
AELQEALWHW

SEQ ID NO: 110402 - protein, 10 aa, Homo Sapiens
AELSEQIKSF

SEQ ID NO: 110403 - protein, 10 aa, Homo Sapiens
AELSFEHDAW

SEQ ID NO: 110404 - protein, 10 aa, Homo Sapiens
AELTEEINKW

SEQ ID NO: 110405 - protein, 10 aa, Homo Sapiens
AELTTLLEQW

SEQ ID NO: 110406 - protein, 10 aa, Homo Sapiens
AELYINEHDY

SEQ ID NO: 110407 - protein, 10 aa, Homo Sapiens
AEMAQNAVRL

SEQ ID NO: 110408 - protein, 10 aa, Homo Sapiens
AEMDARTILL

SEQ ID NO: 110409 - protein, 10 aa, Homo Sapiens
AEMGLATQAF

SEQ ID NO: 110410 - protein, 10 aa, Homo Sapiens
AEMLSQLDLF

SEQ ID NO: 110411 - protein, 10 aa, Homo Sapiens
AEMQRFSDLL

SEQ ID NO: 110412 - protein, 10 aa, Homo Sapiens
AENAEFMRNF

SEQ ID NO: 110413 - protein, 10 aa, Homo Sapiens
AENGFLPIHL

SEQ ID NO: 110414 - protein, 10 aa, Homo Sapiens
AENMLEILGF

SEQ ID NO: 110415 - protein, 10 aa, Homo Sapiens
AENNPGKFWF

SEQ ID NO: 110416 - protein, 10 aa, Homo Sapiens
AENPFLTHLI

SEQ ID NO: 110417 - protein, 10 aa, Homo Sapiens
AENPFVVSMF

SEQ ID NO: 110418 - protein, 10 aa, Homo Sapiens
AENQGLVLKF

SEQ ID NO: 110419 - protein, 10 aa, Homo Sapiens
AENSLLAKVF

SEQ ID NO: 110420 - protein, 10 aa, Homo Sapiens
AENSYVETLF

SEQ ID NO: 110421 - protein, 10 aa, Homo Sapiens
AEPDFVVTDF

SEQ ID NO: 110422 - protein, 10 aa, Homo Sapiens
AEPLPSLEYW

SEQ ID NO: 110423 - protein, 10 aa, Homo Sapiens
AEPVNLFQHL

SEQ ID NO: 110424 - protein, 10 aa, Homo Sapiens
AEQDFISKFF

SEQ ID NO: 110425 - protein, 10 aa, Homo Sapiens
AEQDIVIITY

SEQ ID NO: 110426 - protein, 10 aa, Homo Sapiens
AEQKYQSTLW

SEQ ID NO: 110427 - protein, 10 aa, Homo Sapiens
AEQQVPLVLW

SEQ ID NO: 110428 - protein, 10 aa, Homo Sapiens
AEQRIGPLAF

SEQ ID NO: 110429 - protein, 10 aa, Homo Sapiens
AEQTPILLLF

SEQ ID NO: 110430 - protein, 10 aa, Homo Sapiens
AEQYDAFVKF

SEQ ID NO: 110431 - protein, 10 aa, Homo Sapiens
AEQYESFVKF

SEQ ID NO: 110432 - protein, 10 aa, Homo Sapiens
AESFVNVKRW

SEQ ID NO: 110433 - protein, 10 aa, Homo Sapiens
AESGFPVFAW

SEQ ID NO: 110434 - protein, 10 aa, Homo Sapiens
AESLVRNLQW

SEQ ID NO: 110435 - protein, 10 aa, Homo Sapiens
AESQELIYTF

SEQ ID NO: 110436 - protein, 10 aa, Homo Sapiens
AEVDKLELMF

SEQ ID NO: 110437 - protein, 10 aa, Homo Sapiens
AEVKSLIQYF

SEQ ID NO: 110438 - protein, 10 aa, Homo Sapiens
AEVLGLILRY

SEQ ID NO: 110439 - protein, 10 aa, Homo Sapiens
AEVLGQPIVW

SEQ ID NO: 110440 - protein, 10 aa, Homo Sapiens
AEVLIQQGGL

SEQ ID NO: 110441 - protein, 10 aa, Homo Sapiens
AEVLQSTQRF

SEQ ID NO: 110442 - protein, 10 aa, Homo Sapiens
AEVPIIAIDW

SEQ ID NO: 110443 - protein, 10 aa, Homo Sapiens
AEVSLMEVRF

SEQ ID NO: 110444 - protein, 10 aa, Homo Sapiens
AEVTVDFHCW

SEQ ID NO: 110445 - protein, 10 aa, Homo Sapiens
AEWASRFWLW

SEQ ID NO: 110446 - protein, 10 aa, Homo Sapiens
AEWEERISAW

SEQ ID NO: 110447 - protein, 10 aa, Homo Sapiens
AEWQLDQPSW

SEQ ID NO: 110448 - protein, 10 aa, Homo Sapiens
AEYNSDLHQF

SEQ ID NO: 110449 - protein, 10 aa, Homo Sapiens
DEFSHQVQEW

SEQ ID NO: 110450 - protein, 10 aa, Homo Sapiens
DEIERKFDKW

SEQ ID NO: 110451 - protein, 10 aa, Homo Sapiens
DEQTPIHISW

SEQ ID NO: 110452 - protein, 10 aa, Homo Sapiens
DEVIIPHSGW

SEQ ID NO: 110453 - protein, 10 aa, Homo Sapiens
EEALILDNKY

SEQ ID NO: 110454 - protein, 10 aa, Homo Sapiens
EEALKQLAEW

SEQ ID NO: 110455 - protein, 10 aa, Homo Sapiens
EEAPTDLRVF

SEQ ID NO: 110456 - protein, 10 aa, Homo Sapiens
EEATDLLAYW

SEQ ID NO: 110457 - protein, 10 aa, Homo Sapiens
EEDAALFKAW

SEQ ID NO: 110458 - protein, 10 aa, Homo Sapiens
EEDFPSLREY

SEQ ID NO: 110459 - protein, 10 aa, Homo Sapiens
EEDPNTHILY

SEQ ID NO: 110460 - protein, 10 aa, Homo Sapiens
EEDYRTLTNY

SEQ ID NO: 110461 - protein, 10 aa, Homo Sapiens
EEEGNLLRSW

SEQ ID NO: 110462 - protein, 10 aa, Homo Sapiens
EEEKYAFVNW

SEQ ID NO: 110463 - protein, 10 aa, Homo Sapiens
EEFAAALYHF

SEQ ID NO: 110464 - protein, 10 aa, Homo Sapiens
EEFDARWVTY

SEQ ID NO: 110465 - protein, 10 aa, Homo Sapiens
EEFEKLYASY

SEQ ID NO: 110466 - protein, 10 aa, Homo Sapiens
EEFELLGKAY

SEQ ID NO: 110467 - protein, 10 aa, Homo Sapiens
EEFQKELSQW

SEQ ID NO: 110468 - protein, 10 aa, Homo Sapiens
EEGDTLLHLF

SEQ ID NO: 110469 - protein, 10 aa, Homo Sapiens
EEGITFVPRW

SEQ ID NO: 110470 - protein, 10 aa, Homo Sapiens
EEIAMAVTAW

SEQ ID NO: 110471 - protein, 10 aa, Homo Sapiens
EEIAQLARQY

SEQ ID NO: 110472 - protein, 10 aa, Homo Sapiens
EEIDLRSVGW

SEQ ID NO: 110473 - protein, 10 aa, Homo Sapiens
EEIGNLELAW

SEQ ID NO: 110474 - protein, 10 aa, Homo Sapiens
EEIHATGFNY

SEQ ID NO: 110475 - protein, 10 aa, Homo Sapiens
EEIIRGQVFF

SEQ ID NO: 110476 - protein, 10 aa, Homo Sapiens
EEIREAFRVF

SEQ ID NO: 110477 - protein, 10 aa, Homo Sapiens
EEISNMIHSY

SEQ ID NO: 110478 - protein, 10 aa, Homo Sapiens
EEIVTYDRVY

SEQ ID NO: 110479 - protein, 10 aa, Homo Sapiens
EELAENILKW

SEQ ID NO: 110480 - protein, 10 aa, Homo Sapiens
EELASWGHEY

SEQ ID NO: 110481 - protein, 10 aa, Homo Sapiens
EELEQFARTF

SEQ ID NO: 110482 - protein, 10 aa, Homo Sapiens
EELERGIRSW

SEQ ID NO: 110483 - protein, 10 aa, Homo Sapiens
EELFIVSKLW

SEQ ID NO: 110484 - protein, 10 aa, Homo Sapiens
EELFRDGVNW

SEQ ID NO: 110485 - protein, 10 aa, Homo Sapiens
EELGELLQQF

SEQ ID NO: 110486 - protein, 10 aa, Homo Sapiens
EELLGDGHSY

SEQ ID NO: 110487 - protein, 10 aa, Homo Sapiens
EELNDLIQRF

SEQ ID NO: 110488 - protein, 10 aa, Homo Sapiens
EELNKLIQEF

SEQ ID NO: 110489 - protein, 10 aa, Homo Sapiens
EELPGLDSQW

SEQ ID NO: 110490 - protein, 10 aa, Homo Sapiens
EELPLDYHQY

SEQ ID NO: 110491 - protein, 10 aa, Homo Sapiens
EELPTMMQHF

SEQ ID NO: 110492 - protein, 10 aa, Homo Sapiens
EELQRQFHLF

SEQ ID NO: 110493 - protein, 10 aa, Homo Sapiens
EEMDFERGIW

SEQ ID NO: 110494 - protein, 10 aa, Homo Sapiens
EEMDLKVLQF

SEQ ID NO: 110495 - protein, 10 aa, Homo Sapiens
EEMEAFPEKF

SEQ ID NO: 110496 - protein, 10 aa, Homo Sapiens
EEMGDYIRSY

SEQ ID NO: 110497 - protein, 10 aa, Homo Sapiens
EEMMELREAF

SEQ ID NO: 110498 - protein, 10 aa, Homo Sapiens
EEMSVPLKEL

SEQ ID NO: 110499 - protein, 10 aa, Homo Sapiens
EENPSLNIQF

SEQ ID NO: 110500 - protein, 10 aa, Homo Sapiens
EENQELVTRW

SEQ ID NO: 110501 - protein, 10 aa, Homo Sapiens
EEQIKDIFYI

SEQ ID NO: 110502 - protein, 10 aa, Homo Sapiens
EEQILDHLAW

SEQ ID NO: 110503 - protein, 10 aa, Homo Sapiens
EEQPKNYQVW

SEQ ID NO: 110504 - protein, 10 aa, Homo Sapiens
EEQPQGWVSW

SEQ ID NO: 110505 - protein, 10 aa, Homo Sapiens
EEQQDILSKF

SEQ ID NO: 110506 - protein, 10 aa, Homo Sapiens
EEQRLVQQAF

SEQ ID NO: 110507 - protein, 10 aa, Homo Sapiens
EERAALLELW

SEQ ID NO: 110508 - protein, 10 aa, Homo Sapiens
EETQTLVREY

SEQ ID NO: 110509 - protein, 10 aa, Homo Sapiens
EETQVILREY

SEQ ID NO: 110510 - protein, 10 aa, Homo Sapiens
EEVAELFQRL

SEQ ID NO: 110511 - protein, 10 aa, Homo Sapiens
EEVFLIGKNF

SEQ ID NO: 110512 - protein, 10 aa, Homo Sapiens
EEVHDLERKY

SEQ ID NO: 110513 - protein, 10 aa, Homo Sapiens
EEVLAVFKSY

SEQ ID NO: 110514 - protein, 10 aa, Homo Sapiens
EEVLIPDQKY

SEQ ID NO: 110515 - protein, 10 aa, Homo Sapiens
EEVVSVLHVF

SEQ ID NO: 110516 - protein, 10 aa, Homo Sapiens
EEWGKLIYQW

SEQ ID NO: 110517 - protein, 10 aa, Homo Sapiens
EEYLKVDAQF

SEQ ID NO: 110518 - protein, 10 aa, Homo Sapiens
EEYLRLVIFW

SEQ ID NO: 110519 - protein, 10 aa, Homo Sapiens
FEAPNFFQKY

SEQ ID NO: 110520 - protein, 10 aa, Homo Sapiens
FEIEELNRKY

SEQ ID NO: 110521 - protein, 10 aa, Homo Sapiens
FEQLLSGAHW

SEQ ID NO: 110522 - protein, 10 aa, Homo Sapiens
GEIWLAIHHF

SEQ ID NO: 110523 - protein, 10 aa, Homo Sapiens
GELERAFSYY

SEQ ID NO: 110524 - protein, 10 aa, Homo Sapiens
GELLGEARYY

SEQ ID NO: 110525 - protein, 10 aa, Homo Sapiens
GEPPGFLHSW

SEQ ID NO: 110526 - protein, 10 aa, Homo Sapiens
GEQDQAVHLW

SEQ ID NO: 110527 - protein, 10 aa, Homo Sapiens
GESSFTYRAY

SEQ ID NO: 110528 - protein, 10 aa, Homo Sapiens
GEVPTLRQLW

SEQ ID NO: 110529 - protein, 10 aa, Homo Sapiens
GEWIRQNGGW

SEQ ID NO: 110530 - protein, 10 aa, Homo Sapiens
HEEPESFFTW

SEQ ID NO: 110531 - protein, 10 aa, Homo Sapiens
HEGPVWQVAW

SEQ ID NO: 110532 - protein, 10 aa, Homo Sapiens
HEINGLLVGF

SEQ ID NO: 110533 - protein, 10 aa, Homo Sapiens
HELWPGVPYW

SEQ ID NO: 110534 - protein, 10 aa, Homo Sapiens
HEQEAILHNF

SEQ ID NO: 110535 - protein, 10 aa, Homo Sapiens
IEDPQIQAHW

SEQ ID NO: 110536 - protein, 10 aa, Homo Sapiens
IELEETIKVW

SEQ ID NO: 110537 - protein, 10 aa, Homo Sapiens
IEMPNISYAW

SEQ ID NO: 110538 - protein, 10 aa, Homo Sapiens
IENEVVQITW

SEQ ID NO: 110539 - protein, 10 aa, Homo Sapiens
IEVTPGDRSW

SEQ ID NO: 110540 - protein, 10 aa, Homo Sapiens
KEFEDGIINW

SEQ ID NO: 110541 - protein, 10 aa, Homo Sapiens
KEFTGIDNLW

SEQ ID NO: 110542 - protein, 10 aa, Homo Sapiens
KEGDLPPLWW

SEQ ID NO: 110543 - protein, 10 aa, Homo Sapiens
KEIDMLLKEY

SEQ ID NO: 110544 - protein, 10 aa, Homo Sapiens
KEINTQILFW

SEQ ID NO: 110545 - protein, 10 aa, Homo Sapiens
KELDSPFRLY

SEQ ID NO: 110546 - protein, 10 aa, Homo Sapiens
KELFEGVQKW

SEQ ID NO: 110547 - protein, 10 aa, Homo Sapiens
KENAAYFQFF

SEQ ID NO: 110548 - protein, 10 aa, Homo Sapiens
KENGADIFLY

SEQ ID NO: 110549 - protein, 10 aa, Homo Sapiens
KENSDVIALW

SEQ ID NO: 110550 - protein, 10 aa, Homo Sapiens
KEPLTIVKLW

SEQ ID NO: 110551 - protein, 10 aa, Homo Sapiens
KEYEGEAILW

SEQ ID NO: 110552 - protein, 10 aa, Homo Sapiens
LEAHETFNEW

SEQ ID NO: 110553 - protein, 10 aa, Homo Sapiens
LEELYTKKLW

SEQ ID NO: 110554 - protein, 10 aa, Homo Sapiens
LEIEAENHYW

SEQ ID NO: 110555 - protein, 10 aa, Homo Sapiens
LEINDVTRAW

SEQ ID NO: 110556 - protein, 10 aa, Homo Sapiens
LENDKTIKLW

SEQ ID NO: 110557 - protein, 10 aa, Homo Sapiens
LEPEELYQTF

SEQ ID NO: 110558 - protein, 10 aa, Homo Sapiens
LESFIDTQKF

SEQ ID NO: 110559 - protein, 10 aa, Homo Sapiens
MEATYINHNF

SEQ ID NO: 110560 - protein, 10 aa, Homo Sapiens
MEFLFNKTGW

SEQ ID NO: 110561 - protein, 10 aa, Homo Sapiens
MEIDIPHVWL

SEQ ID NO: 110562 - protein, 10 aa, Homo Sapiens
MEITEELRQY

SEQ ID NO: 110563 - protein, 10 aa, Homo Sapiens
MELDEALRKF

SEQ ID NO: 110564 - protein, 10 aa, Homo Sapiens
MELQQLISVW

SEQ ID NO: 110565 - protein, 10 aa, Homo Sapiens
MEPQWVPISW

SEQ ID NO: 110566 - protein, 10 aa, Homo Sapiens
MEPSTAARAW

SEQ ID NO: 110567 - protein, 10 aa, Homo Sapiens
MEQFPHLAFW

SEQ ID NO: 110568 - protein, 10 aa, Homo Sapiens
MEQNTEGVKW

SEQ ID NO: 110569 - protein, 10 aa, Homo Sapiens
MEQSPLPMLL

SEQ ID NO: 110570 - protein, 10 aa, Homo Sapiens
MEVEVDGQKF

SEQ ID NO: 110571 - protein, 10 aa, Homo Sapiens
MEWQPEEQAW

SEQ ID NO: 110572 - protein, 10 aa, Homo Sapiens
NEASGLYQMF

SEQ ID NO: 110573 - protein, 10 aa, Homo Sapiens
NEATMVLVSW

SEQ ID NO: 110574 - protein, 10 aa, Homo Sapiens
NEAVKIIHDF

SEQ ID NO: 110575 - protein, 10 aa, Homo Sapiens
NEDNGIIKAF

SEQ ID NO: 110576 - protein, 10 aa, Homo Sapiens
NEDPQLKSLW

SEQ ID NO: 110577 - protein, 10 aa, Homo Sapiens
NEFGLTSLRW

SEQ ID NO: 110578 - protein, 10 aa, Homo Sapiens
NEIEDTFRQF

SEQ ID NO: 110579 - protein, 10 aa, Homo Sapiens
NEILDFFHGY

SEQ ID NO: 110580 - protein, 10 aa, Homo Sapiens
NEILDLCHSF

SEQ ID NO: 110581 - protein, 10 aa, Homo Sapiens
NELDAVQREY

SEQ ID NO: 110582 - protein, 10 aa, Homo Sapiens
NEMQPNGKVF

SEQ ID NO: 110583 - protein, 10 aa, Homo Sapiens
NEPILYGRSY

SEQ ID NO: 110584 - protein, 10 aa, Homo Sapiens
NEQPNRVEIY

SEQ ID NO: 110585 - protein, 10 aa, Homo Sapiens
NERDLLGTVW

SEQ ID NO: 110586 - protein, 10 aa, Homo Sapiens
QEAIDIYKRI

SEQ ID NO: 110587 - protein, 10 aa, Homo Sapiens
QEAIQDLWQW

SEQ ID NO: 110588 - protein, 10 aa, Homo Sapiens
QEALNLFKSI

SEQ ID NO: 110589 - protein, 10 aa, Homo Sapiens
QEARNIYQEF

SEQ ID NO: 110590 - protein, 10 aa, Homo Sapiens
QEDFGIFQAW

SEQ ID NO: 110591 - protein, 10 aa, Homo Sapiens
QEEAVLAAYW

SEQ ID NO: 110592 - protein, 10 aa, Homo Sapiens
QEELARSFFW

SEQ ID NO: 110593 - protein, 10 aa, Homo Sapiens
QEFDSGLLHW

SEQ ID NO: 110594 - protein, 10 aa, Homo Sapiens
QEFERNLARF

SEQ ID NO: 110595 - protein, 10 aa, Homo Sapiens
QEFVRALAAF

SEQ ID NO: 110596 - protein, 10 aa, Homo Sapiens
QEHILRFASW

SEQ ID NO: 110597 - protein, 10 aa, Homo Sapiens
QEIDILRTLY

SEQ ID NO: 110598 - protein, 10 aa, Homo Sapiens
QEISDETRVF

SEQ ID NO: 110599 - protein, 10 aa, Homo Sapiens
QEISSLVKYF

SEQ ID NO: 110600 - protein, 10 aa, Homo Sapiens
QEITDETRIF

SEQ ID NO: 110601 - protein, 10 aa, Homo Sapiens
QELASLLRTY

SEQ ID NO: 110602 - protein, 10 aa, Homo Sapiens
QELFPSPELW

SEQ ID NO: 110603 - protein, 10 aa, Homo Sapiens
QELLTIAERW

SEQ ID NO: 110604 - protein, 10 aa, Homo Sapiens
QELNDRFANY

SEQ ID NO: 110605 - protein, 10 aa, Homo Sapiens
QELNKILRSW

SEQ ID NO: 110606 - protein, 10 aa, Homo Sapiens
QELQEINRVY

SEQ ID NO: 110607 - protein, 10 aa, Homo Sapiens
QENEHIYNLW

SEQ ID NO: 110608 - protein, 10 aa, Homo Sapiens
QENHATLVSF

SEQ ID NO: 110609 - protein, 10 aa, Homo Sapiens
QENLTDLHQY

SEQ ID NO: 110610 - protein, 10 aa, Homo Sapiens
QEPKALVSEW

SEQ ID NO: 110611 - protein, 10 aa, Homo Sapiens
QEQEIEQRLL

SEQ ID NO: 110612 - protein, 10 aa, Homo Sapiens
QEQNIKPQFF

SEQ ID NO: 110613 - protein, 10 aa, Homo Sapiens
QESLRIQAQF

SEQ ID NO: 110614 - protein, 10 aa, Homo Sapiens
QEYFIPNKEF

SEQ ID NO: 110615 - protein, 10 aa, Homo Sapiens
QEYPDLIHIY

SEQ ID NO: 110616 - protein, 10 aa, Homo Sapiens
READRLLSLW

SEQ ID NO: 110617 - protein, 10 aa, Homo Sapiens
REFPDRLVGY

SEQ ID NO: 110618 - protein, 10 aa, Homo Sapiens
REHDIAIKFF

SEQ ID NO: 110619 - protein, 10 aa, Homo Sapiens
RELDAVEVFF

SEQ ID NO: 110620 - protein, 10 aa, Homo Sapiens
RELPEPLLTF

SEQ ID NO: 110621 - protein, 10 aa, Homo Sapiens
RELSAPARLY

SEQ ID NO: 110622 - protein, 10 aa, Homo Sapiens
RENYDIIKTY

SEQ ID NO: 110623 - protein, 10 aa, Homo Sapiens
REQEAGLLQF

SEQ ID NO: 110624 - protein, 10 aa, Homo Sapiens
REQEYYLVKW

SEQ ID NO: 110625 - protein, 10 aa, Homo Sapiens
RESDQLFKQY

SEQ ID NO: 110626 - protein, 10 aa, Homo Sapiens
REVSVPTFSW

SEQ ID NO: 110627 - protein, 10 aa, Homo Sapiens
SDTSDIVHIW

SEQ ID NO: 110628 - protein, 10 aa, Homo Sapiens
SEAFVQRLLW

SEQ ID NO: 110629 - protein, 10 aa, Homo Sapiens
SEALALTQTW

SEQ ID NO: 110630 - protein, 10 aa, Homo Sapiens
SEEAEIIRKY

SEQ ID NO: 110631 - protein, 10 aa, Homo Sapiens
SEELISEGKW

SEQ ID NO: 110632 - protein, 10 aa, Homo Sapiens
SEELPLASSW

SEQ ID NO: 110633 - protein, 10 aa, Homo Sapiens
SEEPLGRQLW

SEQ ID NO: 110634 - protein, 10 aa, Homo Sapiens
SEFIDSQRVW

SEQ ID NO: 110635 - protein, 10 aa, Homo Sapiens
SEFNFSSKTY

SEQ ID NO: 110636 - protein, 10 aa, Homo Sapiens
SEFVIPSVYW

SEQ ID NO: 110637 - protein, 10 aa, Homo Sapiens
SEGEDLIRFF

SEQ ID NO: 110638 - protein, 10 aa, Homo Sapiens
SEGELVELRW

SEQ ID NO: 110639 - protein, 10 aa, Homo Sapiens
SEGSFLLTTF

SEQ ID NO: 110640 - protein, 10 aa, Homo Sapiens
SEIADPTRFF

SEQ ID NO: 110641 - protein, 10 aa, Homo Sapiens
SEIDQINKVF

SEQ ID NO: 110642 - protein, 10 aa, Homo Sapiens
SEIDQLFRIF

SEQ ID NO: 110643 - protein, 10 aa, Homo Sapiens
SEIFQYTVVW

SEQ ID NO: 110644 - protein, 10 aa, Homo Sapiens
SEIGGITIAW

SEQ ID NO: 110645 - protein, 10 aa, Homo Sapiens
SEILRTLTVW

SEQ ID NO: 110646 - protein, 10 aa, Homo Sapiens
SEIPSDPKLF

SEQ ID NO: 110647 - protein, 10 aa, Homo Sapiens
SEIVWSIKSF

SEQ ID NO: 110648 - protein, 10 aa, Homo Sapiens
SEIYIHGLGL

SEQ ID NO: 110649 - protein, 10 aa, Homo Sapiens
SELATEVHFY

SEQ ID NO: 110650 - protein, 10 aa, Homo Sapiens
SELDNVTFSF

SEQ ID NO: 110651 - protein, 10 aa, Homo Sapiens
SELDQIQRYF

SEQ ID NO: 110652 - protein, 10 aa, Homo Sapiens
SELDRINAQY

SEQ ID NO: 110653 - protein, 10 aa, Homo Sapiens
SELKDFFQSY

SEQ ID NO: 110654 - protein, 10 aa, Homo Sapiens
SELLGLLKTY

SEQ ID NO: 110655 - protein, 10 aa, Homo Sapiens
SELNPNAEVW

SEQ ID NO: 110656 - protein, 10 aa, Homo Sapiens
SENFGSIHVY

SEQ ID NO: 110657 - protein, 10 aa, Homo Sapiens
SENITQKVVW

SEQ ID NO: 110658 - protein, 10 aa, Homo Sapiens
SENKIVGIGY

SEQ ID NO: 110659 - protein, 10 aa, Homo Sapiens
SENPLPTVEI

SEQ ID NO: 110660 - protein, 10 aa, Homo Sapiens
SENPNEVFRF

SEQ ID NO: 110661 - protein, 10 aa, Homo Sapiens
SENPSDVFRF

SEQ ID NO: 110662 - protein, 10 aa, Homo Sapiens
SENYITYKNF

SEQ ID NO: 110663 - protein, 10 aa, Homo Sapiens
SEPDFVAKFY

SEQ ID NO: 110664 - protein, 10 aa, Homo Sapiens
SEPDNLVITW

SEQ ID NO: 110665 - protein, 10 aa, Homo Sapiens
SEPVGIYQGF

SEQ ID NO: 110666 - protein, 10 aa, Homo Sapiens
SEQPFLLVTY

SEQ ID NO: 110667 - protein, 10 aa, Homo Sapiens
SESIIEVLRF

SEQ ID NO: 110668 - protein, 10 aa, Homo Sapiens
SESTNQRVLW

SEQ ID NO: 110669 - protein, 10 aa, Homo Sapiens
TEAFLADAKW

SEQ ID NO: 110670 - protein, 10 aa, Homo Sapiens
TEEFNREMFW

SEQ ID NO: 110671 - protein, 10 aa, Homo Sapiens
TEIERLITWY

SEQ ID NO: 110672 - protein, 10 aa, Homo Sapiens
TEIMPGINNW

SEQ ID NO: 110673 - protein, 10 aa, Homo Sapiens
TEITDDLHFY

SEQ ID NO: 110674 - protein, 10 aa, Homo Sapiens
TELELKWQHW

SEQ ID NO: 110675 - protein, 10 aa, Homo Sapiens
TELERAFGYY

SEQ ID NO: 110676 - protein, 10 aa, Homo Sapiens
TELGPEEVRW

SEQ ID NO: 110677 - protein, 10 aa, Homo Sapiens
TELLGYLQVF

SEQ ID NO: 110678 - protein, 10 aa, Homo Sapiens
TELQPVKTFW

SEQ ID NO: 110679 - protein, 10 aa, Homo Sapiens
TEMNGKNTFW

SEQ ID NO: 110680 - protein, 10 aa, Homo Sapiens
TEMWPVYVEL

SEQ ID NO: 110681 - protein, 10 aa, Homo Sapiens
TENDHVLLFW

SEQ ID NO: 110682 - protein, 10 aa, Homo Sapiens
TEVSLLRVGW

SEQ ID NO: 110683 - protein, 10 aa, Homo Sapiens
TEWVGATTDW

SEQ ID NO: 110684 - protein, 10 aa, Homo Sapiens
VEFFRVVSEY

SEQ ID NO: 110685 - protein, 10 aa, Homo Sapiens
VEQESLLTAF

SEQ ID NO: 110686 - protein, 10 aa, Homo Sapiens
VEQPTGSVLW

SEQ ID NO: 110687 - protein, 10 aa, Homo Sapiens
YEFDFSKVYW

SEQ ID NO: 110688 - protein, 10 aa, Homo Sapiens
YEILATHPTW

SEQ ID NO: 110689 - protein, 10 aa, Homo Sapiens
YEVEIDGKTY

SEQ ID NO: 110690 - protein, 11 aa, Homo Sapiens
AEAFEAIPRAL

SEQ ID NO: 110691 - protein, 11 aa, Homo Sapiens
AEALAAAQQHF

SEQ ID NO: 110692 - protein, 11 aa, Homo Sapiens
AEALGVPYEQW

SEQ ID NO: 110693 - protein, 11 aa, Homo Sapiens
AEALLSDLHAF

SEQ ID NO: 110694 - protein, 11 aa, Homo Sapiens
AEALPRPNWEL

SEQ ID NO: 110695 - protein, 11 aa, Homo Sapiens
AEALRLPYEQW

SEQ ID NO: 110696 - protein, 11 aa, Homo Sapiens
AEALSRGWALW

SEQ ID NO: 110697 - protein, 11 aa, Homo Sapiens
AEAQLRFIQAW

SEQ ID NO: 110698 - protein, 11 aa, Homo Sapiens
AEASALYGRAL

SEQ ID NO: 110699 - protein, 11 aa, Homo Sapiens
AEDEELVLHLL

SEQ ID NO: 110700 - protein, 11 aa, Homo Sapiens
AEDKENYKKFY

SEQ ID NO: 110701 - protein, 11 aa, Homo Sapiens
AEDLNSRVSYW

SEQ ID NO: 110702 - protein, 11 aa, Homo Sapiens
AEDLNTRVAYW

SEQ ID NO: 110703 - protein, 11 aa, Homo Sapiens
AEDPACIPIFW

SEQ ID NO: 110704 - protein, 11 aa, Homo Sapiens
AEDPNLNQPVW

SEQ ID NO: 110705 - protein, 11 aa, Homo Sapiens
AEEEIGTPRKF

SEQ ID NO: 110706 - protein, 11 aa, Homo Sapiens
AEFFQMESQKF

SEQ ID NO: 110707 - protein, 11 aa, Homo Sapiens
AEFQRTDLGAW

SEQ ID NO: 110708 - protein, 11 aa, Homo Sapiens
AEGDTGLPRVW

SEQ ID NO: 110709 - protein, 11 aa, Homo Sapiens
AEGIHTGQFVY

SEQ ID NO: 110710 - protein, 11 aa, Homo Sapiens
AEGKVIGLQIF

SEQ ID NO: 110711 - protein, 11 aa, Homo Sapiens
AEGLPTPIIYW

SEQ ID NO: 110712 - protein, 11 aa, Homo Sapiens
AEHIAQGLRLY

SEQ ID NO: 110713 - protein, 11 aa, Homo Sapiens
AEIAAQRTINW

SEQ ID NO: 110714 - protein, 11 aa, Homo Sapiens
AEINENNVREF

SEQ ID NO: 110715 - protein, 11 aa, Homo Sapiens
AEIPQQVVGYF

SEQ ID NO: 110716 - protein, 11 aa, Homo Sapiens
AEIQDGRFNLF

SEQ ID NO: 110717 - protein, 11 aa, Homo Sapiens
AEIQNVEGQNL

SEQ ID NO: 110718 - protein, 11 aa, Homo Sapiens
AEIVEGENHTY

SEQ ID NO: 110719 - protein, 11 aa, Homo Sapiens
AEKDLFISDFW

SEQ ID NO: 110720 - protein, 11 aa, Homo Sapiens
AEKGDGAELIW

SEQ ID NO: 110721 - protein, 11 aa, Homo Sapiens
AELDPHILAVF

SEQ ID NO: 110722 - protein, 11 aa, Homo Sapiens
AELDPSIAVGF

SEQ ID NO: 110723 - protein, 11 aa, Homo Sapiens
AELEADLPRSW

SEQ ID NO: 110724 - protein, 11 aa, Homo Sapiens
AELEPDQLLAW

SEQ ID NO: 110725 - protein, 11 aa, Homo Sapiens
AELFLDTVSTF

SEQ ID NO: 110726 - protein, 11 aa, Homo Sapiens
AELLNSKLPRW

SEQ ID NO: 110727 - protein, 11 aa, Homo Sapiens
AELLQKVITLY

SEQ ID NO: 110728 - protein, 11 aa, Homo Sapiens
AELRYDLPASY

SEQ ID NO: 110729 - protein, 11 aa, Homo Sapiens
AEMDERFQQIL

SEQ ID NO: 110730 - protein, 11 aa, Homo Sapiens
AEMNGVFDTTF

SEQ ID NO: 110731 - protein, 11 aa, Homo Sapiens
AEMPDSAAALL

SEQ ID NO: 110732 - protein, 11 aa, Homo Sapiens
AEMTGYVVTRW

SEQ ID NO: 110733 - protein, 11 aa, Homo Sapiens
AENGFLPIHLL

SEQ ID NO: 110734 - protein, 11 aa, Homo Sapiens
AEPLPSNILEW

SEQ ID NO: 110735 - protein, 11 aa, Homo Sapiens
AEQAAQLSRLL

SEQ ID NO: 110736 - protein, 11 aa, Homo Sapiens
AEQDVVVQETF

SEQ ID NO: 110737 - protein, 11 aa, Homo Sapiens
AEQELANLEKW

SEQ ID NO: 110738 - protein, 11 aa, Homo Sapiens
AEQLQEIIARL

SEQ ID NO: 110739 - protein, 11 aa, Homo Sapiens
AEQMFQGIILF

SEQ ID NO: 110740 - protein, 11 aa, Homo Sapiens
AEQQITEVFVL

SEQ ID NO: 110741 - protein, 11 aa, Homo Sapiens
AEQTLNNIKQF

SEQ ID NO: 110742 - protein, 11 aa, Homo Sapiens
AESSPDPQALW

SEQ ID NO: 110743 - protein, 11 aa, Homo Sapiens
AESSPFVERLL

SEQ ID NO: 110744 - protein, 11 aa, Homo Sapiens
AEVDLERVRVW

SEQ ID NO: 110745 - protein, 11 aa, Homo Sapiens
AEVFPLKVFGY

SEQ ID NO: 110746 - protein, 11 aa, Homo Sapiens
AEVGLNALEEW

SEQ ID NO: 110747 - protein, 11 aa, Homo Sapiens
AEYHYLEAQEW

SEQ ID NO: 110748 - protein, 11 aa, Homo Sapiens
AEYPFSSEQKW

SEQ ID NO: 110749 - protein, 11 aa, Homo Sapiens
DELEIIEGMKF

SEQ ID NO: 110750 - protein, 11 aa, Homo Sapiens
DEMTGYVATRW

SEQ ID NO: 110751 - protein, 11 aa, Homo Sapiens
EEADQLRALGW

SEQ ID NO: 110752 - protein, 11 aa, Homo Sapiens
EEALQTIFNRW

SEQ ID NO: 110753 - protein, 11 aa, Homo Sapiens
EEALRDLLAGW

SEQ ID NO: 110754 - protein, 11 aa, Homo Sapiens
EEANPFSFREF

SEQ ID NO: 110755 - protein, 11 aa, Homo Sapiens
EEAQFETKKLY

SEQ ID NO: 110756 - protein, 11 aa, Homo Sapiens
EEASFDGTFLW

SEQ ID NO: 110757 - protein, 11 aa, Homo Sapiens
EEAVTSIQQLF

SEQ ID NO: 110758 - protein, 11 aa, Homo Sapiens
EEAYNAVVRYF

SEQ ID NO: 110759 - protein, 11 aa, Homo Sapiens
EEEPPPVKIAW

SEQ ID NO: 110760 - protein, 11 aa, Homo Sapiens
EEIAIIPSKKL

SEQ ID NO: 110761 - protein, 11 aa, Homo Sapiens
EEIARDFNPNW

SEQ ID NO: 110762 - protein, 11 aa, Homo Sapiens
EEIDTSRLFEW

SEQ ID NO: 110763 - protein, 11 aa, Homo Sapiens
EEIEELLRSQW

SEQ ID NO: 110764 - protein, 11 aa, Homo Sapiens
EEIIDAIRQEL

SEQ ID NO: 110765 - protein, 11 aa, Homo Sapiens
EEIKQIWQQYF

SEQ ID NO: 110766 - protein, 11 aa, Homo Sapiens
EEINKIIRDLW

SEQ ID NO: 110767 - protein, 11 aa, Homo Sapiens
EEIPNLENSNF

SEQ ID NO: 110768 - protein, 11 aa, Homo Sapiens
EEIQEEAERMF

SEQ ID NO: 110769 - protein, 11 aa, Homo Sapiens
EEIYPPEVAEF

SEQ ID NO: 110770 - protein, 11 aa, Homo Sapiens
EEIYPPKLHQF

SEQ ID NO: 110771 - protein, 11 aa, Homo Sapiens
EELDPESREYW

SEQ ID NO: 110772 - protein, 11 aa, Homo Sapiens
EELKETIKKLL

SEQ ID NO: 110773 - protein, 11 aa, Homo Sapiens
EELTIDHVPIW

SEQ ID NO: 110774 - protein, 11 aa, Homo Sapiens
EELTLEGIKQF

SEQ ID NO: 110775 - protein, 11 aa, Homo Sapiens
EELTLEGIRQF

SEQ ID NO: 110776 - protein, 11 aa, Homo Sapiens
EELTVQVARVY

SEQ ID NO: 110777 - protein, 11 aa, Homo Sapiens
EEMPLNVADLI

SEQ ID NO: 110778 - protein, 11 aa, Homo Sapiens
EENDLGLFGYW

SEQ ID NO: 110779 - protein, 11 aa, Homo Sapiens
EENSAIIIQSW

SEQ ID NO: 110780 - protein, 11 aa, Homo Sapiens
EEQLPLGKASF

SEQ ID NO: 110781 - protein, 11 aa, Homo Sapiens
EESLLSLIRNW

SEQ ID NO: 110782 - protein, 11 aa, Homo Sapiens
EETHTNEFITW

SEQ ID NO: 110783 - protein, 11 aa, Homo Sapiens
EETPLTAAQLF

SEQ ID NO: 110784 - protein, 11 aa, Homo Sapiens
EEVFETIIHSY

SEQ ID NO: 110785 - protein, 11 aa, Homo Sapiens
EEVPTQESVKW

SEQ ID NO: 110786 - protein, 11 aa, Homo Sapiens
EEVTQEFTQYW

SEQ ID NO: 110787 - protein, 11 aa, Homo Sapiens
FEVYDPLSKRW

SEQ ID NO: 110788 - protein, 11 aa, Homo Sapiens
FHGEIEDLQQW

SEQ ID NO: 110789 - protein, 11 aa, Homo Sapiens
FVAPFPEVFGK

SEQ ID NO: 110790 - protein, 11 aa, Homo Sapiens
GEALPFIQRVY

SEQ ID NO: 110791 - protein, 11 aa, Homo Sapiens
GEIDLAKLKKF

SEQ ID NO: 110792 - protein, 11 aa, Homo Sapiens
GEIDYEAIVKL

SEQ ID NO: 110793 - protein, 11 aa, Homo Sapiens
GELDQRALQLF

SEQ ID NO: 110794 - protein, 11 aa, Homo Sapiens
GEWASGGVRSF

SEQ ID NO: 110795 - protein, 11 aa, Homo Sapiens
HEGLPGLAVQW

SEQ ID NO: 110796 - protein, 11 aa, Homo Sapiens
HELWPGVPYWW

SEQ ID NO: 110797 - protein, 11 aa, Homo Sapiens
HEQDLGPALEW

SEQ ID NO: 110798 - protein, 11 aa, Homo Sapiens
HEQVLDLGLTW

SEQ ID NO: 110799 - protein, 11 aa, Homo Sapiens
IEISELPVRTW

SEQ ID NO: 110800 - protein, 11 aa, Homo Sapiens
IGGTDTLEGGW

SEQ ID NO: 110801 - protein, 11 aa, Homo Sapiens
KEKYPDLANFW

SEQ ID NO: 110802 - protein, 11 aa, Homo Sapiens
KELLYVPLIGW

SEQ ID NO: 110803 - protein, 11 aa, Homo Sapiens
KEMDLSVETLF

SEQ ID NO: 110804 - protein, 11 aa, Homo Sapiens
KEPAESSFRFW

SEQ ID NO: 110805 - protein, 11 aa, Homo Sapiens
KESSIIGVTLF

SEQ ID NO: 110806 - protein, 11 aa, Homo Sapiens
LEEEGNLLRSW

SEQ ID NO: 110807 - protein, 11 aa, Homo Sapiens
LEHVPNSVRLW

SEQ ID NO: 110808 - protein, 11 aa, Homo Sapiens
LEILDDTVQRF

SEQ ID NO: 110809 - protein, 11 aa, Homo Sapiens
LEISAEDAERW

SEQ ID NO: 110810 - protein, 11 aa, Homo Sapiens
LELETDENRIY

SEQ ID NO: 110811 - protein, 11 aa, Homo Sapiens
LEQDPEGLHLW

SEQ ID NO: 110812 - protein, 11 aa, Homo Sapiens
MEIDIPHVWLY

SEQ ID NO: 110813 - protein, 11 aa, Homo Sapiens
MEITEELRQYF

SEQ ID NO: 110814 - protein, 11 aa, Homo Sapiens
MELSAVGERVF

SEQ ID NO: 110815 - protein, 11 aa, Homo Sapiens
NEDYPVEIHEY

SEQ ID NO: 110816 - protein, 11 aa, Homo Sapiens
NEIEDTFRQFL

SEQ ID NO: 110817 - protein, 11 aa, Homo Sapiens
NEILPNWETMW

SEQ ID NO: 110818 - protein, 11 aa, Homo Sapiens
NEIQEALSRSY

SEQ ID NO: 110819 - protein, 11 aa, Homo Sapiens
NEISERVVQHF

SEQ ID NO: 110820 - protein, 11 aa, Homo Sapiens
PPSKQILALKQ

SEQ ID NO: 110821 - protein, 11 aa, Homo Sapiens
QEAASLLGKKY

SEQ ID NO: 110822 - protein, 11 aa, Homo Sapiens
QEALNLFKSIW

SEQ ID NO: 110823 - protein, 11 aa, Homo Sapiens
QEAPLSLAEGW

SEQ ID NO: 110824 - protein, 11 aa, Homo Sapiens
QEATADVEWRW

SEQ ID NO: 110825 - protein, 11 aa, Homo Sapiens
QEDAARLQAAY

SEQ ID NO: 110826 - protein, 11 aa, Homo Sapiens
QEFEEKSGRTF

SEQ ID NO: 110827 - protein, 11 aa, Homo Sapiens
QEFLTDMKQVF

SEQ ID NO: 110828 - protein, 11 aa, Homo Sapiens
QEFQPSIAKKY

SEQ ID NO: 110829 - protein, 11 aa, Homo Sapiens
QEGLIPGSQFW

SEQ ID NO: 110830 - protein, 11 aa, Homo Sapiens
QEIGVLDQREY

SEQ ID NO: 110831 - protein, 11 aa, Homo Sapiens
QEIYGGSDSRF

SEQ ID NO: 110832 - protein, 11 aa, Homo Sapiens
QELEAGVGGRF

SEQ ID NO: 110833 - protein, 11 aa, Homo Sapiens
QELKLIGEYGL

SEQ ID NO: 110834 - protein, 11 aa, Homo Sapiens
QELPGLSHQYW

SEQ ID NO: 110835 - protein, 11 aa, Homo Sapiens
QEMFPQVPYHL

SEQ ID NO: 110836 - protein, 11 aa, Homo Sapiens
QENHFVEGLLY

SEQ ID NO: 110837 - protein, 11 aa, Homo Sapiens
QEPLYPALRLW

SEQ ID NO: 110838 - protein, 11 aa, Homo Sapiens
QEQEALVNRLW

SEQ ID NO: 110839 - protein, 11 aa, Homo Sapiens
QEQLPDLHSHF

SEQ ID NO: 110840 - protein, 11 aa, Homo Sapiens
QEQQALGVEAW

SEQ ID NO: 110841 - protein, 11 aa, Homo Sapiens
QESLPPVQFDW

SEQ ID NO: 110842 - protein, 11 aa, Homo Sapiens
QEVDASIFKAW

SEQ ID NO: 110843 - protein, 11 aa, Homo Sapiens
QEVNFQEYVTF

SEQ ID NO: 110844 - protein, 11 aa, Homo Sapiens
QEWDEFPNGRW

SEQ ID NO: 110845 - protein, 11 aa, Homo Sapiens
READLDFARQY

SEQ ID NO: 110846 - protein, 11 aa, Homo Sapiens
REAVTHIGRVY

SEQ ID NO: 110847 - protein, 11 aa, Homo Sapiens
REEDAALFKAW

SEQ ID NO: 110848 - protein, 11 aa, Homo Sapiens
REIENLPLRLF

SEQ ID NO: 110849 - protein, 11 aa, Homo Sapiens
REIQDAYLQLF

SEQ ID NO: 110850 - protein, 11 aa, Homo Sapiens
RELDGFGLYLY

SEQ ID NO: 110851 - protein, 11 aa, Homo Sapiens
RELLEIVKKNF

SEQ ID NO: 110852 - protein, 11 aa, Homo Sapiens
RELQPSEEVTW

SEQ ID NO: 110853 - protein, 11 aa, Homo Sapiens
REMVEIITKEF

SEQ ID NO: 110854 - protein, 11 aa, Homo Sapiens
RENEDRIFVYF

SEQ ID NO: 110855 - protein, 11 aa, Homo Sapiens
RENLRTALRYY

SEQ ID NO: 110856 - protein, 11 aa, Homo Sapiens
RENTQTTIKLF

SEQ ID NO: 110857 - protein, 11 aa, Homo Sapiens
SEALPGDNVGF

SEQ ID NO: 110858 - protein, 11 aa, Homo Sapiens
SEANLIVAKSW

SEQ ID NO: 110859 - protein, 11 aa, Homo Sapiens
SEAVSHLLQDW

SEQ ID NO: 110860 - protein, 11 aa, Homo Sapiens
SEFDSISKNTW

SEQ ID NO: 110861 - protein, 11 aa, Homo Sapiens
SEFLYDKALTF

SEQ ID NO: 110862 - protein, 11 aa, Homo Sapiens
SEFPEIDGQVF

SEQ ID NO: 110863 - protein, 11 aa, Homo Sapiens
SEFSEENIEFW

SEQ ID NO: 110864 - protein, 11 aa, Homo Sapiens
SEIEDSTKQVF

SEQ ID NO: 110865 - protein, 11 aa, Homo Sapiens
SEINERVVQHF

SEQ ID NO: 110866 - protein, 11 aa, Homo Sapiens
SEINFSFSRSF

SEQ ID NO: 110867 - protein, 11 aa, Homo Sapiens
SEIRSISVNQW

SEQ ID NO: 110868 - protein, 11 aa, Homo Sapiens
SEITYDKLNKW

SEQ ID NO: 110869 - protein, 11 aa, Homo Sapiens
SEKAGIIQDTW

SEQ ID NO: 110870 - protein, 11 aa, Homo Sapiens
SEKDIFDYIQW

SEQ ID NO: 110871 - protein, 11 aa, Homo Sapiens
SELFMSSFQSY

SEQ ID NO: 110872 - protein, 11 aa, Homo Sapiens
SELIAKIPNFW

SEQ ID NO: 110873 - protein, 11 aa, Homo Sapiens
SELRLDSVVQW

SEQ ID NO: 110874 - protein, 11 aa, Homo Sapiens
SELVPIATQTY

SEQ ID NO: 110875 - protein, 11 aa, Homo Sapiens
SENFGSIHVYF

SEQ ID NO: 110876 - protein, 11 aa, Homo Sapiens
SENPLITLREF

SEQ ID NO: 110877 - protein, 11 aa, Homo Sapiens
SENPNEVFRFL

SEQ ID NO: 110878 - protein, 11 aa, Homo Sapiens
SEQDWSAIQNF

SEQ ID NO: 110879 - protein, 11 aa, Homo Sapiens
SEQRDYIDTTW

SEQ ID NO: 110880 - protein, 11 aa, Homo Sapiens
SESLFVSNHAY

SEQ ID NO: 110881 - protein, 11 aa, Homo Sapiens
SESLLRGIYAY

SEQ ID NO: 110882 - protein, 11 aa, Homo Sapiens
SESQDQVFLRW

SEQ ID NO: 110883 - protein, 11 aa, Homo Sapiens
SETSVPDHVVW

SEQ ID NO: 110884 - protein, 11 aa, Homo Sapiens
SEVPGSIPNSW

SEQ ID NO: 110885 - protein, 11 aa, Homo Sapiens
TEADYYHTELW

SEQ ID NO: 110886 - protein, 11 aa, Homo Sapiens
TEALHFVAAAW

SEQ ID NO: 110887 - protein, 11 aa, Homo Sapiens
TEHQQLEGWRW

SEQ ID NO: 110888 - protein, 11 aa, Homo Sapiens
TEHYDIPKVSW

SEQ ID NO: 110889 - protein, 11 aa, Homo Sapiens
TELFRDSGTMW

SEQ ID NO: 110890 - protein, 11 aa, Homo Sapiens
TELGRPDAEYW

SEQ ID NO: 110891 - protein, 11 aa, Homo Sapiens
TEMLPSILNQL

SEQ ID NO: 110892 - protein, 11 aa, Homo Sapiens
TEQSQIKGYVW

SEQ ID NO: 110893 - protein, 11 aa, Homo Sapiens
VEAPSFLNGVW

SEQ ID NO: 110894 - protein, 11 aa, Homo Sapiens
VEIQFPAEHGW

SEQ ID NO: 110895 - protein, 11 aa, Homo Sapiens
VEITELPVRTW

SEQ ID NO: 110896 - protein, 11 aa, Homo Sapiens
VELPIEANLVW

SEQ ID NO: 110897 - protein, 11 aa, Homo Sapiens
VELTEKIAQLF

SEQ ID NO: 110898 - protein, 11 aa, Homo Sapiens
VEMYDPTRNEW

SEQ ID NO: 110899 - protein, 11 aa, Homo Sapiens
VEVSPATERQW

SEQ ID NO: 110900 - protein, 11 aa, Homo Sapiens
WEVDVTGKEAW

SEQ ID NO: 110901 - protein, 11 aa, Homo Sapiens
WEVEVGDRTSW

SEQ ID NO: 110902 - protein, 11 aa, Homo Sapiens
YEFDEQGHSTW

SEQ ID NO: 110903 - protein, 11 aa, Homo Sapiens
YEIQDIYENSW

SEQ ID NO: 110904 - protein, 8 aa, Homo Sapiens
AIIPSKKL

SEQ ID NO: 110905 - protein, 8 aa, Homo Sapiens
EEIEGFRY

SEQ ID NO: 110906 - protein, 8 aa, Homo Sapiens
NELPGLKW

SEQ ID NO: 110907 - protein, 9 aa, Homo Sapiens
ADRMFELLF

SEQ ID NO: 110908 - protein, 9 aa, Homo Sapiens
AEADLRALL

SEQ ID NO: 110909 - protein, 9 aa, Homo Sapiens
AEAEIIQLL

SEQ ID NO: 110910 - protein, 9 aa, Homo Sapiens
AEAFLEHLW

SEQ ID NO: 110911 - protein, 9 aa, Homo Sapiens
AEAFLLRLY

SEQ ID NO: 110912 - protein, 9 aa, Homo Sapiens
AEAFLVHLF

SEQ ID NO: 110913 - protein, 9 aa, Homo Sapiens
AEAFVRAFL

SEQ ID NO: 110914 - protein, 9 aa, Homo Sapiens
AEALLHPFF

SEQ ID NO: 110915 - protein, 9 aa, Homo Sapiens
AEAQQFLRY

SEQ ID NO: 110916 - protein, 9 aa, Homo Sapiens
AEAVVLTLL

SEQ ID NO: 110917 - protein, 9 aa, Homo Sapiens
AEDAMRLYY

SEQ ID NO: 110918 - protein, 9 aa, Homo Sapiens
AEDELFNRY

SEQ ID NO: 110919 - protein, 9 aa, Homo Sapiens
AEDGLLFKF

SEQ ID NO: 110920 - protein, 9 aa, Homo Sapiens
AEDLVANFF

SEQ ID NO: 110921 - protein, 9 aa, Homo Sapiens
AEDRFMLLF

SEQ ID NO: 110922 - protein, 9 aa, Homo Sapiens
AEEEFVQRF

SEQ ID NO: 110923 - protein, 9 aa, Homo Sapiens
AEEFVNVYY

SEQ ID NO: 110924 - protein, 9 aa, Homo Sapiens
AEELLRIGL

SEQ ID NO: 110925 - protein, 9 aa, Homo Sapiens
AEFAISIKY

SEQ ID NO: 110926 - protein, 9 aa, Homo Sapiens
AEFELPKTM

SEQ ID NO: 110927 - protein, 9 aa, Homo Sapiens
AEFEVHEVY

SEQ ID NO: 110928 - protein, 9 aa, Homo Sapiens
AEFEVVRTI

SEQ ID NO: 110929 - protein, 9 aa, Homo Sapiens
AEFFEPWVY

SEQ ID NO: 110930 - protein, 9 aa, Homo Sapiens
AEFIMLNHF

SEQ ID NO: 110931 - protein, 9 aa, Homo Sapiens
AEFIVAKAI

SEQ ID NO: 110932 - protein, 9 aa, Homo Sapiens
AEFKEAFQL

SEQ ID NO: 110933 - protein, 9 aa, Homo Sapiens
AEFNLRHDW

SEQ ID NO: 110934 - protein, 9 aa, Homo Sapiens
AEFRDPLGY

SEQ ID NO: 110935 - protein, 9 aa, Homo Sapiens
AEFVGVSHL

SEQ ID NO: 110936 - protein, 9 aa, Homo Sapiens
AEGDLIEHF

SEQ ID NO: 110937 - protein, 9 aa, Homo Sapiens
AEGDLVRLL

SEQ ID NO: 110938 - protein, 9 aa, Homo Sapiens
AEGKFWTHW

SEQ ID NO: 110939 - protein, 9 aa, Homo Sapiens
AEGLAKLMF

SEQ ID NO: 110940 - protein, 9 aa, Homo Sapiens
AEGPPRLAI

SEQ ID NO: 110941 - protein, 9 aa, Homo Sapiens
AEGVIVGHW

SEQ ID NO: 110942 - protein, 9 aa, Homo Sapiens
AEIAALRFL

SEQ ID NO: 110943 - protein, 9 aa, Homo Sapiens
AEIDSIHQL

SEQ ID NO: 110944 - protein, 9 aa, Homo Sapiens
AEIEDIRVL

SEQ ID NO: 110945 - protein, 9 aa, Homo Sapiens
AEIEIVKDL

SEQ ID NO: 110946 - protein, 9 aa, Homo Sapiens
AEIIKEDLW

SEQ ID NO: 110947 - protein, 9 aa, Homo Sapiens
AEIIKGELW

SEQ ID NO: 110948 - protein, 9 aa, Homo Sapiens
AEILLSNHY

SEQ ID NO: 110949 - protein, 9 aa, Homo Sapiens
AEINNIIKI

SEQ ID NO: 110950 - protein, 9 aa, Homo Sapiens
AEIPLVVCI

SEQ ID NO: 110951 - protein, 9 aa, Homo Sapiens
AEIRSLVTW

SEQ ID NO: 110952 - protein, 9 aa, Homo Sapiens
AEITDKLGL

SEQ ID NO: 110953 - protein, 9 aa, Homo Sapiens
AEIWEKLNF

SEQ ID NO: 110954 - protein, 9 aa, Homo Sapiens
AEKEISLWF

SEQ ID NO: 110955 - protein, 9 aa, Homo Sapiens
AEKLITQTF

SEQ ID NO: 110956 - protein, 9 aa, Homo Sapiens
AELAIFRVF

SEQ ID NO: 110957 - protein, 9 aa, Homo Sapiens
AELAVILKF

SEQ ID NO: 110958 - protein, 9 aa, Homo Sapiens
AELDIPQSV

SEQ ID NO: 110959 - protein, 9 aa, Homo Sapiens
AELGGLLKY

SEQ ID NO: 110960 - protein, 9 aa, Homo Sapiens
AELIISEVF

SEQ ID NO: 110961 - protein, 9 aa, Homo Sapiens
AELMQTLRF

SEQ ID NO: 110962 - protein, 9 aa, Homo Sapiens
AELPGVSRW

SEQ ID NO: 110963 - protein, 9 aa, Homo Sapiens
AELPLRLFL

SEQ ID NO: 110964 - protein, 9 aa, Homo Sapiens
AELTKVFEI

SEQ ID NO: 110965 - protein, 9 aa, Homo Sapiens
AELVHFLLL

SEQ ID NO: 110966 - protein, 9 aa, Homo Sapiens
AEMEIIGQF

SEQ ID NO: 110967 - protein, 9 aa, Homo Sapiens
AEMLRSISF

SEQ ID NO: 110968 - protein, 9 aa, Homo Sapiens
AENGLTVRL

SEQ ID NO: 110969 - protein, 9 aa, Homo Sapiens
AENLFRAFL

SEQ ID NO: 110970 - protein, 9 aa, Homo Sapiens
AENMIQLQF

SEQ ID NO: 110971 - protein, 9 aa, Homo Sapiens
AENNIQPIF

SEQ ID NO: 110972 - protein, 9 aa, Homo Sapiens
AENPFLTHL

SEQ ID NO: 110973 - protein, 9 aa, Homo Sapiens
AENPSIQLL

SEQ ID NO: 110974 - protein, 9 aa, Homo Sapiens
AENQLALEL

SEQ ID NO: 110975 - protein, 9 aa, Homo Sapiens
AEPIDIQTW

SEQ ID NO: 110976 - protein, 9 aa, Homo Sapiens
AEQAVFILF

SEQ ID NO: 110977 - protein, 9 aa, Homo Sapiens
AEQDFISKF

SEQ ID NO: 110978 - protein, 9 aa, Homo Sapiens
AEQDLVQTL

SEQ ID NO: 110979 - protein, 9 aa, Homo Sapiens
AEQLFHLNF

SEQ ID NO: 110980 - protein, 9 aa, Homo Sapiens
AERQLQVQW

SEQ ID NO: 110981 - protein, 9 aa, Homo Sapiens
AESHIILVL

SEQ ID NO: 110982 - protein, 9 aa, Homo Sapiens
AESLIAKKI

SEQ ID NO: 110983 - protein, 9 aa, Homo Sapiens
AESLYEIRF

SEQ ID NO: 110984 - protein, 9 aa, Homo Sapiens
AETAVQLFI

SEQ ID NO: 110985 - protein, 9 aa, Homo Sapiens
AETDAIRFL

SEQ ID NO: 110986 - protein, 9 aa, Homo Sapiens
AETDLPVVF

SEQ ID NO: 110987 - protein, 9 aa, Homo Sapiens
AETHIVLLF

SEQ ID NO: 110988 - protein, 9 aa, Homo Sapiens
AETPDIKLF

SEQ ID NO: 110989 - protein, 9 aa, Homo Sapiens
AEVAGQFVI

SEQ ID NO: 110990 - protein, 9 aa, Homo Sapiens
AEVDYLEQF

SEQ ID NO: 110991 - protein, 9 aa, Homo Sapiens
AEVFPLKVF

SEQ ID NO: 110992 - protein, 9 aa, Homo Sapiens
AEVGFVRFF

SEQ ID NO: 110993 - protein, 9 aa, Homo Sapiens
AEVTLKTYW

SEQ ID NO: 110994 - protein, 9 aa, Homo Sapiens
AEWEWKAGF

SEQ ID NO: 110995 - protein, 9 aa, Homo Sapiens
AEWLFPLAF

SEQ ID NO: 110996 - protein, 9 aa, Homo Sapiens
AEYLILHLI

SEQ ID NO: 110997 - protein, 9 aa, Homo Sapiens
DEALIGKKF

SEQ ID NO: 110998 - protein, 9 aa, Homo Sapiens
DEEETYRLW

SEQ ID NO: 110999 - protein, 9 aa, Homo Sapiens
DEFHLILEY

SEQ ID NO: 111000 - protein, 9 aa, Homo Sapiens
DELEIKAYY

SEQ ID NO: 111001 - protein, 9 aa, Homo Sapiens
DELIQQSQW

SEQ ID NO: 111002 - protein, 9 aa, Homo Sapiens
DELQIPVKW

SEQ ID NO: 111003 - protein, 9 aa, Homo Sapiens
DENGLIIVW

SEQ ID NO: 111004 - protein, 9 aa, Homo Sapiens
DENPQQLKL

SEQ ID NO: 111005 - protein, 9 aa, Homo Sapiens
DENSVIKSF

SEQ ID NO: 111006 - protein, 9 aa, Homo Sapiens
DEYIERLVW

SEQ ID NO: 111007 - protein, 9 aa, Homo Sapiens
EDAALFKAW

SEQ ID NO: 111008 - protein, 9 aa, Homo Sapiens
EEAEIIRKY

SEQ ID NO: 111009 - protein, 9 aa, Homo Sapiens
EEAEWQTRW

SEQ ID NO: 111010 - protein, 9 aa, Homo Sapiens
EEAHLNTSF

SEQ ID NO: 111011 - protein, 9 aa, Homo Sapiens
EEAPKFLAF

SEQ ID NO: 111012 - protein, 9 aa, Homo Sapiens
EEASIDFRF

SEQ ID NO: 111013 - protein, 9 aa, Homo Sapiens
EEASIYSRW

SEQ ID NO: 111014 - protein, 9 aa, Homo Sapiens
EEASLLHQF

SEQ ID NO: 111015 - protein, 9 aa, Homo Sapiens
EEDKFLLLY

SEQ ID NO: 111016 - protein, 9 aa, Homo Sapiens
EEDRFYLVF

SEQ ID NO: 111017 - protein, 9 aa, Homo Sapiens
EEENVVLKF

SEQ ID NO: 111018 - protein, 9 aa, Homo Sapiens
EEFDFHVRW

SEQ ID NO: 111019 - protein, 9 aa, Homo Sapiens
EEFETIERF

SEQ ID NO: 111020 - protein, 9 aa, Homo Sapiens
EEFGQAFSF

SEQ ID NO: 111021 - protein, 9 aa, Homo Sapiens
EEFGRFASF

SEQ ID NO: 111022 - protein, 9 aa, Homo Sapiens
EEFHQSLQW

SEQ ID NO: 111023 - protein, 9 aa, Homo Sapiens
EEFIGKIGI

SEQ ID NO: 111024 - protein, 9 aa, Homo Sapiens
EEFIKSIFY

SEQ ID NO: 111025 - protein, 9 aa, Homo Sapiens
EEFNREMFW

SEQ ID NO: 111026 - protein, 9 aa, Homo Sapiens
EEFPGGLTI

SEQ ID NO: 111027 - protein, 9 aa, Homo Sapiens
EEFRHVIAW

SEQ ID NO: 111028 - protein, 9 aa, Homo Sapiens
EEFTDPLSF

SEQ ID NO: 111029 - protein, 9 aa, Homo Sapiens
EEFYNLVRF

SEQ ID NO: 111030 - protein, 9 aa, Homo Sapiens
EEGMYVLRW

SEQ ID NO: 111031 - protein, 9 aa, Homo Sapiens
EEGPDVLRW

SEQ ID NO: 111032 - protein, 9 aa, Homo Sapiens
EEHPLVFLF

SEQ ID NO: 111033 - protein, 9 aa, Homo Sapiens
EEIAFLKKL

SEQ ID NO: 111034 - protein, 9 aa, Homo Sapiens
EEIDEKIGF

SEQ ID NO: 111035 - protein, 9 aa, Homo Sapiens
EEIEILLRY

SEQ ID NO: 111036 - protein, 9 aa, Homo Sapiens
EEIFGTIGM

SEQ ID NO: 111037 - protein, 9 aa, Homo Sapiens
EEIFSLHGF

SEQ ID NO: 111038 - protein, 9 aa, Homo Sapiens
EEIGNILAF

SEQ ID NO: 111039 - protein, 9 aa, Homo Sapiens
EEINLQRNI

SEQ ID NO: 111040 - protein, 9 aa, Homo Sapiens
EEIPKIFQI

SEQ ID NO: 111041 - protein, 9 aa, Homo Sapiens
EEIPKNYSI

SEQ ID NO: 111042 - protein, 9 aa, Homo Sapiens
EEIPVHEEF

SEQ ID NO: 111043 - protein, 9 aa, Homo Sapiens
EELDFQKNI

SEQ ID NO: 111044 - protein, 9 aa, Homo Sapiens
EELDLPAVF

SEQ ID NO: 111045 - protein, 9 aa, Homo Sapiens
EELDVLKFL

SEQ ID NO: 111046 - protein, 9 aa, Homo Sapiens
EELERILVY

SEQ ID NO: 111047 - protein, 9 aa, Homo Sapiens
EELFFDYRY

SEQ ID NO: 111048 - protein, 9 aa, Homo Sapiens
EELFHLLNF

SEQ ID NO: 111049 - protein, 9 aa, Homo Sapiens
EELGLVTHL

SEQ ID NO: 111050 - protein, 9 aa, Homo Sapiens
EELIVVTSY

SEQ ID NO: 111051 - protein, 9 aa, Homo Sapiens
EELLGLVVW

SEQ ID NO: 111052 - protein, 9 aa, Homo Sapiens
EELNLKTTW

SEQ ID NO: 111053 - protein, 9 aa, Homo Sapiens
EELPHIHAF

SEQ ID NO: 111054 - protein, 9 aa, Homo Sapiens
EELPTLLHF

SEQ ID NO: 111055 - protein, 9 aa, Homo Sapiens
EELYTKKLW

SEQ ID NO: 111056 - protein, 9 aa, Homo Sapiens
EEMDFPQLM

SEQ ID NO: 111057 - protein, 9 aa, Homo Sapiens
EEMDLFTKY

SEQ ID NO: 111058 - protein, 9 aa, Homo Sapiens
EEMEWFNNY

SEQ ID NO: 111059 - protein, 9 aa, Homo Sapiens
EEMIFQIPW

SEQ ID NO: 111060 - protein, 9 aa, Homo Sapiens
EEMQWIQFF

SEQ ID NO: 111061 - protein, 9 aa, Homo Sapiens
EENIYKIDF

SEQ ID NO: 111062 - protein, 9 aa, Homo Sapiens
EENPIVLEF

SEQ ID NO: 111063 - protein, 9 aa, Homo Sapiens
EENTNILKF

SEQ ID NO: 111064 - protein, 9 aa, Homo Sapiens
EEPESFFTW

SEQ ID NO: 111065 - protein, 9 aa, Homo Sapiens
EEPPTTLLW

SEQ ID NO: 111066 - protein, 9 aa, Homo Sapiens
EEPTVIKKY

SEQ ID NO: 111067 - protein, 9 aa, Homo Sapiens
EEQLIAAKF

SEQ ID NO: 111068 - protein, 9 aa, Homo Sapiens
EEQVFHFYW

SEQ ID NO: 111069 - protein, 9 aa, Homo Sapiens
EESFFILKY

SEQ ID NO: 111070 - protein, 9 aa, Homo Sapiens
EESFIPLTI

SEQ ID NO: 111071 - protein, 9 aa, Homo Sapiens
EESLNIVKY

SEQ ID NO: 111072 - protein, 9 aa, Homo Sapiens
EESRIQIWF

SEQ ID NO: 111073 - protein, 9 aa, Homo Sapiens
EETLLDQSF

SEQ ID NO: 111074 - protein, 9 aa, Homo Sapiens
EETLNILIY

SEQ ID NO: 111075 - protein, 9 aa, Homo Sapiens
EETPVVLQL

SEQ ID NO: 111076 - protein, 9 aa, Homo Sapiens
EETVVPKTF

SEQ ID NO: 111077 - protein, 9 aa, Homo Sapiens
EEVDMPVFF

SEQ ID NO: 111078 - protein, 9 aa, Homo Sapiens
EEVDVTPTF

SEQ ID NO: 111079 - protein, 9 aa, Homo Sapiens
EEVGVEHLL

SEQ ID NO: 111080 - protein, 9 aa, Homo Sapiens
EEVGYAIRF

SEQ ID NO: 111081 - protein, 9 aa, Homo Sapiens
EEVTEFLKF

SEQ ID NO: 111082 - protein, 9 aa, Homo Sapiens
EEWLPRELW

SEQ ID NO: 111083 - protein, 9 aa, Homo Sapiens
EEYLLRQVF

SEQ ID NO: 111084 - protein, 9 aa, Homo Sapiens
EEYLVIIRF

SEQ ID NO: 111085 - protein, 9 aa, Homo Sapiens
EEYMNKPTF

SEQ ID NO: 111086 - protein, 9 aa, Homo Sapiens
EEYQAFLVY

SEQ ID NO: 111087 - protein, 9 aa, Homo Sapiens
EEYQGVIAW

SEQ ID NO: 111088 - protein, 9 aa, Homo Sapiens
EEYQSLIRY

SEQ ID NO: 111089 - protein, 9 aa, Homo Sapiens
FEAPIKLVF

SEQ ID NO: 111090 - protein, 9 aa, Homo Sapiens
FEFEYASRW

SEQ ID NO: 111091 - protein, 9 aa, Homo Sapiens
FENEIILKL

SEQ ID NO: 111092 - protein, 9 aa, Homo Sapiens
FEYEYSQRW

SEQ ID NO: 111093 - protein, 9 aa, Homo Sapiens
GEADVPFYY

SEQ ID NO: 111094 - protein, 9 aa, Homo Sapiens
GEDTFVHIW

SEQ ID NO: 111095 - protein, 9 aa, Homo Sapiens
GEIDTRFSF

SEQ ID NO: 111096 - protein, 9 aa, Homo Sapiens
GEIRLLQSY

SEQ ID NO: 111097 - protein, 9 aa, Homo Sapiens
GELMFLMKW

SEQ ID NO: 111098 - protein, 9 aa, Homo Sapiens
GELQLIKIF

SEQ ID NO: 111099 - protein, 9 aa, Homo Sapiens
GENHLTVTW

SEQ ID NO: 111100 - protein, 9 aa, Homo Sapiens
GENLPPLTY

SEQ ID NO: 111101 - protein, 9 aa, Homo Sapiens
GETELREYF

SEQ ID NO: 111102 - protein, 9 aa, Homo Sapiens
GETEVLKVI

SEQ ID NO: 111103 - protein, 9 aa, Homo Sapiens
GETSYIRVY

SEQ ID NO: 111104 - protein, 9 aa, Homo Sapiens
GEVLISRVY

SEQ ID NO: 111105 - protein, 9 aa, Homo Sapiens
GEWERYIQW

SEQ ID NO: 111106 - protein, 9 aa, Homo Sapiens
HEAEVLKQL

SEQ ID NO: 111107 - protein, 9 aa, Homo Sapiens
HEFLVKPSF

SEQ ID NO: 111108 - protein, 9 aa, Homo Sapiens
HEFPLILIF

SEQ ID NO: 111109 - protein, 9 aa, Homo Sapiens
HEGDIILKI

SEQ ID NO: 111110 - protein, 9 aa, Homo Sapiens
HEGEILQAF

SEQ ID NO: 111111 - protein, 9 aa, Homo Sapiens
HEIEALKSF

SEQ ID NO: 111112 - protein, 9 aa, Homo Sapiens
HEIIETIRW

SEQ ID NO: 111113 - protein, 9 aa, Homo Sapiens
IEFDIPITY

SEQ ID NO: 111114 - protein, 9 aa, Homo Sapiens
IEFNKPQYF

SEQ ID NO: 111115 - protein, 9 aa, Homo Sapiens
IEHGIVTNW

SEQ ID NO: 111116 - protein, 9 aa, Homo Sapiens
IENPALLRW

SEQ ID NO: 111117 - protein, 9 aa, Homo Sapiens
IESVIKELW

SEQ ID NO: 111118 - protein, 9 aa, Homo Sapiens
IETILVQSW

SEQ ID NO: 111119 - protein, 9 aa, Homo Sapiens
KEAFVVEEW

SEQ ID NO: 111120 - protein, 9 aa, Homo Sapiens
KEDLVFIFW

SEQ ID NO: 111121 - protein, 9 aa, Homo Sapiens
KEELMFFLW

SEQ ID NO: 111122 - protein, 9 aa, Homo Sapiens
KEEQVIQVW

SEQ ID NO: 111123 - protein, 9 aa, Homo Sapiens
KEFEPLLNW

SEQ ID NO: 111124 - protein, 9 aa, Homo Sapiens
KEFSIDVGY

SEQ ID NO: 111125 - protein, 9 aa, Homo Sapiens
KEIFLRELI

SEQ ID NO: 111126 - protein, 9 aa, Homo Sapiens
KELAEFLTF

SEQ ID NO: 111127 - protein, 9 aa, Homo Sapiens
KETDLLILF

SEQ ID NO: 111128 - protein, 9 aa, Homo Sapiens
KETIIAFAW

SEQ ID NO: 111129 - protein, 9 aa, Homo Sapiens
KEYIPPLIW

SEQ ID NO: 111130 - protein, 9 aa, Homo Sapiens
LEADLPRSW

SEQ ID NO: 111131 - protein, 9 aa, Homo Sapiens
LEADVNIKL

SEQ ID NO: 111132 - protein, 9 aa, Homo Sapiens
LEHEYIQNF

SEQ ID NO: 111133 - protein, 9 aa, Homo Sapiens
LELGFSKVF

SEQ ID NO: 111134 - protein, 9 aa, Homo Sapiens
LSEVNIPLS

SEQ ID NO: 111135 - protein, 9 aa, Homo Sapiens
MEETIYQNY

SEQ ID NO: 111136 - protein, 9 aa, Homo Sapiens
MEIDIPHVW

SEQ ID NO: 111137 - protein, 9 aa, Homo Sapiens
MELDDTLKY

SEQ ID NO: 111138 - protein, 9 aa, Homo Sapiens
MENGIVRNW

SEQ ID NO: 111139 - protein, 9 aa, Homo Sapiens
MEQVIFKYL

SEQ ID NO: 111140 - protein, 9 aa, Homo Sapiens
METLILKEL

SEQ ID NO: 111141 - protein, 9 aa, Homo Sapiens
MEVFLPQSY

SEQ ID NO: 111142 - protein, 9 aa, Homo Sapiens
MEVPTYLNF

SEQ ID NO: 111143 - protein, 9 aa, Homo Sapiens
MEWDKIWAF

SEQ ID NO: 111144 - protein, 9 aa, Homo Sapiens
NEAVLHLRF

SEQ ID NO: 111145 - protein, 9 aa, Homo Sapiens
NEEGFVRLY

SEQ ID NO: 111146 - protein, 9 aa, Homo Sapiens
NEFLLPPVF

SEQ ID NO: 111147 - protein, 9 aa, Homo Sapiens
NEFPEPIKL

SEQ ID NO: 111148 - protein, 9 aa, Homo Sapiens
NEFPVPEQF

SEQ ID NO: 111149 - protein, 9 aa, Homo Sapiens
NEIGIPMVF

SEQ ID NO: 111150 - protein, 9 aa, Homo Sapiens
NEILGSLRW

SEQ ID NO: 111151 - protein, 9 aa, Homo Sapiens
NEINEVLSW

SEQ ID NO: 111152 - protein, 9 aa, Homo Sapiens
NEIPSLILW

SEQ ID NO: 111153 - protein, 9 aa, Homo Sapiens
NEITIPVTF

SEQ ID NO: 111154 - protein, 9 aa, Homo Sapiens
NENDIITHF

SEQ ID NO: 111155 - protein, 9 aa, Homo Sapiens
NEPYIFKVF

SEQ ID NO: 111156 - protein, 9 aa, Homo Sapiens
NESAIFHGW

SEQ ID NO: 111157 - protein, 9 aa, Homo Sapiens
NESEPIVVY

SEQ ID NO: 111158 - protein, 9 aa, Homo Sapiens
NESGVLLHF

SEQ ID NO: 111159 - protein, 9 aa, Homo Sapiens
NETLIVSKF

SEQ ID NO: 111160 - protein, 9 aa, Homo Sapiens
NEVEQLLYY

SEQ ID NO: 111161 - protein, 9 aa, Homo Sapiens
NEVFLAKLI

SEQ ID NO: 111162 - protein, 9 aa, Homo Sapiens
NEVIMTIGF

SEQ ID NO: 111163 - protein, 9 aa, Homo Sapiens
NEWARYLYY

SEQ ID NO: 111164 - protein, 9 aa, Homo Sapiens
QEAIGFIDW

SEQ ID NO: 111165 - protein, 9 aa, Homo Sapiens
QEALIRTVF

SEQ ID NO: 111166 - protein, 9 aa, Homo Sapiens
QEDLRTFSW

SEQ ID NO: 111167 - protein, 9 aa, Homo Sapiens
QEFGVPHQY

SEQ ID NO: 111168 - protein, 9 aa, Homo Sapiens
QEFNLPVRY

SEQ ID NO: 111169 - protein, 9 aa, Homo Sapiens
QEFRELLQY

SEQ ID NO: 111170 - protein, 9 aa, Homo Sapiens
QEGDIILVL

SEQ ID NO: 111171 - protein, 9 aa, Homo Sapiens
QEIDILEDW

SEQ ID NO: 111172 - protein, 9 aa, Homo Sapiens
QEIEVRPGI

SEQ ID NO: 111173 - protein, 9 aa, Homo Sapiens
QEIPGEFIY

SEQ ID NO: 111174 - protein, 9 aa, Homo Sapiens
QELDDILKF

SEQ ID NO: 111175 - protein, 9 aa, Homo Sapiens
QELFLAHIL

SEQ ID NO: 111176 - protein, 9 aa, Homo Sapiens
QELLQTQDF

SEQ ID NO: 111177 - protein, 9 aa, Homo Sapiens
QELNFLLRY

SEQ ID NO: 111178 - protein, 9 aa, Homo Sapiens
QELYFFHEL

SEQ ID NO: 111179 - protein, 9 aa, Homo Sapiens
QEQFLELSY

SEQ ID NO: 111180 - protein, 9 aa, Homo Sapiens
QEQLIRSLY

SEQ ID NO: 111181 - protein, 9 aa, Homo Sapiens
QESFIWVRY

SEQ ID NO: 111182 - protein, 9 aa, Homo Sapiens
QESNVQLKL

SEQ ID NO: 111183 - protein, 9 aa, Homo Sapiens
QEVERILYF

SEQ ID NO: 111184 - protein, 9 aa, Homo Sapiens
QEVGYSIRF

SEQ ID NO: 111185 - protein, 9 aa, Homo Sapiens
QEVGYTIRF

SEQ ID NO: 111186 - protein, 9 aa, Homo Sapiens
QEVNISLHY

SEQ ID NO: 111187 - protein, 9 aa, Homo Sapiens
QEVPIIIVF

SEQ ID NO: 111188 - protein, 9 aa, Homo Sapiens
QEVSPKVYF

SEQ ID NO: 111189 - protein, 9 aa, Homo Sapiens
QEVTNNLEF

SEQ ID NO: 111190 - protein, 9 aa, Homo Sapiens
QEYEEQFKF

SEQ ID NO: 111191 - protein, 9 aa, Homo Sapiens
REELQQITW

SEQ ID NO: 111192 - protein, 9 aa, Homo Sapiens
REFKLSKVW

SEQ ID NO: 111193 - protein, 9 aa, Homo Sapiens
REFNLNELY

SEQ ID NO: 111194 - protein, 9 aa, Homo Sapiens
REGAITFTW

SEQ ID NO: 111195 - protein, 9 aa, Homo Sapiens
RELELAVFW

SEQ ID NO: 111196 - protein, 9 aa, Homo Sapiens
RENDIKSYF

SEQ ID NO: 111197 - protein, 9 aa, Homo Sapiens
RENEVLEAW

SEQ ID NO: 111198 - protein, 9 aa, Homo Sapiens
RENLPLIVW

SEQ ID NO: 111199 - protein, 9 aa, Homo Sapiens
RETDLQELF

SEQ ID NO: 111200 - protein, 9 aa, Homo Sapiens
SEADFSIHF

SEQ ID NO: 111201 - protein, 9 aa, Homo Sapiens
SEAEMRLFY

SEQ ID NO: 111202 - protein, 9 aa, Homo Sapiens
SEAFVIKGL

SEQ ID NO: 111203 - protein, 9 aa, Homo Sapiens
SEAPFLHYL

SEQ ID NO: 111204 - protein, 9 aa, Homo Sapiens
SEAQVQKFL

SEQ ID NO: 111205 - protein, 9 aa, Homo Sapiens
SEAVVEYVF

SEQ ID NO: 111206 - protein, 9 aa, Homo Sapiens
SEDDPILQI

SEQ ID NO: 111207 - protein, 9 aa, Homo Sapiens
SEDEVKLAL

SEQ ID NO: 111208 - protein, 9 aa, Homo Sapiens
SEDFSLPAY

SEQ ID NO: 111209 - protein, 9 aa, Homo Sapiens
SEDGLLKLW

SEQ ID NO: 111210 - protein, 9 aa, Homo Sapiens
SEDGSLWHW

SEQ ID NO: 111211 - protein, 9 aa, Homo Sapiens
SEDGTLRLW

SEQ ID NO: 111212 - protein, 9 aa, Homo Sapiens
SEDGTVRIW

SEQ ID NO: 111213 - protein, 9 aa, Homo Sapiens
SEDLPLPTF

SEQ ID NO: 111214 - protein, 9 aa, Homo Sapiens
SEDNIMQIW

SEQ ID NO: 111215 - protein, 9 aa, Homo Sapiens
SEDNIMQVW

SEQ ID NO: 111216 - protein, 9 aa, Homo Sapiens
SEDNRILLW

SEQ ID NO: 111217 - protein, 9 aa, Homo Sapiens
SEEDLKVLF

SEQ ID NO: 111218 - protein, 9 aa, Homo Sapiens
SEEEFLRTY

SEQ ID NO: 111219 - protein, 9 aa, Homo Sapiens
SEEGLLRLY

SEQ ID NO: 111220 - protein, 9 aa, Homo Sapiens
SEELLSLKY

SEQ ID NO: 111221 - protein, 9 aa, Homo Sapiens
SEENVIREF

SEQ ID NO: 111222 - protein, 9 aa, Homo Sapiens
SEEPILKWY

SEQ ID NO: 111223 - protein, 9 aa, Homo Sapiens
SEFALRPTF

SEQ ID NO: 111224 - protein, 9 aa, Homo Sapiens
SEFDFFERL

SEQ ID NO: 111225 - protein, 9 aa, Homo Sapiens
SEFEIVKAI

SEQ ID NO: 111226 - protein, 9 aa, Homo Sapiens
SEFELLRSY

SEQ ID NO: 111227 - protein, 9 aa, Homo Sapiens
SEFGAPIKF

SEQ ID NO: 111228 - protein, 9 aa, Homo Sapiens
SEFGLKISF

SEQ ID NO: 111229 - protein, 9 aa, Homo Sapiens
SEFPKPQIL

SEQ ID NO: 111230 - protein, 9 aa, Homo Sapiens
SEFQRLLGF

SEQ ID NO: 111231 - protein, 9 aa, Homo Sapiens
SEFTGVWKY

SEQ ID NO: 111232 - protein, 9 aa, Homo Sapiens
SEFVIPSVY

SEQ ID NO: 111233 - protein, 9 aa, Homo Sapiens
SEGLIKALF

SEQ ID NO: 111234 - protein, 9 aa, Homo Sapiens
SEGPPLTSF

SEQ ID NO: 111235 - protein, 9 aa, Homo Sapiens
SEHLTYLEF

SEQ ID NO: 111236 - protein, 9 aa, Homo Sapiens
SEHVFQILF

SEQ ID NO: 111237 - protein, 9 aa, Homo Sapiens
SEIDQLFRI

SEQ ID NO: 111238 - protein, 9 aa, Homo Sapiens
SEIELFRVF

SEQ ID NO: 111239 - protein, 9 aa, Homo Sapiens
SEIEYYAML

SEQ ID NO: 111240 - protein, 9 aa, Homo Sapiens
SEILLKEFL

SEQ ID NO: 111241 - protein, 9 aa, Homo Sapiens
SEISQVFEI

SEQ ID NO: 111242 - protein, 9 aa, Homo Sapiens
SELDLAVPF

SEQ ID NO: 111243 - protein, 9 aa, Homo Sapiens
SELDLISRL

SEQ ID NO: 111244 - protein, 9 aa, Homo Sapiens
SELEKTFGW

SEQ ID NO: 111245 - protein, 9 aa, Homo Sapiens
SELLDKFTW

SEQ ID NO: 111246 - protein, 9 aa, Homo Sapiens
SELQVLLGY

SEQ ID NO: 111247 - protein, 9 aa, Homo Sapiens
SEMILVLEY

SEQ ID NO: 111248 - protein, 9 aa, Homo Sapiens
SENAERILF

SEQ ID NO: 111249 - protein, 9 aa, Homo Sapiens
SENAIVWKI

SEQ ID NO: 111250 - protein, 9 aa, Homo Sapiens
SENDVIRLI

SEQ ID NO: 111251 - protein, 9 aa, Homo Sapiens
SENSLIILL

SEQ ID NO: 111252 - protein, 9 aa, Homo Sapiens
SENVLQVHL

SEQ ID NO: 111253 - protein, 9 aa, Homo Sapiens
SEPDFVAKF

SEQ ID NO: 111254 - protein, 9 aa, Homo Sapiens
SEQEYQLYL

SEQ ID NO: 111255 - protein, 9 aa, Homo Sapiens
SESPIVVVL

SEQ ID NO: 111256 - protein, 9 aa, Homo Sapiens
SESQLELNW

SEQ ID NO: 111257 - protein, 9 aa, Homo Sapiens
SETKGIWMW

SEQ ID NO: 111258 - protein, 9 aa, Homo Sapiens
SETVLNLAF

SEQ ID NO: 111259 - protein, 9 aa, Homo Sapiens
SEVFVDLKW

SEQ ID NO: 111260 - protein, 9 aa, Homo Sapiens
SEVNIPLSL

SEQ ID NO: 111261 - protein, 9 aa, Homo Sapiens
SEVQAILAF

SEQ ID NO: 111262 - protein, 9 aa, Homo Sapiens
SEVVVNSVF

SEQ ID NO: 111263 - protein, 9 aa, Homo Sapiens
SEYDQIRYI

SEQ ID NO: 111264 - protein, 9 aa, Homo Sapiens
TEADVKIVI

SEQ ID NO: 111265 - protein, 9 aa, Homo Sapiens
TEAEARIFW

SEQ ID NO: 111266 - protein, 9 aa, Homo Sapiens
TEALPVKLI

SEQ ID NO: 111267 - protein, 9 aa, Homo Sapiens
TEDELVAHW

SEQ ID NO: 111268 - protein, 9 aa, Homo Sapiens
TEFRNFIVW

SEQ ID NO: 111269 - protein, 9 aa, Homo Sapiens
TEIDHWLEF

SEQ ID NO: 111270 - protein, 9 aa, Homo Sapiens
TEIELAKQI

SEQ ID NO: 111271 - protein, 9 aa, Homo Sapiens
TEIERLITW

SEQ ID NO: 111272 - protein, 9 aa, Homo Sapiens
TEIQLVQSL

SEQ ID NO: 111273 - protein, 9 aa, Homo Sapiens
TELDLHKRL

SEQ ID NO: 111274 - protein, 9 aa, Homo Sapiens
TELDQVRKW

SEQ ID NO: 111275 - protein, 9 aa, Homo Sapiens
TELLLKEGF

SEQ ID NO: 111276 - protein, 9 aa, Homo Sapiens
TELPKAEKW

SEQ ID NO: 111277 - protein, 9 aa, Homo Sapiens
TENDIANFF

SEQ ID NO: 111278 - protein, 9 aa, Homo Sapiens
TENDIRVMF

SEQ ID NO: 111279 - protein, 9 aa, Homo Sapiens
TENDIYNFF

SEQ ID NO: 111280 - protein, 9 aa, Homo Sapiens
TESLLRLEW

SEQ ID NO: 111281 - protein, 9 aa, Homo Sapiens
TESQVVITL

SEQ ID NO: 111282 - protein, 9 aa, Homo Sapiens
TETQVKIWF

SEQ ID NO: 111283 - protein, 9 aa, Homo Sapiens
TEVITGTLW

SEQ ID NO: 111284 - protein, 9 aa, Homo Sapiens
VEELFERKY

SEQ ID NO: 111285 - protein, 9 aa, Homo Sapiens
VEFGTILVY

SEQ ID NO: 111286 - protein, 9 aa, Homo Sapiens
VEINIDHKF

SEQ ID NO: 111287 - protein, 9 aa, Homo Sapiens
VELRILTNW

SEQ ID NO: 111288 - protein, 9 aa, Homo Sapiens
VENNLILKM

SEQ ID NO: 111289 - protein, 9 aa, Homo Sapiens
VEQSFFNDW

SEQ ID NO: 111290 - protein, 9 aa, Homo Sapiens
VESPLSVSF

SEQ ID NO: 111291 - protein, 9 aa, Homo Sapiens
VEVDLEHEW

SEQ ID NO: 111292 - protein, 9 aa, Homo Sapiens
VEVQLPELF

SEQ ID NO: 111293 - protein, 9 aa, Homo Sapiens
VIESPPEIN

SEQ ID NO: 111294 - protein, 9 aa, Homo Sapiens
YEWSVKLNW

SEQ ID NO: 111295 - protein, 10 aa, Homo Sapiens
AEADEIFQEL

SEQ ID NO: 111296 - protein, 10 aa, Homo Sapiens
AEAGVAVFAW

SEQ ID NO: 111297 - protein, 10 aa, Homo Sapiens
AEARLLLDNF

SEQ ID NO: 111298 - protein, 10 aa, Homo Sapiens
AEAWLNYPCF

SEQ ID NO: 111299 - protein, 10 aa, Homo Sapiens
AEDFLEKLAF

SEQ ID NO: 111300 - protein, 10 aa, Homo Sapiens
AEDGLLFKFL

SEQ ID NO: 111301 - protein, 10 aa, Homo Sapiens
AEDPLGAIHL

SEQ ID NO: 111302 - protein, 10 aa, Homo Sapiens
AEEKPIEIQW

SEQ ID NO: 111303 - protein, 10 aa, Homo Sapiens
AEFEDTLKTF

SEQ ID NO: 111304 - protein, 10 aa, Homo Sapiens
AEFKEAFQLF

SEQ ID NO: 111305 - protein, 10 aa, Homo Sapiens
AEFKEAFSLF

SEQ ID NO: 111306 - protein, 10 aa, Homo Sapiens
AEGEVVQVKW

SEQ ID NO: 111307 - protein, 10 aa, Homo Sapiens
AEGEVVQVRW

SEQ ID NO: 111308 - protein, 10 aa, Homo Sapiens
AEHDQLLLNY

SEQ ID NO: 111309 - protein, 10 aa, Homo Sapiens
AEHSPVPAGF

SEQ ID NO: 111310 - protein, 10 aa, Homo Sapiens
AEIDAHLVAL

SEQ ID NO: 111311 - protein, 10 aa, Homo Sapiens
AEIDFRLVSF

SEQ ID NO: 111312 - protein, 10 aa, Homo Sapiens
AEIDVIFKDF

SEQ ID NO: 111313 - protein, 10 aa, Homo Sapiens
AEIEIVKEEF

SEQ ID NO: 111314 - protein, 10 aa, Homo Sapiens
AEIKQIVSEY

SEQ ID NO: 111315 - protein, 10 aa, Homo Sapiens
AEIPDQLVSY

SEQ ID NO: 111316 - protein, 10 aa, Homo Sapiens
AEIPGLSINF

SEQ ID NO: 111317 - protein, 10 aa, Homo Sapiens
AELDRQIKSF

SEQ ID NO: 111318 - protein, 10 aa, Homo Sapiens
AELELQRFLY

SEQ ID NO: 111319 - protein, 10 aa, Homo Sapiens
AELGGLLKYV

SEQ ID NO: 111320 - protein, 10 aa, Homo Sapiens
AELGLEIPAY

SEQ ID NO: 111321 - protein, 10 aa, Homo Sapiens
AELGTFPRAF

SEQ ID NO: 111322 - protein, 10 aa, Homo Sapiens
AELKAPGISY

SEQ ID NO: 111323 - protein, 10 aa, Homo Sapiens
AELLVKGYEI

SEQ ID NO: 111324 - protein, 10 aa, Homo Sapiens
AELPLIRLDF

SEQ ID NO: 111325 - protein, 10 aa, Homo Sapiens
AELSEQIKSF

SEQ ID NO: 111326 - protein, 10 aa, Homo Sapiens
AELTTLLEQW

SEQ ID NO: 111327 - protein, 10 aa, Homo Sapiens
AELYINEHDY

SEQ ID NO: 111328 - protein, 10 aa, Homo Sapiens
AEMDARTILL

SEQ ID NO: 111329 - protein, 10 aa, Homo Sapiens
AENGFLPIHL

SEQ ID NO: 111330 - protein, 10 aa, Homo Sapiens
AENPFLTHLI

SEQ ID NO: 111331 - protein, 10 aa, Homo Sapiens
AENPFVVSMF

SEQ ID NO: 111332 - protein, 10 aa, Homo Sapiens
AEPDFVVTDF

SEQ ID NO: 111333 - protein, 10 aa, Homo Sapiens
AEPLEIILHL

SEQ ID NO: 111334 - protein, 10 aa, Homo Sapiens
AEQDFISKFF

SEQ ID NO: 111335 - protein, 10 aa, Homo Sapiens
AEQDIVIITY

SEQ ID NO: 111336 - protein, 10 aa, Homo Sapiens
AEQQVPLVLW

SEQ ID NO: 111337 - protein, 10 aa, Homo Sapiens
AESDLDYIQY

SEQ ID NO: 111338 - protein, 10 aa, Homo Sapiens
AESFVNVKRW

SEQ ID NO: 111339 - protein, 10 aa, Homo Sapiens
AESGFPVFAW

SEQ ID NO: 111340 - protein, 10 aa, Homo Sapiens
AESLVRNLQW

SEQ ID NO: 111341 - protein, 10 aa, Homo Sapiens
AETDFEKRDF

SEQ ID NO: 111342 - protein, 10 aa, Homo Sapiens
AEVDKLELMF

SEQ ID NO: 111343 - protein, 10 aa, Homo Sapiens
AEVDKVTGRF

SEQ ID NO: 111344 - protein, 10 aa, Homo Sapiens
AEVISVLQKY

SEQ ID NO: 111345 - protein, 10 aa, Homo Sapiens
AEVLGLILRY

SEQ ID NO: 111346 - protein, 10 aa, Homo Sapiens
AEVLIQQGGL

SEQ ID NO: 111347 - protein, 10 aa, Homo Sapiens
AEVLNFLLRY

SEQ ID NO: 111348 - protein, 10 aa, Homo Sapiens
AEVMPAQWEF

SEQ ID NO: 111349 - protein, 10 aa, Homo Sapiens
AEVPIIAIDW

SEQ ID NO: 111350 - protein, 10 aa, Homo Sapiens
AEVSLMEVRF

SEQ ID NO: 111351 - protein, 10 aa, Homo Sapiens
AEWASRFWLW

SEQ ID NO: 111352 - protein, 10 aa, Homo Sapiens
AEWEERISAW

SEQ ID NO: 111353 - protein, 10 aa, Homo Sapiens
AEWQLDQPSW

SEQ ID NO: 111354 - protein, 10 aa, Homo Sapiens
ALAPILDDGW

SEQ ID NO: 111355 - protein, 10 aa, Homo Sapiens
DEAPVLDVRY

SEQ ID NO: 111356 - protein, 10 aa, Homo Sapiens
DEFSEAIKAF

SEQ ID NO: 111357 - protein, 10 aa, Homo Sapiens
DEFSHQVQEW

SEQ ID NO: 111358 - protein, 10 aa, Homo Sapiens
DEHEGPALYY

SEQ ID NO: 111359 - protein, 10 aa, Homo Sapiens
DEIENVAKQF

SEQ ID NO: 111360 - protein, 10 aa, Homo Sapiens
DELKIPIRSW

SEQ ID NO: 111361 - protein, 10 aa, Homo Sapiens
DELPQSVLKW

SEQ ID NO: 111362 - protein, 10 aa, Homo Sapiens
DEQTPIHISW

SEQ ID NO: 111363 - protein, 10 aa, Homo Sapiens
DEVFFSEKIY

SEQ ID NO: 111364 - protein, 10 aa, Homo Sapiens
DEVIIPHSGW

SEQ ID NO: 111365 - protein, 10 aa, Homo Sapiens
EEAIIYSYGF

SEQ ID NO: 111366 - protein, 10 aa, Homo Sapiens
EEALILDNKY

SEQ ID NO: 111367 - protein, 10 aa, Homo Sapiens
EEAPLVTKAF

SEQ ID NO: 111368 - protein, 10 aa, Homo Sapiens
EEARPLVEFY

SEQ ID NO: 111369 - protein, 10 aa, Homo Sapiens
EEATDLLAYW

SEQ ID NO: 111370 - protein, 10 aa, Homo Sapiens
EEDAALFKAW

SEQ ID NO: 111371 - protein, 10 aa, Homo Sapiens
EEDPNTHILY

SEQ ID NO: 111372 - protein, 10 aa, Homo Sapiens
EEDRVVVIRF

SEQ ID NO: 111373 - protein, 10 aa, Homo Sapiens
EEEGNLLRSW

SEQ ID NO: 111374 - protein, 10 aa, Homo Sapiens
EEEKYAFVNW

SEQ ID NO: 111375 - protein, 10 aa, Homo Sapiens
EEFAAALYHF

SEQ ID NO: 111376 - protein, 10 aa, Homo Sapiens
EEFDARWVTY

SEQ ID NO: 111377 - protein, 10 aa, Homo Sapiens
EEFDRLVKEY

SEQ ID NO: 111378 - protein, 10 aa, Homo Sapiens
EEFEKALVWY

SEQ ID NO: 111379 - protein, 10 aa, Homo Sapiens
EEFEKLYASY

SEQ ID NO: 111380 - protein, 10 aa, Homo Sapiens
EEFELLGKAY

SEQ ID NO: 111381 - protein, 10 aa, Homo Sapiens
EEFFGDLNNF

SEQ ID NO: 111382 - protein, 10 aa, Homo Sapiens
EEFLNGRAVY

SEQ ID NO: 111383 - protein, 10 aa, Homo Sapiens
EEFQKELSQW

SEQ ID NO: 111384 - protein, 10 aa, Homo Sapiens
EEFVIVKALY

SEQ ID NO: 111385 - protein, 10 aa, Homo Sapiens
EEGEIPWLQY

SEQ ID NO: 111386 - protein, 10 aa, Homo Sapiens
EEGHDFIQEF

SEQ ID NO: 111387 - protein, 10 aa, Homo Sapiens
EEHVIIQAEF

SEQ ID NO: 111388 - protein, 10 aa, Homo Sapiens
EEIAQLARQY

SEQ ID NO: 111389 - protein, 10 aa, Homo Sapiens
EEIDLRSVGW

SEQ ID NO: 111390 - protein, 10 aa, Homo Sapiens
EEIHATGFNY

SEQ ID NO: 111391 - protein, 10 aa, Homo Sapiens
EEIKQIWQQY

SEQ ID NO: 111392 - protein, 10 aa, Homo Sapiens
EEIPLIKSAY

SEQ ID NO: 111393 - protein, 10 aa, Homo Sapiens
EEIQTVFNKY

SEQ ID NO: 111394 - protein, 10 aa, Homo Sapiens
EEIREAFRVF

SEQ ID NO: 111395 - protein, 10 aa, Homo Sapiens
EEIRNIILKL

SEQ ID NO: 111396 - protein, 10 aa, Homo Sapiens
EEISNMIHSY

SEQ ID NO: 111397 - protein, 10 aa, Homo Sapiens
EEISTLVQKL

SEQ ID NO: 111398 - protein, 10 aa, Homo Sapiens
EELAENILKW

SEQ ID NO: 111399 - protein, 10 aa, Homo Sapiens
EELASWGHEY

SEQ ID NO: 111400 - protein, 10 aa, Homo Sapiens
EELDFQKNIY

SEQ ID NO: 111401 - protein, 10 aa, Homo Sapiens
EELDGLFRRY

SEQ ID NO: 111402 - protein, 10 aa, Homo Sapiens
EELDLPAVFL

SEQ ID NO: 111403 - protein, 10 aa, Homo Sapiens
EELEVDFKKL

SEQ ID NO: 111404 - protein, 10 aa, Homo Sapiens
EELGELLQQF

SEQ ID NO: 111405 - protein, 10 aa, Homo Sapiens
EELGLIEQAY

SEQ ID NO: 111406 - protein, 10 aa, Homo Sapiens
EELLGDGHSY

SEQ ID NO: 111407 - protein, 10 aa, Homo Sapiens
EELNDLIQRF

SEQ ID NO: 111408 - protein, 10 aa, Homo Sapiens
EELNKLIQEF

SEQ ID NO: 111409 - protein, 10 aa, Homo Sapiens
EELPEKLKLY

SEQ ID NO: 111410 - protein, 10 aa, Homo Sapiens
EELPGLDSQW

SEQ ID NO: 111411 - protein, 10 aa, Homo Sapiens
EELQKIYKTY

SEQ ID NO: 111412 - protein, 10 aa, Homo Sapiens
EELRELAESW

SEQ ID NO: 111413 - protein, 10 aa, Homo Sapiens
EELYGLALRF

SEQ ID NO: 111414 - protein, 10 aa, Homo Sapiens
EEMDFERGIW

SEQ ID NO: 111415 - protein, 10 aa, Homo Sapiens
EEMDLKVLQF

SEQ ID NO: 111416 - protein, 10 aa, Homo Sapiens
EEMEAFPEKF

SEQ ID NO: 111417 - protein, 10 aa, Homo Sapiens
EEMGDYIRSY

SEQ ID NO: 111418 - protein, 10 aa, Homo Sapiens
EEMSVPLKEL

SEQ ID NO: 111419 - protein, 10 aa, Homo Sapiens
EEMYDIFGKY

SEQ ID NO: 111420 - protein, 10 aa, Homo Sapiens
EENPSLNIQF

SEQ ID NO: 111421 - protein, 10 aa, Homo Sapiens
EENQELVTRW

SEQ ID NO: 111422 - protein, 10 aa, Homo Sapiens
EEPDVIFQNF

SEQ ID NO: 111423 - protein, 10 aa, Homo Sapiens
EEPIYIITEY

SEQ ID NO: 111424 - protein, 10 aa, Homo Sapiens
EEQLIDGILY

SEQ ID NO: 111425 - protein, 10 aa, Homo Sapiens
EEQQDILSKF

SEQ ID NO: 111426 - protein, 10 aa, Homo Sapiens
EESFAEHLGY

SEQ ID NO: 111427 - protein, 10 aa, Homo Sapiens
EETHSIFLWY

SEQ ID NO: 111428 - protein, 10 aa, Homo Sapiens
EETQVILREY

SEQ ID NO: 111429 - protein, 10 aa, Homo Sapiens
EETTDLLAHW

SEQ ID NO: 111430 - protein, 10 aa, Homo Sapiens
EETVFYGLQY

SEQ ID NO: 111431 - protein, 10 aa, Homo Sapiens
EEVAELFQRL

SEQ ID NO: 111432 - protein, 10 aa, Homo Sapiens
EEVEAKFKRY

SEQ ID NO: 111433 - protein, 10 aa, Homo Sapiens
EEVFLIGKNF

SEQ ID NO: 111434 - protein, 10 aa, Homo Sapiens
EEVFPLAMNY

SEQ ID NO: 111435 - protein, 10 aa, Homo Sapiens
EEVGDFIQRY

SEQ ID NO: 111436 - protein, 10 aa, Homo Sapiens
EEVHDLERKY

SEQ ID NO: 111437 - protein, 10 aa, Homo Sapiens
EEVLAVFKSY

SEQ ID NO: 111438 - protein, 10 aa, Homo Sapiens
EEVLIHGVSY

SEQ ID NO: 111439 - protein, 10 aa, Homo Sapiens
EEVLIKNGEI

SEQ ID NO: 111440 - protein, 10 aa, Homo Sapiens
EEVLIPDQKY

SEQ ID NO: 111441 - protein, 10 aa, Homo Sapiens
EEVSPNLVRY

SEQ ID NO: 111442 - protein, 10 aa, Homo Sapiens
EEVSPQLFTF

SEQ ID NO: 111443 - protein, 10 aa, Homo Sapiens
EEVTELLARY

SEQ ID NO: 111444 - protein, 10 aa, Homo Sapiens
EEVVSVLHVF

SEQ ID NO: 111445 - protein, 10 aa, Homo Sapiens
EEWEAEFQRY

SEQ ID NO: 111446 - protein, 10 aa, Homo Sapiens
EEWGKLIYQW

SEQ ID NO: 111447 - protein, 10 aa, Homo Sapiens
EEYEREGITW

SEQ ID NO: 111448 - protein, 10 aa, Homo Sapiens
EEYFGFIEQY

SEQ ID NO: 111449 - protein, 10 aa, Homo Sapiens
FEIEELNRKY

SEQ ID NO: 111450 - protein, 10 aa, Homo Sapiens
FEIVLNDYKW

SEQ ID NO: 111451 - protein, 10 aa, Homo Sapiens
FEVESLFQKY

SEQ ID NO: 111452 - protein, 10 aa, Homo Sapiens
FEYDGKINAW

SEQ ID NO: 111453 - protein, 10 aa, Homo Sapiens
GEIDQQYSRF

SEQ ID NO: 111454 - protein, 10 aa, Homo Sapiens
GEIEGLNDTF

SEQ ID NO: 111455 - protein, 10 aa, Homo Sapiens
GELKIADFGW

SEQ ID NO: 111456 - protein, 10 aa, Homo Sapiens
GEVLIDTHLF

SEQ ID NO: 111457 - protein, 10 aa, Homo Sapiens
GEWIRQNGGW

SEQ ID NO: 111458 - protein, 10 aa, Homo Sapiens
GEWTPTLQHY

SEQ ID NO: 111459 - protein, 10 aa, Homo Sapiens
HEGPVWQVAW

SEQ ID NO: 111460 - protein, 10 aa, Homo Sapiens
HEILIGYLEY

SEQ ID NO: 111461 - protein, 10 aa, Homo Sapiens
HEILLHPRYF

SEQ ID NO: 111462 - protein, 10 aa, Homo Sapiens
HEINGLLVGF

SEQ ID NO: 111463 - protein, 10 aa, Homo Sapiens
HEIYTVGKRF

SEQ ID NO: 111464 - protein, 10 aa, Homo Sapiens
HELGNVFLKF

SEQ ID NO: 111465 - protein, 10 aa, Homo Sapiens
HEQEAILHNF

SEQ ID NO: 111466 - protein, 10 aa, Homo Sapiens
HESPALILLF

SEQ ID NO: 111467 - protein, 10 aa, Homo Sapiens
HEVILKNITW

SEQ ID NO: 111468 - protein, 10 aa, Homo Sapiens
IEFPGGKETW

SEQ ID NO: 111469 - protein, 10 aa, Homo Sapiens
IEIAGVKLLY

SEQ ID NO: 111470 - protein, 10 aa, Homo Sapiens
IELEETIKVW

SEQ ID NO: 111471 - protein, 10 aa, Homo Sapiens
KEFEDGIINW

SEQ ID NO: 111472 - protein, 10 aa, Homo Sapiens
KEFTGIDNLW

SEQ ID NO: 111473 - protein, 10 aa, Homo Sapiens
KEGDLPPLWW

SEQ ID NO: 111474 - protein, 10 aa, Homo Sapiens
KEIKDILIQY

SEQ ID NO: 111475 - protein, 10 aa, Homo Sapiens
KEINTQILFW

SEQ ID NO: 111476 - protein, 10 aa, Homo Sapiens
KELFEGVQKW

SEQ ID NO: 111477 - protein, 10 aa, Homo Sapiens
KELWAVLNGW

SEQ ID NO: 111478 - protein, 10 aa, Homo Sapiens
KENSDVIALW

SEQ ID NO: 111479 - protein, 10 aa, Homo Sapiens
LEAHETFNEW

SEQ ID NO: 111480 - protein, 10 aa, Homo Sapiens
LEELYTKKLW

SEQ ID NO: 111481 - protein, 10 aa, Homo Sapiens
LEEPTVIKKY

SEQ ID NO: 111482 - protein, 10 aa, Homo Sapiens
LEHPVLHVSW

SEQ ID NO: 111483 - protein, 10 aa, Homo Sapiens
LEIEAENHYW

SEQ ID NO: 111484 - protein, 10 aa, Homo Sapiens
LEINDVTRAW

SEQ ID NO: 111485 - protein, 10 aa, Homo Sapiens
LENDKTIKLW

SEQ ID NO: 111486 - protein, 10 aa, Homo Sapiens
LEPEELYQTF

SEQ ID NO: 111487 - protein, 10 aa, Homo Sapiens
LESFIDTQKF

SEQ ID NO: 111488 - protein, 10 aa, Homo Sapiens
LPDTQTARVW

SEQ ID NO: 111489 - protein, 10 aa, Homo Sapiens
MEDHLEILEW

SEQ ID NO: 111490 - protein, 10 aa, Homo Sapiens
MEFLFNKTGW

SEQ ID NO: 111491 - protein, 10 aa, Homo Sapiens
MEIDIPHVWL

SEQ ID NO: 111492 - protein, 10 aa, Homo Sapiens
MEIQEAFLRF

SEQ ID NO: 111493 - protein, 10 aa, Homo Sapiens
MEITEELRQY

SEQ ID NO: 111494 - protein, 10 aa, Homo Sapiens
MELPHGGEGW

SEQ ID NO: 111495 - protein, 10 aa, Homo Sapiens
MEQPIKVTEW

SEQ ID NO: 111496 - protein, 10 aa, Homo Sapiens
MEVDPIGHLY

SEQ ID NO: 111497 - protein, 10 aa, Homo Sapiens
MEVEVDGQKF

SEQ ID NO: 111498 - protein, 10 aa, Homo Sapiens
MEWQPEEQAW

SEQ ID NO: 111499 - protein, 10 aa, Homo Sapiens
NEDEPIRVSY

SEQ ID NO: 111500 - protein, 10 aa, Homo Sapiens
NEDNGIIKAF

SEQ ID NO: 111501 - protein, 10 aa, Homo Sapiens
NEDPQLKSLW

SEQ ID NO: 111502 - protein, 10 aa, Homo Sapiens
NEFGLTSLRW

SEQ ID NO: 111503 - protein, 10 aa, Homo Sapiens
NEIEDTFRQF

SEQ ID NO: 111504 - protein, 10 aa, Homo Sapiens
NELDLKLVSF

SEQ ID NO: 111505 - protein, 10 aa, Homo Sapiens
NELENFTKQF

SEQ ID NO: 111506 - protein, 10 aa, Homo Sapiens
NEPILYGRSY

SEQ ID NO: 111507 - protein, 10 aa, Homo Sapiens
NEVSVIKEGW

SEQ ID NO: 111508 - protein, 10 aa, Homo Sapiens
NEVVAGIKEY

SEQ ID NO: 111509 - protein, 10 aa, Homo Sapiens
NEVYEAVKNY

SEQ ID NO: 111510 - protein, 10 aa, Homo Sapiens
QEAIQDLWQW

SEQ ID NO: 111511 - protein, 10 aa, Homo Sapiens
QEALNLFKSI

SEQ ID NO: 111512 - protein, 10 aa, Homo Sapiens
QEARNIYQEF

SEQ ID NO: 111513 - protein, 10 aa, Homo Sapiens
QEDFGIFQAW

SEQ ID NO: 111514 - protein, 10 aa, Homo Sapiens
QEDPEAFLLY

SEQ ID NO: 111515 - protein, 10 aa, Homo Sapiens
QEFDSGLLHW

SEQ ID NO: 111516 - protein, 10 aa, Homo Sapiens
QEHIDLGIKY

SEQ ID NO: 111517 - protein, 10 aa, Homo Sapiens
QEIDILRTLY

SEQ ID NO: 111518 - protein, 10 aa, Homo Sapiens
QEIDLTGVKL

SEQ ID NO: 111519 - protein, 10 aa, Homo Sapiens
QEIRSLFEQY

SEQ ID NO: 111520 - protein, 10 aa, Homo Sapiens
QELADLFVNY

SEQ ID NO: 111521 - protein, 10 aa, Homo Sapiens
QELASLLRTY

SEQ ID NO: 111522 - protein, 10 aa, Homo Sapiens
QELELRSLGY

SEQ ID NO: 111523 - protein, 10 aa, Homo Sapiens
QELLTIAERW

SEQ ID NO: 111524 - protein, 10 aa, Homo Sapiens
QELLTVSERW

SEQ ID NO: 111525 - protein, 10 aa, Homo Sapiens
QELQEINRVY

SEQ ID NO: 111526 - protein, 10 aa, Homo Sapiens
QELQTISPLF

SEQ ID NO: 111527 - protein, 10 aa, Homo Sapiens
QENEHIYNLW

SEQ ID NO: 111528 - protein, 10 aa, Homo Sapiens
QEVLWPLPAY

SEQ ID NO: 111529 - protein, 10 aa, Homo Sapiens
QEYLDTLYRY

SEQ ID NO: 111530 - protein, 10 aa, Homo Sapiens
QEYPDLIHIY

SEQ ID NO: 111531 - protein, 10 aa, Homo Sapiens
RDMPIQAFLL

SEQ ID NO: 111532 - protein, 10 aa, Homo Sapiens
REHDIAIKFF

SEQ ID NO: 111533 - protein, 10 aa, Homo Sapiens
RELPEPLLTF

SEQ ID NO: 111534 - protein, 10 aa, Homo Sapiens
RELPEPLMTF

SEQ ID NO: 111535 - protein, 10 aa, Homo Sapiens
RENYDIIKTY

SEQ ID NO: 111536 - protein, 10 aa, Homo Sapiens
REVSVPTFSW

SEQ ID NO: 111537 - protein, 10 aa, Homo Sapiens
SEALALTQTW

SEQ ID NO: 111538 - protein, 10 aa, Homo Sapiens
SEAYIDARTL

SEQ ID NO: 111539 - protein, 10 aa, Homo Sapiens
SEEENVVLKF

SEQ ID NO: 111540 - protein, 10 aa, Homo Sapiens
SEEGPDVLRW

SEQ ID NO: 111541 - protein, 10 aa, Homo Sapiens
SEEPLGRQLW

SEQ ID NO: 111542 - protein, 10 aa, Homo Sapiens
SEFIDSQRVW

SEQ ID NO: 111543 - protein, 10 aa, Homo Sapiens
SEFKEFSQSF

SEQ ID NO: 111544 - protein, 10 aa, Homo Sapiens
SEFNFSSKTY

SEQ ID NO: 111545 - protein, 10 aa, Homo Sapiens
SEFVIPSVYW

SEQ ID NO: 111546 - protein, 10 aa, Homo Sapiens
SEGELVELRW

SEQ ID NO: 111547 - protein, 10 aa, Homo Sapiens
SEGSFLLTTF

SEQ ID NO: 111548 - protein, 10 aa, Homo Sapiens
SEIDQINKVF

SEQ ID NO: 111549 - protein, 10 aa, Homo Sapiens
SEIDQLFRIF

SEQ ID NO: 111550 - protein, 10 aa, Homo Sapiens
SEIGGITIAW

SEQ ID NO: 111551 - protein, 10 aa, Homo Sapiens
SEIYIHGLGL

SEQ ID NO: 111552 - protein, 10 aa, Homo Sapiens
SELDKLLSSF

SEQ ID NO: 111553 - protein, 10 aa, Homo Sapiens
SELDNVTFSF

SEQ ID NO: 111554 - protein, 10 aa, Homo Sapiens
SELKDFFQSY

SEQ ID NO: 111555 - protein, 10 aa, Homo Sapiens
SELLGLLKTY

SEQ ID NO: 111556 - protein, 10 aa, Homo Sapiens
SELNPNAEVW

SEQ ID NO: 111557 - protein, 10 aa, Homo Sapiens
SELTAEKLGF

SEQ ID NO: 111558 - protein, 10 aa, Homo Sapiens
SENITQKVVW

SEQ ID NO: 111559 - protein, 10 aa, Homo Sapiens
SEPDFVAKFY

SEQ ID NO: 111560 - protein, 10 aa, Homo Sapiens
SEPDNLVITW

SEQ ID NO: 111561 - protein, 10 aa, Homo Sapiens
SEPFHLIVSY

SEQ ID NO: 111562 - protein, 10 aa, Homo Sapiens
SEPVGIYQGF

SEQ ID NO: 111563 - protein, 10 aa, Homo Sapiens
SEQPFLLVTY

SEQ ID NO: 111564 - protein, 10 aa, Homo Sapiens
SESTNQRVLW

SEQ ID NO: 111565 - protein, 10 aa, Homo Sapiens
SEVEKPLMNF

SEQ ID NO: 111566 - protein, 10 aa, Homo Sapiens
SEVILPVPAF

SEQ ID NO: 111567 - protein, 10 aa, Homo Sapiens
SEVVTVFQYY

SEQ ID NO: 111568 - protein, 10 aa, Homo Sapiens
TEAPVLNIQF

SEQ ID NO: 111569 - protein, 10 aa, Homo Sapiens
TEEFNREMFW

SEQ ID NO: 111570 - protein, 10 aa, Homo Sapiens
TEILLRKLPF

SEQ ID NO: 111571 - protein, 10 aa, Homo Sapiens
TEITDDLHFY

SEQ ID NO: 111572 - protein, 10 aa, Homo Sapiens
TELELKWQHW

SEQ ID NO: 111573 - protein, 10 aa, Homo Sapiens
TENDHVLLFW

SEQ ID NO: 111574 - protein, 10 aa, Homo Sapiens
TEVKVEPMTY

SEQ ID NO: 111575 - protein, 10 aa, Homo Sapiens
TEVSLLRVGW

SEQ ID NO: 111576 - protein, 10 aa, Homo Sapiens
VEVPEGPRTW

SEQ ID NO: 111577 - protein, 10 aa, Homo Sapiens
YEFDFSKVYW

SEQ ID NO: 111578 - protein, 10 aa, Homo Sapiens
YEILATHPTW

SEQ ID NO: 111579 - protein, 10 aa, Homo Sapiens
YEVEIDGKTY

SEQ ID NO: 111580 - protein, 11 aa, Homo Sapiens
AEAFEAIPRAL

SEQ ID NO: 111581 - protein, 11 aa, Homo Sapiens
AEALGIVPLQY

SEQ ID NO: 111582 - protein, 11 aa, Homo Sapiens
AEALLSDLHAF

SEQ ID NO: 111583 - protein, 11 aa, Homo Sapiens
AEALPRPNWEL

SEQ ID NO: 111584 - protein, 11 aa, Homo Sapiens
AEAQLRFIQAW

SEQ ID NO: 111585 - protein, 11 aa, Homo Sapiens
AEASALYGRAL

SEQ ID NO: 111586 - protein, 11 aa, Homo Sapiens
AEDLNSRVSYW

SEQ ID NO: 111587 - protein, 11 aa, Homo Sapiens
AEDLNTRVAYW

SEQ ID NO: 111588 - protein, 11 aa, Homo Sapiens
AEDPACIPIFW

SEQ ID NO: 111589 - protein, 11 aa, Homo Sapiens
AEDPNLNQPVW

SEQ ID NO: 111590 - protein, 11 aa, Homo Sapiens
AEFEVPKLVQY

SEQ ID NO: 111591 - protein, 11 aa, Homo Sapiens
AEFLQKLLPGY

SEQ ID NO: 111592 - protein, 11 aa, Homo Sapiens
AEGDTGLPRVW

SEQ ID NO: 111593 - protein, 11 aa, Homo Sapiens
AEGIHTGQFVY

SEQ ID NO: 111594 - protein, 11 aa, Homo Sapiens
AEHIAQGLRLY

SEQ ID NO: 111595 - protein, 11 aa, Homo Sapiens
AEIAAQRTINW

SEQ ID NO: 111596 - protein, 11 aa, Homo Sapiens
AEIDLQELQGY

SEQ ID NO: 111597 - protein, 11 aa, Homo Sapiens
AEINENNVREF

SEQ ID NO: 111598 - protein, 11 aa, Homo Sapiens
AEIQDGRFNLF

SEQ ID NO: 111599 - protein, 11 aa, Homo Sapiens
AEIQNVEGQNL

SEQ ID NO: 111600 - protein, 11 aa, Homo Sapiens
AELDPHILAVF

SEQ ID NO: 111601 - protein, 11 aa, Homo Sapiens
AELDPSIAVGF

SEQ ID NO: 111602 - protein, 11 aa, Homo Sapiens
AELEDDFKEGY

SEQ ID NO: 111603 - protein, 11 aa, Homo Sapiens
AELLNSKLPRW

SEQ ID NO: 111604 - protein, 11 aa, Homo Sapiens
AELLQKVITLY

SEQ ID NO: 111605 - protein, 11 aa, Homo Sapiens
AELPAKILVEF

SEQ ID NO: 111606 - protein, 11 aa, Homo Sapiens
AEMLESVIKNY

SEQ ID NO: 111607 - protein, 11 aa, Homo Sapiens
AENIPENPLKY

SEQ ID NO: 111608 - protein, 11 aa, Homo Sapiens
AEPLPSNILEW

SEQ ID NO: 111609 - protein, 11 aa, Homo Sapiens
AEQELANLEKW

SEQ ID NO: 111610 - protein, 11 aa, Homo Sapiens
AEQMFQGIILF

SEQ ID NO: 111611 - protein, 11 aa, Homo Sapiens
AERIMEAIELY

SEQ ID NO: 111612 - protein, 11 aa, Homo Sapiens
AEVALATGQFL

SEQ ID NO: 111613 - protein, 11 aa, Homo Sapiens
AEVFPLKVFGY

SEQ ID NO: 111614 - protein, 11 aa, Homo Sapiens
AEWAIENPAVF

SEQ ID NO: 111615 - protein, 11 aa, Homo Sapiens
AEWKDGLNEAW

SEQ ID NO: 111616 - protein, 11 aa, Homo Sapiens
AEYIQKNVQLY

SEQ ID NO: 111617 - protein, 11 aa, Homo Sapiens
AEYPFSSEQKW

SEQ ID NO: 111618 - protein, 11 aa, Homo Sapiens
DEIDAIATKRF

SEQ ID NO: 111619 - protein, 11 aa, Homo Sapiens
DEIDAIGGARF

SEQ ID NO: 111620 - protein, 11 aa, Homo Sapiens
DELEIIEGMKF

SEQ ID NO: 111621 - protein, 11 aa, Homo Sapiens
DEMTGYVATRW

SEQ ID NO: 111622 - protein, 11 aa, Homo Sapiens
DGVTPLIGEVW

SEQ ID NO: 111623 - protein, 11 aa, Homo Sapiens
EEAALEQAVKF

SEQ ID NO: 111624 - protein, 11 aa, Homo Sapiens
EEADQLRALGW

SEQ ID NO: 111625 - protein, 11 aa, Homo Sapiens
EEAIIEPVIKW

SEQ ID NO: 111626 - protein, 11 aa, Homo Sapiens
EEALQTIFNRW

SEQ ID NO: 111627 - protein, 11 aa, Homo Sapiens
EEAQFETKKLY

SEQ ID NO: 111628 - protein, 11 aa, Homo Sapiens
EEASFDGTFLW

SEQ ID NO: 111629 - protein, 11 aa, Homo Sapiens
EEDQAAELRAY

SEQ ID NO: 111630 - protein, 11 aa, Homo Sapiens
EEFDARWVTYF

SEQ ID NO: 111631 - protein, 11 aa, Homo Sapiens
EEFKDVLLTAW

SEQ ID NO: 111632 - protein, 11 aa, Homo Sapiens
EEFSRAAEKLY

SEQ ID NO: 111633 - protein, 11 aa, Homo Sapiens
EEIAIIPSKKL

SEQ ID NO: 111634 - protein, 11 aa, Homo Sapiens
EEIDENFKALF

SEQ ID NO: 111635 - protein, 11 aa, Homo Sapiens
EEIDTSRLFEW

SEQ ID NO: 111636 - protein, 11 aa, Homo Sapiens
EEINKIIRDLW

SEQ ID NO: 111637 - protein, 11 aa, Homo Sapiens
EEIPNLENSNF

SEQ ID NO: 111638 - protein, 11 aa, Homo Sapiens
EEIYAPKLQEF

SEQ ID NO: 111639 - protein, 11 aa, Homo Sapiens
EEIYPPEVAEF

SEQ ID NO: 111640 - protein, 11 aa, Homo Sapiens
EEIYPPKLHQF

SEQ ID NO: 111641 - protein, 11 aa, Homo Sapiens
EELDPESREYW

SEQ ID NO: 111642 - protein, 11 aa, Homo Sapiens
EELDSLIKATI

SEQ ID NO: 111643 - protein, 11 aa, Homo Sapiens
EELTLEGIKQF

SEQ ID NO: 111644 - protein, 11 aa, Homo Sapiens
EELTLEGIRQF

SEQ ID NO: 111645 - protein, 11 aa, Homo Sapiens
EELTVQVARVY

SEQ ID NO: 111646 - protein, 11 aa, Homo Sapiens
EEMPLNVADLI

SEQ ID NO: 111647 - protein, 11 aa, Homo Sapiens
EENDLGLFGYW

SEQ ID NO: 111648 - protein, 11 aa, Homo Sapiens
EEPPYAIKAGW

SEQ ID NO: 111649 - protein, 11 aa, Homo Sapiens
EEQRIKDMDLW

SEQ ID NO: 111650 - protein, 11 aa, Homo Sapiens
EESDIKWASRW

SEQ ID NO: 111651 - protein, 11 aa, Homo Sapiens
EETHTNEFITW

SEQ ID NO: 111652 - protein, 11 aa, Homo Sapiens
EETPLTAAQLF

SEQ ID NO: 111653 - protein, 11 aa, Homo Sapiens
EEVDLSKDIQH

SEQ ID NO: 111654 - protein, 11 aa, Homo Sapiens
EEVFETIIHSY

SEQ ID NO: 111655 - protein, 11 aa, Homo Sapiens
EEVPTQESVKW

SEQ ID NO: 111656 - protein, 11 aa, Homo Sapiens
EEVSIEVLKTY

SEQ ID NO: 111657 - protein, 11 aa, Homo Sapiens
EEWNDPPAVKW

SEQ ID NO: 111658 - protein, 11 aa, Homo Sapiens
EEYPDRIMNTF

SEQ ID NO: 111659 - protein, 11 aa, Homo Sapiens
EEYYPNCEVVF

SEQ ID NO: 111660 - protein, 11 aa, Homo Sapiens
FEADSTVIEKW

SEQ ID NO: 111661 - protein, 11 aa, Homo Sapiens
GEHLPVGGFTY

SEQ ID NO: 111662 - protein, 11 aa, Homo Sapiens
GEIDLAKLKKF

SEQ ID NO: 111663 - protein, 11 aa, Homo Sapiens
GEWASGGVRSF

SEQ ID NO: 111664 - protein, 11 aa, Homo Sapiens
HEERFLKNIGW

SEQ ID NO: 111665 - protein, 11 aa, Homo Sapiens
IEFQPPEAKKF

SEQ ID NO: 111666 - protein, 11 aa, Homo Sapiens
IEISELPVRTW

SEQ ID NO: 111667 - protein, 11 aa, Homo Sapiens
IEVFDPDANTW

SEQ ID NO: 111668 - protein, 11 aa, Homo Sapiens
IGGTDTLEGGW

SEQ ID NO: 111669 - protein, 11 aa, Homo Sapiens
KEFSAENVTFW

SEQ ID NO: 111670 - protein, 11 aa, Homo Sapiens
KEFSEENVLFW

SEQ ID NO: 111671 - protein, 11 aa, Homo Sapiens
KEMDLSVETLF

SEQ ID NO: 111672 - protein, 11 aa, Homo Sapiens
LEHVPNSVRLW

SEQ ID NO: 111673 - protein, 11 aa, Homo Sapiens
LEISAEDAERW

SEQ ID NO: 111674 - protein, 11 aa, Homo Sapiens
MEIDIPHVWLY

SEQ ID NO: 111675 - protein, 11 aa, Homo Sapiens
MEITEELRQYF

SEQ ID NO: 111676 - protein, 11 aa, Homo Sapiens
MELSAVGERVF

SEQ ID NO: 111677 - protein, 11 aa, Homo Sapiens
NEFIDASRLVY

SEQ ID NO: 111678 - protein, 11 aa, Homo Sapiens
NEIQEALSRSY

SEQ ID NO: 111679 - protein, 11 aa, Homo Sapiens
NEISERVVQHF

SEQ ID NO: 111680 - protein, 11 aa, Homo Sapiens
NELGVGGTSQW

SEQ ID NO: 111681 - protein, 11 aa, Homo Sapiens
NEVDPGDWQKF

SEQ ID NO: 111682 - protein, 11 aa, Homo Sapiens
PPSKQILALKQ

SEQ ID NO: 111683 - protein, 11 aa, Homo Sapiens
QEAASLLGKKY

SEQ ID NO: 111684 - protein, 11 aa, Homo Sapiens
QEALNLFKSIW

SEQ ID NO: 111685 - protein, 11 aa, Homo Sapiens
QEAPESATVIF

SEQ ID NO: 111686 - protein, 11 aa, Homo Sapiens
QEFEEKSGRTF

SEQ ID NO: 111687 - protein, 11 aa, Homo Sapiens
QEFEESLRLKF

SEQ ID NO: 111688 - protein, 11 aa, Homo Sapiens
QEGLIPGSQFW

SEQ ID NO: 111689 - protein, 11 aa, Homo Sapiens
QEHTQGFIITF

SEQ ID NO: 111690 - protein, 11 aa, Homo Sapiens
QEIGVLDQREY

SEQ ID NO: 111691 - protein, 11 aa, Homo Sapiens
QELKLIGEYGL

SEQ ID NO: 111692 - protein, 11 aa, Homo Sapiens
QELPGLSHQYW

SEQ ID NO: 111693 - protein, 11 aa, Homo Sapiens
QENHFVEGLLY

SEQ ID NO: 111694 - protein, 11 aa, Homo Sapiens
QESLPPVQFDW

SEQ ID NO: 111695 - protein, 11 aa, Homo Sapiens
QEVDASIFKAW

SEQ ID NO: 111696 - protein, 11 aa, Homo Sapiens
QEVNFQEYVTF

SEQ ID NO: 111697 - protein, 11 aa, Homo Sapiens
QEVQITEARCF

SEQ ID NO: 111698 - protein, 11 aa, Homo Sapiens
QEVTHSVRIGF

SEQ ID NO: 111699 - protein, 11 aa, Homo Sapiens
QEWNLTNIKRW

SEQ ID NO: 111700 - protein, 11 aa, Homo Sapiens
REEDAALFKAW

SEQ ID NO: 111701 - protein, 11 aa, Homo Sapiens
REFSPEEGLYY

SEQ ID NO: 111702 - protein, 11 aa, Homo Sapiens
REIFLSQPILL

SEQ ID NO: 111703 - protein, 11 aa, Homo Sapiens
RELQPSEEVTW

SEQ ID NO: 111704 - protein, 11 aa, Homo Sapiens
RENTQTTIKLF

SEQ ID NO: 111705 - protein, 11 aa, Homo Sapiens
SEALPGDNVGF

SEQ ID NO: 111706 - protein, 11 aa, Homo Sapiens
SEDGTVRLWSL

SEQ ID NO: 111707 - protein, 11 aa, Homo Sapiens
SEFDSISKNTW

SEQ ID NO: 111708 - protein, 11 aa, Homo Sapiens
SEFSEENIEFW

SEQ ID NO: 111709 - protein, 11 aa, Homo Sapiens
SEIRSISVNQW

SEQ ID NO: 111710 - protein, 11 aa, Homo Sapiens
SELDLTYGNRY

SEQ ID NO: 111711 - protein, 11 aa, Homo Sapiens
SELFMSSFQSY

SEQ ID NO: 111712 - protein, 11 aa, Homo Sapiens
SELIAKIPNFW

SEQ ID NO: 111713 - protein, 11 aa, Homo Sapiens
SELPGNPNAVW

SEQ ID NO: 111714 - protein, 11 aa, Homo Sapiens
SELRLDSVVQW

SEQ ID NO: 111715 - protein, 11 aa, Homo Sapiens
SELVPIATQTY

SEQ ID NO: 111716 - protein, 11 aa, Homo Sapiens
SESQDQVFLRW

SEQ ID NO: 111717 - protein, 11 aa, Homo Sapiens
SESTNQRVLWW

SEQ ID NO: 111718 - protein, 11 aa, Homo Sapiens
SETSVPDHVVW

SEQ ID NO: 111719 - protein, 11 aa, Homo Sapiens
SEVDLTRSFSF

SEQ ID NO: 111720 - protein, 11 aa, Homo Sapiens
SEVESILNQSF

SEQ ID NO: 111721 - protein, 11 aa, Homo Sapiens
SEVPDSVYQHL

SEQ ID NO: 111722 - protein, 11 aa, Homo Sapiens
SEVPGSIPNSW

SEQ ID NO: 111723 - protein, 11 aa, Homo Sapiens
TEADYYHTELW

SEQ ID NO: 111724 - protein, 11 aa, Homo Sapiens
TEALHFVAAAW

SEQ ID NO: 111725 - protein, 11 aa, Homo Sapiens
TEHDLLGTEAW

SEQ ID NO: 111726 - protein, 11 aa, Homo Sapiens
TEHPENFNLMF

SEQ ID NO: 111727 - protein, 11 aa, Homo Sapiens
TEHQQLEGWRW

SEQ ID NO: 111728 - protein, 11 aa, Homo Sapiens
TEHYDIPKVSW

SEQ ID NO: 111729 - protein, 11 aa, Homo Sapiens
TEIDGRSISLY

SEQ ID NO: 111730 - protein, 11 aa, Homo Sapiens
TELGRPDAEYW

SEQ ID NO: 111731 - protein, 11 aa, Homo Sapiens
TEMLPSILNQL

SEQ ID NO: 111732 - protein, 11 aa, Homo Sapiens
TEQSQIKGYVW

SEQ ID NO: 111733 - protein, 11 aa, Homo Sapiens
TETPLEGDFAW

SEQ ID NO: 111734 - protein, 11 aa, Homo Sapiens
TEYGLTFTEKW

SEQ ID NO: 111735 - protein, 11 aa, Homo Sapiens
VEAPSFLNGVW

SEQ ID NO: 111736 - protein, 11 aa, Homo Sapiens
VEATHVLPLHW

SEQ ID NO: 111737 - protein, 11 aa, Homo Sapiens
VEFSEPTIILF

SEQ ID NO: 111738 - protein, 11 aa, Homo Sapiens
VEGDPIVALSW

SEQ ID NO: 111739 - protein, 11 aa, Homo Sapiens
VEIQFPAEHGW

SEQ ID NO: 111740 - protein, 11 aa, Homo Sapiens
VEITELPVRTW

SEQ ID NO: 111741 - protein, 11 aa, Homo Sapiens
VELMDHGIVSW

SEQ ID NO: 111742 - protein, 11 aa, Homo Sapiens
VELPIEANLVW

SEQ ID NO: 111743 - protein, 11 aa, Homo Sapiens
VEMYDPTRNEW

SEQ ID NO: 111744 - protein, 11 aa, Homo Sapiens
VEVAEESGRLW

SEQ ID NO: 111745 - protein, 11 aa, Homo Sapiens
VEVSPATERQW

SEQ ID NO: 111746 - protein, 11 aa, Homo Sapiens
WEVDVQGSKAY

SEQ ID NO: 111747 - protein, 11 aa, Homo Sapiens
WEVDVTGKEAW

SEQ ID NO: 111748 - protein, 11 aa, Homo Sapiens
WEVEVGDRTSW

SEQ ID NO: 111749 - protein, 11 aa, Homo Sapiens
YEFDEQGHSTW

SEQ ID NO: 111750 - protein, 8 aa, Homo Sapiens
AEDLSHVA

SEQ ID NO: 111751 - protein, 8 aa, Homo Sapiens
AEFIVAKA

SEQ ID NO: 111752 - protein, 8 aa, Homo Sapiens
AEGKGFIA

SEQ ID NO: 111753 - protein, 8 aa, Homo Sapiens
AEGLSHTP

SEQ ID NO: 111754 - protein, 8 aa, Homo Sapiens
AEHKIFPA

SEQ ID NO: 111755 - protein, 8 aa, Homo Sapiens
AENVFFVA

SEQ ID NO: 111756 - protein, 8 aa, Homo Sapiens
AESLQPVA

SEQ ID NO: 111757 - protein, 8 aa, Homo Sapiens
AEYLQPKA

SEQ ID NO: 111758 - protein, 8 aa, Homo Sapiens
CEFIVHSA

SEQ ID NO: 111759 - protein, 8 aa, Homo Sapiens
CEKEFVSA

SEQ ID NO: 111760 - protein, 8 aa, Homo Sapiens
EALIKHKP

SEQ ID NO: 111761 - protein, 8 aa, Homo Sapiens
EEFPSFGA

SEQ ID NO: 111762 - protein, 8 aa, Homo Sapiens
EEKVFRAV

SEQ ID NO: 111763 - protein, 8 aa, Homo Sapiens
EELPHIHA

SEQ ID NO: 111764 - protein, 8 aa, Homo Sapiens
EEMKGIAA

SEQ ID NO: 111765 - protein, 8 aa, Homo Sapiens
EENFAVEA

SEQ ID NO: 111766 - protein, 8 aa, Homo Sapiens
EEQASRQI

SEQ ID NO: 111767 - protein, 8 aa, Homo Sapiens
EEVEGHVA

SEQ ID NO: 111768 - protein, 8 aa, Homo Sapiens
EEVVSREV

SEQ ID NO: 111769 - protein, 8 aa, Homo Sapiens
EEYKATVA

SEQ ID NO: 111770 - protein, 8 aa, Homo Sapiens
EHENLRTP

SEQ ID NO: 111771 - protein, 8 aa, Homo Sapiens
EHNFVAKA

SEQ ID NO: 111772 - protein, 8 aa, Homo Sapiens
EKEMEGVA

SEQ ID NO: 111773 - protein, 8 aa, Homo Sapiens
HEMVVYEA

SEQ ID NO: 111774 - protein, 8 aa, Homo Sapiens
KSQLQEAP

SEQ ID NO: 111775 - protein, 8 aa, Homo Sapiens
NEYPSRVA

SEQ ID NO: 111776 - protein, 8 aa, Homo Sapiens
QEKIFIAA

SEQ ID NO: 111777 - protein, 8 aa, Homo Sapiens
QEVLGHAA

SEQ ID NO: 111778 - protein, 8 aa, Homo Sapiens
QEVYAQVA

SEQ ID NO: 111779 - protein, 8 aa, Homo Sapiens
SEHKVWSP

SEQ ID NO: 111780 - protein, 8 aa, Homo Sapiens
SEIRVYSA

SEQ ID NO: 111781 - protein, 8 aa, Homo Sapiens
SEQRFPVA

SEQ ID NO: 111782 - protein, 8 aa, Homo Sapiens
SETKIFTA

SEQ ID NO: 111783 - protein, 8 aa, Homo Sapiens
SETKVFTA

SEQ ID NO: 111784 - protein, 8 aa, Homo Sapiens
VSLTACKV

SEQ ID NO: 111785 - protein, 8 aa, Homo Sapiens
VVESTGVF

SEQ ID NO: 111786 - protein, 9 aa, Homo Sapiens
AEAAFGLGA

SEQ ID NO: 111787 - protein, 9 aa, Homo Sapiens
AEAARILAA

SEQ ID NO: 111788 - protein, 9 aa, Homo Sapiens
AEAASKWAA

SEQ ID NO: 111789 - protein, 9 aa, Homo Sapiens
AEAAVVLEA

SEQ ID NO: 111790 - protein, 9 aa, Homo Sapiens
AEAEALPWA

SEQ ID NO: 111791 - protein, 9 aa, Homo Sapiens
AEAEALYSA

SEQ ID NO: 111792 - protein, 9 aa, Homo Sapiens
AEAEFYRQV

SEQ ID NO: 111793 - protein, 9 aa, Homo Sapiens
AEAEGLRAA

SEQ ID NO: 111794 - protein, 9 aa, Homo Sapiens
AEAERWGVA

SEQ ID NO: 111795 - protein, 9 aa, Homo Sapiens
AEAFGKIVA

SEQ ID NO: 111796 - protein, 9 aa, Homo Sapiens
AEAFRLPTA

SEQ ID NO: 111797 - protein, 9 aa, Homo Sapiens
AEAFVSQIA

SEQ ID NO: 111798 - protein, 9 aa, Homo Sapiens
AEAGDAVVA

SEQ ID NO: 111799 - protein, 9 aa, Homo Sapiens
AEAGFIHCP

SEQ ID NO: 111800 - protein, 9 aa, Homo Sapiens
AEAGGMHTV

SEQ ID NO: 111801 - protein, 9 aa, Homo Sapiens
AEAGPLASV

SEQ ID NO: 111802 - protein, 9 aa, Homo Sapiens
AEAHPELQA

SEQ ID NO: 111803 - protein, 9 aa, Homo Sapiens
AEAIGADSA

SEQ ID NO: 111804 - protein, 9 aa, Homo Sapiens
AEAIHSPQV

SEQ ID NO: 111805 - protein, 9 aa, Homo Sapiens
AEAIIRSGA

SEQ ID NO: 111806 - protein, 9 aa, Homo Sapiens
AEAIKAWTA

SEQ ID NO: 111807 - protein, 9 aa, Homo Sapiens
AEAIPEPVV

SEQ ID NO: 111808 - protein, 9 aa, Homo Sapiens
AEAIPGLAA

SEQ ID NO: 111809 - protein, 9 aa, Homo Sapiens
AEAIRILAA

SEQ ID NO: 111810 - protein, 9 aa, Homo Sapiens
AEAKENPLP

SEQ ID NO: 111811 - protein, 9 aa, Homo Sapiens
AEAKFFTES

SEQ ID NO: 111812 - protein, 9 aa, Homo Sapiens
AEALAAFTA

SEQ ID NO: 111813 - protein, 9 aa, Homo Sapiens
AEALGSTEA

SEQ ID NO: 111814 - protein, 9 aa, Homo Sapiens
AEALIKHKP

SEQ ID NO: 111815 - protein, 9 aa, Homo Sapiens
AEALPSLAA

SEQ ID NO: 111816 - protein, 9 aa, Homo Sapiens
AEALREVSA

SEQ ID NO: 111817 - protein, 9 aa, Homo Sapiens
AEALSQAVA

SEQ ID NO: 111818 - protein, 9 aa, Homo Sapiens
AEANHFIDL

SEQ ID NO: 111819 - protein, 9 aa, Homo Sapiens
AEAPASPAP

SEQ ID NO: 111820 - protein, 9 aa, Homo Sapiens
AEAPDAPEA

SEQ ID NO: 111821 - protein, 9 aa, Homo Sapiens
AEAPHIVVG

SEQ ID NO: 111822 - protein, 9 aa, Homo Sapiens
AEAPHLVQV

SEQ ID NO: 111823 - protein, 9 aa, Homo Sapiens
AEAPKFPTP

SEQ ID NO: 111824 - protein, 9 aa, Homo Sapiens
AEAPNMAVV

SEQ ID NO: 111825 - protein, 9 aa, Homo Sapiens
AEAPPAYTP

SEQ ID NO: 111826 - protein, 9 aa, Homo Sapiens
AEAPPGVET

SEQ ID NO: 111827 - protein, 9 aa, Homo Sapiens
AEAPPPKIP

SEQ ID NO: 111828 - protein, 9 aa, Homo Sapiens
AEAPPPSVV

SEQ ID NO: 111829 - protein, 9 aa, Homo Sapiens
AEAPPSVAP

SEQ ID NO: 111830 - protein, 9 aa, Homo Sapiens
AEAPTALVP

SEQ ID NO: 111831 - protein, 9 aa, Homo Sapiens
AEAQHLYQS

SEQ ID NO: 111832 - protein, 9 aa, Homo Sapiens
AEAQKLGKP

SEQ ID NO: 111833 - protein, 9 aa, Homo Sapiens
AEAQLHTTA

SEQ ID NO: 111834 - protein, 9 aa, Homo Sapiens
AEAQLWWAA

SEQ ID NO: 111835 - protein, 9 aa, Homo Sapiens
AEAQPMAVV

SEQ ID NO: 111836 - protein, 9 aa, Homo Sapiens
AEAQRWVEA

SEQ ID NO: 111837 - protein, 9 aa, Homo Sapiens
AEAQVTPKP

SEQ ID NO: 111838 - protein, 9 aa, Homo Sapiens
AEARPFEVL

SEQ ID NO: 111839 - protein, 9 aa, Homo Sapiens
AEATGAYVP

SEQ ID NO: 111840 - protein, 9 aa, Homo Sapiens
AEAVAHFEA

SEQ ID NO: 111841 - protein, 9 aa, Homo Sapiens
AEAVFASEV

SEQ ID NO: 111842 - protein, 9 aa, Homo Sapiens
AEAVLKHIA

SEQ ID NO: 111843 - protein, 9 aa, Homo Sapiens
AEAVLYEHL

SEQ ID NO: 111844 - protein, 9 aa, Homo Sapiens
AEAVNFCTA

SEQ ID NO: 111845 - protein, 9 aa, Homo Sapiens
AEAVNVAIA

SEQ ID NO: 111846 - protein, 9 aa, Homo Sapiens
AECGAFRTG

SEQ ID NO: 111847 - protein, 9 aa, Homo Sapiens
AECPNPSTP

SEQ ID NO: 111848 - protein, 9 aa, Homo Sapiens
AECTLKESA

SEQ ID NO: 111849 - protein, 9 aa, Homo Sapiens
AEDDLNTVA

SEQ ID NO: 111850 - protein, 9 aa, Homo Sapiens
AEDEGTQRL

SEQ ID NO: 111851 - protein, 9 aa, Homo Sapiens
AEDEPPAPP

SEQ ID NO: 111852 - protein, 9 aa, Homo Sapiens
AEDEWKAQV

SEQ ID NO: 111853 - protein, 9 aa, Homo Sapiens
AEDFTIFKA

SEQ ID NO: 111854 - protein, 9 aa, Homo Sapiens
AEDGEFTSA

SEQ ID NO: 111855 - protein, 9 aa, Homo Sapiens
AEDGFFVPP

SEQ ID NO: 111856 - protein, 9 aa, Homo Sapiens
AEDKKTALP

SEQ ID NO: 111857 - protein, 9 aa, Homo Sapiens
AEDLNLLIA

SEQ ID NO: 111858 - protein, 9 aa, Homo Sapiens
AEDLNTRVA

SEQ ID NO: 111859 - protein, 9 aa, Homo Sapiens
AEDPETQVV

SEQ ID NO: 111860 - protein, 9 aa, Homo Sapiens
AEDPGPAVA

SEQ ID NO: 111861 - protein, 9 aa, Homo Sapiens
AEDPVSEVP

SEQ ID NO: 111862 - protein, 9 aa, Homo Sapiens
AEEADVHVA

SEQ ID NO: 111863 - protein, 9 aa, Homo Sapiens
AEEAGFPEV

SEQ ID NO: 111864 - protein, 9 aa, Homo Sapiens
AEEAKSAIA

SEQ ID NO: 111865 - protein, 9 aa, Homo Sapiens
AEEAPKMVP

SEQ ID NO: 111866 - protein, 9 aa, Homo Sapiens
AEEAPYDAI

SEQ ID NO: 111867 - protein, 9 aa, Homo Sapiens
AEEARQMAA

SEQ ID NO: 111868 - protein, 9 aa, Homo Sapiens
AEEAYNAVV

SEQ ID NO: 111869 - protein, 9 aa, Homo Sapiens
AEECFFERV

SEQ ID NO: 111870 - protein, 9 aa, Homo Sapiens
AEEDAALQA

SEQ ID NO: 111871 - protein, 9 aa, Homo Sapiens
AEEDAWLRA

SEQ ID NO: 111872 - protein, 9 aa, Homo Sapiens
AEEDFYEKL

SEQ ID NO: 111873 - protein, 9 aa, Homo Sapiens
AEEDPPWAP

SEQ ID NO: 111874 - protein, 9 aa, Homo Sapiens
AEEEKMALP

SEQ ID NO: 111875 - protein, 9 aa, Homo Sapiens
AEEENFKKP

SEQ ID NO: 111876 - protein, 9 aa, Homo Sapiens
AEEEPNRIP

SEQ ID NO: 111877 - protein, 9 aa, Homo Sapiens
AEEEQKIAA

SEQ ID NO: 111878 - protein, 9 aa, Homo Sapiens
AEEERLKAA

SEQ ID NO: 111879 - protein, 9 aa, Homo Sapiens
AEEERMIAV

SEQ ID NO: 111880 - protein, 9 aa, Homo Sapiens
AEEERRIAA

SEQ ID NO: 111881 - protein, 9 aa, Homo Sapiens
AEEERYFRA

SEQ ID NO: 111882 - protein, 9 aa, Homo Sapiens
AEEESRVLA

SEQ ID NO: 111883 - protein, 9 aa, Homo Sapiens
AEEEYGMKA

SEQ ID NO: 111884 - protein, 9 aa, Homo Sapiens
AEEFKVPAA

SEQ ID NO: 111885 - protein, 9 aa, Homo Sapiens
AEEFVIVKA

SEQ ID NO: 111886 - protein, 9 aa, Homo Sapiens
AEEGFTQVT

SEQ ID NO: 111887 - protein, 9 aa, Homo Sapiens
AEEGGFAVV

SEQ ID NO: 111888 - protein, 9 aa, Homo Sapiens
AEEGPPLGA

SEQ ID NO: 111889 - protein, 9 aa, Homo Sapiens
AEEHLTVDA

SEQ ID NO: 111890 - protein, 9 aa, Homo Sapiens
AEEIANYRP

SEQ ID NO: 111891 - protein, 9 aa, Homo Sapiens
AEEKAVLIA

SEQ ID NO: 111892 - protein, 9 aa, Homo Sapiens
AEEKDWKTA

SEQ ID NO: 111893 - protein, 9 aa, Homo Sapiens
AEEKFTIEP

SEQ ID NO: 111894 - protein, 9 aa, Homo Sapiens
AEEKPAPQM

SEQ ID NO: 111895 - protein, 9 aa, Homo Sapiens
AEEKSKPIP

SEQ ID NO: 111896 - protein, 9 aa, Homo Sapiens
AEELALEQA

SEQ ID NO: 111897 - protein, 9 aa, Homo Sapiens
AEELEPRAP

SEQ ID NO: 111898 - protein, 9 aa, Homo Sapiens
AEELPGSHA

SEQ ID NO: 111899 - protein, 9 aa, Homo Sapiens
AEELPHIHA

SEQ ID NO: 111900 - protein, 9 aa, Homo Sapiens
AEELRAQTA

SEQ ID NO: 111901 - protein, 9 aa, Homo Sapiens
AEENGAIAA

SEQ ID NO: 111902 - protein, 9 aa, Homo Sapiens
AEEPAAAAA

SEQ ID NO: 111903 - protein, 9 aa, Homo Sapiens
AEEPASVTP

SEQ ID NO: 111904 - protein, 9 aa, Homo Sapiens
AEEPDLHGP

SEQ ID NO: 111905 - protein, 9 aa, Homo Sapiens
AEEPKPVEA

SEQ ID NO: 111906 - protein, 9 aa, Homo Sapiens
AEEPNAAVP

SEQ ID NO: 111907 - protein, 9 aa, Homo Sapiens
AEEPPAHAP

SEQ ID NO: 111908 - protein, 9 aa, Homo Sapiens
AEEPWGEEA

SEQ ID NO: 111909 - protein, 9 aa, Homo Sapiens
AEEQLRLVV

SEQ ID NO: 111910 - protein, 9 aa, Homo Sapiens
AEESTAIIA

SEQ ID NO: 111911 - protein, 9 aa, Homo Sapiens
AEEVCIHIA

SEQ ID NO: 111912 - protein, 9 aa, Homo Sapiens
AEEVWARVA

SEQ ID NO: 111913 - protein, 9 aa, Homo Sapiens
AEEYGARVV

SEQ ID NO: 111914 - protein, 9 aa, Homo Sapiens
AEFAERSVA

SEQ ID NO: 111915 - protein, 9 aa, Homo Sapiens
AEFGQAESA

SEQ ID NO: 111916 - protein, 9 aa, Homo Sapiens
AEFLQKLLP

SEQ ID NO: 111917 - protein, 9 aa, Homo Sapiens
AEFPGLPEA

SEQ ID NO: 111918 - protein, 9 aa, Homo Sapiens
AEFQVKITA

SEQ ID NO: 111919 - protein, 9 aa, Homo Sapiens
AEGAFPNLA

SEQ ID NO: 111920 - protein, 9 aa, Homo Sapiens
AEGAYQVAA

SEQ ID NO: 111921 - protein, 9 aa, Homo Sapiens
AEGDISNVA

SEQ ID NO: 111922 - protein, 9 aa, Homo Sapiens
AEGIHNFAP

SEQ ID NO: 111923 - protein, 9 aa, Homo Sapiens
AEGIKVTDA

SEQ ID NO: 111924 - protein, 9 aa, Homo Sapiens
AEGKPGVEA

SEQ ID NO: 111925 - protein, 9 aa, Homo Sapiens
AEGKPPEAP

SEQ ID NO: 111926 - protein, 9 aa, Homo Sapiens
AEGKYMAEA

SEQ ID NO: 111927 - protein, 9 aa, Homo Sapiens
AEGLMKVEA

SEQ ID NO: 111928 - protein, 9 aa, Homo Sapiens
AEGPAVSLP

SEQ ID NO: 111929 - protein, 9 aa, Homo Sapiens
AEGPEVICA

SEQ ID NO: 111930 - protein, 9 aa, Homo Sapiens
AEGPPAMLP

SEQ ID NO: 111931 - protein, 9 aa, Homo Sapiens
AEGPPTNPP

SEQ ID NO: 111932 - protein, 9 aa, Homo Sapiens
AEGPVAVVV

SEQ ID NO: 111933 - protein, 9 aa, Homo Sapiens
AEGQRWLSA

SEQ ID NO: 111934 - protein, 9 aa, Homo Sapiens
AEGVPVRGA

SEQ ID NO: 111935 - protein, 9 aa, Homo Sapiens
AEGVRVLGP

SEQ ID NO: 111936 - protein, 9 aa, Homo Sapiens
AEHENLRTP

SEQ ID NO: 111937 - protein, 9 aa, Homo Sapiens
AEHFSIIRA

SEQ ID NO: 111938 - protein, 9 aa, Homo Sapiens
AEHFSMIRA

SEQ ID NO: 111939 - protein, 9 aa, Homo Sapiens
AEHGIFLPP

SEQ ID NO: 111940 - protein, 9 aa, Homo Sapiens
AEHGSFRVT

SEQ ID NO: 111941 - protein, 9 aa, Homo Sapiens
AEHGSVALP

SEQ ID NO: 111942 - protein, 9 aa, Homo Sapiens
AEHKEFITA

SEQ ID NO: 111943 - protein, 9 aa, Homo Sapiens
AEHKYPTLP

SEQ ID NO: 111944 - protein, 9 aa, Homo Sapiens
AEHLMLLEA

SEQ ID NO: 111945 - protein, 9 aa, Homo Sapiens
AEHMLMRVP

SEQ ID NO: 111946 - protein, 9 aa, Homo Sapiens
AEHNAALQA

SEQ ID NO: 111947 - protein, 9 aa, Homo Sapiens
AEHNFVAKA

SEQ ID NO: 111948 - protein, 9 aa, Homo Sapiens
AEHPGFMKT

SEQ ID NO: 111949 - protein, 9 aa, Homo Sapiens
AEHPTIAKS

SEQ ID NO: 111950 - protein, 9 aa, Homo Sapiens
AEHPVYNMV

SEQ ID NO: 111951 - protein, 9 aa, Homo Sapiens
AEHQSFLQA

SEQ ID NO: 111952 - protein, 9 aa, Homo Sapiens
AEHRIDFVA

SEQ ID NO: 111953 - protein, 9 aa, Homo Sapiens
AEHRMLVVA

SEQ ID NO: 111954 - protein, 9 aa, Homo Sapiens
AEHSELKSP

SEQ ID NO: 111955 - protein, 9 aa, Homo Sapiens
AEHSLLDLP

SEQ ID NO: 111956 - protein, 9 aa, Homo Sapiens
AEHSPYYEA

SEQ ID NO: 111957 - protein, 9 aa, Homo Sapiens
AEHVVQPKA

SEQ ID NO: 111958 - protein, 9 aa, Homo Sapiens
AEHYDILCA

SEQ ID NO: 111959 - protein, 9 aa, Homo Sapiens
AEHYLPIFA

SEQ ID NO: 111960 - protein, 9 aa, Homo Sapiens
AEIAESVQA

SEQ ID NO: 111961 - protein, 9 aa, Homo Sapiens
AEIAHLYIA

SEQ ID NO: 111962 - protein, 9 aa, Homo Sapiens
AEIAHNVSS

SEQ ID NO: 111963 - protein, 9 aa, Homo Sapiens
AEIAKLKAA

SEQ ID NO: 111964 - protein, 9 aa, Homo Sapiens
AEIDAHLVA

SEQ ID NO: 111965 - protein, 9 aa, Homo Sapiens
AEIDEEPVS

SEQ ID NO: 111966 - protein, 9 aa, Homo Sapiens
AEIDITNVA

SEQ ID NO: 111967 - protein, 9 aa, Homo Sapiens
AEIDRRISA

SEQ ID NO: 111968 - protein, 9 aa, Homo Sapiens
AEIEDPPIP

SEQ ID NO: 111969 - protein, 9 aa, Homo Sapiens
AEIEDVKPA

SEQ ID NO: 111970 - protein, 9 aa, Homo Sapiens
AEIEKFDKS

SEQ ID NO: 111971 - protein, 9 aa, Homo Sapiens
AEIEPEAQA

SEQ ID NO: 111972 - protein, 9 aa, Homo Sapiens
AEIESIVKP

SEQ ID NO: 111973 - protein, 9 aa, Homo Sapiens
AEIFHSADA

SEQ ID NO: 111974 - protein, 9 aa, Homo Sapiens
AEIGEHVAP

SEQ ID NO: 111975 - protein, 9 aa, Homo Sapiens
AEIIFNPSA

SEQ ID NO: 111976 - protein, 9 aa, Homo Sapiens
AEIKIIREA

SEQ ID NO: 111977 - protein, 9 aa, Homo Sapiens
AEIKKCVTA

SEQ ID NO: 111978 - protein, 9 aa, Homo Sapiens
AEINATMSV

SEQ ID NO: 111979 - protein, 9 aa, Homo Sapiens
AEINGTMNA

SEQ ID NO: 111980 - protein, 9 aa, Homo Sapiens
AEINNIIKI

SEQ ID NO: 111981 - protein, 9 aa, Homo Sapiens
AEIPEGYVP

SEQ ID NO: 111982 - protein, 9 aa, Homo Sapiens
AEIPETSNA

SEQ ID NO: 111983 - protein, 9 aa, Homo Sapiens
AEIPQIFDA

SEQ ID NO: 111984 - protein, 9 aa, Homo Sapiens
AEIQETITA

SEQ ID NO: 111985 - protein, 9 aa, Homo Sapiens
AEIRAINEA

SEQ ID NO: 111986 - protein, 9 aa, Homo Sapiens
AEKAEFYQI

SEQ ID NO: 111987 - protein, 9 aa, Homo Sapiens
AEKAGTFGP

SEQ ID NO: 111988 - protein, 9 aa, Homo Sapiens
AEKAMTALA

SEQ ID NO: 111989 - protein, 9 aa, Homo Sapiens
AEKAYHEQL

SEQ ID NO: 111990 - protein, 9 aa, Homo Sapiens
AEKCFGTGA

SEQ ID NO: 111991 - protein, 9 aa, Homo Sapiens
AEKDFWELA

SEQ ID NO: 111992 - protein, 9 aa, Homo Sapiens
AEKDGVKVP

SEQ ID NO: 111993 - protein, 9 aa, Homo Sapiens
AEKEPVPVP

SEQ ID NO: 111994 - protein, 9 aa, Homo Sapiens
AEKFRNPKA

SEQ ID NO: 111995 - protein, 9 aa, Homo Sapiens
AEKFWYDMA

SEQ ID NO: 111996 - protein, 9 aa, Homo Sapiens
AEKGNFEAA

SEQ ID NO: 111997 - protein, 9 aa, Homo Sapiens
AEKKFIDIA

SEQ ID NO: 111998 - protein, 9 aa, Homo Sapiens
AEKLGFAGL

SEQ ID NO: 111999 - protein, 9 aa, Homo Sapiens
AEKPLQVAA

SEQ ID NO: 112000 - protein, 9 aa, Homo Sapiens
AEKSDFEAV

SEQ ID NO: 112001 - protein, 9 aa, Homo Sapiens
AEKSRTYVA

SEQ ID NO: 112002 - protein, 9 aa, Homo Sapiens
AEKYEWDVA

SEQ ID NO: 112003 - protein, 9 aa, Homo Sapiens
AEKYIMTSA

SEQ ID NO: 112004 - protein, 9 aa, Homo Sapiens
AEKYQTVIA

SEQ ID NO: 112005 - protein, 9 aa, Homo Sapiens
AELAEIPEG

SEQ ID NO: 112006 - protein, 9 aa, Homo Sapiens
AELATRAIP

SEQ ID NO: 112007 - protein, 9 aa, Homo Sapiens
AELCGRPGP

SEQ ID NO: 112008 - protein, 9 aa, Homo Sapiens
AELDEKISA

SEQ ID NO: 112009 - protein, 9 aa, Homo Sapiens
AELEKAHLA

SEQ ID NO: 112010 - protein, 9 aa, Homo Sapiens
AELEKHMAA

SEQ ID NO: 112011 - protein, 9 aa, Homo Sapiens
AELFEKAAA

SEQ ID NO: 112012 - protein, 9 aa, Homo Sapiens
AELGALHSA

SEQ ID NO: 112013 - protein, 9 aa, Homo Sapiens
AELGHLVVS

SEQ ID NO: 112014 - protein, 9 aa, Homo Sapiens
AELGKLYSV

SEQ ID NO: 112015 - protein, 9 aa, Homo Sapiens
AELGLTRAA

SEQ ID NO: 112016 - protein, 9 aa, Homo Sapiens
AELGMEHQA

SEQ ID NO: 112017 - protein, 9 aa, Homo Sapiens
AELGTEIAA

SEQ ID NO: 112018 - protein, 9 aa, Homo Sapiens
AELLKTLAA

SEQ ID NO: 112019 - protein, 9 aa, Homo Sapiens
AELLVSHGA

SEQ ID NO: 112020 - protein, 9 aa, Homo Sapiens
AELQQHDVA

SEQ ID NO: 112021 - protein, 9 aa, Homo Sapiens
AELQRLVAA

SEQ ID NO: 112022 - protein, 9 aa, Homo Sapiens
AELQSRLAA

SEQ ID NO: 112023 - protein, 9 aa, Homo Sapiens
AELRPDSPA

SEQ ID NO: 112024 - protein, 9 aa, Homo Sapiens
AELSELHSA

SEQ ID NO: 112025 - protein, 9 aa, Homo Sapiens
AELVKTYCS

SEQ ID NO: 112026 - protein, 9 aa, Homo Sapiens
AELWKNPTA

SEQ ID NO: 112027 - protein, 9 aa, Homo Sapiens
AELYFHDSA

SEQ ID NO: 112028 - protein, 9 aa, Homo Sapiens
AELYHIISS

SEQ ID NO: 112029 - protein, 9 aa, Homo Sapiens
AEMAPYMKR

SEQ ID NO: 112030 - protein, 9 aa, Homo Sapiens
AEMAVQQNP

SEQ ID NO: 112031 - protein, 9 aa, Homo Sapiens
AEMEKATEV

SEQ ID NO: 112032 - protein, 9 aa, Homo Sapiens
AEMENIKAI

SEQ ID NO: 112033 - protein, 9 aa, Homo Sapiens
AEMGFCHVT

SEQ ID NO: 112034 - protein, 9 aa, Homo Sapiens
AEMKAQEVA

SEQ ID NO: 112035 - protein, 9 aa, Homo Sapiens
AEMLEIVQA

SEQ ID NO: 112036 - protein, 9 aa, Homo Sapiens
AEMNGKLIA

SEQ ID NO: 112037 - protein, 9 aa, Homo Sapiens
AEMPDMYPP

SEQ ID NO: 112038 - protein, 9 aa, Homo Sapiens
AEMPDSAAA

SEQ ID NO: 112039 - protein, 9 aa, Homo Sapiens
AEMPQNYRP

SEQ ID NO: 112040 - protein, 9 aa, Homo Sapiens
AEMPTQMSP

SEQ ID NO: 112041 - protein, 9 aa, Homo Sapiens
AEMRLFYTT

SEQ ID NO: 112042 - protein, 9 aa, Homo Sapiens
AEMRQKEIP

SEQ ID NO: 112043 - protein, 9 aa, Homo Sapiens
AEMSHIPQS

SEQ ID NO: 112044 - protein, 9 aa, Homo Sapiens
AEMTTRMVA

SEQ ID NO: 112045 - protein, 9 aa, Homo Sapiens
AEMVKPSTP

SEQ ID NO: 112046 - protein, 9 aa, Homo Sapiens
AENALDVAA

SEQ ID NO: 112047 - protein, 9 aa, Homo Sapiens
AENDPFVRP

SEQ ID NO: 112048 - protein, 9 aa, Homo Sapiens
AENDVKLGA

SEQ ID NO: 112049 - protein, 9 aa, Homo Sapiens
AENEQMLKP

SEQ ID NO: 112050 - protein, 9 aa, Homo Sapiens
AENGLLMTP

SEQ ID NO: 112051 - protein, 9 aa, Homo Sapiens
AENIPVHLP

SEQ ID NO: 112052 - protein, 9 aa, Homo Sapiens
AENISSVVA

SEQ ID NO: 112053 - protein, 9 aa, Homo Sapiens
AENLEKVQA

SEQ ID NO: 112054 - protein, 9 aa, Homo Sapiens
AENLLVKEA

SEQ ID NO: 112055 - protein, 9 aa, Homo Sapiens
AENNVFHLV

SEQ ID NO: 112056 - protein, 9 aa, Homo Sapiens
AENPDIFAV

SEQ ID NO: 112057 - protein, 9 aa, Homo Sapiens
AENPFLTHL

SEQ ID NO: 112058 - protein, 9 aa, Homo Sapiens
AENPGKYNI

SEQ ID NO: 112059 - protein, 9 aa, Homo Sapiens
AENPKLISA

SEQ ID NO: 112060 - protein, 9 aa, Homo Sapiens
AENQGFVAA

SEQ ID NO: 112061 - protein, 9 aa, Homo Sapiens
AENQRITAV

SEQ ID NO: 112062 - protein, 9 aa, Homo Sapiens
AENSAVPTA

SEQ ID NO: 112063 - protein, 9 aa, Homo Sapiens
AENTIQNEA

SEQ ID NO: 112064 - protein, 9 aa, Homo Sapiens
AENVAVPEA

SEQ ID NO: 112065 - protein, 9 aa, Homo Sapiens
AENVTFWKA

SEQ ID NO: 112066 - protein, 9 aa, Homo Sapiens
AENYDIPSA

SEQ ID NO: 112067 - protein, 9 aa, Homo Sapiens
AENYLGHTA

SEQ ID NO: 112068 - protein, 9 aa, Homo Sapiens
AEPVASTPA

SEQ ID NO: 112069 - protein, 9 aa, Homo Sapiens
AEQAKVVLA

SEQ ID NO: 112070 - protein, 9 aa, Homo Sapiens
AEQATTVKA

SEQ ID NO: 112071 - protein, 9 aa, Homo Sapiens
AEQAVLAAP

SEQ ID NO: 112072 - protein, 9 aa, Homo Sapiens
AEQDFWRAV

SEQ ID NO: 112073 - protein, 9 aa, Homo Sapiens
AEQEFLANA

SEQ ID NO: 112074 - protein, 9 aa, Homo Sapiens
AEQEYNATV

SEQ ID NO: 112075 - protein, 9 aa, Homo Sapiens
AEQFKLIQA

SEQ ID NO: 112076 - protein, 9 aa, Homo Sapiens
AEQFRLEQI

SEQ ID NO: 112077 - protein, 9 aa, Homo Sapiens
AEQGHLPPP

SEQ ID NO: 112078 - protein, 9 aa, Homo Sapiens
AEQHGVWTA

SEQ ID NO: 112079 - protein, 9 aa, Homo Sapiens
AEQIARWIA

SEQ ID NO: 112080 - protein, 9 aa, Homo Sapiens
AEQIATLCA

SEQ ID NO: 112081 - protein, 9 aa, Homo Sapiens
AEQIKHILA

SEQ ID NO: 112082 - protein, 9 aa, Homo Sapiens
AEQILQHMV

SEQ ID NO: 112083 - protein, 9 aa, Homo Sapiens
AEQINKMEA

SEQ ID NO: 112084 - protein, 9 aa, Homo Sapiens
AEQIQPEEA

SEQ ID NO: 112085 - protein, 9 aa, Homo Sapiens
AEQIVPLSA

SEQ ID NO: 112086 - protein, 9 aa, Homo Sapiens
AEQKDEMVP

SEQ ID NO: 112087 - protein, 9 aa, Homo Sapiens
AEQKLRIQA

SEQ ID NO: 112088 - protein, 9 aa, Homo Sapiens
AEQLAKWIA

SEQ ID NO: 112089 - protein, 9 aa, Homo Sapiens
AEQLPYLKC

SEQ ID NO: 112090 - protein, 9 aa, Homo Sapiens
AEQLQEIIA

SEQ ID NO: 112091 - protein, 9 aa, Homo Sapiens
AEQLRVLQA

SEQ ID NO: 112092 - protein, 9 aa, Homo Sapiens
AEQLSHSVA

SEQ ID NO: 112093 - protein, 9 aa, Homo Sapiens
AEQLSLVQA

SEQ ID NO: 112094 - protein, 9 aa, Homo Sapiens
AEQLVKEGA

SEQ ID NO: 112095 - protein, 9 aa, Homo Sapiens
AEQMRLAQV

SEQ ID NO: 112096 - protein, 9 aa, Homo Sapiens
AEQPPHLTP

SEQ ID NO: 112097 - protein, 9 aa, Homo Sapiens
AEQPPRPCP

SEQ ID NO: 112098 - protein, 9 aa, Homo Sapiens
AEQPYFIEA

SEQ ID NO: 112099 - protein, 9 aa, Homo Sapiens
AEQRFLAGA

SEQ ID NO: 112100 - protein, 9 aa, Homo Sapiens
AEQRPGVAP

SEQ ID NO: 112101 - protein, 9 aa, Homo Sapiens
AEQSEIIQA

SEQ ID NO: 112102 - protein, 9 aa, Homo Sapiens
AEQSKVLSA

SEQ ID NO: 112103 - protein, 9 aa, Homo Sapiens
AEQTLSQLP

SEQ ID NO: 112104 - protein, 9 aa, Homo Sapiens
AEQTMSHLP

SEQ ID NO: 112105 - protein, 9 aa, Homo Sapiens
AEQTRAVLA

SEQ ID NO: 112106 - protein, 9 aa, Homo Sapiens
AEQVSHHPP

SEQ ID NO: 112107 - protein, 9 aa, Homo Sapiens
AEQVVARVA

SEQ ID NO: 112108 - protein, 9 aa, Homo Sapiens
AEQWKTNEA

SEQ ID NO: 112109 - protein, 9 aa, Homo Sapiens
AEQWRFSSA

SEQ ID NO: 112110 - protein, 9 aa, Homo Sapiens
AERDFIHTA

SEQ ID NO: 112111 - protein, 9 aa, Homo Sapiens
AERDILVEA

SEQ ID NO: 112112 - protein, 9 aa, Homo Sapiens
AERLQTDAA

SEQ ID NO: 112113 - protein, 9 aa, Homo Sapiens
AERMGFTEV

SEQ ID NO: 112114 - protein, 9 aa, Homo Sapiens
AERPYFMSS

SEQ ID NO: 112115 - protein, 9 aa, Homo Sapiens
AERQPCFSA

SEQ ID NO: 112116 - protein, 9 aa, Homo Sapiens
AERYDDMAA

SEQ ID NO: 112117 - protein, 9 aa, Homo Sapiens
AESDHMAIP

SEQ ID NO: 112118 - protein, 9 aa, Homo Sapiens
AESDVRMVA

SEQ ID NO: 112119 - protein, 9 aa, Homo Sapiens
AESETFLTS

SEQ ID NO: 112120 - protein, 9 aa, Homo Sapiens
AESGALIEA

SEQ ID NO: 112121 - protein, 9 aa, Homo Sapiens
AESKASLAA

SEQ ID NO: 112122 - protein, 9 aa, Homo Sapiens
AESKVSVAV

SEQ ID NO: 112123 - protein, 9 aa, Homo Sapiens
AESLGQYAA

SEQ ID NO: 112124 - protein, 9 aa, Homo Sapiens
AESLPGVEA

SEQ ID NO: 112125 - protein, 9 aa, Homo Sapiens
AESLQPVAA

SEQ ID NO: 112126 - protein, 9 aa, Homo Sapiens
AESNKAFLA

SEQ ID NO: 112127 - protein, 9 aa, Homo Sapiens
AESPALVTP

SEQ ID NO: 112128 - protein, 9 aa, Homo Sapiens
AESPGEVQA

SEQ ID NO: 112129 - protein, 9 aa, Homo Sapiens
AESPGFSQA

SEQ ID NO: 112130 - protein, 9 aa, Homo Sapiens
AESPGVPVA

SEQ ID NO: 112131 - protein, 9 aa, Homo Sapiens
AESPSCLVA

SEQ ID NO: 112132 - protein, 9 aa, Homo Sapiens
AESPVNMMP

SEQ ID NO: 112133 - protein, 9 aa, Homo Sapiens
AESRPTPMG

SEQ ID NO: 112134 - protein, 9 aa, Homo Sapiens
AESVVKLTA

SEQ ID NO: 112135 - protein, 9 aa, Homo Sapiens
AETDSVVIA

SEQ ID NO: 112136 - protein, 9 aa, Homo Sapiens
AETEFFSKA

SEQ ID NO: 112137 - protein, 9 aa, Homo Sapiens
AETKDIPAA

SEQ ID NO: 112138 - protein, 9 aa, Homo Sapiens
AETKDLLVA

SEQ ID NO: 112139 - protein, 9 aa, Homo Sapiens
AETLPEVEA

SEQ ID NO: 112140 - protein, 9 aa, Homo Sapiens
AETPGTVSP

SEQ ID NO: 112141 - protein, 9 aa, Homo Sapiens
AETQQPPAA

SEQ ID NO: 112142 - protein, 9 aa, Homo Sapiens
AETSAVCTA

SEQ ID NO: 112143 - protein, 9 aa, Homo Sapiens
AETSHALVP

SEQ ID NO: 112144 - protein, 9 aa, Homo Sapiens
AETSPAPIP

SEQ ID NO: 112145 - protein, 9 aa, Homo Sapiens
AETTTTFSP

SEQ ID NO: 112146 - protein, 9 aa, Homo Sapiens
AETTVNVLV

SEQ ID NO: 112147 - protein, 9 aa, Homo Sapiens
AEVDAAMAA

SEQ ID NO: 112148 - protein, 9 aa, Homo Sapiens
AEVDKLRAA

SEQ ID NO: 112149 - protein, 9 aa, Homo Sapiens
AEVDRQVIP

SEQ ID NO: 112150 - protein, 9 aa, Homo Sapiens
AEVEGRLPA

SEQ ID NO: 112151 - protein, 9 aa, Homo Sapiens
AEVEHVVNA

SEQ ID NO: 112152 - protein, 9 aa, Homo Sapiens
AEVEPTPEA

SEQ ID NO: 112153 - protein, 9 aa, Homo Sapiens
AEVETRIEA

SEQ ID NO: 112154 - protein, 9 aa, Homo Sapiens
AEVIQAFSA

SEQ ID NO: 112155 - protein, 9 aa, Homo Sapiens
AEVKGSVSA

SEQ ID NO: 112156 - protein, 9 aa, Homo Sapiens
AEVKQELAA

SEQ ID NO: 112157 - protein, 9 aa, Homo Sapiens
AEVRVIAPP

SEQ ID NO: 112158 - protein, 9 aa, Homo Sapiens
AEVVDEIAA

SEQ ID NO: 112159 - protein, 9 aa, Homo Sapiens
AEYAGLKVA

SEQ ID NO: 112160 - protein, 9 aa, Homo Sapiens
AEYGEIKNI

SEQ ID NO: 112161 - protein, 9 aa, Homo Sapiens
AEYGGWYKA

SEQ ID NO: 112162 - protein, 9 aa, Homo Sapiens
AEYGHFVDI

SEQ ID NO: 112163 - protein, 9 aa, Homo Sapiens
AEYINEAAA

SEQ ID NO: 112164 - protein, 9 aa, Homo Sapiens
AEYLQPKAA

SEQ ID NO: 112165 - protein, 9 aa, Homo Sapiens
AEYNGRLAA

SEQ ID NO: 112166 - protein, 9 aa, Homo Sapiens
AEYQAFREA

SEQ ID NO: 112167 - protein, 9 aa, Homo Sapiens
AEYYRQQAA

SEQ ID NO: 112168 - protein, 9 aa, Homo Sapiens
APESLAPPA

SEQ ID NO: 112169 - protein, 9 aa, Homo Sapiens
CEAPGAFIA

SEQ ID NO: 112170 - protein, 9 aa, Homo Sapiens
CEDDKVMAA

SEQ ID NO: 112171 - protein, 9 aa, Homo Sapiens
CEGLIVRSA

SEQ ID NO: 112172 - protein, 9 aa, Homo Sapiens
CEGPKAVAA

SEQ ID NO: 112173 - protein, 9 aa, Homo Sapiens
CEHHSLYGA

SEQ ID NO: 112174 - protein, 9 aa, Homo Sapiens
CEHPNQVSP

SEQ ID NO: 112175 - protein, 9 aa, Homo Sapiens
CEIEKVVVA

SEQ ID NO: 112176 - protein, 9 aa, Homo Sapiens
CEIQSVPLA

SEQ ID NO: 112177 - protein, 9 aa, Homo Sapiens
CEKGNFNVA

SEQ ID NO: 112178 - protein, 9 aa, Homo Sapiens
CEKIHFIAP

SEQ ID NO: 112179 - protein, 9 aa, Homo Sapiens
CENSMILSA

SEQ ID NO: 112180 - protein, 9 aa, Homo Sapiens
CEQGPHQVP

SEQ ID NO: 112181 - protein, 9 aa, Homo Sapiens
CEQIGLKEA

SEQ ID NO: 112182 - protein, 9 aa, Homo Sapiens
CEQLSTVIP

SEQ ID NO: 112183 - protein, 9 aa, Homo Sapiens
CEQLVKEVA

SEQ ID NO: 112184 - protein, 9 aa, Homo Sapiens
CESPTFTVA

SEQ ID NO: 112185 - protein, 9 aa, Homo Sapiens
DAAPPSAPP

SEQ ID NO: 112186 - protein, 9 aa, Homo Sapiens
DEQNHLVVA

SEQ ID NO: 112187 - protein, 9 aa, Homo Sapiens
EAQPPPPPP

SEQ ID NO: 112188 - protein, 9 aa, Homo Sapiens
EAVDKGFPP

SEQ ID NO: 112189 - protein, 9 aa, Homo Sapiens
EDRVVVIRF

SEQ ID NO: 112190 - protein, 9 aa, Homo Sapiens
EEAAAVPAA

SEQ ID NO: 112191 - protein, 9 aa, Homo Sapiens
EEAASAPAV

SEQ ID NO: 112192 - protein, 9 aa, Homo Sapiens
EEAATRIPA

SEQ ID NO: 112193 - protein, 9 aa, Homo Sapiens
EEAAVAIKA

SEQ ID NO: 112194 - protein, 9 aa, Homo Sapiens
EEADAAMAA

SEQ ID NO: 112195 - protein, 9 aa, Homo Sapiens
EEAEILHSA

SEQ ID NO: 112196 - protein, 9 aa, Homo Sapiens
EEAKRWMEA

SEQ ID NO: 112197 - protein, 9 aa, Homo Sapiens
EEALPVTTA

SEQ ID NO: 112198 - protein, 9 aa, Homo Sapiens
EEALVDHVA

SEQ ID NO: 112199 - protein, 9 aa, Homo Sapiens
EEANKAFSA

SEQ ID NO: 112200 - protein, 9 aa, Homo Sapiens
EEAPAAMTA

SEQ ID NO: 112201 - protein, 9 aa, Homo Sapiens
EEAPALDAA

SEQ ID NO: 112202 - protein, 9 aa, Homo Sapiens
EEAPAQAKP

SEQ ID NO: 112203 - protein, 9 aa, Homo Sapiens
EEAPGEPSA

SEQ ID NO: 112204 - protein, 9 aa, Homo Sapiens
EEAPPGLSP

SEQ ID NO: 112205 - protein, 9 aa, Homo Sapiens
EEAPQTPVA

SEQ ID NO: 112206 - protein, 9 aa, Homo Sapiens
EEAQHFIKA

SEQ ID NO: 112207 - protein, 9 aa, Homo Sapiens
EEAQPMAAP

SEQ ID NO: 112208 - protein, 9 aa, Homo Sapiens
EEAQPQPQP

SEQ ID NO: 112209 - protein, 9 aa, Homo Sapiens
EEASPLHPA

SEQ ID NO: 112210 - protein, 9 aa, Homo Sapiens
EEAWRGFAA

SEQ ID NO: 112211 - protein, 9 aa, Homo Sapiens
EECLRLLEA

SEQ ID NO: 112212 - protein, 9 aa, Homo Sapiens
EECPMRNTP

SEQ ID NO: 112213 - protein, 9 aa, Homo Sapiens
EECTKLPEA

SEQ ID NO: 112214 - protein, 9 aa, Homo Sapiens
EECVRSIQA

SEQ ID NO: 112215 - protein, 9 aa, Homo Sapiens
EEDAALFKA

SEQ ID NO: 112216 - protein, 9 aa, Homo Sapiens
EEDIRDLAA

SEQ ID NO: 112217 - protein, 9 aa, Homo Sapiens
EEDPVTSIP

SEQ ID NO: 112218 - protein, 9 aa, Homo Sapiens
EEDVLKFLA

SEQ ID NO: 112219 - protein, 9 aa, Homo Sapiens
EEEAATRIP

SEQ ID NO: 112220 - protein, 9 aa, Homo Sapiens
EEEAFGILP

SEQ ID NO: 112221 - protein, 9 aa, Homo Sapiens
EEEAKTVSA

SEQ ID NO: 112222 - protein, 9 aa, Homo Sapiens
EEEDFIRAA

SEQ ID NO: 112223 - protein, 9 aa, Homo Sapiens
EEEEAQPMA

SEQ ID NO: 112224 - protein, 9 aa, Homo Sapiens
EEEEFLKLP

SEQ ID NO: 112225 - protein, 9 aa, Homo Sapiens
EEEEFNTGP

SEQ ID NO: 112226 - protein, 9 aa, Homo Sapiens
EEEEPQPLP

SEQ ID NO: 112227 - protein, 9 aa, Homo Sapiens
EEEEPVKEA

SEQ ID NO: 112228 - protein, 9 aa, Homo Sapiens
EEEEQRAIA

SEQ ID NO: 112229 - protein, 9 aa, Homo Sapiens
EEEETSIKA

SEQ ID NO: 112230 - protein, 9 aa, Homo Sapiens
EEEFFYEKA

SEQ ID NO: 112231 - protein, 9 aa, Homo Sapiens
EEEGITFVP

SEQ ID NO: 112232 - protein, 9 aa, Homo Sapiens
EEEHNFFLA

SEQ ID NO: 112233 - protein, 9 aa, Homo Sapiens
EEEIDAPKP

SEQ ID NO: 112234 - protein, 9 aa, Homo Sapiens
EEEKAVAVP

SEQ ID NO: 112235 - protein, 9 aa, Homo Sapiens
EEEKRMLEA

SEQ ID NO: 112236 - protein, 9 aa, Homo Sapiens
EEEKTTLRA

SEQ ID NO: 112237 - protein, 9 aa, Homo Sapiens
EEEKWVEVA

SEQ ID NO: 112238 - protein, 9 aa, Homo Sapiens
EEELFKMRA

SEQ ID NO: 112239 - protein, 9 aa, Homo Sapiens
EEELGLVGA

SEQ ID NO: 112240 - protein, 9 aa, Homo Sapiens
EEEMKGIAA

SEQ ID NO: 112241 - protein, 9 aa, Homo Sapiens
EEENFYLEP

SEQ ID NO: 112242 - protein, 9 aa, Homo Sapiens
EEEPFALGA

SEQ ID NO: 112243 - protein, 9 aa, Homo Sapiens
EEEPLYVNA

SEQ ID NO: 112244 - protein, 9 aa, Homo Sapiens
EEERAFLVA

SEQ ID NO: 112245 - protein, 9 aa, Homo Sapiens
EEEREFYNA

SEQ ID NO: 112246 - protein, 9 aa, Homo Sapiens
EEERNVPLA

SEQ ID NO: 112247 - protein, 9 aa, Homo Sapiens
EEESKEPVA

SEQ ID NO: 112248 - protein, 9 aa, Homo Sapiens
EEETPLHCA

SEQ ID NO: 112249 - protein, 9 aa, Homo Sapiens
EEETSIKAA

SEQ ID NO: 112250 - protein, 9 aa, Homo Sapiens
EEETVFPKA

SEQ ID NO: 112251 - protein, 9 aa, Homo Sapiens
EEEVMIAHA

SEQ ID NO: 112252 - protein, 9 aa, Homo Sapiens
EEEVQGPPA

SEQ ID NO: 112253 - protein, 9 aa, Homo Sapiens
EEEYPGITA

SEQ ID NO: 112254 - protein, 9 aa, Homo Sapiens
EEFDHLPPP

SEQ ID NO: 112255 - protein, 9 aa, Homo Sapiens
EEFPAFPRA

SEQ ID NO: 112256 - protein, 9 aa, Homo Sapiens
EEFSFIPSA

SEQ ID NO: 112257 - protein, 9 aa, Homo Sapiens
EEFVQMMTA

SEQ ID NO: 112258 - protein, 9 aa, Homo Sapiens
EEGPGKNLP

SEQ ID NO: 112259 - protein, 9 aa, Homo Sapiens
EEGPGVPAA

SEQ ID NO: 112260 - protein, 9 aa, Homo Sapiens
EEGSPTPVL

SEQ ID NO: 112261 - protein, 9 aa, Homo Sapiens
EEHEWFIPA

SEQ ID NO: 112262 - protein, 9 aa, Homo Sapiens
EEHNFFLAP

SEQ ID NO: 112263 - protein, 9 aa, Homo Sapiens
EEHNIVFMP

SEQ ID NO: 112264 - protein, 9 aa, Homo Sapiens
EEIAYKFTP

SEQ ID NO: 112265 - protein, 9 aa, Homo Sapiens
EEIDISKAA

SEQ ID NO: 112266 - protein, 9 aa, Homo Sapiens
EEIEGLISA

SEQ ID NO: 112267 - protein, 9 aa, Homo Sapiens
EEIGKVAAA

SEQ ID NO: 112268 - protein, 9 aa, Homo Sapiens
EEIIDELKA

SEQ ID NO: 112269 - protein, 9 aa, Homo Sapiens
EEIKDFLLT

SEQ ID NO: 112270 - protein, 9 aa, Homo Sapiens
EEILFKERA

SEQ ID NO: 112271 - protein, 9 aa, Homo Sapiens
EEINSTFCP

SEQ ID NO: 112272 - protein, 9 aa, Homo Sapiens
EEIPKIFQI

SEQ ID NO: 112273 - protein, 9 aa, Homo Sapiens
EEIQIKEPA

SEQ ID NO: 112274 - protein, 9 aa, Homo Sapiens
EEIQRLYEA

SEQ ID NO: 112275 - protein, 9 aa, Homo Sapiens
EEIRKTFNI

SEQ ID NO: 112276 - protein, 9 aa, Homo Sapiens
EEISNLKAA

SEQ ID NO: 112277 - protein, 9 aa, Homo Sapiens
EEKERWIRA

SEQ ID NO: 112278 - protein, 9 aa, Homo Sapiens
EEKESWIKA

SEQ ID NO: 112279 - protein, 9 aa, Homo Sapiens
EEKNNWMAA

SEQ ID NO: 112280 - protein, 9 aa, Homo Sapiens
EEKPHQWSA

SEQ ID NO: 112281 - protein, 9 aa, Homo Sapiens
EEKQKWLDA

SEQ ID NO: 112282 - protein, 9 aa, Homo Sapiens
EELDSLIKA

SEQ ID NO: 112283 - protein, 9 aa, Homo Sapiens
EELEHVSAP

SEQ ID NO: 112284 - protein, 9 aa, Homo Sapiens
EELEQTYHA

SEQ ID NO: 112285 - protein, 9 aa, Homo Sapiens
EELGGILKA

SEQ ID NO: 112286 - protein, 9 aa, Homo Sapiens
EELGLVHSP

SEQ ID NO: 112287 - protein, 9 aa, Homo Sapiens
EELIQLVAA

SEQ ID NO: 112288 - protein, 9 aa, Homo Sapiens
EELPDIAPP

SEQ ID NO: 112289 - protein, 9 aa, Homo Sapiens
EELPKSSSA

SEQ ID NO: 112290 - protein, 9 aa, Homo Sapiens
EELQKIYKT

SEQ ID NO: 112291 - protein, 9 aa, Homo Sapiens
EELRDIPQA

SEQ ID NO: 112292 - protein, 9 aa, Homo Sapiens
EELRRVVAA

SEQ ID NO: 112293 - protein, 9 aa, Homo Sapiens
EELSHLEVA

SEQ ID NO: 112294 - protein, 9 aa, Homo Sapiens
EELSNVLAA

SEQ ID NO: 112295 - protein, 9 aa, Homo Sapiens
EEMGVPVAA

SEQ ID NO: 112296 - protein, 9 aa, Homo Sapiens
EEMHQVAIA

SEQ ID NO: 112297 - protein, 9 aa, Homo Sapiens
EEMKGIAAV

SEQ ID NO: 112298 - protein, 9 aa, Homo Sapiens
EEMMELREA

SEQ ID NO: 112299 - protein, 9 aa, Homo Sapiens
EEMPQVHTP

SEQ ID NO: 112300 - protein, 9 aa, Homo Sapiens
EEMPSVARP

SEQ ID NO: 112301 - protein, 9 aa, Homo Sapiens
EEMRHIDMV

SEQ ID NO: 112302 - protein, 9 aa, Homo Sapiens
EENKIKVVA

SEQ ID NO: 112303 - protein, 9 aa, Homo Sapiens
EENKLIYTP

SEQ ID NO: 112304 - protein, 9 aa, Homo Sapiens
EENNIVHQA

SEQ ID NO: 112305 - protein, 9 aa, Homo Sapiens
EENPEFAVA

SEQ ID NO: 112306 - protein, 9 aa, Homo Sapiens
EENPGIFAV

SEQ ID NO: 112307 - protein, 9 aa, Homo Sapiens
EENSHLTSV

SEQ ID NO: 112308 - protein, 9 aa, Homo Sapiens
EENYNVVAP

SEQ ID NO: 112309 - protein, 9 aa, Homo Sapiens
EEQALTKAA

SEQ ID NO: 112310 - protein, 9 aa, Homo Sapiens
EEQDSVKVA

SEQ ID NO: 112311 - protein, 9 aa, Homo Sapiens
EEQIKVWTA

SEQ ID NO: 112312 - protein, 9 aa, Homo Sapiens
EEQKIVVKV

SEQ ID NO: 112313 - protein, 9 aa, Homo Sapiens
EEQPKNYQV

SEQ ID NO: 112314 - protein, 9 aa, Homo Sapiens
EEQPQEAVP

SEQ ID NO: 112315 - protein, 9 aa, Homo Sapiens
EEQPRFQSA

SEQ ID NO: 112316 - protein, 9 aa, Homo Sapiens
EEQPVFRLV

SEQ ID NO: 112317 - protein, 9 aa, Homo Sapiens
EEQQRLLEA

SEQ ID NO: 112318 - protein, 9 aa, Homo Sapiens
EEQQYVIKC

SEQ ID NO: 112319 - protein, 9 aa, Homo Sapiens
EEQRLVQQA

SEQ ID NO: 112320 - protein, 9 aa, Homo Sapiens
EEQRYTCHV

SEQ ID NO: 112321 - protein, 9 aa, Homo Sapiens
EEQSRLIAA

SEQ ID NO: 112322 - protein, 9 aa, Homo Sapiens
EEQTPLHIA

SEQ ID NO: 112323 - protein, 9 aa, Homo Sapiens
EEQVQCPKA

SEQ ID NO: 112324 - protein, 9 aa, Homo Sapiens
EEQVRSLEA

SEQ ID NO: 112325 - protein, 9 aa, Homo Sapiens
EERAKYLAA

SEQ ID NO: 112326 - protein, 9 aa, Homo Sapiens
EERNLLSVA

SEQ ID NO: 112327 - protein, 9 aa, Homo Sapiens
EERPLFPQI

SEQ ID NO: 112328 - protein, 9 aa, Homo Sapiens
EERPPTLSA

SEQ ID NO: 112329 - protein, 9 aa, Homo Sapiens
EERPWLWVV

SEQ ID NO: 112330 - protein, 9 aa, Homo Sapiens
EERQKYLEA

SEQ ID NO: 112331 - protein, 9 aa, Homo Sapiens
EERQPSPEP

SEQ ID NO: 112332 - protein, 9 aa, Homo Sapiens
EERRYLQSA

SEQ ID NO: 112333 - protein, 9 aa, Homo Sapiens
EERVQIVSA

SEQ ID NO: 112334 - protein, 9 aa, Homo Sapiens
EESKTFVSS

SEQ ID NO: 112335 - protein, 9 aa, Homo Sapiens
EESPTATVA

SEQ ID NO: 112336 - protein, 9 aa, Homo Sapiens
EESPVQYAA

SEQ ID NO: 112337 - protein, 9 aa, Homo Sapiens
EESSKIRAP

SEQ ID NO: 112338 - protein, 9 aa, Homo Sapiens
EESVFAVTA

SEQ ID NO: 112339 - protein, 9 aa, Homo Sapiens
EETKYLRVA

SEQ ID NO: 112340 - protein, 9 aa, Homo Sapiens
EETNQKLVA

SEQ ID NO: 112341 - protein, 9 aa, Homo Sapiens
EETPEQPTA

SEQ ID NO: 112342 - protein, 9 aa, Homo Sapiens
EETPITSVP

SEQ ID NO: 112343 - protein, 9 aa, Homo Sapiens
EETPLAVQA

SEQ ID NO: 112344 - protein, 9 aa, Homo Sapiens
EETPNILRI

SEQ ID NO: 112345 - protein, 9 aa, Homo Sapiens
EETRRNFEA

SEQ ID NO: 112346 - protein, 9 aa, Homo Sapiens
EEVKQEITA

SEQ ID NO: 112347 - protein, 9 aa, Homo Sapiens
EEVPGSPEA

SEQ ID NO: 112348 - protein, 9 aa, Homo Sapiens
EEVQSLPLP

SEQ ID NO: 112349 - protein, 9 aa, Homo Sapiens
EEWGQLKAP

SEQ ID NO: 112350 - protein, 9 aa, Homo Sapiens
EEYDKIQIA

SEQ ID NO: 112351 - protein, 9 aa, Homo Sapiens
EEYEWKETA

SEQ ID NO: 112352 - protein, 9 aa, Homo Sapiens
EKSDSLEQP

SEQ ID NO: 112353 - protein, 9 aa, Homo Sapiens
EPSSPPLAP

SEQ ID NO: 112354 - protein, 9 aa, Homo Sapiens
ESLAGILGT

SEQ ID NO: 112355 - protein, 9 aa, Homo Sapiens
FEKEWIECA

SEQ ID NO: 112356 - protein, 9 aa, Homo Sapiens
FENQDIHSA

SEQ ID NO: 112357 - protein, 9 aa, Homo Sapiens
FEQEMATAA

SEQ ID NO: 112358 - protein, 9 aa, Homo Sapiens
FESSGIHVA

SEQ ID NO: 112359 - protein, 9 aa, Homo Sapiens
GEAEVSPTA

SEQ ID NO: 112360 - protein, 9 aa, Homo Sapiens
GEAPAALEA

SEQ ID NO: 112361 - protein, 9 aa, Homo Sapiens
GEARPGPTA

SEQ ID NO: 112362 - protein, 9 aa, Homo Sapiens
GECGHAFSA

SEQ ID NO: 112363 - protein, 9 aa, Homo Sapiens
GEEADFHQA

SEQ ID NO: 112364 - protein, 9 aa, Homo Sapiens
GEEDFSLSA

SEQ ID NO: 112365 - protein, 9 aa, Homo Sapiens
GEEGPQAVA

SEQ ID NO: 112366 - protein, 9 aa, Homo Sapiens
GEFGGFGSV

SEQ ID NO: 112367 - protein, 9 aa, Homo Sapiens
GEHDKMVAA

SEQ ID NO: 112368 - protein, 9 aa, Homo Sapiens
GEHDPWYCP

SEQ ID NO: 112369 - protein, 9 aa, Homo Sapiens
GEIFDHLVA

SEQ ID NO: 112370 - protein, 9 aa, Homo Sapiens
GEIFDQCVA

SEQ ID NO: 112371 - protein, 9 aa, Homo Sapiens
GEKFHSEVA

SEQ ID NO: 112372 - protein, 9 aa, Homo Sapiens
GEKRFADAA

SEQ ID NO: 112373 - protein, 9 aa, Homo Sapiens
GEMAGAFVA

SEQ ID NO: 112374 - protein, 9 aa, Homo Sapiens
GEMWNNTAA

SEQ ID NO: 112375 - protein, 9 aa, Homo Sapiens
GEMWSEQSA

SEQ ID NO: 112376 - protein, 9 aa, Homo Sapiens
GEQEPPPPP

SEQ ID NO: 112377 - protein, 9 aa, Homo Sapiens
GERDFQTSA

SEQ ID NO: 112378 - protein, 9 aa, Homo Sapiens
GETVPAPSA

SEQ ID NO: 112379 - protein, 9 aa, Homo Sapiens
GEVFDYLVA

SEQ ID NO: 112380 - protein, 9 aa, Homo Sapiens
GEYEWVHKP

SEQ ID NO: 112381 - protein, 9 aa, Homo Sapiens
GPELEAPGL

SEQ ID NO: 112382 - protein, 9 aa, Homo Sapiens
HAIYEEITA

SEQ ID NO: 112383 - protein, 9 aa, Homo Sapiens
HECFVSPVA

SEQ ID NO: 112384 - protein, 9 aa, Homo Sapiens
HEEMNYITA

SEQ ID NO: 112385 - protein, 9 aa, Homo Sapiens
HEETGLKPP

SEQ ID NO: 112386 - protein, 9 aa, Homo Sapiens
HEIGHGIAA

SEQ ID NO: 112387 - protein, 9 aa, Homo Sapiens
HELLKTNAA

SEQ ID NO: 112388 - protein, 9 aa, Homo Sapiens
HEMVVYEAA

SEQ ID NO: 112389 - protein, 9 aa, Homo Sapiens
HENESVYKA

SEQ ID NO: 112390 - protein, 9 aa, Homo Sapiens
HEQFIPIAA

SEQ ID NO: 112391 - protein, 9 aa, Homo Sapiens
HEQQFAHPP

SEQ ID NO: 112392 - protein, 9 aa, Homo Sapiens
HEQQKLPAA

SEQ ID NO: 112393 - protein, 9 aa, Homo Sapiens
HESDINAVA

SEQ ID NO: 112394 - protein, 9 aa, Homo Sapiens
HESGHAIIA

SEQ ID NO: 112395 - protein, 9 aa, Homo Sapiens
HEYPWILSA

SEQ ID NO: 112396 - protein, 9 aa, Homo Sapiens
INPEDDTDP

SEQ ID NO: 112397 - protein, 9 aa, Homo Sapiens
KEALGIPAA

SEQ ID NO: 112398 - protein, 9 aa, Homo Sapiens
KEAPAPPKA

SEQ ID NO: 112399 - protein, 9 aa, Homo Sapiens
KEAPAQPAP

SEQ ID NO: 112400 - protein, 9 aa, Homo Sapiens
KEAPPMEKP

SEQ ID NO: 112401 - protein, 9 aa, Homo Sapiens
KEDKPPLAP

SEQ ID NO: 112402 - protein, 9 aa, Homo Sapiens
KEDPFVFIP

SEQ ID NO: 112403 - protein, 9 aa, Homo Sapiens
KEEAKFFTA

SEQ ID NO: 112404 - protein, 9 aa, Homo Sapiens
KEKPGWVTP

SEQ ID NO: 112405 - protein, 9 aa, Homo Sapiens
KELEKTYSA

SEQ ID NO: 112406 - protein, 9 aa, Homo Sapiens
KELIFQETA

SEQ ID NO: 112407 - protein, 9 aa, Homo Sapiens
KEMEKSFEV

SEQ ID NO: 112408 - protein, 9 aa, Homo Sapiens
KEMEVSPSA

SEQ ID NO: 112409 - protein, 9 aa, Homo Sapiens
KEMLETQVA

SEQ ID NO: 112410 - protein, 9 aa, Homo Sapiens
KENAFSLGA

SEQ ID NO: 112411 - protein, 9 aa, Homo Sapiens
KENSHFFVA

SEQ ID NO: 112412 - protein, 9 aa, Homo Sapiens
KEQEPMPTV

SEQ ID NO: 112413 - protein, 9 aa, Homo Sapiens
KEQPPQLSA

SEQ ID NO: 112414 - protein, 9 aa, Homo Sapiens
KEQTFYHVA

SEQ ID NO: 112415 - protein, 9 aa, Homo Sapiens
KESDIYIVA

SEQ ID NO: 112416 - protein, 9 aa, Homo Sapiens
KESGVDIAA

SEQ ID NO: 112417 - protein, 9 aa, Homo Sapiens
KEVDVGLAA

SEQ ID NO: 112418 - protein, 9 aa, Homo Sapiens
KIVKWDRDM

SEQ ID NO: 112419 - protein, 9 aa, Homo Sapiens
LEALPQIAA

SEQ ID NO: 112420 - protein, 9 aa, Homo Sapiens
LEEDNKFCA

SEQ ID NO: 112421 - protein, 9 aa, Homo Sapiens
LEENPDPSA

SEQ ID NO: 112422 - protein, 9 aa, Homo Sapiens
LEHEGLATA

SEQ ID NO: 112423 - protein, 9 aa, Homo Sapiens
LEKLFPDTP

SEQ ID NO: 112424 - protein, 9 aa, Homo Sapiens
LEMKPGPQA

SEQ ID NO: 112425 - protein, 9 aa, Homo Sapiens
LENALKLIP

SEQ ID NO: 112426 - protein, 9 aa, Homo Sapiens
LEQDHFQVA

SEQ ID NO: 112427 - protein, 9 aa, Homo Sapiens
LEQEKAYQA

SEQ ID NO: 112428 - protein, 9 aa, Homo Sapiens
LEQPTDPVA

SEQ ID NO: 112429 - protein, 9 aa, Homo Sapiens
LERDPIPAA

SEQ ID NO: 112430 - protein, 9 aa, Homo Sapiens
LESRPFPAA

SEQ ID NO: 112431 - protein, 9 aa, Homo Sapiens
LETDAGPAA

SEQ ID NO: 112432 - protein, 9 aa, Homo Sapiens
MEALPLLAA

SEQ ID NO: 112433 - protein, 9 aa, Homo Sapiens
MEAPHIIVG

SEQ ID NO: 112434 - protein, 9 aa, Homo Sapiens
MEAQKSAVP

SEQ ID NO: 112435 - protein, 9 aa, Homo Sapiens
MEAVAVAAA

SEQ ID NO: 112436 - protein, 9 aa, Homo Sapiens
MEDAHNCIP

SEQ ID NO: 112437 - protein, 9 aa, Homo Sapiens
MEDAKVYVA

SEQ ID NO: 112438 - protein, 9 aa, Homo Sapiens
MEDANVRVA

SEQ ID NO: 112439 - protein, 9 aa, Homo Sapiens
MEDDKVAEA

SEQ ID NO: 112440 - protein, 9 aa, Homo Sapiens
MEDIKILIA

SEQ ID NO: 112441 - protein, 9 aa, Homo Sapiens
MEDTGSYRA

SEQ ID NO: 112442 - protein, 9 aa, Homo Sapiens
MEEGVSAVA

SEQ ID NO: 112443 - protein, 9 aa, Homo Sapiens
MEEKYIVSA

SEQ ID NO: 112444 - protein, 9 aa, Homo Sapiens
MEELHNQEV

SEQ ID NO: 112445 - protein, 9 aa, Homo Sapiens
MEENFAVEA

SEQ ID NO: 112446 - protein, 9 aa, Homo Sapiens
MEENPGIFA

SEQ ID NO: 112447 - protein, 9 aa, Homo Sapiens
MEEPAVPAP

SEQ ID NO: 112448 - protein, 9 aa, Homo Sapiens
MEERAQLEA

SEQ ID NO: 112449 - protein, 9 aa, Homo Sapiens
MEERYQIAA

SEQ ID NO: 112450 - protein, 9 aa, Homo Sapiens
MEEVGRWVA

SEQ ID NO: 112451 - protein, 9 aa, Homo Sapiens
MEHNRVLEA

SEQ ID NO: 112452 - protein, 9 aa, Homo Sapiens
MEHPGLQAI

SEQ ID NO: 112453 - protein, 9 aa, Homo Sapiens
MEHPYFYTV

SEQ ID NO: 112454 - protein, 9 aa, Homo Sapiens
MEIEGEPAP

SEQ ID NO: 112455 - protein, 9 aa, Homo Sapiens
MEKAFAFQA

SEQ ID NO: 112456 - protein, 9 aa, Homo Sapiens
MELERIVSA

SEQ ID NO: 112457 - protein, 9 aa, Homo Sapiens
MELQRMIAA

SEQ ID NO: 112458 - protein, 9 aa, Homo Sapiens
MEMLVEHQA

SEQ ID NO: 112459 - protein, 9 aa, Homo Sapiens
MEMPSQPAP

SEQ ID NO: 112460 - protein, 9 aa, Homo Sapiens
MEMTFTRPA

SEQ ID NO: 112461 - protein, 9 aa, Homo Sapiens
MEMTNSHLA

SEQ ID NO: 112462 - protein, 9 aa, Homo Sapiens
MENANIPSV

SEQ ID NO: 112463 - protein, 9 aa, Homo Sapiens
MENEMAHYA

SEQ ID NO: 112464 - protein, 9 aa, Homo Sapiens
MENRPSVQA

SEQ ID NO: 112465 - protein, 9 aa, Homo Sapiens
MEQELAHAV

SEQ ID NO: 112466 - protein, 9 aa, Homo Sapiens
MEQGRVTIA

SEQ ID NO: 112467 - protein, 9 aa, Homo Sapiens
MEQPDAVPA

SEQ ID NO: 112468 - protein, 9 aa, Homo Sapiens
MEQQPTRPP

SEQ ID NO: 112469 - protein, 9 aa, Homo Sapiens
MEQQTISIA

SEQ ID NO: 112470 - protein, 9 aa, Homo Sapiens
MEQVFEMKV

SEQ ID NO: 112471 - protein, 9 aa, Homo Sapiens
MESCSVAQA

SEQ ID NO: 112472 - protein, 9 aa, Homo Sapiens
MESDKFICI

SEQ ID NO: 112473 - protein, 9 aa, Homo Sapiens
MESDKHLEA

SEQ ID NO: 112474 - protein, 9 aa, Homo Sapiens
MESNVELIA

SEQ ID NO: 112475 - protein, 9 aa, Homo Sapiens
NAEVWAYLA

SEQ ID NO: 112476 - protein, 9 aa, Homo Sapiens
NEDLRSWTA

SEQ ID NO: 112477 - protein, 9 aa, Homo Sapiens
NEEPKVATA

SEQ ID NO: 112478 - protein, 9 aa, Homo Sapiens
NEEPPALPP

SEQ ID NO: 112479 - protein, 9 aa, Homo Sapiens
NEEQRLASA

SEQ ID NO: 112480 - protein, 9 aa, Homo Sapiens
NEGVATYAA

SEQ ID NO: 112481 - protein, 9 aa, Homo Sapiens
NEGVTNHTP

SEQ ID NO: 112482 - protein, 9 aa, Homo Sapiens
NEIDAEPPA

SEQ ID NO: 112483 - protein, 9 aa, Homo Sapiens
NEIGAIEKA

SEQ ID NO: 112484 - protein, 9 aa, Homo Sapiens
NEIIFPHCA

SEQ ID NO: 112485 - protein, 9 aa, Homo Sapiens
NEIKDSVVA

SEQ ID NO: 112486 - protein, 9 aa, Homo Sapiens
NEKAWFQTP

SEQ ID NO: 112487 - protein, 9 aa, Homo Sapiens
NEKEGFPIT

SEQ ID NO: 112488 - protein, 9 aa, Homo Sapiens
NELPGLPRA

SEQ ID NO: 112489 - protein, 9 aa, Homo Sapiens
NELPLTHET

SEQ ID NO: 112490 - protein, 9 aa, Homo Sapiens
NENETVFAP

SEQ ID NO: 112491 - protein, 9 aa, Homo Sapiens
NENKNIPKA

SEQ ID NO: 112492 - protein, 9 aa, Homo Sapiens
NENYAGIAA

SEQ ID NO: 112493 - protein, 9 aa, Homo Sapiens
NEQAACYAA

SEQ ID NO: 112494 - protein, 9 aa, Homo Sapiens
NEQGNFPPP

SEQ ID NO: 112495 - protein, 9 aa, Homo Sapiens
NEQGSYVVA

SEQ ID NO: 112496 - protein, 9 aa, Homo Sapiens
NEQMHQLVA

SEQ ID NO: 112497 - protein, 9 aa, Homo Sapiens
NERFFGDSA

SEQ ID NO: 112498 - protein, 9 aa, Homo Sapiens
NESPGAPPA

SEQ ID NO: 112499 - protein, 9 aa, Homo Sapiens
NEVADELVA

SEQ ID NO: 112500 - protein, 9 aa, Homo Sapiens
NEVTDYAIA

SEQ ID NO: 112501 - protein, 9 aa, Homo Sapiens
NEVVQVHAA

SEQ ID NO: 112502 - protein, 9 aa, Homo Sapiens
PDLAEKNPP

SEQ ID NO: 112503 - protein, 9 aa, Homo Sapiens
PEAAEGPEV

SEQ ID NO: 112504 - protein, 9 aa, Homo Sapiens
QEAFENHCA

SEQ ID NO: 112505 - protein, 9 aa, Homo Sapiens
QEAFFQCQV

SEQ ID NO: 112506 - protein, 9 aa, Homo Sapiens
QEALREEVA

SEQ ID NO: 112507 - protein, 9 aa, Homo Sapiens
QEALSALTA

SEQ ID NO: 112508 - protein, 9 aa, Homo Sapiens
QEAQKIFKA

SEQ ID NO: 112509 - protein, 9 aa, Homo Sapiens
QEATHFPKV

SEQ ID NO: 112510 - protein, 9 aa, Homo Sapiens
QEAYFRYMA

SEQ ID NO: 112511 - protein, 9 aa, Homo Sapiens
QEDAARLQA

SEQ ID NO: 112512 - protein, 9 aa, Homo Sapiens
QEDPNSIIA

SEQ ID NO: 112513 - protein, 9 aa, Homo Sapiens
QEDRPGLHA

SEQ ID NO: 112514 - protein, 9 aa, Homo Sapiens
QEDSFSAEA

SEQ ID NO: 112515 - protein, 9 aa, Homo Sapiens
QEDSLNWVA

SEQ ID NO: 112516 - protein, 9 aa, Homo Sapiens
QEEAPGPAP

SEQ ID NO: 112517 - protein, 9 aa, Homo Sapiens
QEEDLKAQA

SEQ ID NO: 112518 - protein, 9 aa, Homo Sapiens
QEEDVYHTV

SEQ ID NO: 112519 - protein, 9 aa, Homo Sapiens
QEEFQEHEA

SEQ ID NO: 112520 - protein, 9 aa, Homo Sapiens
QEEFYRVYP

SEQ ID NO: 112521 - protein, 9 aa, Homo Sapiens
QEEGYIIAV

SEQ ID NO: 112522 - protein, 9 aa, Homo Sapiens
QEEKAMYSA

SEQ ID NO: 112523 - protein, 9 aa, Homo Sapiens
QEENFRLEA

SEQ ID NO: 112524 - protein, 9 aa, Homo Sapiens
QEEPDLVSA

SEQ ID NO: 112525 - protein, 9 aa, Homo Sapiens
QEEPEARVP

SEQ ID NO: 112526 - protein, 9 aa, Homo Sapiens
QEEPGQLLP

SEQ ID NO: 112527 - protein, 9 aa, Homo Sapiens
QEEPQSLQA

SEQ ID NO: 112528 - protein, 9 aa, Homo Sapiens
QEETFRLEA

SEQ ID NO: 112529 - protein, 9 aa, Homo Sapiens
QEEVFNTAV

SEQ ID NO: 112530 - protein, 9 aa, Homo Sapiens
QEEWNEHNA

SEQ ID NO: 112531 - protein, 9 aa, Homo Sapiens
QEFPFPETP

SEQ ID NO: 112532 - protein, 9 aa, Homo Sapiens
QEGAVAFAA

SEQ ID NO: 112533 - protein, 9 aa, Homo Sapiens
QEGDFQTEV

SEQ ID NO: 112534 - protein, 9 aa, Homo Sapiens
QEGPGSLAA

SEQ ID NO: 112535 - protein, 9 aa, Homo Sapiens
QEGPVGPAP

SEQ ID NO: 112536 - protein, 9 aa, Homo Sapiens
QEGSYFREA

SEQ ID NO: 112537 - protein, 9 aa, Homo Sapiens
QEGVEVRVA

SEQ ID NO: 112538 - protein, 9 aa, Homo Sapiens
QEHGLKYPA

SEQ ID NO: 112539 - protein, 9 aa, Homo Sapiens
QEHIIIEAA

SEQ ID NO: 112540 - protein, 9 aa, Homo Sapiens
QEHPELAVL

SEQ ID NO: 112541 - protein, 9 aa, Homo Sapiens
QEHPVVLLP

SEQ ID NO: 112542 - protein, 9 aa, Homo Sapiens
QEIATVVVP

SEQ ID NO: 112543 - protein, 9 aa, Homo Sapiens
QEIEQKLEV

SEQ ID NO: 112544 - protein, 9 aa, Homo Sapiens
QEIMTVPPP

SEQ ID NO: 112545 - protein, 9 aa, Homo Sapiens
QEINTLLEA

SEQ ID NO: 112546 - protein, 9 aa, Homo Sapiens
QEIPKYITA

SEQ ID NO: 112547 - protein, 9 aa, Homo Sapiens
QEIPVVSAP

SEQ ID NO: 112548 - protein, 9 aa, Homo Sapiens
QEISHLIEP

SEQ ID NO: 112549 - protein, 9 aa, Homo Sapiens
QEIVSSVVP

SEQ ID NO: 112550 - protein, 9 aa, Homo Sapiens
QEKALFAVP

SEQ ID NO: 112551 - protein, 9 aa, Homo Sapiens
QEKEAWIHA

SEQ ID NO: 112552 - protein, 9 aa, Homo Sapiens
QEKVQAVCA

SEQ ID NO: 112553 - protein, 9 aa, Homo Sapiens
QELGGLHSA

SEQ ID NO: 112554 - protein, 9 aa, Homo Sapiens
QELLDVHAA

SEQ ID NO: 112555 - protein, 9 aa, Homo Sapiens
QELPGLPAP

SEQ ID NO: 112556 - protein, 9 aa, Homo Sapiens
QELPGLPLV

SEQ ID NO: 112557 - protein, 9 aa, Homo Sapiens
QELPRLLSA

SEQ ID NO: 112558 - protein, 9 aa, Homo Sapiens
QELPTQPEA

SEQ ID NO: 112559 - protein, 9 aa, Homo Sapiens
QEMNRLFGA

SEQ ID NO: 112560 - protein, 9 aa, Homo Sapiens
QENDRVVMV

SEQ ID NO: 112561 - protein, 9 aa, Homo Sapiens
QENFLAVEA

SEQ ID NO: 112562 - protein, 9 aa, Homo Sapiens
QENKNLPQA

SEQ ID NO: 112563 - protein, 9 aa, Homo Sapiens
QENPNMRLS

SEQ ID NO: 112564 - protein, 9 aa, Homo Sapiens
QENTQTPTV

SEQ ID NO: 112565 - protein, 9 aa, Homo Sapiens
QEQAVSPKV

SEQ ID NO: 112566 - protein, 9 aa, Homo Sapiens
QEQFNSIAA

SEQ ID NO: 112567 - protein, 9 aa, Homo Sapiens
QEQLRLQLP

SEQ ID NO: 112568 - protein, 9 aa, Homo Sapiens
QEQMRPQLP

SEQ ID NO: 112569 - protein, 9 aa, Homo Sapiens
QEQQAFKEA

SEQ ID NO: 112570 - protein, 9 aa, Homo Sapiens
QEQRIMKEA

SEQ ID NO: 112571 - protein, 9 aa, Homo Sapiens
QEQRQAFAP

SEQ ID NO: 112572 - protein, 9 aa, Homo Sapiens
QEQSFVIRA

SEQ ID NO: 112573 - protein, 9 aa, Homo Sapiens
QEQVMAVTA

SEQ ID NO: 112574 - protein, 9 aa, Homo Sapiens
QEQVTAAVA

SEQ ID NO: 112575 - protein, 9 aa, Homo Sapiens
QESEMKVLA

SEQ ID NO: 112576 - protein, 9 aa, Homo Sapiens
QESGFSHSA

SEQ ID NO: 112577 - protein, 9 aa, Homo Sapiens
QESKLIILA

SEQ ID NO: 112578 - protein, 9 aa, Homo Sapiens
QESLPHAGP

SEQ ID NO: 112579 - protein, 9 aa, Homo Sapiens
QESPGGLEA

SEQ ID NO: 112580 - protein, 9 aa, Homo Sapiens
QESPGKVAA

SEQ ID NO: 112581 - protein, 9 aa, Homo Sapiens
QESPIMAKP

SEQ ID NO: 112582 - protein, 9 aa, Homo Sapiens
QESPINVTT

SEQ ID NO: 112583 - protein, 9 aa, Homo Sapiens
QETAFNEKA

SEQ ID NO: 112584 - protein, 9 aa, Homo Sapiens
QETDPLPVV

SEQ ID NO: 112585 - protein, 9 aa, Homo Sapiens
QETPLHLVA

SEQ ID NO: 112586 - protein, 9 aa, Homo Sapiens
QETSFTKEA

SEQ ID NO: 112587 - protein, 9 aa, Homo Sapiens
QEYFGSLAA

SEQ ID NO: 112588 - protein, 9 aa, Homo Sapiens
QEYPDLIHI

SEQ ID NO: 112589 - protein, 9 aa, Homo Sapiens
QEYPTLKVP

SEQ ID NO: 112590 - protein, 9 aa, Homo Sapiens
QREEAAEVA

SEQ ID NO: 112591 - protein, 9 aa, Homo Sapiens
REANFTVSS

SEQ ID NO: 112592 - protein, 9 aa, Homo Sapiens
REAQSFISA

SEQ ID NO: 112593 - protein, 9 aa, Homo Sapiens
RECTIEATA

SEQ ID NO: 112594 - protein, 9 aa, Homo Sapiens
REGITVIDV

SEQ ID NO: 112595 - protein, 9 aa, Homo Sapiens
REHAPFLVA

SEQ ID NO: 112596 - protein, 9 aa, Homo Sapiens
REHPKLKAP

SEQ ID NO: 112597 - protein, 9 aa, Homo Sapiens
REIFFPETA

SEQ ID NO: 112598 - protein, 9 aa, Homo Sapiens
REIKFTVQA

SEQ ID NO: 112599 - protein, 9 aa, Homo Sapiens
REILTELEA

SEQ ID NO: 112600 - protein, 9 aa, Homo Sapiens
REKETWQNV

SEQ ID NO: 112601 - protein, 9 aa, Homo Sapiens
REKMFVEEV

SEQ ID NO: 112602 - protein, 9 aa, Homo Sapiens
REKMGWAQV

SEQ ID NO: 112603 - protein, 9 aa, Homo Sapiens
RELEVQHPA

SEQ ID NO: 112604 - protein, 9 aa, Homo Sapiens
RELPFTKSA

SEQ ID NO: 112605 - protein, 9 aa, Homo Sapiens
REMDQTMAA

SEQ ID NO: 112606 - protein, 9 aa, Homo Sapiens
REMEENFAV

SEQ ID NO: 112607 - protein, 9 aa, Homo Sapiens
REMENIIAT

SEQ ID NO: 112608 - protein, 9 aa, Homo Sapiens
REMEVKCKP

SEQ ID NO: 112609 - protein, 9 aa, Homo Sapiens
REMPGVWGA

SEQ ID NO: 112610 - protein, 9 aa, Homo Sapiens
REMPVKVEA

SEQ ID NO: 112611 - protein, 9 aa, Homo Sapiens
REMRGLTSA

SEQ ID NO: 112612 - protein, 9 aa, Homo Sapiens
REMTILGSA

SEQ ID NO: 112613 - protein, 9 aa, Homo Sapiens
RENKNVVVA

SEQ ID NO: 112614 - protein, 9 aa, Homo Sapiens
RENVFKLLP

SEQ ID NO: 112615 - protein, 9 aa, Homo Sapiens
REQDQSFTA

SEQ ID NO: 112616 - protein, 9 aa, Homo Sapiens
REQTTGLAA

SEQ ID NO: 112617 - protein, 9 aa, Homo Sapiens
RESNNMVVP

SEQ ID NO: 112618 - protein, 9 aa, Homo Sapiens
RESPFSTSA

SEQ ID NO: 112619 - protein, 9 aa, Homo Sapiens
REVEHFLKA

SEQ ID NO: 112620 - protein, 9 aa, Homo Sapiens
REYMGFIQA

SEQ ID NO: 112621 - protein, 9 aa, Homo Sapiens
REYWNEQSA

SEQ ID NO: 112622 - protein, 9 aa, Homo Sapiens
RPEAPPPPP

SEQ ID NO: 112623 - protein, 9 aa, Homo Sapiens
RPMSPPPPP

SEQ ID NO: 112624 - protein, 9 aa, Homo Sapiens
SEAATPPVA

SEQ ID NO: 112625 - protein, 9 aa, Homo Sapiens
SEADKIKVA

SEQ ID NO: 112626 - protein, 9 aa, Homo Sapiens
SEADPSGVA

SEQ ID NO: 112627 - protein, 9 aa, Homo Sapiens
SEAEIQAKA

SEQ ID NO: 112628 - protein, 9 aa, Homo Sapiens
SEAEKVYIV

SEQ ID NO: 112629 - protein, 9 aa, Homo Sapiens
SEAFHLIKA

SEQ ID NO: 112630 - protein, 9 aa, Homo Sapiens
SEAFSVASA

SEQ ID NO: 112631 - protein, 9 aa, Homo Sapiens
SEAGPGPRP

SEQ ID NO: 112632 - protein, 9 aa, Homo Sapiens
SEAKPAAVA

SEQ ID NO: 112633 - protein, 9 aa, Homo Sapiens
SEAKQMPRA

SEQ ID NO: 112634 - protein, 9 aa, Homo Sapiens
SEALPSDIA

SEQ ID NO: 112635 - protein, 9 aa, Homo Sapiens
SEAPPSKMV

SEQ ID NO: 112636 - protein, 9 aa, Homo Sapiens
SEAPPTNQA

SEQ ID NO: 112637 - protein, 9 aa, Homo Sapiens
SEAPSPVNA

SEQ ID NO: 112638 - protein, 9 aa, Homo Sapiens
SEAQPQPEV

SEQ ID NO: 112639 - protein, 9 aa, Homo Sapiens
SEASETPMA

SEQ ID NO: 112640 - protein, 9 aa, Homo Sapiens
SEAWRCWKA

SEQ ID NO: 112641 - protein, 9 aa, Homo Sapiens
SECGKTFTV

SEQ ID NO: 112642 - protein, 9 aa, Homo Sapiens
SEDDPILQI

SEQ ID NO: 112643 - protein, 9 aa, Homo Sapiens
SEDEPTRSL

SEQ ID NO: 112644 - protein, 9 aa, Homo Sapiens
SEDNPTPGI

SEQ ID NO: 112645 - protein, 9 aa, Homo Sapiens
SEDPKNNIP

SEQ ID NO: 112646 - protein, 9 aa, Homo Sapiens
SEEAFVKES

SEQ ID NO: 112647 - protein, 9 aa, Homo Sapiens
SEEAIKVIA

SEQ ID NO: 112648 - protein, 9 aa, Homo Sapiens
SEEEGVPST

SEQ ID NO: 112649 - protein, 9 aa, Homo Sapiens
SEEEISFRA

SEQ ID NO: 112650 - protein, 9 aa, Homo Sapiens
SEEFPSFGA

SEQ ID NO: 112651 - protein, 9 aa, Homo Sapiens
SEEFPVPPA

SEQ ID NO: 112652 - protein, 9 aa, Homo Sapiens
SEEGGHVAV

SEQ ID NO: 112653 - protein, 9 aa, Homo Sapiens
SEEGHPFKA

SEQ ID NO: 112654 - protein, 9 aa, Homo Sapiens
SEEGSVYTA

SEQ ID NO: 112655 - protein, 9 aa, Homo Sapiens
SEEHNTWEP

SEQ ID NO: 112656 - protein, 9 aa, Homo Sapiens
SEEKLVISA

SEQ ID NO: 112657 - protein, 9 aa, Homo Sapiens
SEEKPHVVA

SEQ ID NO: 112658 - protein, 9 aa, Homo Sapiens
SEEKPVPAA

SEQ ID NO: 112659 - protein, 9 aa, Homo Sapiens
SEELPSTAV

SEQ ID NO: 112660 - protein, 9 aa, Homo Sapiens
SEEPETPAA

SEQ ID NO: 112661 - protein, 9 aa, Homo Sapiens
SEEPGAPLP

SEQ ID NO: 112662 - protein, 9 aa, Homo Sapiens
SEEPLLHVA

SEQ ID NO: 112663 - protein, 9 aa, Homo Sapiens
SEEPWTVLP

SEQ ID NO: 112664 - protein, 9 aa, Homo Sapiens
SEEQSRLAA

SEQ ID NO: 112665 - protein, 9 aa, Homo Sapiens
SEESPAIEA

SEQ ID NO: 112666 - protein, 9 aa, Homo Sapiens
SEETPAISP

SEQ ID NO: 112667 - protein, 9 aa, Homo Sapiens
SEETPLTAA

SEQ ID NO: 112668 - protein, 9 aa, Homo Sapiens
SEEVGIAEA

SEQ ID NO: 112669 - protein, 9 aa, Homo Sapiens
SEEVNIKTA

SEQ ID NO: 112670 - protein, 9 aa, Homo Sapiens
SEEYPNKPP

SEQ ID NO: 112671 - protein, 9 aa, Homo Sapiens
SEGGKTPVA

SEQ ID NO: 112672 - protein, 9 aa, Homo Sapiens
SEGNVVNKP

SEQ ID NO: 112673 - protein, 9 aa, Homo Sapiens
SEGVRVNVV

SEQ ID NO: 112674 - protein, 9 aa, Homo Sapiens
SEHASQSVP

SEQ ID NO: 112675 - protein, 9 aa, Homo Sapiens
SEHASSPVP

SEQ ID NO: 112676 - protein, 9 aa, Homo Sapiens
SEHGLVVIA

SEQ ID NO: 112677 - protein, 9 aa, Homo Sapiens
SEHPLLSEP

SEQ ID NO: 112678 - protein, 9 aa, Homo Sapiens
SEHPTLQAS

SEQ ID NO: 112679 - protein, 9 aa, Homo Sapiens
SEHSVIKPP

SEQ ID NO: 112680 - protein, 9 aa, Homo Sapiens
SEHVMPYAA

SEQ ID NO: 112681 - protein, 9 aa, Homo Sapiens
SEHWLVLVP

SEQ ID NO: 112682 - protein, 9 aa, Homo Sapiens
SEIDMSVKA

SEQ ID NO: 112683 - protein, 9 aa, Homo Sapiens
SEIDQVVPA

SEQ ID NO: 112684 - protein, 9 aa, Homo Sapiens
SEIEARIAA

SEQ ID NO: 112685 - protein, 9 aa, Homo Sapiens
SEIEKLSAA

SEQ ID NO: 112686 - protein, 9 aa, Homo Sapiens
SEIELVFRP

SEQ ID NO: 112687 - protein, 9 aa, Homo Sapiens
SEIERQAQV

SEQ ID NO: 112688 - protein, 9 aa, Homo Sapiens
SEIGGITIA

SEQ ID NO: 112689 - protein, 9 aa, Homo Sapiens
SEILYSAPP

SEQ ID NO: 112690 - protein, 9 aa, Homo Sapiens
SEIMAEKAA

SEQ ID NO: 112691 - protein, 9 aa, Homo Sapiens
SEIPKLPAV

SEQ ID NO: 112692 - protein, 9 aa, Homo Sapiens
SEITDTVAA

SEQ ID NO: 112693 - protein, 9 aa, Homo Sapiens
SEITGLSTA

SEQ ID NO: 112694 - protein, 9 aa, Homo Sapiens
SEKEATPVV

SEQ ID NO: 112695 - protein, 9 aa, Homo Sapiens
SEKFSPETA

SEQ ID NO: 112696 - protein, 9 aa, Homo Sapiens
SEKGGQPLP

SEQ ID NO: 112697 - protein, 9 aa, Homo Sapiens
SEKPYILEA

SEQ ID NO: 112698 - protein, 9 aa, Homo Sapiens
SEKWKQNAP

SEQ ID NO: 112699 - protein, 9 aa, Homo Sapiens
SELACIYSA

SEQ ID NO: 112700 - protein, 9 aa, Homo Sapiens
SELAFPITA

SEQ ID NO: 112701 - protein, 9 aa, Homo Sapiens
SELDRLLSA

SEQ ID NO: 112702 - protein, 9 aa, Homo Sapiens
SELEKTQVA

SEQ ID NO: 112703 - protein, 9 aa, Homo Sapiens
SELERLIVP

SEQ ID NO: 112704 - protein, 9 aa, Homo Sapiens
SELITKAVA

SEQ ID NO: 112705 - protein, 9 aa, Homo Sapiens
SELPGAFEA

SEQ ID NO: 112706 - protein, 9 aa, Homo Sapiens
SELPIVTPA

SEQ ID NO: 112707 - protein, 9 aa, Homo Sapiens
SELPVSEVA

SEQ ID NO: 112708 - protein, 9 aa, Homo Sapiens
SELQKIHKA

SEQ ID NO: 112709 - protein, 9 aa, Homo Sapiens
SELSQNISA

SEQ ID NO: 112710 - protein, 9 aa, Homo Sapiens
SELSRTYLP

SEQ ID NO: 112711 - protein, 9 aa, Homo Sapiens
SELSSNPAA

SEQ ID NO: 112712 - protein, 9 aa, Homo Sapiens
SELTPMLAA

SEQ ID NO: 112713 - protein, 9 aa, Homo Sapiens
SEMAPVCAV

SEQ ID NO: 112714 - protein, 9 aa, Homo Sapiens
SEMDRVPFV

SEQ ID NO: 112715 - protein, 9 aa, Homo Sapiens
SEMHLHDTA

SEQ ID NO: 112716 - protein, 9 aa, Homo Sapiens
SEMRAPPAA

SEQ ID NO: 112717 - protein, 9 aa, Homo Sapiens
SEMSGFCKA

SEQ ID NO: 112718 - protein, 9 aa, Homo Sapiens
SEMSKVSKP

SEQ ID NO: 112719 - protein, 9 aa, Homo Sapiens
SENAHIIEA

SEQ ID NO: 112720 - protein, 9 aa, Homo Sapiens
SENAIGVAA

SEQ ID NO: 112721 - protein, 9 aa, Homo Sapiens
SENEEFVEV

SEQ ID NO: 112722 - protein, 9 aa, Homo Sapiens
SENELCVRA

SEQ ID NO: 112723 - protein, 9 aa, Homo Sapiens
SENEYIMKA

SEQ ID NO: 112724 - protein, 9 aa, Homo Sapiens
SENGALPVV

SEQ ID NO: 112725 - protein, 9 aa, Homo Sapiens
SENIKVWAP

SEQ ID NO: 112726 - protein, 9 aa, Homo Sapiens
SENKAFISV

SEQ ID NO: 112727 - protein, 9 aa, Homo Sapiens
SENPSVYVP

SEQ ID NO: 112728 - protein, 9 aa, Homo Sapiens
SENPVPLTV

SEQ ID NO: 112729 - protein, 9 aa, Homo Sapiens
SENQHLVSP

SEQ ID NO: 112730 - protein, 9 aa, Homo Sapiens
SENVKLFSA

SEQ ID NO: 112731 - protein, 9 aa, Homo Sapiens
SENVYVNTA

SEQ ID NO: 112732 - protein, 9 aa, Homo Sapiens
SENWRVDSA

SEQ ID NO: 112733 - protein, 9 aa, Homo Sapiens
SEQEHFLIV

SEQ ID NO: 112734 - protein, 9 aa, Homo Sapiens
SEQETLVRP

SEQ ID NO: 112735 - protein, 9 aa, Homo Sapiens
SEQHIPVSA

SEQ ID NO: 112736 - protein, 9 aa, Homo Sapiens
SEQIMKTGA

SEQ ID NO: 112737 - protein, 9 aa, Homo Sapiens
SEQKPFPCA

SEQ ID NO: 112738 - protein, 9 aa, Homo Sapiens
SEQLHNVTA

SEQ ID NO: 112739 - protein, 9 aa, Homo Sapiens
SEQPTLVTA

SEQ ID NO: 112740 - protein, 9 aa, Homo Sapiens
SEQREFVMA

SEQ ID NO: 112741 - protein, 9 aa, Homo Sapiens
SEQTVCHVA

SEQ ID NO: 112742 - protein, 9 aa, Homo Sapiens
SEQVFKVAS

SEQ ID NO: 112743 - protein, 9 aa, Homo Sapiens
SEQVPLMSA

SEQ ID NO: 112744 - protein, 9 aa, Homo Sapiens
SEQVTRWAA

SEQ ID NO: 112745 - protein, 9 aa, Homo Sapiens
SERDFFQEV

SEQ ID NO: 112746 - protein, 9 aa, Homo Sapiens
SERDPIQPP

SEQ ID NO: 112747 - protein, 9 aa, Homo Sapiens
SERPGLRGA

SEQ ID NO: 112748 - protein, 9 aa, Homo Sapiens
SERWKTMSA

SEQ ID NO: 112749 - protein, 9 aa, Homo Sapiens
SESAGLATA

SEQ ID NO: 112750 - protein, 9 aa, Homo Sapiens
SESDEALVA

SEQ ID NO: 112751 - protein, 9 aa, Homo Sapiens
SESDYIVMP

SEQ ID NO: 112752 - protein, 9 aa, Homo Sapiens
SESEAVAVA

SEQ ID NO: 112753 - protein, 9 aa, Homo Sapiens
SESEDRLVA

SEQ ID NO: 112754 - protein, 9 aa, Homo Sapiens
SESEKQWKA

SEQ ID NO: 112755 - protein, 9 aa, Homo Sapiens
SESFIQHIV

SEQ ID NO: 112756 - protein, 9 aa, Homo Sapiens
SESFVSPEA

SEQ ID NO: 112757 - protein, 9 aa, Homo Sapiens
SESGIQMVP

SEQ ID NO: 112758 - protein, 9 aa, Homo Sapiens
SESPVILTP

SEQ ID NO: 112759 - protein, 9 aa, Homo Sapiens
SESPVITKA

SEQ ID NO: 112760 - protein, 9 aa, Homo Sapiens
SESPVTPSA

SEQ ID NO: 112761 - protein, 9 aa, Homo Sapiens
SESPWLHAP

SEQ ID NO: 112762 - protein, 9 aa, Homo Sapiens
SESRFFVSS

SEQ ID NO: 112763 - protein, 9 aa, Homo Sapiens
SESSAIPEA

SEQ ID NO: 112764 - protein, 9 aa, Homo Sapiens
SESTFMPVA

SEQ ID NO: 112765 - protein, 9 aa, Homo Sapiens
SESVNLRIA

SEQ ID NO: 112766 - protein, 9 aa, Homo Sapiens
SESVPVIAA

SEQ ID NO: 112767 - protein, 9 aa, Homo Sapiens
SETALIHIA

SEQ ID NO: 112768 - protein, 9 aa, Homo Sapiens
SETANYISA

SEQ ID NO: 112769 - protein, 9 aa, Homo Sapiens
SETDFKVMA

SEQ ID NO: 112770 - protein, 9 aa, Homo Sapiens
SETEATPVP

SEQ ID NO: 112771 - protein, 9 aa, Homo Sapiens
SETQTSHLP

SEQ ID NO: 112772 - protein, 9 aa, Homo Sapiens
SETSLIGTA

SEQ ID NO: 112773 - protein, 9 aa, Homo Sapiens
SETSNWIAA

SEQ ID NO: 112774 - protein, 9 aa, Homo Sapiens
SETSPFPPA

SEQ ID NO: 112775 - protein, 9 aa, Homo Sapiens
SETVMVHQA

SEQ ID NO: 112776 - protein, 9 aa, Homo Sapiens
SEVATLTAA

SEQ ID NO: 112777 - protein, 9 aa, Homo Sapiens
SEVEVIHVP

SEQ ID NO: 112778 - protein, 9 aa, Homo Sapiens
SEVGKLLSA

SEQ ID NO: 112779 - protein, 9 aa, Homo Sapiens
SEYEGILDA

SEQ ID NO: 112780 - protein, 9 aa, Homo Sapiens
SEYEMSIAA

SEQ ID NO: 112781 - protein, 9 aa, Homo Sapiens
SEYLCKQVA

SEQ ID NO: 112782 - protein, 9 aa, Homo Sapiens
SEYLQQHVA

SEQ ID NO: 112783 - protein, 9 aa, Homo Sapiens
SEYSGFVNP

SEQ ID NO: 112784 - protein, 9 aa, Homo Sapiens
SPSESTVVS

SEQ ID NO: 112785 - protein, 9 aa, Homo Sapiens
TEAEDMISA

SEQ ID NO: 112786 - protein, 9 aa, Homo Sapiens
TEAEIAHIA

SEQ ID NO: 112787 - protein, 9 aa, Homo Sapiens
TEAKPAVVA

SEQ ID NO: 112788 - protein, 9 aa, Homo Sapiens
TEALHFVAA

SEQ ID NO: 112789 - protein, 9 aa, Homo Sapiens
TEAPLNPKA

SEQ ID NO: 112790 - protein, 9 aa, Homo Sapiens
TEAPPQPPP

SEQ ID NO: 112791 - protein, 9 aa, Homo Sapiens
TEAPRWPLP

SEQ ID NO: 112792 - protein, 9 aa, Homo Sapiens
TEAQIKHLA

SEQ ID NO: 112793 - protein, 9 aa, Homo Sapiens
TEARFPDVA

SEQ ID NO: 112794 - protein, 9 aa, Homo Sapiens
TEDLPFPPA

SEQ ID NO: 112795 - protein, 9 aa, Homo Sapiens
TEEDPILRA

SEQ ID NO: 112796 - protein, 9 aa, Homo Sapiens
TEEEKNFKA

SEQ ID NO: 112797 - protein, 9 aa, Homo Sapiens
TEENKSFSA

SEQ ID NO: 112798 - protein, 9 aa, Homo Sapiens
TEGSHFVEA

SEQ ID NO: 112799 - protein, 9 aa, Homo Sapiens
TEHFLTAVA

SEQ ID NO: 112800 - protein, 9 aa, Homo Sapiens
TEIEKSISA

SEQ ID NO: 112801 - protein, 9 aa, Homo Sapiens
TEIGSIHSA

SEQ ID NO: 112802 - protein, 9 aa, Homo Sapiens
TEKKDVLVP

SEQ ID NO: 112803 - protein, 9 aa, Homo Sapiens
TEKRDFVSA

SEQ ID NO: 112804 - protein, 9 aa, Homo Sapiens
TEMEISRAA

SEQ ID NO: 112805 - protein, 9 aa, Homo Sapiens
TEQSWPHSA

SEQ ID NO: 112806 - protein, 9 aa, Homo Sapiens
TESPCALVA

SEQ ID NO: 112807 - protein, 9 aa, Homo Sapiens
TESPPSLAA

SEQ ID NO: 112808 - protein, 9 aa, Homo Sapiens
TESSHFYSA

SEQ ID NO: 112809 - protein, 9 aa, Homo Sapiens
TESSQSFVA

SEQ ID NO: 112810 - protein, 9 aa, Homo Sapiens
TETDSLVSA

SEQ ID NO: 112811 - protein, 9 aa, Homo Sapiens
TEVANIPVA

SEQ ID NO: 112812 - protein, 9 aa, Homo Sapiens
TEVAPPPPP

SEQ ID NO: 112813 - protein, 9 aa, Homo Sapiens
TEVSKTPEA

SEQ ID NO: 112814 - protein, 9 aa, Homo Sapiens
VAAAEAVIG

SEQ ID NO: 112815 - protein, 9 aa, Homo Sapiens
VEDRGTVVA

SEQ ID NO: 112816 - protein, 9 aa, Homo Sapiens
VEEEPRPAA

SEQ ID NO: 112817 - protein, 9 aa, Homo Sapiens
VEEPSNPEA

SEQ ID NO: 112818 - protein, 9 aa, Homo Sapiens
VEEPSRPSA

SEQ ID NO: 112819 - protein, 9 aa, Homo Sapiens
VEERPGLPA

SEQ ID NO: 112820 - protein, 9 aa, Homo Sapiens
VEHPSLQSP

SEQ ID NO: 112821 - protein, 9 aa, Homo Sapiens
VEKPVGVAA

SEQ ID NO: 112822 - protein, 9 aa, Homo Sapiens
VENDKLPPP

SEQ ID NO: 112823 - protein, 9 aa, Homo Sapiens
VENPGGYVA

SEQ ID NO: 112824 - protein, 9 aa, Homo Sapiens
VEPDHFKVA

SEQ ID NO: 112825 - protein, 9 aa, Homo Sapiens
VEREDFVEA

SEQ ID NO: 112826 - protein, 9 aa, Homo Sapiens
VETDHIVAA

SEQ ID NO: 112827 - protein, 9 aa, Homo Sapiens
VEVPETPKA

SEQ ID NO: 112828 - protein, 9 aa, Homo Sapiens
YEEAAMAIA

SEQ ID NO: 112829 - protein, 10 aa, Homo Sapiens
AARELAGPPA

SEQ ID NO: 112830 - protein, 10 aa, Homo Sapiens
ADASIRLLKA

SEQ ID NO: 112831 - protein, 10 aa, Homo Sapiens
AEAAAAVVAA

SEQ ID NO: 112832 - protein, 10 aa, Homo Sapiens
AEAAALEVLA

SEQ ID NO: 112833 - protein, 10 aa, Homo Sapiens
AEAEAFLKKA

SEQ ID NO: 112834 - protein, 10 aa, Homo Sapiens
AEAEALARSA

SEQ ID NO: 112835 - protein, 10 aa, Homo Sapiens
AEAEASRLTA

SEQ ID NO: 112836 - protein, 10 aa, Homo Sapiens
AEAFLRQQQA

SEQ ID NO: 112837 - protein, 10 aa, Homo Sapiens
AEAFPSGCTA

SEQ ID NO: 112838 - protein, 10 aa, Homo Sapiens
AEAGGYLHTA

SEQ ID NO: 112839 - protein, 10 aa, Homo Sapiens
AEAILGQNAA

SEQ ID NO: 112840 - protein, 10 aa, Homo Sapiens
AEAMALGREA

SEQ ID NO: 112841 - protein, 10 aa, Homo Sapiens
AEANLVGREA

SEQ ID NO: 112842 - protein, 10 aa, Homo Sapiens
AEANNLAAVA

SEQ ID NO: 112843 - protein, 10 aa, Homo Sapiens
AEAPGAVAGA

SEQ ID NO: 112844 - protein, 10 aa, Homo Sapiens
AEAPSPAPTP

SEQ ID NO: 112845 - protein, 10 aa, Homo Sapiens
AEAPSQKVTV

SEQ ID NO: 112846 - protein, 10 aa, Homo Sapiens
AEAVLYEHLF

SEQ ID NO: 112847 - protein, 10 aa, Homo Sapiens
AEAWLLGQEP

SEQ ID NO: 112848 - protein, 10 aa, Homo Sapiens
AECGAFRTGP

SEQ ID NO: 112849 - protein, 10 aa, Homo Sapiens
AEDDLNTVAA

SEQ ID NO: 112850 - protein, 10 aa, Homo Sapiens
AEEALVDHVA

SEQ ID NO: 112851 - protein, 10 aa, Homo Sapiens
AEEAPQLMRT

SEQ ID NO: 112852 - protein, 10 aa, Homo Sapiens
AEEDFLAVSP

SEQ ID NO: 112853 - protein, 10 aa, Homo Sapiens
AEEDVQGTQA

SEQ ID NO: 112854 - protein, 10 aa, Homo Sapiens
AEEEFFYEKA

SEQ ID NO: 112855 - protein, 10 aa, Homo Sapiens
AEEEGVKMSA

SEQ ID NO: 112856 - protein, 10 aa, Homo Sapiens
AEEELGELEA

SEQ ID NO: 112857 - protein, 10 aa, Homo Sapiens
AEEEPNRIPS

SEQ ID NO: 112858 - protein, 10 aa, Homo Sapiens
AEEFPNLAVA

SEQ ID NO: 112859 - protein, 10 aa, Homo Sapiens
AEEGPGVPAA

SEQ ID NO: 112860 - protein, 10 aa, Homo Sapiens
AEEGSLAAAA

SEQ ID NO: 112861 - protein, 10 aa, Homo Sapiens
AEEGTRNVVA

SEQ ID NO: 112862 - protein, 10 aa, Homo Sapiens
AEEIPSRIQA

SEQ ID NO: 112863 - protein, 10 aa, Homo Sapiens
AEELASGHLA

SEQ ID NO: 112864 - protein, 10 aa, Homo Sapiens
AEELGNNVKP

SEQ ID NO: 112865 - protein, 10 aa, Homo Sapiens
AEEMETGNVA

SEQ ID NO: 112866 - protein, 10 aa, Homo Sapiens
AEEPPTPALP

SEQ ID NO: 112867 - protein, 10 aa, Homo Sapiens
AEEQAAVVTA

SEQ ID NO: 112868 - protein, 10 aa, Homo Sapiens
AEERDKRLAA

SEQ ID NO: 112869 - protein, 10 aa, Homo Sapiens
AEERIEGRVA

SEQ ID NO: 112870 - protein, 10 aa, Homo Sapiens
AEEVLLGVHA

SEQ ID NO: 112871 - protein, 10 aa, Homo Sapiens
AEGGASRFSA

SEQ ID NO: 112872 - protein, 10 aa, Homo Sapiens
AEHAMDCVRA

SEQ ID NO: 112873 - protein, 10 aa, Homo Sapiens
AEHLGEAEVA

SEQ ID NO: 112874 - protein, 10 aa, Homo Sapiens
AEHNDLQYAA

SEQ ID NO: 112875 - protein, 10 aa, Homo Sapiens
AEHPTIAKSV

SEQ ID NO: 112876 - protein, 10 aa, Homo Sapiens
AEIASSLPAA

SEQ ID NO: 112877 - protein, 10 aa, Homo Sapiens
AEIKDGERLP

SEQ ID NO: 112878 - protein, 10 aa, Homo Sapiens
AEIRDKNFNA

SEQ ID NO: 112879 - protein, 10 aa, Homo Sapiens
AEIRYEGILY

SEQ ID NO: 112880 - protein, 10 aa, Homo Sapiens
AEISSKSPVA

SEQ ID NO: 112881 - protein, 10 aa, Homo Sapiens
AEISSRNLAA

SEQ ID NO: 112882 - protein, 10 aa, Homo Sapiens
AEKAFQEGIA

SEQ ID NO: 112883 - protein, 10 aa, Homo Sapiens
AEKEMTSVVA

SEQ ID NO: 112884 - protein, 10 aa, Homo Sapiens
AEKFPSTETA

SEQ ID NO: 112885 - protein, 10 aa, Homo Sapiens
AEKGDVGLVA

SEQ ID NO: 112886 - protein, 10 aa, Homo Sapiens
AEKIDGVFAA

SEQ ID NO: 112887 - protein, 10 aa, Homo Sapiens
AEKKFIDIAA

SEQ ID NO: 112888 - protein, 10 aa, Homo Sapiens
AEKLYPLPSA

SEQ ID NO: 112889 - protein, 10 aa, Homo Sapiens
AEMDARTILL

SEQ ID NO: 112890 - protein, 10 aa, Homo Sapiens
AEMEMKNRQV

SEQ ID NO: 112891 - protein, 10 aa, Homo Sapiens
AEMLYGLIHA

SEQ ID NO: 112892 - protein, 10 aa, Homo Sapiens
AEMNGKLIAA

SEQ ID NO: 112893 - protein, 10 aa, Homo Sapiens
AEMYVAKFAA

SEQ ID NO: 112894 - protein, 10 aa, Homo Sapiens
AENAYHIHQA

SEQ ID NO: 112895 - protein, 10 aa, Homo Sapiens
AENDFSVSQA

SEQ ID NO: 112896 - protein, 10 aa, Homo Sapiens
AENELGVVVA

SEQ ID NO: 112897 - protein, 10 aa, Homo Sapiens
AENPGKYNIL

SEQ ID NO: 112898 - protein, 10 aa, Homo Sapiens
AENQPFLIEA

SEQ ID NO: 112899 - protein, 10 aa, Homo Sapiens
AEQAERYDDM

SEQ ID NO: 112900 - protein, 10 aa, Homo Sapiens
AEQAFERISA

SEQ ID NO: 112901 - protein, 10 aa, Homo Sapiens
AEQAGCMVSA

SEQ ID NO: 112902 - protein, 10 aa, Homo Sapiens
AEQDFWRAVC

SEQ ID NO: 112903 - protein, 10 aa, Homo Sapiens
AEQEYNATVA

SEQ ID NO: 112904 - protein, 10 aa, Homo Sapiens
AEQGVQKPAA

SEQ ID NO: 112905 - protein, 10 aa, Homo Sapiens
AEQKAFEVIA

SEQ ID NO: 112906 - protein, 10 aa, Homo Sapiens
AEQLAEKINA

SEQ ID NO: 112907 - protein, 10 aa, Homo Sapiens
AEQLEPRVSA

SEQ ID NO: 112908 - protein, 10 aa, Homo Sapiens
AEQLMTLISA

SEQ ID NO: 112909 - protein, 10 aa, Homo Sapiens
AEQLTAPPSA

SEQ ID NO: 112910 - protein, 10 aa, Homo Sapiens
AEQMASVQNA

SEQ ID NO: 112911 - protein, 10 aa, Homo Sapiens
AEQPSELVSA

SEQ ID NO: 112912 - protein, 10 aa, Homo Sapiens
AEQQAALLLA

SEQ ID NO: 112913 - protein, 10 aa, Homo Sapiens
AEQQALRLEV

SEQ ID NO: 112914 - protein, 10 aa, Homo Sapiens
AEQQKAQFTA

SEQ ID NO: 112915 - protein, 10 aa, Homo Sapiens
AEQQRLFNEA

SEQ ID NO: 112916 - protein, 10 aa, Homo Sapiens
AEQRLKAIVA

SEQ ID NO: 112917 - protein, 10 aa, Homo Sapiens
AERDLRDIEA

SEQ ID NO: 112918 - protein, 10 aa, Homo Sapiens
AERDLRDIGA

SEQ ID NO: 112919 - protein, 10 aa, Homo Sapiens
AERDYLDLTA

SEQ ID NO: 112920 - protein, 10 aa, Homo Sapiens
AEREAFELLP

SEQ ID NO: 112921 - protein, 10 aa, Homo Sapiens
AERFYGKYTA

SEQ ID NO: 112922 - protein, 10 aa, Homo Sapiens
AERGAFIDQS

SEQ ID NO: 112923 - protein, 10 aa, Homo Sapiens
AERNSNLVGA

SEQ ID NO: 112924 - protein, 10 aa, Homo Sapiens
AERPGEAAVA

SEQ ID NO: 112925 - protein, 10 aa, Homo Sapiens
AERRSVLDAA

SEQ ID NO: 112926 - protein, 10 aa, Homo Sapiens
AESAPLPVSA

SEQ ID NO: 112927 - protein, 10 aa, Homo Sapiens
AESAQTRVAP

SEQ ID NO: 112928 - protein, 10 aa, Homo Sapiens
AESGCKIQIA

SEQ ID NO: 112929 - protein, 10 aa, Homo Sapiens
AESQTPTPSA

SEQ ID NO: 112930 - protein, 10 aa, Homo Sapiens
AESYHQHFAA

SEQ ID NO: 112931 - protein, 10 aa, Homo Sapiens
AEYALKRQEA

SEQ ID NO: 112932 - protein, 10 aa, Homo Sapiens
AEYDLTTRIA

SEQ ID NO: 112933 - protein, 10 aa, Homo Sapiens
AEYDNFFQHL

SEQ ID NO: 112934 - protein, 10 aa, Homo Sapiens
AEYENLTNKL

SEQ ID NO: 112935 - protein, 10 aa, Homo Sapiens
AEYLLGPLYA

SEQ ID NO: 112936 - protein, 10 aa, Homo Sapiens
AGHSLELIEP

SEQ ID NO: 112937 - protein, 10 aa, Homo Sapiens
ATHHMALEAP

SEQ ID NO: 112938 - protein, 10 aa, Homo Sapiens
CEHQFTIIVA

SEQ ID NO: 112939 - protein, 10 aa, Homo Sapiens
EEAALLHEEA

SEQ ID NO: 112940 - protein, 10 aa, Homo Sapiens
EEADFHQASA

SEQ ID NO: 112941 - protein, 10 aa, Homo Sapiens
EEAPAAMTAA

SEQ ID NO: 112942 - protein, 10 aa, Homo Sapiens
EEDPYLVVNP

SEQ ID NO: 112943 - protein, 10 aa, Homo Sapiens
EEEAATRIPA

SEQ ID NO: 112944 - protein, 10 aa, Homo Sapiens
EEEEAKTVSA

SEQ ID NO: 112945 - protein, 10 aa, Homo Sapiens
EEEEFRRLAA

SEQ ID NO: 112946 - protein, 10 aa, Homo Sapiens
EEEGPFHSLP

SEQ ID NO: 112947 - protein, 10 aa, Homo Sapiens
EEEPPQNMKP

SEQ ID NO: 112948 - protein, 10 aa, Homo Sapiens
EEHPTLLTEA

SEQ ID NO: 112949 - protein, 10 aa, Homo Sapiens
EEHPVLLTEA

SEQ ID NO: 112950 - protein, 10 aa, Homo Sapiens
EEIKDFLLTA

SEQ ID NO: 112951 - protein, 10 aa, Homo Sapiens
EEIQKKLEAA

SEQ ID NO: 112952 - protein, 10 aa, Homo Sapiens
EEMHQVAIAA

SEQ ID NO: 112953 - protein, 10 aa, Homo Sapiens
EEQHQLAVTA

SEQ ID NO: 112954 - protein, 10 aa, Homo Sapiens
EEVRAGAVSA

SEQ ID NO: 112955 - protein, 10 aa, Homo Sapiens
EEYGPELHVA

SEQ ID NO: 112956 - protein, 10 aa, Homo Sapiens
FEEEMKGIAA

SEQ ID NO: 112957 - protein, 10 aa, Homo Sapiens
GEAEAFAIGA

SEQ ID NO: 112958 - protein, 10 aa, Homo Sapiens
GEAPAAVTSA

SEQ ID NO: 112959 - protein, 10 aa, Homo Sapiens
GEQEGAMVAA

SEQ ID NO: 112960 - protein, 10 aa, Homo Sapiens
GETKSSYIAA

SEQ ID NO: 112961 - protein, 10 aa, Homo Sapiens
HEFLHEVPAA

SEQ ID NO: 112962 - protein, 10 aa, Homo Sapiens
HHSVEAAGPP

SEQ ID NO: 112963 - protein, 10 aa, Homo Sapiens
INTAVPLPAA

SEQ ID NO: 112964 - protein, 10 aa, Homo Sapiens
KEHEEFQITA

SEQ ID NO: 112965 - protein, 10 aa, Homo Sapiens
KEMEHNTVCA

SEQ ID NO: 112966 - protein, 10 aa, Homo Sapiens
KETDSLKVAA

SEQ ID NO: 112967 - protein, 10 aa, Homo Sapiens
MEEDSIRLPA

SEQ ID NO: 112968 - protein, 10 aa, Homo Sapiens
MEEQVTKAEA

SEQ ID NO: 112969 - protein, 10 aa, Homo Sapiens
MEIQTTQPAA

SEQ ID NO: 112970 - protein, 10 aa, Homo Sapiens
MENNLSRVIA

SEQ ID NO: 112971 - protein, 10 aa, Homo Sapiens
MEQSPDMHNA

SEQ ID NO: 112972 - protein, 10 aa, Homo Sapiens
MESLDGLHLP

SEQ ID NO: 112973 - protein, 10 aa, Homo Sapiens
NEATGGKYVP

SEQ ID NO: 112974 - protein, 10 aa, Homo Sapiens
NEEEIRANVA

SEQ ID NO: 112975 - protein, 10 aa, Homo Sapiens
NEEKASDIAA

SEQ ID NO: 112976 - protein, 10 aa, Homo Sapiens
NEKEGFPITA

SEQ ID NO: 112977 - protein, 10 aa, Homo Sapiens
NEQMHQLVAA

SEQ ID NO: 112978 - protein, 10 aa, Homo Sapiens
NERFFGDSAA

SEQ ID NO: 112979 - protein, 10 aa, Homo Sapiens
NKGNEPPPPP

SEQ ID NO: 112980 - protein, 10 aa, Homo Sapiens
PGSSAVPAAA

SEQ ID NO: 112981 - protein, 10 aa, Homo Sapiens
PQEAGLPAGA

SEQ ID NO: 112982 - protein, 10 aa, Homo Sapiens
QAESPLGIRP

SEQ ID NO: 112983 - protein, 10 aa, Homo Sapiens
QEADDIVRVA

SEQ ID NO: 112984 - protein, 10 aa, Homo Sapiens
QEAEAPGAVA

SEQ ID NO: 112985 - protein, 10 aa, Homo Sapiens
QEARPPLVSA

SEQ ID NO: 112986 - protein, 10 aa, Homo Sapiens
QEARVFNETP

SEQ ID NO: 112987 - protein, 10 aa, Homo Sapiens
QEDAARLQAA

SEQ ID NO: 112988 - protein, 10 aa, Homo Sapiens
QEDPAKRPSA

SEQ ID NO: 112989 - protein, 10 aa, Homo Sapiens
QEEEPQKKLP

SEQ ID NO: 112990 - protein, 10 aa, Homo Sapiens
QEENFRLEAA

SEQ ID NO: 112991 - protein, 10 aa, Homo Sapiens
QEEPEARVPA

SEQ ID NO: 112992 - protein, 10 aa, Homo Sapiens
QENDKLGTVA

SEQ ID NO: 112993 - protein, 10 aa, Homo Sapiens
QENEHIYNLW

SEQ ID NO: 112994 - protein, 10 aa, Homo Sapiens
QENERLYNQV

SEQ ID NO: 112995 - protein, 10 aa, Homo Sapiens
QENLGSRIAA

SEQ ID NO: 112996 - protein, 10 aa, Homo Sapiens
QEPDSPLPPA

SEQ ID NO: 112997 - protein, 10 aa, Homo Sapiens
QEQEIEHHLA

SEQ ID NO: 112998 - protein, 10 aa, Homo Sapiens
QEQIEAIHKA

SEQ ID NO: 112999 - protein, 10 aa, Homo Sapiens
QEQVSRFLAA

SEQ ID NO: 113000 - protein, 10 aa, Homo Sapiens
QETAVAMHVA

SEQ ID NO: 113001 - protein, 10 aa, Homo Sapiens
QEYDALAKVI

SEQ ID NO: 113002 - protein, 10 aa, Homo Sapiens
QEYPDLIHIY

SEQ ID NO: 113003 - protein, 10 aa, Homo Sapiens
REAEFTKSIA

SEQ ID NO: 113004 - protein, 10 aa, Homo Sapiens
REIDDYIVQA

SEQ ID NO: 113005 - protein, 10 aa, Homo Sapiens
SEAAPLLVHV

SEQ ID NO: 113006 - protein, 10 aa, Homo Sapiens
SEADIRGFVA

SEQ ID NO: 113007 - protein, 10 aa, Homo Sapiens
SEAEFLARTA

SEQ ID NO: 113008 - protein, 10 aa, Homo Sapiens
SEAKPAAVAA

SEQ ID NO: 113009 - protein, 10 aa, Homo Sapiens
SEALPSDIAA

SEQ ID NO: 113010 - protein, 10 aa, Homo Sapiens
SEAPGQRALP

SEQ ID NO: 113011 - protein, 10 aa, Homo Sapiens
SEDEKQQYLP

SEQ ID NO: 113012 - protein, 10 aa, Homo Sapiens
SEEAPAAMTA

SEQ ID NO: 113013 - protein, 10 aa, Homo Sapiens
SEEDFQGITP

SEQ ID NO: 113014 - protein, 10 aa, Homo Sapiens
SEEEAFGILP

SEQ ID NO: 113015 - protein, 10 aa, Homo Sapiens
SEEKAMDISA

SEQ ID NO: 113016 - protein, 10 aa, Homo Sapiens
SEEQGARLAA

SEQ ID NO: 113017 - protein, 10 aa, Homo Sapiens
SEESARLVAA

SEQ ID NO: 113018 - protein, 10 aa, Homo Sapiens
SEESVGGRVA

SEQ ID NO: 113019 - protein, 10 aa, Homo Sapiens
SEGTFGIHVA

SEQ ID NO: 113020 - protein, 10 aa, Homo Sapiens
SEHCFDLIFA

SEQ ID NO: 113021 - protein, 10 aa, Homo Sapiens
SEHGLVVIAP

SEQ ID NO: 113022 - protein, 10 aa, Homo Sapiens
SEIESVKISA

SEQ ID NO: 113023 - protein, 10 aa, Homo Sapiens
SEPDGPGIAA

SEQ ID NO: 113024 - protein, 10 aa, Homo Sapiens
SEQGLAKAVA

SEQ ID NO: 113025 - protein, 10 aa, Homo Sapiens
SEQNGAKIVA

SEQ ID NO: 113026 - protein, 10 aa, Homo Sapiens
SEQPPNSVLP

SEQ ID NO: 113027 - protein, 10 aa, Homo Sapiens
SERKIEFDSA

SEQ ID NO: 113028 - protein, 10 aa, Homo Sapiens
SETGAGKHVP

SEQ ID NO: 113029 - protein, 10 aa, Homo Sapiens
SETKAWLIAA

SEQ ID NO: 113030 - protein, 10 aa, Homo Sapiens
SETSLIGTAA

SEQ ID NO: 113031 - protein, 10 aa, Homo Sapiens
SEYLSSHLEA

SEQ ID NO: 113032 - protein, 10 aa, Homo Sapiens
SQQQEAETPP

SEQ ID NO: 113033 - protein, 10 aa, Homo Sapiens
TEMDAKTVTA

SEQ ID NO: 113034 - protein, 10 aa, Homo Sapiens
VEQDFHLEIA

SEQ ID NO: 113035 - protein, 10 aa, Homo Sapiens
VEQWPYRAVA

SEQ ID NO: 113036 - protein, 11 aa, Homo Sapiens
AEAAAAPTVAP

SEQ ID NO: 113037 - protein, 11 aa, Homo Sapiens
AEAESAQTRVA

SEQ ID NO: 113038 - protein, 11 aa, Homo Sapiens
AEAGPLASVPA

SEQ ID NO: 113039 - protein, 11 aa, Homo Sapiens
AEAPHLVQVDA

SEQ ID NO: 113040 - protein, 11 aa, Homo Sapiens
AEAPSESKPAA

SEQ ID NO: 113041 - protein, 11 aa, Homo Sapiens
AEASASAAYKA

SEQ ID NO: 113042 - protein, 11 aa, Homo Sapiens
AEASYARDACA

SEQ ID NO: 113043 - protein, 11 aa, Homo Sapiens
AEDSGLHIIAA

SEQ ID NO: 113044 - protein, 11 aa, Homo Sapiens
AEDVLSGKVSA

SEQ ID NO: 113045 - protein, 11 aa, Homo Sapiens
AEEAARLSVAA

SEQ ID NO: 113046 - protein, 11 aa, Homo Sapiens
AEEAGAALRTA

SEQ ID NO: 113047 - protein, 11 aa, Homo Sapiens
AEEANSPDVTA

SEQ ID NO: 113048 - protein, 11 aa, Homo Sapiens
AEEAPYDAIHV

SEQ ID NO: 113049 - protein, 11 aa, Homo Sapiens
AEEDPAHAFEA

SEQ ID NO: 113050 - protein, 11 aa, Homo Sapiens
AEEEAATRIPA

SEQ ID NO: 113051 - protein, 11 aa, Homo Sapiens
AEEEAYKSELF

SEQ ID NO: 113052 - protein, 11 aa, Homo Sapiens
AEEEETSIKAA

SEQ ID NO: 113053 - protein, 11 aa, Homo Sapiens
AEEGTAKLIEF

SEQ ID NO: 113054 - protein, 11 aa, Homo Sapiens
AEEIAGKWLQA

SEQ ID NO: 113055 - protein, 11 aa, Homo Sapiens
AEEILEKGLKV

SEQ ID NO: 113056 - protein, 11 aa, Homo Sapiens
AEEKAAVTSLF

SEQ ID NO: 113057 - protein, 11 aa, Homo Sapiens
AEEKLTHKMEA

SEQ ID NO: 113058 - protein, 11 aa, Homo Sapiens
AEEQFILSQVA

SEQ ID NO: 113059 - protein, 11 aa, Homo Sapiens
AEEQPPFGVYA

SEQ ID NO: 113060 - protein, 11 aa, Homo Sapiens
AEERIEGRVAA

SEQ ID NO: 113061 - protein, 11 aa, Homo Sapiens
AEEVLLGVHAA

SEQ ID NO: 113062 - protein, 11 aa, Homo Sapiens
AEGRPTPTIEW

SEQ ID NO: 113063 - protein, 11 aa, Homo Sapiens
AEHDLWHIIKF

SEQ ID NO: 113064 - protein, 11 aa, Homo Sapiens
AEHDSILAEKA

SEQ ID NO: 113065 - protein, 11 aa, Homo Sapiens
AEHKHIEVIRM

SEQ ID NO: 113066 - protein, 11 aa, Homo Sapiens
AEIDEEPVSKA

SEQ ID NO: 113067 - protein, 11 aa, Homo Sapiens
AEIEYLEKTLP

SEQ ID NO: 113068 - protein, 11 aa, Homo Sapiens
AEILELAGNAA

SEQ ID NO: 113069 - protein, 11 aa, Homo Sapiens
AEILNGKEISA

SEQ ID NO: 113070 - protein, 11 aa, Homo Sapiens
AEIPAGPGREP

SEQ ID NO: 113071 - protein, 11 aa, Homo Sapiens
AEIRYEGILYT

SEQ ID NO: 113072 - protein, 11 aa, Homo Sapiens
AEIRYLVEKPK

SEQ ID NO: 113073 - protein, 11 aa, Homo Sapiens
AEIVLGNVQNA

SEQ ID NO: 113074 - protein, 11 aa, Homo Sapiens
AEKIASIGQTA

SEQ ID NO: 113075 - protein, 11 aa, Homo Sapiens
AEKRDPQELVA

SEQ ID NO: 113076 - protein, 11 aa, Homo Sapiens
AELNGKDGFIP

SEQ ID NO: 113077 - protein, 11 aa, Homo Sapiens
AELPAAAQPSA

SEQ ID NO: 113078 - protein, 11 aa, Homo Sapiens
AEMPADSGYPA

SEQ ID NO: 113079 - protein, 11 aa, Homo Sapiens
AEMVALVEQRA

SEQ ID NO: 113080 - protein, 11 aa, Homo Sapiens
AENEAETKLQA

SEQ ID NO: 113081 - protein, 11 aa, Homo Sapiens
AEPLEIILHLP

SEQ ID NO: 113082 - protein, 11 aa, Homo Sapiens
AEQDELSQRLA

SEQ ID NO: 113083 - protein, 11 aa, Homo Sapiens
AEQDRAYLEGL

SEQ ID NO: 113084 - protein, 11 aa, Homo Sapiens
AEQEPTAEQLA

SEQ ID NO: 113085 - protein, 11 aa, Homo Sapiens
AEQGKFALEVA

SEQ ID NO: 113086 - protein, 11 aa, Homo Sapiens
AEQLWHQDQVA

SEQ ID NO: 113087 - protein, 11 aa, Homo Sapiens
AERDLERAEVA

SEQ ID NO: 113088 - protein, 11 aa, Homo Sapiens
AESADIARAEV

SEQ ID NO: 113089 - protein, 11 aa, Homo Sapiens
AESASFAAVVA

SEQ ID NO: 113090 - protein, 11 aa, Homo Sapiens
AESGTPSLTAA

SEQ ID NO: 113091 - protein, 11 aa, Homo Sapiens
AESIHTGLEVA

SEQ ID NO: 113092 - protein, 11 aa, Homo Sapiens
AESWGTGRAVA

SEQ ID NO: 113093 - protein, 11 aa, Homo Sapiens
AETDKITLEVA

SEQ ID NO: 113094 - protein, 11 aa, Homo Sapiens
AEVGSDGERVA

SEQ ID NO: 113095 - protein, 11 aa, Homo Sapiens
AEYGEIKNIHL

SEQ ID NO: 113096 - protein, 11 aa, Homo Sapiens
CEYLIGQHVTA

SEQ ID NO: 113097 - protein, 11 aa, Homo Sapiens
EEAFHQGLISA

SEQ ID NO: 113098 - protein, 11 aa, Homo Sapiens
EEASGIPSRTA

SEQ ID NO: 113099 - protein, 11 aa, Homo Sapiens
EEDPQTSREIF

SEQ ID NO: 113100 - protein, 11 aa, Homo Sapiens
EEEGTGVVHQA

SEQ ID NO: 113101 - protein, 11 aa, Homo Sapiens
EEEKASKEFAA

SEQ ID NO: 113102 - protein, 11 aa, Homo Sapiens
EEELFPESERP

SEQ ID NO: 113103 - protein, 11 aa, Homo Sapiens
EEFDKFLEERA

SEQ ID NO: 113104 - protein, 11 aa, Homo Sapiens
EEMIETKGRAA

SEQ ID NO: 113105 - protein, 11 aa, Homo Sapiens
EENASQSTVKV

SEQ ID NO: 113106 - protein, 11 aa, Homo Sapiens
EENQSVVVDFL

SEQ ID NO: 113107 - protein, 11 aa, Homo Sapiens
EEQVSGAKVIA

SEQ ID NO: 113108 - protein, 11 aa, Homo Sapiens
EESLNIVKYTA

SEQ ID NO: 113109 - protein, 11 aa, Homo Sapiens
HENEALWREVA

SEQ ID NO: 113110 - protein, 11 aa, Homo Sapiens
KEATYGERVVA

SEQ ID NO: 113111 - protein, 11 aa, Homo Sapiens
KEIENTYANVA

SEQ ID NO: 113112 - protein, 11 aa, Homo Sapiens
KEIEYVETVTS

SEQ ID NO: 113113 - protein, 11 aa, Homo Sapiens
KVQALEEANND

SEQ ID NO: 113114 - protein, 11 aa, Homo Sapiens
LAGPPFGAEAA

SEQ ID NO: 113115 - protein, 11 aa, Homo Sapiens
LEMLTGQERVA

SEQ ID NO: 113116 - protein, 11 aa, Homo Sapiens
LEQYPTRPHIA

SEQ ID NO: 113117 - protein, 11 aa, Homo Sapiens
MDAAAAALPAA

SEQ ID NO: 113118 - protein, 11 aa, Homo Sapiens
MEEMHQVAIAA

SEQ ID NO: 113119 - protein, 11 aa, Homo Sapiens
MEEMYKKAHAA

SEQ ID NO: 113120 - protein, 11 aa, Homo Sapiens
MEIEEEKKRTA

SEQ ID NO: 113121 - protein, 11 aa, Homo Sapiens
MEQQTISIAKA

SEQ ID NO: 113122 - protein, 11 aa, Homo Sapiens
NEQQSVLQRIA

SEQ ID NO: 113123 - protein, 11 aa, Homo Sapiens
PSTPSATVHTP

SEQ ID NO: 113124 - protein, 11 aa, Homo Sapiens
QEATASKVIVA

SEQ ID NO: 113125 - protein, 11 aa, Homo Sapiens
QEELDTLFTTA

SEQ ID NO: 113126 - protein, 11 aa, Homo Sapiens
QEQAQTTDWRA

SEQ ID NO: 113127 - protein, 11 aa, Homo Sapiens
QEQEKQQKVEF

SEQ ID NO: 113128 - protein, 11 aa, Homo Sapiens
QEQRLQGEVVA

SEQ ID NO: 113129 - protein, 11 aa, Homo Sapiens
QEYLSGRSILA

SEQ ID NO: 113130 - protein, 11 aa, Homo Sapiens
REAPHLEKQPA

SEQ ID NO: 113131 - protein, 11 aa, Homo Sapiens
REEEEKLLHLA

SEQ ID NO: 113132 - protein, 11 aa, Homo Sapiens
RENEYLTLQVP

SEQ ID NO: 113133 - protein, 11 aa, Homo Sapiens
REYALNVGTIA

SEQ ID NO: 113134 - protein, 11 aa, Homo Sapiens
SCTNTTSSSSE

SEQ ID NO: 113135 - protein, 11 aa, Homo Sapiens
SEAFLGGHSVA

SEQ ID NO: 113136 - protein, 11 aa, Homo Sapiens
SEAPPTNQATA

SEQ ID NO: 113137 - protein, 11 aa, Homo Sapiens
SECEQLVKEVA

SEQ ID NO: 113138 - protein, 11 aa, Homo Sapiens
SEEDRVVVIRF

SEQ ID NO: 113139 - protein, 11 aa, Homo Sapiens
SEEEFERIHQA

SEQ ID NO: 113140 - protein, 11 aa, Homo Sapiens
SEEMYVPRVVT

SEQ ID NO: 113141 - protein, 11 aa, Homo Sapiens
SEEQYNKIVIP

SEQ ID NO: 113142 - protein, 11 aa, Homo Sapiens
SEHKLSTDHIP

SEQ ID NO: 113143 - protein, 11 aa, Homo Sapiens
SEHTGPGWESA

SEQ ID NO: 113144 - protein, 11 aa, Homo Sapiens
SEIDESVKLIP

SEQ ID NO: 113145 - protein, 11 aa, Homo Sapiens
SELELSAHNAA

SEQ ID NO: 113146 - protein, 11 aa, Homo Sapiens
SEMRYGIEILP

SEQ ID NO: 113147 - protein, 11 aa, Homo Sapiens
SEQLDLPVRQA

SEQ ID NO: 113148 - protein, 11 aa, Homo Sapiens
SEQTEALIHRA

SEQ ID NO: 113149 - protein, 11 aa, Homo Sapiens
SESSTILVVRY

SEQ ID NO: 113150 - protein, 11 aa, Homo Sapiens
TEDPHTVLVEF

SEQ ID NO: 113151 - protein, 11 aa, Homo Sapiens
VEKLFAEDTEA

SEQ ID NO: 113152 - protein, 11 aa, Homo Sapiens
VESGDLQKEIA

SEQ ID NO: 113153 - protein, 11 aa, Homo Sapiens
YEAGHLSFYSA

SEQ ID NO: 113154 - protein, 8 aa, Homo Sapiens
AKAPFAAH

SEQ ID NO: 113155 - protein, 8 aa, Homo Sapiens
AKDYTKAL

SEQ ID NO: 113156 - protein, 8 aa, Homo Sapiens
AKSGTKAF

SEQ ID NO: 113157 - protein, 8 aa, Homo Sapiens
ALATWLSF

SEQ ID NO: 113158 - protein, 8 aa, Homo Sapiens
AQMLQMEY

SEQ ID NO: 113159 - protein, 8 aa, Homo Sapiens
ASNIGISH

SEQ ID NO: 113160 - protein, 8 aa, Homo Sapiens
ASNIWAAY

SEQ ID NO: 113161 - protein, 8 aa, Homo Sapiens
ATAVWHAY

SEQ ID NO: 113162 - protein, 8 aa, Homo Sapiens
CAKHGIEY

SEQ ID NO: 113163 - protein, 8 aa, Homo Sapiens
EEQLQQIR

SEQ ID NO: 113164 - protein, 8 aa, Homo Sapiens
FAHWGQEL

SEQ ID NO: 113165 - protein, 8 aa, Homo Sapiens
FAMNGKSF

SEQ ID NO: 113166 - protein, 8 aa, Homo Sapiens
FAWLYQEY

SEQ ID NO: 113167 - protein, 8 aa, Homo Sapiens
FFKDGLEM

SEQ ID NO: 113168 - protein, 8 aa, Homo Sapiens
FIHISTAY

SEQ ID NO: 113169 - protein, 8 aa, Homo Sapiens
FLFVASEF

SEQ ID NO: 113170 - protein, 8 aa, Homo Sapiens
FLKENSEY

SEQ ID NO: 113171 - protein, 8 aa, Homo Sapiens
FLLQIKDR

SEQ ID NO: 113172 - protein, 8 aa, Homo Sapiens
FLQEWEVY

SEQ ID NO: 113173 - protein, 8 aa, Homo Sapiens
FMHVSTAY

SEQ ID NO: 113174 - protein, 8 aa, Homo Sapiens
FMNNWEVY

SEQ ID NO: 113175 - protein, 8 aa, Homo Sapiens
FQHVGKAF

SEQ ID NO: 113176 - protein, 8 aa, Homo Sapiens
FSHNGMAL

SEQ ID NO: 113177 - protein, 8 aa, Homo Sapiens
FSKDWSFY

SEQ ID NO: 113178 - protein, 8 aa, Homo Sapiens
FSKVGREL

SEQ ID NO: 113179 - protein, 8 aa, Homo Sapiens
FSNLWKSY

SEQ ID NO: 113180 - protein, 8 aa, Homo Sapiens
FTMVGKTF

SEQ ID NO: 113181 - protein, 8 aa, Homo Sapiens
FTNEAREM

SEQ ID NO: 113182 - protein, 8 aa, Homo Sapiens
GFKVGINY

SEQ ID NO: 113183 - protein, 8 aa, Homo Sapiens
GKAPGTPH

SEQ ID NO: 113184 - protein, 8 aa, Homo Sapiens
HGTNWVEY

SEQ ID NO: 113185 - protein, 8 aa, Homo Sapiens
HQFLQNEY

SEQ ID NO: 113186 - protein, 8 aa, Homo Sapiens
IAHVLPAL

SEQ ID NO: 113187 - protein, 8 aa, Homo Sapiens
IANTARAY

SEQ ID NO: 113188 - protein, 8 aa, Homo Sapiens
ILAHWACY

SEQ ID NO: 113189 - protein, 8 aa, Homo Sapiens
ILNTWISL

SEQ ID NO: 113190 - protein, 8 aa, Homo Sapiens
IQTAVTSY

SEQ ID NO: 113191 - protein, 8 aa, Homo Sapiens
IRDGVRAY

SEQ ID NO: 113192 - protein, 8 aa, Homo Sapiens
ISHEGHVY

SEQ ID NO: 113193 - protein, 8 aa, Homo Sapiens
LAFVSPSL

SEQ ID NO: 113194 - protein, 8 aa, Homo Sapiens
LAKVGIAL

SEQ ID NO: 113195 - protein, 8 aa, Homo Sapiens
LAMVGSAM

SEQ ID NO: 113196 - protein, 8 aa, Homo Sapiens
LIKKDVNY

SEQ ID NO: 113197 - protein, 8 aa, Homo Sapiens
LQNSWESY

SEQ ID NO: 113198 - protein, 8 aa, Homo Sapiens
LSGVWVAY

SEQ ID NO: 113199 - protein, 8 aa, Homo Sapiens
LSHLQNEY

SEQ ID NO: 113200 - protein, 8 aa, Homo Sapiens
LSKVSPSF

SEQ ID NO: 113201 - protein, 8 aa, Homo Sapiens
LSQLWKEY

SEQ ID NO: 113202 - protein, 8 aa, Homo Sapiens
LSRETIEY

SEQ ID NO: 113203 - protein, 8 aa, Homo Sapiens
LTRELPSF

SEQ ID NO: 113204 - protein, 8 aa, Homo Sapiens
MKDFNHSY

SEQ ID NO: 113205 - protein, 8 aa, Homo Sapiens
MKKIRESY

SEQ ID NO: 113206 - protein, 8 aa, Homo Sapiens
MSMTGVSF

SEQ ID NO: 113207 - protein, 8 aa, Homo Sapiens
RATQIPSY

SEQ ID NO: 113208 - protein, 8 aa, Homo Sapiens
SQRVWAEY

SEQ ID NO: 113209 - protein, 8 aa, Homo Sapiens
TAWRWPEF

SEQ ID NO: 113210 - protein, 8 aa, Homo Sapiens
TEELAYLK

SEQ ID NO: 113211 - protein, 8 aa, Homo Sapiens
TGHVGTVY

SEQ ID NO: 113212 - protein, 8 aa, Homo Sapiens
TLHNWLSF

SEQ ID NO: 113213 - protein, 8 aa, Homo Sapiens
TMAQWTRY

SEQ ID NO: 113214 - protein, 8 aa, Homo Sapiens
TQNHWFTY

SEQ ID NO: 113215 - protein, 8 aa, Homo Sapiens
TSGHWQHY

SEQ ID NO: 113216 - protein, 8 aa, Homo Sapiens
VAHLWQEF

SEQ ID NO: 113217 - protein, 8 aa, Homo Sapiens
VAKVGVSM

SEQ ID NO: 113218 - protein, 8 aa, Homo Sapiens
VAYEAPSL

SEQ ID NO: 113219 - protein, 8 aa, Homo Sapiens
VGNKWEAY

SEQ ID NO: 113220 - protein, 8 aa, Homo Sapiens
VGNVWRQY

SEQ ID NO: 113221 - protein, 8 aa, Homo Sapiens
VINNSTSY

SEQ ID NO: 113222 - protein, 8 aa, Homo Sapiens
VLKEGSEY

SEQ ID NO: 113223 - protein, 8 aa, Homo Sapiens
VLKEGVEY

SEQ ID NO: 113224 - protein, 8 aa, Homo Sapiens
VLNCGIAY

SEQ ID NO: 113225 - protein, 8 aa, Homo Sapiens
VLRVAAEF

SEQ ID NO: 113226 - protein, 8 aa, Homo Sapiens
VMRLTISY

SEQ ID NO: 113227 - protein, 8 aa, Homo Sapiens
VQALWKQF

SEQ ID NO: 113228 - protein, 8 aa, Homo Sapiens
VQQVAAEY

SEQ ID NO: 113229 - protein, 8 aa, Homo Sapiens
VQQVQHVY

SEQ ID NO: 113230 - protein, 8 aa, Homo Sapiens
VRDMIREV

SEQ ID NO: 113231 - protein, 8 aa, Homo Sapiens
VSKEWIAY

SEQ ID NO: 113232 - protein, 8 aa, Homo Sapiens
VSQVGKEL

SEQ ID NO: 113233 - protein, 8 aa, Homo Sapiens
YAQQWNQY

SEQ ID NO: 113234 - protein, 8 aa, Homo Sapiens
YFMVGTAF

SEQ ID NO: 113235 - protein, 8 aa, Homo Sapiens
YIHVGAQL

SEQ ID NO: 113236 - protein, 8 aa, Homo Sapiens
YLYVAPAY

SEQ ID NO: 113237 - protein, 8 aa, Homo Sapiens
YSAAWAEY

SEQ ID NO: 113238 - protein, 8 aa, Homo Sapiens
YSGHYIAH

SEQ ID NO: 113239 - protein, 8 aa, Homo Sapiens
YSHIYSSY

SEQ ID NO: 113240 - protein, 9 aa, Homo Sapiens
AAAAAAAAY

SEQ ID NO: 113241 - protein, 9 aa, Homo Sapiens
AAAAPRAVA

SEQ ID NO: 113242 - protein, 9 aa, Homo Sapiens
AAAGGLHEF

SEQ ID NO: 113243 - protein, 9 aa, Homo Sapiens
AAAGPGAAL

SEQ ID NO: 113244 - protein, 9 aa, Homo Sapiens
AAANPTLAF

SEQ ID NO: 113245 - protein, 9 aa, Homo Sapiens
AAAPAGTTF

SEQ ID NO: 113246 - protein, 9 aa, Homo Sapiens
AAARPKSAF

SEQ ID NO: 113247 - protein, 9 aa, Homo Sapiens
AAATGLHPA

SEQ ID NO: 113248 - protein, 9 aa, Homo Sapiens
AAATRTTSF

SEQ ID NO: 113249 - protein, 9 aa, Homo Sapiens
AAAVPRAAF

SEQ ID NO: 113250 - protein, 9 aa, Homo Sapiens
AAAVPTRSY

SEQ ID NO: 113251 - protein, 9 aa, Homo Sapiens
AAFADALEF

SEQ ID NO: 113252 - protein, 9 aa, Homo Sapiens
AAFPGASLY

SEQ ID NO: 113253 - protein, 9 aa, Homo Sapiens
AAGEPGTSM

SEQ ID NO: 113254 - protein, 9 aa, Homo Sapiens
AAHLPTQPH

SEQ ID NO: 113255 - protein, 9 aa, Homo Sapiens
AAHTVTAAY

SEQ ID NO: 113256 - protein, 9 aa, Homo Sapiens
AAHVAGAAY

SEQ ID NO: 113257 - protein, 9 aa, Homo Sapiens
AAIDIYTDM

SEQ ID NO: 113258 - protein, 9 aa, Homo Sapiens
AAIDPRVQY

SEQ ID NO: 113259 - protein, 9 aa, Homo Sapiens
AAIKINKPQ

SEQ ID NO: 113260 - protein, 9 aa, Homo Sapiens
AAIKPGTPL

SEQ ID NO: 113261 - protein, 9 aa, Homo Sapiens
AAIQDIAAF

SEQ ID NO: 113262 - protein, 9 aa, Homo Sapiens
AAIWQYESL

SEQ ID NO: 113263 - protein, 9 aa, Homo Sapiens
AAKAAGVSF

SEQ ID NO: 113264 - protein, 9 aa, Homo Sapiens
AAKAGLLAL

SEQ ID NO: 113265 - protein, 9 aa, Homo Sapiens
AAKDKLSEL

SEQ ID NO: 113266 - protein, 9 aa, Homo Sapiens
AAKDKLTEL

SEQ ID NO: 113267 - protein, 9 aa, Homo Sapiens
AAKDKYREL

SEQ ID NO: 113268 - protein, 9 aa, Homo Sapiens
AAKDYNQKL

SEQ ID NO: 113269 - protein, 9 aa, Homo Sapiens
AAKFKTPEL

SEQ ID NO: 113270 - protein, 9 aa, Homo Sapiens
AAKGVNKEF

SEQ ID NO: 113271 - protein, 9 aa, Homo Sapiens
AAKPEMAAL

SEQ ID NO: 113272 - protein, 9 aa, Homo Sapiens
AAKPHNPGF

SEQ ID NO: 113273 - protein, 9 aa, Homo Sapiens
AAKPPPLSA

SEQ ID NO: 113274 - protein, 9 aa, Homo Sapiens
AAKQINIDF

SEQ ID NO: 113275 - protein, 9 aa, Homo Sapiens
AAMPRPVSY

SEQ ID NO: 113276 - protein, 9 aa, Homo Sapiens
AAMVTAVAY

SEQ ID NO: 113277 - protein, 9 aa, Homo Sapiens
AANPHSFVF

SEQ ID NO: 113278 - protein, 9 aa, Homo Sapiens
AAPAYSRAL

SEQ ID NO: 113279 - protein, 9 aa, Homo Sapiens
AAPGPSAAF

SEQ ID NO: 113280 - protein, 9 aa, Homo Sapiens
AAPIRLLAA

SEQ ID NO: 113281 - protein, 9 aa, Homo Sapiens
AAQEGAVAF

SEQ ID NO: 113282 - protein, 9 aa, Homo Sapiens
AAQTVGNTY

SEQ ID NO: 113283 - protein, 9 aa, Homo Sapiens
AARAALRVY

SEQ ID NO: 113284 - protein, 9 aa, Homo Sapiens
AARDFLQTF

SEQ ID NO: 113285 - protein, 9 aa, Homo Sapiens
AAREHVLAY

SEQ ID NO: 113286 - protein, 9 aa, Homo Sapiens
AARFVSTPF

SEQ ID NO: 113287 - protein, 9 aa, Homo Sapiens
AARPATSTL

SEQ ID NO: 113288 - protein, 9 aa, Homo Sapiens
AARSGPLAM

SEQ ID NO: 113289 - protein, 9 aa, Homo Sapiens
AARVIIEKY

SEQ ID NO: 113290 - protein, 9 aa, Homo Sapiens
AARVPGVEH

SEQ ID NO: 113291 - protein, 9 aa, Homo Sapiens
AASPVVAEY

SEQ ID NO: 113292 - protein, 9 aa, Homo Sapiens
AAVAPGHPL

SEQ ID NO: 113293 - protein, 9 aa, Homo Sapiens
AAVDAGMAM

SEQ ID NO: 113294 - protein, 9 aa, Homo Sapiens
AAVDRTTEL

SEQ ID NO: 113295 - protein, 9 aa, Homo Sapiens
AAVGTGSSY

SEQ ID NO: 113296 - protein, 9 aa, Homo Sapiens
AAVPEVAVY

SEQ ID NO: 113297 - protein, 9 aa, Homo Sapiens
AFRPQLPAY

SEQ ID NO: 113298 - protein, 9 aa, Homo Sapiens
AGAPPGTAY

SEQ ID NO: 113299 - protein, 9 aa, Homo Sapiens
AGFASRQPY

SEQ ID NO: 113300 - protein, 9 aa, Homo Sapiens
AGHPAFVNY

SEQ ID NO: 113301 - protein, 9 aa, Homo Sapiens
AGIFPRLSF

SEQ ID NO: 113302 - protein, 9 aa, Homo Sapiens
AGMPITEVF

SEQ ID NO: 113303 - protein, 9 aa, Homo Sapiens
AGPMPGSSY

SEQ ID NO: 113304 - protein, 9 aa, Homo Sapiens
AGRLLLENY

SEQ ID NO: 113305 - protein, 9 aa, Homo Sapiens
AIFPNGAAY

SEQ ID NO: 113306 - protein, 9 aa, Homo Sapiens
AIIDILTHY

SEQ ID NO: 113307 - protein, 9 aa, Homo Sapiens
AIIDTVINY

SEQ ID NO: 113308 - protein, 9 aa, Homo Sapiens
AIIDYLTDH

SEQ ID NO: 113309 - protein, 9 aa, Homo Sapiens
AIIEEYLHL

SEQ ID NO: 113310 - protein, 9 aa, Homo Sapiens
AIIERLKEH

SEQ ID NO: 113311 - protein, 9 aa, Homo Sapiens
AIIERTASF

SEQ ID NO: 113312 - protein, 9 aa, Homo Sapiens
AIIHGLSSL

SEQ ID NO: 113313 - protein, 9 aa, Homo Sapiens
AIIPSHLAY

SEQ ID NO: 113314 - protein, 9 aa, Homo Sapiens
AIITPQTCY

SEQ ID NO: 113315 - protein, 9 aa, Homo Sapiens
AIKDKQVKY

SEQ ID NO: 113316 - protein, 9 aa, Homo Sapiens
AIKPTSKEF

SEQ ID NO: 113317 - protein, 9 aa, Homo Sapiens
AIKQDAQSL

SEQ ID NO: 113318 - protein, 9 aa, Homo Sapiens
AIMGNSSEF

SEQ ID NO: 113319 - protein, 9 aa, Homo Sapiens
AIRDGVIEA

SEQ ID NO: 113320 - protein, 9 aa, Homo Sapiens
AIRQQIESY

SEQ ID NO: 113321 - protein, 9 aa, Homo Sapiens
AIVHAVHAY

SEQ ID NO: 113322 - protein, 9 aa, Homo Sapiens
AIYGGSASY

SEQ ID NO: 113323 - protein, 9 aa, Homo Sapiens
ALAGPAAAL

SEQ ID NO: 113324 - protein, 9 aa, Homo Sapiens
ALAPAGFSY

SEQ ID NO: 113325 - protein, 9 aa, Homo Sapiens
ALAVIITSY

SEQ ID NO: 113326 - protein, 9 aa, Homo Sapiens
ALIPYWTVY

SEQ ID NO: 113327 - protein, 9 aa, Homo Sapiens
ALISDYKEY

SEQ ID NO: 113328 - protein, 9 aa, Homo Sapiens
ALKECLTAY

SEQ ID NO: 113329 - protein, 9 aa, Homo Sapiens
ALKNPSEEY

SEQ ID NO: 113330 - protein, 9 aa, Homo Sapiens
ALKNVTVSF

SEQ ID NO: 113331 - protein, 9 aa, Homo Sapiens
ALKPGLSAY

SEQ ID NO: 113332 - protein, 9 aa, Homo Sapiens
ALKPPYSAF

SEQ ID NO: 113333 - protein, 9 aa, Homo Sapiens
ALNTIVTVY

SEQ ID NO: 113334 - protein, 9 aa, Homo Sapiens
ALNVDLTEF

SEQ ID NO: 113335 - protein, 9 aa, Homo Sapiens
ALQDLLSEY

SEQ ID NO: 113336 - protein, 9 aa, Homo Sapiens
ALQEACEAY

SEQ ID NO: 113337 - protein, 9 aa, Homo Sapiens
ALQEASEAY

SEQ ID NO: 113338 - protein, 9 aa, Homo Sapiens
ALVPSVWLY

SEQ ID NO: 113339 - protein, 9 aa, Homo Sapiens
AMKETFKSY

SEQ ID NO: 113340 - protein, 9 aa, Homo Sapiens
AMKKVFRVY

SEQ ID NO: 113341 - protein, 9 aa, Homo Sapiens
AMKSKLPVL

SEQ ID NO: 113342 - protein, 9 aa, Homo Sapiens
AMNPTNTVF

SEQ ID NO: 113343 - protein, 9 aa, Homo Sapiens
AMRPGLEGY

SEQ ID NO: 113344 - protein, 9 aa, Homo Sapiens
AMYPIRSAY

SEQ ID NO: 113345 - protein, 9 aa, Homo Sapiens
AQAEVYKEL

SEQ ID NO: 113346 - protein, 9 aa, Homo Sapiens
AQKNHIPVF

SEQ ID NO: 113347 - protein, 9 aa, Homo Sapiens
ASICVTQAF

SEQ ID NO: 113348 - protein, 9 aa, Homo Sapiens
ASIPYFHAM

SEQ ID NO: 113349 - protein, 9 aa, Homo Sapiens
ASISNISPH

SEQ ID NO: 113350 - protein, 9 aa, Homo Sapiens
ATAAAAAAY

SEQ ID NO: 113351 - protein, 9 aa, Homo Sapiens
ATAQPPAPL

SEQ ID NO: 113352 - protein, 9 aa, Homo Sapiens
AVAAGTPAP

SEQ ID NO: 113353 - protein, 9 aa, Homo Sapiens
AVAPPGCSH

SEQ ID NO: 113354 - protein, 9 aa, Homo Sapiens
AVHDITVAY

SEQ ID NO: 113355 - protein, 9 aa, Homo Sapiens
AVIAPKSSY

SEQ ID NO: 113356 - protein, 9 aa, Homo Sapiens
AVIEDTWHY

SEQ ID NO: 113357 - protein, 9 aa, Homo Sapiens
AVIKSNHSY

SEQ ID NO: 113358 - protein, 9 aa, Homo Sapiens
AVKVSPVSY

SEQ ID NO: 113359 - protein, 9 aa, Homo Sapiens
AVNALQSVY

SEQ ID NO: 113360 - protein, 9 aa, Homo Sapiens
AVNGHTNSF

SEQ ID NO: 113361 - protein, 9 aa, Homo Sapiens
AVRDGLRAV

SEQ ID NO: 113362 - protein, 9 aa, Homo Sapiens
AVRENIEEF

SEQ ID NO: 113363 - protein, 9 aa, Homo Sapiens
AVRPGLPAY

SEQ ID NO: 113364 - protein, 9 aa, Homo Sapiens
AVRSGIVEY

SEQ ID NO: 113365 - protein, 9 aa, Homo Sapiens
AVVPKTKEV

SEQ ID NO: 113366 - protein, 9 aa, Homo Sapiens
AYFPYFITY

SEQ ID NO: 113367 - protein, 9 aa, Homo Sapiens
AYSGHYIAH

SEQ ID NO: 113368 - protein, 9 aa, Homo Sapiens
CAADIKSAY

SEQ ID NO: 113369 - protein, 9 aa, Homo Sapiens
CAIAQAESL

SEQ ID NO: 113370 - protein, 9 aa, Homo Sapiens
CPMRNTPEY

SEQ ID NO: 113371 - protein, 9 aa, Homo Sapiens
CSHAAVSAY

SEQ ID NO: 113372 - protein, 9 aa, Homo Sapiens
CVKPDVHVY

SEQ ID NO: 113373 - protein, 9 aa, Homo Sapiens
FAADIISVL

SEQ ID NO: 113374 - protein, 9 aa, Homo Sapiens
FAAHLRCTY

SEQ ID NO: 113375 - protein, 9 aa, Homo Sapiens
FAANVYEAF

SEQ ID NO: 113376 - protein, 9 aa, Homo Sapiens
FAAVAAAAY

SEQ ID NO: 113377 - protein, 9 aa, Homo Sapiens
FACEKNENL

SEQ ID NO: 113378 - protein, 9 aa, Homo Sapiens
FAFDPSVNY

SEQ ID NO: 113379 - protein, 9 aa, Homo Sapiens
FAFEHSEEY

SEQ ID NO: 113380 - protein, 9 aa, Homo Sapiens
FAFLTGVGL

SEQ ID NO: 113381 - protein, 9 aa, Homo Sapiens
FAFVTDNTY

SEQ ID NO: 113382 - protein, 9 aa, Homo Sapiens
FAHASGMQY

SEQ ID NO: 113383 - protein, 9 aa, Homo Sapiens
FAHEVGHNF

SEQ ID NO: 113384 - protein, 9 aa, Homo Sapiens
FAHHASCHF

SEQ ID NO: 113385 - protein, 9 aa, Homo Sapiens
FAHLINVEF

SEQ ID NO: 113386 - protein, 9 aa, Homo Sapiens
FAHLPKSTF

SEQ ID NO: 113387 - protein, 9 aa, Homo Sapiens
FAIQRTTNF

SEQ ID NO: 113388 - protein, 9 aa, Homo Sapiens
FAKDFMTYL

SEQ ID NO: 113389 - protein, 9 aa, Homo Sapiens
FAKELQRSF

SEQ ID NO: 113390 - protein, 9 aa, Homo Sapiens
FAKEVSHEM

SEQ ID NO: 113391 - protein, 9 aa, Homo Sapiens
FAKKTFISY

SEQ ID NO: 113392 - protein, 9 aa, Homo Sapiens
FAKPENIDL

SEQ ID NO: 113393 - protein, 9 aa, Homo Sapiens
FAKPFLASL

SEQ ID NO: 113394 - protein, 9 aa, Homo Sapiens
FANIDQETY

SEQ ID NO: 113395 - protein, 9 aa, Homo Sapiens
FANLPNQVY

SEQ ID NO: 113396 - protein, 9 aa, Homo Sapiens
FAQEALTVL

SEQ ID NO: 113397 - protein, 9 aa, Homo Sapiens
FASIPGLEF

SEQ ID NO: 113398 - protein, 9 aa, Homo Sapiens
FATFPSSAF

SEQ ID NO: 113399 - protein, 9 aa, Homo Sapiens
FATPPSSTY

SEQ ID NO: 113400 - protein, 9 aa, Homo Sapiens
FAVPENSSV

SEQ ID NO: 113401 - protein, 9 aa, Homo Sapiens
FAYHYPYTY

SEQ ID NO: 113402 - protein, 9 aa, Homo Sapiens
FGHTSIVAY

SEQ ID NO: 113403 - protein, 9 aa, Homo Sapiens
FGKAPGTPH

SEQ ID NO: 113404 - protein, 9 aa, Homo Sapiens
FIAPGYSMI

SEQ ID NO: 113405 - protein, 9 aa, Homo Sapiens
FIIQGLRSV

SEQ ID NO: 113406 - protein, 9 aa, Homo Sapiens
FIISRTQAL

SEQ ID NO: 113407 - protein, 9 aa, Homo Sapiens
FIKDGSSTY

SEQ ID NO: 113408 - protein, 9 aa, Homo Sapiens
FIKDRILVY

SEQ ID NO: 113409 - protein, 9 aa, Homo Sapiens
FIKEGNAEM

SEQ ID NO: 113410 - protein, 9 aa, Homo Sapiens
FIMDRAQAL

SEQ ID NO: 113411 - protein, 9 aa, Homo Sapiens
FIMGKTIEF

SEQ ID NO: 113412 - protein, 9 aa, Homo Sapiens
FINGDISSL

SEQ ID NO: 113413 - protein, 9 aa, Homo Sapiens
FINYVKNCF

SEQ ID NO: 113414 - protein, 9 aa, Homo Sapiens
FIRPWCTSL

SEQ ID NO: 113415 - protein, 9 aa, Homo Sapiens
FIRVVGSEF

SEQ ID NO: 113416 - protein, 9 aa, Homo Sapiens
FLAPLVTEY

SEQ ID NO: 113417 - protein, 9 aa, Homo Sapiens
FLHESLVEY

SEQ ID NO: 113418 - protein, 9 aa, Homo Sapiens
FLIDKVNAF

SEQ ID NO: 113419 - protein, 9 aa, Homo Sapiens
FLIDRSPEY

SEQ ID NO: 113420 - protein, 9 aa, Homo Sapiens
FLKEIVETF

SEQ ID NO: 113421 - protein, 9 aa, Homo Sapiens
FLKEVVETF

SEQ ID NO: 113422 - protein, 9 aa, Homo Sapiens
FLNKASAVY

SEQ ID NO: 113423 - protein, 9 aa, Homo Sapiens
FLPQAWLAY

SEQ ID NO: 113424 - protein, 9 aa, Homo Sapiens
FLRDHLRCL

SEQ ID NO: 113425 - protein, 9 aa, Homo Sapiens
FLRDKIASY

SEQ ID NO: 113426 - protein, 9 aa, Homo Sapiens
FLRHMILAY

SEQ ID NO: 113427 - protein, 9 aa, Homo Sapiens
FMAQALQEY

SEQ ID NO: 113428 - protein, 9 aa, Homo Sapiens
FMKEVGSHF

SEQ ID NO: 113429 - protein, 9 aa, Homo Sapiens
FMKRDLTEF

SEQ ID NO: 113430 - protein, 9 aa, Homo Sapiens
FMPHVTEAY

SEQ ID NO: 113431 - protein, 9 aa, Homo Sapiens
FNKNKFVEY

SEQ ID NO: 113432 - protein, 9 aa, Homo Sapiens
FQAPTAKEM

SEQ ID NO: 113433 - protein, 9 aa, Homo Sapiens
FQMGPTQAY

SEQ ID NO: 113434 - protein, 9 aa, Homo Sapiens
FQNKIHVSY

SEQ ID NO: 113435 - protein, 9 aa, Homo Sapiens
FQNVQQVEY

SEQ ID NO: 113436 - protein, 9 aa, Homo Sapiens
FQRNIKKEY

SEQ ID NO: 113437 - protein, 9 aa, Homo Sapiens
FQYESKVFY

SEQ ID NO: 113438 - protein, 9 aa, Homo Sapiens
FSAPLFLSH

SEQ ID NO: 113439 - protein, 9 aa, Homo Sapiens
FSAPPGSEL

SEQ ID NO: 113440 - protein, 9 aa, Homo Sapiens
FSHRIYVAY

SEQ ID NO: 113441 - protein, 9 aa, Homo Sapiens
FSKDIVENY

SEQ ID NO: 113442 - protein, 9 aa, Homo Sapiens
FSKDKLVAL

SEQ ID NO: 113443 - protein, 9 aa, Homo Sapiens
FSKLVGSAF

SEQ ID NO: 113444 - protein, 9 aa, Homo Sapiens
FSNFWYHSY

SEQ ID NO: 113445 - protein, 9 aa, Homo Sapiens
FSNPYSIEY

SEQ ID NO: 113446 - protein, 9 aa, Homo Sapiens
FSRGGMISF

SEQ ID NO: 113447 - protein, 9 aa, Homo Sapiens
FSRSSRQEY

SEQ ID NO: 113448 - protein, 9 aa, Homo Sapiens
FSYQHAIEE

SEQ ID NO: 113449 - protein, 9 aa, Homo Sapiens
FTHLSLQEF

SEQ ID NO: 113450 - protein, 9 aa, Homo Sapiens
FTITKTVEY

SEQ ID NO: 113451 - protein, 9 aa, Homo Sapiens
FTRSINITH

SEQ ID NO: 113452 - protein, 9 aa, Homo Sapiens
FTVPHTHVF

SEQ ID NO: 113453 - protein, 9 aa, Homo Sapiens
FVKDSGACF

SEQ ID NO: 113454 - protein, 9 aa, Homo Sapiens
FVKGQFHEY

SEQ ID NO: 113455 - protein, 9 aa, Homo Sapiens
FVNPHVSSF

SEQ ID NO: 113456 - protein, 9 aa, Homo Sapiens
FVRDMIREV

SEQ ID NO: 113457 - protein, 9 aa, Homo Sapiens
GAIEQYNAL

SEQ ID NO: 113458 - protein, 9 aa, Homo Sapiens
GAITKYSAL

SEQ ID NO: 113459 - protein, 9 aa, Homo Sapiens
GAVTKTHVM

SEQ ID NO: 113460 - protein, 9 aa, Homo Sapiens
GGPGGVGGL

SEQ ID NO: 113461 - protein, 9 aa, Homo Sapiens
GGVTGLSQY

SEQ ID NO: 113462 - protein, 9 aa, Homo Sapiens
GIFGKGSAY

SEQ ID NO: 113463 - protein, 9 aa, Homo Sapiens
GIHVAEVTY

SEQ ID NO: 113464 - protein, 9 aa, Homo Sapiens
GIIRPGTAF

SEQ ID NO: 113465 - protein, 9 aa, Homo Sapiens
GLIPKFVSF

SEQ ID NO: 113466 - protein, 9 aa, Homo Sapiens
GMIGKFSAL

SEQ ID NO: 113467 - protein, 9 aa, Homo Sapiens
GQKPWSQHY

SEQ ID NO: 113468 - protein, 9 aa, Homo Sapiens
GSIGGYNAH

SEQ ID NO: 113469 - protein, 9 aa, Homo Sapiens
GVIQPGRGF

SEQ ID NO: 113470 - protein, 9 aa, Homo Sapiens
GVISGLQEY

SEQ ID NO: 113471 - protein, 9 aa, Homo Sapiens
GVKKPTKAL

SEQ ID NO: 113472 - protein, 9 aa, Homo Sapiens
GVKSVGQGY

SEQ ID NO: 113473 - protein, 9 aa, Homo Sapiens
HAFVTEVAY

SEQ ID NO: 113474 - protein, 9 aa, Homo Sapiens
HAIPPTAIM

SEQ ID NO: 113475 - protein, 9 aa, Homo Sapiens
HAIPPTLAM

SEQ ID NO: 113476 - protein, 9 aa, Homo Sapiens
HAIQKYLEI

SEQ ID NO: 113477 - protein, 9 aa, Homo Sapiens
HAKTNISSY

SEQ ID NO: 113478 - protein, 9 aa, Homo Sapiens
HARDFTVSA

SEQ ID NO: 113479 - protein, 9 aa, Homo Sapiens
HARGNLASY

SEQ ID NO: 113480 - protein, 9 aa, Homo Sapiens
HFREKLPSY

SEQ ID NO: 113481 - protein, 9 aa, Homo Sapiens
HGIDPTGTY

SEQ ID NO: 113482 - protein, 9 aa, Homo Sapiens
HIASFLSVF

SEQ ID NO: 113483 - protein, 9 aa, Homo Sapiens
HIIAGAGEL

SEQ ID NO: 113484 - protein, 9 aa, Homo Sapiens
HIIENIVAV

SEQ ID NO: 113485 - protein, 9 aa, Homo Sapiens
HIIHDFQPH

SEQ ID NO: 113486 - protein, 9 aa, Homo Sapiens
HIITGVAVF

SEQ ID NO: 113487 - protein, 9 aa, Homo Sapiens
HIRGAIREY

SEQ ID NO: 113488 - protein, 9 aa, Homo Sapiens
HLHPIQTSF

SEQ ID NO: 113489 - protein, 9 aa, Homo Sapiens
HLHVQETKF

SEQ ID NO: 113490 - protein, 9 aa, Homo Sapiens
HLKEDQTEY

SEQ ID NO: 113491 - protein, 9 aa, Homo Sapiens
HLPPPSVAY

SEQ ID NO: 113492 - protein, 9 aa, Homo Sapiens
HLRDYFEEY

SEQ ID NO: 113493 - protein, 9 aa, Homo Sapiens
HLRDYFEQY

SEQ ID NO: 113494 - protein, 9 aa, Homo Sapiens
HLRNPSAAF

SEQ ID NO: 113495 - protein, 9 aa, Homo Sapiens
HMPDPWAEF

SEQ ID NO: 113496 - protein, 9 aa, Homo Sapiens
HQITVLHVY

SEQ ID NO: 113497 - protein, 9 aa, Homo Sapiens
HWHLWKKTY

SEQ ID NO: 113498 - protein, 9 aa, Homo Sapiens
IAAVPATAM

SEQ ID NO: 113499 - protein, 9 aa, Homo Sapiens
IAFDPRSAY

SEQ ID NO: 113500 - protein, 9 aa, Homo Sapiens
IAIEPGAAL

SEQ ID NO: 113501 - protein, 9 aa, Homo Sapiens
IAIPVTVAF

SEQ ID NO: 113502 - protein, 9 aa, Homo Sapiens
IAISRTPVL

SEQ ID NO: 113503 - protein, 9 aa, Homo Sapiens
IAKAGIPVY

SEQ ID NO: 113504 - protein, 9 aa, Homo Sapiens
IAKDEIGEF

SEQ ID NO: 113505 - protein, 9 aa, Homo Sapiens
IAKSGTKAF

SEQ ID NO: 113506 - protein, 9 aa, Homo Sapiens
IAKSGTSEF

SEQ ID NO: 113507 - protein, 9 aa, Homo Sapiens
IAPGVTHEL

SEQ ID NO: 113508 - protein, 9 aa, Homo Sapiens
IAVDRYLAI

SEQ ID NO: 113509 - protein, 9 aa, Homo Sapiens
ICRPLPVTF

SEQ ID NO: 113510 - protein, 9 aa, Homo Sapiens
IGAGHSSEF

SEQ ID NO: 113511 - protein, 9 aa, Homo Sapiens
IIADPKTDH

SEQ ID NO: 113512 - protein, 9 aa, Homo Sapiens
IIAEPGRYY

SEQ ID NO: 113513 - protein, 9 aa, Homo Sapiens
IIKENKVPY

SEQ ID NO: 113514 - protein, 9 aa, Homo Sapiens
IIRDRLIQF

SEQ ID NO: 113515 - protein, 9 aa, Homo Sapiens
IIRKPVTVH

SEQ ID NO: 113516 - protein, 9 aa, Homo Sapiens
ILGPPGSVY

SEQ ID NO: 113517 - protein, 9 aa, Homo Sapiens
ILHLISTVY

SEQ ID NO: 113518 - protein, 9 aa, Homo Sapiens
ILHSIFSSY

SEQ ID NO: 113519 - protein, 9 aa, Homo Sapiens
ILKDDNHSL

SEQ ID NO: 113520 - protein, 9 aa, Homo Sapiens
ILKDSISSY

SEQ ID NO: 113521 - protein, 9 aa, Homo Sapiens
ILMDPSPEY

SEQ ID NO: 113522 - protein, 9 aa, Homo Sapiens
ILPKCRTSY

SEQ ID NO: 113523 - protein, 9 aa, Homo Sapiens
ILPPGWQSY

SEQ ID NO: 113524 - protein, 9 aa, Homo Sapiens
ILQDYTHEF

SEQ ID NO: 113525 - protein, 9 aa, Homo Sapiens
ILRKDIPSF

SEQ ID NO: 113526 - protein, 9 aa, Homo Sapiens
ILYNIKQEY

SEQ ID NO: 113527 - protein, 9 aa, Homo Sapiens
IMKGGSKEY

SEQ ID NO: 113528 - protein, 9 aa, Homo Sapiens
IMKKIRESY

SEQ ID NO: 113529 - protein, 9 aa, Homo Sapiens
IMNDKLTEY

SEQ ID NO: 113530 - protein, 9 aa, Homo Sapiens
IMRELDVSY

SEQ ID NO: 113531 - protein, 9 aa, Homo Sapiens
ISAEHLTSH

SEQ ID NO: 113532 - protein, 9 aa, Homo Sapiens
ISAPHMHAY

SEQ ID NO: 113533 - protein, 9 aa, Homo Sapiens
ISAPSMPEY

SEQ ID NO: 113534 - protein, 9 aa, Homo Sapiens
ISGPLSPAY

SEQ ID NO: 113535 - protein, 9 aa, Homo Sapiens
ISHFIPSYH

SEQ ID NO: 113536 - protein, 9 aa, Homo Sapiens
ISHSWEESF

SEQ ID NO: 113537 - protein, 9 aa, Homo Sapiens
ISNPKTAEF

SEQ ID NO: 113538 - protein, 9 aa, Homo Sapiens
ISPSHIWIF

SEQ ID NO: 113539 - protein, 9 aa, Homo Sapiens
ISRETGEPY

SEQ ID NO: 113540 - protein, 9 aa, Homo Sapiens
ISREWTQKY

SEQ ID NO: 113541 - protein, 9 aa, Homo Sapiens
ISRGEMDSF

SEQ ID NO: 113542 - protein, 9 aa, Homo Sapiens
ISRWPLPEY

SEQ ID NO: 113543 - protein, 9 aa, Homo Sapiens
ISTPVIRTF

SEQ ID NO: 113544 - protein, 9 aa, Homo Sapiens
ITAPPGTAA

SEQ ID NO: 113545 - protein, 9 aa, Homo Sapiens
ITKADAAEF

SEQ ID NO: 113546 - protein, 9 aa, Homo Sapiens
IVIDPKNPL

SEQ ID NO: 113547 - protein, 9 aa, Homo Sapiens
IVKNVGREY

SEQ ID NO: 113548 - protein, 9 aa, Homo Sapiens
KAKPVGSPL

SEQ ID NO: 113549 - protein, 9 aa, Homo Sapiens
KAMGIMNSF

SEQ ID NO: 113550 - protein, 9 aa, Homo Sapiens
KAPGSTSNL

SEQ ID NO: 113551 - protein, 9 aa, Homo Sapiens
KAPVTKVAA

SEQ ID NO: 113552 - protein, 9 aa, Homo Sapiens
KFKFPGRQK

SEQ ID NO: 113553 - protein, 9 aa, Homo Sapiens
KMIEKYESL

SEQ ID NO: 113554 - protein, 9 aa, Homo Sapiens
KMIENYEAL

SEQ ID NO: 113555 - protein, 9 aa, Homo Sapiens
KMKEIAEAY

SEQ ID NO: 113556 - protein, 9 aa, Homo Sapiens
KMKPLWIMY

SEQ ID NO: 113557 - protein, 9 aa, Homo Sapiens
KPRHDLPPY

SEQ ID NO: 113558 - protein, 9 aa, Homo Sapiens
KSFPGGKEY

SEQ ID NO: 113559 - protein, 9 aa, Homo Sapiens
KSFVSSQSF

SEQ ID NO: 113560 - protein, 9 aa, Homo Sapiens
KSKNPGEAL

SEQ ID NO: 113561 - protein, 9 aa, Homo Sapiens
KSMFQRTTY

SEQ ID NO: 113562 - protein, 9 aa, Homo Sapiens
KSVRPGASY

SEQ ID NO: 113563 - protein, 9 aa, Homo Sapiens
KTKDPTAAL

SEQ ID NO: 113564 - protein, 9 aa, Homo Sapiens
KTKEIEQVY

SEQ ID NO: 113565 - protein, 9 aa, Homo Sapiens
LAAARLAAA

SEQ ID NO: 113566 - protein, 9 aa, Homo Sapiens
LAADCAHEL

SEQ ID NO: 113567 - protein, 9 aa, Homo Sapiens
LAAGPSAAA

SEQ ID NO: 113568 - protein, 9 aa, Homo Sapiens
LAIEGAQAF

SEQ ID NO: 113569 - protein, 9 aa, Homo Sapiens
LAIPITNTY

SEQ ID NO: 113570 - protein, 9 aa, Homo Sapiens
LAIRDTASY

SEQ ID NO: 113571 - protein, 9 aa, Homo Sapiens
LAKAPFAAH

SEQ ID NO: 113572 - protein, 9 aa, Homo Sapiens
LAKEGLYQY

SEQ ID NO: 113573 - protein, 9 aa, Homo Sapiens
LAKELGCSY

SEQ ID NO: 113574 - protein, 9 aa, Homo Sapiens
LAKEVGTSY

SEQ ID NO: 113575 - protein, 9 aa, Homo Sapiens
LAKGEVTEM

SEQ ID NO: 113576 - protein, 9 aa, Homo Sapiens
LAKGGTVEY

SEQ ID NO: 113577 - protein, 9 aa, Homo Sapiens
LAKVENACY

SEQ ID NO: 113578 - protein, 9 aa, Homo Sapiens
LAMPPGNSH

SEQ ID NO: 113579 - protein, 9 aa, Homo Sapiens
LAQKPGAPL

SEQ ID NO: 113580 - protein, 9 aa, Homo Sapiens
LAQTTRTAY

SEQ ID NO: 113581 - protein, 9 aa, Homo Sapiens
LARCSIVSY

SEQ ID NO: 113582 - protein, 9 aa, Homo Sapiens
LARDFLDEY

SEQ ID NO: 113583 - protein, 9 aa, Homo Sapiens
LARDLKEAY

SEQ ID NO: 113584 - protein, 9 aa, Homo Sapiens
LARGIDSSY

SEQ ID NO: 113585 - protein, 9 aa, Homo Sapiens
LARPLPVEY

SEQ ID NO: 113586 - protein, 9 aa, Homo Sapiens
LARTSSAEY

SEQ ID NO: 113587 - protein, 9 aa, Homo Sapiens
LASPIYTHF

SEQ ID NO: 113588 - protein, 9 aa, Homo Sapiens
LAVDGLMEM

SEQ ID NO: 113589 - protein, 9 aa, Homo Sapiens
LAVGLTSCF

SEQ ID NO: 113590 - protein, 9 aa, Homo Sapiens
LAVPDMSSL

SEQ ID NO: 113591 - protein, 9 aa, Homo Sapiens
LGGPASSAY

SEQ ID NO: 113592 - protein, 9 aa, Homo Sapiens
LGHGGLTSF

SEQ ID NO: 113593 - protein, 9 aa, Homo Sapiens
LGIPNTAHF

SEQ ID NO: 113594 - protein, 9 aa, Homo Sapiens
LIHVPLETF

SEQ ID NO: 113595 - protein, 9 aa, Homo Sapiens
LIIAGTSAY

SEQ ID NO: 113596 - protein, 9 aa, Homo Sapiens
LIIANTMAF

SEQ ID NO: 113597 - protein, 9 aa, Homo Sapiens
LIISNTKSL

SEQ ID NO: 113598 - protein, 9 aa, Homo Sapiens
LIISPTREL

SEQ ID NO: 113599 - protein, 9 aa, Homo Sapiens
LIKETTTGY

SEQ ID NO: 113600 - protein, 9 aa, Homo Sapiens
LIKTPTKSF

SEQ ID NO: 113601 - protein, 9 aa, Homo Sapiens
LIMDGASAF

SEQ ID NO: 113602 - protein, 9 aa, Homo Sapiens
LIRDKVAGH

SEQ ID NO: 113603 - protein, 9 aa, Homo Sapiens
LIRDNRVVY

SEQ ID NO: 113604 - protein, 9 aa, Homo Sapiens
LIREYIVEY

SEQ ID NO: 113605 - protein, 9 aa, Homo Sapiens
LIRGALEAY

SEQ ID NO: 113606 - protein, 9 aa, Homo Sapiens
LIRQGVLEH

SEQ ID NO: 113607 - protein, 9 aa, Homo Sapiens
LIYDGKVEM

SEQ ID NO: 113608 - protein, 9 aa, Homo Sapiens
LIYGTPRAA

SEQ ID NO: 113609 - protein, 9 aa, Homo Sapiens
LLGPSYREM

SEQ ID NO: 113610 - protein, 9 aa, Homo Sapiens
LLKDSLNEY

SEQ ID NO: 113611 - protein, 9 aa, Homo Sapiens
LLKQIQEAY

SEQ ID NO: 113612 - protein, 9 aa, Homo Sapiens
LLKSPGACF

SEQ ID NO: 113613 - protein, 9 aa, Homo Sapiens
LLMPHSAQF

SEQ ID NO: 113614 - protein, 9 aa, Homo Sapiens
LLQEPRHEY

SEQ ID NO: 113615 - protein, 9 aa, Homo Sapiens
LLRDATACY

SEQ ID NO: 113616 - protein, 9 aa, Homo Sapiens
LMIDVTKSY

SEQ ID NO: 113617 - protein, 9 aa, Homo Sapiens
LQIDNARLA

SEQ ID NO: 113618 - protein, 9 aa, Homo Sapiens
LQPDRWTEY

SEQ ID NO: 113619 - protein, 9 aa, Homo Sapiens
LSAPIHTQM

SEQ ID NO: 113620 - protein, 9 aa, Homo Sapiens
LSFPTTKTY

SEQ ID NO: 113621 - protein, 9 aa, Homo Sapiens
LSGPLKEQY

SEQ ID NO: 113622 - protein, 9 aa, Homo Sapiens
LSHGSTTSY

SEQ ID NO: 113623 - protein, 9 aa, Homo Sapiens
LSHTQASAF

SEQ ID NO: 113624 - protein, 9 aa, Homo Sapiens
LSKCPWKEY

SEQ ID NO: 113625 - protein, 9 aa, Homo Sapiens
LSKDDIENM

SEQ ID NO: 113626 - protein, 9 aa, Homo Sapiens
LSKDPGENY

SEQ ID NO: 113627 - protein, 9 aa, Homo Sapiens
LSKDSILSL

SEQ ID NO: 113628 - protein, 9 aa, Homo Sapiens
LSKGDGLEF

SEQ ID NO: 113629 - protein, 9 aa, Homo Sapiens
LSKGPGLEV

SEQ ID NO: 113630 - protein, 9 aa, Homo Sapiens
LSKLIHQSY

SEQ ID NO: 113631 - protein, 9 aa, Homo Sapiens
LSKLPCGEY

SEQ ID NO: 113632 - protein, 9 aa, Homo Sapiens
LSKLTDIQY

SEQ ID NO: 113633 - protein, 9 aa, Homo Sapiens
LSNITVETY

SEQ ID NO: 113634 - protein, 9 aa, Homo Sapiens
LSNTWNEKY

SEQ ID NO: 113635 - protein, 9 aa, Homo Sapiens
LTRDTIASH

SEQ ID NO: 113636 - protein, 9 aa, Homo Sapiens
LVREIAQDF

SEQ ID NO: 113637 - protein, 9 aa, Homo Sapiens
MAAMPQTVY

SEQ ID NO: 113638 - protein, 9 aa, Homo Sapiens
MAISGLSSF

SEQ ID NO: 113639 - protein, 9 aa, Homo Sapiens
MAKGSLVDY

SEQ ID NO: 113640 - protein, 9 aa, Homo Sapiens
MARSPGRAY

SEQ ID NO: 113641 - protein, 9 aa, Homo Sapiens
MGRDPGVSF

SEQ ID NO: 113642 - protein, 9 aa, Homo Sapiens
MIIENFEAL

SEQ ID NO: 113643 - protein, 9 aa, Homo Sapiens
MISEPRISY

SEQ ID NO: 113644 - protein, 9 aa, Homo Sapiens
MLHQILTPF

SEQ ID NO: 113645 - protein, 9 aa, Homo Sapiens
MLRDIIREY

SEQ ID NO: 113646 - protein, 9 aa, Homo Sapiens
MLRESLKEY

SEQ ID NO: 113647 - protein, 9 aa, Homo Sapiens
MMNAIKESY

SEQ ID NO: 113648 - protein, 9 aa, Homo Sapiens
MSAGPRYEY

SEQ ID NO: 113649 - protein, 9 aa, Homo Sapiens
MSKAPSNTF

SEQ ID NO: 113650 - protein, 9 aa, Homo Sapiens
MTKKPGMFF

SEQ ID NO: 113651 - protein, 9 aa, Homo Sapiens
NAHYPKQSF

SEQ ID NO: 113652 - protein, 9 aa, Homo Sapiens
NAIEAYTEH

SEQ ID NO: 113653 - protein, 9 aa, Homo Sapiens
NAIEGLTEY

SEQ ID NO: 113654 - protein, 9 aa, Homo Sapiens
NAISVTTSY

SEQ ID NO: 113655 - protein, 9 aa, Homo Sapiens
NAKCPNLEF

SEQ ID NO: 113656 - protein, 9 aa, Homo Sapiens
NAKGYTIPL

SEQ ID NO: 113657 - protein, 9 aa, Homo Sapiens
NASPVISSV

SEQ ID NO: 113658 - protein, 9 aa, Homo Sapiens
NIICGITSV

SEQ ID NO: 113659 - protein, 9 aa, Homo Sapiens
NIKSPALAF

SEQ ID NO: 113660 - protein, 9 aa, Homo Sapiens
NIREIEIDY

SEQ ID NO: 113661 - protein, 9 aa, Homo Sapiens
NIVDKTASF

SEQ ID NO: 113662 - protein, 9 aa, Homo Sapiens
NIVENLLMI

SEQ ID NO: 113663 - protein, 9 aa, Homo Sapiens
NMNDLVSEY

SEQ ID NO: 113664 - protein, 9 aa, Homo Sapiens
NQKPPSAEY

SEQ ID NO: 113665 - protein, 9 aa, Homo Sapiens
NSYVPVTAY

SEQ ID NO: 113666 - protein, 9 aa, Homo Sapiens
NTIDPSHPM

SEQ ID NO: 113667 - protein, 9 aa, Homo Sapiens
NTKEPPLSL

SEQ ID NO: 113668 - protein, 9 aa, Homo Sapiens
NVIDKLAQF

SEQ ID NO: 113669 - protein, 9 aa, Homo Sapiens
QAFPGGHSM

SEQ ID NO: 113670 - protein, 9 aa, Homo Sapiens
QAPQPQSSL

SEQ ID NO: 113671 - protein, 9 aa, Homo Sapiens
QIKPDMETY

SEQ ID NO: 113672 - protein, 9 aa, Homo Sapiens
QLGPVGGVF

SEQ ID NO: 113673 - protein, 9 aa, Homo Sapiens
QSKTIKVSY

SEQ ID NO: 113674 - protein, 9 aa, Homo Sapiens
RAIEIYTDM

SEQ ID NO: 113675 - protein, 9 aa, Homo Sapiens
RARELLVSY

SEQ ID NO: 113676 - protein, 9 aa, Homo Sapiens
RIHFPLATY

SEQ ID NO: 113677 - protein, 9 aa, Homo Sapiens
RIHVAVTEM

SEQ ID NO: 113678 - protein, 9 aa, Homo Sapiens
RIKPNAITY

SEQ ID NO: 113679 - protein, 9 aa, Homo Sapiens
RINPQTTEF

SEQ ID NO: 113680 - protein, 9 aa, Homo Sapiens
RIVDALNEF

SEQ ID NO: 113681 - protein, 9 aa, Homo Sapiens
RLKNPTVEY

SEQ ID NO: 113682 - protein, 9 aa, Homo Sapiens
RLRDDIKEY

SEQ ID NO: 113683 - protein, 9 aa, Homo Sapiens
RMQEGSEVY

SEQ ID NO: 113684 - protein, 9 aa, Homo Sapiens
RVRDDVAEY

SEQ ID NO: 113685 - protein, 9 aa, Homo Sapiens
SAAFPGASL

SEQ ID NO: 113686 - protein, 9 aa, Homo Sapiens
SAAMPGASL

SEQ ID NO: 113687 - protein, 9 aa, Homo Sapiens
SAAQPGVAF

SEQ ID NO: 113688 - protein, 9 aa, Homo Sapiens
SAIASTKVM

SEQ ID NO: 113689 - protein, 9 aa, Homo Sapiens
SAITNTGVF

SEQ ID NO: 113690 - protein, 9 aa, Homo Sapiens
SAKITIAAY

SEQ ID NO: 113691 - protein, 9 aa, Homo Sapiens
SAKNPWQEY

SEQ ID NO: 113692 - protein, 9 aa, Homo Sapiens
SAKPEISAM

SEQ ID NO: 113693 - protein, 9 aa, Homo Sapiens
SAKPQTTVF

SEQ ID NO: 113694 - protein, 9 aa, Homo Sapiens
SAKSGAVTF

SEQ ID NO: 113695 - protein, 9 aa, Homo Sapiens
SAKSPTATF

SEQ ID NO: 113696 - protein, 9 aa, Homo Sapiens
SAKTPGFSV

SEQ ID NO: 113697 - protein, 9 aa, Homo Sapiens
SAKTPSSTY

SEQ ID NO: 113698 - protein, 9 aa, Homo Sapiens
SAKVANASY

SEQ ID NO: 113699 - protein, 9 aa, Homo Sapiens
SALVTGQSY

SEQ ID NO: 113700 - protein, 9 aa, Homo Sapiens
SAMPTSSSF

SEQ ID NO: 113701 - protein, 9 aa, Homo Sapiens
SAMSNPRAM

SEQ ID NO: 113702 - protein, 9 aa, Homo Sapiens
SAMYSRKAM

SEQ ID NO: 113703 - protein, 9 aa, Homo Sapiens
SANVSKVSF

SEQ ID NO: 113704 - protein, 9 aa, Homo Sapiens
SAPASQASL

SEQ ID NO: 113705 - protein, 9 aa, Homo Sapiens
SARDAALAY

SEQ ID NO: 113706 - protein, 9 aa, Homo Sapiens
SARPKLKAF

SEQ ID NO: 113707 - protein, 9 aa, Homo Sapiens
SASVQNHEF

SEQ ID NO: 113708 - protein, 9 aa, Homo Sapiens
SAVPSTSTM

SEQ ID NO: 113709 - protein, 9 aa, Homo Sapiens
SGGPGPRVY

SEQ ID NO: 113710 - protein, 9 aa, Homo Sapiens
SGICGLSPH

SEQ ID NO: 113711 - protein, 9 aa, Homo Sapiens
SGMGKTAVF

SEQ ID NO: 113712 - protein, 9 aa, Homo Sapiens
SGRYISSSY

SEQ ID NO: 113713 - protein, 9 aa, Homo Sapiens
SIFDDFSHY

SEQ ID NO: 113714 - protein, 9 aa, Homo Sapiens
SIIPGSAAY

SEQ ID NO: 113715 - protein, 9 aa, Homo Sapiens
SIITGVAAM

SEQ ID NO: 113716 - protein, 9 aa, Homo Sapiens
SIKDNSFQY

SEQ ID NO: 113717 - protein, 9 aa, Homo Sapiens
SIKDYFLEF

SEQ ID NO: 113718 - protein, 9 aa, Homo Sapiens
SIKETVEAY

SEQ ID NO: 113719 - protein, 9 aa, Homo Sapiens
SILEKTSAY

SEQ ID NO: 113720 - protein, 9 aa, Homo Sapiens
SIMEHNVAY

SEQ ID NO: 113721 - protein, 9 aa, Homo Sapiens
SIPDIKTAF

SEQ ID NO: 113722 - protein, 9 aa, Homo Sapiens
SIRDGVRAY

SEQ ID NO: 113723 - protein, 9 aa, Homo Sapiens
SIREAGGAF

SEQ ID NO: 113724 - protein, 9 aa, Homo Sapiens
SIRPGLSPY

SEQ ID NO: 113725 - protein, 9 aa, Homo Sapiens
SIRSELIPY

SEQ ID NO: 113726 - protein, 9 aa, Homo Sapiens
SLAEPGSAY

SEQ ID NO: 113727 - protein, 9 aa, Homo Sapiens
SLAPPSMEY

SEQ ID NO: 113728 - protein, 9 aa, Homo Sapiens
SLARPGHPM

SEQ ID NO: 113729 - protein, 9 aa, Homo Sapiens
SLFVSNHAY

SEQ ID NO: 113730 - protein, 9 aa, Homo Sapiens
SLKTPGTSL

SEQ ID NO: 113731 - protein, 9 aa, Homo Sapiens
SLRFIDVEF

SEQ ID NO: 113732 - protein, 9 aa, Homo Sapiens
SMHLQLTCF

SEQ ID NO: 113733 - protein, 9 aa, Homo Sapiens
SMIDKYQAL

SEQ ID NO: 113734 - protein, 9 aa, Homo Sapiens
SMVDHTSAF

SEQ ID NO: 113735 - protein, 9 aa, Homo Sapiens
SMYPVWKSF

SEQ ID NO: 113736 - protein, 9 aa, Homo Sapiens
SQFGGGSQY

SEQ ID NO: 113737 - protein, 9 aa, Homo Sapiens
SQFIFEHSY

SEQ ID NO: 113738 - protein, 9 aa, Homo Sapiens
SQGPVKHVY

SEQ ID NO: 113739 - protein, 9 aa, Homo Sapiens
SQIDRICEM

SEQ ID NO: 113740 - protein, 9 aa, Homo Sapiens
SSAPPRTAF

SEQ ID NO: 113741 - protein, 9 aa, Homo Sapiens
SSFFAKIPY

SEQ ID NO: 113742 - protein, 9 aa, Homo Sapiens
SSHLVLVTF

SEQ ID NO: 113743 - protein, 9 aa, Homo Sapiens
SSHQSSATF

SEQ ID NO: 113744 - protein, 9 aa, Homo Sapiens
SSHVTNVAF

SEQ ID NO: 113745 - protein, 9 aa, Homo Sapiens
SSHVTNVSF

SEQ ID NO: 113746 - protein, 9 aa, Homo Sapiens
SSIGKLSEY

SEQ ID NO: 113747 - protein, 9 aa, Homo Sapiens
SSKEPPSAY

SEQ ID NO: 113748 - protein, 9 aa, Homo Sapiens
SSMKPTLSH

SEQ ID NO: 113749 - protein, 9 aa, Homo Sapiens
SSYVTITSH

SEQ ID NO: 113750 - protein, 9 aa, Homo Sapiens
STHVTISTY

SEQ ID NO: 113751 - protein, 9 aa, Homo Sapiens
STKEPGRTL

SEQ ID NO: 113752 - protein, 9 aa, Homo Sapiens
STKPPGTFL

SEQ ID NO: 113753 - protein, 9 aa, Homo Sapiens
SVKDGAICY

SEQ ID NO: 113754 - protein, 9 aa, Homo Sapiens
SVKEWTITY

SEQ ID NO: 113755 - protein, 9 aa, Homo Sapiens
SVKPASSSF

SEQ ID NO: 113756 - protein, 9 aa, Homo Sapiens
SVKSPNQSL

SEQ ID NO: 113757 - protein, 9 aa, Homo Sapiens
TAAAVGAVF

SEQ ID NO: 113758 - protein, 9 aa, Homo Sapiens
TAAPPAQPL

SEQ ID NO: 113759 - protein, 9 aa, Homo Sapiens
TAHQINIGY

SEQ ID NO: 113760 - protein, 9 aa, Homo Sapiens
TAIDRYLCL

SEQ ID NO: 113761 - protein, 9 aa, Homo Sapiens
TAISRYMEL

SEQ ID NO: 113762 - protein, 9 aa, Homo Sapiens
TAKATVAAF

SEQ ID NO: 113763 - protein, 9 aa, Homo Sapiens
TAKDCLLVY

SEQ ID NO: 113764 - protein, 9 aa, Homo Sapiens
TAKSPATCY

SEQ ID NO: 113765 - protein, 9 aa, Homo Sapiens
TAKSVTCTY

SEQ ID NO: 113766 - protein, 9 aa, Homo Sapiens
TAMPKLLSY

SEQ ID NO: 113767 - protein, 9 aa, Homo Sapiens
TAMPYLTSY

SEQ ID NO: 113768 - protein, 9 aa, Homo Sapiens
TARDSILSH

SEQ ID NO: 113769 - protein, 9 aa, Homo Sapiens
TARYIYISY

SEQ ID NO: 113770 - protein, 9 aa, Homo Sapiens
TGMVPGSEF

SEQ ID NO: 113771 - protein, 9 aa, Homo Sapiens
TIIDKSKSV

SEQ ID NO: 113772 - protein, 9 aa, Homo Sapiens
TIIECLHSF

SEQ ID NO: 113773 - protein, 9 aa, Homo Sapiens
TIIPKVLAM

SEQ ID NO: 113774 - protein, 9 aa, Homo Sapiens
TIISAYRAL

SEQ ID NO: 113775 - protein, 9 aa, Homo Sapiens
TIKSATISY

SEQ ID NO: 113776 - protein, 9 aa, Homo Sapiens
TILGGLNEF

SEQ ID NO: 113777 - protein, 9 aa, Homo Sapiens
TIMAHVTEF

SEQ ID NO: 113778 - protein, 9 aa, Homo Sapiens
TINGHNAEV

SEQ ID NO: 113779 - protein, 9 aa, Homo Sapiens
TLITGLEEY

SEQ ID NO: 113780 - protein, 9 aa, Homo Sapiens
TLKDHIMSH

SEQ ID NO: 113781 - protein, 9 aa, Homo Sapiens
TLKEAGTHY

SEQ ID NO: 113782 - protein, 9 aa, Homo Sapiens
TLKEDWIAY

SEQ ID NO: 113783 - protein, 9 aa, Homo Sapiens
TLKLTTPTY

SEQ ID NO: 113784 - protein, 9 aa, Homo Sapiens
TLKQKWVEY

SEQ ID NO: 113785 - protein, 9 aa, Homo Sapiens
TLKTPGKSF

SEQ ID NO: 113786 - protein, 9 aa, Homo Sapiens
TLNEKLTAL

SEQ ID NO: 113787 - protein, 9 aa, Homo Sapiens
TLRAQLTEF

SEQ ID NO: 113788 - protein, 9 aa, Homo Sapiens
TLTPIIQEY

SEQ ID NO: 113789 - protein, 9 aa, Homo Sapiens
TMKDFNHSY

SEQ ID NO: 113790 - protein, 9 aa, Homo Sapiens
TMKPMNVEY

SEQ ID NO: 113791 - protein, 9 aa, Homo Sapiens
TMVGKTFTY

SEQ ID NO: 113792 - protein, 9 aa, Homo Sapiens
TSHVSAQSF

SEQ ID NO: 113793 - protein, 9 aa, Homo Sapiens
TSKVPSAPH

SEQ ID NO: 113794 - protein, 9 aa, Homo Sapiens
TSREIQTAV

SEQ ID NO: 113795 - protein, 9 aa, Homo Sapiens
TTKAPTGPF

SEQ ID NO: 113796 - protein, 9 aa, Homo Sapiens
TVRDHVHCL

SEQ ID NO: 113797 - protein, 9 aa, Homo Sapiens
TYPENWRAF

SEQ ID NO: 113798 - protein, 9 aa, Homo Sapiens
VAAAPGTPA

SEQ ID NO: 113799 - protein, 9 aa, Homo Sapiens
VAFPSSSVY

SEQ ID NO: 113800 - protein, 9 aa, Homo Sapiens
VAIAGLMEV

SEQ ID NO: 113801 - protein, 9 aa, Homo Sapiens
VAIKAYTAV

SEQ ID NO: 113802 - protein, 9 aa, Homo Sapiens
VAIPSYICY

SEQ ID NO: 113803 - protein, 9 aa, Homo Sapiens
VAKAPSLTF

SEQ ID NO: 113804 - protein, 9 aa, Homo Sapiens
VAKAPSQAL

SEQ ID NO: 113805 - protein, 9 aa, Homo Sapiens
VAKAVTQAL

SEQ ID NO: 113806 - protein, 9 aa, Homo Sapiens
VAKMGITEY

SEQ ID NO: 113807 - protein, 9 aa, Homo Sapiens
VAKPPVMSF

SEQ ID NO: 113808 - protein, 9 aa, Homo Sapiens
VAKSKLREL

SEQ ID NO: 113809 - protein, 9 aa, Homo Sapiens
VAKSQLLSY

SEQ ID NO: 113810 - protein, 9 aa, Homo Sapiens
VAKTNTVSY

SEQ ID NO: 113811 - protein, 9 aa, Homo Sapiens
VAKTPRNTY

SEQ ID NO: 113812 - protein, 9 aa, Homo Sapiens
VAKWATVTF

SEQ ID NO: 113813 - protein, 9 aa, Homo Sapiens
VANPNSAIF

SEQ ID NO: 113814 - protein, 9 aa, Homo Sapiens
VARDLRAEF

SEQ ID NO: 113815 - protein, 9 aa, Homo Sapiens
VARGNLGVY

SEQ ID NO: 113816 - protein, 9 aa, Homo Sapiens
VARLIAIFF

SEQ ID NO: 113817 - protein, 9 aa, Homo Sapiens
VARPDVVEM

SEQ ID NO: 113818 - protein, 9 aa, Homo Sapiens
VARPPGQDF

SEQ ID NO: 113819 - protein, 9 aa, Homo Sapiens
VAVDGINAL

SEQ ID NO: 113820 - protein, 9 aa, Homo Sapiens
VAVEPGAAV

SEQ ID NO: 113821 - protein, 9 aa, Homo Sapiens
VAVNKPAEF

SEQ ID NO: 113822 - protein, 9 aa, Homo Sapiens
VAYGKGTYF

SEQ ID NO: 113823 - protein, 9 aa, Homo Sapiens
VAYVSSVAL

SEQ ID NO: 113824 - protein, 9 aa, Homo Sapiens
VGIDLGTTY

SEQ ID NO: 113825 - protein, 9 aa, Homo Sapiens
VGIDPLSSY

SEQ ID NO: 113826 - protein, 9 aa, Homo Sapiens
VGYPGKYTY

SEQ ID NO: 113827 - protein, 9 aa, Homo Sapiens
VIFAGGQAY

SEQ ID NO: 113828 - protein, 9 aa, Homo Sapiens
VIHLILECY

SEQ ID NO: 113829 - protein, 9 aa, Homo Sapiens
VIIDDRHVY

SEQ ID NO: 113830 - protein, 9 aa, Homo Sapiens
VIIKGTQVY

SEQ ID NO: 113831 - protein, 9 aa, Homo Sapiens
VIINSFAEH

SEQ ID NO: 113832 - protein, 9 aa, Homo Sapiens
VIKEQNREL

SEQ ID NO: 113833 - protein, 9 aa, Homo Sapiens
VIKESGPPH

SEQ ID NO: 113834 - protein, 9 aa, Homo Sapiens
VILPPLSPY

SEQ ID NO: 113835 - protein, 9 aa, Homo Sapiens
VIRDEVEKY

SEQ ID NO: 113836 - protein, 9 aa, Homo Sapiens
VIRDFAGPY

SEQ ID NO: 113837 - protein, 9 aa, Homo Sapiens
VIRELKEQY

SEQ ID NO: 113838 - protein, 9 aa, Homo Sapiens
VIRGNIVKH

SEQ ID NO: 113839 - protein, 9 aa, Homo Sapiens
VIRQQCVEY

SEQ ID NO: 113840 - protein, 9 aa, Homo Sapiens
VIVGGIDSM

SEQ ID NO: 113841 - protein, 9 aa, Homo Sapiens
VIVGGSSEY

SEQ ID NO: 113842 - protein, 9 aa, Homo Sapiens
VIVSTRSPY

SEQ ID NO: 113843 - protein, 9 aa, Homo Sapiens
VLAALLDHV

SEQ ID NO: 113844 - protein, 9 aa, Homo Sapiens
VLAEKAAAY

SEQ ID NO: 113845 - protein, 9 aa, Homo Sapiens
VLFEHAVGY

SEQ ID NO: 113846 - protein, 9 aa, Homo Sapiens
VLIEATKAF

SEQ ID NO: 113847 - protein, 9 aa, Homo Sapiens
VLKAAAHHY

SEQ ID NO: 113848 - protein, 9 aa, Homo Sapiens
VLKEKIAKY

SEQ ID NO: 113849 - protein, 9 aa, Homo Sapiens
VLKGGLSSF

SEQ ID NO: 113850 - protein, 9 aa, Homo Sapiens
VLKIIREEY

SEQ ID NO: 113851 - protein, 9 aa, Homo Sapiens
VLKLTPVAY

SEQ ID NO: 113852 - protein, 9 aa, Homo Sapiens
VLKLVDISY

SEQ ID NO: 113853 - protein, 9 aa, Homo Sapiens
VLKNLATAY

SEQ ID NO: 113854 - protein, 9 aa, Homo Sapiens
VLKPNIISY

SEQ ID NO: 113855 - protein, 9 aa, Homo Sapiens
VLKQEQEEY

SEQ ID NO: 113856 - protein, 9 aa, Homo Sapiens
VLMPKVMHY

SEQ ID NO: 113857 - protein, 9 aa, Homo Sapiens
VLNIHLTAY

SEQ ID NO: 113858 - protein, 9 aa, Homo Sapiens
VLRDVVQAY

SEQ ID NO: 113859 - protein, 9 aa, Homo Sapiens
VLREIAEEY

SEQ ID NO: 113860 - protein, 9 aa, Homo Sapiens
VLRPFPASY

SEQ ID NO: 113861 - protein, 9 aa, Homo Sapiens
VLYPHLSTY

SEQ ID NO: 113862 - protein, 9 aa, Homo Sapiens
VMINKATPY

SEQ ID NO: 113863 - protein, 9 aa, Homo Sapiens
VMKDSAPEL

SEQ ID NO: 113864 - protein, 9 aa, Homo Sapiens
VQGPVGTDF

SEQ ID NO: 113865 - protein, 9 aa, Homo Sapiens
VQPSKFNSY

SEQ ID NO: 113866 - protein, 9 aa, Homo Sapiens
VSHLIATEY

SEQ ID NO: 113867 - protein, 9 aa, Homo Sapiens
VSHWQQQSY

SEQ ID NO: 113868 - protein, 9 aa, Homo Sapiens
VSKPCFTAY

SEQ ID NO: 113869 - protein, 9 aa, Homo Sapiens
VTKGNIAQM

SEQ ID NO: 113870 - protein, 9 aa, Homo Sapiens
VTKPVGGNY

SEQ ID NO: 113871 - protein, 9 aa, Homo Sapiens
VTLEWFPPI

SEQ ID NO: 113872 - protein, 9 aa, Homo Sapiens
VTRPHLQAY

SEQ ID NO: 113873 - protein, 9 aa, Homo Sapiens
VTYVPVTTF

SEQ ID NO: 113874 - protein, 9 aa, Homo Sapiens
VVHTPETSV

SEQ ID NO: 113875 - protein, 9 aa, Homo Sapiens
VVHVPLEAY

SEQ ID NO: 113876 - protein, 9 aa, Homo Sapiens
VVIGNIGAL

SEQ ID NO: 113877 - protein, 9 aa, Homo Sapiens
VVKMPSGEF

SEQ ID NO: 113878 - protein, 9 aa, Homo Sapiens
VVKPPGSSL

SEQ ID NO: 113879 - protein, 9 aa, Homo Sapiens
VVPTAILAF

SEQ ID NO: 113880 - protein, 9 aa, Homo Sapiens
WARPLSVSF

SEQ ID NO: 113881 - protein, 9 aa, Homo Sapiens
YAAGVHSVL

SEQ ID NO: 113882 - protein, 9 aa, Homo Sapiens
YAALHGEFY

SEQ ID NO: 113883 - protein, 9 aa, Homo Sapiens
YAALPGQQH

SEQ ID NO: 113884 - protein, 9 aa, Homo Sapiens
YAANPGQLF

SEQ ID NO: 113885 - protein, 9 aa, Homo Sapiens
YAAQASQAL

SEQ ID NO: 113886 - protein, 9 aa, Homo Sapiens
YAAQNLLSH

SEQ ID NO: 113887 - protein, 9 aa, Homo Sapiens
YAFDFARQS

SEQ ID NO: 113888 - protein, 9 aa, Homo Sapiens
YAFGGGCEL

SEQ ID NO: 113889 - protein, 9 aa, Homo Sapiens
YAFPKAVSV

SEQ ID NO: 113890 - protein, 9 aa, Homo Sapiens
YAIDNPLHY

SEQ ID NO: 113891 - protein, 9 aa, Homo Sapiens
YAIGNAPEL

SEQ ID NO: 113892 - protein, 9 aa, Homo Sapiens
YAIGVSHPL

SEQ ID NO: 113893 - protein, 9 aa, Homo Sapiens
YAKDDPLEF

SEQ ID NO: 113894 - protein, 9 aa, Homo Sapiens
YAKDGRVSY

SEQ ID NO: 113895 - protein, 9 aa, Homo Sapiens
YAKDKTCFY

SEQ ID NO: 113896 - protein, 9 aa, Homo Sapiens
YAKDMLTSL

SEQ ID NO: 113897 - protein, 9 aa, Homo Sapiens
YAKDYTKAL

SEQ ID NO: 113898 - protein, 9 aa, Homo Sapiens
YAKEKLESF

SEQ ID NO: 113899 - protein, 9 aa, Homo Sapiens
YAKGFGGQY

SEQ ID NO: 113900 - protein, 9 aa, Homo Sapiens
YAKIVEIPF

SEQ ID NO: 113901 - protein, 9 aa, Homo Sapiens
YAKRPGIGL

SEQ ID NO: 113902 - protein, 9 aa, Homo Sapiens
YAMDELRSL

SEQ ID NO: 113903 - protein, 9 aa, Homo Sapiens
YANDFASEY

SEQ ID NO: 113904 - protein, 9 aa, Homo Sapiens
YANEVGEAF

SEQ ID NO: 113905 - protein, 9 aa, Homo Sapiens
YARDETEFY

SEQ ID NO: 113906 - protein, 9 aa, Homo Sapiens
YARVVGSEY

SEQ ID NO: 113907 - protein, 9 aa, Homo Sapiens
YASSPGGVY

SEQ ID NO: 113908 - protein, 9 aa, Homo Sapiens
YATLYYREH

SEQ ID NO: 113909 - protein, 9 aa, Homo Sapiens
YAVPALEAH

SEQ ID NO: 113910 - protein, 9 aa, Homo Sapiens
YAVSELAGH

SEQ ID NO: 113911 - protein, 9 aa, Homo Sapiens
YAYPATAAA

SEQ ID NO: 113912 - protein, 9 aa, Homo Sapiens
YAYPYSYYY

SEQ ID NO: 113913 - protein, 9 aa, Homo Sapiens
YFHCTLIGY

SEQ ID NO: 113914 - protein, 9 aa, Homo Sapiens
YFKPMMKEF

SEQ ID NO: 113915 - protein, 9 aa, Homo Sapiens
YGPPVRTEY

SEQ ID NO: 113916 - protein, 9 aa, Homo Sapiens
YIAAFLSHF

SEQ ID NO: 113917 - protein, 9 aa, Homo Sapiens
YIISGLTGF

SEQ ID NO: 113918 - protein, 9 aa, Homo Sapiens
YIKEYVTCH

SEQ ID NO: 113919 - protein, 9 aa, Homo Sapiens
YIKGPSLSY

SEQ ID NO: 113920 - protein, 9 aa, Homo Sapiens
YIRDLALEY

SEQ ID NO: 113921 - protein, 9 aa, Homo Sapiens
YIRGSTIKY

SEQ ID NO: 113922 - protein, 9 aa, Homo Sapiens
YLFEWRTQY

SEQ ID NO: 113923 - protein, 9 aa, Homo Sapiens
YLKNMVTQY

SEQ ID NO: 113924 - protein, 9 aa, Homo Sapiens
YLKNSVVAY

SEQ ID NO: 113925 - protein, 9 aa, Homo Sapiens
YLKRPGLTY

SEQ ID NO: 113926 - protein, 9 aa, Homo Sapiens
YLRDALPEY

SEQ ID NO: 113927 - protein, 9 aa, Homo Sapiens
YLRELLTTM

SEQ ID NO: 113928 - protein, 9 aa, Homo Sapiens
YLREVMQDY

SEQ ID NO: 113929 - protein, 9 aa, Homo Sapiens
YLRPSLFVY

SEQ ID NO: 113930 - protein, 9 aa, Homo Sapiens
YLYGQTTTY

SEQ ID NO: 113931 - protein, 9 aa, Homo Sapiens
YMADRLLSF

SEQ ID NO: 113932 - protein, 9 aa, Homo Sapiens
YMIDAGTEF

SEQ ID NO: 113933 - protein, 9 aa, Homo Sapiens
YMKDLPTSF

SEQ ID NO: 113934 - protein, 9 aa, Homo Sapiens
YMRGFMTAH

SEQ ID NO: 113935 - protein, 9 aa, Homo Sapiens
YMRPDIVAL

SEQ ID NO: 113936 - protein, 9 aa, Homo Sapiens
YNRDFKISF

SEQ ID NO: 113937 - protein, 9 aa, Homo Sapiens
YQAEAREAL

SEQ ID NO: 113938 - protein, 9 aa, Homo Sapiens
YQFTGIKKY

SEQ ID NO: 113939 - protein, 9 aa, Homo Sapiens
YQHLITNSF

SEQ ID NO: 113940 - protein, 9 aa, Homo Sapiens
YSKDQLQTF

SEQ ID NO: 113941 - protein, 9 aa, Homo Sapiens
YSKLPGVSL

SEQ ID NO: 113942 - protein, 9 aa, Homo Sapiens
YSKPSIMAH

SEQ ID NO: 113943 - protein, 9 aa, Homo Sapiens
YSKRVYIAY

SEQ ID NO: 113944 - protein, 9 aa, Homo Sapiens
YSMPSTHAM

SEQ ID NO: 113945 - protein, 9 aa, Homo Sapiens
YSRYPPREY

SEQ ID NO: 113946 - protein, 9 aa, Homo Sapiens
YTRPGLPTF

SEQ ID NO: 113947 - protein, 9 aa, Homo Sapiens
YVIQHVLEH

SEQ ID NO: 113948 - protein, 9 aa, Homo Sapiens
YVKGGLSTF

SEQ ID NO: 113949 - protein, 9 aa, Homo Sapiens
YVKRPGAAL

SEQ ID NO: 113950 - protein, 9 aa, Homo Sapiens
YVKSIVQEY

SEQ ID NO: 113951 - protein, 9 aa, Homo Sapiens
YVPEHWEYY

SEQ ID NO: 113952 - protein, 9 aa, Homo Sapiens
YVRDCVEAL

SEQ ID NO: 113953 - protein, 9 aa, Homo Sapiens
YVTTSTRTY

SEQ ID NO: 113954 - protein, 9 aa, Homo Sapiens
YYKPDSPEY

SEQ ID NO: 113955 - protein, 10 aa, Homo Sapiens
AAAPHSIESF

SEQ ID NO: 113956 - protein, 10 aa, Homo Sapiens
AAFDASRTSF

SEQ ID NO: 113957 - protein, 10 aa, Homo Sapiens
AAFGGNPKSV

SEQ ID NO: 113958 - protein, 10 aa, Homo Sapiens
AALTHHPAAM

SEQ ID NO: 113959 - protein, 10 aa, Homo Sapiens
AAVNFQLNSH

SEQ ID NO: 113960 - protein, 10 aa, Homo Sapiens
AAYASQPAAY

SEQ ID NO: 113961 - protein, 10 aa, Homo Sapiens
AAYGGYPTAH

SEQ ID NO: 113962 - protein, 10 aa, Homo Sapiens
AAYNGHCEAL

SEQ ID NO: 113963 - protein, 10 aa, Homo Sapiens
AGAPWTLMTY

SEQ ID NO: 113964 - protein, 10 aa, Homo Sapiens
AIKPGTSVEY

SEQ ID NO: 113965 - protein, 10 aa, Homo Sapiens
ALIEFIRSEY

SEQ ID NO: 113966 - protein, 10 aa, Homo Sapiens
ALPDSELAEY

SEQ ID NO: 113967 - protein, 10 aa, Homo Sapiens
ALPQHKLTCF

SEQ ID NO: 113968 - protein, 10 aa, Homo Sapiens
ALYPRAWTVY

SEQ ID NO: 113969 - protein, 10 aa, Homo Sapiens
ALYTEKFEEF

SEQ ID NO: 113970 - protein, 10 aa, Homo Sapiens
AQAPCGQAAY

SEQ ID NO: 113971 - protein, 10 aa, Homo Sapiens
AQRQEIRTAY

SEQ ID NO: 113972 - protein, 10 aa, Homo Sapiens
ASFDGRISVY

SEQ ID NO: 113973 - protein, 10 aa, Homo Sapiens
ATPVFNPTVF

SEQ ID NO: 113974 - protein, 10 aa, Homo Sapiens
CASQAGMTAY

SEQ ID NO: 113975 - protein, 10 aa, Homo Sapiens
CMKIPTGQEY

SEQ ID NO: 113976 - protein, 10 aa, Homo Sapiens
CSVPFTPIEF

SEQ ID NO: 113977 - protein, 10 aa, Homo Sapiens
FAIGSQVSEH

SEQ ID NO: 113978 - protein, 10 aa, Homo Sapiens
FAKGPTLTVY

SEQ ID NO: 113979 - protein, 10 aa, Homo Sapiens
FAKTFVGTPY

SEQ ID NO: 113980 - protein, 10 aa, Homo Sapiens
FAQPFSLKEY

SEQ ID NO: 113981 - protein, 10 aa, Homo Sapiens
FAWEPNGSKF

SEQ ID NO: 113982 - protein, 10 aa, Homo Sapiens
FAYGGHPYPF

SEQ ID NO: 113983 - protein, 10 aa, Homo Sapiens
FAYGQNKTAF

SEQ ID NO: 113984 - protein, 10 aa, Homo Sapiens
FAYSDSRVGF

SEQ ID NO: 113985 - protein, 10 aa, Homo Sapiens
FIIDTRDAGY

SEQ ID NO: 113986 - protein, 10 aa, Homo Sapiens
FLPKHKANAY

SEQ ID NO: 113987 - protein, 10 aa, Homo Sapiens
FQKPKGTIEY

SEQ ID NO: 113988 - protein, 10 aa, Homo Sapiens
FQPPFQPGRM

SEQ ID NO: 113989 - protein, 10 aa, Homo Sapiens
FQYPVRPASM

SEQ ID NO: 113990 - protein, 10 aa, Homo Sapiens
FSFGGKLVTF

SEQ ID NO: 113991 - protein, 10 aa, Homo Sapiens
GIPTHHPRVY

SEQ ID NO: 113992 - protein, 10 aa, Homo Sapiens
GVGFSYHNFD

SEQ ID NO: 113993 - protein, 10 aa, Homo Sapiens
GVIEKLLTSY

SEQ ID NO: 113994 - protein, 10 aa, Homo Sapiens
HGIDPTGTYH

SEQ ID NO: 113995 - protein, 10 aa, Homo Sapiens
HLPEHEVMPH

SEQ ID NO: 113996 - protein, 10 aa, Homo Sapiens
HMKPLPYYSY

SEQ ID NO: 113997 - protein, 10 aa, Homo Sapiens
IAQPHHGVPY

SEQ ID NO: 113998 - protein, 10 aa, Homo Sapiens
IEITTERPKK

SEQ ID NO: 113999 - protein, 10 aa, Homo Sapiens
IIYPGAFVDL

SEQ ID NO: 114000 - protein, 10 aa, Homo Sapiens
ISHDTFGTTY

SEQ ID NO: 114001 - protein, 10 aa, Homo Sapiens
ISPEHVIQAL

SEQ ID NO: 114002 - protein, 10 aa, Homo Sapiens
ISPPWDFREF

SEQ ID NO: 114003 - protein, 10 aa, Homo Sapiens
ITKPPDGSAF

SEQ ID NO: 114004 - protein, 10 aa, Homo Sapiens
KAADFQLHTH

SEQ ID NO: 114005 - protein, 10 aa, Homo Sapiens
KANPFGGASH

SEQ ID NO: 114006 - protein, 10 aa, Homo Sapiens
KIKAPTPTCF

SEQ ID NO: 114007 - protein, 10 aa, Homo Sapiens
KIPNFWVTTF

SEQ ID NO: 114008 - protein, 10 aa, Homo Sapiens
KIYEGAYHVL

SEQ ID NO: 114009 - protein, 10 aa, Homo Sapiens
KLPEFTKSEY

SEQ ID NO: 114010 - protein, 10 aa, Homo Sapiens
KLYEGVPLPF

SEQ ID NO: 114011 - protein, 10 aa, Homo Sapiens
KQIDRQLTAY

SEQ ID NO: 114012 - protein, 10 aa, Homo Sapiens
LAADFEIGHF

SEQ ID NO: 114013 - protein, 10 aa, Homo Sapiens
LAIVHAVHAY

SEQ ID NO: 114014 - protein, 10 aa, Homo Sapiens
LAVHPSGVAL

SEQ ID NO: 114015 - protein, 10 aa, Homo Sapiens
LEEIQQKVMQ

SEQ ID NO: 114016 - protein, 10 aa, Homo Sapiens
LGVPFNIASY

SEQ ID NO: 114017 - protein, 10 aa, Homo Sapiens
LIKPPDNNEF

SEQ ID NO: 114018 - protein, 10 aa, Homo Sapiens
LLPQHQVPAY

SEQ ID NO: 114019 - protein, 10 aa, Homo Sapiens
LMPEFQFGTY

SEQ ID NO: 114020 - protein, 10 aa, Homo Sapiens
LMPQFSTIEY

SEQ ID NO: 114021 - protein, 10 aa, Homo Sapiens
LQGRVNPVEY

SEQ ID NO: 114022 - protein, 10 aa, Homo Sapiens
LSFPRNNISY

SEQ ID NO: 114023 - protein, 10 aa, Homo Sapiens
LSPAGKLVAY

SEQ ID NO: 114024 - protein, 10 aa, Homo Sapiens
MAYEGQYDAY

SEQ ID NO: 114025 - protein, 10 aa, Homo Sapiens
MAYGASFLSF

SEQ ID NO: 114026 - protein, 10 aa, Homo Sapiens
NGIGHPLPPY

SEQ ID NO: 114027 - protein, 10 aa, Homo Sapiens
PTFTASQYRA

SEQ ID NO: 114028 - protein, 10 aa, Homo Sapiens
QAGPATGQAY

SEQ ID NO: 114029 - protein, 10 aa, Homo Sapiens
QGIPFKPGTF

SEQ ID NO: 114030 - protein, 10 aa, Homo Sapiens
QMPPWNQTEF

SEQ ID NO: 114031 - protein, 10 aa, Homo Sapiens
RAFPYGNVAF

SEQ ID NO: 114032 - protein, 10 aa, Homo Sapiens
RIPEFNMAAF

SEQ ID NO: 114033 - protein, 10 aa, Homo Sapiens
RIYPYAAISY

SEQ ID NO: 114034 - protein, 10 aa, Homo Sapiens
RLPETELGEY

SEQ ID NO: 114035 - protein, 10 aa, Homo Sapiens
RSGDFTTSSY

SEQ ID NO: 114036 - protein, 10 aa, Homo Sapiens
RTVDWALAEY

SEQ ID NO: 114037 - protein, 10 aa, Homo Sapiens
RVFEGPYKEY

SEQ ID NO: 114038 - protein, 10 aa, Homo Sapiens
RVIPAALKAF

SEQ ID NO: 114039 - protein, 10 aa, Homo Sapiens
SACRTSGQTF

SEQ ID NO: 114040 - protein, 10 aa, Homo Sapiens
SAVEKKLAEY

SEQ ID NO: 114041 - protein, 10 aa, Homo Sapiens
SAYPYYASAF

SEQ ID NO: 114042 - protein, 10 aa, Homo Sapiens
SAYSGHYIAH

SEQ ID NO: 114043 - protein, 10 aa, Homo Sapiens
SIIEKETKEY

SEQ ID NO: 114044 - protein, 10 aa, Homo Sapiens
SIRPDNMSEY

SEQ ID NO: 114045 - protein, 10 aa, Homo Sapiens
SLPNFKQNEF

SEQ ID NO: 114046 - protein, 10 aa, Homo Sapiens
SLVVIQQPSL

SEQ ID NO: 114047 - protein, 10 aa, Homo Sapiens
SQIPGPTAAY

SEQ ID NO: 114048 - protein, 10 aa, Homo Sapiens
SSPGRDLPPF

SEQ ID NO: 114049 - protein, 10 aa, Homo Sapiens
TAFPGGAKEL

SEQ ID NO: 114050 - protein, 10 aa, Homo Sapiens
TKTGMLSRAT

SEQ ID NO: 114051 - protein, 10 aa, Homo Sapiens
TLFPFEAEAY

SEQ ID NO: 114052 - protein, 10 aa, Homo Sapiens
TLPPHHPYPH

SEQ ID NO: 114053 - protein, 10 aa, Homo Sapiens
TTKVGPNATY

SEQ ID NO: 114054 - protein, 10 aa, Homo Sapiens
VAAMPRPVSY

SEQ ID NO: 114055 - protein, 10 aa, Homo Sapiens
VAMNPTNTVF

SEQ ID NO: 114056 - protein, 10 aa, Homo Sapiens
VIFPLIYSEM

SEQ ID NO: 114057 - protein, 10 aa, Homo Sapiens
VIVPHLTESY

SEQ ID NO: 114058 - protein, 10 aa, Homo Sapiens
VLAPHLTRAY

SEQ ID NO: 114059 - protein, 10 aa, Homo Sapiens
VLKPGMVVTF

SEQ ID NO: 114060 - protein, 10 aa, Homo Sapiens
VLPHQPLATY

SEQ ID NO: 114061 - protein, 10 aa, Homo Sapiens
VLVQHNLVSY

SEQ ID NO: 114062 - protein, 10 aa, Homo Sapiens
VMFPGNSPSY

SEQ ID NO: 114063 - protein, 10 aa, Homo Sapiens
VQFDGTNSAF

SEQ ID NO: 114064 - protein, 10 aa, Homo Sapiens
VQPTFTASQY

SEQ ID NO: 114065 - protein, 10 aa, Homo Sapiens
VQPVFNLAAY

SEQ ID NO: 114066 - protein, 10 aa, Homo Sapiens
VSNMLLAEAY

SEQ ID NO: 114067 - protein, 10 aa, Homo Sapiens
YAAPFAMMSH

SEQ ID NO: 114068 - protein, 10 aa, Homo Sapiens
YAAPHPLQSY

SEQ ID NO: 114069 - protein, 10 aa, Homo Sapiens
YAFAGMYHVF

SEQ ID NO: 114070 - protein, 10 aa, Homo Sapiens
YAFPKAVSVF

SEQ ID NO: 114071 - protein, 10 aa, Homo Sapiens
YINPAKLTPY

SEQ ID NO: 114072 - protein, 10 aa, Homo Sapiens
YINPYQPNEY

SEQ ID NO: 114073 - protein, 10 aa, Homo Sapiens
YIPEHSPEYY

SEQ ID NO: 114074 - protein, 10 aa, Homo Sapiens
YLAPFSLSNY

SEQ ID NO: 114075 - protein, 10 aa, Homo Sapiens
YLPDFRFTPF

SEQ ID NO: 114076 - protein, 10 aa, Homo Sapiens
YLPQHTIETY

SEQ ID NO: 114077 - protein, 10 aa, Homo Sapiens
YLRGEPFHEY

SEQ ID NO: 114078 - protein, 10 aa, Homo Sapiens
YLRPGQAAAF

SEQ ID NO: 114079 - protein, 10 aa, Homo Sapiens
YMIDPSGVSY

SEQ ID NO: 114080 - protein, 10 aa, Homo Sapiens
YMNPYQLNAY

SEQ ID NO: 114081 - protein, 10 aa, Homo Sapiens
YSPDHTNNSF

SEQ ID NO: 114082 - protein, 10 aa, Homo Sapiens
YSYAGGRGSY

SEQ ID NO: 114083 - protein, 10 aa, Homo Sapiens
YVIPHPVHAF

SEQ ID NO: 114084 - protein, 10 aa, Homo Sapiens
YVNPANTHQF

SEQ ID NO: 114085 - protein, 11 aa, Homo Sapiens
ALRPSTSRSLY

SEQ ID NO: 114086 - protein, 11 aa, Homo Sapiens
ATIDPDTISAL

SEQ ID NO: 114087 - protein, 11 aa, Homo Sapiens
AVRDISEASVF

SEQ ID NO: 114088 - protein, 11 aa, Homo Sapiens
FAKKAGAHSVY

SEQ ID NO: 114089 - protein, 11 aa, Homo Sapiens
FAVDPEKIQLY

SEQ ID NO: 114090 - protein, 11 aa, Homo Sapiens
FAYDGKDYLTL

SEQ ID NO: 114091 - protein, 11 aa, Homo Sapiens
FSKYPASSSVF

SEQ ID NO: 114092 - protein, 11 aa, Homo Sapiens
GIHETTFNSIM

SEQ ID NO: 114093 - protein, 11 aa, Homo Sapiens
IGPPGSGKTTY

SEQ ID NO: 114094 - protein, 11 aa, Homo Sapiens
KLIEPGFLTAF

SEQ ID NO: 114095 - protein, 11 aa, Homo Sapiens
KQAKEFLEYVY

SEQ ID NO: 114096 - protein, 11 aa, Homo Sapiens
LAAAAAASYQV

SEQ ID NO: 114097 - protein, 11 aa, Homo Sapiens
MAALASLMGAL

SEQ ID NO: 114098 - protein, 11 aa, Homo Sapiens
RIMDPDVITGY

SEQ ID NO: 114099 - protein, 11 aa, Homo Sapiens
SAKDARGMTPF

SEQ ID NO: 114100 - protein, 11 aa, Homo Sapiens
SAVNPEHLSYF

SEQ ID NO: 114101 - protein, 11 aa, Homo Sapiens
SAYDGKDYIAL

SEQ ID NO: 114102 - protein, 11 aa, Homo Sapiens
SSINPDHLSYF

SEQ ID NO: 114103 - protein, 11 aa, Homo Sapiens
SSINPDHLTYF

SEQ ID NO: 114104 - protein, 11 aa, Homo Sapiens
SSTISSNVASK

SEQ ID NO: 114105 - protein, 11 aa, Homo Sapiens
STINPDHLSYF

SEQ ID NO: 114106 - protein, 11 aa, Homo Sapiens
SVIDSAELQAY

SEQ ID NO: 114107 - protein, 11 aa, Homo Sapiens
TIFEGGKATCF

SEQ ID NO: 114108 - protein, 11 aa, Homo Sapiens
TTIDPRWLVEF

SEQ ID NO: 114109 - protein, 11 aa, Homo Sapiens
VLRPPGGGSNF

SEQ ID NO: 114110 - protein, 11 aa, Homo Sapiens
YAVDPAQLQAL

SEQ ID NO: 114111 - protein, 11 aa, Homo Sapiens
YAYAAQNLLSH

SEQ ID NO: 114112 - protein, 11 aa, Homo Sapiens
YAYDGKDYIAL

SEQ ID NO: 114113 - protein, 11 aa, Homo Sapiens
YAYPATAAAPM

SEQ ID NO: 114114 - protein, 8 aa, Homo Sapiens
ADDHTVKL

SEQ ID NO: 114115 - protein, 8 aa, Homo Sapiens
AEAAAAVV

SEQ ID NO: 114116 - protein, 8 aa, Homo Sapiens
AEAGPIVI

SEQ ID NO: 114117 - protein, 8 aa, Homo Sapiens
AEAKFREI

SEQ ID NO: 114118 - protein, 8 aa, Homo Sapiens
AEAPHIVV

SEQ ID NO: 114119 - protein, 8 aa, Homo Sapiens
AEAPTALV

SEQ ID NO: 114120 - protein, 8 aa, Homo Sapiens
AEAQPMAV

SEQ ID NO: 114121 - protein, 8 aa, Homo Sapiens
AEAVGVKI

SEQ ID NO: 114122 - protein, 8 aa, Homo Sapiens
AEAVVNTV

SEQ ID NO: 114123 - protein, 8 aa, Homo Sapiens
AEDKSWRV

SEQ ID NO: 114124 - protein, 8 aa, Homo Sapiens
AEEKAVLI

SEQ ID NO: 114125 - protein, 8 aa, Homo Sapiens
AEEVWARV

SEQ ID NO: 114126 - protein, 8 aa, Homo Sapiens
AEFEVHEV

SEQ ID NO: 114127 - protein, 8 aa, Homo Sapiens
AEFHVQRV

SEQ ID NO: 114128 - protein, 8 aa, Homo Sapiens
AEFVVQKI

SEQ ID NO: 114129 - protein, 8 aa, Homo Sapiens
AEGPETKI

SEQ ID NO: 114130 - protein, 8 aa, Homo Sapiens
AEGSVTSV

SEQ ID NO: 114131 - protein, 8 aa, Homo Sapiens
AEGYFISI

SEQ ID NO: 114132 - protein, 8 aa, Homo Sapiens
AEHPIVIV

SEQ ID NO: 114133 - protein, 8 aa, Homo Sapiens
AEHPTIKI

SEQ ID NO: 114134 - protein, 8 aa, Homo Sapiens
AEHRMLVV

SEQ ID NO: 114135 - protein, 8 aa, Homo Sapiens
AEHRPPKI

SEQ ID NO: 114136 - protein, 8 aa, Homo Sapiens
AEIAHSQV

SEQ ID NO: 114137 - protein, 8 aa, Homo Sapiens
AEIATRLA

SEQ ID NO: 114138 - protein, 8 aa, Homo Sapiens
AEIAVNAV

SEQ ID NO: 114139 - protein, 8 aa, Homo Sapiens
AEIDAHLV

SEQ ID NO: 114140 - protein, 8 aa, Homo Sapiens
AEIDFRLV

SEQ ID NO: 114141 - protein, 8 aa, Homo Sapiens
AEIGFLTV

SEQ ID NO: 114142 - protein, 8 aa, Homo Sapiens
AEIITNQI

SEQ ID NO: 114143 - protein, 8 aa, Homo Sapiens
AEIKVKLI

SEQ ID NO: 114144 - protein, 8 aa, Homo Sapiens
AEILTTKV

SEQ ID NO: 114145 - protein, 8 aa, Homo Sapiens
AEIPLRMV

SEQ ID NO: 114146 - protein, 8 aa, Homo Sapiens
AEIRHVLV

SEQ ID NO: 114147 - protein, 8 aa, Homo Sapiens
AEIRVHTV

SEQ ID NO: 114148 - protein, 8 aa, Homo Sapiens
AEIVTKTI

SEQ ID NO: 114149 - protein, 8 aa, Homo Sapiens
AEIVTPEI

SEQ ID NO: 114150 - protein, 8 aa, Homo Sapiens
AEKKVVKI

SEQ ID NO: 114151 - protein, 8 aa, Homo Sapiens
AELFLDTV

SEQ ID NO: 114152 - protein, 8 aa, Homo Sapiens
AELFVETI

SEQ ID NO: 114153 - protein, 8 aa, Homo Sapiens
AELKSSTV

SEQ ID NO: 114154 - protein, 8 aa, Homo Sapiens
AELKTESV

SEQ ID NO: 114155 - protein, 8 aa, Homo Sapiens
AELLFNTI

SEQ ID NO: 114156 - protein, 8 aa, Homo Sapiens
AELTVIKV

SEQ ID NO: 114157 - protein, 8 aa, Homo Sapiens
AELVFKCV

SEQ ID NO: 114158 - protein, 8 aa, Homo Sapiens
AEMAQNAV

SEQ ID NO: 114159 - protein, 8 aa, Homo Sapiens
AEMAVSRV

SEQ ID NO: 114160 - protein, 8 aa, Homo Sapiens
AEMKAQEV

SEQ ID NO: 114161 - protein, 8 aa, Homo Sapiens
AEMTTRMV

SEQ ID NO: 114162 - protein, 8 aa, Homo Sapiens
AENIFKSV

SEQ ID NO: 114163 - protein, 8 aa, Homo Sapiens
AENVSSKV

SEQ ID NO: 114164 - protein, 8 aa, Homo Sapiens
AEPHVSGV

SEQ ID NO: 114165 - protein, 8 aa, Homo Sapiens
AEQLMTLI

SEQ ID NO: 114166 - protein, 8 aa, Homo Sapiens
AERIFSEV

SEQ ID NO: 114167 - protein, 8 aa, Homo Sapiens
AERKFKQV

SEQ ID NO: 114168 - protein, 8 aa, Homo Sapiens
AERKSPEI

SEQ ID NO: 114169 - protein, 8 aa, Homo Sapiens
AERLFNLV

SEQ ID NO: 114170 - protein, 8 aa, Homo Sapiens
AESHVSGI

SEQ ID NO: 114171 - protein, 8 aa, Homo Sapiens
AESPTVHV

SEQ ID NO: 114172 - protein, 8 aa, Homo Sapiens
AESPVIEV

SEQ ID NO: 114173 - protein, 8 aa, Homo Sapiens
AETAVSVI

SEQ ID NO: 114174 - protein, 8 aa, Homo Sapiens
AETSQRLV

SEQ ID NO: 114175 - protein, 8 aa, Homo Sapiens
AETYLHRI

SEQ ID NO: 114176 - protein, 8 aa, Homo Sapiens
AEVIPLAL

SEQ ID NO: 114177 - protein, 8 aa, Homo Sapiens
AEVPTMAV

SEQ ID NO: 114178 - protein, 8 aa, Homo Sapiens
AEVPTQLV

SEQ ID NO: 114179 - protein, 8 aa, Homo Sapiens
AEVSLMEV

SEQ ID NO: 114180 - protein, 8 aa, Homo Sapiens
AEVVVTEI

SEQ ID NO: 114181 - protein, 8 aa, Homo Sapiens
AEYIQKNV

SEQ ID NO: 114182 - protein, 8 aa, Homo Sapiens
AEYLTPVL

SEQ ID NO: 114183 - protein, 8 aa, Homo Sapiens
AEYPTISI

SEQ ID NO: 114184 - protein, 8 aa, Homo Sapiens
AEYRHPTV

SEQ ID NO: 114185 - protein, 8 aa, Homo Sapiens
AEYVPEKV

SEQ ID NO: 114186 - protein, 8 aa, Homo Sapiens
CEYIVKKI

SEQ ID NO: 114187 - protein, 8 aa, Homo Sapiens
DPDKRISI

SEQ ID NO: 114188 - protein, 8 aa, Homo Sapiens
DRQQQITV

SEQ ID NO: 114189 - protein, 8 aa, Homo Sapiens
EAASQGLK

SEQ ID NO: 114190 - protein, 8 aa, Homo Sapiens
EALITKIG

SEQ ID NO: 114191 - protein, 8 aa, Homo Sapiens
EATLLQKL

SEQ ID NO: 114192 - protein, 8 aa, Homo Sapiens
ELQTHPEL

SEQ ID NO: 114193 - protein, 8 aa, Homo Sapiens
EQTLPTKL

SEQ ID NO: 114194 - protein, 8 aa, Homo Sapiens
ESLRLILV

SEQ ID NO: 114195 - protein, 8 aa, Homo Sapiens
FEAQVVRV

SEQ ID NO: 114196 - protein, 8 aa, Homo Sapiens
FEELTNLI

SEQ ID NO: 114197 - protein, 8 aa, Homo Sapiens
FEEVWGVI

SEQ ID NO: 114198 - protein, 8 aa, Homo Sapiens
FEFRPELV

SEQ ID NO: 114199 - protein, 8 aa, Homo Sapiens
FEGGVSSV

SEQ ID NO: 114200 - protein, 8 aa, Homo Sapiens
FEGLITTI

SEQ ID NO: 114201 - protein, 8 aa, Homo Sapiens
FEHKAQHI

SEQ ID NO: 114202 - protein, 8 aa, Homo Sapiens
FEHVTSEI

SEQ ID NO: 114203 - protein, 8 aa, Homo Sapiens
FEKVAAGV

SEQ ID NO: 114204 - protein, 8 aa, Homo Sapiens
FEMAVAKV

SEQ ID NO: 114205 - protein, 8 aa, Homo Sapiens
FEVGARKV

SEQ ID NO: 114206 - protein, 8 aa, Homo Sapiens
FEVILTRI

SEQ ID NO: 114207 - protein, 8 aa, Homo Sapiens
FEWVAERV

SEQ ID NO: 114208 - protein, 8 aa, Homo Sapiens
FEWVVNRI

SEQ ID NO: 114209 - protein, 8 aa, Homo Sapiens
FEYILSHV

SEQ ID NO: 114210 - protein, 8 aa, Homo Sapiens
FEYKGKKV

SEQ ID NO: 114211 - protein, 8 aa, Homo Sapiens
FEYKPEVI

SEQ ID NO: 114212 - protein, 8 aa, Homo Sapiens
GEAEFNRI

SEQ ID NO: 114213 - protein, 8 aa, Homo Sapiens
GEAMLRKI

SEQ ID NO: 114214 - protein, 8 aa, Homo Sapiens
GEFELMHV

SEQ ID NO: 114215 - protein, 8 aa, Homo Sapiens
GEFGVRNV

SEQ ID NO: 114216 - protein, 8 aa, Homo Sapiens
GEFKFTNV

SEQ ID NO: 114217 - protein, 8 aa, Homo Sapiens
GEFKVHRV

SEQ ID NO: 114218 - protein, 8 aa, Homo Sapiens
GEFRTTTV

SEQ ID NO: 114219 - protein, 8 aa, Homo Sapiens
GEGNIRSV

SEQ ID NO: 114220 - protein, 8 aa, Homo Sapiens
GEGPIAVI

SEQ ID NO: 114221 - protein, 8 aa, Homo Sapiens
GEGPSSLI

SEQ ID NO: 114222 - protein, 8 aa, Homo Sapiens
GEGVIVKI

SEQ ID NO: 114223 - protein, 8 aa, Homo Sapiens
GEIILHSV

SEQ ID NO: 114224 - protein, 8 aa, Homo Sapiens
GEIPVVAI

SEQ ID NO: 114225 - protein, 8 aa, Homo Sapiens
GEIRTITV

SEQ ID NO: 114226 - protein, 8 aa, Homo Sapiens
GEISMEKV

SEQ ID NO: 114227 - protein, 8 aa, Homo Sapiens
GEISSPVI

SEQ ID NO: 114228 - protein, 8 aa, Homo Sapiens
GELHSKLI

SEQ ID NO: 114229 - protein, 8 aa, Homo Sapiens
GELKITSV

SEQ ID NO: 114230 - protein, 8 aa, Homo Sapiens
GELVTEGV

SEQ ID NO: 114231 - protein, 8 aa, Homo Sapiens
GEMKGSAI

SEQ ID NO: 114232 - protein, 8 aa, Homo Sapiens
GERPQITI

SEQ ID NO: 114233 - protein, 8 aa, Homo Sapiens
GESKFITV

SEQ ID NO: 114234 - protein, 8 aa, Homo Sapiens
GESTVRTI

SEQ ID NO: 114235 - protein, 8 aa, Homo Sapiens
GETPTTEV

SEQ ID NO: 114236 - protein, 8 aa, Homo Sapiens
GETRICKI

SEQ ID NO: 114237 - protein, 8 aa, Homo Sapiens
GEVLISRV

SEQ ID NO: 114238 - protein, 8 aa, Homo Sapiens
GEVPISFV

SEQ ID NO: 114239 - protein, 8 aa, Homo Sapiens
GEVPVLNV

SEQ ID NO: 114240 - protein, 8 aa, Homo Sapiens
GEVRFSAV

SEQ ID NO: 114241 - protein, 8 aa, Homo Sapiens
GEVSFINI

SEQ ID NO: 114242 - protein, 8 aa, Homo Sapiens
GEVTFKSI

SEQ ID NO: 114243 - protein, 8 aa, Homo Sapiens
GEVTVRVV

SEQ ID NO: 114244 - protein, 8 aa, Homo Sapiens
GEVVTIRV

SEQ ID NO: 114245 - protein, 8 aa, Homo Sapiens
GEWEPPVI

SEQ ID NO: 114246 - protein, 8 aa, Homo Sapiens
GEYAVRAI

SEQ ID NO: 114247 - protein, 8 aa, Homo Sapiens
GEYLFERL

SEQ ID NO: 114248 - protein, 8 aa, Homo Sapiens
HEAEFSKI

SEQ ID NO: 114249 - protein, 8 aa, Homo Sapiens
HEAIVKNV

SEQ ID NO: 114250 - protein, 8 aa, Homo Sapiens
HEAPMTKI

SEQ ID NO: 114251 - protein, 8 aa, Homo Sapiens
HEAPTTKI

SEQ ID NO: 114252 - protein, 8 aa, Homo Sapiens
HEDLTVKI

SEQ ID NO: 114253 - protein, 8 aa, Homo Sapiens
HEDPVIAV

SEQ ID NO: 114254 - protein, 8 aa, Homo Sapiens
HEFLQTEI

SEQ ID NO: 114255 - protein, 8 aa, Homo Sapiens
HEGETSYI

SEQ ID NO: 114256 - protein, 8 aa, Homo Sapiens
HEGFVRGI

SEQ ID NO: 114257 - protein, 8 aa, Homo Sapiens
HEGKPLKL

SEQ ID NO: 114258 - protein, 8 aa, Homo Sapiens
HEICSNLV

SEQ ID NO: 114259 - protein, 8 aa, Homo Sapiens
HEIEVETI

SEQ ID NO: 114260 - protein, 8 aa, Homo Sapiens
HEIKTIKI

SEQ ID NO: 114261 - protein, 8 aa, Homo Sapiens
HEITVLII

SEQ ID NO: 114262 - protein, 8 aa, Homo Sapiens
HEKIFNTV

SEQ ID NO: 114263 - protein, 8 aa, Homo Sapiens
HELITLEI

SEQ ID NO: 114264 - protein, 8 aa, Homo Sapiens
HESKPVNV

SEQ ID NO: 114265 - protein, 8 aa, Homo Sapiens
HETTFNSI

SEQ ID NO: 114266 - protein, 8 aa, Homo Sapiens
HEYTTKEI

SEQ ID NO: 114267 - protein, 8 aa, Homo Sapiens
HEYVHGDI

SEQ ID NO: 114268 - protein, 8 aa, Homo Sapiens
HIAGILAR

SEQ ID NO: 114269 - protein, 8 aa, Homo Sapiens
IEALLHTV

SEQ ID NO: 114270 - protein, 8 aa, Homo Sapiens
IEAQIREI

SEQ ID NO: 114271 - protein, 8 aa, Homo Sapiens
IEDLVVHI

SEQ ID NO: 114272 - protein, 8 aa, Homo Sapiens
IEDRVKKI

SEQ ID NO: 114273 - protein, 8 aa, Homo Sapiens
IEEPSAKI

SEQ ID NO: 114274 - protein, 8 aa, Homo Sapiens
IEEYVHRI

SEQ ID NO: 114275 - protein, 8 aa, Homo Sapiens
IEFICKTI

SEQ ID NO: 114276 - protein, 8 aa, Homo Sapiens
IEHISSLI

SEQ ID NO: 114277 - protein, 8 aa, Homo Sapiens
IEHLTTLL

SEQ ID NO: 114278 - protein, 8 aa, Homo Sapiens
IEHVFNII

SEQ ID NO: 114279 - protein, 8 aa, Homo Sapiens
IEHYARQV

SEQ ID NO: 114280 - protein, 8 aa, Homo Sapiens
IEIGVQHI

SEQ ID NO: 114281 - protein, 8 aa, Homo Sapiens
IEISGPKV

SEQ ID NO: 114282 - protein, 8 aa, Homo Sapiens
IEIYVQKV

SEQ ID NO: 114283 - protein, 8 aa, Homo Sapiens
IEKLFQSV

SEQ ID NO: 114284 - protein, 8 aa, Homo Sapiens
IEKNIELF

SEQ ID NO: 114285 - protein, 8 aa, Homo Sapiens
IELDMRTI

SEQ ID NO: 114286 - protein, 8 aa, Homo Sapiens
IENESVKI

SEQ ID NO: 114287 - protein, 8 aa, Homo Sapiens
IERATRLV

SEQ ID NO: 114288 - protein, 8 aa, Homo Sapiens
IERIHREV

SEQ ID NO: 114289 - protein, 8 aa, Homo Sapiens
IERLINLL

SEQ ID NO: 114290 - protein, 8 aa, Homo Sapiens
IESSSPEV

SEQ ID NO: 114291 - protein, 8 aa, Homo Sapiens
IESTTQKI

SEQ ID NO: 114292 - protein, 8 aa, Homo Sapiens
IETRVILV

SEQ ID NO: 114293 - protein, 8 aa, Homo Sapiens
IEVETHKV

SEQ ID NO: 114294 - protein, 8 aa, Homo Sapiens
IEVGVVTV

SEQ ID NO: 114295 - protein, 8 aa, Homo Sapiens
IEVLQPLI

SEQ ID NO: 114296 - protein, 8 aa, Homo Sapiens
IEVSFREL

SEQ ID NO: 114297 - protein, 8 aa, Homo Sapiens
IREFLQKI

SEQ ID NO: 114298 - protein, 8 aa, Homo Sapiens
KEAELRQV

SEQ ID NO: 114299 - protein, 8 aa, Homo Sapiens
KEAVLNGL

SEQ ID NO: 114300 - protein, 8 aa, Homo Sapiens
KEFEFSQL

SEQ ID NO: 114301 - protein, 8 aa, Homo Sapiens
KEFENPEV

SEQ ID NO: 114302 - protein, 8 aa, Homo Sapiens
KEFITALI

SEQ ID NO: 114303 - protein, 8 aa, Homo Sapiens
KEFVFDTI

SEQ ID NO: 114304 - protein, 8 aa, Homo Sapiens
KEGPSPKV

SEQ ID NO: 114305 - protein, 8 aa, Homo Sapiens
KEHIAASV

SEQ ID NO: 114306 - protein, 8 aa, Homo Sapiens
KEILLKAV

SEQ ID NO: 114307 - protein, 8 aa, Homo Sapiens
KEIPVTVV

SEQ ID NO: 114308 - protein, 8 aa, Homo Sapiens
KELDSKTI

SEQ ID NO: 114309 - protein, 8 aa, Homo Sapiens
KEQEFRSI

SEQ ID NO: 114310 - protein, 8 aa, Homo Sapiens
KETIAKCI

SEQ ID NO: 114311 - protein, 8 aa, Homo Sapiens
KEVKVSSV

SEQ ID NO: 114312 - protein, 8 aa, Homo Sapiens
KEYLVSLI

SEQ ID NO: 114313 - protein, 8 aa, Homo Sapiens
LEAAIRTV

SEQ ID NO: 114314 - protein, 8 aa, Homo Sapiens
LEAFVKMV

SEQ ID NO: 114315 - protein, 8 aa, Homo Sapiens
LEAFVRMV

SEQ ID NO: 114316 - protein, 8 aa, Homo Sapiens
LEEKTRLI

SEQ ID NO: 114317 - protein, 8 aa, Homo Sapiens
LEFKGRKI

SEQ ID NO: 114318 - protein, 8 aa, Homo Sapiens
LEFYLRKI

SEQ ID NO: 114319 - protein, 8 aa, Homo Sapiens
LEHNFSAI

SEQ ID NO: 114320 - protein, 8 aa, Homo Sapiens
LEKIISQL

SEQ ID NO: 114321 - protein, 8 aa, Homo Sapiens
LEKKFHTV

SEQ ID NO: 114322 - protein, 8 aa, Homo Sapiens
LEKLGILI

SEQ ID NO: 114323 - protein, 8 aa, Homo Sapiens
LEKPSRTV

SEQ ID NO: 114324 - protein, 8 aa, Homo Sapiens
LELGFSKV

SEQ ID NO: 114325 - protein, 8 aa, Homo Sapiens
LENEVSRQ

SEQ ID NO: 114326 - protein, 8 aa, Homo Sapiens
LENVAITV

SEQ ID NO: 114327 - protein, 8 aa, Homo Sapiens
LESFLKQV

SEQ ID NO: 114328 - protein, 8 aa, Homo Sapiens
LETTVQKV

SEQ ID NO: 114329 - protein, 8 aa, Homo Sapiens
LEVLVKGV

SEQ ID NO: 114330 - protein, 8 aa, Homo Sapiens
LEVRLQAV

SEQ ID NO: 114331 - protein, 8 aa, Homo Sapiens
LEWKIIYV

SEQ ID NO: 114332 - protein, 8 aa, Homo Sapiens
LEYEARQI

SEQ ID NO: 114333 - protein, 8 aa, Homo Sapiens
LEYPTISL

SEQ ID NO: 114334 - protein, 8 aa, Homo Sapiens
LEYRVTQV

SEQ ID NO: 114335 - protein, 8 aa, Homo Sapiens
MEFPTAEV

SEQ ID NO: 114336 - protein, 8 aa, Homo Sapiens
MEFQVPVI

SEQ ID NO: 114337 - protein, 8 aa, Homo Sapiens
MEHGTVTV

SEQ ID NO: 114338 - protein, 8 aa, Homo Sapiens
MEIKITTV

SEQ ID NO: 114339 - protein, 8 aa, Homo Sapiens
MEIMTREV

SEQ ID NO: 114340 - protein, 8 aa, Homo Sapiens
MEIPVTLI

SEQ ID NO: 114341 - protein, 8 aa, Homo Sapiens
MELSQPEV

SEQ ID NO: 114342 - protein, 8 aa, Homo Sapiens
MEQQSISI

SEQ ID NO: 114343 - protein, 8 aa, Homo Sapiens
MEQQTISI

SEQ ID NO: 114344 - protein, 8 aa, Homo Sapiens
MEVQTKKV

SEQ ID NO: 114345 - protein, 8 aa, Homo Sapiens
MEWDTQVV

SEQ ID NO: 114346 - protein, 8 aa, Homo Sapiens
NEIPTKNI

SEQ ID NO: 114347 - protein, 8 aa, Homo Sapiens
NEQPPVVL

SEQ ID NO: 114348 - protein, 8 aa, Homo Sapiens
NEVNFREI

SEQ ID NO: 114349 - protein, 8 aa, Homo Sapiens
QEAYVRVV

SEQ ID NO: 114350 - protein, 8 aa, Homo Sapiens
QEHHTLRV

SEQ ID NO: 114351 - protein, 8 aa, Homo Sapiens
QEHQIVLV

SEQ ID NO: 114352 - protein, 8 aa, Homo Sapiens
QELPTTLV

SEQ ID NO: 114353 - protein, 8 aa, Homo Sapiens
QEYLFERI

SEQ ID NO: 114354 - protein, 8 aa, Homo Sapiens
QEYPTLKV

SEQ ID NO: 114355 - protein, 8 aa, Homo Sapiens
REAAFRNI

SEQ ID NO: 114356 - protein, 8 aa, Homo Sapiens
READFARV

SEQ ID NO: 114357 - protein, 8 aa, Homo Sapiens
RECESVLV

SEQ ID NO: 114358 - protein, 8 aa, Homo Sapiens
REDAARAI

SEQ ID NO: 114359 - protein, 8 aa, Homo Sapiens
REELNREL

SEQ ID NO: 114360 - protein, 8 aa, Homo Sapiens
REFEPDAI

SEQ ID NO: 114361 - protein, 8 aa, Homo Sapiens
REFKLSKV

SEQ ID NO: 114362 - protein, 8 aa, Homo Sapiens
REFLFNAI

SEQ ID NO: 114363 - protein, 8 aa, Homo Sapiens
REFQTSAI

SEQ ID NO: 114364 - protein, 8 aa, Homo Sapiens
REFQTSVV

SEQ ID NO: 114365 - protein, 8 aa, Homo Sapiens
REHPSLRL

SEQ ID NO: 114366 - protein, 8 aa, Homo Sapiens
REHPVPLL

SEQ ID NO: 114367 - protein, 8 aa, Homo Sapiens
REIEGRAI

SEQ ID NO: 114368 - protein, 8 aa, Homo Sapiens
REIGVRNI

SEQ ID NO: 114369 - protein, 8 aa, Homo Sapiens
REIIINAV

SEQ ID NO: 114370 - protein, 8 aa, Homo Sapiens
REIQQRVV

SEQ ID NO: 114371 - protein, 8 aa, Homo Sapiens
REIVQQLI

SEQ ID NO: 114372 - protein, 8 aa, Homo Sapiens
REKELAKV

SEQ ID NO: 114373 - protein, 8 aa, Homo Sapiens
RELEFNEI

SEQ ID NO: 114374 - protein, 8 aa, Homo Sapiens
RELEVRQV

SEQ ID NO: 114375 - protein, 8 aa, Homo Sapiens
RELKLSKV

SEQ ID NO: 114376 - protein, 8 aa, Homo Sapiens
RELQLQEV

SEQ ID NO: 114377 - protein, 8 aa, Homo Sapiens
RELVSRQV

SEQ ID NO: 114378 - protein, 8 aa, Homo Sapiens
RENLSVEI

SEQ ID NO: 114379 - protein, 8 aa, Homo Sapiens
RENTQTTI

SEQ ID NO: 114380 - protein, 8 aa, Homo Sapiens
RETAPRTI

SEQ ID NO: 114381 - protein, 8 aa, Homo Sapiens
REVLINNI

SEQ ID NO: 114382 - protein, 8 aa, Homo Sapiens
REYIGRSV

SEQ ID NO: 114383 - protein, 8 aa, Homo Sapiens
REYMVEKI

SEQ ID NO: 114384 - protein, 8 aa, Homo Sapiens
SEAAPLLV

SEQ ID NO: 114385 - protein, 8 aa, Homo Sapiens
SEAIVTVI

SEQ ID NO: 114386 - protein, 8 aa, Homo Sapiens
SEAKPLAV

SEQ ID NO: 114387 - protein, 8 aa, Homo Sapiens
SEAKSVKV

SEQ ID NO: 114388 - protein, 8 aa, Homo Sapiens
SEAYLVGL

SEQ ID NO: 114389 - protein, 8 aa, Homo Sapiens
SEDATIKV

SEQ ID NO: 114390 - protein, 8 aa, Homo Sapiens
SEDKSIKV

SEQ ID NO: 114391 - protein, 8 aa, Homo Sapiens
SEDKSIRV

SEQ ID NO: 114392 - protein, 8 aa, Homo Sapiens
SEDRIITI

SEQ ID NO: 114393 - protein, 8 aa, Homo Sapiens
SEFETHNV

SEQ ID NO: 114394 - protein, 8 aa, Homo Sapiens
SEFSPRSV

SEQ ID NO: 114395 - protein, 8 aa, Homo Sapiens
SEHPGLSI

SEQ ID NO: 114396 - protein, 8 aa, Homo Sapiens
SEIATTGV

SEQ ID NO: 114397 - protein, 8 aa, Homo Sapiens
SEIESVKI

SEQ ID NO: 114398 - protein, 8 aa, Homo Sapiens
SEIGTKQI

SEQ ID NO: 114399 - protein, 8 aa, Homo Sapiens
SEIKLDGV

SEQ ID NO: 114400 - protein, 8 aa, Homo Sapiens
SEILHRVI

SEQ ID NO: 114401 - protein, 8 aa, Homo Sapiens
SEIVGKRI

SEQ ID NO: 114402 - protein, 8 aa, Homo Sapiens
SEKLFRTV

SEQ ID NO: 114403 - protein, 8 aa, Homo Sapiens
SELITKAV

SEQ ID NO: 114404 - protein, 8 aa, Homo Sapiens
SELPALGI

SEQ ID NO: 114405 - protein, 8 aa, Homo Sapiens
SELPAVCI

SEQ ID NO: 114406 - protein, 8 aa, Homo Sapiens
SELPSVNI

SEQ ID NO: 114407 - protein, 8 aa, Homo Sapiens
SELRSVLV

SEQ ID NO: 114408 - protein, 8 aa, Homo Sapiens
SENPSVYV

SEQ ID NO: 114409 - protein, 8 aa, Homo Sapiens
SESDFRQV

SEQ ID NO: 114410 - protein, 8 aa, Homo Sapiens
SETQFSHL

SEQ ID NO: 114411 - protein, 8 aa, Homo Sapiens
SEVEIIHV

SEQ ID NO: 114412 - protein, 8 aa, Homo Sapiens
SEVELMKV

SEQ ID NO: 114413 - protein, 8 aa, Homo Sapiens
SEVESLRL

SEQ ID NO: 114414 - protein, 8 aa, Homo Sapiens
SEVEVIHV

SEQ ID NO: 114415 - protein, 8 aa, Homo Sapiens
SEVLLRHI

SEQ ID NO: 114416 - protein, 8 aa, Homo Sapiens
SEVPMVLV

SEQ ID NO: 114417 - protein, 8 aa, Homo Sapiens
SEWRNLGV

SEQ ID NO: 114418 - protein, 8 aa, Homo Sapiens
SEYIATKI

SEQ ID NO: 114419 - protein, 8 aa, Homo Sapiens
SEYITHEI

SEQ ID NO: 114420 - protein, 8 aa, Homo Sapiens
SEYLHINI

SEQ ID NO: 114421 - protein, 8 aa, Homo Sapiens
TEAEVRGL

SEQ ID NO: 114422 - protein, 8 aa, Homo Sapiens
TEAKPAVV

SEQ ID NO: 114423 - protein, 8 aa, Homo Sapiens
TEDLVLKI

SEQ ID NO: 114424 - protein, 8 aa, Homo Sapiens
TEFIFTTI

SEQ ID NO: 114425 - protein, 8 aa, Homo Sapiens
TEFPGVVV

SEQ ID NO: 114426 - protein, 8 aa, Homo Sapiens
TEFPSKQV

SEQ ID NO: 114427 - protein, 8 aa, Homo Sapiens
TEFRSLVI

SEQ ID NO: 114428 - protein, 8 aa, Homo Sapiens
TEGKGLIV

SEQ ID NO: 114429 - protein, 8 aa, Homo Sapiens
TEIEQTKI

SEQ ID NO: 114430 - protein, 8 aa, Homo Sapiens
TEIQHKSI

SEQ ID NO: 114431 - protein, 8 aa, Homo Sapiens
TEISTKEV

SEQ ID NO: 114432 - protein, 8 aa, Homo Sapiens
TEKLSIMI

SEQ ID NO: 114433 - protein, 8 aa, Homo Sapiens
TEKPTVTV

SEQ ID NO: 114434 - protein, 8 aa, Homo Sapiens
TETDLRVV

SEQ ID NO: 114435 - protein, 8 aa, Homo Sapiens
TETIAPKI

SEQ ID NO: 114436 - protein, 8 aa, Homo Sapiens
TEVFLHVV

SEQ ID NO: 114437 - protein, 8 aa, Homo Sapiens
TEVLVSKV

SEQ ID NO: 114438 - protein, 8 aa, Homo Sapiens
TEVPSLVV

SEQ ID NO: 114439 - protein, 8 aa, Homo Sapiens
TEVPTASI

SEQ ID NO: 114440 - protein, 8 aa, Homo Sapiens
TEYPVKIV

SEQ ID NO: 114441 - protein, 8 aa, Homo Sapiens
TEYQPRAV

SEQ ID NO: 114442 - protein, 8 aa, Homo Sapiens
TVGNNKTL

SEQ ID NO: 114443 - protein, 8 aa, Homo Sapiens
VEAAFQTI

SEQ ID NO: 114444 - protein, 8 aa, Homo Sapiens
VEAIVKNV

SEQ ID NO: 114445 - protein, 8 aa, Homo Sapiens
VEDPVRKV

SEQ ID NO: 114446 - protein, 8 aa, Homo Sapiens
VEHVVVYV

SEQ ID NO: 114447 - protein, 8 aa, Homo Sapiens
VEIILHVV

SEQ ID NO: 114448 - protein, 8 aa, Homo Sapiens
VEIQTPKI

SEQ ID NO: 114449 - protein, 8 aa, Homo Sapiens
VEKDAVFI

SEQ ID NO: 114450 - protein, 8 aa, Homo Sapiens
VENKTAQI

SEQ ID NO: 114451 - protein, 8 aa, Homo Sapiens
VESELRSI

SEQ ID NO: 114452 - protein, 8 aa, Homo Sapiens
VESLFRVI

SEQ ID NO: 114453 - protein, 8 aa, Homo Sapiens
VETAITKV

SEQ ID NO: 114454 - protein, 8 aa, Homo Sapiens
VEYAFKAI

SEQ ID NO: 114455 - protein, 8 aa, Homo Sapiens
VEYQMKSV

SEQ ID NO: 114456 - protein, 8 aa, Homo Sapiens
WEGVFRCI

SEQ ID NO: 114457 - protein, 8 aa, Homo Sapiens
WEVPLPKV

SEQ ID NO: 114458 - protein, 8 aa, Homo Sapiens
YEAAVKKV

SEQ ID NO: 114459 - protein, 8 aa, Homo Sapiens
YEAKCVKV

SEQ ID NO: 114460 - protein, 8 aa, Homo Sapiens
YEDISRGL

SEQ ID NO: 114461 - protein, 8 aa, Homo Sapiens
YEDLINKI

SEQ ID NO: 114462 - protein, 8 aa, Homo Sapiens
YEDMVRQV

SEQ ID NO: 114463 - protein, 8 aa, Homo Sapiens
YEEFLSKV

SEQ ID NO: 114464 - protein, 8 aa, Homo Sapiens
YEEIVKEV

SEQ ID NO: 114465 - protein, 8 aa, Homo Sapiens
YEELVRMV

SEQ ID NO: 114466 - protein, 8 aa, Homo Sapiens
YEFDFSKV

SEQ ID NO: 114467 - protein, 8 aa, Homo Sapiens
YEFKPIVV

SEQ ID NO: 114468 - protein, 8 aa, Homo Sapiens
YEFSSHIV

SEQ ID NO: 114469 - protein, 8 aa, Homo Sapiens
YEGKVSSV

SEQ ID NO: 114470 - protein, 8 aa, Homo Sapiens
YEGSPIKV

SEQ ID NO: 114471 - protein, 8 aa, Homo Sapiens
YEGSVAKV

SEQ ID NO: 114472 - protein, 8 aa, Homo Sapiens
YEIEIVHI

SEQ ID NO: 114473 - protein, 8 aa, Homo Sapiens
YEILLHEV

SEQ ID NO: 114474 - protein, 8 aa, Homo Sapiens
YERIYNEI

SEQ ID NO: 114475 - protein, 8 aa, Homo Sapiens
YEYQPLQI

SEQ ID NO: 114476 - protein, 9 aa, Homo Sapiens
ADFAKVLEL

SEQ ID NO: 114477 - protein, 9 aa, Homo Sapiens
AEAAALEVL

SEQ ID NO: 114478 - protein, 9 aa, Homo Sapiens
AEAAGLHKV

SEQ ID NO: 114479 - protein, 9 aa, Homo Sapiens
AEAAGTTFV

SEQ ID NO: 114480 - protein, 9 aa, Homo Sapiens
AEAALKKEV

SEQ ID NO: 114481 - protein, 9 aa, Homo Sapiens
AEAATPYGI

SEQ ID NO: 114482 - protein, 9 aa, Homo Sapiens
AEAAVPRTI

SEQ ID NO: 114483 - protein, 9 aa, Homo Sapiens
AEADKTIKV

SEQ ID NO: 114484 - protein, 9 aa, Homo Sapiens
AEADLRALL

SEQ ID NO: 114485 - protein, 9 aa, Homo Sapiens
AEAEAVREV

SEQ ID NO: 114486 - protein, 9 aa, Homo Sapiens
AEAEFYRQV

SEQ ID NO: 114487 - protein, 9 aa, Homo Sapiens
AEAEGLRAA

SEQ ID NO: 114488 - protein, 9 aa, Homo Sapiens
AEAEIIQLL

SEQ ID NO: 114489 - protein, 9 aa, Homo Sapiens
AEAEKIRKI

SEQ ID NO: 114490 - protein, 9 aa, Homo Sapiens
AEAEKSQLI

SEQ ID NO: 114491 - protein, 9 aa, Homo Sapiens
AEAEPPSEV

SEQ ID NO: 114492 - protein, 9 aa, Homo Sapiens
AEAERLLLI

SEQ ID NO: 114493 - protein, 9 aa, Homo Sapiens
AEAFKAKNV

SEQ ID NO: 114494 - protein, 9 aa, Homo Sapiens
AEAGGMHTV

SEQ ID NO: 114495 - protein, 9 aa, Homo Sapiens
AEAGHLNIL

SEQ ID NO: 114496 - protein, 9 aa, Homo Sapiens
AEAGPLASV

SEQ ID NO: 114497 - protein, 9 aa, Homo Sapiens
AEAHARIHL

SEQ ID NO: 114498 - protein, 9 aa, Homo Sapiens
AEAHRIQQI

SEQ ID NO: 114499 - protein, 9 aa, Homo Sapiens
AEAIHSPQV

SEQ ID NO: 114500 - protein, 9 aa, Homo Sapiens
AEAISGHSV

SEQ ID NO: 114501 - protein, 9 aa, Homo Sapiens
AEAKARAEI

SEQ ID NO: 114502 - protein, 9 aa, Homo Sapiens
AEAKKLAAI

SEQ ID NO: 114503 - protein, 9 aa, Homo Sapiens
AEALATHIL

SEQ ID NO: 114504 - protein, 9 aa, Homo Sapiens
AEALIKVFV

SEQ ID NO: 114505 - protein, 9 aa, Homo Sapiens
AEALLHPFF

SEQ ID NO: 114506 - protein, 9 aa, Homo Sapiens
AEALPKQSV

SEQ ID NO: 114507 - protein, 9 aa, Homo Sapiens
AEALRISDV

SEQ ID NO: 114508 - protein, 9 aa, Homo Sapiens
AEALRQPVL

SEQ ID NO: 114509 - protein, 9 aa, Homo Sapiens
AEALRVVKI

SEQ ID NO: 114510 - protein, 9 aa, Homo Sapiens
AEANAFSVL

SEQ ID NO: 114511 - protein, 9 aa, Homo Sapiens
AEANHFIDL

SEQ ID NO: 114512 - protein, 9 aa, Homo Sapiens
AEAPAGPAL

SEQ ID NO: 114513 - protein, 9 aa, Homo Sapiens
AEAPGLVDV

SEQ ID NO: 114514 - protein, 9 aa, Homo Sapiens
AEAPHLVQV

SEQ ID NO: 114515 - protein, 9 aa, Homo Sapiens
AEAPNMAVV

SEQ ID NO: 114516 - protein, 9 aa, Homo Sapiens
AEAPPPSVV

SEQ ID NO: 114517 - protein, 9 aa, Homo Sapiens
AEAPSCLII

SEQ ID NO: 114518 - protein, 9 aa, Homo Sapiens
AEAPSQVRL

SEQ ID NO: 114519 - protein, 9 aa, Homo Sapiens
AEAQGSTTL

SEQ ID NO: 114520 - protein, 9 aa, Homo Sapiens
AEAQKLGKP

SEQ ID NO: 114521 - protein, 9 aa, Homo Sapiens
AEAQKSSLV

SEQ ID NO: 114522 - protein, 9 aa, Homo Sapiens
AEAQQLITI

SEQ ID NO: 114523 - protein, 9 aa, Homo Sapiens
AEARHNPSI

SEQ ID NO: 114524 - protein, 9 aa, Homo Sapiens
AEARPFEVL

SEQ ID NO: 114525 - protein, 9 aa, Homo Sapiens
AEASMISKL

SEQ ID NO: 114526 - protein, 9 aa, Homo Sapiens
AEASVMTQL

SEQ ID NO: 114527 - protein, 9 aa, Homo Sapiens
AEATLPTVI

SEQ ID NO: 114528 - protein, 9 aa, Homo Sapiens
AEAVFASEV

SEQ ID NO: 114529 - protein, 9 aa, Homo Sapiens
AEAVGASRV

SEQ ID NO: 114530 - protein, 9 aa, Homo Sapiens
AEAVLYEHL

SEQ ID NO: 114531 - protein, 9 aa, Homo Sapiens
AEAYHFFIL

SEQ ID NO: 114532 - protein, 9 aa, Homo Sapiens
AEAYLGKKV

SEQ ID NO: 114533 - protein, 9 aa, Homo Sapiens
AEAYLGKTV

SEQ ID NO: 114534 - protein, 9 aa, Homo Sapiens
AEAYLKPVV

SEQ ID NO: 114535 - protein, 9 aa, Homo Sapiens
AECGAFRTG

SEQ ID NO: 114536 - protein, 9 aa, Homo Sapiens
AECGKAFTI

SEQ ID NO: 114537 - protein, 9 aa, Homo Sapiens
AECGPQQEL

SEQ ID NO: 114538 - protein, 9 aa, Homo Sapiens
AECHGVIYV

SEQ ID NO: 114539 - protein, 9 aa, Homo Sapiens
AECKSVPGI

SEQ ID NO: 114540 - protein, 9 aa, Homo Sapiens
AECLEKFTV

SEQ ID NO: 114541 - protein, 9 aa, Homo Sapiens
AECLVIGQI

SEQ ID NO: 114542 - protein, 9 aa, Homo Sapiens
AECRVLQKL

SEQ ID NO: 114543 - protein, 9 aa, Homo Sapiens
AEDAPWKKI

SEQ ID NO: 114544 - protein, 9 aa, Homo Sapiens
AEDDRHYNI

SEQ ID NO: 114545 - protein, 9 aa, Homo Sapiens
AEDEGTQRL

SEQ ID NO: 114546 - protein, 9 aa, Homo Sapiens
AEDENGKIV

SEQ ID NO: 114547 - protein, 9 aa, Homo Sapiens
AEDEWKAQV

SEQ ID NO: 114548 - protein, 9 aa, Homo Sapiens
AEDFYDCRV

SEQ ID NO: 114549 - protein, 9 aa, Homo Sapiens
AEDGPTTRF

SEQ ID NO: 114550 - protein, 9 aa, Homo Sapiens
AEDGSRVYV

SEQ ID NO: 114551 - protein, 9 aa, Homo Sapiens
AEDHINFTI

SEQ ID NO: 114552 - protein, 9 aa, Homo Sapiens
AEDKDTPAL

SEQ ID NO: 114553 - protein, 9 aa, Homo Sapiens
AEDKKGHLI

SEQ ID NO: 114554 - protein, 9 aa, Homo Sapiens
AEDKPRAQL

SEQ ID NO: 114555 - protein, 9 aa, Homo Sapiens
AEDKVFNEI

SEQ ID NO: 114556 - protein, 9 aa, Homo Sapiens
AEDLRREMI

SEQ ID NO: 114557 - protein, 9 aa, Homo Sapiens
AEDPAGLKV

SEQ ID NO: 114558 - protein, 9 aa, Homo Sapiens
AEDPETQVV

SEQ ID NO: 114559 - protein, 9 aa, Homo Sapiens
AEDPPMVVV

SEQ ID NO: 114560 - protein, 9 aa, Homo Sapiens
AEDPRMIKV

SEQ ID NO: 114561 - protein, 9 aa, Homo Sapiens
AEDPSKSYV

SEQ ID NO: 114562 - protein, 9 aa, Homo Sapiens
AEDVATYKV

SEQ ID NO: 114563 - protein, 9 aa, Homo Sapiens
AEDYIFKAV

SEQ ID NO: 114564 - protein, 9 aa, Homo Sapiens
AEEAGKTMV

SEQ ID NO: 114565 - protein, 9 aa, Homo Sapiens
AEEAPCKEV

SEQ ID NO: 114566 - protein, 9 aa, Homo Sapiens
AEEARLLHV

SEQ ID NO: 114567 - protein, 9 aa, Homo Sapiens
AEECFFERV

SEQ ID NO: 114568 - protein, 9 aa, Homo Sapiens
AEEEAATRI

SEQ ID NO: 114569 - protein, 9 aa, Homo Sapiens
AEEESERLL

SEQ ID NO: 114570 - protein, 9 aa, Homo Sapiens
AEEIKVARI

SEQ ID NO: 114571 - protein, 9 aa, Homo Sapiens
AEEIRYTHI

SEQ ID NO: 114572 - protein, 9 aa, Homo Sapiens
AEEIYKAFV

SEQ ID NO: 114573 - protein, 9 aa, Homo Sapiens
AEEKLQASV

SEQ ID NO: 114574 - protein, 9 aa, Homo Sapiens
AEELGASKV

SEQ ID NO: 114575 - protein, 9 aa, Homo Sapiens
AEENGFRYI

SEQ ID NO: 114576 - protein, 9 aa, Homo Sapiens
AEENLFKLI

SEQ ID NO: 114577 - protein, 9 aa, Homo Sapiens
AEETGVHII

SEQ ID NO: 114578 - protein, 9 aa, Homo Sapiens
AEETSSPVI

SEQ ID NO: 114579 - protein, 9 aa, Homo Sapiens
AEEYGARVV

SEQ ID NO: 114580 - protein, 9 aa, Homo Sapiens
AEFEDLDSL

SEQ ID NO: 114581 - protein, 9 aa, Homo Sapiens
AEFEEPRVI

SEQ ID NO: 114582 - protein, 9 aa, Homo Sapiens
AEFERQRKI

SEQ ID NO: 114583 - protein, 9 aa, Homo Sapiens
AEFEVVRTI

SEQ ID NO: 114584 - protein, 9 aa, Homo Sapiens
AEFEWENKV

SEQ ID NO: 114585 - protein, 9 aa, Homo Sapiens
AEFFSSENV

SEQ ID NO: 114586 - protein, 9 aa, Homo Sapiens
AEFHQIEGV

SEQ ID NO: 114587 - protein, 9 aa, Homo Sapiens
AEFHVCPEL

SEQ ID NO: 114588 - protein, 9 aa, Homo Sapiens
AEFIKFTVI

SEQ ID NO: 114589 - protein, 9 aa, Homo Sapiens
AEFIVAKAI

SEQ ID NO: 114590 - protein, 9 aa, Homo Sapiens
AEFKASKEI

SEQ ID NO: 114591 - protein, 9 aa, Homo Sapiens
AEFKNITRI

SEQ ID NO: 114592 - protein, 9 aa, Homo Sapiens
AEFKQIRSI

SEQ ID NO: 114593 - protein, 9 aa, Homo Sapiens
AEFKRAVKV

SEQ ID NO: 114594 - protein, 9 aa, Homo Sapiens
AEFLFNQCI

SEQ ID NO: 114595 - protein, 9 aa, Homo Sapiens
AEFNRIMSL

SEQ ID NO: 114596 - protein, 9 aa, Homo Sapiens
AEFPHSFLV

SEQ ID NO: 114597 - protein, 9 aa, Homo Sapiens
AEFQELLKV

SEQ ID NO: 114598 - protein, 9 aa, Homo Sapiens
AEFVGGVLV

SEQ ID NO: 114599 - protein, 9 aa, Homo Sapiens
AEFVGVSHL

SEQ ID NO: 114600 - protein, 9 aa, Homo Sapiens
AEFVSTPEL

SEQ ID NO: 114601 - protein, 9 aa, Homo Sapiens
AEGDLVRLL

SEQ ID NO: 114602 - protein, 9 aa, Homo Sapiens
AEGEGISKV

SEQ ID NO: 114603 - protein, 9 aa, Homo Sapiens
AEGEKVKQV

SEQ ID NO: 114604 - protein, 9 aa, Homo Sapiens
AEGKPYLHV

SEQ ID NO: 114605 - protein, 9 aa, Homo Sapiens
AEGLNLHTI

SEQ ID NO: 114606 - protein, 9 aa, Homo Sapiens
AEGLTLAQV

SEQ ID NO: 114607 - protein, 9 aa, Homo Sapiens
AEGPEVICA

SEQ ID NO: 114608 - protein, 9 aa, Homo Sapiens
AEGPKVSIV

SEQ ID NO: 114609 - protein, 9 aa, Homo Sapiens
AEGPPRLAI

SEQ ID NO: 114610 - protein, 9 aa, Homo Sapiens
AEGPRAVFV

SEQ ID NO: 114611 - protein, 9 aa, Homo Sapiens
AEGPVAVVV

SEQ ID NO: 114612 - protein, 9 aa, Homo Sapiens
AEGPVVEKI

SEQ ID NO: 114613 - protein, 9 aa, Homo Sapiens
AEGRPTPTI

SEQ ID NO: 114614 - protein, 9 aa, Homo Sapiens
AEGTFPGKI

SEQ ID NO: 114615 - protein, 9 aa, Homo Sapiens
AEGTITGVI

SEQ ID NO: 114616 - protein, 9 aa, Homo Sapiens
AEGTNFRTV

SEQ ID NO: 114617 - protein, 9 aa, Homo Sapiens
AEGTSTRLI

SEQ ID NO: 114618 - protein, 9 aa, Homo Sapiens
AEHAVVGEI

SEQ ID NO: 114619 - protein, 9 aa, Homo Sapiens
AEHDLWHII

SEQ ID NO: 114620 - protein, 9 aa, Homo Sapiens
AEHFAMMVI

SEQ ID NO: 114621 - protein, 9 aa, Homo Sapiens
AEHIKSLLI

SEQ ID NO: 114622 - protein, 9 aa, Homo Sapiens
AEHKEFITA

SEQ ID NO: 114623 - protein, 9 aa, Homo Sapiens
AEHKHIEVI

SEQ ID NO: 114624 - protein, 9 aa, Homo Sapiens
AEHNFVAKA

SEQ ID NO: 114625 - protein, 9 aa, Homo Sapiens
AEHNPQYLI

SEQ ID NO: 114626 - protein, 9 aa, Homo Sapiens
AEHPAGHLV

SEQ ID NO: 114627 - protein, 9 aa, Homo Sapiens
AEHPGFMKT

SEQ ID NO: 114628 - protein, 9 aa, Homo Sapiens
AEHPQSPCV

SEQ ID NO: 114629 - protein, 9 aa, Homo Sapiens
AEHPVYNMV

SEQ ID NO: 114630 - protein, 9 aa, Homo Sapiens
AEIAALRFL

SEQ ID NO: 114631 - protein, 9 aa, Homo Sapiens
AEIAAQRTI

SEQ ID NO: 114632 - protein, 9 aa, Homo Sapiens
AEIAPFVEI

SEQ ID NO: 114633 - protein, 9 aa, Homo Sapiens
AEIAQLMSL

SEQ ID NO: 114634 - protein, 9 aa, Homo Sapiens
AEIDASNIV

SEQ ID NO: 114635 - protein, 9 aa, Homo Sapiens
AEIDSIHQL

SEQ ID NO: 114636 - protein, 9 aa, Homo Sapiens
AEIEALEKM

SEQ ID NO: 114637 - protein, 9 aa, Homo Sapiens
AEIEHFIHI

SEQ ID NO: 114638 - protein, 9 aa, Homo Sapiens
AEIEKFDKS

SEQ ID NO: 114639 - protein, 9 aa, Homo Sapiens
AEIENLQSL

SEQ ID NO: 114640 - protein, 9 aa, Homo Sapiens
AEIERETSV

SEQ ID NO: 114641 - protein, 9 aa, Homo Sapiens
AEIHLPHFI

SEQ ID NO: 114642 - protein, 9 aa, Homo Sapiens
AEIIKQLKI

SEQ ID NO: 114643 - protein, 9 aa, Homo Sapiens
AEIIRFLTN

SEQ ID NO: 114644 - protein, 9 aa, Homo Sapiens
AEIKNSLKI

SEQ ID NO: 114645 - protein, 9 aa, Homo Sapiens
AEIKRKLGI

SEQ ID NO: 114646 - protein, 9 aa, Homo Sapiens
AEIKSGLCV

SEQ ID NO: 114647 - protein, 9 aa, Homo Sapiens
AEIKTTNEV

SEQ ID NO: 114648 - protein, 9 aa, Homo Sapiens
AEILMKTLL

SEQ ID NO: 114649 - protein, 9 aa, Homo Sapiens
AEILNGKEI

SEQ ID NO: 114650 - protein, 9 aa, Homo Sapiens
AEIMKTLEV

SEQ ID NO: 114651 - protein, 9 aa, Homo Sapiens
AEIMQAVRL

SEQ ID NO: 114652 - protein, 9 aa, Homo Sapiens
AEINATMSV

SEQ ID NO: 114653 - protein, 9 aa, Homo Sapiens
AEINEIIRV

SEQ ID NO: 114654 - protein, 9 aa, Homo Sapiens
AEINGTMNA

SEQ ID NO: 114655 - protein, 9 aa, Homo Sapiens
AEINKSDHV

SEQ ID NO: 114656 - protein, 9 aa, Homo Sapiens
AEINNIIKI

SEQ ID NO: 114657 - protein, 9 aa, Homo Sapiens
AEIPGVRSV

SEQ ID NO: 114658 - protein, 9 aa, Homo Sapiens
AEIPLVVCI

SEQ ID NO: 114659 - protein, 9 aa, Homo Sapiens
AEIQFAQRL

SEQ ID NO: 114660 - protein, 9 aa, Homo Sapiens
AEIQGNVKV

SEQ ID NO: 114661 - protein, 9 aa, Homo Sapiens
AEIRHEVSV

SEQ ID NO: 114662 - protein, 9 aa, Homo Sapiens
AEIRHVLVT

SEQ ID NO: 114663 - protein, 9 aa, Homo Sapiens
AEIRQQIPV

SEQ ID NO: 114664 - protein, 9 aa, Homo Sapiens
AEIRRFSSV

SEQ ID NO: 114665 - protein, 9 aa, Homo Sapiens
AEISAQPRI

SEQ ID NO: 114666 - protein, 9 aa, Homo Sapiens
AEISKYLTL

SEQ ID NO: 114667 - protein, 9 aa, Homo Sapiens
AEISQPPAL

SEQ ID NO: 114668 - protein, 9 aa, Homo Sapiens
AEISTLAKM

SEQ ID NO: 114669 - protein, 9 aa, Homo Sapiens
AEITDKLGL

SEQ ID NO: 114670 - protein, 9 aa, Homo Sapiens
AEITELIHI

SEQ ID NO: 114671 - protein, 9 aa, Homo Sapiens
AEITNGNAV

SEQ ID NO: 114672 - protein, 9 aa, Homo Sapiens
AEITYGQKV

SEQ ID NO: 114673 - protein, 9 aa, Homo Sapiens
AEIVKQTHI

SEQ ID NO: 114674 - protein, 9 aa, Homo Sapiens
AEIVTPFNI

SEQ ID NO: 114675 - protein, 9 aa, Homo Sapiens
AEIYEQEYI

SEQ ID NO: 114676 - protein, 9 aa, Homo Sapiens
AEIYGVTHT

SEQ ID NO: 114677 - protein, 9 aa, Homo Sapiens
AEKAFQEGI

SEQ ID NO: 114678 - protein, 9 aa, Homo Sapiens
AEKAFTRSI

SEQ ID NO: 114679 - protein, 9 aa, Homo Sapiens
AEKAGMVHL

SEQ ID NO: 114680 - protein, 9 aa, Homo Sapiens
AEKALFRAL

SEQ ID NO: 114681 - protein, 9 aa, Homo Sapiens
AEKEFNETM

SEQ ID NO: 114682 - protein, 9 aa, Homo Sapiens
AEKELTASV

SEQ ID NO: 114683 - protein, 9 aa, Homo Sapiens
AEKELVTII

SEQ ID NO: 114684 - protein, 9 aa, Homo Sapiens
AEKEMTSVV

SEQ ID NO: 114685 - protein, 9 aa, Homo Sapiens
AEKGGSLVV

SEQ ID NO: 114686 - protein, 9 aa, Homo Sapiens
AEKGPMIVL

SEQ ID NO: 114687 - protein, 9 aa, Homo Sapiens
AEKGVARVV

SEQ ID NO: 114688 - protein, 9 aa, Homo Sapiens
AEKIPGEST

SEQ ID NO: 114689 - protein, 9 aa, Homo Sapiens
AEKKEMKTI

SEQ ID NO: 114690 - protein, 9 aa, Homo Sapiens
AEKLDEIYV

SEQ ID NO: 114691 - protein, 9 aa, Homo Sapiens
AEKLEALSV

SEQ ID NO: 114692 - protein, 9 aa, Homo Sapiens
AEKLGFAGL

SEQ ID NO: 114693 - protein, 9 aa, Homo Sapiens
AEKLGGSAV

SEQ ID NO: 114694 - protein, 9 aa, Homo Sapiens
AEKLPGATV

SEQ ID NO: 114695 - protein, 9 aa, Homo Sapiens
AEKLQRITV

SEQ ID NO: 114696 - protein, 9 aa, Homo Sapiens
AEKLVTQII

SEQ ID NO: 114697 - protein, 9 aa, Homo Sapiens
AEKLYLRSI

SEQ ID NO: 114698 - protein, 9 aa, Homo Sapiens
AEKNFELVI

SEQ ID NO: 114699 - protein, 9 aa, Homo Sapiens
AEKNFLTTV

SEQ ID NO: 114700 - protein, 9 aa, Homo Sapiens
AEKNGLVKI

SEQ ID NO: 114701 - protein, 9 aa, Homo Sapiens
AEKNGYVTV

SEQ ID NO: 114702 - protein, 9 aa, Homo Sapiens
AEKPVGALL

SEQ ID NO: 114703 - protein, 9 aa, Homo Sapiens
AEKPVLTAV

SEQ ID NO: 114704 - protein, 9 aa, Homo Sapiens
AEKQPSQEV

SEQ ID NO: 114705 - protein, 9 aa, Homo Sapiens
AEKSDFEAV

SEQ ID NO: 114706 - protein, 9 aa, Homo Sapiens
AEKSEQPTL

SEQ ID NO: 114707 - protein, 9 aa, Homo Sapiens
AEKSPLQTI

SEQ ID NO: 114708 - protein, 9 aa, Homo Sapiens
AEKSPSVHI

SEQ ID NO: 114709 - protein, 9 aa, Homo Sapiens
AEKTGICKI

SEQ ID NO: 114710 - protein, 9 aa, Homo Sapiens
AEKTPYVVV

SEQ ID NO: 114711 - protein, 9 aa, Homo Sapiens
AEKVDAVRI

SEQ ID NO: 114712 - protein, 9 aa, Homo Sapiens
AEKVHFILV

SEQ ID NO: 114713 - protein, 9 aa, Homo Sapiens
AEKWEVAEV

SEQ ID NO: 114714 - protein, 9 aa, Homo Sapiens
AELADREKI

SEQ ID NO: 114715 - protein, 9 aa, Homo Sapiens
AELAEHREV

SEQ ID NO: 114716 - protein, 9 aa, Homo Sapiens
AELARRSLA

SEQ ID NO: 114717 - protein, 9 aa, Homo Sapiens
AELCRPLLV

SEQ ID NO: 114718 - protein, 9 aa, Homo Sapiens
AELDIPQSV

SEQ ID NO: 114719 - protein, 9 aa, Homo Sapiens
AELDKLTSV

SEQ ID NO: 114720 - protein, 9 aa, Homo Sapiens
AELDPSIAV

SEQ ID NO: 114721 - protein, 9 aa, Homo Sapiens
AELDQLLAV

SEQ ID NO: 114722 - protein, 9 aa, Homo Sapiens
AELEGKLRV

SEQ ID NO: 114723 - protein, 9 aa, Homo Sapiens
AELEGREQV

SEQ ID NO: 114724 - protein, 9 aa, Homo Sapiens
AELFHLSGI

SEQ ID NO: 114725 - protein, 9 aa, Homo Sapiens
AELFIPPKI

SEQ ID NO: 114726 - protein, 9 aa, Homo Sapiens
AELGKLYSV

SEQ ID NO: 114727 - protein, 9 aa, Homo Sapiens
AELHQNVNV

SEQ ID NO: 114728 - protein, 9 aa, Homo Sapiens
AELHSTEKV

SEQ ID NO: 114729 - protein, 9 aa, Homo Sapiens
AELIMSRCI

SEQ ID NO: 114730 - protein, 9 aa, Homo Sapiens
AELLLIPKV

SEQ ID NO: 114731 - protein, 9 aa, Homo Sapiens
AELLQKIEV

SEQ ID NO: 114732 - protein, 9 aa, Homo Sapiens
AELLSGKRL

SEQ ID NO: 114733 - protein, 9 aa, Homo Sapiens
AELMGLKQV

SEQ ID NO: 114734 - protein, 9 aa, Homo Sapiens
AELNFFQRI

SEQ ID NO: 114735 - protein, 9 aa, Homo Sapiens
AELPAKILV

SEQ ID NO: 114736 - protein, 9 aa, Homo Sapiens
AELPGSSAV

SEQ ID NO: 114737 - protein, 9 aa, Homo Sapiens
AELQELLTI

SEQ ID NO: 114738 - protein, 9 aa, Homo Sapiens
AELQELLTV

SEQ ID NO: 114739 - protein, 9 aa, Homo Sapiens
AELQEVVKV

SEQ ID NO: 114740 - protein, 9 aa, Homo Sapiens
AELQRVQKV

SEQ ID NO: 114741 - protein, 9 aa, Homo Sapiens
AELRNASAV

SEQ ID NO: 114742 - protein, 9 aa, Homo Sapiens
AELRRVDAL

SEQ ID NO: 114743 - protein, 9 aa, Homo Sapiens
AELSEFRMV

SEQ ID NO: 114744 - protein, 9 aa, Homo Sapiens
AELTKVFEI

SEQ ID NO: 114745 - protein, 9 aa, Homo Sapiens
AEMAKVSEI

SEQ ID NO: 114746 - protein, 9 aa, Homo Sapiens
AEMANILVI

SEQ ID NO: 114747 - protein, 9 aa, Homo Sapiens
AEMEKATEV

SEQ ID NO: 114748 - protein, 9 aa, Homo Sapiens
AEMENYAHL

SEQ ID NO: 114749 - protein, 9 aa, Homo Sapiens
AEMLEDLHI

SEQ ID NO: 114750 - protein, 9 aa, Homo Sapiens
AEMLKENKV

SEQ ID NO: 114751 - protein, 9 aa, Homo Sapiens
AEMRPFIEI

SEQ ID NO: 114752 - protein, 9 aa, Homo Sapiens
AEMVFATRV

SEQ ID NO: 114753 - protein, 9 aa, Homo Sapiens
AENDFLHSL

SEQ ID NO: 114754 - protein, 9 aa, Homo Sapiens
AENDKDVKI

SEQ ID NO: 114755 - protein, 9 aa, Homo Sapiens
AENELGVVV

SEQ ID NO: 114756 - protein, 9 aa, Homo Sapiens
AENESMAKI

SEQ ID NO: 114757 - protein, 9 aa, Homo Sapiens
AENEYQTAI

SEQ ID NO: 114758 - protein, 9 aa, Homo Sapiens
AENFFVETL

SEQ ID NO: 114759 - protein, 9 aa, Homo Sapiens
AENFPFCTI

SEQ ID NO: 114760 - protein, 9 aa, Homo Sapiens
AENGPGIKI

SEQ ID NO: 114761 - protein, 9 aa, Homo Sapiens
AENKPGLQI

SEQ ID NO: 114762 - protein, 9 aa, Homo Sapiens
AENLFRAFL

SEQ ID NO: 114763 - protein, 9 aa, Homo Sapiens
AENLQALFV

SEQ ID NO: 114764 - protein, 9 aa, Homo Sapiens
AENNHLEAV

SEQ ID NO: 114765 - protein, 9 aa, Homo Sapiens
AENNVFHLV

SEQ ID NO: 114766 - protein, 9 aa, Homo Sapiens
AENPDIFAV

SEQ ID NO: 114767 - protein, 9 aa, Homo Sapiens
AENPFLTHL

SEQ ID NO: 114768 - protein, 9 aa, Homo Sapiens
AENPGKYNI

SEQ ID NO: 114769 - protein, 9 aa, Homo Sapiens
AENPPSGSV

SEQ ID NO: 114770 - protein, 9 aa, Homo Sapiens
AENPVENHI

SEQ ID NO: 114771 - protein, 9 aa, Homo Sapiens
AENQRITAV

SEQ ID NO: 114772 - protein, 9 aa, Homo Sapiens
AENVAGHQI

SEQ ID NO: 114773 - protein, 9 aa, Homo Sapiens
AENVAVPEA

SEQ ID NO: 114774 - protein, 9 aa, Homo Sapiens
AENVGKPTI

SEQ ID NO: 114775 - protein, 9 aa, Homo Sapiens
AENVPQTEV

SEQ ID NO: 114776 - protein, 9 aa, Homo Sapiens
AEPDIISTI

SEQ ID NO: 114777 - protein, 9 aa, Homo Sapiens
AEPEKVLRV

SEQ ID NO: 114778 - protein, 9 aa, Homo Sapiens
AEPESVLLV

SEQ ID NO: 114779 - protein, 9 aa, Homo Sapiens
AEPFFIRCI

SEQ ID NO: 114780 - protein, 9 aa, Homo Sapiens
AEPGNLAGV

SEQ ID NO: 114781 - protein, 9 aa, Homo Sapiens
AEPHRPLKI

SEQ ID NO: 114782 - protein, 9 aa, Homo Sapiens
AEPIRMLEI

SEQ ID NO: 114783 - protein, 9 aa, Homo Sapiens
AEPKLAFVI

SEQ ID NO: 114784 - protein, 9 aa, Homo Sapiens
AEPNLKQTI

SEQ ID NO: 114785 - protein, 9 aa, Homo Sapiens
AEPSKLNSI

SEQ ID NO: 114786 - protein, 9 aa, Homo Sapiens
AEQDFWRAV

SEQ ID NO: 114787 - protein, 9 aa, Homo Sapiens
AEQFRLEQI

SEQ ID NO: 114788 - protein, 9 aa, Homo Sapiens
AEQGKALLI

SEQ ID NO: 114789 - protein, 9 aa, Homo Sapiens
AEQIGELFI

SEQ ID NO: 114790 - protein, 9 aa, Homo Sapiens
AEQKRLKTV

SEQ ID NO: 114791 - protein, 9 aa, Homo Sapiens
AEQLAWLRV

SEQ ID NO: 114792 - protein, 9 aa, Homo Sapiens
AEQLPVAQI

SEQ ID NO: 114793 - protein, 9 aa, Homo Sapiens
AEQPSVKLC

SEQ ID NO: 114794 - protein, 9 aa, Homo Sapiens
AEQPTALTV

SEQ ID NO: 114795 - protein, 9 aa, Homo Sapiens
AEQRVPLSV

SEQ ID NO: 114796 - protein, 9 aa, Homo Sapiens
AEQTFEQAI

SEQ ID NO: 114797 - protein, 9 aa, Homo Sapiens
AERDKALRV

SEQ ID NO: 114798 - protein, 9 aa, Homo Sapiens
AEREIVRDI

SEQ ID NO: 114799 - protein, 9 aa, Homo Sapiens
AERENFHRL

SEQ ID NO: 114800 - protein, 9 aa, Homo Sapiens
AEREQEEAI

SEQ ID NO: 114801 - protein, 9 aa, Homo Sapiens
AERERGITI

SEQ ID NO: 114802 - protein, 9 aa, Homo Sapiens
AERESAEVV

SEQ ID NO: 114803 - protein, 9 aa, Homo Sapiens
AERFHFEAL

SEQ ID NO: 114804 - protein, 9 aa, Homo Sapiens
AERIGVDHV

SEQ ID NO: 114805 - protein, 9 aa, Homo Sapiens
AERIIILKI

SEQ ID NO: 114806 - protein, 9 aa, Homo Sapiens
AERINNINI

SEQ ID NO: 114807 - protein, 9 aa, Homo Sapiens
AERLFENQL

SEQ ID NO: 114808 - protein, 9 aa, Homo Sapiens
AERLGMGLV

SEQ ID NO: 114809 - protein, 9 aa, Homo Sapiens
AERLTTELI

SEQ ID NO: 114810 - protein, 9 aa, Homo Sapiens
AERPGEAAV

SEQ ID NO: 114811 - protein, 9 aa, Homo Sapiens
AERPTVARI

SEQ ID NO: 114812 - protein, 9 aa, Homo Sapiens
AERSGLRVV

SEQ ID NO: 114813 - protein, 9 aa, Homo Sapiens
AERVGLHKV

SEQ ID NO: 114814 - protein, 9 aa, Homo Sapiens
AERWIVNLI

SEQ ID NO: 114815 - protein, 9 aa, Homo Sapiens
AERYGINTT

SEQ ID NO: 114816 - protein, 9 aa, Homo Sapiens
AESCIKSTV

SEQ ID NO: 114817 - protein, 9 aa, Homo Sapiens
AESDKPVVI

SEQ ID NO: 114818 - protein, 9 aa, Homo Sapiens
AESGCKIQI

SEQ ID NO: 114819 - protein, 9 aa, Homo Sapiens
AESHIILVL

SEQ ID NO: 114820 - protein, 9 aa, Homo Sapiens
AESIANQRI

SEQ ID NO: 114821 - protein, 9 aa, Homo Sapiens
AESIHLWEV

SEQ ID NO: 114822 - protein, 9 aa, Homo Sapiens
AESKEISNV

SEQ ID NO: 114823 - protein, 9 aa, Homo Sapiens
AESKLQTEV

SEQ ID NO: 114824 - protein, 9 aa, Homo Sapiens
AESLHKTIV

SEQ ID NO: 114825 - protein, 9 aa, Homo Sapiens
AESLIAKKI

SEQ ID NO: 114826 - protein, 9 aa, Homo Sapiens
AESLPPPTL

SEQ ID NO: 114827 - protein, 9 aa, Homo Sapiens
AESLQLVTV

SEQ ID NO: 114828 - protein, 9 aa, Homo Sapiens
AESPGFSQA

SEQ ID NO: 114829 - protein, 9 aa, Homo Sapiens
AESPSFLSL

SEQ ID NO: 114830 - protein, 9 aa, Homo Sapiens
AESPSRDVV

SEQ ID NO: 114831 - protein, 9 aa, Homo Sapiens
AESQDLRHV

SEQ ID NO: 114832 - protein, 9 aa, Homo Sapiens
AESTGTVRV

SEQ ID NO: 114833 - protein, 9 aa, Homo Sapiens
AETASPVAV

SEQ ID NO: 114834 - protein, 9 aa, Homo Sapiens
AETAVQLFI

SEQ ID NO: 114835 - protein, 9 aa, Homo Sapiens
AETDRLSYV

SEQ ID NO: 114836 - protein, 9 aa, Homo Sapiens
AETEPIVKM

SEQ ID NO: 114837 - protein, 9 aa, Homo Sapiens
AETEQHIKV

SEQ ID NO: 114838 - protein, 9 aa, Homo Sapiens
AETGCKIMV

SEQ ID NO: 114839 - protein, 9 aa, Homo Sapiens
AETGKVVII

SEQ ID NO: 114840 - protein, 9 aa, Homo Sapiens
AETGLLSAI

SEQ ID NO: 114841 - protein, 9 aa, Homo Sapiens
AETGQVQKI

SEQ ID NO: 114842 - protein, 9 aa, Homo Sapiens
AETGVGKTV

SEQ ID NO: 114843 - protein, 9 aa, Homo Sapiens
AETIAWVRI

SEQ ID NO: 114844 - protein, 9 aa, Homo Sapiens
AETILKNNI

SEQ ID NO: 114845 - protein, 9 aa, Homo Sapiens
AETILLKAV

SEQ ID NO: 114846 - protein, 9 aa, Homo Sapiens
AETKQEAVV

SEQ ID NO: 114847 - protein, 9 aa, Homo Sapiens
AETLLNSEV

SEQ ID NO: 114848 - protein, 9 aa, Homo Sapiens
AETLPALKI

SEQ ID NO: 114849 - protein, 9 aa, Homo Sapiens
AETLQKCLI

SEQ ID NO: 114850 - protein, 9 aa, Homo Sapiens
AETLSKQSI

SEQ ID NO: 114851 - protein, 9 aa, Homo Sapiens
AETPEGHAV

SEQ ID NO: 114852 - protein, 9 aa, Homo Sapiens
AETPGAEKI

SEQ ID NO: 114853 - protein, 9 aa, Homo Sapiens
AETPQAKKI

SEQ ID NO: 114854 - protein, 9 aa, Homo Sapiens
AETPVHKQI

SEQ ID NO: 114855 - protein, 9 aa, Homo Sapiens
AETRPPIRV

SEQ ID NO: 114856 - protein, 9 aa, Homo Sapiens
AETVRPEEV

SEQ ID NO: 114857 - protein, 9 aa, Homo Sapiens
AETVTKGGI

SEQ ID NO: 114858 - protein, 9 aa, Homo Sapiens
AEVAGQFVI

SEQ ID NO: 114859 - protein, 9 aa, Homo Sapiens
AEVAGSKVV

SEQ ID NO: 114860 - protein, 9 aa, Homo Sapiens
AEVAPVAQV

SEQ ID NO: 114861 - protein, 9 aa, Homo Sapiens
AEVDKLELM

SEQ ID NO: 114862 - protein, 9 aa, Homo Sapiens
AEVDKVARL

SEQ ID NO: 114863 - protein, 9 aa, Homo Sapiens
AEVDRLLEI

SEQ ID NO: 114864 - protein, 9 aa, Homo Sapiens
AEVEKIIAV

SEQ ID NO: 114865 - protein, 9 aa, Homo Sapiens
AEVEKNETV

SEQ ID NO: 114866 - protein, 9 aa, Homo Sapiens
AEVELASRV

SEQ ID NO: 114867 - protein, 9 aa, Homo Sapiens
AEVERARQV

SEQ ID NO: 114868 - protein, 9 aa, Homo Sapiens
AEVERLKGL

SEQ ID NO: 114869 - protein, 9 aa, Homo Sapiens
AEVERVKDV

SEQ ID NO: 114870 - protein, 9 aa, Homo Sapiens
AEVFHVPLL

SEQ ID NO: 114871 - protein, 9 aa, Homo Sapiens
AEVGGVPYL

SEQ ID NO: 114872 - protein, 9 aa, Homo Sapiens
AEVGIIESI

SEQ ID NO: 114873 - protein, 9 aa, Homo Sapiens
AEVGRKLLL

SEQ ID NO: 114874 - protein, 9 aa, Homo Sapiens
AEVGRVLQV

SEQ ID NO: 114875 - protein, 9 aa, Homo Sapiens
AEVGVPVSV

SEQ ID NO: 114876 - protein, 9 aa, Homo Sapiens
AEVHKAITI

SEQ ID NO: 114877 - protein, 9 aa, Homo Sapiens
AEVHRLVVV

SEQ ID NO: 114878 - protein, 9 aa, Homo Sapiens
AEVINAREV

SEQ ID NO: 114879 - protein, 9 aa, Homo Sapiens
AEVKAAAEI

SEQ ID NO: 114880 - protein, 9 aa, Homo Sapiens
AEVKDTTRV

SEQ ID NO: 114881 - protein, 9 aa, Homo Sapiens
AEVKPEVKI

SEQ ID NO: 114882 - protein, 9 aa, Homo Sapiens
AEVKPILQA

SEQ ID NO: 114883 - protein, 9 aa, Homo Sapiens
AEVLEAHTI

SEQ ID NO: 114884 - protein, 9 aa, Homo Sapiens
AEVLPSHKV

SEQ ID NO: 114885 - protein, 9 aa, Homo Sapiens
AEVLRTMEL

SEQ ID NO: 114886 - protein, 9 aa, Homo Sapiens
AEVLTVKEV

SEQ ID NO: 114887 - protein, 9 aa, Homo Sapiens
AEVPGAGAV

SEQ ID NO: 114888 - protein, 9 aa, Homo Sapiens
AEVPLLDEV

SEQ ID NO: 114889 - protein, 9 aa, Homo Sapiens
AEVPTGTNV

SEQ ID NO: 114890 - protein, 9 aa, Homo Sapiens
AEVQHQLHV

SEQ ID NO: 114891 - protein, 9 aa, Homo Sapiens
AEVRAVQEI

SEQ ID NO: 114892 - protein, 9 aa, Homo Sapiens
AEVRKIIRV

SEQ ID NO: 114893 - protein, 9 aa, Homo Sapiens
AEVRVINLI

SEQ ID NO: 114894 - protein, 9 aa, Homo Sapiens
AEVSPMYGV

SEQ ID NO: 114895 - protein, 9 aa, Homo Sapiens
AEVSQWTRL

SEQ ID NO: 114896 - protein, 9 aa, Homo Sapiens
AEVTELHVI

SEQ ID NO: 114897 - protein, 9 aa, Homo Sapiens
AEVTIACKV

SEQ ID NO: 114898 - protein, 9 aa, Homo Sapiens
AEVTSGARV

SEQ ID NO: 114899 - protein, 9 aa, Homo Sapiens
AEVTTKSQI

SEQ ID NO: 114900 - protein, 9 aa, Homo Sapiens
AEVVKAPQV

SEQ ID NO: 114901 - protein, 9 aa, Homo Sapiens
AEVYKELRL

SEQ ID NO: 114902 - protein, 9 aa, Homo Sapiens
AEVYRILSV

SEQ ID NO: 114903 - protein, 9 aa, Homo Sapiens
AEWEANPLI

SEQ ID NO: 114904 - protein, 9 aa, Homo Sapiens
AEWIQQNNI

SEQ ID NO: 114905 - protein, 9 aa, Homo Sapiens
AEWLGVLKA

SEQ ID NO: 114906 - protein, 9 aa, Homo Sapiens
AEWPKEQFI

SEQ ID NO: 114907 - protein, 9 aa, Homo Sapiens
AEYAGRLGV

SEQ ID NO: 114908 - protein, 9 aa, Homo Sapiens
AEYAHPLET

SEQ ID NO: 114909 - protein, 9 aa, Homo Sapiens
AEYDLTTRI

SEQ ID NO: 114910 - protein, 9 aa, Homo Sapiens
AEYDRPNLL

SEQ ID NO: 114911 - protein, 9 aa, Homo Sapiens
AEYFCKPTV

SEQ ID NO: 114912 - protein, 9 aa, Homo Sapiens
AEYGEIKNI

SEQ ID NO: 114913 - protein, 9 aa, Homo Sapiens
AEYGGHDQI

SEQ ID NO: 114914 - protein, 9 aa, Homo Sapiens
AEYGGHQRL

SEQ ID NO: 114915 - protein, 9 aa, Homo Sapiens
AEYGHFVDI

SEQ ID NO: 114916 - protein, 9 aa, Homo Sapiens
AEYISTVKT

SEQ ID NO: 114917 - protein, 9 aa, Homo Sapiens
AEYKGRVTL

SEQ ID NO: 114918 - protein, 9 aa, Homo Sapiens
AEYKRYLEM

SEQ ID NO: 114919 - protein, 9 aa, Homo Sapiens
AEYLGANSV

SEQ ID NO: 114920 - protein, 9 aa, Homo Sapiens
AEYLGSCLL

SEQ ID NO: 114921 - protein, 9 aa, Homo Sapiens
AEYLILHLI

SEQ ID NO: 114922 - protein, 9 aa, Homo Sapiens
AEYLKLEFI

SEQ ID NO: 114923 - protein, 9 aa, Homo Sapiens
AEYLYFFRV

SEQ ID NO: 114924 - protein, 9 aa, Homo Sapiens
AEYNGRLAA

SEQ ID NO: 114925 - protein, 9 aa, Homo Sapiens
AEYNRYTWV

SEQ ID NO: 114926 - protein, 9 aa, Homo Sapiens
AEYNVNNLV

SEQ ID NO: 114927 - protein, 9 aa, Homo Sapiens
AEYPDGRII

SEQ ID NO: 114928 - protein, 9 aa, Homo Sapiens
AEYPEGFEI

SEQ ID NO: 114929 - protein, 9 aa, Homo Sapiens
AEYQDLTFL

SEQ ID NO: 114930 - protein, 9 aa, Homo Sapiens
AEYQELLDV

SEQ ID NO: 114931 - protein, 9 aa, Homo Sapiens
AEYRHLRKL

SEQ ID NO: 114932 - protein, 9 aa, Homo Sapiens
AEYVGRLGI

SEQ ID NO: 114933 - protein, 9 aa, Homo Sapiens
CEGGGVTRV

SEQ ID NO: 114934 - protein, 9 aa, Homo Sapiens
DAREILKQI

SEQ ID NO: 114935 - protein, 9 aa, Homo Sapiens
DTSPFAKSL

SEQ ID NO: 114936 - protein, 9 aa, Homo Sapiens
EAEIRAKQL

SEQ ID NO: 114937 - protein, 9 aa, Homo Sapiens
EAGPGRALV

SEQ ID NO: 114938 - protein, 9 aa, Homo Sapiens
EAILLHFST

SEQ ID NO: 114939 - protein, 9 aa, Homo Sapiens
EEAKKFGTI

SEQ ID NO: 114940 - protein, 9 aa, Homo Sapiens
EEAPLYSKV

SEQ ID NO: 114941 - protein, 9 aa, Homo Sapiens
EEARAFNRI

SEQ ID NO: 114942 - protein, 9 aa, Homo Sapiens
EECPAVRLI

SEQ ID NO: 114943 - protein, 9 aa, Homo Sapiens
EEDQGSKLI

SEQ ID NO: 114944 - protein, 9 aa, Homo Sapiens
EEFGDFRLV

SEQ ID NO: 114945 - protein, 9 aa, Homo Sapiens
EEFLSKVSI

SEQ ID NO: 114946 - protein, 9 aa, Homo Sapiens
EEFNQPLSV

SEQ ID NO: 114947 - protein, 9 aa, Homo Sapiens
EEFPGGLTI

SEQ ID NO: 114948 - protein, 9 aa, Homo Sapiens
EEFQNVRII

SEQ ID NO: 114949 - protein, 9 aa, Homo Sapiens
EEFTIFNRV

SEQ ID NO: 114950 - protein, 9 aa, Homo Sapiens
EEGPPVTTV

SEQ ID NO: 114951 - protein, 9 aa, Homo Sapiens
EEIAQVATI

SEQ ID NO: 114952 - protein, 9 aa, Homo Sapiens
EEIDRALGI

SEQ ID NO: 114953 - protein, 9 aa, Homo Sapiens
EEIEREVNI

SEQ ID NO: 114954 - protein, 9 aa, Homo Sapiens
EEILKFLCI

SEQ ID NO: 114955 - protein, 9 aa, Homo Sapiens
EEINYLTRI

SEQ ID NO: 114956 - protein, 9 aa, Homo Sapiens
EEIQNLIKI

SEQ ID NO: 114957 - protein, 9 aa, Homo Sapiens
EEISGIVEV

SEQ ID NO: 114958 - protein, 9 aa, Homo Sapiens
EELDKWAKI

SEQ ID NO: 114959 - protein, 9 aa, Homo Sapiens
EELEYFNHI

SEQ ID NO: 114960 - protein, 9 aa, Homo Sapiens
EEVPEFTKI

SEQ ID NO: 114961 - protein, 9 aa, Homo Sapiens
EEVTGCKTV

SEQ ID NO: 114962 - protein, 9 aa, Homo Sapiens
EEYFMRETV

SEQ ID NO: 114963 - protein, 9 aa, Homo Sapiens
EEYGKIDTI

SEQ ID NO: 114964 - protein, 9 aa, Homo Sapiens
EEYGKILEV

SEQ ID NO: 114965 - protein, 9 aa, Homo Sapiens
EEYQNPHTV

SEQ ID NO: 114966 - protein, 9 aa, Homo Sapiens
ELSERLELV

SEQ ID NO: 114967 - protein, 9 aa, Homo Sapiens
ESNVQILKL

SEQ ID NO: 114968 - protein, 9 aa, Homo Sapiens
ETALRLTEL

SEQ ID NO: 114969 - protein, 9 aa, Homo Sapiens
EVIEEVNKV

SEQ ID NO: 114970 - protein, 9 aa, Homo Sapiens
EVIEPSDTL

SEQ ID NO: 114971 - protein, 9 aa, Homo Sapiens
FEAPNQEKV

SEQ ID NO: 114972 - protein, 9 aa, Homo Sapiens
FEAPTIVKV

SEQ ID NO: 114973 - protein, 9 aa, Homo Sapiens
FEAQFQKNV

SEQ ID NO: 114974 - protein, 9 aa, Homo Sapiens
FEASDPRII

SEQ ID NO: 114975 - protein, 9 aa, Homo Sapiens
FECDTKLYT

SEQ ID NO: 114976 - protein, 9 aa, Homo Sapiens
FECIGNVKV

SEQ ID NO: 114977 - protein, 9 aa, Homo Sapiens
FEDDAIQLV

SEQ ID NO: 114978 - protein, 9 aa, Homo Sapiens
FEDDDITHV

SEQ ID NO: 114979 - protein, 9 aa, Homo Sapiens
FEDEKPALL

SEQ ID NO: 114980 - protein, 9 aa, Homo Sapiens
FEDETIRNI

SEQ ID NO: 114981 - protein, 9 aa, Homo Sapiens
FEDGQKIVV

SEQ ID NO: 114982 - protein, 9 aa, Homo Sapiens
FEDKLIQSV

SEQ ID NO: 114983 - protein, 9 aa, Homo Sapiens
FEDKWFRKI

SEQ ID NO: 114984 - protein, 9 aa, Homo Sapiens
FEDNDFVFV

SEQ ID NO: 114985 - protein, 9 aa, Homo Sapiens
FEDPKFEVI

SEQ ID NO: 114986 - protein, 9 aa, Homo Sapiens
FEDPQRREV

SEQ ID NO: 114987 - protein, 9 aa, Homo Sapiens
FEDPRLILI

SEQ ID NO: 114988 - protein, 9 aa, Homo Sapiens
FEDQMVYTV

SEQ ID NO: 114989 - protein, 9 aa, Homo Sapiens
FEDRGFVQV

SEQ ID NO: 114990 - protein, 9 aa, Homo Sapiens
FEDTNLCAI

SEQ ID NO: 114991 - protein, 9 aa, Homo Sapiens
FEEASNQLI

SEQ ID NO: 114992 - protein, 9 aa, Homo Sapiens
FEEIPIAHI

SEQ ID NO: 114993 - protein, 9 aa, Homo Sapiens
FEEKDFSQI

SEQ ID NO: 114994 - protein, 9 aa, Homo Sapiens
FEFDIHQVI

SEQ ID NO: 114995 - protein, 9 aa, Homo Sapiens
FEFDTKTSA

SEQ ID NO: 114996 - protein, 9 aa, Homo Sapiens
FEFEYQTKV

SEQ ID NO: 114997 - protein, 9 aa, Homo Sapiens
FEGAVIRTV

SEQ ID NO: 114998 - protein, 9 aa, Homo Sapiens
FEGDTGLIV

SEQ ID NO: 114999 - protein, 9 aa, Homo Sapiens
FEGEKGAVV

SEQ ID NO: 115000 - protein, 9 aa, Homo Sapiens
FEGGPRPWI

SEQ ID NO: 115001 - protein, 9 aa, Homo Sapiens
FEGHFKCEV

SEQ ID NO: 115002 - protein, 9 aa, Homo Sapiens
FEGTSTKTV

SEQ ID NO: 115003 - protein, 9 aa, Homo Sapiens
FEHAHNMRV

SEQ ID NO: 115004 - protein, 9 aa, Homo Sapiens
FEHENKFYI

SEQ ID NO: 115005 - protein, 9 aa, Homo Sapiens
FEHGDTNEV

SEQ ID NO: 115006 - protein, 9 aa, Homo Sapiens
FEHHGQVRL

SEQ ID NO: 115007 - protein, 9 aa, Homo Sapiens
FEHLAPVLV

SEQ ID NO: 115008 - protein, 9 aa, Homo Sapiens
FEHQRAPRV

SEQ ID NO: 115009 - protein, 9 aa, Homo Sapiens
FEHSDIVVI

SEQ ID NO: 115010 - protein, 9 aa, Homo Sapiens
FEIERDLRL

SEQ ID NO: 115011 - protein, 9 aa, Homo Sapiens
FEIKDKMLI

SEQ ID NO: 115012 - protein, 9 aa, Homo Sapiens
FEILPGLSV

SEQ ID NO: 115013 - protein, 9 aa, Homo Sapiens
FEIPKGTQV

SEQ ID NO: 115014 - protein, 9 aa, Homo Sapiens
FEISNRALI

SEQ ID NO: 115015 - protein, 9 aa, Homo Sapiens
FEKTLTPII

SEQ ID NO: 115016 - protein, 9 aa, Homo Sapiens
FELPEIKKV

SEQ ID NO: 115017 - protein, 9 aa, Homo Sapiens
FEMKELPQL

SEQ ID NO: 115018 - protein, 9 aa, Homo Sapiens
FENETAKKV

SEQ ID NO: 115019 - protein, 9 aa, Homo Sapiens
FENKPMILL

SEQ ID NO: 115020 - protein, 9 aa, Homo Sapiens
FENMGAYTV

SEQ ID NO: 115021 - protein, 9 aa, Homo Sapiens
FEQFLLPVI

SEQ ID NO: 115022 - protein, 9 aa, Homo Sapiens
FEQFLQERI

SEQ ID NO: 115023 - protein, 9 aa, Homo Sapiens
FEQFLREKV

SEQ ID NO: 115024 - protein, 9 aa, Homo Sapiens
FEQGGARVV

SEQ ID NO: 115025 - protein, 9 aa, Homo Sapiens
FEQKGFRLV

SEQ ID NO: 115026 - protein, 9 aa, Homo Sapiens
FEQVSGVTV

SEQ ID NO: 115027 - protein, 9 aa, Homo Sapiens
FERATFLVI

SEQ ID NO: 115028 - protein, 9 aa, Homo Sapiens
FEREFYSEI

SEQ ID NO: 115029 - protein, 9 aa, Homo Sapiens
FERKLDQTI

SEQ ID NO: 115030 - protein, 9 aa, Homo Sapiens
FERNKAIKV

SEQ ID NO: 115031 - protein, 9 aa, Homo Sapiens
FERPQYAEI

SEQ ID NO: 115032 - protein, 9 aa, Homo Sapiens
FESDLHSLL

SEQ ID NO: 115033 - protein, 9 aa, Homo Sapiens
FESGNLRKV

SEQ ID NO: 115034 - protein, 9 aa, Homo Sapiens
FESGNMTQV

SEQ ID NO: 115035 - protein, 9 aa, Homo Sapiens
FESKGTGRI

SEQ ID NO: 115036 - protein, 9 aa, Homo Sapiens
FESPNILRI

SEQ ID NO: 115037 - protein, 9 aa, Homo Sapiens
FETEPVSKL

SEQ ID NO: 115038 - protein, 9 aa, Homo Sapiens
FETIVKQQI

SEQ ID NO: 115039 - protein, 9 aa, Homo Sapiens
FETPGSILV

SEQ ID NO: 115040 - protein, 9 aa, Homo Sapiens
FETPLRVDV

SEQ ID NO: 115041 - protein, 9 aa, Homo Sapiens
FEVDSRVYL

SEQ ID NO: 115042 - protein, 9 aa, Homo Sapiens
FEVIFPERI

SEQ ID NO: 115043 - protein, 9 aa, Homo Sapiens
FEVKKGDRI

SEQ ID NO: 115044 - protein, 9 aa, Homo Sapiens
FEVKKWNAV

SEQ ID NO: 115045 - protein, 9 aa, Homo Sapiens
FEVPAGKKV

SEQ ID NO: 115046 - protein, 9 aa, Homo Sapiens
FEVTGQETV

SEQ ID NO: 115047 - protein, 9 aa, Homo Sapiens
FEWDRKLEL

SEQ ID NO: 115048 - protein, 9 aa, Homo Sapiens
FEWENKVTV

SEQ ID NO: 115049 - protein, 9 aa, Homo Sapiens
FEYPEYQKI

SEQ ID NO: 115050 - protein, 9 aa, Homo Sapiens
FEYRKDNKV

SEQ ID NO: 115051 - protein, 9 aa, Homo Sapiens
FEYVINEVI

SEQ ID NO: 115052 - protein, 9 aa, Homo Sapiens
GEAAFPVMV

SEQ ID NO: 115053 - protein, 9 aa, Homo Sapiens
GEAEGLMKV

SEQ ID NO: 115054 - protein, 9 aa, Homo Sapiens
GEAELELRV

SEQ ID NO: 115055 - protein, 9 aa, Homo Sapiens
GEAEPRTVV

SEQ ID NO: 115056 - protein, 9 aa, Homo Sapiens
GEAGPHAMV

SEQ ID NO: 115057 - protein, 9 aa, Homo Sapiens
GEAGPIHHL

SEQ ID NO: 115058 - protein, 9 aa, Homo Sapiens
GEAGPVGNM

SEQ ID NO: 115059 - protein, 9 aa, Homo Sapiens
GEALAPRQV

SEQ ID NO: 115060 - protein, 9 aa, Homo Sapiens
GEALPFSHL

SEQ ID NO: 115061 - protein, 9 aa, Homo Sapiens
GEANPINMV

SEQ ID NO: 115062 - protein, 9 aa, Homo Sapiens
GEAPALVAV

SEQ ID NO: 115063 - protein, 9 aa, Homo Sapiens
GEAPFAQRI

SEQ ID NO: 115064 - protein, 9 aa, Homo Sapiens
GEAPSKTLV

SEQ ID NO: 115065 - protein, 9 aa, Homo Sapiens
GEAPVLIMI

SEQ ID NO: 115066 - protein, 9 aa, Homo Sapiens
GEAPVPASV

SEQ ID NO: 115067 - protein, 9 aa, Homo Sapiens
GEAQPTKSL

SEQ ID NO: 115068 - protein, 9 aa, Homo Sapiens
GEAQRLIEI

SEQ ID NO: 115069 - protein, 9 aa, Homo Sapiens
GEARKQVEV

SEQ ID NO: 115070 - protein, 9 aa, Homo Sapiens
GEARPGPTA

SEQ ID NO: 115071 - protein, 9 aa, Homo Sapiens
GEASFPVMV

SEQ ID NO: 115072 - protein, 9 aa, Homo Sapiens
GEAVFARCL

SEQ ID NO: 115073 - protein, 9 aa, Homo Sapiens
GEAVGARLI

SEQ ID NO: 115074 - protein, 9 aa, Homo Sapiens
GECGKAFRV

SEQ ID NO: 115075 - protein, 9 aa, Homo Sapiens
GECHTENEI

SEQ ID NO: 115076 - protein, 9 aa, Homo Sapiens
GEDFKLGTI

SEQ ID NO: 115077 - protein, 9 aa, Homo Sapiens
GEDGFLLKI

SEQ ID NO: 115078 - protein, 9 aa, Homo Sapiens
GEDHQITEV

SEQ ID NO: 115079 - protein, 9 aa, Homo Sapiens
GEDKGGYVI

SEQ ID NO: 115080 - protein, 9 aa, Homo Sapiens
GEDKGIKAL

SEQ ID NO: 115081 - protein, 9 aa, Homo Sapiens
GEDLPTIVI

SEQ ID NO: 115082 - protein, 9 aa, Homo Sapiens
GEDPYPHKF

SEQ ID NO: 115083 - protein, 9 aa, Homo Sapiens
GEDSSFLVV

SEQ ID NO: 115084 - protein, 9 aa, Homo Sapiens
GEDVRSALL

SEQ ID NO: 115085 - protein, 9 aa, Homo Sapiens
GEEALLRYV

SEQ ID NO: 115086 - protein, 9 aa, Homo Sapiens
GEEHAFLTV

SEQ ID NO: 115087 - protein, 9 aa, Homo Sapiens
GEEHPIRVV

SEQ ID NO: 115088 - protein, 9 aa, Homo Sapiens
GEEIRFRVV

SEQ ID NO: 115089 - protein, 9 aa, Homo Sapiens
GEELVTKPV

SEQ ID NO: 115090 - protein, 9 aa, Homo Sapiens
GEENGAHTI

SEQ ID NO: 115091 - protein, 9 aa, Homo Sapiens
GEERLRSTI

SEQ ID NO: 115092 - protein, 9 aa, Homo Sapiens
GEEVAMRTV

SEQ ID NO: 115093 - protein, 9 aa, Homo Sapiens
GEEVAVKKV

SEQ ID NO: 115094 - protein, 9 aa, Homo Sapiens
GEEWKGYVV

SEQ ID NO: 115095 - protein, 9 aa, Homo Sapiens
GEFADPFKL

SEQ ID NO: 115096 - protein, 9 aa, Homo Sapiens
GEFAKLSKI

SEQ ID NO: 115097 - protein, 9 aa, Homo Sapiens
GEFDLVQRI

SEQ ID NO: 115098 - protein, 9 aa, Homo Sapiens
GEFEGFVAV

SEQ ID NO: 115099 - protein, 9 aa, Homo Sapiens
GEFEKKYVA

SEQ ID NO: 115100 - protein, 9 aa, Homo Sapiens
GEFFKQIGI

SEQ ID NO: 115101 - protein, 9 aa, Homo Sapiens
GEFGEIEAI

SEQ ID NO: 115102 - protein, 9 aa, Homo Sapiens
GEFGGFGSV

SEQ ID NO: 115103 - protein, 9 aa, Homo Sapiens
GEFGGFSEV

SEQ ID NO: 115104 - protein, 9 aa, Homo Sapiens
GEFGKPYFI

SEQ ID NO: 115105 - protein, 9 aa, Homo Sapiens
GEFHKMREV

SEQ ID NO: 115106 - protein, 9 aa, Homo Sapiens
GEFHLWYQV

SEQ ID NO: 115107 - protein, 9 aa, Homo Sapiens
GEFIIGRVI

SEQ ID NO: 115108 - protein, 9 aa, Homo Sapiens
GEFILKTYV

SEQ ID NO: 115109 - protein, 9 aa, Homo Sapiens
GEFKKYLEV

SEQ ID NO: 115110 - protein, 9 aa, Homo Sapiens
GEFLEVTCI

SEQ ID NO: 115111 - protein, 9 aa, Homo Sapiens
GEFPCQNDI

SEQ ID NO: 115112 - protein, 9 aa, Homo Sapiens
GEFPVRVQV

SEQ ID NO: 115113 - protein, 9 aa, Homo Sapiens
GEFPYLGRL

SEQ ID NO: 115114 - protein, 9 aa, Homo Sapiens
GEFRAVTEL

SEQ ID NO: 115115 - protein, 9 aa, Homo Sapiens
GEFTHEMQV

SEQ ID NO: 115116 - protein, 9 aa, Homo Sapiens
GEFTSARAV

SEQ ID NO: 115117 - protein, 9 aa, Homo Sapiens
GEFVDDYTV

SEQ ID NO: 115118 - protein, 9 aa, Homo Sapiens
GEGAEPLKV

SEQ ID NO: 115119 - protein, 9 aa, Homo Sapiens
GEGDIVPKI

SEQ ID NO: 115120 - protein, 9 aa, Homo Sapiens
GEGEPVKEV

SEQ ID NO: 115121 - protein, 9 aa, Homo Sapiens
GEGFQTVRV

SEQ ID NO: 115122 - protein, 9 aa, Homo Sapiens
GEGKPTPAL

SEQ ID NO: 115123 - protein, 9 aa, Homo Sapiens
GEGKSTTTI

SEQ ID NO: 115124 - protein, 9 aa, Homo Sapiens
GEGKSTVTI

SEQ ID NO: 115125 - protein, 9 aa, Homo Sapiens
GEGPQSQKI

SEQ ID NO: 115126 - protein, 9 aa, Homo Sapiens
GEGTFGRVV

SEQ ID NO: 115127 - protein, 9 aa, Homo Sapiens
GEHCDFTIL

SEQ ID NO: 115128 - protein, 9 aa, Homo Sapiens
GEHGLIIRV

SEQ ID NO: 115129 - protein, 9 aa, Homo Sapiens
GEHHSTPSL

SEQ ID NO: 115130 - protein, 9 aa, Homo Sapiens
GEHKIMDYI

SEQ ID NO: 115131 - protein, 9 aa, Homo Sapiens
GEHLGTLKV

SEQ ID NO: 115132 - protein, 9 aa, Homo Sapiens
GEHPFYHCL

SEQ ID NO: 115133 - protein, 9 aa, Homo Sapiens
GEHPGVAGI

SEQ ID NO: 115134 - protein, 9 aa, Homo Sapiens
GEHTLLVTV

SEQ ID NO: 115135 - protein, 9 aa, Homo Sapiens
GEHVKAIEI

SEQ ID NO: 115136 - protein, 9 aa, Homo Sapiens
GEIAPRTVV

SEQ ID NO: 115137 - protein, 9 aa, Homo Sapiens
GEIDKRVEV

SEQ ID NO: 115138 - protein, 9 aa, Homo Sapiens
GEIDKVQYI

SEQ ID NO: 115139 - protein, 9 aa, Homo Sapiens
GEIDRARAI

SEQ ID NO: 115140 - protein, 9 aa, Homo Sapiens
GEIERLINL

SEQ ID NO: 115141 - protein, 9 aa, Homo Sapiens
GEIGHFDSV

SEQ ID NO: 115142 - protein, 9 aa, Homo Sapiens
GEIGTKTTL

SEQ ID NO: 115143 - protein, 9 aa, Homo Sapiens
GEIIGKRGI

SEQ ID NO: 115144 - protein, 9 aa, Homo Sapiens
GEIKEPLEI

SEQ ID NO: 115145 - protein, 9 aa, Homo Sapiens
GEIKGFTGI

SEQ ID NO: 115146 - protein, 9 aa, Homo Sapiens
GEIKHVSSL

SEQ ID NO: 115147 - protein, 9 aa, Homo Sapiens
GEIKWIDFV

SEQ ID NO: 115148 - protein, 9 aa, Homo Sapiens
GEILNEVKI

SEQ ID NO: 115149 - protein, 9 aa, Homo Sapiens
GEILRVIEI

SEQ ID NO: 115150 - protein, 9 aa, Homo Sapiens
GEIPKQVKV

SEQ ID NO: 115151 - protein, 9 aa, Homo Sapiens
GEIPTLKTL

SEQ ID NO: 115152 - protein, 9 aa, Homo Sapiens
GEIPWSQEL

SEQ ID NO: 115153 - protein, 9 aa, Homo Sapiens
GEIQAGAKL

SEQ ID NO: 115154 - protein, 9 aa, Homo Sapiens
GEIRELKQL

SEQ ID NO: 115155 - protein, 9 aa, Homo Sapiens
GEIRGFETA

SEQ ID NO: 115156 - protein, 9 aa, Homo Sapiens
GEIRTITVV

SEQ ID NO: 115157 - protein, 9 aa, Homo Sapiens
GEISPQREV

SEQ ID NO: 115158 - protein, 9 aa, Homo Sapiens
GEISRMREV

SEQ ID NO: 115159 - protein, 9 aa, Homo Sapiens
GEISTIDKV

SEQ ID NO: 115160 - protein, 9 aa, Homo Sapiens
GEITGEVRM

SEQ ID NO: 115161 - protein, 9 aa, Homo Sapiens
GEITGHNKV

SEQ ID NO: 115162 - protein, 9 aa, Homo Sapiens
GEITLRGLV

SEQ ID NO: 115163 - protein, 9 aa, Homo Sapiens
GEITSRAAV

SEQ ID NO: 115164 - protein, 9 aa, Homo Sapiens
GEITTGPRV

SEQ ID NO: 115165 - protein, 9 aa, Homo Sapiens
GEIVALKKV

SEQ ID NO: 115166 - protein, 9 aa, Homo Sapiens
GEIVQQVRV

SEQ ID NO: 115167 - protein, 9 aa, Homo Sapiens
GEIVRNILI

SEQ ID NO: 115168 - protein, 9 aa, Homo Sapiens
GEIYTGTSV

SEQ ID NO: 115169 - protein, 9 aa, Homo Sapiens
GEKELILTV

SEQ ID NO: 115170 - protein, 9 aa, Homo Sapiens
GEKGKNIKI

SEQ ID NO: 115171 - protein, 9 aa, Homo Sapiens
GEKGPACLV

SEQ ID NO: 115172 - protein, 9 aa, Homo Sapiens
GEKPFTCEI

SEQ ID NO: 115173 - protein, 9 aa, Homo Sapiens
GEKPFVCKI

SEQ ID NO: 115174 - protein, 9 aa, Homo Sapiens
GEKQPELQI

SEQ ID NO: 115175 - protein, 9 aa, Homo Sapiens
GEKSESISV

SEQ ID NO: 115176 - protein, 9 aa, Homo Sapiens
GEKTAGINV

SEQ ID NO: 115177 - protein, 9 aa, Homo Sapiens
GEKTSNLRV

SEQ ID NO: 115178 - protein, 9 aa, Homo Sapiens
GEKVGVGKI

SEQ ID NO: 115179 - protein, 9 aa, Homo Sapiens
GEKVNIISV

SEQ ID NO: 115180 - protein, 9 aa, Homo Sapiens
GEKVWQIRV

SEQ ID NO: 115181 - protein, 9 aa, Homo Sapiens
GELALKKKI

SEQ ID NO: 115182 - protein, 9 aa, Homo Sapiens
GELAQHSRV

SEQ ID NO: 115183 - protein, 9 aa, Homo Sapiens
GELARAVVL

SEQ ID NO: 115184 - protein, 9 aa, Homo Sapiens
GELDHVVEI

SEQ ID NO: 115185 - protein, 9 aa, Homo Sapiens
GELEEMRKV

SEQ ID NO: 115186 - protein, 9 aa, Homo Sapiens
GELEYATKI

SEQ ID NO: 115187 - protein, 9 aa, Homo Sapiens
GELGDFRAV

SEQ ID NO: 115188 - protein, 9 aa, Homo Sapiens
GELGGFAAI

SEQ ID NO: 115189 - protein, 9 aa, Homo Sapiens
GELGKLDLI

SEQ ID NO: 115190 - protein, 9 aa, Homo Sapiens
GELIPKSKV

SEQ ID NO: 115191 - protein, 9 aa, Homo Sapiens
GELLPARKI

SEQ ID NO: 115192 - protein, 9 aa, Homo Sapiens
GELLPQIFV

SEQ ID NO: 115193 - protein, 9 aa, Homo Sapiens
GELPEHAKI

SEQ ID NO: 115194 - protein, 9 aa, Homo Sapiens
GELPFLTHV

SEQ ID NO: 115195 - protein, 9 aa, Homo Sapiens
GELPITVSV

SEQ ID NO: 115196 - protein, 9 aa, Homo Sapiens
GELPNGTRV

SEQ ID NO: 115197 - protein, 9 aa, Homo Sapiens
GELPSWILM

SEQ ID NO: 115198 - protein, 9 aa, Homo Sapiens
GELQHASAV

SEQ ID NO: 115199 - protein, 9 aa, Homo Sapiens
GELRHITKL

SEQ ID NO: 115200 - protein, 9 aa, Homo Sapiens
GELSKVTKV

SEQ ID NO: 115201 - protein, 9 aa, Homo Sapiens
GELSLPVHL

SEQ ID NO: 115202 - protein, 9 aa, Homo Sapiens
GELVKAIVV

SEQ ID NO: 115203 - protein, 9 aa, Homo Sapiens
GELVRLILV

SEQ ID NO: 115204 - protein, 9 aa, Homo Sapiens
GELWNKFFV

SEQ ID NO: 115205 - protein, 9 aa, Homo Sapiens
GELYNEVKV

SEQ ID NO: 115206 - protein, 9 aa, Homo Sapiens
GEMCAFNKV

SEQ ID NO: 115207 - protein, 9 aa, Homo Sapiens
GEMDSFSLI

SEQ ID NO: 115208 - protein, 9 aa, Homo Sapiens
GEMERDCQI

SEQ ID NO: 115209 - protein, 9 aa, Homo Sapiens
GEMQKQAQL

SEQ ID NO: 115210 - protein, 9 aa, Homo Sapiens
GEMVALPPV

SEQ ID NO: 115211 - protein, 9 aa, Homo Sapiens
GENEDLLKL

SEQ ID NO: 115212 - protein, 9 aa, Homo Sapiens
GENIEPVKI

SEQ ID NO: 115213 - protein, 9 aa, Homo Sapiens
GENLFEIHI

SEQ ID NO: 115214 - protein, 9 aa, Homo Sapiens
GENLKVLTV

SEQ ID NO: 115215 - protein, 9 aa, Homo Sapiens
GENLVSMTV

SEQ ID NO: 115216 - protein, 9 aa, Homo Sapiens
GENMFLRCV

SEQ ID NO: 115217 - protein, 9 aa, Homo Sapiens
GENPFACKV

SEQ ID NO: 115218 - protein, 9 aa, Homo Sapiens
GENPLQVLV

SEQ ID NO: 115219 - protein, 9 aa, Homo Sapiens
GENSRTCMI

SEQ ID NO: 115220 - protein, 9 aa, Homo Sapiens
GENVHIYLI

SEQ ID NO: 115221 - protein, 9 aa, Homo Sapiens
GEPDKLSMV

SEQ ID NO: 115222 - protein, 9 aa, Homo Sapiens
GEPEPTPVV

SEQ ID NO: 115223 - protein, 9 aa, Homo Sapiens
GEPGPVRSV

SEQ ID NO: 115224 - protein, 9 aa, Homo Sapiens
GEPLHSLII

SEQ ID NO: 115225 - protein, 9 aa, Homo Sapiens
GEPSHSVKV

SEQ ID NO: 115226 - protein, 9 aa, Homo Sapiens
GEPVSVVTV

SEQ ID NO: 115227 - protein, 9 aa, Homo Sapiens
GEQNMMTKV

SEQ ID NO: 115228 - protein, 9 aa, Homo Sapiens
GEQRLIHKI

SEQ ID NO: 115229 - protein, 9 aa, Homo Sapiens
GEREIWNQI

SEQ ID NO: 115230 - protein, 9 aa, Homo Sapiens
GERIRLEKV

SEQ ID NO: 115231 - protein, 9 aa, Homo Sapiens
GERPSNEEI

SEQ ID NO: 115232 - protein, 9 aa, Homo Sapiens
GESAGAASV

SEQ ID NO: 115233 - protein, 9 aa, Homo Sapiens
GESAILDRV

SEQ ID NO: 115234 - protein, 9 aa, Homo Sapiens
GESDPMKGV

SEQ ID NO: 115235 - protein, 9 aa, Homo Sapiens
GESFGISRI

SEQ ID NO: 115236 - protein, 9 aa, Homo Sapiens
GESGKSTIV

SEQ ID NO: 115237 - protein, 9 aa, Homo Sapiens
GESGPMGNI

SEQ ID NO: 115238 - protein, 9 aa, Homo Sapiens
GESKDLLFI

SEQ ID NO: 115239 - protein, 9 aa, Homo Sapiens
GESLDLLKV

SEQ ID NO: 115240 - protein, 9 aa, Homo Sapiens
GESPELLLV

SEQ ID NO: 115241 - protein, 9 aa, Homo Sapiens
GESVPEPRI

SEQ ID NO: 115242 - protein, 9 aa, Homo Sapiens
GESVQGSHV

SEQ ID NO: 115243 - protein, 9 aa, Homo Sapiens
GETEKKCFI

SEQ ID NO: 115244 - protein, 9 aa, Homo Sapiens
GETEKRCFI

SEQ ID NO: 115245 - protein, 9 aa, Homo Sapiens
GETEVLKVI

SEQ ID NO: 115246 - protein, 9 aa, Homo Sapiens
GETHPFTKL

SEQ ID NO: 115247 - protein, 9 aa, Homo Sapiens
GETIHIPTM

SEQ ID NO: 115248 - protein, 9 aa, Homo Sapiens
GETINTRLI

SEQ ID NO: 115249 - protein, 9 aa, Homo Sapiens
GETKVWQYI

SEQ ID NO: 115250 - protein, 9 aa, Homo Sapiens
GETNLKTHV

SEQ ID NO: 115251 - protein, 9 aa, Homo Sapiens
GETPQVAVI

SEQ ID NO: 115252 - protein, 9 aa, Homo Sapiens
GETQLVQEV

SEQ ID NO: 115253 - protein, 9 aa, Homo Sapiens
GETTFMAKL

SEQ ID NO: 115254 - protein, 9 aa, Homo Sapiens
GETTPCSKV

SEQ ID NO: 115255 - protein, 9 aa, Homo Sapiens
GETVKIVRI

SEQ ID NO: 115256 - protein, 9 aa, Homo Sapiens
GETYNGHLV

SEQ ID NO: 115257 - protein, 9 aa, Homo Sapiens
GEVAMGRVV

SEQ ID NO: 115258 - protein, 9 aa, Homo Sapiens
GEVDFKEFI

SEQ ID NO: 115259 - protein, 9 aa, Homo Sapiens
GEVDKRELI

SEQ ID NO: 115260 - protein, 9 aa, Homo Sapiens
GEVEKLLKT

SEQ ID NO: 115261 - protein, 9 aa, Homo Sapiens
GEVENGRCI

SEQ ID NO: 115262 - protein, 9 aa, Homo Sapiens
GEVESAKLI

SEQ ID NO: 115263 - protein, 9 aa, Homo Sapiens
GEVFKTYNV

SEQ ID NO: 115264 - protein, 9 aa, Homo Sapiens
GEVFPTTEV

SEQ ID NO: 115265 - protein, 9 aa, Homo Sapiens
GEVGKTTGI

SEQ ID NO: 115266 - protein, 9 aa, Homo Sapiens
GEVGRWLVI

SEQ ID NO: 115267 - protein, 9 aa, Homo Sapiens
GEVHPSEMI

SEQ ID NO: 115268 - protein, 9 aa, Homo Sapiens
GEVHTGTTI

SEQ ID NO: 115269 - protein, 9 aa, Homo Sapiens
GEVMPVVVV

SEQ ID NO: 115270 - protein, 9 aa, Homo Sapiens
GEVPFNHEI

SEQ ID NO: 115271 - protein, 9 aa, Homo Sapiens
GEVRTHIRV

SEQ ID NO: 115272 - protein, 9 aa, Homo Sapiens
GEVVAIKKI

SEQ ID NO: 115273 - protein, 9 aa, Homo Sapiens
GEWDKALSI

SEQ ID NO: 115274 - protein, 9 aa, Homo Sapiens
GEWERAAAV

SEQ ID NO: 115275 - protein, 9 aa, Homo Sapiens
GEWGAFNDI

SEQ ID NO: 115276 - protein, 9 aa, Homo Sapiens
GEWIKPGAI

SEQ ID NO: 115277 - protein, 9 aa, Homo Sapiens
GEWPDQPRI

SEQ ID NO: 115278 - protein, 9 aa, Homo Sapiens
GEWSDQPRI

SEQ ID NO: 115279 - protein, 9 aa, Homo Sapiens
GEWVGLCKI

SEQ ID NO: 115280 - protein, 9 aa, Homo Sapiens
GEYAKLEKI

SEQ ID NO: 115281 - protein, 9 aa, Homo Sapiens
GEYEDVSRV

SEQ ID NO: 115282 - protein, 9 aa, Homo Sapiens
GEYFAIKAL

SEQ ID NO: 115283 - protein, 9 aa, Homo Sapiens
GEYGGWYKA

SEQ ID NO: 115284 - protein, 9 aa, Homo Sapiens
GEYGKFFVT

SEQ ID NO: 115285 - protein, 9 aa, Homo Sapiens
GEYGNLVTI

SEQ ID NO: 115286 - protein, 9 aa, Homo Sapiens
GEYIAPEKI

SEQ ID NO: 115287 - protein, 9 aa, Homo Sapiens
GEYIKTWRP

SEQ ID NO: 115288 - protein, 9 aa, Homo Sapiens
GEYKAPQCI

SEQ ID NO: 115289 - protein, 9 aa, Homo Sapiens
GEYKMILVV

SEQ ID NO: 115290 - protein, 9 aa, Homo Sapiens
GEYLGNNRL

SEQ ID NO: 115291 - protein, 9 aa, Homo Sapiens
GEYMDKNNV

SEQ ID NO: 115292 - protein, 9 aa, Homo Sapiens
GEYPKLLRL

SEQ ID NO: 115293 - protein, 9 aa, Homo Sapiens
GEYQRMGVM

SEQ ID NO: 115294 - protein, 9 aa, Homo Sapiens
GEYSDPVTL

SEQ ID NO: 115295 - protein, 9 aa, Homo Sapiens
GEYSGIEHV

SEQ ID NO: 115296 - protein, 9 aa, Homo Sapiens
GEYSKVLAI

SEQ ID NO: 115297 - protein, 9 aa, Homo Sapiens
GEYTHIRNI

SEQ ID NO: 115298 - protein, 9 aa, Homo Sapiens
GEYTYYFRV

SEQ ID NO: 115299 - protein, 9 aa, Homo Sapiens
GEYWCEVTV

SEQ ID NO: 115300 - protein, 9 aa, Homo Sapiens
HEAAALNAV

SEQ ID NO: 115301 - protein, 9 aa, Homo Sapiens
HEAAFPIAV

SEQ ID NO: 115302 - protein, 9 aa, Homo Sapiens
HEAEIETRI

SEQ ID NO: 115303 - protein, 9 aa, Homo Sapiens
HEAEPVRTL

SEQ ID NO: 115304 - protein, 9 aa, Homo Sapiens
HEAERINNI

SEQ ID NO: 115305 - protein, 9 aa, Homo Sapiens
HEAFPLRVI

SEQ ID NO: 115306 - protein, 9 aa, Homo Sapiens
HEAHKFLKV

SEQ ID NO: 115307 - protein, 9 aa, Homo Sapiens
HEAMEQQSI

SEQ ID NO: 115308 - protein, 9 aa, Homo Sapiens
HEAMEQQTI

SEQ ID NO: 115309 - protein, 9 aa, Homo Sapiens
HEAQLSEKI

SEQ ID NO: 115310 - protein, 9 aa, Homo Sapiens
HECASINRI

SEQ ID NO: 115311 - protein, 9 aa, Homo Sapiens
HEDKNLVHV

SEQ ID NO: 115312 - protein, 9 aa, Homo Sapiens
HEEGYFTAI

SEQ ID NO: 115313 - protein, 9 aa, Homo Sapiens
HEEKVFRAV

SEQ ID NO: 115314 - protein, 9 aa, Homo Sapiens
HEEQPRPFV

SEQ ID NO: 115315 - protein, 9 aa, Homo Sapiens
HEFFHILNL

SEQ ID NO: 115316 - protein, 9 aa, Homo Sapiens
HEFGAITFV

SEQ ID NO: 115317 - protein, 9 aa, Homo Sapiens
HEFLRLSQV

SEQ ID NO: 115318 - protein, 9 aa, Homo Sapiens
HEFSTICKI

SEQ ID NO: 115319 - protein, 9 aa, Homo Sapiens
HEFTDLNLV

SEQ ID NO: 115320 - protein, 9 aa, Homo Sapiens
HEFTTSARI

SEQ ID NO: 115321 - protein, 9 aa, Homo Sapiens
HEGDIILKI

SEQ ID NO: 115322 - protein, 9 aa, Homo Sapiens
HEGLPGLAV

SEQ ID NO: 115323 - protein, 9 aa, Homo Sapiens
HEGLPQPLI

SEQ ID NO: 115324 - protein, 9 aa, Homo Sapiens
HEHIEILTV

SEQ ID NO: 115325 - protein, 9 aa, Homo Sapiens
HEIDRYTAI

SEQ ID NO: 115326 - protein, 9 aa, Homo Sapiens
HEIDYILLV

SEQ ID NO: 115327 - protein, 9 aa, Homo Sapiens
HEIGFGSKV

SEQ ID NO: 115328 - protein, 9 aa, Homo Sapiens
HEIPSLQSI

SEQ ID NO: 115329 - protein, 9 aa, Homo Sapiens
HEIQNLTLI

SEQ ID NO: 115330 - protein, 9 aa, Homo Sapiens
HEIVPGSLI

SEQ ID NO: 115331 - protein, 9 aa, Homo Sapiens
HEKISSPKV

SEQ ID NO: 115332 - protein, 9 aa, Homo Sapiens
HELAFSRLI

SEQ ID NO: 115333 - protein, 9 aa, Homo Sapiens
HELEQMQLI

SEQ ID NO: 115334 - protein, 9 aa, Homo Sapiens
HELFSKSFI

SEQ ID NO: 115335 - protein, 9 aa, Homo Sapiens
HELFTPPVI

SEQ ID NO: 115336 - protein, 9 aa, Homo Sapiens
HELMFSTKI

SEQ ID NO: 115337 - protein, 9 aa, Homo Sapiens
HELPEFNLI

SEQ ID NO: 115338 - protein, 9 aa, Homo Sapiens
HELVYEAII

SEQ ID NO: 115339 - protein, 9 aa, Homo Sapiens
HEMLPASLI

SEQ ID NO: 115340 - protein, 9 aa, Homo Sapiens
HENAFIVFI

SEQ ID NO: 115341 - protein, 9 aa, Homo Sapiens
HENDAIHKI

SEQ ID NO: 115342 - protein, 9 aa, Homo Sapiens
HENPDLAKV

SEQ ID NO: 115343 - protein, 9 aa, Homo Sapiens
HEQALFIYV

SEQ ID NO: 115344 - protein, 9 aa, Homo Sapiens
HEQEYKNNI

SEQ ID NO: 115345 - protein, 9 aa, Homo Sapiens
HEQLRAVIV

SEQ ID NO: 115346 - protein, 9 aa, Homo Sapiens
HEQLSVAEI

SEQ ID NO: 115347 - protein, 9 aa, Homo Sapiens
HEQLTVAEI

SEQ ID NO: 115348 - protein, 9 aa, Homo Sapiens
HEQSRIITV

SEQ ID NO: 115349 - protein, 9 aa, Homo Sapiens
HERAAILSV

SEQ ID NO: 115350 - protein, 9 aa, Homo Sapiens
HERANLLEI

SEQ ID NO: 115351 - protein, 9 aa, Homo Sapiens
HERFPFEIV

SEQ ID NO: 115352 - protein, 9 aa, Homo Sapiens
HESAAHAIV

SEQ ID NO: 115353 - protein, 9 aa, Homo Sapiens
HESACGRTV

SEQ ID NO: 115354 - protein, 9 aa, Homo Sapiens
HESGASIKI

SEQ ID NO: 115355 - protein, 9 aa, Homo Sapiens
HESPAVKLM

SEQ ID NO: 115356 - protein, 9 aa, Homo Sapiens
HESRQITQV

SEQ ID NO: 115357 - protein, 9 aa, Homo Sapiens
HETDNMNQI

SEQ ID NO: 115358 - protein, 9 aa, Homo Sapiens
HETLFILGV

SEQ ID NO: 115359 - protein, 9 aa, Homo Sapiens
HETPKQPVV

SEQ ID NO: 115360 - protein, 9 aa, Homo Sapiens
HEVAPPRLV

SEQ ID NO: 115361 - protein, 9 aa, Homo Sapiens
HEVDELTQI

SEQ ID NO: 115362 - protein, 9 aa, Homo Sapiens
HEVDKLYKV

SEQ ID NO: 115363 - protein, 9 aa, Homo Sapiens
HEVFNHREV

SEQ ID NO: 115364 - protein, 9 aa, Homo Sapiens
HEVKEVAGI

SEQ ID NO: 115365 - protein, 9 aa, Homo Sapiens
HEVMEQQTI

SEQ ID NO: 115366 - protein, 9 aa, Homo Sapiens
HEVNRILKV

SEQ ID NO: 115367 - protein, 9 aa, Homo Sapiens
HEVPFPANI

SEQ ID NO: 115368 - protein, 9 aa, Homo Sapiens
HEVPGHQSV

SEQ ID NO: 115369 - protein, 9 aa, Homo Sapiens
HEVSLQESI

SEQ ID NO: 115370 - protein, 9 aa, Homo Sapiens
HEVSNGSVV

SEQ ID NO: 115371 - protein, 9 aa, Homo Sapiens
HEWLQQHGI

SEQ ID NO: 115372 - protein, 9 aa, Homo Sapiens
HEYFPEMQI

SEQ ID NO: 115373 - protein, 9 aa, Homo Sapiens
HEYPPGLLV

SEQ ID NO: 115374 - protein, 9 aa, Homo Sapiens
HEYPWILSA

SEQ ID NO: 115375 - protein, 9 aa, Homo Sapiens
HEYVAQNGI

SEQ ID NO: 115376 - protein, 9 aa, Homo Sapiens
HEYVPWVTV

SEQ ID NO: 115377 - protein, 9 aa, Homo Sapiens
IEAAIERKI

SEQ ID NO: 115378 - protein, 9 aa, Homo Sapiens
IEAAQLLQI

SEQ ID NO: 115379 - protein, 9 aa, Homo Sapiens
IEAEGLKEM

SEQ ID NO: 115380 - protein, 9 aa, Homo Sapiens
IEAEKVAQV

SEQ ID NO: 115381 - protein, 9 aa, Homo Sapiens
IEAELTRRV

SEQ ID NO: 115382 - protein, 9 aa, Homo Sapiens
IEAGLPQKV

SEQ ID NO: 115383 - protein, 9 aa, Homo Sapiens
IEAKFYEEV

SEQ ID NO: 115384 - protein, 9 aa, Homo Sapiens
IEAPSSTCV

SEQ ID NO: 115385 - protein, 9 aa, Homo Sapiens
IEAVLLNSL

SEQ ID NO: 115386 - protein, 9 aa, Homo Sapiens
IEDAGFHKV

SEQ ID NO: 115387 - protein, 9 aa, Homo Sapiens
IEDDTILKT

SEQ ID NO: 115388 - protein, 9 aa, Homo Sapiens
IEDEKMVVV

SEQ ID NO: 115389 - protein, 9 aa, Homo Sapiens
IEDEVTRQV

SEQ ID NO: 115390 - protein, 9 aa, Homo Sapiens
IEDGKVVTV

SEQ ID NO: 115391 - protein, 9 aa, Homo Sapiens
IEDGSIHRI

SEQ ID NO: 115392 - protein, 9 aa, Homo Sapiens
IEDHFDVTV

SEQ ID NO: 115393 - protein, 9 aa, Homo Sapiens
IEDPKLGKV

SEQ ID NO: 115394 - protein, 9 aa, Homo Sapiens
IEDPVRPEV

SEQ ID NO: 115395 - protein, 9 aa, Homo Sapiens
IEDRPMPKL

SEQ ID NO: 115396 - protein, 9 aa, Homo Sapiens
IEDSRVYEL

SEQ ID NO: 115397 - protein, 9 aa, Homo Sapiens
IEDVPCGNI

SEQ ID NO: 115398 - protein, 9 aa, Homo Sapiens
IEEDRKLLI

SEQ ID NO: 115399 - protein, 9 aa, Homo Sapiens
IEESGEHII

SEQ ID NO: 115400 - protein, 9 aa, Homo Sapiens
IEEVGIYRI

SEQ ID NO: 115401 - protein, 9 aa, Homo Sapiens
IEFDEHINV

SEQ ID NO: 115402 - protein, 9 aa, Homo Sapiens
IEFNPPKTV

SEQ ID NO: 115403 - protein, 9 aa, Homo Sapiens
IEFSDKESV

SEQ ID NO: 115404 - protein, 9 aa, Homo Sapiens
IEFSIPDSL

SEQ ID NO: 115405 - protein, 9 aa, Homo Sapiens
IEFTYTAKL

SEQ ID NO: 115406 - protein, 9 aa, Homo Sapiens
IEGPSKAEI

SEQ ID NO: 115407 - protein, 9 aa, Homo Sapiens
IEGTPLETI

SEQ ID NO: 115408 - protein, 9 aa, Homo Sapiens
IEHDKREMI

SEQ ID NO: 115409 - protein, 9 aa, Homo Sapiens
IEHHLASNV

SEQ ID NO: 115410 - protein, 9 aa, Homo Sapiens
IEHIIENIV

SEQ ID NO: 115411 - protein, 9 aa, Homo Sapiens
IEHNKLRTI

SEQ ID NO: 115412 - protein, 9 aa, Homo Sapiens
IEIAKNYNV

SEQ ID NO: 115413 - protein, 9 aa, Homo Sapiens
IEIDPHRTV

SEQ ID NO: 115414 - protein, 9 aa, Homo Sapiens
IEIDSPYEI

SEQ ID NO: 115415 - protein, 9 aa, Homo Sapiens
IEIEKGEAV

SEQ ID NO: 115416 - protein, 9 aa, Homo Sapiens
IEIERILSV

SEQ ID NO: 115417 - protein, 9 aa, Homo Sapiens
IEIETPTQI

SEQ ID NO: 115418 - protein, 9 aa, Homo Sapiens
IEIGDTIRV

SEQ ID NO: 115419 - protein, 9 aa, Homo Sapiens
IEIGPDGRV

SEQ ID NO: 115420 - protein, 9 aa, Homo Sapiens
IEIGYVCSV

SEQ ID NO: 115421 - protein, 9 aa, Homo Sapiens
IEILGVRNV

SEQ ID NO: 115422 - protein, 9 aa, Homo Sapiens
IEKDIAAHI

SEQ ID NO: 115423 - protein, 9 aa, Homo Sapiens
IEKEGVTLV

SEQ ID NO: 115424 - protein, 9 aa, Homo Sapiens
IEKEHVEEI

SEQ ID NO: 115425 - protein, 9 aa, Homo Sapiens
IEKEKPLLI

SEQ ID NO: 115426 - protein, 9 aa, Homo Sapiens
IEKEYLERV

SEQ ID NO: 115427 - protein, 9 aa, Homo Sapiens
IEKKATATI

SEQ ID NO: 115428 - protein, 9 aa, Homo Sapiens
IEKLFPDAI

SEQ ID NO: 115429 - protein, 9 aa, Homo Sapiens
IEKLGGLVI

SEQ ID NO: 115430 - protein, 9 aa, Homo Sapiens
IEKPGGIIV

SEQ ID NO: 115431 - protein, 9 aa, Homo Sapiens
IEKSGWLFI

SEQ ID NO: 115432 - protein, 9 aa, Homo Sapiens
IEKTGKIKI

SEQ ID NO: 115433 - protein, 9 aa, Homo Sapiens
IELKNGTQV

SEQ ID NO: 115434 - protein, 9 aa, Homo Sapiens
IELPNIQKV

SEQ ID NO: 115435 - protein, 9 aa, Homo Sapiens
IEMAYARQI

SEQ ID NO: 115436 - protein, 9 aa, Homo Sapiens
IEMDKGTYI

SEQ ID NO: 115437 - protein, 9 aa, Homo Sapiens
IEMETKTSI

SEQ ID NO: 115438 - protein, 9 aa, Homo Sapiens
IENGHIFTV

SEQ ID NO: 115439 - protein, 9 aa, Homo Sapiens
IENSIVHRV

SEQ ID NO: 115440 - protein, 9 aa, Homo Sapiens
IENVIFNRV

SEQ ID NO: 115441 - protein, 9 aa, Homo Sapiens
IENVPCEFV

SEQ ID NO: 115442 - protein, 9 aa, Homo Sapiens
IEPEHVNTV

SEQ ID NO: 115443 - protein, 9 aa, Homo Sapiens
IEPELNNLI

SEQ ID NO: 115444 - protein, 9 aa, Homo Sapiens
IEQDTDTKI

SEQ ID NO: 115445 - protein, 9 aa, Homo Sapiens
IEQHPVVVI

SEQ ID NO: 115446 - protein, 9 aa, Homo Sapiens
IEQYYSTQI

SEQ ID NO: 115447 - protein, 9 aa, Homo Sapiens
IERALQPCI

SEQ ID NO: 115448 - protein, 9 aa, Homo Sapiens
IEREDIEFI

SEQ ID NO: 115449 - protein, 9 aa, Homo Sapiens
IESDKIVEI

SEQ ID NO: 115450 - protein, 9 aa, Homo Sapiens
IESKHEVTI

SEQ ID NO: 115451 - protein, 9 aa, Homo Sapiens
IESNHPIVL

SEQ ID NO: 115452 - protein, 9 aa, Homo Sapiens
IESNHPVVI

SEQ ID NO: 115453 - protein, 9 aa, Homo Sapiens
IESPAFSTL

SEQ ID NO: 115454 - protein, 9 aa, Homo Sapiens
IESTYGTHI

SEQ ID NO: 115455 - protein, 9 aa, Homo Sapiens
IETASGNKV

SEQ ID NO: 115456 - protein, 9 aa, Homo Sapiens
IETFYNTSI

SEQ ID NO: 115457 - protein, 9 aa, Homo Sapiens
IETINFHEV

SEQ ID NO: 115458 - protein, 9 aa, Homo Sapiens
IETPPTRNI

SEQ ID NO: 115459 - protein, 9 aa, Homo Sapiens
IETVQKETI

SEQ ID NO: 115460 - protein, 9 aa, Homo Sapiens
IEVDPVLTV

SEQ ID NO: 115461 - protein, 9 aa, Homo Sapiens
IEVDSSPSV

SEQ ID NO: 115462 - protein, 9 aa, Homo Sapiens
IEVEAPITV

SEQ ID NO: 115463 - protein, 9 aa, Homo Sapiens
IEVEKPFAI

SEQ ID NO: 115464 - protein, 9 aa, Homo Sapiens
IEVENKNNL

SEQ ID NO: 115465 - protein, 9 aa, Homo Sapiens
IEVNPQTRI

SEQ ID NO: 115466 - protein, 9 aa, Homo Sapiens
IEVTPQSKI

SEQ ID NO: 115467 - protein, 9 aa, Homo Sapiens
IEYAKPTRL

SEQ ID NO: 115468 - protein, 9 aa, Homo Sapiens
IEYARQLEM

SEQ ID NO: 115469 - protein, 9 aa, Homo Sapiens
IEYEPFRKN

SEQ ID NO: 115470 - protein, 9 aa, Homo Sapiens
IEYGDMQLI

SEQ ID NO: 115471 - protein, 9 aa, Homo Sapiens
IEYPTLHVV

SEQ ID NO: 115472 - protein, 9 aa, Homo Sapiens
IEYQFVERL

SEQ ID NO: 115473 - protein, 9 aa, Homo Sapiens
IPADLPVVV

SEQ ID NO: 115474 - protein, 9 aa, Homo Sapiens
KDYPFYLTV

SEQ ID NO: 115475 - protein, 9 aa, Homo Sapiens
KEAAYHPEV

SEQ ID NO: 115476 - protein, 9 aa, Homo Sapiens
KEAEFLQKL

SEQ ID NO: 115477 - protein, 9 aa, Homo Sapiens
KEAEFQRHV

SEQ ID NO: 115478 - protein, 9 aa, Homo Sapiens
KEAEKSPQL

SEQ ID NO: 115479 - protein, 9 aa, Homo Sapiens
KEAEKVARV

SEQ ID NO: 115480 - protein, 9 aa, Homo Sapiens
KEAELRSGI

SEQ ID NO: 115481 - protein, 9 aa, Homo Sapiens
KEAELRTWI

SEQ ID NO: 115482 - protein, 9 aa, Homo Sapiens
KEAGDLSTL

SEQ ID NO: 115483 - protein, 9 aa, Homo Sapiens
KEAGKFSAV

SEQ ID NO: 115484 - protein, 9 aa, Homo Sapiens
KEAHEPLAV

SEQ ID NO: 115485 - protein, 9 aa, Homo Sapiens
KEAIKSSLI

SEQ ID NO: 115486 - protein, 9 aa, Homo Sapiens
KEALVQVEV

SEQ ID NO: 115487 - protein, 9 aa, Homo Sapiens
KEALYALTV

SEQ ID NO: 115488 - protein, 9 aa, Homo Sapiens
KEAPAKVEV

SEQ ID NO: 115489 - protein, 9 aa, Homo Sapiens
KEAPAPPKA

SEQ ID NO: 115490 - protein, 9 aa, Homo Sapiens
KEAPPMEKP

SEQ ID NO: 115491 - protein, 9 aa, Homo Sapiens
KEAQPVVVI

SEQ ID NO: 115492 - protein, 9 aa, Homo Sapiens
KEASTTVRV

SEQ ID NO: 115493 - protein, 9 aa, Homo Sapiens
KEATSIKRV

SEQ ID NO: 115494 - protein, 9 aa, Homo Sapiens
KEAVTGITV

SEQ ID NO: 115495 - protein, 9 aa, Homo Sapiens
KECDFQTKF

SEQ ID NO: 115496 - protein, 9 aa, Homo Sapiens
KECENVKEI

SEQ ID NO: 115497 - protein, 9 aa, Homo Sapiens
KECGKAFRV

SEQ ID NO: 115498 - protein, 9 aa, Homo Sapiens
KECGKAFSI

SEQ ID NO: 115499 - protein, 9 aa, Homo Sapiens
KECGKAFTV

SEQ ID NO: 115500 - protein, 9 aa, Homo Sapiens
KECQEKLQV

SEQ ID NO: 115501 - protein, 9 aa, Homo Sapiens
KEDDAPRTI

SEQ ID NO: 115502 - protein, 9 aa, Homo Sapiens
KEDDVRQYV

SEQ ID NO: 115503 - protein, 9 aa, Homo Sapiens
KEDGAFSFV

SEQ ID NO: 115504 - protein, 9 aa, Homo Sapiens
KEDIPRQLV

SEQ ID NO: 115505 - protein, 9 aa, Homo Sapiens
KEDIQKETV

SEQ ID NO: 115506 - protein, 9 aa, Homo Sapiens
KEDPKALAV

SEQ ID NO: 115507 - protein, 9 aa, Homo Sapiens
KEDSQILKI

SEQ ID NO: 115508 - protein, 9 aa, Homo Sapiens
KEDTKELVV

SEQ ID NO: 115509 - protein, 9 aa, Homo Sapiens
KEDVKPYQV

SEQ ID NO: 115510 - protein, 9 aa, Homo Sapiens
KEDVRILKV

SEQ ID NO: 115511 - protein, 9 aa, Homo Sapiens
KEEEPVKKI

SEQ ID NO: 115512 - protein, 9 aa, Homo Sapiens
KEEEPVKKV

SEQ ID NO: 115513 - protein, 9 aa, Homo Sapiens
KEEQAERLV

SEQ ID NO: 115514 - protein, 9 aa, Homo Sapiens
KEEVTTREV

SEQ ID NO: 115515 - protein, 9 aa, Homo Sapiens
KEFAQIIKI

SEQ ID NO: 115516 - protein, 9 aa, Homo Sapiens
KEFDGKSLV

SEQ ID NO: 115517 - protein, 9 aa, Homo Sapiens
KEFEGKTLV

SEQ ID NO: 115518 - protein, 9 aa, Homo Sapiens
KEFEKASKI

SEQ ID NO: 115519 - protein, 9 aa, Homo Sapiens
KEFGAVSKV

SEQ ID NO: 115520 - protein, 9 aa, Homo Sapiens
KEFIGQQLI

SEQ ID NO: 115521 - protein, 9 aa, Homo Sapiens
KEFKEVEKV

SEQ ID NO: 115522 - protein, 9 aa, Homo Sapiens
KEFKSQLFV

SEQ ID NO: 115523 - protein, 9 aa, Homo Sapiens
KEFLMENRV

SEQ ID NO: 115524 - protein, 9 aa, Homo Sapiens
KEFLVVASV

SEQ ID NO: 115525 - protein, 9 aa, Homo Sapiens
KEFQDLREV

SEQ ID NO: 115526 - protein, 9 aa, Homo Sapiens
KEFQEGLKI

SEQ ID NO: 115527 - protein, 9 aa, Homo Sapiens
KEFQLFQGV

SEQ ID NO: 115528 - protein, 9 aa, Homo Sapiens
KEFSGHSSL

SEQ ID NO: 115529 - protein, 9 aa, Homo Sapiens
KEFSKCLFI

SEQ ID NO: 115530 - protein, 9 aa, Homo Sapiens
KEFSPFGTI

SEQ ID NO: 115531 - protein, 9 aa, Homo Sapiens
KEFSSEARV

SEQ ID NO: 115532 - protein, 9 aa, Homo Sapiens
KEFVGKPTI

SEQ ID NO: 115533 - protein, 9 aa, Homo Sapiens
KEGDIVTLI

SEQ ID NO: 115534 - protein, 9 aa, Homo Sapiens
KEGEIIHLI

SEQ ID NO: 115535 - protein, 9 aa, Homo Sapiens
KEGENRAVI

SEQ ID NO: 115536 - protein, 9 aa, Homo Sapiens
KEGFPITAI

SEQ ID NO: 115537 - protein, 9 aa, Homo Sapiens
KEGKPPISV

SEQ ID NO: 115538 - protein, 9 aa, Homo Sapiens
KEGLPTRAL

SEQ ID NO: 115539 - protein, 9 aa, Homo Sapiens
KEGLVMVEV

SEQ ID NO: 115540 - protein, 9 aa, Homo Sapiens
KEGPITKHI

SEQ ID NO: 115541 - protein, 9 aa, Homo Sapiens
KEGVFAKEV

SEQ ID NO: 115542 - protein, 9 aa, Homo Sapiens
KEHEAITKV

SEQ ID NO: 115543 - protein, 9 aa, Homo Sapiens
KEHEVTIFV

SEQ ID NO: 115544 - protein, 9 aa, Homo Sapiens
KEHFEVNVV

SEQ ID NO: 115545 - protein, 9 aa, Homo Sapiens
KEHLYFETV

SEQ ID NO: 115546 - protein, 9 aa, Homo Sapiens
KEHNSKLTI

SEQ ID NO: 115547 - protein, 9 aa, Homo Sapiens
KEHPFILNL

SEQ ID NO: 115548 - protein, 9 aa, Homo Sapiens
KEHPLFKKL

SEQ ID NO: 115549 - protein, 9 aa, Homo Sapiens
KEHTGRLVI

SEQ ID NO: 115550 - protein, 9 aa, Homo Sapiens
KEIAEVNEI

SEQ ID NO: 115551 - protein, 9 aa, Homo Sapiens
KEICAVSRI

SEQ ID NO: 115552 - protein, 9 aa, Homo Sapiens
KEIDTSTKV

SEQ ID NO: 115553 - protein, 9 aa, Homo Sapiens
KEIEDFDSL

SEQ ID NO: 115554 - protein, 9 aa, Homo Sapiens
KEIEQEAAV

SEQ ID NO: 115555 - protein, 9 aa, Homo Sapiens
KEIERFQEI

SEQ ID NO: 115556 - protein, 9 aa, Homo Sapiens
KEIEYVETV

SEQ ID NO: 115557 - protein, 9 aa, Homo Sapiens
KEIFFNILV

SEQ ID NO: 115558 - protein, 9 aa, Homo Sapiens
KEIFLRELI

SEQ ID NO: 115559 - protein, 9 aa, Homo Sapiens
KEIGDIAGV

SEQ ID NO: 115560 - protein, 9 aa, Homo Sapiens
KEIGGLTQV

SEQ ID NO: 115561 - protein, 9 aa, Homo Sapiens
KEIGNCTQI

SEQ ID NO: 115562 - protein, 9 aa, Homo Sapiens
KEIGQLKAI

SEQ ID NO: 115563 - protein, 9 aa, Homo Sapiens
KEIIGLEGV

SEQ ID NO: 115564 - protein, 9 aa, Homo Sapiens
KEILPAAEI

SEQ ID NO: 115565 - protein, 9 aa, Homo Sapiens
KEINFCRKV

SEQ ID NO: 115566 - protein, 9 aa, Homo Sapiens
KEIPIPFYL

SEQ ID NO: 115567 - protein, 9 aa, Homo Sapiens
KEIPRIFQI

SEQ ID NO: 115568 - protein, 9 aa, Homo Sapiens
KEISDLHYL

SEQ ID NO: 115569 - protein, 9 aa, Homo Sapiens
KEISESRVV

SEQ ID NO: 115570 - protein, 9 aa, Homo Sapiens
KEISITHHV

SEQ ID NO: 115571 - protein, 9 aa, Homo Sapiens
KEITEGKTV

SEQ ID NO: 115572 - protein, 9 aa, Homo Sapiens
KEIVDDTKV

SEQ ID NO: 115573 - protein, 9 aa, Homo Sapiens
KEIVGVVNV

SEQ ID NO: 115574 - protein, 9 aa, Homo Sapiens
KEKASWSSL

SEQ ID NO: 115575 - protein, 9 aa, Homo Sapiens
KEKEFEETM

SEQ ID NO: 115576 - protein, 9 aa, Homo Sapiens
KEKESTVHI

SEQ ID NO: 115577 - protein, 9 aa, Homo Sapiens
KEKVPGITI

SEQ ID NO: 115578 - protein, 9 aa, Homo Sapiens
KELATVRTI

SEQ ID NO: 115579 - protein, 9 aa, Homo Sapiens
KELDGFLSI

SEQ ID NO: 115580 - protein, 9 aa, Homo Sapiens
KELDHPRIV

SEQ ID NO: 115581 - protein, 9 aa, Homo Sapiens
KELEENLNI

SEQ ID NO: 115582 - protein, 9 aa, Homo Sapiens
KELEHLSHI

SEQ ID NO: 115583 - protein, 9 aa, Homo Sapiens
KELELPENI

SEQ ID NO: 115584 - protein, 9 aa, Homo Sapiens
KELEYIVSV

SEQ ID NO: 115585 - protein, 9 aa, Homo Sapiens
KELFFEDSI

SEQ ID NO: 115586 - protein, 9 aa, Homo Sapiens
KELGILSKI

SEQ ID NO: 115587 - protein, 9 aa, Homo Sapiens
KELIKPPTI

SEQ ID NO: 115588 - protein, 9 aa, Homo Sapiens
KELKGFKTI

SEQ ID NO: 115589 - protein, 9 aa, Homo Sapiens
KELKKSLKI

SEQ ID NO: 115590 - protein, 9 aa, Homo Sapiens
KELKLLQTI

SEQ ID NO: 115591 - protein, 9 aa, Homo Sapiens
KELLLKRTV

SEQ ID NO: 115592 - protein, 9 aa, Homo Sapiens
KELLRVAQI

SEQ ID NO: 115593 - protein, 9 aa, Homo Sapiens
KELLYVPLI

SEQ ID NO: 115594 - protein, 9 aa, Homo Sapiens
KELPQVSFV

SEQ ID NO: 115595 - protein, 9 aa, Homo Sapiens
KELQAEATV

SEQ ID NO: 115596 - protein, 9 aa, Homo Sapiens
KELRKFRKI

SEQ ID NO: 115597 - protein, 9 aa, Homo Sapiens
KELSEALTR

SEQ ID NO: 115598 - protein, 9 aa, Homo Sapiens
KELSELVSI

SEQ ID NO: 115599 - protein, 9 aa, Homo Sapiens
KELWAHKEV

SEQ ID NO: 115600 - protein, 9 aa, Homo Sapiens
KEMDSNTVI

SEQ ID NO: 115601 - protein, 9 aa, Homo Sapiens
KEMEKSFEV

SEQ ID NO: 115602 - protein, 9 aa, Homo Sapiens
KEMEQLLEM

SEQ ID NO: 115603 - protein, 9 aa, Homo Sapiens
KEMGGHHIV

SEQ ID NO: 115604 - protein, 9 aa, Homo Sapiens
KEMNPALGI

SEQ ID NO: 115605 - protein, 9 aa, Homo Sapiens
KEMTEVPRV

SEQ ID NO: 115606 - protein, 9 aa, Homo Sapiens
KENDQILAI

SEQ ID NO: 115607 - protein, 9 aa, Homo Sapiens
KENDRICQV

SEQ ID NO: 115608 - protein, 9 aa, Homo Sapiens
KENDRSLYI

SEQ ID NO: 115609 - protein, 9 aa, Homo Sapiens
KENEELTRI

SEQ ID NO: 115610 - protein, 9 aa, Homo Sapiens
KENERWNVI

SEQ ID NO: 115611 - protein, 9 aa, Homo Sapiens
KENGFSEKI

SEQ ID NO: 115612 - protein, 9 aa, Homo Sapiens
KENGRTLVV

SEQ ID NO: 115613 - protein, 9 aa, Homo Sapiens
KENQNIAYV

SEQ ID NO: 115614 - protein, 9 aa, Homo Sapiens
KENTPPVVI

SEQ ID NO: 115615 - protein, 9 aa, Homo Sapiens
KENVKPIKV

SEQ ID NO: 115616 - protein, 9 aa, Homo Sapiens
KEPELFQTV

SEQ ID NO: 115617 - protein, 9 aa, Homo Sapiens
KEPPLSLTI

SEQ ID NO: 115618 - protein, 9 aa, Homo Sapiens
KEQEPMPTV

SEQ ID NO: 115619 - protein, 9 aa, Homo Sapiens
KEQETALRV

SEQ ID NO: 115620 - protein, 9 aa, Homo Sapiens
KEQIKWSLL

SEQ ID NO: 115621 - protein, 9 aa, Homo Sapiens
KEQVPPPAV

SEQ ID NO: 115622 - protein, 9 aa, Homo Sapiens
KEQYYVRKV

SEQ ID NO: 115623 - protein, 9 aa, Homo Sapiens
KERELQNTV

SEQ ID NO: 115624 - protein, 9 aa, Homo Sapiens
KESDHIHII

SEQ ID NO: 115625 - protein, 9 aa, Homo Sapiens
KESEDKPEI

SEQ ID NO: 115626 - protein, 9 aa, Homo Sapiens
KESEPAEEV

SEQ ID NO: 115627 - protein, 9 aa, Homo Sapiens
KESIPFAVV

SEQ ID NO: 115628 - protein, 9 aa, Homo Sapiens
KESLPLFKI

SEQ ID NO: 115629 - protein, 9 aa, Homo Sapiens
KESNDLLLI

SEQ ID NO: 115630 - protein, 9 aa, Homo Sapiens
KESVPARTV

SEQ ID NO: 115631 - protein, 9 aa, Homo Sapiens
KETAVFINI

SEQ ID NO: 115632 - protein, 9 aa, Homo Sapiens
KETELNKVI

SEQ ID NO: 115633 - protein, 9 aa, Homo Sapiens
KETESLRKI

SEQ ID NO: 115634 - protein, 9 aa, Homo Sapiens
KETGQIVAI

SEQ ID NO: 115635 - protein, 9 aa, Homo Sapiens
KETIDNNSV

SEQ ID NO: 115636 - protein, 9 aa, Homo Sapiens
KETLPGARI

SEQ ID NO: 115637 - protein, 9 aa, Homo Sapiens
KETNIQLFV

SEQ ID NO: 115638 - protein, 9 aa, Homo Sapiens
KETQPPETV

SEQ ID NO: 115639 - protein, 9 aa, Homo Sapiens
KEVAELTRL

SEQ ID NO: 115640 - protein, 9 aa, Homo Sapiens
KEVAGLRQL

SEQ ID NO: 115641 - protein, 9 aa, Homo Sapiens
KEVAKIIYI

SEQ ID NO: 115642 - protein, 9 aa, Homo Sapiens
KEVAPVPKI

SEQ ID NO: 115643 - protein, 9 aa, Homo Sapiens
KEVDLIPKV

SEQ ID NO: 115644 - protein, 9 aa, Homo Sapiens
KEVDNLYNI

SEQ ID NO: 115645 - protein, 9 aa, Homo Sapiens
KEVEKKLTV

SEQ ID NO: 115646 - protein, 9 aa, Homo Sapiens
KEVEQFTQV

SEQ ID NO: 115647 - protein, 9 aa, Homo Sapiens
KEVERILGL

SEQ ID NO: 115648 - protein, 9 aa, Homo Sapiens
KEVEYFTGI

SEQ ID NO: 115649 - protein, 9 aa, Homo Sapiens
KEVFIRELI

SEQ ID NO: 115650 - protein, 9 aa, Homo Sapiens
KEVIKSQEV

SEQ ID NO: 115651 - protein, 9 aa, Homo Sapiens
KEVIKTNNV

SEQ ID NO: 115652 - protein, 9 aa, Homo Sapiens
KEVISVVKV

SEQ ID NO: 115653 - protein, 9 aa, Homo Sapiens
KEVNFTSEL

SEQ ID NO: 115654 - protein, 9 aa, Homo Sapiens
KEVQTVTSI

SEQ ID NO: 115655 - protein, 9 aa, Homo Sapiens
KEVTDLRKI

SEQ ID NO: 115656 - protein, 9 aa, Homo Sapiens
KEVVEAVTI

SEQ ID NO: 115657 - protein, 9 aa, Homo Sapiens
KEVYFAERV

SEQ ID NO: 115658 - protein, 9 aa, Homo Sapiens
KEVYLFERI

SEQ ID NO: 115659 - protein, 9 aa, Homo Sapiens
KEYAVNEVV

SEQ ID NO: 115660 - protein, 9 aa, Homo Sapiens
KEYDALKAA

SEQ ID NO: 115661 - protein, 9 aa, Homo Sapiens
KEYDSISRL

SEQ ID NO: 115662 - protein, 9 aa, Homo Sapiens
KEYERFSKY

SEQ ID NO: 115663 - protein, 9 aa, Homo Sapiens
KEYFEFSEF

SEQ ID NO: 115664 - protein, 9 aa, Homo Sapiens
KEYFGIVSV

SEQ ID NO: 115665 - protein, 9 aa, Homo Sapiens
KEYFPVQVV

SEQ ID NO: 115666 - protein, 9 aa, Homo Sapiens
KEYGQIESV

SEQ ID NO: 115667 - protein, 9 aa, Homo Sapiens
KEYQPHVIV

SEQ ID NO: 115668 - protein, 9 aa, Homo Sapiens
KEYTNPEQI

SEQ ID NO: 115669 - protein, 9 aa, Homo Sapiens
KEYVGIVRL

SEQ ID NO: 115670 - protein, 9 aa, Homo Sapiens
KQQLELDSI

SEQ ID NO: 115671 - protein, 9 aa, Homo Sapiens
LAQFIDKPV

SEQ ID NO: 115672 - protein, 9 aa, Homo Sapiens
LEAAAATQV

SEQ ID NO: 115673 - protein, 9 aa, Homo Sapiens
LEAAIPERV

SEQ ID NO: 115674 - protein, 9 aa, Homo Sapiens
LEADGTEKV

SEQ ID NO: 115675 - protein, 9 aa, Homo Sapiens
LEADKIRPL

SEQ ID NO: 115676 - protein, 9 aa, Homo Sapiens
LEADPIKRI

SEQ ID NO: 115677 - protein, 9 aa, Homo Sapiens
LEADRMAAL

SEQ ID NO: 115678 - protein, 9 aa, Homo Sapiens
LEAEPIRML

SEQ ID NO: 115679 - protein, 9 aa, Homo Sapiens
LEAERSTNI

SEQ ID NO: 115680 - protein, 9 aa, Homo Sapiens
LEAETGCKI

SEQ ID NO: 115681 - protein, 9 aa, Homo Sapiens
LEAHFVPLV

SEQ ID NO: 115682 - protein, 9 aa, Homo Sapiens
LEAIKALEV

SEQ ID NO: 115683 - protein, 9 aa, Homo Sapiens
LEALCPQVI

SEQ ID NO: 115684 - protein, 9 aa, Homo Sapiens
LEALVMPTL

SEQ ID NO: 115685 - protein, 9 aa, Homo Sapiens
LEALVPVTI

SEQ ID NO: 115686 - protein, 9 aa, Homo Sapiens
LEASERQSL

SEQ ID NO: 115687 - protein, 9 aa, Homo Sapiens
LEASFARTV

SEQ ID NO: 115688 - protein, 9 aa, Homo Sapiens
LEAWPALQI

SEQ ID NO: 115689 - protein, 9 aa, Homo Sapiens
LEDAFSRQV

SEQ ID NO: 115690 - protein, 9 aa, Homo Sapiens
LEDEKPVSV

SEQ ID NO: 115691 - protein, 9 aa, Homo Sapiens
LEDELRQEV

SEQ ID NO: 115692 - protein, 9 aa, Homo Sapiens
LEDGHSLVI

SEQ ID NO: 115693 - protein, 9 aa, Homo Sapiens
LEDGNFLKL

SEQ ID NO: 115694 - protein, 9 aa, Homo Sapiens
LEDIPQALV

SEQ ID NO: 115695 - protein, 9 aa, Homo Sapiens
LEDIQTREV

SEQ ID NO: 115696 - protein, 9 aa, Homo Sapiens
LEDIYRPTI

SEQ ID NO: 115697 - protein, 9 aa, Homo Sapiens
LEDKRQVSV

SEQ ID NO: 115698 - protein, 9 aa, Homo Sapiens
LEDLGVSRI

SEQ ID NO: 115699 - protein, 9 aa, Homo Sapiens
LEDLNFPEI

SEQ ID NO: 115700 - protein, 9 aa, Homo Sapiens
LEDNSIPQV

SEQ ID NO: 115701 - protein, 9 aa, Homo Sapiens
LEDPHVDII

SEQ ID NO: 115702 - protein, 9 aa, Homo Sapiens
LEDRGIRKI

SEQ ID NO: 115703 - protein, 9 aa, Homo Sapiens
LEDSNVKLV

SEQ ID NO: 115704 - protein, 9 aa, Homo Sapiens
LEDVKTAVL

SEQ ID NO: 115705 - protein, 9 aa, Homo Sapiens
LEDVNKCVI

SEQ ID NO: 115706 - protein, 9 aa, Homo Sapiens
LEDYSGLSV

SEQ ID NO: 115707 - protein, 9 aa, Homo Sapiens
LEEAGFHTV

SEQ ID NO: 115708 - protein, 9 aa, Homo Sapiens
LEEAVYRNI

SEQ ID NO: 115709 - protein, 9 aa, Homo Sapiens
LEEDKSLKV

SEQ ID NO: 115710 - protein, 9 aa, Homo Sapiens
LEEFITPIV

SEQ ID NO: 115711 - protein, 9 aa, Homo Sapiens
LEEGKEILV

SEQ ID NO: 115712 - protein, 9 aa, Homo Sapiens
LEEGRVREV

SEQ ID NO: 115713 - protein, 9 aa, Homo Sapiens
LEEKGKRVI

SEQ ID NO: 115714 - protein, 9 aa, Homo Sapiens
LEELQKRFI

SEQ ID NO: 115715 - protein, 9 aa, Homo Sapiens
LEEQASRQI

SEQ ID NO: 115716 - protein, 9 aa, Homo Sapiens
LEERFRVAI

SEQ ID NO: 115717 - protein, 9 aa, Homo Sapiens
LEETSIRYV

SEQ ID NO: 115718 - protein, 9 aa, Homo Sapiens
LEEYEQRVV

SEQ ID NO: 115719 - protein, 9 aa, Homo Sapiens
LEFDPAQRI

SEQ ID NO: 115720 - protein, 9 aa, Homo Sapiens
LEFLDRESI

SEQ ID NO: 115721 - protein, 9 aa, Homo Sapiens
LEFLSVKEI

SEQ ID NO: 115722 - protein, 9 aa, Homo Sapiens
LEFPDQPDI

SEQ ID NO: 115723 - protein, 9 aa, Homo Sapiens
LEFPQFETL

SEQ ID NO: 115724 - protein, 9 aa, Homo Sapiens
LEFPQLIRV

SEQ ID NO: 115725 - protein, 9 aa, Homo Sapiens
LEFPSGETI

SEQ ID NO: 115726 - protein, 9 aa, Homo Sapiens
LEGDIVRTI

SEQ ID NO: 115727 - protein, 9 aa, Homo Sapiens
LEGLSVRSV

SEQ ID NO: 115728 - protein, 9 aa, Homo Sapiens
LEGNFAKEV

SEQ ID NO: 115729 - protein, 9 aa, Homo Sapiens
LEGNPFLTV

SEQ ID NO: 115730 - protein, 9 aa, Homo Sapiens
LEGNPLRTI

SEQ ID NO: 115731 - protein, 9 aa, Homo Sapiens
LEGPPSRNV

SEQ ID NO: 115732 - protein, 9 aa, Homo Sapiens
LEGSEVRTI

SEQ ID NO: 115733 - protein, 9 aa, Homo Sapiens
LEHEGLVSL

SEQ ID NO: 115734 - protein, 9 aa, Homo Sapiens
LEHGADPTV

SEQ ID NO: 115735 - protein, 9 aa, Homo Sapiens
LEHGITLVI

SEQ ID NO: 115736 - protein, 9 aa, Homo Sapiens
LEHIHSNEV

SEQ ID NO: 115737 - protein, 9 aa, Homo Sapiens
LEHKIIIRV

SEQ ID NO: 115738 - protein, 9 aa, Homo Sapiens
LEHLSEETV

SEQ ID NO: 115739 - protein, 9 aa, Homo Sapiens
LEHNYFVSI

SEQ ID NO: 115740 - protein, 9 aa, Homo Sapiens
LEHPFVSSI

SEQ ID NO: 115741 - protein, 9 aa, Homo Sapiens
LEHQLQNII

SEQ ID NO: 115742 - protein, 9 aa, Homo Sapiens
LEHQVFTVL

SEQ ID NO: 115743 - protein, 9 aa, Homo Sapiens
LEHSGIGRI

SEQ ID NO: 115744 - protein, 9 aa, Homo Sapiens
LEHSLPHSV

SEQ ID NO: 115745 - protein, 9 aa, Homo Sapiens
LEHSPFSYL

SEQ ID NO: 115746 - protein, 9 aa, Homo Sapiens
LEHTGFSKA

SEQ ID NO: 115747 - protein, 9 aa, Homo Sapiens
LEHTTLRKV

SEQ ID NO: 115748 - protein, 9 aa, Homo Sapiens
LEIARNPAM

SEQ ID NO: 115749 - protein, 9 aa, Homo Sapiens
LEIEKSLLV

SEQ ID NO: 115750 - protein, 9 aa, Homo Sapiens
LEIEPGKRI

SEQ ID NO: 115751 - protein, 9 aa, Homo Sapiens
LEIGENRLV

SEQ ID NO: 115752 - protein, 9 aa, Homo Sapiens
LEIPAATTI

SEQ ID NO: 115753 - protein, 9 aa, Homo Sapiens
LEIPAVSHV

SEQ ID NO: 115754 - protein, 9 aa, Homo Sapiens
LEIPKGEMV

SEQ ID NO: 115755 - protein, 9 aa, Homo Sapiens
LEISVGKSV

SEQ ID NO: 115756 - protein, 9 aa, Homo Sapiens
LEITARPVL

SEQ ID NO: 115757 - protein, 9 aa, Homo Sapiens
LEITKASHV

SEQ ID NO: 115758 - protein, 9 aa, Homo Sapiens
LEIVEPVTV

SEQ ID NO: 115759 - protein, 9 aa, Homo Sapiens
LEIVKMVMI

SEQ ID NO: 115760 - protein, 9 aa, Homo Sapiens
LEKEQVAHI

SEQ ID NO: 115761 - protein, 9 aa, Homo Sapiens
LEKFFETRV

SEQ ID NO: 115762 - protein, 9 aa, Homo Sapiens
LEKKIGKSI

SEQ ID NO: 115763 - protein, 9 aa, Homo Sapiens
LEKLFLQKI

SEQ ID NO: 115764 - protein, 9 aa, Homo Sapiens
LEKLNDIQL

SEQ ID NO: 115765 - protein, 9 aa, Homo Sapiens
LEKPDFINV

SEQ ID NO: 115766 - protein, 9 aa, Homo Sapiens
LEKPFAVLV

SEQ ID NO: 115767 - protein, 9 aa, Homo Sapiens
LEKSDQTNI

SEQ ID NO: 115768 - protein, 9 aa, Homo Sapiens
LEKSGDLLV

SEQ ID NO: 115769 - protein, 9 aa, Homo Sapiens
LEKSVSQKV

SEQ ID NO: 115770 - protein, 9 aa, Homo Sapiens
LEKVPAELI

SEQ ID NO: 115771 - protein, 9 aa, Homo Sapiens
LELEAPLKI

SEQ ID NO: 115772 - protein, 9 aa, Homo Sapiens
LELEKHIRV

SEQ ID NO: 115773 - protein, 9 aa, Homo Sapiens
LELEQLRSV

SEQ ID NO: 115774 - protein, 9 aa, Homo Sapiens
LELGSGVTV

SEQ ID NO: 115775 - protein, 9 aa, Homo Sapiens
LELKSACQV

SEQ ID NO: 115776 - protein, 9 aa, Homo Sapiens
LELKTATKI

SEQ ID NO: 115777 - protein, 9 aa, Homo Sapiens
LELPGQPSV

SEQ ID NO: 115778 - protein, 9 aa, Homo Sapiens
LEMEHTQQM

SEQ ID NO: 115779 - protein, 9 aa, Homo Sapiens
LEMNPGYEV

SEQ ID NO: 115780 - protein, 9 aa, Homo Sapiens
LENAGCNKI

SEQ ID NO: 115781 - protein, 9 aa, Homo Sapiens
LENDKILQI

SEQ ID NO: 115782 - protein, 9 aa, Homo Sapiens
LENENMMRV

SEQ ID NO: 115783 - protein, 9 aa, Homo Sapiens
LENFPLNTI

SEQ ID NO: 115784 - protein, 9 aa, Homo Sapiens
LENGVPCVI

SEQ ID NO: 115785 - protein, 9 aa, Homo Sapiens
LENIFDWNV

SEQ ID NO: 115786 - protein, 9 aa, Homo Sapiens
LENIRPVLV

SEQ ID NO: 115787 - protein, 9 aa, Homo Sapiens
LENITSKEI

SEQ ID NO: 115788 - protein, 9 aa, Homo Sapiens
LENNRPLLT

SEQ ID NO: 115789 - protein, 9 aa, Homo Sapiens
LENPDFREI

SEQ ID NO: 115790 - protein, 9 aa, Homo Sapiens
LENPSNIRG

SEQ ID NO: 115791 - protein, 9 aa, Homo Sapiens
LENQNKTLI

SEQ ID NO: 115792 - protein, 9 aa, Homo Sapiens
LENSGWQKI

SEQ ID NO: 115793 - protein, 9 aa, Homo Sapiens
LENSKQPSV

SEQ ID NO: 115794 - protein, 9 aa, Homo Sapiens
LENTHLLEV

SEQ ID NO: 115795 - protein, 9 aa, Homo Sapiens
LENVWLHFI

SEQ ID NO: 115796 - protein, 9 aa, Homo Sapiens
LEPGFFTHI

SEQ ID NO: 115797 - protein, 9 aa, Homo Sapiens
LEPGSIRHI

SEQ ID NO: 115798 - protein, 9 aa, Homo Sapiens
LEPSETLVV

SEQ ID NO: 115799 - protein, 9 aa, Homo Sapiens
LEQDFKVTL

SEQ ID NO: 115800 - protein, 9 aa, Homo Sapiens
LEQDFVSRV

SEQ ID NO: 115801 - protein, 9 aa, Homo Sapiens
LEQERQQEI

SEQ ID NO: 115802 - protein, 9 aa, Homo Sapiens
LEQGLFSKV

SEQ ID NO: 115803 - protein, 9 aa, Homo Sapiens
LEQHQVLEV

SEQ ID NO: 115804 - protein, 9 aa, Homo Sapiens
LEQLHAVEI

SEQ ID NO: 115805 - protein, 9 aa, Homo Sapiens
LEQLRPVTV

SEQ ID NO: 115806 - protein, 9 aa, Homo Sapiens
LEQQKPTVI

SEQ ID NO: 115807 - protein, 9 aa, Homo Sapiens
LEQSKCISI

SEQ ID NO: 115808 - protein, 9 aa, Homo Sapiens
LERELYHVI

SEQ ID NO: 115809 - protein, 9 aa, Homo Sapiens
LERESKVVV

SEQ ID NO: 115810 - protein, 9 aa, Homo Sapiens
LERTEGLSV

SEQ ID NO: 115811 - protein, 9 aa, Homo Sapiens
LERYLQRTV

SEQ ID NO: 115812 - protein, 9 aa, Homo Sapiens
LESAHVCLI

SEQ ID NO: 115813 - protein, 9 aa, Homo Sapiens
LESAPVLRT

SEQ ID NO: 115814 - protein, 9 aa, Homo Sapiens
LESDDVLRL

SEQ ID NO: 115815 - protein, 9 aa, Homo Sapiens
LESDPQQVV

SEQ ID NO: 115816 - protein, 9 aa, Homo Sapiens
LESEEFQKI

SEQ ID NO: 115817 - protein, 9 aa, Homo Sapiens
LESHWFVWV

SEQ ID NO: 115818 - protein, 9 aa, Homo Sapiens
LESKLGKTI

SEQ ID NO: 115819 - protein, 9 aa, Homo Sapiens
LESKSVQRV

SEQ ID NO: 115820 - protein, 9 aa, Homo Sapiens
LESLPATHI

SEQ ID NO: 115821 - protein, 9 aa, Homo Sapiens
LESLPEPVI

SEQ ID NO: 115822 - protein, 9 aa, Homo Sapiens
LESLPLSKL

SEQ ID NO: 115823 - protein, 9 aa, Homo Sapiens
LESLPSPTL

SEQ ID NO: 115824 - protein, 9 aa, Homo Sapiens
LESPRPALV

SEQ ID NO: 115825 - protein, 9 aa, Homo Sapiens
LESSAKSKI

SEQ ID NO: 115826 - protein, 9 aa, Homo Sapiens
LESVSLHEV

SEQ ID NO: 115827 - protein, 9 aa, Homo Sapiens
LETIFVRKV

SEQ ID NO: 115828 - protein, 9 aa, Homo Sapiens
LETMFGVKV

SEQ ID NO: 115829 - protein, 9 aa, Homo Sapiens
LETNAPESI

SEQ ID NO: 115830 - protein, 9 aa, Homo Sapiens
LETNVPLLV

SEQ ID NO: 115831 - protein, 9 aa, Homo Sapiens
LETTGGHSV

SEQ ID NO: 115832 - protein, 9 aa, Homo Sapiens
LETTKKLKI

SEQ ID NO: 115833 - protein, 9 aa, Homo Sapiens
LEVDHIRTI

SEQ ID NO: 115834 - protein, 9 aa, Homo Sapiens
LEVDTKKQI

SEQ ID NO: 115835 - protein, 9 aa, Homo Sapiens
LEVECATQL

SEQ ID NO: 115836 - protein, 9 aa, Homo Sapiens
LEVEKSLVL

SEQ ID NO: 115837 - protein, 9 aa, Homo Sapiens
LEVERVEMI

SEQ ID NO: 115838 - protein, 9 aa, Homo Sapiens
LEVGDIVKV

SEQ ID NO: 115839 - protein, 9 aa, Homo Sapiens
LEVIDIFKI

SEQ ID NO: 115840 - protein, 9 aa, Homo Sapiens
LEVILRPKI

SEQ ID NO: 115841 - protein, 9 aa, Homo Sapiens
LEVIPRTLI

SEQ ID NO: 115842 - protein, 9 aa, Homo Sapiens
LEVPATEEI

SEQ ID NO: 115843 - protein, 9 aa, Homo Sapiens
LEVPGLRSV

SEQ ID NO: 115844 - protein, 9 aa, Homo Sapiens
LEVPRSISV

SEQ ID NO: 115845 - protein, 9 aa, Homo Sapiens
LEVPSRVTV

SEQ ID NO: 115846 - protein, 9 aa, Homo Sapiens
LEVQSNPKI

SEQ ID NO: 115847 - protein, 9 aa, Homo Sapiens
LEVRKLMHV

SEQ ID NO: 115848 - protein, 9 aa, Homo Sapiens
LEVTNTIRV

SEQ ID NO: 115849 - protein, 9 aa, Homo Sapiens
LEVVDKSQV

SEQ ID NO: 115850 - protein, 9 aa, Homo Sapiens
LEWGADPHI

SEQ ID NO: 115851 - protein, 9 aa, Homo Sapiens
LEYDQDLSV

SEQ ID NO: 115852 - protein, 9 aa, Homo Sapiens
LEYEDHKTA

SEQ ID NO: 115853 - protein, 9 aa, Homo Sapiens
LEYERQLVL

SEQ ID NO: 115854 - protein, 9 aa, Homo Sapiens
LEYGLPIQV

SEQ ID NO: 115855 - protein, 9 aa, Homo Sapiens
LEYGVPVTL

SEQ ID NO: 115856 - protein, 9 aa, Homo Sapiens
LEYIHALTL

SEQ ID NO: 115857 - protein, 9 aa, Homo Sapiens
LEYNIFEGM

SEQ ID NO: 115858 - protein, 9 aa, Homo Sapiens
LEYPTISLH

SEQ ID NO: 115859 - protein, 9 aa, Homo Sapiens
LPNDHSRVI

SEQ ID NO: 115860 - protein, 9 aa, Homo Sapiens
LQIDNARLA

SEQ ID NO: 115861 - protein, 9 aa, Homo Sapiens
LSLDWKTEI

SEQ ID NO: 115862 - protein, 9 aa, Homo Sapiens
LSRGEANVL

SEQ ID NO: 115863 - protein, 9 aa, Homo Sapiens
LTQALKDNK

SEQ ID NO: 115864 - protein, 9 aa, Homo Sapiens
LTVGNNKTL

SEQ ID NO: 115865 - protein, 9 aa, Homo Sapiens
MEAPAAGLF

SEQ ID NO: 115866 - protein, 9 aa, Homo Sapiens
MEAPKIDRI

SEQ ID NO: 115867 - protein, 9 aa, Homo Sapiens
MEDGGVKLL

SEQ ID NO: 115868 - protein, 9 aa, Homo Sapiens
MEDGPIVKL

SEQ ID NO: 115869 - protein, 9 aa, Homo Sapiens
MEDKNGRFV

SEQ ID NO: 115870 - protein, 9 aa, Homo Sapiens
MEDTGHYSI

SEQ ID NO: 115871 - protein, 9 aa, Homo Sapiens
MEEIGRISI

SEQ ID NO: 115872 - protein, 9 aa, Homo Sapiens
MEEIRNLTV

SEQ ID NO: 115873 - protein, 9 aa, Homo Sapiens
MEELLQNEV

SEQ ID NO: 115874 - protein, 9 aa, Homo Sapiens
MEESGICKV

SEQ ID NO: 115875 - protein, 9 aa, Homo Sapiens
MEFAQISRV

SEQ ID NO: 115876 - protein, 9 aa, Homo Sapiens
MEFERQAEI

SEQ ID NO: 115877 - protein, 9 aa, Homo Sapiens
MEFKAVQQV

SEQ ID NO: 115878 - protein, 9 aa, Homo Sapiens
MEFPKIESV

SEQ ID NO: 115879 - protein, 9 aa, Homo Sapiens
MEGKLTHKI

SEQ ID NO: 115880 - protein, 9 aa, Homo Sapiens
MEHGTVTVV

SEQ ID NO: 115881 - protein, 9 aa, Homo Sapiens
MEHLKSLKI

SEQ ID NO: 115882 - protein, 9 aa, Homo Sapiens
MEHPGLQAI

SEQ ID NO: 115883 - protein, 9 aa, Homo Sapiens
MEHPQRQNV

SEQ ID NO: 115884 - protein, 9 aa, Homo Sapiens
MEHPYFYTV

SEQ ID NO: 115885 - protein, 9 aa, Homo Sapiens
MEIERILGV

SEQ ID NO: 115886 - protein, 9 aa, Homo Sapiens
MEKPSPLLV

SEQ ID NO: 115887 - protein, 9 aa, Homo Sapiens
MELEKPVLI

SEQ ID NO: 115888 - protein, 9 aa, Homo Sapiens
MEMFQPSAV

SEQ ID NO: 115889 - protein, 9 aa, Homo Sapiens
MENDLPQKI

SEQ ID NO: 115890 - protein, 9 aa, Homo Sapiens
MENESVKSV

SEQ ID NO: 115891 - protein, 9 aa, Homo Sapiens
MENGSITSI

SEQ ID NO: 115892 - protein, 9 aa, Homo Sapiens
MEPYYFVEV

SEQ ID NO: 115893 - protein, 9 aa, Homo Sapiens
MEQKTIILI

SEQ ID NO: 115894 - protein, 9 aa, Homo Sapiens
MEQTLPVTV

SEQ ID NO: 115895 - protein, 9 aa, Homo Sapiens
MEQVAHQTI

SEQ ID NO: 115896 - protein, 9 aa, Homo Sapiens
MEQVFEMKV

SEQ ID NO: 115897 - protein, 9 aa, Homo Sapiens
MESDKFICI

SEQ ID NO: 115898 - protein, 9 aa, Homo Sapiens
METAPHTMI

SEQ ID NO: 115899 - protein, 9 aa, Homo Sapiens
METSAKANI

SEQ ID NO: 115900 - protein, 9 aa, Homo Sapiens
MEVLPGRCV

SEQ ID NO: 115901 - protein, 9 aa, Homo Sapiens
MEVPVLPKI

SEQ ID NO: 115902 - protein, 9 aa, Homo Sapiens
MEWTSSSKI

SEQ ID NO: 115903 - protein, 9 aa, Homo Sapiens
MEYDQPLYV

SEQ ID NO: 115904 - protein, 9 aa, Homo Sapiens
MEYFSLEKI

SEQ ID NO: 115905 - protein, 9 aa, Homo Sapiens
MEYPNFEET

SEQ ID NO: 115906 - protein, 9 aa, Homo Sapiens
NEAQLLRKI

SEQ ID NO: 115907 - protein, 9 aa, Homo Sapiens
NEASATKCI

SEQ ID NO: 115908 - protein, 9 aa, Homo Sapiens
NECVVVIRV

SEQ ID NO: 115909 - protein, 9 aa, Homo Sapiens
NEDPATPRV

SEQ ID NO: 115910 - protein, 9 aa, Homo Sapiens
NEGLGQPQV

SEQ ID NO: 115911 - protein, 9 aa, Homo Sapiens
NEIDLFHCI

SEQ ID NO: 115912 - protein, 9 aa, Homo Sapiens
NEISEITSI

SEQ ID NO: 115913 - protein, 9 aa, Homo Sapiens
NEITRLTTV

SEQ ID NO: 115914 - protein, 9 aa, Homo Sapiens
NEIVKLHEI

SEQ ID NO: 115915 - protein, 9 aa, Homo Sapiens
NEKKNFHLV

SEQ ID NO: 115916 - protein, 9 aa, Homo Sapiens
NELDHIMEI

SEQ ID NO: 115917 - protein, 9 aa, Homo Sapiens
NELEKICEI

SEQ ID NO: 115918 - protein, 9 aa, Homo Sapiens
NELERNITI

SEQ ID NO: 115919 - protein, 9 aa, Homo Sapiens
NELPDFPHI

SEQ ID NO: 115920 - protein, 9 aa, Homo Sapiens
NEQPSSPRV

SEQ ID NO: 115921 - protein, 9 aa, Homo Sapiens
NEVDRMVLV

SEQ ID NO: 115922 - protein, 9 aa, Homo Sapiens
NEVPEHPCV

SEQ ID NO: 115923 - protein, 9 aa, Homo Sapiens
NEWIAVNTV

SEQ ID NO: 115924 - protein, 9 aa, Homo Sapiens
NEWVAVNTV

SEQ ID NO: 115925 - protein, 9 aa, Homo Sapiens
NEYHLFFLL

SEQ ID NO: 115926 - protein, 9 aa, Homo Sapiens
NEYLIFQKI

SEQ ID NO: 115927 - protein, 9 aa, Homo Sapiens
NEYVFRETV

SEQ ID NO: 115928 - protein, 9 aa, Homo Sapiens
PEAAEGPEV

SEQ ID NO: 115929 - protein, 9 aa, Homo Sapiens
PEARFLNVI

SEQ ID NO: 115930 - protein, 9 aa, Homo Sapiens
QEACEAYLV

SEQ ID NO: 115931 - protein, 9 aa, Homo Sapiens
QEADKCPTL

SEQ ID NO: 115932 - protein, 9 aa, Homo Sapiens
QEAEPGSRV

SEQ ID NO: 115933 - protein, 9 aa, Homo Sapiens
QEAEPLKQV

SEQ ID NO: 115934 - protein, 9 aa, Homo Sapiens
QEAEPQKQV

SEQ ID NO: 115935 - protein, 9 aa, Homo Sapiens
QEAERARFV

SEQ ID NO: 115936 - protein, 9 aa, Homo Sapiens
QEAFFQCQV

SEQ ID NO: 115937 - protein, 9 aa, Homo Sapiens
QEAKELKKV

SEQ ID NO: 115938 - protein, 9 aa, Homo Sapiens
QEALGVAVI

SEQ ID NO: 115939 - protein, 9 aa, Homo Sapiens
QEAPAVRKL

SEQ ID NO: 115940 - protein, 9 aa, Homo Sapiens
QEAPSVARI

SEQ ID NO: 115941 - protein, 9 aa, Homo Sapiens
QEASEAYLV

SEQ ID NO: 115942 - protein, 9 aa, Homo Sapiens
QEATAGFTI

SEQ ID NO: 115943 - protein, 9 aa, Homo Sapiens
QEATHFPKV

SEQ ID NO: 115944 - protein, 9 aa, Homo Sapiens
QEAVGNIKV

SEQ ID NO: 115945 - protein, 9 aa, Homo Sapiens
QEDLLREMI

SEQ ID NO: 115946 - protein, 9 aa, Homo Sapiens
QEEELTRKV

SEQ ID NO: 115947 - protein, 9 aa, Homo Sapiens
QEEKRQRVI

SEQ ID NO: 115948 - protein, 9 aa, Homo Sapiens
QEERPIRQI

SEQ ID NO: 115949 - protein, 9 aa, Homo Sapiens
QEFDIYREV

SEQ ID NO: 115950 - protein, 9 aa, Homo Sapiens
QEFGILDKV

SEQ ID NO: 115951 - protein, 9 aa, Homo Sapiens
QEFGPISYV

SEQ ID NO: 115952 - protein, 9 aa, Homo Sapiens
QEFPDLENV

SEQ ID NO: 115953 - protein, 9 aa, Homo Sapiens
QEFQNFKTL

SEQ ID NO: 115954 - protein, 9 aa, Homo Sapiens
QEFSFFDKV

SEQ ID NO: 115955 - protein, 9 aa, Homo Sapiens
QEFTELLKV

SEQ ID NO: 115956 - protein, 9 aa, Homo Sapiens
QEGDQILKV

SEQ ID NO: 115957 - protein, 9 aa, Homo Sapiens
QEGHSVPEI

SEQ ID NO: 115958 - protein, 9 aa, Homo Sapiens
QEGYKFCKI

SEQ ID NO: 115959 - protein, 9 aa, Homo Sapiens
QEHGDYSNI

SEQ ID NO: 115960 - protein, 9 aa, Homo Sapiens
QEHITTVVV

SEQ ID NO: 115961 - protein, 9 aa, Homo Sapiens
QEHLDYEII

SEQ ID NO: 115962 - protein, 9 aa, Homo Sapiens
QEHPSIRTL

SEQ ID NO: 115963 - protein, 9 aa, Homo Sapiens
QEIANQKGV

SEQ ID NO: 115964 - protein, 9 aa, Homo Sapiens
QEIEELTKI

SEQ ID NO: 115965 - protein, 9 aa, Homo Sapiens
QEIEKPVAV

SEQ ID NO: 115966 - protein, 9 aa, Homo Sapiens
QEIERLNKL

SEQ ID NO: 115967 - protein, 9 aa, Homo Sapiens
QEIEVRPGI

SEQ ID NO: 115968 - protein, 9 aa, Homo Sapiens
QEIFPAARI

SEQ ID NO: 115969 - protein, 9 aa, Homo Sapiens
QEIISKGLI

SEQ ID NO: 115970 - protein, 9 aa, Homo Sapiens
QEIKSAHKI

SEQ ID NO: 115971 - protein, 9 aa, Homo Sapiens
QEILPALCV

SEQ ID NO: 115972 - protein, 9 aa, Homo Sapiens
QEIPEPLQL

SEQ ID NO: 115973 - protein, 9 aa, Homo Sapiens
QEIPKSRGV

SEQ ID NO: 115974 - protein, 9 aa, Homo Sapiens
QEISQVCQL

SEQ ID NO: 115975 - protein, 9 aa, Homo Sapiens
QEIVTERSV

SEQ ID NO: 115976 - protein, 9 aa, Homo Sapiens
QEKLGLTRI

SEQ ID NO: 115977 - protein, 9 aa, Homo Sapiens
QEKPMHLEI

SEQ ID NO: 115978 - protein, 9 aa, Homo Sapiens
QELEQVLGI

SEQ ID NO: 115979 - protein, 9 aa, Homo Sapiens
QELNELSAI

SEQ ID NO: 115980 - protein, 9 aa, Homo Sapiens
QELPGLPLV

SEQ ID NO: 115981 - protein, 9 aa, Homo Sapiens
QELQEINRV

SEQ ID NO: 115982 - protein, 9 aa, Homo Sapiens
QELQKLRAV

SEQ ID NO: 115983 - protein, 9 aa, Homo Sapiens
QELYFFHEL

SEQ ID NO: 115984 - protein, 9 aa, Homo Sapiens
QEMINFHTI

SEQ ID NO: 115985 - protein, 9 aa, Homo Sapiens
QEMPSLEVI

SEQ ID NO: 115986 - protein, 9 aa, Homo Sapiens
QEMPWNVRM

SEQ ID NO: 115987 - protein, 9 aa, Homo Sapiens
QEMQLIHEI

SEQ ID NO: 115988 - protein, 9 aa, Homo Sapiens
QEMQQGATV

SEQ ID NO: 115989 - protein, 9 aa, Homo Sapiens
QENDFSKRI

SEQ ID NO: 115990 - protein, 9 aa, Homo Sapiens
QENGSLVEI

SEQ ID NO: 115991 - protein, 9 aa, Homo Sapiens
QENKGLREI

SEQ ID NO: 115992 - protein, 9 aa, Homo Sapiens
QENNMMVLV

SEQ ID NO: 115993 - protein, 9 aa, Homo Sapiens
QENTQTPTV

SEQ ID NO: 115994 - protein, 9 aa, Homo Sapiens
QENVSNLVI

SEQ ID NO: 115995 - protein, 9 aa, Homo Sapiens
QEQAVSPKV

SEQ ID NO: 115996 - protein, 9 aa, Homo Sapiens
QEQIGWRNV

SEQ ID NO: 115997 - protein, 9 aa, Homo Sapiens
QEQPAATKI

SEQ ID NO: 115998 - protein, 9 aa, Homo Sapiens
QEQVIAVHI

SEQ ID NO: 115999 - protein, 9 aa, Homo Sapiens
QERHLLVKV

SEQ ID NO: 116000 - protein, 9 aa, Homo Sapiens
QERPGAAAI

SEQ ID NO: 116001 - protein, 9 aa, Homo Sapiens
QESEPFSHI

SEQ ID NO: 116002 - protein, 9 aa, Homo Sapiens
QESNVQLKL

SEQ ID NO: 116003 - protein, 9 aa, Homo Sapiens
QESNVRLKL

SEQ ID NO: 116004 - protein, 9 aa, Homo Sapiens
QESPLFNNV

SEQ ID NO: 116005 - protein, 9 aa, Homo Sapiens
QESRCQPKV

SEQ ID NO: 116006 - protein, 9 aa, Homo Sapiens
QETDSSLVV

SEQ ID NO: 116007 - protein, 9 aa, Homo Sapiens
QETDVRAQI

SEQ ID NO: 116008 - protein, 9 aa, Homo Sapiens
QETELSQRI

SEQ ID NO: 116009 - protein, 9 aa, Homo Sapiens
QETSVIHKI

SEQ ID NO: 116010 - protein, 9 aa, Homo Sapiens
QEVDLQQLI

SEQ ID NO: 116011 - protein, 9 aa, Homo Sapiens
QEVEDRPEV

SEQ ID NO: 116012 - protein, 9 aa, Homo Sapiens
QEVENFKKV

SEQ ID NO: 116013 - protein, 9 aa, Homo Sapiens
QEVGKVIGI

SEQ ID NO: 116014 - protein, 9 aa, Homo Sapiens
QEVIITKFI

SEQ ID NO: 116015 - protein, 9 aa, Homo Sapiens
QEVLEMRKI

SEQ ID NO: 116016 - protein, 9 aa, Homo Sapiens
QEVLKTALI

SEQ ID NO: 116017 - protein, 9 aa, Homo Sapiens
QEVNFQEYV

SEQ ID NO: 116018 - protein, 9 aa, Homo Sapiens
QEVPEKVTV

SEQ ID NO: 116019 - protein, 9 aa, Homo Sapiens
QEVQLMTKI

SEQ ID NO: 116020 - protein, 9 aa, Homo Sapiens
QEVRCPVTV

SEQ ID NO: 116021 - protein, 9 aa, Homo Sapiens
QEVSQLNKI

SEQ ID NO: 116022 - protein, 9 aa, Homo Sapiens
QEVTHSVRI

SEQ ID NO: 116023 - protein, 9 aa, Homo Sapiens
QEWDGLVRI

SEQ ID NO: 116024 - protein, 9 aa, Homo Sapiens
QEWKIPPCI

SEQ ID NO: 116025 - protein, 9 aa, Homo Sapiens
QEYAQVIKM

SEQ ID NO: 116026 - protein, 9 aa, Homo Sapiens
QEYEEFKEL

SEQ ID NO: 116027 - protein, 9 aa, Homo Sapiens
QEYEEVKLV

SEQ ID NO: 116028 - protein, 9 aa, Homo Sapiens
QEYLSGRSI

SEQ ID NO: 116029 - protein, 9 aa, Homo Sapiens
QEYNQFCVI

SEQ ID NO: 116030 - protein, 9 aa, Homo Sapiens
QEYPDLIHI

SEQ ID NO: 116031 - protein, 9 aa, Homo Sapiens
QEYQEKLQV

SEQ ID NO: 116032 - protein, 9 aa, Homo Sapiens
QEYSCVVKM

SEQ ID NO: 116033 - protein, 9 aa, Homo Sapiens
QIKEDFTQL

SEQ ID NO: 116034 - protein, 9 aa, Homo Sapiens
QSEIRSISV

SEQ ID NO: 116035 - protein, 9 aa, Homo Sapiens
READFFWSL

SEQ ID NO: 116036 - protein, 9 aa, Homo Sapiens
READFKETL

SEQ ID NO: 116037 - protein, 9 aa, Homo Sapiens
READLIFLL

SEQ ID NO: 116038 - protein, 9 aa, Homo Sapiens
READPMTKV

SEQ ID NO: 116039 - protein, 9 aa, Homo Sapiens
READRLLSL

SEQ ID NO: 116040 - protein, 9 aa, Homo Sapiens
REAEFTKSI

SEQ ID NO: 116041 - protein, 9 aa, Homo Sapiens
REAEHGPEV

SEQ ID NO: 116042 - protein, 9 aa, Homo Sapiens
REAEIYQTV

SEQ ID NO: 116043 - protein, 9 aa, Homo Sapiens
REAELKQRV

SEQ ID NO: 116044 - protein, 9 aa, Homo Sapiens
REAELQAVL

SEQ ID NO: 116045 - protein, 9 aa, Homo Sapiens
REAELQMLL

SEQ ID NO: 116046 - protein, 9 aa, Homo Sapiens
REAEMRNSI

SEQ ID NO: 116047 - protein, 9 aa, Homo Sapiens
REAEPIPKM

SEQ ID NO: 116048 - protein, 9 aa, Homo Sapiens
REAESFTQL

SEQ ID NO: 116049 - protein, 9 aa, Homo Sapiens
REAFPAHKV

SEQ ID NO: 116050 - protein, 9 aa, Homo Sapiens
REAGITEKV

SEQ ID NO: 116051 - protein, 9 aa, Homo Sapiens
REAKFYRVV

SEQ ID NO: 116052 - protein, 9 aa, Homo Sapiens
REALTHRKI

SEQ ID NO: 116053 - protein, 9 aa, Homo Sapiens
REAPERPSL

SEQ ID NO: 116054 - protein, 9 aa, Homo Sapiens
REAPSPLMI

SEQ ID NO: 116055 - protein, 9 aa, Homo Sapiens
REAQKFALA

SEQ ID NO: 116056 - protein, 9 aa, Homo Sapiens
REASIYTGI

SEQ ID NO: 116057 - protein, 9 aa, Homo Sapiens
REATQILSV

SEQ ID NO: 116058 - protein, 9 aa, Homo Sapiens
REAVHIEKI

SEQ ID NO: 116059 - protein, 9 aa, Homo Sapiens
RECENQLVL

SEQ ID NO: 116060 - protein, 9 aa, Homo Sapiens
RECEVLKKI

SEQ ID NO: 116061 - protein, 9 aa, Homo Sapiens
RECFYIPKI

SEQ ID NO: 116062 - protein, 9 aa, Homo Sapiens
RECTIEATA

SEQ ID NO: 116063 - protein, 9 aa, Homo Sapiens
RECVAGPNI

SEQ ID NO: 116064 - protein, 9 aa, Homo Sapiens
REDAGAEKI

SEQ ID NO: 116065 - protein, 9 aa, Homo Sapiens
REDAVSKEV

SEQ ID NO: 116066 - protein, 9 aa, Homo Sapiens
REDDPVRML

SEQ ID NO: 116067 - protein, 9 aa, Homo Sapiens
REDEKPLVL

SEQ ID NO: 116068 - protein, 9 aa, Homo Sapiens
REDFKTAVV

SEQ ID NO: 116069 - protein, 9 aa, Homo Sapiens
REDGEKTFV

SEQ ID NO: 116070 - protein, 9 aa, Homo Sapiens
REDGSIVIV

SEQ ID NO: 116071 - protein, 9 aa, Homo Sapiens
REDGVTPYM

SEQ ID NO: 116072 - protein, 9 aa, Homo Sapiens
REDITEPAI

SEQ ID NO: 116073 - protein, 9 aa, Homo Sapiens
REDQINRLI

SEQ ID NO: 116074 - protein, 9 aa, Homo Sapiens
REDSITVHI

SEQ ID NO: 116075 - protein, 9 aa, Homo Sapiens
REDVWLPLM

SEQ ID NO: 116076 - protein, 9 aa, Homo Sapiens
REEEAMKQI

SEQ ID NO: 116077 - protein, 9 aa, Homo Sapiens
REEEGTLII

SEQ ID NO: 116078 - protein, 9 aa, Homo Sapiens
REEEKVSAV

SEQ ID NO: 116079 - protein, 9 aa, Homo Sapiens
REEFDLDVV

SEQ ID NO: 116080 - protein, 9 aa, Homo Sapiens
REEIGNRYI

SEQ ID NO: 116081 - protein, 9 aa, Homo Sapiens
REEINFVEI

SEQ ID NO: 116082 - protein, 9 aa, Homo Sapiens
REELQTCLI

SEQ ID NO: 116083 - protein, 9 aa, Homo Sapiens
REEVGNISI

SEQ ID NO: 116084 - protein, 9 aa, Homo Sapiens
REFAIQSQI

SEQ ID NO: 116085 - protein, 9 aa, Homo Sapiens
REFDFFNKI

SEQ ID NO: 116086 - protein, 9 aa, Homo Sapiens
REFDRCRKL

SEQ ID NO: 116087 - protein, 9 aa, Homo Sapiens
REFDVGRHI

SEQ ID NO: 116088 - protein, 9 aa, Homo Sapiens
REFEPMLQV

SEQ ID NO: 116089 - protein, 9 aa, Homo Sapiens
REFERFQEM

SEQ ID NO: 116090 - protein, 9 aa, Homo Sapiens
REFEVIAQI

SEQ ID NO: 116091 - protein, 9 aa, Homo Sapiens
REFFKLQKI

SEQ ID NO: 116092 - protein, 9 aa, Homo Sapiens
REFGKALQL

SEQ ID NO: 116093 - protein, 9 aa, Homo Sapiens
REFGNLTRM

SEQ ID NO: 116094 - protein, 9 aa, Homo Sapiens
REFLFNAIE

SEQ ID NO: 116095 - protein, 9 aa, Homo Sapiens
REFPKFFTF

SEQ ID NO: 116096 - protein, 9 aa, Homo Sapiens
REFPTHRSV

SEQ ID NO: 116097 - protein, 9 aa, Homo Sapiens
REFPTVPLV

SEQ ID NO: 116098 - protein, 9 aa, Homo Sapiens
REFPVISVV

SEQ ID NO: 116099 - protein, 9 aa, Homo Sapiens
REFQNPPQL

SEQ ID NO: 116100 - protein, 9 aa, Homo Sapiens
REFSDFIRV

SEQ ID NO: 116101 - protein, 9 aa, Homo Sapiens
REFVEREVI

SEQ ID NO: 116102 - protein, 9 aa, Homo Sapiens
REFVMQVKV

SEQ ID NO: 116103 - protein, 9 aa, Homo Sapiens
REGDLLFTV

SEQ ID NO: 116104 - protein, 9 aa, Homo Sapiens
REGDVITII

SEQ ID NO: 116105 - protein, 9 aa, Homo Sapiens
REGEWQTMI

SEQ ID NO: 116106 - protein, 9 aa, Homo Sapiens
REGLVVVKV

SEQ ID NO: 116107 - protein, 9 aa, Homo Sapiens
REGPYSISV

SEQ ID NO: 116108 - protein, 9 aa, Homo Sapiens
REGSFKETI

SEQ ID NO: 116109 - protein, 9 aa, Homo Sapiens
REGYCFTEV

SEQ ID NO: 116110 - protein, 9 aa, Homo Sapiens
REHDWNNSI

SEQ ID NO: 116111 - protein, 9 aa, Homo Sapiens
REHESLCHI

SEQ ID NO: 116112 - protein, 9 aa, Homo Sapiens
REHFVFTDI

SEQ ID NO: 116113 - protein, 9 aa, Homo Sapiens
REHGAFDAV

SEQ ID NO: 116114 - protein, 9 aa, Homo Sapiens
REHHEPVMI

SEQ ID NO: 116115 - protein, 9 aa, Homo Sapiens
REHPALRSL

SEQ ID NO: 116116 - protein, 9 aa, Homo Sapiens
REHQFYETL

SEQ ID NO: 116117 - protein, 9 aa, Homo Sapiens
REHTALLKI

SEQ ID NO: 116118 - protein, 9 aa, Homo Sapiens
REHVEAIKI

SEQ ID NO: 116119 - protein, 9 aa, Homo Sapiens
REIAEAKQI

SEQ ID NO: 116120 - protein, 9 aa, Homo Sapiens
REIALLREL

SEQ ID NO: 116121 - protein, 9 aa, Homo Sapiens
REIEATNAV

SEQ ID NO: 116122 - protein, 9 aa, Homo Sapiens
REIEELHKL

SEQ ID NO: 116123 - protein, 9 aa, Homo Sapiens
REIEGDLLL

SEQ ID NO: 116124 - protein, 9 aa, Homo Sapiens
REIEIQAHL

SEQ ID NO: 116125 - protein, 9 aa, Homo Sapiens
REINGMTGL

SEQ ID NO: 116126 - protein, 9 aa, Homo Sapiens
REINYILRV

SEQ ID NO: 116127 - protein, 9 aa, Homo Sapiens
REIPIVHRV

SEQ ID NO: 116128 - protein, 9 aa, Homo Sapiens
REIQEAIAV

SEQ ID NO: 116129 - protein, 9 aa, Homo Sapiens
REIQELGQL

SEQ ID NO: 116130 - protein, 9 aa, Homo Sapiens
REIQKVTKL

SEQ ID NO: 116131 - protein, 9 aa, Homo Sapiens
REIQTAVRL

SEQ ID NO: 116132 - protein, 9 aa, Homo Sapiens
REIVSAAKV

SEQ ID NO: 116133 - protein, 9 aa, Homo Sapiens
REKDLFRSV

SEQ ID NO: 116134 - protein, 9 aa, Homo Sapiens
REKDWVSKI

SEQ ID NO: 116135 - protein, 9 aa, Homo Sapiens
REKEFTVKI

SEQ ID NO: 116136 - protein, 9 aa, Homo Sapiens
REKEFVARV

SEQ ID NO: 116137 - protein, 9 aa, Homo Sapiens
REKITAQSI

SEQ ID NO: 116138 - protein, 9 aa, Homo Sapiens
REKLPSSEV

SEQ ID NO: 116139 - protein, 9 aa, Homo Sapiens
REKPPSSGV

SEQ ID NO: 116140 - protein, 9 aa, Homo Sapiens
REKSTLERI

SEQ ID NO: 116141 - protein, 9 aa, Homo Sapiens
REKYLYQKI

SEQ ID NO: 116142 - protein, 9 aa, Homo Sapiens
RELAHCQKV

SEQ ID NO: 116143 - protein, 9 aa, Homo Sapiens
RELAQPASV

SEQ ID NO: 116144 - protein, 9 aa, Homo Sapiens
RELDRFSVL

SEQ ID NO: 116145 - protein, 9 aa, Homo Sapiens
RELECIREI

SEQ ID NO: 116146 - protein, 9 aa, Homo Sapiens
RELEKLFQL

SEQ ID NO: 116147 - protein, 9 aa, Homo Sapiens
RELENLIGI

SEQ ID NO: 116148 - protein, 9 aa, Homo Sapiens
RELESVCVV

SEQ ID NO: 116149 - protein, 9 aa, Homo Sapiens
RELGEFRTT

SEQ ID NO: 116150 - protein, 9 aa, Homo Sapiens
RELKGAKLV

SEQ ID NO: 116151 - protein, 9 aa, Homo Sapiens
RELKKTQLI

SEQ ID NO: 116152 - protein, 9 aa, Homo Sapiens
RELPTSSAI

SEQ ID NO: 116153 - protein, 9 aa, Homo Sapiens
RELVAIKKV

SEQ ID NO: 116154 - protein, 9 aa, Homo Sapiens
RELYLSAKV

SEQ ID NO: 116155 - protein, 9 aa, Homo Sapiens
REMDEQIRL

SEQ ID NO: 116156 - protein, 9 aa, Homo Sapiens
REMDRETLI

SEQ ID NO: 116157 - protein, 9 aa, Homo Sapiens
REMENYEKI

SEQ ID NO: 116158 - protein, 9 aa, Homo Sapiens
REMGSATSV

SEQ ID NO: 116159 - protein, 9 aa, Homo Sapiens
REMIPFAVV

SEQ ID NO: 116160 - protein, 9 aa, Homo Sapiens
REMLIRVNM

SEQ ID NO: 116161 - protein, 9 aa, Homo Sapiens
REMLQQSKI

SEQ ID NO: 116162 - protein, 9 aa, Homo Sapiens
REMQESVQV

SEQ ID NO: 116163 - protein, 9 aa, Homo Sapiens
RENDCIVRI

SEQ ID NO: 116164 - protein, 9 aa, Homo Sapiens
RENENHLLV

SEQ ID NO: 116165 - protein, 9 aa, Homo Sapiens
RENFCNIHV

SEQ ID NO: 116166 - protein, 9 aa, Homo Sapiens
RENFFPVTV

SEQ ID NO: 116167 - protein, 9 aa, Homo Sapiens
RENGFNIYV

SEQ ID NO: 116168 - protein, 9 aa, Homo Sapiens
RENGKPVTV

SEQ ID NO: 116169 - protein, 9 aa, Homo Sapiens
RENKTAVVV

SEQ ID NO: 116170 - protein, 9 aa, Homo Sapiens
RENPQLKQI

SEQ ID NO: 116171 - protein, 9 aa, Homo Sapiens
RENTFVVKV

SEQ ID NO: 116172 - protein, 9 aa, Homo Sapiens
RENVAVAKL

SEQ ID NO: 116173 - protein, 9 aa, Homo Sapiens
RENVIMSQI

SEQ ID NO: 116174 - protein, 9 aa, Homo Sapiens
RENVNLAQI

SEQ ID NO: 116175 - protein, 9 aa, Homo Sapiens
REPLSLINV

SEQ ID NO: 116176 - protein, 9 aa, Homo Sapiens
REPQGFHKV

SEQ ID NO: 116177 - protein, 9 aa, Homo Sapiens
REPRPFPKL

SEQ ID NO: 116178 - protein, 9 aa, Homo Sapiens
REQDQTLLL

SEQ ID NO: 116179 - protein, 9 aa, Homo Sapiens
REQELFNRI

SEQ ID NO: 116180 - protein, 9 aa, Homo Sapiens
REQEQKVYV

SEQ ID NO: 116181 - protein, 9 aa, Homo Sapiens
REQHFHSQV

SEQ ID NO: 116182 - protein, 9 aa, Homo Sapiens
REQLKKLLV

SEQ ID NO: 116183 - protein, 9 aa, Homo Sapiens
REQSHKVYV

SEQ ID NO: 116184 - protein, 9 aa, Homo Sapiens
REQVVNETV

SEQ ID NO: 116185 - protein, 9 aa, Homo Sapiens
RERADAPSV

SEQ ID NO: 116186 - protein, 9 aa, Homo Sapiens
RERDFLKKV

SEQ ID NO: 116187 - protein, 9 aa, Homo Sapiens
RERGITIDI

SEQ ID NO: 116188 - protein, 9 aa, Homo Sapiens
RERIIPRSV

SEQ ID NO: 116189 - protein, 9 aa, Homo Sapiens
RERWNFDFV

SEQ ID NO: 116190 - protein, 9 aa, Homo Sapiens
RESDLENYI

SEQ ID NO: 116191 - protein, 9 aa, Homo Sapiens
RESERQLRL

SEQ ID NO: 116192 - protein, 9 aa, Homo Sapiens
RESHTHVSV

SEQ ID NO: 116193 - protein, 9 aa, Homo Sapiens
RESIKLVSI

SEQ ID NO: 116194 - protein, 9 aa, Homo Sapiens
RESPPTRDV

SEQ ID NO: 116195 - protein, 9 aa, Homo Sapiens
RESPRPLQL

SEQ ID NO: 116196 - protein, 9 aa, Homo Sapiens
RESQEQSLV

SEQ ID NO: 116197 - protein, 9 aa, Homo Sapiens
RESQLALIV

SEQ ID NO: 116198 - protein, 9 aa, Homo Sapiens
RETAFTHAV

SEQ ID NO: 116199 - protein, 9 aa, Homo Sapiens
RETDCGVHI

SEQ ID NO: 116200 - protein, 9 aa, Homo Sapiens
RETDVAKKI

SEQ ID NO: 116201 - protein, 9 aa, Homo Sapiens
RETEATNAI

SEQ ID NO: 116202 - protein, 9 aa, Homo Sapiens
RETEHCVSL

SEQ ID NO: 116203 - protein, 9 aa, Homo Sapiens
RETFPQRHM

SEQ ID NO: 116204 - protein, 9 aa, Homo Sapiens
RETGYPLAV

SEQ ID NO: 116205 - protein, 9 aa, Homo Sapiens
RETIIMNQI

SEQ ID NO: 116206 - protein, 9 aa, Homo Sapiens
RETIPAKLV

SEQ ID NO: 116207 - protein, 9 aa, Homo Sapiens
RETLLGKVV

SEQ ID NO: 116208 - protein, 9 aa, Homo Sapiens
RETPHSPGV

SEQ ID NO: 116209 - protein, 9 aa, Homo Sapiens
RETPRVTAV

SEQ ID NO: 116210 - protein, 9 aa, Homo Sapiens
RETSHVTMV

SEQ ID NO: 116211 - protein, 9 aa, Homo Sapiens
RETSLAENI

SEQ ID NO: 116212 - protein, 9 aa, Homo Sapiens
RETVIKQTM

SEQ ID NO: 116213 - protein, 9 aa, Homo Sapiens
REVALLRRL

SEQ ID NO: 116214 - protein, 9 aa, Homo Sapiens
REVDEIDEI

SEQ ID NO: 116215 - protein, 9 aa, Homo Sapiens
REVEHFLKA

SEQ ID NO: 116216 - protein, 9 aa, Homo Sapiens
REVEIQSHL

SEQ ID NO: 116217 - protein, 9 aa, Homo Sapiens
REVERALQL

SEQ ID NO: 116218 - protein, 9 aa, Homo Sapiens
REVFKTQGV

SEQ ID NO: 116219 - protein, 9 aa, Homo Sapiens
REVGKALLI

SEQ ID NO: 116220 - protein, 9 aa, Homo Sapiens
REVLELDSI

SEQ ID NO: 116221 - protein, 9 aa, Homo Sapiens
REVLHKFTV

SEQ ID NO: 116222 - protein, 9 aa, Homo Sapiens
REVNYIDKI

SEQ ID NO: 116223 - protein, 9 aa, Homo Sapiens
REVPECLEI

SEQ ID NO: 116224 - protein, 9 aa, Homo Sapiens
REVSQVDTI

SEQ ID NO: 116225 - protein, 9 aa, Homo Sapiens
REVVETPLL

SEQ ID NO: 116226 - protein, 9 aa, Homo Sapiens
REVVFVEDV

SEQ ID NO: 116227 - protein, 9 aa, Homo Sapiens
REVVKHPSV

SEQ ID NO: 116228 - protein, 9 aa, Homo Sapiens
REVVKPAAV

SEQ ID NO: 116229 - protein, 9 aa, Homo Sapiens
REVWLYEQV

SEQ ID NO: 116230 - protein, 9 aa, Homo Sapiens
REYATKTRI

SEQ ID NO: 116231 - protein, 9 aa, Homo Sapiens
REYDVPYHI

SEQ ID NO: 116232 - protein, 9 aa, Homo Sapiens
REYFHKLLI

SEQ ID NO: 116233 - protein, 9 aa, Homo Sapiens
REYGFLRTL

SEQ ID NO: 116234 - protein, 9 aa, Homo Sapiens
REYHTDTTV

SEQ ID NO: 116235 - protein, 9 aa, Homo Sapiens
REYLRVNVV

SEQ ID NO: 116236 - protein, 9 aa, Homo Sapiens
REYMGFIQA

SEQ ID NO: 116237 - protein, 9 aa, Homo Sapiens
REYNEYENI

SEQ ID NO: 116238 - protein, 9 aa, Homo Sapiens
REYPNLVTI

SEQ ID NO: 116239 - protein, 9 aa, Homo Sapiens
REYQDLLNV

SEQ ID NO: 116240 - protein, 9 aa, Homo Sapiens
REYQELMSV

SEQ ID NO: 116241 - protein, 9 aa, Homo Sapiens
REYRLQARI

SEQ ID NO: 116242 - protein, 9 aa, Homo Sapiens
RLDEVLRTL

SEQ ID NO: 116243 - protein, 9 aa, Homo Sapiens
RQIDQFLVV

SEQ ID NO: 116244 - protein, 9 aa, Homo Sapiens
SEADPAPLL

SEQ ID NO: 116245 - protein, 9 aa, Homo Sapiens
SEAEAKAQI

SEQ ID NO: 116246 - protein, 9 aa, Homo Sapiens
SEAEKLTLV

SEQ ID NO: 116247 - protein, 9 aa, Homo Sapiens
SEAEKVYIV

SEQ ID NO: 116248 - protein, 9 aa, Homo Sapiens
SEAFLPQSI

SEQ ID NO: 116249 - protein, 9 aa, Homo Sapiens
SEAGKSTSI

SEQ ID NO: 116250 - protein, 9 aa, Homo Sapiens
SEAGTQPQV

SEQ ID NO: 116251 - protein, 9 aa, Homo Sapiens
SEAIHPNTI

SEQ ID NO: 116252 - protein, 9 aa, Homo Sapiens
SEAIKGAVV

SEQ ID NO: 116253 - protein, 9 aa, Homo Sapiens
SEAIKTSQI

SEQ ID NO: 116254 - protein, 9 aa, Homo Sapiens
SEAKEVRGV

SEQ ID NO: 116255 - protein, 9 aa, Homo Sapiens
SEALEAARI

SEQ ID NO: 116256 - protein, 9 aa, Homo Sapiens
SEAMSVEKI

SEQ ID NO: 116257 - protein, 9 aa, Homo Sapiens
SEAPEAPLL

SEQ ID NO: 116258 - protein, 9 aa, Homo Sapiens
SEAPFLHYL

SEQ ID NO: 116259 - protein, 9 aa, Homo Sapiens
SEAPFTHKV

SEQ ID NO: 116260 - protein, 9 aa, Homo Sapiens
SEAPGPSKV

SEQ ID NO: 116261 - protein, 9 aa, Homo Sapiens
SEAPKEVNI

SEQ ID NO: 116262 - protein, 9 aa, Homo Sapiens
SEAPNEMVI

SEQ ID NO: 116263 - protein, 9 aa, Homo Sapiens
SEAPPSKMV

SEQ ID NO: 116264 - protein, 9 aa, Homo Sapiens
SEAPPTNQA

SEQ ID NO: 116265 - protein, 9 aa, Homo Sapiens
SEAQKIKEV

SEQ ID NO: 116266 - protein, 9 aa, Homo Sapiens
SEAQPARQI

SEQ ID NO: 116267 - protein, 9 aa, Homo Sapiens
SEAQPQPEV

SEQ ID NO: 116268 - protein, 9 aa, Homo Sapiens
SEASDFNKV

SEQ ID NO: 116269 - protein, 9 aa, Homo Sapiens
SEASGFCYV

SEQ ID NO: 116270 - protein, 9 aa, Homo Sapiens
SEATHIITI

SEQ ID NO: 116271 - protein, 9 aa, Homo Sapiens
SEAVNLSKV

SEQ ID NO: 116272 - protein, 9 aa, Homo Sapiens
SECGKFSQL

SEQ ID NO: 116273 - protein, 9 aa, Homo Sapiens
SECGKGFTV

SEQ ID NO: 116274 - protein, 9 aa, Homo Sapiens
SECGKTFTV

SEQ ID NO: 116275 - protein, 9 aa, Homo Sapiens
SECGPFIKL

SEQ ID NO: 116276 - protein, 9 aa, Homo Sapiens
SECIGSALI

SEQ ID NO: 116277 - protein, 9 aa, Homo Sapiens
SECKKLRGV

SEQ ID NO: 116278 - protein, 9 aa, Homo Sapiens
SECPSRVLV

SEQ ID NO: 116279 - protein, 9 aa, Homo Sapiens
SECRLLAYI

SEQ ID NO: 116280 - protein, 9 aa, Homo Sapiens
SECVLNQQV

SEQ ID NO: 116281 - protein, 9 aa, Homo Sapiens
SECVSSKSV

SEQ ID NO: 116282 - protein, 9 aa, Homo Sapiens
SEDAAFNKI

SEQ ID NO: 116283 - protein, 9 aa, Homo Sapiens
SEDDIHRSI

SEQ ID NO: 116284 - protein, 9 aa, Homo Sapiens
SEDDPILQI

SEQ ID NO: 116285 - protein, 9 aa, Homo Sapiens
SEDDRLPVI

SEQ ID NO: 116286 - protein, 9 aa, Homo Sapiens
SEDELKRSV

SEQ ID NO: 116287 - protein, 9 aa, Homo Sapiens
SEDFPRPLV

SEQ ID NO: 116288 - protein, 9 aa, Homo Sapiens
SEDGAIHVI

SEQ ID NO: 116289 - protein, 9 aa, Homo Sapiens
SEDGSLLAV

SEQ ID NO: 116290 - protein, 9 aa, Homo Sapiens
SEDGYQTCV

SEQ ID NO: 116291 - protein, 9 aa, Homo Sapiens
SEDIHIIYI

SEQ ID NO: 116292 - protein, 9 aa, Homo Sapiens
SEDIKNLVV

SEQ ID NO: 116293 - protein, 9 aa, Homo Sapiens
SEDKVRQLV

SEQ ID NO: 116294 - protein, 9 aa, Homo Sapiens
SEDPSHPSM

SEQ ID NO: 116295 - protein, 9 aa, Homo Sapiens
SEDQRTPLM

SEQ ID NO: 116296 - protein, 9 aa, Homo Sapiens
SEDSSVTQI

SEQ ID NO: 116297 - protein, 9 aa, Homo Sapiens
SEDVLRLLI

SEQ ID NO: 116298 - protein, 9 aa, Homo Sapiens
SEDVSRVLI

SEQ ID NO: 116299 - protein, 9 aa, Homo Sapiens
SEDYPRKTI

SEQ ID NO: 116300 - protein, 9 aa, Homo Sapiens
SEEDFLRQV

SEQ ID NO: 116301 - protein, 9 aa, Homo Sapiens
SEEDRVVVI

SEQ ID NO: 116302 - protein, 9 aa, Homo Sapiens
SEEELKTHI

SEQ ID NO: 116303 - protein, 9 aa, Homo Sapiens
SEEGYLAKV

SEQ ID NO: 116304 - protein, 9 aa, Homo Sapiens
SEEKRIYRV

SEQ ID NO: 116305 - protein, 9 aa, Homo Sapiens
SEELCYTLI

SEQ ID NO: 116306 - protein, 9 aa, Homo Sapiens
SEELGYRCV

SEQ ID NO: 116307 - protein, 9 aa, Homo Sapiens
SEELRSRIV

SEQ ID NO: 116308 - protein, 9 aa, Homo Sapiens
SEELRVSKV

SEQ ID NO: 116309 - protein, 9 aa, Homo Sapiens
SEEQFVHHI

SEQ ID NO: 116310 - protein, 9 aa, Homo Sapiens
SEEVVSREV

SEQ ID NO: 116311 - protein, 9 aa, Homo Sapiens
SEFATTNQI

SEQ ID NO: 116312 - protein, 9 aa, Homo Sapiens
SEFDFFERL

SEQ ID NO: 116313 - protein, 9 aa, Homo Sapiens
SEFDRQAEI

SEQ ID NO: 116314 - protein, 9 aa, Homo Sapiens
SEFEGHKRI

SEQ ID NO: 116315 - protein, 9 aa, Homo Sapiens
SEFEIVKAI

SEQ ID NO: 116316 - protein, 9 aa, Homo Sapiens
SEFGAPVSV

SEQ ID NO: 116317 - protein, 9 aa, Homo Sapiens
SEFGKLERV

SEQ ID NO: 116318 - protein, 9 aa, Homo Sapiens
SEFIDSQRV

SEQ ID NO: 116319 - protein, 9 aa, Homo Sapiens
SEFKAMDSI

SEQ ID NO: 116320 - protein, 9 aa, Homo Sapiens
SEFLIEPTV

SEQ ID NO: 116321 - protein, 9 aa, Homo Sapiens
SEFPVRLSV

SEQ ID NO: 116322 - protein, 9 aa, Homo Sapiens
SEFRAFSSF

SEQ ID NO: 116323 - protein, 9 aa, Homo Sapiens
SEFSEPSFI

SEQ ID NO: 116324 - protein, 9 aa, Homo Sapiens
SEFTGTHYI

SEQ ID NO: 116325 - protein, 9 aa, Homo Sapiens
SEFYKHIVL

SEQ ID NO: 116326 - protein, 9 aa, Homo Sapiens
SEFYTLHEV

SEQ ID NO: 116327 - protein, 9 aa, Homo Sapiens
SEGGPPLRI

SEQ ID NO: 116328 - protein, 9 aa, Homo Sapiens
SEGGQLRSI

SEQ ID NO: 116329 - protein, 9 aa, Homo Sapiens
SEGGRTPLM

SEQ ID NO: 116330 - protein, 9 aa, Homo Sapiens
SEGKLEQTV

SEQ ID NO: 116331 - protein, 9 aa, Homo Sapiens
SEGKVFINI

SEQ ID NO: 116332 - protein, 9 aa, Homo Sapiens
SEGNGSHTI

SEQ ID NO: 116333 - protein, 9 aa, Homo Sapiens
SEGPIVATL

SEQ ID NO: 116334 - protein, 9 aa, Homo Sapiens
SEGPKVVSV

SEQ ID NO: 116335 - protein, 9 aa, Homo Sapiens
SEGRDPLTI

SEQ ID NO: 116336 - protein, 9 aa, Homo Sapiens
SEGRPTIEV

SEQ ID NO: 116337 - protein, 9 aa, Homo Sapiens
SEHERQYLL

SEQ ID NO: 116338 - protein, 9 aa, Homo Sapiens
SEHGVGIYV

SEQ ID NO: 116339 - protein, 9 aa, Homo Sapiens
SEHHLQRAI

SEQ ID NO: 116340 - protein, 9 aa, Homo Sapiens
SEHKVFDLV

SEQ ID NO: 116341 - protein, 9 aa, Homo Sapiens
SEHLAAIEI

SEQ ID NO: 116342 - protein, 9 aa, Homo Sapiens
SEHPFVNGV

SEQ ID NO: 116343 - protein, 9 aa, Homo Sapiens
SEHSKVRLV

SEQ ID NO: 116344 - protein, 9 aa, Homo Sapiens
SEHSMDTLL

SEQ ID NO: 116345 - protein, 9 aa, Homo Sapiens
SEHVWVEVV

SEQ ID NO: 116346 - protein, 9 aa, Homo Sapiens
SEIDQINKV

SEQ ID NO: 116347 - protein, 9 aa, Homo Sapiens
SEIDQLFRI

SEQ ID NO: 116348 - protein, 9 aa, Homo Sapiens
SEIERQAQV

SEQ ID NO: 116349 - protein, 9 aa, Homo Sapiens
SEIEYYAML

SEQ ID NO: 116350 - protein, 9 aa, Homo Sapiens
SEIFTDNQI

SEQ ID NO: 116351 - protein, 9 aa, Homo Sapiens
SEIGDASRV

SEQ ID NO: 116352 - protein, 9 aa, Homo Sapiens
SEIHSGNSV

SEQ ID NO: 116353 - protein, 9 aa, Homo Sapiens
SEIIGSMGI

SEQ ID NO: 116354 - protein, 9 aa, Homo Sapiens
SEIIKPCSV

SEQ ID NO: 116355 - protein, 9 aa, Homo Sapiens
SEIILRQEV

SEQ ID NO: 116356 - protein, 9 aa, Homo Sapiens
SEIKGVCSV

SEQ ID NO: 116357 - protein, 9 aa, Homo Sapiens
SEIKSIPGV

SEQ ID NO: 116358 - protein, 9 aa, Homo Sapiens
SEIKTSIEV

SEQ ID NO: 116359 - protein, 9 aa, Homo Sapiens
SEILCGKEI

SEQ ID NO: 116360 - protein, 9 aa, Homo Sapiens
SEILRMERI

SEQ ID NO: 116361 - protein, 9 aa, Homo Sapiens
SEINCMIRV

SEQ ID NO: 116362 - protein, 9 aa, Homo Sapiens
SEINIAPRI

SEQ ID NO: 116363 - protein, 9 aa, Homo Sapiens
SEINSLPTI

SEQ ID NO: 116364 - protein, 9 aa, Homo Sapiens
SEIPKLPAV

SEQ ID NO: 116365 - protein, 9 aa, Homo Sapiens
SEIQNVLGV

SEQ ID NO: 116366 - protein, 9 aa, Homo Sapiens
SEIRELENI

SEQ ID NO: 116367 - protein, 9 aa, Homo Sapiens
SEIRHLLTL

SEQ ID NO: 116368 - protein, 9 aa, Homo Sapiens
SEISQVFEI

SEQ ID NO: 116369 - protein, 9 aa, Homo Sapiens
SEISSATKL

SEQ ID NO: 116370 - protein, 9 aa, Homo Sapiens
SEITGLSTA

SEQ ID NO: 116371 - protein, 9 aa, Homo Sapiens
SEIVMEHSI

SEQ ID NO: 116372 - protein, 9 aa, Homo Sapiens
SEIYLPEVV

SEQ ID NO: 116373 - protein, 9 aa, Homo Sapiens
SEKDIFDYI

SEQ ID NO: 116374 - protein, 9 aa, Homo Sapiens
SEKEATPVV

SEQ ID NO: 116375 - protein, 9 aa, Homo Sapiens
SEKEFKAYV

SEQ ID NO: 116376 - protein, 9 aa, Homo Sapiens
SEKILLLCV

SEQ ID NO: 116377 - protein, 9 aa, Homo Sapiens
SEKISLQAI

SEQ ID NO: 116378 - protein, 9 aa, Homo Sapiens
SEKLNLDSI

SEQ ID NO: 116379 - protein, 9 aa, Homo Sapiens
SEKPTVTTV

SEQ ID NO: 116380 - protein, 9 aa, Homo Sapiens
SEKQYTIYI

SEQ ID NO: 116381 - protein, 9 aa, Homo Sapiens
SEKRKQISV

SEQ ID NO: 116382 - protein, 9 aa, Homo Sapiens
SEKSNLIRI

SEQ ID NO: 116383 - protein, 9 aa, Homo Sapiens
SELADARRV

SEQ ID NO: 116384 - protein, 9 aa, Homo Sapiens
SELDASKTV

SEQ ID NO: 116385 - protein, 9 aa, Homo Sapiens
SELDLISRL

SEQ ID NO: 116386 - protein, 9 aa, Homo Sapiens
SELDVPFKV

SEQ ID NO: 116387 - protein, 9 aa, Homo Sapiens
SELEKPQKV

SEQ ID NO: 116388 - protein, 9 aa, Homo Sapiens
SELEKQKGV

SEQ ID NO: 116389 - protein, 9 aa, Homo Sapiens
SELERESKV

SEQ ID NO: 116390 - protein, 9 aa, Homo Sapiens
SELERPHKV

SEQ ID NO: 116391 - protein, 9 aa, Homo Sapiens
SELGGIWSV

SEQ ID NO: 116392 - protein, 9 aa, Homo Sapiens
SELGKICSV

SEQ ID NO: 116393 - protein, 9 aa, Homo Sapiens
SELIPGTTV

SEQ ID NO: 116394 - protein, 9 aa, Homo Sapiens
SELITHQRI

SEQ ID NO: 116395 - protein, 9 aa, Homo Sapiens
SELPHCLEV

SEQ ID NO: 116396 - protein, 9 aa, Homo Sapiens
SELPKPSSI

SEQ ID NO: 116397 - protein, 9 aa, Homo Sapiens
SELPMPLLI

SEQ ID NO: 116398 - protein, 9 aa, Homo Sapiens
SELPRIPKI

SEQ ID NO: 116399 - protein, 9 aa, Homo Sapiens
SELPTTVTV

SEQ ID NO: 116400 - protein, 9 aa, Homo Sapiens
SELRSMLEV

SEQ ID NO: 116401 - protein, 9 aa, Homo Sapiens
SELSPGRSV

SEQ ID NO: 116402 - protein, 9 aa, Homo Sapiens
SELYRPSFV

SEQ ID NO: 116403 - protein, 9 aa, Homo Sapiens
SEMAPVCAV

SEQ ID NO: 116404 - protein, 9 aa, Homo Sapiens
SEMDRVPFV

SEQ ID NO: 116405 - protein, 9 aa, Homo Sapiens
SEMERVRLV

SEQ ID NO: 116406 - protein, 9 aa, Homo Sapiens
SEMGVMPEI

SEQ ID NO: 116407 - protein, 9 aa, Homo Sapiens
SEMHSFIQI

SEQ ID NO: 116408 - protein, 9 aa, Homo Sapiens
SEMRAPPAA

SEQ ID NO: 116409 - protein, 9 aa, Homo Sapiens
SEMSRVIRV

SEQ ID NO: 116410 - protein, 9 aa, Homo Sapiens
SEMTQVKEV

SEQ ID NO: 116411 - protein, 9 aa, Homo Sapiens
SENDVIRLI

SEQ ID NO: 116412 - protein, 9 aa, Homo Sapiens
SENEDFRCI

SEQ ID NO: 116413 - protein, 9 aa, Homo Sapiens
SENEEFVEV

SEQ ID NO: 116414 - protein, 9 aa, Homo Sapiens
SENGALPVV

SEQ ID NO: 116415 - protein, 9 aa, Homo Sapiens
SENGWLKAV

SEQ ID NO: 116416 - protein, 9 aa, Homo Sapiens
SENKAFISV

SEQ ID NO: 116417 - protein, 9 aa, Homo Sapiens
SENLPERSV

SEQ ID NO: 116418 - protein, 9 aa, Homo Sapiens
SENPGNKTI

SEQ ID NO: 116419 - protein, 9 aa, Homo Sapiens
SENPPSFTI

SEQ ID NO: 116420 - protein, 9 aa, Homo Sapiens
SENPVLQNI

SEQ ID NO: 116421 - protein, 9 aa, Homo Sapiens
SENPVPLTV

SEQ ID NO: 116422 - protein, 9 aa, Homo Sapiens
SENQPFPSL

SEQ ID NO: 116423 - protein, 9 aa, Homo Sapiens
SENRDLKTV

SEQ ID NO: 116424 - protein, 9 aa, Homo Sapiens
SENVNKLLV

SEQ ID NO: 116425 - protein, 9 aa, Homo Sapiens
SEPMLSHTV

SEQ ID NO: 116426 - protein, 9 aa, Homo Sapiens
SEQEHFLIV

SEQ ID NO: 116427 - protein, 9 aa, Homo Sapiens
SEQNDILKV

SEQ ID NO: 116428 - protein, 9 aa, Homo Sapiens
SEQQALHTV

SEQ ID NO: 116429 - protein, 9 aa, Homo Sapiens
SEQSRSVNI

SEQ ID NO: 116430 - protein, 9 aa, Homo Sapiens
SEQTFMYYV

SEQ ID NO: 116431 - protein, 9 aa, Homo Sapiens
SEQTGLLKI

SEQ ID NO: 116432 - protein, 9 aa, Homo Sapiens
SERDFFQEV

SEQ ID NO: 116433 - protein, 9 aa, Homo Sapiens
SERELFNAV

SEQ ID NO: 116434 - protein, 9 aa, Homo Sapiens
SERETAVRI

SEQ ID NO: 116435 - protein, 9 aa, Homo Sapiens
SERGNLVAV

SEQ ID NO: 116436 - protein, 9 aa, Homo Sapiens
SERPKEIKV

SEQ ID NO: 116437 - protein, 9 aa, Homo Sapiens
SERYTWIVL

SEQ ID NO: 116438 - protein, 9 aa, Homo Sapiens
SESAAVKEI

SEQ ID NO: 116439 - protein, 9 aa, Homo Sapiens
SESALLKCI

SEQ ID NO: 116440 - protein, 9 aa, Homo Sapiens
SESEIVPKV

SEQ ID NO: 116441 - protein, 9 aa, Homo Sapiens
SESEKQWKA

SEQ ID NO: 116442 - protein, 9 aa, Homo Sapiens
SESFIQHIV

SEQ ID NO: 116443 - protein, 9 aa, Homo Sapiens
SESNAPLLI

SEQ ID NO: 116444 - protein, 9 aa, Homo Sapiens
SESPDHYLV

SEQ ID NO: 116445 - protein, 9 aa, Homo Sapiens
SESPGKLHV

SEQ ID NO: 116446 - protein, 9 aa, Homo Sapiens
SESPIVVVL

SEQ ID NO: 116447 - protein, 9 aa, Homo Sapiens
SESPRPCSL

SEQ ID NO: 116448 - protein, 9 aa, Homo Sapiens
SESSFFAKI

SEQ ID NO: 116449 - protein, 9 aa, Homo Sapiens
SESSTVRTV

SEQ ID NO: 116450 - protein, 9 aa, Homo Sapiens
SESVLRTQI

SEQ ID NO: 116451 - protein, 9 aa, Homo Sapiens
SETDMVRQI

SEQ ID NO: 116452 - protein, 9 aa, Homo Sapiens
SETEGTPKL

SEQ ID NO: 116453 - protein, 9 aa, Homo Sapiens
SETESMLKI

SEQ ID NO: 116454 - protein, 9 aa, Homo Sapiens
SETLIIPRV

SEQ ID NO: 116455 - protein, 9 aa, Homo Sapiens
SETPQLFTV

SEQ ID NO: 116456 - protein, 9 aa, Homo Sapiens
SETPTFAKV

SEQ ID NO: 116457 - protein, 9 aa, Homo Sapiens
SETSSVSHI

SEQ ID NO: 116458 - protein, 9 aa, Homo Sapiens
SETTSTRKI

SEQ ID NO: 116459 - protein, 9 aa, Homo Sapiens
SETVKAAKV

SEQ ID NO: 116460 - protein, 9 aa, Homo Sapiens
SEVASGQKI

SEQ ID NO: 116461 - protein, 9 aa, Homo Sapiens
SEVDKVVEV

SEQ ID NO: 116462 - protein, 9 aa, Homo Sapiens
SEVDNWRII

SEQ ID NO: 116463 - protein, 9 aa, Homo Sapiens
SEVEGVKNI

SEQ ID NO: 116464 - protein, 9 aa, Homo Sapiens
SEVEQYVKV

SEQ ID NO: 116465 - protein, 9 aa, Homo Sapiens
SEVERPASI

SEQ ID NO: 116466 - protein, 9 aa, Homo Sapiens
SEVEVKNEI

SEQ ID NO: 116467 - protein, 9 aa, Homo Sapiens
SEVFEAINI

SEQ ID NO: 116468 - protein, 9 aa, Homo Sapiens
SEVFHQAMV

SEQ ID NO: 116469 - protein, 9 aa, Homo Sapiens
SEVGDTQVV

SEQ ID NO: 116470 - protein, 9 aa, Homo Sapiens
SEVGHWRHI

SEQ ID NO: 116471 - protein, 9 aa, Homo Sapiens
SEVGKAGHI

SEQ ID NO: 116472 - protein, 9 aa, Homo Sapiens
SEVGKLLSA

SEQ ID NO: 116473 - protein, 9 aa, Homo Sapiens
SEVGKTPTL

SEQ ID NO: 116474 - protein, 9 aa, Homo Sapiens
SEVHSPPNV

SEQ ID NO: 116475 - protein, 9 aa, Homo Sapiens
SEVISQHLV

SEQ ID NO: 116476 - protein, 9 aa, Homo Sapiens
SEVKIQTHI

SEQ ID NO: 116477 - protein, 9 aa, Homo Sapiens
SEVKPKMVV

SEQ ID NO: 116478 - protein, 9 aa, Homo Sapiens
SEVKPPRDI

SEQ ID NO: 116479 - protein, 9 aa, Homo Sapiens
SEVKRIRSI

SEQ ID NO: 116480 - protein, 9 aa, Homo Sapiens
SEVLHQVFI

SEQ ID NO: 116481 - protein, 9 aa, Homo Sapiens
SEVPGGQSV

SEQ ID NO: 116482 - protein, 9 aa, Homo Sapiens
SEVPNGKEV

SEQ ID NO: 116483 - protein, 9 aa, Homo Sapiens
SEVPSSSGI

SEQ ID NO: 116484 - protein, 9 aa, Homo Sapiens
SEVQKVLQI

SEQ ID NO: 116485 - protein, 9 aa, Homo Sapiens
SEVQLKQHI

SEQ ID NO: 116486 - protein, 9 aa, Homo Sapiens
SEVSKIVTV

SEQ ID NO: 116487 - protein, 9 aa, Homo Sapiens
SEVSQLNHI

SEQ ID NO: 116488 - protein, 9 aa, Homo Sapiens
SEVSTAVRI

SEQ ID NO: 116489 - protein, 9 aa, Homo Sapiens
SEVSTVLKL

SEQ ID NO: 116490 - protein, 9 aa, Homo Sapiens
SEVSWISSI

SEQ ID NO: 116491 - protein, 9 aa, Homo Sapiens
SEVTAALRV

SEQ ID NO: 116492 - protein, 9 aa, Homo Sapiens
SEVTDPLSV

SEQ ID NO: 116493 - protein, 9 aa, Homo Sapiens
SEVTPAMQI

SEQ ID NO: 116494 - protein, 9 aa, Homo Sapiens
SEVYLFSHV

SEQ ID NO: 116495 - protein, 9 aa, Homo Sapiens
SEWDGIVTV

SEQ ID NO: 116496 - protein, 9 aa, Homo Sapiens
SEWKSGTKV

SEQ ID NO: 116497 - protein, 9 aa, Homo Sapiens
SEYARPHVM

SEQ ID NO: 116498 - protein, 9 aa, Homo Sapiens
SEYDQIRYI

SEQ ID NO: 116499 - protein, 9 aa, Homo Sapiens
SEYFRDLFI

SEQ ID NO: 116500 - protein, 9 aa, Homo Sapiens
SEYGFAEKV

SEQ ID NO: 116501 - protein, 9 aa, Homo Sapiens
SEYKINNKV

SEQ ID NO: 116502 - protein, 9 aa, Homo Sapiens
SEYLKLGYV

SEQ ID NO: 116503 - protein, 9 aa, Homo Sapiens
SEYLPTLWV

SEQ ID NO: 116504 - protein, 9 aa, Homo Sapiens
SEYMQAERI

SEQ ID NO: 116505 - protein, 9 aa, Homo Sapiens
SEYNNFKSM

SEQ ID NO: 116506 - protein, 9 aa, Homo Sapiens
SEYNPWRKL

SEQ ID NO: 116507 - protein, 9 aa, Homo Sapiens
SEYPVILSI

SEQ ID NO: 116508 - protein, 9 aa, Homo Sapiens
SEYQRFAVM

SEQ ID NO: 116509 - protein, 9 aa, Homo Sapiens
SEYSQSPKM

SEQ ID NO: 116510 - protein, 9 aa, Homo Sapiens
SEYSVHSSL

SEQ ID NO: 116511 - protein, 9 aa, Homo Sapiens
SEYTSGHSV

SEQ ID NO: 116512 - protein, 9 aa, Homo Sapiens
TEADGKSYV

SEQ ID NO: 116513 - protein, 9 aa, Homo Sapiens
TEAEKIAKV

SEQ ID NO: 116514 - protein, 9 aa, Homo Sapiens
TEAEKQMLV

SEQ ID NO: 116515 - protein, 9 aa, Homo Sapiens
TEAELIRGI

SEQ ID NO: 116516 - protein, 9 aa, Homo Sapiens
TEAEVRGLC

SEQ ID NO: 116517 - protein, 9 aa, Homo Sapiens
TEAHPLPVL

SEQ ID NO: 116518 - protein, 9 aa, Homo Sapiens
TEAIPGAKI

SEQ ID NO: 116519 - protein, 9 aa, Homo Sapiens
TEAKLVRKV

SEQ ID NO: 116520 - protein, 9 aa, Homo Sapiens
TEALPVKLI

SEQ ID NO: 116521 - protein, 9 aa, Homo Sapiens
TEAPAAVVI

SEQ ID NO: 116522 - protein, 9 aa, Homo Sapiens
TEAPPIIFA

SEQ ID NO: 116523 - protein, 9 aa, Homo Sapiens
TEAPTQVTV

SEQ ID NO: 116524 - protein, 9 aa, Homo Sapiens
TEAPVPVSV

SEQ ID NO: 116525 - protein, 9 aa, Homo Sapiens
TEASFQKVI

SEQ ID NO: 116526 - protein, 9 aa, Homo Sapiens
TECGKAFRV

SEQ ID NO: 116527 - protein, 9 aa, Homo Sapiens
TEDAKPVKI

SEQ ID NO: 116528 - protein, 9 aa, Homo Sapiens
TEDDKQLLL

SEQ ID NO: 116529 - protein, 9 aa, Homo Sapiens
TEDEVERVI

SEQ ID NO: 116530 - protein, 9 aa, Homo Sapiens
TEDHVMHLL

SEQ ID NO: 116531 - protein, 9 aa, Homo Sapiens
TEDIPIILV

SEQ ID NO: 116532 - protein, 9 aa, Homo Sapiens
TEDNGFHAI

SEQ ID NO: 116533 - protein, 9 aa, Homo Sapiens
TEDPHTVLV

SEQ ID NO: 116534 - protein, 9 aa, Homo Sapiens
TEDPNQLTV

SEQ ID NO: 116535 - protein, 9 aa, Homo Sapiens
TEDPRVFKV

SEQ ID NO: 116536 - protein, 9 aa, Homo Sapiens
TEDPSVHEI

SEQ ID NO: 116537 - protein, 9 aa, Homo Sapiens
TEDPTILRI

SEQ ID NO: 116538 - protein, 9 aa, Homo Sapiens
TEDQRFPQL

SEQ ID NO: 116539 - protein, 9 aa, Homo Sapiens
TEDSHLSTV

SEQ ID NO: 116540 - protein, 9 aa, Homo Sapiens
TEDSKRIAV

SEQ ID NO: 116541 - protein, 9 aa, Homo Sapiens
TEDSPGLKV

SEQ ID NO: 116542 - protein, 9 aa, Homo Sapiens
TEDVPMILV

SEQ ID NO: 116543 - protein, 9 aa, Homo Sapiens
TEDVPRKLL

SEQ ID NO: 116544 - protein, 9 aa, Homo Sapiens
TEDYYVHLI

SEQ ID NO: 116545 - protein, 9 aa, Homo Sapiens
TEEEKRTLI

SEQ ID NO: 116546 - protein, 9 aa, Homo Sapiens
TEEERLVTI

SEQ ID NO: 116547 - protein, 9 aa, Homo Sapiens
TEEKSVRQI

SEQ ID NO: 116548 - protein, 9 aa, Homo Sapiens
TEENKALKI

SEQ ID NO: 116549 - protein, 9 aa, Homo Sapiens
TEEVSKNLV

SEQ ID NO: 116550 - protein, 9 aa, Homo Sapiens
TEFDQLRSI

SEQ ID NO: 116551 - protein, 9 aa, Homo Sapiens
TEFDRLNEI

SEQ ID NO: 116552 - protein, 9 aa, Homo Sapiens
TEFDRQAEV

SEQ ID NO: 116553 - protein, 9 aa, Homo Sapiens
TEFGHPAAI

SEQ ID NO: 116554 - protein, 9 aa, Homo Sapiens
TEFHELEKI

SEQ ID NO: 116555 - protein, 9 aa, Homo Sapiens
TEFHHVRTL

SEQ ID NO: 116556 - protein, 9 aa, Homo Sapiens
TEFPTVLDI

SEQ ID NO: 116557 - protein, 9 aa, Homo Sapiens
TEFQHPCFL

SEQ ID NO: 116558 - protein, 9 aa, Homo Sapiens
TEFTPPGCI

SEQ ID NO: 116559 - protein, 9 aa, Homo Sapiens
TEFYEQESI

SEQ ID NO: 116560 - protein, 9 aa, Homo Sapiens
TEGIPVLIV

SEQ ID NO: 116561 - protein, 9 aa, Homo Sapiens
TEGPFVERV

SEQ ID NO: 116562 - protein, 9 aa, Homo Sapiens
TEGQGTPKL

SEQ ID NO: 116563 - protein, 9 aa, Homo Sapiens
TEGVPSTAI

SEQ ID NO: 116564 - protein, 9 aa, Homo Sapiens
TEHAHQVVV

SEQ ID NO: 116565 - protein, 9 aa, Homo Sapiens
TEHGEFLAL

SEQ ID NO: 116566 - protein, 9 aa, Homo Sapiens
TEHTEVREI

SEQ ID NO: 116567 - protein, 9 aa, Homo Sapiens
TEHYDIPKV

SEQ ID NO: 116568 - protein, 9 aa, Homo Sapiens
TEIAKFLKV

SEQ ID NO: 116569 - protein, 9 aa, Homo Sapiens
TEIDEKEYI

SEQ ID NO: 116570 - protein, 9 aa, Homo Sapiens
TEIDPICAL

SEQ ID NO: 116571 - protein, 9 aa, Homo Sapiens
TEIDWKAYM

SEQ ID NO: 116572 - protein, 9 aa, Homo Sapiens
TEIEDMPTL

SEQ ID NO: 116573 - protein, 9 aa, Homo Sapiens
TEIEGSKLV

SEQ ID NO: 116574 - protein, 9 aa, Homo Sapiens
TEIEGTQKL

SEQ ID NO: 116575 - protein, 9 aa, Homo Sapiens
TEIEKARAV

SEQ ID NO: 116576 - protein, 9 aa, Homo Sapiens
TEIEKSISA

SEQ ID NO: 116577 - protein, 9 aa, Homo Sapiens
TEIFSGKSV

SEQ ID NO: 116578 - protein, 9 aa, Homo Sapiens
TEIFYHRGV

SEQ ID NO: 116579 - protein, 9 aa, Homo Sapiens
TEIGPRMTL

SEQ ID NO: 116580 - protein, 9 aa, Homo Sapiens
TEIGTMISV

SEQ ID NO: 116581 - protein, 9 aa, Homo Sapiens
TEIHNINII

SEQ ID NO: 116582 - protein, 9 aa, Homo Sapiens
TEIIGGVVV

SEQ ID NO: 116583 - protein, 9 aa, Homo Sapiens
TEIIKTAKI

SEQ ID NO: 116584 - protein, 9 aa, Homo Sapiens
TEIIPKSAV

SEQ ID NO: 116585 - protein, 9 aa, Homo Sapiens
TEIKKIPGI

SEQ ID NO: 116586 - protein, 9 aa, Homo Sapiens
TEILGTQEI

SEQ ID NO: 116587 - protein, 9 aa, Homo Sapiens
TEINFTQKL

SEQ ID NO: 116588 - protein, 9 aa, Homo Sapiens
TEIPPGAVI

SEQ ID NO: 116589 - protein, 9 aa, Homo Sapiens
TEIPQIVEI

SEQ ID NO: 116590 - protein, 9 aa, Homo Sapiens
TEIPTAITI

SEQ ID NO: 116591 - protein, 9 aa, Homo Sapiens
TEIPTKITI

SEQ ID NO: 116592 - protein, 9 aa, Homo Sapiens
TEIQLVQSL

SEQ ID NO: 116593 - protein, 9 aa, Homo Sapiens
TEIRGPVTI

SEQ ID NO: 116594 - protein, 9 aa, Homo Sapiens
TEISSAEKV

SEQ ID NO: 116595 - protein, 9 aa, Homo Sapiens
TEITHAVVI

SEQ ID NO: 116596 - protein, 9 aa, Homo Sapiens
TEKAPEPHV

SEQ ID NO: 116597 - protein, 9 aa, Homo Sapiens
TEKDFLEAV

SEQ ID NO: 116598 - protein, 9 aa, Homo Sapiens
TEKDPSYFV

SEQ ID NO: 116599 - protein, 9 aa, Homo Sapiens
TEKEDFIEL

SEQ ID NO: 116600 - protein, 9 aa, Homo Sapiens
TEKGGLVEV

SEQ ID NO: 116601 - protein, 9 aa, Homo Sapiens
TEKHFFHKV

SEQ ID NO: 116602 - protein, 9 aa, Homo Sapiens
TEKPSLMQV

SEQ ID NO: 116603 - protein, 9 aa, Homo Sapiens
TEKQWLRAI

SEQ ID NO: 116604 - protein, 9 aa, Homo Sapiens
TEKQYIATI

SEQ ID NO: 116605 - protein, 9 aa, Homo Sapiens
TELDHIMEV

SEQ ID NO: 116606 - protein, 9 aa, Homo Sapiens
TELDRVHIV

SEQ ID NO: 116607 - protein, 9 aa, Homo Sapiens
TELIKVDKV

SEQ ID NO: 116608 - protein, 9 aa, Homo Sapiens
TELISVSEV

SEQ ID NO: 116609 - protein, 9 aa, Homo Sapiens
TELKGLSKI

SEQ ID NO: 116610 - protein, 9 aa, Homo Sapiens
TELKQVAYI

SEQ ID NO: 116611 - protein, 9 aa, Homo Sapiens
TELLTTQRV

SEQ ID NO: 116612 - protein, 9 aa, Homo Sapiens
TELPKKTEV

SEQ ID NO: 116613 - protein, 9 aa, Homo Sapiens
TELPQTSHV

SEQ ID NO: 116614 - protein, 9 aa, Homo Sapiens
TELQDVQRI

SEQ ID NO: 116615 - protein, 9 aa, Homo Sapiens
TELQQVILI

SEQ ID NO: 116616 - protein, 9 aa, Homo Sapiens
TELSGKCVV

SEQ ID NO: 116617 - protein, 9 aa, Homo Sapiens
TELTNLIKI

SEQ ID NO: 116618 - protein, 9 aa, Homo Sapiens
TELTQNALI

SEQ ID NO: 116619 - protein, 9 aa, Homo Sapiens
TEMPCQALV

SEQ ID NO: 116620 - protein, 9 aa, Homo Sapiens
TENASEVKI

SEQ ID NO: 116621 - protein, 9 aa, Homo Sapiens
TENCFWIKV

SEQ ID NO: 116622 - protein, 9 aa, Homo Sapiens
TENFYFREI

SEQ ID NO: 116623 - protein, 9 aa, Homo Sapiens
TENHLIRKI

SEQ ID NO: 116624 - protein, 9 aa, Homo Sapiens
TENIRVTVI

SEQ ID NO: 116625 - protein, 9 aa, Homo Sapiens
TENKELKTV

SEQ ID NO: 116626 - protein, 9 aa, Homo Sapiens
TENTRFCLI

SEQ ID NO: 116627 - protein, 9 aa, Homo Sapiens
TEQATVTMV

SEQ ID NO: 116628 - protein, 9 aa, Homo Sapiens
TEQDRVFFI

SEQ ID NO: 116629 - protein, 9 aa, Homo Sapiens
TEQERGVGI

SEQ ID NO: 116630 - protein, 9 aa, Homo Sapiens
TEQPSHSQV

SEQ ID NO: 116631 - protein, 9 aa, Homo Sapiens
TEQQPQPYV

SEQ ID NO: 116632 - protein, 9 aa, Homo Sapiens
TEQVIISRV

SEQ ID NO: 116633 - protein, 9 aa, Homo Sapiens
TEQYKWLEI

SEQ ID NO: 116634 - protein, 9 aa, Homo Sapiens
TERAFIHRL

SEQ ID NO: 116635 - protein, 9 aa, Homo Sapiens
TEREKFWKI

SEQ ID NO: 116636 - protein, 9 aa, Homo Sapiens
TERKDFIKT

SEQ ID NO: 116637 - protein, 9 aa, Homo Sapiens
TERLIKHAV

SEQ ID NO: 116638 - protein, 9 aa, Homo Sapiens
TERPDWQNV

SEQ ID NO: 116639 - protein, 9 aa, Homo Sapiens
TERSRVITV

SEQ ID NO: 116640 - protein, 9 aa, Homo Sapiens
TESKTVIKV

SEQ ID NO: 116641 - protein, 9 aa, Homo Sapiens
TESLFFDKV

SEQ ID NO: 116642 - protein, 9 aa, Homo Sapiens
TESLKSPKV

SEQ ID NO: 116643 - protein, 9 aa, Homo Sapiens
TESNQKLGL

SEQ ID NO: 116644 - protein, 9 aa, Homo Sapiens
TESPQRVII

SEQ ID NO: 116645 - protein, 9 aa, Homo Sapiens
TESSPVSAV

SEQ ID NO: 116646 - protein, 9 aa, Homo Sapiens
TESTPITAV

SEQ ID NO: 116647 - protein, 9 aa, Homo Sapiens
TETEKFSGV

SEQ ID NO: 116648 - protein, 9 aa, Homo Sapiens
TETEPSKTV

SEQ ID NO: 116649 - protein, 9 aa, Homo Sapiens
TETGSNINV

SEQ ID NO: 116650 - protein, 9 aa, Homo Sapiens
TETKGTVLI

SEQ ID NO: 116651 - protein, 9 aa, Homo Sapiens
TETKYGIRI

SEQ ID NO: 116652 - protein, 9 aa, Homo Sapiens
TETLHFVSI

SEQ ID NO: 116653 - protein, 9 aa, Homo Sapiens
TETNVYFKL

SEQ ID NO: 116654 - protein, 9 aa, Homo Sapiens
TETRTSCLI

SEQ ID NO: 116655 - protein, 9 aa, Homo Sapiens
TETSNALKV

SEQ ID NO: 116656 - protein, 9 aa, Homo Sapiens
TETVFVPVI

SEQ ID NO: 116657 - protein, 9 aa, Homo Sapiens
TETVLRQAI

SEQ ID NO: 116658 - protein, 9 aa, Homo Sapiens
TEVAPAKDV

SEQ ID NO: 116659 - protein, 9 aa, Homo Sapiens
TEVDKILKV

SEQ ID NO: 116660 - protein, 9 aa, Homo Sapiens
TEVGLVEKV

SEQ ID NO: 116661 - protein, 9 aa, Homo Sapiens
TEVGSVSEV

SEQ ID NO: 116662 - protein, 9 aa, Homo Sapiens
TEVKTSTVI

SEQ ID NO: 116663 - protein, 9 aa, Homo Sapiens
TEVLFNEKI

SEQ ID NO: 116664 - protein, 9 aa, Homo Sapiens
TEVLVTQEI

SEQ ID NO: 116665 - protein, 9 aa, Homo Sapiens
TEVQLQQKV

SEQ ID NO: 116666 - protein, 9 aa, Homo Sapiens
TEVREIKRI

SEQ ID NO: 116667 - protein, 9 aa, Homo Sapiens
TEVSFLDYI

SEQ ID NO: 116668 - protein, 9 aa, Homo Sapiens
TEWLKGQQI

SEQ ID NO: 116669 - protein, 9 aa, Homo Sapiens
TEYAGPLFI

SEQ ID NO: 116670 - protein, 9 aa, Homo Sapiens
TEYENFKVQ

SEQ ID NO: 116671 - protein, 9 aa, Homo Sapiens
TEYETQVKV

SEQ ID NO: 116672 - protein, 9 aa, Homo Sapiens
TEYPLHKAI

SEQ ID NO: 116673 - protein, 9 aa, Homo Sapiens
TEYSFLDYV

SEQ ID NO: 116674 - protein, 9 aa, Homo Sapiens
TEYSFLKEV

SEQ ID NO: 116675 - protein, 9 aa, Homo Sapiens
VEAALVSKI

SEQ ID NO: 116676 - protein, 9 aa, Homo Sapiens
VEACPVVRV

SEQ ID NO: 116677 - protein, 9 aa, Homo Sapiens
VEAFIIQNI

SEQ ID NO: 116678 - protein, 9 aa, Homo Sapiens
VEALNGKEV

SEQ ID NO: 116679 - protein, 9 aa, Homo Sapiens
VEALTTLEV

SEQ ID NO: 116680 - protein, 9 aa, Homo Sapiens
VEAMKLGAV

SEQ ID NO: 116681 - protein, 9 aa, Homo Sapiens
VEAPPKILV

SEQ ID NO: 116682 - protein, 9 aa, Homo Sapiens
VEAPPSVVL

SEQ ID NO: 116683 - protein, 9 aa, Homo Sapiens
VECTPSPRL

SEQ ID NO: 116684 - protein, 9 aa, Homo Sapiens
VEDKGACRL

SEQ ID NO: 116685 - protein, 9 aa, Homo Sapiens
VEDLNIIQV

SEQ ID NO: 116686 - protein, 9 aa, Homo Sapiens
VEDPQGNTI

SEQ ID NO: 116687 - protein, 9 aa, Homo Sapiens
VEDPRVLLL

SEQ ID NO: 116688 - protein, 9 aa, Homo Sapiens
VEDRGTVVA

SEQ ID NO: 116689 - protein, 9 aa, Homo Sapiens
VEEDHIPYI

SEQ ID NO: 116690 - protein, 9 aa, Homo Sapiens
VEEENIRVV

SEQ ID NO: 116691 - protein, 9 aa, Homo Sapiens
VEEEPFHTI

SEQ ID NO: 116692 - protein, 9 aa, Homo Sapiens
VEFDLKQTL

SEQ ID NO: 116693 - protein, 9 aa, Homo Sapiens
VEFGNFNNL

SEQ ID NO: 116694 - protein, 9 aa, Homo Sapiens
VEFISQSSV

SEQ ID NO: 116695 - protein, 9 aa, Homo Sapiens
VEFNGKLLA

SEQ ID NO: 116696 - protein, 9 aa, Homo Sapiens
VEFNKQVCI

SEQ ID NO: 116697 - protein, 9 aa, Homo Sapiens
VEFPHSPEI

SEQ ID NO: 116698 - protein, 9 aa, Homo Sapiens
VEFRDFLKI

SEQ ID NO: 116699 - protein, 9 aa, Homo Sapiens
VEFRSNLYI

SEQ ID NO: 116700 - protein, 9 aa, Homo Sapiens
VEGPIVTQI

SEQ ID NO: 116701 - protein, 9 aa, Homo Sapiens
VEGPSQAKI

SEQ ID NO: 116702 - protein, 9 aa, Homo Sapiens
VEGPSTCLV

SEQ ID NO: 116703 - protein, 9 aa, Homo Sapiens
VEHANIIKV

SEQ ID NO: 116704 - protein, 9 aa, Homo Sapiens
VEHFQIRNV

SEQ ID NO: 116705 - protein, 9 aa, Homo Sapiens
VEHGGFYRT

SEQ ID NO: 116706 - protein, 9 aa, Homo Sapiens
VEHPGHPEV

SEQ ID NO: 116707 - protein, 9 aa, Homo Sapiens
VEHSPFSSF

SEQ ID NO: 116708 - protein, 9 aa, Homo Sapiens
VEIDGIGRI

SEQ ID NO: 116709 - protein, 9 aa, Homo Sapiens
VEIEKAPKV

SEQ ID NO: 116710 - protein, 9 aa, Homo Sapiens
VEIENLGNL

SEQ ID NO: 116711 - protein, 9 aa, Homo Sapiens
VEIEREVLL

SEQ ID NO: 116712 - protein, 9 aa, Homo Sapiens
VEIFHPLRL

SEQ ID NO: 116713 - protein, 9 aa, Homo Sapiens
VEIGVFPLI

SEQ ID NO: 116714 - protein, 9 aa, Homo Sapiens
VEIITKEFI

SEQ ID NO: 116715 - protein, 9 aa, Homo Sapiens
VEILMRPTI

SEQ ID NO: 116716 - protein, 9 aa, Homo Sapiens
VEILNGEKV

SEQ ID NO: 116717 - protein, 9 aa, Homo Sapiens
VEILPVPYV

SEQ ID NO: 116718 - protein, 9 aa, Homo Sapiens
VEIPKNCVV

SEQ ID NO: 116719 - protein, 9 aa, Homo Sapiens
VEIPPNKAV

SEQ ID NO: 116720 - protein, 9 aa, Homo Sapiens
VEIQCPEQV

SEQ ID NO: 116721 - protein, 9 aa, Homo Sapiens
VEIQTPKII

SEQ ID NO: 116722 - protein, 9 aa, Homo Sapiens
VEIRNLHNV

SEQ ID NO: 116723 - protein, 9 aa, Homo Sapiens
VEISAKELI

SEQ ID NO: 116724 - protein, 9 aa, Homo Sapiens
VEISQVTIV

SEQ ID NO: 116725 - protein, 9 aa, Homo Sapiens
VEKESGITI

SEQ ID NO: 116726 - protein, 9 aa, Homo Sapiens
VEKGHFAEL

SEQ ID NO: 116727 - protein, 9 aa, Homo Sapiens
VEKIDFDSV

SEQ ID NO: 116728 - protein, 9 aa, Homo Sapiens
VEKILLSVV

SEQ ID NO: 116729 - protein, 9 aa, Homo Sapiens
VEKQSALLI

SEQ ID NO: 116730 - protein, 9 aa, Homo Sapiens
VELDHATLV

SEQ ID NO: 116731 - protein, 9 aa, Homo Sapiens
VELDLQRSV

SEQ ID NO: 116732 - protein, 9 aa, Homo Sapiens
VELEHSTKV

SEQ ID NO: 116733 - protein, 9 aa, Homo Sapiens
VELGPRPTV

SEQ ID NO: 116734 - protein, 9 aa, Homo Sapiens
VELKKFKRV

SEQ ID NO: 116735 - protein, 9 aa, Homo Sapiens
VELNKIPTV

SEQ ID NO: 116736 - protein, 9 aa, Homo Sapiens
VELPAVASV

SEQ ID NO: 116737 - protein, 9 aa, Homo Sapiens
VELPEQPAV

SEQ ID NO: 116738 - protein, 9 aa, Homo Sapiens
VENDGYKTI

SEQ ID NO: 116739 - protein, 9 aa, Homo Sapiens
VENEQILNV

SEQ ID NO: 116740 - protein, 9 aa, Homo Sapiens
VENKKAQLV

SEQ ID NO: 116741 - protein, 9 aa, Homo Sapiens
VENLPPHII

SEQ ID NO: 116742 - protein, 9 aa, Homo Sapiens
VENLPRTVI

SEQ ID NO: 116743 - protein, 9 aa, Homo Sapiens
VENPTATEI

SEQ ID NO: 116744 - protein, 9 aa, Homo Sapiens
VEPDHYVVV

SEQ ID NO: 116745 - protein, 9 aa, Homo Sapiens
VEPKMQVTI

SEQ ID NO: 116746 - protein, 9 aa, Homo Sapiens
VEPLHFTCV

SEQ ID NO: 116747 - protein, 9 aa, Homo Sapiens
VEQDFHLEI

SEQ ID NO: 116748 - protein, 9 aa, Homo Sapiens
VEQEIQTSV

SEQ ID NO: 116749 - protein, 9 aa, Homo Sapiens
VEQILPTLV

SEQ ID NO: 116750 - protein, 9 aa, Homo Sapiens
VEQKQNPTV

SEQ ID NO: 116751 - protein, 9 aa, Homo Sapiens
VEQQQLITV

SEQ ID NO: 116752 - protein, 9 aa, Homo Sapiens
VEQWPYRAV

SEQ ID NO: 116753 - protein, 9 aa, Homo Sapiens
VERARQVQV

SEQ ID NO: 116754 - protein, 9 aa, Homo Sapiens
VESAPMQVV

SEQ ID NO: 116755 - protein, 9 aa, Homo Sapiens
VESEAHVKI

SEQ ID NO: 116756 - protein, 9 aa, Homo Sapiens
VESEHQVKI

SEQ ID NO: 116757 - protein, 9 aa, Homo Sapiens
VESIISPKV

SEQ ID NO: 116758 - protein, 9 aa, Homo Sapiens
VESKFERTV

SEQ ID NO: 116759 - protein, 9 aa, Homo Sapiens
VESLGFCSV

SEQ ID NO: 116760 - protein, 9 aa, Homo Sapiens
VESPVICKI

SEQ ID NO: 116761 - protein, 9 aa, Homo Sapiens
VESQLPEKV

SEQ ID NO: 116762 - protein, 9 aa, Homo Sapiens
VETDQRVRV

SEQ ID NO: 116763 - protein, 9 aa, Homo Sapiens
VETESVRYV

SEQ ID NO: 116764 - protein, 9 aa, Homo Sapiens
VETGYLNSV

SEQ ID NO: 116765 - protein, 9 aa, Homo Sapiens
VETHTIHKI

SEQ ID NO: 116766 - protein, 9 aa, Homo Sapiens
VETLTETKI

SEQ ID NO: 116767 - protein, 9 aa, Homo Sapiens
VETPPMVVV

SEQ ID NO: 116768 - protein, 9 aa, Homo Sapiens
VETSRVVHI

SEQ ID NO: 116769 - protein, 9 aa, Homo Sapiens
VEVDRILEV

SEQ ID NO: 116770 - protein, 9 aa, Homo Sapiens
VEVDSGRQI

SEQ ID NO: 116771 - protein, 9 aa, Homo Sapiens
VEVGKNINI

SEQ ID NO: 116772 - protein, 9 aa, Homo Sapiens
VEVGRVAYV

SEQ ID NO: 116773 - protein, 9 aa, Homo Sapiens
VEVGSKIYV

SEQ ID NO: 116774 - protein, 9 aa, Homo Sapiens
VEVKDIELV

SEQ ID NO: 116775 - protein, 9 aa, Homo Sapiens
VEVKKFVKI

SEQ ID NO: 116776 - protein, 9 aa, Homo Sapiens
VEVKRPRGV

SEQ ID NO: 116777 - protein, 9 aa, Homo Sapiens
VEVPETPKA

SEQ ID NO: 116778 - protein, 9 aa, Homo Sapiens
VEVPGCGKI

SEQ ID NO: 116779 - protein, 9 aa, Homo Sapiens
VEVTGHAHV

SEQ ID NO: 116780 - protein, 9 aa, Homo Sapiens
VEYCPEVNV

SEQ ID NO: 116781 - protein, 9 aa, Homo Sapiens
VEYEALCKV

SEQ ID NO: 116782 - protein, 9 aa, Homo Sapiens
VEYQMKSVL

SEQ ID NO: 116783 - protein, 9 aa, Homo Sapiens
VEYVKSFNI

SEQ ID NO: 116784 - protein, 9 aa, Homo Sapiens
WEAGKPLSI

SEQ ID NO: 116785 - protein, 9 aa, Homo Sapiens
WEEDRDTVV

SEQ ID NO: 116786 - protein, 9 aa, Homo Sapiens
WEEEGFRQI

SEQ ID NO: 116787 - protein, 9 aa, Homo Sapiens
WEEERQPIL

SEQ ID NO: 116788 - protein, 9 aa, Homo Sapiens
WEIDNNPKV

SEQ ID NO: 116789 - protein, 9 aa, Homo Sapiens
WEIENNPTV

SEQ ID NO: 116790 - protein, 9 aa, Homo Sapiens
WEISQKTVL

SEQ ID NO: 116791 - protein, 9 aa, Homo Sapiens
WELEKKSAV

SEQ ID NO: 116792 - protein, 9 aa, Homo Sapiens
WETEKICQL

SEQ ID NO: 116793 - protein, 9 aa, Homo Sapiens
WEVATARCV

SEQ ID NO: 116794 - protein, 9 aa, Homo Sapiens
WEYDESHVI

SEQ ID NO: 116795 - protein, 9 aa, Homo Sapiens
YEAAKLLNV

SEQ ID NO: 116796 - protein, 9 aa, Homo Sapiens
YEAGKMLAI

SEQ ID NO: 116797 - protein, 9 aa, Homo Sapiens
YEAIFKPVM

SEQ ID NO: 116798 - protein, 9 aa, Homo Sapiens
YEALPQHKL

SEQ ID NO: 116799 - protein, 9 aa, Homo Sapiens
YEAPAYHLI

SEQ ID NO: 116800 - protein, 9 aa, Homo Sapiens
YEAPGVREA

SEQ ID NO: 116801 - protein, 9 aa, Homo Sapiens
YEASLPHQI

SEQ ID NO: 116802 - protein, 9 aa, Homo Sapiens
YEAYLPETF

SEQ ID NO: 116803 - protein, 9 aa, Homo Sapiens
YEDATKITV

SEQ ID NO: 116804 - protein, 9 aa, Homo Sapiens
YEDFHIVKL

SEQ ID NO: 116805 - protein, 9 aa, Homo Sapiens
YEDGNVQLV

SEQ ID NO: 116806 - protein, 9 aa, Homo Sapiens
YEDGSIRIF

SEQ ID NO: 116807 - protein, 9 aa, Homo Sapiens
YEDGWLIKM

SEQ ID NO: 116808 - protein, 9 aa, Homo Sapiens
YEDPGGKNV

SEQ ID NO: 116809 - protein, 9 aa, Homo Sapiens
YEDPQHHPL

SEQ ID NO: 116810 - protein, 9 aa, Homo Sapiens
YEDRGITSV

SEQ ID NO: 116811 - protein, 9 aa, Homo Sapiens
YEDRQVPEA

SEQ ID NO: 116812 - protein, 9 aa, Homo Sapiens
YEDTGLLCI

SEQ ID NO: 116813 - protein, 9 aa, Homo Sapiens
YEEDGARSI

SEQ ID NO: 116814 - protein, 9 aa, Homo Sapiens
YEEDSYSHI

SEQ ID NO: 116815 - protein, 9 aa, Homo Sapiens
YEEIMRDYI

SEQ ID NO: 116816 - protein, 9 aa, Homo Sapiens
YEEKVRPCI

SEQ ID NO: 116817 - protein, 9 aa, Homo Sapiens
YEEMFSPNI

SEQ ID NO: 116818 - protein, 9 aa, Homo Sapiens
YEEMYPPEI

SEQ ID NO: 116819 - protein, 9 aa, Homo Sapiens
YEEPNAWRI

SEQ ID NO: 116820 - protein, 9 aa, Homo Sapiens
YEEQGKPEV

SEQ ID NO: 116821 - protein, 9 aa, Homo Sapiens
YEEQRTVDP

SEQ ID NO: 116822 - protein, 9 aa, Homo Sapiens
YEERVLPSI

SEQ ID NO: 116823 - protein, 9 aa, Homo Sapiens
YEERVQAVV

SEQ ID NO: 116824 - protein, 9 aa, Homo Sapiens
YEFDTKDLV

SEQ ID NO: 116825 - protein, 9 aa, Homo Sapiens
YEFEGGVKL

SEQ ID NO: 116826 - protein, 9 aa, Homo Sapiens
YEFERTTSI

SEQ ID NO: 116827 - protein, 9 aa, Homo Sapiens
YEFKGHSLL

SEQ ID NO: 116828 - protein, 9 aa, Homo Sapiens
YEFLKSWTV

SEQ ID NO: 116829 - protein, 9 aa, Homo Sapiens
YEFQASQLL

SEQ ID NO: 116830 - protein, 9 aa, Homo Sapiens
YEFSGCRQI

SEQ ID NO: 116831 - protein, 9 aa, Homo Sapiens
YEGKFANHV

SEQ ID NO: 116832 - protein, 9 aa, Homo Sapiens
YEGLPIGKV

SEQ ID NO: 116833 - protein, 9 aa, Homo Sapiens
YEGPAKIEV

SEQ ID NO: 116834 - protein, 9 aa, Homo Sapiens
YEHPKDLKL

SEQ ID NO: 116835 - protein, 9 aa, Homo Sapiens
YEIDKTLGI

SEQ ID NO: 116836 - protein, 9 aa, Homo Sapiens
YEIHDGMNL

SEQ ID NO: 116837 - protein, 9 aa, Homo Sapiens
YEIHHGKKI

SEQ ID NO: 116838 - protein, 9 aa, Homo Sapiens
YEIKKLIYV

SEQ ID NO: 116839 - protein, 9 aa, Homo Sapiens
YEILNNPEL

SEQ ID NO: 116840 - protein, 9 aa, Homo Sapiens
YEILTPNSI

SEQ ID NO: 116841 - protein, 9 aa, Homo Sapiens
YEITEQRKI

SEQ ID NO: 116842 - protein, 9 aa, Homo Sapiens
YEKINVNEI

SEQ ID NO: 116843 - protein, 9 aa, Homo Sapiens
YEKTIAQMI

SEQ ID NO: 116844 - protein, 9 aa, Homo Sapiens
YEKVKLLEI

SEQ ID NO: 116845 - protein, 9 aa, Homo Sapiens
YELEKLWTL

SEQ ID NO: 116846 - protein, 9 aa, Homo Sapiens
YELKEGRQI

SEQ ID NO: 116847 - protein, 9 aa, Homo Sapiens
YELLFKEGV

SEQ ID NO: 116848 - protein, 9 aa, Homo Sapiens
YELLKQMSI

SEQ ID NO: 116849 - protein, 9 aa, Homo Sapiens
YELLMPHRI

SEQ ID NO: 116850 - protein, 9 aa, Homo Sapiens
YELPDGQVI

SEQ ID NO: 116851 - protein, 9 aa, Homo Sapiens
YELPENIRV

SEQ ID NO: 116852 - protein, 9 aa, Homo Sapiens
YELYDPCTV

SEQ ID NO: 116853 - protein, 9 aa, Homo Sapiens
YEMEVSQRL

SEQ ID NO: 116854 - protein, 9 aa, Homo Sapiens
YENDYPSVI

SEQ ID NO: 116855 - protein, 9 aa, Homo Sapiens
YENIPIRHH

SEQ ID NO: 116856 - protein, 9 aa, Homo Sapiens
YENPVVSRI

SEQ ID NO: 116857 - protein, 9 aa, Homo Sapiens
YENVKIPSI

SEQ ID NO: 116858 - protein, 9 aa, Homo Sapiens
YEQAARVAI

SEQ ID NO: 116859 - protein, 9 aa, Homo Sapiens
YEQAWYAKL

SEQ ID NO: 116860 - protein, 9 aa, Homo Sapiens
YEQILNTKL

SEQ ID NO: 116861 - protein, 9 aa, Homo Sapiens
YEQQMGQKV

SEQ ID NO: 116862 - protein, 9 aa, Homo Sapiens
YEQQTYQVI

SEQ ID NO: 116863 - protein, 9 aa, Homo Sapiens
YEQVSTPEI

SEQ ID NO: 116864 - protein, 9 aa, Homo Sapiens
YERDHAVVV

SEQ ID NO: 116865 - protein, 9 aa, Homo Sapiens
YERGFENIM

SEQ ID NO: 116866 - protein, 9 aa, Homo Sapiens
YERLFGTTV

SEQ ID NO: 116867 - protein, 9 aa, Homo Sapiens
YERPNETKI

SEQ ID NO: 116868 - protein, 9 aa, Homo Sapiens
YESDHPVRV

SEQ ID NO: 116869 - protein, 9 aa, Homo Sapiens
YESEHGINI

SEQ ID NO: 116870 - protein, 9 aa, Homo Sapiens
YESEKVGVA

SEQ ID NO: 116871 - protein, 9 aa, Homo Sapiens
YESINHVVV

SEQ ID NO: 116872 - protein, 9 aa, Homo Sapiens
YESLPATHI

SEQ ID NO: 116873 - protein, 9 aa, Homo Sapiens
YESQPIRQT

SEQ ID NO: 116874 - protein, 9 aa, Homo Sapiens
YETIDKELI

SEQ ID NO: 116875 - protein, 9 aa, Homo Sapiens
YETNKVTRI

SEQ ID NO: 116876 - protein, 9 aa, Homo Sapiens
YETPQGLRI

SEQ ID NO: 116877 - protein, 9 aa, Homo Sapiens
YETPTGIKV

SEQ ID NO: 116878 - protein, 9 aa, Homo Sapiens
YEVQLESKV

SEQ ID NO: 116879 - protein, 9 aa, Homo Sapiens
YEVQQVPKV

SEQ ID NO: 116880 - protein, 9 aa, Homo Sapiens
YEVRLNDTI

SEQ ID NO: 116881 - protein, 9 aa, Homo Sapiens
YEVRLTQTV

SEQ ID NO: 116882 - protein, 9 aa, Homo Sapiens
YEVVDKDSI

SEQ ID NO: 116883 - protein, 9 aa, Homo Sapiens
YEVVEKTRI

SEQ ID NO: 116884 - protein, 9 aa, Homo Sapiens
YEVVQSQRV

SEQ ID NO: 116885 - protein, 9 aa, Homo Sapiens
YEYDRKWGI

SEQ ID NO: 116886 - protein, 9 aa, Homo Sapiens
YEYKKRLTL

SEQ ID NO: 116887 - protein, 9 aa, Homo Sapiens
YEYMEEQVI

SEQ ID NO: 116888 - protein, 9 aa, Homo Sapiens
YEYSGYNYL

SEQ ID NO: 116889 - protein, 9 aa, Homo Sapiens
YEYYVQGQI

SEQ ID NO: 116890 - protein, 9 aa, Homo Sapiens
YGIYNVTMV

SEQ ID NO: 116891 - protein, 10 aa, Homo Sapiens
AAGPPISEGK

SEQ ID NO: 116892 - protein, 10 aa, Homo Sapiens
AEAAEVILRV

SEQ ID NO: 116893 - protein, 10 aa, Homo Sapiens
AEADSKLKQV

SEQ ID NO: 116894 - protein, 10 aa, Homo Sapiens
AEAEASRLTA

SEQ ID NO: 116895 - protein, 10 aa, Homo Sapiens
AEAEKSQLIM

SEQ ID NO: 116896 - protein, 10 aa, Homo Sapiens
AEAEPPSEVV

SEQ ID NO: 116897 - protein, 10 aa, Homo Sapiens
AEAEQEMQRI

SEQ ID NO: 116898 - protein, 10 aa, Homo Sapiens
AEAERTFAEV

SEQ ID NO: 116899 - protein, 10 aa, Homo Sapiens
AEAESAQTRV

SEQ ID NO: 116900 - protein, 10 aa, Homo Sapiens
AEAFPSGCTA

SEQ ID NO: 116901 - protein, 10 aa, Homo Sapiens
AEAKKLAAIT

SEQ ID NO: 116902 - protein, 10 aa, Homo Sapiens
AEAKVNGTTV

SEQ ID NO: 116903 - protein, 10 aa, Homo Sapiens
AEALVGQVLV

SEQ ID NO: 116904 - protein, 10 aa, Homo Sapiens
AEAPSQKVTV

SEQ ID NO: 116905 - protein, 10 aa, Homo Sapiens
AEAQEKLSRI

SEQ ID NO: 116906 - protein, 10 aa, Homo Sapiens
AEAQLLNKQI

SEQ ID NO: 116907 - protein, 10 aa, Homo Sapiens
AEASQLGHKV

SEQ ID NO: 116908 - protein, 10 aa, Homo Sapiens
AEAVNRAITI

SEQ ID NO: 116909 - protein, 10 aa, Homo Sapiens
AECEKLMELY

SEQ ID NO: 116910 - protein, 10 aa, Homo Sapiens
AECHLNPIIL

SEQ ID NO: 116911 - protein, 10 aa, Homo Sapiens
AECNAVRQAL

SEQ ID NO: 116912 - protein, 10 aa, Homo Sapiens
AEDAMRLYYV

SEQ ID NO: 116913 - protein, 10 aa, Homo Sapiens
AEDDVKQITV

SEQ ID NO: 116914 - protein, 10 aa, Homo Sapiens
AEDGPRVVFM

SEQ ID NO: 116915 - protein, 10 aa, Homo Sapiens
AEDGSAGVRV

SEQ ID NO: 116916 - protein, 10 aa, Homo Sapiens
AEDGSRVYVV

SEQ ID NO: 116917 - protein, 10 aa, Homo Sapiens
AEDGYSGVEV

SEQ ID NO: 116918 - protein, 10 aa, Homo Sapiens
AEDPKVTLTI

SEQ ID NO: 116919 - protein, 10 aa, Homo Sapiens
AEDPLGAIHL

SEQ ID NO: 116920 - protein, 10 aa, Homo Sapiens
AEDPQQVSTV

SEQ ID NO: 116921 - protein, 10 aa, Homo Sapiens
AEEERRKIEV

SEQ ID NO: 116922 - protein, 10 aa, Homo Sapiens
AEEKNGVVFI

SEQ ID NO: 116923 - protein, 10 aa, Homo Sapiens
AEEPRGGLKI

SEQ ID NO: 116924 - protein, 10 aa, Homo Sapiens
AEEQFILSQV

SEQ ID NO: 116925 - protein, 10 aa, Homo Sapiens
AEFEKNFKEV

SEQ ID NO: 116926 - protein, 10 aa, Homo Sapiens
AEFHQIEGVV

SEQ ID NO: 116927 - protein, 10 aa, Homo Sapiens
AEFKEAFQLF

SEQ ID NO: 116928 - protein, 10 aa, Homo Sapiens
AEFLSEHPNV

SEQ ID NO: 116929 - protein, 10 aa, Homo Sapiens
AEFNSTPAVF

SEQ ID NO: 116930 - protein, 10 aa, Homo Sapiens
AEFRDPLGYI

SEQ ID NO: 116931 - protein, 10 aa, Homo Sapiens
AEFRDYPPVL

SEQ ID NO: 116932 - protein, 10 aa, Homo Sapiens
AEFSSALVSI

SEQ ID NO: 116933 - protein, 10 aa, Homo Sapiens
AEGDIGKAEV

SEQ ID NO: 116934 - protein, 10 aa, Homo Sapiens
AEGEVTFKSI

SEQ ID NO: 116935 - protein, 10 aa, Homo Sapiens
AEGPITALTF

SEQ ID NO: 116936 - protein, 10 aa, Homo Sapiens
AEHENMKAVL

SEQ ID NO: 116937 - protein, 10 aa, Homo Sapiens
AEHLFLENDV

SEQ ID NO: 116938 - protein, 10 aa, Homo Sapiens
AEHPGDCLIF

SEQ ID NO: 116939 - protein, 10 aa, Homo Sapiens
AEHPNVTLTI

SEQ ID NO: 116940 - protein, 10 aa, Homo Sapiens
AEHPTIAKSV

SEQ ID NO: 116941 - protein, 10 aa, Homo Sapiens
AEHPTIKIFW

SEQ ID NO: 116942 - protein, 10 aa, Homo Sapiens
AEHQQLIPLV

SEQ ID NO: 116943 - protein, 10 aa, Homo Sapiens
AEHSESGQLV

SEQ ID NO: 116944 - protein, 10 aa, Homo Sapiens
AEIDAHLVAL

SEQ ID NO: 116945 - protein, 10 aa, Homo Sapiens
AEIDDKLNKI

SEQ ID NO: 116946 - protein, 10 aa, Homo Sapiens
AEIDFKYALI

SEQ ID NO: 116947 - protein, 10 aa, Homo Sapiens
AEIDLRQGRL

SEQ ID NO: 116948 - protein, 10 aa, Homo Sapiens
AEIDSIHQLV

SEQ ID NO: 116949 - protein, 10 aa, Homo Sapiens
AEIEHFIHII

SEQ ID NO: 116950 - protein, 10 aa, Homo Sapiens
AEIENLANRI

SEQ ID NO: 116951 - protein, 10 aa, Homo Sapiens
AEIEQSQRVV

SEQ ID NO: 116952 - protein, 10 aa, Homo Sapiens
AEIETDKATI

SEQ ID NO: 116953 - protein, 10 aa, Homo Sapiens
AEIHLRLGQI

SEQ ID NO: 116954 - protein, 10 aa, Homo Sapiens
AEIIGGERSV

SEQ ID NO: 116955 - protein, 10 aa, Homo Sapiens
AEIIPGVLFI

SEQ ID NO: 116956 - protein, 10 aa, Homo Sapiens
AEIKELFQYI

SEQ ID NO: 116957 - protein, 10 aa, Homo Sapiens
AEILAEIARI

SEQ ID NO: 116958 - protein, 10 aa, Homo Sapiens
AEILGSGAGI

SEQ ID NO: 116959 - protein, 10 aa, Homo Sapiens
AEILRTMKKV

SEQ ID NO: 116960 - protein, 10 aa, Homo Sapiens
AEINNIIKIV

SEQ ID NO: 116961 - protein, 10 aa, Homo Sapiens
AEIPEHFGAV

SEQ ID NO: 116962 - protein, 10 aa, Homo Sapiens
AEIQELHQSV

SEQ ID NO: 116963 - protein, 10 aa, Homo Sapiens
AEIQGNINHV

SEQ ID NO: 116964 - protein, 10 aa, Homo Sapiens
AEIQGNINKV

SEQ ID NO: 116965 - protein, 10 aa, Homo Sapiens
AEIQNGVKQI

SEQ ID NO: 116966 - protein, 10 aa, Homo Sapiens
AEIRHVLVTL

SEQ ID NO: 116967 - protein, 10 aa, Homo Sapiens
AEIVKRLNGI

SEQ ID NO: 116968 - protein, 10 aa, Homo Sapiens
AEIVPVTTTV

SEQ ID NO: 116969 - protein, 10 aa, Homo Sapiens
AEIYAKLEEI

SEQ ID NO: 116970 - protein, 10 aa, Homo Sapiens
AEKDFTVNTV

SEQ ID NO: 116971 - protein, 10 aa, Homo Sapiens
AEKDNAEIRV

SEQ ID NO: 116972 - protein, 10 aa, Homo Sapiens
AEKDSVLNIA

SEQ ID NO: 116973 - protein, 10 aa, Homo Sapiens
AEKGPMIVLV

SEQ ID NO: 116974 - protein, 10 aa, Homo Sapiens
AEKLGGSAVI

SEQ ID NO: 116975 - protein, 10 aa, Homo Sapiens
AEKNLGESEI

SEQ ID NO: 116976 - protein, 10 aa, Homo Sapiens
AEKPGSKSTI

SEQ ID NO: 116977 - protein, 10 aa, Homo Sapiens
AELAGEGISV

SEQ ID NO: 116978 - protein, 10 aa, Homo Sapiens
AELDISNNKI

SEQ ID NO: 116979 - protein, 10 aa, Homo Sapiens
AELDPGTISV

SEQ ID NO: 116980 - protein, 10 aa, Homo Sapiens
AELDRQWKKI

SEQ ID NO: 116981 - protein, 10 aa, Homo Sapiens
AELEGKSSSI

SEQ ID NO: 116982 - protein, 10 aa, Homo Sapiens
AELEKSTQTI

SEQ ID NO: 116983 - protein, 10 aa, Homo Sapiens
AELETQLQQI

SEQ ID NO: 116984 - protein, 10 aa, Homo Sapiens
AELGVPLSQV

SEQ ID NO: 116985 - protein, 10 aa, Homo Sapiens
AELHNHGIQI

SEQ ID NO: 116986 - protein, 10 aa, Homo Sapiens
AELKDLLLQV

SEQ ID NO: 116987 - protein, 10 aa, Homo Sapiens
AELNFGAITL

SEQ ID NO: 116988 - protein, 10 aa, Homo Sapiens
AELTPHQTFV

SEQ ID NO: 116989 - protein, 10 aa, Homo Sapiens
AEMDARTILL

SEQ ID NO: 116990 - protein, 10 aa, Homo Sapiens
AEMEGQQPVF

SEQ ID NO: 116991 - protein, 10 aa, Homo Sapiens
AEMEMKNRQV

SEQ ID NO: 116992 - protein, 10 aa, Homo Sapiens
AEMETQKEKI

SEQ ID NO: 116993 - protein, 10 aa, Homo Sapiens
AEMRPFIEII

SEQ ID NO: 116994 - protein, 10 aa, Homo Sapiens
AENPFLTHLI

SEQ ID NO: 116995 - protein, 10 aa, Homo Sapiens
AENSQLTERI

SEQ ID NO: 116996 - protein, 10 aa, Homo Sapiens
AEPSFPFQVA

SEQ ID NO: 116997 - protein, 10 aa, Homo Sapiens
AEQNTQITSI

SEQ ID NO: 116998 - protein, 10 aa, Homo Sapiens
AERDRWIEDL

SEQ ID NO: 116999 - protein, 10 aa, Homo Sapiens
AERPDTMLGV

SEQ ID NO: 117000 - protein, 10 aa, Homo Sapiens
AERSEASLKV

SEQ ID NO: 117001 - protein, 10 aa, Homo Sapiens
AERVGAGAPV

SEQ ID NO: 117002 - protein, 10 aa, Homo Sapiens
AESIKNQMTV

SEQ ID NO: 117003 - protein, 10 aa, Homo Sapiens
AESPAALTEV

SEQ ID NO: 117004 - protein, 10 aa, Homo Sapiens
AESRAEAARI

SEQ ID NO: 117005 - protein, 10 aa, Homo Sapiens
AESVEGVVRI

SEQ ID NO: 117006 - protein, 10 aa, Homo Sapiens
AESWGTGRAV

SEQ ID NO: 117007 - protein, 10 aa, Homo Sapiens
AETDVLFNKV

SEQ ID NO: 117008 - protein, 10 aa, Homo Sapiens
AETEPKFNSV

SEQ ID NO: 117009 - protein, 10 aa, Homo Sapiens
AETEYFVRCI

SEQ ID NO: 117010 - protein, 10 aa, Homo Sapiens
AETHFGFETV

SEQ ID NO: 117011 - protein, 10 aa, Homo Sapiens
AETQRQMAHV

SEQ ID NO: 117012 - protein, 10 aa, Homo Sapiens
AEVARAQAAL

SEQ ID NO: 117013 - protein, 10 aa, Homo Sapiens
AEVDNSKQLI

SEQ ID NO: 117014 - protein, 10 aa, Homo Sapiens
AEVDVTRDIV

SEQ ID NO: 117015 - protein, 10 aa, Homo Sapiens
AEVEDMASRI

SEQ ID NO: 117016 - protein, 10 aa, Homo Sapiens
AEVETDKATV

SEQ ID NO: 117017 - protein, 10 aa, Homo Sapiens
AEVETLKTQI

SEQ ID NO: 117018 - protein, 10 aa, Homo Sapiens
AEVGDGTTSV

SEQ ID NO: 117019 - protein, 10 aa, Homo Sapiens
AEVITKFINV

SEQ ID NO: 117020 - protein, 10 aa, Homo Sapiens
AEVKNQEVTI

SEQ ID NO: 117021 - protein, 10 aa, Homo Sapiens
AEVLQILTQV

SEQ ID NO: 117022 - protein, 10 aa, Homo Sapiens
AEVNSSGKTI

SEQ ID NO: 117023 - protein, 10 aa, Homo Sapiens
AEVPFSPGLF

SEQ ID NO: 117024 - protein, 10 aa, Homo Sapiens
AEVPTALEKI

SEQ ID NO: 117025 - protein, 10 aa, Homo Sapiens
AEVRALQAEI

SEQ ID NO: 117026 - protein, 10 aa, Homo Sapiens
AEVVHQLQEI

SEQ ID NO: 117027 - protein, 10 aa, Homo Sapiens
AEVYGIADKI

SEQ ID NO: 117028 - protein, 10 aa, Homo Sapiens
AEWRPEEGFV

SEQ ID NO: 117029 - protein, 10 aa, Homo Sapiens
AEYAHPLETL

SEQ ID NO: 117030 - protein, 10 aa, Homo Sapiens
AEYDFRNDSV

SEQ ID NO: 117031 - protein, 10 aa, Homo Sapiens
AEYDNFFQHL

SEQ ID NO: 117032 - protein, 10 aa, Homo Sapiens
AEYDTQVKEI

SEQ ID NO: 117033 - protein, 10 aa, Homo Sapiens
AEYEERAAKV

SEQ ID NO: 117034 - protein, 10 aa, Homo Sapiens
AEYEFISSGL

SEQ ID NO: 117035 - protein, 10 aa, Homo Sapiens
AEYEKTIAQM

SEQ ID NO: 117036 - protein, 10 aa, Homo Sapiens
AEYENLTNKL

SEQ ID NO: 117037 - protein, 10 aa, Homo Sapiens
AEYEPVLIEI

SEQ ID NO: 117038 - protein, 10 aa, Homo Sapiens
AEYESFLRTG

SEQ ID NO: 117039 - protein, 10 aa, Homo Sapiens
AEYISTVKTL

SEQ ID NO: 117040 - protein, 10 aa, Homo Sapiens
AEYLGANSVV

SEQ ID NO: 117041 - protein, 10 aa, Homo Sapiens
AEYPGSSAQL

SEQ ID NO: 117042 - protein, 10 aa, Homo Sapiens
AEYQAFREAI

SEQ ID NO: 117043 - protein, 10 aa, Homo Sapiens
AEYSRFVNQI

SEQ ID NO: 117044 - protein, 10 aa, Homo Sapiens
AEYSTKNNAL

SEQ ID NO: 117045 - protein, 10 aa, Homo Sapiens
AEYTHKSPRV

SEQ ID NO: 117046 - protein, 10 aa, Homo Sapiens
AIDSRGGEPL

SEQ ID NO: 117047 - protein, 10 aa, Homo Sapiens
APGEVLRSVP

SEQ ID NO: 117048 - protein, 10 aa, Homo Sapiens
EEDQGSKLIR

SEQ ID NO: 117049 - protein, 10 aa, Homo Sapiens
EEFKYLWNNI

SEQ ID NO: 117050 - protein, 10 aa, Homo Sapiens
EEHGNFLITV

SEQ ID NO: 117051 - protein, 10 aa, Homo Sapiens
EEILEKGLKV

SEQ ID NO: 117052 - protein, 10 aa, Homo Sapiens
EEYGEFYKSL

SEQ ID NO: 117053 - protein, 10 aa, Homo Sapiens
EEYNKEFAEV

SEQ ID NO: 117054 - protein, 10 aa, Homo Sapiens
ELAAPGQAKI

SEQ ID NO: 117055 - protein, 10 aa, Homo Sapiens
ELLKPTELVP

SEQ ID NO: 117056 - protein, 10 aa, Homo Sapiens
FEAQGALANI

SEQ ID NO: 117057 - protein, 10 aa, Homo Sapiens
FEAQGGLANI

SEQ ID NO: 117058 - protein, 10 aa, Homo Sapiens
FEDQNTLTSI

SEQ ID NO: 117059 - protein, 10 aa, Homo Sapiens
FEFTGSHLTV

SEQ ID NO: 117060 - protein, 10 aa, Homo Sapiens
FEIFADPRTV

SEQ ID NO: 117061 - protein, 10 aa, Homo Sapiens
FEISDIGAKI

SEQ ID NO: 117062 - protein, 10 aa, Homo Sapiens
FEISDRLIGI

SEQ ID NO: 117063 - protein, 10 aa, Homo Sapiens
FEITPEGRRI

SEQ ID NO: 117064 - protein, 10 aa, Homo Sapiens
FEMPTVCTTI

SEQ ID NO: 117065 - protein, 10 aa, Homo Sapiens
FEQGGARVVV

SEQ ID NO: 117066 - protein, 10 aa, Homo Sapiens
FEREVGRQSV

SEQ ID NO: 117067 - protein, 10 aa, Homo Sapiens
FESGDVKATV

SEQ ID NO: 117068 - protein, 10 aa, Homo Sapiens
FEVGAGQVSV

SEQ ID NO: 117069 - protein, 10 aa, Homo Sapiens
FEVLPQQVTI

SEQ ID NO: 117070 - protein, 10 aa, Homo Sapiens
GEADQKGSLV

SEQ ID NO: 117071 - protein, 10 aa, Homo Sapiens
GEAEDMLMRI

SEQ ID NO: 117072 - protein, 10 aa, Homo Sapiens
GEAELNWSRL

SEQ ID NO: 117073 - protein, 10 aa, Homo Sapiens
GEAFLPLREV

SEQ ID NO: 117074 - protein, 10 aa, Homo Sapiens
GEAGAKFIEV

SEQ ID NO: 117075 - protein, 10 aa, Homo Sapiens
GEAHPSASLI

SEQ ID NO: 117076 - protein, 10 aa, Homo Sapiens
GEALPFIQRV

SEQ ID NO: 117077 - protein, 10 aa, Homo Sapiens
GEANVPFITV

SEQ ID NO: 117078 - protein, 10 aa, Homo Sapiens
GEAPFSSTKV

SEQ ID NO: 117079 - protein, 10 aa, Homo Sapiens
GEAPKPGEEV

SEQ ID NO: 117080 - protein, 10 aa, Homo Sapiens
GEAPMHFCEV

SEQ ID NO: 117081 - protein, 10 aa, Homo Sapiens
GEATNTVTKI

SEQ ID NO: 117082 - protein, 10 aa, Homo Sapiens
GECDVFKEIL

SEQ ID NO: 117083 - protein, 10 aa, Homo Sapiens
GECRPLSKTV

SEQ ID NO: 117084 - protein, 10 aa, Homo Sapiens
GECTPTQREV

SEQ ID NO: 117085 - protein, 10 aa, Homo Sapiens
GEDPDKRISI

SEQ ID NO: 117086 - protein, 10 aa, Homo Sapiens
GEDPNGTLII

SEQ ID NO: 117087 - protein, 10 aa, Homo Sapiens
GEDPRPGGQI

SEQ ID NO: 117088 - protein, 10 aa, Homo Sapiens
GEDPRVSINV

SEQ ID NO: 117089 - protein, 10 aa, Homo Sapiens
GEEARVTQLI

SEQ ID NO: 117090 - protein, 10 aa, Homo Sapiens
GEEQRYTCHV

SEQ ID NO: 117091 - protein, 10 aa, Homo Sapiens
GEFEEFSRRI

SEQ ID NO: 117092 - protein, 10 aa, Homo Sapiens
GEFEKGGKSV

SEQ ID NO: 117093 - protein, 10 aa, Homo Sapiens
GEFFPVPESI

SEQ ID NO: 117094 - protein, 10 aa, Homo Sapiens
GEFGSVFKCV

SEQ ID NO: 117095 - protein, 10 aa, Homo Sapiens
GEFNEVFNDV

SEQ ID NO: 117096 - protein, 10 aa, Homo Sapiens
GEFPDLHRTI

SEQ ID NO: 117097 - protein, 10 aa, Homo Sapiens
GEFPFAKCFV

SEQ ID NO: 117098 - protein, 10 aa, Homo Sapiens
GEFQIVNPHL

SEQ ID NO: 117099 - protein, 10 aa, Homo Sapiens
GEFQSALPKI

SEQ ID NO: 117100 - protein, 10 aa, Homo Sapiens
GEFQSFPKVF

SEQ ID NO: 117101 - protein, 10 aa, Homo Sapiens
GEFREIGTVI

SEQ ID NO: 117102 - protein, 10 aa, Homo Sapiens
GEFSLHEQTV

SEQ ID NO: 117103 - protein, 10 aa, Homo Sapiens
GEFSTCFTEL

SEQ ID NO: 117104 - protein, 10 aa, Homo Sapiens
GEHALGTPEV

SEQ ID NO: 117105 - protein, 10 aa, Homo Sapiens
GEHGDSSVAV

SEQ ID NO: 117106 - protein, 10 aa, Homo Sapiens
GEHLPFLTSV

SEQ ID NO: 117107 - protein, 10 aa, Homo Sapiens
GEIDGNKVTL

SEQ ID NO: 117108 - protein, 10 aa, Homo Sapiens
GEIDRCLKKV

SEQ ID NO: 117109 - protein, 10 aa, Homo Sapiens
GEIFLLPARV

SEQ ID NO: 117110 - protein, 10 aa, Homo Sapiens
GEIIGKRGII

SEQ ID NO: 117111 - protein, 10 aa, Homo Sapiens
GEIKHLLGEI

SEQ ID NO: 117112 - protein, 10 aa, Homo Sapiens
GEILIGGQSV

SEQ ID NO: 117113 - protein, 10 aa, Homo Sapiens
GEIPLPKLYI

SEQ ID NO: 117114 - protein, 10 aa, Homo Sapiens
GEIQETSKKI

SEQ ID NO: 117115 - protein, 10 aa, Homo Sapiens
GEIRNLENVI

SEQ ID NO: 117116 - protein, 10 aa, Homo Sapiens
GEISDKWQYI

SEQ ID NO: 117117 - protein, 10 aa, Homo Sapiens
GEISKKVAQI

SEQ ID NO: 117118 - protein, 10 aa, Homo Sapiens
GEISSSKPAI

SEQ ID NO: 117119 - protein, 10 aa, Homo Sapiens
GEITHLQLEI

SEQ ID NO: 117120 - protein, 10 aa, Homo Sapiens
GEITRLLNHI

SEQ ID NO: 117121 - protein, 10 aa, Homo Sapiens
GEIVIGGQNI

SEQ ID NO: 117122 - protein, 10 aa, Homo Sapiens
GEIVTTIPTI

SEQ ID NO: 117123 - protein, 10 aa, Homo Sapiens
GELDLPILKV

SEQ ID NO: 117124 - protein, 10 aa, Homo Sapiens
GELERALSAV

SEQ ID NO: 117125 - protein, 10 aa, Homo Sapiens
GELGMKLSEI

SEQ ID NO: 117126 - protein, 10 aa, Homo Sapiens
GELIGNFVRV

SEQ ID NO: 117127 - protein, 10 aa, Homo Sapiens
GELIHDLLTI

SEQ ID NO: 117128 - protein, 10 aa, Homo Sapiens
GELKDLTQKV

SEQ ID NO: 117129 - protein, 10 aa, Homo Sapiens
GELPNGRHKI

SEQ ID NO: 117130 - protein, 10 aa, Homo Sapiens
GELPQGFARL

SEQ ID NO: 117131 - protein, 10 aa, Homo Sapiens
GELSARLLSI

SEQ ID NO: 117132 - protein, 10 aa, Homo Sapiens
GEMKPGRKGI

SEQ ID NO: 117133 - protein, 10 aa, Homo Sapiens
GEMKSGVPVL

SEQ ID NO: 117134 - protein, 10 aa, Homo Sapiens
GEMPAEPMTI

SEQ ID NO: 117135 - protein, 10 aa, Homo Sapiens
GENPHGVKAV

SEQ ID NO: 117136 - protein, 10 aa, Homo Sapiens
GENRDAQMLI

SEQ ID NO: 117137 - protein, 10 aa, Homo Sapiens
GENVFGVCHI

SEQ ID NO: 117138 - protein, 10 aa, Homo Sapiens
GEPGFPLNAI

SEQ ID NO: 117139 - protein, 10 aa, Homo Sapiens
GEPIGRGTKV

SEQ ID NO: 117140 - protein, 10 aa, Homo Sapiens
GEPQVQFKLV

SEQ ID NO: 117141 - protein, 10 aa, Homo Sapiens
GERDDQQVFI

SEQ ID NO: 117142 - protein, 10 aa, Homo Sapiens
GESEANVREI

SEQ ID NO: 117143 - protein, 10 aa, Homo Sapiens
GESQVDHSTI

SEQ ID NO: 117144 - protein, 10 aa, Homo Sapiens
GESSAPPRKV

SEQ ID NO: 117145 - protein, 10 aa, Homo Sapiens
GESTSKLASV

SEQ ID NO: 117146 - protein, 10 aa, Homo Sapiens
GETDWKLIAI

SEQ ID NO: 117147 - protein, 10 aa, Homo Sapiens
GETQSRTITV

SEQ ID NO: 117148 - protein, 10 aa, Homo Sapiens
GEVDLRECVV

SEQ ID NO: 117149 - protein, 10 aa, Homo Sapiens
GEVDVEQHTL

SEQ ID NO: 117150 - protein, 10 aa, Homo Sapiens
GEVEKMQILV

SEQ ID NO: 117151 - protein, 10 aa, Homo Sapiens
GEVENTPLRV

SEQ ID NO: 117152 - protein, 10 aa, Homo Sapiens
GEVHTGTTIM

SEQ ID NO: 117153 - protein, 10 aa, Homo Sapiens
GEVSGLMRKV

SEQ ID NO: 117154 - protein, 10 aa, Homo Sapiens
GEVVTTIPTI

SEQ ID NO: 117155 - protein, 10 aa, Homo Sapiens
GEWPTMPHTI

SEQ ID NO: 117156 - protein, 10 aa, Homo Sapiens
GEWYIRGQTI

SEQ ID NO: 117157 - protein, 10 aa, Homo Sapiens
GEYDFRYIFV

SEQ ID NO: 117158 - protein, 10 aa, Homo Sapiens
GEYDVTMPKV

SEQ ID NO: 117159 - protein, 10 aa, Homo Sapiens
GEYFPGTGDL

SEQ ID NO: 117160 - protein, 10 aa, Homo Sapiens
GEYFSVGSQV

SEQ ID NO: 117161 - protein, 10 aa, Homo Sapiens
GEYGGWYKAC

SEQ ID NO: 117162 - protein, 10 aa, Homo Sapiens
GEYGKFFVTI

SEQ ID NO: 117163 - protein, 10 aa, Homo Sapiens
GEYIIRCSEI

SEQ ID NO: 117164 - protein, 10 aa, Homo Sapiens
GEYKFGPLFV

SEQ ID NO: 117165 - protein, 10 aa, Homo Sapiens
GEYNNRHPNI

SEQ ID NO: 117166 - protein, 10 aa, Homo Sapiens
GEYPLTAMTL

SEQ ID NO: 117167 - protein, 10 aa, Homo Sapiens
GEYSGIEHVI

SEQ ID NO: 117168 - protein, 10 aa, Homo Sapiens
GEYSQKYSTM

SEQ ID NO: 117169 - protein, 10 aa, Homo Sapiens
HEAAFPIAVV

SEQ ID NO: 117170 - protein, 10 aa, Homo Sapiens
HEAEDLKMLI

SEQ ID NO: 117171 - protein, 10 aa, Homo Sapiens
HEIAHDGQRI

SEQ ID NO: 117172 - protein, 10 aa, Homo Sapiens
HEIERHFIEI

SEQ ID NO: 117173 - protein, 10 aa, Homo Sapiens
HEIGHGIAAI

SEQ ID NO: 117174 - protein, 10 aa, Homo Sapiens
HEILEKSGRI

SEQ ID NO: 117175 - protein, 10 aa, Homo Sapiens
HEIPSLQSIY

SEQ ID NO: 117176 - protein, 10 aa, Homo Sapiens
HEIQSDVLTI

SEQ ID NO: 117177 - protein, 10 aa, Homo Sapiens
HEISNLKNLV

SEQ ID NO: 117178 - protein, 10 aa, Homo Sapiens
HELIPGGKTI

SEQ ID NO: 117179 - protein, 10 aa, Homo Sapiens
HELNVPFFKV

SEQ ID NO: 117180 - protein, 10 aa, Homo Sapiens
HELPKYGVKV

SEQ ID NO: 117181 - protein, 10 aa, Homo Sapiens
HELPVDMETI

SEQ ID NO: 117182 - protein, 10 aa, Homo Sapiens
HELTIPNNLI

SEQ ID NO: 117183 - protein, 10 aa, Homo Sapiens
HENEALWREV

SEQ ID NO: 117184 - protein, 10 aa, Homo Sapiens
HETPAASKTV

SEQ ID NO: 117185 - protein, 10 aa, Homo Sapiens
HEVDELTQII

SEQ ID NO: 117186 - protein, 10 aa, Homo Sapiens
HEVISRQATI

SEQ ID NO: 117187 - protein, 10 aa, Homo Sapiens
HEVPYPDARI

SEQ ID NO: 117188 - protein, 10 aa, Homo Sapiens
HEYPDLVHKV

SEQ ID NO: 117189 - protein, 10 aa, Homo Sapiens
IEAVNMASKI

SEQ ID NO: 117190 - protein, 10 aa, Homo Sapiens
IEDGKGTILI

SEQ ID NO: 117191 - protein, 10 aa, Homo Sapiens
IEDNNTLVFI

SEQ ID NO: 117192 - protein, 10 aa, Homo Sapiens
IEDSHTLVTV

SEQ ID NO: 117193 - protein, 10 aa, Homo Sapiens
IEEQKIVVKV

SEQ ID NO: 117194 - protein, 10 aa, Homo Sapiens
IEEVHAVVTV

SEQ ID NO: 117195 - protein, 10 aa, Homo Sapiens
IEFDERGNVI

SEQ ID NO: 117196 - protein, 10 aa, Homo Sapiens
IEFLYNENTV

SEQ ID NO: 117197 - protein, 10 aa, Homo Sapiens
IEFSYELSKV

SEQ ID NO: 117198 - protein, 10 aa, Homo Sapiens
IEIDQKLQEI

SEQ ID NO: 117199 - protein, 10 aa, Homo Sapiens
IEIVGGATRI

SEQ ID NO: 117200 - protein, 10 aa, Homo Sapiens
IEIVPGKVFV

SEQ ID NO: 117201 - protein, 10 aa, Homo Sapiens
IEMELRQMEV

SEQ ID NO: 117202 - protein, 10 aa, Homo Sapiens
IENPADVSVI

SEQ ID NO: 117203 - protein, 10 aa, Homo Sapiens
IEPDVELQRI

SEQ ID NO: 117204 - protein, 10 aa, Homo Sapiens
IEPDYKFSTL

SEQ ID NO: 117205 - protein, 10 aa, Homo Sapiens
IEPELPMQLV

SEQ ID NO: 117206 - protein, 10 aa, Homo Sapiens
IETTHGVVHV

SEQ ID NO: 117207 - protein, 10 aa, Homo Sapiens
IEYARQLEMI

SEQ ID NO: 117208 - protein, 10 aa, Homo Sapiens
IEYDDFVECL

SEQ ID NO: 117209 - protein, 10 aa, Homo Sapiens
IEYDPVIILI

SEQ ID NO: 117210 - protein, 10 aa, Homo Sapiens
IEYIHSKNFI

SEQ ID NO: 117211 - protein, 10 aa, Homo Sapiens
KEADLDVATI

SEQ ID NO: 117212 - protein, 10 aa, Homo Sapiens
KEAEEVFERI

SEQ ID NO: 117213 - protein, 10 aa, Homo Sapiens
KEAEPIPETV

SEQ ID NO: 117214 - protein, 10 aa, Homo Sapiens
KEALPDGVNI

SEQ ID NO: 117215 - protein, 10 aa, Homo Sapiens
KEAPCVLIYI

SEQ ID NO: 117216 - protein, 10 aa, Homo Sapiens
KEATYGERVV

SEQ ID NO: 117217 - protein, 10 aa, Homo Sapiens
KEFEDAVRKV

SEQ ID NO: 117218 - protein, 10 aa, Homo Sapiens
KEFGFSGLNV

SEQ ID NO: 117219 - protein, 10 aa, Homo Sapiens
KEFKGFGTEV

SEQ ID NO: 117220 - protein, 10 aa, Homo Sapiens
KEFPELVARI

SEQ ID NO: 117221 - protein, 10 aa, Homo Sapiens
KEFSGNPIKV

SEQ ID NO: 117222 - protein, 10 aa, Homo Sapiens
KEFSPFGTIT

SEQ ID NO: 117223 - protein, 10 aa, Homo Sapiens
KEFWDGFEEV

SEQ ID NO: 117224 - protein, 10 aa, Homo Sapiens
KEGDKPSATI

SEQ ID NO: 117225 - protein, 10 aa, Homo Sapiens
KEGLSFLGGL

SEQ ID NO: 117226 - protein, 10 aa, Homo Sapiens
KEHDPRVITV

SEQ ID NO: 117227 - protein, 10 aa, Homo Sapiens
KEHPDAWTRV

SEQ ID NO: 117228 - protein, 10 aa, Homo Sapiens
KEIAAVIETV

SEQ ID NO: 117229 - protein, 10 aa, Homo Sapiens
KEIEEAMKRV

SEQ ID NO: 117230 - protein, 10 aa, Homo Sapiens
KEIEHNLSKI

SEQ ID NO: 117231 - protein, 10 aa, Homo Sapiens
KEIELPSGQL

SEQ ID NO: 117232 - protein, 10 aa, Homo Sapiens
KEIENGVYLI

SEQ ID NO: 117233 - protein, 10 aa, Homo Sapiens
KEIENTYANV

SEQ ID NO: 117234 - protein, 10 aa, Homo Sapiens
KEIEQKDNEI

SEQ ID NO: 117235 - protein, 10 aa, Homo Sapiens
KEIFETPTEI

SEQ ID NO: 117236 - protein, 10 aa, Homo Sapiens
KEIIPTSEFI

SEQ ID NO: 117237 - protein, 10 aa, Homo Sapiens
KEILGTAQSV

SEQ ID NO: 117238 - protein, 10 aa, Homo Sapiens
KEINKAQNAI

SEQ ID NO: 117239 - protein, 10 aa, Homo Sapiens
KEIQGHQPRI

SEQ ID NO: 117240 - protein, 10 aa, Homo Sapiens
KEIQSAFVSV

SEQ ID NO: 117241 - protein, 10 aa, Homo Sapiens
KEISGKIIFV

SEQ ID NO: 117242 - protein, 10 aa, Homo Sapiens
KELEFYLRKI

SEQ ID NO: 117243 - protein, 10 aa, Homo Sapiens
KELESRLQQV

SEQ ID NO: 117244 - protein, 10 aa, Homo Sapiens
KELGITALHI

SEQ ID NO: 117245 - protein, 10 aa, Homo Sapiens
KELLLQPVTI

SEQ ID NO: 117246 - protein, 10 aa, Homo Sapiens
KELPTVTTNV

SEQ ID NO: 117247 - protein, 10 aa, Homo Sapiens
KELQSAFNEI

SEQ ID NO: 117248 - protein, 10 aa, Homo Sapiens
KELSSKGVKI

SEQ ID NO: 117249 - protein, 10 aa, Homo Sapiens
KEMEAFLVSV

SEQ ID NO: 117250 - protein, 10 aa, Homo Sapiens
KEMEKSFEVV

SEQ ID NO: 117251 - protein, 10 aa, Homo Sapiens
KEMEVKPSSV

SEQ ID NO: 117252 - protein, 10 aa, Homo Sapiens
KEMPSVFQNV

SEQ ID NO: 117253 - protein, 10 aa, Homo Sapiens
KENPNQYNYI

SEQ ID NO: 117254 - protein, 10 aa, Homo Sapiens
KEPEKVNPQI

SEQ ID NO: 117255 - protein, 10 aa, Homo Sapiens
KESDLNGAQI

SEQ ID NO: 117256 - protein, 10 aa, Homo Sapiens
KETLPSNNTV

SEQ ID NO: 117257 - protein, 10 aa, Homo Sapiens
KEVDEQMLNV

SEQ ID NO: 117258 - protein, 10 aa, Homo Sapiens
KEVDSKSQVI

SEQ ID NO: 117259 - protein, 10 aa, Homo Sapiens
KEVEVQAKTV

SEQ ID NO: 117260 - protein, 10 aa, Homo Sapiens
KEWAFEESKI

SEQ ID NO: 117261 - protein, 10 aa, Homo Sapiens
KEYDGFTITI

SEQ ID NO: 117262 - protein, 10 aa, Homo Sapiens
KEYDLAKKYI

SEQ ID NO: 117263 - protein, 10 aa, Homo Sapiens
KEYEELLASV

SEQ ID NO: 117264 - protein, 10 aa, Homo Sapiens
KEYEEYVLTV

SEQ ID NO: 117265 - protein, 10 aa, Homo Sapiens
KEYEGEAILW

SEQ ID NO: 117266 - protein, 10 aa, Homo Sapiens
KEYEPEMGKV

SEQ ID NO: 117267 - protein, 10 aa, Homo Sapiens
KEYEQEFDFI

SEQ ID NO: 117268 - protein, 10 aa, Homo Sapiens
KEYPPHVQKV

SEQ ID NO: 117269 - protein, 10 aa, Homo Sapiens
KEYQKISNQV

SEQ ID NO: 117270 - protein, 10 aa, Homo Sapiens
KGEFGGFGSV

SEQ ID NO: 117271 - protein, 10 aa, Homo Sapiens
KNTVELLTDR

SEQ ID NO: 117272 - protein, 10 aa, Homo Sapiens
LEALPTGTVL

SEQ ID NO: 117273 - protein, 10 aa, Homo Sapiens
LECGLGHRTV

SEQ ID NO: 117274 - protein, 10 aa, Homo Sapiens
LEDEHLLQAI

SEQ ID NO: 117275 - protein, 10 aa, Homo Sapiens
LEDGPKRYTI

SEQ ID NO: 117276 - protein, 10 aa, Homo Sapiens
LEDLFPTTKI

SEQ ID NO: 117277 - protein, 10 aa, Homo Sapiens
LEDPSSGLGV

SEQ ID NO: 117278 - protein, 10 aa, Homo Sapiens
LEEDQAGFRI

SEQ ID NO: 117279 - protein, 10 aa, Homo Sapiens
LEEIGGGQKV

SEQ ID NO: 117280 - protein, 10 aa, Homo Sapiens
LEEKTRLINQ

SEQ ID NO: 117281 - protein, 10 aa, Homo Sapiens
LEEPRGQQEV

SEQ ID NO: 117282 - protein, 10 aa, Homo Sapiens
LEFDRIAEII

SEQ ID NO: 117283 - protein, 10 aa, Homo Sapiens
LEFDSIIQKV

SEQ ID NO: 117284 - protein, 10 aa, Homo Sapiens
LEFDTGIHYI

SEQ ID NO: 117285 - protein, 10 aa, Homo Sapiens
LEFLHANQVI

SEQ ID NO: 117286 - protein, 10 aa, Homo Sapiens
LEFLHSNQVI

SEQ ID NO: 117287 - protein, 10 aa, Homo Sapiens
LEFPAGSVHV

SEQ ID NO: 117288 - protein, 10 aa, Homo Sapiens
LEFPVEVNTV

SEQ ID NO: 117289 - protein, 10 aa, Homo Sapiens
LEGDFAWERV

SEQ ID NO: 117290 - protein, 10 aa, Homo Sapiens
LEIAQNNVEV

SEQ ID NO: 117291 - protein, 10 aa, Homo Sapiens
LEIDFPARAI

SEQ ID NO: 117292 - protein, 10 aa, Homo Sapiens
LEIDPQKVNI

SEQ ID NO: 117293 - protein, 10 aa, Homo Sapiens
LEIEEKINKI

SEQ ID NO: 117294 - protein, 10 aa, Homo Sapiens
LEIEQSMNRV

SEQ ID NO: 117295 - protein, 10 aa, Homo Sapiens
LEINGRNNLI

SEQ ID NO: 117296 - protein, 10 aa, Homo Sapiens
LEINPDHSII

SEQ ID NO: 117297 - protein, 10 aa, Homo Sapiens
LEIPHQGVQV

SEQ ID NO: 117298 - protein, 10 aa, Homo Sapiens
LEIVPNGITL

SEQ ID NO: 117299 - protein, 10 aa, Homo Sapiens
LEIWKESTTV

SEQ ID NO: 117300 - protein, 10 aa, Homo Sapiens
LEKEDLGTRI

SEQ ID NO: 117301 - protein, 10 aa, Homo Sapiens
LELDLSGQQV

SEQ ID NO: 117302 - protein, 10 aa, Homo Sapiens
LELDTIKNLV

SEQ ID NO: 117303 - protein, 10 aa, Homo Sapiens
LELQHALQAI

SEQ ID NO: 117304 - protein, 10 aa, Homo Sapiens
LEMNLGLQKI

SEQ ID NO: 117305 - protein, 10 aa, Homo Sapiens
LENDPDCRHV

SEQ ID NO: 117306 - protein, 10 aa, Homo Sapiens
LEPDKQEALI

SEQ ID NO: 117307 - protein, 10 aa, Homo Sapiens
LEPEYYFSTI

SEQ ID NO: 117308 - protein, 10 aa, Homo Sapiens
LEQGNNSRTV

SEQ ID NO: 117309 - protein, 10 aa, Homo Sapiens
LEQPVGMTTV

SEQ ID NO: 117310 - protein, 10 aa, Homo Sapiens
LERQGQGQLV

SEQ ID NO: 117311 - protein, 10 aa, Homo Sapiens
LESPPKGVTI

SEQ ID NO: 117312 - protein, 10 aa, Homo Sapiens
LEVDGQKVEV

SEQ ID NO: 117313 - protein, 10 aa, Homo Sapiens
LEVDTKKQIV

SEQ ID NO: 117314 - protein, 10 aa, Homo Sapiens
LEVEHPAAKV

SEQ ID NO: 117315 - protein, 10 aa, Homo Sapiens
LEYFKGAIPL

SEQ ID NO: 117316 - protein, 10 aa, Homo Sapiens
LEYGKAELEI

SEQ ID NO: 117317 - protein, 10 aa, Homo Sapiens
LEYGVPVTLI

SEQ ID NO: 117318 - protein, 10 aa, Homo Sapiens
LEYPDFYRKL

SEQ ID NO: 117319 - protein, 10 aa, Homo Sapiens
LEYTQILQTV

SEQ ID NO: 117320 - protein, 10 aa, Homo Sapiens
LNATCKVNLL

SEQ ID NO: 117321 - protein, 10 aa, Homo Sapiens
LSHGSSTFSL

SEQ ID NO: 117322 - protein, 10 aa, Homo Sapiens
MEADARSIYV

SEQ ID NO: 117323 - protein, 10 aa, Homo Sapiens
MEEGSIGRFI

SEQ ID NO: 117324 - protein, 10 aa, Homo Sapiens
MEHPYFYTVV

SEQ ID NO: 117325 - protein, 10 aa, Homo Sapiens
MEIQVNGGTV

SEQ ID NO: 117326 - protein, 10 aa, Homo Sapiens
MERNADKLTV

SEQ ID NO: 117327 - protein, 10 aa, Homo Sapiens
MEVELPYRYI

SEQ ID NO: 117328 - protein, 10 aa, Homo Sapiens
MEVKPSSVTA

SEQ ID NO: 117329 - protein, 10 aa, Homo Sapiens
MEYKGYLVSV

SEQ ID NO: 117330 - protein, 10 aa, Homo Sapiens
MEYLEGNNFV

SEQ ID NO: 117331 - protein, 10 aa, Homo Sapiens
MPASKQAVTV

SEQ ID NO: 117332 - protein, 10 aa, Homo Sapiens
NESELFGRTI

SEQ ID NO: 117333 - protein, 10 aa, Homo Sapiens
PEHDFSKISI

SEQ ID NO: 117334 - protein, 10 aa, Homo Sapiens
PEYDGRGVLI

SEQ ID NO: 117335 - protein, 10 aa, Homo Sapiens
PEYGGFTSYI

SEQ ID NO: 117336 - protein, 10 aa, Homo Sapiens
QEAEARFREI

SEQ ID NO: 117337 - protein, 10 aa, Homo Sapiens
QEAEMAQNAV

SEQ ID NO: 117338 - protein, 10 aa, Homo Sapiens
QEAEQLKNQI

SEQ ID NO: 117339 - protein, 10 aa, Homo Sapiens
QEAEQLRNQI

SEQ ID NO: 117340 - protein, 10 aa, Homo Sapiens
QEALNLFKSI

SEQ ID NO: 117341 - protein, 10 aa, Homo Sapiens
QEENITRALI

SEQ ID NO: 117342 - protein, 10 aa, Homo Sapiens
QEFAGRLNSV

SEQ ID NO: 117343 - protein, 10 aa, Homo Sapiens
QEFELPYVSV

SEQ ID NO: 117344 - protein, 10 aa, Homo Sapiens
QEFKEAFNMI

SEQ ID NO: 117345 - protein, 10 aa, Homo Sapiens
QEHKAEIITV

SEQ ID NO: 117346 - protein, 10 aa, Homo Sapiens
QEIASLDVKI

SEQ ID NO: 117347 - protein, 10 aa, Homo Sapiens
QEIATLDNKI

SEQ ID NO: 117348 - protein, 10 aa, Homo Sapiens
QEIDGRFTSI

SEQ ID NO: 117349 - protein, 10 aa, Homo Sapiens
QEIEVRPGIV

SEQ ID NO: 117350 - protein, 10 aa, Homo Sapiens
QEIKDLKQKI

SEQ ID NO: 117351 - protein, 10 aa, Homo Sapiens
QEINVEAKHV

SEQ ID NO: 117352 - protein, 10 aa, Homo Sapiens
QEIPDLSSNV

SEQ ID NO: 117353 - protein, 10 aa, Homo Sapiens
QEIPFRLREI

SEQ ID NO: 117354 - protein, 10 aa, Homo Sapiens
QEIQEGQINI

SEQ ID NO: 117355 - protein, 10 aa, Homo Sapiens
QEIRSQIVSV

SEQ ID NO: 117356 - protein, 10 aa, Homo Sapiens
QELDMKQRTI

SEQ ID NO: 117357 - protein, 10 aa, Homo Sapiens
QELGEARATV

SEQ ID NO: 117358 - protein, 10 aa, Homo Sapiens
QELQAKIEAL

SEQ ID NO: 117359 - protein, 10 aa, Homo Sapiens
QELQAKLAEI

SEQ ID NO: 117360 - protein, 10 aa, Homo Sapiens
QEMEKMTKKI

SEQ ID NO: 117361 - protein, 10 aa, Homo Sapiens
QEMKSRILVI

SEQ ID NO: 117362 - protein, 10 aa, Homo Sapiens
QEMPVQFQVV

SEQ ID NO: 117363 - protein, 10 aa, Homo Sapiens
QENPFLFSTI

SEQ ID NO: 117364 - protein, 10 aa, Homo Sapiens
QENPGPWGEL

SEQ ID NO: 117365 - protein, 10 aa, Homo Sapiens
QEQDPTNLYI

SEQ ID NO: 117366 - protein, 10 aa, Homo Sapiens
QERIDAWAQL

SEQ ID NO: 117367 - protein, 10 aa, Homo Sapiens
QEVAVKEQLT

SEQ ID NO: 117368 - protein, 10 aa, Homo Sapiens
QEVFEKATFI

SEQ ID NO: 117369 - protein, 10 aa, Homo Sapiens
QEVNSALSKI

SEQ ID NO: 117370 - protein, 10 aa, Homo Sapiens
QEVYIPFSAI

SEQ ID NO: 117371 - protein, 10 aa, Homo Sapiens
QEWDGKESTI

SEQ ID NO: 117372 - protein, 10 aa, Homo Sapiens
QEWDKYCHYV

SEQ ID NO: 117373 - protein, 10 aa, Homo Sapiens
QEYDALAKVI

SEQ ID NO: 117374 - protein, 10 aa, Homo Sapiens
QEYLGKFRRL

SEQ ID NO: 117375 - protein, 10 aa, Homo Sapiens
QEYLPSQITI

SEQ ID NO: 117376 - protein, 10 aa, Homo Sapiens
QEYNVGGKVI

SEQ ID NO: 117377 - protein, 10 aa, Homo Sapiens
QEYQEKGVRV

SEQ ID NO: 117378 - protein, 10 aa, Homo Sapiens
REAEDMVQKV

SEQ ID NO: 117379 - protein, 10 aa, Homo Sapiens
REAEFTKSIA

SEQ ID NO: 117380 - protein, 10 aa, Homo Sapiens
REAEHLYHTL

SEQ ID NO: 117381 - protein, 10 aa, Homo Sapiens
REAEMRNSIL

SEQ ID NO: 117382 - protein, 10 aa, Homo Sapiens
REDEFHISVI

SEQ ID NO: 117383 - protein, 10 aa, Homo Sapiens
REDGSHILTV

SEQ ID NO: 117384 - protein, 10 aa, Homo Sapiens
REDLNQVITI

SEQ ID NO: 117385 - protein, 10 aa, Homo Sapiens
REDPKEGIKI

SEQ ID NO: 117386 - protein, 10 aa, Homo Sapiens
REDVNRNVYV

SEQ ID NO: 117387 - protein, 10 aa, Homo Sapiens
REDWKPVLTI

SEQ ID NO: 117388 - protein, 10 aa, Homo Sapiens
REEDAEKAVI

SEQ ID NO: 117389 - protein, 10 aa, Homo Sapiens
REEEHKPVAV

SEQ ID NO: 117390 - protein, 10 aa, Homo Sapiens
REESGARINI

SEQ ID NO: 117391 - protein, 10 aa, Homo Sapiens
REFDAFVETL

SEQ ID NO: 117392 - protein, 10 aa, Homo Sapiens
REFDDPGQQV

SEQ ID NO: 117393 - protein, 10 aa, Homo Sapiens
REFDKRFTSV

SEQ ID NO: 117394 - protein, 10 aa, Homo Sapiens
REFEKMNQSL

SEQ ID NO: 117395 - protein, 10 aa, Homo Sapiens
REFGNLHNTV

SEQ ID NO: 117396 - protein, 10 aa, Homo Sapiens
REFKGAVREI

SEQ ID NO: 117397 - protein, 10 aa, Homo Sapiens
REFLLGFQFI

SEQ ID NO: 117398 - protein, 10 aa, Homo Sapiens
REFSDFIQAV

SEQ ID NO: 117399 - protein, 10 aa, Homo Sapiens
REGKIAGRAV

SEQ ID NO: 117400 - protein, 10 aa, Homo Sapiens
REHANKLIEV

SEQ ID NO: 117401 - protein, 10 aa, Homo Sapiens
REHEHVVECI

SEQ ID NO: 117402 - protein, 10 aa, Homo Sapiens
REHEQFQHAI

SEQ ID NO: 117403 - protein, 10 aa, Homo Sapiens
REIDKKMNSI

SEQ ID NO: 117404 - protein, 10 aa, Homo Sapiens
REIEATNAVL

SEQ ID NO: 117405 - protein, 10 aa, Homo Sapiens
REIEENQKRI

SEQ ID NO: 117406 - protein, 10 aa, Homo Sapiens
REIEGRAIRL

SEQ ID NO: 117407 - protein, 10 aa, Homo Sapiens
REIEHLSRLY

SEQ ID NO: 117408 - protein, 10 aa, Homo Sapiens
REIENEDMRV

SEQ ID NO: 117409 - protein, 10 aa, Homo Sapiens
REIFLSQPIL

SEQ ID NO: 117410 - protein, 10 aa, Homo Sapiens
REILTLLQGV

SEQ ID NO: 117411 - protein, 10 aa, Homo Sapiens
REIMGTPEYV

SEQ ID NO: 117412 - protein, 10 aa, Homo Sapiens
REINPAPYTI

SEQ ID NO: 117413 - protein, 10 aa, Homo Sapiens
REIQEREMKV

SEQ ID NO: 117414 - protein, 10 aa, Homo Sapiens
REIQQRVVRV

SEQ ID NO: 117415 - protein, 10 aa, Homo Sapiens
REISDGLVEI

SEQ ID NO: 117416 - protein, 10 aa, Homo Sapiens
REIVLSYSYI

SEQ ID NO: 117417 - protein, 10 aa, Homo Sapiens
REIVSGMKYI

SEQ ID NO: 117418 - protein, 10 aa, Homo Sapiens
REIYDIISMV

SEQ ID NO: 117419 - protein, 10 aa, Homo Sapiens
REKELAKVTI

SEQ ID NO: 117420 - protein, 10 aa, Homo Sapiens
REKLPSSEVV

SEQ ID NO: 117421 - protein, 10 aa, Homo Sapiens
RELAQQIQKV

SEQ ID NO: 117422 - protein, 10 aa, Homo Sapiens
RELDLQRNYI

SEQ ID NO: 117423 - protein, 10 aa, Homo Sapiens
RELDLRGYKI

SEQ ID NO: 117424 - protein, 10 aa, Homo Sapiens
RELDLYDNQI

SEQ ID NO: 117425 - protein, 10 aa, Homo Sapiens
RELDVSYVLV

SEQ ID NO: 117426 - protein, 10 aa, Homo Sapiens
RELENGNLEV

SEQ ID NO: 117427 - protein, 10 aa, Homo Sapiens
RELEQYGQCV

SEQ ID NO: 117428 - protein, 10 aa, Homo Sapiens
RELLPSFHEV

SEQ ID NO: 117429 - protein, 10 aa, Homo Sapiens
RELPAGINSI

SEQ ID NO: 117430 - protein, 10 aa, Homo Sapiens
RELQPGVKAV

SEQ ID NO: 117431 - protein, 10 aa, Homo Sapiens
RELVSGGRSV

SEQ ID NO: 117432 - protein, 10 aa, Homo Sapiens
REMENIIATV

SEQ ID NO: 117433 - protein, 10 aa, Homo Sapiens
REMEQKHSTI

SEQ ID NO: 117434 - protein, 10 aa, Homo Sapiens
REMPLLKSEV

SEQ ID NO: 117435 - protein, 10 aa, Homo Sapiens
REMQSVVQLI

SEQ ID NO: 117436 - protein, 10 aa, Homo Sapiens
RENGKTVIRV

SEQ ID NO: 117437 - protein, 10 aa, Homo Sapiens
RENPQLLQQI

SEQ ID NO: 117438 - protein, 10 aa, Homo Sapiens
REPDTEVITV

SEQ ID NO: 117439 - protein, 10 aa, Homo Sapiens
REPEKRPPTV

SEQ ID NO: 117440 - protein, 10 aa, Homo Sapiens
REPERIPVTV

SEQ ID NO: 117441 - protein, 10 aa, Homo Sapiens
REPQLPTAEI

SEQ ID NO: 117442 - protein, 10 aa, Homo Sapiens
REQPYYLNLI

SEQ ID NO: 117443 - protein, 10 aa, Homo Sapiens
RERHQVIQTV

SEQ ID NO: 117444 - protein, 10 aa, Homo Sapiens
RESTGAQVQV

SEQ ID NO: 117445 - protein, 10 aa, Homo Sapiens
RETADVIAKV

SEQ ID NO: 117446 - protein, 10 aa, Homo Sapiens
RETDFYLQSV

SEQ ID NO: 117447 - protein, 10 aa, Homo Sapiens
RETSHVTMVV

SEQ ID NO: 117448 - protein, 10 aa, Homo Sapiens
REVDDLGPEV

SEQ ID NO: 117449 - protein, 10 aa, Homo Sapiens
REVEVEYSTV

SEQ ID NO: 117450 - protein, 10 aa, Homo Sapiens
REVPEYLNHV

SEQ ID NO: 117451 - protein, 10 aa, Homo Sapiens
REVQAEIGKL

SEQ ID NO: 117452 - protein, 10 aa, Homo Sapiens
REVSVELAKV

SEQ ID NO: 117453 - protein, 10 aa, Homo Sapiens
REVTSPNSTV

SEQ ID NO: 117454 - protein, 10 aa, Homo Sapiens
REWEAQDMRV

SEQ ID NO: 117455 - protein, 10 aa, Homo Sapiens
REWYSAKITI

SEQ ID NO: 117456 - protein, 10 aa, Homo Sapiens
REYDTSKIEA

SEQ ID NO: 117457 - protein, 10 aa, Homo Sapiens
REYEKRVSAI

SEQ ID NO: 117458 - protein, 10 aa, Homo Sapiens
REYELRKNNF

SEQ ID NO: 117459 - protein, 10 aa, Homo Sapiens
REYHSVGVQV

SEQ ID NO: 117460 - protein, 10 aa, Homo Sapiens
REYIDRMIKI

SEQ ID NO: 117461 - protein, 10 aa, Homo Sapiens
REYPNLVTIY

SEQ ID NO: 117462 - protein, 10 aa, Homo Sapiens
REYTSRESKI

SEQ ID NO: 117463 - protein, 10 aa, Homo Sapiens
RKFVGNLELI

SEQ ID NO: 117464 - protein, 10 aa, Homo Sapiens
SEAAPLLVHV

SEQ ID NO: 117465 - protein, 10 aa, Homo Sapiens
SEAEPTLTHM

SEQ ID NO: 117466 - protein, 10 aa, Homo Sapiens
SEASPSREAI

SEQ ID NO: 117467 - protein, 10 aa, Homo Sapiens
SEASYLITSV

SEQ ID NO: 117468 - protein, 10 aa, Homo Sapiens
SECEQLVKEV

SEQ ID NO: 117469 - protein, 10 aa, Homo Sapiens
SECPWLGIRI

SEQ ID NO: 117470 - protein, 10 aa, Homo Sapiens
SEDGRSPISI

SEQ ID NO: 117471 - protein, 10 aa, Homo Sapiens
SEDHRRHIEI

SEQ ID NO: 117472 - protein, 10 aa, Homo Sapiens
SEDKEMVTTV

SEQ ID NO: 117473 - protein, 10 aa, Homo Sapiens
SEDQRQVISV

SEQ ID NO: 117474 - protein, 10 aa, Homo Sapiens
SEDRPTGLVV

SEQ ID NO: 117475 - protein, 10 aa, Homo Sapiens
SEFDFSWSKI

SEQ ID NO: 117476 - protein, 10 aa, Homo Sapiens
SEFEGGKSTV

SEQ ID NO: 117477 - protein, 10 aa, Homo Sapiens
SEFENFKTKM

SEQ ID NO: 117478 - protein, 10 aa, Homo Sapiens
SEFHKHYARI

SEQ ID NO: 117479 - protein, 10 aa, Homo Sapiens
SEFIDLSEKI

SEQ ID NO: 117480 - protein, 10 aa, Homo Sapiens
SEFKEFSQSF

SEQ ID NO: 117481 - protein, 10 aa, Homo Sapiens
SEFNFDLHTV

SEQ ID NO: 117482 - protein, 10 aa, Homo Sapiens
SEFQKAVKLV

SEQ ID NO: 117483 - protein, 10 aa, Homo Sapiens
SEFTGVWKYI

SEQ ID NO: 117484 - protein, 10 aa, Homo Sapiens
SEFVFNNPNI

SEQ ID NO: 117485 - protein, 10 aa, Homo Sapiens
SEFYKNLTSI

SEQ ID NO: 117486 - protein, 10 aa, Homo Sapiens
SEGSVSTKQI

SEQ ID NO: 117487 - protein, 10 aa, Homo Sapiens
SEHLAFERQV

SEQ ID NO: 117488 - protein, 10 aa, Homo Sapiens
SEHPNVTLTI

SEQ ID NO: 117489 - protein, 10 aa, Homo Sapiens
SEHSGPPIVI

SEQ ID NO: 117490 - protein, 10 aa, Homo Sapiens
SEIATTGVRV

SEQ ID NO: 117491 - protein, 10 aa, Homo Sapiens
SEIDQLFRIF

SEQ ID NO: 117492 - protein, 10 aa, Homo Sapiens
SEIEAKVRYV

SEQ ID NO: 117493 - protein, 10 aa, Homo Sapiens
SEIESKAPTV

SEQ ID NO: 117494 - protein, 10 aa, Homo Sapiens
SEIGGLSEQI

SEQ ID NO: 117495 - protein, 10 aa, Homo Sapiens
SEIHPGMLLI

SEQ ID NO: 117496 - protein, 10 aa, Homo Sapiens
SEILERLQKI

SEQ ID NO: 117497 - protein, 10 aa, Homo Sapiens
SEILIPLQSV

SEQ ID NO: 117498 - protein, 10 aa, Homo Sapiens
SEILKNLSQV

SEQ ID NO: 117499 - protein, 10 aa, Homo Sapiens
SEINLPGNCV

SEQ ID NO: 117500 - protein, 10 aa, Homo Sapiens
SEIPLTLHSV

SEQ ID NO: 117501 - protein, 10 aa, Homo Sapiens
SEIRAPIVTV

SEQ ID NO: 117502 - protein, 10 aa, Homo Sapiens
SEISDEFKVV

SEQ ID NO: 117503 - protein, 10 aa, Homo Sapiens
SEIVQNGRLI

SEQ ID NO: 117504 - protein, 10 aa, Homo Sapiens
SEKDAVSREI

SEQ ID NO: 117505 - protein, 10 aa, Homo Sapiens
SEKGASSPLI

SEQ ID NO: 117506 - protein, 10 aa, Homo Sapiens
SELANKLITV

SEQ ID NO: 117507 - protein, 10 aa, Homo Sapiens
SELEKKLVAI

SEQ ID NO: 117508 - protein, 10 aa, Homo Sapiens
SELGYVFQAI

SEQ ID NO: 117509 - protein, 10 aa, Homo Sapiens
SELRSICTTV

SEQ ID NO: 117510 - protein, 10 aa, Homo Sapiens
SELVSNGVQI

SEQ ID NO: 117511 - protein, 10 aa, Homo Sapiens
SEMDSVLMKI

SEQ ID NO: 117512 - protein, 10 aa, Homo Sapiens
SENELFGATI

SEQ ID NO: 117513 - protein, 10 aa, Homo Sapiens
SENPLPTVEI

SEQ ID NO: 117514 - protein, 10 aa, Homo Sapiens
SENQESFRTI

SEQ ID NO: 117515 - protein, 10 aa, Homo Sapiens
SENSYVSPRI

SEQ ID NO: 117516 - protein, 10 aa, Homo Sapiens
SEQPLPNKTI

SEQ ID NO: 117517 - protein, 10 aa, Homo Sapiens
SERDLQELSI

SEQ ID NO: 117518 - protein, 10 aa, Homo Sapiens
SERKTKFAKV

SEQ ID NO: 117519 - protein, 10 aa, Homo Sapiens
SESEAKSVKV

SEQ ID NO: 117520 - protein, 10 aa, Homo Sapiens
SESLLRGIYA

SEQ ID NO: 117521 - protein, 10 aa, Homo Sapiens
SESRPLPRVH

SEQ ID NO: 117522 - protein, 10 aa, Homo Sapiens
SESRYPQALV

SEQ ID NO: 117523 - protein, 10 aa, Homo Sapiens
SETGALKTFI

SEQ ID NO: 117524 - protein, 10 aa, Homo Sapiens
SEVANAGIKL

SEQ ID NO: 117525 - protein, 10 aa, Homo Sapiens
SEVGVGGAQV

SEQ ID NO: 117526 - protein, 10 aa, Homo Sapiens
SEVNLKLQNI

SEQ ID NO: 117527 - protein, 10 aa, Homo Sapiens
SEVPVITPYL

SEQ ID NO: 117528 - protein, 10 aa, Homo Sapiens
SEWERFISKV

SEQ ID NO: 117529 - protein, 10 aa, Homo Sapiens
SEYEATNLLI

SEQ ID NO: 117530 - protein, 10 aa, Homo Sapiens
SEYHAAFNSM

SEQ ID NO: 117531 - protein, 10 aa, Homo Sapiens
SEYHRIQHQL

SEQ ID NO: 117532 - protein, 10 aa, Homo Sapiens
SEYITHEITV

SEQ ID NO: 117533 - protein, 10 aa, Homo Sapiens
SEYLSQNPRV

SEQ ID NO: 117534 - protein, 10 aa, Homo Sapiens
SEYNVTNNSV

SEQ ID NO: 117535 - protein, 10 aa, Homo Sapiens
SEYPIVDGKL

SEQ ID NO: 117536 - protein, 10 aa, Homo Sapiens
SEYVEKFYRI

SEQ ID NO: 117537 - protein, 10 aa, Homo Sapiens
SEYVRNQQTI

SEQ ID NO: 117538 - protein, 10 aa, Homo Sapiens
SMDNNRSLDL

SEQ ID NO: 117539 - protein, 10 aa, Homo Sapiens
STLANVVTSL

SEQ ID NO: 117540 - protein, 10 aa, Homo Sapiens
TAKAAPLPSV

SEQ ID NO: 117541 - protein, 10 aa, Homo Sapiens
TEAEVRGLCI

SEQ ID NO: 117542 - protein, 10 aa, Homo Sapiens
TEAQYKFIYV

SEQ ID NO: 117543 - protein, 10 aa, Homo Sapiens
TEDGDSFLHL

SEQ ID NO: 117544 - protein, 10 aa, Homo Sapiens
TEFEERSATI

SEQ ID NO: 117545 - protein, 10 aa, Homo Sapiens
TEFQGKRMHV

SEQ ID NO: 117546 - protein, 10 aa, Homo Sapiens
TEGPETKPVL

SEQ ID NO: 117547 - protein, 10 aa, Homo Sapiens
TEHKALTSEI

SEQ ID NO: 117548 - protein, 10 aa, Homo Sapiens
TEHSGLTTGV

SEQ ID NO: 117549 - protein, 10 aa, Homo Sapiens
TEHVEAFITI

SEQ ID NO: 117550 - protein, 10 aa, Homo Sapiens
TEIAKRLNTI

SEQ ID NO: 117551 - protein, 10 aa, Homo Sapiens
TEIEDSHTLV

SEQ ID NO: 117552 - protein, 10 aa, Homo Sapiens
TEIESDLRSV

SEQ ID NO: 117553 - protein, 10 aa, Homo Sapiens
TEIGPMSCFI

SEQ ID NO: 117554 - protein, 10 aa, Homo Sapiens
TEIGQKHGLV

SEQ ID NO: 117555 - protein, 10 aa, Homo Sapiens
TEINQHPVTV

SEQ ID NO: 117556 - protein, 10 aa, Homo Sapiens
TEIPLQLVTV

SEQ ID NO: 117557 - protein, 10 aa, Homo Sapiens
TEIREIITSI

SEQ ID NO: 117558 - protein, 10 aa, Homo Sapiens
TEIREKLAKM

SEQ ID NO: 117559 - protein, 10 aa, Homo Sapiens
TELKEKLRSI

SEQ ID NO: 117560 - protein, 10 aa, Homo Sapiens
TELMNILNKV

SEQ ID NO: 117561 - protein, 10 aa, Homo Sapiens
TELQRAWATI

SEQ ID NO: 117562 - protein, 10 aa, Homo Sapiens
TEMESMKTTL

SEQ ID NO: 117563 - protein, 10 aa, Homo Sapiens
TEMQQILTRV

SEQ ID NO: 117564 - protein, 10 aa, Homo Sapiens
TENPGKSISV

SEQ ID NO: 117565 - protein, 10 aa, Homo Sapiens
TENPHGVKAV

SEQ ID NO: 117566 - protein, 10 aa, Homo Sapiens
TEPDEAFRQI

SEQ ID NO: 117567 - protein, 10 aa, Homo Sapiens
TEPYFNFTSI

SEQ ID NO: 117568 - protein, 10 aa, Homo Sapiens
TEQGGAHFSV

SEQ ID NO: 117569 - protein, 10 aa, Homo Sapiens
TEQQQRFHEI

SEQ ID NO: 117570 - protein, 10 aa, Homo Sapiens
TESSTAGLKV

SEQ ID NO: 117571 - protein, 10 aa, Homo Sapiens
TEVEKIKTTV

SEQ ID NO: 117572 - protein, 10 aa, Homo Sapiens
TEYDCKGFHI

SEQ ID NO: 117573 - protein, 10 aa, Homo Sapiens
TEYENFKVQV

SEQ ID NO: 117574 - protein, 10 aa, Homo Sapiens
TEYGVHFHRV

SEQ ID NO: 117575 - protein, 10 aa, Homo Sapiens
VEAELKSSTV

SEQ ID NO: 117576 - protein, 10 aa, Homo Sapiens
VECQSHRLTV

SEQ ID NO: 117577 - protein, 10 aa, Homo Sapiens
VEDDARGTVV

SEQ ID NO: 117578 - protein, 10 aa, Homo Sapiens
VEDDSRALNI

SEQ ID NO: 117579 - protein, 10 aa, Homo Sapiens
VEDEHSTLLI

SEQ ID NO: 117580 - protein, 10 aa, Homo Sapiens
VEDGPREILI

SEQ ID NO: 117581 - protein, 10 aa, Homo Sapiens
VEFAKQLATV

SEQ ID NO: 117582 - protein, 10 aa, Homo Sapiens
VEFRNFKIIY

SEQ ID NO: 117583 - protein, 10 aa, Homo Sapiens
VEGHGVNPSV

SEQ ID NO: 117584 - protein, 10 aa, Homo Sapiens
VEGRDVVALI

SEQ ID NO: 117585 - protein, 10 aa, Homo Sapiens
VEHQNGKVVV

SEQ ID NO: 117586 - protein, 10 aa, Homo Sapiens
VEIAKQSVTI

SEQ ID NO: 117587 - protein, 10 aa, Homo Sapiens
VEIDNKNKTI

SEQ ID NO: 117588 - protein, 10 aa, Homo Sapiens
VEISLPLSTV

SEQ ID NO: 117589 - protein, 10 aa, Homo Sapiens
VEITPTSSRI

SEQ ID NO: 117590 - protein, 10 aa, Homo Sapiens
VEIVGGATRI

SEQ ID NO: 117591 - protein, 10 aa, Homo Sapiens
VELDPSKVEV

SEQ ID NO: 117592 - protein, 10 aa, Homo Sapiens
VENPSARITI

SEQ ID NO: 117593 - protein, 10 aa, Homo Sapiens
VEQVHRGTTI

SEQ ID NO: 117594 - protein, 10 aa, Homo Sapiens
VERIWGDCTV

SEQ ID NO: 117595 - protein, 10 aa, Homo Sapiens
VESGDLQKEI

SEQ ID NO: 117596 - protein, 10 aa, Homo Sapiens
VETDGFISYI

SEQ ID NO: 117597 - protein, 10 aa, Homo Sapiens
VETQSGKTVI

SEQ ID NO: 117598 - protein, 10 aa, Homo Sapiens
VEVLPTETEI

SEQ ID NO: 117599 - protein, 10 aa, Homo Sapiens
VEWDPTGRYV

SEQ ID NO: 117600 - protein, 10 aa, Homo Sapiens
VEYETKAGRI

SEQ ID NO: 117601 - protein, 10 aa, Homo Sapiens
VEYTEKMVSI

SEQ ID NO: 117602 - protein, 10 aa, Homo Sapiens
VQLIRESLKV

SEQ ID NO: 117603 - protein, 10 aa, Homo Sapiens
VVPPFLQPEV

SEQ ID NO: 117604 - protein, 10 aa, Homo Sapiens
WEAYLSRLGV

SEQ ID NO: 117605 - protein, 10 aa, Homo Sapiens
WEDEGVRACY

SEQ ID NO: 117606 - protein, 10 aa, Homo Sapiens
WEMDNMLIQI

SEQ ID NO: 117607 - protein, 10 aa, Homo Sapiens
WESEPHPYVF

SEQ ID NO: 117608 - protein, 10 aa, Homo Sapiens
YEATTGNLHV

SEQ ID NO: 117609 - protein, 10 aa, Homo Sapiens
YEDGAFGIRI

SEQ ID NO: 117610 - protein, 10 aa, Homo Sapiens
YEEDAIVRMI

SEQ ID NO: 117611 - protein, 10 aa, Homo Sapiens
YEEDQGSKLI

SEQ ID NO: 117612 - protein, 10 aa, Homo Sapiens
YEETRGVLKV

SEQ ID NO: 117613 - protein, 10 aa, Homo Sapiens
YEFFAKRQLV

SEQ ID NO: 117614 - protein, 10 aa, Homo Sapiens
YEHDDIVSTV

SEQ ID NO: 117615 - protein, 10 aa, Homo Sapiens
YEIQKGQALI

SEQ ID NO: 117616 - protein, 10 aa, Homo Sapiens
YELDHPGFQI

SEQ ID NO: 117617 - protein, 10 aa, Homo Sapiens
YELDLGLNHV

SEQ ID NO: 117618 - protein, 10 aa, Homo Sapiens
YELLFKEGVM

SEQ ID NO: 117619 - protein, 10 aa, Homo Sapiens
YEVLDHCSSI

SEQ ID NO: 117620 - protein, 10 aa, Homo Sapiens
YEYADERLRI

SEQ ID NO: 117621 - protein, 10 aa, Homo Sapiens
YEYASKGIFV

SEQ ID NO: 117622 - protein, 10 aa, Homo Sapiens
YEYEGGHIKT

SEQ ID NO: 117623 - protein, 10 aa, Homo Sapiens
YGIYNVTMVV

SEQ ID NO: 117624 - protein, 11 aa, Homo Sapiens
AEAADVGAQMI

SEQ ID NO: 117625 - protein, 11 aa, Homo Sapiens
AEADQGLCRQI

SEQ ID NO: 117626 - protein, 11 aa, Homo Sapiens
AEAERVGLHKV

SEQ ID NO: 117627 - protein, 11 aa, Homo Sapiens
AEAVASLATRI

SEQ ID NO: 117628 - protein, 11 aa, Homo Sapiens
AEDDNIYQQKI

SEQ ID NO: 117629 - protein, 11 aa, Homo Sapiens
AEDEGTQRLTC

SEQ ID NO: 117630 - protein, 11 aa, Homo Sapiens
AEDGGLKKCKI

SEQ ID NO: 117631 - protein, 11 aa, Homo Sapiens
AEDGTTSKYFV

SEQ ID NO: 117632 - protein, 11 aa, Homo Sapiens
AEEESLKERLI

SEQ ID NO: 117633 - protein, 11 aa, Homo Sapiens
AEEPAASGRII

SEQ ID NO: 117634 - protein, 11 aa, Homo Sapiens
AEFEWENKVTV

SEQ ID NO: 117635 - protein, 11 aa, Homo Sapiens
AEFGAAGVNRL

SEQ ID NO: 117636 - protein, 11 aa, Homo Sapiens
AEFGPDSGGRV

SEQ ID NO: 117637 - protein, 11 aa, Homo Sapiens
AEFLIGQGAHV

SEQ ID NO: 117638 - protein, 11 aa, Homo Sapiens
AEFPMSPVTSV

SEQ ID NO: 117639 - protein, 11 aa, Homo Sapiens
AEFQTDSQGKI

SEQ ID NO: 117640 - protein, 11 aa, Homo Sapiens
AEFVPLIMNTI

SEQ ID NO: 117641 - protein, 11 aa, Homo Sapiens
AEFWDGKIVLV

SEQ ID NO: 117642 - protein, 11 aa, Homo Sapiens
AEGQGQGQLLI

SEQ ID NO: 117643 - protein, 11 aa, Homo Sapiens
AEHHKDICLTV

SEQ ID NO: 117644 - protein, 11 aa, Homo Sapiens
AEIDPKQLVDI

SEQ ID NO: 117645 - protein, 11 aa, Homo Sapiens
AEIDSIHQLVV

SEQ ID NO: 117646 - protein, 11 aa, Homo Sapiens
AEIEEDKARRI

SEQ ID NO: 117647 - protein, 11 aa, Homo Sapiens
AEIEETYANFI

SEQ ID NO: 117648 - protein, 11 aa, Homo Sapiens
AEIGADGIAVI

SEQ ID NO: 117649 - protein, 11 aa, Homo Sapiens
AEINSRTGSKL

SEQ ID NO: 117650 - protein, 11 aa, Homo Sapiens
AEIQHAEEFLI

SEQ ID NO: 117651 - protein, 11 aa, Homo Sapiens
AEISSKSPVAV

SEQ ID NO: 117652 - protein, 11 aa, Homo Sapiens
AEISSNSLERI

SEQ ID NO: 117653 - protein, 11 aa, Homo Sapiens
AELRPDSPAHV

SEQ ID NO: 117654 - protein, 11 aa, Homo Sapiens
AENPFQEPRTV

SEQ ID NO: 117655 - protein, 11 aa, Homo Sapiens
AENSLLAKVFI

SEQ ID NO: 117656 - protein, 11 aa, Homo Sapiens
AESEGLSLLNV

SEQ ID NO: 117657 - protein, 11 aa, Homo Sapiens
AESRQPSENSV

SEQ ID NO: 117658 - protein, 11 aa, Homo Sapiens
AESTLPGRHTV

SEQ ID NO: 117659 - protein, 11 aa, Homo Sapiens
AETGLLGAHFV

SEQ ID NO: 117660 - protein, 11 aa, Homo Sapiens
AEVDASVVREI

SEQ ID NO: 117661 - protein, 11 aa, Homo Sapiens
AEVEQNGGLFI

SEQ ID NO: 117662 - protein, 11 aa, Homo Sapiens
AEWDKSGVVTV

SEQ ID NO: 117663 - protein, 11 aa, Homo Sapiens
AEWEESQTQKI

SEQ ID NO: 117664 - protein, 11 aa, Homo Sapiens
AEWVRAGATTV

SEQ ID NO: 117665 - protein, 11 aa, Homo Sapiens
AEYAHPLETLI

SEQ ID NO: 117666 - protein, 11 aa, Homo Sapiens
AEYANYYTREV

SEQ ID NO: 117667 - protein, 11 aa, Homo Sapiens
AEYEKTIAQMI

SEQ ID NO: 117668 - protein, 11 aa, Homo Sapiens
AEYFPTKPMFV

SEQ ID NO: 117669 - protein, 11 aa, Homo Sapiens
AEYGHFVDIRI

SEQ ID NO: 117670 - protein, 11 aa, Homo Sapiens
DKGEFGGFGSV

SEQ ID NO: 117671 - protein, 11 aa, Homo Sapiens
EAHYLSYLNNL

SEQ ID NO: 117672 - protein, 11 aa, Homo Sapiens
FEAHSDYIRCI

SEQ ID NO: 117673 - protein, 11 aa, Homo Sapiens
FEELTNLIRTI

SEQ ID NO: 117674 - protein, 11 aa, Homo Sapiens
FEHFIEGGRTV

SEQ ID NO: 117675 - protein, 11 aa, Homo Sapiens
GEANAELCRYL

SEQ ID NO: 117676 - protein, 11 aa, Homo Sapiens
GEAPLHKAAKV

SEQ ID NO: 117677 - protein, 11 aa, Homo Sapiens
GEATCITEMSV

SEQ ID NO: 117678 - protein, 11 aa, Homo Sapiens
GECTPTQREVI

SEQ ID NO: 117679 - protein, 11 aa, Homo Sapiens
GEDPRVSINVV

SEQ ID NO: 117680 - protein, 11 aa, Homo Sapiens
GEDSVSGSQRI

SEQ ID NO: 117681 - protein, 11 aa, Homo Sapiens
GEFAWRDGPLL

SEQ ID NO: 117682 - protein, 11 aa, Homo Sapiens
GEFDYSGSQAI

SEQ ID NO: 117683 - protein, 11 aa, Homo Sapiens
GEFEPDGCLKI

SEQ ID NO: 117684 - protein, 11 aa, Homo Sapiens
GEFHPDGCLQI

SEQ ID NO: 117685 - protein, 11 aa, Homo Sapiens
GEFPDLHRTIV

SEQ ID NO: 117686 - protein, 11 aa, Homo Sapiens
GEFVDDYTVRV

SEQ ID NO: 117687 - protein, 11 aa, Homo Sapiens
GEHEIDYILLV

SEQ ID NO: 117688 - protein, 11 aa, Homo Sapiens
GEHGFIGCRKV

SEQ ID NO: 117689 - protein, 11 aa, Homo Sapiens
GEIDENSFHNI

SEQ ID NO: 117690 - protein, 11 aa, Homo Sapiens
GEIGFENHETV

SEQ ID NO: 117691 - protein, 11 aa, Homo Sapiens
GEIMQETGTRI

SEQ ID NO: 117692 - protein, 11 aa, Homo Sapiens
GEIPNFPRSTV

SEQ ID NO: 117693 - protein, 11 aa, Homo Sapiens
GEIRETSQTKV

SEQ ID NO: 117694 - protein, 11 aa, Homo Sapiens
GEISPGKINSV

SEQ ID NO: 117695 - protein, 11 aa, Homo Sapiens
GEIVGSQGSRL

SEQ ID NO: 117696 - protein, 11 aa, Homo Sapiens
GENPEDTKTQV

SEQ ID NO: 117697 - protein, 11 aa, Homo Sapiens
GENVFTGQSKI

SEQ ID NO: 117698 - protein, 11 aa, Homo Sapiens
GESDELIGQKV

SEQ ID NO: 117699 - protein, 11 aa, Homo Sapiens
GEYDVKYPALI

SEQ ID NO: 117700 - protein, 11 aa, Homo Sapiens
GEYEERKLIRA

SEQ ID NO: 117701 - protein, 11 aa, Homo Sapiens
GEYSSLEHESV

SEQ ID NO: 117702 - protein, 11 aa, Homo Sapiens
GGGVGKSALTI

SEQ ID NO: 117703 - protein, 11 aa, Homo Sapiens
HEKEDGAISTI

SEQ ID NO: 117704 - protein, 11 aa, Homo Sapiens
HEVDPEGDRTI

SEQ ID NO: 117705 - protein, 11 aa, Homo Sapiens
HEVMEQGRVTI

SEQ ID NO: 117706 - protein, 11 aa, Homo Sapiens
IEDPSLLNSRV

SEQ ID NO: 117707 - protein, 11 aa, Homo Sapiens
IEFQEPVPASI

SEQ ID NO: 117708 - protein, 11 aa, Homo Sapiens
IEIKNKKKLLI

SEQ ID NO: 117709 - protein, 11 aa, Homo Sapiens
IEQDTDTKITI

SEQ ID NO: 117710 - protein, 11 aa, Homo Sapiens
IEQVPQQPTYV

SEQ ID NO: 117711 - protein, 11 aa, Homo Sapiens
IESDRLALLQV

SEQ ID NO: 117712 - protein, 11 aa, Homo Sapiens
IESQDAGIKTI

SEQ ID NO: 117713 - protein, 11 aa, Homo Sapiens
IEYDPERRLGI

SEQ ID NO: 117714 - protein, 11 aa, Homo Sapiens
IVEKIDFDSVS

SEQ ID NO: 117715 - protein, 11 aa, Homo Sapiens
KDGSELILHFV

SEQ ID NO: 117716 - protein, 11 aa, Homo Sapiens
KECEYLIGQHV

SEQ ID NO: 117717 - protein, 11 aa, Homo Sapiens
KEDALVTKNLV

SEQ ID NO: 117718 - protein, 11 aa, Homo Sapiens
KEDENVPFLLV

SEQ ID NO: 117719 - protein, 11 aa, Homo Sapiens
KEDESIRKTEI

SEQ ID NO: 117720 - protein, 11 aa, Homo Sapiens
KEDPELAKSFI

SEQ ID NO: 117721 - protein, 11 aa, Homo Sapiens
KEFAPVYPIMV

SEQ ID NO: 117722 - protein, 11 aa, Homo Sapiens
KEFDGKSLVSV

SEQ ID NO: 117723 - protein, 11 aa, Homo Sapiens
KEFEGKTLVSV

SEQ ID NO: 117724 - protein, 11 aa, Homo Sapiens
KEFNFPEEAVL

SEQ ID NO: 117725 - protein, 11 aa, Homo Sapiens
KEFPGLAGVKI

SEQ ID NO: 117726 - protein, 11 aa, Homo Sapiens
KEIEHNLSKIM

SEQ ID NO: 117727 - protein, 11 aa, Homo Sapiens
KEIENGHIFTV

SEQ ID NO: 117728 - protein, 11 aa, Homo Sapiens
KEIPLSEILTV

SEQ ID NO: 117729 - protein, 11 aa, Homo Sapiens
KEISYFVAEFI

SEQ ID NO: 117730 - protein, 11 aa, Homo Sapiens
KELDPTNMTYI

SEQ ID NO: 117731 - protein, 11 aa, Homo Sapiens
KESSPLSSRKI

SEQ ID NO: 117732 - protein, 11 aa, Homo Sapiens
KEVDPQGLRTI

SEQ ID NO: 117733 - protein, 11 aa, Homo Sapiens
KEVTPEGLQMV

SEQ ID NO: 117734 - protein, 11 aa, Homo Sapiens
KEYEEDGARSI

SEQ ID NO: 117735 - protein, 11 aa, Homo Sapiens
KEYEPEMGKVI

SEQ ID NO: 117736 - protein, 11 aa, Homo Sapiens
LEDDPQGARKI

SEQ ID NO: 117737 - protein, 11 aa, Homo Sapiens
LEFIPSDQQVI

SEQ ID NO: 117738 - protein, 11 aa, Homo Sapiens
LEINPKLQTQV

SEQ ID NO: 117739 - protein, 11 aa, Homo Sapiens
LENDPDCRHVI

SEQ ID NO: 117740 - protein, 11 aa, Homo Sapiens
LEYDPAKRITL

SEQ ID NO: 117741 - protein, 11 aa, Homo Sapiens
LEYEPRSGEQV

SEQ ID NO: 117742 - protein, 11 aa, Homo Sapiens
LLAETAGMIGV

SEQ ID NO: 117743 - protein, 11 aa, Homo Sapiens
MEHDGSLFQAV

SEQ ID NO: 117744 - protein, 11 aa, Homo Sapiens
NECKQLSESQV

SEQ ID NO: 117745 - protein, 11 aa, Homo Sapiens
QEILFDPKTSV

SEQ ID NO: 117746 - protein, 11 aa, Homo Sapiens
QEILTKDSVTI

SEQ ID NO: 117747 - protein, 11 aa, Homo Sapiens
QELPSHGVPLI

SEQ ID NO: 117748 - protein, 11 aa, Homo Sapiens
QEMADSLGVRI

SEQ ID NO: 117749 - protein, 11 aa, Homo Sapiens
QERFQTEIQTV

SEQ ID NO: 117750 - protein, 11 aa, Homo Sapiens
QEVDPEGDRTI

SEQ ID NO: 117751 - protein, 11 aa, Homo Sapiens
QEVPASGLFRI

SEQ ID NO: 117752 - protein, 11 aa, Homo Sapiens
QEYIDAHPETI

SEQ ID NO: 117753 - protein, 11 aa, Homo Sapiens
RAQYESIAAKN

SEQ ID NO: 117754 - protein, 11 aa, Homo Sapiens
READAALFSEL

SEQ ID NO: 117755 - protein, 11 aa, Homo Sapiens
REAESLIAKKI

SEQ ID NO: 117756 - protein, 11 aa, Homo Sapiens
REAPVDVLTQI

SEQ ID NO: 117757 - protein, 11 aa, Homo Sapiens
RECPLFGLSGI

SEQ ID NO: 117758 - protein, 11 aa, Homo Sapiens
REDIEFICKTI

SEQ ID NO: 117759 - protein, 11 aa, Homo Sapiens
REDINSLCMTV

SEQ ID NO: 117760 - protein, 11 aa, Homo Sapiens
REDIYSSAKKV

SEQ ID NO: 117761 - protein, 11 aa, Homo Sapiens
REEPPGTFSVI

SEQ ID NO: 117762 - protein, 11 aa, Homo Sapiens
REFDRFGTIRT

SEQ ID NO: 117763 - protein, 11 aa, Homo Sapiens
REFEALRSCFA

SEQ ID NO: 117764 - protein, 11 aa, Homo Sapiens
REFLFNAIETM

SEQ ID NO: 117765 - protein, 11 aa, Homo Sapiens
REHQFTKIDTI

SEQ ID NO: 117766 - protein, 11 aa, Homo Sapiens
REIFLSQPILL

SEQ ID NO: 117767 - protein, 11 aa, Homo Sapiens
REIPSHVLSKV

SEQ ID NO: 117768 - protein, 11 aa, Homo Sapiens
REITDQEHNVV

SEQ ID NO: 117769 - protein, 11 aa, Homo Sapiens
REKEDGAFSFV

SEQ ID NO: 117770 - protein, 11 aa, Homo Sapiens
RELENLIGISC

SEQ ID NO: 117771 - protein, 11 aa, Homo Sapiens
RELGEFRTTTV

SEQ ID NO: 117772 - protein, 11 aa, Homo Sapiens
RELPAGINSIV

SEQ ID NO: 117773 - protein, 11 aa, Homo Sapiens
RERHPGSFDVV

SEQ ID NO: 117774 - protein, 11 aa, Homo Sapiens
REYDDQRALEI

SEQ ID NO: 117775 - protein, 11 aa, Homo Sapiens
REYEDNDEVHI

SEQ ID NO: 117776 - protein, 11 aa, Homo Sapiens
REYIEIITSSI

SEQ ID NO: 117777 - protein, 11 aa, Homo Sapiens
REYLSEEVQAV

SEQ ID NO: 117778 - protein, 11 aa, Homo Sapiens
REYPDGTVKTV

SEQ ID NO: 117779 - protein, 11 aa, Homo Sapiens
REYQDLLNVKM

SEQ ID NO: 117780 - protein, 11 aa, Homo Sapiens
REYSEFKRQQL

SEQ ID NO: 117781 - protein, 11 aa, Homo Sapiens
RQGVDADINGL

SEQ ID NO: 117782 - protein, 11 aa, Homo Sapiens
SEADPSGVASI

SEQ ID NO: 117783 - protein, 11 aa, Homo Sapiens
SEDKGALAKLV

SEQ ID NO: 117784 - protein, 11 aa, Homo Sapiens
SEFFTDLLNHI

SEQ ID NO: 117785 - protein, 11 aa, Homo Sapiens
SEHFRIDGPVI

SEQ ID NO: 117786 - protein, 11 aa, Homo Sapiens
SEIEEHLNCTI

SEQ ID NO: 117787 - protein, 11 aa, Homo Sapiens
SEIERMGLVMD

SEQ ID NO: 117788 - protein, 11 aa, Homo Sapiens
SEILDGNQLHI

SEQ ID NO: 117789 - protein, 11 aa, Homo Sapiens
SELDRINAQYL

SEQ ID NO: 117790 - protein, 11 aa, Homo Sapiens
SELNQKRPQYI

SEQ ID NO: 117791 - protein, 11 aa, Homo Sapiens
SETRSITNTTV

SEQ ID NO: 117792 - protein, 11 aa, Homo Sapiens
SEVFLPNSNHV

SEQ ID NO: 117793 - protein, 11 aa, Homo Sapiens
SEVSAENILTV

SEQ ID NO: 117794 - protein, 11 aa, Homo Sapiens
SEWDSSRTPII

SEQ ID NO: 117795 - protein, 11 aa, Homo Sapiens
SFEMVKGGYTL

SEQ ID NO: 117796 - protein, 11 aa, Homo Sapiens
TEDEVERVITI

SEQ ID NO: 117797 - protein, 11 aa, Homo Sapiens
TEDSGLQTQVI

SEQ ID NO: 117798 - protein, 11 aa, Homo Sapiens
TEFDYPSVGQV

SEQ ID NO: 117799 - protein, 11 aa, Homo Sapiens
TEFGGSIYQKV

SEQ ID NO: 117800 - protein, 11 aa, Homo Sapiens
TELDPASFTEI

SEQ ID NO: 117801 - protein, 11 aa, Homo Sapiens
TELEHSGIGRI

SEQ ID NO: 117802 - protein, 11 aa, Homo Sapiens
TENMPIKINLI

SEQ ID NO: 117803 - protein, 11 aa, Homo Sapiens
TETDLHGSLRV

SEQ ID NO: 117804 - protein, 11 aa, Homo Sapiens
TEVHPDYGSHI

SEQ ID NO: 117805 - protein, 11 aa, Homo Sapiens
TEYDCKGFHIV

SEQ ID NO: 117806 - protein, 11 aa, Homo Sapiens
TEYENFKVQVL

SEQ ID NO: 117807 - protein, 11 aa, Homo Sapiens
TEYEPRVINQM

SEQ ID NO: 117808 - protein, 11 aa, Homo Sapiens
TEYPEKEVTLI

SEQ ID NO: 117809 - protein, 11 aa, Homo Sapiens
VEDDARGTVVL

SEQ ID NO: 117810 - protein, 11 aa, Homo Sapiens
VEEDEAGGRFV

SEQ ID NO: 117811 - protein, 11 aa, Homo Sapiens
VEFMDDTSRSI

SEQ ID NO: 117812 - protein, 11 aa, Homo Sapiens
VEFNGKLLASI

SEQ ID NO: 117813 - protein, 11 aa, Homo Sapiens
VEFPTDPKVVV

SEQ ID NO: 117814 - protein, 11 aa, Homo Sapiens
VEIDAHIGCAM

SEQ ID NO: 117815 - protein, 11 aa, Homo Sapiens
VENEETFMNRV

SEQ ID NO: 117816 - protein, 11 aa, Homo Sapiens
VENPFFGQRYI

SEQ ID NO: 117817 - protein, 11 aa, Homo Sapiens
VEWDTTGQNLI

SEQ ID NO: 117818 - protein, 11 aa, Homo Sapiens
VEYCPEVNVMV

SEQ ID NO: 117819 - protein, 11 aa, Homo Sapiens
VEYDAEGFTKL

SEQ ID NO: 117820 - protein, 11 aa, Homo Sapiens
VEYEIDKTLGI

SEQ ID NO: 117821 - protein, 11 aa, Homo Sapiens
WEIDPKDLTFL

SEQ ID NO: 117822 - protein, 11 aa, Homo Sapiens
WLLSLGATDRQ

SEQ ID NO: 117823 - protein, 11 aa, Homo Sapiens
YEDISRGLQGT

SEQ ID NO: 117824 - protein, 11 aa, Homo Sapiens
YEEDQGSKLIR

SEQ ID NO: 117825 - protein, 11 aa, Homo Sapiens
YEFPDKDWAHI

SEQ ID NO: 117826 - protein, 11 aa, Homo Sapiens
YEIDDRDVNKI

SEQ ID NO: 117827 - protein, 11 aa, Homo Sapiens
YELDLGLNHVV

SEQ ID NO: 117828 - protein, 11 aa, Homo Sapiens
YELPDGQVITI

SEQ ID NO: 117829 - protein, 11 aa, Homo Sapiens
YEWDVAEARKI

SEQ ID NO: 117830 - protein, 11 aa, Homo Sapiens
YEYEGGHIKTA

SEQ ID NO: 117831 - protein, 11 aa, Homo Sapiens
YEYHWADGTNI

SEQ ID NO: 117832 - protein, 11 aa, Homo Sapiens
YEYIIKDKHIL

SEQ ID NO: 117833 - protein, 11 aa, Homo Sapiens
YQAELSQMQTQ

SEQ ID NO: 117834 - protein, 8 aa, Homo Sapiens
AEFLFNQC

SEQ ID NO: 117835 - protein, 8 aa, Homo Sapiens
FEFRAIEA

SEQ ID NO: 117836 - protein, 8 aa, Homo Sapiens
GEITFLEA

SEQ ID NO: 117837 - protein, 8 aa, Homo Sapiens
IEWRFTEA

SEQ ID NO: 117838 - protein, 8 aa, Homo Sapiens
IINTDTLA

SEQ ID NO: 117839 - protein, 8 aa, Homo Sapiens
LEVVRFFY

SEQ ID NO: 117840 - protein, 8 aa, Homo Sapiens
LEWPSLTA

SEQ ID NO: 117841 - protein, 8 aa, Homo Sapiens
LFTGELAE

SEQ ID NO: 117842 - protein, 8 aa, Homo Sapiens
LSENITLA

SEQ ID NO: 117843 - protein, 8 aa, Homo Sapiens
MEALLLGA

SEQ ID NO: 117844 - protein, 8 aa, Homo Sapiens
SEAIFLEA

SEQ ID NO: 117845 - protein, 8 aa, Homo Sapiens
SEFEGFSF

SEQ ID NO: 117846 - protein, 8 aa, Homo Sapiens
TEFESFSF

SEQ ID NO: 117847 - protein, 8 aa, Homo Sapiens
TEFLFHTA

SEQ ID NO: 117848 - protein, 8 aa, Homo Sapiens
TEFPGVVA

SEQ ID NO: 117849 - protein, 8 aa, Homo Sapiens
TEFPNFKY

SEQ ID NO: 117850 - protein, 9 aa, Homo Sapiens
ADFAKVLEL

SEQ ID NO: 117851 - protein, 9 aa, Homo Sapiens
ADTIFVTAP

SEQ ID NO: 117852 - protein, 9 aa, Homo Sapiens
AEAAVVAVA

SEQ ID NO: 117853 - protein, 9 aa, Homo Sapiens
AEAFRLPTA

SEQ ID NO: 117854 - protein, 9 aa, Homo Sapiens
AEAIPEPVV

SEQ ID NO: 117855 - protein, 9 aa, Homo Sapiens
AEAIPGLAA

SEQ ID NO: 117856 - protein, 9 aa, Homo Sapiens
AEAIRILAA

SEQ ID NO: 117857 - protein, 9 aa, Homo Sapiens
AEALAAFTA

SEQ ID NO: 117858 - protein, 9 aa, Homo Sapiens
AEALPSLAA

SEQ ID NO: 117859 - protein, 9 aa, Homo Sapiens
AEANAFSVL

SEQ ID NO: 117860 - protein, 9 aa, Homo Sapiens
AEAPPPKIP

SEQ ID NO: 117861 - protein, 9 aa, Homo Sapiens
AEAQLWWAA

SEQ ID NO: 117862 - protein, 9 aa, Homo Sapiens
AEARPFEVL

SEQ ID NO: 117863 - protein, 9 aa, Homo Sapiens
AEAVFASEV

SEQ ID NO: 117864 - protein, 9 aa, Homo Sapiens
AEDLNLLIA

SEQ ID NO: 117865 - protein, 9 aa, Homo Sapiens
AEFDSFVLV

SEQ ID NO: 117866 - protein, 9 aa, Homo Sapiens
AEFDTFLAS

SEQ ID NO: 117867 - protein, 9 aa, Homo Sapiens
AEFEWENKV

SEQ ID NO: 117868 - protein, 9 aa, Homo Sapiens
AEFFLSQQA

SEQ ID NO: 117869 - protein, 9 aa, Homo Sapiens
AEFIKFTVI

SEQ ID NO: 117870 - protein, 9 aa, Homo Sapiens
AEFLQKLLP

SEQ ID NO: 117871 - protein, 9 aa, Homo Sapiens
AEFLTFHYA

SEQ ID NO: 117872 - protein, 9 aa, Homo Sapiens
AEFPGLPEA

SEQ ID NO: 117873 - protein, 9 aa, Homo Sapiens
AEFQVKITA

SEQ ID NO: 117874 - protein, 9 aa, Homo Sapiens
AEFWKFSGI

SEQ ID NO: 117875 - protein, 9 aa, Homo Sapiens
AEGAFPNLA

SEQ ID NO: 117876 - protein, 9 aa, Homo Sapiens
AEGPVAVVV

SEQ ID NO: 117877 - protein, 9 aa, Homo Sapiens
AEHDLWHII

SEQ ID NO: 117878 - protein, 9 aa, Homo Sapiens
AEHFSIIRA

SEQ ID NO: 117879 - protein, 9 aa, Homo Sapiens
AEHFSMIRA

SEQ ID NO: 117880 - protein, 9 aa, Homo Sapiens
AEHGIFLPP

SEQ ID NO: 117881 - protein, 9 aa, Homo Sapiens
AEIAHLYIA

SEQ ID NO: 117882 - protein, 9 aa, Homo Sapiens
AEIAPFVEI

SEQ ID NO: 117883 - protein, 9 aa, Homo Sapiens
AEIDAHLVA

SEQ ID NO: 117884 - protein, 9 aa, Homo Sapiens
AEIDLFRAA

SEQ ID NO: 117885 - protein, 9 aa, Homo Sapiens
AEIEDPPIP

SEQ ID NO: 117886 - protein, 9 aa, Homo Sapiens
AEIEHFIHI

SEQ ID NO: 117887 - protein, 9 aa, Homo Sapiens
AEIIFNPSA

SEQ ID NO: 117888 - protein, 9 aa, Homo Sapiens
AEIIQLVNA

SEQ ID NO: 117889 - protein, 9 aa, Homo Sapiens
AEINNIIKI

SEQ ID NO: 117890 - protein, 9 aa, Homo Sapiens
AEIQGVIDA

SEQ ID NO: 117891 - protein, 9 aa, Homo Sapiens
AEKDFWELA

SEQ ID NO: 117892 - protein, 9 aa, Homo Sapiens
AELATRAIP

SEQ ID NO: 117893 - protein, 9 aa, Homo Sapiens
AELDKLTSV

SEQ ID NO: 117894 - protein, 9 aa, Homo Sapiens
AELDVPALP

SEQ ID NO: 117895 - protein, 9 aa, Homo Sapiens
AELEFAIQP

SEQ ID NO: 117896 - protein, 9 aa, Homo Sapiens
AELFWPSMA

SEQ ID NO: 117897 - protein, 9 aa, Homo Sapiens
AELLIFSVP

SEQ ID NO: 117898 - protein, 9 aa, Homo Sapiens
AELLPLVSA

SEQ ID NO: 117899 - protein, 9 aa, Homo Sapiens
AELLTKTLP

SEQ ID NO: 117900 - protein, 9 aa, Homo Sapiens
AELLVLLAA

SEQ ID NO: 117901 - protein, 9 aa, Homo Sapiens
AELPWAVKP

SEQ ID NO: 117902 - protein, 9 aa, Homo Sapiens
AELSFFGHA

SEQ ID NO: 117903 - protein, 9 aa, Homo Sapiens
AELWKNPTA

SEQ ID NO: 117904 - protein, 9 aa, Homo Sapiens
AENYFQLSV

SEQ ID NO: 117905 - protein, 9 aa, Homo Sapiens
AEQPYFIEA

SEQ ID NO: 117906 - protein, 9 aa, Homo Sapiens
AERFHFEAL

SEQ ID NO: 117907 - protein, 9 aa, Homo Sapiens
AETEFFSKA

SEQ ID NO: 117908 - protein, 9 aa, Homo Sapiens
AEVAGILEP

SEQ ID NO: 117909 - protein, 9 aa, Homo Sapiens
AEVDRQVIP

SEQ ID NO: 117910 - protein, 9 aa, Homo Sapiens
AEVEKWLGP

SEQ ID NO: 117911 - protein, 9 aa, Homo Sapiens
AEVFPPPVA

SEQ ID NO: 117912 - protein, 9 aa, Homo Sapiens
AEVGRVLQV

SEQ ID NO: 117913 - protein, 9 aa, Homo Sapiens
AEVKPILQA

SEQ ID NO: 117914 - protein, 9 aa, Homo Sapiens
AEVLTFLDA

SEQ ID NO: 117915 - protein, 9 aa, Homo Sapiens
AEVRVIAPP

SEQ ID NO: 117916 - protein, 9 aa, Homo Sapiens
AEVWWNLVP

SEQ ID NO: 117917 - protein, 9 aa, Homo Sapiens
AEVYRILSV

SEQ ID NO: 117918 - protein, 9 aa, Homo Sapiens
AEWKFLNPA

SEQ ID NO: 117919 - protein, 9 aa, Homo Sapiens
AEWLGVLKA

SEQ ID NO: 117920 - protein, 9 aa, Homo Sapiens
AEYAGLKVA

SEQ ID NO: 117921 - protein, 9 aa, Homo Sapiens
AEYEFLSFV

SEQ ID NO: 117922 - protein, 9 aa, Homo Sapiens
AEYGHFVDI

SEQ ID NO: 117923 - protein, 9 aa, Homo Sapiens
AEYLHWLLT

SEQ ID NO: 117924 - protein, 9 aa, Homo Sapiens
AEYLYFFRV

SEQ ID NO: 117925 - protein, 9 aa, Homo Sapiens
DAERQLLAP

SEQ ID NO: 117926 - protein, 9 aa, Homo Sapiens
DAKIRIFDL

SEQ ID NO: 117927 - protein, 9 aa, Homo Sapiens
DEYQFFTQA

SEQ ID NO: 117928 - protein, 9 aa, Homo Sapiens
EEFGDFRLV

SEQ ID NO: 117929 - protein, 9 aa, Homo Sapiens
EEFPAFPRA

SEQ ID NO: 117930 - protein, 9 aa, Homo Sapiens
EEFSFIPSA

SEQ ID NO: 117931 - protein, 9 aa, Homo Sapiens
EEFVFIPAA

SEQ ID NO: 117932 - protein, 9 aa, Homo Sapiens
EEHEWFIPA

SEQ ID NO: 117933 - protein, 9 aa, Homo Sapiens
EEHNFFLAP

SEQ ID NO: 117934 - protein, 9 aa, Homo Sapiens
EEIEGLISA

SEQ ID NO: 117935 - protein, 9 aa, Homo Sapiens
EEYYPFSEV

SEQ ID NO: 117936 - protein, 9 aa, Homo Sapiens
ELCTVLIGL

SEQ ID NO: 117937 - protein, 9 aa, Homo Sapiens
ELNISEIPP

SEQ ID NO: 117938 - protein, 9 aa, Homo Sapiens
ELWQVLGAP

SEQ ID NO: 117939 - protein, 9 aa, Homo Sapiens
EMLQRADPP

SEQ ID NO: 117940 - protein, 9 aa, Homo Sapiens
ESLAGILGT

SEQ ID NO: 117941 - protein, 9 aa, Homo Sapiens
FDKTFEISA

SEQ ID NO: 117942 - protein, 9 aa, Homo Sapiens
FEARFFHLA

SEQ ID NO: 117943 - protein, 9 aa, Homo Sapiens
FEARIALLP

SEQ ID NO: 117944 - protein, 9 aa, Homo Sapiens
FEFDIFTRL

SEQ ID NO: 117945 - protein, 9 aa, Homo Sapiens
FEFDTKTSA

SEQ ID NO: 117946 - protein, 9 aa, Homo Sapiens
FEFEYQTKV

SEQ ID NO: 117947 - protein, 9 aa, Homo Sapiens
FEFGVFPAI

SEQ ID NO: 117948 - protein, 9 aa, Homo Sapiens
FEFLLKLTP

SEQ ID NO: 117949 - protein, 9 aa, Homo Sapiens
FEFLTKELA

SEQ ID NO: 117950 - protein, 9 aa, Homo Sapiens
FEFPDYCTP

SEQ ID NO: 117951 - protein, 9 aa, Homo Sapiens
FEFPRPFLP

SEQ ID NO: 117952 - protein, 9 aa, Homo Sapiens
FEFTDFTLP

SEQ ID NO: 117953 - protein, 9 aa, Homo Sapiens
FEILPGLSV

SEQ ID NO: 117954 - protein, 9 aa, Homo Sapiens
FEIPTGREA

SEQ ID NO: 117955 - protein, 9 aa, Homo Sapiens
FEIRGTLLP

SEQ ID NO: 117956 - protein, 9 aa, Homo Sapiens
FEKEWIECA

SEQ ID NO: 117957 - protein, 9 aa, Homo Sapiens
FEKVFSIGP

SEQ ID NO: 117958 - protein, 9 aa, Homo Sapiens
FELLDRILP

SEQ ID NO: 117959 - protein, 9 aa, Homo Sapiens
FELPYVSVT

SEQ ID NO: 117960 - protein, 9 aa, Homo Sapiens
FENLFSKPP

SEQ ID NO: 117961 - protein, 9 aa, Homo Sapiens
FEQKGFRLV

SEQ ID NO: 117962 - protein, 9 aa, Homo Sapiens
FETEFNTQP

SEQ ID NO: 117963 - protein, 9 aa, Homo Sapiens
FETQFILSP

SEQ ID NO: 117964 - protein, 9 aa, Homo Sapiens
FEVKKWNAV

SEQ ID NO: 117965 - protein, 9 aa, Homo Sapiens
FEVPHELVA

SEQ ID NO: 117966 - protein, 9 aa, Homo Sapiens
FEWTFPTRP

SEQ ID NO: 117967 - protein, 9 aa, Homo Sapiens
FEYILSHVA

SEQ ID NO: 117968 - protein, 9 aa, Homo Sapiens
FEYPNFIRV

SEQ ID NO: 117969 - protein, 9 aa, Homo Sapiens
FEYPVQIEP

SEQ ID NO: 117970 - protein, 9 aa, Homo Sapiens
FEYSIRTTP

SEQ ID NO: 117971 - protein, 9 aa, Homo Sapiens
FEYVKVPLA

SEQ ID NO: 117972 - protein, 9 aa, Homo Sapiens
GDRIFFVSA

SEQ ID NO: 117973 - protein, 9 aa, Homo Sapiens
GEAIPALAA

SEQ ID NO: 117974 - protein, 9 aa, Homo Sapiens
GEAWPFESV

SEQ ID NO: 117975 - protein, 9 aa, Homo Sapiens
GEEFLFRTA

SEQ ID NO: 117976 - protein, 9 aa, Homo Sapiens
GEFEGFVAV

SEQ ID NO: 117977 - protein, 9 aa, Homo Sapiens
GEFGGFGSV

SEQ ID NO: 117978 - protein, 9 aa, Homo Sapiens
GEFGGFSEV

SEQ ID NO: 117979 - protein, 9 aa, Homo Sapiens
GEFHLWYQV

SEQ ID NO: 117980 - protein, 9 aa, Homo Sapiens
GEFLAFQTV

SEQ ID NO: 117981 - protein, 9 aa, Homo Sapiens
GEFLPIQPA

SEQ ID NO: 117982 - protein, 9 aa, Homo Sapiens
GEFTFLLPA

SEQ ID NO: 117983 - protein, 9 aa, Homo Sapiens
GEFVFATSL

SEQ ID NO: 117984 - protein, 9 aa, Homo Sapiens
GEHCDFTIL

SEQ ID NO: 117985 - protein, 9 aa, Homo Sapiens
GEIFDHLVA

SEQ ID NO: 117986 - protein, 9 aa, Homo Sapiens
GEIFNVQLP

SEQ ID NO: 117987 - protein, 9 aa, Homo Sapiens
GEIFSLCLP

SEQ ID NO: 117988 - protein, 9 aa, Homo Sapiens
GEILGLLGP

SEQ ID NO: 117989 - protein, 9 aa, Homo Sapiens
GEINVIGEP

SEQ ID NO: 117990 - protein, 9 aa, Homo Sapiens
GEIPKVLVA

SEQ ID NO: 117991 - protein, 9 aa, Homo Sapiens
GEIRTITVV

SEQ ID NO: 117992 - protein, 9 aa, Homo Sapiens
GEIVRLTTP

SEQ ID NO: 117993 - protein, 9 aa, Homo Sapiens
GEIVSTLLP

SEQ ID NO: 117994 - protein, 9 aa, Homo Sapiens
GEKSFFLQP

SEQ ID NO: 117995 - protein, 9 aa, Homo Sapiens
GELLFVHSA

SEQ ID NO: 117996 - protein, 9 aa, Homo Sapiens
GELMAFLLP

SEQ ID NO: 117997 - protein, 9 aa, Homo Sapiens
GELPFLTHV

SEQ ID NO: 117998 - protein, 9 aa, Homo Sapiens
GELPLSLAA

SEQ ID NO: 117999 - protein, 9 aa, Homo Sapiens
GELSDWSLP

SEQ ID NO: 118000 - protein, 9 aa, Homo Sapiens
GENFDKLLA

SEQ ID NO: 118001 - protein, 9 aa, Homo Sapiens
GENLGFWEA

SEQ ID NO: 118002 - protein, 9 aa, Homo Sapiens
GEREIWNQI

SEQ ID NO: 118003 - protein, 9 aa, Homo Sapiens
GETDPLLIA

SEQ ID NO: 118004 - protein, 9 aa, Homo Sapiens
GETIFFRGP

SEQ ID NO: 118005 - protein, 9 aa, Homo Sapiens
GETIFVERP

SEQ ID NO: 118006 - protein, 9 aa, Homo Sapiens
GETIFVTAP

SEQ ID NO: 118007 - protein, 9 aa, Homo Sapiens
GEVFDYLVA

SEQ ID NO: 118008 - protein, 9 aa, Homo Sapiens
GEVPPGPLP

SEQ ID NO: 118009 - protein, 9 aa, Homo Sapiens
GEVVLRFAA

SEQ ID NO: 118010 - protein, 9 aa, Homo Sapiens
GEYDWALQA

SEQ ID NO: 118011 - protein, 9 aa, Homo Sapiens
GEYEWVHKP

SEQ ID NO: 118012 - protein, 9 aa, Homo Sapiens
GEYGGWYKA

SEQ ID NO: 118013 - protein, 9 aa, Homo Sapiens
GEYGKFFVT

SEQ ID NO: 118014 - protein, 9 aa, Homo Sapiens
GEYKFFWTA

SEQ ID NO: 118015 - protein, 9 aa, Homo Sapiens
HELPFYGCA

SEQ ID NO: 118016 - protein, 9 aa, Homo Sapiens
HEYPWILSA

SEQ ID NO: 118017 - protein, 9 aa, Homo Sapiens
IDRLFDTSA

SEQ ID NO: 118018 - protein, 9 aa, Homo Sapiens
IEAFTPLLA

SEQ ID NO: 118019 - protein, 9 aa, Homo Sapiens
IEAKFYEEV

SEQ ID NO: 118020 - protein, 9 aa, Homo Sapiens
IEAPHFPLP

SEQ ID NO: 118021 - protein, 9 aa, Homo Sapiens
IECITGILG

SEQ ID NO: 118022 - protein, 9 aa, Homo Sapiens
IEFPYKNLP

SEQ ID NO: 118023 - protein, 9 aa, Homo Sapiens
IEIDFPRAA

SEQ ID NO: 118024 - protein, 9 aa, Homo Sapiens
IEIERILSV

SEQ ID NO: 118025 - protein, 9 aa, Homo Sapiens
IEILPVAVA

SEQ ID NO: 118026 - protein, 9 aa, Homo Sapiens
IEIYPLAEA

SEQ ID NO: 118027 - protein, 9 aa, Homo Sapiens
IELDMRTIA

SEQ ID NO: 118028 - protein, 9 aa, Homo Sapiens
IELPSMAVA

SEQ ID NO: 118029 - protein, 9 aa, Homo Sapiens
IEQEFLTEA

SEQ ID NO: 118030 - protein, 9 aa, Homo Sapiens
IERPIRIVA

SEQ ID NO: 118031 - protein, 9 aa, Homo Sapiens
IESPPAFTA

SEQ ID NO: 118032 - protein, 9 aa, Homo Sapiens
IEVSLPEAA

SEQ ID NO: 118033 - protein, 9 aa, Homo Sapiens
IEWDKPPVP

SEQ ID NO: 118034 - protein, 9 aa, Homo Sapiens
IEYDCELVP

SEQ ID NO: 118035 - protein, 9 aa, Homo Sapiens
KDLLFILTA

SEQ ID NO: 118036 - protein, 9 aa, Homo Sapiens
KDYPFYLTV

SEQ ID NO: 118037 - protein, 9 aa, Homo Sapiens
KEFEFSQLP

SEQ ID NO: 118038 - protein, 9 aa, Homo Sapiens
KEFNFPEEA

SEQ ID NO: 118039 - protein, 9 aa, Homo Sapiens
KEFPFDVQP

SEQ ID NO: 118040 - protein, 9 aa, Homo Sapiens
KEFPYGIEA

SEQ ID NO: 118041 - protein, 9 aa, Homo Sapiens
KEFQLFQGV

SEQ ID NO: 118042 - protein, 9 aa, Homo Sapiens
KEFSPFGTI

SEQ ID NO: 118043 - protein, 9 aa, Homo Sapiens
KEHLYFETV

SEQ ID NO: 118044 - protein, 9 aa, Homo Sapiens
KEIDVISIP

SEQ ID NO: 118045 - protein, 9 aa, Homo Sapiens
KEIFQTTVP

SEQ ID NO: 118046 - protein, 9 aa, Homo Sapiens
KELEFLTQA

SEQ ID NO: 118047 - protein, 9 aa, Homo Sapiens
KELIFQETA

SEQ ID NO: 118048 - protein, 9 aa, Homo Sapiens
KEVEQFTQV

SEQ ID NO: 118049 - protein, 9 aa, Homo Sapiens
KEYFGIVSV

SEQ ID NO: 118050 - protein, 9 aa, Homo Sapiens
KEYLFYAEA

SEQ ID NO: 118051 - protein, 9 aa, Homo Sapiens
KEYLFYLNV

SEQ ID NO: 118052 - protein, 9 aa, Homo Sapiens
KEYPDFNFV

SEQ ID NO: 118053 - protein, 9 aa, Homo Sapiens
KEYPFILDA

SEQ ID NO: 118054 - protein, 9 aa, Homo Sapiens
KEYWFVLTA

SEQ ID NO: 118055 - protein, 9 aa, Homo Sapiens
LAEVANFIP

SEQ ID NO: 118056 - protein, 9 aa, Homo Sapiens
LAFQMRIEL

SEQ ID NO: 118057 - protein, 9 aa, Homo Sapiens
LEAHFVPLV

SEQ ID NO: 118058 - protein, 9 aa, Homo Sapiens
LEAILAAVP

SEQ ID NO: 118059 - protein, 9 aa, Homo Sapiens
LEALPQIAA

SEQ ID NO: 118060 - protein, 9 aa, Homo Sapiens
LEAPDLLLA

SEQ ID NO: 118061 - protein, 9 aa, Homo Sapiens
LEAVLKLLP

SEQ ID NO: 118062 - protein, 9 aa, Homo Sapiens
LEAWLQREA

SEQ ID NO: 118063 - protein, 9 aa, Homo Sapiens
LEDRPRLLP

SEQ ID NO: 118064 - protein, 9 aa, Homo Sapiens
LEFEHQRAP

SEQ ID NO: 118065 - protein, 9 aa, Homo Sapiens
LEFERWLNA

SEQ ID NO: 118066 - protein, 9 aa, Homo Sapiens
LEFPFRKDL

SEQ ID NO: 118067 - protein, 9 aa, Homo Sapiens
LEFPQFETL

SEQ ID NO: 118068 - protein, 9 aa, Homo Sapiens
LEFPYGILA

SEQ ID NO: 118069 - protein, 9 aa, Homo Sapiens
LEHALFTAL

SEQ ID NO: 118070 - protein, 9 aa, Homo Sapiens
LEHGAWRLP

SEQ ID NO: 118071 - protein, 9 aa, Homo Sapiens
LEHPFVSSI

SEQ ID NO: 118072 - protein, 9 aa, Homo Sapiens
LEHQVFTVL

SEQ ID NO: 118073 - protein, 9 aa, Homo Sapiens
LEIENLNLA

SEQ ID NO: 118074 - protein, 9 aa, Homo Sapiens
LEIFLAQRA

SEQ ID NO: 118075 - protein, 9 aa, Homo Sapiens
LEIIEFRAA

SEQ ID NO: 118076 - protein, 9 aa, Homo Sapiens
LEIIQSSLP

SEQ ID NO: 118077 - protein, 9 aa, Homo Sapiens
LEIPDILNA

SEQ ID NO: 118078 - protein, 9 aa, Homo Sapiens
LEIPRLPPP

SEQ ID NO: 118079 - protein, 9 aa, Homo Sapiens
LEIVNPQAA

SEQ ID NO: 118080 - protein, 9 aa, Homo Sapiens
LEIVPFRVA

SEQ ID NO: 118081 - protein, 9 aa, Homo Sapiens
LEKIFQNAP

SEQ ID NO: 118082 - protein, 9 aa, Homo Sapiens
LELDTNLPA

SEQ ID NO: 118083 - protein, 9 aa, Homo Sapiens
LELFCKILE

SEQ ID NO: 118084 - protein, 9 aa, Homo Sapiens
LELIGHAVA

SEQ ID NO: 118085 - protein, 9 aa, Homo Sapiens
LELPGQPVA

SEQ ID NO: 118086 - protein, 9 aa, Homo Sapiens
LELPHLTSA

SEQ ID NO: 118087 - protein, 9 aa, Homo Sapiens
LELPPPGLP

SEQ ID NO: 118088 - protein, 9 aa, Homo Sapiens
LEREEFLVP

SEQ ID NO: 118089 - protein, 9 aa, Homo Sapiens
LERFPWPSL

SEQ ID NO: 118090 - protein, 9 aa, Homo Sapiens
LERPHFTLP

SEQ ID NO: 118091 - protein, 9 aa, Homo Sapiens
LESLPEPVI

SEQ ID NO: 118092 - protein, 9 aa, Homo Sapiens
LETLPFGIA

SEQ ID NO: 118093 - protein, 9 aa, Homo Sapiens
LEVKLGELP

SEQ ID NO: 118094 - protein, 9 aa, Homo Sapiens
LEVLKLLVA

SEQ ID NO: 118095 - protein, 9 aa, Homo Sapiens
LEVPGLRSV

SEQ ID NO: 118096 - protein, 9 aa, Homo Sapiens
LEVVKFTQA

SEQ ID NO: 118097 - protein, 9 aa, Homo Sapiens
LEYGLPIQV

SEQ ID NO: 118098 - protein, 9 aa, Homo Sapiens
LEYHVPVTA

SEQ ID NO: 118099 - protein, 9 aa, Homo Sapiens
LEYLAFSDS

SEQ ID NO: 118100 - protein, 9 aa, Homo Sapiens
LEYWNHLAA

SEQ ID NO: 118101 - protein, 9 aa, Homo Sapiens
LEYYDFYEV

SEQ ID NO: 118102 - protein, 9 aa, Homo Sapiens
LTQALKDNK

SEQ ID NO: 118103 - protein, 9 aa, Homo Sapiens
MEALPLLAA

SEQ ID NO: 118104 - protein, 9 aa, Homo Sapiens
MEDIKILIA

SEQ ID NO: 118105 - protein, 9 aa, Homo Sapiens
MEFQRFVTP

SEQ ID NO: 118106 - protein, 9 aa, Homo Sapiens
MEHPYFYTV

SEQ ID NO: 118107 - protein, 9 aa, Homo Sapiens
MEIERILGV

SEQ ID NO: 118108 - protein, 9 aa, Homo Sapiens
MELWPCLAA

SEQ ID NO: 118109 - protein, 9 aa, Homo Sapiens
MEVELPAAA

SEQ ID NO: 118110 - protein, 9 aa, Homo Sapiens
MEYDQPLYV

SEQ ID NO: 118111 - protein, 9 aa, Homo Sapiens
MEYPNFEET

SEQ ID NO: 118112 - protein, 9 aa, Homo Sapiens
NEFPFGCPP

SEQ ID NO: 118113 - protein, 9 aa, Homo Sapiens
NEIIFPHCA

SEQ ID NO: 118114 - protein, 9 aa, Homo Sapiens
NEYAGFLMA

SEQ ID NO: 118115 - protein, 9 aa, Homo Sapiens
PEFKFWHAA

SEQ ID NO: 118116 - protein, 9 aa, Homo Sapiens
QEFLTEALP

SEQ ID NO: 118117 - protein, 9 aa, Homo Sapiens
QEFNRLLEA

SEQ ID NO: 118118 - protein, 9 aa, Homo Sapiens
QEFPFPETP

SEQ ID NO: 118119 - protein, 9 aa, Homo Sapiens
QEFQNFKTL

SEQ ID NO: 118120 - protein, 9 aa, Homo Sapiens
QEFSFFDKV

SEQ ID NO: 118121 - protein, 9 aa, Homo Sapiens
QEFWNFCEV

SEQ ID NO: 118122 - protein, 9 aa, Homo Sapiens
QEHPVVLLP

SEQ ID NO: 118123 - protein, 9 aa, Homo Sapiens
QEIATVVVP

SEQ ID NO: 118124 - protein, 9 aa, Homo Sapiens
QEILGVLVP

SEQ ID NO: 118125 - protein, 9 aa, Homo Sapiens
QEINTLLEA

SEQ ID NO: 118126 - protein, 9 aa, Homo Sapiens
QEKYFLLQA

SEQ ID NO: 118127 - protein, 9 aa, Homo Sapiens
QELEFLRVA

SEQ ID NO: 118128 - protein, 9 aa, Homo Sapiens
QELPGLPAP

SEQ ID NO: 118129 - protein, 9 aa, Homo Sapiens
QELPRLLSA

SEQ ID NO: 118130 - protein, 9 aa, Homo Sapiens
QELSRFIAA

SEQ ID NO: 118131 - protein, 9 aa, Homo Sapiens
QEVFGLAVV

SEQ ID NO: 118132 - protein, 9 aa, Homo Sapiens
QEVFPVLAA

SEQ ID NO: 118133 - protein, 9 aa, Homo Sapiens
QEYFGSLAA

SEQ ID NO: 118134 - protein, 9 aa, Homo Sapiens
QEYNQFCVI

SEQ ID NO: 118135 - protein, 9 aa, Homo Sapiens
QEYPTLKVP

SEQ ID NO: 118136 - protein, 9 aa, Homo Sapiens
READFFWSL

SEQ ID NO: 118137 - protein, 9 aa, Homo Sapiens
REAFGFEQA

SEQ ID NO: 118138 - protein, 9 aa, Homo Sapiens
REFALRLVA

SEQ ID NO: 118139 - protein, 9 aa, Homo Sapiens
REFDFFNKI

SEQ ID NO: 118140 - protein, 9 aa, Homo Sapiens
REFGFFMVL

SEQ ID NO: 118141 - protein, 9 aa, Homo Sapiens
REFPVISVV

SEQ ID NO: 118142 - protein, 9 aa, Homo Sapiens
REFSDFIRV

SEQ ID NO: 118143 - protein, 9 aa, Homo Sapiens
REFVLLPAA

SEQ ID NO: 118144 - protein, 9 aa, Homo Sapiens
REHAPFLVA

SEQ ID NO: 118145 - protein, 9 aa, Homo Sapiens
REHPVPLLP

SEQ ID NO: 118146 - protein, 9 aa, Homo Sapiens
REIFFPETA

SEQ ID NO: 118147 - protein, 9 aa, Homo Sapiens
REILTELEA

SEQ ID NO: 118148 - protein, 9 aa, Homo Sapiens
REINTILKA

SEQ ID NO: 118149 - protein, 9 aa, Homo Sapiens
REIWNQISA

SEQ ID NO: 118150 - protein, 9 aa, Homo Sapiens
REMIPFAVV

SEQ ID NO: 118151 - protein, 9 aa, Homo Sapiens
RENVFKLLP

SEQ ID NO: 118152 - protein, 9 aa, Homo Sapiens
RESVFKLLP

SEQ ID NO: 118153 - protein, 9 aa, Homo Sapiens
REVYSILQA

SEQ ID NO: 118154 - protein, 9 aa, Homo Sapiens
REYMGFIQA

SEQ ID NO: 118155 - protein, 9 aa, Homo Sapiens
REYPNLVTI

SEQ ID NO: 118156 - protein, 9 aa, Homo Sapiens
SEFCFILKV

SEQ ID NO: 118157 - protein, 9 aa, Homo Sapiens
SEFEGFSFV

SEQ ID NO: 118158 - protein, 9 aa, Homo Sapiens
SEFISFITS

SEQ ID NO: 118159 - protein, 9 aa, Homo Sapiens
SEFMFEKAP

SEQ ID NO: 118160 - protein, 9 aa, Homo Sapiens
SEFRNPLAP

SEQ ID NO: 118161 - protein, 9 aa, Homo Sapiens
SEHCFDLIF

SEQ ID NO: 118162 - protein, 9 aa, Homo Sapiens
SEHVWVEVV

SEQ ID NO: 118163 - protein, 9 aa, Homo Sapiens
SEIAFHTIP

SEQ ID NO: 118164 - protein, 9 aa, Homo Sapiens
SEIGGITIA

SEQ ID NO: 118165 - protein, 9 aa, Homo Sapiens
SEIPKLPAV

SEQ ID NO: 118166 - protein, 9 aa, Homo Sapiens
SEIYGLMKA

SEQ ID NO: 118167 - protein, 9 aa, Homo Sapiens
SELAFPITA

SEQ ID NO: 118168 - protein, 9 aa, Homo Sapiens
SELAGLLSA

SEQ ID NO: 118169 - protein, 9 aa, Homo Sapiens
SELDRLLSA

SEQ ID NO: 118170 - protein, 9 aa, Homo Sapiens
SELERLIVP

SEQ ID NO: 118171 - protein, 9 aa, Homo Sapiens
SELFVLNAA

SEQ ID NO: 118172 - protein, 9 aa, Homo Sapiens
SELPFTIAS

SEQ ID NO: 118173 - protein, 9 aa, Homo Sapiens
SELPIVTPA

SEQ ID NO: 118174 - protein, 9 aa, Homo Sapiens
SELQQLGLP

SEQ ID NO: 118175 - protein, 9 aa, Homo Sapiens
SELTPMLAA

SEQ ID NO: 118176 - protein, 9 aa, Homo Sapiens
SEVELMKVA

SEQ ID NO: 118177 - protein, 9 aa, Homo Sapiens
SEVGKLLSA

SEQ ID NO: 118178 - protein, 9 aa, Homo Sapiens
SEVILPVPA

SEQ ID NO: 118179 - protein, 9 aa, Homo Sapiens
SEVNLFLVP

SEQ ID NO: 118180 - protein, 9 aa, Homo Sapiens
SEWKFTITP

SEQ ID NO: 118181 - protein, 9 aa, Homo Sapiens
SEYNAFWKC

SEQ ID NO: 118182 - protein, 9 aa, Homo Sapiens
SEYQWITSP

SEQ ID NO: 118183 - protein, 9 aa, Homo Sapiens
TDFAFRITP

SEQ ID NO: 118184 - protein, 9 aa, Homo Sapiens
TEALHFVAA

SEQ ID NO: 118185 - protein, 9 aa, Homo Sapiens
TEAPPIIFA

SEQ ID NO: 118186 - protein, 9 aa, Homo Sapiens
TEAPRWPLP

SEQ ID NO: 118187 - protein, 9 aa, Homo Sapiens
TEFLSIITS

SEQ ID NO: 118188 - protein, 9 aa, Homo Sapiens
TEFPLFLQT

SEQ ID NO: 118189 - protein, 9 aa, Homo Sapiens
TEFQEFLSV

SEQ ID NO: 118190 - protein, 9 aa, Homo Sapiens
TEFRNFIVW

SEQ ID NO: 118191 - protein, 9 aa, Homo Sapiens
TEIGKLLSS

SEQ ID NO: 118192 - protein, 9 aa, Homo Sapiens
TEILKSVVA

SEQ ID NO: 118193 - protein, 9 aa, Homo Sapiens
TEIPEFPIA

SEQ ID NO: 118194 - protein, 9 aa, Homo Sapiens
TEIRDMLLA

SEQ ID NO: 118195 - protein, 9 aa, Homo Sapiens
TEIVKILSA

SEQ ID NO: 118196 - protein, 9 aa, Homo Sapiens
TEIWFLDRA

SEQ ID NO: 118197 - protein, 9 aa, Homo Sapiens
TELELFKAA

SEQ ID NO: 118198 - protein, 9 aa, Homo Sapiens
TELLWPGAA

SEQ ID NO: 118199 - protein, 9 aa, Homo Sapiens
TELRFEVEA

SEQ ID NO: 118200 - protein, 9 aa, Homo Sapiens
TEQWIFLCA

SEQ ID NO: 118201 - protein, 9 aa, Homo Sapiens
TEYSFLKEV

SEQ ID NO: 118202 - protein, 9 aa, Homo Sapiens
VEAFFLVHA

SEQ ID NO: 118203 - protein, 9 aa, Homo Sapiens
VEALPLVEA

SEQ ID NO: 118204 - protein, 9 aa, Homo Sapiens
VEFEDFSQP

SEQ ID NO: 118205 - protein, 9 aa, Homo Sapiens
VEFGNFNNL

SEQ ID NO: 118206 - protein, 9 aa, Homo Sapiens
VEFHRLWSA

SEQ ID NO: 118207 - protein, 9 aa, Homo Sapiens
VEFMHYIIA

SEQ ID NO: 118208 - protein, 9 aa, Homo Sapiens
VEFNFGQRA

SEQ ID NO: 118209 - protein, 9 aa, Homo Sapiens
VEFNGKLLA

SEQ ID NO: 118210 - protein, 9 aa, Homo Sapiens
VEFPDFSST

SEQ ID NO: 118211 - protein, 9 aa, Homo Sapiens
VEHDAFIFA

SEQ ID NO: 118212 - protein, 9 aa, Homo Sapiens
VEHEDFLTV

SEQ ID NO: 118213 - protein, 9 aa, Homo Sapiens
VEIFHPLRL

SEQ ID NO: 118214 - protein, 9 aa, Homo Sapiens
VEIFKFEEA

SEQ ID NO: 118215 - protein, 9 aa, Homo Sapiens
VELFFQEVA

SEQ ID NO: 118216 - protein, 9 aa, Homo Sapiens
VELFLNSTA

SEQ ID NO: 118217 - protein, 9 aa, Homo Sapiens
VELSQLRVA

SEQ ID NO: 118218 - protein, 9 aa, Homo Sapiens
VERVIEFAA

SEQ ID NO: 118219 - protein, 9 aa, Homo Sapiens
VEVGGLLGV

SEQ ID NO: 118220 - protein, 9 aa, Homo Sapiens
VEVIKPLVA

SEQ ID NO: 118221 - protein, 9 aa, Homo Sapiens
VEVPETPKA

SEQ ID NO: 118222 - protein, 9 aa, Homo Sapiens
VEVRFVSSA

SEQ ID NO: 118223 - protein, 9 aa, Homo Sapiens
VEWSAFLEA

SEQ ID NO: 118224 - protein, 9 aa, Homo Sapiens
WEALVSPVV

SEQ ID NO: 118225 - protein, 9 aa, Homo Sapiens
WEFPINNEA

SEQ ID NO: 118226 - protein, 9 aa, Homo Sapiens
WEIDNNPKV

SEQ ID NO: 118227 - protein, 9 aa, Homo Sapiens
WEIENNPTV

SEQ ID NO: 118228 - protein, 9 aa, Homo Sapiens
WEIKTITSA

SEQ ID NO: 118229 - protein, 9 aa, Homo Sapiens
WEIRDRLLA

SEQ ID NO: 118230 - protein, 9 aa, Homo Sapiens
WELLPSAAA

SEQ ID NO: 118231 - protein, 9 aa, Homo Sapiens
WEVVPEPVA

SEQ ID NO: 118232 - protein, 9 aa, Homo Sapiens
WEVYLRETA

SEQ ID NO: 118233 - protein, 9 aa, Homo Sapiens
YEAFLVGKP

SEQ ID NO: 118234 - protein, 9 aa, Homo Sapiens
YEAPIFTIP

SEQ ID NO: 118235 - protein, 9 aa, Homo Sapiens
YEFGQIINA

SEQ ID NO: 118236 - protein, 9 aa, Homo Sapiens
YEFHLPLSP

SEQ ID NO: 118237 - protein, 9 aa, Homo Sapiens
YEFLVGKPP

SEQ ID NO: 118238 - protein, 9 aa, Homo Sapiens
YEFNVWTRP

SEQ ID NO: 118239 - protein, 9 aa, Homo Sapiens
YEIDKTLGI

SEQ ID NO: 118240 - protein, 9 aa, Homo Sapiens
YEILNNPEL

SEQ ID NO: 118241 - protein, 9 aa, Homo Sapiens
YEILRLLVT

SEQ ID NO: 118242 - protein, 9 aa, Homo Sapiens
YEIPPITPP

SEQ ID NO: 118243 - protein, 9 aa, Homo Sapiens
YEIPSNLTP

SEQ ID NO: 118244 - protein, 9 aa, Homo Sapiens
YEKILFTEA

SEQ ID NO: 118245 - protein, 9 aa, Homo Sapiens
YEKLGFPGA

SEQ ID NO: 118246 - protein, 9 aa, Homo Sapiens
YELALILKA

SEQ ID NO: 118247 - protein, 9 aa, Homo Sapiens
YELAQVLLA

SEQ ID NO: 118248 - protein, 9 aa, Homo Sapiens
YELEHLSTP

SEQ ID NO: 118249 - protein, 9 aa, Homo Sapiens
YELLFKEGV

SEQ ID NO: 118250 - protein, 9 aa, Homo Sapiens
YELQFRLGP

SEQ ID NO: 118251 - protein, 9 aa, Homo Sapiens
YELTYFLEA

SEQ ID NO: 118252 - protein, 9 aa, Homo Sapiens
YENELMLMS

SEQ ID NO: 118253 - protein, 9 aa, Homo Sapiens
YERIYNEIP

SEQ ID NO: 118254 - protein, 9 aa, Homo Sapiens
YERLFGTTV

SEQ ID NO: 118255 - protein, 9 aa, Homo Sapiens
YEVRLTQTV

SEQ ID NO: 118256 - protein, 9 aa, Homo Sapiens
YEYAYLKAI

SEQ ID NO: 118257 - protein, 9 aa, Homo Sapiens
YEYKFGFEL

SEQ ID NO: 118258 - protein, 9 aa, Homo Sapiens
YEYLLHVGA

SEQ ID NO: 118259 - protein, 9 aa, Homo Sapiens
YEYRFLEFT

SEQ ID NO: 118260 - protein, 9 aa, Homo Sapiens
YEYRHVMLP

SEQ ID NO: 118261 - protein, 9 aa, Homo Sapiens
YEYYPHVYP

SEQ ID NO: 118262 - protein, 10 aa, Homo Sapiens
AEAFGFKVNA

SEQ ID NO: 118263 - protein, 10 aa, Homo Sapiens
AEALNVFQQA

SEQ ID NO: 118264 - protein, 10 aa, Homo Sapiens
AEAQLRFIQA

SEQ ID NO: 118265 - protein, 10 aa, Homo Sapiens
AEFAPFVVFI

SEQ ID NO: 118266 - protein, 10 aa, Homo Sapiens
AEFDSFVLVT

SEQ ID NO: 118267 - protein, 10 aa, Homo Sapiens
AEFLKVFIPS

SEQ ID NO: 118268 - protein, 10 aa, Homo Sapiens
AEHPTIKIFW

SEQ ID NO: 118269 - protein, 10 aa, Homo Sapiens
AEIASSLPAA

SEQ ID NO: 118270 - protein, 10 aa, Homo Sapiens
AEIDAHLVAL

SEQ ID NO: 118271 - protein, 10 aa, Homo Sapiens
AEIDFRLVSF

SEQ ID NO: 118272 - protein, 10 aa, Homo Sapiens
AEIDSLWEIS

SEQ ID NO: 118273 - protein, 10 aa, Homo Sapiens
AEIEHFIHII

SEQ ID NO: 118274 - protein, 10 aa, Homo Sapiens
AEIEVRSLLP

SEQ ID NO: 118275 - protein, 10 aa, Homo Sapiens
AEIKVKLIEA

SEQ ID NO: 118276 - protein, 10 aa, Homo Sapiens
AEILRSLNSA

SEQ ID NO: 118277 - protein, 10 aa, Homo Sapiens
AEINNIIKIV

SEQ ID NO: 118278 - protein, 10 aa, Homo Sapiens
AEITELIHIA

SEQ ID NO: 118279 - protein, 10 aa, Homo Sapiens
AEIYEEFLAA

SEQ ID NO: 118280 - protein, 10 aa, Homo Sapiens
AELADVLTEA

SEQ ID NO: 118281 - protein, 10 aa, Homo Sapiens
AELDSVFSSA

SEQ ID NO: 118282 - protein, 10 aa, Homo Sapiens
AELGVPLSQV

SEQ ID NO: 118283 - protein, 10 aa, Homo Sapiens
AELLGFLTHA

SEQ ID NO: 118284 - protein, 10 aa, Homo Sapiens
AELYGPFTSA

SEQ ID NO: 118285 - protein, 10 aa, Homo Sapiens
AEMLYGLIHA

SEQ ID NO: 118286 - protein, 10 aa, Homo Sapiens
AEMRPFIEII

SEQ ID NO: 118287 - protein, 10 aa, Homo Sapiens
AEPDFIFRAP

SEQ ID NO: 118288 - protein, 10 aa, Homo Sapiens
AEPSFPFQVA

SEQ ID NO: 118289 - protein, 10 aa, Homo Sapiens
AEPYMIFKEA

SEQ ID NO: 118290 - protein, 10 aa, Homo Sapiens
AEQPWPPLPA

SEQ ID NO: 118291 - protein, 10 aa, Homo Sapiens
AEYDNFFQHL

SEQ ID NO: 118292 - protein, 10 aa, Homo Sapiens
AEYDRPNLLP

SEQ ID NO: 118293 - protein, 10 aa, Homo Sapiens
AEYEFISSGL

SEQ ID NO: 118294 - protein, 10 aa, Homo Sapiens
AEYIPLTPAA

SEQ ID NO: 118295 - protein, 10 aa, Homo Sapiens
AEYLLGPLYA

SEQ ID NO: 118296 - protein, 10 aa, Homo Sapiens
AEYSRFVNQI

SEQ ID NO: 118297 - protein, 10 aa, Homo Sapiens
ASIALEDLLP

SEQ ID NO: 118298 - protein, 10 aa, Homo Sapiens
EEIKDFLLTA

SEQ ID NO: 118299 - protein, 10 aa, Homo Sapiens
FEANFGKIQA

SEQ ID NO: 118300 - protein, 10 aa, Homo Sapiens
FEAPATINSA

SEQ ID NO: 118301 - protein, 10 aa, Homo Sapiens
FEEGNVKLLA

SEQ ID NO: 118302 - protein, 10 aa, Homo Sapiens
FEFGVFPAIL

SEQ ID NO: 118303 - protein, 10 aa, Homo Sapiens
FERPEGFLQA

SEQ ID NO: 118304 - protein, 10 aa, Homo Sapiens
GEADVPFYYA

SEQ ID NO: 118305 - protein, 10 aa, Homo Sapiens
GEAEAFAIGA

SEQ ID NO: 118306 - protein, 10 aa, Homo Sapiens
GEFADPFKLA

SEQ ID NO: 118307 - protein, 10 aa, Homo Sapiens
GEFEGFVAVV

SEQ ID NO: 118308 - protein, 10 aa, Homo Sapiens
GEFGGFGSVT

SEQ ID NO: 118309 - protein, 10 aa, Homo Sapiens
GEFNEVFNDV

SEQ ID NO: 118310 - protein, 10 aa, Homo Sapiens
GEFPFAKCFV

SEQ ID NO: 118311 - protein, 10 aa, Homo Sapiens
GEFQSFPKVF

SEQ ID NO: 118312 - protein, 10 aa, Homo Sapiens
GEFRQGLISA

SEQ ID NO: 118313 - protein, 10 aa, Homo Sapiens
GEHLPFLTSV

SEQ ID NO: 118314 - protein, 10 aa, Homo Sapiens
GEHVPGFCLP

SEQ ID NO: 118315 - protein, 10 aa, Homo Sapiens
GEIDTRFSFC

SEQ ID NO: 118316 - protein, 10 aa, Homo Sapiens
GEIEGFRLSA

SEQ ID NO: 118317 - protein, 10 aa, Homo Sapiens
GEIPAELRAA

SEQ ID NO: 118318 - protein, 10 aa, Homo Sapiens
GEIVTTIPTI

SEQ ID NO: 118319 - protein, 10 aa, Homo Sapiens
GELGNGNIKL

SEQ ID NO: 118320 - protein, 10 aa, Homo Sapiens
GELLERLSSA

SEQ ID NO: 118321 - protein, 10 aa, Homo Sapiens
GEWVGFTLLC

SEQ ID NO: 118322 - protein, 10 aa, Homo Sapiens
GEYDFRYIFV

SEQ ID NO: 118323 - protein, 10 aa, Homo Sapiens
GEYGKFFVTI

SEQ ID NO: 118324 - protein, 10 aa, Homo Sapiens
HEFLHEVPAA

SEQ ID NO: 118325 - protein, 10 aa, Homo Sapiens
HENILGFIAA

SEQ ID NO: 118326 - protein, 10 aa, Homo Sapiens
HEYPPGLLVA

SEQ ID NO: 118327 - protein, 10 aa, Homo Sapiens
IEFDNFIQRT

SEQ ID NO: 118328 - protein, 10 aa, Homo Sapiens
IEIELENSRP

SEQ ID NO: 118329 - protein, 10 aa, Homo Sapiens
IEVEKPFAIA

SEQ ID NO: 118330 - protein, 10 aa, Homo Sapiens
IEYDDFVECL

SEQ ID NO: 118331 - protein, 10 aa, Homo Sapiens
IEYKDFKLIY

SEQ ID NO: 118332 - protein, 10 aa, Homo Sapiens
KEFCAFSQTL

SEQ ID NO: 118333 - protein, 10 aa, Homo Sapiens
KEIDAYIVQA

SEQ ID NO: 118334 - protein, 10 aa, Homo Sapiens
KEIQGFFNIP

SEQ ID NO: 118335 - protein, 10 aa, Homo Sapiens
KEIQGFLDCA

SEQ ID NO: 118336 - protein, 10 aa, Homo Sapiens
KEMEAFLVSV

SEQ ID NO: 118337 - protein, 10 aa, Homo Sapiens
KEYAAFVLGA

SEQ ID NO: 118338 - protein, 10 aa, Homo Sapiens
KEYDFGLGAP

SEQ ID NO: 118339 - protein, 10 aa, Homo Sapiens
KEYDGFTITI

SEQ ID NO: 118340 - protein, 10 aa, Homo Sapiens
KITPLEIEVL

SEQ ID NO: 118341 - protein, 10 aa, Homo Sapiens
LEARFTGVGV

SEQ ID NO: 118342 - protein, 10 aa, Homo Sapiens
LEFAFRYVTT

SEQ ID NO: 118343 - protein, 10 aa, Homo Sapiens
LEFKEFVGLP

SEQ ID NO: 118344 - protein, 10 aa, Homo Sapiens
LEFLNRFEEA

SEQ ID NO: 118345 - protein, 10 aa, Homo Sapiens
LEFPYGILAA

SEQ ID NO: 118346 - protein, 10 aa, Homo Sapiens
LEHYFHAVVA

SEQ ID NO: 118347 - protein, 10 aa, Homo Sapiens
LEIEFKETQA

SEQ ID NO: 118348 - protein, 10 aa, Homo Sapiens
LEIEGERELP

SEQ ID NO: 118349 - protein, 10 aa, Homo Sapiens
LEIQQELKTA

SEQ ID NO: 118350 - protein, 10 aa, Homo Sapiens
LEKGMRGLSA

SEQ ID NO: 118351 - protein, 10 aa, Homo Sapiens
LELPGPLMAA

SEQ ID NO: 118352 - protein, 10 aa, Homo Sapiens
LENPSPFHSP

SEQ ID NO: 118353 - protein, 10 aa, Homo Sapiens
LEVFPEFAAA

SEQ ID NO: 118354 - protein, 10 aa, Homo Sapiens
LEYPDFYRKL

SEQ ID NO: 118355 - protein, 10 aa, Homo Sapiens
LSVAVDLSLP

SEQ ID NO: 118356 - protein, 10 aa, Homo Sapiens
MEHPYFYPVV

SEQ ID NO: 118357 - protein, 10 aa, Homo Sapiens
MEHPYFYTVV

SEQ ID NO: 118358 - protein, 10 aa, Homo Sapiens
NEYRFAWVEA

SEQ ID NO: 118359 - protein, 10 aa, Homo Sapiens
QEFAEGFVKA

SEQ ID NO: 118360 - protein, 10 aa, Homo Sapiens
QEFDYQPIAA

SEQ ID NO: 118361 - protein, 10 aa, Homo Sapiens
QEFQDAWKLP

SEQ ID NO: 118362 - protein, 10 aa, Homo Sapiens
QEFSFGNLRA

SEQ ID NO: 118363 - protein, 10 aa, Homo Sapiens
QERIDAWAQL

SEQ ID NO: 118364 - protein, 10 aa, Homo Sapiens
QEYDALAKVI

SEQ ID NO: 118365 - protein, 10 aa, Homo Sapiens
QEYGSIFTGA

SEQ ID NO: 118366 - protein, 10 aa, Homo Sapiens
QMALTGISPP

SEQ ID NO: 118367 - protein, 10 aa, Homo Sapiens
REFDAFVETL

SEQ ID NO: 118368 - protein, 10 aa, Homo Sapiens
REFSDFIQAV

SEQ ID NO: 118369 - protein, 10 aa, Homo Sapiens
REGDLLFTVA

SEQ ID NO: 118370 - protein, 10 aa, Homo Sapiens
REGPPFISEA

SEQ ID NO: 118371 - protein, 10 aa, Homo Sapiens
REHQFYETLP

SEQ ID NO: 118372 - protein, 10 aa, Homo Sapiens
REIEELLAEA

SEQ ID NO: 118373 - protein, 10 aa, Homo Sapiens
RELDPSLVSA

SEQ ID NO: 118374 - protein, 10 aa, Homo Sapiens
RELLIIGGVA

SEQ ID NO: 118375 - protein, 10 aa, Homo Sapiens
RETDFYLQSV

SEQ ID NO: 118376 - protein, 10 aa, Homo Sapiens
REYEIEFIYA

SEQ ID NO: 118377 - protein, 10 aa, Homo Sapiens
REYMGFIQAM

SEQ ID NO: 118378 - protein, 10 aa, Homo Sapiens
SEFQPSFHQA

SEQ ID NO: 118379 - protein, 10 aa, Homo Sapiens
SEFSFSKLAA

SEQ ID NO: 118380 - protein, 10 aa, Homo Sapiens
SEHCFDLIFA

SEQ ID NO: 118381 - protein, 10 aa, Homo Sapiens
SEIEKLSAAF

SEQ ID NO: 118382 - protein, 10 aa, Homo Sapiens
SELEKTFNLP

SEQ ID NO: 118383 - protein, 10 aa, Homo Sapiens
SETPFHFTLP

SEQ ID NO: 118384 - protein, 10 aa, Homo Sapiens
SEVTFALHSA

SEQ ID NO: 118385 - protein, 10 aa, Homo Sapiens
SEYNFEDLSA

SEQ ID NO: 118386 - protein, 10 aa, Homo Sapiens
TEAQHLFLQA

SEQ ID NO: 118387 - protein, 10 aa, Homo Sapiens
TEYAFAFIQV

SEQ ID NO: 118388 - protein, 10 aa, Homo Sapiens
TEYENFKVQV

SEQ ID NO: 118389 - protein, 10 aa, Homo Sapiens
TLPPPDFPPP

SEQ ID NO: 118390 - protein, 10 aa, Homo Sapiens
VEFMHYIIAA

SEQ ID NO: 118391 - protein, 10 aa, Homo Sapiens
VEFNGKLLAS

SEQ ID NO: 118392 - protein, 10 aa, Homo Sapiens
VEFRNFKIIY

SEQ ID NO: 118393 - protein, 10 aa, Homo Sapiens
VEFVKSFNLP

SEQ ID NO: 118394 - protein, 10 aa, Homo Sapiens
VEHYFFGVEA

SEQ ID NO: 118395 - protein, 10 aa, Homo Sapiens
VEIRSGFLAA

SEQ ID NO: 118396 - protein, 10 aa, Homo Sapiens
VEYNGGFHLA

SEQ ID NO: 118397 - protein, 10 aa, Homo Sapiens
WEAYLGLLQA

SEQ ID NO: 118398 - protein, 10 aa, Homo Sapiens
WEAYLSRLGV

SEQ ID NO: 118399 - protein, 10 aa, Homo Sapiens
YEFDFSKVYW

SEQ ID NO: 118400 - protein, 10 aa, Homo Sapiens
YEFPRVFSSV

SEQ ID NO: 118401 - protein, 10 aa, Homo Sapiens
YEIKQFLECA

SEQ ID NO: 118402 - protein, 10 aa, Homo Sapiens
YEILTPNSIP

SEQ ID NO: 118403 - protein, 10 aa, Homo Sapiens
YELDLGLNHV

SEQ ID NO: 118404 - protein, 10 aa, Homo Sapiens
YELLFKEGVM

SEQ ID NO: 118405 - protein, 10 aa, Homo Sapiens
YEQDFAVLTA

SEQ ID NO: 118406 - protein, 10 aa, Homo Sapiens
YEVRLTQTVA

SEQ ID NO: 118407 - protein, 11 aa, Homo Sapiens
AEADKIGLLLA

SEQ ID NO: 118408 - protein, 11 aa, Homo Sapiens
AEAERLLAPFL

SEQ ID NO: 118409 - protein, 11 aa, Homo Sapiens
AEANAFSVLQH

SEQ ID NO: 118410 - protein, 11 aa, Homo Sapiens
AEDVLSGKVSA

SEQ ID NO: 118411 - protein, 11 aa, Homo Sapiens
AEFHQIEGVVA

SEQ ID NO: 118412 - protein, 11 aa, Homo Sapiens
AEFPLGPVTTA

SEQ ID NO: 118413 - protein, 11 aa, Homo Sapiens
AEFWKFSGIVF

SEQ ID NO: 118414 - protein, 11 aa, Homo Sapiens
AEHDLWHIIKF

SEQ ID NO: 118415 - protein, 11 aa, Homo Sapiens
AEIDAHLVALA

SEQ ID NO: 118416 - protein, 11 aa, Homo Sapiens
AEIDPKQLVDI

SEQ ID NO: 118417 - protein, 11 aa, Homo Sapiens
AEILELAGNAA

SEQ ID NO: 118418 - protein, 11 aa, Homo Sapiens
AEILNGKEISA

SEQ ID NO: 118419 - protein, 11 aa, Homo Sapiens
AEIQFADYIFP

SEQ ID NO: 118420 - protein, 11 aa, Homo Sapiens
AETPGFGAVTF

SEQ ID NO: 118421 - protein, 11 aa, Homo Sapiens
AEYGHFVDIRI

SEQ ID NO: 118422 - protein, 11 aa, Homo Sapiens
AEYIPLTPAAA

SEQ ID NO: 118423 - protein, 11 aa, Homo Sapiens
FEIKDKMLIEF

SEQ ID NO: 118424 - protein, 11 aa, Homo Sapiens
FEVGPPAFRIA

SEQ ID NO: 118425 - protein, 11 aa, Homo Sapiens
GEDSSFLVVRL

SEQ ID NO: 118426 - protein, 11 aa, Homo Sapiens
GEIDTRFSFCA

SEQ ID NO: 118427 - protein, 11 aa, Homo Sapiens
GEITLRGLVLP

SEQ ID NO: 118428 - protein, 11 aa, Homo Sapiens
GEWVGFTLLCA

SEQ ID NO: 118429 - protein, 11 aa, Homo Sapiens
GEYVSLGKVEA

SEQ ID NO: 118430 - protein, 11 aa, Homo Sapiens
LEAAQGLLVEA

SEQ ID NO: 118431 - protein, 11 aa, Homo Sapiens
LEAIPTSGLTA

SEQ ID NO: 118432 - protein, 11 aa, Homo Sapiens
LEFDPAQRITL

SEQ ID NO: 118433 - protein, 11 aa, Homo Sapiens
LEHVFFQVVEF

SEQ ID NO: 118434 - protein, 11 aa, Homo Sapiens
LEIAPHALLQA

SEQ ID NO: 118435 - protein, 11 aa, Homo Sapiens
LEINFGDLGRP

SEQ ID NO: 118436 - protein, 11 aa, Homo Sapiens
LESLPEPVICY

SEQ ID NO: 118437 - protein, 11 aa, Homo Sapiens
LEYDPAKRITL

SEQ ID NO: 118438 - protein, 11 aa, Homo Sapiens
LEYDPLSNYSA

SEQ ID NO: 118439 - protein, 11 aa, Homo Sapiens
LEYGFLRLSQA

SEQ ID NO: 118440 - protein, 11 aa, Homo Sapiens
LEYIARAILSA

SEQ ID NO: 118441 - protein, 11 aa, Homo Sapiens
MEHDGSLFQAV

SEQ ID NO: 118442 - protein, 11 aa, Homo Sapiens
MERNFQPVIIF

SEQ ID NO: 118443 - protein, 11 aa, Homo Sapiens
PSGNGYKFLSP

SEQ ID NO: 118444 - protein, 11 aa, Homo Sapiens
QEIFTEQVVTA

SEQ ID NO: 118445 - protein, 11 aa, Homo Sapiens
READAALFSEL

SEQ ID NO: 118446 - protein, 11 aa, Homo Sapiens
REALFNEFVAA

SEQ ID NO: 118447 - protein, 11 aa, Homo Sapiens
REFLFNAIETM

SEQ ID NO: 118448 - protein, 11 aa, Homo Sapiens
REIEIPLGELF

SEQ ID NO: 118449 - protein, 11 aa, Homo Sapiens
REIFLSQPILL

SEQ ID NO: 118450 - protein, 11 aa, Homo Sapiens
RELENLIGISC

SEQ ID NO: 118451 - protein, 11 aa, Homo Sapiens
RELLIIGGVAA

SEQ ID NO: 118452 - protein, 11 aa, Homo Sapiens
REPPADVWTPP

SEQ ID NO: 118453 - protein, 11 aa, Homo Sapiens
RESGQLFHIDF

SEQ ID NO: 118454 - protein, 11 aa, Homo Sapiens
REYDRFYVINY

SEQ ID NO: 118455 - protein, 11 aa, Homo Sapiens
REYEIPSNLTP

SEQ ID NO: 118456 - protein, 11 aa, Homo Sapiens
REYNARLFGLA

SEQ ID NO: 118457 - protein, 11 aa, Homo Sapiens
SEEDRVVVIRF

SEQ ID NO: 118458 - protein, 11 aa, Homo Sapiens
SEIDESVKLIP

SEQ ID NO: 118459 - protein, 11 aa, Homo Sapiens
SEYSGFVNPVL

SEQ ID NO: 118460 - protein, 11 aa, Homo Sapiens
TEDPHTVLVEF

SEQ ID NO: 118461 - protein, 11 aa, Homo Sapiens
TEFFFGASGSP

SEQ ID NO: 118462 - protein, 11 aa, Homo Sapiens
TEYENFKVQVL

SEQ ID NO: 118463 - protein, 11 aa, Homo Sapiens
TVEYVTFTSIA

SEQ ID NO: 118464 - protein, 11 aa, Homo Sapiens
VEFQHIIPISA

SEQ ID NO: 118465 - protein, 11 aa, Homo Sapiens
VEYIFGIVGIP

SEQ ID NO: 118466 - protein, 11 aa, Homo Sapiens
WEYDESHVITA

SEQ ID NO: 118467 - protein, 11 aa, Homo Sapiens
YEIPGLEPITF

SEQ ID NO: 118468 - protein, 11 aa, Homo Sapiens
YELDLGLNHVV

SEQ ID NO: 118469 - protein, 8 aa, Homo Sapiens
ADILTQIL

SEQ ID NO: 118470 - protein, 8 aa, Homo Sapiens
ADLVFISV

SEQ ID NO: 118471 - protein, 8 aa, Homo Sapiens
ALVQVRVL

SEQ ID NO: 118472 - protein, 8 aa, Homo Sapiens
ASPAVLEL

SEQ ID NO: 118473 - protein, 8 aa, Homo Sapiens
ATPAIPTI

SEQ ID NO: 118474 - protein, 8 aa, Homo Sapiens
DAAEFRVV

SEQ ID NO: 118475 - protein, 8 aa, Homo Sapiens
DAAEIRLV

SEQ ID NO: 118476 - protein, 8 aa, Homo Sapiens
DAAFATLV

SEQ ID NO: 118477 - protein, 8 aa, Homo Sapiens
DAAIVDMV

SEQ ID NO: 118478 - protein, 8 aa, Homo Sapiens
DAARFPII

SEQ ID NO: 118479 - protein, 8 aa, Homo Sapiens
DADYAIKI

SEQ ID NO: 118480 - protein, 8 aa, Homo Sapiens
DAFISVQV

SEQ ID NO: 118481 - protein, 8 aa, Homo Sapiens
DAFKIWVI

SEQ ID NO: 118482 - protein, 8 aa, Homo Sapiens
DAFKTLFV

SEQ ID NO: 118483 - protein, 8 aa, Homo Sapiens
DAFNIPLI

SEQ ID NO: 118484 - protein, 8 aa, Homo Sapiens
DAFPPPRV

SEQ ID NO: 118485 - protein, 8 aa, Homo Sapiens
DAFPVGEV

SEQ ID NO: 118486 - protein, 8 aa, Homo Sapiens
DAFRFENV

SEQ ID NO: 118487 - protein, 8 aa, Homo Sapiens
DAFRQPSL

SEQ ID NO: 118488 - protein, 8 aa, Homo Sapiens
DAFRTLGL

SEQ ID NO: 118489 - protein, 8 aa, Homo Sapiens
DAFRVNVI

SEQ ID NO: 118490 - protein, 8 aa, Homo Sapiens
DAFTIKTV

SEQ ID NO: 118491 - protein, 8 aa, Homo Sapiens
DAFVFSYL

SEQ ID NO: 118492 - protein, 8 aa, Homo Sapiens
DAGLGKLI

SEQ ID NO: 118493 - protein, 8 aa, Homo Sapiens
DAIAVHVV

SEQ ID NO: 118494 - protein, 8 aa, Homo Sapiens
DAIKLMNI

SEQ ID NO: 118495 - protein, 8 aa, Homo Sapiens
DAILATLM

SEQ ID NO: 118496 - protein, 8 aa, Homo Sapiens
DAIPGLKI

SEQ ID NO: 118497 - protein, 8 aa, Homo Sapiens
DAIRILGI

SEQ ID NO: 118498 - protein, 8 aa, Homo Sapiens
DAIRLKEI

SEQ ID NO: 118499 - protein, 8 aa, Homo Sapiens
DALIVRPV

SEQ ID NO: 118500 - protein, 8 aa, Homo Sapiens
DALKVTFL

SEQ ID NO: 118501 - protein, 8 aa, Homo Sapiens
DALQGFKI

SEQ ID NO: 118502 - protein, 8 aa, Homo Sapiens
DALQILHI

SEQ ID NO: 118503 - protein, 8 aa, Homo Sapiens
DALRICIV

SEQ ID NO: 118504 - protein, 8 aa, Homo Sapiens
DALRLYLI

SEQ ID NO: 118505 - protein, 8 aa, Homo Sapiens
DALVIFQL

SEQ ID NO: 118506 - protein, 8 aa, Homo Sapiens
DALVILQL

SEQ ID NO: 118507 - protein, 8 aa, Homo Sapiens
DALVLAKM

SEQ ID NO: 118508 - protein, 8 aa, Homo Sapiens
DALVLHKV

SEQ ID NO: 118509 - protein, 8 aa, Homo Sapiens
DAMGMNMI

SEQ ID NO: 118510 - protein, 8 aa, Homo Sapiens
DAMRLYYV

SEQ ID NO: 118511 - protein, 8 aa, Homo Sapiens
DAMYVKLI

SEQ ID NO: 118512 - protein, 8 aa, Homo Sapiens
DANLLPLV

SEQ ID NO: 118513 - protein, 8 aa, Homo Sapiens
DAPDTLLL

SEQ ID NO: 118514 - protein, 8 aa, Homo Sapiens
DAPDVFTV

SEQ ID NO: 118515 - protein, 8 aa, Homo Sapiens
DAPESIQF

SEQ ID NO: 118516 - protein, 8 aa, Homo Sapiens
DAPGVPRI

SEQ ID NO: 118517 - protein, 8 aa, Homo Sapiens
DAPIGPHL

SEQ ID NO: 118518 - protein, 8 aa, Homo Sapiens
DAPLDLKI

SEQ ID NO: 118519 - protein, 8 aa, Homo Sapiens
DAPLSPLL

SEQ ID NO: 118520 - protein, 8 aa, Homo Sapiens
DAPVALVV

SEQ ID NO: 118521 - protein, 8 aa, Homo Sapiens
DAPYIFIV

SEQ ID NO: 118522 - protein, 8 aa, Homo Sapiens
DARTFYII

SEQ ID NO: 118523 - protein, 8 aa, Homo Sapiens
DARVAITI

SEQ ID NO: 118524 - protein, 8 aa, Homo Sapiens
DASLVFKV

SEQ ID NO: 118525 - protein, 8 aa, Homo Sapiens
DATVFTCI

SEQ ID NO: 118526 - protein, 8 aa, Homo Sapiens
DAVKILKL

SEQ ID NO: 118527 - protein, 8 aa, Homo Sapiens
DAVKMTII

SEQ ID NO: 118528 - protein, 8 aa, Homo Sapiens
DAVQLNVI

SEQ ID NO: 118529 - protein, 8 aa, Homo Sapiens
DAVRIVHI

SEQ ID NO: 118530 - protein, 8 aa, Homo Sapiens
DAVVMPKI

SEQ ID NO: 118531 - protein, 8 aa, Homo Sapiens
DAWKLPKI

SEQ ID NO: 118532 - protein, 8 aa, Homo Sapiens
DAWLVHSV

SEQ ID NO: 118533 - protein, 8 aa, Homo Sapiens
DAYIPLQI

SEQ ID NO: 118534 - protein, 8 aa, Homo Sapiens
DAYLPLRL

SEQ ID NO: 118535 - protein, 8 aa, Homo Sapiens
DAYLQILI

SEQ ID NO: 118536 - protein, 8 aa, Homo Sapiens
DAYLVHLI

SEQ ID NO: 118537 - protein, 8 aa, Homo Sapiens
DAYVLPKL

SEQ ID NO: 118538 - protein, 8 aa, Homo Sapiens
DFIRILVI

SEQ ID NO: 118539 - protein, 8 aa, Homo Sapiens
DGATILKL

SEQ ID NO: 118540 - protein, 8 aa, Homo Sapiens
DGFKANLV

SEQ ID NO: 118541 - protein, 8 aa, Homo Sapiens
DGFTPLAV

SEQ ID NO: 118542 - protein, 8 aa, Homo Sapiens
DGFTVPQI

SEQ ID NO: 118543 - protein, 8 aa, Homo Sapiens
DGIVIVKV

SEQ ID NO: 118544 - protein, 8 aa, Homo Sapiens
DGIVNPTI

SEQ ID NO: 118545 - protein, 8 aa, Homo Sapiens
DGLCTRLI

SEQ ID NO: 118546 - protein, 8 aa, Homo Sapiens
DGLITPTI

SEQ ID NO: 118547 - protein, 8 aa, Homo Sapiens
DGLVLPVI

SEQ ID NO: 118548 - protein, 8 aa, Homo Sapiens
DGLVVLKI

SEQ ID NO: 118549 - protein, 8 aa, Homo Sapiens
DGPGILRI

SEQ ID NO: 118550 - protein, 8 aa, Homo Sapiens
DGPRVFRV

SEQ ID NO: 118551 - protein, 8 aa, Homo Sapiens
DGTVLPTL

SEQ ID NO: 118552 - protein, 8 aa, Homo Sapiens
DGVAVLKV

SEQ ID NO: 118553 - protein, 8 aa, Homo Sapiens
DGVLIWKI

SEQ ID NO: 118554 - protein, 8 aa, Homo Sapiens
DGVPVIKV

SEQ ID NO: 118555 - protein, 8 aa, Homo Sapiens
DGWPAMGI

SEQ ID NO: 118556 - protein, 8 aa, Homo Sapiens
DGWTPLHV

SEQ ID NO: 118557 - protein, 8 aa, Homo Sapiens
DGYLMICV

SEQ ID NO: 118558 - protein, 8 aa, Homo Sapiens
DMYLAPHV

SEQ ID NO: 118559 - protein, 8 aa, Homo Sapiens
DMYLVPKL

SEQ ID NO: 118560 - protein, 8 aa, Homo Sapiens
DPFFMPEI

SEQ ID NO: 118561 - protein, 8 aa, Homo Sapiens
DPFILDVI

SEQ ID NO: 118562 - protein, 8 aa, Homo Sapiens
DPFTVPTI

SEQ ID NO: 118563 - protein, 8 aa, Homo Sapiens
DPFVAFHI

SEQ ID NO: 118564 - protein, 8 aa, Homo Sapiens
DPGPILRI

SEQ ID NO: 118565 - protein, 8 aa, Homo Sapiens
DPMVQCII

SEQ ID NO: 118566 - protein, 8 aa, Homo Sapiens
DPPIIIFV

SEQ ID NO: 118567 - protein, 8 aa, Homo Sapiens
DPPVLPTV

SEQ ID NO: 118568 - protein, 8 aa, Homo Sapiens
DPRIIRLI

SEQ ID NO: 118569 - protein, 8 aa, Homo Sapiens
DPSLAPYI

SEQ ID NO: 118570 - protein, 8 aa, Homo Sapiens
DPTQLPKI

SEQ ID NO: 118571 - protein, 8 aa, Homo Sapiens
DPTVLPLL

SEQ ID NO: 118572 - protein, 8 aa, Homo Sapiens
DPVGVLYI

SEQ ID NO: 118573 - protein, 8 aa, Homo Sapiens
DPWLLPEI

SEQ ID NO: 118574 - protein, 8 aa, Homo Sapiens
DPYCLLGI

SEQ ID NO: 118575 - protein, 8 aa, Homo Sapiens
DPYKVYRI

SEQ ID NO: 118576 - protein, 8 aa, Homo Sapiens
DPYLLPHI

SEQ ID NO: 118577 - protein, 8 aa, Homo Sapiens
DPYLLPHM

SEQ ID NO: 118578 - protein, 8 aa, Homo Sapiens
DPYPLLVV

SEQ ID NO: 118579 - protein, 8 aa, Homo Sapiens
DPYRALDI

SEQ ID NO: 118580 - protein, 8 aa, Homo Sapiens
DPYTFAEI

SEQ ID NO: 118581 - protein, 8 aa, Homo Sapiens
DQYKFYSV

SEQ ID NO: 118582 - protein, 8 aa, Homo Sapiens
DSALLPAV

SEQ ID NO: 118583 - protein, 8 aa, Homo Sapiens
DSIVLQSV

SEQ ID NO: 118584 - protein, 8 aa, Homo Sapiens
DSLITPHV

SEQ ID NO: 118585 - protein, 8 aa, Homo Sapiens
DSLVILTI

SEQ ID NO: 118586 - protein, 8 aa, Homo Sapiens
DSLVLNNI

SEQ ID NO: 118587 - protein, 8 aa, Homo Sapiens
DSQILPKI

SEQ ID NO: 118588 - protein, 8 aa, Homo Sapiens
DTFRIPLI

SEQ ID NO: 118589 - protein, 8 aa, Homo Sapiens
DVPGVPKI

SEQ ID NO: 118590 - protein, 8 aa, Homo Sapiens
DVPQVSLI

SEQ ID NO: 118591 - protein, 8 aa, Homo Sapiens
EALPVKLI

SEQ ID NO: 118592 - protein, 8 aa, Homo Sapiens
EALVMPTL

SEQ ID NO: 118593 - protein, 8 aa, Homo Sapiens
EAPAVLLC

SEQ ID NO: 118594 - protein, 8 aa, Homo Sapiens
EAWPALQI

SEQ ID NO: 118595 - protein, 8 aa, Homo Sapiens
EPFIFHEV

SEQ ID NO: 118596 - protein, 8 aa, Homo Sapiens
EPPLSLTI

SEQ ID NO: 118597 - protein, 8 aa, Homo Sapiens
EPPQVLEI

SEQ ID NO: 118598 - protein, 8 aa, Homo Sapiens
EQFLLPVI

SEQ ID NO: 118599 - protein, 8 aa, Homo Sapiens
FALGILKI

SEQ ID NO: 118600 - protein, 8 aa, Homo Sapiens
FAPMSPRI

SEQ ID NO: 118601 - protein, 8 aa, Homo Sapiens
FAYTVKYV

SEQ ID NO: 118602 - protein, 8 aa, Homo Sapiens
FGPVASVV

SEQ ID NO: 118603 - protein, 8 aa, Homo Sapiens
FGYRTLTV

SEQ ID NO: 118604 - protein, 8 aa, Homo Sapiens
FPAIAQEI

SEQ ID NO: 118605 - protein, 8 aa, Homo Sapiens
FPALLVRI

SEQ ID NO: 118606 - protein, 8 aa, Homo Sapiens
FPAVSALV

SEQ ID NO: 118607 - protein, 8 aa, Homo Sapiens
FPAVTVEV

SEQ ID NO: 118608 - protein, 8 aa, Homo Sapiens
FPFHFVEV

SEQ ID NO: 118609 - protein, 8 aa, Homo Sapiens
FPFIPIQV

SEQ ID NO: 118610 - protein, 8 aa, Homo Sapiens
FPFKPPSI

SEQ ID NO: 118611 - protein, 8 aa, Homo Sapiens
FPFLFQHI

SEQ ID NO: 118612 - protein, 8 aa, Homo Sapiens
FPFQPGSV

SEQ ID NO: 118613 - protein, 8 aa, Homo Sapiens
FPFSLQHI

SEQ ID NO: 118614 - protein, 8 aa, Homo Sapiens
FPFVAVSI

SEQ ID NO: 118615 - protein, 8 aa, Homo Sapiens
FPGLAIKI

SEQ ID NO: 118616 - protein, 8 aa, Homo Sapiens
FPHPLPSL

SEQ ID NO: 118617 - protein, 8 aa, Homo Sapiens
FPHVLPLI

SEQ ID NO: 118618 - protein, 8 aa, Homo Sapiens
FPLIISSV

SEQ ID NO: 118619 - protein, 8 aa, Homo Sapiens
FPNILKEI

SEQ ID NO: 118620 - protein, 8 aa, Homo Sapiens
FPRPEPFV

SEQ ID NO: 118621 - protein, 8 aa, Homo Sapiens
FPSPILKV

SEQ ID NO: 118622 - protein, 8 aa, Homo Sapiens
FPSYLETV

SEQ ID NO: 118623 - protein, 8 aa, Homo Sapiens
FPTLQPTV

SEQ ID NO: 118624 - protein, 8 aa, Homo Sapiens
FPVEVNTV

SEQ ID NO: 118625 - protein, 8 aa, Homo Sapiens
FPVFATVI

SEQ ID NO: 118626 - protein, 8 aa, Homo Sapiens
FPVILYEV

SEQ ID NO: 118627 - protein, 8 aa, Homo Sapiens
FPVVVHSV

SEQ ID NO: 118628 - protein, 8 aa, Homo Sapiens
FPYAFKEV

SEQ ID NO: 118629 - protein, 8 aa, Homo Sapiens
FPYIQKGL

SEQ ID NO: 118630 - protein, 8 aa, Homo Sapiens
FPYKIPAV

SEQ ID NO: 118631 - protein, 8 aa, Homo Sapiens
FPYPFQVV

SEQ ID NO: 118632 - protein, 8 aa, Homo Sapiens
FPYSSHLI

SEQ ID NO: 118633 - protein, 8 aa, Homo Sapiens
FPYVLKEI

SEQ ID NO: 118634 - protein, 8 aa, Homo Sapiens
FPYVTMDI

SEQ ID NO: 118635 - protein, 8 aa, Homo Sapiens
GEGLGKII

SEQ ID NO: 118636 - protein, 8 aa, Homo Sapiens
GVEKIIKI

SEQ ID NO: 118637 - protein, 8 aa, Homo Sapiens
HAFKISKI

SEQ ID NO: 118638 - protein, 8 aa, Homo Sapiens
HATIIPKV

SEQ ID NO: 118639 - protein, 8 aa, Homo Sapiens
HAVLLQVI

SEQ ID NO: 118640 - protein, 8 aa, Homo Sapiens
HGLLLPHI

SEQ ID NO: 118641 - protein, 8 aa, Homo Sapiens
HGLTVPLI

SEQ ID NO: 118642 - protein, 8 aa, Homo Sapiens
HGVFLPLV

SEQ ID NO: 118643 - protein, 8 aa, Homo Sapiens
HPFHVIRI

SEQ ID NO: 118644 - protein, 8 aa, Homo Sapiens
HPLVILNI

SEQ ID NO: 118645 - protein, 8 aa, Homo Sapiens
HPYMFQHI

SEQ ID NO: 118646 - protein, 8 aa, Homo Sapiens
IAAVLPKV

SEQ ID NO: 118647 - protein, 8 aa, Homo Sapiens
IAFLSPKV

SEQ ID NO: 118648 - protein, 8 aa, Homo Sapiens
IAPETLRV

SEQ ID NO: 118649 - protein, 8 aa, Homo Sapiens
IAPLVKSL

SEQ ID NO: 118650 - protein, 8 aa, Homo Sapiens
IAPVLLVV

SEQ ID NO: 118651 - protein, 8 aa, Homo Sapiens
IAPVTLKV

SEQ ID NO: 118652 - protein, 8 aa, Homo Sapiens
IAPYSVEI

SEQ ID NO: 118653 - protein, 8 aa, Homo Sapiens
IATILREI

SEQ ID NO: 118654 - protein, 8 aa, Homo Sapiens
IAVKALQI

SEQ ID NO: 118655 - protein, 8 aa, Homo Sapiens
IAYILQGV

SEQ ID NO: 118656 - protein, 8 aa, Homo Sapiens
IAYIMPGL

SEQ ID NO: 118657 - protein, 8 aa, Homo Sapiens
IGYLIPLM

SEQ ID NO: 118658 - protein, 8 aa, Homo Sapiens
IIPPLFTV

SEQ ID NO: 118659 - protein, 8 aa, Homo Sapiens
IPADLRII

SEQ ID NO: 118660 - protein, 8 aa, Homo Sapiens
IPAEVPHI

SEQ ID NO: 118661 - protein, 8 aa, Homo Sapiens
IPAYFVTV

SEQ ID NO: 118662 - protein, 8 aa, Homo Sapiens
IPFGTALV

SEQ ID NO: 118663 - protein, 8 aa, Homo Sapiens
IPFIPMGV

SEQ ID NO: 118664 - protein, 8 aa, Homo Sapiens
IPFISKEL

SEQ ID NO: 118665 - protein, 8 aa, Homo Sapiens
IPFPVEKI

SEQ ID NO: 118666 - protein, 8 aa, Homo Sapiens
IPFQPRHL

SEQ ID NO: 118667 - protein, 8 aa, Homo Sapiens
IPFSPYRV

SEQ ID NO: 118668 - protein, 8 aa, Homo Sapiens
IPHEVPQI

SEQ ID NO: 118669 - protein, 8 aa, Homo Sapiens
IPHSFALI

SEQ ID NO: 118670 - protein, 8 aa, Homo Sapiens
IPIAVSGV

SEQ ID NO: 118671 - protein, 8 aa, Homo Sapiens
IPIFLPEV

SEQ ID NO: 118672 - protein, 8 aa, Homo Sapiens
IPITVRHI

SEQ ID NO: 118673 - protein, 8 aa, Homo Sapiens
IPLLINHL

SEQ ID NO: 118674 - protein, 8 aa, Homo Sapiens
IPLLVQGV

SEQ ID NO: 118675 - protein, 8 aa, Homo Sapiens
IPMEMTRV

SEQ ID NO: 118676 - protein, 8 aa, Homo Sapiens
IPNIFQKI

SEQ ID NO: 118677 - protein, 8 aa, Homo Sapiens
IPNRIPKI

SEQ ID NO: 118678 - protein, 8 aa, Homo Sapiens
IPPHAVMV

SEQ ID NO: 118679 - protein, 8 aa, Homo Sapiens
IPPIAIFL

SEQ ID NO: 118680 - protein, 8 aa, Homo Sapiens
IPPLGLKV

SEQ ID NO: 118681 - protein, 8 aa, Homo Sapiens
IPPPVIMV

SEQ ID NO: 118682 - protein, 8 aa, Homo Sapiens
IPPYVPRF

SEQ ID NO: 118683 - protein, 8 aa, Homo Sapiens
IPQIMPSI

SEQ ID NO: 118684 - protein, 8 aa, Homo Sapiens
IPQLVSNI

SEQ ID NO: 118685 - protein, 8 aa, Homo Sapiens
IPRLIPVI

SEQ ID NO: 118686 - protein, 8 aa, Homo Sapiens
IPTVFVAV

SEQ ID NO: 118687 - protein, 8 aa, Homo Sapiens
IPVHLPNI

SEQ ID NO: 118688 - protein, 8 aa, Homo Sapiens
IPVVHASI

SEQ ID NO: 118689 - protein, 8 aa, Homo Sapiens
IPVVVRQV

SEQ ID NO: 118690 - protein, 8 aa, Homo Sapiens
IPWGPASI

SEQ ID NO: 118691 - protein, 8 aa, Homo Sapiens
IPWKVPGL

SEQ ID NO: 118692 - protein, 8 aa, Homo Sapiens
IPYAQPPL

SEQ ID NO: 118693 - protein, 8 aa, Homo Sapiens
IPYESPIF

SEQ ID NO: 118694 - protein, 8 aa, Homo Sapiens
IPYGMRFI

SEQ ID NO: 118695 - protein, 8 aa, Homo Sapiens
IPYHIVNI

SEQ ID NO: 118696 - protein, 8 aa, Homo Sapiens
IPYIPTLI

SEQ ID NO: 118697 - protein, 8 aa, Homo Sapiens
IPYITNVL

SEQ ID NO: 118698 - protein, 8 aa, Homo Sapiens
IPYKTILL

SEQ ID NO: 118699 - protein, 8 aa, Homo Sapiens
IPYLPELI

SEQ ID NO: 118700 - protein, 8 aa, Homo Sapiens
IPYLVVKV

SEQ ID NO: 118701 - protein, 8 aa, Homo Sapiens
IPYNFICV

SEQ ID NO: 118702 - protein, 8 aa, Homo Sapiens
ISPGKLVW

SEQ ID NO: 118703 - protein, 8 aa, Homo Sapiens
LAAALAHI

SEQ ID NO: 118704 - protein, 8 aa, Homo Sapiens
LAPLAKVI

SEQ ID NO: 118705 - protein, 8 aa, Homo Sapiens
LAPLIQVI

SEQ ID NO: 118706 - protein, 8 aa, Homo Sapiens
LAPPALVV

SEQ ID NO: 118707 - protein, 8 aa, Homo Sapiens
LAPVVKEI

SEQ ID NO: 118708 - protein, 8 aa, Homo Sapiens
LGYVPIMV

SEQ ID NO: 118709 - protein, 8 aa, Homo Sapiens
LMPLVVVL

SEQ ID NO: 118710 - protein, 8 aa, Homo Sapiens
LPAFSPLM

SEQ ID NO: 118711 - protein, 8 aa, Homo Sapiens
LPAFVRVV

SEQ ID NO: 118712 - protein, 8 aa, Homo Sapiens
LPAFVSVV

SEQ ID NO: 118713 - protein, 8 aa, Homo Sapiens
LPAHAVII

SEQ ID NO: 118714 - protein, 8 aa, Homo Sapiens
LPALLQQI

SEQ ID NO: 118715 - protein, 8 aa, Homo Sapiens
LPALVSQI

SEQ ID NO: 118716 - protein, 8 aa, Homo Sapiens
LPAPAPVI

SEQ ID NO: 118717 - protein, 8 aa, Homo Sapiens
LPATIARI

SEQ ID NO: 118718 - protein, 8 aa, Homo Sapiens
LPAVSLEV

SEQ ID NO: 118719 - protein, 8 aa, Homo Sapiens
LPEVLAVI

SEQ ID NO: 118720 - protein, 8 aa, Homo Sapiens
LPFAAAQI

SEQ ID NO: 118721 - protein, 8 aa, Homo Sapiens
LPFEASYI

SEQ ID NO: 118722 - protein, 8 aa, Homo Sapiens
LPFFAIQI

SEQ ID NO: 118723 - protein, 8 aa, Homo Sapiens
LPFGMNII

SEQ ID NO: 118724 - protein, 8 aa, Homo Sapiens
LPFQLSSV

SEQ ID NO: 118725 - protein, 8 aa, Homo Sapiens
LPFQQFEI

SEQ ID NO: 118726 - protein, 8 aa, Homo Sapiens
LPFRVLLV

SEQ ID NO: 118727 - protein, 8 aa, Homo Sapiens
LPFSFEHI

SEQ ID NO: 118728 - protein, 8 aa, Homo Sapiens
LPFSPLVI

SEQ ID NO: 118729 - protein, 8 aa, Homo Sapiens
LPFSQPKV

SEQ ID NO: 118730 - protein, 8 aa, Homo Sapiens
LPFTIPEL

SEQ ID NO: 118731 - protein, 8 aa, Homo Sapiens
LPFTMKKI

SEQ ID NO: 118732 - protein, 8 aa, Homo Sapiens
LPFTPKNI

SEQ ID NO: 118733 - protein, 8 aa, Homo Sapiens
LPFVLQEI

SEQ ID NO: 118734 - protein, 8 aa, Homo Sapiens
LPHAGPII

SEQ ID NO: 118735 - protein, 8 aa, Homo Sapiens
LPHAILRL

SEQ ID NO: 118736 - protein, 8 aa, Homo Sapiens
LPHEILEM

SEQ ID NO: 118737 - protein, 8 aa, Homo Sapiens
LPHLVVSI

SEQ ID NO: 118738 - protein, 8 aa, Homo Sapiens
LPHPGLKV

SEQ ID NO: 118739 - protein, 8 aa, Homo Sapiens
LPHPGLQV

SEQ ID NO: 118740 - protein, 8 aa, Homo Sapiens
LPHVVPTL

SEQ ID NO: 118741 - protein, 8 aa, Homo Sapiens
LPILVNII

SEQ ID NO: 118742 - protein, 8 aa, Homo Sapiens
LPILVQHI

SEQ ID NO: 118743 - protein, 8 aa, Homo Sapiens
LPIRVLLV

SEQ ID NO: 118744 - protein, 8 aa, Homo Sapiens
LPITVAHV

SEQ ID NO: 118745 - protein, 8 aa, Homo Sapiens
LPIVTPAL

SEQ ID NO: 118746 - protein, 8 aa, Homo Sapiens
LPIYAVTV

SEQ ID NO: 118747 - protein, 8 aa, Homo Sapiens
LPLALRTV

SEQ ID NO: 118748 - protein, 8 aa, Homo Sapiens
LPLKVLVV

SEQ ID NO: 118749 - protein, 8 aa, Homo Sapiens
LPLLLTAV

SEQ ID NO: 118750 - protein, 8 aa, Homo Sapiens
LPLLVRVI

SEQ ID NO: 118751 - protein, 8 aa, Homo Sapiens
LPLPIPTV

SEQ ID NO: 118752 - protein, 8 aa, Homo Sapiens
LPLVVSFI

SEQ ID NO: 118753 - protein, 8 aa, Homo Sapiens
LPMFIIVV

SEQ ID NO: 118754 - protein, 8 aa, Homo Sapiens
LPMHPLQI

SEQ ID NO: 118755 - protein, 8 aa, Homo Sapiens
LPMSVIIV

SEQ ID NO: 118756 - protein, 8 aa, Homo Sapiens
LPNRALLV

SEQ ID NO: 118757 - protein, 8 aa, Homo Sapiens
LPNVYEVI

SEQ ID NO: 118758 - protein, 8 aa, Homo Sapiens
LPPEAITI

SEQ ID NO: 118759 - protein, 8 aa, Homo Sapiens
LPPEVLSI

SEQ ID NO: 118760 - protein, 8 aa, Homo Sapiens
LPPEVNRI

SEQ ID NO: 118761 - protein, 8 aa, Homo Sapiens
LPPHIIRL

SEQ ID NO: 118762 - protein, 8 aa, Homo Sapiens
LPPHILEV

SEQ ID NO: 118763 - protein, 8 aa, Homo Sapiens
LPPKVLEL

SEQ ID NO: 118764 - protein, 8 aa, Homo Sapiens
LPPLLSPL

SEQ ID NO: 118765 - protein, 8 aa, Homo Sapiens
LPPLSPYF

SEQ ID NO: 118766 - protein, 8 aa, Homo Sapiens
LPPLVDVI

SEQ ID NO: 118767 - protein, 8 aa, Homo Sapiens
LPPLVPAI

SEQ ID NO: 118768 - protein, 8 aa, Homo Sapiens
LPPNVQII

SEQ ID NO: 118769 - protein, 8 aa, Homo Sapiens
LPPPIMLI

SEQ ID NO: 118770 - protein, 8 aa, Homo Sapiens
LPPSVLAV

SEQ ID NO: 118771 - protein, 8 aa, Homo Sapiens
LPPTVITI

SEQ ID NO: 118772 - protein, 8 aa, Homo Sapiens
LPPVLTTV

SEQ ID NO: 118773 - protein, 8 aa, Homo Sapiens
LPPVMLLI

SEQ ID NO: 118774 - protein, 8 aa, Homo Sapiens
LPPYTFQI

SEQ ID NO: 118775 - protein, 8 aa, Homo Sapiens
LPQIAAKI

SEQ ID NO: 118776 - protein, 8 aa, Homo Sapiens
LPQTLPEI

SEQ ID NO: 118777 - protein, 8 aa, Homo Sapiens
LPRIFTSI

SEQ ID NO: 118778 - protein, 8 aa, Homo Sapiens
LPRPLPAV

SEQ ID NO: 118779 - protein, 8 aa, Homo Sapiens
LPRPVPLV

SEQ ID NO: 118780 - protein, 8 aa, Homo Sapiens
LPSILPGL

SEQ ID NO: 118781 - protein, 8 aa, Homo Sapiens
LPSITNVI

SEQ ID NO: 118782 - protein, 8 aa, Homo Sapiens
LPSYTPTI

SEQ ID NO: 118783 - protein, 8 aa, Homo Sapiens
LPTILVEI

SEQ ID NO: 118784 - protein, 8 aa, Homo Sapiens
LPTSVPQI

SEQ ID NO: 118785 - protein, 8 aa, Homo Sapiens
LPTSVVTI

SEQ ID NO: 118786 - protein, 8 aa, Homo Sapiens
LPTTMGVV

SEQ ID NO: 118787 - protein, 8 aa, Homo Sapiens
LPTVLLKL

SEQ ID NO: 118788 - protein, 8 aa, Homo Sapiens
LPVAFKVV

SEQ ID NO: 118789 - protein, 8 aa, Homo Sapiens
LPVEVQEV

SEQ ID NO: 118790 - protein, 8 aa, Homo Sapiens
LPVFQPGV

SEQ ID NO: 118791 - protein, 8 aa, Homo Sapiens
LPVILDII

SEQ ID NO: 118792 - protein, 8 aa, Homo Sapiens
LPVITKEL

SEQ ID NO: 118793 - protein, 8 aa, Homo Sapiens
LPVRLANI

SEQ ID NO: 118794 - protein, 8 aa, Homo Sapiens
LPVSLPQI

SEQ ID NO: 118795 - protein, 8 aa, Homo Sapiens
LPWKFEHI

SEQ ID NO: 118796 - protein, 8 aa, Homo Sapiens
LPWKPVFI

SEQ ID NO: 118797 - protein, 8 aa, Homo Sapiens
LPWLEARI

SEQ ID NO: 118798 - protein, 8 aa, Homo Sapiens
LPWQAAFI

SEQ ID NO: 118799 - protein, 8 aa, Homo Sapiens
LPWQIVQI

SEQ ID NO: 118800 - protein, 8 aa, Homo Sapiens
LPWVVAEV

SEQ ID NO: 118801 - protein, 8 aa, Homo Sapiens
LPYAITIV

SEQ ID NO: 118802 - protein, 8 aa, Homo Sapiens
LPYAVEEL

SEQ ID NO: 118803 - protein, 8 aa, Homo Sapiens
LPYAVGKL

SEQ ID NO: 118804 - protein, 8 aa, Homo Sapiens
LPYEDVAI

SEQ ID NO: 118805 - protein, 8 aa, Homo Sapiens
LPYFLRYI

SEQ ID NO: 118806 - protein, 8 aa, Homo Sapiens
LPYIFPNI

SEQ ID NO: 118807 - protein, 8 aa, Homo Sapiens
LPYKPQVI

SEQ ID NO: 118808 - protein, 8 aa, Homo Sapiens
LPYLFHVV

SEQ ID NO: 118809 - protein, 8 aa, Homo Sapiens
LPYLIHDI

SEQ ID NO: 118810 - protein, 8 aa, Homo Sapiens
LPYLPHYI

SEQ ID NO: 118811 - protein, 8 aa, Homo Sapiens
LPYLQGQV

SEQ ID NO: 118812 - protein, 8 aa, Homo Sapiens
LPYLVPKL

SEQ ID NO: 118813 - protein, 8 aa, Homo Sapiens
LPYLVSNV

SEQ ID NO: 118814 - protein, 8 aa, Homo Sapiens
LPYNGVTV

SEQ ID NO: 118815 - protein, 8 aa, Homo Sapiens
LPYNPMMV

SEQ ID NO: 118816 - protein, 8 aa, Homo Sapiens
LPYNTSLV

SEQ ID NO: 118817 - protein, 8 aa, Homo Sapiens
LPYPIHQV

SEQ ID NO: 118818 - protein, 8 aa, Homo Sapiens
LPYQIKKI

SEQ ID NO: 118819 - protein, 8 aa, Homo Sapiens
LPYQPPAL

SEQ ID NO: 118820 - protein, 8 aa, Homo Sapiens
LPYQVVEV

SEQ ID NO: 118821 - protein, 8 aa, Homo Sapiens
LPYSNITV

SEQ ID NO: 118822 - protein, 8 aa, Homo Sapiens
LPYSPRVL

SEQ ID NO: 118823 - protein, 8 aa, Homo Sapiens
LPYSVTLI

SEQ ID NO: 118824 - protein, 8 aa, Homo Sapiens
LPYVALLI

SEQ ID NO: 118825 - protein, 8 aa, Homo Sapiens
LPYVAPEL

SEQ ID NO: 118826 - protein, 8 aa, Homo Sapiens
LPYVGNLI

SEQ ID NO: 118827 - protein, 8 aa, Homo Sapiens
LPYVGTSV

SEQ ID NO: 118828 - protein, 8 aa, Homo Sapiens
LPYVLENV

SEQ ID NO: 118829 - protein, 8 aa, Homo Sapiens
LSPVVPQI

SEQ ID NO: 118830 - protein, 8 aa, Homo Sapiens
MAFLLPLI

SEQ ID NO: 118831 - protein, 8 aa, Homo Sapiens
MAFLPHHI

SEQ ID NO: 118832 - protein, 8 aa, Homo Sapiens
MAFWLPTI

SEQ ID NO: 118833 - protein, 8 aa, Homo Sapiens
MAYGFRNI

SEQ ID NO: 118834 - protein, 8 aa, Homo Sapiens
MGVIVHII

SEQ ID NO: 118835 - protein, 8 aa, Homo Sapiens
MPAVFHTV

SEQ ID NO: 118836 - protein, 8 aa, Homo Sapiens
MPFFAKTV

SEQ ID NO: 118837 - protein, 8 aa, Homo Sapiens
MPIKINLI

SEQ ID NO: 118838 - protein, 8 aa, Homo Sapiens
MPILISKI

SEQ ID NO: 118839 - protein, 8 aa, Homo Sapiens
MPIYVTGI

SEQ ID NO: 118840 - protein, 8 aa, Homo Sapiens
MPPPVGMV

SEQ ID NO: 118841 - protein, 8 aa, Homo Sapiens
MPRLIAKV

SEQ ID NO: 118842 - protein, 8 aa, Homo Sapiens
MPSDVLEV

SEQ ID NO: 118843 - protein, 8 aa, Homo Sapiens
MPTDVLEV

SEQ ID NO: 118844 - protein, 8 aa, Homo Sapiens
MPTIFNLI

SEQ ID NO: 118845 - protein, 8 aa, Homo Sapiens
MPVQFQVV

SEQ ID NO: 118846 - protein, 8 aa, Homo Sapiens
MPWLADLV

SEQ ID NO: 118847 - protein, 8 aa, Homo Sapiens
MPYMQPVM

SEQ ID NO: 118848 - protein, 8 aa, Homo Sapiens
MPYTPICI

SEQ ID NO: 118849 - protein, 8 aa, Homo Sapiens
MPYTQNFI

SEQ ID NO: 118850 - protein, 8 aa, Homo Sapiens
MPYVIEFI

SEQ ID NO: 118851 - protein, 8 aa, Homo Sapiens
MSQILPCI

SEQ ID NO: 118852 - protein, 8 aa, Homo Sapiens
NAAIIMKI

SEQ ID NO: 118853 - protein, 8 aa, Homo Sapiens
NAAIIMKV

SEQ ID NO: 118854 - protein, 8 aa, Homo Sapiens
NAFATPTI

SEQ ID NO: 118855 - protein, 8 aa, Homo Sapiens
NAPAIIFI

SEQ ID NO: 118856 - protein, 8 aa, Homo Sapiens
NAPCVIFI

SEQ ID NO: 118857 - protein, 8 aa, Homo Sapiens
NGIKVLLI

SEQ ID NO: 118858 - protein, 8 aa, Homo Sapiens
NPFLFSTI

SEQ ID NO: 118859 - protein, 8 aa, Homo Sapiens
NPPKILTV

SEQ ID NO: 118860 - protein, 8 aa, Homo Sapiens
NPYIVRMI

SEQ ID NO: 118861 - protein, 8 aa, Homo Sapiens
PDGRIIKV

SEQ ID NO: 118862 - protein, 8 aa, Homo Sapiens
PEPILIPR

SEQ ID NO: 118863 - protein, 8 aa, Homo Sapiens
PLSPIITL

SEQ ID NO: 118864 - protein, 8 aa, Homo Sapiens
PSLADALI

SEQ ID NO: 118865 - protein, 8 aa, Homo Sapiens
QALEVLKI

SEQ ID NO: 118866 - protein, 8 aa, Homo Sapiens
QAPVVPYM

SEQ ID NO: 118867 - protein, 8 aa, Homo Sapiens
SAFEQLVV

SEQ ID NO: 118868 - protein, 8 aa, Homo Sapiens
SAPAVLVV

SEQ ID NO: 118869 - protein, 8 aa, Homo Sapiens
SAPEVLLV

SEQ ID NO: 118870 - protein, 8 aa, Homo Sapiens
SAVELPKI

SEQ ID NO: 118871 - protein, 8 aa, Homo Sapiens
SAYEVIKL

SEQ ID NO: 118872 - protein, 8 aa, Homo Sapiens
SPFSFHHV

SEQ ID NO: 118873 - protein, 8 aa, Homo Sapiens
SPPTVLVI

SEQ ID NO: 118874 - protein, 8 aa, Homo Sapiens
SPPVILLI

SEQ ID NO: 118875 - protein, 8 aa, Homo Sapiens
TAASVLRI

SEQ ID NO: 118876 - protein, 8 aa, Homo Sapiens
TALGILVV

SEQ ID NO: 118877 - protein, 8 aa, Homo Sapiens
TALKIMKV

SEQ ID NO: 118878 - protein, 8 aa, Homo Sapiens
TALKVLEI

SEQ ID NO: 118879 - protein, 8 aa, Homo Sapiens
TALSLLIV

SEQ ID NO: 118880 - protein, 8 aa, Homo Sapiens
TAPLVVVV

SEQ ID NO: 118881 - protein, 8 aa, Homo Sapiens
TAPVVALF

SEQ ID NO: 118882 - protein, 8 aa, Homo Sapiens
TATYLPEV

SEQ ID NO: 118883 - protein, 8 aa, Homo Sapiens
TAYYALVV

SEQ ID NO: 118884 - protein, 8 aa, Homo Sapiens
TGLTILRI

SEQ ID NO: 118885 - protein, 8 aa, Homo Sapiens
TPFLIFII

SEQ ID NO: 118886 - protein, 8 aa, Homo Sapiens
TPPLAPVV

SEQ ID NO: 118887 - protein, 8 aa, Homo Sapiens
TPPVVLRL

SEQ ID NO: 118888 - protein, 8 aa, Homo Sapiens
TPVRLPSI

SEQ ID NO: 118889 - protein, 8 aa, Homo Sapiens
TPWQPPTV

SEQ ID NO: 118890 - protein, 8 aa, Homo Sapiens
TPYALPVI

SEQ ID NO: 118891 - protein, 8 aa, Homo Sapiens
TSPKALVI

SEQ ID NO: 118892 - protein, 8 aa, Homo Sapiens
VAHLALQI

SEQ ID NO: 118893 - protein, 8 aa, Homo Sapiens
VAPIVVVI

SEQ ID NO: 118894 - protein, 8 aa, Homo Sapiens
VAPTSLVV

SEQ ID NO: 118895 - protein, 8 aa, Homo Sapiens
VAVKILKV

SEQ ID NO: 118896 - protein, 8 aa, Homo Sapiens
VAWLVAHV

SEQ ID NO: 118897 - protein, 8 aa, Homo Sapiens
VAWVGQQV

SEQ ID NO: 118898 - protein, 8 aa, Homo Sapiens
VGPFVSKI

SEQ ID NO: 118899 - protein, 8 aa, Homo Sapiens
VPAALKVV

SEQ ID NO: 118900 - protein, 8 aa, Homo Sapiens
VPAEFECI

SEQ ID NO: 118901 - protein, 8 aa, Homo Sapiens
VPAFVRMI

SEQ ID NO: 118902 - protein, 8 aa, Homo Sapiens
VPAKLPEI

SEQ ID NO: 118903 - protein, 8 aa, Homo Sapiens
VPAPVPLM

SEQ ID NO: 118904 - protein, 8 aa, Homo Sapiens
VPATLFEI

SEQ ID NO: 118905 - protein, 8 aa, Homo Sapiens
VPATVPSI

SEQ ID NO: 118906 - protein, 8 aa, Homo Sapiens
VPELIRTI

SEQ ID NO: 118907 - protein, 8 aa, Homo Sapiens
VPFLVSVL

SEQ ID NO: 118908 - protein, 8 aa, Homo Sapiens
VPFPISLI

SEQ ID NO: 118909 - protein, 8 aa, Homo Sapiens
VPFPLNSV

SEQ ID NO: 118910 - protein, 8 aa, Homo Sapiens
VPFQVPEI

SEQ ID NO: 118911 - protein, 8 aa, Homo Sapiens
VPFSHVNI

SEQ ID NO: 118912 - protein, 8 aa, Homo Sapiens
VPFSLDSV

SEQ ID NO: 118913 - protein, 8 aa, Homo Sapiens
VPFSVPKI

SEQ ID NO: 118914 - protein, 8 aa, Homo Sapiens
VPHVLPFI

SEQ ID NO: 118915 - protein, 8 aa, Homo Sapiens
VPIEIPTI

SEQ ID NO: 118916 - protein, 8 aa, Homo Sapiens
VPILAPRI

SEQ ID NO: 118917 - protein, 8 aa, Homo Sapiens
VPILISEI

SEQ ID NO: 118918 - protein, 8 aa, Homo Sapiens
VPLEMLEI

SEQ ID NO: 118919 - protein, 8 aa, Homo Sapiens
VPLIIFTI

SEQ ID NO: 118920 - protein, 8 aa, Homo Sapiens
VPLLVKVI

SEQ ID NO: 118921 - protein, 8 aa, Homo Sapiens
VPPETLHI

SEQ ID NO: 118922 - protein, 8 aa, Homo Sapiens
VPPFTIEV

SEQ ID NO: 118923 - protein, 8 aa, Homo Sapiens
VPPKISLL

SEQ ID NO: 118924 - protein, 8 aa, Homo Sapiens
VPPLVPKV

SEQ ID NO: 118925 - protein, 8 aa, Homo Sapiens
VPPNGLVV

SEQ ID NO: 118926 - protein, 8 aa, Homo Sapiens
VPPVSPEL

SEQ ID NO: 118927 - protein, 8 aa, Homo Sapiens
VPQQALVI

SEQ ID NO: 118928 - protein, 8 aa, Homo Sapiens
VPSPVLRI

SEQ ID NO: 118929 - protein, 8 aa, Homo Sapiens
VPSVQPIV

SEQ ID NO: 118930 - protein, 8 aa, Homo Sapiens
VPSYIPLV

SEQ ID NO: 118931 - protein, 8 aa, Homo Sapiens
VPVITPYL

SEQ ID NO: 118932 - protein, 8 aa, Homo Sapiens
VPYAGINI

SEQ ID NO: 118933 - protein, 8 aa, Homo Sapiens
VPYEPPEV

SEQ ID NO: 118934 - protein, 8 aa, Homo Sapiens
VPYEPPQV

SEQ ID NO: 118935 - protein, 8 aa, Homo Sapiens
VPYGLPCI

SEQ ID NO: 118936 - protein, 8 aa, Homo Sapiens
VPYLFKKV

SEQ ID NO: 118937 - protein, 8 aa, Homo Sapiens
VPYLMEAI

SEQ ID NO: 118938 - protein, 8 aa, Homo Sapiens
VPYPLPKI

SEQ ID NO: 118939 - protein, 8 aa, Homo Sapiens
VPYPTASL

SEQ ID NO: 118940 - protein, 8 aa, Homo Sapiens
VPYRLNEI

SEQ ID NO: 118941 - protein, 8 aa, Homo Sapiens
VPYRVVGL

SEQ ID NO: 118942 - protein, 8 aa, Homo Sapiens
WAMKALLI

SEQ ID NO: 118943 - protein, 8 aa, Homo Sapiens
WAPSVVKI

SEQ ID NO: 118944 - protein, 8 aa, Homo Sapiens
WPLVAALL

SEQ ID NO: 118945 - protein, 8 aa, Homo Sapiens
YAFAFIQV

SEQ ID NO: 118946 - protein, 8 aa, Homo Sapiens
YAIKILAI

SEQ ID NO: 118947 - protein, 8 aa, Homo Sapiens
YALEVEKI

SEQ ID NO: 118948 - protein, 8 aa, Homo Sapiens
YAYLPLHV

SEQ ID NO: 118949 - protein, 8 aa, Homo Sapiens
YGYSLKGI

SEQ ID NO: 118950 - protein, 8 aa, Homo Sapiens
YPAELNNI

SEQ ID NO: 118951 - protein, 8 aa, Homo Sapiens
YPASSLVV

SEQ ID NO: 118952 - protein, 8 aa, Homo Sapiens
YPDRVPVI

SEQ ID NO: 118953 - protein, 8 aa, Homo Sapiens
YPFAISLI

SEQ ID NO: 118954 - protein, 8 aa, Homo Sapiens
YPFAPLIL

SEQ ID NO: 118955 - protein, 8 aa, Homo Sapiens
YPFEPPQI

SEQ ID NO: 118956 - protein, 8 aa, Homo Sapiens
YPFKPPKI

SEQ ID NO: 118957 - protein, 8 aa, Homo Sapiens
YPFKPPKV

SEQ ID NO: 118958 - protein, 8 aa, Homo Sapiens
YPFKPPMI

SEQ ID NO: 118959 - protein, 8 aa, Homo Sapiens
YPFKSPSI

SEQ ID NO: 118960 - protein, 8 aa, Homo Sapiens
YPFLLMVV

SEQ ID NO: 118961 - protein, 8 aa, Homo Sapiens
YPFLLPVI

SEQ ID NO: 118962 - protein, 8 aa, Homo Sapiens
YPFNPPKV

SEQ ID NO: 118963 - protein, 8 aa, Homo Sapiens
YPFQIHSI

SEQ ID NO: 118964 - protein, 8 aa, Homo Sapiens
YPFTLRVV

SEQ ID NO: 118965 - protein, 8 aa, Homo Sapiens
YPFVVLNI

SEQ ID NO: 118966 - protein, 8 aa, Homo Sapiens
YPHEVPQI

SEQ ID NO: 118967 - protein, 8 aa, Homo Sapiens
YPLALNRI

SEQ ID NO: 118968 - protein, 8 aa, Homo Sapiens
YPLILKEL

SEQ ID NO: 118969 - protein, 8 aa, Homo Sapiens
YPLLIIRE

SEQ ID NO: 118970 - protein, 8 aa, Homo Sapiens
YPLLILFV

SEQ ID NO: 118971 - protein, 8 aa, Homo Sapiens
YPLLLQSI

SEQ ID NO: 118972 - protein, 8 aa, Homo Sapiens
YPLLLREI

SEQ ID NO: 118973 - protein, 8 aa, Homo Sapiens
YPLPAVKV

SEQ ID NO: 118974 - protein, 8 aa, Homo Sapiens
YPMLIRTI

SEQ ID NO: 118975 - protein, 8 aa, Homo Sapiens
YPNVFKKI

SEQ ID NO: 118976 - protein, 8 aa, Homo Sapiens
YPPGAILV

SEQ ID NO: 118977 - protein, 8 aa, Homo Sapiens
YPPGVKEI

SEQ ID NO: 118978 - protein, 8 aa, Homo Sapiens
YPPLVNCV

SEQ ID NO: 118979 - protein, 8 aa, Homo Sapiens
YPPSPWTI

SEQ ID NO: 118980 - protein, 8 aa, Homo Sapiens
YPQLLPGI

SEQ ID NO: 118981 - protein, 8 aa, Homo Sapiens
YPTTFVMV

SEQ ID NO: 118982 - protein, 8 aa, Homo Sapiens
YPVELLLV

SEQ ID NO: 118983 - protein, 8 aa, Homo Sapiens
YPVIIHLI

SEQ ID NO: 118984 - protein, 8 aa, Homo Sapiens
YPWGTVQV

SEQ ID NO: 118985 - protein, 8 aa, Homo Sapiens
YPWGVAEV

SEQ ID NO: 118986 - protein, 8 aa, Homo Sapiens
YPWGVVQV

SEQ ID NO: 118987 - protein, 8 aa, Homo Sapiens
YPWVHVVI

SEQ ID NO: 118988 - protein, 8 aa, Homo Sapiens
YPYIAKIL

SEQ ID NO: 118989 - protein, 8 aa, Homo Sapiens
YPYIFHVL

SEQ ID NO: 118990 - protein, 8 aa, Homo Sapiens
YPYIPAHI

SEQ ID NO: 118991 - protein, 8 aa, Homo Sapiens
YPYNAPTV

SEQ ID NO: 118992 - protein, 8 aa, Homo Sapiens
YPYQAPLV

SEQ ID NO: 118993 - protein, 8 aa, Homo Sapiens
YPYVAVML

SEQ ID NO: 118994 - protein, 8 aa, Homo Sapiens
YPYVIQEL

SEQ ID NO: 118995 - protein, 9 aa, Homo Sapiens
AAWLQVLPV

SEQ ID NO: 118996 - protein, 9 aa, Homo Sapiens
ADAPVALVV

SEQ ID NO: 118997 - protein, 9 aa, Homo Sapiens
ADAVPLPPP

SEQ ID NO: 118998 - protein, 9 aa, Homo Sapiens
ALAPPAALL

SEQ ID NO: 118999 - protein, 9 aa, Homo Sapiens
CPFTGNVSI

SEQ ID NO: 119000 - protein, 9 aa, Homo Sapiens
DAAAFFKSV

SEQ ID NO: 119001 - protein, 9 aa, Homo Sapiens
DAAAKALRI

SEQ ID NO: 119002 - protein, 9 aa, Homo Sapiens
DAAEFAISI

SEQ ID NO: 119003 - protein, 9 aa, Homo Sapiens
DAALDFKNV

SEQ ID NO: 119004 - protein, 9 aa, Homo Sapiens
DAANVMVYV

SEQ ID NO: 119005 - protein, 9 aa, Homo Sapiens
DAENAMRYI

SEQ ID NO: 119006 - protein, 9 aa, Homo Sapiens
DAFANFANF

SEQ ID NO: 119007 - protein, 9 aa, Homo Sapiens
DAFFSDTQI

SEQ ID NO: 119008 - protein, 9 aa, Homo Sapiens
DAFHFVSYV

SEQ ID NO: 119009 - protein, 9 aa, Homo Sapiens
DAFIFKSDV

SEQ ID NO: 119010 - protein, 9 aa, Homo Sapiens
DAFPDQVAI

SEQ ID NO: 119011 - protein, 9 aa, Homo Sapiens
DAFPEAIIV

SEQ ID NO: 119012 - protein, 9 aa, Homo Sapiens
DAFPNIDKI

SEQ ID NO: 119013 - protein, 9 aa, Homo Sapiens
DAFPNIEKV

SEQ ID NO: 119014 - protein, 9 aa, Homo Sapiens
DAFPSIDKI

SEQ ID NO: 119015 - protein, 9 aa, Homo Sapiens
DAFQKLLIV

SEQ ID NO: 119016 - protein, 9 aa, Homo Sapiens
DAFQLAVNV

SEQ ID NO: 119017 - protein, 9 aa, Homo Sapiens
DAFQLERAI

SEQ ID NO: 119018 - protein, 9 aa, Homo Sapiens
DAFQQTLII

SEQ ID NO: 119019 - protein, 9 aa, Homo Sapiens
DAFRQPSLF

SEQ ID NO: 119020 - protein, 9 aa, Homo Sapiens
DAFSFTSKV

SEQ ID NO: 119021 - protein, 9 aa, Homo Sapiens
DAFSRQLLI

SEQ ID NO: 119022 - protein, 9 aa, Homo Sapiens
DAFTFRHFL

SEQ ID NO: 119023 - protein, 9 aa, Homo Sapiens
DAFWWTPLM

SEQ ID NO: 119024 - protein, 9 aa, Homo Sapiens
DAHEFLIAA

SEQ ID NO: 119025 - protein, 9 aa, Homo Sapiens
DAHEFLNYL

SEQ ID NO: 119026 - protein, 9 aa, Homo Sapiens
DAHELFHVI

SEQ ID NO: 119027 - protein, 9 aa, Homo Sapiens
DAHIYLNHI

SEQ ID NO: 119028 - protein, 9 aa, Homo Sapiens
DAIAEIRAI

SEQ ID NO: 119029 - protein, 9 aa, Homo Sapiens
DAIARLKEV

SEQ ID NO: 119030 - protein, 9 aa, Homo Sapiens
DAIHQLGFI

SEQ ID NO: 119031 - protein, 9 aa, Homo Sapiens
DAIITKASI

SEQ ID NO: 119032 - protein, 9 aa, Homo Sapiens
DAIKVFVRI

SEQ ID NO: 119033 - protein, 9 aa, Homo Sapiens
DAIRSLASV

SEQ ID NO: 119034 - protein, 9 aa, Homo Sapiens
DAIRVFANI

SEQ ID NO: 119035 - protein, 9 aa, Homo Sapiens
DAKILSNVI

SEQ ID NO: 119036 - protein, 9 aa, Homo Sapiens
DALAEIERI

SEQ ID NO: 119037 - protein, 9 aa, Homo Sapiens
DALAFNSAI

SEQ ID NO: 119038 - protein, 9 aa, Homo Sapiens
DALAKVTKI

SEQ ID NO: 119039 - protein, 9 aa, Homo Sapiens
DALAMGLCV

SEQ ID NO: 119040 - protein, 9 aa, Homo Sapiens
DALDHVIDI

SEQ ID NO: 119041 - protein, 9 aa, Homo Sapiens
DALDKIRLI

SEQ ID NO: 119042 - protein, 9 aa, Homo Sapiens
DALDVANKI

SEQ ID NO: 119043 - protein, 9 aa, Homo Sapiens
DALEDFKKV

SEQ ID NO: 119044 - protein, 9 aa, Homo Sapiens
DALGKLISI

SEQ ID NO: 119045 - protein, 9 aa, Homo Sapiens
DALHNLFYI

SEQ ID NO: 119046 - protein, 9 aa, Homo Sapiens
DALISSPIL

SEQ ID NO: 119047 - protein, 9 aa, Homo Sapiens
DALIVLIHL

SEQ ID NO: 119048 - protein, 9 aa, Homo Sapiens
DALKAITEV

SEQ ID NO: 119049 - protein, 9 aa, Homo Sapiens
DALKVTFLI

SEQ ID NO: 119050 - protein, 9 aa, Homo Sapiens
DALKVTVGV

SEQ ID NO: 119051 - protein, 9 aa, Homo Sapiens
DALLEQAMI

SEQ ID NO: 119052 - protein, 9 aa, Homo Sapiens
DALLIHDTV

SEQ ID NO: 119053 - protein, 9 aa, Homo Sapiens
DALLIIPKV

SEQ ID NO: 119054 - protein, 9 aa, Homo Sapiens
DALLKFSHI

SEQ ID NO: 119055 - protein, 9 aa, Homo Sapiens
DALLQCMNV

SEQ ID NO: 119056 - protein, 9 aa, Homo Sapiens
DALLQMITI

SEQ ID NO: 119057 - protein, 9 aa, Homo Sapiens
DALMKSLQV

SEQ ID NO: 119058 - protein, 9 aa, Homo Sapiens
DALNAPLHI

SEQ ID NO: 119059 - protein, 9 aa, Homo Sapiens
DALNIETAI

SEQ ID NO: 119060 - protein, 9 aa, Homo Sapiens
DALNIREAI

SEQ ID NO: 119061 - protein, 9 aa, Homo Sapiens
DALNRPLNI

SEQ ID NO: 119062 - protein, 9 aa, Homo Sapiens
DALQYLQKV

SEQ ID NO: 119063 - protein, 9 aa, Homo Sapiens
DALRAIQCV

SEQ ID NO: 119064 - protein, 9 aa, Homo Sapiens
DALRSGLTV

SEQ ID NO: 119065 - protein, 9 aa, Homo Sapiens
DALRSILTI

SEQ ID NO: 119066 - protein, 9 aa, Homo Sapiens
DALSKMVII

SEQ ID NO: 119067 - protein, 9 aa, Homo Sapiens
DALVTKNLV

SEQ ID NO: 119068 - protein, 9 aa, Homo Sapiens
DAMFPVTHI

SEQ ID NO: 119069 - protein, 9 aa, Homo Sapiens
DAMFSVSFI

SEQ ID NO: 119070 - protein, 9 aa, Homo Sapiens
DAMGHTIVL

SEQ ID NO: 119071 - protein, 9 aa, Homo Sapiens
DAMKYTIVV

SEQ ID NO: 119072 - protein, 9 aa, Homo Sapiens
DAMSILETI

SEQ ID NO: 119073 - protein, 9 aa, Homo Sapiens
DANDVVITV

SEQ ID NO: 119074 - protein, 9 aa, Homo Sapiens
DANIFPALI

SEQ ID NO: 119075 - protein, 9 aa, Homo Sapiens
DANPFLQSV

SEQ ID NO: 119076 - protein, 9 aa, Homo Sapiens
DANVQIASI

SEQ ID NO: 119077 - protein, 9 aa, Homo Sapiens
DAPFVINAI

SEQ ID NO: 119078 - protein, 9 aa, Homo Sapiens
DAPHPPLKI

SEQ ID NO: 119079 - protein, 9 aa, Homo Sapiens
DAPIQLSKI

SEQ ID NO: 119080 - protein, 9 aa, Homo Sapiens
DAPISPASI

SEQ ID NO: 119081 - protein, 9 aa, Homo Sapiens
DAPLNIRSI

SEQ ID NO: 119082 - protein, 9 aa, Homo Sapiens
DAPLSPMLY

SEQ ID NO: 119083 - protein, 9 aa, Homo Sapiens
DAPWPVRKI

SEQ ID NO: 119084 - protein, 9 aa, Homo Sapiens
DAQGLQLLV

SEQ ID NO: 119085 - protein, 9 aa, Homo Sapiens
DAQGQFLTV

SEQ ID NO: 119086 - protein, 9 aa, Homo Sapiens
DAREIVNNV

SEQ ID NO: 119087 - protein, 9 aa, Homo Sapiens
DARELELVI

SEQ ID NO: 119088 - protein, 9 aa, Homo Sapiens
DAREVMILI

SEQ ID NO: 119089 - protein, 9 aa, Homo Sapiens
DARIFLNEI

SEQ ID NO: 119090 - protein, 9 aa, Homo Sapiens
DARIGSFTI

SEQ ID NO: 119091 - protein, 9 aa, Homo Sapiens
DARLFTEKI

SEQ ID NO: 119092 - protein, 9 aa, Homo Sapiens
DARWWAVVV

SEQ ID NO: 119093 - protein, 9 aa, Homo Sapiens
DASPVQAVF

SEQ ID NO: 119094 - protein, 9 aa, Homo Sapiens
DATKLLPSV

SEQ ID NO: 119095 - protein, 9 aa, Homo Sapiens
DAVASLLIV

SEQ ID NO: 119096 - protein, 9 aa, Homo Sapiens
DAVKFFVAV

SEQ ID NO: 119097 - protein, 9 aa, Homo Sapiens
DAVKFFVSV

SEQ ID NO: 119098 - protein, 9 aa, Homo Sapiens
DAVLYLLEI

SEQ ID NO: 119099 - protein, 9 aa, Homo Sapiens
DAVNLALLM

SEQ ID NO: 119100 - protein, 9 aa, Homo Sapiens
DAVRVLREI

SEQ ID NO: 119101 - protein, 9 aa, Homo Sapiens
DAVTFITYV

SEQ ID NO: 119102 - protein, 9 aa, Homo Sapiens
DAWAQLNSI

SEQ ID NO: 119103 - protein, 9 aa, Homo Sapiens
DAWKELTIV

SEQ ID NO: 119104 - protein, 9 aa, Homo Sapiens
DAWLRAQVI

SEQ ID NO: 119105 - protein, 9 aa, Homo Sapiens
DAYALNHTL

SEQ ID NO: 119106 - protein, 9 aa, Homo Sapiens
DAYAQYLWI

SEQ ID NO: 119107 - protein, 9 aa, Homo Sapiens
DAYDNFDNI

SEQ ID NO: 119108 - protein, 9 aa, Homo Sapiens
DAYEFFTSL

SEQ ID NO: 119109 - protein, 9 aa, Homo Sapiens
DAYEIRLLM

SEQ ID NO: 119110 - protein, 9 aa, Homo Sapiens
DAYETTLHV

SEQ ID NO: 119111 - protein, 9 aa, Homo Sapiens
DAYIQEHLL

SEQ ID NO: 119112 - protein, 9 aa, Homo Sapiens
DAYKGLFEV

SEQ ID NO: 119113 - protein, 9 aa, Homo Sapiens
DAYKIRIRI

SEQ ID NO: 119114 - protein, 9 aa, Homo Sapiens
DAYLFLLCL

SEQ ID NO: 119115 - protein, 9 aa, Homo Sapiens
DAYLQRILA

SEQ ID NO: 119116 - protein, 9 aa, Homo Sapiens
DAYPNGLQV

SEQ ID NO: 119117 - protein, 9 aa, Homo Sapiens
DAYPQRIKF

SEQ ID NO: 119118 - protein, 9 aa, Homo Sapiens
DAYQVLSTL

SEQ ID NO: 119119 - protein, 9 aa, Homo Sapiens
DAYRALQKL

SEQ ID NO: 119120 - protein, 9 aa, Homo Sapiens
DAYSFSRKI

SEQ ID NO: 119121 - protein, 9 aa, Homo Sapiens
DAYTHPQFV

SEQ ID NO: 119122 - protein, 9 aa, Homo Sapiens
DAYTVLTRI

SEQ ID NO: 119123 - protein, 9 aa, Homo Sapiens
DAYVGYMTI

SEQ ID NO: 119124 - protein, 9 aa, Homo Sapiens
DAYVLPKLY

SEQ ID NO: 119125 - protein, 9 aa, Homo Sapiens
DAYYKLRHI

SEQ ID NO: 119126 - protein, 9 aa, Homo Sapiens
DGFAFQNLV

SEQ ID NO: 119127 - protein, 9 aa, Homo Sapiens
DGFIPKNYI

SEQ ID NO: 119128 - protein, 9 aa, Homo Sapiens
DGFISNLTI

SEQ ID NO: 119129 - protein, 9 aa, Homo Sapiens
DGFLFLNTL

SEQ ID NO: 119130 - protein, 9 aa, Homo Sapiens
DGLLRVLTV

SEQ ID NO: 119131 - protein, 9 aa, Homo Sapiens
DGLNYIPKI

SEQ ID NO: 119132 - protein, 9 aa, Homo Sapiens
DGLRDLPSI

SEQ ID NO: 119133 - protein, 9 aa, Homo Sapiens
DGLTVHLVI

SEQ ID NO: 119134 - protein, 9 aa, Homo Sapiens
DGRIFGESI

SEQ ID NO: 119135 - protein, 9 aa, Homo Sapiens
DGRLTICTI

SEQ ID NO: 119136 - protein, 9 aa, Homo Sapiens
DGRLVINRV

SEQ ID NO: 119137 - protein, 9 aa, Homo Sapiens
DGRVYYICI

SEQ ID NO: 119138 - protein, 9 aa, Homo Sapiens
DGYAFQNLI

SEQ ID NO: 119139 - protein, 9 aa, Homo Sapiens
DGYEQAARV

SEQ ID NO: 119140 - protein, 9 aa, Homo Sapiens
DGYEVENLI

SEQ ID NO: 119141 - protein, 9 aa, Homo Sapiens
DGYLLLKSV

SEQ ID NO: 119142 - protein, 9 aa, Homo Sapiens
DGYVVKETI

SEQ ID NO: 119143 - protein, 9 aa, Homo Sapiens
DIFEFLNHV

SEQ ID NO: 119144 - protein, 9 aa, Homo Sapiens
DIKDTEPLI

SEQ ID NO: 119145 - protein, 9 aa, Homo Sapiens
DIYSKFDVI

SEQ ID NO: 119146 - protein, 9 aa, Homo Sapiens
DLREQILRV

SEQ ID NO: 119147 - protein, 9 aa, Homo Sapiens
DLYPGIPVI

SEQ ID NO: 119148 - protein, 9 aa, Homo Sapiens
DMYEQFQNI

SEQ ID NO: 119149 - protein, 9 aa, Homo Sapiens
DPAASLPII

SEQ ID NO: 119150 - protein, 9 aa, Homo Sapiens
DPALDLKVI

SEQ ID NO: 119151 - protein, 9 aa, Homo Sapiens
DPFAFIHKI

SEQ ID NO: 119152 - protein, 9 aa, Homo Sapiens
DPFAGRNVI

SEQ ID NO: 119153 - protein, 9 aa, Homo Sapiens
DPFDLSHNV

SEQ ID NO: 119154 - protein, 9 aa, Homo Sapiens
DPFIIIHSI

SEQ ID NO: 119155 - protein, 9 aa, Homo Sapiens
DPFLSEKSV

SEQ ID NO: 119156 - protein, 9 aa, Homo Sapiens
DPFPVPLVI

SEQ ID NO: 119157 - protein, 9 aa, Homo Sapiens
DPFPWQQKV

SEQ ID NO: 119158 - protein, 9 aa, Homo Sapiens
DPFQYQLVI

SEQ ID NO: 119159 - protein, 9 aa, Homo Sapiens
DPIVMGVTV

SEQ ID NO: 119160 - protein, 9 aa, Homo Sapiens
DPKVQINAI

SEQ ID NO: 119161 - protein, 9 aa, Homo Sapiens
DPLDKSIVI

SEQ ID NO: 119162 - protein, 9 aa, Homo Sapiens
DPLGYIAKI

SEQ ID NO: 119163 - protein, 9 aa, Homo Sapiens
DPLLKVSII

SEQ ID NO: 119164 - protein, 9 aa, Homo Sapiens
DPLQQICKI

SEQ ID NO: 119165 - protein, 9 aa, Homo Sapiens
DPLRVIILV

SEQ ID NO: 119166 - protein, 9 aa, Homo Sapiens
DPLSFIGRI

SEQ ID NO: 119167 - protein, 9 aa, Homo Sapiens
DPMEILITV

SEQ ID NO: 119168 - protein, 9 aa, Homo Sapiens
DPPIARLSV

SEQ ID NO: 119169 - protein, 9 aa, Homo Sapiens
DPPPPMETI

SEQ ID NO: 119170 - protein, 9 aa, Homo Sapiens
DPRVSINVV

SEQ ID NO: 119171 - protein, 9 aa, Homo Sapiens
DPSDIYAVI

SEQ ID NO: 119172 - protein, 9 aa, Homo Sapiens
DPSMVILEV

SEQ ID NO: 119173 - protein, 9 aa, Homo Sapiens
DPSSIVPLI

SEQ ID NO: 119174 - protein, 9 aa, Homo Sapiens
DPTEHIPEI

SEQ ID NO: 119175 - protein, 9 aa, Homo Sapiens
DPVHAVVYI

SEQ ID NO: 119176 - protein, 9 aa, Homo Sapiens
DPYEVSYRI

SEQ ID NO: 119177 - protein, 9 aa, Homo Sapiens
DPYGFLTTV

SEQ ID NO: 119178 - protein, 9 aa, Homo Sapiens
DPYITQPII

SEQ ID NO: 119179 - protein, 9 aa, Homo Sapiens
DPYKVYRIV

SEQ ID NO: 119180 - protein, 9 aa, Homo Sapiens
DSFEFKAHV

SEQ ID NO: 119181 - protein, 9 aa, Homo Sapiens
DSFLHLAII

SEQ ID NO: 119182 - protein, 9 aa, Homo Sapiens
DSYEFLKAI

SEQ ID NO: 119183 - protein, 9 aa, Homo Sapiens
DSYINVQEI

SEQ ID NO: 119184 - protein, 9 aa, Homo Sapiens
DSYPVVNLI

SEQ ID NO: 119185 - protein, 9 aa, Homo Sapiens
DVFNVPLVI

SEQ ID NO: 119186 - protein, 9 aa, Homo Sapiens
DVFPHLPLI

SEQ ID NO: 119187 - protein, 9 aa, Homo Sapiens
DVHIQINSI

SEQ ID NO: 119188 - protein, 9 aa, Homo Sapiens
DVLSKLLVV

SEQ ID NO: 119189 - protein, 9 aa, Homo Sapiens
DVREIVNNI

SEQ ID NO: 119190 - protein, 9 aa, Homo Sapiens
EAAEVILRV

SEQ ID NO: 119191 - protein, 9 aa, Homo Sapiens
EAFYNVITV

SEQ ID NO: 119192 - protein, 9 aa, Homo Sapiens
EALAYFITV

SEQ ID NO: 119193 - protein, 9 aa, Homo Sapiens
EALHAFLLV

SEQ ID NO: 119194 - protein, 9 aa, Homo Sapiens
EAMTQIIRV

SEQ ID NO: 119195 - protein, 9 aa, Homo Sapiens
EAYLSRLGV

SEQ ID NO: 119196 - protein, 9 aa, Homo Sapiens
EAYPHFMSI

SEQ ID NO: 119197 - protein, 9 aa, Homo Sapiens
EAYTSVLTV

SEQ ID NO: 119198 - protein, 9 aa, Homo Sapiens
EGDNVTLVV

SEQ ID NO: 119199 - protein, 9 aa, Homo Sapiens
EPFADFHRV

SEQ ID NO: 119200 - protein, 9 aa, Homo Sapiens
EPLEIILHL

SEQ ID NO: 119201 - protein, 9 aa, Homo Sapiens
EPRIEIVVV

SEQ ID NO: 119202 - protein, 9 aa, Homo Sapiens
EPYFNFTSI

SEQ ID NO: 119203 - protein, 9 aa, Homo Sapiens
FAFRYVTTI

SEQ ID NO: 119204 - protein, 9 aa, Homo Sapiens
FAMPYFIQV

SEQ ID NO: 119205 - protein, 9 aa, Homo Sapiens
FAQAPQLSV

SEQ ID NO: 119206 - protein, 9 aa, Homo Sapiens
FAYLRDLLI

SEQ ID NO: 119207 - protein, 9 aa, Homo Sapiens
FAYSSRIAI

SEQ ID NO: 119208 - protein, 9 aa, Homo Sapiens
FAYTARISV

SEQ ID NO: 119209 - protein, 9 aa, Homo Sapiens
FAYTSQITV

SEQ ID NO: 119210 - protein, 9 aa, Homo Sapiens
FAYVQIKTI

SEQ ID NO: 119211 - protein, 9 aa, Homo Sapiens
FPAAIEHTI

SEQ ID NO: 119212 - protein, 9 aa, Homo Sapiens
FPAAPAPKM

SEQ ID NO: 119213 - protein, 9 aa, Homo Sapiens
FPAAPLLTV

SEQ ID NO: 119214 - protein, 9 aa, Homo Sapiens
FPAEFYPHI

SEQ ID NO: 119215 - protein, 9 aa, Homo Sapiens
FPANVMDVI

SEQ ID NO: 119216 - protein, 9 aa, Homo Sapiens
FPAPILRAV

SEQ ID NO: 119217 - protein, 9 aa, Homo Sapiens
FPAPTPKNI

SEQ ID NO: 119218 - protein, 9 aa, Homo Sapiens
FPDNFVREI

SEQ ID NO: 119219 - protein, 9 aa, Homo Sapiens
FPDPNVKYV

SEQ ID NO: 119220 - protein, 9 aa, Homo Sapiens
FPEDVVRVI

SEQ ID NO: 119221 - protein, 9 aa, Homo Sapiens
FPEEEWRHV

SEQ ID NO: 119222 - protein, 9 aa, Homo Sapiens
FPEPNPRVI

SEQ ID NO: 119223 - protein, 9 aa, Homo Sapiens
FPFDQQFNI

SEQ ID NO: 119224 - protein, 9 aa, Homo Sapiens
FPFGCPPTV

SEQ ID NO: 119225 - protein, 9 aa, Homo Sapiens
FPFGFFTTV

SEQ ID NO: 119226 - protein, 9 aa, Homo Sapiens
FPFGKIGTV

SEQ ID NO: 119227 - protein, 9 aa, Homo Sapiens
FPFGYVSNI

SEQ ID NO: 119228 - protein, 9 aa, Homo Sapiens
FPFIVLVTV

SEQ ID NO: 119229 - protein, 9 aa, Homo Sapiens
FPFKPPQRI

SEQ ID NO: 119230 - protein, 9 aa, Homo Sapiens
FPFPGVMLI

SEQ ID NO: 119231 - protein, 9 aa, Homo Sapiens
FPFPKPALI

SEQ ID NO: 119232 - protein, 9 aa, Homo Sapiens
FPFPKPDLI

SEQ ID NO: 119233 - protein, 9 aa, Homo Sapiens
FPFPTPPSV

SEQ ID NO: 119234 - protein, 9 aa, Homo Sapiens
FPHLQDAQV

SEQ ID NO: 119235 - protein, 9 aa, Homo Sapiens
FPHLQLLDV

SEQ ID NO: 119236 - protein, 9 aa, Homo Sapiens
FPHSLLSVI

SEQ ID NO: 119237 - protein, 9 aa, Homo Sapiens
FPIDHFTHI

SEQ ID NO: 119238 - protein, 9 aa, Homo Sapiens
FPKYCEPVV

SEQ ID NO: 119239 - protein, 9 aa, Homo Sapiens
FPLATESNI

SEQ ID NO: 119240 - protein, 9 aa, Homo Sapiens
FPLDAFQEI

SEQ ID NO: 119241 - protein, 9 aa, Homo Sapiens
FPLPTPLSV

SEQ ID NO: 119242 - protein, 9 aa, Homo Sapiens
FPLQQKILV

SEQ ID NO: 119243 - protein, 9 aa, Homo Sapiens
FPMSPVTSV

SEQ ID NO: 119244 - protein, 9 aa, Homo Sapiens
FPNIHPPQI

SEQ ID NO: 119245 - protein, 9 aa, Homo Sapiens
FPNLDSPNV

SEQ ID NO: 119246 - protein, 9 aa, Homo Sapiens
FPNPEATFV

SEQ ID NO: 119247 - protein, 9 aa, Homo Sapiens
FPNVEIVTI

SEQ ID NO: 119248 - protein, 9 aa, Homo Sapiens
FPPPVADFI

SEQ ID NO: 119249 - protein, 9 aa, Homo Sapiens
FPPPVSPRL

SEQ ID NO: 119250 - protein, 9 aa, Homo Sapiens
FPRHIEPEL

SEQ ID NO: 119251 - protein, 9 aa, Homo Sapiens
FPSEDILLV

SEQ ID NO: 119252 - protein, 9 aa, Homo Sapiens
FPSEYVPTV

SEQ ID NO: 119253 - protein, 9 aa, Homo Sapiens
FPSPHILQI

SEQ ID NO: 119254 - protein, 9 aa, Homo Sapiens
FPTAPTRVV

SEQ ID NO: 119255 - protein, 9 aa, Homo Sapiens
FPVQGVHTV

SEQ ID NO: 119256 - protein, 9 aa, Homo Sapiens
FPVQTITTV

SEQ ID NO: 119257 - protein, 9 aa, Homo Sapiens
FPWNKNVEV

SEQ ID NO: 119258 - protein, 9 aa, Homo Sapiens
FPWPKVLKI

SEQ ID NO: 119259 - protein, 9 aa, Homo Sapiens
FPWSEIRNI

SEQ ID NO: 119260 - protein, 9 aa, Homo Sapiens
FPWSGLIYI

SEQ ID NO: 119261 - protein, 9 aa, Homo Sapiens
FPYAFKEVI

SEQ ID NO: 119262 - protein, 9 aa, Homo Sapiens
FPYDANIQI

SEQ ID NO: 119263 - protein, 9 aa, Homo Sapiens
FPYFFESRI

SEQ ID NO: 119264 - protein, 9 aa, Homo Sapiens
FPYGLFELV

SEQ ID NO: 119265 - protein, 9 aa, Homo Sapiens
FPYGSFPYV

SEQ ID NO: 119266 - protein, 9 aa, Homo Sapiens
FPYMTHPSV

SEQ ID NO: 119267 - protein, 9 aa, Homo Sapiens
FPYSLLIFV

SEQ ID NO: 119268 - protein, 9 aa, Homo Sapiens
FPYTTILSI

SEQ ID NO: 119269 - protein, 9 aa, Homo Sapiens
FPYVVVPRV

SEQ ID NO: 119270 - protein, 9 aa, Homo Sapiens
FPYYPSPGV

SEQ ID NO: 119271 - protein, 9 aa, Homo Sapiens
FSPFHASVL

SEQ ID NO: 119272 - protein, 9 aa, Homo Sapiens
FVNDIFERI

SEQ ID NO: 119273 - protein, 9 aa, Homo Sapiens
GDFLPPDEL

SEQ ID NO: 119274 - protein, 9 aa, Homo Sapiens
GVPLIIFTI

SEQ ID NO: 119275 - protein, 9 aa, Homo Sapiens
GYPYNAPTV

SEQ ID NO: 119276 - protein, 9 aa, Homo Sapiens
HACGVIATI

SEQ ID NO: 119277 - protein, 9 aa, Homo Sapiens
HAFSFPLLI

SEQ ID NO: 119278 - protein, 9 aa, Homo Sapiens
HAFWGGSVV

SEQ ID NO: 119279 - protein, 9 aa, Homo Sapiens
HANPILLLV

SEQ ID NO: 119280 - protein, 9 aa, Homo Sapiens
HAYIGVSLV

SEQ ID NO: 119281 - protein, 9 aa, Homo Sapiens
HGFAGVILI

SEQ ID NO: 119282 - protein, 9 aa, Homo Sapiens
HPDGKILII

SEQ ID NO: 119283 - protein, 9 aa, Homo Sapiens
HPDSHQLFI

SEQ ID NO: 119284 - protein, 9 aa, Homo Sapiens
HPFEAQTLI

SEQ ID NO: 119285 - protein, 9 aa, Homo Sapiens
HPFFYVPEI

SEQ ID NO: 119286 - protein, 9 aa, Homo Sapiens
HPHPFLNSV

SEQ ID NO: 119287 - protein, 9 aa, Homo Sapiens
HPNSAVLMV

SEQ ID NO: 119288 - protein, 9 aa, Homo Sapiens
HPPSHWPLI

SEQ ID NO: 119289 - protein, 9 aa, Homo Sapiens
HPSPVVLKV

SEQ ID NO: 119290 - protein, 9 aa, Homo Sapiens
HPYEVAEVI

SEQ ID NO: 119291 - protein, 9 aa, Homo Sapiens
HPYRLILTV

SEQ ID NO: 119292 - protein, 9 aa, Homo Sapiens
HVIDVKFLY

SEQ ID NO: 119293 - protein, 9 aa, Homo Sapiens
IAFEFPVLV

SEQ ID NO: 119294 - protein, 9 aa, Homo Sapiens
IAFFILTTI

SEQ ID NO: 119295 - protein, 9 aa, Homo Sapiens
IAFFTTASV

SEQ ID NO: 119296 - protein, 9 aa, Homo Sapiens
IAFHTIPVI

SEQ ID NO: 119297 - protein, 9 aa, Homo Sapiens
IAFLMINAV

SEQ ID NO: 119298 - protein, 9 aa, Homo Sapiens
IAFPTSISV

SEQ ID NO: 119299 - protein, 9 aa, Homo Sapiens
IALPHGQLV

SEQ ID NO: 119300 - protein, 9 aa, Homo Sapiens
IAMDLILKM

SEQ ID NO: 119301 - protein, 9 aa, Homo Sapiens
IANHQVLII

SEQ ID NO: 119302 - protein, 9 aa, Homo Sapiens
IAPKITSVI

SEQ ID NO: 119303 - protein, 9 aa, Homo Sapiens
IASPVIAAV

SEQ ID NO: 119304 - protein, 9 aa, Homo Sapiens
IAVNAVLTV

SEQ ID NO: 119305 - protein, 9 aa, Homo Sapiens
IAYDNIKVV

SEQ ID NO: 119306 - protein, 9 aa, Homo Sapiens
IAYKFGKTV

SEQ ID NO: 119307 - protein, 9 aa, Homo Sapiens
IGYPFLVSV

SEQ ID NO: 119308 - protein, 9 aa, Homo Sapiens
IPAAAFSLV

SEQ ID NO: 119309 - protein, 9 aa, Homo Sapiens
IPADLRIIS

SEQ ID NO: 119310 - protein, 9 aa, Homo Sapiens
IPASDLPQV

SEQ ID NO: 119311 - protein, 9 aa, Homo Sapiens
IPDGGVHII

SEQ ID NO: 119312 - protein, 9 aa, Homo Sapiens
IPDGGVHIV

SEQ ID NO: 119313 - protein, 9 aa, Homo Sapiens
IPDTMAHLI

SEQ ID NO: 119314 - protein, 9 aa, Homo Sapiens
IPFAGKVEV

SEQ ID NO: 119315 - protein, 9 aa, Homo Sapiens
IPFEFPLHL

SEQ ID NO: 119316 - protein, 9 aa, Homo Sapiens
IPFFREIIV

SEQ ID NO: 119317 - protein, 9 aa, Homo Sapiens
IPFFSIPVV

SEQ ID NO: 119318 - protein, 9 aa, Homo Sapiens
IPFGDITDI

SEQ ID NO: 119319 - protein, 9 aa, Homo Sapiens
IPFIGVVKV

SEQ ID NO: 119320 - protein, 9 aa, Homo Sapiens
IPFNQALVF

SEQ ID NO: 119321 - protein, 9 aa, Homo Sapiens
IPFSKPVKV

SEQ ID NO: 119322 - protein, 9 aa, Homo Sapiens
IPFSSKLNI

SEQ ID NO: 119323 - protein, 9 aa, Homo Sapiens
IPFVAPPLV

SEQ ID NO: 119324 - protein, 9 aa, Homo Sapiens
IPHIHKSLI

SEQ ID NO: 119325 - protein, 9 aa, Homo Sapiens
IPHPLIMGV

SEQ ID NO: 119326 - protein, 9 aa, Homo Sapiens
IPIPTLPSV

SEQ ID NO: 119327 - protein, 9 aa, Homo Sapiens
IPISNILMV

SEQ ID NO: 119328 - protein, 9 aa, Homo Sapiens
IPKNNPPTL

SEQ ID NO: 119329 - protein, 9 aa, Homo Sapiens
IPLEILVQI

SEQ ID NO: 119330 - protein, 9 aa, Homo Sapiens
IPLKEMPAV

SEQ ID NO: 119331 - protein, 9 aa, Homo Sapiens
IPLPLEPQV

SEQ ID NO: 119332 - protein, 9 aa, Homo Sapiens
IPLPTKILV

SEQ ID NO: 119333 - protein, 9 aa, Homo Sapiens
IPLSEILTV

SEQ ID NO: 119334 - protein, 9 aa, Homo Sapiens
IPMELVNEV

SEQ ID NO: 119335 - protein, 9 aa, Homo Sapiens
IPNEKIRNI

SEQ ID NO: 119336 - protein, 9 aa, Homo Sapiens
IPNFDVREI

SEQ ID NO: 119337 - protein, 9 aa, Homo Sapiens
IPNFPRSTV

SEQ ID NO: 119338 - protein, 9 aa, Homo Sapiens
IPPEIIMKV

SEQ ID NO: 119339 - protein, 9 aa, Homo Sapiens
IPPIQVTKV

SEQ ID NO: 119340 - protein, 9 aa, Homo Sapiens
IPPLATHTI

SEQ ID NO: 119341 - protein, 9 aa, Homo Sapiens
IPPPLSPPR

SEQ ID NO: 119342 - protein, 9 aa, Homo Sapiens
IPPTALNSI

SEQ ID NO: 119343 - protein, 9 aa, Homo Sapiens
IPQARFLLV

SEQ ID NO: 119344 - protein, 9 aa, Homo Sapiens
IPRSFMMEV

SEQ ID NO: 119345 - protein, 9 aa, Homo Sapiens
IPRSITVLV

SEQ ID NO: 119346 - protein, 9 aa, Homo Sapiens
IPRVPSLSV

SEQ ID NO: 119347 - protein, 9 aa, Homo Sapiens
IPRVQVAQI

SEQ ID NO: 119348 - protein, 9 aa, Homo Sapiens
IPTDKLLVI

SEQ ID NO: 119349 - protein, 9 aa, Homo Sapiens
IPTLKISLI

SEQ ID NO: 119350 - protein, 9 aa, Homo Sapiens
IPVEFKLVI

SEQ ID NO: 119351 - protein, 9 aa, Homo Sapiens
IPVSQISTI

SEQ ID NO: 119352 - protein, 9 aa, Homo Sapiens
IPVSWMPVI

SEQ ID NO: 119353 - protein, 9 aa, Homo Sapiens
IPWEVKASI

SEQ ID NO: 119354 - protein, 9 aa, Homo Sapiens
IPWIAIPLV

SEQ ID NO: 119355 - protein, 9 aa, Homo Sapiens
IPWLQYNEV

SEQ ID NO: 119356 - protein, 9 aa, Homo Sapiens
IPWPGTLAI

SEQ ID NO: 119357 - protein, 9 aa, Homo Sapiens
IPYEGFASL

SEQ ID NO: 119358 - protein, 9 aa, Homo Sapiens
IPYHIVNIV

SEQ ID NO: 119359 - protein, 9 aa, Homo Sapiens
IPYPRPIHL

SEQ ID NO: 119360 - protein, 9 aa, Homo Sapiens
IPYPSYAIF

SEQ ID NO: 119361 - protein, 9 aa, Homo Sapiens
IPYQDLPHL

SEQ ID NO: 119362 - protein, 9 aa, Homo Sapiens
IPYSPDVQI

SEQ ID NO: 119363 - protein, 9 aa, Homo Sapiens
IPYTFEDRI

SEQ ID NO: 119364 - protein, 9 aa, Homo Sapiens
KPYNVYITV

SEQ ID NO: 119365 - protein, 9 aa, Homo Sapiens
LALPAIAVI

SEQ ID NO: 119366 - protein, 9 aa, Homo Sapiens
LAPITLNTI

SEQ ID NO: 119367 - protein, 9 aa, Homo Sapiens
LAPPSPSLV

SEQ ID NO: 119368 - protein, 9 aa, Homo Sapiens
LAYPGSATI

SEQ ID NO: 119369 - protein, 9 aa, Homo Sapiens
LEGVRTPVL

SEQ ID NO: 119370 - protein, 9 aa, Homo Sapiens
LGYDTRVTI

SEQ ID NO: 119371 - protein, 9 aa, Homo Sapiens
LPAADVKNI

SEQ ID NO: 119372 - protein, 9 aa, Homo Sapiens
LPADFGRLV

SEQ ID NO: 119373 - protein, 9 aa, Homo Sapiens
LPADWAPLF

SEQ ID NO: 119374 - protein, 9 aa, Homo Sapiens
LPAEFFEVL

SEQ ID NO: 119375 - protein, 9 aa, Homo Sapiens
LPAELINQI

SEQ ID NO: 119376 - protein, 9 aa, Homo Sapiens
LPAGILPMV

SEQ ID NO: 119377 - protein, 9 aa, Homo Sapiens
LPAGINSIV

SEQ ID NO: 119378 - protein, 9 aa, Homo Sapiens
LPANLYPTV

SEQ ID NO: 119379 - protein, 9 aa, Homo Sapiens
LPANPIPVI

SEQ ID NO: 119380 - protein, 9 aa, Homo Sapiens
LPAPAVEHI

SEQ ID NO: 119381 - protein, 9 aa, Homo Sapiens
LPAPHLTLP

SEQ ID NO: 119382 - protein, 9 aa, Homo Sapiens
LPAQPMISV

SEQ ID NO: 119383 - protein, 9 aa, Homo Sapiens
LPASIPHVI

SEQ ID NO: 119384 - protein, 9 aa, Homo Sapiens
LPCTPVLVV

SEQ ID NO: 119385 - protein, 9 aa, Homo Sapiens
LPDGQVITI

SEQ ID NO: 119386 - protein, 9 aa, Homo Sapiens
LPDGRIIKV

SEQ ID NO: 119387 - protein, 9 aa, Homo Sapiens
LPDGRTLIV

SEQ ID NO: 119388 - protein, 9 aa, Homo Sapiens
LPDHVSIIL

SEQ ID NO: 119389 - protein, 9 aa, Homo Sapiens
LPDNSILVV

SEQ ID NO: 119390 - protein, 9 aa, Homo Sapiens
LPEDKPRLI

SEQ ID NO: 119391 - protein, 9 aa, Homo Sapiens
LPEITVRSV

SEQ ID NO: 119392 - protein, 9 aa, Homo Sapiens
LPEPKVRIV

SEQ ID NO: 119393 - protein, 9 aa, Homo Sapiens
LPEPSIRSV

SEQ ID NO: 119394 - protein, 9 aa, Homo Sapiens
LPFAAAGAL

SEQ ID NO: 119395 - protein, 9 aa, Homo Sapiens
LPFDHSRVI

SEQ ID NO: 119396 - protein, 9 aa, Homo Sapiens
LPFDLQRNV

SEQ ID NO: 119397 - protein, 9 aa, Homo Sapiens
LPFDRFSEV

SEQ ID NO: 119398 - protein, 9 aa, Homo Sapiens
LPFEIKNFV

SEQ ID NO: 119399 - protein, 9 aa, Homo Sapiens
LPFEPVPVI

SEQ ID NO: 119400 - protein, 9 aa, Homo Sapiens
LPFEVLQHI

SEQ ID NO: 119401 - protein, 9 aa, Homo Sapiens
LPFGKVTNI

SEQ ID NO: 119402 - protein, 9 aa, Homo Sapiens
LPFGVPASI

SEQ ID NO: 119403 - protein, 9 aa, Homo Sapiens
LPFLKNTVI

SEQ ID NO: 119404 - protein, 9 aa, Homo Sapiens
LPFLTNVTL

SEQ ID NO: 119405 - protein, 9 aa, Homo Sapiens
LPFPFPSKL

SEQ ID NO: 119406 - protein, 9 aa, Homo Sapiens
LPFPTVLRV

SEQ ID NO: 119407 - protein, 9 aa, Homo Sapiens
LPFQACLKV

SEQ ID NO: 119408 - protein, 9 aa, Homo Sapiens
LPFQKGYLV

SEQ ID NO: 119409 - protein, 9 aa, Homo Sapiens
LPFRALLQI

SEQ ID NO: 119410 - protein, 9 aa, Homo Sapiens
LPFRVIPLV

SEQ ID NO: 119411 - protein, 9 aa, Homo Sapiens
LPFSHPLFI

SEQ ID NO: 119412 - protein, 9 aa, Homo Sapiens
LPFTKPKVI

SEQ ID NO: 119413 - protein, 9 aa, Homo Sapiens
LPFTPLSYI

SEQ ID NO: 119414 - protein, 9 aa, Homo Sapiens
LPFVGKESI

SEQ ID NO: 119415 - protein, 9 aa, Homo Sapiens
LPFYFVQKI

SEQ ID NO: 119416 - protein, 9 aa, Homo Sapiens
LPGELFHVV

SEQ ID NO: 119417 - protein, 9 aa, Homo Sapiens
LPGPILQSI

SEQ ID NO: 119418 - protein, 9 aa, Homo Sapiens
LPHDPSFAI

SEQ ID NO: 119419 - protein, 9 aa, Homo Sapiens
LPHELCTLI

SEQ ID NO: 119420 - protein, 9 aa, Homo Sapiens
LPHFTSEHI

SEQ ID NO: 119421 - protein, 9 aa, Homo Sapiens
LPHHRVIEV

SEQ ID NO: 119422 - protein, 9 aa, Homo Sapiens
LPHLEAVVI

SEQ ID NO: 119423 - protein, 9 aa, Homo Sapiens
LPHLPQSEI

SEQ ID NO: 119424 - protein, 9 aa, Homo Sapiens
LPHLPSLEI

SEQ ID NO: 119425 - protein, 9 aa, Homo Sapiens
LPHPIIVSI

SEQ ID NO: 119426 - protein, 9 aa, Homo Sapiens
LPHPYAIAV

SEQ ID NO: 119427 - protein, 9 aa, Homo Sapiens
LPHRDFLQI

SEQ ID NO: 119428 - protein, 9 aa, Homo Sapiens
LPHVFVNCV

SEQ ID NO: 119429 - protein, 9 aa, Homo Sapiens
LPHVPLGVI

SEQ ID NO: 119430 - protein, 9 aa, Homo Sapiens
LPIANVARI

SEQ ID NO: 119431 - protein, 9 aa, Homo Sapiens
LPIAPSHVI

SEQ ID NO: 119432 - protein, 9 aa, Homo Sapiens
LPIDDVLRI

SEQ ID NO: 119433 - protein, 9 aa, Homo Sapiens
LPIDVQLYI

SEQ ID NO: 119434 - protein, 9 aa, Homo Sapiens
LPIGIPYSI

SEQ ID NO: 119435 - protein, 9 aa, Homo Sapiens
LPIHTVETI

SEQ ID NO: 119436 - protein, 9 aa, Homo Sapiens
LPIPESQVI

SEQ ID NO: 119437 - protein, 9 aa, Homo Sapiens
LPIPVPIFV

SEQ ID NO: 119438 - protein, 9 aa, Homo Sapiens
LPIQPAQHI

SEQ ID NO: 119439 - protein, 9 aa, Homo Sapiens
LPISHPPQI

SEQ ID NO: 119440 - protein, 9 aa, Homo Sapiens
LPISHPRFV

SEQ ID NO: 119441 - protein, 9 aa, Homo Sapiens
LPIVPQLQV

SEQ ID NO: 119442 - protein, 9 aa, Homo Sapiens
LPIVTPALR

SEQ ID NO: 119443 - protein, 9 aa, Homo Sapiens
LPKEPQGII

SEQ ID NO: 119444 - protein, 9 aa, Homo Sapiens
LPKLHIVKV

SEQ ID NO: 119445 - protein, 9 aa, Homo Sapiens
LPKNPDLRI

SEQ ID NO: 119446 - protein, 9 aa, Homo Sapiens
LPKPSSIEI

SEQ ID NO: 119447 - protein, 9 aa, Homo Sapiens
LPKSIYSQI

SEQ ID NO: 119448 - protein, 9 aa, Homo Sapiens
LPLAHHLLV

SEQ ID NO: 119449 - protein, 9 aa, Homo Sapiens
LPLAHVLEL

SEQ ID NO: 119450 - protein, 9 aa, Homo Sapiens
LPLDQRLLI

SEQ ID NO: 119451 - protein, 9 aa, Homo Sapiens
LPLDRYILV

SEQ ID NO: 119452 - protein, 9 aa, Homo Sapiens
LPLEDSPVI

SEQ ID NO: 119453 - protein, 9 aa, Homo Sapiens
LPLEKAIHI

SEQ ID NO: 119454 - protein, 9 aa, Homo Sapiens
LPLENGRFI

SEQ ID NO: 119455 - protein, 9 aa, Homo Sapiens
LPLEVCNIV

SEQ ID NO: 119456 - protein, 9 aa, Homo Sapiens
LPLFFVITV

SEQ ID NO: 119457 - protein, 9 aa, Homo Sapiens
LPLKTLESI

SEQ ID NO: 119458 - protein, 9 aa, Homo Sapiens
LPLLIADTL

SEQ ID NO: 119459 - protein, 9 aa, Homo Sapiens
LPLLRVLSI

SEQ ID NO: 119460 - protein, 9 aa, Homo Sapiens
LPLLVQRTI

SEQ ID NO: 119461 - protein, 9 aa, Homo Sapiens
LPLMKFLEV

SEQ ID NO: 119462 - protein, 9 aa, Homo Sapiens
LPLNIERNI

SEQ ID NO: 119463 - protein, 9 aa, Homo Sapiens
LPLPASPVV

SEQ ID NO: 119464 - protein, 9 aa, Homo Sapiens
LPLPHFDTI

SEQ ID NO: 119465 - protein, 9 aa, Homo Sapiens
LPLQENVTI

SEQ ID NO: 119466 - protein, 9 aa, Homo Sapiens
LPLRFWVNI

SEQ ID NO: 119467 - protein, 9 aa, Homo Sapiens
LPLSGVPLM

SEQ ID NO: 119468 - protein, 9 aa, Homo Sapiens
LPLSIFIQI

SEQ ID NO: 119469 - protein, 9 aa, Homo Sapiens
LPLSMIVAI

SEQ ID NO: 119470 - protein, 9 aa, Homo Sapiens
LPLSSLTHV

SEQ ID NO: 119471 - protein, 9 aa, Homo Sapiens
LPMDYVQRV

SEQ ID NO: 119472 - protein, 9 aa, Homo Sapiens
LPMGSIKNV

SEQ ID NO: 119473 - protein, 9 aa, Homo Sapiens
LPMVLVLLL

SEQ ID NO: 119474 - protein, 9 aa, Homo Sapiens
LPNAPKALI

SEQ ID NO: 119475 - protein, 9 aa, Homo Sapiens
LPNAVITRI

SEQ ID NO: 119476 - protein, 9 aa, Homo Sapiens
LPNDVVLQI

SEQ ID NO: 119477 - protein, 9 aa, Homo Sapiens
LPNIPVQTI

SEQ ID NO: 119478 - protein, 9 aa, Homo Sapiens
LPNKVDPLV

SEQ ID NO: 119479 - protein, 9 aa, Homo Sapiens
LPNLQTVTV

SEQ ID NO: 119480 - protein, 9 aa, Homo Sapiens
LPNNRELYI

SEQ ID NO: 119481 - protein, 9 aa, Homo Sapiens
LPNPTLVTI

SEQ ID NO: 119482 - protein, 9 aa, Homo Sapiens
LPPAALHLI

SEQ ID NO: 119483 - protein, 9 aa, Homo Sapiens
LPPDLSYIV

SEQ ID NO: 119484 - protein, 9 aa, Homo Sapiens
LPPDVWMKI

SEQ ID NO: 119485 - protein, 9 aa, Homo Sapiens
LPPGFYPHI

SEQ ID NO: 119486 - protein, 9 aa, Homo Sapiens
LPPIKVLVV

SEQ ID NO: 119487 - protein, 9 aa, Homo Sapiens
LPPLHVAKL

SEQ ID NO: 119488 - protein, 9 aa, Homo Sapiens
LPPNHILEI

SEQ ID NO: 119489 - protein, 9 aa, Homo Sapiens
LPPNLYPTV

SEQ ID NO: 119490 - protein, 9 aa, Homo Sapiens
LPPPFVPTL

SEQ ID NO: 119491 - protein, 9 aa, Homo Sapiens
LPPPLAPNI

SEQ ID NO: 119492 - protein, 9 aa, Homo Sapiens
LPPPPHLPP

SEQ ID NO: 119493 - protein, 9 aa, Homo Sapiens
LPPPPHPSV

SEQ ID NO: 119494 - protein, 9 aa, Homo Sapiens
LPPPPMQYI

SEQ ID NO: 119495 - protein, 9 aa, Homo Sapiens
LPPPPPPHL

SEQ ID NO: 119496 - protein, 9 aa, Homo Sapiens
LPPPPQQKI

SEQ ID NO: 119497 - protein, 9 aa, Homo Sapiens
LPPPTPSQI

SEQ ID NO: 119498 - protein, 9 aa, Homo Sapiens
LPPPVQTQI

SEQ ID NO: 119499 - protein, 9 aa, Homo Sapiens
LPPQAFNHI

SEQ ID NO: 119500 - protein, 9 aa, Homo Sapiens
LPPSALQSV

SEQ ID NO: 119501 - protein, 9 aa, Homo Sapiens
LPPSVVATV

SEQ ID NO: 119502 - protein, 9 aa, Homo Sapiens
LPPVPVPKI

SEQ ID NO: 119503 - protein, 9 aa, Homo Sapiens
LPPVVFLLI

SEQ ID NO: 119504 - protein, 9 aa, Homo Sapiens
LPQDVILKF

SEQ ID NO: 119505 - protein, 9 aa, Homo Sapiens
LPQEIGNLK

SEQ ID NO: 119506 - protein, 9 aa, Homo Sapiens
LPRDHPAVI

SEQ ID NO: 119507 - protein, 9 aa, Homo Sapiens
LPREISLDL

SEQ ID NO: 119508 - protein, 9 aa, Homo Sapiens
LPRLSLNGV

SEQ ID NO: 119509 - protein, 9 aa, Homo Sapiens
LPRNLPVTI

SEQ ID NO: 119510 - protein, 9 aa, Homo Sapiens
LPSDPFSRV

SEQ ID NO: 119511 - protein, 9 aa, Homo Sapiens
LPSEITRTI

SEQ ID NO: 119512 - protein, 9 aa, Homo Sapiens
LPSELIVHI

SEQ ID NO: 119513 - protein, 9 aa, Homo Sapiens
LPSGAVFVI

SEQ ID NO: 119514 - protein, 9 aa, Homo Sapiens
LPSHGVPLI

SEQ ID NO: 119515 - protein, 9 aa, Homo Sapiens
LPSNTSLVI

SEQ ID NO: 119516 - protein, 9 aa, Homo Sapiens
LPSPISPDI

SEQ ID NO: 119517 - protein, 9 aa, Homo Sapiens
LPSPPAVAV

SEQ ID NO: 119518 - protein, 9 aa, Homo Sapiens
LPSQVSRVV

SEQ ID NO: 119519 - protein, 9 aa, Homo Sapiens
LPSSLYLKI

SEQ ID NO: 119520 - protein, 9 aa, Homo Sapiens
LPSSVLHII

SEQ ID NO: 119521 - protein, 9 aa, Homo Sapiens
LPTDVMTTV

SEQ ID NO: 119522 - protein, 9 aa, Homo Sapiens
LPTHDLPLI

SEQ ID NO: 119523 - protein, 9 aa, Homo Sapiens
LPTTALPTV

SEQ ID NO: 119524 - protein, 9 aa, Homo Sapiens
LPVAVKHVV

SEQ ID NO: 119525 - protein, 9 aa, Homo Sapiens
LPVDAVISV

SEQ ID NO: 119526 - protein, 9 aa, Homo Sapiens
LPVEAMVTI

SEQ ID NO: 119527 - protein, 9 aa, Homo Sapiens
LPVNAQNYV

SEQ ID NO: 119528 - protein, 9 aa, Homo Sapiens
LPVPAFNVI

SEQ ID NO: 119529 - protein, 9 aa, Homo Sapiens
LPVPLHPQV

SEQ ID NO: 119530 - protein, 9 aa, Homo Sapiens
LPVVLPPIM

SEQ ID NO: 119531 - protein, 9 aa, Homo Sapiens
LPVVVISNI

SEQ ID NO: 119532 - protein, 9 aa, Homo Sapiens
LPVVVISNV

SEQ ID NO: 119533 - protein, 9 aa, Homo Sapiens
LPWASVLRV

SEQ ID NO: 119534 - protein, 9 aa, Homo Sapiens
LPWEEREKI

SEQ ID NO: 119535 - protein, 9 aa, Homo Sapiens
LPWESMPSL

SEQ ID NO: 119536 - protein, 9 aa, Homo Sapiens
LPWGPALLI

SEQ ID NO: 119537 - protein, 9 aa, Homo Sapiens
LPWISILTV

SEQ ID NO: 119538 - protein, 9 aa, Homo Sapiens
LPWIVPMSL

SEQ ID NO: 119539 - protein, 9 aa, Homo Sapiens
LPWKSLTSI

SEQ ID NO: 119540 - protein, 9 aa, Homo Sapiens
LPWPFQGTI

SEQ ID NO: 119541 - protein, 9 aa, Homo Sapiens
LPWPFRNKV

SEQ ID NO: 119542 - protein, 9 aa, Homo Sapiens
LPWSNPLKV

SEQ ID NO: 119543 - protein, 9 aa, Homo Sapiens
LPWTAEQVV

SEQ ID NO: 119544 - protein, 9 aa, Homo Sapiens
LPYAGDVSM

SEQ ID NO: 119545 - protein, 9 aa, Homo Sapiens
LPYAITIVA

SEQ ID NO: 119546 - protein, 9 aa, Homo Sapiens
LPYDAFVVF

SEQ ID NO: 119547 - protein, 9 aa, Homo Sapiens
LPYELAINI

SEQ ID NO: 119548 - protein, 9 aa, Homo Sapiens
LPYGEGLRI

SEQ ID NO: 119549 - protein, 9 aa, Homo Sapiens
LPYGFIQEL

SEQ ID NO: 119550 - protein, 9 aa, Homo Sapiens
LPYGLERAI

SEQ ID NO: 119551 - protein, 9 aa, Homo Sapiens
LPYHIYPFI

SEQ ID NO: 119552 - protein, 9 aa, Homo Sapiens
LPYHVAVLL

SEQ ID NO: 119553 - protein, 9 aa, Homo Sapiens
LPYKIAYYI

SEQ ID NO: 119554 - protein, 9 aa, Homo Sapiens
LPYLALLTI

SEQ ID NO: 119555 - protein, 9 aa, Homo Sapiens
LPYLASLGI

SEQ ID NO: 119556 - protein, 9 aa, Homo Sapiens
LPYLNKVVV

SEQ ID NO: 119557 - protein, 9 aa, Homo Sapiens
LPYLVSNVI

SEQ ID NO: 119558 - protein, 9 aa, Homo Sapiens
LPYNMPLAY

SEQ ID NO: 119559 - protein, 9 aa, Homo Sapiens
LPYPAPEGI

SEQ ID NO: 119560 - protein, 9 aa, Homo Sapiens
LPYPFASEI

SEQ ID NO: 119561 - protein, 9 aa, Homo Sapiens
LPYPVKIKV

SEQ ID NO: 119562 - protein, 9 aa, Homo Sapiens
LPYRLVFAV

SEQ ID NO: 119563 - protein, 9 aa, Homo Sapiens
LPYRWQMLI

SEQ ID NO: 119564 - protein, 9 aa, Homo Sapiens
LPYSFIIGV

SEQ ID NO: 119565 - protein, 9 aa, Homo Sapiens
LPYSIRVLL

SEQ ID NO: 119566 - protein, 9 aa, Homo Sapiens
LPYSPRVLV

SEQ ID NO: 119567 - protein, 9 aa, Homo Sapiens
LPYSQISGL

SEQ ID NO: 119568 - protein, 9 aa, Homo Sapiens
LPYTQSVQI

SEQ ID NO: 119569 - protein, 9 aa, Homo Sapiens
LPYVGMVTI

SEQ ID NO: 119570 - protein, 9 aa, Homo Sapiens
LPYVSVTSL

SEQ ID NO: 119571 - protein, 9 aa, Homo Sapiens
LPYWVPLSL

SEQ ID NO: 119572 - protein, 9 aa, Homo Sapiens
LPYYIGISI

SEQ ID NO: 119573 - protein, 9 aa, Homo Sapiens
MAFLTQRTI

SEQ ID NO: 119574 - protein, 9 aa, Homo Sapiens
MALIQHSTI

SEQ ID NO: 119575 - protein, 9 aa, Homo Sapiens
MALQSILSI

SEQ ID NO: 119576 - protein, 9 aa, Homo Sapiens
MANPRELRI

SEQ ID NO: 119577 - protein, 9 aa, Homo Sapiens
MAPLALHLL

SEQ ID NO: 119578 - protein, 9 aa, Homo Sapiens
MAWAVVNEI

SEQ ID NO: 119579 - protein, 9 aa, Homo Sapiens
MAYARQIYI

SEQ ID NO: 119580 - protein, 9 aa, Homo Sapiens
MAYPDLNEI

SEQ ID NO: 119581 - protein, 9 aa, Homo Sapiens
MGYSHSLVI

SEQ ID NO: 119582 - protein, 9 aa, Homo Sapiens
MPALAPPEV

SEQ ID NO: 119583 - protein, 9 aa, Homo Sapiens
MPFESAVVI

SEQ ID NO: 119584 - protein, 9 aa, Homo Sapiens
MPFNLIPVI

SEQ ID NO: 119585 - protein, 9 aa, Homo Sapiens
MPFRGDTVI

SEQ ID NO: 119586 - protein, 9 aa, Homo Sapiens
MPHLSMQQV

SEQ ID NO: 119587 - protein, 9 aa, Homo Sapiens
MPHNQFIKM

SEQ ID NO: 119588 - protein, 9 aa, Homo Sapiens
MPISQLLMI

SEQ ID NO: 119589 - protein, 9 aa, Homo Sapiens
MPKPDPTVI

SEQ ID NO: 119590 - protein, 9 aa, Homo Sapiens
MPLESAVNV

SEQ ID NO: 119591 - protein, 9 aa, Homo Sapiens
MPLLTPRYI

SEQ ID NO: 119592 - protein, 9 aa, Homo Sapiens
MPLNVADLI

SEQ ID NO: 119593 - protein, 9 aa, Homo Sapiens
MPLPVLQAI

SEQ ID NO: 119594 - protein, 9 aa, Homo Sapiens
MPLQLLLLL

SEQ ID NO: 119595 - protein, 9 aa, Homo Sapiens
MPLSTIREV

SEQ ID NO: 119596 - protein, 9 aa, Homo Sapiens
MPLVKSVTV

SEQ ID NO: 119597 - protein, 9 aa, Homo Sapiens
MPMNVADLI

SEQ ID NO: 119598 - protein, 9 aa, Homo Sapiens
MPNENIPEL

SEQ ID NO: 119599 - protein, 9 aa, Homo Sapiens
MPNTRPPII

SEQ ID NO: 119600 - protein, 9 aa, Homo Sapiens
MPPPPLQHV

SEQ ID NO: 119601 - protein, 9 aa, Homo Sapiens
MPPPPPQGV

SEQ ID NO: 119602 - protein, 9 aa, Homo Sapiens
MPQIETRVI

SEQ ID NO: 119603 - protein, 9 aa, Homo Sapiens
MPQNRTIYV

SEQ ID NO: 119604 - protein, 9 aa, Homo Sapiens
MPRDILIVV

SEQ ID NO: 119605 - protein, 9 aa, Homo Sapiens
MPTLPPPSV

SEQ ID NO: 119606 - protein, 9 aa, Homo Sapiens
MPVIPMNTI

SEQ ID NO: 119607 - protein, 9 aa, Homo Sapiens
MPYEDIRNV

SEQ ID NO: 119608 - protein, 9 aa, Homo Sapiens
MPYEFDIRV

SEQ ID NO: 119609 - protein, 9 aa, Homo Sapiens
MPYGSLYNV

SEQ ID NO: 119610 - protein, 9 aa, Homo Sapiens
MPYGWLTEI

SEQ ID NO: 119611 - protein, 9 aa, Homo Sapiens
MPYHIQRTI

SEQ ID NO: 119612 - protein, 9 aa, Homo Sapiens
MPYLIGIHL

SEQ ID NO: 119613 - protein, 9 aa, Homo Sapiens
MPYNYPVLL

SEQ ID NO: 119614 - protein, 9 aa, Homo Sapiens
MPYQEIKNV

SEQ ID NO: 119615 - protein, 9 aa, Homo Sapiens
MTYERILYI

SEQ ID NO: 119616 - protein, 9 aa, Homo Sapiens
NAFQYVNSI

SEQ ID NO: 119617 - protein, 9 aa, Homo Sapiens
NAIETMPCV

SEQ ID NO: 119618 - protein, 9 aa, Homo Sapiens
NALDKVLSV

SEQ ID NO: 119619 - protein, 9 aa, Homo Sapiens
NALGVILQV

SEQ ID NO: 119620 - protein, 9 aa, Homo Sapiens
NAYEYFTKI

SEQ ID NO: 119621 - protein, 9 aa, Homo Sapiens
NAYFLLPKV

SEQ ID NO: 119622 - protein, 9 aa, Homo Sapiens
NAYPNTPYI

SEQ ID NO: 119623 - protein, 9 aa, Homo Sapiens
NPLPSKETI

SEQ ID NO: 119624 - protein, 9 aa, Homo Sapiens
NPYIGGLGI

SEQ ID NO: 119625 - protein, 9 aa, Homo Sapiens
NPYLLALTI

SEQ ID NO: 119626 - protein, 9 aa, Homo Sapiens
NPYQFDVLV

SEQ ID NO: 119627 - protein, 9 aa, Homo Sapiens
NSAPAVLEI

SEQ ID NO: 119628 - protein, 9 aa, Homo Sapiens
NVPYPLPKI

SEQ ID NO: 119629 - protein, 9 aa, Homo Sapiens
PIRLLAAAA

SEQ ID NO: 119630 - protein, 9 aa, Homo Sapiens
PRAKIITVL

SEQ ID NO: 119631 - protein, 9 aa, Homo Sapiens
PSEIVGKRI

SEQ ID NO: 119632 - protein, 9 aa, Homo Sapiens
QAIERYLVV

SEQ ID NO: 119633 - protein, 9 aa, Homo Sapiens
QALDARLEV

SEQ ID NO: 119634 - protein, 9 aa, Homo Sapiens
QALGITTKI

SEQ ID NO: 119635 - protein, 9 aa, Homo Sapiens
QALPWVRYI

SEQ ID NO: 119636 - protein, 9 aa, Homo Sapiens
QPFEDTPVV

SEQ ID NO: 119637 - protein, 9 aa, Homo Sapiens
QPLPRIVTI

SEQ ID NO: 119638 - protein, 9 aa, Homo Sapiens
QPLPVILHV

SEQ ID NO: 119639 - protein, 9 aa, Homo Sapiens
QPPPPPLWI

SEQ ID NO: 119640 - protein, 9 aa, Homo Sapiens
QPYGGFLDI

SEQ ID NO: 119641 - protein, 9 aa, Homo Sapiens
QPYLFTRHV

SEQ ID NO: 119642 - protein, 9 aa, Homo Sapiens
QPYPEILVV

SEQ ID NO: 119643 - protein, 9 aa, Homo Sapiens
QPYSKLPGV

SEQ ID NO: 119644 - protein, 9 aa, Homo Sapiens
REPLGLRVW

SEQ ID NO: 119645 - protein, 9 aa, Homo Sapiens
SAFDHFASV

SEQ ID NO: 119646 - protein, 9 aa, Homo Sapiens
SAFPFPVTV

SEQ ID NO: 119647 - protein, 9 aa, Homo Sapiens
SALPWNITV

SEQ ID NO: 119648 - protein, 9 aa, Homo Sapiens
SANHNILQI

SEQ ID NO: 119649 - protein, 9 aa, Homo Sapiens
SAWRVISSI

SEQ ID NO: 119650 - protein, 9 aa, Homo Sapiens
SAYESLMEI

SEQ ID NO: 119651 - protein, 9 aa, Homo Sapiens
SAYLVAEKV

SEQ ID NO: 119652 - protein, 9 aa, Homo Sapiens
SDAIPGLKI

SEQ ID NO: 119653 - protein, 9 aa, Homo Sapiens
SDAPGVPRI

SEQ ID NO: 119654 - protein, 9 aa, Homo Sapiens
SPAPPLLHV

SEQ ID NO: 119655 - protein, 9 aa, Homo Sapiens
SPFALQNTI

SEQ ID NO: 119656 - protein, 9 aa, Homo Sapiens
SPFPDIPKV

SEQ ID NO: 119657 - protein, 9 aa, Homo Sapiens
SPIAMFLTI

SEQ ID NO: 119658 - protein, 9 aa, Homo Sapiens
SPIENIQRV

SEQ ID NO: 119659 - protein, 9 aa, Homo Sapiens
SPLDIYPKI

SEQ ID NO: 119660 - protein, 9 aa, Homo Sapiens
SPLDSIHTI

SEQ ID NO: 119661 - protein, 9 aa, Homo Sapiens
SPLPQYVTV

SEQ ID NO: 119662 - protein, 9 aa, Homo Sapiens
SPMDTFLLI

SEQ ID NO: 119663 - protein, 9 aa, Homo Sapiens
SPYDMLESI

SEQ ID NO: 119664 - protein, 9 aa, Homo Sapiens
SPYHGFTIV

SEQ ID NO: 119665 - protein, 9 aa, Homo Sapiens
SPYPGLRLI

SEQ ID NO: 119666 - protein, 9 aa, Homo Sapiens
TAFAFHLRV

SEQ ID NO: 119667 - protein, 9 aa, Homo Sapiens
TAFAHLREV

SEQ ID NO: 119668 - protein, 9 aa, Homo Sapiens
TAFPFQVEV

SEQ ID NO: 119669 - protein, 9 aa, Homo Sapiens
TAFSRLILI

SEQ ID NO: 119670 - protein, 9 aa, Homo Sapiens
TAFVEPLVI

SEQ ID NO: 119671 - protein, 9 aa, Homo Sapiens
TAIHNFPTV

SEQ ID NO: 119672 - protein, 9 aa, Homo Sapiens
TAKLPAPSI

SEQ ID NO: 119673 - protein, 9 aa, Homo Sapiens
TALAIYHVI

SEQ ID NO: 119674 - protein, 9 aa, Homo Sapiens
TALALQLVM

SEQ ID NO: 119675 - protein, 9 aa, Homo Sapiens
TALAQIMTI

SEQ ID NO: 119676 - protein, 9 aa, Homo Sapiens
TALERVVRI

SEQ ID NO: 119677 - protein, 9 aa, Homo Sapiens
TALNRFLQV

SEQ ID NO: 119678 - protein, 9 aa, Homo Sapiens
TALPMVPIV

SEQ ID NO: 119679 - protein, 9 aa, Homo Sapiens
TALVIHQRI

SEQ ID NO: 119680 - protein, 9 aa, Homo Sapiens
TANLITVTV

SEQ ID NO: 119681 - protein, 9 aa, Homo Sapiens
TAPPPLPRI

SEQ ID NO: 119682 - protein, 9 aa, Homo Sapiens
TAPVNIAVI

SEQ ID NO: 119683 - protein, 9 aa, Homo Sapiens
TAVESFLTI

SEQ ID NO: 119684 - protein, 9 aa, Homo Sapiens
TAYIHQVTV

SEQ ID NO: 119685 - protein, 9 aa, Homo Sapiens
TAYLFSRFV

SEQ ID NO: 119686 - protein, 9 aa, Homo Sapiens
TAYNLIHTI

SEQ ID NO: 119687 - protein, 9 aa, Homo Sapiens
TAYPQVVVV

SEQ ID NO: 119688 - protein, 9 aa, Homo Sapiens
TAYPSLRLI

SEQ ID NO: 119689 - protein, 9 aa, Homo Sapiens
TGPLVLNRV

SEQ ID NO: 119690 - protein, 9 aa, Homo Sapiens
TGPPVSELI

SEQ ID NO: 119691 - protein, 9 aa, Homo Sapiens
TGYLNTVTV

SEQ ID NO: 119692 - protein, 9 aa, Homo Sapiens
TIRYPDPLI

SEQ ID NO: 119693 - protein, 9 aa, Homo Sapiens
TPESKIRFV

SEQ ID NO: 119694 - protein, 9 aa, Homo Sapiens
TPFEGILII

SEQ ID NO: 119695 - protein, 9 aa, Homo Sapiens
TPFGGRLLV

SEQ ID NO: 119696 - protein, 9 aa, Homo Sapiens
TPFHVMLLI

SEQ ID NO: 119697 - protein, 9 aa, Homo Sapiens
TPFPYNPLI

SEQ ID NO: 119698 - protein, 9 aa, Homo Sapiens
TPHDFIEHI

SEQ ID NO: 119699 - protein, 9 aa, Homo Sapiens
TPINRIPIM

SEQ ID NO: 119700 - protein, 9 aa, Homo Sapiens
TPLASFTTV

SEQ ID NO: 119701 - protein, 9 aa, Homo Sapiens
TPLQIKSVV

SEQ ID NO: 119702 - protein, 9 aa, Homo Sapiens
TPRVIIQTV

SEQ ID NO: 119703 - protein, 9 aa, Homo Sapiens
TPYHVNLLL

SEQ ID NO: 119704 - protein, 9 aa, Homo Sapiens
TPYNYPVPV

SEQ ID NO: 119705 - protein, 9 aa, Homo Sapiens
TPYQSKWTI

SEQ ID NO: 119706 - protein, 9 aa, Homo Sapiens
TPYWMAPEV

SEQ ID NO: 119707 - protein, 9 aa, Homo Sapiens
TVLPFVSTV

SEQ ID NO: 119708 - protein, 9 aa, Homo Sapiens
VAAAVDLII

SEQ ID NO: 119709 - protein, 9 aa, Homo Sapiens
VAAPPSIQI

SEQ ID NO: 119710 - protein, 9 aa, Homo Sapiens
VAHQQLIQI

SEQ ID NO: 119711 - protein, 9 aa, Homo Sapiens
VAIESTPMI

SEQ ID NO: 119712 - protein, 9 aa, Homo Sapiens
VALARALFI

SEQ ID NO: 119713 - protein, 9 aa, Homo Sapiens
VALDKVIEI

SEQ ID NO: 119714 - protein, 9 aa, Homo Sapiens
VALEHFVLV

SEQ ID NO: 119715 - protein, 9 aa, Homo Sapiens
VALFFAVLI

SEQ ID NO: 119716 - protein, 9 aa, Homo Sapiens
VALKIIRNV

SEQ ID NO: 119717 - protein, 9 aa, Homo Sapiens
VALLVGEKV

SEQ ID NO: 119718 - protein, 9 aa, Homo Sapiens
VALPMVLVL

SEQ ID NO: 119719 - protein, 9 aa, Homo Sapiens
VALPVFLVI

SEQ ID NO: 119720 - protein, 9 aa, Homo Sapiens
VALPVLMNI

SEQ ID NO: 119721 - protein, 9 aa, Homo Sapiens
VALPVYLLI

SEQ ID NO: 119722 - protein, 9 aa, Homo Sapiens
VALSLKISI

SEQ ID NO: 119723 - protein, 9 aa, Homo Sapiens
VALVVPVSI

SEQ ID NO: 119724 - protein, 9 aa, Homo Sapiens
VAPGALLGL

SEQ ID NO: 119725 - protein, 9 aa, Homo Sapiens
VAPLATVNI

SEQ ID NO: 119726 - protein, 9 aa, Homo Sapiens
VARLEKIKI

SEQ ID NO: 119727 - protein, 9 aa, Homo Sapiens
VAVAPRLVV

SEQ ID NO: 119728 - protein, 9 aa, Homo Sapiens
VAVEPRSLI

SEQ ID NO: 119729 - protein, 9 aa, Homo Sapiens
VAWEVANKV

SEQ ID NO: 119730 - protein, 9 aa, Homo Sapiens
VFLAMLLVL

SEQ ID NO: 119731 - protein, 9 aa, Homo Sapiens
VPAATFQSI

SEQ ID NO: 119732 - protein, 9 aa, Homo Sapiens
VPAGGVLTI

SEQ ID NO: 119733 - protein, 9 aa, Homo Sapiens
VPAPSVPSV

SEQ ID NO: 119734 - protein, 9 aa, Homo Sapiens
VPASVVSRI

SEQ ID NO: 119735 - protein, 9 aa, Homo Sapiens
VPDQPHPEI

SEQ ID NO: 119736 - protein, 9 aa, Homo Sapiens
VPDTSRIYV

SEQ ID NO: 119737 - protein, 9 aa, Homo Sapiens
VPFAPIVFI

SEQ ID NO: 119738 - protein, 9 aa, Homo Sapiens
VPFENKLYL

SEQ ID NO: 119739 - protein, 9 aa, Homo Sapiens
VPFERPAVI

SEQ ID NO: 119740 - protein, 9 aa, Homo Sapiens
VPFITEHII

SEQ ID NO: 119741 - protein, 9 aa, Homo Sapiens
VPFIVPLSV

SEQ ID NO: 119742 - protein, 9 aa, Homo Sapiens
VPFLNPYTV

SEQ ID NO: 119743 - protein, 9 aa, Homo Sapiens
VPFPDTYEI

SEQ ID NO: 119744 - protein, 9 aa, Homo Sapiens
VPFPEGFVI

SEQ ID NO: 119745 - protein, 9 aa, Homo Sapiens
VPFSHVNIV

SEQ ID NO: 119746 - protein, 9 aa, Homo Sapiens
VPFSQVVCI

SEQ ID NO: 119747 - protein, 9 aa, Homo Sapiens
VPFVGKVHI

SEQ ID NO: 119748 - protein, 9 aa, Homo Sapiens
VPHFPTPSI

SEQ ID NO: 119749 - protein, 9 aa, Homo Sapiens
VPIEQIPLV

SEQ ID NO: 119750 - protein, 9 aa, Homo Sapiens
VPIFPQPLI

SEQ ID NO: 119751 - protein, 9 aa, Homo Sapiens
VPIKPLPNV

SEQ ID NO: 119752 - protein, 9 aa, Homo Sapiens
VPILAPRIF

SEQ ID NO: 119753 - protein, 9 aa, Homo Sapiens
VPITRSGDL

SEQ ID NO: 119754 - protein, 9 aa, Homo Sapiens
VPIVMLPKI

SEQ ID NO: 119755 - protein, 9 aa, Homo Sapiens
VPKALEPYV

SEQ ID NO: 119756 - protein, 9 aa, Homo Sapiens
VPLALHPVV

SEQ ID NO: 119757 - protein, 9 aa, Homo Sapiens
VPLDKQITI

SEQ ID NO: 119758 - protein, 9 aa, Homo Sapiens
VPLDPMEHV

SEQ ID NO: 119759 - protein, 9 aa, Homo Sapiens
VPLEIMIKF

SEQ ID NO: 119760 - protein, 9 aa, Homo Sapiens
VPLETIVII

SEQ ID NO: 119761 - protein, 9 aa, Homo Sapiens
VPLEVFEYI

SEQ ID NO: 119762 - protein, 9 aa, Homo Sapiens
VPLGVISRI

SEQ ID NO: 119763 - protein, 9 aa, Homo Sapiens
VPLIIPVSV

SEQ ID NO: 119764 - protein, 9 aa, Homo Sapiens
VPLIIVNSI

SEQ ID NO: 119765 - protein, 9 aa, Homo Sapiens
VPLKDIVAI

SEQ ID NO: 119766 - protein, 9 aa, Homo Sapiens
VPLLKSLEV

SEQ ID NO: 119767 - protein, 9 aa, Homo Sapiens
VPLPNVPSI

SEQ ID NO: 119768 - protein, 9 aa, Homo Sapiens
VPLPPPMAI

SEQ ID NO: 119769 - protein, 9 aa, Homo Sapiens
VPLPRLLEV

SEQ ID NO: 119770 - protein, 9 aa, Homo Sapiens
VPLQPVTQN

SEQ ID NO: 119771 - protein, 9 aa, Homo Sapiens
VPLRVSPYV

SEQ ID NO: 119772 - protein, 9 aa, Homo Sapiens
VPLSQVKSI

SEQ ID NO: 119773 - protein, 9 aa, Homo Sapiens
VPLSSPLKV

SEQ ID NO: 119774 - protein, 9 aa, Homo Sapiens
VPLVAGLVI

SEQ ID NO: 119775 - protein, 9 aa, Homo Sapiens
VPLVVLISI

SEQ ID NO: 119776 - protein, 9 aa, Homo Sapiens
VPMPYTLKV

SEQ ID NO: 119777 - protein, 9 aa, Homo Sapiens
VPMRPGILV

SEQ ID NO: 119778 - protein, 9 aa, Homo Sapiens
VPMTPLRTV

SEQ ID NO: 119779 - protein, 9 aa, Homo Sapiens
VPNEHIMNV

SEQ ID NO: 119780 - protein, 9 aa, Homo Sapiens
VPNHLIWLI

SEQ ID NO: 119781 - protein, 9 aa, Homo Sapiens
VPNLEIPTV

SEQ ID NO: 119782 - protein, 9 aa, Homo Sapiens
VPNLKPLTV

SEQ ID NO: 119783 - protein, 9 aa, Homo Sapiens
VPNLQTVSV

SEQ ID NO: 119784 - protein, 9 aa, Homo Sapiens
VPNNKITVV

SEQ ID NO: 119785 - protein, 9 aa, Homo Sapiens
VPNPRIKLI

SEQ ID NO: 119786 - protein, 9 aa, Homo Sapiens
VPPAALISI

SEQ ID NO: 119787 - protein, 9 aa, Homo Sapiens
VPPEILNNV

SEQ ID NO: 119788 - protein, 9 aa, Homo Sapiens
VPPENIIYI

SEQ ID NO: 119789 - protein, 9 aa, Homo Sapiens
VPPEWVPII

SEQ ID NO: 119790 - protein, 9 aa, Homo Sapiens
VPPLATNTV

SEQ ID NO: 119791 - protein, 9 aa, Homo Sapiens
VPPLVPKVL

SEQ ID NO: 119792 - protein, 9 aa, Homo Sapiens
VPPPLAKAI

SEQ ID NO: 119793 - protein, 9 aa, Homo Sapiens
VPPSPANFI

SEQ ID NO: 119794 - protein, 9 aa, Homo Sapiens
VPQLQNNTI

SEQ ID NO: 119795 - protein, 9 aa, Homo Sapiens
VPRQNVPVI

SEQ ID NO: 119796 - protein, 9 aa, Homo Sapiens
VPRWSPPSI

SEQ ID NO: 119797 - protein, 9 aa, Homo Sapiens
VPSDLYPLV

SEQ ID NO: 119798 - protein, 9 aa, Homo Sapiens
VPSTAIREI

SEQ ID NO: 119799 - protein, 9 aa, Homo Sapiens
VPVEPVLTV

SEQ ID NO: 119800 - protein, 9 aa, Homo Sapiens
VPVEQVLLI

SEQ ID NO: 119801 - protein, 9 aa, Homo Sapiens
VPVFWPILV

SEQ ID NO: 119802 - protein, 9 aa, Homo Sapiens
VPVGFFLLI

SEQ ID NO: 119803 - protein, 9 aa, Homo Sapiens
VPVGKVLKV

SEQ ID NO: 119804 - protein, 9 aa, Homo Sapiens
VPVGRQPII

SEQ ID NO: 119805 - protein, 9 aa, Homo Sapiens
VPVMPLTSI

SEQ ID NO: 119806 - protein, 9 aa, Homo Sapiens
VPVWSGMNV

SEQ ID NO: 119807 - protein, 9 aa, Homo Sapiens
VPWPVDIVI

SEQ ID NO: 119808 - protein, 9 aa, Homo Sapiens
VPYAGVLAV

SEQ ID NO: 119809 - protein, 9 aa, Homo Sapiens
VPYEKGFAL

SEQ ID NO: 119810 - protein, 9 aa, Homo Sapiens
VPYGTPLSV

SEQ ID NO: 119811 - protein, 9 aa, Homo Sapiens
VPYIGIVTI

SEQ ID NO: 119812 - protein, 9 aa, Homo Sapiens
VPYLKIFTV

SEQ ID NO: 119813 - protein, 9 aa, Homo Sapiens
VPYLVGQVV

SEQ ID NO: 119814 - protein, 9 aa, Homo Sapiens
VPYPTASLV

SEQ ID NO: 119815 - protein, 9 aa, Homo Sapiens
VPYPVALHV

SEQ ID NO: 119816 - protein, 9 aa, Homo Sapiens
VPYRLLPGI

SEQ ID NO: 119817 - protein, 9 aa, Homo Sapiens
VPYVINVTL

SEQ ID NO: 119818 - protein, 9 aa, Homo Sapiens
WAYPRQVFI

SEQ ID NO: 119819 - protein, 9 aa, Homo Sapiens
WPFSIQDVV

SEQ ID NO: 119820 - protein, 9 aa, Homo Sapiens
WPREGILRV

SEQ ID NO: 119821 - protein, 9 aa, Homo Sapiens
YAFAHILTV

SEQ ID NO: 119822 - protein, 9 aa, Homo Sapiens
YAFGKFPTV

SEQ ID NO: 119823 - protein, 9 aa, Homo Sapiens
YAFNMKATV

SEQ ID NO: 119824 - protein, 9 aa, Homo Sapiens
YAFPKAVSV

SEQ ID NO: 119825 - protein, 9 aa, Homo Sapiens
YAFPKSITV

SEQ ID NO: 119826 - protein, 9 aa, Homo Sapiens
YAFVGFDCI

SEQ ID NO: 119827 - protein, 9 aa, Homo Sapiens
YAHFPINVV

SEQ ID NO: 119828 - protein, 9 aa, Homo Sapiens
YALNHTLSV

SEQ ID NO: 119829 - protein, 9 aa, Homo Sapiens
YAPPPFLHI

SEQ ID NO: 119830 - protein, 9 aa, Homo Sapiens
YAYDAKIEI

SEQ ID NO: 119831 - protein, 9 aa, Homo Sapiens
YAYDGKDYI

SEQ ID NO: 119832 - protein, 9 aa, Homo Sapiens
YAYPGVLLI

SEQ ID NO: 119833 - protein, 9 aa, Homo Sapiens
YAYRSVPSI

SEQ ID NO: 119834 - protein, 9 aa, Homo Sapiens
YIIEREPLI

SEQ ID NO: 119835 - protein, 9 aa, Homo Sapiens
YPAGFMDVI

SEQ ID NO: 119836 - protein, 9 aa, Homo Sapiens
YPALIGNLV

SEQ ID NO: 119837 - protein, 9 aa, Homo Sapiens
YPANSIVVV

SEQ ID NO: 119838 - protein, 9 aa, Homo Sapiens
YPAPAGLHI

SEQ ID NO: 119839 - protein, 9 aa, Homo Sapiens
YPASPWSHI

SEQ ID NO: 119840 - protein, 9 aa, Homo Sapiens
YPASSLVVV

SEQ ID NO: 119841 - protein, 9 aa, Homo Sapiens
YPDRNLPTI

SEQ ID NO: 119842 - protein, 9 aa, Homo Sapiens
YPDSHQLFV

SEQ ID NO: 119843 - protein, 9 aa, Homo Sapiens
YPEAITRLV

SEQ ID NO: 119844 - protein, 9 aa, Homo Sapiens
YPESLVRVV

SEQ ID NO: 119845 - protein, 9 aa, Homo Sapiens
YPESVIRLI

SEQ ID NO: 119846 - protein, 9 aa, Homo Sapiens
YPFANKESI

SEQ ID NO: 119847 - protein, 9 aa, Homo Sapiens
YPFFRGVTI

SEQ ID NO: 119848 - protein, 9 aa, Homo Sapiens
YPFPVPPLL

SEQ ID NO: 119849 - protein, 9 aa, Homo Sapiens
YPFTADQEI

SEQ ID NO: 119850 - protein, 9 aa, Homo Sapiens
YPGIIVSNI

SEQ ID NO: 119851 - protein, 9 aa, Homo Sapiens
YPIGTNAIV

SEQ ID NO: 119852 - protein, 9 aa, Homo Sapiens
YPKEADIVI

SEQ ID NO: 119853 - protein, 9 aa, Homo Sapiens
YPLCQFQYI

SEQ ID NO: 119854 - protein, 9 aa, Homo Sapiens
YPLDLLLKL

SEQ ID NO: 119855 - protein, 9 aa, Homo Sapiens
YPLEDATHI

SEQ ID NO: 119856 - protein, 9 aa, Homo Sapiens
YPLEDLPSL

SEQ ID NO: 119857 - protein, 9 aa, Homo Sapiens
YPLEVTKLI

SEQ ID NO: 119858 - protein, 9 aa, Homo Sapiens
YPLGDIKIV

SEQ ID NO: 119859 - protein, 9 aa, Homo Sapiens
YPLKEIVVI

SEQ ID NO: 119860 - protein, 9 aa, Homo Sapiens
YPLLLKELV

SEQ ID NO: 119861 - protein, 9 aa, Homo Sapiens
YPLQTVQSI

SEQ ID NO: 119862 - protein, 9 aa, Homo Sapiens
YPLTQLVVV

SEQ ID NO: 119863 - protein, 9 aa, Homo Sapiens
YPLYTIVFI

SEQ ID NO: 119864 - protein, 9 aa, Homo Sapiens
YPLYTQITV

SEQ ID NO: 119865 - protein, 9 aa, Homo Sapiens
YPMRIDESI

SEQ ID NO: 119866 - protein, 9 aa, Homo Sapiens
YPNLQLREI

SEQ ID NO: 119867 - protein, 9 aa, Homo Sapiens
YPPAPFMHI

SEQ ID NO: 119868 - protein, 9 aa, Homo Sapiens
YPPGAFVSV

SEQ ID NO: 119869 - protein, 9 aa, Homo Sapiens
YPPNIAVKV

SEQ ID NO: 119870 - protein, 9 aa, Homo Sapiens
YPPPEVRNI

SEQ ID NO: 119871 - protein, 9 aa, Homo Sapiens
YPPSMEAVV

SEQ ID NO: 119872 - protein, 9 aa, Homo Sapiens
YPPSQIAQL

SEQ ID NO: 119873 - protein, 9 aa, Homo Sapiens
YPPWPGKIV

SEQ ID NO: 119874 - protein, 9 aa, Homo Sapiens
YPQAVFLEV

SEQ ID NO: 119875 - protein, 9 aa, Homo Sapiens
YPQDYQFYI

SEQ ID NO: 119876 - protein, 9 aa, Homo Sapiens
YPRQLESLI

SEQ ID NO: 119877 - protein, 9 aa, Homo Sapiens
YPSETFTRV

SEQ ID NO: 119878 - protein, 9 aa, Homo Sapiens
YPSLPAQQV

SEQ ID NO: 119879 - protein, 9 aa, Homo Sapiens
YPSLPTMTV

SEQ ID NO: 119880 - protein, 9 aa, Homo Sapiens
YPSPTGVLI

SEQ ID NO: 119881 - protein, 9 aa, Homo Sapiens
YPTQLFRTV

SEQ ID NO: 119882 - protein, 9 aa, Homo Sapiens
YPTSKAVYI

SEQ ID NO: 119883 - protein, 9 aa, Homo Sapiens
YPVPKPALI

SEQ ID NO: 119884 - protein, 9 aa, Homo Sapiens
YPYHYAPFL

SEQ ID NO: 119885 - protein, 9 aa, Homo Sapiens
YPYPHTLYL

SEQ ID NO: 119886 - protein, 9 aa, Homo Sapiens
YPYPVSNSV

SEQ ID NO: 119887 - protein, 9 aa, Homo Sapiens
YPYPYPHTL

SEQ ID NO: 119888 - protein, 9 aa, Homo Sapiens
YPYQERVFL

SEQ ID NO: 119889 - protein, 9 aa, Homo Sapiens
YPYVEVNSI

SEQ ID NO: 119890 - protein, 9 aa, Homo Sapiens
YPYVGILHV

SEQ ID NO: 119891 - protein, 10 aa, Homo Sapiens
DADPNFDRLI

SEQ ID NO: 119892 - protein, 10 aa, Homo Sapiens
DAFLEAAKKI

SEQ ID NO: 119893 - protein, 10 aa, Homo Sapiens
DAFRQPSLFY

SEQ ID NO: 119894 - protein, 10 aa, Homo Sapiens
DALRPPLQNI

SEQ ID NO: 119895 - protein, 10 aa, Homo Sapiens
DALRPSVVSI

SEQ ID NO: 119896 - protein, 10 aa, Homo Sapiens
DAPVALVVHM

SEQ ID NO: 119897 - protein, 10 aa, Homo Sapiens
DAYHNAELFF

SEQ ID NO: 119898 - protein, 10 aa, Homo Sapiens
DAYQVILDGV

SEQ ID NO: 119899 - protein, 10 aa, Homo Sapiens
DAYSKRFISV

SEQ ID NO: 119900 - protein, 10 aa, Homo Sapiens
DAYVLPKLYV

SEQ ID NO: 119901 - protein, 10 aa, Homo Sapiens
DGLAPPQHLI

SEQ ID NO: 119902 - protein, 10 aa, Homo Sapiens
DPLVPPQLTI

SEQ ID NO: 119903 - protein, 10 aa, Homo Sapiens
DPYGFLTTVI

SEQ ID NO: 119904 - protein, 10 aa, Homo Sapiens
FPDPNGTRLV

SEQ ID NO: 119905 - protein, 10 aa, Homo Sapiens
FPFPETPTKV

SEQ ID NO: 119906 - protein, 10 aa, Homo Sapiens
FPFYGKPMRI

SEQ ID NO: 119907 - protein, 10 aa, Homo Sapiens
FPNEFAKLTV

SEQ ID NO: 119908 - protein, 10 aa, Homo Sapiens
FPSEIVGKRI

SEQ ID NO: 119909 - protein, 10 aa, Homo Sapiens
FPYNKNGFKV

SEQ ID NO: 119910 - protein, 10 aa, Homo Sapiens
HPFPGPGLAI

SEQ ID NO: 119911 - protein, 10 aa, Homo Sapiens
IPFLGAGIKI

SEQ ID NO: 119912 - protein, 10 aa, Homo Sapiens
IPLPLGTVTI

SEQ ID NO: 119913 - protein, 10 aa, Homo Sapiens
IPYAQPPLGR

SEQ ID NO: 119914 - protein, 10 aa, Homo Sapiens
IPYFSANAVI

SEQ ID NO: 119915 - protein, 10 aa, Homo Sapiens
IPYTGPFNLL

SEQ ID NO: 119916 - protein, 10 aa, Homo Sapiens
ISNNVTLLSL

SEQ ID NO: 119917 - protein, 10 aa, Homo Sapiens
KADAPVALVV

SEQ ID NO: 119918 - protein, 10 aa, Homo Sapiens
LALIPSGVTV

SEQ ID NO: 119919 - protein, 10 aa, Homo Sapiens
LPFLQPGRLV

SEQ ID NO: 119920 - protein, 10 aa, Homo Sapiens
LPFPAQPPVV

SEQ ID NO: 119921 - protein, 10 aa, Homo Sapiens
LPGYVPKTSL

SEQ ID NO: 119922 - protein, 10 aa, Homo Sapiens
LPLAGPPITV

SEQ ID NO: 119923 - protein, 10 aa, Homo Sapiens
LPLEGWNHVV

SEQ ID NO: 119924 - protein, 10 aa, Homo Sapiens
LPLQPPTEPG

SEQ ID NO: 119925 - protein, 10 aa, Homo Sapiens
LPLSAHGIVV

SEQ ID NO: 119926 - protein, 10 aa, Homo Sapiens
LPLSGVPLMI

SEQ ID NO: 119927 - protein, 10 aa, Homo Sapiens
LPRVTPFYAV

SEQ ID NO: 119928 - protein, 10 aa, Homo Sapiens
LPTETFIPVI

SEQ ID NO: 119929 - protein, 10 aa, Homo Sapiens
LPYAMKPIDY

SEQ ID NO: 119930 - protein, 10 aa, Homo Sapiens
LPYHETRIFV

SEQ ID NO: 119931 - protein, 10 aa, Homo Sapiens
LPYPEAIFEI

SEQ ID NO: 119932 - protein, 10 aa, Homo Sapiens
LPYPNNLNSV

SEQ ID NO: 119933 - protein, 10 aa, Homo Sapiens
LPYTGAETRI

SEQ ID NO: 119934 - protein, 10 aa, Homo Sapiens
LPYVGMVTII

SEQ ID NO: 119935 - protein, 10 aa, Homo Sapiens
LPYYSKFILI

SEQ ID NO: 119936 - protein, 10 aa, Homo Sapiens
LSLHSLGLSL

SEQ ID NO: 119937 - protein, 10 aa, Homo Sapiens
MPRGPTLGHV

SEQ ID NO: 119938 - protein, 10 aa, Homo Sapiens
MPRPSVPPLV

SEQ ID NO: 119939 - protein, 10 aa, Homo Sapiens
SAYGPGLVSI

SEQ ID NO: 119940 - protein, 10 aa, Homo Sapiens
SPYPWPLNHI

SEQ ID NO: 119941 - protein, 10 aa, Homo Sapiens
VAGPVGLLSV

SEQ ID NO: 119942 - protein, 10 aa, Homo Sapiens
VAYQHAFLYI

SEQ ID NO: 119943 - protein, 10 aa, Homo Sapiens
VPAGFLLATI

SEQ ID NO: 119944 - protein, 10 aa, Homo Sapiens
VPILLAAASL

SEQ ID NO: 119945 - protein, 10 aa, Homo Sapiens
VPIPRSPYTV

SEQ ID NO: 119946 - protein, 10 aa, Homo Sapiens
VPLDGRPMNI

SEQ ID NO: 119947 - protein, 10 aa, Homo Sapiens
VPLPAENVTI

SEQ ID NO: 119948 - protein, 10 aa, Homo Sapiens
VPYPLPKIDL

SEQ ID NO: 119949 - protein, 10 aa, Homo Sapiens
YPETLGRLLI

SEQ ID NO: 119950 - protein, 10 aa, Homo Sapiens
YPFDFQGARI

SEQ ID NO: 119951 - protein, 10 aa, Homo Sapiens
YPFIFPLHKV

SEQ ID NO: 119952 - protein, 10 aa, Homo Sapiens
YPFNNGDLTI

SEQ ID NO: 119953 - protein, 10 aa, Homo Sapiens
YPHEVPQISI

SEQ ID NO: 119954 - protein, 10 aa, Homo Sapiens
YPIVDGKLSI

SEQ ID NO: 119955 - protein, 10 aa, Homo Sapiens
YPLERGFIYV

SEQ ID NO: 119956 - protein, 10 aa, Homo Sapiens
YPYEYEGGHI

SEQ ID NO: 119957 - protein, 10 aa, Homo Sapiens
YPYEYLGGHI

SEQ ID NO: 119958 - protein, 10 aa, Homo Sapiens
YPYGPVENKI

SEQ ID NO: 119959 - protein, 10 aa, Homo Sapiens
YPYPYPHTLY

SEQ ID NO: 119960 - protein, 11 aa, Homo Sapiens
DAFRQPSLFYH

SEQ ID NO: 119961 - protein, 11 aa, Homo Sapiens
DAPKAGQLEAW

SEQ ID NO: 119962 - protein, 11 aa, Homo Sapiens
DAWQDGAVLQI

SEQ ID NO: 119963 - protein, 11 aa, Homo Sapiens
DAYALNHTLSV

SEQ ID NO: 119964 - protein, 11 aa, Homo Sapiens
DAYLQSLAKKI

SEQ ID NO: 119965 - protein, 11 aa, Homo Sapiens
DAYVLPKLYVK

SEQ ID NO: 119966 - protein, 11 aa, Homo Sapiens
FPFNPLDFESF

SEQ ID NO: 119967 - protein, 11 aa, Homo Sapiens
FPYEASTPTGI

SEQ ID NO: 119968 - protein, 11 aa, Homo Sapiens
GKADAPVALVV

SEQ ID NO: 119969 - protein, 11 aa, Homo Sapiens
IPIQINVGTTV

SEQ ID NO: 119970 - protein, 11 aa, Homo Sapiens
IPYAQPPLGRL

SEQ ID NO: 119971 - protein, 11 aa, Homo Sapiens
IPYHSEVPVSL

SEQ ID NO: 119972 - protein, 11 aa, Homo Sapiens
IPYPLSENNQV

SEQ ID NO: 119973 - protein, 11 aa, Homo Sapiens
LPFPFPSKLYI

SEQ ID NO: 119974 - protein, 11 aa, Homo Sapiens
LPFVSRGPLTV

SEQ ID NO: 119975 - protein, 11 aa, Homo Sapiens
LPIPESQVITI

SEQ ID NO: 119976 - protein, 11 aa, Homo Sapiens
LPNSTERAITI

SEQ ID NO: 119977 - protein, 11 aa, Homo Sapiens
LPRPIQDILTI

SEQ ID NO: 119978 - protein, 11 aa, Homo Sapiens
LPYCPGKTLVV

SEQ ID NO: 119979 - protein, 11 aa, Homo Sapiens
LPYLIDGAHKI

SEQ ID NO: 119980 - protein, 11 aa, Homo Sapiens
LPYSPTKTLSV

SEQ ID NO: 119981 - protein, 11 aa, Homo Sapiens
MPYEDGIYSVI

SEQ ID NO: 119982 - protein, 11 aa, Homo Sapiens
MPYPAPNVPVV

SEQ ID NO: 119983 - protein, 11 aa, Homo Sapiens
QPYMPTVSATI

SEQ ID NO: 119984 - protein, 11 aa, Homo Sapiens
VAADAVASLLI

SEQ ID NO: 119985 - protein, 11 aa, Homo Sapiens
VPFEPSKPPVI

SEQ ID NO: 119986 - protein, 11 aa, Homo Sapiens
VPYPLPKIDLI

SEQ ID NO: 119987 - protein, 11 aa, Homo Sapiens
VPYSTSASLYI

SEQ ID NO: 119988 - protein, 11 aa, Homo Sapiens
YPFINSRIITV

SEQ ID NO: 119989 - protein, 11 aa, Homo Sapiens
YPIEIDPHRTV

SEQ ID NO: 119990 - protein, 11 aa, Homo Sapiens
YPLQGPGLLSV

SEQ ID NO: 119991 - protein, 11 aa, Homo Sapiens
YPYPYPHTLYL

SEQ ID NO: 119992 - protein, 8 aa, Homo Sapiens
AASLLPVL

SEQ ID NO: 119993 - protein, 8 aa, Homo Sapiens
AEYIQKNV

SEQ ID NO: 119994 - protein, 8 aa, Homo Sapiens
AFLKVSSV

SEQ ID NO: 119995 - protein, 8 aa, Homo Sapiens
AFMPVLKV

SEQ ID NO: 119996 - protein, 8 aa, Homo Sapiens
AFPKAVSV

SEQ ID NO: 119997 - protein, 8 aa, Homo Sapiens
AFPQAAKI

SEQ ID NO: 119998 - protein, 8 aa, Homo Sapiens
AMFPVTHI

SEQ ID NO: 119999 - protein, 8 aa, Homo Sapiens
AMIALNTV

SEQ ID NO: 120000 - protein, 8 aa, Homo Sapiens
AMIKGLQV

SEQ ID NO: 120001 - protein, 8 aa, Homo Sapiens
AMKEDPTV

SEQ ID NO: 120002 - protein, 8 aa, Homo Sapiens
AMLGVTTV

SEQ ID NO: 120003 - protein, 8 aa, Homo Sapiens
AMPLISLV

SEQ ID NO: 120004 - protein, 8 aa, Homo Sapiens
AMRQVNTI

SEQ ID NO: 120005 - protein, 8 aa, Homo Sapiens
AMVRVISV

SEQ ID NO: 120006 - protein, 8 aa, Homo Sapiens
AMYPPSMI

SEQ ID NO: 120007 - protein, 8 aa, Homo Sapiens
AQAALQAV

SEQ ID NO: 120008 - protein, 8 aa, Homo Sapiens
AQAEALRI

SEQ ID NO: 120009 - protein, 8 aa, Homo Sapiens
AQAELMKV

SEQ ID NO: 120010 - protein, 8 aa, Homo Sapiens
AQARAAEI

SEQ ID NO: 120011 - protein, 8 aa, Homo Sapiens
AQAVFPAI

SEQ ID NO: 120012 - protein, 8 aa, Homo Sapiens
AQAVIREV

SEQ ID NO: 120013 - protein, 8 aa, Homo Sapiens
AQCYIKYI

SEQ ID NO: 120014 - protein, 8 aa, Homo Sapiens
AQELMPVV

SEQ ID NO: 120015 - protein, 8 aa, Homo Sapiens
AQFAARAI

SEQ ID NO: 120016 - protein, 8 aa, Homo Sapiens
AQFAQPEI

SEQ ID NO: 120017 - protein, 8 aa, Homo Sapiens
AQFETKKL

SEQ ID NO: 120018 - protein, 8 aa, Homo Sapiens
AQFKFTVL

SEQ ID NO: 120019 - protein, 8 aa, Homo Sapiens
AQFKLLLV

SEQ ID NO: 120020 - protein, 8 aa, Homo Sapiens
AQFKQLLI

SEQ ID NO: 120021 - protein, 8 aa, Homo Sapiens
AQFSVQKV

SEQ ID NO: 120022 - protein, 8 aa, Homo Sapiens
AQHALTSV

SEQ ID NO: 120023 - protein, 8 aa, Homo Sapiens
AQHLQAAV

SEQ ID NO: 120024 - protein, 8 aa, Homo Sapiens
AQILLKAL

SEQ ID NO: 120025 - protein, 8 aa, Homo Sapiens
AQIQQKSI

SEQ ID NO: 120026 - protein, 8 aa, Homo Sapiens
AQIQVQHV

SEQ ID NO: 120027 - protein, 8 aa, Homo Sapiens
AQIRTIAI

SEQ ID NO: 120028 - protein, 8 aa, Homo Sapiens
AQITMKVI

SEQ ID NO: 120029 - protein, 8 aa, Homo Sapiens
AQITTLLV

SEQ ID NO: 120030 - protein, 8 aa, Homo Sapiens
AQIVTRSV

SEQ ID NO: 120031 - protein, 8 aa, Homo Sapiens
AQIYVDKV

SEQ ID NO: 120032 - protein, 8 aa, Homo Sapiens
AQKALAKV

SEQ ID NO: 120033 - protein, 8 aa, Homo Sapiens
AQKQLRSI

SEQ ID NO: 120034 - protein, 8 aa, Homo Sapiens
AQLAVTKI

SEQ ID NO: 120035 - protein, 8 aa, Homo Sapiens
AQLGALFI

SEQ ID NO: 120036 - protein, 8 aa, Homo Sapiens
AQLIVQAI

SEQ ID NO: 120037 - protein, 8 aa, Homo Sapiens
AQLLQLKV

SEQ ID NO: 120038 - protein, 8 aa, Homo Sapiens
AQLRVSEI

SEQ ID NO: 120039 - protein, 8 aa, Homo Sapiens
AQLSVKQV

SEQ ID NO: 120040 - protein, 8 aa, Homo Sapiens
AQLTQRSV

SEQ ID NO: 120041 - protein, 8 aa, Homo Sapiens
AQLVQLRV

SEQ ID NO: 120042 - protein, 8 aa, Homo Sapiens
AQMLIRIV

SEQ ID NO: 120043 - protein, 8 aa, Homo Sapiens
AQNISKTI

SEQ ID NO: 120044 - protein, 8 aa, Homo Sapiens
AQNPSLFV

SEQ ID NO: 120045 - protein, 8 aa, Homo Sapiens
AQQIQKVV

SEQ ID NO: 120046 - protein, 8 aa, Homo Sapiens
AQQVCHAI

SEQ ID NO: 120047 - protein, 8 aa, Homo Sapiens
AQRLATVV

SEQ ID NO: 120048 - protein, 8 aa, Homo Sapiens
AQRLMQLI

SEQ ID NO: 120049 - protein, 8 aa, Homo Sapiens
AQRLVRVL

SEQ ID NO: 120050 - protein, 8 aa, Homo Sapiens
AQSKILFV

SEQ ID NO: 120051 - protein, 8 aa, Homo Sapiens
AQSTQPVV

SEQ ID NO: 120052 - protein, 8 aa, Homo Sapiens
AQSYAKRI

SEQ ID NO: 120053 - protein, 8 aa, Homo Sapiens
AQTALTVV

SEQ ID NO: 120054 - protein, 8 aa, Homo Sapiens
AQTFIQRV

SEQ ID NO: 120055 - protein, 8 aa, Homo Sapiens
AQTFLSEI

SEQ ID NO: 120056 - protein, 8 aa, Homo Sapiens
AQTPIAVI

SEQ ID NO: 120057 - protein, 8 aa, Homo Sapiens
AQTTLRNV

SEQ ID NO: 120058 - protein, 8 aa, Homo Sapiens
AQTVVLCV

SEQ ID NO: 120059 - protein, 8 aa, Homo Sapiens
AQVATKNV

SEQ ID NO: 120060 - protein, 8 aa, Homo Sapiens
AQVHIPSI

SEQ ID NO: 120061 - protein, 8 aa, Homo Sapiens
AQVKQLEM

SEQ ID NO: 120062 - protein, 8 aa, Homo Sapiens
AQVKVAEV

SEQ ID NO: 120063 - protein, 8 aa, Homo Sapiens
AQVKVLFV

SEQ ID NO: 120064 - protein, 8 aa, Homo Sapiens
AQVLIREV

SEQ ID NO: 120065 - protein, 8 aa, Homo Sapiens
AQVLLHNV

SEQ ID NO: 120066 - protein, 8 aa, Homo Sapiens
AQVLLQKV

SEQ ID NO: 120067 - protein, 8 aa, Homo Sapiens
AQYEANKV

SEQ ID NO: 120068 - protein, 8 aa, Homo Sapiens
AQYFLDKI

SEQ ID NO: 120069 - protein, 8 aa, Homo Sapiens
AQYKFFIV

SEQ ID NO: 120070 - protein, 8 aa, Homo Sapiens
AQYKFIYV

SEQ ID NO: 120071 - protein, 8 aa, Homo Sapiens
AQYNFILV

SEQ ID NO: 120072 - protein, 8 aa, Homo Sapiens
AQYPITAV

SEQ ID NO: 120073 - protein, 8 aa, Homo Sapiens
AQYQFTGI

SEQ ID NO: 120074 - protein, 8 aa, Homo Sapiens
AQYSGAQV

SEQ ID NO: 120075 - protein, 8 aa, Homo Sapiens
AQYSPQQL

SEQ ID NO: 120076 - protein, 8 aa, Homo Sapiens
AQYVLLAL

SEQ ID NO: 120077 - protein, 8 aa, Homo Sapiens
ASIALARI

SEQ ID NO: 120078 - protein, 8 aa, Homo Sapiens
ASIDLPGI

SEQ ID NO: 120079 - protein, 8 aa, Homo Sapiens
ASLPLPLL

SEQ ID NO: 120080 - protein, 8 aa, Homo Sapiens
ASPAVLEL

SEQ ID NO: 120081 - protein, 8 aa, Homo Sapiens
ASPSVLVV

SEQ ID NO: 120082 - protein, 8 aa, Homo Sapiens
ASPTALLI

SEQ ID NO: 120083 - protein, 8 aa, Homo Sapiens
ASVKISKV

SEQ ID NO: 120084 - protein, 8 aa, Homo Sapiens
ASYPIPLV

SEQ ID NO: 120085 - protein, 8 aa, Homo Sapiens
CEYIVKKI

SEQ ID NO: 120086 - protein, 8 aa, Homo Sapiens
CMRYIATI

SEQ ID NO: 120087 - protein, 8 aa, Homo Sapiens
CQIPLFGI

SEQ ID NO: 120088 - protein, 8 aa, Homo Sapiens
CQLRVLEV

SEQ ID NO: 120089 - protein, 8 aa, Homo Sapiens
CQTIIPKI

SEQ ID NO: 120090 - protein, 8 aa, Homo Sapiens
CQYRVSML

SEQ ID NO: 120091 - protein, 8 aa, Homo Sapiens
CSFRVLVV

SEQ ID NO: 120092 - protein, 8 aa, Homo Sapiens
CSLLVRLV

SEQ ID NO: 120093 - protein, 8 aa, Homo Sapiens
CSSVHPSV

SEQ ID NO: 120094 - protein, 8 aa, Homo Sapiens
CYIAILNI

SEQ ID NO: 120095 - protein, 8 aa, Homo Sapiens
DAPVALVV

SEQ ID NO: 120096 - protein, 8 aa, Homo Sapiens
DFIRILVI

SEQ ID NO: 120097 - protein, 8 aa, Homo Sapiens
DMYLAPHV

SEQ ID NO: 120098 - protein, 8 aa, Homo Sapiens
DQYKFYSV

SEQ ID NO: 120099 - protein, 8 aa, Homo Sapiens
EAWPALQI

SEQ ID NO: 120100 - protein, 8 aa, Homo Sapiens
EEFITPIV

SEQ ID NO: 120101 - protein, 8 aa, Homo Sapiens
EEIAALVI

SEQ ID NO: 120102 - protein, 8 aa, Homo Sapiens
EEIPALKI

SEQ ID NO: 120103 - protein, 8 aa, Homo Sapiens
EEYEQRVV

SEQ ID NO: 120104 - protein, 8 aa, Homo Sapiens
EFPIAPEI

SEQ ID NO: 120105 - protein, 8 aa, Homo Sapiens
EFPTVLDI

SEQ ID NO: 120106 - protein, 8 aa, Homo Sapiens
EFPTVPLV

SEQ ID NO: 120107 - protein, 8 aa, Homo Sapiens
EFYRALYI

SEQ ID NO: 120108 - protein, 8 aa, Homo Sapiens
ELKLLQSL

SEQ ID NO: 120109 - protein, 8 aa, Homo Sapiens
EMVALPPV

SEQ ID NO: 120110 - protein, 8 aa, Homo Sapiens
EMYVPRVV

SEQ ID NO: 120111 - protein, 8 aa, Homo Sapiens
EQFILSQV

SEQ ID NO: 120112 - protein, 8 aa, Homo Sapiens
EQFLLPVI

SEQ ID NO: 120113 - protein, 8 aa, Homo Sapiens
EQIEIIRI

SEQ ID NO: 120114 - protein, 8 aa, Homo Sapiens
EQIKIKKI

SEQ ID NO: 120115 - protein, 8 aa, Homo Sapiens
EQIKVLEV

SEQ ID NO: 120116 - protein, 8 aa, Homo Sapiens
EQILIQWI

SEQ ID NO: 120117 - protein, 8 aa, Homo Sapiens
EQKIVVKV

SEQ ID NO: 120118 - protein, 8 aa, Homo Sapiens
EQLALPVL

SEQ ID NO: 120119 - protein, 8 aa, Homo Sapiens
EQLAWLRV

SEQ ID NO: 120120 - protein, 8 aa, Homo Sapiens
EQLELERI

SEQ ID NO: 120121 - protein, 8 aa, Homo Sapiens
EQLIIPQV

SEQ ID NO: 120122 - protein, 8 aa, Homo Sapiens
EQLKVTTI

SEQ ID NO: 120123 - protein, 8 aa, Homo Sapiens
EQLQLREI

SEQ ID NO: 120124 - protein, 8 aa, Homo Sapiens
EQQKVRTI

SEQ ID NO: 120125 - protein, 8 aa, Homo Sapiens
EQRAIAKI

SEQ ID NO: 120126 - protein, 8 aa, Homo Sapiens
EQRIVQQV

SEQ ID NO: 120127 - protein, 8 aa, Homo Sapiens
EQRKIPLV

SEQ ID NO: 120128 - protein, 8 aa, Homo Sapiens
EQRVPLSV

SEQ ID NO: 120129 - protein, 8 aa, Homo Sapiens
EQRVVKRI

SEQ ID NO: 120130 - protein, 8 aa, Homo Sapiens
EQRYTCHV

SEQ ID NO: 120131 - protein, 8 aa, Homo Sapiens
EQVSTPEI

SEQ ID NO: 120132 - protein, 8 aa, Homo Sapiens
EQWQTMEI

SEQ ID NO: 120133 - protein, 8 aa, Homo Sapiens
EQWTPSHV

SEQ ID NO: 120134 - protein, 8 aa, Homo Sapiens
EQYCIRKV

SEQ ID NO: 120135 - protein, 8 aa, Homo Sapiens
EQYEHASI

SEQ ID NO: 120136 - protein, 8 aa, Homo Sapiens
EQYLLKMV

SEQ ID NO: 120137 - protein, 8 aa, Homo Sapiens
EQYRIRQV

SEQ ID NO: 120138 - protein, 8 aa, Homo Sapiens
EQYVTKTV

SEQ ID NO: 120139 - protein, 8 aa, Homo Sapiens
EQYYVRKV

SEQ ID NO: 120140 - protein, 8 aa, Homo Sapiens
ESILLPRI

SEQ ID NO: 120141 - protein, 8 aa, Homo Sapiens
ESLRLILV

SEQ ID NO: 120142 - protein, 8 aa, Homo Sapiens
EYLTAEIL

SEQ ID NO: 120143 - protein, 8 aa, Homo Sapiens
FEILTPKI

SEQ ID NO: 120144 - protein, 8 aa, Homo Sapiens
FELDLPTV

SEQ ID NO: 120145 - protein, 8 aa, Homo Sapiens
FEVILTRI

SEQ ID NO: 120146 - protein, 8 aa, Homo Sapiens
FEYILSHV

SEQ ID NO: 120147 - protein, 8 aa, Homo Sapiens
FEYKPEVI

SEQ ID NO: 120148 - protein, 8 aa, Homo Sapiens
FEYQVRSI

SEQ ID NO: 120149 - protein, 8 aa, Homo Sapiens
FGYKGLKI

SEQ ID NO: 120150 - protein, 8 aa, Homo Sapiens
FMPLVIKV

SEQ ID NO: 120151 - protein, 8 aa, Homo Sapiens
FMYKPKKV

SEQ ID NO: 120152 - protein, 8 aa, Homo Sapiens
FNEKSKEL

SEQ ID NO: 120153 - protein, 8 aa, Homo Sapiens
FQALLTVV

SEQ ID NO: 120154 - protein, 8 aa, Homo Sapiens
FQHPARLV

SEQ ID NO: 120155 - protein, 8 aa, Homo Sapiens
FQHVFLVV

SEQ ID NO: 120156 - protein, 8 aa, Homo Sapiens
FQHVFVIV

SEQ ID NO: 120157 - protein, 8 aa, Homo Sapiens
FQHVKPCI

SEQ ID NO: 120158 - protein, 8 aa, Homo Sapiens
FQITPKTV

SEQ ID NO: 120159 - protein, 8 aa, Homo Sapiens
FQKEVAQV

SEQ ID NO: 120160 - protein, 8 aa, Homo Sapiens
FQQYLPVV

SEQ ID NO: 120161 - protein, 8 aa, Homo Sapiens
FQRLTVTI

SEQ ID NO: 120162 - protein, 8 aa, Homo Sapiens
FQRLVREI

SEQ ID NO: 120163 - protein, 8 aa, Homo Sapiens
FQTEIQTV

SEQ ID NO: 120164 - protein, 8 aa, Homo Sapiens
FQTIHKTI

SEQ ID NO: 120165 - protein, 8 aa, Homo Sapiens
FQTILTEI

SEQ ID NO: 120166 - protein, 8 aa, Homo Sapiens
FQVLQPQV

SEQ ID NO: 120167 - protein, 8 aa, Homo Sapiens
FQYAVRVI

SEQ ID NO: 120168 - protein, 8 aa, Homo Sapiens
FQYFVKVV

SEQ ID NO: 120169 - protein, 8 aa, Homo Sapiens
FSFAHQTI

SEQ ID NO: 120170 - protein, 8 aa, Homo Sapiens
FTGKVLLV

SEQ ID NO: 120171 - protein, 8 aa, Homo Sapiens
GEYAVRAI

SEQ ID NO: 120172 - protein, 8 aa, Homo Sapiens
GMFKIARV

SEQ ID NO: 120173 - protein, 8 aa, Homo Sapiens
GQELARVV

SEQ ID NO: 120174 - protein, 8 aa, Homo Sapiens
GQERFRTI

SEQ ID NO: 120175 - protein, 8 aa, Homo Sapiens
GQFIARAV

SEQ ID NO: 120176 - protein, 8 aa, Homo Sapiens
GQFKIGLI

SEQ ID NO: 120177 - protein, 8 aa, Homo Sapiens
GQFKTYAI

SEQ ID NO: 120178 - protein, 8 aa, Homo Sapiens
GQFLVRII

SEQ ID NO: 120179 - protein, 8 aa, Homo Sapiens
GQFVTEEV

SEQ ID NO: 120180 - protein, 8 aa, Homo Sapiens
GQIAILYV

SEQ ID NO: 120181 - protein, 8 aa, Homo Sapiens
GQICLPII

SEQ ID NO: 120182 - protein, 8 aa, Homo Sapiens
GQIFKPII

SEQ ID NO: 120183 - protein, 8 aa, Homo Sapiens
GQIKLREI

SEQ ID NO: 120184 - protein, 8 aa, Homo Sapiens
GQILMPNI

SEQ ID NO: 120185 - protein, 8 aa, Homo Sapiens
GQIVQSKI

SEQ ID NO: 120186 - protein, 8 aa, Homo Sapiens
GQKITHVV

SEQ ID NO: 120187 - protein, 8 aa, Homo Sapiens
GQLELKSV

SEQ ID NO: 120188 - protein, 8 aa, Homo Sapiens
GQLHVLRV

SEQ ID NO: 120189 - protein, 8 aa, Homo Sapiens
GQLKSLTI

SEQ ID NO: 120190 - protein, 8 aa, Homo Sapiens
GQLKSVTI

SEQ ID NO: 120191 - protein, 8 aa, Homo Sapiens
GQLLIKTV

SEQ ID NO: 120192 - protein, 8 aa, Homo Sapiens
GQQVIRSV

SEQ ID NO: 120193 - protein, 8 aa, Homo Sapiens
GQRCGVEV

SEQ ID NO: 120194 - protein, 8 aa, Homo Sapiens
GQREPLTV

SEQ ID NO: 120195 - protein, 8 aa, Homo Sapiens
GQRVIPRI

SEQ ID NO: 120196 - protein, 8 aa, Homo Sapiens
GQVAVRNV

SEQ ID NO: 120197 - protein, 8 aa, Homo Sapiens
GQVCLPVI

SEQ ID NO: 120198 - protein, 8 aa, Homo Sapiens
GQVIIHNI

SEQ ID NO: 120199 - protein, 8 aa, Homo Sapiens
GQVQVLKV

SEQ ID NO: 120200 - protein, 8 aa, Homo Sapiens
GQWEVKKI

SEQ ID NO: 120201 - protein, 8 aa, Homo Sapiens
GQYAGHVV

SEQ ID NO: 120202 - protein, 8 aa, Homo Sapiens
GQYFEPVV

SEQ ID NO: 120203 - protein, 8 aa, Homo Sapiens
GQYKSKLV

SEQ ID NO: 120204 - protein, 8 aa, Homo Sapiens
GQYPPPTV

SEQ ID NO: 120205 - protein, 8 aa, Homo Sapiens
GQYSFLVV

SEQ ID NO: 120206 - protein, 8 aa, Homo Sapiens
GSFILPHI

SEQ ID NO: 120207 - protein, 8 aa, Homo Sapiens
GSTLTPKI

SEQ ID NO: 120208 - protein, 8 aa, Homo Sapiens
HAFIQPEI

SEQ ID NO: 120209 - protein, 8 aa, Homo Sapiens
HAFKISKI

SEQ ID NO: 120210 - protein, 8 aa, Homo Sapiens
HARVQTCI

SEQ ID NO: 120211 - protein, 8 aa, Homo Sapiens
HATIIPKV

SEQ ID NO: 120212 - protein, 8 aa, Homo Sapiens
HAVYALKV

SEQ ID NO: 120213 - protein, 8 aa, Homo Sapiens
HAYIIAKV

SEQ ID NO: 120214 - protein, 8 aa, Homo Sapiens
HEITVLII

SEQ ID NO: 120215 - protein, 8 aa, Homo Sapiens
HEYLVACI

SEQ ID NO: 120216 - protein, 8 aa, Homo Sapiens
HEYTTKEI

SEQ ID NO: 120217 - protein, 8 aa, Homo Sapiens
HGHPQPQV

SEQ ID NO: 120218 - protein, 8 aa, Homo Sapiens
HGIEFSVI

SEQ ID NO: 120219 - protein, 8 aa, Homo Sapiens
HGIILKYI

SEQ ID NO: 120220 - protein, 8 aa, Homo Sapiens
HGIPMSHV

SEQ ID NO: 120221 - protein, 8 aa, Homo Sapiens
HGKILNGV

SEQ ID NO: 120222 - protein, 8 aa, Homo Sapiens
HGLEMRTI

SEQ ID NO: 120223 - protein, 8 aa, Homo Sapiens
HGLTVPLI

SEQ ID NO: 120224 - protein, 8 aa, Homo Sapiens
HGMIMLRI

SEQ ID NO: 120225 - protein, 8 aa, Homo Sapiens
HGMTLKSV

SEQ ID NO: 120226 - protein, 8 aa, Homo Sapiens
HGPKALKV

SEQ ID NO: 120227 - protein, 8 aa, Homo Sapiens
HGPKAVTI

SEQ ID NO: 120228 - protein, 8 aa, Homo Sapiens
HGSYVLRV

SEQ ID NO: 120229 - protein, 8 aa, Homo Sapiens
HGVELLKI

SEQ ID NO: 120230 - protein, 8 aa, Homo Sapiens
HGVFLPLV

SEQ ID NO: 120231 - protein, 8 aa, Homo Sapiens
HGVVHVTI

SEQ ID NO: 120232 - protein, 8 aa, Homo Sapiens
HGYIFSSL

SEQ ID NO: 120233 - protein, 8 aa, Homo Sapiens
HMFAPRHV

SEQ ID NO: 120234 - protein, 8 aa, Homo Sapiens
HMQIVHKI

SEQ ID NO: 120235 - protein, 8 aa, Homo Sapiens
HMQQQPVV

SEQ ID NO: 120236 - protein, 8 aa, Homo Sapiens
HMYVQPVV

SEQ ID NO: 120237 - protein, 8 aa, Homo Sapiens
HQAKMREI

SEQ ID NO: 120238 - protein, 8 aa, Homo Sapiens
HQALINQV

SEQ ID NO: 120239 - protein, 8 aa, Homo Sapiens
HQALVRKL

SEQ ID NO: 120240 - protein, 8 aa, Homo Sapiens
HQAVLRCL

SEQ ID NO: 120241 - protein, 8 aa, Homo Sapiens
HQAVMRCL

SEQ ID NO: 120242 - protein, 8 aa, Homo Sapiens
HQAWLQSI

SEQ ID NO: 120243 - protein, 8 aa, Homo Sapiens
HQCSLKSV

SEQ ID NO: 120244 - protein, 8 aa, Homo Sapiens
HQDILSTI

SEQ ID NO: 120245 - protein, 8 aa, Homo Sapiens
HQEVLREI

SEQ ID NO: 120246 - protein, 8 aa, Homo Sapiens
HQEYLNSI

SEQ ID NO: 120247 - protein, 8 aa, Homo Sapiens
HQFETLDV

SEQ ID NO: 120248 - protein, 8 aa, Homo Sapiens
HQFLMDTI

SEQ ID NO: 120249 - protein, 8 aa, Homo Sapiens
HQFLQYHV

SEQ ID NO: 120250 - protein, 8 aa, Homo Sapiens
HQFLVSET

SEQ ID NO: 120251 - protein, 8 aa, Homo Sapiens
HQFQMQLL

SEQ ID NO: 120252 - protein, 8 aa, Homo Sapiens
HQFRMLVV

SEQ ID NO: 120253 - protein, 8 aa, Homo Sapiens
HQFSPHIL

SEQ ID NO: 120254 - protein, 8 aa, Homo Sapiens
HQFSTLRI

SEQ ID NO: 120255 - protein, 8 aa, Homo Sapiens
HQFYPTVV

SEQ ID NO: 120256 - protein, 8 aa, Homo Sapiens
HQGILSRV

SEQ ID NO: 120257 - protein, 8 aa, Homo Sapiens
HQHEMSVL

SEQ ID NO: 120258 - protein, 8 aa, Homo Sapiens
HQHMVKYI

SEQ ID NO: 120259 - protein, 8 aa, Homo Sapiens
HQHNPVQV

SEQ ID NO: 120260 - protein, 8 aa, Homo Sapiens
HQHQVELI

SEQ ID NO: 120261 - protein, 8 aa, Homo Sapiens
HQHTISTL

SEQ ID NO: 120262 - protein, 8 aa, Homo Sapiens
HQIAQMGV

SEQ ID NO: 120263 - protein, 8 aa, Homo Sapiens
HQIIHAGV

SEQ ID NO: 120264 - protein, 8 aa, Homo Sapiens
HQIIQRHL

SEQ ID NO: 120265 - protein, 8 aa, Homo Sapiens
HQIIVQNV

SEQ ID NO: 120266 - protein, 8 aa, Homo Sapiens
HQILTPFL

SEQ ID NO: 120267 - protein, 8 aa, Homo Sapiens
HQIMPKEI

SEQ ID NO: 120268 - protein, 8 aa, Homo Sapiens
HQINLIKV

SEQ ID NO: 120269 - protein, 8 aa, Homo Sapiens
HQITVLHV

SEQ ID NO: 120270 - protein, 8 aa, Homo Sapiens
HQKEITVI

SEQ ID NO: 120271 - protein, 8 aa, Homo Sapiens
HQKIQYVV

SEQ ID NO: 120272 - protein, 8 aa, Homo Sapiens
HQKQISSL

SEQ ID NO: 120273 - protein, 8 aa, Homo Sapiens
HQLAALYI

SEQ ID NO: 120274 - protein, 8 aa, Homo Sapiens
HQLAMTVV

SEQ ID NO: 120275 - protein, 8 aa, Homo Sapiens
HQLILAFL

SEQ ID NO: 120276 - protein, 8 aa, Homo Sapiens
HQLILSKL

SEQ ID NO: 120277 - protein, 8 aa, Homo Sapiens
HQLIVVDI

SEQ ID NO: 120278 - protein, 8 aa, Homo Sapiens
HQLKQLLL

SEQ ID NO: 120279 - protein, 8 aa, Homo Sapiens
HQLKTKVV

SEQ ID NO: 120280 - protein, 8 aa, Homo Sapiens
HQLLALAI

SEQ ID NO: 120281 - protein, 8 aa, Homo Sapiens
HQLPIKTV

SEQ ID NO: 120282 - protein, 8 aa, Homo Sapiens
HQLQPRRV

SEQ ID NO: 120283 - protein, 8 aa, Homo Sapiens
HQLSLRTV

SEQ ID NO: 120284 - protein, 8 aa, Homo Sapiens
HQLVPLQV

SEQ ID NO: 120285 - protein, 8 aa, Homo Sapiens
HQLYVLQV

SEQ ID NO: 120286 - protein, 8 aa, Homo Sapiens
HQMEMERI

SEQ ID NO: 120287 - protein, 8 aa, Homo Sapiens
HQMVVRAL

SEQ ID NO: 120288 - protein, 8 aa, Homo Sapiens
HQNLVTGV

SEQ ID NO: 120289 - protein, 8 aa, Homo Sapiens
HQNMARAI

SEQ ID NO: 120290 - protein, 8 aa, Homo Sapiens
HQQEISKI

SEQ ID NO: 120291 - protein, 8 aa, Homo Sapiens
HQQHTTVI

SEQ ID NO: 120292 - protein, 8 aa, Homo Sapiens
HQQKLTEI

SEQ ID NO: 120293 - protein, 8 aa, Homo Sapiens
HQQLIPLV

SEQ ID NO: 120294 - protein, 8 aa, Homo Sapiens
HQQLPPLV

SEQ ID NO: 120295 - protein, 8 aa, Homo Sapiens
HQQSIPAV

SEQ ID NO: 120296 - protein, 8 aa, Homo Sapiens
HQQTLQRV

SEQ ID NO: 120297 - protein, 8 aa, Homo Sapiens
HQQVVSRI

SEQ ID NO: 120298 - protein, 8 aa, Homo Sapiens
HQREIQVM

SEQ ID NO: 120299 - protein, 8 aa, Homo Sapiens
HQREITSL

SEQ ID NO: 120300 - protein, 8 aa, Homo Sapiens
HQRIHPGI

SEQ ID NO: 120301 - protein, 8 aa, Homo Sapiens
HQRIPQSV

SEQ ID NO: 120302 - protein, 8 aa, Homo Sapiens
HQRITEEL

SEQ ID NO: 120303 - protein, 8 aa, Homo Sapiens
HQRYDVLI

SEQ ID NO: 120304 - protein, 8 aa, Homo Sapiens
HQSVEPVV

SEQ ID NO: 120305 - protein, 8 aa, Homo Sapiens
HQSVTKVV

SEQ ID NO: 120306 - protein, 8 aa, Homo Sapiens
HQTELSNL

SEQ ID NO: 120307 - protein, 8 aa, Homo Sapiens
HQTGLKVV

SEQ ID NO: 120308 - protein, 8 aa, Homo Sapiens
HQTISALI

SEQ ID NO: 120309 - protein, 8 aa, Homo Sapiens
HQTLLVVV

SEQ ID NO: 120310 - protein, 8 aa, Homo Sapiens
HQVLMKTV

SEQ ID NO: 120311 - protein, 8 aa, Homo Sapiens
HQVQVNHI

SEQ ID NO: 120312 - protein, 8 aa, Homo Sapiens
HQVTTRNL

SEQ ID NO: 120313 - protein, 8 aa, Homo Sapiens
HQVVLPVL

SEQ ID NO: 120314 - protein, 8 aa, Homo Sapiens
HQVVTHLL

SEQ ID NO: 120315 - protein, 8 aa, Homo Sapiens
HQVVVANI

SEQ ID NO: 120316 - protein, 8 aa, Homo Sapiens
HQWFGNIV

SEQ ID NO: 120317 - protein, 8 aa, Homo Sapiens
HQYIAKCL

SEQ ID NO: 120318 - protein, 8 aa, Homo Sapiens
HQYIFSHI

SEQ ID NO: 120319 - protein, 8 aa, Homo Sapiens
HQYITKMT

SEQ ID NO: 120320 - protein, 8 aa, Homo Sapiens
HQYPFVVL

SEQ ID NO: 120321 - protein, 8 aa, Homo Sapiens
HQYRLLHT

SEQ ID NO: 120322 - protein, 8 aa, Homo Sapiens
HQYTGSAL

SEQ ID NO: 120323 - protein, 8 aa, Homo Sapiens
HQYTPEMI

SEQ ID NO: 120324 - protein, 8 aa, Homo Sapiens
HQYVVPKI

SEQ ID NO: 120325 - protein, 8 aa, Homo Sapiens
HSDYIRCI

SEQ ID NO: 120326 - protein, 8 aa, Homo Sapiens
HSFISNAV

SEQ ID NO: 120327 - protein, 8 aa, Homo Sapiens
HSFTQPRL

SEQ ID NO: 120328 - protein, 8 aa, Homo Sapiens
HSHLALSV

SEQ ID NO: 120329 - protein, 8 aa, Homo Sapiens
HSIATRVI

SEQ ID NO: 120330 - protein, 8 aa, Homo Sapiens
HSILIANI

SEQ ID NO: 120331 - protein, 8 aa, Homo Sapiens
HSIQIMKV

SEQ ID NO: 120332 - protein, 8 aa, Homo Sapiens
HSKIVAGV

SEQ ID NO: 120333 - protein, 8 aa, Homo Sapiens
HSKLIAKV

SEQ ID NO: 120334 - protein, 8 aa, Homo Sapiens
HSLKLWRI

SEQ ID NO: 120335 - protein, 8 aa, Homo Sapiens
HSLQVAGI

SEQ ID NO: 120336 - protein, 8 aa, Homo Sapiens
HSLYTPVI

SEQ ID NO: 120337 - protein, 8 aa, Homo Sapiens
HSMITRKV

SEQ ID NO: 120338 - protein, 8 aa, Homo Sapiens
HSMKMEEI

SEQ ID NO: 120339 - protein, 8 aa, Homo Sapiens
HSPKVNLV

SEQ ID NO: 120340 - protein, 8 aa, Homo Sapiens
HSPSVAKI

SEQ ID NO: 120341 - protein, 8 aa, Homo Sapiens
HSPYVAQI

SEQ ID NO: 120342 - protein, 8 aa, Homo Sapiens
HSQELPAI

SEQ ID NO: 120343 - protein, 8 aa, Homo Sapiens
HSQLMQLI

SEQ ID NO: 120344 - protein, 8 aa, Homo Sapiens
HSRALVGI

SEQ ID NO: 120345 - protein, 8 aa, Homo Sapiens
HSRPVPKL

SEQ ID NO: 120346 - protein, 8 aa, Homo Sapiens
HSTIMPRL

SEQ ID NO: 120347 - protein, 8 aa, Homo Sapiens
HSVCVNQI

SEQ ID NO: 120348 - protein, 8 aa, Homo Sapiens
HSVFQLQI

SEQ ID NO: 120349 - protein, 8 aa, Homo Sapiens
HSVTVPLV

SEQ ID NO: 120350 - protein, 8 aa, Homo Sapiens
HSWAPLKV

SEQ ID NO: 120351 - protein, 8 aa, Homo Sapiens
HSWLILQV

SEQ ID NO: 120352 - protein, 8 aa, Homo Sapiens
HSYAVSSV

SEQ ID NO: 120353 - protein, 8 aa, Homo Sapiens
HSYILVKI

SEQ ID NO: 120354 - protein, 8 aa, Homo Sapiens
HSYLSRLI

SEQ ID NO: 120355 - protein, 8 aa, Homo Sapiens
HSYSPITV

SEQ ID NO: 120356 - protein, 8 aa, Homo Sapiens
HSYSPRAI

SEQ ID NO: 120357 - protein, 8 aa, Homo Sapiens
IEFICKTI

SEQ ID NO: 120358 - protein, 8 aa, Homo Sapiens
IEKIMAQI

SEQ ID NO: 120359 - protein, 8 aa, Homo Sapiens
IERATRLV

SEQ ID NO: 120360 - protein, 8 aa, Homo Sapiens
IEVLQPLI

SEQ ID NO: 120361 - protein, 8 aa, Homo Sapiens
IFIRILQV

SEQ ID NO: 120362 - protein, 8 aa, Homo Sapiens
IFLKTRVV

SEQ ID NO: 120363 - protein, 8 aa, Homo Sapiens
IFYKTKEI

SEQ ID NO: 120364 - protein, 8 aa, Homo Sapiens
IGLQHKSV

SEQ ID NO: 120365 - protein, 8 aa, Homo Sapiens
IGYLIPLM

SEQ ID NO: 120366 - protein, 8 aa, Homo Sapiens
IKQLLSEL

SEQ ID NO: 120367 - protein, 8 aa, Homo Sapiens
IMDRILQI

SEQ ID NO: 120368 - protein, 8 aa, Homo Sapiens
IMMNTPVI

SEQ ID NO: 120369 - protein, 8 aa, Homo Sapiens
IMRQTLEI

SEQ ID NO: 120370 - protein, 8 aa, Homo Sapiens
IMRSPQMV

SEQ ID NO: 120371 - protein, 8 aa, Homo Sapiens
IMYKGRTV

SEQ ID NO: 120372 - protein, 8 aa, Homo Sapiens
IQFEVRRV

SEQ ID NO: 120373 - protein, 8 aa, Homo Sapiens
IQFKLEKI

SEQ ID NO: 120374 - protein, 8 aa, Homo Sapiens
IQFPIQKI

SEQ ID NO: 120375 - protein, 8 aa, Homo Sapiens
IQHIQNAI

SEQ ID NO: 120376 - protein, 8 aa, Homo Sapiens
IQHLIPKI

SEQ ID NO: 120377 - protein, 8 aa, Homo Sapiens
IQHQTIHI

SEQ ID NO: 120378 - protein, 8 aa, Homo Sapiens
IQHQVLVV

SEQ ID NO: 120379 - protein, 8 aa, Homo Sapiens
IQKLSKAV

SEQ ID NO: 120380 - protein, 8 aa, Homo Sapiens
IQKLTKAV

SEQ ID NO: 120381 - protein, 8 aa, Homo Sapiens
IQKTIQMV

SEQ ID NO: 120382 - protein, 8 aa, Homo Sapiens
IQKVHPAI

SEQ ID NO: 120383 - protein, 8 aa, Homo Sapiens
IQLELDTV

SEQ ID NO: 120384 - protein, 8 aa, Homo Sapiens
IQLKTSVI

SEQ ID NO: 120385 - protein, 8 aa, Homo Sapiens
IQMSVQRI

SEQ ID NO: 120386 - protein, 8 aa, Homo Sapiens
IQNRIIEV

SEQ ID NO: 120387 - protein, 8 aa, Homo Sapiens
IQQPQPLI

SEQ ID NO: 120388 - protein, 8 aa, Homo Sapiens
IQREVSLM

SEQ ID NO: 120389 - protein, 8 aa, Homo Sapiens
IQRVAAGV

SEQ ID NO: 120390 - protein, 8 aa, Homo Sapiens
IQRVGQAV

SEQ ID NO: 120391 - protein, 8 aa, Homo Sapiens
IQSIIAII

SEQ ID NO: 120392 - protein, 8 aa, Homo Sapiens
IQSIMAIV

SEQ ID NO: 120393 - protein, 8 aa, Homo Sapiens
IQTELHHV

SEQ ID NO: 120394 - protein, 8 aa, Homo Sapiens
IQTKVNYV

SEQ ID NO: 120395 - protein, 8 aa, Homo Sapiens
IQTMLRQI

SEQ ID NO: 120396 - protein, 8 aa, Homo Sapiens
IQVAVHKI

SEQ ID NO: 120397 - protein, 8 aa, Homo Sapiens
IQVVVATV

SEQ ID NO: 120398 - protein, 8 aa, Homo Sapiens
IQWIVVRI

SEQ ID NO: 120399 - protein, 8 aa, Homo Sapiens
IQYALRTL

SEQ ID NO: 120400 - protein, 8 aa, Homo Sapiens
IRMISVNI

SEQ ID NO: 120401 - protein, 8 aa, Homo Sapiens
ISKIQPSV

SEQ ID NO: 120402 - protein, 8 aa, Homo Sapiens
ISPASPKI

SEQ ID NO: 120403 - protein, 8 aa, Homo Sapiens
ITLNRHVI

SEQ ID NO: 120404 - protein, 8 aa, Homo Sapiens
KAWKALEI

SEQ ID NO: 120405 - protein, 8 aa, Homo Sapiens
KEIKGRTV

SEQ ID NO: 120406 - protein, 8 aa, Homo Sapiens
KFLKILQV

SEQ ID NO: 120407 - protein, 8 aa, Homo Sapiens
KMFQVHQV

SEQ ID NO: 120408 - protein, 8 aa, Homo Sapiens
KMIGIKKV

SEQ ID NO: 120409 - protein, 8 aa, Homo Sapiens
KMLKVKIV

SEQ ID NO: 120410 - protein, 8 aa, Homo Sapiens
KMMKIAEI

SEQ ID NO: 120411 - protein, 8 aa, Homo Sapiens
KMPEVITI

SEQ ID NO: 120412 - protein, 8 aa, Homo Sapiens
KMPSVIKI

SEQ ID NO: 120413 - protein, 8 aa, Homo Sapiens
KMSVQPTV

SEQ ID NO: 120414 - protein, 8 aa, Homo Sapiens
KQFESKII

SEQ ID NO: 120415 - protein, 8 aa, Homo Sapiens
KQIEINTI

SEQ ID NO: 120416 - protein, 8 aa, Homo Sapiens
KQIIKPFI

SEQ ID NO: 120417 - protein, 8 aa, Homo Sapiens
KQIVLTGI

SEQ ID NO: 120418 - protein, 8 aa, Homo Sapiens
KQLIAKKI

SEQ ID NO: 120419 - protein, 8 aa, Homo Sapiens
KQLQLTTV

SEQ ID NO: 120420 - protein, 8 aa, Homo Sapiens
KQLSILKV

SEQ ID NO: 120421 - protein, 8 aa, Homo Sapiens
KQLYLRSV

SEQ ID NO: 120422 - protein, 8 aa, Homo Sapiens
KQMLVSEV

SEQ ID NO: 120423 - protein, 8 aa, Homo Sapiens
KQMRILMV

SEQ ID NO: 120424 - protein, 8 aa, Homo Sapiens
KQVQQPSV

SEQ ID NO: 120425 - protein, 8 aa, Homo Sapiens
KQYEILCV

SEQ ID NO: 120426 - protein, 8 aa, Homo Sapiens
KQYVLLSI

SEQ ID NO: 120427 - protein, 8 aa, Homo Sapiens
KQYYALEV

SEQ ID NO: 120428 - protein, 8 aa, Homo Sapiens
KSLKILRI

SEQ ID NO: 120429 - protein, 8 aa, Homo Sapiens
KYYLAPKI

SEQ ID NO: 120430 - protein, 8 aa, Homo Sapiens
LAPLAKVI

SEQ ID NO: 120431 - protein, 8 aa, Homo Sapiens
LEKLLPPV

SEQ ID NO: 120432 - protein, 8 aa, Homo Sapiens
LERTFIAI

SEQ ID NO: 120433 - protein, 8 aa, Homo Sapiens
LETTALFV

SEQ ID NO: 120434 - protein, 8 aa, Homo Sapiens
LEYEARQI

SEQ ID NO: 120435 - protein, 8 aa, Homo Sapiens
LEYIARAI

SEQ ID NO: 120436 - protein, 8 aa, Homo Sapiens
LEYRVTQV

SEQ ID NO: 120437 - protein, 8 aa, Homo Sapiens
LFLQTPKI

SEQ ID NO: 120438 - protein, 8 aa, Homo Sapiens
LFLRTPKI

SEQ ID NO: 120439 - protein, 8 aa, Homo Sapiens
LGLAMMVA

SEQ ID NO: 120440 - protein, 8 aa, Homo Sapiens
LGYEMVQV

SEQ ID NO: 120441 - protein, 8 aa, Homo Sapiens
LLQAIAQL

SEQ ID NO: 120442 - protein, 8 aa, Homo Sapiens
LLRQLLKL

SEQ ID NO: 120443 - protein, 8 aa, Homo Sapiens
LMPPVKQV

SEQ ID NO: 120444 - protein, 8 aa, Homo Sapiens
LMRKVPRV

SEQ ID NO: 120445 - protein, 8 aa, Homo Sapiens
LNRKIVQV

SEQ ID NO: 120446 - protein, 8 aa, Homo Sapiens
LPFRVLLV

SEQ ID NO: 120447 - protein, 8 aa, Homo Sapiens
LPYIFPNI

SEQ ID NO: 120448 - protein, 8 aa, Homo Sapiens
LPYQVVEV

SEQ ID NO: 120449 - protein, 8 aa, Homo Sapiens
LQAALARV

SEQ ID NO: 120450 - protein, 8 aa, Homo Sapiens
LQFIFTNI

SEQ ID NO: 120451 - protein, 8 aa, Homo Sapiens
LQFKVVRV

SEQ ID NO: 120452 - protein, 8 aa, Homo Sapiens
LQFLAPKI

SEQ ID NO: 120453 - protein, 8 aa, Homo Sapiens
LQFPVGRI

SEQ ID NO: 120454 - protein, 8 aa, Homo Sapiens
LQFPVGRV

SEQ ID NO: 120455 - protein, 8 aa, Homo Sapiens
LQFQFAEV

SEQ ID NO: 120456 - protein, 8 aa, Homo Sapiens
LQHELQTI

SEQ ID NO: 120457 - protein, 8 aa, Homo Sapiens
LQHPFVTV

SEQ ID NO: 120458 - protein, 8 aa, Homo Sapiens
LQIIINCV

SEQ ID NO: 120459 - protein, 8 aa, Homo Sapiens
LQKELKKV

SEQ ID NO: 120460 - protein, 8 aa, Homo Sapiens
LQKEMQVI

SEQ ID NO: 120461 - protein, 8 aa, Homo Sapiens
LQKQILKI

SEQ ID NO: 120462 - protein, 8 aa, Homo Sapiens
LQKVMNHI

SEQ ID NO: 120463 - protein, 8 aa, Homo Sapiens
LQLKMIGI

SEQ ID NO: 120464 - protein, 8 aa, Homo Sapiens
LQLKPRTV

SEQ ID NO: 120465 - protein, 8 aa, Homo Sapiens
LQLQIPRI

SEQ ID NO: 120466 - protein, 8 aa, Homo Sapiens
LQQAKDEI

SEQ ID NO: 120467 - protein, 8 aa, Homo Sapiens
LQQAKEDL

SEQ ID NO: 120468 - protein, 8 aa, Homo Sapiens
LQRIHAEI

SEQ ID NO: 120469 - protein, 8 aa, Homo Sapiens
LQRKQMVI

SEQ ID NO: 120470 - protein, 8 aa, Homo Sapiens
LQRLKPEI

SEQ ID NO: 120471 - protein, 8 aa, Homo Sapiens
LQRTMNEI

SEQ ID NO: 120472 - protein, 8 aa, Homo Sapiens
LQRVIDTI

SEQ ID NO: 120473 - protein, 8 aa, Homo Sapiens
LQRVIDYI

SEQ ID NO: 120474 - protein, 8 aa, Homo Sapiens
LQTAFRTV

SEQ ID NO: 120475 - protein, 8 aa, Homo Sapiens
LQTALLVV

SEQ ID NO: 120476 - protein, 8 aa, Homo Sapiens
LQVAIKVI

SEQ ID NO: 120477 - protein, 8 aa, Homo Sapiens
LQVLVNAI

SEQ ID NO: 120478 - protein, 8 aa, Homo Sapiens
LQVTQPTV

SEQ ID NO: 120479 - protein, 8 aa, Homo Sapiens
LQWPSLTV

SEQ ID NO: 120480 - protein, 8 aa, Homo Sapiens
LQYEFTKL

SEQ ID NO: 120481 - protein, 8 aa, Homo Sapiens
LQYIFAHV

SEQ ID NO: 120482 - protein, 8 aa, Homo Sapiens
LQYKPTVI

SEQ ID NO: 120483 - protein, 8 aa, Homo Sapiens
LQYQQPSI

SEQ ID NO: 120484 - protein, 8 aa, Homo Sapiens
LQYSLTKI

SEQ ID NO: 120485 - protein, 8 aa, Homo Sapiens
LQYTPPVV

SEQ ID NO: 120486 - protein, 8 aa, Homo Sapiens
LRQHIAEL

SEQ ID NO: 120487 - protein, 8 aa, Homo Sapiens
LSAPLPLL

SEQ ID NO: 120488 - protein, 8 aa, Homo Sapiens
LSFILHTI

SEQ ID NO: 120489 - protein, 8 aa, Homo Sapiens
LSFTMPQI

SEQ ID NO: 120490 - protein, 8 aa, Homo Sapiens
LSHLSLIV

SEQ ID NO: 120491 - protein, 8 aa, Homo Sapiens
LSPVVPQI

SEQ ID NO: 120492 - protein, 8 aa, Homo Sapiens
LSRPQPEI

SEQ ID NO: 120493 - protein, 8 aa, Homo Sapiens
LSYAVRKV

SEQ ID NO: 120494 - protein, 8 aa, Homo Sapiens
LYPKVAKI

SEQ ID NO: 120495 - protein, 8 aa, Homo Sapiens
MEFQVPVI

SEQ ID NO: 120496 - protein, 8 aa, Homo Sapiens
MEYSTKKV

SEQ ID NO: 120497 - protein, 8 aa, Homo Sapiens
MGYKTIMV

SEQ ID NO: 120498 - protein, 8 aa, Homo Sapiens
MGYVHRSV

SEQ ID NO: 120499 - protein, 8 aa, Homo Sapiens
MQFRSILI

SEQ ID NO: 120500 - protein, 8 aa, Homo Sapiens
MQHPPSTI

SEQ ID NO: 120501 - protein, 8 aa, Homo Sapiens
MQIFLPRI

SEQ ID NO: 120502 - protein, 8 aa, Homo Sapiens
MQIFVKTL

SEQ ID NO: 120503 - protein, 8 aa, Homo Sapiens
MQIRIHQI

SEQ ID NO: 120504 - protein, 8 aa, Homo Sapiens
MQKEITAL

SEQ ID NO: 120505 - protein, 8 aa, Homo Sapiens
MQLKALEI

SEQ ID NO: 120506 - protein, 8 aa, Homo Sapiens
MQQILTRV

SEQ ID NO: 120507 - protein, 8 aa, Homo Sapiens
MQRHIRLV

SEQ ID NO: 120508 - protein, 8 aa, Homo Sapiens
MQRSTLSV

SEQ ID NO: 120509 - protein, 8 aa, Homo Sapiens
MQTEFHHV

SEQ ID NO: 120510 - protein, 8 aa, Homo Sapiens
MQTEVHHV

SEQ ID NO: 120511 - protein, 8 aa, Homo Sapiens
MQVTLKTL

SEQ ID NO: 120512 - protein, 8 aa, Homo Sapiens
MQWRALVL

SEQ ID NO: 120513 - protein, 8 aa, Homo Sapiens
MQWVLPKI

SEQ ID NO: 120514 - protein, 8 aa, Homo Sapiens
MSQILPCI

SEQ ID NO: 120515 - protein, 8 aa, Homo Sapiens
MSYLFRNI

SEQ ID NO: 120516 - protein, 8 aa, Homo Sapiens
NAFATPTI

SEQ ID NO: 120517 - protein, 8 aa, Homo Sapiens
NMLKILAI

SEQ ID NO: 120518 - protein, 8 aa, Homo Sapiens
NMLKVNLI

SEQ ID NO: 120519 - protein, 8 aa, Homo Sapiens
NMPAVKAI

SEQ ID NO: 120520 - protein, 8 aa, Homo Sapiens
NMPKVKTI

SEQ ID NO: 120521 - protein, 8 aa, Homo Sapiens
NMYGFRKV

SEQ ID NO: 120522 - protein, 8 aa, Homo Sapiens
NQFRVDYI

SEQ ID NO: 120523 - protein, 8 aa, Homo Sapiens
NQFVVHTV

SEQ ID NO: 120524 - protein, 8 aa, Homo Sapiens
NQIILNKV

SEQ ID NO: 120525 - protein, 8 aa, Homo Sapiens
NQIRLTNV

SEQ ID NO: 120526 - protein, 8 aa, Homo Sapiens
NQISLPRL

SEQ ID NO: 120527 - protein, 8 aa, Homo Sapiens
NQLELLRV

SEQ ID NO: 120528 - protein, 8 aa, Homo Sapiens
NQMLVPVI

SEQ ID NO: 120529 - protein, 8 aa, Homo Sapiens
NQQLALKV

SEQ ID NO: 120530 - protein, 8 aa, Homo Sapiens
NQRNVPGI

SEQ ID NO: 120531 - protein, 8 aa, Homo Sapiens
NQTPLPLI

SEQ ID NO: 120532 - protein, 8 aa, Homo Sapiens
NQTVMTTI

SEQ ID NO: 120533 - protein, 8 aa, Homo Sapiens
NQVEQLRV

SEQ ID NO: 120534 - protein, 8 aa, Homo Sapiens
NQVVKPRV

SEQ ID NO: 120535 - protein, 8 aa, Homo Sapiens
NQYIAEMV

SEQ ID NO: 120536 - protein, 8 aa, Homo Sapiens
NQYKFILL

SEQ ID NO: 120537 - protein, 8 aa, Homo Sapiens
NQYQFDKV

SEQ ID NO: 120538 - protein, 8 aa, Homo Sapiens
NSMLVSIV

SEQ ID NO: 120539 - protein, 8 aa, Homo Sapiens
NSRLVCKI

SEQ ID NO: 120540 - protein, 8 aa, Homo Sapiens
NSYVSPRI

SEQ ID NO: 120541 - protein, 8 aa, Homo Sapiens
PFPTVLRV

SEQ ID NO: 120542 - protein, 8 aa, Homo Sapiens
PWPKVLKI

SEQ ID NO: 120543 - protein, 8 aa, Homo Sapiens
QAIKGMHI

SEQ ID NO: 120544 - protein, 8 aa, Homo Sapiens
QALEVLKI

SEQ ID NO: 120545 - protein, 8 aa, Homo Sapiens
QALILKIA

SEQ ID NO: 120546 - protein, 8 aa, Homo Sapiens
QAMVVRKV

SEQ ID NO: 120547 - protein, 8 aa, Homo Sapiens
QFLTGRKI

SEQ ID NO: 120548 - protein, 8 aa, Homo Sapiens
QFQAVLRV

SEQ ID NO: 120549 - protein, 8 aa, Homo Sapiens
QGIELHCI

SEQ ID NO: 120550 - protein, 8 aa, Homo Sapiens
QGYTVARI

SEQ ID NO: 120551 - protein, 8 aa, Homo Sapiens
QHSNLTQV

SEQ ID NO: 120552 - protein, 8 aa, Homo Sapiens
QKDKTSVI

SEQ ID NO: 120553 - protein, 8 aa, Homo Sapiens
QLLKALEV

SEQ ID NO: 120554 - protein, 8 aa, Homo Sapiens
QMILDKKF

SEQ ID NO: 120555 - protein, 8 aa, Homo Sapiens
QMLKARSV

SEQ ID NO: 120556 - protein, 8 aa, Homo Sapiens
QMPSDKTI

SEQ ID NO: 120557 - protein, 8 aa, Homo Sapiens
QMPTVIYV

SEQ ID NO: 120558 - protein, 8 aa, Homo Sapiens
QMTVIRKV

SEQ ID NO: 120559 - protein, 8 aa, Homo Sapiens
QMVIGFLV

SEQ ID NO: 120560 - protein, 8 aa, Homo Sapiens
QNRLVRLV

SEQ ID NO: 120561 - protein, 8 aa, Homo Sapiens
QQFKILNV

SEQ ID NO: 120562 - protein, 8 aa, Homo Sapiens
QQFLLKVV

SEQ ID NO: 120563 - protein, 8 aa, Homo Sapiens
QQFQEPFV

SEQ ID NO: 120564 - protein, 8 aa, Homo Sapiens
QQFTSRRV

SEQ ID NO: 120565 - protein, 8 aa, Homo Sapiens
QQFYQPKI

SEQ ID NO: 120566 - protein, 8 aa, Homo Sapiens
QQHHQPMV

SEQ ID NO: 120567 - protein, 8 aa, Homo Sapiens
QQHIHTSV

SEQ ID NO: 120568 - protein, 8 aa, Homo Sapiens
QQHKLLKV

SEQ ID NO: 120569 - protein, 8 aa, Homo Sapiens
QQHSPQQI

SEQ ID NO: 120570 - protein, 8 aa, Homo Sapiens
QQHYTNKI

SEQ ID NO: 120571 - protein, 8 aa, Homo Sapiens
QQIELLEV

SEQ ID NO: 120572 - protein, 8 aa, Homo Sapiens
QQIEQKSI

SEQ ID NO: 120573 - protein, 8 aa, Homo Sapiens
QQIHLEKV

SEQ ID NO: 120574 - protein, 8 aa, Homo Sapiens
QQIKLWKV

SEQ ID NO: 120575 - protein, 8 aa, Homo Sapiens
QQIKTWNI

SEQ ID NO: 120576 - protein, 8 aa, Homo Sapiens
QQIKVATL

SEQ ID NO: 120577 - protein, 8 aa, Homo Sapiens
QQIQAQLV

SEQ ID NO: 120578 - protein, 8 aa, Homo Sapiens
QQIQIQTV

SEQ ID NO: 120579 - protein, 8 aa, Homo Sapiens
QQIRINEV

SEQ ID NO: 120580 - protein, 8 aa, Homo Sapiens
QQIRVLLM

SEQ ID NO: 120581 - protein, 8 aa, Homo Sapiens
QQISILTV

SEQ ID NO: 120582 - protein, 8 aa, Homo Sapiens
QQITQTEV

SEQ ID NO: 120583 - protein, 8 aa, Homo Sapiens
QQKAGRTI

SEQ ID NO: 120584 - protein, 8 aa, Homo Sapiens
QQKELEKV

SEQ ID NO: 120585 - protein, 8 aa, Homo Sapiens
QQKKAAII

SEQ ID NO: 120586 - protein, 8 aa, Homo Sapiens
QQLALQWV

SEQ ID NO: 120587 - protein, 8 aa, Homo Sapiens
QQLEMYSI

SEQ ID NO: 120588 - protein, 8 aa, Homo Sapiens
QQLKQKMV

SEQ ID NO: 120589 - protein, 8 aa, Homo Sapiens
QQLLQKKV

SEQ ID NO: 120590 - protein, 8 aa, Homo Sapiens
QQLQQRLQ

SEQ ID NO: 120591 - protein, 8 aa, Homo Sapiens
QQLQQRQI

SEQ ID NO: 120592 - protein, 8 aa, Homo Sapiens
QQLRLVRI

SEQ ID NO: 120593 - protein, 8 aa, Homo Sapiens
QQLTHHSV

SEQ ID NO: 120594 - protein, 8 aa, Homo Sapiens
QQLVLRTV

SEQ ID NO: 120595 - protein, 8 aa, Homo Sapiens
QQLVSHEV

SEQ ID NO: 120596 - protein, 8 aa, Homo Sapiens
QQNPQPLI

SEQ ID NO: 120597 - protein, 8 aa, Homo Sapiens
QQPIVRKV

SEQ ID NO: 120598 - protein, 8 aa, Homo Sapiens
QQPKSLKV

SEQ ID NO: 120599 - protein, 8 aa, Homo Sapiens
QQQRFHEI

SEQ ID NO: 120600 - protein, 8 aa, Homo Sapiens
QQQTMLRV

SEQ ID NO: 120601 - protein, 8 aa, Homo Sapiens
QQQVIRKI

SEQ ID NO: 120602 - protein, 8 aa, Homo Sapiens
QQREKPRV

SEQ ID NO: 120603 - protein, 8 aa, Homo Sapiens
QQRIESKV

SEQ ID NO: 120604 - protein, 8 aa, Homo Sapiens
QQSKILKV

SEQ ID NO: 120605 - protein, 8 aa, Homo Sapiens
QQSVLQRI

SEQ ID NO: 120606 - protein, 8 aa, Homo Sapiens
QQVAIKKI

SEQ ID NO: 120607 - protein, 8 aa, Homo Sapiens
QQVFIQKV

SEQ ID NO: 120608 - protein, 8 aa, Homo Sapiens
QQVILVQV

SEQ ID NO: 120609 - protein, 8 aa, Homo Sapiens
QQVLVRKL

SEQ ID NO: 120610 - protein, 8 aa, Homo Sapiens
QQVQIHQI

SEQ ID NO: 120611 - protein, 8 aa, Homo Sapiens
QQVQQVHV

SEQ ID NO: 120612 - protein, 8 aa, Homo Sapiens
QQVRFKTV

SEQ ID NO: 120613 - protein, 8 aa, Homo Sapiens
QQVVIHLI

SEQ ID NO: 120614 - protein, 8 aa, Homo Sapiens
QQWPVRSI

SEQ ID NO: 120615 - protein, 8 aa, Homo Sapiens
QQYENLVV

SEQ ID NO: 120616 - protein, 8 aa, Homo Sapiens
QQYRALTV

SEQ ID NO: 120617 - protein, 8 aa, Homo Sapiens
QSCEALRV

SEQ ID NO: 120618 - protein, 8 aa, Homo Sapiens
QSKILKVI

SEQ ID NO: 120619 - protein, 8 aa, Homo Sapiens
QSLATPVV

SEQ ID NO: 120620 - protein, 8 aa, Homo Sapiens
QSLRLRTI

SEQ ID NO: 120621 - protein, 8 aa, Homo Sapiens
QSTLLREI

SEQ ID NO: 120622 - protein, 8 aa, Homo Sapiens
QSTQVPTI

SEQ ID NO: 120623 - protein, 8 aa, Homo Sapiens
QSTRLPLI

SEQ ID NO: 120624 - protein, 8 aa, Homo Sapiens
QSVYISKI

SEQ ID NO: 120625 - protein, 8 aa, Homo Sapiens
QSYKVRLV

SEQ ID NO: 120626 - protein, 8 aa, Homo Sapiens
QSYVVNRV

SEQ ID NO: 120627 - protein, 8 aa, Homo Sapiens
QTPKVLVV

SEQ ID NO: 120628 - protein, 8 aa, Homo Sapiens
QTPQILVK

SEQ ID NO: 120629 - protein, 8 aa, Homo Sapiens
QTYAVPLI

SEQ ID NO: 120630 - protein, 8 aa, Homo Sapiens
RAPLVPKV

SEQ ID NO: 120631 - protein, 8 aa, Homo Sapiens
RCLMALKV

SEQ ID NO: 120632 - protein, 8 aa, Homo Sapiens
REFQTSVV

SEQ ID NO: 120633 - protein, 8 aa, Homo Sapiens
RFIQLLKV

SEQ ID NO: 120634 - protein, 8 aa, Homo Sapiens
RFMKITVI

SEQ ID NO: 120635 - protein, 8 aa, Homo Sapiens
RGYKLPKV

SEQ ID NO: 120636 - protein, 8 aa, Homo Sapiens
RMPIARKI

SEQ ID NO: 120637 - protein, 8 aa, Homo Sapiens
RMYPPPLI

SEQ ID NO: 120638 - protein, 8 aa, Homo Sapiens
RQAFIRKV

SEQ ID NO: 120639 - protein, 8 aa, Homo Sapiens
RQALMPTL

SEQ ID NO: 120640 - protein, 8 aa, Homo Sapiens
RQDYARLV

SEQ ID NO: 120641 - protein, 8 aa, Homo Sapiens
RQFAAQTV

SEQ ID NO: 120642 - protein, 8 aa, Homo Sapiens
RQFSHRAI

SEQ ID NO: 120643 - protein, 8 aa, Homo Sapiens
RQFTVRKV

SEQ ID NO: 120644 - protein, 8 aa, Homo Sapiens
RQFVPIKV

SEQ ID NO: 120645 - protein, 8 aa, Homo Sapiens
RQHLQQSI

SEQ ID NO: 120646 - protein, 8 aa, Homo Sapiens
RQHPQPYI

SEQ ID NO: 120647 - protein, 8 aa, Homo Sapiens
RQHVLTRI

SEQ ID NO: 120648 - protein, 8 aa, Homo Sapiens
RQIEIPKV

SEQ ID NO: 120649 - protein, 8 aa, Homo Sapiens
RQIGQRTI

SEQ ID NO: 120650 - protein, 8 aa, Homo Sapiens
RQIKINEV

SEQ ID NO: 120651 - protein, 8 aa, Homo Sapiens
RQILAPVV

SEQ ID NO: 120652 - protein, 8 aa, Homo Sapiens
RQISLNKV

SEQ ID NO: 120653 - protein, 8 aa, Homo Sapiens
RQIVLAKV

SEQ ID NO: 120654 - protein, 8 aa, Homo Sapiens
RQKALRMV

SEQ ID NO: 120655 - protein, 8 aa, Homo Sapiens
RQKEIPRV

SEQ ID NO: 120656 - protein, 8 aa, Homo Sapiens
RQKLDPKI

SEQ ID NO: 120657 - protein, 8 aa, Homo Sapiens
RQKLVRNI

SEQ ID NO: 120658 - protein, 8 aa, Homo Sapiens
RQLAVLNV

SEQ ID NO: 120659 - protein, 8 aa, Homo Sapiens
RQLEIKQI

SEQ ID NO: 120660 - protein, 8 aa, Homo Sapiens
RQLIHRSV

SEQ ID NO: 120661 - protein, 8 aa, Homo Sapiens
RQLKIKEV

SEQ ID NO: 120662 - protein, 8 aa, Homo Sapiens
RQLTLRKL

SEQ ID NO: 120663 - protein, 8 aa, Homo Sapiens
RQLVFNEI

SEQ ID NO: 120664 - protein, 8 aa, Homo Sapiens
RQLYSKVI

SEQ ID NO: 120665 - protein, 8 aa, Homo Sapiens
RQMELVSV

SEQ ID NO: 120666 - protein, 8 aa, Homo Sapiens
RQMFVQRV

SEQ ID NO: 120667 - protein, 8 aa, Homo Sapiens
RQMVFNEI

SEQ ID NO: 120668 - protein, 8 aa, Homo Sapiens
RQQIKPAV

SEQ ID NO: 120669 - protein, 8 aa, Homo Sapiens
RQQQQLLI

SEQ ID NO: 120670 - protein, 8 aa, Homo Sapiens
RQRIILRV

SEQ ID NO: 120671 - protein, 8 aa, Homo Sapiens
RQSIIRKV

SEQ ID NO: 120672 - protein, 8 aa, Homo Sapiens
RQVKLVNI

SEQ ID NO: 120673 - protein, 8 aa, Homo Sapiens
RQVLALRI

SEQ ID NO: 120674 - protein, 8 aa, Homo Sapiens
RQVLIRQI

SEQ ID NO: 120675 - protein, 8 aa, Homo Sapiens
RQWLIEQI

SEQ ID NO: 120676 - protein, 8 aa, Homo Sapiens
RQYMFSSL

SEQ ID NO: 120677 - protein, 8 aa, Homo Sapiens
RQYRMKKL

SEQ ID NO: 120678 - protein, 8 aa, Homo Sapiens
RQYVVRAV

SEQ ID NO: 120679 - protein, 8 aa, Homo Sapiens
RQYYLSKI

SEQ ID NO: 120680 - protein, 8 aa, Homo Sapiens
RQYYPVTI

SEQ ID NO: 120681 - protein, 8 aa, Homo Sapiens
RSFQTSAI

SEQ ID NO: 120682 - protein, 8 aa, Homo Sapiens
RYIHILMI

SEQ ID NO: 120683 - protein, 8 aa, Homo Sapiens
SAPAVLEI

SEQ ID NO: 120684 - protein, 8 aa, Homo Sapiens
SAPAVLVV

SEQ ID NO: 120685 - protein, 8 aa, Homo Sapiens
SAPEVLLV

SEQ ID NO: 120686 - protein, 8 aa, Homo Sapiens
SAVELPKI

SEQ ID NO: 120687 - protein, 8 aa, Homo Sapiens
SAYRVKTV

SEQ ID NO: 120688 - protein, 8 aa, Homo Sapiens
SEYITHEI

SEQ ID NO: 120689 - protein, 8 aa, Homo Sapiens
SFFKSLVI

SEQ ID NO: 120690 - protein, 8 aa, Homo Sapiens
SFPGANII

SEQ ID NO: 120691 - protein, 8 aa, Homo Sapiens
SFPMTPSI

SEQ ID NO: 120692 - protein, 8 aa, Homo Sapiens
SFPTAKYI

SEQ ID NO: 120693 - protein, 8 aa, Homo Sapiens
SFPVILSI

SEQ ID NO: 120694 - protein, 8 aa, Homo Sapiens
SFSKAFGQ

SEQ ID NO: 120695 - protein, 8 aa, Homo Sapiens
SFYKIRTI

SEQ ID NO: 120696 - protein, 8 aa, Homo Sapiens
SGTVLPAV

SEQ ID NO: 120697 - protein, 8 aa, Homo Sapiens
SGYAPLSV

SEQ ID NO: 120698 - protein, 8 aa, Homo Sapiens
SHVVTTSV

SEQ ID NO: 120699 - protein, 8 aa, Homo Sapiens
SMFEPPQV

SEQ ID NO: 120700 - protein, 8 aa, Homo Sapiens
SMFSPASI

SEQ ID NO: 120701 - protein, 8 aa, Homo Sapiens
SMIGTSTI

SEQ ID NO: 120702 - protein, 8 aa, Homo Sapiens
SMKIMHEI

SEQ ID NO: 120703 - protein, 8 aa, Homo Sapiens
SMLRISTI

SEQ ID NO: 120704 - protein, 8 aa, Homo Sapiens
SMPDVLKI

SEQ ID NO: 120705 - protein, 8 aa, Homo Sapiens
SMPRGVVV

SEQ ID NO: 120706 - protein, 8 aa, Homo Sapiens
SMPTEKKI

SEQ ID NO: 120707 - protein, 8 aa, Homo Sapiens
SMPTVTQI

SEQ ID NO: 120708 - protein, 8 aa, Homo Sapiens
SMYQTKAV

SEQ ID NO: 120709 - protein, 8 aa, Homo Sapiens
SNIVIPLI

SEQ ID NO: 120710 - protein, 8 aa, Homo Sapiens
SQALILKI

SEQ ID NO: 120711 - protein, 8 aa, Homo Sapiens
SQAMLNAV

SEQ ID NO: 120712 - protein, 8 aa, Homo Sapiens
SQASMKQV

SEQ ID NO: 120713 - protein, 8 aa, Homo Sapiens
SQCLSKLV

SEQ ID NO: 120714 - protein, 8 aa, Homo Sapiens
SQFAFESV

SEQ ID NO: 120715 - protein, 8 aa, Homo Sapiens
SQFCLQRI

SEQ ID NO: 120716 - protein, 8 aa, Homo Sapiens
SQFELLKV

SEQ ID NO: 120717 - protein, 8 aa, Homo Sapiens
SQFIADVI

SEQ ID NO: 120718 - protein, 8 aa, Homo Sapiens
SQFIEPKI

SEQ ID NO: 120719 - protein, 8 aa, Homo Sapiens
SQFLVSSV

SEQ ID NO: 120720 - protein, 8 aa, Homo Sapiens
SQFQIHHL

SEQ ID NO: 120721 - protein, 8 aa, Homo Sapiens
SQFTLQCV

SEQ ID NO: 120722 - protein, 8 aa, Homo Sapiens
SQFVMEGV

SEQ ID NO: 120723 - protein, 8 aa, Homo Sapiens
SQHMTEVV

SEQ ID NO: 120724 - protein, 8 aa, Homo Sapiens
SQHPGLLV

SEQ ID NO: 120725 - protein, 8 aa, Homo Sapiens
SQHVSPKI

SEQ ID NO: 120726 - protein, 8 aa, Homo Sapiens
SQICAKAV

SEQ ID NO: 120727 - protein, 8 aa, Homo Sapiens
SQIEKPKI

SEQ ID NO: 120728 - protein, 8 aa, Homo Sapiens
SQIFARKV

SEQ ID NO: 120729 - protein, 8 aa, Homo Sapiens
SQIITSVV

SEQ ID NO: 120730 - protein, 8 aa, Homo Sapiens
SQIKLYNI

SEQ ID NO: 120731 - protein, 8 aa, Homo Sapiens
SQILVNQI

SEQ ID NO: 120732 - protein, 8 aa, Homo Sapiens
SQIPLSKI

SEQ ID NO: 120733 - protein, 8 aa, Homo Sapiens
SQITPHAI

SEQ ID NO: 120734 - protein, 8 aa, Homo Sapiens
SQIVFRSV

SEQ ID NO: 120735 - protein, 8 aa, Homo Sapiens
SQIYLHHI

SEQ ID NO: 120736 - protein, 8 aa, Homo Sapiens
SQKIKPQV

SEQ ID NO: 120737 - protein, 8 aa, Homo Sapiens
SQKKTVTI

SEQ ID NO: 120738 - protein, 8 aa, Homo Sapiens
SQLAVLKV

SEQ ID NO: 120739 - protein, 8 aa, Homo Sapiens
SQLILHLI

SEQ ID NO: 120740 - protein, 8 aa, Homo Sapiens
SQLILQKI

SEQ ID NO: 120741 - protein, 8 aa, Homo Sapiens
SQLKLWNV

SEQ ID NO: 120742 - protein, 8 aa, Homo Sapiens
SQLKTVCV

SEQ ID NO: 120743 - protein, 8 aa, Homo Sapiens
SQLLLAHV

SEQ ID NO: 120744 - protein, 8 aa, Homo Sapiens
SQLLVHVL

SEQ ID NO: 120745 - protein, 8 aa, Homo Sapiens
SQLQALHI

SEQ ID NO: 120746 - protein, 8 aa, Homo Sapiens
SQLQLRCV

SEQ ID NO: 120747 - protein, 8 aa, Homo Sapiens
SQLQVHMV

SEQ ID NO: 120748 - protein, 8 aa, Homo Sapiens
SQLRVAKV

SEQ ID NO: 120749 - protein, 8 aa, Homo Sapiens
SQLSVPEI

SEQ ID NO: 120750 - protein, 8 aa, Homo Sapiens
SQLTTHKI

SEQ ID NO: 120751 - protein, 8 aa, Homo Sapiens
SQMIVKEI

SEQ ID NO: 120752 - protein, 8 aa, Homo Sapiens
SQMPIRKI

SEQ ID NO: 120753 - protein, 8 aa, Homo Sapiens
SQMTFHKI

SEQ ID NO: 120754 - protein, 8 aa, Homo Sapiens
SQNILPTI

SEQ ID NO: 120755 - protein, 8 aa, Homo Sapiens
SQPPVFKV

SEQ ID NO: 120756 - protein, 8 aa, Homo Sapiens
SQQLQLRV

SEQ ID NO: 120757 - protein, 8 aa, Homo Sapiens
SQQRLAQV

SEQ ID NO: 120758 - protein, 8 aa, Homo Sapiens
SQRAGLQV

SEQ ID NO: 120759 - protein, 8 aa, Homo Sapiens
SQRELDTV

SEQ ID NO: 120760 - protein, 8 aa, Homo Sapiens
SQRFTVQI

SEQ ID NO: 120761 - protein, 8 aa, Homo Sapiens
SQRITNQV

SEQ ID NO: 120762 - protein, 8 aa, Homo Sapiens
SQRLFRKI

SEQ ID NO: 120763 - protein, 8 aa, Homo Sapiens
SQRLQTQI

SEQ ID NO: 120764 - protein, 8 aa, Homo Sapiens
SQRPVLKV

SEQ ID NO: 120765 - protein, 8 aa, Homo Sapiens
SQRSVTSV

SEQ ID NO: 120766 - protein, 8 aa, Homo Sapiens
SQRYQVGV

SEQ ID NO: 120767 - protein, 8 aa, Homo Sapiens
SQRYVVAV

SEQ ID NO: 120768 - protein, 8 aa, Homo Sapiens
SQSLLPAI

SEQ ID NO: 120769 - protein, 8 aa, Homo Sapiens
SQTILKPL

SEQ ID NO: 120770 - protein, 8 aa, Homo Sapiens
SQTIQPKV

SEQ ID NO: 120771 - protein, 8 aa, Homo Sapiens
SQTKLKEV

SEQ ID NO: 120772 - protein, 8 aa, Homo Sapiens
SQTLQRSI

SEQ ID NO: 120773 - protein, 8 aa, Homo Sapiens
SQTPLPTI

SEQ ID NO: 120774 - protein, 8 aa, Homo Sapiens
SQTTVLVV

SEQ ID NO: 120775 - protein, 8 aa, Homo Sapiens
SQVALKII

SEQ ID NO: 120776 - protein, 8 aa, Homo Sapiens
SQVAVQKV

SEQ ID NO: 120777 - protein, 8 aa, Homo Sapiens
SQVIFNSV

SEQ ID NO: 120778 - protein, 8 aa, Homo Sapiens
SQVKATVI

SEQ ID NO: 120779 - protein, 8 aa, Homo Sapiens
SQVLLRCL

SEQ ID NO: 120780 - protein, 8 aa, Homo Sapiens
SQVLSQKI

SEQ ID NO: 120781 - protein, 8 aa, Homo Sapiens
SQVQVPQI

SEQ ID NO: 120782 - protein, 8 aa, Homo Sapiens
SQWEVSQV

SEQ ID NO: 120783 - protein, 8 aa, Homo Sapiens
SQYIFTEM

SEQ ID NO: 120784 - protein, 8 aa, Homo Sapiens
SQYKQLTI

SEQ ID NO: 120785 - protein, 8 aa, Homo Sapiens
SQYKSHFV

SEQ ID NO: 120786 - protein, 8 aa, Homo Sapiens
SQYLMHEV

SEQ ID NO: 120787 - protein, 8 aa, Homo Sapiens
SQYNIRGV

SEQ ID NO: 120788 - protein, 8 aa, Homo Sapiens
SQYPELLV

SEQ ID NO: 120789 - protein, 8 aa, Homo Sapiens
SQYPLEKV

SEQ ID NO: 120790 - protein, 8 aa, Homo Sapiens
SQYQLNSI

SEQ ID NO: 120791 - protein, 8 aa, Homo Sapiens
SQYRALSV

SEQ ID NO: 120792 - protein, 8 aa, Homo Sapiens
SQYYIRAV

SEQ ID NO: 120793 - protein, 8 aa, Homo Sapiens
SSFAHAQV

SEQ ID NO: 120794 - protein, 8 aa, Homo Sapiens
SSFVFSTV

SEQ ID NO: 120795 - protein, 8 aa, Homo Sapiens
SSFVTKSV

SEQ ID NO: 120796 - protein, 8 aa, Homo Sapiens
SSHLVATV

SEQ ID NO: 120797 - protein, 8 aa, Homo Sapiens
SSPEALTV

SEQ ID NO: 120798 - protein, 8 aa, Homo Sapiens
SSPSVLEI

SEQ ID NO: 120799 - protein, 8 aa, Homo Sapiens
SSTPLPTI

SEQ ID NO: 120800 - protein, 8 aa, Homo Sapiens
SSYIVKNI

SEQ ID NO: 120801 - protein, 8 aa, Homo Sapiens
SSYIVSQI

SEQ ID NO: 120802 - protein, 8 aa, Homo Sapiens
SSYPTRLI

SEQ ID NO: 120803 - protein, 8 aa, Homo Sapiens
SSYPTTTI

SEQ ID NO: 120804 - protein, 8 aa, Homo Sapiens
SSYPVALI

SEQ ID NO: 120805 - protein, 8 aa, Homo Sapiens
SSYVVKKV

SEQ ID NO: 120806 - protein, 8 aa, Homo Sapiens
TAPLAPTI

SEQ ID NO: 120807 - protein, 8 aa, Homo Sapiens
TAPLVVVV

SEQ ID NO: 120808 - protein, 8 aa, Homo Sapiens
TAPTASKI

SEQ ID NO: 120809 - protein, 8 aa, Homo Sapiens
TAYVSPTV

SEQ ID NO: 120810 - protein, 8 aa, Homo Sapiens
TAYYALVV

SEQ ID NO: 120811 - protein, 8 aa, Homo Sapiens
TEFIFTTI

SEQ ID NO: 120812 - protein, 8 aa, Homo Sapiens
TEYPVKIV

SEQ ID NO: 120813 - protein, 8 aa, Homo Sapiens
TEYQPRAV

SEQ ID NO: 120814 - protein, 8 aa, Homo Sapiens
TFGKVILV

SEQ ID NO: 120815 - protein, 8 aa, Homo Sapiens
TGFIFQKV

SEQ ID NO: 120816 - protein, 8 aa, Homo Sapiens
TGLTILRI

SEQ ID NO: 120817 - protein, 8 aa, Homo Sapiens
TGTEMRTV

SEQ ID NO: 120818 - protein, 8 aa, Homo Sapiens
TGYTTRNI

SEQ ID NO: 120819 - protein, 8 aa, Homo Sapiens
TIQVLPTV

SEQ ID NO: 120820 - protein, 8 aa, Homo Sapiens
TMFVQRQV

SEQ ID NO: 120821 - protein, 8 aa, Homo Sapiens
TMIKIVLI

SEQ ID NO: 120822 - protein, 8 aa, Homo Sapiens
TMKKLPIV

SEQ ID NO: 120823 - protein, 8 aa, Homo Sapiens
TMLATKTV

SEQ ID NO: 120824 - protein, 8 aa, Homo Sapiens
TMPVTMLI

SEQ ID NO: 120825 - protein, 8 aa, Homo Sapiens
TMPVVPSV

SEQ ID NO: 120826 - protein, 8 aa, Homo Sapiens
TMVETKKV

SEQ ID NO: 120827 - protein, 8 aa, Homo Sapiens
TQFKWIHI

SEQ ID NO: 120828 - protein, 8 aa, Homo Sapiens
TQFLPRTI

SEQ ID NO: 120829 - protein, 8 aa, Homo Sapiens
TQFSHLTV

SEQ ID NO: 120830 - protein, 8 aa, Homo Sapiens
TQFVLSTL

SEQ ID NO: 120831 - protein, 8 aa, Homo Sapiens
TQHTPTSI

SEQ ID NO: 120832 - protein, 8 aa, Homo Sapiens
TQIISKKI

SEQ ID NO: 120833 - protein, 8 aa, Homo Sapiens
TQIQALKV

SEQ ID NO: 120834 - protein, 8 aa, Homo Sapiens
TQIYIKLV

SEQ ID NO: 120835 - protein, 8 aa, Homo Sapiens
TQLAVNKI

SEQ ID NO: 120836 - protein, 8 aa, Homo Sapiens
TQLTTEKI

SEQ ID NO: 120837 - protein, 8 aa, Homo Sapiens
TQMKLMAI

SEQ ID NO: 120838 - protein, 8 aa, Homo Sapiens
TQNVVTKV

SEQ ID NO: 120839 - protein, 8 aa, Homo Sapiens
TQQILPYI

SEQ ID NO: 120840 - protein, 8 aa, Homo Sapiens
TQQKVPTI

SEQ ID NO: 120841 - protein, 8 aa, Homo Sapiens
TQRAFKEV

SEQ ID NO: 120842 - protein, 8 aa, Homo Sapiens
TQRAQPAV

SEQ ID NO: 120843 - protein, 8 aa, Homo Sapiens
TQRISLEI

SEQ ID NO: 120844 - protein, 8 aa, Homo Sapiens
TQRNVEVI

SEQ ID NO: 120845 - protein, 8 aa, Homo Sapiens
TQRSFQKI

SEQ ID NO: 120846 - protein, 8 aa, Homo Sapiens
TQRVISFI

SEQ ID NO: 120847 - protein, 8 aa, Homo Sapiens
TQTLLKEI

SEQ ID NO: 120848 - protein, 8 aa, Homo Sapiens
TQTPSLKV

SEQ ID NO: 120849 - protein, 8 aa, Homo Sapiens
TQTVIHTV

SEQ ID NO: 120850 - protein, 8 aa, Homo Sapiens
TQTVISSI

SEQ ID NO: 120851 - protein, 8 aa, Homo Sapiens
TQVKKPVI

SEQ ID NO: 120852 - protein, 8 aa, Homo Sapiens
TQVLIKLI

SEQ ID NO: 120853 - protein, 8 aa, Homo Sapiens
TQVLLYRI

SEQ ID NO: 120854 - protein, 8 aa, Homo Sapiens
TQVQQMQV

SEQ ID NO: 120855 - protein, 8 aa, Homo Sapiens
TQVQTTLV

SEQ ID NO: 120856 - protein, 8 aa, Homo Sapiens
TQVRIQTV

SEQ ID NO: 120857 - protein, 8 aa, Homo Sapiens
TQVTVQKI

SEQ ID NO: 120858 - protein, 8 aa, Homo Sapiens
TQVVISRI

SEQ ID NO: 120859 - protein, 8 aa, Homo Sapiens
TQVVVSRI

SEQ ID NO: 120860 - protein, 8 aa, Homo Sapiens
TQWITKPV

SEQ ID NO: 120861 - protein, 8 aa, Homo Sapiens
TQWRVRMI

SEQ ID NO: 120862 - protein, 8 aa, Homo Sapiens
TQYGLERI

SEQ ID NO: 120863 - protein, 8 aa, Homo Sapiens
TQYIPLSI

SEQ ID NO: 120864 - protein, 8 aa, Homo Sapiens
TQYRFTII

SEQ ID NO: 120865 - protein, 8 aa, Homo Sapiens
TQYTFSSI

SEQ ID NO: 120866 - protein, 8 aa, Homo Sapiens
TQYTTHHI

SEQ ID NO: 120867 - protein, 8 aa, Homo Sapiens
TSFILRAV

SEQ ID NO: 120868 - protein, 8 aa, Homo Sapiens
TSPEALEI

SEQ ID NO: 120869 - protein, 8 aa, Homo Sapiens
TSPKALVI

SEQ ID NO: 120870 - protein, 8 aa, Homo Sapiens
TSPQASII

SEQ ID NO: 120871 - protein, 8 aa, Homo Sapiens
TSPTVLYV

SEQ ID NO: 120872 - protein, 8 aa, Homo Sapiens
TVGNNKTL

SEQ ID NO: 120873 - protein, 8 aa, Homo Sapiens
VAIPLPGV

SEQ ID NO: 120874 - protein, 8 aa, Homo Sapiens
VEIEQKVV

SEQ ID NO: 120875 - protein, 8 aa, Homo Sapiens
VEIILHVV

SEQ ID NO: 120876 - protein, 8 aa, Homo Sapiens
VEIQTPKI

SEQ ID NO: 120877 - protein, 8 aa, Homo Sapiens
VERVKPRI

SEQ ID NO: 120878 - protein, 8 aa, Homo Sapiens
VEVIKPLV

SEQ ID NO: 120879 - protein, 8 aa, Homo Sapiens
VEYAFKAI

SEQ ID NO: 120880 - protein, 8 aa, Homo Sapiens
VEYITRYI

SEQ ID NO: 120881 - protein, 8 aa, Homo Sapiens
VEYQMKSV

SEQ ID NO: 120882 - protein, 8 aa, Homo Sapiens
VFFMPATV

SEQ ID NO: 120883 - protein, 8 aa, Homo Sapiens
VFIELNHI

SEQ ID NO: 120884 - protein, 8 aa, Homo Sapiens
VFIKAVHV

SEQ ID NO: 120885 - protein, 8 aa, Homo Sapiens
VFIQVHCI

SEQ ID NO: 120886 - protein, 8 aa, Homo Sapiens
VFLEIHNI

SEQ ID NO: 120887 - protein, 8 aa, Homo Sapiens
VFLRVSEV

SEQ ID NO: 120888 - protein, 8 aa, Homo Sapiens
VFLSVPCI

SEQ ID NO: 120889 - protein, 8 aa, Homo Sapiens
VFPKAKQV

SEQ ID NO: 120890 - protein, 8 aa, Homo Sapiens
VFPTIATI

SEQ ID NO: 120891 - protein, 8 aa, Homo Sapiens
VFPVVPRL

SEQ ID NO: 120892 - protein, 8 aa, Homo Sapiens
VGFVLLTV

SEQ ID NO: 120893 - protein, 8 aa, Homo Sapiens
VGILITTI

SEQ ID NO: 120894 - protein, 8 aa, Homo Sapiens
VGTTIAEL

SEQ ID NO: 120895 - protein, 8 aa, Homo Sapiens
VGYILSVV

SEQ ID NO: 120896 - protein, 8 aa, Homo Sapiens
VGYLQPLV

SEQ ID NO: 120897 - protein, 8 aa, Homo Sapiens
VGYRVTQI

SEQ ID NO: 120898 - protein, 8 aa, Homo Sapiens
VGYYIFRV

SEQ ID NO: 120899 - protein, 8 aa, Homo Sapiens
VMAEALGV

SEQ ID NO: 120900 - protein, 8 aa, Homo Sapiens
VMFTPLTV

SEQ ID NO: 120901 - protein, 8 aa, Homo Sapiens
VMKTEPSI

SEQ ID NO: 120902 - protein, 8 aa, Homo Sapiens
VMLHALLI

SEQ ID NO: 120903 - protein, 8 aa, Homo Sapiens
VMLKAIRI

SEQ ID NO: 120904 - protein, 8 aa, Homo Sapiens
VMLVQPRV

SEQ ID NO: 120905 - protein, 8 aa, Homo Sapiens
VMMGILTI

SEQ ID NO: 120906 - protein, 8 aa, Homo Sapiens
VMPEVNKV

SEQ ID NO: 120907 - protein, 8 aa, Homo Sapiens
VMQKTPII

SEQ ID NO: 120908 - protein, 8 aa, Homo Sapiens
VMSILPKI

SEQ ID NO: 120909 - protein, 8 aa, Homo Sapiens
VMTDLPVI

SEQ ID NO: 120910 - protein, 8 aa, Homo Sapiens
VMVISPVI

SEQ ID NO: 120911 - protein, 8 aa, Homo Sapiens
VMYGFKGV

SEQ ID NO: 120912 - protein, 8 aa, Homo Sapiens
VMYRVIQV

SEQ ID NO: 120913 - protein, 8 aa, Homo Sapiens
VPYPLPKI

SEQ ID NO: 120914 - protein, 8 aa, Homo Sapiens
VQATPSKV

SEQ ID NO: 120915 - protein, 8 aa, Homo Sapiens
VQAVIPTI

SEQ ID NO: 120916 - protein, 8 aa, Homo Sapiens
VQDLAKAV

SEQ ID NO: 120917 - protein, 8 aa, Homo Sapiens
VQFASQEI

SEQ ID NO: 120918 - protein, 8 aa, Homo Sapiens
VQFCARKV

SEQ ID NO: 120919 - protein, 8 aa, Homo Sapiens
VQFKLVLV

SEQ ID NO: 120920 - protein, 8 aa, Homo Sapiens
VQFLIYQI

SEQ ID NO: 120921 - protein, 8 aa, Homo Sapiens
VQFQPNTV

SEQ ID NO: 120922 - protein, 8 aa, Homo Sapiens
VQFVFDAV

SEQ ID NO: 120923 - protein, 8 aa, Homo Sapiens
VQIEQLYV

SEQ ID NO: 120924 - protein, 8 aa, Homo Sapiens
VQIKQETI

SEQ ID NO: 120925 - protein, 8 aa, Homo Sapiens
VQIPIMLV

SEQ ID NO: 120926 - protein, 8 aa, Homo Sapiens
VQIPVSAV

SEQ ID NO: 120927 - protein, 8 aa, Homo Sapiens
VQIRIFKI

SEQ ID NO: 120928 - protein, 8 aa, Homo Sapiens
VQIRIKLM

SEQ ID NO: 120929 - protein, 8 aa, Homo Sapiens
VQIRILDV

SEQ ID NO: 120930 - protein, 8 aa, Homo Sapiens
VQIVSKKV

SEQ ID NO: 120931 - protein, 8 aa, Homo Sapiens
VQKAVTAI

SEQ ID NO: 120932 - protein, 8 aa, Homo Sapiens
VQKELQSI

SEQ ID NO: 120933 - protein, 8 aa, Homo Sapiens
VQKKLESI

SEQ ID NO: 120934 - protein, 8 aa, Homo Sapiens
VQKLSRVI

SEQ ID NO: 120935 - protein, 8 aa, Homo Sapiens
VQKLVQKV

SEQ ID NO: 120936 - protein, 8 aa, Homo Sapiens
VQKLVVVI

SEQ ID NO: 120937 - protein, 8 aa, Homo Sapiens
VQKSVRTI

SEQ ID NO: 120938 - protein, 8 aa, Homo Sapiens
VQKVLGSV

SEQ ID NO: 120939 - protein, 8 aa, Homo Sapiens
VQLAVNRV

SEQ ID NO: 120940 - protein, 8 aa, Homo Sapiens
VQLETLSI

SEQ ID NO: 120941 - protein, 8 aa, Homo Sapiens
VQLLIPRI

SEQ ID NO: 120942 - protein, 8 aa, Homo Sapiens
VQLRLNSI

SEQ ID NO: 120943 - protein, 8 aa, Homo Sapiens
VQMALSKV

SEQ ID NO: 120944 - protein, 8 aa, Homo Sapiens
VQMEPKVV

SEQ ID NO: 120945 - protein, 8 aa, Homo Sapiens
VQNAVIKI

SEQ ID NO: 120946 - protein, 8 aa, Homo Sapiens
VQNGIALV

SEQ ID NO: 120947 - protein, 8 aa, Homo Sapiens
VQQVSLVI

SEQ ID NO: 120948 - protein, 8 aa, Homo Sapiens
VQRAVCML

SEQ ID NO: 120949 - protein, 8 aa, Homo Sapiens
VQRCVVRI

SEQ ID NO: 120950 - protein, 8 aa, Homo Sapiens
VQRHLTAV

SEQ ID NO: 120951 - protein, 8 aa, Homo Sapiens
VQRIAERV

SEQ ID NO: 120952 - protein, 8 aa, Homo Sapiens
VQRILPCL

SEQ ID NO: 120953 - protein, 8 aa, Homo Sapiens
VQRKMPCV

SEQ ID NO: 120954 - protein, 8 aa, Homo Sapiens
VQRKVICI

SEQ ID NO: 120955 - protein, 8 aa, Homo Sapiens
VQRLEPVI

SEQ ID NO: 120956 - protein, 8 aa, Homo Sapiens
VQRSFTQV

SEQ ID NO: 120957 - protein, 8 aa, Homo Sapiens
VQRVASVM

SEQ ID NO: 120958 - protein, 8 aa, Homo Sapiens
VQRVQNEV

SEQ ID NO: 120959 - protein, 8 aa, Homo Sapiens
VQSLKRKI

SEQ ID NO: 120960 - protein, 8 aa, Homo Sapiens
VQSQLRHI

SEQ ID NO: 120961 - protein, 8 aa, Homo Sapiens
VQSQPPRV

SEQ ID NO: 120962 - protein, 8 aa, Homo Sapiens
VQTCINLI

SEQ ID NO: 120963 - protein, 8 aa, Homo Sapiens
VQTCLKRI

SEQ ID NO: 120964 - protein, 8 aa, Homo Sapiens
VQTVLPLV

SEQ ID NO: 120965 - protein, 8 aa, Homo Sapiens
VQVALSRV

SEQ ID NO: 120966 - protein, 8 aa, Homo Sapiens
VQVAVAHV

SEQ ID NO: 120967 - protein, 8 aa, Homo Sapiens
VQVEQSKV

SEQ ID NO: 120968 - protein, 8 aa, Homo Sapiens
VQVEVITI

SEQ ID NO: 120969 - protein, 8 aa, Homo Sapiens
VQVLIEHI

SEQ ID NO: 120970 - protein, 8 aa, Homo Sapiens
VQVSTSNI

SEQ ID NO: 120971 - protein, 8 aa, Homo Sapiens
VQYEINLL

SEQ ID NO: 120972 - protein, 8 aa, Homo Sapiens
VQYFLHVV

SEQ ID NO: 120973 - protein, 8 aa, Homo Sapiens
VQYKATSL

SEQ ID NO: 120974 - protein, 8 aa, Homo Sapiens
VQYKFSHL

SEQ ID NO: 120975 - protein, 8 aa, Homo Sapiens
VQYLVKEV

SEQ ID NO: 120976 - protein, 8 aa, Homo Sapiens
VQYPPKKV

SEQ ID NO: 120977 - protein, 8 aa, Homo Sapiens
VQYQAPQL

SEQ ID NO: 120978 - protein, 8 aa, Homo Sapiens
VSKILPRV

SEQ ID NO: 120979 - protein, 8 aa, Homo Sapiens
VSPRVLEV

SEQ ID NO: 120980 - protein, 8 aa, Homo Sapiens
VSTYIKKI

SEQ ID NO: 120981 - protein, 8 aa, Homo Sapiens
VSYKPQKI

SEQ ID NO: 120982 - protein, 8 aa, Homo Sapiens
VSYLFSHV

SEQ ID NO: 120983 - protein, 8 aa, Homo Sapiens
YAPAAATV

SEQ ID NO: 120984 - protein, 8 aa, Homo Sapiens
YAYRHPLI

SEQ ID NO: 120985 - protein, 8 aa, Homo Sapiens
YDYILPQV

SEQ ID NO: 120986 - protein, 8 aa, Homo Sapiens
YEILLHEV

SEQ ID NO: 120987 - protein, 8 aa, Homo Sapiens
YEKQLAQI

SEQ ID NO: 120988 - protein, 8 aa, Homo Sapiens
YEYQPLQI

SEQ ID NO: 120989 - protein, 8 aa, Homo Sapiens
YEYVYRCI

SEQ ID NO: 120990 - protein, 8 aa, Homo Sapiens
YFPVVKLV

SEQ ID NO: 120991 - protein, 8 aa, Homo Sapiens
YGHKLPVI

SEQ ID NO: 120992 - protein, 8 aa, Homo Sapiens
YMFATKVV

SEQ ID NO: 120993 - protein, 8 aa, Homo Sapiens
YMLKANLI

SEQ ID NO: 120994 - protein, 8 aa, Homo Sapiens
YQFRLIVI

SEQ ID NO: 120995 - protein, 8 aa, Homo Sapiens
YQFRMEEI

SEQ ID NO: 120996 - protein, 8 aa, Homo Sapiens
YQGPVLLI

SEQ ID NO: 120997 - protein, 8 aa, Homo Sapiens
YQHKFPEV

SEQ ID NO: 120998 - protein, 8 aa, Homo Sapiens
YQIAVTKV

SEQ ID NO: 120999 - protein, 8 aa, Homo Sapiens
YQIHLKSV

SEQ ID NO: 121000 - protein, 8 aa, Homo Sapiens
YQIIMTMI

SEQ ID NO: 121001 - protein, 8 aa, Homo Sapiens
YQIRLESV

SEQ ID NO: 121002 - protein, 8 aa, Homo Sapiens
YQLPLSKI

SEQ ID NO: 121003 - protein, 8 aa, Homo Sapiens
YQNKCRLI

SEQ ID NO: 121004 - protein, 8 aa, Homo Sapiens
YQQALSRV

SEQ ID NO: 121005 - protein, 8 aa, Homo Sapiens
YQRAPRNI

SEQ ID NO: 121006 - protein, 8 aa, Homo Sapiens
YQRETPQV

SEQ ID NO: 121007 - protein, 8 aa, Homo Sapiens
YQRLLHEV

SEQ ID NO: 121008 - protein, 8 aa, Homo Sapiens
YQTELTFI

SEQ ID NO: 121009 - protein, 8 aa, Homo Sapiens
YQTKAVII

SEQ ID NO: 121010 - protein, 8 aa, Homo Sapiens
YQTSPPKV

SEQ ID NO: 121011 - protein, 8 aa, Homo Sapiens
YQYGFNLV

SEQ ID NO: 121012 - protein, 8 aa, Homo Sapiens
YQYMHETI

SEQ ID NO: 121013 - protein, 8 aa, Homo Sapiens
YSFSFHVV

SEQ ID NO: 121014 - protein, 8 aa, Homo Sapiens
YSHIMALI

SEQ ID NO: 121015 - protein, 8 aa, Homo Sapiens
YSIVIRQI

SEQ ID NO: 121016 - protein, 8 aa, Homo Sapiens
YSKMLAKV

SEQ ID NO: 121017 - protein, 8 aa, Homo Sapiens
YSSEQLLI

SEQ ID NO: 121018 - protein, 9 aa, Homo Sapiens
AAAPPAKEI

SEQ ID NO: 121019 - protein, 9 aa, Homo Sapiens
AAKDPSPSV

SEQ ID NO: 121020 - protein, 9 aa, Homo Sapiens
AAPAYSRAL

SEQ ID NO: 121021 - protein, 9 aa, Homo Sapiens
AFIKRTPVI

SEQ ID NO: 121022 - protein, 9 aa, Homo Sapiens
AFYKAQPVI

SEQ ID NO: 121023 - protein, 9 aa, Homo Sapiens
ALYEQSLHI

SEQ ID NO: 121024 - protein, 9 aa, Homo Sapiens
AMAASPHAV

SEQ ID NO: 121025 - protein, 9 aa, Homo Sapiens
AMAKPQVVV

SEQ ID NO: 121026 - protein, 9 aa, Homo Sapiens
AMAPGTVTV

SEQ ID NO: 121027 - protein, 9 aa, Homo Sapiens
AMAPTSPQI

SEQ ID NO: 121028 - protein, 9 aa, Homo Sapiens
AMAPVTTRI

SEQ ID NO: 121029 - protein, 9 aa, Homo Sapiens
AMFGKLMTI

SEQ ID NO: 121030 - protein, 9 aa, Homo Sapiens
AMFRPFVEV

SEQ ID NO: 121031 - protein, 9 aa, Homo Sapiens
AMIERITFI

SEQ ID NO: 121032 - protein, 9 aa, Homo Sapiens
AMINRFQFV

SEQ ID NO: 121033 - protein, 9 aa, Homo Sapiens
AMLAVLHTV

SEQ ID NO: 121034 - protein, 9 aa, Homo Sapiens
AMLERQFTV

SEQ ID NO: 121035 - protein, 9 aa, Homo Sapiens
AMNSQILEV

SEQ ID NO: 121036 - protein, 9 aa, Homo Sapiens
AMYEHKIFV

SEQ ID NO: 121037 - protein, 9 aa, Homo Sapiens
AMYFIQQKV

SEQ ID NO: 121038 - protein, 9 aa, Homo Sapiens
AMYKKSLHI

SEQ ID NO: 121039 - protein, 9 aa, Homo Sapiens
AQALAKLTI

SEQ ID NO: 121040 - protein, 9 aa, Homo Sapiens
AQFEHTLLV

SEQ ID NO: 121041 - protein, 9 aa, Homo Sapiens
AQFGYYFRV

SEQ ID NO: 121042 - protein, 9 aa, Homo Sapiens
AQFPESFTV

SEQ ID NO: 121043 - protein, 9 aa, Homo Sapiens
AQFRFYRHV

SEQ ID NO: 121044 - protein, 9 aa, Homo Sapiens
AQHCFIKSI

SEQ ID NO: 121045 - protein, 9 aa, Homo Sapiens
AQHIVPCTI

SEQ ID NO: 121046 - protein, 9 aa, Homo Sapiens
AQHKFLVAV

SEQ ID NO: 121047 - protein, 9 aa, Homo Sapiens
AQHMNISTV

SEQ ID NO: 121048 - protein, 9 aa, Homo Sapiens
AQHPNIVTV

SEQ ID NO: 121049 - protein, 9 aa, Homo Sapiens
AQILQILTV

SEQ ID NO: 121050 - protein, 9 aa, Homo Sapiens
AQILRLLHI

SEQ ID NO: 121051 - protein, 9 aa, Homo Sapiens
AQIRYLTQV

SEQ ID NO: 121052 - protein, 9 aa, Homo Sapiens
AQKISVRTV

SEQ ID NO: 121053 - protein, 9 aa, Homo Sapiens
AQKSPAPKV

SEQ ID NO: 121054 - protein, 9 aa, Homo Sapiens
AQLELISRI

SEQ ID NO: 121055 - protein, 9 aa, Homo Sapiens
AQLLNMPVV

SEQ ID NO: 121056 - protein, 9 aa, Homo Sapiens
AQLLVACKV

SEQ ID NO: 121057 - protein, 9 aa, Homo Sapiens
AQNARALKI

SEQ ID NO: 121058 - protein, 9 aa, Homo Sapiens
AQNLIGISI

SEQ ID NO: 121059 - protein, 9 aa, Homo Sapiens
AQQEIKATV

SEQ ID NO: 121060 - protein, 9 aa, Homo Sapiens
AQRAFILTV

SEQ ID NO: 121061 - protein, 9 aa, Homo Sapiens
AQRAVELFI

SEQ ID NO: 121062 - protein, 9 aa, Homo Sapiens
AQRFILRHV

SEQ ID NO: 121063 - protein, 9 aa, Homo Sapiens
AQRIMTLSV

SEQ ID NO: 121064 - protein, 9 aa, Homo Sapiens
AQRSFRVSI

SEQ ID NO: 121065 - protein, 9 aa, Homo Sapiens
AQRVQENMI

SEQ ID NO: 121066 - protein, 9 aa, Homo Sapiens
AQVALVNEV

SEQ ID NO: 121067 - protein, 9 aa, Homo Sapiens
AQVPMNMTI

SEQ ID NO: 121068 - protein, 9 aa, Homo Sapiens
AQYAQRASV

SEQ ID NO: 121069 - protein, 9 aa, Homo Sapiens
AQYDGAYKV

SEQ ID NO: 121070 - protein, 9 aa, Homo Sapiens
AQYEHDLEV

SEQ ID NO: 121071 - protein, 9 aa, Homo Sapiens
AQYENPPHI

SEQ ID NO: 121072 - protein, 9 aa, Homo Sapiens
AQYGKKVMV

SEQ ID NO: 121073 - protein, 9 aa, Homo Sapiens
AQYHLMLHI

SEQ ID NO: 121074 - protein, 9 aa, Homo Sapiens
AQYKFVYQV

SEQ ID NO: 121075 - protein, 9 aa, Homo Sapiens
AQYLINARL

SEQ ID NO: 121076 - protein, 9 aa, Homo Sapiens
AQYLINVRL

SEQ ID NO: 121077 - protein, 9 aa, Homo Sapiens
AQYLLQNSV

SEQ ID NO: 121078 - protein, 9 aa, Homo Sapiens
AQYPKGRSV

SEQ ID NO: 121079 - protein, 9 aa, Homo Sapiens
AQYRLVTEI

SEQ ID NO: 121080 - protein, 9 aa, Homo Sapiens
ARLGVISKV

SEQ ID NO: 121081 - protein, 9 aa, Homo Sapiens
ASYRAQPSV

SEQ ID NO: 121082 - protein, 9 aa, Homo Sapiens
ASYVNLPTI

SEQ ID NO: 121083 - protein, 9 aa, Homo Sapiens
ATYVFLHTV

SEQ ID NO: 121084 - protein, 9 aa, Homo Sapiens
AVRVPAPSI

SEQ ID NO: 121085 - protein, 9 aa, Homo Sapiens
CSYVVTRTI

SEQ ID NO: 121086 - protein, 9 aa, Homo Sapiens
DQYPYLKSV

SEQ ID NO: 121087 - protein, 9 aa, Homo Sapiens
ELGAQLLEL

SEQ ID NO: 121088 - protein, 9 aa, Homo Sapiens
EMEKNVRLL

SEQ ID NO: 121089 - protein, 9 aa, Homo Sapiens
EMLKTIKTV

SEQ ID NO: 121090 - protein, 9 aa, Homo Sapiens
EMYNRPVEV

SEQ ID NO: 121091 - protein, 9 aa, Homo Sapiens
EQFKFKNMV

SEQ ID NO: 121092 - protein, 9 aa, Homo Sapiens
EQIELHNSI

SEQ ID NO: 121093 - protein, 9 aa, Homo Sapiens
EQRLFTEKV

SEQ ID NO: 121094 - protein, 9 aa, Homo Sapiens
EQYAAKVSI

SEQ ID NO: 121095 - protein, 9 aa, Homo Sapiens
EQYGKIEVI

SEQ ID NO: 121096 - protein, 9 aa, Homo Sapiens
EQYKFPVVI

SEQ ID NO: 121097 - protein, 9 aa, Homo Sapiens
EQYLFLVRV

SEQ ID NO: 121098 - protein, 9 aa, Homo Sapiens
EQYPTRPHI

SEQ ID NO: 121099 - protein, 9 aa, Homo Sapiens
EQYRQVISV

SEQ ID NO: 121100 - protein, 9 aa, Homo Sapiens
ERLKIRGSL

SEQ ID NO: 121101 - protein, 9 aa, Homo Sapiens
ESFTFRNHV

SEQ ID NO: 121102 - protein, 9 aa, Homo Sapiens
ESRQFPVTV

SEQ ID NO: 121103 - protein, 9 aa, Homo Sapiens
FALYPINIS

SEQ ID NO: 121104 - protein, 9 aa, Homo Sapiens
FEFEYQTKV

SEQ ID NO: 121105 - protein, 9 aa, Homo Sapiens
FEWENKVTV

SEQ ID NO: 121106 - protein, 9 aa, Homo Sapiens
FPYAFKEVI

SEQ ID NO: 121107 - protein, 9 aa, Homo Sapiens
FQKAIQETV

SEQ ID NO: 121108 - protein, 9 aa, Homo Sapiens
FQNTFPHSI

SEQ ID NO: 121109 - protein, 9 aa, Homo Sapiens
FQRTNALTV

SEQ ID NO: 121110 - protein, 9 aa, Homo Sapiens
FRVPTANVS

SEQ ID NO: 121111 - protein, 9 aa, Homo Sapiens
FSYAFPKAV

SEQ ID NO: 121112 - protein, 9 aa, Homo Sapiens
GFYPGQVLI

SEQ ID NO: 121113 - protein, 9 aa, Homo Sapiens
GFYPGSIEV

SEQ ID NO: 121114 - protein, 9 aa, Homo Sapiens
GGLYAKLVQ

SEQ ID NO: 121115 - protein, 9 aa, Homo Sapiens
GLMRKVPRV

SEQ ID NO: 121116 - protein, 9 aa, Homo Sapiens
GLQYIFAHV

SEQ ID NO: 121117 - protein, 9 aa, Homo Sapiens
GLYSRQLYV

SEQ ID NO: 121118 - protein, 9 aa, Homo Sapiens
GMDPITRQV

SEQ ID NO: 121119 - protein, 9 aa, Homo Sapiens
GMMPPQPGI

SEQ ID NO: 121120 - protein, 9 aa, Homo Sapiens
GMRDCINTI

SEQ ID NO: 121121 - protein, 9 aa, Homo Sapiens
GMYDGSALI

SEQ ID NO: 121122 - protein, 9 aa, Homo Sapiens
GMYIFLHTV

SEQ ID NO: 121123 - protein, 9 aa, Homo Sapiens
GMYLISKYI

SEQ ID NO: 121124 - protein, 9 aa, Homo Sapiens
GMYPNLVHV

SEQ ID NO: 121125 - protein, 9 aa, Homo Sapiens
GMYVFLHAV

SEQ ID NO: 121126 - protein, 9 aa, Homo Sapiens
GNQIETPSI

SEQ ID NO: 121127 - protein, 9 aa, Homo Sapiens
GQDDKIRVV

SEQ ID NO: 121128 - protein, 9 aa, Homo Sapiens
GQDMFRETI

SEQ ID NO: 121129 - protein, 9 aa, Homo Sapiens
GQFNFVHVI

SEQ ID NO: 121130 - protein, 9 aa, Homo Sapiens
GQFPFYDSI

SEQ ID NO: 121131 - protein, 9 aa, Homo Sapiens
GQHAFYQLI

SEQ ID NO: 121132 - protein, 9 aa, Homo Sapiens
GQHCFIREV

SEQ ID NO: 121133 - protein, 9 aa, Homo Sapiens
GQKEGEPRI

SEQ ID NO: 121134 - protein, 9 aa, Homo Sapiens
GQKHFGATV

SEQ ID NO: 121135 - protein, 9 aa, Homo Sapiens
GQLLVKPTI

SEQ ID NO: 121136 - protein, 9 aa, Homo Sapiens
GQQIQIQTV

SEQ ID NO: 121137 - protein, 9 aa, Homo Sapiens
GQRIQNVNV

SEQ ID NO: 121138 - protein, 9 aa, Homo Sapiens
GQSPPLPRI

SEQ ID NO: 121139 - protein, 9 aa, Homo Sapiens
GQTIIHHHI

SEQ ID NO: 121140 - protein, 9 aa, Homo Sapiens
GQYYAIKKI

SEQ ID NO: 121141 - protein, 9 aa, Homo Sapiens
GSRLYAHTI

SEQ ID NO: 121142 - protein, 9 aa, Homo Sapiens
GSYVFENTV

SEQ ID NO: 121143 - protein, 9 aa, Homo Sapiens
GTQYTFSSI

SEQ ID NO: 121144 - protein, 9 aa, Homo Sapiens
HACGVIATI

SEQ ID NO: 121145 - protein, 9 aa, Homo Sapiens
HAHPFFFTI

SEQ ID NO: 121146 - protein, 9 aa, Homo Sapiens
HAPEIVSTV

SEQ ID NO: 121147 - protein, 9 aa, Homo Sapiens
HGHLYVNKV

SEQ ID NO: 121148 - protein, 9 aa, Homo Sapiens
HGYEKYNTI

SEQ ID NO: 121149 - protein, 9 aa, Homo Sapiens
HMAKAFKEV

SEQ ID NO: 121150 - protein, 9 aa, Homo Sapiens
HMHIHISTV

SEQ ID NO: 121151 - protein, 9 aa, Homo Sapiens
HQALHSISV

SEQ ID NO: 121152 - protein, 9 aa, Homo Sapiens
HQAQLISKI

SEQ ID NO: 121153 - protein, 9 aa, Homo Sapiens
HQATFRLNV

SEQ ID NO: 121154 - protein, 9 aa, Homo Sapiens
HQFIQEENI

SEQ ID NO: 121155 - protein, 9 aa, Homo Sapiens
HQFQLDITV

SEQ ID NO: 121156 - protein, 9 aa, Homo Sapiens
HQHEEIQNV

SEQ ID NO: 121157 - protein, 9 aa, Homo Sapiens
HQHEYFFLI

SEQ ID NO: 121158 - protein, 9 aa, Homo Sapiens
HQIFHVLVV

SEQ ID NO: 121159 - protein, 9 aa, Homo Sapiens
HQIIMPSAI

SEQ ID NO: 121160 - protein, 9 aa, Homo Sapiens
HQIMHLLSV

SEQ ID NO: 121161 - protein, 9 aa, Homo Sapiens
HQIQNVVTV

SEQ ID NO: 121162 - protein, 9 aa, Homo Sapiens
HQKGGIPNV

SEQ ID NO: 121163 - protein, 9 aa, Homo Sapiens
HQKVLNVSI

SEQ ID NO: 121164 - protein, 9 aa, Homo Sapiens
HQLFHIFVV

SEQ ID NO: 121165 - protein, 9 aa, Homo Sapiens
HQLNICSKV

SEQ ID NO: 121166 - protein, 9 aa, Homo Sapiens
HQLPLPHNV

SEQ ID NO: 121167 - protein, 9 aa, Homo Sapiens
HQLRFTCRV

SEQ ID NO: 121168 - protein, 9 aa, Homo Sapiens
HQLSQHVTV

SEQ ID NO: 121169 - protein, 9 aa, Homo Sapiens
HQMEFPCNI

SEQ ID NO: 121170 - protein, 9 aa, Homo Sapiens
HQMETHYRV

SEQ ID NO: 121171 - protein, 9 aa, Homo Sapiens
HQMQLVDSI

SEQ ID NO: 121172 - protein, 9 aa, Homo Sapiens
HQNDKQISI

SEQ ID NO: 121173 - protein, 9 aa, Homo Sapiens
HQNGSMAAV

SEQ ID NO: 121174 - protein, 9 aa, Homo Sapiens
HQNKILSSV

SEQ ID NO: 121175 - protein, 9 aa, Homo Sapiens
HQNQAKLVV

SEQ ID NO: 121176 - protein, 9 aa, Homo Sapiens
HQNVFPNHI

SEQ ID NO: 121177 - protein, 9 aa, Homo Sapiens
HQNVNVKNI

SEQ ID NO: 121178 - protein, 9 aa, Homo Sapiens
HQQQVAQAV

SEQ ID NO: 121179 - protein, 9 aa, Homo Sapiens
HQQTFLNQL

SEQ ID NO: 121180 - protein, 9 aa, Homo Sapiens
HQRLEPATL

SEQ ID NO: 121181 - protein, 9 aa, Homo Sapiens
HQRQVYLQI

SEQ ID NO: 121182 - protein, 9 aa, Homo Sapiens
HQRSFDIGI

SEQ ID NO: 121183 - protein, 9 aa, Homo Sapiens
HQRSFTETM

SEQ ID NO: 121184 - protein, 9 aa, Homo Sapiens
HQRTFVLEV

SEQ ID NO: 121185 - protein, 9 aa, Homo Sapiens
HQRVLYIDI

SEQ ID NO: 121186 - protein, 9 aa, Homo Sapiens
HQTIVMQFI

SEQ ID NO: 121187 - protein, 9 aa, Homo Sapiens
HQTPLHLAV

SEQ ID NO: 121188 - protein, 9 aa, Homo Sapiens
HQVMINQFV

SEQ ID NO: 121189 - protein, 9 aa, Homo Sapiens
HQVPAVSSV

SEQ ID NO: 121190 - protein, 9 aa, Homo Sapiens
HQVPQANTI

SEQ ID NO: 121191 - protein, 9 aa, Homo Sapiens
HQYDGLVEL

SEQ ID NO: 121192 - protein, 9 aa, Homo Sapiens
HQYFHICFV

SEQ ID NO: 121193 - protein, 9 aa, Homo Sapiens
HQYIFSHIL

SEQ ID NO: 121194 - protein, 9 aa, Homo Sapiens
HQYITKMTA

SEQ ID NO: 121195 - protein, 9 aa, Homo Sapiens
HQYKVRAYI

SEQ ID NO: 121196 - protein, 9 aa, Homo Sapiens
HQYPNFKDI

SEQ ID NO: 121197 - protein, 9 aa, Homo Sapiens
HQYVVGDTI

SEQ ID NO: 121198 - protein, 9 aa, Homo Sapiens
HSFIFFNKV

SEQ ID NO: 121199 - protein, 9 aa, Homo Sapiens
HSHLLYSTI

SEQ ID NO: 121200 - protein, 9 aa, Homo Sapiens
HSLQMLHTI

SEQ ID NO: 121201 - protein, 9 aa, Homo Sapiens
HSNEVIMTI

SEQ ID NO: 121202 - protein, 9 aa, Homo Sapiens
HSQLMRLMV

SEQ ID NO: 121203 - protein, 9 aa, Homo Sapiens
HSRCSVASI

SEQ ID NO: 121204 - protein, 9 aa, Homo Sapiens
HSRFIFNYV

SEQ ID NO: 121205 - protein, 9 aa, Homo Sapiens
HSYLQENKI

SEQ ID NO: 121206 - protein, 9 aa, Homo Sapiens
HSYLSKEEI

SEQ ID NO: 121207 - protein, 9 aa, Homo Sapiens
HSYVIGFVV

SEQ ID NO: 121208 - protein, 9 aa, Homo Sapiens
HVYELLNTI

SEQ ID NO: 121209 - protein, 9 aa, Homo Sapiens
IAYKFGKTV

SEQ ID NO: 121210 - protein, 9 aa, Homo Sapiens
IGYKIKTLI

SEQ ID NO: 121211 - protein, 9 aa, Homo Sapiens
IQDEIRSVI

SEQ ID NO: 121212 - protein, 9 aa, Homo Sapiens
IQHVFQNLI

SEQ ID NO: 121213 - protein, 9 aa, Homo Sapiens
IQKLFSERI

SEQ ID NO: 121214 - protein, 9 aa, Homo Sapiens
IQKLHIRTV

SEQ ID NO: 121215 - protein, 9 aa, Homo Sapiens
IQKRFGLNI

SEQ ID NO: 121216 - protein, 9 aa, Homo Sapiens
IQLGITHTV

SEQ ID NO: 121217 - protein, 9 aa, Homo Sapiens
IQRGPVRGI

SEQ ID NO: 121218 - protein, 9 aa, Homo Sapiens
IQRIFLITL

SEQ ID NO: 121219 - protein, 9 aa, Homo Sapiens
IQYDRTLLV

SEQ ID NO: 121220 - protein, 9 aa, Homo Sapiens
IQYIRPVFV

SEQ ID NO: 121221 - protein, 9 aa, Homo Sapiens
IQYLSKIKI

SEQ ID NO: 121222 - protein, 9 aa, Homo Sapiens
IQYQAVPQI

SEQ ID NO: 121223 - protein, 9 aa, Homo Sapiens
KDVDGAYMT

SEQ ID NO: 121224 - protein, 9 aa, Homo Sapiens
KFFEMVNTI

SEQ ID NO: 121225 - protein, 9 aa, Homo Sapiens
KFYESIMKI

SEQ ID NO: 121226 - protein, 9 aa, Homo Sapiens
KIYEGQVEV

SEQ ID NO: 121227 - protein, 9 aa, Homo Sapiens
KLLEQALVI

SEQ ID NO: 121228 - protein, 9 aa, Homo Sapiens
KLYEQHHVV

SEQ ID NO: 121229 - protein, 9 aa, Homo Sapiens
KLYGKPIRV

SEQ ID NO: 121230 - protein, 9 aa, Homo Sapiens
KMAPALRKV

SEQ ID NO: 121231 - protein, 9 aa, Homo Sapiens
KMAPPPKEV

SEQ ID NO: 121232 - protein, 9 aa, Homo Sapiens
KMFEVDMKI

SEQ ID NO: 121233 - protein, 9 aa, Homo Sapiens
KMMDVTVTI

SEQ ID NO: 121234 - protein, 9 aa, Homo Sapiens
KMYGKIIRV

SEQ ID NO: 121235 - protein, 9 aa, Homo Sapiens
KQFHHQLRV

SEQ ID NO: 121236 - protein, 9 aa, Homo Sapiens
KQFLVKVLI

SEQ ID NO: 121237 - protein, 9 aa, Homo Sapiens
KQIDQFLVV

SEQ ID NO: 121238 - protein, 9 aa, Homo Sapiens
KQRLTPKLF

SEQ ID NO: 121239 - protein, 9 aa, Homo Sapiens
KQYDKALEI

SEQ ID NO: 121240 - protein, 9 aa, Homo Sapiens
KQYQAGQTV

SEQ ID NO: 121241 - protein, 9 aa, Homo Sapiens
KQYQIVERI

SEQ ID NO: 121242 - protein, 9 aa, Homo Sapiens
LEHPFVSSI

SEQ ID NO: 121243 - protein, 9 aa, Homo Sapiens
LLYGHTVTV

SEQ ID NO: 121244 - protein, 9 aa, Homo Sapiens
LMAPAPSTV

SEQ ID NO: 121245 - protein, 9 aa, Homo Sapiens
LMKDCEAEV

SEQ ID NO: 121246 - protein, 9 aa, Homo Sapiens
LMNAVVQTV

SEQ ID NO: 121247 - protein, 9 aa, Homo Sapiens
LPHVFVNCV

SEQ ID NO: 121248 - protein, 9 aa, Homo Sapiens
LPYLVSNVI

SEQ ID NO: 121249 - protein, 9 aa, Homo Sapiens
LQFDGIHVV

SEQ ID NO: 121250 - protein, 9 aa, Homo Sapiens
LQSEKTITL

SEQ ID NO: 121251 - protein, 9 aa, Homo Sapiens
LSFPFHESI

SEQ ID NO: 121252 - protein, 9 aa, Homo Sapiens
LSRLSVNSV

SEQ ID NO: 121253 - protein, 9 aa, Homo Sapiens
LSYDGRLVI

SEQ ID NO: 121254 - protein, 9 aa, Homo Sapiens
MLFGHPLLV

SEQ ID NO: 121255 - protein, 9 aa, Homo Sapiens
MMLLRPLLV

SEQ ID NO: 121256 - protein, 9 aa, Homo Sapiens
MMPAVFHTV

SEQ ID NO: 121257 - protein, 9 aa, Homo Sapiens
MMPPPVGMV

SEQ ID NO: 121258 - protein, 9 aa, Homo Sapiens
MMQQPARSV

SEQ ID NO: 121259 - protein, 9 aa, Homo Sapiens
MMYQTGMKI

SEQ ID NO: 121260 - protein, 9 aa, Homo Sapiens
MQIFVKTLT

SEQ ID NO: 121261 - protein, 9 aa, Homo Sapiens
MQKAPMTTV

SEQ ID NO: 121262 - protein, 9 aa, Homo Sapiens
MQNPRQYKI

SEQ ID NO: 121263 - protein, 9 aa, Homo Sapiens
MQYLPQHTI

SEQ ID NO: 121264 - protein, 9 aa, Homo Sapiens
MQYPISINV

SEQ ID NO: 121265 - protein, 9 aa, Homo Sapiens
MQYQVLNEV

SEQ ID NO: 121266 - protein, 9 aa, Homo Sapiens
MSLMIRQTI

SEQ ID NO: 121267 - protein, 9 aa, Homo Sapiens
NAALQAAEL

SEQ ID NO: 121268 - protein, 9 aa, Homo Sapiens
NEYVFRETV

SEQ ID NO: 121269 - protein, 9 aa, Homo Sapiens
NGQICLPII

SEQ ID NO: 121270 - protein, 9 aa, Homo Sapiens
NMYGKVVTV

SEQ ID NO: 121271 - protein, 9 aa, Homo Sapiens
NNCLEILRV

SEQ ID NO: 121272 - protein, 9 aa, Homo Sapiens
NQFPGFKEV

SEQ ID NO: 121273 - protein, 9 aa, Homo Sapiens
NQIQMKETV

SEQ ID NO: 121274 - protein, 9 aa, Homo Sapiens
NQLKNTNTI

SEQ ID NO: 121275 - protein, 9 aa, Homo Sapiens
NQRVLVTSV

SEQ ID NO: 121276 - protein, 9 aa, Homo Sapiens
NQRVLWWSI

SEQ ID NO: 121277 - protein, 9 aa, Homo Sapiens
NQTIFEQTI

SEQ ID NO: 121278 - protein, 9 aa, Homo Sapiens
NQVAVNTTI

SEQ ID NO: 121279 - protein, 9 aa, Homo Sapiens
NQYRLIVNV

SEQ ID NO: 121280 - protein, 9 aa, Homo Sapiens
NSRAFTNLV

SEQ ID NO: 121281 - protein, 9 aa, Homo Sapiens
NSYPVTMSI

SEQ ID NO: 121282 - protein, 9 aa, Homo Sapiens
QMKKVVKTV

SEQ ID NO: 121283 - protein, 9 aa, Homo Sapiens
QMLAVVETI

SEQ ID NO: 121284 - protein, 9 aa, Homo Sapiens
QMLEETRQV

SEQ ID NO: 121285 - protein, 9 aa, Homo Sapiens
QMLENQMEV

SEQ ID NO: 121286 - protein, 9 aa, Homo Sapiens
QMLESKRNV

SEQ ID NO: 121287 - protein, 9 aa, Homo Sapiens
QMLTRILVI

SEQ ID NO: 121288 - protein, 9 aa, Homo Sapiens
QMPETTETV

SEQ ID NO: 121289 - protein, 9 aa, Homo Sapiens
QMYQLFSRV

SEQ ID NO: 121290 - protein, 9 aa, Homo Sapiens
QMYRTEIRM

SEQ ID NO: 121291 - protein, 9 aa, Homo Sapiens
QQALMRSTV

SEQ ID NO: 121292 - protein, 9 aa, Homo Sapiens
QQAQPQQTV

SEQ ID NO: 121293 - protein, 9 aa, Homo Sapiens
QQFQYAVRV

SEQ ID NO: 121294 - protein, 9 aa, Homo Sapiens
QQHAQFPII

SEQ ID NO: 121295 - protein, 9 aa, Homo Sapiens
QQHLYRVNI

SEQ ID NO: 121296 - protein, 9 aa, Homo Sapiens
QQHVIETLI

SEQ ID NO: 121297 - protein, 9 aa, Homo Sapiens
QQIAFKNLV

SEQ ID NO: 121298 - protein, 9 aa, Homo Sapiens
QQIQKQLLI

SEQ ID NO: 121299 - protein, 9 aa, Homo Sapiens
QQISFVNSI

SEQ ID NO: 121300 - protein, 9 aa, Homo Sapiens
QQKVLHETI

SEQ ID NO: 121301 - protein, 9 aa, Homo Sapiens
QQKVVITKV

SEQ ID NO: 121302 - protein, 9 aa, Homo Sapiens
QQLCIFWKV

SEQ ID NO: 121303 - protein, 9 aa, Homo Sapiens
QQLEFLNEI

SEQ ID NO: 121304 - protein, 9 aa, Homo Sapiens
QQLEIVCLI

SEQ ID NO: 121305 - protein, 9 aa, Homo Sapiens
QQLQIIHRV

SEQ ID NO: 121306 - protein, 9 aa, Homo Sapiens
QQMENRPSV

SEQ ID NO: 121307 - protein, 9 aa, Homo Sapiens
QQRAIIPCI

SEQ ID NO: 121308 - protein, 9 aa, Homo Sapiens
QQRAQTLRV

SEQ ID NO: 121309 - protein, 9 aa, Homo Sapiens
QQRLIREQI

SEQ ID NO: 121310 - protein, 9 aa, Homo Sapiens
QQRLVVVSV

SEQ ID NO: 121311 - protein, 9 aa, Homo Sapiens
QQVIQHNTI

SEQ ID NO: 121312 - protein, 9 aa, Homo Sapiens
QQVQRLPFL

SEQ ID NO: 121313 - protein, 9 aa, Homo Sapiens
QQYECVAEI

SEQ ID NO: 121314 - protein, 9 aa, Homo Sapiens
QQYQWLEKV

SEQ ID NO: 121315 - protein, 9 aa, Homo Sapiens
QQYVFINQM

SEQ ID NO: 121316 - protein, 9 aa, Homo Sapiens
QSHTFISSV

SEQ ID NO: 121317 - protein, 9 aa, Homo Sapiens
QSYIFPSSI

SEQ ID NO: 121318 - protein, 9 aa, Homo Sapiens
RAIGIITHI

SEQ ID NO: 121319 - protein, 9 aa, Homo Sapiens
RAYLFAHAV

SEQ ID NO: 121320 - protein, 9 aa, Homo Sapiens
RAYQKQPTI

SEQ ID NO: 121321 - protein, 9 aa, Homo Sapiens
REYPNLVTI

SEQ ID NO: 121322 - protein, 9 aa, Homo Sapiens
RFFEVRRVV

SEQ ID NO: 121323 - protein, 9 aa, Homo Sapiens
RGFSKPISI

SEQ ID NO: 121324 - protein, 9 aa, Homo Sapiens
RLYDTHITV

SEQ ID NO: 121325 - protein, 9 aa, Homo Sapiens
RLYSKQITI

SEQ ID NO: 121326 - protein, 9 aa, Homo Sapiens
RMARTPQTV

SEQ ID NO: 121327 - protein, 9 aa, Homo Sapiens
RMFDGKFVV

SEQ ID NO: 121328 - protein, 9 aa, Homo Sapiens
RMFFGKNKV

SEQ ID NO: 121329 - protein, 9 aa, Homo Sapiens
RMFFHFSEI

SEQ ID NO: 121330 - protein, 9 aa, Homo Sapiens
RMGFPQHTI

SEQ ID NO: 121331 - protein, 9 aa, Homo Sapiens
RMITAMNTI

SEQ ID NO: 121332 - protein, 9 aa, Homo Sapiens
RMLAHPLHV

SEQ ID NO: 121333 - protein, 9 aa, Homo Sapiens
RMLPHAPGV

SEQ ID NO: 121334 - protein, 9 aa, Homo Sapiens
RMNPNSPSI

SEQ ID NO: 121335 - protein, 9 aa, Homo Sapiens
RMYEKALQI

SEQ ID NO: 121336 - protein, 9 aa, Homo Sapiens
RMYSYPARV

SEQ ID NO: 121337 - protein, 9 aa, Homo Sapiens
RQFDNFKRV

SEQ ID NO: 121338 - protein, 9 aa, Homo Sapiens
RQFLLKSLI

SEQ ID NO: 121339 - protein, 9 aa, Homo Sapiens
RQFPGSHRV

SEQ ID NO: 121340 - protein, 9 aa, Homo Sapiens
RQHEIVLKV

SEQ ID NO: 121341 - protein, 9 aa, Homo Sapiens
RQHLQATGV

SEQ ID NO: 121342 - protein, 9 aa, Homo Sapiens
RQHVIDVQI

SEQ ID NO: 121343 - protein, 9 aa, Homo Sapiens
RQIDQFLVV

SEQ ID NO: 121344 - protein, 9 aa, Homo Sapiens
RQKLQLEKV

SEQ ID NO: 121345 - protein, 9 aa, Homo Sapiens
RQLEKIKTI

SEQ ID NO: 121346 - protein, 9 aa, Homo Sapiens
RQLGHALLV

SEQ ID NO: 121347 - protein, 9 aa, Homo Sapiens
RQLPSQKTV

SEQ ID NO: 121348 - protein, 9 aa, Homo Sapiens
RQMIMIRSI

SEQ ID NO: 121349 - protein, 9 aa, Homo Sapiens
RQMSVNSSI

SEQ ID NO: 121350 - protein, 9 aa, Homo Sapiens
RQMTVIRKV

SEQ ID NO: 121351 - protein, 9 aa, Homo Sapiens
RQNLVALTV

SEQ ID NO: 121352 - protein, 9 aa, Homo Sapiens
RQVVLKYTV

SEQ ID NO: 121353 - protein, 9 aa, Homo Sapiens
RQYLAINQI

SEQ ID NO: 121354 - protein, 9 aa, Homo Sapiens
RQYLILRNI

SEQ ID NO: 121355 - protein, 9 aa, Homo Sapiens
RQYPETKII

SEQ ID NO: 121356 - protein, 9 aa, Homo Sapiens
RSVLIANTV

SEQ ID NO: 121357 - protein, 9 aa, Homo Sapiens
SAWRVISSI

SEQ ID NO: 121358 - protein, 9 aa, Homo Sapiens
SAYLVAEKV

SEQ ID NO: 121359 - protein, 9 aa, Homo Sapiens
SEYPVILSI

SEQ ID NO: 121360 - protein, 9 aa, Homo Sapiens
SFHEFCTSV

SEQ ID NO: 121361 - protein, 9 aa, Homo Sapiens
SFYEHIITV

SEQ ID NO: 121362 - protein, 9 aa, Homo Sapiens
SFYPYIHVV

SEQ ID NO: 121363 - protein, 9 aa, Homo Sapiens
SGRTFLHTV

SEQ ID NO: 121364 - protein, 9 aa, Homo Sapiens
SLYGGTITI

SEQ ID NO: 121365 - protein, 9 aa, Homo Sapiens
SLYPIAVLI

SEQ ID NO: 121366 - protein, 9 aa, Homo Sapiens
SMFGAGLTV

SEQ ID NO: 121367 - protein, 9 aa, Homo Sapiens
SMHDRSLKV

SEQ ID NO: 121368 - protein, 9 aa, Homo Sapiens
SMYDKVLML

SEQ ID NO: 121369 - protein, 9 aa, Homo Sapiens
SNQMLVPVI

SEQ ID NO: 121370 - protein, 9 aa, Homo Sapiens
SQARFGQSV

SEQ ID NO: 121371 - protein, 9 aa, Homo Sapiens
SQCPHIVRI

SEQ ID NO: 121372 - protein, 9 aa, Homo Sapiens
SQDPGTHVV

SEQ ID NO: 121373 - protein, 9 aa, Homo Sapiens
SQFAFESVV

SEQ ID NO: 121374 - protein, 9 aa, Homo Sapiens
SQFMYDEHI

SEQ ID NO: 121375 - protein, 9 aa, Homo Sapiens
SQFPKHLIV

SEQ ID NO: 121376 - protein, 9 aa, Homo Sapiens
SQFSYQHAI

SEQ ID NO: 121377 - protein, 9 aa, Homo Sapiens
SQHKFASNV

SEQ ID NO: 121378 - protein, 9 aa, Homo Sapiens
SQIPAQPSV

SEQ ID NO: 121379 - protein, 9 aa, Homo Sapiens
SQIQYMNTV

SEQ ID NO: 121380 - protein, 9 aa, Homo Sapiens
SQLELKSLI

SEQ ID NO: 121381 - protein, 9 aa, Homo Sapiens
SQLVIHQRI

SEQ ID NO: 121382 - protein, 9 aa, Homo Sapiens
SQMGIRSSI

SEQ ID NO: 121383 - protein, 9 aa, Homo Sapiens
SQNPYHNAV

SEQ ID NO: 121384 - protein, 9 aa, Homo Sapiens
SQQLVHVTV

SEQ ID NO: 121385 - protein, 9 aa, Homo Sapiens
SQRSFVEFI

SEQ ID NO: 121386 - protein, 9 aa, Homo Sapiens
SQRTITVGV

SEQ ID NO: 121387 - protein, 9 aa, Homo Sapiens
SQVEILQRV

SEQ ID NO: 121388 - protein, 9 aa, Homo Sapiens
SQWSPALTI

SEQ ID NO: 121389 - protein, 9 aa, Homo Sapiens
SQYLTRITI

SEQ ID NO: 121390 - protein, 9 aa, Homo Sapiens
SQYPFPVTL

SEQ ID NO: 121391 - protein, 9 aa, Homo Sapiens
SQYPGAKYI

SEQ ID NO: 121392 - protein, 9 aa, Homo Sapiens
SQYPWSQRV

SEQ ID NO: 121393 - protein, 9 aa, Homo Sapiens
SQYSGQLKV

SEQ ID NO: 121394 - protein, 9 aa, Homo Sapiens
SSRIIKNNI

SEQ ID NO: 121395 - protein, 9 aa, Homo Sapiens
SSRLILSNV

SEQ ID NO: 121396 - protein, 9 aa, Homo Sapiens
SSWRVISSI

SEQ ID NO: 121397 - protein, 9 aa, Homo Sapiens
TFLPFIHTI

SEQ ID NO: 121398 - protein, 9 aa, Homo Sapiens
TGYLNTVTV

SEQ ID NO: 121399 - protein, 9 aa, Homo Sapiens
TIRYPDPLI

SEQ ID NO: 121400 - protein, 9 aa, Homo Sapiens
TMCATTRTI

SEQ ID NO: 121401 - protein, 9 aa, Homo Sapiens
TQHCFKTMV

SEQ ID NO: 121402 - protein, 9 aa, Homo Sapiens
TQKKPSISI

SEQ ID NO: 121403 - protein, 9 aa, Homo Sapiens
TQKTFLTEV

SEQ ID NO: 121404 - protein, 9 aa, Homo Sapiens
TQLPQSMKI

SEQ ID NO: 121405 - protein, 9 aa, Homo Sapiens
TQLTIHQRV

SEQ ID NO: 121406 - protein, 9 aa, Homo Sapiens
TQRIFQEAV

SEQ ID NO: 121407 - protein, 9 aa, Homo Sapiens
TQRNCIRTI

SEQ ID NO: 121408 - protein, 9 aa, Homo Sapiens
TQRTFLKEV

SEQ ID NO: 121409 - protein, 9 aa, Homo Sapiens
TQYEFQVRV

SEQ ID NO: 121410 - protein, 9 aa, Homo Sapiens
TQYIFTEKL

SEQ ID NO: 121411 - protein, 9 aa, Homo Sapiens
TQYKFRLTA

SEQ ID NO: 121412 - protein, 9 aa, Homo Sapiens
TQYSAVRTV

SEQ ID NO: 121413 - protein, 9 aa, Homo Sapiens
TSFIFFNKV

SEQ ID NO: 121414 - protein, 9 aa, Homo Sapiens
TSQYLMHEV

SEQ ID NO: 121415 - protein, 9 aa, Homo Sapiens
TSREIQTAV

SEQ ID NO: 121416 - protein, 9 aa, Homo Sapiens
VAPGKDLTK

SEQ ID NO: 121417 - protein, 9 aa, Homo Sapiens
VFFPEEPKV

SEQ ID NO: 121418 - protein, 9 aa, Homo Sapiens
VFPRPEPFV

SEQ ID NO: 121419 - protein, 9 aa, Homo Sapiens
VFRDQEPKI

SEQ ID NO: 121420 - protein, 9 aa, Homo Sapiens
VFYGHHAKI

SEQ ID NO: 121421 - protein, 9 aa, Homo Sapiens
VLYDRPLKI

SEQ ID NO: 121422 - protein, 9 aa, Homo Sapiens
VLYENKVAV

SEQ ID NO: 121423 - protein, 9 aa, Homo Sapiens
VMADIRELI

SEQ ID NO: 121424 - protein, 9 aa, Homo Sapiens
VMEQGRVTI

SEQ ID NO: 121425 - protein, 9 aa, Homo Sapiens
VMEYHPRII

SEQ ID NO: 121426 - protein, 9 aa, Homo Sapiens
VMFGGKQVV

SEQ ID NO: 121427 - protein, 9 aa, Homo Sapiens
VMFKTPVSI

SEQ ID NO: 121428 - protein, 9 aa, Homo Sapiens
VMGPQEKKV

SEQ ID NO: 121429 - protein, 9 aa, Homo Sapiens
VMHPFWNTI

SEQ ID NO: 121430 - protein, 9 aa, Homo Sapiens
VMKHADPRI

SEQ ID NO: 121431 - protein, 9 aa, Homo Sapiens
VMKKIIETV

SEQ ID NO: 121432 - protein, 9 aa, Homo Sapiens
VMRIMDPEI

SEQ ID NO: 121433 - protein, 9 aa, Homo Sapiens
VMTIPIPIV

SEQ ID NO: 121434 - protein, 9 aa, Homo Sapiens
VMYGKVYRI

SEQ ID NO: 121435 - protein, 9 aa, Homo Sapiens
VQFLVPQSI

SEQ ID NO: 121436 - protein, 9 aa, Homo Sapiens
VQFVFDNKV

SEQ ID NO: 121437 - protein, 9 aa, Homo Sapiens
VQHIPSPKV

SEQ ID NO: 121438 - protein, 9 aa, Homo Sapiens
VQHNIQKTV

SEQ ID NO: 121439 - protein, 9 aa, Homo Sapiens
VQHVVMTAI

SEQ ID NO: 121440 - protein, 9 aa, Homo Sapiens
VQKFFLEEI

SEQ ID NO: 121441 - protein, 9 aa, Homo Sapiens
VQKLYEHIV

SEQ ID NO: 121442 - protein, 9 aa, Homo Sapiens
VQLKKLPKV

SEQ ID NO: 121443 - protein, 9 aa, Homo Sapiens
VQNPQAQTI

SEQ ID NO: 121444 - protein, 9 aa, Homo Sapiens
VQPPPPCKI

SEQ ID NO: 121445 - protein, 9 aa, Homo Sapiens
VQQLVLRTV

SEQ ID NO: 121446 - protein, 9 aa, Homo Sapiens
VQREYQLVV

SEQ ID NO: 121447 - protein, 9 aa, Homo Sapiens
VQRLEPVIM

SEQ ID NO: 121448 - protein, 9 aa, Homo Sapiens
VQRQMVVSV

SEQ ID NO: 121449 - protein, 9 aa, Homo Sapiens
VQRRFVQEV

SEQ ID NO: 121450 - protein, 9 aa, Homo Sapiens
VQRSQVSSI

SEQ ID NO: 121451 - protein, 9 aa, Homo Sapiens
VQRTMLELI

SEQ ID NO: 121452 - protein, 9 aa, Homo Sapiens
VQRTQAPAV

SEQ ID NO: 121453 - protein, 9 aa, Homo Sapiens
VQTVLPLVM

SEQ ID NO: 121454 - protein, 9 aa, Homo Sapiens
VQVPVPVTV

SEQ ID NO: 121455 - protein, 9 aa, Homo Sapiens
VQVTFGRTI

SEQ ID NO: 121456 - protein, 9 aa, Homo Sapiens
VQYAAVRRV

SEQ ID NO: 121457 - protein, 9 aa, Homo Sapiens
VQYAYFKKV

SEQ ID NO: 121458 - protein, 9 aa, Homo Sapiens
VQYDGRRVV

SEQ ID NO: 121459 - protein, 9 aa, Homo Sapiens
VQYEMRTLY

SEQ ID NO: 121460 - protein, 9 aa, Homo Sapiens
VQYIVLQNI

SEQ ID NO: 121461 - protein, 9 aa, Homo Sapiens
VQYKGHVEI

SEQ ID NO: 121462 - protein, 9 aa, Homo Sapiens
VQYNEPLKV

SEQ ID NO: 121463 - protein, 9 aa, Homo Sapiens
VQYNMKIVI

SEQ ID NO: 121464 - protein, 9 aa, Homo Sapiens
VQYPYQLYI

SEQ ID NO: 121465 - protein, 9 aa, Homo Sapiens
VQYQVIPQI

SEQ ID NO: 121466 - protein, 9 aa, Homo Sapiens
VSAPPMPSV

SEQ ID NO: 121467 - protein, 9 aa, Homo Sapiens
VSHAIIRTI

SEQ ID NO: 121468 - protein, 9 aa, Homo Sapiens
VSLLVQRTI

SEQ ID NO: 121469 - protein, 9 aa, Homo Sapiens
VSRVVTQNI

SEQ ID NO: 121470 - protein, 9 aa, Homo Sapiens
VSYPGKNKI

SEQ ID NO: 121471 - protein, 9 aa, Homo Sapiens
VVYGGKSTI

SEQ ID NO: 121472 - protein, 9 aa, Homo Sapiens
YERLFGTTV

SEQ ID NO: 121473 - protein, 9 aa, Homo Sapiens
YMCPNSSTV

SEQ ID NO: 121474 - protein, 9 aa, Homo Sapiens
YQFGEIRTI

SEQ ID NO: 121475 - protein, 9 aa, Homo Sapiens
YQHGIFQSI

SEQ ID NO: 121476 - protein, 9 aa, Homo Sapiens
YQHIVTTLV

SEQ ID NO: 121477 - protein, 9 aa, Homo Sapiens
YQHLLVNSI

SEQ ID NO: 121478 - protein, 9 aa, Homo Sapiens
YQHMLANSI

SEQ ID NO: 121479 - protein, 9 aa, Homo Sapiens
YQHSPSSTV

SEQ ID NO: 121480 - protein, 9 aa, Homo Sapiens
YQKTFSTRI

SEQ ID NO: 121481 - protein, 9 aa, Homo Sapiens
YQYMLEHVI

SEQ ID NO: 121482 - protein, 9 aa, Homo Sapiens
YQYPRPLLI

SEQ ID NO: 121483 - protein, 9 aa, Homo Sapiens
YQYPVIIHL

SEQ ID NO: 121484 - protein, 9 aa, Homo Sapiens
YQYTTLTSV

SEQ ID NO: 121485 - protein, 9 aa, Homo Sapiens
YSKAFTLTI

SEQ ID NO: 121486 - protein, 9 aa, Homo Sapiens
YSKIFTENI

SEQ ID NO: 121487 - protein, 9 aa, Homo Sapiens
YSQVFKETV

SEQ ID NO: 121488 - protein, 10 aa, Homo Sapiens
AVDSRTGKLT

SEQ ID NO: 121489 - protein, 10 aa, Homo Sapiens
DNQYRLIVNV

SEQ ID NO: 121490 - protein, 10 aa, Homo Sapiens
EEQLQQIRAE

SEQ ID NO: 121491 - protein, 10 aa, Homo Sapiens
GQAGALRALG

SEQ ID NO: 121492 - protein, 10 aa, Homo Sapiens
GQILMPNIGY

SEQ ID NO: 121493 - protein, 10 aa, Homo Sapiens
GSNQYLFSVI

SEQ ID NO: 121494 - protein, 10 aa, Homo Sapiens
HQHPHPPVGP

SEQ ID NO: 121495 - protein, 10 aa, Homo Sapiens
HQRTFVLEVM

SEQ ID NO: 121496 - protein, 10 aa, Homo Sapiens
HQVVLPVLGY

SEQ ID NO: 121497 - protein, 10 aa, Homo Sapiens
HSTIMPRLSE

SEQ ID NO: 121498 - protein, 10 aa, Homo Sapiens
KMLKPTGRVV

SEQ ID NO: 121499 - protein, 10 aa, Homo Sapiens
QLPNVPHSLP

SEQ ID NO: 121500 - protein, 10 aa, Homo Sapiens
RMYPFQIHSI

SEQ ID NO: 121501 - protein, 10 aa, Homo Sapiens
RQYPWGTVQV

SEQ ID NO: 121502 - protein, 10 aa, Homo Sapiens
RQYPWGVAEV

SEQ ID NO: 121503 - protein, 10 aa, Homo Sapiens
RQYPWGVVQV

SEQ ID NO: 121504 - protein, 10 aa, Homo Sapiens
SQRPGAHLTV

SEQ ID NO: 121505 - protein, 10 aa, Homo Sapiens
SQYSFAGSSI

SEQ ID NO: 121506 - protein, 10 aa, Homo Sapiens
TISSNVASKA

SEQ ID NO: 121507 - protein, 10 aa, Homo Sapiens
TKSQIPLSKI

SEQ ID NO: 121508 - protein, 10 aa, Homo Sapiens
TSNQMLVPVI

SEQ ID NO: 121509 - protein, 10 aa, Homo Sapiens
TTSQYLMHEV

SEQ ID NO: 121510 - protein, 10 aa, Homo Sapiens
VMFGGKQVVV

SEQ ID NO: 121511 - protein, 10 aa, Homo Sapiens
YDAEISQIHQ

SEQ ID NO: 121512 - protein, 11 aa, Homo Sapiens
AAVEEILPSLK

SEQ ID NO: 121513 - protein, 11 aa, Homo Sapiens
AEQNRKDAEAW

SEQ ID NO: 121514 - protein, 11 aa, Homo Sapiens
AQYDPAKPNYI

SEQ ID NO: 121515 - protein, 11 aa, Homo Sapiens
DPASLPRVLRV

SEQ ID NO: 121516 - protein, 11 aa, Homo Sapiens
GAGKNRAGLEL

SEQ ID NO: 121517 - protein, 11 aa, Homo Sapiens
GLGSGGSIRSS

SEQ ID NO: 121518 - protein, 11 aa, Homo Sapiens
IGGNAYQHSKV

SEQ ID NO: 121519 - protein, 11 aa, Homo Sapiens
ITSNQMLVPVI

SEQ ID NO: 121520 - protein, 11 aa, Homo Sapiens
KKDVDNAYMIK

SEQ ID NO: 121521 - protein, 11 aa, Homo Sapiens
KQGTQYTFSSI

SEQ ID NO: 121522 - protein, 11 aa, Homo Sapiens
RGSQQYRALTV

SEQ ID NO: 121523 - protein, 11 aa, Homo Sapiens
SDNQYRLIVNV

SEQ ID NO: 121524 - protein, 11 aa, Homo Sapiens
TKPNQYKPTYV

SEQ ID NO: 121525 - protein, 11 aa, Homo Sapiens
TVDEKNYTKAM

SEQ ID NO: 121526 - protein, 8 aa, Homo Sapiens
DAAQGYRY

SEQ ID NO: 121527 - protein, 8 aa, Homo Sapiens
DAGIGYLF

SEQ ID NO: 121528 - protein, 8 aa, Homo Sapiens
DAHGSFCF

SEQ ID NO: 121529 - protein, 8 aa, Homo Sapiens
DPSQPQQW

SEQ ID NO: 121530 - protein, 8 aa, Homo Sapiens
DPVLGDKW

SEQ ID NO: 121531 - protein, 8 aa, Homo Sapiens
DVGPTAEW

SEQ ID NO: 121532 - protein, 8 aa, Homo Sapiens
EEQLQQIR

SEQ ID NO: 121533 - protein, 8 aa, Homo Sapiens
EPVNSSKW

SEQ ID NO: 121534 - protein, 8 aa, Homo Sapiens
FPGKAFSW

SEQ ID NO: 121535 - protein, 8 aa, Homo Sapiens
FPGPIFHL

SEQ ID NO: 121536 - protein, 8 aa, Homo Sapiens
FPGPSKPF

SEQ ID NO: 121537 - protein, 8 aa, Homo Sapiens
FPHTTPSM

SEQ ID NO: 121538 - protein, 8 aa, Homo Sapiens
FPIDSHTW

SEQ ID NO: 121539 - protein, 8 aa, Homo Sapiens
FPIGSSGF

SEQ ID NO: 121540 - protein, 8 aa, Homo Sapiens
FPLKVFGY

SEQ ID NO: 121541 - protein, 8 aa, Homo Sapiens
FPLSVQKF

SEQ ID NO: 121542 - protein, 8 aa, Homo Sapiens
FPSSGRFW

SEQ ID NO: 121543 - protein, 8 aa, Homo Sapiens
FPTISLEF

SEQ ID NO: 121544 - protein, 8 aa, Homo Sapiens
FPYKGYIW

SEQ ID NO: 121545 - protein, 8 aa, Homo Sapiens
HASHGFMW

SEQ ID NO: 121546 - protein, 8 aa, Homo Sapiens
HASTSWYW

SEQ ID NO: 121547 - protein, 8 aa, Homo Sapiens
HPSKGYWW

SEQ ID NO: 121548 - protein, 8 aa, Homo Sapiens
IANVAHTF

SEQ ID NO: 121549 - protein, 8 aa, Homo Sapiens
IPAESYTF

SEQ ID NO: 121550 - protein, 8 aa, Homo Sapiens
IPGSVLLW

SEQ ID NO: 121551 - protein, 8 aa, Homo Sapiens
IPYKDTFW

SEQ ID NO: 121552 - protein, 8 aa, Homo Sapiens
LPADTQAW

SEQ ID NO: 121553 - protein, 8 aa, Homo Sapiens
LPAEARER

SEQ ID NO: 121554 - protein, 8 aa, Homo Sapiens
LPDQSFLW

SEQ ID NO: 121555 - protein, 8 aa, Homo Sapiens
LPFNTFKF

SEQ ID NO: 121556 - protein, 8 aa, Homo Sapiens
LPGKTYSF

SEQ ID NO: 121557 - protein, 8 aa, Homo Sapiens
LPGPYIKW

SEQ ID NO: 121558 - protein, 8 aa, Homo Sapiens
LPGSSHSF

SEQ ID NO: 121559 - protein, 8 aa, Homo Sapiens
LPHGGEGW

SEQ ID NO: 121560 - protein, 8 aa, Homo Sapiens
LPHTGYIY

SEQ ID NO: 121561 - protein, 8 aa, Homo Sapiens
LPLESLGW

SEQ ID NO: 121562 - protein, 8 aa, Homo Sapiens
LPPGAEHW

SEQ ID NO: 121563 - protein, 8 aa, Homo Sapiens
LPPPAYGF

SEQ ID NO: 121564 - protein, 8 aa, Homo Sapiens
LPRTDYSF

SEQ ID NO: 121565 - protein, 8 aa, Homo Sapiens
LPSASKGW

SEQ ID NO: 121566 - protein, 8 aa, Homo Sapiens
LPTVGELW

SEQ ID NO: 121567 - protein, 8 aa, Homo Sapiens
LPVEGGFW

SEQ ID NO: 121568 - protein, 8 aa, Homo Sapiens
LQWLLLLF

SEQ ID NO: 121569 - protein, 8 aa, Homo Sapiens
MACQGHKW

SEQ ID NO: 121570 - protein, 8 aa, Homo Sapiens
MPAEQAFW

SEQ ID NO: 121571 - protein, 8 aa, Homo Sapiens
MPDAAHGI

SEQ ID NO: 121572 - protein, 8 aa, Homo Sapiens
MPDLSLSF

SEQ ID NO: 121573 - protein, 8 aa, Homo Sapiens
MPGEDLKF

SEQ ID NO: 121574 - protein, 8 aa, Homo Sapiens
MPGKELEW

SEQ ID NO: 121575 - protein, 8 aa, Homo Sapiens
MPHSTSRW

SEQ ID NO: 121576 - protein, 8 aa, Homo Sapiens
MPIQSHVI

SEQ ID NO: 121577 - protein, 8 aa, Homo Sapiens
MPIRSLTF

SEQ ID NO: 121578 - protein, 8 aa, Homo Sapiens
MPSSSHLF

SEQ ID NO: 121579 - protein, 8 aa, Homo Sapiens
NPGPGPRW

SEQ ID NO: 121580 - protein, 8 aa, Homo Sapiens
PDDHARKI

SEQ ID NO: 121581 - protein, 8 aa, Homo Sapiens
PHSAHQKY

SEQ ID NO: 121582 - protein, 8 aa, Homo Sapiens
PSHTKIKY

SEQ ID NO: 121583 - protein, 8 aa, Homo Sapiens
PVGRVHRL

SEQ ID NO: 121584 - protein, 8 aa, Homo Sapiens
PYNHQHEY

SEQ ID NO: 121585 - protein, 8 aa, Homo Sapiens
SPANSFHF

SEQ ID NO: 121586 - protein, 8 aa, Homo Sapiens
SPLTSYRW

SEQ ID NO: 121587 - protein, 8 aa, Homo Sapiens
SPVRAFQW

SEQ ID NO: 121588 - protein, 8 aa, Homo Sapiens
SVTEIQEK

SEQ ID NO: 121589 - protein, 8 aa, Homo Sapiens
TEVTGHRW

SEQ ID NO: 121590 - protein, 8 aa, Homo Sapiens
TPAASSIW

SEQ ID NO: 121591 - protein, 8 aa, Homo Sapiens
TPAGEFKW

SEQ ID NO: 121592 - protein, 8 aa, Homo Sapiens
TPGPAFKI

SEQ ID NO: 121593 - protein, 8 aa, Homo Sapiens
TPLEAACW

SEQ ID NO: 121594 - protein, 8 aa, Homo Sapiens
TWSALPVL

SEQ ID NO: 121595 - protein, 8 aa, Homo Sapiens
VPAESHIY

SEQ ID NO: 121596 - protein, 8 aa, Homo Sapiens
VPATSHHF

SEQ ID NO: 121597 - protein, 8 aa, Homo Sapiens
VPGLTFHW

SEQ ID NO: 121598 - protein, 8 aa, Homo Sapiens
VPGPGGIW

SEQ ID NO: 121599 - protein, 8 aa, Homo Sapiens
VPLMSAHW

SEQ ID NO: 121600 - protein, 8 aa, Homo Sapiens
VPSNAELW

SEQ ID NO: 121601 - protein, 8 aa, Homo Sapiens
WPLAVRKW

SEQ ID NO: 121602 - protein, 8 aa, Homo Sapiens
YATQSHQW

SEQ ID NO: 121603 - protein, 8 aa, Homo Sapiens
YPASDPRW

SEQ ID NO: 121604 - protein, 8 aa, Homo Sapiens
YPASSSVF

SEQ ID NO: 121605 - protein, 8 aa, Homo Sapiens
YPCSSSHF

SEQ ID NO: 121606 - protein, 8 aa, Homo Sapiens
YPGPAVVL

SEQ ID NO: 121607 - protein, 8 aa, Homo Sapiens
YPGPGNHF

SEQ ID NO: 121608 - protein, 8 aa, Homo Sapiens
YPGPSHRI

SEQ ID NO: 121609 - protein, 8 aa, Homo Sapiens
YPGSSYIF

SEQ ID NO: 121610 - protein, 8 aa, Homo Sapiens
YPHEAPSW

SEQ ID NO: 121611 - protein, 8 aa, Homo Sapiens
YPHPDWIW

SEQ ID NO: 121612 - protein, 8 aa, Homo Sapiens
YPLKPTWW

SEQ ID NO: 121613 - protein, 8 aa, Homo Sapiens
YPLNSYEL

SEQ ID NO: 121614 - protein, 8 aa, Homo Sapiens
YPLSSKRW

SEQ ID NO: 121615 - protein, 8 aa, Homo Sapiens
YPMKSEKI

SEQ ID NO: 121616 - protein, 9 aa, Homo Sapiens
AAAAATAAW

SEQ ID NO: 121617 - protein, 9 aa, Homo Sapiens
AACDLVQRF

SEQ ID NO: 121618 - protein, 9 aa, Homo Sapiens
AADETLRLW

SEQ ID NO: 121619 - protein, 9 aa, Homo Sapiens
AADSAVRLW

SEQ ID NO: 121620 - protein, 9 aa, Homo Sapiens
AANPHSFVF

SEQ ID NO: 121621 - protein, 9 aa, Homo Sapiens
AANPIESQW

SEQ ID NO: 121622 - protein, 9 aa, Homo Sapiens
AAPAYSRAL

SEQ ID NO: 121623 - protein, 9 aa, Homo Sapiens
AAPTSAAAL

SEQ ID NO: 121624 - protein, 9 aa, Homo Sapiens
AAQDFFQRW

SEQ ID NO: 121625 - protein, 9 aa, Homo Sapiens
AASPHYQEW

SEQ ID NO: 121626 - protein, 9 aa, Homo Sapiens
AASSISSPW

SEQ ID NO: 121627 - protein, 9 aa, Homo Sapiens
APAAGYHVW

SEQ ID NO: 121628 - protein, 9 aa, Homo Sapiens
APADQSQSW

SEQ ID NO: 121629 - protein, 9 aa, Homo Sapiens
APAGDAGRW

SEQ ID NO: 121630 - protein, 9 aa, Homo Sapiens
APAPIHNQF

SEQ ID NO: 121631 - protein, 9 aa, Homo Sapiens
APAPSTVHF

SEQ ID NO: 121632 - protein, 9 aa, Homo Sapiens
APFSKVITF

SEQ ID NO: 121633 - protein, 9 aa, Homo Sapiens
APIASIHSF

SEQ ID NO: 121634 - protein, 9 aa, Homo Sapiens
APLEDEATL

SEQ ID NO: 121635 - protein, 9 aa, Homo Sapiens
APLKLQMEF

SEQ ID NO: 121636 - protein, 9 aa, Homo Sapiens
APLSLAEGW

SEQ ID NO: 121637 - protein, 9 aa, Homo Sapiens
APLSTIINW

SEQ ID NO: 121638 - protein, 9 aa, Homo Sapiens
APMECQESW

SEQ ID NO: 121639 - protein, 9 aa, Homo Sapiens
APMHDLLLW

SEQ ID NO: 121640 - protein, 9 aa, Homo Sapiens
APNEMVYRF

SEQ ID NO: 121641 - protein, 9 aa, Homo Sapiens
APSADAPMF

SEQ ID NO: 121642 - protein, 9 aa, Homo Sapiens
APSDTVLMF

SEQ ID NO: 121643 - protein, 9 aa, Homo Sapiens
APTAQATEW

SEQ ID NO: 121644 - protein, 9 aa, Homo Sapiens
APTDCVSSF

SEQ ID NO: 121645 - protein, 9 aa, Homo Sapiens
APVEVTHNF

SEQ ID NO: 121646 - protein, 9 aa, Homo Sapiens
APVPLYNSF

SEQ ID NO: 121647 - protein, 9 aa, Homo Sapiens
ASRDTVIVW

SEQ ID NO: 121648 - protein, 9 aa, Homo Sapiens
ATADTVIIY

SEQ ID NO: 121649 - protein, 9 aa, Homo Sapiens
CPALIKSIW

SEQ ID NO: 121650 - protein, 9 aa, Homo Sapiens
CPDPSLSVW

SEQ ID NO: 121651 - protein, 9 aa, Homo Sapiens
CPDPYIQRF

SEQ ID NO: 121652 - protein, 9 aa, Homo Sapiens
CPFQGTVAF

SEQ ID NO: 121653 - protein, 9 aa, Homo Sapiens
CPFTGNVSI

SEQ ID NO: 121654 - protein, 9 aa, Homo Sapiens
CPIPSTDEF

SEQ ID NO: 121655 - protein, 9 aa, Homo Sapiens
CPNDYHQLF

SEQ ID NO: 121656 - protein, 9 aa, Homo Sapiens
CPNPTKQIW

SEQ ID NO: 121657 - protein, 9 aa, Homo Sapiens
CPTENVAKI

SEQ ID NO: 121658 - protein, 9 aa, Homo Sapiens
CPTSWVTDW

SEQ ID NO: 121659 - protein, 9 aa, Homo Sapiens
CPVLVGNKW

SEQ ID NO: 121660 - protein, 9 aa, Homo Sapiens
CPVPHLHRW

SEQ ID NO: 121661 - protein, 9 aa, Homo Sapiens
DADPHFHHF

SEQ ID NO: 121662 - protein, 9 aa, Homo Sapiens
DADSLQRAW

SEQ ID NO: 121663 - protein, 9 aa, Homo Sapiens
DAFNVPVFW

SEQ ID NO: 121664 - protein, 9 aa, Homo Sapiens
DAFQHMQHF

SEQ ID NO: 121665 - protein, 9 aa, Homo Sapiens
DAGPPTHAF

SEQ ID NO: 121666 - protein, 9 aa, Homo Sapiens
DAHVDSTTY

SEQ ID NO: 121667 - protein, 9 aa, Homo Sapiens
DALEKNQQW

SEQ ID NO: 121668 - protein, 9 aa, Homo Sapiens
DALPEYSTF

SEQ ID NO: 121669 - protein, 9 aa, Homo Sapiens
DAMQLNDKW

SEQ ID NO: 121670 - protein, 9 aa, Homo Sapiens
DANPETHAF

SEQ ID NO: 121671 - protein, 9 aa, Homo Sapiens
DANPLKTLW

SEQ ID NO: 121672 - protein, 9 aa, Homo Sapiens
DANSKQLLY

SEQ ID NO: 121673 - protein, 9 aa, Homo Sapiens
DASALRILF

SEQ ID NO: 121674 - protein, 9 aa, Homo Sapiens
DASKVVTVF

SEQ ID NO: 121675 - protein, 9 aa, Homo Sapiens
DASPVQAVF

SEQ ID NO: 121676 - protein, 9 aa, Homo Sapiens
DAWIEHDVW

SEQ ID NO: 121677 - protein, 9 aa, Homo Sapiens
DAYALNHTL

SEQ ID NO: 121678 - protein, 9 aa, Homo Sapiens
DAYPEIEKF

SEQ ID NO: 121679 - protein, 9 aa, Homo Sapiens
DAYTHLETF

SEQ ID NO: 121680 - protein, 9 aa, Homo Sapiens
DFFRDPLNW

SEQ ID NO: 121681 - protein, 9 aa, Homo Sapiens
DLFQDYERW

SEQ ID NO: 121682 - protein, 9 aa, Homo Sapiens
DLWLEREVF

SEQ ID NO: 121683 - protein, 9 aa, Homo Sapiens
DPDEVARLW

SEQ ID NO: 121684 - protein, 9 aa, Homo Sapiens
DPDEVARRW

SEQ ID NO: 121685 - protein, 9 aa, Homo Sapiens
DPDKDVLGW

SEQ ID NO: 121686 - protein, 9 aa, Homo Sapiens
DPDKDVQGW

SEQ ID NO: 121687 - protein, 9 aa, Homo Sapiens
DPDSHFPAW

SEQ ID NO: 121688 - protein, 9 aa, Homo Sapiens
DPFIDLNYM

SEQ ID NO: 121689 - protein, 9 aa, Homo Sapiens
DPFKDIILY

SEQ ID NO: 121690 - protein, 9 aa, Homo Sapiens
DPFRDLHSL

SEQ ID NO: 121691 - protein, 9 aa, Homo Sapiens
DPHKADLVW

SEQ ID NO: 121692 - protein, 9 aa, Homo Sapiens
DPHQQIYTF

SEQ ID NO: 121693 - protein, 9 aa, Homo Sapiens
DPIPAAHSF

SEQ ID NO: 121694 - protein, 9 aa, Homo Sapiens
DPLNMHVTW

SEQ ID NO: 121695 - protein, 9 aa, Homo Sapiens
DPLSDYNVW

SEQ ID NO: 121696 - protein, 9 aa, Homo Sapiens
DPQDFIQEW

SEQ ID NO: 121697 - protein, 9 aa, Homo Sapiens
DPSGAYFAW

SEQ ID NO: 121698 - protein, 9 aa, Homo Sapiens
DPSGNAHKW

SEQ ID NO: 121699 - protein, 9 aa, Homo Sapiens
DPSGNYGGW

SEQ ID NO: 121700 - protein, 9 aa, Homo Sapiens
DPSGTYHAW

SEQ ID NO: 121701 - protein, 9 aa, Homo Sapiens
DPVDIYKSW

SEQ ID NO: 121702 - protein, 9 aa, Homo Sapiens
EAAAFDDEW

SEQ ID NO: 121703 - protein, 9 aa, Homo Sapiens
EAASVPVVY

SEQ ID NO: 121704 - protein, 9 aa, Homo Sapiens
EADGGLKSW

SEQ ID NO: 121705 - protein, 9 aa, Homo Sapiens
EAEPQGAAW

SEQ ID NO: 121706 - protein, 9 aa, Homo Sapiens
EAFRGVHRY

SEQ ID NO: 121707 - protein, 9 aa, Homo Sapiens
EAIKQASEW

SEQ ID NO: 121708 - protein, 9 aa, Homo Sapiens
EAINVEQAF

SEQ ID NO: 121709 - protein, 9 aa, Homo Sapiens
EAIQDLWQW

SEQ ID NO: 121710 - protein, 9 aa, Homo Sapiens
EAIRISPTF

SEQ ID NO: 121711 - protein, 9 aa, Homo Sapiens
EALALTQTW

SEQ ID NO: 121712 - protein, 9 aa, Homo Sapiens
EALDVCEKW

SEQ ID NO: 121713 - protein, 9 aa, Homo Sapiens
EALHASHGF

SEQ ID NO: 121714 - protein, 9 aa, Homo Sapiens
EAMPFPLNF

SEQ ID NO: 121715 - protein, 9 aa, Homo Sapiens
EAMRLGPGW

SEQ ID NO: 121716 - protein, 9 aa, Homo Sapiens
EANAIALKY

SEQ ID NO: 121717 - protein, 9 aa, Homo Sapiens
EANSNAVRF

SEQ ID NO: 121718 - protein, 9 aa, Homo Sapiens
EASAVTVRF

SEQ ID NO: 121719 - protein, 9 aa, Homo Sapiens
EASEGCYRW

SEQ ID NO: 121720 - protein, 9 aa, Homo Sapiens
EASPSSLHF

SEQ ID NO: 121721 - protein, 9 aa, Homo Sapiens
EATYINHNF

SEQ ID NO: 121722 - protein, 9 aa, Homo Sapiens
EAVDKYFKL

SEQ ID NO: 121723 - protein, 9 aa, Homo Sapiens
EAVGNIVKF

SEQ ID NO: 121724 - protein, 9 aa, Homo Sapiens
EAYPDHTQF

SEQ ID NO: 121725 - protein, 9 aa, Homo Sapiens
EGNPDTHSW

SEQ ID NO: 121726 - protein, 9 aa, Homo Sapiens
ELFEGVQKW

SEQ ID NO: 121727 - protein, 9 aa, Homo Sapiens
EPDPHVVRI

SEQ ID NO: 121728 - protein, 9 aa, Homo Sapiens
EPEGEGQAW

SEQ ID NO: 121729 - protein, 9 aa, Homo Sapiens
EPEGGFSKW

SEQ ID NO: 121730 - protein, 9 aa, Homo Sapiens
EPEGTSHEF

SEQ ID NO: 121731 - protein, 9 aa, Homo Sapiens
EPHCFQVTW

SEQ ID NO: 121732 - protein, 9 aa, Homo Sapiens
EPHSKPIKF

SEQ ID NO: 121733 - protein, 9 aa, Homo Sapiens
EPNCETQKW

SEQ ID NO: 121734 - protein, 9 aa, Homo Sapiens
EPNPDDPLM

SEQ ID NO: 121735 - protein, 9 aa, Homo Sapiens
EPNPESLEL

SEQ ID NO: 121736 - protein, 9 aa, Homo Sapiens
EPPGFLHSW

SEQ ID NO: 121737 - protein, 9 aa, Homo Sapiens
EPQEDTRLW

SEQ ID NO: 121738 - protein, 9 aa, Homo Sapiens
EPQPGARRW

SEQ ID NO: 121739 - protein, 9 aa, Homo Sapiens
EPSAVALEL

SEQ ID NO: 121740 - protein, 9 aa, Homo Sapiens
EPSDLIVKI

SEQ ID NO: 121741 - protein, 9 aa, Homo Sapiens
EPSESNMRW

SEQ ID NO: 121742 - protein, 9 aa, Homo Sapiens
EPSTEAPRW

SEQ ID NO: 121743 - protein, 9 aa, Homo Sapiens
EPTNVRYLW

SEQ ID NO: 121744 - protein, 9 aa, Homo Sapiens
EPVELAQEF

SEQ ID NO: 121745 - protein, 9 aa, Homo Sapiens
EPVEQFSKL

SEQ ID NO: 121746 - protein, 9 aa, Homo Sapiens
EPVNLFQHL

SEQ ID NO: 121747 - protein, 9 aa, Homo Sapiens
FADGHLILW

SEQ ID NO: 121748 - protein, 9 aa, Homo Sapiens
FAVPDKVLW

SEQ ID NO: 121749 - protein, 9 aa, Homo Sapiens
FLWKEPATM

SEQ ID NO: 121750 - protein, 9 aa, Homo Sapiens
FPAAPAPKM

SEQ ID NO: 121751 - protein, 9 aa, Homo Sapiens
FPAAPIPTL

SEQ ID NO: 121752 - protein, 9 aa, Homo Sapiens
FPAEKESEW

SEQ ID NO: 121753 - protein, 9 aa, Homo Sapiens
FPAEKGQLF

SEQ ID NO: 121754 - protein, 9 aa, Homo Sapiens
FPAELENRI

SEQ ID NO: 121755 - protein, 9 aa, Homo Sapiens
FPAGKVPAF

SEQ ID NO: 121756 - protein, 9 aa, Homo Sapiens
FPAGTNSRW

SEQ ID NO: 121757 - protein, 9 aa, Homo Sapiens
FPAHILDCL

SEQ ID NO: 121758 - protein, 9 aa, Homo Sapiens
FPAKELHTI

SEQ ID NO: 121759 - protein, 9 aa, Homo Sapiens
FPAKVTAHW

SEQ ID NO: 121760 - protein, 9 aa, Homo Sapiens
FPAKVVSRL

SEQ ID NO: 121761 - protein, 9 aa, Homo Sapiens
FPANNIVKF

SEQ ID NO: 121762 - protein, 9 aa, Homo Sapiens
FPANVMDVI

SEQ ID NO: 121763 - protein, 9 aa, Homo Sapiens
FPATGCQKL

SEQ ID NO: 121764 - protein, 9 aa, Homo Sapiens
FPATPLLDY

SEQ ID NO: 121765 - protein, 9 aa, Homo Sapiens
FPAVDPEKI

SEQ ID NO: 121766 - protein, 9 aa, Homo Sapiens
FPAVGEPNI

SEQ ID NO: 121767 - protein, 9 aa, Homo Sapiens
FPCTTAPKI

SEQ ID NO: 121768 - protein, 9 aa, Homo Sapiens
FPDFSEQRW

SEQ ID NO: 121769 - protein, 9 aa, Homo Sapiens
FPDKPITQY

SEQ ID NO: 121770 - protein, 9 aa, Homo Sapiens
FPDPNVKYV

SEQ ID NO: 121771 - protein, 9 aa, Homo Sapiens
FPDRALSSW

SEQ ID NO: 121772 - protein, 9 aa, Homo Sapiens
FPDSGHFNV

SEQ ID NO: 121773 - protein, 9 aa, Homo Sapiens
FPDVEKAEW

SEQ ID NO: 121774 - protein, 9 aa, Homo Sapiens
FPEALARLL

SEQ ID NO: 121775 - protein, 9 aa, Homo Sapiens
FPEEDKKTY

SEQ ID NO: 121776 - protein, 9 aa, Homo Sapiens
FPEEIQQQI

SEQ ID NO: 121777 - protein, 9 aa, Homo Sapiens
FPEELTQTF

SEQ ID NO: 121778 - protein, 9 aa, Homo Sapiens
FPEGSVELY

SEQ ID NO: 121779 - protein, 9 aa, Homo Sapiens
FPEHIFPAL

SEQ ID NO: 121780 - protein, 9 aa, Homo Sapiens
FPEHRAAEI

SEQ ID NO: 121781 - protein, 9 aa, Homo Sapiens
FPEPEHSSF

SEQ ID NO: 121782 - protein, 9 aa, Homo Sapiens
FPEPNPRVI

SEQ ID NO: 121783 - protein, 9 aa, Homo Sapiens
FPESCNHVF

SEQ ID NO: 121784 - protein, 9 aa, Homo Sapiens
FPEYTHQLF

SEQ ID NO: 121785 - protein, 9 aa, Homo Sapiens
FPFAVANQL

SEQ ID NO: 121786 - protein, 9 aa, Homo Sapiens
FPFDVAVKF

SEQ ID NO: 121787 - protein, 9 aa, Homo Sapiens
FPFFDIAHY

SEQ ID NO: 121788 - protein, 9 aa, Homo Sapiens
FPFGYVSNI

SEQ ID NO: 121789 - protein, 9 aa, Homo Sapiens
FPFKHPDEW

SEQ ID NO: 121790 - protein, 9 aa, Homo Sapiens
FPFPKPDLI

SEQ ID NO: 121791 - protein, 9 aa, Homo Sapiens
FPFSRPELL

SEQ ID NO: 121792 - protein, 9 aa, Homo Sapiens
FPGDQDLRF

SEQ ID NO: 121793 - protein, 9 aa, Homo Sapiens
FPHDNVEDL

SEQ ID NO: 121794 - protein, 9 aa, Homo Sapiens
FPHGDLTEF

SEQ ID NO: 121795 - protein, 9 aa, Homo Sapiens
FPHHVSPGF

SEQ ID NO: 121796 - protein, 9 aa, Homo Sapiens
FPHLTVVLL

SEQ ID NO: 121797 - protein, 9 aa, Homo Sapiens
FPHMPCAYL

SEQ ID NO: 121798 - protein, 9 aa, Homo Sapiens
FPHPHIHEY

SEQ ID NO: 121799 - protein, 9 aa, Homo Sapiens
FPHRQPLRY

SEQ ID NO: 121800 - protein, 9 aa, Homo Sapiens
FPHSAHQKY

SEQ ID NO: 121801 - protein, 9 aa, Homo Sapiens
FPHYGFPTY

SEQ ID NO: 121802 - protein, 9 aa, Homo Sapiens
FPIDHFTHI

SEQ ID NO: 121803 - protein, 9 aa, Homo Sapiens
FPIEVRHYL

SEQ ID NO: 121804 - protein, 9 aa, Homo Sapiens
FPIEYHDIW

SEQ ID NO: 121805 - protein, 9 aa, Homo Sapiens
FPIHVQTSL

SEQ ID NO: 121806 - protein, 9 aa, Homo Sapiens
FPIPDLQKY

SEQ ID NO: 121807 - protein, 9 aa, Homo Sapiens
FPIPGEPGF

SEQ ID NO: 121808 - protein, 9 aa, Homo Sapiens
FPIPLINRL

SEQ ID NO: 121809 - protein, 9 aa, Homo Sapiens
FPITASQKI

SEQ ID NO: 121810 - protein, 9 aa, Homo Sapiens
FPLATESNI

SEQ ID NO: 121811 - protein, 9 aa, Homo Sapiens
FPLCRTPQF

SEQ ID NO: 121812 - protein, 9 aa, Homo Sapiens
FPLDKMTYL

SEQ ID NO: 121813 - protein, 9 aa, Homo Sapiens
FPLEAITAF

SEQ ID NO: 121814 - protein, 9 aa, Homo Sapiens
FPLMTIEEF

SEQ ID NO: 121815 - protein, 9 aa, Homo Sapiens
FPLSPDPRW

SEQ ID NO: 121816 - protein, 9 aa, Homo Sapiens
FPLTISERW

SEQ ID NO: 121817 - protein, 9 aa, Homo Sapiens
FPMAHPPNL

SEQ ID NO: 121818 - protein, 9 aa, Homo Sapiens
FPMAKLLYL

SEQ ID NO: 121819 - protein, 9 aa, Homo Sapiens
FPMEIRQYL

SEQ ID NO: 121820 - protein, 9 aa, Homo Sapiens
FPMELRQFL

SEQ ID NO: 121821 - protein, 9 aa, Homo Sapiens
FPMTMDEKY

SEQ ID NO: 121822 - protein, 9 aa, Homo Sapiens
FPNAIEHTL

SEQ ID NO: 121823 - protein, 9 aa, Homo Sapiens
FPNIHPPQI

SEQ ID NO: 121824 - protein, 9 aa, Homo Sapiens
FPNKPPLTF

SEQ ID NO: 121825 - protein, 9 aa, Homo Sapiens
FPNKQGYVL

SEQ ID NO: 121826 - protein, 9 aa, Homo Sapiens
FPNNYVTKI

SEQ ID NO: 121827 - protein, 9 aa, Homo Sapiens
FPNSFNDKF

SEQ ID NO: 121828 - protein, 9 aa, Homo Sapiens
FPNVSSFEW

SEQ ID NO: 121829 - protein, 9 aa, Homo Sapiens
FPPEANYLF

SEQ ID NO: 121830 - protein, 9 aa, Homo Sapiens
FPPESNYLF

SEQ ID NO: 121831 - protein, 9 aa, Homo Sapiens
FPQCVFDHW

SEQ ID NO: 121832 - protein, 9 aa, Homo Sapiens
FPQDQIRLW

SEQ ID NO: 121833 - protein, 9 aa, Homo Sapiens
FPQEGMHQM

SEQ ID NO: 121834 - protein, 9 aa, Homo Sapiens
FPQFEPQRY

SEQ ID NO: 121835 - protein, 9 aa, Homo Sapiens
FPQFYPLGI

SEQ ID NO: 121836 - protein, 9 aa, Homo Sapiens
FPQIEINKM

SEQ ID NO: 121837 - protein, 9 aa, Homo Sapiens
FPQLDSTSF

SEQ ID NO: 121838 - protein, 9 aa, Homo Sapiens
FPQPEKESF

SEQ ID NO: 121839 - protein, 9 aa, Homo Sapiens
FPQTALVSF

SEQ ID NO: 121840 - protein, 9 aa, Homo Sapiens
FPRHIEPEL

SEQ ID NO: 121841 - protein, 9 aa, Homo Sapiens
FPSADVRTW

SEQ ID NO: 121842 - protein, 9 aa, Homo Sapiens
FPSAKDPTW

SEQ ID NO: 121843 - protein, 9 aa, Homo Sapiens
FPSEDILLV

SEQ ID NO: 121844 - protein, 9 aa, Homo Sapiens
FPSEITDTV

SEQ ID NO: 121845 - protein, 9 aa, Homo Sapiens
FPSEVVGKM

SEQ ID NO: 121846 - protein, 9 aa, Homo Sapiens
FPSEYVPTV

SEQ ID NO: 121847 - protein, 9 aa, Homo Sapiens
FPSGSVHSF

SEQ ID NO: 121848 - protein, 9 aa, Homo Sapiens
FPSIYDVKY

SEQ ID NO: 121849 - protein, 9 aa, Homo Sapiens
FPSLELGHW

SEQ ID NO: 121850 - protein, 9 aa, Homo Sapiens
FPSLQRLVY

SEQ ID NO: 121851 - protein, 9 aa, Homo Sapiens
FPSPIRLEF

SEQ ID NO: 121852 - protein, 9 aa, Homo Sapiens
FPSTAEHTL

SEQ ID NO: 121853 - protein, 9 aa, Homo Sapiens
FPSTTTPQI

SEQ ID NO: 121854 - protein, 9 aa, Homo Sapiens
FPSTVSTVY

SEQ ID NO: 121855 - protein, 9 aa, Homo Sapiens
FPTESTWRW

SEQ ID NO: 121856 - protein, 9 aa, Homo Sapiens
FPTGNIHMF

SEQ ID NO: 121857 - protein, 9 aa, Homo Sapiens
FPVEIKSFY

SEQ ID NO: 121858 - protein, 9 aa, Homo Sapiens
FPVEKQLDL

SEQ ID NO: 121859 - protein, 9 aa, Homo Sapiens
FPVEVNTVL

SEQ ID NO: 121860 - protein, 9 aa, Homo Sapiens
FPVGDVNNF

SEQ ID NO: 121861 - protein, 9 aa, Homo Sapiens
FPVGPGTGF

SEQ ID NO: 121862 - protein, 9 aa, Homo Sapiens
FPVGRVHRL

SEQ ID NO: 121863 - protein, 9 aa, Homo Sapiens
FPVPKGESW

SEQ ID NO: 121864 - protein, 9 aa, Homo Sapiens
FPVSEQRLW

SEQ ID NO: 121865 - protein, 9 aa, Homo Sapiens
FPVSYNDKF

SEQ ID NO: 121866 - protein, 9 aa, Homo Sapiens
FPWEKPTTL

SEQ ID NO: 121867 - protein, 9 aa, Homo Sapiens
FPWSEIRNI

SEQ ID NO: 121868 - protein, 9 aa, Homo Sapiens
FPYAFKEVI

SEQ ID NO: 121869 - protein, 9 aa, Homo Sapiens
FPYAQRQFL

SEQ ID NO: 121870 - protein, 9 aa, Homo Sapiens
FPYGDASKF

SEQ ID NO: 121871 - protein, 9 aa, Homo Sapiens
FPYGTTVTY

SEQ ID NO: 121872 - protein, 9 aa, Homo Sapiens
FPYPDPSQW

SEQ ID NO: 121873 - protein, 9 aa, Homo Sapiens
FPYPFQVVY

SEQ ID NO: 121874 - protein, 9 aa, Homo Sapiens
FPYPYAERL

SEQ ID NO: 121875 - protein, 9 aa, Homo Sapiens
FSLPAQPLW

SEQ ID NO: 121876 - protein, 9 aa, Homo Sapiens
FVGPVVGGW

SEQ ID NO: 121877 - protein, 9 aa, Homo Sapiens
FVILRDEKW

SEQ ID NO: 121878 - protein, 9 aa, Homo Sapiens
FVIPLDPRW

SEQ ID NO: 121879 - protein, 9 aa, Homo Sapiens
GADPGNKKW

SEQ ID NO: 121880 - protein, 9 aa, Homo Sapiens
GAVRENYTW

SEQ ID NO: 121881 - protein, 9 aa, Homo Sapiens
GDTLLIENI

SEQ ID NO: 121882 - protein, 9 aa, Homo Sapiens
GPAAIREGW

SEQ ID NO: 121883 - protein, 9 aa, Homo Sapiens
GPCPAAPIF

SEQ ID NO: 121884 - protein, 9 aa, Homo Sapiens
GPFETVHRW

SEQ ID NO: 121885 - protein, 9 aa, Homo Sapiens
GPNDALLRW

SEQ ID NO: 121886 - protein, 9 aa, Homo Sapiens
GPVEVISHW

SEQ ID NO: 121887 - protein, 9 aa, Homo Sapiens
HAAAPTSTL

SEQ ID NO: 121888 - protein, 9 aa, Homo Sapiens
HAADLSLWW

SEQ ID NO: 121889 - protein, 9 aa, Homo Sapiens
HAADVFEAY

SEQ ID NO: 121890 - protein, 9 aa, Homo Sapiens
HAAGFAYTY

SEQ ID NO: 121891 - protein, 9 aa, Homo Sapiens
HAAHIISEL

SEQ ID NO: 121892 - protein, 9 aa, Homo Sapiens
HAANIVTAI

SEQ ID NO: 121893 - protein, 9 aa, Homo Sapiens
HAAPQPQKL

SEQ ID NO: 121894 - protein, 9 aa, Homo Sapiens
HAASDTVGW

SEQ ID NO: 121895 - protein, 9 aa, Homo Sapiens
HAASESLKF

SEQ ID NO: 121896 - protein, 9 aa, Homo Sapiens
HAATIRLIF

SEQ ID NO: 121897 - protein, 9 aa, Homo Sapiens
HAATTSLSW

SEQ ID NO: 121898 - protein, 9 aa, Homo Sapiens
HAAVPTPGY

SEQ ID NO: 121899 - protein, 9 aa, Homo Sapiens
HAAYNLLFF

SEQ ID NO: 121900 - protein, 9 aa, Homo Sapiens
HACALAASL

SEQ ID NO: 121901 - protein, 9 aa, Homo Sapiens
HACGVIATI

SEQ ID NO: 121902 - protein, 9 aa, Homo Sapiens
HADDSFLVL

SEQ ID NO: 121903 - protein, 9 aa, Homo Sapiens
HADGSLNQW

SEQ ID NO: 121904 - protein, 9 aa, Homo Sapiens
HADGTIVRY

SEQ ID NO: 121905 - protein, 9 aa, Homo Sapiens
HADHSSLTL

SEQ ID NO: 121906 - protein, 9 aa, Homo Sapiens
HADINLLYW

SEQ ID NO: 121907 - protein, 9 aa, Homo Sapiens
HADPTELAL

SEQ ID NO: 121908 - protein, 9 aa, Homo Sapiens
HADTTKWEW

SEQ ID NO: 121909 - protein, 9 aa, Homo Sapiens
HADVATVMW

SEQ ID NO: 121910 - protein, 9 aa, Homo Sapiens
HAEMCFLSW

SEQ ID NO: 121911 - protein, 9 aa, Homo Sapiens
HAFEIIHLL

SEQ ID NO: 121912 - protein, 9 aa, Homo Sapiens
HAFVELHEF

SEQ ID NO: 121913 - protein, 9 aa, Homo Sapiens
HAGNINFKW

SEQ ID NO: 121914 - protein, 9 aa, Homo Sapiens
HAGPIVSVW

SEQ ID NO: 121915 - protein, 9 aa, Homo Sapiens
HAGPTAHEL

SEQ ID NO: 121916 - protein, 9 aa, Homo Sapiens
HAGPVINTL

SEQ ID NO: 121917 - protein, 9 aa, Homo Sapiens
HAGSLLLKM

SEQ ID NO: 121918 - protein, 9 aa, Homo Sapiens
HAHVDKVTY

SEQ ID NO: 121919 - protein, 9 aa, Homo Sapiens
HAHYIAQCW

SEQ ID NO: 121920 - protein, 9 aa, Homo Sapiens
HAIDGTNNW

SEQ ID NO: 121921 - protein, 9 aa, Homo Sapiens
HAIDIICGF

SEQ ID NO: 121922 - protein, 9 aa, Homo Sapiens
HAIEDKETI

SEQ ID NO: 121923 - protein, 9 aa, Homo Sapiens
HAIPLRSSW

SEQ ID NO: 121924 - protein, 9 aa, Homo Sapiens
HALICISHW

SEQ ID NO: 121925 - protein, 9 aa, Homo Sapiens
HAMEEVKKF

SEQ ID NO: 121926 - protein, 9 aa, Homo Sapiens
HAMGGVPAW

SEQ ID NO: 121927 - protein, 9 aa, Homo Sapiens
HANDQTVIF

SEQ ID NO: 121928 - protein, 9 aa, Homo Sapiens
HANNTVSNF

SEQ ID NO: 121929 - protein, 9 aa, Homo Sapiens
HANSVDTSF

SEQ ID NO: 121930 - protein, 9 aa, Homo Sapiens
HAQDYVLTY

SEQ ID NO: 121931 - protein, 9 aa, Homo Sapiens
HAQLSEVLW

SEQ ID NO: 121932 - protein, 9 aa, Homo Sapiens
HARPEEPSW

SEQ ID NO: 121933 - protein, 9 aa, Homo Sapiens
HASCHVQFF

SEQ ID NO: 121934 - protein, 9 aa, Homo Sapiens
HASMLNIWW

SEQ ID NO: 121935 - protein, 9 aa, Homo Sapiens
HASQVCRNW

SEQ ID NO: 121936 - protein, 9 aa, Homo Sapiens
HASRTMPLL

SEQ ID NO: 121937 - protein, 9 aa, Homo Sapiens
HASSEQLYF

SEQ ID NO: 121938 - protein, 9 aa, Homo Sapiens
HATGHHYTW

SEQ ID NO: 121939 - protein, 9 aa, Homo Sapiens
HATKAIYRW

SEQ ID NO: 121940 - protein, 9 aa, Homo Sapiens
HATTALLHY

SEQ ID NO: 121941 - protein, 9 aa, Homo Sapiens
HAVEGAEQW

SEQ ID NO: 121942 - protein, 9 aa, Homo Sapiens
HAVHVALVL

SEQ ID NO: 121943 - protein, 9 aa, Homo Sapiens
HAVPIYEGF

SEQ ID NO: 121944 - protein, 9 aa, Homo Sapiens
HAVQTVETM

SEQ ID NO: 121945 - protein, 9 aa, Homo Sapiens
HAVSPIAKY

SEQ ID NO: 121946 - protein, 9 aa, Homo Sapiens
HAYDGKDYI

SEQ ID NO: 121947 - protein, 9 aa, Homo Sapiens
HAYIHSVQF

SEQ ID NO: 121948 - protein, 9 aa, Homo Sapiens
HAYLHDQFW

SEQ ID NO: 121949 - protein, 9 aa, Homo Sapiens
HGDSSVAVW

SEQ ID NO: 121950 - protein, 9 aa, Homo Sapiens
HGSDICTSW

SEQ ID NO: 121951 - protein, 9 aa, Homo Sapiens
HLAWVQEEW

SEQ ID NO: 121952 - protein, 9 aa, Homo Sapiens
HLSDVVLRF

SEQ ID NO: 121953 - protein, 9 aa, Homo Sapiens
HPAPDQQGL

SEQ ID NO: 121954 - protein, 9 aa, Homo Sapiens
HPASSDPRF

SEQ ID NO: 121955 - protein, 9 aa, Homo Sapiens
HPATVFILF

SEQ ID NO: 121956 - protein, 9 aa, Homo Sapiens
HPCITKTFF

SEQ ID NO: 121957 - protein, 9 aa, Homo Sapiens
HPCLYILTF

SEQ ID NO: 121958 - protein, 9 aa, Homo Sapiens
HPDCLMLNF

SEQ ID NO: 121959 - protein, 9 aa, Homo Sapiens
HPDEPLYSF

SEQ ID NO: 121960 - protein, 9 aa, Homo Sapiens
HPDESGSKF

SEQ ID NO: 121961 - protein, 9 aa, Homo Sapiens
HPDGKILII

SEQ ID NO: 121962 - protein, 9 aa, Homo Sapiens
HPDKDVRLL

SEQ ID NO: 121963 - protein, 9 aa, Homo Sapiens
HPDPNNENI

SEQ ID NO: 121964 - protein, 9 aa, Homo Sapiens
HPDPNWKNF

SEQ ID NO: 121965 - protein, 9 aa, Homo Sapiens
HPDQAQAIL

SEQ ID NO: 121966 - protein, 9 aa, Homo Sapiens
HPDRSQPAF

SEQ ID NO: 121967 - protein, 9 aa, Homo Sapiens
HPDSHQLFI

SEQ ID NO: 121968 - protein, 9 aa, Homo Sapiens
HPDTWNPAW

SEQ ID NO: 121969 - protein, 9 aa, Homo Sapiens
HPEEHIRIW

SEQ ID NO: 121970 - protein, 9 aa, Homo Sapiens
HPEHAFYEF

SEQ ID NO: 121971 - protein, 9 aa, Homo Sapiens
HPERGIRQW

SEQ ID NO: 121972 - protein, 9 aa, Homo Sapiens
HPETRSAFL

SEQ ID NO: 121973 - protein, 9 aa, Homo Sapiens
HPETWQPSW

SEQ ID NO: 121974 - protein, 9 aa, Homo Sapiens
HPEVTPLRF

SEQ ID NO: 121975 - protein, 9 aa, Homo Sapiens
HPFAPPICF

SEQ ID NO: 121976 - protein, 9 aa, Homo Sapiens
HPFEAQTLI

SEQ ID NO: 121977 - protein, 9 aa, Homo Sapiens
HPFEDGAKL

SEQ ID NO: 121978 - protein, 9 aa, Homo Sapiens
HPFFKNDQW

SEQ ID NO: 121979 - protein, 9 aa, Homo Sapiens
HPFFKTINW

SEQ ID NO: 121980 - protein, 9 aa, Homo Sapiens
HPFFSKIDW

SEQ ID NO: 121981 - protein, 9 aa, Homo Sapiens
HPFKIFTKM

SEQ ID NO: 121982 - protein, 9 aa, Homo Sapiens
HPFLTALKY

SEQ ID NO: 121983 - protein, 9 aa, Homo Sapiens
HPFPFHPSL

SEQ ID NO: 121984 - protein, 9 aa, Homo Sapiens
HPGDQAYEF

SEQ ID NO: 121985 - protein, 9 aa, Homo Sapiens
HPGSSALHY

SEQ ID NO: 121986 - protein, 9 aa, Homo Sapiens
HPGSTTLRI

SEQ ID NO: 121987 - protein, 9 aa, Homo Sapiens
HPGTHTVLW

SEQ ID NO: 121988 - protein, 9 aa, Homo Sapiens
HPHDLVILM

SEQ ID NO: 121989 - protein, 9 aa, Homo Sapiens
HPHEVMQRM

SEQ ID NO: 121990 - protein, 9 aa, Homo Sapiens
HPHGSYSRL

SEQ ID NO: 121991 - protein, 9 aa, Homo Sapiens
HPHIFPYLL

SEQ ID NO: 121992 - protein, 9 aa, Homo Sapiens
HPHKIIVMY

SEQ ID NO: 121993 - protein, 9 aa, Homo Sapiens
HPHPEDIKF

SEQ ID NO: 121994 - protein, 9 aa, Homo Sapiens
HPHPVVPKM

SEQ ID NO: 121995 - protein, 9 aa, Homo Sapiens
HPHVYSPVI

SEQ ID NO: 121996 - protein, 9 aa, Homo Sapiens
HPIDRSVDF

SEQ ID NO: 121997 - protein, 9 aa, Homo Sapiens
HPIEVSVGH

SEQ ID NO: 121998 - protein, 9 aa, Homo Sapiens
HPIHADNCL

SEQ ID NO: 121999 - protein, 9 aa, Homo Sapiens
HPIKQVDVL

SEQ ID NO: 122000 - protein, 9 aa, Homo Sapiens
HPILNDPIY

SEQ ID NO: 122001 - protein, 9 aa, Homo Sapiens
HPIPGEYKF

SEQ ID NO: 122002 - protein, 9 aa, Homo Sapiens
HPIQTQAQY

SEQ ID NO: 122003 - protein, 9 aa, Homo Sapiens
HPIRIADGY

SEQ ID NO: 122004 - protein, 9 aa, Homo Sapiens
HPIRLFCRY

SEQ ID NO: 122005 - protein, 9 aa, Homo Sapiens
HPISSEELL

SEQ ID NO: 122006 - protein, 9 aa, Homo Sapiens
HPLDLRVQF

SEQ ID NO: 122007 - protein, 9 aa, Homo Sapiens
HPLDYELTY

SEQ ID NO: 122008 - protein, 9 aa, Homo Sapiens
HPLEDRNTI

SEQ ID NO: 122009 - protein, 9 aa, Homo Sapiens
HPLEGTHEL

SEQ ID NO: 122010 - protein, 9 aa, Homo Sapiens
HPLGDIVAF

SEQ ID NO: 122011 - protein, 9 aa, Homo Sapiens
HPLGIVQGF

SEQ ID NO: 122012 - protein, 9 aa, Homo Sapiens
HPLGMAIFL

SEQ ID NO: 122013 - protein, 9 aa, Homo Sapiens
HPLHNDPNL

SEQ ID NO: 122014 - protein, 9 aa, Homo Sapiens
HPLPEVAHV

SEQ ID NO: 122015 - protein, 9 aa, Homo Sapiens
HPLPGTQLL

SEQ ID NO: 122016 - protein, 9 aa, Homo Sapiens
HPMAYQLQL

SEQ ID NO: 122017 - protein, 9 aa, Homo Sapiens
HPMDHPSAF

SEQ ID NO: 122018 - protein, 9 aa, Homo Sapiens
HPMPRVNEI

SEQ ID NO: 122019 - protein, 9 aa, Homo Sapiens
HPMRAIFMI

SEQ ID NO: 122020 - protein, 9 aa, Homo Sapiens
HPNAKVLLH

SEQ ID NO: 122021 - protein, 9 aa, Homo Sapiens
HPNALNLQL

SEQ ID NO: 122022 - protein, 9 aa, Homo Sapiens
HPNDDDVHF

SEQ ID NO: 122023 - protein, 9 aa, Homo Sapiens
HPNEGALVL

SEQ ID NO: 122024 - protein, 9 aa, Homo Sapiens
HPNEMVRRW

SEQ ID NO: 122025 - protein, 9 aa, Homo Sapiens
HPNGLQVMY

SEQ ID NO: 122026 - protein, 9 aa, Homo Sapiens
HPNPDVLKI

SEQ ID NO: 122027 - protein, 9 aa, Homo Sapiens
HPNPPSVLF

SEQ ID NO: 122028 - protein, 9 aa, Homo Sapiens
HPNSAVLMV

SEQ ID NO: 122029 - protein, 9 aa, Homo Sapiens
HPNSLMKKI

SEQ ID NO: 122030 - protein, 9 aa, Homo Sapiens
HPNSNLLDL

SEQ ID NO: 122031 - protein, 9 aa, Homo Sapiens
HPNTIQEYM

SEQ ID NO: 122032 - protein, 9 aa, Homo Sapiens
HPNYVDCYL

SEQ ID NO: 122033 - protein, 9 aa, Homo Sapiens
HPPNYIVLW

SEQ ID NO: 122034 - protein, 9 aa, Homo Sapiens
HPQDGRSAW

SEQ ID NO: 122035 - protein, 9 aa, Homo Sapiens
HPQEVYNEY

SEQ ID NO: 122036 - protein, 9 aa, Homo Sapiens
HPQPGAVEL

SEQ ID NO: 122037 - protein, 9 aa, Homo Sapiens
HPQTIIAGW

SEQ ID NO: 122038 - protein, 9 aa, Homo Sapiens
HPQTLSHAD

SEQ ID NO: 122039 - protein, 9 aa, Homo Sapiens
HPQYEVVEI

SEQ ID NO: 122040 - protein, 9 aa, Homo Sapiens
HPSASYNQL

SEQ ID NO: 122041 - protein, 9 aa, Homo Sapiens
HPSDIEVDL

SEQ ID NO: 122042 - protein, 9 aa, Homo Sapiens
HPSESLEKM

SEQ ID NO: 122043 - protein, 9 aa, Homo Sapiens
HPSFHNINF

SEQ ID NO: 122044 - protein, 9 aa, Homo Sapiens
HPSGATPTL

SEQ ID NO: 122045 - protein, 9 aa, Homo Sapiens
HPSGLSLHL

SEQ ID NO: 122046 - protein, 9 aa, Homo Sapiens
HPSHVQPAY

SEQ ID NO: 122047 - protein, 9 aa, Homo Sapiens
HPSINKQEW

SEQ ID NO: 122048 - protein, 9 aa, Homo Sapiens
HPSLIPLFV

SEQ ID NO: 122049 - protein, 9 aa, Homo Sapiens
HPSNVLHFF

SEQ ID NO: 122050 - protein, 9 aa, Homo Sapiens
HPSPVVLKV

SEQ ID NO: 122051 - protein, 9 aa, Homo Sapiens
HPSQTVELF

SEQ ID NO: 122052 - protein, 9 aa, Homo Sapiens
HPTADVQTF

SEQ ID NO: 122053 - protein, 9 aa, Homo Sapiens
HPTAFVVSY

SEQ ID NO: 122054 - protein, 9 aa, Homo Sapiens
HPTAHAPMM

SEQ ID NO: 122055 - protein, 9 aa, Homo Sapiens
HPTDDTTTL

SEQ ID NO: 122056 - protein, 9 aa, Homo Sapiens
HPTDPLTSF

SEQ ID NO: 122057 - protein, 9 aa, Homo Sapiens
HPTDVDYRV

SEQ ID NO: 122058 - protein, 9 aa, Homo Sapiens
HPTERCFVF

SEQ ID NO: 122059 - protein, 9 aa, Homo Sapiens
HPTGKMFIL

SEQ ID NO: 122060 - protein, 9 aa, Homo Sapiens
HPTIISESF

SEQ ID NO: 122061 - protein, 9 aa, Homo Sapiens
HPTLIQRTY

SEQ ID NO: 122062 - protein, 9 aa, Homo Sapiens
HPTSHVSLL

SEQ ID NO: 122063 - protein, 9 aa, Homo Sapiens
HPTSVISGY

SEQ ID NO: 122064 - protein, 9 aa, Homo Sapiens
HPTTISPRY

SEQ ID NO: 122065 - protein, 9 aa, Homo Sapiens
HPTTLAVGI

SEQ ID NO: 122066 - protein, 9 aa, Homo Sapiens
HPTVVISAY

SEQ ID NO: 122067 - protein, 9 aa, Homo Sapiens
HPVDFLDAF

SEQ ID NO: 122068 - protein, 9 aa, Homo Sapiens
HPVDQANTL

SEQ ID NO: 122069 - protein, 9 aa, Homo Sapiens
HPVHPDIKL

SEQ ID NO: 122070 - protein, 9 aa, Homo Sapiens
HPVNLTWPF

SEQ ID NO: 122071 - protein, 9 aa, Homo Sapiens
HPVPVPADW

SEQ ID NO: 122072 - protein, 9 aa, Homo Sapiens
HPVSALMEI

SEQ ID NO: 122073 - protein, 9 aa, Homo Sapiens
HPVSLEQYL

SEQ ID NO: 122074 - protein, 9 aa, Homo Sapiens
HPVSQESSW

SEQ ID NO: 122075 - protein, 9 aa, Homo Sapiens
HPVSREWTL

SEQ ID NO: 122076 - protein, 9 aa, Homo Sapiens
HPVTGQFLY

SEQ ID NO: 122077 - protein, 9 aa, Homo Sapiens
HPWTHTERF

SEQ ID NO: 122078 - protein, 9 aa, Homo Sapiens
HPYEVAEVI

SEQ ID NO: 122079 - protein, 9 aa, Homo Sapiens
HPYIYRVTF

SEQ ID NO: 122080 - protein, 9 aa, Homo Sapiens
HPYPHNHYM

SEQ ID NO: 122081 - protein, 9 aa, Homo Sapiens
HPYQFLLKY

SEQ ID NO: 122082 - protein, 9 aa, Homo Sapiens
HPYQPDPKM

SEQ ID NO: 122083 - protein, 9 aa, Homo Sapiens
HSGPVIPVY

SEQ ID NO: 122084 - protein, 9 aa, Homo Sapiens
HSYPGASGW

SEQ ID NO: 122085 - protein, 9 aa, Homo Sapiens
HTNPVGTEW

SEQ ID NO: 122086 - protein, 9 aa, Homo Sapiens
HVGAFGELW

SEQ ID NO: 122087 - protein, 9 aa, Homo Sapiens
HVGPILVGW

SEQ ID NO: 122088 - protein, 9 aa, Homo Sapiens
HVSGAVLTF

SEQ ID NO: 122089 - protein, 9 aa, Homo Sapiens
HVSLVQLTL

SEQ ID NO: 122090 - protein, 9 aa, Homo Sapiens
HVSTVNPNY

SEQ ID NO: 122091 - protein, 9 aa, Homo Sapiens
HVVIVVQDW

SEQ ID NO: 122092 - protein, 9 aa, Homo Sapiens
IAAPDSRRW

SEQ ID NO: 122093 - protein, 9 aa, Homo Sapiens
IAAQTGTRW

SEQ ID NO: 122094 - protein, 9 aa, Homo Sapiens
IADEDRGNW

SEQ ID NO: 122095 - protein, 9 aa, Homo Sapiens
IAHLFNVEW

SEQ ID NO: 122096 - protein, 9 aa, Homo Sapiens
IAMDLILKM

SEQ ID NO: 122097 - protein, 9 aa, Homo Sapiens
IAPETRRSI

SEQ ID NO: 122098 - protein, 9 aa, Homo Sapiens
IAQSLEHSW

SEQ ID NO: 122099 - protein, 9 aa, Homo Sapiens
IAVPRNDEW

SEQ ID NO: 122100 - protein, 9 aa, Homo Sapiens
IIISTPEKW

SEQ ID NO: 122101 - protein, 9 aa, Homo Sapiens
IPAATTIAY

SEQ ID NO: 122102 - protein, 9 aa, Homo Sapiens
IPAAVKLTY

SEQ ID NO: 122103 - protein, 9 aa, Homo Sapiens
IPAEDVPLL

SEQ ID NO: 122104 - protein, 9 aa, Homo Sapiens
IPAEFSGVW

SEQ ID NO: 122105 - protein, 9 aa, Homo Sapiens
IPAESYTFF

SEQ ID NO: 122106 - protein, 9 aa, Homo Sapiens
IPAGTELTF

SEQ ID NO: 122107 - protein, 9 aa, Homo Sapiens
IPANVVLKW

SEQ ID NO: 122108 - protein, 9 aa, Homo Sapiens
IPAQHITLF

SEQ ID NO: 122109 - protein, 9 aa, Homo Sapiens
IPASKVSKW

SEQ ID NO: 122110 - protein, 9 aa, Homo Sapiens
IPCPTVVLL

SEQ ID NO: 122111 - protein, 9 aa, Homo Sapiens
IPDASKLQF

SEQ ID NO: 122112 - protein, 9 aa, Homo Sapiens
IPDEVIKKW

SEQ ID NO: 122113 - protein, 9 aa, Homo Sapiens
IPDIKKDRW

SEQ ID NO: 122114 - protein, 9 aa, Homo Sapiens
IPDIQAHEW

SEQ ID NO: 122115 - protein, 9 aa, Homo Sapiens
IPDKQYTDW

SEQ ID NO: 122116 - protein, 9 aa, Homo Sapiens
IPDLSEYKW

SEQ ID NO: 122117 - protein, 9 aa, Homo Sapiens
IPDQVIRVF

SEQ ID NO: 122118 - protein, 9 aa, Homo Sapiens
IPDTLQELF

SEQ ID NO: 122119 - protein, 9 aa, Homo Sapiens
IPDTMAHLI

SEQ ID NO: 122120 - protein, 9 aa, Homo Sapiens
IPFEFPLHL

SEQ ID NO: 122121 - protein, 9 aa, Homo Sapiens
IPFISPKRW

SEQ ID NO: 122122 - protein, 9 aa, Homo Sapiens
IPFNQALVF

SEQ ID NO: 122123 - protein, 9 aa, Homo Sapiens
IPFRPSIQF

SEQ ID NO: 122124 - protein, 9 aa, Homo Sapiens
IPFTGNVKL

SEQ ID NO: 122125 - protein, 9 aa, Homo Sapiens
IPFVDPDSW

SEQ ID NO: 122126 - protein, 9 aa, Homo Sapiens
IPHDVLPDW

SEQ ID NO: 122127 - protein, 9 aa, Homo Sapiens
IPHHIIVKF

SEQ ID NO: 122128 - protein, 9 aa, Homo Sapiens
IPIEGATEW

SEQ ID NO: 122129 - protein, 9 aa, Homo Sapiens
IPIEPDYKF

SEQ ID NO: 122130 - protein, 9 aa, Homo Sapiens
IPLHYLLSY

SEQ ID NO: 122131 - protein, 9 aa, Homo Sapiens
IPMTPTSSF

SEQ ID NO: 122132 - protein, 9 aa, Homo Sapiens
IPNEIIHAL

SEQ ID NO: 122133 - protein, 9 aa, Homo Sapiens
IPNENEAQF

SEQ ID NO: 122134 - protein, 9 aa, Homo Sapiens
IPNENELQF

SEQ ID NO: 122135 - protein, 9 aa, Homo Sapiens
IPNFDVREI

SEQ ID NO: 122136 - protein, 9 aa, Homo Sapiens
IPRIDYDRI

SEQ ID NO: 122137 - protein, 9 aa, Homo Sapiens
IPRPDGIEW

SEQ ID NO: 122138 - protein, 9 aa, Homo Sapiens
IPSAEVEKW

SEQ ID NO: 122139 - protein, 9 aa, Homo Sapiens
IPSDLACRL

SEQ ID NO: 122140 - protein, 9 aa, Homo Sapiens
IPSELFSSF

SEQ ID NO: 122141 - protein, 9 aa, Homo Sapiens
IPSQLNVNF

SEQ ID NO: 122142 - protein, 9 aa, Homo Sapiens
IPSRLPLLL

SEQ ID NO: 122143 - protein, 9 aa, Homo Sapiens
IPSSKLLFL

SEQ ID NO: 122144 - protein, 9 aa, Homo Sapiens
IPSSVPATF

SEQ ID NO: 122145 - protein, 9 aa, Homo Sapiens
IPSSWRLLF

SEQ ID NO: 122146 - protein, 9 aa, Homo Sapiens
IPSTCSEIW

SEQ ID NO: 122147 - protein, 9 aa, Homo Sapiens
IPTEQVNEL

SEQ ID NO: 122148 - protein, 9 aa, Homo Sapiens
IPTKQTQTF

SEQ ID NO: 122149 - protein, 9 aa, Homo Sapiens
IPTRVITNF

SEQ ID NO: 122150 - protein, 9 aa, Homo Sapiens
IPVAIRTQI

SEQ ID NO: 122151 - protein, 9 aa, Homo Sapiens
IPVGGTYLI

SEQ ID NO: 122152 - protein, 9 aa, Homo Sapiens
IPVSQISTI

SEQ ID NO: 122153 - protein, 9 aa, Homo Sapiens
IPYEGFASL

SEQ ID NO: 122154 - protein, 9 aa, Homo Sapiens
IPYPGCEFF

SEQ ID NO: 122155 - protein, 9 aa, Homo Sapiens
IPYPRPIHL

SEQ ID NO: 122156 - protein, 9 aa, Homo Sapiens
IPYQDRESY

SEQ ID NO: 122157 - protein, 9 aa, Homo Sapiens
IPYSPDVQI

SEQ ID NO: 122158 - protein, 9 aa, Homo Sapiens
ITTTINPRF

SEQ ID NO: 122159 - protein, 9 aa, Homo Sapiens
KAPGSTSNL

SEQ ID NO: 122160 - protein, 9 aa, Homo Sapiens
KPFIDREWW

SEQ ID NO: 122161 - protein, 9 aa, Homo Sapiens
KPFQAVFKF

SEQ ID NO: 122162 - protein, 9 aa, Homo Sapiens
KPIESFNEY

SEQ ID NO: 122163 - protein, 9 aa, Homo Sapiens
KPIPKSDKF

SEQ ID NO: 122164 - protein, 9 aa, Homo Sapiens
KPNDQSSRW

SEQ ID NO: 122165 - protein, 9 aa, Homo Sapiens
KPNGLILQY

SEQ ID NO: 122166 - protein, 9 aa, Homo Sapiens
KPNKTRVIW

SEQ ID NO: 122167 - protein, 9 aa, Homo Sapiens
KPTHVVVTL

SEQ ID NO: 122168 - protein, 9 aa, Homo Sapiens
KPVELRTKW

SEQ ID NO: 122169 - protein, 9 aa, Homo Sapiens
LAASVISKW

SEQ ID NO: 122170 - protein, 9 aa, Homo Sapiens
LACSAGDTW

SEQ ID NO: 122171 - protein, 9 aa, Homo Sapiens
LAEEGFYKF

SEQ ID NO: 122172 - protein, 9 aa, Homo Sapiens
LAHGADVNW

SEQ ID NO: 122173 - protein, 9 aa, Homo Sapiens
LASDPDCRW

SEQ ID NO: 122174 - protein, 9 aa, Homo Sapiens
LATASSPKF

SEQ ID NO: 122175 - protein, 9 aa, Homo Sapiens
LATTILQHW

SEQ ID NO: 122176 - protein, 9 aa, Homo Sapiens
LPAAARPLW

SEQ ID NO: 122177 - protein, 9 aa, Homo Sapiens
LPAACLLQL

SEQ ID NO: 122178 - protein, 9 aa, Homo Sapiens
LPAAGKTTW

SEQ ID NO: 122179 - protein, 9 aa, Homo Sapiens
LPAALLSRF

SEQ ID NO: 122180 - protein, 9 aa, Homo Sapiens
LPADCQIHL

SEQ ID NO: 122181 - protein, 9 aa, Homo Sapiens
LPADTVQRI

SEQ ID NO: 122182 - protein, 9 aa, Homo Sapiens
LPADVQNYY

SEQ ID NO: 122183 - protein, 9 aa, Homo Sapiens
LPADWAPLF

SEQ ID NO: 122184 - protein, 9 aa, Homo Sapiens
LPAEFFEVL

SEQ ID NO: 122185 - protein, 9 aa, Homo Sapiens
LPAEHQFSF

SEQ ID NO: 122186 - protein, 9 aa, Homo Sapiens
LPAESNEKI

SEQ ID NO: 122187 - protein, 9 aa, Homo Sapiens
LPAEYATHF

SEQ ID NO: 122188 - protein, 9 aa, Homo Sapiens
LPAGIVAVL

SEQ ID NO: 122189 - protein, 9 aa, Homo Sapiens
LPAGSKKNW

SEQ ID NO: 122190 - protein, 9 aa, Homo Sapiens
LPAKILVEF

SEQ ID NO: 122191 - protein, 9 aa, Homo Sapiens
LPALFTDLY

SEQ ID NO: 122192 - protein, 9 aa, Homo Sapiens
LPALKDRKW

SEQ ID NO: 122193 - protein, 9 aa, Homo Sapiens
LPAPGVPAW

SEQ ID NO: 122194 - protein, 9 aa, Homo Sapiens
LPAPPKIYF

SEQ ID NO: 122195 - protein, 9 aa, Homo Sapiens
LPAPPTQNM

SEQ ID NO: 122196 - protein, 9 aa, Homo Sapiens
LPAQQVHNY

SEQ ID NO: 122197 - protein, 9 aa, Homo Sapiens
LPASEGEVW

SEQ ID NO: 122198 - protein, 9 aa, Homo Sapiens
LPASVHPQL

SEQ ID NO: 122199 - protein, 9 aa, Homo Sapiens
LPATPWGVW

SEQ ID NO: 122200 - protein, 9 aa, Homo Sapiens
LPCKDAPEL

SEQ ID NO: 122201 - protein, 9 aa, Homo Sapiens
LPCKFTSQF

SEQ ID NO: 122202 - protein, 9 aa, Homo Sapiens
LPCPDSQKL

SEQ ID NO: 122203 - protein, 9 aa, Homo Sapiens
LPDDISHGY

SEQ ID NO: 122204 - protein, 9 aa, Homo Sapiens
LPDDKLTLF

SEQ ID NO: 122205 - protein, 9 aa, Homo Sapiens
LPDDSKDTW

SEQ ID NO: 122206 - protein, 9 aa, Homo Sapiens
LPDEIYHVY

SEQ ID NO: 122207 - protein, 9 aa, Homo Sapiens
LPDEKVELF

SEQ ID NO: 122208 - protein, 9 aa, Homo Sapiens
LPDEVRERW

SEQ ID NO: 122209 - protein, 9 aa, Homo Sapiens
LPDGPAGSW

SEQ ID NO: 122210 - protein, 9 aa, Homo Sapiens
LPDGQVITI

SEQ ID NO: 122211 - protein, 9 aa, Homo Sapiens
LPDGSTIEI

SEQ ID NO: 122212 - protein, 9 aa, Homo Sapiens
LPDGSYEDW

SEQ ID NO: 122213 - protein, 9 aa, Homo Sapiens
LPDHPHFHW

SEQ ID NO: 122214 - protein, 9 aa, Homo Sapiens
LPDKGAQRL

SEQ ID NO: 122215 - protein, 9 aa, Homo Sapiens
LPDLDSENW

SEQ ID NO: 122216 - protein, 9 aa, Homo Sapiens
LPDNAKQCF

SEQ ID NO: 122217 - protein, 9 aa, Homo Sapiens
LPDPGFQKI

SEQ ID NO: 122218 - protein, 9 aa, Homo Sapiens
LPDPIIIHL

SEQ ID NO: 122219 - protein, 9 aa, Homo Sapiens
LPDPNLITF

SEQ ID NO: 122220 - protein, 9 aa, Homo Sapiens
LPDQSFLWN

SEQ ID NO: 122221 - protein, 9 aa, Homo Sapiens
LPDTLKVTY

SEQ ID NO: 122222 - protein, 9 aa, Homo Sapiens
LPDTQTPSW

SEQ ID NO: 122223 - protein, 9 aa, Homo Sapiens
LPDVSLQEF

SEQ ID NO: 122224 - protein, 9 aa, Homo Sapiens
LPEAHQRTW

SEQ ID NO: 122225 - protein, 9 aa, Homo Sapiens
LPEDFYHFW

SEQ ID NO: 122226 - protein, 9 aa, Homo Sapiens
LPEDKPRLI

SEQ ID NO: 122227 - protein, 9 aa, Homo Sapiens
LPEDLYHLI

SEQ ID NO: 122228 - protein, 9 aa, Homo Sapiens
LPEDVGHCF

SEQ ID NO: 122229 - protein, 9 aa, Homo Sapiens
LPEEEHEFF

SEQ ID NO: 122230 - protein, 9 aa, Homo Sapiens
LPEEHARFY

SEQ ID NO: 122231 - protein, 9 aa, Homo Sapiens
LPEEPITRW

SEQ ID NO: 122232 - protein, 9 aa, Homo Sapiens
LPEHNLITW

SEQ ID NO: 122233 - protein, 9 aa, Homo Sapiens
LPEPVTLRW

SEQ ID NO: 122234 - protein, 9 aa, Homo Sapiens
LPFDKETGF

SEQ ID NO: 122235 - protein, 9 aa, Homo Sapiens
LPFEGKCYY

SEQ ID NO: 122236 - protein, 9 aa, Homo Sapiens
LPFEGKVNL

SEQ ID NO: 122237 - protein, 9 aa, Homo Sapiens
LPFEPVPVI

SEQ ID NO: 122238 - protein, 9 aa, Homo Sapiens
LPFEVLQHI

SEQ ID NO: 122239 - protein, 9 aa, Homo Sapiens
LPFFNDRPW

SEQ ID NO: 122240 - protein, 9 aa, Homo Sapiens
LPFGKVTNI

SEQ ID NO: 122241 - protein, 9 aa, Homo Sapiens
LPFGPTAYF

SEQ ID NO: 122242 - protein, 9 aa, Homo Sapiens
LPFIPPQRW

SEQ ID NO: 122243 - protein, 9 aa, Homo Sapiens
LPFLEASTL

SEQ ID NO: 122244 - protein, 9 aa, Homo Sapiens
LPFPFPSKL

SEQ ID NO: 122245 - protein, 9 aa, Homo Sapiens
LPFPIIQQY

SEQ ID NO: 122246 - protein, 9 aa, Homo Sapiens
LPFQFAHHL

SEQ ID NO: 122247 - protein, 9 aa, Homo Sapiens
LPFQVANVW

SEQ ID NO: 122248 - protein, 9 aa, Homo Sapiens
LPGAGKTTW

SEQ ID NO: 122249 - protein, 9 aa, Homo Sapiens
LPGDTALLL

SEQ ID NO: 122250 - protein, 9 aa, Homo Sapiens
LPGGPTLTF

SEQ ID NO: 122251 - protein, 9 aa, Homo Sapiens
LPGLTQVRW

SEQ ID NO: 122252 - protein, 9 aa, Homo Sapiens
LPGNPNAVW

SEQ ID NO: 122253 - protein, 9 aa, Homo Sapiens
LPGPHYYTW

SEQ ID NO: 122254 - protein, 9 aa, Homo Sapiens
LPGPSLDQW

SEQ ID NO: 122255 - protein, 9 aa, Homo Sapiens
LPGSGKTQW

SEQ ID NO: 122256 - protein, 9 aa, Homo Sapiens
LPHEDLPFW

SEQ ID NO: 122257 - protein, 9 aa, Homo Sapiens
LPHELCTLI

SEQ ID NO: 122258 - protein, 9 aa, Homo Sapiens
LPHHVHLTW

SEQ ID NO: 122259 - protein, 9 aa, Homo Sapiens
LPHITDVSW

SEQ ID NO: 122260 - protein, 9 aa, Homo Sapiens
LPHQPLATY

SEQ ID NO: 122261 - protein, 9 aa, Homo Sapiens
LPHSGEAQL

SEQ ID NO: 122262 - protein, 9 aa, Homo Sapiens
LPHSVNSKL

SEQ ID NO: 122263 - protein, 9 aa, Homo Sapiens
LPIDDVLRI

SEQ ID NO: 122264 - protein, 9 aa, Homo Sapiens
LPIDESNTI

SEQ ID NO: 122265 - protein, 9 aa, Homo Sapiens
LPISKIDQW

SEQ ID NO: 122266 - protein, 9 aa, Homo Sapiens
LPLAHVLEL

SEQ ID NO: 122267 - protein, 9 aa, Homo Sapiens
LPLEEAYRF

SEQ ID NO: 122268 - protein, 9 aa, Homo Sapiens
LPLEEHYRF

SEQ ID NO: 122269 - protein, 9 aa, Homo Sapiens
LPLEPEQFL

SEQ ID NO: 122270 - protein, 9 aa, Homo Sapiens
LPLHIAPRW

SEQ ID NO: 122271 - protein, 9 aa, Homo Sapiens
LPLHVATLL

SEQ ID NO: 122272 - protein, 9 aa, Homo Sapiens
LPLHVLPLY

SEQ ID NO: 122273 - protein, 9 aa, Homo Sapiens
LPLLRTVLW

SEQ ID NO: 122274 - protein, 9 aa, Homo Sapiens
LPLLSPVTF

SEQ ID NO: 122275 - protein, 9 aa, Homo Sapiens
LPLLSVYQL

SEQ ID NO: 122276 - protein, 9 aa, Homo Sapiens
LPLNSVYVY

SEQ ID NO: 122277 - protein, 9 aa, Homo Sapiens
LPLPEVQCF

SEQ ID NO: 122278 - protein, 9 aa, Homo Sapiens
LPLPHFDTI

SEQ ID NO: 122279 - protein, 9 aa, Homo Sapiens
LPLPVLEKW

SEQ ID NO: 122280 - protein, 9 aa, Homo Sapiens
LPLPVVQLL

SEQ ID NO: 122281 - protein, 9 aa, Homo Sapiens
LPLQENVTI

SEQ ID NO: 122282 - protein, 9 aa, Homo Sapiens
LPLQTVQRL

SEQ ID NO: 122283 - protein, 9 aa, Homo Sapiens
LPNAVITRI

SEQ ID NO: 122284 - protein, 9 aa, Homo Sapiens
LPNDGDEKY

SEQ ID NO: 122285 - protein, 9 aa, Homo Sapiens
LPNDKTLLY

SEQ ID NO: 122286 - protein, 9 aa, Homo Sapiens
LPNDVISSL

SEQ ID NO: 122287 - protein, 9 aa, Homo Sapiens
LPNELIELL

SEQ ID NO: 122288 - protein, 9 aa, Homo Sapiens
LPNGLDVTF

SEQ ID NO: 122289 - protein, 9 aa, Homo Sapiens
LPNGPTAHF

SEQ ID NO: 122290 - protein, 9 aa, Homo Sapiens
LPNIQAVLL

SEQ ID NO: 122291 - protein, 9 aa, Homo Sapiens
LPNNAKLEM

SEQ ID NO: 122292 - protein, 9 aa, Homo Sapiens
LPNNIVDVW

SEQ ID NO: 122293 - protein, 9 aa, Homo Sapiens
LPNNRELYI

SEQ ID NO: 122294 - protein, 9 aa, Homo Sapiens
LPNQTVLKI

SEQ ID NO: 122295 - protein, 9 aa, Homo Sapiens
LPNSIASRF

SEQ ID NO: 122296 - protein, 9 aa, Homo Sapiens
LPNTDVPIL

SEQ ID NO: 122297 - protein, 9 aa, Homo Sapiens
LPQAQQPQW

SEQ ID NO: 122298 - protein, 9 aa, Homo Sapiens
LPQDVILKF

SEQ ID NO: 122299 - protein, 9 aa, Homo Sapiens
LPQNAPNYW

SEQ ID NO: 122300 - protein, 9 aa, Homo Sapiens
LPQPLILRW

SEQ ID NO: 122301 - protein, 9 aa, Homo Sapiens
LPRDEADEL

SEQ ID NO: 122302 - protein, 9 aa, Homo Sapiens
LPSDFEHTI

SEQ ID NO: 122303 - protein, 9 aa, Homo Sapiens
LPSDHSVKY

SEQ ID NO: 122304 - protein, 9 aa, Homo Sapiens
LPSDKALVL

SEQ ID NO: 122305 - protein, 9 aa, Homo Sapiens
LPSDVQTAI

SEQ ID NO: 122306 - protein, 9 aa, Homo Sapiens
LPSDVSILY

SEQ ID NO: 122307 - protein, 9 aa, Homo Sapiens
LPSDVVTGY

SEQ ID NO: 122308 - protein, 9 aa, Homo Sapiens
LPSEHQTIL

SEQ ID NO: 122309 - protein, 9 aa, Homo Sapiens
LPSEIEVKY

SEQ ID NO: 122310 - protein, 9 aa, Homo Sapiens
LPSEKAIFL

SEQ ID NO: 122311 - protein, 9 aa, Homo Sapiens
LPSELIVHI

SEQ ID NO: 122312 - protein, 9 aa, Homo Sapiens
LPSEMQTRI

SEQ ID NO: 122313 - protein, 9 aa, Homo Sapiens
LPSEQQEQW

SEQ ID NO: 122314 - protein, 9 aa, Homo Sapiens
LPSETIQTY

SEQ ID NO: 122315 - protein, 9 aa, Homo Sapiens
LPSGAILSL

SEQ ID NO: 122316 - protein, 9 aa, Homo Sapiens
LPSGAVFVI

SEQ ID NO: 122317 - protein, 9 aa, Homo Sapiens
LPSGEVVKI

SEQ ID NO: 122318 - protein, 9 aa, Homo Sapiens
LPSHGRVQW

SEQ ID NO: 122319 - protein, 9 aa, Homo Sapiens
LPSHGVPLI

SEQ ID NO: 122320 - protein, 9 aa, Homo Sapiens
LPSHLNISY

SEQ ID NO: 122321 - protein, 9 aa, Homo Sapiens
LPSHTKIKY

SEQ ID NO: 122322 - protein, 9 aa, Homo Sapiens
LPSHVVTML

SEQ ID NO: 122323 - protein, 9 aa, Homo Sapiens
LPSKTKVAW

SEQ ID NO: 122324 - protein, 9 aa, Homo Sapiens
LPSLADFSP

SEQ ID NO: 122325 - protein, 9 aa, Homo Sapiens
LPSLDKPGW

SEQ ID NO: 122326 - protein, 9 aa, Homo Sapiens
LPSLPMTSW

SEQ ID NO: 122327 - protein, 9 aa, Homo Sapiens
LPSLVPLRI

SEQ ID NO: 122328 - protein, 9 aa, Homo Sapiens
LPSNDSSKF

SEQ ID NO: 122329 - protein, 9 aa, Homo Sapiens
LPSPAHHLW

SEQ ID NO: 122330 - protein, 9 aa, Homo Sapiens
LPSPHPVRY

SEQ ID NO: 122331 - protein, 9 aa, Homo Sapiens
LPSPLQPSW

SEQ ID NO: 122332 - protein, 9 aa, Homo Sapiens
LPSPSTPRF

SEQ ID NO: 122333 - protein, 9 aa, Homo Sapiens
LPSQLAHRL

SEQ ID NO: 122334 - protein, 9 aa, Homo Sapiens
LPSSEVVKF

SEQ ID NO: 122335 - protein, 9 aa, Homo Sapiens
LPSSFVEKL

SEQ ID NO: 122336 - protein, 9 aa, Homo Sapiens
LPSSHVARL

SEQ ID NO: 122337 - protein, 9 aa, Homo Sapiens
LPSSLYLKI

SEQ ID NO: 122338 - protein, 9 aa, Homo Sapiens
LPSSNYSNI

SEQ ID NO: 122339 - protein, 9 aa, Homo Sapiens
LPSSSPEHL

SEQ ID NO: 122340 - protein, 9 aa, Homo Sapiens
LPSSTKSGW

SEQ ID NO: 122341 - protein, 9 aa, Homo Sapiens
LPSSVISAI

SEQ ID NO: 122342 - protein, 9 aa, Homo Sapiens
LPSTTIVSM

SEQ ID NO: 122343 - protein, 9 aa, Homo Sapiens
LPTASASKF

SEQ ID NO: 122344 - protein, 9 aa, Homo Sapiens
LPTDTLQEL

SEQ ID NO: 122345 - protein, 9 aa, Homo Sapiens
LPTEEPSVW

SEQ ID NO: 122346 - protein, 9 aa, Homo Sapiens
LPTEQEVRF

SEQ ID NO: 122347 - protein, 9 aa, Homo Sapiens
LPTFQSPEF

SEQ ID NO: 122348 - protein, 9 aa, Homo Sapiens
LPTGAAFRW

SEQ ID NO: 122349 - protein, 9 aa, Homo Sapiens
LPTGIPIVY

SEQ ID NO: 122350 - protein, 9 aa, Homo Sapiens
LPTGVYLNF

SEQ ID NO: 122351 - protein, 9 aa, Homo Sapiens
LPTYGVHYY

SEQ ID NO: 122352 - protein, 9 aa, Homo Sapiens
LPVALPARW

SEQ ID NO: 122353 - protein, 9 aa, Homo Sapiens
LPVALQTRL

SEQ ID NO: 122354 - protein, 9 aa, Homo Sapiens
LPVDFHIKM

SEQ ID NO: 122355 - protein, 9 aa, Homo Sapiens
LPVDFVECL

SEQ ID NO: 122356 - protein, 9 aa, Homo Sapiens
LPVDIRQYL

SEQ ID NO: 122357 - protein, 9 aa, Homo Sapiens
LPVDLAEEL

SEQ ID NO: 122358 - protein, 9 aa, Homo Sapiens
LPVDSSHGF

SEQ ID NO: 122359 - protein, 9 aa, Homo Sapiens
LPVEEFNEL

SEQ ID NO: 122360 - protein, 9 aa, Homo Sapiens
LPVEHVNQL

SEQ ID NO: 122361 - protein, 9 aa, Homo Sapiens
LPVIIFTTF

SEQ ID NO: 122362 - protein, 9 aa, Homo Sapiens
LPVLSTDKF

SEQ ID NO: 122363 - protein, 9 aa, Homo Sapiens
LPVNESFGF

SEQ ID NO: 122364 - protein, 9 aa, Homo Sapiens
LPVPAFNVI

SEQ ID NO: 122365 - protein, 9 aa, Homo Sapiens
LPVPDPILL

SEQ ID NO: 122366 - protein, 9 aa, Homo Sapiens
LPVPVIPSF

SEQ ID NO: 122367 - protein, 9 aa, Homo Sapiens
LPVRYLQEF

SEQ ID NO: 122368 - protein, 9 aa, Homo Sapiens
LPVSHGAHF

SEQ ID NO: 122369 - protein, 9 aa, Homo Sapiens
LPVSQPKSW

SEQ ID NO: 122370 - protein, 9 aa, Homo Sapiens
LPWASTHSL

SEQ ID NO: 122371 - protein, 9 aa, Homo Sapiens
LPWEEREKI

SEQ ID NO: 122372 - protein, 9 aa, Homo Sapiens
LPWNITVHF

SEQ ID NO: 122373 - protein, 9 aa, Homo Sapiens
LPWVGKELY

SEQ ID NO: 122374 - protein, 9 aa, Homo Sapiens
LPYAGDVSM

SEQ ID NO: 122375 - protein, 9 aa, Homo Sapiens
LPYNDYFEY

SEQ ID NO: 122376 - protein, 9 aa, Homo Sapiens
LPYNHQHEY

SEQ ID NO: 122377 - protein, 9 aa, Homo Sapiens
LPYPFASEI

SEQ ID NO: 122378 - protein, 9 aa, Homo Sapiens
LPYPFTHHW

SEQ ID NO: 122379 - protein, 9 aa, Homo Sapiens
LPYQGHNSF

SEQ ID NO: 122380 - protein, 9 aa, Homo Sapiens
LPYTNPSKF

SEQ ID NO: 122381 - protein, 9 aa, Homo Sapiens
LVADPDCRW

SEQ ID NO: 122382 - protein, 9 aa, Homo Sapiens
LVHAVQALW

SEQ ID NO: 122383 - protein, 9 aa, Homo Sapiens
LVNNTPLNW

SEQ ID NO: 122384 - protein, 9 aa, Homo Sapiens
LVSDLQQVW

SEQ ID NO: 122385 - protein, 9 aa, Homo Sapiens
MAAAGNYAW

SEQ ID NO: 122386 - protein, 9 aa, Homo Sapiens
MAADGRLVF

SEQ ID NO: 122387 - protein, 9 aa, Homo Sapiens
MAAEPYETI

SEQ ID NO: 122388 - protein, 9 aa, Homo Sapiens
MACDTFIKI

SEQ ID NO: 122389 - protein, 9 aa, Homo Sapiens
MADHLANSW

SEQ ID NO: 122390 - protein, 9 aa, Homo Sapiens
MAGDIYSVF

SEQ ID NO: 122391 - protein, 9 aa, Homo Sapiens
MAHTGVIFF

SEQ ID NO: 122392 - protein, 9 aa, Homo Sapiens
MAIEAQQKF

SEQ ID NO: 122393 - protein, 9 aa, Homo Sapiens
MAIVGTHKF

SEQ ID NO: 122394 - protein, 9 aa, Homo Sapiens
MALEHLVVW

SEQ ID NO: 122395 - protein, 9 aa, Homo Sapiens
MANDLKEVW

SEQ ID NO: 122396 - protein, 9 aa, Homo Sapiens
MANGAVIHL

SEQ ID NO: 122397 - protein, 9 aa, Homo Sapiens
MANPRELRI

SEQ ID NO: 122398 - protein, 9 aa, Homo Sapiens
MAQHFDEVW

SEQ ID NO: 122399 - protein, 9 aa, Homo Sapiens
MARYEREQY

SEQ ID NO: 122400 - protein, 9 aa, Homo Sapiens
MATAHVTEI

SEQ ID NO: 122401 - protein, 9 aa, Homo Sapiens
MATESILHF

SEQ ID NO: 122402 - protein, 9 aa, Homo Sapiens
MAYPDLNEI

SEQ ID NO: 122403 - protein, 9 aa, Homo Sapiens
MPAAGGVLY

SEQ ID NO: 122404 - protein, 9 aa, Homo Sapiens
MPAATDNRY

SEQ ID NO: 122405 - protein, 9 aa, Homo Sapiens
MPADIATLL

SEQ ID NO: 122406 - protein, 9 aa, Homo Sapiens
MPADTNKAF

SEQ ID NO: 122407 - protein, 9 aa, Homo Sapiens
MPAEIVELH

SEQ ID NO: 122408 - protein, 9 aa, Homo Sapiens
MPAFIFEHI

SEQ ID NO: 122409 - protein, 9 aa, Homo Sapiens
MPAGEIEQF

SEQ ID NO: 122410 - protein, 9 aa, Homo Sapiens
MPAPEIVSY

SEQ ID NO: 122411 - protein, 9 aa, Homo Sapiens
MPATVFMLF

SEQ ID NO: 122412 - protein, 9 aa, Homo Sapiens
MPAVKAIIY

SEQ ID NO: 122413 - protein, 9 aa, Homo Sapiens
MPCEALVRM

SEQ ID NO: 122414 - protein, 9 aa, Homo Sapiens
MPDDHARKI

SEQ ID NO: 122415 - protein, 9 aa, Homo Sapiens
MPDDLLTTL

SEQ ID NO: 122416 - protein, 9 aa, Homo Sapiens
MPDGKIQKL

SEQ ID NO: 122417 - protein, 9 aa, Homo Sapiens
MPDGKLYNF

SEQ ID NO: 122418 - protein, 9 aa, Homo Sapiens
MPDHTDVSL

SEQ ID NO: 122419 - protein, 9 aa, Homo Sapiens
MPDHVIPEI

SEQ ID NO: 122420 - protein, 9 aa, Homo Sapiens
MPDPTPFLL

SEQ ID NO: 122421 - protein, 9 aa, Homo Sapiens
MPDSAAALL

SEQ ID NO: 122422 - protein, 9 aa, Homo Sapiens
MPDSGRPAF

SEQ ID NO: 122423 - protein, 9 aa, Homo Sapiens
MPDVVVRSF

SEQ ID NO: 122424 - protein, 9 aa, Homo Sapiens
MPEDGQVNI

SEQ ID NO: 122425 - protein, 9 aa, Homo Sapiens
MPEKLSHKL

SEQ ID NO: 122426 - protein, 9 aa, Homo Sapiens
MPEPASRCL

SEQ ID NO: 122427 - protein, 9 aa, Homo Sapiens
MPEPDAQRF

SEQ ID NO: 122428 - protein, 9 aa, Homo Sapiens
MPEPTVLSL

SEQ ID NO: 122429 - protein, 9 aa, Homo Sapiens
MPEQWARLL

SEQ ID NO: 122430 - protein, 9 aa, Homo Sapiens
MPEVRGALF

SEQ ID NO: 122431 - protein, 9 aa, Homo Sapiens
MPFNKEPKW

SEQ ID NO: 122432 - protein, 9 aa, Homo Sapiens
MPFTTVSEL

SEQ ID NO: 122433 - protein, 9 aa, Homo Sapiens
MPGGNKEAW

SEQ ID NO: 122434 - protein, 9 aa, Homo Sapiens
MPHDAIILL

SEQ ID NO: 122435 - protein, 9 aa, Homo Sapiens
MPHDLITQL

SEQ ID NO: 122436 - protein, 9 aa, Homo Sapiens
MPHEKHYTL

SEQ ID NO: 122437 - protein, 9 aa, Homo Sapiens
MPHHTPHQL

SEQ ID NO: 122438 - protein, 9 aa, Homo Sapiens
MPHNQFIKM

SEQ ID NO: 122439 - protein, 9 aa, Homo Sapiens
MPHNYSRCY

SEQ ID NO: 122440 - protein, 9 aa, Homo Sapiens
MPHQLQDTF

SEQ ID NO: 122441 - protein, 9 aa, Homo Sapiens
MPHRISSHF

SEQ ID NO: 122442 - protein, 9 aa, Homo Sapiens
MPHSSSAKL

SEQ ID NO: 122443 - protein, 9 aa, Homo Sapiens
MPIGPDVSL

SEQ ID NO: 122444 - protein, 9 aa, Homo Sapiens
MPIQGQPCF

SEQ ID NO: 122445 - protein, 9 aa, Homo Sapiens
MPKKGGRWW

SEQ ID NO: 122446 - protein, 9 aa, Homo Sapiens
MPLAFSDKY

SEQ ID NO: 122447 - protein, 9 aa, Homo Sapiens
MPLEDMNEF

SEQ ID NO: 122448 - protein, 9 aa, Homo Sapiens
MPLEEGDTF

SEQ ID NO: 122449 - protein, 9 aa, Homo Sapiens
MPLGARILF

SEQ ID NO: 122450 - protein, 9 aa, Homo Sapiens
MPLGTIHCI

SEQ ID NO: 122451 - protein, 9 aa, Homo Sapiens
MPLHVAPLL

SEQ ID NO: 122452 - protein, 9 aa, Homo Sapiens
MPLNVADLI

SEQ ID NO: 122453 - protein, 9 aa, Homo Sapiens
MPLQLLLLL

SEQ ID NO: 122454 - protein, 9 aa, Homo Sapiens
MPLRDAAKL

SEQ ID NO: 122455 - protein, 9 aa, Homo Sapiens
MPLSFPSLL

SEQ ID NO: 122456 - protein, 9 aa, Homo Sapiens
MPLTSIQCW

SEQ ID NO: 122457 - protein, 9 aa, Homo Sapiens
MPMGPDQKY

SEQ ID NO: 122458 - protein, 9 aa, Homo Sapiens
MPMLNERTW

SEQ ID NO: 122459 - protein, 9 aa, Homo Sapiens
MPMNVADLI

SEQ ID NO: 122460 - protein, 9 aa, Homo Sapiens
MPMRLDDGW

SEQ ID NO: 122461 - protein, 9 aa, Homo Sapiens
MPNENIPEL

SEQ ID NO: 122462 - protein, 9 aa, Homo Sapiens
MPNGTVQRF

SEQ ID NO: 122463 - protein, 9 aa, Homo Sapiens
MPNQHACKL

SEQ ID NO: 122464 - protein, 9 aa, Homo Sapiens
MPNQIVQIL

SEQ ID NO: 122465 - protein, 9 aa, Homo Sapiens
MPNSPAPHF

SEQ ID NO: 122466 - protein, 9 aa, Homo Sapiens
MPNVKVAVF

SEQ ID NO: 122467 - protein, 9 aa, Homo Sapiens
MPPMQAQEW

SEQ ID NO: 122468 - protein, 9 aa, Homo Sapiens
MPQEKSPGY

SEQ ID NO: 122469 - protein, 9 aa, Homo Sapiens
MPQGGGQHY

SEQ ID NO: 122470 - protein, 9 aa, Homo Sapiens
MPQGNPLLL

SEQ ID NO: 122471 - protein, 9 aa, Homo Sapiens
MPQKERESI

SEQ ID NO: 122472 - protein, 9 aa, Homo Sapiens
MPQNKSTKF

SEQ ID NO: 122473 - protein, 9 aa, Homo Sapiens
MPSEDVVSL

SEQ ID NO: 122474 - protein, 9 aa, Homo Sapiens
MPSGEFARI

SEQ ID NO: 122475 - protein, 9 aa, Homo Sapiens
MPSGIKTNI

SEQ ID NO: 122476 - protein, 9 aa, Homo Sapiens
MPSKTELIV

SEQ ID NO: 122477 - protein, 9 aa, Homo Sapiens
MPSPVSPKL

SEQ ID NO: 122478 - protein, 9 aa, Homo Sapiens
MPSQSVETY

SEQ ID NO: 122479 - protein, 9 aa, Homo Sapiens
MPSSLAHRI

SEQ ID NO: 122480 - protein, 9 aa, Homo Sapiens
MPSSVPLRA

SEQ ID NO: 122481 - protein, 9 aa, Homo Sapiens
MPSVKVSVF

SEQ ID NO: 122482 - protein, 9 aa, Homo Sapiens
MPTEQAEGF

SEQ ID NO: 122483 - protein, 9 aa, Homo Sapiens
MPTKETTKL

SEQ ID NO: 122484 - protein, 9 aa, Homo Sapiens
MPTKTIEVL

SEQ ID NO: 122485 - protein, 9 aa, Homo Sapiens
MPTMRLLSF

SEQ ID NO: 122486 - protein, 9 aa, Homo Sapiens
MPTPVIKAF

SEQ ID NO: 122487 - protein, 9 aa, Homo Sapiens
MPTQEVQEL

SEQ ID NO: 122488 - protein, 9 aa, Homo Sapiens
MPTRPVPSY

SEQ ID NO: 122489 - protein, 9 aa, Homo Sapiens
MPTSTILRL

SEQ ID NO: 122490 - protein, 9 aa, Homo Sapiens
MPVDSFNSM

SEQ ID NO: 122491 - protein, 9 aa, Homo Sapiens
MPVEKNITL

SEQ ID NO: 122492 - protein, 9 aa, Homo Sapiens
MPVFPDFKM

SEQ ID NO: 122493 - protein, 9 aa, Homo Sapiens
MPVGMTHGL

SEQ ID NO: 122494 - protein, 9 aa, Homo Sapiens
MPVGPAPGM

SEQ ID NO: 122495 - protein, 9 aa, Homo Sapiens
MPVHAAVQM

SEQ ID NO: 122496 - protein, 9 aa, Homo Sapiens
MPVIPMNTI

SEQ ID NO: 122497 - protein, 9 aa, Homo Sapiens
MPVNTNQNF

SEQ ID NO: 122498 - protein, 9 aa, Homo Sapiens
MPVPTTPEF

SEQ ID NO: 122499 - protein, 9 aa, Homo Sapiens
MPVPVILNF

SEQ ID NO: 122500 - protein, 9 aa, Homo Sapiens
MPVQDLPRL

SEQ ID NO: 122501 - protein, 9 aa, Homo Sapiens
MPVRAADKL

SEQ ID NO: 122502 - protein, 9 aa, Homo Sapiens
MPVSKPTSW

SEQ ID NO: 122503 - protein, 9 aa, Homo Sapiens
MPVSSQHRY

SEQ ID NO: 122504 - protein, 9 aa, Homo Sapiens
MPWCSPQEW

SEQ ID NO: 122505 - protein, 9 aa, Homo Sapiens
MPYLEHESF

SEQ ID NO: 122506 - protein, 9 aa, Homo Sapiens
MPYNHQHKY

SEQ ID NO: 122507 - protein, 9 aa, Homo Sapiens
MSVHLSPCF

SEQ ID NO: 122508 - protein, 9 aa, Homo Sapiens
MTNGFHMTW

SEQ ID NO: 122509 - protein, 9 aa, Homo Sapiens
MVDGTLLLL

SEQ ID NO: 122510 - protein, 9 aa, Homo Sapiens
MVDHNIYVW

SEQ ID NO: 122511 - protein, 9 aa, Homo Sapiens
MVESSRHNW

SEQ ID NO: 122512 - protein, 9 aa, Homo Sapiens
MVLDIVQHW

SEQ ID NO: 122513 - protein, 9 aa, Homo Sapiens
MVNHFIAEF

SEQ ID NO: 122514 - protein, 9 aa, Homo Sapiens
NAAADRVKW

SEQ ID NO: 122515 - protein, 9 aa, Homo Sapiens
NAAEELWKW

SEQ ID NO: 122516 - protein, 9 aa, Homo Sapiens
NAAPSHTKF

SEQ ID NO: 122517 - protein, 9 aa, Homo Sapiens
NACKIGGYW

SEQ ID NO: 122518 - protein, 9 aa, Homo Sapiens
NADGHGEVW

SEQ ID NO: 122519 - protein, 9 aa, Homo Sapiens
NADHTTLLL

SEQ ID NO: 122520 - protein, 9 aa, Homo Sapiens
NADPASHEI

SEQ ID NO: 122521 - protein, 9 aa, Homo Sapiens
NADTLALVF

SEQ ID NO: 122522 - protein, 9 aa, Homo Sapiens
NAFEELVAF

SEQ ID NO: 122523 - protein, 9 aa, Homo Sapiens
NAFKEITTM

SEQ ID NO: 122524 - protein, 9 aa, Homo Sapiens
NAGDRADFW

SEQ ID NO: 122525 - protein, 9 aa, Homo Sapiens
NAGPPSHII

SEQ ID NO: 122526 - protein, 9 aa, Homo Sapiens
NAHMDSLQW

SEQ ID NO: 122527 - protein, 9 aa, Homo Sapiens
NAIEHTLQW

SEQ ID NO: 122528 - protein, 9 aa, Homo Sapiens
NALNQVVLW

SEQ ID NO: 122529 - protein, 9 aa, Homo Sapiens
NAMDVVVQF

SEQ ID NO: 122530 - protein, 9 aa, Homo Sapiens
NANAASPLI

SEQ ID NO: 122531 - protein, 9 aa, Homo Sapiens
NANRIALDF

SEQ ID NO: 122532 - protein, 9 aa, Homo Sapiens
NASDLPLSI

SEQ ID NO: 122533 - protein, 9 aa, Homo Sapiens
NASESKLEL

SEQ ID NO: 122534 - protein, 9 aa, Homo Sapiens
NATGVAMLF

SEQ ID NO: 122535 - protein, 9 aa, Homo Sapiens
NATTIANHW

SEQ ID NO: 122536 - protein, 9 aa, Homo Sapiens
NPAASSNHW

SEQ ID NO: 122537 - protein, 9 aa, Homo Sapiens
NPADITVLF

SEQ ID NO: 122538 - protein, 9 aa, Homo Sapiens
NPADRAYSW

SEQ ID NO: 122539 - protein, 9 aa, Homo Sapiens
NPDDVFREF

SEQ ID NO: 122540 - protein, 9 aa, Homo Sapiens
NPDEGVNYF

SEQ ID NO: 122541 - protein, 9 aa, Homo Sapiens
NPDEQARQF

SEQ ID NO: 122542 - protein, 9 aa, Homo Sapiens
NPDPHFQGF

SEQ ID NO: 122543 - protein, 9 aa, Homo Sapiens
NPEYTTVSW

SEQ ID NO: 122544 - protein, 9 aa, Homo Sapiens
NPFPHSHTF

SEQ ID NO: 122545 - protein, 9 aa, Homo Sapiens
NPHPHCQVW

SEQ ID NO: 122546 - protein, 9 aa, Homo Sapiens
NPIEQDQKW

SEQ ID NO: 122547 - protein, 9 aa, Homo Sapiens
NPIIVSCGW

SEQ ID NO: 122548 - protein, 9 aa, Homo Sapiens
NPINMVSKL

SEQ ID NO: 122549 - protein, 9 aa, Homo Sapiens
NPINTFTKF

SEQ ID NO: 122550 - protein, 9 aa, Homo Sapiens
NPISTVTEL

SEQ ID NO: 122551 - protein, 9 aa, Homo Sapiens
NPLAATHEF

SEQ ID NO: 122552 - protein, 9 aa, Homo Sapiens
NPLPSKETI

SEQ ID NO: 122553 - protein, 9 aa, Homo Sapiens
NPLPTNYTW

SEQ ID NO: 122554 - protein, 9 aa, Homo Sapiens
NPNRHQMGW

SEQ ID NO: 122555 - protein, 9 aa, Homo Sapiens
NPNSGDFRF

SEQ ID NO: 122556 - protein, 9 aa, Homo Sapiens
NPNTVIILI

SEQ ID NO: 122557 - protein, 9 aa, Homo Sapiens
NPPEYEFLW

SEQ ID NO: 122558 - protein, 9 aa, Homo Sapiens
NPQHVQLLF

SEQ ID NO: 122559 - protein, 9 aa, Homo Sapiens
NPQPMTPPW

SEQ ID NO: 122560 - protein, 9 aa, Homo Sapiens
NPSEYVVCF

SEQ ID NO: 122561 - protein, 9 aa, Homo Sapiens
NPSPYHLYY

SEQ ID NO: 122562 - protein, 9 aa, Homo Sapiens
NPTDISYVY

SEQ ID NO: 122563 - protein, 9 aa, Homo Sapiens
NPTSVFSRI

SEQ ID NO: 122564 - protein, 9 aa, Homo Sapiens
NPVDIVSTL

SEQ ID NO: 122565 - protein, 9 aa, Homo Sapiens
NPVPYNSSW

SEQ ID NO: 122566 - protein, 9 aa, Homo Sapiens
NPVSWVQTF

SEQ ID NO: 122567 - protein, 9 aa, Homo Sapiens
NPYEFALKF

SEQ ID NO: 122568 - protein, 9 aa, Homo Sapiens
NPYHVVILF

SEQ ID NO: 122569 - protein, 9 aa, Homo Sapiens
NSSAVLLQW

SEQ ID NO: 122570 - protein, 9 aa, Homo Sapiens
NSSPVINHL

SEQ ID NO: 122571 - protein, 9 aa, Homo Sapiens
NTCPYVHNI

SEQ ID NO: 122572 - protein, 9 aa, Homo Sapiens
NTTAIAEAW

SEQ ID NO: 122573 - protein, 9 aa, Homo Sapiens
NVADVVIKF

SEQ ID NO: 122574 - protein, 9 aa, Homo Sapiens
NVFGVCHIF

SEQ ID NO: 122575 - protein, 9 aa, Homo Sapiens
NVVDCKLHW

SEQ ID NO: 122576 - protein, 9 aa, Homo Sapiens
NVYCGVHRY

SEQ ID NO: 122577 - protein, 9 aa, Homo Sapiens
PFKPPKVTF

SEQ ID NO: 122578 - protein, 9 aa, Homo Sapiens
PIRLLAAAA

SEQ ID NO: 122579 - protein, 9 aa, Homo Sapiens
PPHVLSSEF

SEQ ID NO: 122580 - protein, 9 aa, Homo Sapiens
PSLTGSPWP

SEQ ID NO: 122581 - protein, 9 aa, Homo Sapiens
PVSSSAWLL

SEQ ID NO: 122582 - protein, 9 aa, Homo Sapiens
PVVSGVLPE

SEQ ID NO: 122583 - protein, 9 aa, Homo Sapiens
QAADTVVIF

SEQ ID NO: 122584 - protein, 9 aa, Homo Sapiens
QAAEFREAW

SEQ ID NO: 122585 - protein, 9 aa, Homo Sapiens
QAAERPQEW

SEQ ID NO: 122586 - protein, 9 aa, Homo Sapiens
QADTTRLEL

SEQ ID NO: 122587 - protein, 9 aa, Homo Sapiens
QAESAAAVW

SEQ ID NO: 122588 - protein, 9 aa, Homo Sapiens
QAFPNTNRW

SEQ ID NO: 122589 - protein, 9 aa, Homo Sapiens
QALELPLRI

SEQ ID NO: 122590 - protein, 9 aa, Homo Sapiens
QANDDARTF

SEQ ID NO: 122591 - protein, 9 aa, Homo Sapiens
QARIEIESF

SEQ ID NO: 122592 - protein, 9 aa, Homo Sapiens
QASDGIHHW

SEQ ID NO: 122593 - protein, 9 aa, Homo Sapiens
QASDVSVKY

SEQ ID NO: 122594 - protein, 9 aa, Homo Sapiens
QASPSNTVW

SEQ ID NO: 122595 - protein, 9 aa, Homo Sapiens
QASSKILKY

SEQ ID NO: 122596 - protein, 9 aa, Homo Sapiens
QATELVHQL

SEQ ID NO: 122597 - protein, 9 aa, Homo Sapiens
QATPNFHQW

SEQ ID NO: 122598 - protein, 9 aa, Homo Sapiens
QATPTFHQW

SEQ ID NO: 122599 - protein, 9 aa, Homo Sapiens
QATRTVPVF

SEQ ID NO: 122600 - protein, 9 aa, Homo Sapiens
QAWEEPTNW

SEQ ID NO: 122601 - protein, 9 aa, Homo Sapiens
QPAPISPHL

SEQ ID NO: 122602 - protein, 9 aa, Homo Sapiens
QPATPTRTI

SEQ ID NO: 122603 - protein, 9 aa, Homo Sapiens
QPDHLFRKF

SEQ ID NO: 122604 - protein, 9 aa, Homo Sapiens
QPEELIQKW

SEQ ID NO: 122605 - protein, 9 aa, Homo Sapiens
QPEESYSHW

SEQ ID NO: 122606 - protein, 9 aa, Homo Sapiens
QPETRVSYW

SEQ ID NO: 122607 - protein, 9 aa, Homo Sapiens
QPGTFLLRF

SEQ ID NO: 122608 - protein, 9 aa, Homo Sapiens
QPHVSSPRF

SEQ ID NO: 122609 - protein, 9 aa, Homo Sapiens
QPINLIFRY

SEQ ID NO: 122610 - protein, 9 aa, Homo Sapiens
QPITPGPSI

SEQ ID NO: 122611 - protein, 9 aa, Homo Sapiens
QPLEGSDLW

SEQ ID NO: 122612 - protein, 9 aa, Homo Sapiens
QPLESGTHF

SEQ ID NO: 122613 - protein, 9 aa, Homo Sapiens
QPMEVQEGY

SEQ ID NO: 122614 - protein, 9 aa, Homo Sapiens
QPMPETPKW

SEQ ID NO: 122615 - protein, 9 aa, Homo Sapiens
QPNAQPQYL

SEQ ID NO: 122616 - protein, 9 aa, Homo Sapiens
QPNCETQKW

SEQ ID NO: 122617 - protein, 9 aa, Homo Sapiens
QPNPLPLRL

SEQ ID NO: 122618 - protein, 9 aa, Homo Sapiens
QPNTLICHI

SEQ ID NO: 122619 - protein, 9 aa, Homo Sapiens
QPSTLTDKW

SEQ ID NO: 122620 - protein, 9 aa, Homo Sapiens
QPTPHTQHW

SEQ ID NO: 122621 - protein, 9 aa, Homo Sapiens
QPVKIGCVW

SEQ ID NO: 122622 - protein, 9 aa, Homo Sapiens
QPYSKDSPF

SEQ ID NO: 122623 - protein, 9 aa, Homo Sapiens
RPAPIQAMW

SEQ ID NO: 122624 - protein, 9 aa, Homo Sapiens
RPAPVEVTY

SEQ ID NO: 122625 - protein, 9 aa, Homo Sapiens
RPFAGFEDF

SEQ ID NO: 122626 - protein, 9 aa, Homo Sapiens
RPLQDLQLW

SEQ ID NO: 122627 - protein, 9 aa, Homo Sapiens
RPLSKTVRF

SEQ ID NO: 122628 - protein, 9 aa, Homo Sapiens
RPNDIYVNM

SEQ ID NO: 122629 - protein, 9 aa, Homo Sapiens
RPNDVQLFY

SEQ ID NO: 122630 - protein, 9 aa, Homo Sapiens
RPNETDIKI

SEQ ID NO: 122631 - protein, 9 aa, Homo Sapiens
RPTDVAISF

SEQ ID NO: 122632 - protein, 9 aa, Homo Sapiens
RPVPEYQKY

SEQ ID NO: 122633 - protein, 9 aa, Homo Sapiens
RPVPKGATY

SEQ ID NO: 122634 - protein, 9 aa, Homo Sapiens
SAANIQPIF

SEQ ID NO: 122635 - protein, 9 aa, Homo Sapiens
SAAPLFFSW

SEQ ID NO: 122636 - protein, 9 aa, Homo Sapiens
SAARLYYYW

SEQ ID NO: 122637 - protein, 9 aa, Homo Sapiens
SACASSHQF

SEQ ID NO: 122638 - protein, 9 aa, Homo Sapiens
SACKNILRF

SEQ ID NO: 122639 - protein, 9 aa, Homo Sapiens
SACPFSSKF

SEQ ID NO: 122640 - protein, 9 aa, Homo Sapiens
SADEVQRFF

SEQ ID NO: 122641 - protein, 9 aa, Homo Sapiens
SADGTIKLW

SEQ ID NO: 122642 - protein, 9 aa, Homo Sapiens
SADHLIILW

SEQ ID NO: 122643 - protein, 9 aa, Homo Sapiens
SADKLIKIW

SEQ ID NO: 122644 - protein, 9 aa, Homo Sapiens
SADKTVALW

SEQ ID NO: 122645 - protein, 9 aa, Homo Sapiens
SADKTVKLW

SEQ ID NO: 122646 - protein, 9 aa, Homo Sapiens
SADNSCRLW

SEQ ID NO: 122647 - protein, 9 aa, Homo Sapiens
SADNTVILW

SEQ ID NO: 122648 - protein, 9 aa, Homo Sapiens
SADQTCKIW

SEQ ID NO: 122649 - protein, 9 aa, Homo Sapiens
SADRFVYVW

SEQ ID NO: 122650 - protein, 9 aa, Homo Sapiens
SADRNVKIW

SEQ ID NO: 122651 - protein, 9 aa, Homo Sapiens
SAFPYAHRF

SEQ ID NO: 122652 - protein, 9 aa, Homo Sapiens
SALDMTRYW

SEQ ID NO: 122653 - protein, 9 aa, Homo Sapiens
SALEKFFYF

SEQ ID NO: 122654 - protein, 9 aa, Homo Sapiens
SALPLYNLY

SEQ ID NO: 122655 - protein, 9 aa, Homo Sapiens
SAPSSDKPL

SEQ ID NO: 122656 - protein, 9 aa, Homo Sapiens
SASEVLKEW

SEQ ID NO: 122657 - protein, 9 aa, Homo Sapiens
SASPFQSAW

SEQ ID NO: 122658 - protein, 9 aa, Homo Sapiens
SASSLTSKW

SEQ ID NO: 122659 - protein, 9 aa, Homo Sapiens
SASTTTLRY

SEQ ID NO: 122660 - protein, 9 aa, Homo Sapiens
SATDTSAKW

SEQ ID NO: 122661 - protein, 9 aa, Homo Sapiens
SATEVDSRW

SEQ ID NO: 122662 - protein, 9 aa, Homo Sapiens
SAVDVHINM

SEQ ID NO: 122663 - protein, 9 aa, Homo Sapiens
SAVPDSLRW

SEQ ID NO: 122664 - protein, 9 aa, Homo Sapiens
SAVVEDVAW

SEQ ID NO: 122665 - protein, 9 aa, Homo Sapiens
SAYDGKDYI

SEQ ID NO: 122666 - protein, 9 aa, Homo Sapiens
SGPGPAAAL

SEQ ID NO: 122667 - protein, 9 aa, Homo Sapiens
SIDFTQEEW

SEQ ID NO: 122668 - protein, 9 aa, Homo Sapiens
SIPKGNSAL

SEQ ID NO: 122669 - protein, 9 aa, Homo Sapiens
SNPGGRPAL

SEQ ID NO: 122670 - protein, 9 aa, Homo Sapiens
SPAEETVVW

SEQ ID NO: 122671 - protein, 9 aa, Homo Sapiens
SPAEFVTRF

SEQ ID NO: 122672 - protein, 9 aa, Homo Sapiens
SPAGAALLW

SEQ ID NO: 122673 - protein, 9 aa, Homo Sapiens
SPAPVPVTY

SEQ ID NO: 122674 - protein, 9 aa, Homo Sapiens
SPAQILLRW

SEQ ID NO: 122675 - protein, 9 aa, Homo Sapiens
SPASSEYSW

SEQ ID NO: 122676 - protein, 9 aa, Homo Sapiens
SPCGHIGLW

SEQ ID NO: 122677 - protein, 9 aa, Homo Sapiens
SPCSELLLW

SEQ ID NO: 122678 - protein, 9 aa, Homo Sapiens
SPDATIRIW

SEQ ID NO: 122679 - protein, 9 aa, Homo Sapiens
SPDDQVYSF

SEQ ID NO: 122680 - protein, 9 aa, Homo Sapiens
SPDESHRMW

SEQ ID NO: 122681 - protein, 9 aa, Homo Sapiens
SPDGSFLLI

SEQ ID NO: 122682 - protein, 9 aa, Homo Sapiens
SPDHTNNSF

SEQ ID NO: 122683 - protein, 9 aa, Homo Sapiens
SPDSGVYEM

SEQ ID NO: 122684 - protein, 9 aa, Homo Sapiens
SPEELLLRW

SEQ ID NO: 122685 - protein, 9 aa, Homo Sapiens
SPEKGAETW

SEQ ID NO: 122686 - protein, 9 aa, Homo Sapiens
SPEPGQRTF

SEQ ID NO: 122687 - protein, 9 aa, Homo Sapiens
SPFDEFNLW

SEQ ID NO: 122688 - protein, 9 aa, Homo Sapiens
SPFDLEQQW

SEQ ID NO: 122689 - protein, 9 aa, Homo Sapiens
SPFEFGFTF

SEQ ID NO: 122690 - protein, 9 aa, Homo Sapiens
SPFHPATHW

SEQ ID NO: 122691 - protein, 9 aa, Homo Sapiens
SPFSASGGW

SEQ ID NO: 122692 - protein, 9 aa, Homo Sapiens
SPFTGTTTI

SEQ ID NO: 122693 - protein, 9 aa, Homo Sapiens
SPFVEHILW

SEQ ID NO: 122694 - protein, 9 aa, Homo Sapiens
SPHEDMRTW

SEQ ID NO: 122695 - protein, 9 aa, Homo Sapiens
SPHFKVFKW

SEQ ID NO: 122696 - protein, 9 aa, Homo Sapiens
SPHGGALVM

SEQ ID NO: 122697 - protein, 9 aa, Homo Sapiens
SPHLDKTSW

SEQ ID NO: 122698 - protein, 9 aa, Homo Sapiens
SPHPTSNHW

SEQ ID NO: 122699 - protein, 9 aa, Homo Sapiens
SPHSNVSDW

SEQ ID NO: 122700 - protein, 9 aa, Homo Sapiens
SPIDVVEKY

SEQ ID NO: 122701 - protein, 9 aa, Homo Sapiens
SPIPGFTKW

SEQ ID NO: 122702 - protein, 9 aa, Homo Sapiens
SPIQFESAW

SEQ ID NO: 122703 - protein, 9 aa, Homo Sapiens
SPIRGLPHW

SEQ ID NO: 122704 - protein, 9 aa, Homo Sapiens
SPITEYQFW

SEQ ID NO: 122705 - protein, 9 aa, Homo Sapiens
SPLDIYPKI

SEQ ID NO: 122706 - protein, 9 aa, Homo Sapiens
SPLDSIHTI

SEQ ID NO: 122707 - protein, 9 aa, Homo Sapiens
SPMDIFDMF

SEQ ID NO: 122708 - protein, 9 aa, Homo Sapiens
SPNALVLLI

SEQ ID NO: 122709 - protein, 9 aa, Homo Sapiens
SPNELILGW

SEQ ID NO: 122710 - protein, 9 aa, Homo Sapiens
SPNSISIMG

SEQ ID NO: 122711 - protein, 9 aa, Homo Sapiens
SPSAYVLEI

SEQ ID NO: 122712 - protein, 9 aa, Homo Sapiens
SPSEIVKQI

SEQ ID NO: 122713 - protein, 9 aa, Homo Sapiens
SPSGRATVW

SEQ ID NO: 122714 - protein, 9 aa, Homo Sapiens
SPSPENLKF

SEQ ID NO: 122715 - protein, 9 aa, Homo Sapiens
SPSRILLLF

SEQ ID NO: 122716 - protein, 9 aa, Homo Sapiens
SPSSDSLLF

SEQ ID NO: 122717 - protein, 9 aa, Homo Sapiens
SPSSICHQW

SEQ ID NO: 122718 - protein, 9 aa, Homo Sapiens
SPTEMVAKF

SEQ ID NO: 122719 - protein, 9 aa, Homo Sapiens
SPTENSFTL

SEQ ID NO: 122720 - protein, 9 aa, Homo Sapiens
SPTEVVERL

SEQ ID NO: 122721 - protein, 9 aa, Homo Sapiens
SPTHISRSW

SEQ ID NO: 122722 - protein, 9 aa, Homo Sapiens
SPTIIFDNW

SEQ ID NO: 122723 - protein, 9 aa, Homo Sapiens
SPTNISSLL

SEQ ID NO: 122724 - protein, 9 aa, Homo Sapiens
SPTQVVSQL

SEQ ID NO: 122725 - protein, 9 aa, Homo Sapiens
SPTSAHAFW

SEQ ID NO: 122726 - protein, 9 aa, Homo Sapiens
SPVALNVQY

SEQ ID NO: 122727 - protein, 9 aa, Homo Sapiens
SPVAQSQEF

SEQ ID NO: 122728 - protein, 9 aa, Homo Sapiens
SPVDIFAKI

SEQ ID NO: 122729 - protein, 9 aa, Homo Sapiens
SPVDSVLFY

SEQ ID NO: 122730 - protein, 9 aa, Homo Sapiens
SPVDVLQIF

SEQ ID NO: 122731 - protein, 9 aa, Homo Sapiens
SPVELQSLF

SEQ ID NO: 122732 - protein, 9 aa, Homo Sapiens
SPYDGNETL

SEQ ID NO: 122733 - protein, 9 aa, Homo Sapiens
SPYGHLPNW

SEQ ID NO: 122734 - protein, 9 aa, Homo Sapiens
SPYPEVDHF

SEQ ID NO: 122735 - protein, 9 aa, Homo Sapiens
SSEDYIHRI

SEQ ID NO: 122736 - protein, 9 aa, Homo Sapiens
SSPAPRTAL

SEQ ID NO: 122737 - protein, 9 aa, Homo Sapiens
SVGPAEPTW

SEQ ID NO: 122738 - protein, 9 aa, Homo Sapiens
SVIDSDEKW

SEQ ID NO: 122739 - protein, 9 aa, Homo Sapiens
SVTEIQEKW

SEQ ID NO: 122740 - protein, 9 aa, Homo Sapiens
SVTEVQLRF

SEQ ID NO: 122741 - protein, 9 aa, Homo Sapiens
TAAAVGAVF

SEQ ID NO: 122742 - protein, 9 aa, Homo Sapiens
TAADTVIIY

SEQ ID NO: 122743 - protein, 9 aa, Homo Sapiens
TAADVVKQW

SEQ ID NO: 122744 - protein, 9 aa, Homo Sapiens
TAAETHYTY

SEQ ID NO: 122745 - protein, 9 aa, Homo Sapiens
TAAPTGTTI

SEQ ID NO: 122746 - protein, 9 aa, Homo Sapiens
TAAPVVPEL

SEQ ID NO: 122747 - protein, 9 aa, Homo Sapiens
TAASSALGF

SEQ ID NO: 122748 - protein, 9 aa, Homo Sapiens
TACDIQTHM

SEQ ID NO: 122749 - protein, 9 aa, Homo Sapiens
TADDKKLQF

SEQ ID NO: 122750 - protein, 9 aa, Homo Sapiens
TADGNTWMW

SEQ ID NO: 122751 - protein, 9 aa, Homo Sapiens
TADITVLRW

SEQ ID NO: 122752 - protein, 9 aa, Homo Sapiens
TAEGTVFHF

SEQ ID NO: 122753 - protein, 9 aa, Homo Sapiens
TAENVAKKW

SEQ ID NO: 122754 - protein, 9 aa, Homo Sapiens
TAFEKEHLW

SEQ ID NO: 122755 - protein, 9 aa, Homo Sapiens
TAFGGFLKY

SEQ ID NO: 122756 - protein, 9 aa, Homo Sapiens
TAFPGTGGF

SEQ ID NO: 122757 - protein, 9 aa, Homo Sapiens
TAGVDGHSW

SEQ ID NO: 122758 - protein, 9 aa, Homo Sapiens
TAHSEPSLW

SEQ ID NO: 122759 - protein, 9 aa, Homo Sapiens
TAIEAQHLL

SEQ ID NO: 122760 - protein, 9 aa, Homo Sapiens
TALLQKLTW

SEQ ID NO: 122761 - protein, 9 aa, Homo Sapiens
TALSNLITW

SEQ ID NO: 122762 - protein, 9 aa, Homo Sapiens
TANDRILKY

SEQ ID NO: 122763 - protein, 9 aa, Homo Sapiens
TANGIALLW

SEQ ID NO: 122764 - protein, 9 aa, Homo Sapiens
TASADPSIW

SEQ ID NO: 122765 - protein, 9 aa, Homo Sapiens
TASAVVQHM

SEQ ID NO: 122766 - protein, 9 aa, Homo Sapiens
TASDVAQHL

SEQ ID NO: 122767 - protein, 9 aa, Homo Sapiens
TASEMILVL

SEQ ID NO: 122768 - protein, 9 aa, Homo Sapiens
TASGAKSMW

SEQ ID NO: 122769 - protein, 9 aa, Homo Sapiens
TASPTHSTW

SEQ ID NO: 122770 - protein, 9 aa, Homo Sapiens
TASPVAVSL

SEQ ID NO: 122771 - protein, 9 aa, Homo Sapiens
TASQVASTW

SEQ ID NO: 122772 - protein, 9 aa, Homo Sapiens
TASSTAHLW

SEQ ID NO: 122773 - protein, 9 aa, Homo Sapiens
TASSVALDL

SEQ ID NO: 122774 - protein, 9 aa, Homo Sapiens
TATEITESF

SEQ ID NO: 122775 - protein, 9 aa, Homo Sapiens
TAVKIAPRY

SEQ ID NO: 122776 - protein, 9 aa, Homo Sapiens
TAVPTLLKY

SEQ ID NO: 122777 - protein, 9 aa, Homo Sapiens
TAVTPQQTW

SEQ ID NO: 122778 - protein, 9 aa, Homo Sapiens
TAVVEDVSW

SEQ ID NO: 122779 - protein, 9 aa, Homo Sapiens
TAYEKINKW

SEQ ID NO: 122780 - protein, 9 aa, Homo Sapiens
TAYPGQTQY

SEQ ID NO: 122781 - protein, 9 aa, Homo Sapiens
TAYSEKHHW

SEQ ID NO: 122782 - protein, 9 aa, Homo Sapiens
TGHADTTKW

SEQ ID NO: 122783 - protein, 9 aa, Homo Sapiens
TGYAETYRW

SEQ ID NO: 122784 - protein, 9 aa, Homo Sapiens
TISPIILYF

SEQ ID NO: 122785 - protein, 9 aa, Homo Sapiens
TNIPFDVKW

SEQ ID NO: 122786 - protein, 9 aa, Homo Sapiens
TPADVFIVF

SEQ ID NO: 122787 - protein, 9 aa, Homo Sapiens
TPAEIREEF

SEQ ID NO: 122788 - protein, 9 aa, Homo Sapiens
TPAEVSHRF

SEQ ID NO: 122789 - protein, 9 aa, Homo Sapiens
TPAGVVNKY

SEQ ID NO: 122790 - protein, 9 aa, Homo Sapiens
TPAHVYYRW

SEQ ID NO: 122791 - protein, 9 aa, Homo Sapiens
TPAPPIKRW

SEQ ID NO: 122792 - protein, 9 aa, Homo Sapiens
TPAPPTHAL

SEQ ID NO: 122793 - protein, 9 aa, Homo Sapiens
TPASAGHVW

SEQ ID NO: 122794 - protein, 9 aa, Homo Sapiens
TPDEIDHVF

SEQ ID NO: 122795 - protein, 9 aa, Homo Sapiens
TPDETKLKM

SEQ ID NO: 122796 - protein, 9 aa, Homo Sapiens
TPEENQASW

SEQ ID NO: 122797 - protein, 9 aa, Homo Sapiens
TPEKEPPLW

SEQ ID NO: 122798 - protein, 9 aa, Homo Sapiens
TPFLGQHGF

SEQ ID NO: 122799 - protein, 9 aa, Homo Sapiens
TPGSSQNPW

SEQ ID NO: 122800 - protein, 9 aa, Homo Sapiens
TPHDFIEHI

SEQ ID NO: 122801 - protein, 9 aa, Homo Sapiens
TPHGLFILF

SEQ ID NO: 122802 - protein, 9 aa, Homo Sapiens
TPHPEGYLF

SEQ ID NO: 122803 - protein, 9 aa, Homo Sapiens
TPIDSTGKF

SEQ ID NO: 122804 - protein, 9 aa, Homo Sapiens
TPIKDSHLI

SEQ ID NO: 122805 - protein, 9 aa, Homo Sapiens
TPIMKTKKW

SEQ ID NO: 122806 - protein, 9 aa, Homo Sapiens
TPIPVPAYF

SEQ ID NO: 122807 - protein, 9 aa, Homo Sapiens
TPIREQHVL

SEQ ID NO: 122808 - protein, 9 aa, Homo Sapiens
TPISQAQKL

SEQ ID NO: 122809 - protein, 9 aa, Homo Sapiens
TPIYAGHSW

SEQ ID NO: 122810 - protein, 9 aa, Homo Sapiens
TPLEGDFAW

SEQ ID NO: 122811 - protein, 9 aa, Homo Sapiens
TPNDFCSFY

SEQ ID NO: 122812 - protein, 9 aa, Homo Sapiens
TPQDYNLRW

SEQ ID NO: 122813 - protein, 9 aa, Homo Sapiens
TPQSLFILF

SEQ ID NO: 122814 - protein, 9 aa, Homo Sapiens
TPSAVFRVW

SEQ ID NO: 122815 - protein, 9 aa, Homo Sapiens
TPSDKLFFW

SEQ ID NO: 122816 - protein, 9 aa, Homo Sapiens
TPSENSDLF

SEQ ID NO: 122817 - protein, 9 aa, Homo Sapiens
TPSEPIHCI

SEQ ID NO: 122818 - protein, 9 aa, Homo Sapiens
TPSGRSLWT

SEQ ID NO: 122819 - protein, 9 aa, Homo Sapiens
TPSPIIQQL

SEQ ID NO: 122820 - protein, 9 aa, Homo Sapiens
TPSPSADLL

SEQ ID NO: 122821 - protein, 9 aa, Homo Sapiens
TPSPSPHAW

SEQ ID NO: 122822 - protein, 9 aa, Homo Sapiens
TPSQGTHTF

SEQ ID NO: 122823 - protein, 9 aa, Homo Sapiens
TPSSDVLVF

SEQ ID NO: 122824 - protein, 9 aa, Homo Sapiens
TPSTGMYHF

SEQ ID NO: 122825 - protein, 9 aa, Homo Sapiens
TPTENELKF

SEQ ID NO: 122826 - protein, 9 aa, Homo Sapiens
TPTPFFHTF

SEQ ID NO: 122827 - protein, 9 aa, Homo Sapiens
TPTSVIPKL

SEQ ID NO: 122828 - protein, 9 aa, Homo Sapiens
TPVKSELLW

SEQ ID NO: 122829 - protein, 9 aa, Homo Sapiens
TPWPHIVEF

SEQ ID NO: 122830 - protein, 9 aa, Homo Sapiens
TPYHVNLLL

SEQ ID NO: 122831 - protein, 9 aa, Homo Sapiens
TQAPVVPYW

SEQ ID NO: 122832 - protein, 9 aa, Homo Sapiens
TSVPDHVVW

SEQ ID NO: 122833 - protein, 9 aa, Homo Sapiens
TVDPTKLTW

SEQ ID NO: 122834 - protein, 9 aa, Homo Sapiens
TVHQGDTSW

SEQ ID NO: 122835 - protein, 9 aa, Homo Sapiens
TVIEKTESW

SEQ ID NO: 122836 - protein, 9 aa, Homo Sapiens
TVSDAILRY

SEQ ID NO: 122837 - protein, 9 aa, Homo Sapiens
TVTEVLLKY

SEQ ID NO: 122838 - protein, 9 aa, Homo Sapiens
TVYPKPEEW

SEQ ID NO: 122839 - protein, 9 aa, Homo Sapiens
VADSNIVRW

SEQ ID NO: 122840 - protein, 9 aa, Homo Sapiens
VANLTNLVW

SEQ ID NO: 122841 - protein, 9 aa, Homo Sapiens
VLFPEPLTW

SEQ ID NO: 122842 - protein, 9 aa, Homo Sapiens
VPAAVSGRW

SEQ ID NO: 122843 - protein, 9 aa, Homo Sapiens
VPAEPKLAF

SEQ ID NO: 122844 - protein, 9 aa, Homo Sapiens
VPAHLQNSW

SEQ ID NO: 122845 - protein, 9 aa, Homo Sapiens
VPASALGSW

SEQ ID NO: 122846 - protein, 9 aa, Homo Sapiens
VPASTGLGW

SEQ ID NO: 122847 - protein, 9 aa, Homo Sapiens
VPATDPHSW

SEQ ID NO: 122848 - protein, 9 aa, Homo Sapiens
VPCPSVQLW

SEQ ID NO: 122849 - protein, 9 aa, Homo Sapiens
VPDLAPMLW

SEQ ID NO: 122850 - protein, 9 aa, Homo Sapiens
VPDPNVIKL

SEQ ID NO: 122851 - protein, 9 aa, Homo Sapiens
VPEPRPSEW

SEQ ID NO: 122852 - protein, 9 aa, Homo Sapiens
VPFNIPLEF

SEQ ID NO: 122853 - protein, 9 aa, Homo Sapiens
VPFPDTYEI

SEQ ID NO: 122854 - protein, 9 aa, Homo Sapiens
VPFPLTLRF

SEQ ID NO: 122855 - protein, 9 aa, Homo Sapiens
VPFSIFDEF

SEQ ID NO: 122856 - protein, 9 aa, Homo Sapiens
VPHSIINGY

SEQ ID NO: 122857 - protein, 9 aa, Homo Sapiens
VPISAHHRW

SEQ ID NO: 122858 - protein, 9 aa, Homo Sapiens
VPLDKQITI

SEQ ID NO: 122859 - protein, 9 aa, Homo Sapiens
VPLEIMIKF

SEQ ID NO: 122860 - protein, 9 aa, Homo Sapiens
VPLPASAKW

SEQ ID NO: 122861 - protein, 9 aa, Homo Sapiens
VPNKVIQCF

SEQ ID NO: 122862 - protein, 9 aa, Homo Sapiens
VPRKAEERW

SEQ ID NO: 122863 - protein, 9 aa, Homo Sapiens
VPSAVALVL

SEQ ID NO: 122864 - protein, 9 aa, Homo Sapiens
VPSNLALKF

SEQ ID NO: 122865 - protein, 9 aa, Homo Sapiens
VPTELALLY

SEQ ID NO: 122866 - protein, 9 aa, Homo Sapiens
VPTPIHPIF

SEQ ID NO: 122867 - protein, 9 aa, Homo Sapiens
VPTPIQPTF

SEQ ID NO: 122868 - protein, 9 aa, Homo Sapiens
VPTPTAPLL

SEQ ID NO: 122869 - protein, 9 aa, Homo Sapiens
VPTQESVKW

SEQ ID NO: 122870 - protein, 9 aa, Homo Sapiens
VPTQLVSYF

SEQ ID NO: 122871 - protein, 9 aa, Homo Sapiens
VPTTEVNAW

SEQ ID NO: 122872 - protein, 9 aa, Homo Sapiens
VPVDLQHQF

SEQ ID NO: 122873 - protein, 9 aa, Homo Sapiens
VPVEEQEEF

SEQ ID NO: 122874 - protein, 9 aa, Homo Sapiens
VPVGFGESW

SEQ ID NO: 122875 - protein, 9 aa, Homo Sapiens
VPVKVTDRF

SEQ ID NO: 122876 - protein, 9 aa, Homo Sapiens
VPVPGESTW

SEQ ID NO: 122877 - protein, 9 aa, Homo Sapiens
VPVSVVECF

SEQ ID NO: 122878 - protein, 9 aa, Homo Sapiens
VPVWIIHYY

SEQ ID NO: 122879 - protein, 9 aa, Homo Sapiens
VPYKDEELY

SEQ ID NO: 122880 - protein, 9 aa, Homo Sapiens
WPFLIDKRW

SEQ ID NO: 122881 - protein, 9 aa, Homo Sapiens
WPHEDAAQF

SEQ ID NO: 122882 - protein, 9 aa, Homo Sapiens
WPNAEVDRF

SEQ ID NO: 122883 - protein, 9 aa, Homo Sapiens
YADLVKQAW

SEQ ID NO: 122884 - protein, 9 aa, Homo Sapiens
YADVGGKQF

SEQ ID NO: 122885 - protein, 9 aa, Homo Sapiens
YAEPAVLKW

SEQ ID NO: 122886 - protein, 9 aa, Homo Sapiens
YAEPAVLQW

SEQ ID NO: 122887 - protein, 9 aa, Homo Sapiens
YAFDFARQS

SEQ ID NO: 122888 - protein, 9 aa, Homo Sapiens
YAFNGTQRF

SEQ ID NO: 122889 - protein, 9 aa, Homo Sapiens
YAGPEVDIW

SEQ ID NO: 122890 - protein, 9 aa, Homo Sapiens
YARDETEFY

SEQ ID NO: 122891 - protein, 9 aa, Homo Sapiens
YASDCASFF

SEQ ID NO: 122892 - protein, 9 aa, Homo Sapiens
YGTEIISKW

SEQ ID NO: 122893 - protein, 9 aa, Homo Sapiens
YMFVDENTF

SEQ ID NO: 122894 - protein, 9 aa, Homo Sapiens
YPAAPLPGF

SEQ ID NO: 122895 - protein, 9 aa, Homo Sapiens
YPAAVPQAL

SEQ ID NO: 122896 - protein, 9 aa, Homo Sapiens
YPADLAHKI

SEQ ID NO: 122897 - protein, 9 aa, Homo Sapiens
YPAESPDYF

SEQ ID NO: 122898 - protein, 9 aa, Homo Sapiens
YPAGFMDVI

SEQ ID NO: 122899 - protein, 9 aa, Homo Sapiens
YPAHMYQVY

SEQ ID NO: 122900 - protein, 9 aa, Homo Sapiens
YPAPAGLHI

SEQ ID NO: 122901 - protein, 9 aa, Homo Sapiens
YPAPGLKTF

SEQ ID NO: 122902 - protein, 9 aa, Homo Sapiens
YPAQGVQQF

SEQ ID NO: 122903 - protein, 9 aa, Homo Sapiens
YPAQITPKM

SEQ ID NO: 122904 - protein, 9 aa, Homo Sapiens
YPASTVQIL

SEQ ID NO: 122905 - protein, 9 aa, Homo Sapiens
YPDEKSVCL

SEQ ID NO: 122906 - protein, 9 aa, Homo Sapiens
YPDFAPQKF

SEQ ID NO: 122907 - protein, 9 aa, Homo Sapiens
YPDINFNRL

SEQ ID NO: 122908 - protein, 9 aa, Homo Sapiens
YPDPMVRGF

SEQ ID NO: 122909 - protein, 9 aa, Homo Sapiens
YPDPRGAPW

SEQ ID NO: 122910 - protein, 9 aa, Homo Sapiens
YPDRIMNTF

SEQ ID NO: 122911 - protein, 9 aa, Homo Sapiens
YPDSHQLFV

SEQ ID NO: 122912 - protein, 9 aa, Homo Sapiens
YPDSSQSRF

SEQ ID NO: 122913 - protein, 9 aa, Homo Sapiens
YPEGKLPHW

SEQ ID NO: 122914 - protein, 9 aa, Homo Sapiens
YPENIVPSF

SEQ ID NO: 122915 - protein, 9 aa, Homo Sapiens
YPESIPRKF

SEQ ID NO: 122916 - protein, 9 aa, Homo Sapiens
YPETLVNLI

SEQ ID NO: 122917 - protein, 9 aa, Homo Sapiens
YPFKDVNNW

SEQ ID NO: 122918 - protein, 9 aa, Homo Sapiens
YPFSSEQKW

SEQ ID NO: 122919 - protein, 9 aa, Homo Sapiens
YPFYKTDPF

SEQ ID NO: 122920 - protein, 9 aa, Homo Sapiens
YPGDIKIKW

SEQ ID NO: 122921 - protein, 9 aa, Homo Sapiens
YPGPGGGGW

SEQ ID NO: 122922 - protein, 9 aa, Homo Sapiens
YPGPGNHFW

SEQ ID NO: 122923 - protein, 9 aa, Homo Sapiens
YPGSIEVRW

SEQ ID NO: 122924 - protein, 9 aa, Homo Sapiens
YPHAFNVKF

SEQ ID NO: 122925 - protein, 9 aa, Homo Sapiens
YPHDGKIFF

SEQ ID NO: 122926 - protein, 9 aa, Homo Sapiens
YPHEPTAVF

SEQ ID NO: 122927 - protein, 9 aa, Homo Sapiens
YPIAVDCSW

SEQ ID NO: 122928 - protein, 9 aa, Homo Sapiens
YPLCQFQYI

SEQ ID NO: 122929 - protein, 9 aa, Homo Sapiens
YPLDLLLKL

SEQ ID NO: 122930 - protein, 9 aa, Homo Sapiens
YPLEDATHI

SEQ ID NO: 122931 - protein, 9 aa, Homo Sapiens
YPLEDHTEF

SEQ ID NO: 122932 - protein, 9 aa, Homo Sapiens
YPLEKGHLF

SEQ ID NO: 122933 - protein, 9 aa, Homo Sapiens
YPLEKIGFW

SEQ ID NO: 122934 - protein, 9 aa, Homo Sapiens
YPLQEVERF

SEQ ID NO: 122935 - protein, 9 aa, Homo Sapiens
YPMPFCDRW

SEQ ID NO: 122936 - protein, 9 aa, Homo Sapiens
YPNEEKDAW

SEQ ID NO: 122937 - protein, 9 aa, Homo Sapiens
YPNERFELL

SEQ ID NO: 122938 - protein, 9 aa, Homo Sapiens
YPNGVVVHY

SEQ ID NO: 122939 - protein, 9 aa, Homo Sapiens
YPNIEETHW

SEQ ID NO: 122940 - protein, 9 aa, Homo Sapiens
YPNKYESVI

SEQ ID NO: 122941 - protein, 9 aa, Homo Sapiens
YPNPEYDNW

SEQ ID NO: 122942 - protein, 9 aa, Homo Sapiens
YPNSHTHYF

SEQ ID NO: 122943 - protein, 9 aa, Homo Sapiens
YPNSQCNHY

SEQ ID NO: 122944 - protein, 9 aa, Homo Sapiens
YPNTLLRTW

SEQ ID NO: 122945 - protein, 9 aa, Homo Sapiens
YPNVGKSSF

SEQ ID NO: 122946 - protein, 9 aa, Homo Sapiens
YPNVNIHNF

SEQ ID NO: 122947 - protein, 9 aa, Homo Sapiens
YPPHPDYTW

SEQ ID NO: 122948 - protein, 9 aa, Homo Sapiens
YPQEDYESF

SEQ ID NO: 122949 - protein, 9 aa, Homo Sapiens
YPQEVIPTF

SEQ ID NO: 122950 - protein, 9 aa, Homo Sapiens
YPRSDVDLY

SEQ ID NO: 122951 - protein, 9 aa, Homo Sapiens
YPSEFATYL

SEQ ID NO: 122952 - protein, 9 aa, Homo Sapiens
YPSEFSTYL

SEQ ID NO: 122953 - protein, 9 aa, Homo Sapiens
YPSETFTRV

SEQ ID NO: 122954 - protein, 9 aa, Homo Sapiens
YPSETTVKY

SEQ ID NO: 122955 - protein, 9 aa, Homo Sapiens
YPSLPTPLL

SEQ ID NO: 122956 - protein, 9 aa, Homo Sapiens
YPSPHAVMY

SEQ ID NO: 122957 - protein, 9 aa, Homo Sapiens
YPSPTGVLI

SEQ ID NO: 122958 - protein, 9 aa, Homo Sapiens
YPSSDNSLY

SEQ ID NO: 122959 - protein, 9 aa, Homo Sapiens
YPTEKGLSF

SEQ ID NO: 122960 - protein, 9 aa, Homo Sapiens
YPTEVQHLI

SEQ ID NO: 122961 - protein, 9 aa, Homo Sapiens
YPTKVDPFY

SEQ ID NO: 122962 - protein, 9 aa, Homo Sapiens
YPTSKAVYI

SEQ ID NO: 122963 - protein, 9 aa, Homo Sapiens
YPTSVPVLY

SEQ ID NO: 122964 - protein, 9 aa, Homo Sapiens
YPVDDGCRI

SEQ ID NO: 122965 - protein, 9 aa, Homo Sapiens
YPVDLGDKF

SEQ ID NO: 122966 - protein, 9 aa, Homo Sapiens
YPVEHPDKF

SEQ ID NO: 122967 - protein, 9 aa, Homo Sapiens
YPVEIHEYL

SEQ ID NO: 122968 - protein, 9 aa, Homo Sapiens
YPVNTPERW

SEQ ID NO: 122969 - protein, 9 aa, Homo Sapiens
YPVPDVSTY

SEQ ID NO: 122970 - protein, 9 aa, Homo Sapiens
YPWWEQQGF

SEQ ID NO: 122971 - protein, 9 aa, Homo Sapiens
YPYEHSYGL

SEQ ID NO: 122972 - protein, 9 aa, Homo Sapiens
YPYPYPHTL

SEQ ID NO: 122973 - protein, 9 aa, Homo Sapiens
YPYQERVFL

SEQ ID NO: 122974 - protein, 9 aa, Homo Sapiens
YPYTETQMY

SEQ ID NO: 122975 - protein, 9 aa, Homo Sapiens
YVHPVNLTW

SEQ ID NO: 122976 - protein, 9 aa, Homo Sapiens
YVLGTATRW

SEQ ID NO: 122977 - protein, 10 aa, Homo Sapiens
AAVDLISDEW

SEQ ID NO: 122978 - protein, 10 aa, Homo Sapiens
AGHINPLIIY

SEQ ID NO: 122979 - protein, 10 aa, Homo Sapiens
ALAPILDDGW

SEQ ID NO: 122980 - protein, 10 aa, Homo Sapiens
APAETPHEKW

SEQ ID NO: 122981 - protein, 10 aa, Homo Sapiens
APANISNSTW

SEQ ID NO: 122982 - protein, 10 aa, Homo Sapiens
APDPCDPQRW

SEQ ID NO: 122983 - protein, 10 aa, Homo Sapiens
APIAGETKVW

SEQ ID NO: 122984 - protein, 10 aa, Homo Sapiens
APINSKSDEW

SEQ ID NO: 122985 - protein, 10 aa, Homo Sapiens
APIPTVEEKW

SEQ ID NO: 122986 - protein, 10 aa, Homo Sapiens
APIRPDIVNF

SEQ ID NO: 122987 - protein, 10 aa, Homo Sapiens
APSPEEKEEW

SEQ ID NO: 122988 - protein, 10 aa, Homo Sapiens
CALWGLAEDS

SEQ ID NO: 122989 - protein, 10 aa, Homo Sapiens
DIMKDKDNFW

SEQ ID NO: 122990 - protein, 10 aa, Homo Sapiens
DPQNDKPSKW

SEQ ID NO: 122991 - protein, 10 aa, Homo Sapiens
DPYADGDPAW

SEQ ID NO: 122992 - protein, 10 aa, Homo Sapiens
EADGLSTNHW

SEQ ID NO: 122993 - protein, 10 aa, Homo Sapiens
EAEGVIVGHW

SEQ ID NO: 122994 - protein, 10 aa, Homo Sapiens
EAFRKDMIRW

SEQ ID NO: 122995 - protein, 10 aa, Homo Sapiens
EAISDLQQLW

SEQ ID NO: 122996 - protein, 10 aa, Homo Sapiens
EALKCNYEHW

SEQ ID NO: 122997 - protein, 10 aa, Homo Sapiens
EALRLPYEQW

SEQ ID NO: 122998 - protein, 10 aa, Homo Sapiens
EAVSHLLQDW

SEQ ID NO: 122999 - protein, 10 aa, Homo Sapiens
EAVSRILEEW

SEQ ID NO: 123000 - protein, 10 aa, Homo Sapiens
EAYNPETDTW

SEQ ID NO: 123001 - protein, 10 aa, Homo Sapiens
EGCAQGLQKW

SEQ ID NO: 123002 - protein, 10 aa, Homo Sapiens
EPEGTATDRW

SEQ ID NO: 123003 - protein, 10 aa, Homo Sapiens
EPMPTKETGW

SEQ ID NO: 123004 - protein, 10 aa, Homo Sapiens
EPYGQLNPKW

SEQ ID NO: 123005 - protein, 10 aa, Homo Sapiens
FANPEDCVAF

SEQ ID NO: 123006 - protein, 10 aa, Homo Sapiens
FASHLGDQTW

SEQ ID NO: 123007 - protein, 10 aa, Homo Sapiens
FASTQPTHSW

SEQ ID NO: 123008 - protein, 10 aa, Homo Sapiens
FAYKDPEKNW

SEQ ID NO: 123009 - protein, 10 aa, Homo Sapiens
FPAGIYDTKY

SEQ ID NO: 123010 - protein, 10 aa, Homo Sapiens
FPAKPGSLTL

SEQ ID NO: 123011 - protein, 10 aa, Homo Sapiens
FPAPAKAVVY

SEQ ID NO: 123012 - protein, 10 aa, Homo Sapiens
FPAPEERIKW

SEQ ID NO: 123013 - protein, 10 aa, Homo Sapiens
FPAPGKTVTL

SEQ ID NO: 123014 - protein, 10 aa, Homo Sapiens
FPASIPITKF

SEQ ID NO: 123015 - protein, 10 aa, Homo Sapiens
FPATPFGAQW

SEQ ID NO: 123016 - protein, 10 aa, Homo Sapiens
FPDEDSYQKF

SEQ ID NO: 123017 - protein, 10 aa, Homo Sapiens
FPDPEKPCKM

SEQ ID NO: 123018 - protein, 10 aa, Homo Sapiens
FPDPEPVRNL

SEQ ID NO: 123019 - protein, 10 aa, Homo Sapiens
FPDPNVKYVF

SEQ ID NO: 123020 - protein, 10 aa, Homo Sapiens
FPDPQRQRKL

SEQ ID NO: 123021 - protein, 10 aa, Homo Sapiens
FPDTGSDHSY

SEQ ID NO: 123022 - protein, 10 aa, Homo Sapiens
FPDVPDKENF

SEQ ID NO: 123023 - protein, 10 aa, Homo Sapiens
FPEALARLLL

SEQ ID NO: 123024 - protein, 10 aa, Homo Sapiens
FPEDVVRVIF

SEQ ID NO: 123025 - protein, 10 aa, Homo Sapiens
FPEEDDPTNW

SEQ ID NO: 123026 - protein, 10 aa, Homo Sapiens
FPEEVIATIF

SEQ ID NO: 123027 - protein, 10 aa, Homo Sapiens
FPEHMANVEL

SEQ ID NO: 123028 - protein, 10 aa, Homo Sapiens
FPEHYAPSVF

SEQ ID NO: 123029 - protein, 10 aa, Homo Sapiens
FPEPSRPPLF

SEQ ID NO: 123030 - protein, 10 aa, Homo Sapiens
FPEQANNNEW

SEQ ID NO: 123031 - protein, 10 aa, Homo Sapiens
FPESDNLFKW

SEQ ID NO: 123032 - protein, 10 aa, Homo Sapiens
FPFEKGSVQY

SEQ ID NO: 123033 - protein, 10 aa, Homo Sapiens
FPFHEVIQEF

SEQ ID NO: 123034 - protein, 10 aa, Homo Sapiens
FPFPETPTKV

SEQ ID NO: 123035 - protein, 10 aa, Homo Sapiens
FPFYGKPMRI

SEQ ID NO: 123036 - protein, 10 aa, Homo Sapiens
FPGFHGSEMW

SEQ ID NO: 123037 - protein, 10 aa, Homo Sapiens
FPHDNVEDLI

SEQ ID NO: 123038 - protein, 10 aa, Homo Sapiens
FPHHGTFEVI

SEQ ID NO: 123039 - protein, 10 aa, Homo Sapiens
FPHHVIPDSF

SEQ ID NO: 123040 - protein, 10 aa, Homo Sapiens
FPHLLQPVLW

SEQ ID NO: 123041 - protein, 10 aa, Homo Sapiens
FPHNFQETTY

SEQ ID NO: 123042 - protein, 10 aa, Homo Sapiens
FPHPVNQVTF

SEQ ID NO: 123043 - protein, 10 aa, Homo Sapiens
FPIGEKQDIW

SEQ ID NO: 123044 - protein, 10 aa, Homo Sapiens
FPISEETIKL

SEQ ID NO: 123045 - protein, 10 aa, Homo Sapiens
FPLIYSEMKY

SEQ ID NO: 123046 - protein, 10 aa, Homo Sapiens
FPLREPGVNW

SEQ ID NO: 123047 - protein, 10 aa, Homo Sapiens
FPLSSPISKF

SEQ ID NO: 123048 - protein, 10 aa, Homo Sapiens
FPMTHGNTGF

SEQ ID NO: 123049 - protein, 10 aa, Homo Sapiens
FPNRVVFQEF

SEQ ID NO: 123050 - protein, 10 aa, Homo Sapiens
FPQPPGAARW

SEQ ID NO: 123051 - protein, 10 aa, Homo Sapiens
FPQTFAGPII

SEQ ID NO: 123052 - protein, 10 aa, Homo Sapiens
FPSEYVPTVF

SEQ ID NO: 123053 - protein, 10 aa, Homo Sapiens
FPSPFDPLTL

SEQ ID NO: 123054 - protein, 10 aa, Homo Sapiens
FPSSVAALRF

SEQ ID NO: 123055 - protein, 10 aa, Homo Sapiens
FPTEAERQQW

SEQ ID NO: 123056 - protein, 10 aa, Homo Sapiens
FPTGYIFDRF

SEQ ID NO: 123057 - protein, 10 aa, Homo Sapiens
FPVAGQKLIY

SEQ ID NO: 123058 - protein, 10 aa, Homo Sapiens
FPVKPHNKSF

SEQ ID NO: 123059 - protein, 10 aa, Homo Sapiens
FPVPGSGLVL

SEQ ID NO: 123060 - protein, 10 aa, Homo Sapiens
FPVRDGKIKL

SEQ ID NO: 123061 - protein, 10 aa, Homo Sapiens
FPWGDGNHTL

SEQ ID NO: 123062 - protein, 10 aa, Homo Sapiens
FPYADGPHQF

SEQ ID NO: 123063 - protein, 10 aa, Homo Sapiens
FPYEESKEKF

SEQ ID NO: 123064 - protein, 10 aa, Homo Sapiens
GPQQDPRLYW

SEQ ID NO: 123065 - protein, 10 aa, Homo Sapiens
GTEYTGPKLY

SEQ ID NO: 123066 - protein, 10 aa, Homo Sapiens
HAADPIITRW

SEQ ID NO: 123067 - protein, 10 aa, Homo Sapiens
HAAPILYAVW

SEQ ID NO: 123068 - protein, 10 aa, Homo Sapiens
HAARIINDLL

SEQ ID NO: 123069 - protein, 10 aa, Homo Sapiens
HACALAASLW

SEQ ID NO: 123070 - protein, 10 aa, Homo Sapiens
HADDTQPARL

SEQ ID NO: 123071 - protein, 10 aa, Homo Sapiens
HAENNEFITW

SEQ ID NO: 123072 - protein, 10 aa, Homo Sapiens
HAGFFVEDNF

SEQ ID NO: 123073 - protein, 10 aa, Homo Sapiens
HAGSLVSVMW

SEQ ID NO: 123074 - protein, 10 aa, Homo Sapiens
HAGVVPDLLW

SEQ ID NO: 123075 - protein, 10 aa, Homo Sapiens
HAHISEQAVW

SEQ ID NO: 123076 - protein, 10 aa, Homo Sapiens
HAIEESVVLI

SEQ ID NO: 123077 - protein, 10 aa, Homo Sapiens
HALESSFVGW

SEQ ID NO: 123078 - protein, 10 aa, Homo Sapiens
HALVAGIDRY

SEQ ID NO: 123079 - protein, 10 aa, Homo Sapiens
HALVGSPIIW

SEQ ID NO: 123080 - protein, 10 aa, Homo Sapiens
HAVGNVELYL

SEQ ID NO: 123081 - protein, 10 aa, Homo Sapiens
HAVGPEAHTI

SEQ ID NO: 123082 - protein, 10 aa, Homo Sapiens
HAVKNDFQIW

SEQ ID NO: 123083 - protein, 10 aa, Homo Sapiens
HIDPNVDYQF

SEQ ID NO: 123084 - protein, 10 aa, Homo Sapiens
HIWPDDITKW

SEQ ID NO: 123085 - protein, 10 aa, Homo Sapiens
HLHNMPPSAL

SEQ ID NO: 123086 - protein, 10 aa, Homo Sapiens
HPAAVFGCDW

SEQ ID NO: 123087 - protein, 10 aa, Homo Sapiens
HPAGHLVLKW

SEQ ID NO: 123088 - protein, 10 aa, Homo Sapiens
HPALLSDGKW

SEQ ID NO: 123089 - protein, 10 aa, Homo Sapiens
HPASPRGSSF

SEQ ID NO: 123090 - protein, 10 aa, Homo Sapiens
HPCGADVPSY

SEQ ID NO: 123091 - protein, 10 aa, Homo Sapiens
HPDCANVKQW

SEQ ID NO: 123092 - protein, 10 aa, Homo Sapiens
HPDGNFGAMW

SEQ ID NO: 123093 - protein, 10 aa, Homo Sapiens
HPDPDSSVKI

SEQ ID NO: 123094 - protein, 10 aa, Homo Sapiens
HPDPFANKSL

SEQ ID NO: 123095 - protein, 10 aa, Homo Sapiens
HPDPTRLLLF

SEQ ID NO: 123096 - protein, 10 aa, Homo Sapiens
HPDTIYSVDW

SEQ ID NO: 123097 - protein, 10 aa, Homo Sapiens
HPDVTEPMRF

SEQ ID NO: 123098 - protein, 10 aa, Homo Sapiens
HPEASIQAVF

SEQ ID NO: 123099 - protein, 10 aa, Homo Sapiens
HPEPLAGRHF

SEQ ID NO: 123100 - protein, 10 aa, Homo Sapiens
HPEQDAGKVF

SEQ ID NO: 123101 - protein, 10 aa, Homo Sapiens
HPEYTCIYRF

SEQ ID NO: 123102 - protein, 10 aa, Homo Sapiens
HPFLSGAETF

SEQ ID NO: 123103 - protein, 10 aa, Homo Sapiens
HPFLYDRETY

SEQ ID NO: 123104 - protein, 10 aa, Homo Sapiens
HPFPGPGLAI

SEQ ID NO: 123105 - protein, 10 aa, Homo Sapiens
HPFTNKPTTF

SEQ ID NO: 123106 - protein, 10 aa, Homo Sapiens
HPGVFRGDKW

SEQ ID NO: 123107 - protein, 10 aa, Homo Sapiens
HPIDDLQSAY

SEQ ID NO: 123108 - protein, 10 aa, Homo Sapiens
HPIDGFLQSL

SEQ ID NO: 123109 - protein, 10 aa, Homo Sapiens
HPIEGSTTVF

SEQ ID NO: 123110 - protein, 10 aa, Homo Sapiens
HPIHQGITEL

SEQ ID NO: 123111 - protein, 10 aa, Homo Sapiens
HPIIPEQSTF

SEQ ID NO: 123112 - protein, 10 aa, Homo Sapiens
HPISDHEATL

SEQ ID NO: 123113 - protein, 10 aa, Homo Sapiens
HPITSIEYQW

SEQ ID NO: 123114 - protein, 10 aa, Homo Sapiens
HPKYPDGKTF

SEQ ID NO: 123115 - protein, 10 aa, Homo Sapiens
HPMYGAGHKF

SEQ ID NO: 123116 - protein, 10 aa, Homo Sapiens
HPNNVVSVKY

SEQ ID NO: 123117 - protein, 10 aa, Homo Sapiens
HPNPGSITHL

SEQ ID NO: 123118 - protein, 10 aa, Homo Sapiens
HPNYHKEPFL

SEQ ID NO: 123119 - protein, 10 aa, Homo Sapiens
HPNYLGDLIM

SEQ ID NO: 123120 - protein, 10 aa, Homo Sapiens
HPQPGSANSL

SEQ ID NO: 123121 - protein, 10 aa, Homo Sapiens
HPSDESGYRW

SEQ ID NO: 123122 - protein, 10 aa, Homo Sapiens
HPSSVPGPDF

SEQ ID NO: 123123 - protein, 10 aa, Homo Sapiens
HPTLGPKITY

SEQ ID NO: 123124 - protein, 10 aa, Homo Sapiens
HPVKSGIHKW

SEQ ID NO: 123125 - protein, 10 aa, Homo Sapiens
HPVLSKDRNF

SEQ ID NO: 123126 - protein, 10 aa, Homo Sapiens
HPVSDHEATL

SEQ ID NO: 123127 - protein, 10 aa, Homo Sapiens
HPVSEYKAHF

SEQ ID NO: 123128 - protein, 10 aa, Homo Sapiens
HPVTGEPATW

SEQ ID NO: 123129 - protein, 10 aa, Homo Sapiens
HPVVDRSIKI

SEQ ID NO: 123130 - protein, 10 aa, Homo Sapiens
HPVYILKGGY

SEQ ID NO: 123131 - protein, 10 aa, Homo Sapiens
HPYHFKPKKI

SEQ ID NO: 123132 - protein, 10 aa, Homo Sapiens
HPYPTTKLMW

SEQ ID NO: 123133 - protein, 10 aa, Homo Sapiens
HPYQMEGLNW

SEQ ID NO: 123134 - protein, 10 aa, Homo Sapiens
HPYTEKPRLW

SEQ ID NO: 123135 - protein, 10 aa, Homo Sapiens
HTAPVLDIAW

SEQ ID NO: 123136 - protein, 10 aa, Homo Sapiens
HVAPVTSVEW

SEQ ID NO: 123137 - protein, 10 aa, Homo Sapiens
HVATEPVATW

SEQ ID NO: 123138 - protein, 10 aa, Homo Sapiens
HVEEKAVHSW

SEQ ID NO: 123139 - protein, 10 aa, Homo Sapiens
HVFSDGVTNW

SEQ ID NO: 123140 - protein, 10 aa, Homo Sapiens
HVNPYIGLFF

SEQ ID NO: 123141 - protein, 10 aa, Homo Sapiens
HVSRIPDYLW

SEQ ID NO: 123142 - protein, 10 aa, Homo Sapiens
IAANEENRKW

SEQ ID NO: 123143 - protein, 10 aa, Homo Sapiens
IPEEELTDNW

SEQ ID NO: 123144 - protein, 10 aa, Homo Sapiens
IPEGYVPEHW

SEQ ID NO: 123145 - protein, 10 aa, Homo Sapiens
IPEPEAAVLF

SEQ ID NO: 123146 - protein, 10 aa, Homo Sapiens
IPESLKSITW

SEQ ID NO: 123147 - protein, 10 aa, Homo Sapiens
IPFDPKFITY

SEQ ID NO: 123148 - protein, 10 aa, Homo Sapiens
IPFQAGLPRW

SEQ ID NO: 123149 - protein, 10 aa, Homo Sapiens
IPICHGNLIF

SEQ ID NO: 123150 - protein, 10 aa, Homo Sapiens
IPIGAYEPRW

SEQ ID NO: 123151 - protein, 10 aa, Homo Sapiens
IPLDDPTLLF

SEQ ID NO: 123152 - protein, 10 aa, Homo Sapiens
IPLDGETWSY

SEQ ID NO: 123153 - protein, 10 aa, Homo Sapiens
IPLPLGTVTI

SEQ ID NO: 123154 - protein, 10 aa, Homo Sapiens
IPMPGHPVNF

SEQ ID NO: 123155 - protein, 10 aa, Homo Sapiens
IPSPPPRPKN

SEQ ID NO: 123156 - protein, 10 aa, Homo Sapiens
IPSTGDATEW

SEQ ID NO: 123157 - protein, 10 aa, Homo Sapiens
IPTEEKPYKW

SEQ ID NO: 123158 - protein, 10 aa, Homo Sapiens
IPYAGETLKW

SEQ ID NO: 123159 - protein, 10 aa, Homo Sapiens
IPYTGPFNLL

SEQ ID NO: 123160 - protein, 10 aa, Homo Sapiens
IVWDEKKNQW

SEQ ID NO: 123161 - protein, 10 aa, Homo Sapiens
LALFNPDVCW

SEQ ID NO: 123162 - protein, 10 aa, Homo Sapiens
LALPPGAEHW

SEQ ID NO: 123163 - protein, 10 aa, Homo Sapiens
LPADITEDEF

SEQ ID NO: 123164 - protein, 10 aa, Homo Sapiens
LPAPAACGSF

SEQ ID NO: 123165 - protein, 10 aa, Homo Sapiens
LPDADTLLHF

SEQ ID NO: 123166 - protein, 10 aa, Homo Sapiens
LPDLSGPHSY

SEQ ID NO: 123167 - protein, 10 aa, Homo Sapiens
LPDNYTQDTW

SEQ ID NO: 123168 - protein, 10 aa, Homo Sapiens
LPEELVHAGW

SEQ ID NO: 123169 - protein, 10 aa, Homo Sapiens
LPEESGGRHL

SEQ ID NO: 123170 - protein, 10 aa, Homo Sapiens
LPEGAESRVW

SEQ ID NO: 123171 - protein, 10 aa, Homo Sapiens
LPEGEDLNEW

SEQ ID NO: 123172 - protein, 10 aa, Homo Sapiens
LPELEPPTTL

SEQ ID NO: 123173 - protein, 10 aa, Homo Sapiens
LPENYKQLTW

SEQ ID NO: 123174 - protein, 10 aa, Homo Sapiens
LPEPGHSHRF

SEQ ID NO: 123175 - protein, 10 aa, Homo Sapiens
LPFEGKCYYF

SEQ ID NO: 123176 - protein, 10 aa, Homo Sapiens
LPFLPDLEEL

SEQ ID NO: 123177 - protein, 10 aa, Homo Sapiens
LPFPNPERNF

SEQ ID NO: 123178 - protein, 10 aa, Homo Sapiens
LPHPYAIAVF

SEQ ID NO: 123179 - protein, 10 aa, Homo Sapiens
LPIAIINDRF

SEQ ID NO: 123180 - protein, 10 aa, Homo Sapiens
LPIAPDLEHF

SEQ ID NO: 123181 - protein, 10 aa, Homo Sapiens
LPIDGANDLF

SEQ ID NO: 123182 - protein, 10 aa, Homo Sapiens
LPIDPNEPTY

SEQ ID NO: 123183 - protein, 10 aa, Homo Sapiens
LPIEAVYHRY

SEQ ID NO: 123184 - protein, 10 aa, Homo Sapiens
LPIENDVYKY

SEQ ID NO: 123185 - protein, 10 aa, Homo Sapiens
LPIGDVATQY

SEQ ID NO: 123186 - protein, 10 aa, Homo Sapiens
LPIKDGKLVF

SEQ ID NO: 123187 - protein, 10 aa, Homo Sapiens
LPIQARLGSI

SEQ ID NO: 123188 - protein, 10 aa, Homo Sapiens
LPITDLHCGF

SEQ ID NO: 123189 - protein, 10 aa, Homo Sapiens
LPLPSNTPTF

SEQ ID NO: 123190 - protein, 10 aa, Homo Sapiens
LPNGMKEERF

SEQ ID NO: 123191 - protein, 10 aa, Homo Sapiens
LPNKDGVVRF

SEQ ID NO: 123192 - protein, 10 aa, Homo Sapiens
LPPELRGDLW

SEQ ID NO: 123193 - protein, 10 aa, Homo Sapiens
LPQEAEEERW

SEQ ID NO: 123194 - protein, 10 aa, Homo Sapiens
LPQGTSGQLW

SEQ ID NO: 123195 - protein, 10 aa, Homo Sapiens
LPQPDVFPLF

SEQ ID NO: 123196 - protein, 10 aa, Homo Sapiens
LPSHVAVDVW

SEQ ID NO: 123197 - protein, 10 aa, Homo Sapiens
LPSPVTAQKY

SEQ ID NO: 123198 - protein, 10 aa, Homo Sapiens
LPVADYFKQW

SEQ ID NO: 123199 - protein, 10 aa, Homo Sapiens
LPVTPILEGF

SEQ ID NO: 123200 - protein, 10 aa, Homo Sapiens
LPYAGDVSMF

SEQ ID NO: 123201 - protein, 10 aa, Homo Sapiens
LPYNHQHEYF

SEQ ID NO: 123202 - protein, 10 aa, Homo Sapiens
LPYRRSVPTW

SEQ ID NO: 123203 - protein, 10 aa, Homo Sapiens
LPYTGAETRI

SEQ ID NO: 123204 - protein, 10 aa, Homo Sapiens
LREESEADQW

SEQ ID NO: 123205 - protein, 10 aa, Homo Sapiens
LVAEVPKEHW

SEQ ID NO: 123206 - protein, 10 aa, Homo Sapiens
MAEGSNGNKW

SEQ ID NO: 123207 - protein, 10 aa, Homo Sapiens
MAFQNDVYEW

SEQ ID NO: 123208 - protein, 10 aa, Homo Sapiens
MPALFSDHTF

SEQ ID NO: 123209 - protein, 10 aa, Homo Sapiens
MPALRPALLW

SEQ ID NO: 123210 - protein, 10 aa, Homo Sapiens
MPANGETVTL

SEQ ID NO: 123211 - protein, 10 aa, Homo Sapiens
MPAPHTSITM

SEQ ID NO: 123212 - protein, 10 aa, Homo Sapiens
MPCPVPPARM

SEQ ID NO: 123213 - protein, 10 aa, Homo Sapiens
MPDDYGAPRF

SEQ ID NO: 123214 - protein, 10 aa, Homo Sapiens
MPDEATPHYF

SEQ ID NO: 123215 - protein, 10 aa, Homo Sapiens
MPEDVKNFYL

SEQ ID NO: 123216 - protein, 10 aa, Homo Sapiens
MPEPDAQRFF

SEQ ID NO: 123217 - protein, 10 aa, Homo Sapiens
MPESGAGSEF

SEQ ID NO: 123218 - protein, 10 aa, Homo Sapiens
MPESGPSYEF

SEQ ID NO: 123219 - protein, 10 aa, Homo Sapiens
MPFAPAIQTF

SEQ ID NO: 123220 - protein, 10 aa, Homo Sapiens
MPFEIRLPEF

SEQ ID NO: 123221 - protein, 10 aa, Homo Sapiens
MPFQRAGVNF

SEQ ID NO: 123222 - protein, 10 aa, Homo Sapiens
MPHANMNVHY

SEQ ID NO: 123223 - protein, 10 aa, Homo Sapiens
MPHAPIGLYF

SEQ ID NO: 123224 - protein, 10 aa, Homo Sapiens
MPIPGGNQRF

SEQ ID NO: 123225 - protein, 10 aa, Homo Sapiens
MPLHTIIPLL

SEQ ID NO: 123226 - protein, 10 aa, Homo Sapiens
MPNSASRDEF

SEQ ID NO: 123227 - protein, 10 aa, Homo Sapiens
MPRPDKNHQW

SEQ ID NO: 123228 - protein, 10 aa, Homo Sapiens
MPSGPSGKRW

SEQ ID NO: 123229 - protein, 10 aa, Homo Sapiens
MPSQSVEQTY

SEQ ID NO: 123230 - protein, 10 aa, Homo Sapiens
MPSSDTTVTF

SEQ ID NO: 123231 - protein, 10 aa, Homo Sapiens
MPVDPNEPTY

SEQ ID NO: 123232 - protein, 10 aa, Homo Sapiens
MPVNKVVQSF

SEQ ID NO: 123233 - protein, 10 aa, Homo Sapiens
MVLENVKEMW

SEQ ID NO: 123234 - protein, 10 aa, Homo Sapiens
NADPASHEIW

SEQ ID NO: 123235 - protein, 10 aa, Homo Sapiens
NAIQDSLTRW

SEQ ID NO: 123236 - protein, 10 aa, Homo Sapiens
NARMPEKVTW

SEQ ID NO: 123237 - protein, 10 aa, Homo Sapiens
NPDSAQPYKW

SEQ ID NO: 123238 - protein, 10 aa, Homo Sapiens
NPEDVARLIF

SEQ ID NO: 123239 - protein, 10 aa, Homo Sapiens
NPEPELLVRW

SEQ ID NO: 123240 - protein, 10 aa, Homo Sapiens
NPFGGRGLAW

SEQ ID NO: 123241 - protein, 10 aa, Homo Sapiens
NPIQGLASKW

SEQ ID NO: 123242 - protein, 10 aa, Homo Sapiens
NPISNNSQTF

SEQ ID NO: 123243 - protein, 10 aa, Homo Sapiens
NPLGGGREVW

SEQ ID NO: 123244 - protein, 10 aa, Homo Sapiens
NPPLESHVGW

SEQ ID NO: 123245 - protein, 10 aa, Homo Sapiens
NPTDIYPSKW

SEQ ID NO: 123246 - protein, 10 aa, Homo Sapiens
NPVPDGHSRW

SEQ ID NO: 123247 - protein, 10 aa, Homo Sapiens
NPYPGDVTKF

SEQ ID NO: 123248 - protein, 10 aa, Homo Sapiens
NPYSGDLTKF

SEQ ID NO: 123249 - protein, 10 aa, Homo Sapiens
NVEGAAKLLW

SEQ ID NO: 123250 - protein, 10 aa, Homo Sapiens
NVFKNDQDTW

SEQ ID NO: 123251 - protein, 10 aa, Homo Sapiens
PAASSFGSPG

SEQ ID NO: 123252 - protein, 10 aa, Homo Sapiens
QALEDHFSSF

SEQ ID NO: 123253 - protein, 10 aa, Homo Sapiens
QARVEELERW

SEQ ID NO: 123254 - protein, 10 aa, Homo Sapiens
QPAGPATHTW

SEQ ID NO: 123255 - protein, 10 aa, Homo Sapiens
QPAPPEKVGW

SEQ ID NO: 123256 - protein, 10 aa, Homo Sapiens
QPAQDIFSVY

SEQ ID NO: 123257 - protein, 10 aa, Homo Sapiens
QPDPDAIKMF

SEQ ID NO: 123258 - protein, 10 aa, Homo Sapiens
QPWEEIKTSY

SEQ ID NO: 123259 - protein, 10 aa, Homo Sapiens
RAGDPILTYF

SEQ ID NO: 123260 - protein, 10 aa, Homo Sapiens
RPIDHDLANW

SEQ ID NO: 123261 - protein, 10 aa, Homo Sapiens
SAASPHYQEW

SEQ ID NO: 123262 - protein, 10 aa, Homo Sapiens
SACDLPREVW

SEQ ID NO: 123263 - protein, 10 aa, Homo Sapiens
SACRTSGQTF

SEQ ID NO: 123264 - protein, 10 aa, Homo Sapiens
SADTCTHAYW

SEQ ID NO: 123265 - protein, 10 aa, Homo Sapiens
SATEVTGHRW

SEQ ID NO: 123266 - protein, 10 aa, Homo Sapiens
SAVASKEDSW

SEQ ID NO: 123267 - protein, 10 aa, Homo Sapiens
SAYDSKADIW

SEQ ID NO: 123268 - protein, 10 aa, Homo Sapiens
SPDGGYIPRI

SEQ ID NO: 123269 - protein, 10 aa, Homo Sapiens
SPDSAVGVQW

SEQ ID NO: 123270 - protein, 10 aa, Homo Sapiens
SPEDSWVSKW

SEQ ID NO: 123271 - protein, 10 aa, Homo Sapiens
SPEPGTAAAW

SEQ ID NO: 123272 - protein, 10 aa, Homo Sapiens
SPEQTVPYLW

SEQ ID NO: 123273 - protein, 10 aa, Homo Sapiens
SPHSAAYVLW

SEQ ID NO: 123274 - protein, 10 aa, Homo Sapiens
SPIDFHLQSW

SEQ ID NO: 123275 - protein, 10 aa, Homo Sapiens
SPIPCLPLRW

SEQ ID NO: 123276 - protein, 10 aa, Homo Sapiens
SPIPFPPLSY

SEQ ID NO: 123277 - protein, 10 aa, Homo Sapiens
SPITSSPPKW

SEQ ID NO: 123278 - protein, 10 aa, Homo Sapiens
SPMEIPKELW

SEQ ID NO: 123279 - protein, 10 aa, Homo Sapiens
SPRQAEAERW

SEQ ID NO: 123280 - protein, 10 aa, Homo Sapiens
SPSANIPEHW

SEQ ID NO: 123281 - protein, 10 aa, Homo Sapiens
SPSPGGDAAW

SEQ ID NO: 123282 - protein, 10 aa, Homo Sapiens
SPVLFQEALW

SEQ ID NO: 123283 - protein, 10 aa, Homo Sapiens
TAATAGIIGW

SEQ ID NO: 123284 - protein, 10 aa, Homo Sapiens
TADPGATMTF

SEQ ID NO: 123285 - protein, 10 aa, Homo Sapiens
TAHDDRGIRF

SEQ ID NO: 123286 - protein, 10 aa, Homo Sapiens
TAIATEQQSW

SEQ ID NO: 123287 - protein, 10 aa, Homo Sapiens
TAIESGQHYW

SEQ ID NO: 123288 - protein, 10 aa, Homo Sapiens
TALLAEGITW

SEQ ID NO: 123289 - protein, 10 aa, Homo Sapiens
TALPLTQLRW

SEQ ID NO: 123290 - protein, 10 aa, Homo Sapiens
TAQSDNKITW

SEQ ID NO: 123291 - protein, 10 aa, Homo Sapiens
TASPPTDLIW

SEQ ID NO: 123292 - protein, 10 aa, Homo Sapiens
TASRDDRSTW

SEQ ID NO: 123293 - protein, 10 aa, Homo Sapiens
TAVICQLDYW

SEQ ID NO: 123294 - protein, 10 aa, Homo Sapiens
TAWDEADVRF

SEQ ID NO: 123295 - protein, 10 aa, Homo Sapiens
TAWLEIMTKY

SEQ ID NO: 123296 - protein, 10 aa, Homo Sapiens
TPCGEGSKTW

SEQ ID NO: 123297 - protein, 10 aa, Homo Sapiens
TPCPGPFLRY

SEQ ID NO: 123298 - protein, 10 aa, Homo Sapiens
TPDPSTPSRL

SEQ ID NO: 123299 - protein, 10 aa, Homo Sapiens
TPDPTCAGRW

SEQ ID NO: 123300 - protein, 10 aa, Homo Sapiens
TPIEERGDLF

SEQ ID NO: 123301 - protein, 10 aa, Homo Sapiens
TPLYGNVHSW

SEQ ID NO: 123302 - protein, 10 aa, Homo Sapiens
TPSAEPSTSW

SEQ ID NO: 123303 - protein, 10 aa, Homo Sapiens
TPSPEEVQSW

SEQ ID NO: 123304 - protein, 10 aa, Homo Sapiens
TVYTGIDHHW

SEQ ID NO: 123305 - protein, 10 aa, Homo Sapiens
VAADALGEEW

SEQ ID NO: 123306 - protein, 10 aa, Homo Sapiens
VPAHPDSRCW

SEQ ID NO: 123307 - protein, 10 aa, Homo Sapiens
VPDPNKPQKL

SEQ ID NO: 123308 - protein, 10 aa, Homo Sapiens
VPEAGAHEEW

SEQ ID NO: 123309 - protein, 10 aa, Homo Sapiens
VPEASRPHQW

SEQ ID NO: 123310 - protein, 10 aa, Homo Sapiens
VPEKGSGDKW

SEQ ID NO: 123311 - protein, 10 aa, Homo Sapiens
VPIEQKHEVW

SEQ ID NO: 123312 - protein, 10 aa, Homo Sapiens
VPLQNPPIKW

SEQ ID NO: 123313 - protein, 10 aa, Homo Sapiens
VPNMQDKTEW

SEQ ID NO: 123314 - protein, 10 aa, Homo Sapiens
VPSPPPGHKW

SEQ ID NO: 123315 - protein, 10 aa, Homo Sapiens
VPVALRTDDW

SEQ ID NO: 123316 - protein, 10 aa, Homo Sapiens
VPVAVVPSKW

SEQ ID NO: 123317 - protein, 10 aa, Homo Sapiens
VPVPPFGCTF

SEQ ID NO: 123318 - protein, 10 aa, Homo Sapiens
VPVQVDGEAW

SEQ ID NO: 123319 - protein, 10 aa, Homo Sapiens
VPVTTKEDAW

SEQ ID NO: 123320 - protein, 10 aa, Homo Sapiens
VPWEELHNRF

SEQ ID NO: 123321 - protein, 10 aa, Homo Sapiens
VPYPDDLVGF

SEQ ID NO: 123322 - protein, 10 aa, Homo Sapiens
VSPEYFSMLL

SEQ ID NO: 123323 - protein, 10 aa, Homo Sapiens
WPDDLQNHTF

SEQ ID NO: 123324 - protein, 10 aa, Homo Sapiens
WPEEGPATAW

SEQ ID NO: 123325 - protein, 10 aa, Homo Sapiens
WPQPDKPMFF

SEQ ID NO: 123326 - protein, 10 aa, Homo Sapiens
YADPGAEVKI

SEQ ID NO: 123327 - protein, 10 aa, Homo Sapiens
YAFDVNTHKW

SEQ ID NO: 123328 - protein, 10 aa, Homo Sapiens
YAYSPLEDSW

SEQ ID NO: 123329 - protein, 10 aa, Homo Sapiens
YPDEEGPKHW

SEQ ID NO: 123330 - protein, 10 aa, Homo Sapiens
YPDRELQSQW

SEQ ID NO: 123331 - protein, 10 aa, Homo Sapiens
YPDSNGMPVW

SEQ ID NO: 123332 - protein, 10 aa, Homo Sapiens
YPESNSRAIF

SEQ ID NO: 123333 - protein, 10 aa, Homo Sapiens
YPETLGRLLI

SEQ ID NO: 123334 - protein, 10 aa, Homo Sapiens
YPFDSPQVMF

SEQ ID NO: 123335 - protein, 10 aa, Homo Sapiens
YPFHKQPPTY

SEQ ID NO: 123336 - protein, 10 aa, Homo Sapiens
YPFKPPKITF

SEQ ID NO: 123337 - protein, 10 aa, Homo Sapiens
YPFKPPKVAF

SEQ ID NO: 123338 - protein, 10 aa, Homo Sapiens
YPFKPPKVTF

SEQ ID NO: 123339 - protein, 10 aa, Homo Sapiens
YPIDPVTQEF

SEQ ID NO: 123340 - protein, 10 aa, Homo Sapiens
YPIVDGKLSI

SEQ ID NO: 123341 - protein, 10 aa, Homo Sapiens
YPLEVTKLIY

SEQ ID NO: 123342 - protein, 10 aa, Homo Sapiens
YPNGVVVHYF

SEQ ID NO: 123343 - protein, 10 aa, Homo Sapiens
YPNKLDTITW

SEQ ID NO: 123344 - protein, 10 aa, Homo Sapiens
YPNPYSKHVL

SEQ ID NO: 123345 - protein, 10 aa, Homo Sapiens
YPPPHQVFTW

SEQ ID NO: 123346 - protein, 10 aa, Homo Sapiens
YPQSVPRLFI

SEQ ID NO: 123347 - protein, 10 aa, Homo Sapiens
YPVGHMPYGW

SEQ ID NO: 123348 - protein, 10 aa, Homo Sapiens
YPYEYEGGHI

SEQ ID NO: 123349 - protein, 10 aa, Homo Sapiens
YPYNAPTVKF

SEQ ID NO: 123350 - protein, 10 aa, Homo Sapiens
YPYPPPPPEF

SEQ ID NO: 123351 - protein, 10 aa, Homo Sapiens
YPYPPVPETF

SEQ ID NO: 123352 - protein, 10 aa, Homo Sapiens
YPYPYPHTLY

SEQ ID NO: 123353 - protein, 11 aa, Homo Sapiens
AACPVLVGNKW

SEQ ID NO: 123354 - protein, 11 aa, Homo Sapiens
AAQAAATAAAM

SEQ ID NO: 123355 - protein, 11 aa, Homo Sapiens
APAPPGPGTRW

SEQ ID NO: 123356 - protein, 11 aa, Homo Sapiens
APEPLIPFHQW

SEQ ID NO: 123357 - protein, 11 aa, Homo Sapiens
APIPNAPPARW

SEQ ID NO: 123358 - protein, 11 aa, Homo Sapiens
APLAGLEKMAS

SEQ ID NO: 123359 - protein, 11 aa, Homo Sapiens
APVKENIPYSW

SEQ ID NO: 123360 - protein, 11 aa, Homo Sapiens
AQAAATAAAMA

SEQ ID NO: 123361 - protein, 11 aa, Homo Sapiens
CPEEFLTGHYW

SEQ ID NO: 123362 - protein, 11 aa, Homo Sapiens
DALAHGADVNW

SEQ ID NO: 123363 - protein, 11 aa, Homo Sapiens
EAIEEVKNGGW

SEQ ID NO: 123364 - protein, 11 aa, Homo Sapiens
EALGDNVKQYW

SEQ ID NO: 123365 - protein, 11 aa, Homo Sapiens
EALPGPHYYTW

SEQ ID NO: 123366 - protein, 11 aa, Homo Sapiens
EAWNEEGKAVW

SEQ ID NO: 123367 - protein, 11 aa, Homo Sapiens
EPIYPEVVHMF

SEQ ID NO: 123368 - protein, 11 aa, Homo Sapiens
EPVPASIPNYY

SEQ ID NO: 123369 - protein, 11 aa, Homo Sapiens
FAQTVSPAEKW

SEQ ID NO: 123370 - protein, 11 aa, Homo Sapiens
FAYKDQNENRW

SEQ ID NO: 123371 - protein, 11 aa, Homo Sapiens
FPAAIEHTIQW

SEQ ID NO: 123372 - protein, 11 aa, Homo Sapiens
FPASPPKGYFL

SEQ ID NO: 123373 - protein, 11 aa, Homo Sapiens
FPAVDDNLLKF

SEQ ID NO: 123374 - protein, 11 aa, Homo Sapiens
FPDFPTPGVVF

SEQ ID NO: 123375 - protein, 11 aa, Homo Sapiens
FPDPAGKLNQF

SEQ ID NO: 123376 - protein, 11 aa, Homo Sapiens
FPEKPCKGSGY

SEQ ID NO: 123377 - protein, 11 aa, Homo Sapiens
FPESASDAIKF

SEQ ID NO: 123378 - protein, 11 aa, Homo Sapiens
FPFKEPEKRTI

SEQ ID NO: 123379 - protein, 11 aa, Homo Sapiens
FPFLSGDNQHY

SEQ ID NO: 123380 - protein, 11 aa, Homo Sapiens
FPFNPLDFESF

SEQ ID NO: 123381 - protein, 11 aa, Homo Sapiens
FPFSQDINSHL

SEQ ID NO: 123382 - protein, 11 aa, Homo Sapiens
FPHLPGSAPSW

SEQ ID NO: 123383 - protein, 11 aa, Homo Sapiens
FPIIIHDEPTY

SEQ ID NO: 123384 - protein, 11 aa, Homo Sapiens
FPLIEVNKVYY

SEQ ID NO: 123385 - protein, 11 aa, Homo Sapiens
FPLLPQDVHLL

SEQ ID NO: 123386 - protein, 11 aa, Homo Sapiens
FPLQPGKVATF

SEQ ID NO: 123387 - protein, 11 aa, Homo Sapiens
FPNAIEHTLQW

SEQ ID NO: 123388 - protein, 11 aa, Homo Sapiens
FPNIVIKGSEL

SEQ ID NO: 123389 - protein, 11 aa, Homo Sapiens
FPNTGARIMLF

SEQ ID NO: 123390 - protein, 11 aa, Homo Sapiens
FPSTAEHTLQW

SEQ ID NO: 123391 - protein, 11 aa, Homo Sapiens
FPVETNCGHLF

SEQ ID NO: 123392 - protein, 11 aa, Homo Sapiens
FPWGDGNHTLF

SEQ ID NO: 123393 - protein, 11 aa, Homo Sapiens
FPYARDDLSLY

SEQ ID NO: 123394 - protein, 11 aa, Homo Sapiens
FPYYPSPGVLF

SEQ ID NO: 123395 - protein, 11 aa, Homo Sapiens
GPGGPGGGGQR

SEQ ID NO: 123396 - protein, 11 aa, Homo Sapiens
GPSIHPGFLPW

SEQ ID NO: 123397 - protein, 11 aa, Homo Sapiens
GVAGPKGPAGE

SEQ ID NO: 123398 - protein, 11 aa, Homo Sapiens
HAAEDSSLLIY

SEQ ID NO: 123399 - protein, 11 aa, Homo Sapiens
HACGVIATIAF

SEQ ID NO: 123400 - protein, 11 aa, Homo Sapiens
HAEDSVMDHHF

SEQ ID NO: 123401 - protein, 11 aa, Homo Sapiens
HAETATASSTW

SEQ ID NO: 123402 - protein, 11 aa, Homo Sapiens
HAIIDEQPLIF

SEQ ID NO: 123403 - protein, 11 aa, Homo Sapiens
HASDVLETSGW

SEQ ID NO: 123404 - protein, 11 aa, Homo Sapiens
HAYEGVPNGGW

SEQ ID NO: 123405 - protein, 11 aa, Homo Sapiens
HAYPDFAPQKF

SEQ ID NO: 123406 - protein, 11 aa, Homo Sapiens
HPAPFSKVITF

SEQ ID NO: 123407 - protein, 11 aa, Homo Sapiens
HPAPLCTIRTL

SEQ ID NO: 123408 - protein, 11 aa, Homo Sapiens
HPCFWIDGQYL

SEQ ID NO: 123409 - protein, 11 aa, Homo Sapiens
HPDPDAELQRM

SEQ ID NO: 123410 - protein, 11 aa, Homo Sapiens
HPDQTGTNQHF

SEQ ID NO: 123411 - protein, 11 aa, Homo Sapiens
HPENPKAVETF

SEQ ID NO: 123412 - protein, 11 aa, Homo Sapiens
HPESPNTGSHW

SEQ ID NO: 123413 - protein, 11 aa, Homo Sapiens
HPESPSTGHYW

SEQ ID NO: 123414 - protein, 11 aa, Homo Sapiens
HPFEDGAKLRI

SEQ ID NO: 123415 - protein, 11 aa, Homo Sapiens
HPIADGGTPDI

SEQ ID NO: 123416 - protein, 11 aa, Homo Sapiens
HPIPGEYKFFW

SEQ ID NO: 123417 - protein, 11 aa, Homo Sapiens
HPLPETAVRGY

SEQ ID NO: 123418 - protein, 11 aa, Homo Sapiens
HPLPRVKAETY

SEQ ID NO: 123419 - protein, 11 aa, Homo Sapiens
HPLYGHGECKW

SEQ ID NO: 123420 - protein, 11 aa, Homo Sapiens
HPQIMSPLAKW

SEQ ID NO: 123421 - protein, 11 aa, Homo Sapiens
HPVTTDIKHSI

SEQ ID NO: 123422 - protein, 11 aa, Homo Sapiens
HPYPFSGIFEI

SEQ ID NO: 123423 - protein, 11 aa, Homo Sapiens
HRGFSGLDGAK

SEQ ID NO: 123424 - protein, 11 aa, Homo Sapiens
IARREEEFDLF

SEQ ID NO: 123425 - protein, 11 aa, Homo Sapiens
IPEEILGKVSI

SEQ ID NO: 123426 - protein, 11 aa, Homo Sapiens
IPEKGLEPEHS

SEQ ID NO: 123427 - protein, 11 aa, Homo Sapiens
IPHTDPVDYEF

SEQ ID NO: 123428 - protein, 11 aa, Homo Sapiens
IPIALSGRDIL

SEQ ID NO: 123429 - protein, 11 aa, Homo Sapiens
IPLALEGKDLL

SEQ ID NO: 123430 - protein, 11 aa, Homo Sapiens
IPLAPISKSLW

SEQ ID NO: 123431 - protein, 11 aa, Homo Sapiens
IPMNPNTNDLF

SEQ ID NO: 123432 - protein, 11 aa, Homo Sapiens
IPYHSEVPVSL

SEQ ID NO: 123433 - protein, 11 aa, Homo Sapiens
IPYPTKNPFTW

SEQ ID NO: 123434 - protein, 11 aa, Homo Sapiens
IPYSEPMPLSF

SEQ ID NO: 123435 - protein, 11 aa, Homo Sapiens
LADPDEVARRW

SEQ ID NO: 123436 - protein, 11 aa, Homo Sapiens
LPAGINSIVAI

SEQ ID NO: 123437 - protein, 11 aa, Homo Sapiens
LPALEPSTRYW

SEQ ID NO: 123438 - protein, 11 aa, Homo Sapiens
LPCPLGPLTVW

SEQ ID NO: 123439 - protein, 11 aa, Homo Sapiens
LPDGTSLTQTF

SEQ ID NO: 123440 - protein, 11 aa, Homo Sapiens
LPDPGLCGPAW

SEQ ID NO: 123441 - protein, 11 aa, Homo Sapiens
LPEGKSSATKW

SEQ ID NO: 123442 - protein, 11 aa, Homo Sapiens
LPFCQPSKITY

SEQ ID NO: 123443 - protein, 11 aa, Homo Sapiens
LPFLPSTEDVY

SEQ ID NO: 123444 - protein, 11 aa, Homo Sapiens
LPFLPTPMGKG

SEQ ID NO: 123445 - protein, 11 aa, Homo Sapiens
LPFPDETHERY

SEQ ID NO: 123446 - protein, 11 aa, Homo Sapiens
LPIGDVATQYF

SEQ ID NO: 123447 - protein, 11 aa, Homo Sapiens
LPIPESQVITI

SEQ ID NO: 123448 - protein, 11 aa, Homo Sapiens
LPLFPEPLHVF

SEQ ID NO: 123449 - protein, 11 aa, Homo Sapiens
LPNAVGPPFTW

SEQ ID NO: 123450 - protein, 11 aa, Homo Sapiens
LPNHLAMMETL

SEQ ID NO: 123451 - protein, 11 aa, Homo Sapiens
LPNSTERAITI

SEQ ID NO: 123452 - protein, 11 aa, Homo Sapiens
LPVGALATEQW

SEQ ID NO: 123453 - protein, 11 aa, Homo Sapiens
LPVQAPANDSW

SEQ ID NO: 123454 - protein, 11 aa, Homo Sapiens
LPYKATENDIY

SEQ ID NO: 123455 - protein, 11 aa, Homo Sapiens
LPYNHQHEYFF

SEQ ID NO: 123456 - protein, 11 aa, Homo Sapiens
LPYPDPAIAQF

SEQ ID NO: 123457 - protein, 11 aa, Homo Sapiens
LPYRATENDIY

SEQ ID NO: 123458 - protein, 11 aa, Homo Sapiens
MAFLDSQTATF

SEQ ID NO: 123459 - protein, 11 aa, Homo Sapiens
MPAPPPKENAW

SEQ ID NO: 123460 - protein, 11 aa, Homo Sapiens
MPDPKTFKQHF

SEQ ID NO: 123461 - protein, 11 aa, Homo Sapiens
MPEEESAKVCL

SEQ ID NO: 123462 - protein, 11 aa, Homo Sapiens
MPFQDGKPFNL

SEQ ID NO: 123463 - protein, 11 aa, Homo Sapiens
MPIREGDTVTL

SEQ ID NO: 123464 - protein, 11 aa, Homo Sapiens
MPMGSLEHEGL

SEQ ID NO: 123465 - protein, 11 aa, Homo Sapiens
MPMSGNTGENF

SEQ ID NO: 123466 - protein, 11 aa, Homo Sapiens
MPNPSLAQVKI

SEQ ID NO: 123467 - protein, 11 aa, Homo Sapiens
MPPQDAFTTQW

SEQ ID NO: 123468 - protein, 11 aa, Homo Sapiens
MPQELIEASNW

SEQ ID NO: 123469 - protein, 11 aa, Homo Sapiens
MPTTSTTSTRF

SEQ ID NO: 123470 - protein, 11 aa, Homo Sapiens
MPVGPDAILRY

SEQ ID NO: 123471 - protein, 11 aa, Homo Sapiens
MPYNHQHKYFF

SEQ ID NO: 123472 - protein, 11 aa, Homo Sapiens
NAAANVLRETW

SEQ ID NO: 123473 - protein, 11 aa, Homo Sapiens
NAEKELTDRNW

SEQ ID NO: 123474 - protein, 11 aa, Homo Sapiens
NAFEESKDNTI

SEQ ID NO: 123475 - protein, 11 aa, Homo Sapiens
NALPDTLKVTY

SEQ ID NO: 123476 - protein, 11 aa, Homo Sapiens
NAVNWIESSSW

SEQ ID NO: 123477 - protein, 11 aa, Homo Sapiens
NAWLEAPPEKW

SEQ ID NO: 123478 - protein, 11 aa, Homo Sapiens
NPDPKSHDVYW

SEQ ID NO: 123479 - protein, 11 aa, Homo Sapiens
NPFQEPRTVVW

SEQ ID NO: 123480 - protein, 11 aa, Homo Sapiens
NPLQEPFKNAW

SEQ ID NO: 123481 - protein, 11 aa, Homo Sapiens
NPVCVRPTPKW

SEQ ID NO: 123482 - protein, 11 aa, Homo Sapiens
NPVDILTYVTW

SEQ ID NO: 123483 - protein, 11 aa, Homo Sapiens
PEHMAHSHSPI

SEQ ID NO: 123484 - protein, 11 aa, Homo Sapiens
PGMAPVPTGVF

SEQ ID NO: 123485 - protein, 11 aa, Homo Sapiens
QAADPAISQAW

SEQ ID NO: 123486 - protein, 11 aa, Homo Sapiens
QAAFLEERDAW

SEQ ID NO: 123487 - protein, 11 aa, Homo Sapiens
QPEAELGRLLF

SEQ ID NO: 123488 - protein, 11 aa, Homo Sapiens
QPEGPGGAASW

SEQ ID NO: 123489 - protein, 11 aa, Homo Sapiens
QPFGDTGGFHF

SEQ ID NO: 123490 - protein, 11 aa, Homo Sapiens
QPIAALHRDEW

SEQ ID NO: 123491 - protein, 11 aa, Homo Sapiens
QPMEVQEGYGF

SEQ ID NO: 123492 - protein, 11 aa, Homo Sapiens
QPVTPLGTSRW

SEQ ID NO: 123493 - protein, 11 aa, Homo Sapiens
RPAGDGTFQKW

SEQ ID NO: 123494 - protein, 11 aa, Homo Sapiens
RPFACDTKLEW

SEQ ID NO: 123495 - protein, 11 aa, Homo Sapiens
RPFEENGACKY

SEQ ID NO: 123496 - protein, 11 aa, Homo Sapiens
RPFEESGTCKY

SEQ ID NO: 123497 - protein, 11 aa, Homo Sapiens
SAAADETLRLW

SEQ ID NO: 123498 - protein, 11 aa, Homo Sapiens
SAAADSAVRLW

SEQ ID NO: 123499 - protein, 11 aa, Homo Sapiens
SAEEAMKHVYF

SEQ ID NO: 123500 - protein, 11 aa, Homo Sapiens
SAFSAAHEEQW

SEQ ID NO: 123501 - protein, 11 aa, Homo Sapiens
SALGPDIICRW

SEQ ID NO: 123502 - protein, 11 aa, Homo Sapiens
SASDDGTVRIW

SEQ ID NO: 123503 - protein, 11 aa, Homo Sapiens
SASPDATIRIW

SEQ ID NO: 123504 - protein, 11 aa, Homo Sapiens
SASQDGKLIIW

SEQ ID NO: 123505 - protein, 11 aa, Homo Sapiens
SAYNEGTLMKF

SEQ ID NO: 123506 - protein, 11 aa, Homo Sapiens
SGANIDELITF

SEQ ID NO: 123507 - protein, 11 aa, Homo Sapiens
SPEVPLPGMKW

SEQ ID NO: 123508 - protein, 11 aa, Homo Sapiens
SPFPSSIPHAF

SEQ ID NO: 123509 - protein, 11 aa, Homo Sapiens
SPLNTHAAELW

SEQ ID NO: 123510 - protein, 11 aa, Homo Sapiens
SPMFDGKVPHW

SEQ ID NO: 123511 - protein, 11 aa, Homo Sapiens
SPSSVTGNALW

SEQ ID NO: 123512 - protein, 11 aa, Homo Sapiens
TAADDHQALIW

SEQ ID NO: 123513 - protein, 11 aa, Homo Sapiens
TAAPSLKNAAF

SEQ ID NO: 123514 - protein, 11 aa, Homo Sapiens
TAAPTGTTIKF

SEQ ID NO: 123515 - protein, 11 aa, Homo Sapiens
TAEEKAIVQQW

SEQ ID NO: 123516 - protein, 11 aa, Homo Sapiens
TAEGEINNVQW

SEQ ID NO: 123517 - protein, 11 aa, Homo Sapiens
TAEGQATLERL

SEQ ID NO: 123518 - protein, 11 aa, Homo Sapiens
TAIQEIVVTHW

SEQ ID NO: 123519 - protein, 11 aa, Homo Sapiens
TASADGTIKLW

SEQ ID NO: 123520 - protein, 11 aa, Homo Sapiens
TASDDATIKAW

SEQ ID NO: 123521 - protein, 11 aa, Homo Sapiens
TAVGEGLDRVW

SEQ ID NO: 123522 - protein, 11 aa, Homo Sapiens
TKEETTPPSAS

SEQ ID NO: 123523 - protein, 11 aa, Homo Sapiens
TPEAAAQVVQW

SEQ ID NO: 123524 - protein, 11 aa, Homo Sapiens
TPIQDNVDQTY

SEQ ID NO: 123525 - protein, 11 aa, Homo Sapiens
TPIQNSLKDLW

SEQ ID NO: 123526 - protein, 11 aa, Homo Sapiens
TPLEDVGKQVW

SEQ ID NO: 123527 - protein, 11 aa, Homo Sapiens
TPLPREVLHKW

SEQ ID NO: 123528 - protein, 11 aa, Homo Sapiens
TPLQNNLHELW

SEQ ID NO: 123529 - protein, 11 aa, Homo Sapiens
TPVPSAEAFRW

SEQ ID NO: 123530 - protein, 11 aa, Homo Sapiens
TSENITQKVVW

SEQ ID NO: 123531 - protein, 11 aa, Homo Sapiens
VGGEFDLEMNF

SEQ ID NO: 123532 - protein, 11 aa, Homo Sapiens
VPAAVSHSEFW

SEQ ID NO: 123533 - protein, 11 aa, Homo Sapiens
VPEEQEHMRRW

SEQ ID NO: 123534 - protein, 11 aa, Homo Sapiens
VPEEVEAHQSW

SEQ ID NO: 123535 - protein, 11 aa, Homo Sapiens
VPEGQIILAKW

SEQ ID NO: 123536 - protein, 11 aa, Homo Sapiens
VPESSLAGHSF

SEQ ID NO: 123537 - protein, 11 aa, Homo Sapiens
VPIDLQKVDQF

SEQ ID NO: 123538 - protein, 11 aa, Homo Sapiens
VPIPGGAAPPP

SEQ ID NO: 123539 - protein, 11 aa, Homo Sapiens
VPLPGPPGPPG

SEQ ID NO: 123540 - protein, 11 aa, Homo Sapiens
VPRNPTIGDKF

SEQ ID NO: 123541 - protein, 11 aa, Homo Sapiens
VPSSELQIYTW

SEQ ID NO: 123542 - protein, 11 aa, Homo Sapiens
YGTLTSFDIHI

SEQ ID NO: 123543 - protein, 11 aa, Homo Sapiens
YMDPTGKTRTW

SEQ ID NO: 123544 - protein, 11 aa, Homo Sapiens
YPDMESDIRSW

SEQ ID NO: 123545 - protein, 11 aa, Homo Sapiens
YPDPVSIIQKY

SEQ ID NO: 123546 - protein, 11 aa, Homo Sapiens
YPETLGRLLIL

SEQ ID NO: 123547 - protein, 11 aa, Homo Sapiens
YPFESAEAQLL

SEQ ID NO: 123548 - protein, 11 aa, Homo Sapiens
YPFTGDHKQKF

SEQ ID NO: 123549 - protein, 11 aa, Homo Sapiens
YPHEPTAVFNI

SEQ ID NO: 123550 - protein, 11 aa, Homo Sapiens
YPIEHGIVTNW

SEQ ID NO: 123551 - protein, 11 aa, Homo Sapiens
YPLDLEGGSEY

SEQ ID NO: 123552 - protein, 11 aa, Homo Sapiens
YPLDPTTEHIY

SEQ ID NO: 123553 - protein, 11 aa, Homo Sapiens
YPLQDPKNLIL

SEQ ID NO: 123554 - protein, 11 aa, Homo Sapiens
YPMDLGGRNFL

SEQ ID NO: 123555 - protein, 11 aa, Homo Sapiens
YPMENGIVRNW

SEQ ID NO: 123556 - protein, 11 aa, Homo Sapiens
YPMSSTIPHNF

SEQ ID NO: 123557 - protein, 11 aa, Homo Sapiens
YPMTPAIEQRL

SEQ ID NO: 123558 - protein, 11 aa, Homo Sapiens
YPSETTVKYVF

SEQ ID NO: 123559 - protein, 11 aa, Homo Sapiens
YPSRVFVGDTF

SEQ ID NO: 123560 - protein, 11 aa, Homo Sapiens
YPVYQDYHTVW

SEQ ID NO: 123561 - protein, 8 aa, Homo Sapiens
APVILPSA

SEQ ID NO: 123562 - protein, 8 aa, Homo Sapiens
DAIRLFAA

SEQ ID NO: 123563 - protein, 8 aa, Homo Sapiens
DPTDIPVV

SEQ ID NO: 123564 - protein, 8 aa, Homo Sapiens
EAFRLPTA

SEQ ID NO: 123565 - protein, 8 aa, Homo Sapiens
EALGIPAA

SEQ ID NO: 123566 - protein, 8 aa, Homo Sapiens
EEQLQQIR

SEQ ID NO: 123567 - protein, 8 aa, Homo Sapiens
ESLLLFEA

SEQ ID NO: 123568 - protein, 8 aa, Homo Sapiens
FIFQQPEA

SEQ ID NO: 123569 - protein, 8 aa, Homo Sapiens
FPANIQVV

SEQ ID NO: 123570 - protein, 8 aa, Homo Sapiens
FPAPILRA

SEQ ID NO: 123571 - protein, 8 aa, Homo Sapiens
FPAQVPSA

SEQ ID NO: 123572 - protein, 8 aa, Homo Sapiens
FPDSLPEV

SEQ ID NO: 123573 - protein, 8 aa, Homo Sapiens
FPFHFVEV

SEQ ID NO: 123574 - protein, 8 aa, Homo Sapiens
FPFLGRVA

SEQ ID NO: 123575 - protein, 8 aa, Homo Sapiens
FPFNIHEN

SEQ ID NO: 123576 - protein, 8 aa, Homo Sapiens
FPFNPLDF

SEQ ID NO: 123577 - protein, 8 aa, Homo Sapiens
FPFNTPKT

SEQ ID NO: 123578 - protein, 8 aa, Homo Sapiens
FPFRFLNA

SEQ ID NO: 123579 - protein, 8 aa, Homo Sapiens
FPGIILAA

SEQ ID NO: 123580 - protein, 8 aa, Homo Sapiens
FPHIMPLA

SEQ ID NO: 123581 - protein, 8 aa, Homo Sapiens
FPHMLFMV

SEQ ID NO: 123582 - protein, 8 aa, Homo Sapiens
FPHPLPSL

SEQ ID NO: 123583 - protein, 8 aa, Homo Sapiens
FPHVLPLI

SEQ ID NO: 123584 - protein, 8 aa, Homo Sapiens
FPILIRQV

SEQ ID NO: 123585 - protein, 8 aa, Homo Sapiens
FPISLLQA

SEQ ID NO: 123586 - protein, 8 aa, Homo Sapiens
FPKEPVEL

SEQ ID NO: 123587 - protein, 8 aa, Homo Sapiens
FPLAKEFI

SEQ ID NO: 123588 - protein, 8 aa, Homo Sapiens
FPLIISSV

SEQ ID NO: 123589 - protein, 8 aa, Homo Sapiens
FPLLLPMA

SEQ ID NO: 123590 - protein, 8 aa, Homo Sapiens
FPSPILKV

SEQ ID NO: 123591 - protein, 8 aa, Homo Sapiens
FPTLGFVV

SEQ ID NO: 123592 - protein, 8 aa, Homo Sapiens
FPVHGFPT

SEQ ID NO: 123593 - protein, 8 aa, Homo Sapiens
FPVILYEV

SEQ ID NO: 123594 - protein, 8 aa, Homo Sapiens
FPVLFVSA

SEQ ID NO: 123595 - protein, 8 aa, Homo Sapiens
FPVLLRLA

SEQ ID NO: 123596 - protein, 8 aa, Homo Sapiens
FPVSIPAV

SEQ ID NO: 123597 - protein, 8 aa, Homo Sapiens
FPVSLPLA

SEQ ID NO: 123598 - protein, 8 aa, Homo Sapiens
FPWQSLEA

SEQ ID NO: 123599 - protein, 8 aa, Homo Sapiens
FPYAFKEV

SEQ ID NO: 123600 - protein, 8 aa, Homo Sapiens
FPYKIFKN

SEQ ID NO: 123601 - protein, 8 aa, Homo Sapiens
FPYKIPAV

SEQ ID NO: 123602 - protein, 8 aa, Homo Sapiens
HATIIPKV

SEQ ID NO: 123603 - protein, 8 aa, Homo Sapiens
HNLLLPVA

SEQ ID NO: 123604 - protein, 8 aa, Homo Sapiens
HNLLLYEA

SEQ ID NO: 123605 - protein, 8 aa, Homo Sapiens
HPFGFVAV

SEQ ID NO: 123606 - protein, 8 aa, Homo Sapiens
HPFLLLGT

SEQ ID NO: 123607 - protein, 8 aa, Homo Sapiens
HPTSIVKA

SEQ ID NO: 123608 - protein, 8 aa, Homo Sapiens
HPVLLTEA

SEQ ID NO: 123609 - protein, 8 aa, Homo Sapiens
HPWVLPVV

SEQ ID NO: 123610 - protein, 8 aa, Homo Sapiens
HPYLFPVA

SEQ ID NO: 123611 - protein, 8 aa, Homo Sapiens
IPALLESA

SEQ ID NO: 123612 - protein, 8 aa, Homo Sapiens
IPFDLPSA

SEQ ID NO: 123613 - protein, 8 aa, Homo Sapiens
IPFVITVA

SEQ ID NO: 123614 - protein, 8 aa, Homo Sapiens
IPIFLPEV

SEQ ID NO: 123615 - protein, 8 aa, Homo Sapiens
IPIVGIVA

SEQ ID NO: 123616 - protein, 8 aa, Homo Sapiens
IPNMIPQA

SEQ ID NO: 123617 - protein, 8 aa, Homo Sapiens
IPQVMAIA

SEQ ID NO: 123618 - protein, 8 aa, Homo Sapiens
IPTPIVGV

SEQ ID NO: 123619 - protein, 8 aa, Homo Sapiens
IPVRFIEA

SEQ ID NO: 123620 - protein, 8 aa, Homo Sapiens
LPALLFKA

SEQ ID NO: 123621 - protein, 8 aa, Homo Sapiens
LPFLFFST

SEQ ID NO: 123622 - protein, 8 aa, Homo Sapiens
LPFLGVLA

SEQ ID NO: 123623 - protein, 8 aa, Homo Sapiens
LPFLLYMA

SEQ ID NO: 123624 - protein, 8 aa, Homo Sapiens
LPFLTTEV

SEQ ID NO: 123625 - protein, 8 aa, Homo Sapiens
LPFSQPKV

SEQ ID NO: 123626 - protein, 8 aa, Homo Sapiens
LPHLIQDA

SEQ ID NO: 123627 - protein, 8 aa, Homo Sapiens
LPKQPVIV

SEQ ID NO: 123628 - protein, 8 aa, Homo Sapiens
LPLPIPTV

SEQ ID NO: 123629 - protein, 8 aa, Homo Sapiens
LPLPLPMA

SEQ ID NO: 123630 - protein, 8 aa, Homo Sapiens
LPMLQTVA

SEQ ID NO: 123631 - protein, 8 aa, Homo Sapiens
LPRPLPAV

SEQ ID NO: 123632 - protein, 8 aa, Homo Sapiens
LPVRLATA

SEQ ID NO: 123633 - protein, 8 aa, Homo Sapiens
LPWQGLKA

SEQ ID NO: 123634 - protein, 8 aa, Homo Sapiens
LPWWGAIA

SEQ ID NO: 123635 - protein, 8 aa, Homo Sapiens
LPYLFHVV

SEQ ID NO: 123636 - protein, 8 aa, Homo Sapiens
LPYPIHQV

SEQ ID NO: 123637 - protein, 8 aa, Homo Sapiens
MAAFVPAA

SEQ ID NO: 123638 - protein, 8 aa, Homo Sapiens
MAFKGWSA

SEQ ID NO: 123639 - protein, 8 aa, Homo Sapiens
MAFLLPLI

SEQ ID NO: 123640 - protein, 8 aa, Homo Sapiens
MAFRVPTA

SEQ ID NO: 123641 - protein, 8 aa, Homo Sapiens
MAVVIPEA

SEQ ID NO: 123642 - protein, 8 aa, Homo Sapiens
MPAFLRSA

SEQ ID NO: 123643 - protein, 8 aa, Homo Sapiens
MPFQQWEA

SEQ ID NO: 123644 - protein, 8 aa, Homo Sapiens
MPHSIMRV

SEQ ID NO: 123645 - protein, 8 aa, Homo Sapiens
MPIKINLI

SEQ ID NO: 123646 - protein, 8 aa, Homo Sapiens
MPIYPKWM

SEQ ID NO: 123647 - protein, 8 aa, Homo Sapiens
MPIYVTGI

SEQ ID NO: 123648 - protein, 8 aa, Homo Sapiens
MPQPVPTA

SEQ ID NO: 123649 - protein, 8 aa, Homo Sapiens
MPSLQPVV

SEQ ID NO: 123650 - protein, 8 aa, Homo Sapiens
MPVQFQVV

SEQ ID NO: 123651 - protein, 8 aa, Homo Sapiens
MPWVQETL

SEQ ID NO: 123652 - protein, 8 aa, Homo Sapiens
PNLFPFEK

SEQ ID NO: 123653 - protein, 8 aa, Homo Sapiens
PYLFPVAA

SEQ ID NO: 123654 - protein, 8 aa, Homo Sapiens
QNIQLPAA

SEQ ID NO: 123655 - protein, 8 aa, Homo Sapiens
SPFEWDIV

SEQ ID NO: 123656 - protein, 8 aa, Homo Sapiens
TEELAYLK

SEQ ID NO: 123657 - protein, 8 aa, Homo Sapiens
TPTPVPVV

SEQ ID NO: 123658 - protein, 8 aa, Homo Sapiens
VPFLHWEA

SEQ ID NO: 123659 - protein, 8 aa, Homo Sapiens
VPFSIPAA

SEQ ID NO: 123660 - protein, 8 aa, Homo Sapiens
VPIEIPTI

SEQ ID NO: 123661 - protein, 8 aa, Homo Sapiens
VPLIAIMA

SEQ ID NO: 123662 - protein, 8 aa, Homo Sapiens
VPTNIIAA

SEQ ID NO: 123663 - protein, 8 aa, Homo Sapiens
VPVIISRA

SEQ ID NO: 123664 - protein, 8 aa, Homo Sapiens
VPWLLLGA

SEQ ID NO: 123665 - protein, 8 aa, Homo Sapiens
WPFLGIVA

SEQ ID NO: 123666 - protein, 8 aa, Homo Sapiens
WPFREPVT

SEQ ID NO: 123667 - protein, 8 aa, Homo Sapiens
WPLLLVVA

SEQ ID NO: 123668 - protein, 8 aa, Homo Sapiens
YAFILTSA

SEQ ID NO: 123669 - protein, 8 aa, Homo Sapiens
YAFLLDKA

SEQ ID NO: 123670 - protein, 8 aa, Homo Sapiens
YPAPIPPP

SEQ ID NO: 123671 - protein, 8 aa, Homo Sapiens
YPFDFQGA

SEQ ID NO: 123672 - protein, 8 aa, Homo Sapiens
YPFELIMA

SEQ ID NO: 123673 - protein, 8 aa, Homo Sapiens
YPFKPPKV

SEQ ID NO: 123674 - protein, 8 aa, Homo Sapiens
YPFLLMVV

SEQ ID NO: 123675 - protein, 8 aa, Homo Sapiens
YPFLLPKS

SEQ ID NO: 123676 - protein, 8 aa, Homo Sapiens
YPFLLPVI

SEQ ID NO: 123677 - protein, 8 aa, Homo Sapiens
YPFQIHSI

SEQ ID NO: 123678 - protein, 8 aa, Homo Sapiens
YPIALTRA

SEQ ID NO: 123679 - protein, 8 aa, Homo Sapiens
YPLELFMA

SEQ ID NO: 123680 - protein, 8 aa, Homo Sapiens
YPLLIIRE

SEQ ID NO: 123681 - protein, 8 aa, Homo Sapiens
YPLLLQSI

SEQ ID NO: 123682 - protein, 8 aa, Homo Sapiens
YPQLLPGI

SEQ ID NO: 123683 - protein, 8 aa, Homo Sapiens
YPVLLDGV

SEQ ID NO: 123684 - protein, 8 aa, Homo Sapiens
YPYQVVRA

SEQ ID NO: 123685 - protein, 9 aa, Homo Sapiens
AAIAPIIAA

SEQ ID NO: 123686 - protein, 9 aa, Homo Sapiens
AIPALGGIS

SEQ ID NO: 123687 - protein, 9 aa, Homo Sapiens
APALLLIPA

SEQ ID NO: 123688 - protein, 9 aa, Homo Sapiens
APFQGLLQA

SEQ ID NO: 123689 - protein, 9 aa, Homo Sapiens
APIWLEHAA

SEQ ID NO: 123690 - protein, 9 aa, Homo Sapiens
APLDAYFQV

SEQ ID NO: 123691 - protein, 9 aa, Homo Sapiens
APLPHLPPA

SEQ ID NO: 123692 - protein, 9 aa, Homo Sapiens
APMPPIIHA

SEQ ID NO: 123693 - protein, 9 aa, Homo Sapiens
APNPVVFVA

SEQ ID NO: 123694 - protein, 9 aa, Homo Sapiens
APRQPGLMA

SEQ ID NO: 123695 - protein, 9 aa, Homo Sapiens
APVLLPSAA

SEQ ID NO: 123696 - protein, 9 aa, Homo Sapiens
APYPGFLSV

SEQ ID NO: 123697 - protein, 9 aa, Homo Sapiens
AYAIYELAV

SEQ ID NO: 123698 - protein, 9 aa, Homo Sapiens
CPHVVVLVA

SEQ ID NO: 123699 - protein, 9 aa, Homo Sapiens
CPHWVFNVA

SEQ ID NO: 123700 - protein, 9 aa, Homo Sapiens
CPVYPVITA

SEQ ID NO: 123701 - protein, 9 aa, Homo Sapiens
DAHEFLIAA

SEQ ID NO: 123702 - protein, 9 aa, Homo Sapiens
DAISNIFQA

SEQ ID NO: 123703 - protein, 9 aa, Homo Sapiens
DALLVGVPA

SEQ ID NO: 123704 - protein, 9 aa, Homo Sapiens
DALYPVVSA

SEQ ID NO: 123705 - protein, 9 aa, Homo Sapiens
DPFDILREA

SEQ ID NO: 123706 - protein, 9 aa, Homo Sapiens
DPFELFIAA

SEQ ID NO: 123707 - protein, 9 aa, Homo Sapiens
DPFERLISA

SEQ ID NO: 123708 - protein, 9 aa, Homo Sapiens
DPFQILVAA

SEQ ID NO: 123709 - protein, 9 aa, Homo Sapiens
DPHSGHFVA

SEQ ID NO: 123710 - protein, 9 aa, Homo Sapiens
DSFHHNVAA

SEQ ID NO: 123711 - protein, 9 aa, Homo Sapiens
EAAVPQLAA

SEQ ID NO: 123712 - protein, 9 aa, Homo Sapiens
EAFEAIKAA

SEQ ID NO: 123713 - protein, 9 aa, Homo Sapiens
EAFEAIPRA

SEQ ID NO: 123714 - protein, 9 aa, Homo Sapiens
EAFGFKVNA

SEQ ID NO: 123715 - protein, 9 aa, Homo Sapiens
EAIVRIAEA

SEQ ID NO: 123716 - protein, 9 aa, Homo Sapiens
EAKFPILSA

SEQ ID NO: 123717 - protein, 9 aa, Homo Sapiens
EALAYFITV

SEQ ID NO: 123718 - protein, 9 aa, Homo Sapiens
EALGIPAAA

SEQ ID NO: 123719 - protein, 9 aa, Homo Sapiens
EAWNGFVAA

SEQ ID NO: 123720 - protein, 9 aa, Homo Sapiens
EGFSIPVSA

SEQ ID NO: 123721 - protein, 9 aa, Homo Sapiens
EGLPPILNA

SEQ ID NO: 123722 - protein, 9 aa, Homo Sapiens
EGLPVFVVA

SEQ ID NO: 123723 - protein, 9 aa, Homo Sapiens
ELYADFIAA

SEQ ID NO: 123724 - protein, 9 aa, Homo Sapiens
ENYNKFISA

SEQ ID NO: 123725 - protein, 9 aa, Homo Sapiens
EPFADFHRV

SEQ ID NO: 123726 - protein, 9 aa, Homo Sapiens
ESFVMPWQA

SEQ ID NO: 123727 - protein, 9 aa, Homo Sapiens
EVFPEFAAA

SEQ ID NO: 123728 - protein, 9 aa, Homo Sapiens
EVTFALHSA

SEQ ID NO: 123729 - protein, 9 aa, Homo Sapiens
FAHFIQPAA

SEQ ID NO: 123730 - protein, 9 aa, Homo Sapiens
FAILQSVKA

SEQ ID NO: 123731 - protein, 9 aa, Homo Sapiens
FAKIPFEEA

SEQ ID NO: 123732 - protein, 9 aa, Homo Sapiens
FALAKGFTA

SEQ ID NO: 123733 - protein, 9 aa, Homo Sapiens
FALLQKVRA

SEQ ID NO: 123734 - protein, 9 aa, Homo Sapiens
FALPFGRTA

SEQ ID NO: 123735 - protein, 9 aa, Homo Sapiens
FALPGLLHA

SEQ ID NO: 123736 - protein, 9 aa, Homo Sapiens
FAMPYFIQV

SEQ ID NO: 123737 - protein, 9 aa, Homo Sapiens
FAVEGPKLV

SEQ ID NO: 123738 - protein, 9 aa, Homo Sapiens
FIFHSSLPT

SEQ ID NO: 123739 - protein, 9 aa, Homo Sapiens
FIKAVHVKA

SEQ ID NO: 123740 - protein, 9 aa, Homo Sapiens
FILKFPHSA

SEQ ID NO: 123741 - protein, 9 aa, Homo Sapiens
FPAAPLLTV

SEQ ID NO: 123742 - protein, 9 aa, Homo Sapiens
FPAEPMKGP

SEQ ID NO: 123743 - protein, 9 aa, Homo Sapiens
FPANVMDVI

SEQ ID NO: 123744 - protein, 9 aa, Homo Sapiens
FPAPILRAV

SEQ ID NO: 123745 - protein, 9 aa, Homo Sapiens
FPASSLLSA

SEQ ID NO: 123746 - protein, 9 aa, Homo Sapiens
FPAVVKNVA

SEQ ID NO: 123747 - protein, 9 aa, Homo Sapiens
FPEGLVIQA

SEQ ID NO: 123748 - protein, 9 aa, Homo Sapiens
FPELMGVFA

SEQ ID NO: 123749 - protein, 9 aa, Homo Sapiens
FPFAPPAAA

SEQ ID NO: 123750 - protein, 9 aa, Homo Sapiens
FPFDPERRV

SEQ ID NO: 123751 - protein, 9 aa, Homo Sapiens
FPFFNPIQT

SEQ ID NO: 123752 - protein, 9 aa, Homo Sapiens
FPFGCPPTV

SEQ ID NO: 123753 - protein, 9 aa, Homo Sapiens
FPFGFFTTV

SEQ ID NO: 123754 - protein, 9 aa, Homo Sapiens
FPFGGFIGS

SEQ ID NO: 123755 - protein, 9 aa, Homo Sapiens
FPFGKIGTV

SEQ ID NO: 123756 - protein, 9 aa, Homo Sapiens
FPFLQQEEA

SEQ ID NO: 123757 - protein, 9 aa, Homo Sapiens
FPFLVGEQV

SEQ ID NO: 123758 - protein, 9 aa, Homo Sapiens
FPFNSFLSG

SEQ ID NO: 123759 - protein, 9 aa, Homo Sapiens
FPFPTPPSV

SEQ ID NO: 123760 - protein, 9 aa, Homo Sapiens
FPFQPGSVA

SEQ ID NO: 123761 - protein, 9 aa, Homo Sapiens
FPGEQFKPA

SEQ ID NO: 123762 - protein, 9 aa, Homo Sapiens
FPGIRPYLA

SEQ ID NO: 123763 - protein, 9 aa, Homo Sapiens
FPHESTFGV

SEQ ID NO: 123764 - protein, 9 aa, Homo Sapiens
FPHFDLSHG

SEQ ID NO: 123765 - protein, 9 aa, Homo Sapiens
FPHISPCEV

SEQ ID NO: 123766 - protein, 9 aa, Homo Sapiens
FPHLQDAQV

SEQ ID NO: 123767 - protein, 9 aa, Homo Sapiens
FPHLQLLDV

SEQ ID NO: 123768 - protein, 9 aa, Homo Sapiens
FPHLRVLEA

SEQ ID NO: 123769 - protein, 9 aa, Homo Sapiens
FPIAEVFTL

SEQ ID NO: 123770 - protein, 9 aa, Homo Sapiens
FPIHAITGV

SEQ ID NO: 123771 - protein, 9 aa, Homo Sapiens
FPIKQPITV

SEQ ID NO: 123772 - protein, 9 aa, Homo Sapiens
FPIRDSWNA

SEQ ID NO: 123773 - protein, 9 aa, Homo Sapiens
FPKDLIQVV

SEQ ID NO: 123774 - protein, 9 aa, Homo Sapiens
FPKETFEGP

SEQ ID NO: 123775 - protein, 9 aa, Homo Sapiens
FPKGDVISV

SEQ ID NO: 123776 - protein, 9 aa, Homo Sapiens
FPKGTIFTA

SEQ ID NO: 123777 - protein, 9 aa, Homo Sapiens
FPLDAILNA

SEQ ID NO: 123778 - protein, 9 aa, Homo Sapiens
FPLEKALEA

SEQ ID NO: 123779 - protein, 9 aa, Homo Sapiens
FPLELTQKA

SEQ ID NO: 123780 - protein, 9 aa, Homo Sapiens
FPLLLPMAS

SEQ ID NO: 123781 - protein, 9 aa, Homo Sapiens
FPLNDLLSA

SEQ ID NO: 123782 - protein, 9 aa, Homo Sapiens
FPLPTPLSV

SEQ ID NO: 123783 - protein, 9 aa, Homo Sapiens
FPLQFGREV

SEQ ID NO: 123784 - protein, 9 aa, Homo Sapiens
FPLQLEPSA

SEQ ID NO: 123785 - protein, 9 aa, Homo Sapiens
FPLQPGKVA

SEQ ID NO: 123786 - protein, 9 aa, Homo Sapiens
FPLSAMLEA

SEQ ID NO: 123787 - protein, 9 aa, Homo Sapiens
FPLSPAVRV

SEQ ID NO: 123788 - protein, 9 aa, Homo Sapiens
FPLTKVYVV

SEQ ID NO: 123789 - protein, 9 aa, Homo Sapiens
FPLVKSALN

SEQ ID NO: 123790 - protein, 9 aa, Homo Sapiens
FPMEIRQYL

SEQ ID NO: 123791 - protein, 9 aa, Homo Sapiens
FPMELRQFL

SEQ ID NO: 123792 - protein, 9 aa, Homo Sapiens
FPMPLPRKA

SEQ ID NO: 123793 - protein, 9 aa, Homo Sapiens
FPMSPVTSV

SEQ ID NO: 123794 - protein, 9 aa, Homo Sapiens
FPNEFIVET

SEQ ID NO: 123795 - protein, 9 aa, Homo Sapiens
FPNGVLIKV

SEQ ID NO: 123796 - protein, 9 aa, Homo Sapiens
FPNIHPPQI

SEQ ID NO: 123797 - protein, 9 aa, Homo Sapiens
FPNIPVAST

SEQ ID NO: 123798 - protein, 9 aa, Homo Sapiens
FPNQYVDVA

SEQ ID NO: 123799 - protein, 9 aa, Homo Sapiens
FPNRLNLEA

SEQ ID NO: 123800 - protein, 9 aa, Homo Sapiens
FPPNIVESA

SEQ ID NO: 123801 - protein, 9 aa, Homo Sapiens
FPQEFVWEA

SEQ ID NO: 123802 - protein, 9 aa, Homo Sapiens
FPQIVSVAA

SEQ ID NO: 123803 - protein, 9 aa, Homo Sapiens
FPQLFPVSA

SEQ ID NO: 123804 - protein, 9 aa, Homo Sapiens
FPQVPYHLV

SEQ ID NO: 123805 - protein, 9 aa, Homo Sapiens
FPRNVVTSV

SEQ ID NO: 123806 - protein, 9 aa, Homo Sapiens
FPRPVTVEP

SEQ ID NO: 123807 - protein, 9 aa, Homo Sapiens
FPSDKIFEA

SEQ ID NO: 123808 - protein, 9 aa, Homo Sapiens
FPSEITDTV

SEQ ID NO: 123809 - protein, 9 aa, Homo Sapiens
FPSEYVPTV

SEQ ID NO: 123810 - protein, 9 aa, Homo Sapiens
FPSGHLLDA

SEQ ID NO: 123811 - protein, 9 aa, Homo Sapiens
FPSHDLPSV

SEQ ID NO: 123812 - protein, 9 aa, Homo Sapiens
FPSHLLVTA

SEQ ID NO: 123813 - protein, 9 aa, Homo Sapiens
FPSINVHKV

SEQ ID NO: 123814 - protein, 9 aa, Homo Sapiens
FPSNIFYEG

SEQ ID NO: 123815 - protein, 9 aa, Homo Sapiens
FPSNLEVEA

SEQ ID NO: 123816 - protein, 9 aa, Homo Sapiens
FPSSAFLRA

SEQ ID NO: 123817 - protein, 9 aa, Homo Sapiens
FPSTKISEA

SEQ ID NO: 123818 - protein, 9 aa, Homo Sapiens
FPTAATLEA

SEQ ID NO: 123819 - protein, 9 aa, Homo Sapiens
FPTAPTRVV

SEQ ID NO: 123820 - protein, 9 aa, Homo Sapiens
FPTDPKVVV

SEQ ID NO: 123821 - protein, 9 aa, Homo Sapiens
FPTHPYFSA

SEQ ID NO: 123822 - protein, 9 aa, Homo Sapiens
FPTHPYFSV

SEQ ID NO: 123823 - protein, 9 aa, Homo Sapiens
FPTIKIFGS

SEQ ID NO: 123824 - protein, 9 aa, Homo Sapiens
FPTLKFFPA

SEQ ID NO: 123825 - protein, 9 aa, Homo Sapiens
FPTLSPMVV

SEQ ID NO: 123826 - protein, 9 aa, Homo Sapiens
FPTPPSVEA

SEQ ID NO: 123827 - protein, 9 aa, Homo Sapiens
FPTTKIPNP

SEQ ID NO: 123828 - protein, 9 aa, Homo Sapiens
FPTVLDITA

SEQ ID NO: 123829 - protein, 9 aa, Homo Sapiens
FPVAMFWVS

SEQ ID NO: 123830 - protein, 9 aa, Homo Sapiens
FPVEFLIQV

SEQ ID NO: 123831 - protein, 9 aa, Homo Sapiens
FPVGKGLAA

SEQ ID NO: 123832 - protein, 9 aa, Homo Sapiens
FPVGVFVVA

SEQ ID NO: 123833 - protein, 9 aa, Homo Sapiens
FPVHGFPTL

SEQ ID NO: 123834 - protein, 9 aa, Homo Sapiens
FPVIPLLPT

SEQ ID NO: 123835 - protein, 9 aa, Homo Sapiens
FPVLLSDTA

SEQ ID NO: 123836 - protein, 9 aa, Homo Sapiens
FPVPVTVRA

SEQ ID NO: 123837 - protein, 9 aa, Homo Sapiens
FPVQGVHTV

SEQ ID NO: 123838 - protein, 9 aa, Homo Sapiens
FPVQTITTV

SEQ ID NO: 123839 - protein, 9 aa, Homo Sapiens
FPVRLLVAA

SEQ ID NO: 123840 - protein, 9 aa, Homo Sapiens
FPVSIPAVL

SEQ ID NO: 123841 - protein, 9 aa, Homo Sapiens
FPVSWDNEV

SEQ ID NO: 123842 - protein, 9 aa, Homo Sapiens
FPWINTEGV

SEQ ID NO: 123843 - protein, 9 aa, Homo Sapiens
FPWNKNVEV

SEQ ID NO: 123844 - protein, 9 aa, Homo Sapiens
FPWPQPLST

SEQ ID NO: 123845 - protein, 9 aa, Homo Sapiens
FPWQPKTGA

SEQ ID NO: 123846 - protein, 9 aa, Homo Sapiens
FPYAFKEVI

SEQ ID NO: 123847 - protein, 9 aa, Homo Sapiens
FPYAHRFPP

SEQ ID NO: 123848 - protein, 9 aa, Homo Sapiens
FPYEPFLNA

SEQ ID NO: 123849 - protein, 9 aa, Homo Sapiens
FPYGGVLAG

SEQ ID NO: 123850 - protein, 9 aa, Homo Sapiens
FPYGLFELV

SEQ ID NO: 123851 - protein, 9 aa, Homo Sapiens
FPYGSFPYV

SEQ ID NO: 123852 - protein, 9 aa, Homo Sapiens
FPYMTHPSV

SEQ ID NO: 123853 - protein, 9 aa, Homo Sapiens
FPYPVGVHA

SEQ ID NO: 123854 - protein, 9 aa, Homo Sapiens
FPYSLLIFV

SEQ ID NO: 123855 - protein, 9 aa, Homo Sapiens
FPYVLLRNA

SEQ ID NO: 123856 - protein, 9 aa, Homo Sapiens
FPYYPSPGV

SEQ ID NO: 123857 - protein, 9 aa, Homo Sapiens
FQRPPLIAA

SEQ ID NO: 123858 - protein, 9 aa, Homo Sapiens
FVADGIFKA

SEQ ID NO: 123859 - protein, 9 aa, Homo Sapiens
FVEILIPVA

SEQ ID NO: 123860 - protein, 9 aa, Homo Sapiens
FVFSFPVSV

SEQ ID NO: 123861 - protein, 9 aa, Homo Sapiens
FVIRNIVEA

SEQ ID NO: 123862 - protein, 9 aa, Homo Sapiens
FVNDIFERI

SEQ ID NO: 123863 - protein, 9 aa, Homo Sapiens
FVRDMIREV

SEQ ID NO: 123864 - protein, 9 aa, Homo Sapiens
FVSPVSVAA

SEQ ID NO: 123865 - protein, 9 aa, Homo Sapiens
HAFWGGSVV

SEQ ID NO: 123866 - protein, 9 aa, Homo Sapiens
HARDFTVSA

SEQ ID NO: 123867 - protein, 9 aa, Homo Sapiens
HATLLFNTA

SEQ ID NO: 123868 - protein, 9 aa, Homo Sapiens
HPAAFPLPV

SEQ ID NO: 123869 - protein, 9 aa, Homo Sapiens
HPADSVVSV

SEQ ID NO: 123870 - protein, 9 aa, Homo Sapiens
HPASLEFQA

SEQ ID NO: 123871 - protein, 9 aa, Homo Sapiens
HPASVIFTV

SEQ ID NO: 123872 - protein, 9 aa, Homo Sapiens
HPDYAILAA

SEQ ID NO: 123873 - protein, 9 aa, Homo Sapiens
HPEEFYNLV

SEQ ID NO: 123874 - protein, 9 aa, Homo Sapiens
HPFGAMNIV

SEQ ID NO: 123875 - protein, 9 aa, Homo Sapiens
HPHPFLNSV

SEQ ID NO: 123876 - protein, 9 aa, Homo Sapiens
HPLNIVPPP

SEQ ID NO: 123877 - protein, 9 aa, Homo Sapiens
HPLPIWTPA

SEQ ID NO: 123878 - protein, 9 aa, Homo Sapiens
HPLYQSWVI

SEQ ID NO: 123879 - protein, 9 aa, Homo Sapiens
HPNLNLFAA

SEQ ID NO: 123880 - protein, 9 aa, Homo Sapiens
HPTWALKEA

SEQ ID NO: 123881 - protein, 9 aa, Homo Sapiens
HPVAKILHA

SEQ ID NO: 123882 - protein, 9 aa, Homo Sapiens
HPVDNVIAV

SEQ ID NO: 123883 - protein, 9 aa, Homo Sapiens
HPVEIFYTP

SEQ ID NO: 123884 - protein, 9 aa, Homo Sapiens
HPVHPFLAV

SEQ ID NO: 123885 - protein, 9 aa, Homo Sapiens
HPVLLQPVA

SEQ ID NO: 123886 - protein, 9 aa, Homo Sapiens
HPWEVIVGT

SEQ ID NO: 123887 - protein, 9 aa, Homo Sapiens
HPWLFIEEA

SEQ ID NO: 123888 - protein, 9 aa, Homo Sapiens
HPWLPLMQA

SEQ ID NO: 123889 - protein, 9 aa, Homo Sapiens
HPYFYAPEL

SEQ ID NO: 123890 - protein, 9 aa, Homo Sapiens
HPYLFPVAA

SEQ ID NO: 123891 - protein, 9 aa, Homo Sapiens
HPYLPINSA

SEQ ID NO: 123892 - protein, 9 aa, Homo Sapiens
HPYRLILTV

SEQ ID NO: 123893 - protein, 9 aa, Homo Sapiens
HSMRYFYTA

SEQ ID NO: 123894 - protein, 9 aa, Homo Sapiens
HVGDFVWVA

SEQ ID NO: 123895 - protein, 9 aa, Homo Sapiens
HVYDGKFLA

SEQ ID NO: 123896 - protein, 9 aa, Homo Sapiens
IALWQFLSA

SEQ ID NO: 123897 - protein, 9 aa, Homo Sapiens
IASGIYLLA

SEQ ID NO: 123898 - protein, 9 aa, Homo Sapiens
IPAALPVAA

SEQ ID NO: 123899 - protein, 9 aa, Homo Sapiens
IPFDIFITA

SEQ ID NO: 123900 - protein, 9 aa, Homo Sapiens
IPFDLPSAA

SEQ ID NO: 123901 - protein, 9 aa, Homo Sapiens
IPFFSIPVV

SEQ ID NO: 123902 - protein, 9 aa, Homo Sapiens
IPFFSVPVA

SEQ ID NO: 123903 - protein, 9 aa, Homo Sapiens
IPFGIFSRA

SEQ ID NO: 123904 - protein, 9 aa, Homo Sapiens
IPFGITEEA

SEQ ID NO: 123905 - protein, 9 aa, Homo Sapiens
IPFGTMVAV

SEQ ID NO: 123906 - protein, 9 aa, Homo Sapiens
IPFIPQNPA

SEQ ID NO: 123907 - protein, 9 aa, Homo Sapiens
IPFSKPVKV

SEQ ID NO: 123908 - protein, 9 aa, Homo Sapiens
IPFWRNTAV

SEQ ID NO: 123909 - protein, 9 aa, Homo Sapiens
IPFYGILGA

SEQ ID NO: 123910 - protein, 9 aa, Homo Sapiens
IPFYLQPHA

SEQ ID NO: 123911 - protein, 9 aa, Homo Sapiens
IPFYLQYLA

SEQ ID NO: 123912 - protein, 9 aa, Homo Sapiens
IPHLLGDVV

SEQ ID NO: 123913 - protein, 9 aa, Homo Sapiens
IPHLVTHDA

SEQ ID NO: 123914 - protein, 9 aa, Homo Sapiens
IPHPLIMGV

SEQ ID NO: 123915 - protein, 9 aa, Homo Sapiens
IPIEVIPMA

SEQ ID NO: 123916 - protein, 9 aa, Homo Sapiens
IPIPTLPSV

SEQ ID NO: 123917 - protein, 9 aa, Homo Sapiens
IPISNILMV

SEQ ID NO: 123918 - protein, 9 aa, Homo Sapiens
IPISPISPA

SEQ ID NO: 123919 - protein, 9 aa, Homo Sapiens
IPITVLQPA

SEQ ID NO: 123920 - protein, 9 aa, Homo Sapiens
IPIVGIVAG

SEQ ID NO: 123921 - protein, 9 aa, Homo Sapiens
IPIWLYWRI

SEQ ID NO: 123922 - protein, 9 aa, Homo Sapiens
IPKILPWHA

SEQ ID NO: 123923 - protein, 9 aa, Homo Sapiens
IPLDKRLAA

SEQ ID NO: 123924 - protein, 9 aa, Homo Sapiens
IPLGFGVAA

SEQ ID NO: 123925 - protein, 9 aa, Homo Sapiens
IPLKEMPAV

SEQ ID NO: 123926 - protein, 9 aa, Homo Sapiens
IPLPDMPHA

SEQ ID NO: 123927 - protein, 9 aa, Homo Sapiens
IPLPPPPPP

SEQ ID NO: 123928 - protein, 9 aa, Homo Sapiens
IPLQDLVAA

SEQ ID NO: 123929 - protein, 9 aa, Homo Sapiens
IPMELVNEV

SEQ ID NO: 123930 - protein, 9 aa, Homo Sapiens
IPNISYITA

SEQ ID NO: 123931 - protein, 9 aa, Homo Sapiens
IPPPVPPSA

SEQ ID NO: 123932 - protein, 9 aa, Homo Sapiens
IPQQVFQEV

SEQ ID NO: 123933 - protein, 9 aa, Homo Sapiens
IPRSFMMEV

SEQ ID NO: 123934 - protein, 9 aa, Homo Sapiens
IPRVPSLSV

SEQ ID NO: 123935 - protein, 9 aa, Homo Sapiens
IPVDFKYIA

SEQ ID NO: 123936 - protein, 9 aa, Homo Sapiens
IPVYSPLSA

SEQ ID NO: 123937 - protein, 9 aa, Homo Sapiens
IPWSIPLEA

SEQ ID NO: 123938 - protein, 9 aa, Homo Sapiens
IPYAVLLEA

SEQ ID NO: 123939 - protein, 9 aa, Homo Sapiens
IPYGMRFIA

SEQ ID NO: 123940 - protein, 9 aa, Homo Sapiens
IPYHIVNIV

SEQ ID NO: 123941 - protein, 9 aa, Homo Sapiens
ISLLQREAA

SEQ ID NO: 123942 - protein, 9 aa, Homo Sapiens
ITIHLPSPV

SEQ ID NO: 123943 - protein, 9 aa, Homo Sapiens
KAINVFVSA

SEQ ID NO: 123944 - protein, 9 aa, Homo Sapiens
KPANVFITA

SEQ ID NO: 123945 - protein, 9 aa, Homo Sapiens
KPFKEFVEA

SEQ ID NO: 123946 - protein, 9 aa, Homo Sapiens
KPFLLPVEA

SEQ ID NO: 123947 - protein, 9 aa, Homo Sapiens
KPLPPIQVA

SEQ ID NO: 123948 - protein, 9 aa, Homo Sapiens
KPMEGWIAV

SEQ ID NO: 123949 - protein, 9 aa, Homo Sapiens
KPYNVYITV

SEQ ID NO: 123950 - protein, 9 aa, Homo Sapiens
LAAARLAAA

SEQ ID NO: 123951 - protein, 9 aa, Homo Sapiens
LAADIFAIA

SEQ ID NO: 123952 - protein, 9 aa, Homo Sapiens
LAATPHSLP

SEQ ID NO: 123953 - protein, 9 aa, Homo Sapiens
LAFEGHLAA

SEQ ID NO: 123954 - protein, 9 aa, Homo Sapiens
LAFGQGLAA

SEQ ID NO: 123955 - protein, 9 aa, Homo Sapiens
LAHAAFSAA

SEQ ID NO: 123956 - protein, 9 aa, Homo Sapiens
LALAPPPEA

SEQ ID NO: 123957 - protein, 9 aa, Homo Sapiens
LALLPALAA

SEQ ID NO: 123958 - protein, 9 aa, Homo Sapiens
LAMVPSHAV

SEQ ID NO: 123959 - protein, 9 aa, Homo Sapiens
LFKPPQPPA

SEQ ID NO: 123960 - protein, 9 aa, Homo Sapiens
LGMLQAVAA

SEQ ID NO: 123961 - protein, 9 aa, Homo Sapiens
LPAAKGFVA

SEQ ID NO: 123962 - protein, 9 aa, Homo Sapiens
LPAAMPITA

SEQ ID NO: 123963 - protein, 9 aa, Homo Sapiens
LPAEYLLSA

SEQ ID NO: 123964 - protein, 9 aa, Homo Sapiens
LPAFPLFSA

SEQ ID NO: 123965 - protein, 9 aa, Homo Sapiens
LPAGILPMV

SEQ ID NO: 123966 - protein, 9 aa, Homo Sapiens
LPALGFTGA

SEQ ID NO: 123967 - protein, 9 aa, Homo Sapiens
LPAPPAVSA

SEQ ID NO: 123968 - protein, 9 aa, Homo Sapiens
LPAPPHIDV

SEQ ID NO: 123969 - protein, 9 aa, Homo Sapiens
LPAQPMISV

SEQ ID NO: 123970 - protein, 9 aa, Homo Sapiens
LPAYLLVSA

SEQ ID NO: 123971 - protein, 9 aa, Homo Sapiens
LPDDVAISA

SEQ ID NO: 123972 - protein, 9 aa, Homo Sapiens
LPDLRPWTS

SEQ ID NO: 123973 - protein, 9 aa, Homo Sapiens
LPEEIREPA

SEQ ID NO: 123974 - protein, 9 aa, Homo Sapiens
LPELLGLEA

SEQ ID NO: 123975 - protein, 9 aa, Homo Sapiens
LPFDRFSEV

SEQ ID NO: 123976 - protein, 9 aa, Homo Sapiens
LPFFFGNIT

SEQ ID NO: 123977 - protein, 9 aa, Homo Sapiens
LPFGGVPTV

SEQ ID NO: 123978 - protein, 9 aa, Homo Sapiens
LPFHFPGSF

SEQ ID NO: 123979 - protein, 9 aa, Homo Sapiens
LPFLSTEQA

SEQ ID NO: 123980 - protein, 9 aa, Homo Sapiens
LPFPGPFPA

SEQ ID NO: 123981 - protein, 9 aa, Homo Sapiens
LPFPLPLFA

SEQ ID NO: 123982 - protein, 9 aa, Homo Sapiens
LPFQTLPPP

SEQ ID NO: 123983 - protein, 9 aa, Homo Sapiens
LPFRVIPLV

SEQ ID NO: 123984 - protein, 9 aa, Homo Sapiens
LPFSSMPTA

SEQ ID NO: 123985 - protein, 9 aa, Homo Sapiens
LPFVPPPAV

SEQ ID NO: 123986 - protein, 9 aa, Homo Sapiens
LPFWAYSAA

SEQ ID NO: 123987 - protein, 9 aa, Homo Sapiens
LPGELFHVV

SEQ ID NO: 123988 - protein, 9 aa, Homo Sapiens
LPGLPLVTA

SEQ ID NO: 123989 - protein, 9 aa, Homo Sapiens
LPHDLAVQA

SEQ ID NO: 123990 - protein, 9 aa, Homo Sapiens
LPHEILEMT

SEQ ID NO: 123991 - protein, 9 aa, Homo Sapiens
LPHELGDFA

SEQ ID NO: 123992 - protein, 9 aa, Homo Sapiens
LPHGFTNMA

SEQ ID NO: 123993 - protein, 9 aa, Homo Sapiens
LPHHILADV

SEQ ID NO: 123994 - protein, 9 aa, Homo Sapiens
LPHHRVIEV

SEQ ID NO: 123995 - protein, 9 aa, Homo Sapiens
LPHPNRIQA

SEQ ID NO: 123996 - protein, 9 aa, Homo Sapiens
LPHPYAIAV

SEQ ID NO: 123997 - protein, 9 aa, Homo Sapiens
LPHSQLPQA

SEQ ID NO: 123998 - protein, 9 aa, Homo Sapiens
LPHVPLGVI

SEQ ID NO: 123999 - protein, 9 aa, Homo Sapiens
LPHWLSWLP

SEQ ID NO: 124000 - protein, 9 aa, Homo Sapiens
LPIEIKAVP

SEQ ID NO: 124001 - protein, 9 aa, Homo Sapiens
LPIGTLPLA

SEQ ID NO: 124002 - protein, 9 aa, Homo Sapiens
LPIVPQLQV

SEQ ID NO: 124003 - protein, 9 aa, Homo Sapiens
LPKPPKPVS

SEQ ID NO: 124004 - protein, 9 aa, Homo Sapiens
LPLHPSWEA

SEQ ID NO: 124005 - protein, 9 aa, Homo Sapiens
LPLKPSLVA

SEQ ID NO: 124006 - protein, 9 aa, Homo Sapiens
LPLLARPAA

SEQ ID NO: 124007 - protein, 9 aa, Homo Sapiens
LPLLGLHEA

SEQ ID NO: 124008 - protein, 9 aa, Homo Sapiens
LPLPSVPAP

SEQ ID NO: 124009 - protein, 9 aa, Homo Sapiens
LPLPYGFSA

SEQ ID NO: 124010 - protein, 9 aa, Homo Sapiens
LPLPYGVSA

SEQ ID NO: 124011 - protein, 9 aa, Homo Sapiens
LPLQWVDIA

SEQ ID NO: 124012 - protein, 9 aa, Homo Sapiens
LPLRPFPAA

SEQ ID NO: 124013 - protein, 9 aa, Homo Sapiens
LPLSLLKTA

SEQ ID NO: 124014 - protein, 9 aa, Homo Sapiens
LPLTKITSA

SEQ ID NO: 124015 - protein, 9 aa, Homo Sapiens
LPLWVDKEA

SEQ ID NO: 124016 - protein, 9 aa, Homo Sapiens
LPLYGLLQA

SEQ ID NO: 124017 - protein, 9 aa, Homo Sapiens
LPMDTFTVA

SEQ ID NO: 124018 - protein, 9 aa, Homo Sapiens
LPNAVITRI

SEQ ID NO: 124019 - protein, 9 aa, Homo Sapiens
LPNFLPYNV

SEQ ID NO: 124020 - protein, 9 aa, Homo Sapiens
LPNGKPVSV

SEQ ID NO: 124021 - protein, 9 aa, Homo Sapiens
LPNHVVNVV

SEQ ID NO: 124022 - protein, 9 aa, Homo Sapiens
LPNIPVQTI

SEQ ID NO: 124023 - protein, 9 aa, Homo Sapiens
LPNIQKVEV

SEQ ID NO: 124024 - protein, 9 aa, Homo Sapiens
LPNLQTVTV

SEQ ID NO: 124025 - protein, 9 aa, Homo Sapiens
LPNLTPLSV

SEQ ID NO: 124026 - protein, 9 aa, Homo Sapiens
LPNSTIYVV

SEQ ID NO: 124027 - protein, 9 aa, Homo Sapiens
LPPEPVLNA

SEQ ID NO: 124028 - protein, 9 aa, Homo Sapiens
LPPEVYAVV

SEQ ID NO: 124029 - protein, 9 aa, Homo Sapiens
LPPLPVPGT

SEQ ID NO: 124030 - protein, 9 aa, Homo Sapiens
LPPMPPPPP

SEQ ID NO: 124031 - protein, 9 aa, Homo Sapiens
LPQELMAEA

SEQ ID NO: 124032 - protein, 9 aa, Homo Sapiens
LPQEVSIAA

SEQ ID NO: 124033 - protein, 9 aa, Homo Sapiens
LPQPAFIPA

SEQ ID NO: 124034 - protein, 9 aa, Homo Sapiens
LPQPVPLSV

SEQ ID NO: 124035 - protein, 9 aa, Homo Sapiens
LPQQILPTA

SEQ ID NO: 124036 - protein, 9 aa, Homo Sapiens
LPQSPIVRA

SEQ ID NO: 124037 - protein, 9 aa, Homo Sapiens
LPQVYPFAA

SEQ ID NO: 124038 - protein, 9 aa, Homo Sapiens
LPRDVLTRA

SEQ ID NO: 124039 - protein, 9 aa, Homo Sapiens
LPRLIDMSA

SEQ ID NO: 124040 - protein, 9 aa, Homo Sapiens
LPRNIYIVA

SEQ ID NO: 124041 - protein, 9 aa, Homo Sapiens
LPRPPMLLA

SEQ ID NO: 124042 - protein, 9 aa, Homo Sapiens
LPRPVPLVA

SEQ ID NO: 124043 - protein, 9 aa, Homo Sapiens
LPSDFTPAV

SEQ ID NO: 124044 - protein, 9 aa, Homo Sapiens
LPSDIAAEA

SEQ ID NO: 124045 - protein, 9 aa, Homo Sapiens
LPSLSPLSA

SEQ ID NO: 124046 - protein, 9 aa, Homo Sapiens
LPSPPAVAV

SEQ ID NO: 124047 - protein, 9 aa, Homo Sapiens
LPSRFIESA

SEQ ID NO: 124048 - protein, 9 aa, Homo Sapiens
LPSRVYWIA

SEQ ID NO: 124049 - protein, 9 aa, Homo Sapiens
LPTEAYISV

SEQ ID NO: 124050 - protein, 9 aa, Homo Sapiens
LPTKDLLSA

SEQ ID NO: 124051 - protein, 9 aa, Homo Sapiens
LPTKVFWIA

SEQ ID NO: 124052 - protein, 9 aa, Homo Sapiens
LPTTMGVVA

SEQ ID NO: 124053 - protein, 9 aa, Homo Sapiens
LPVAFKVVA

SEQ ID NO: 124054 - protein, 9 aa, Homo Sapiens
LPVDAVISV

SEQ ID NO: 124055 - protein, 9 aa, Homo Sapiens
LPVDVVVNA

SEQ ID NO: 124056 - protein, 9 aa, Homo Sapiens
LPVEFTIDA

SEQ ID NO: 124057 - protein, 9 aa, Homo Sapiens
LPVKLIFVA

SEQ ID NO: 124058 - protein, 9 aa, Homo Sapiens
LPVLPVAAA

SEQ ID NO: 124059 - protein, 9 aa, Homo Sapiens
LPVLPWSEV

SEQ ID NO: 124060 - protein, 9 aa, Homo Sapiens
LPVSLPTHA

SEQ ID NO: 124061 - protein, 9 aa, Homo Sapiens
LPVSNVVSV

SEQ ID NO: 124062 - protein, 9 aa, Homo Sapiens
LPVSVFESV

SEQ ID NO: 124063 - protein, 9 aa, Homo Sapiens
LPVWLENHT

SEQ ID NO: 124064 - protein, 9 aa, Homo Sapiens
LPWISILTV

SEQ ID NO: 124065 - protein, 9 aa, Homo Sapiens
LPWQGLKAA

SEQ ID NO: 124066 - protein, 9 aa, Homo Sapiens
LPWSNPLKV

SEQ ID NO: 124067 - protein, 9 aa, Homo Sapiens
LPWWGAIAA

SEQ ID NO: 124068 - protein, 9 aa, Homo Sapiens
LPYAITIVA

SEQ ID NO: 124069 - protein, 9 aa, Homo Sapiens
LPYDIPHRA

SEQ ID NO: 124070 - protein, 9 aa, Homo Sapiens
LPYHHVIHA

SEQ ID NO: 124071 - protein, 9 aa, Homo Sapiens
LPYKWVVEA

SEQ ID NO: 124072 - protein, 9 aa, Homo Sapiens
LPYLAAVYA

SEQ ID NO: 124073 - protein, 9 aa, Homo Sapiens
LPYLGVHGA

SEQ ID NO: 124074 - protein, 9 aa, Homo Sapiens
LPYNGVVLA

SEQ ID NO: 124075 - protein, 9 aa, Homo Sapiens
LPYNPMMVV

SEQ ID NO: 124076 - protein, 9 aa, Homo Sapiens
LPYSDFPRP

SEQ ID NO: 124077 - protein, 9 aa, Homo Sapiens
LPYSFIIGV

SEQ ID NO: 124078 - protein, 9 aa, Homo Sapiens
LSHEVIVSA

SEQ ID NO: 124079 - protein, 9 aa, Homo Sapiens
LVAPPLPAA

SEQ ID NO: 124080 - protein, 9 aa, Homo Sapiens
LVFYGFLAA

SEQ ID NO: 124081 - protein, 9 aa, Homo Sapiens
LVGKNFEQV

SEQ ID NO: 124082 - protein, 9 aa, Homo Sapiens
LVKDVFISA

SEQ ID NO: 124083 - protein, 9 aa, Homo Sapiens
MAAVPVAAA

SEQ ID NO: 124084 - protein, 9 aa, Homo Sapiens
MAFWGWRAA

SEQ ID NO: 124085 - protein, 9 aa, Homo Sapiens
MAILNGIVA

SEQ ID NO: 124086 - protein, 9 aa, Homo Sapiens
MALGKFRAA

SEQ ID NO: 124087 - protein, 9 aa, Homo Sapiens
MALRYPMAV

SEQ ID NO: 124088 - protein, 9 aa, Homo Sapiens
MAPPTIPSA

SEQ ID NO: 124089 - protein, 9 aa, Homo Sapiens
MAVFVVLLA

SEQ ID NO: 124090 - protein, 9 aa, Homo Sapiens
MAVVIPEAA

SEQ ID NO: 124091 - protein, 9 aa, Homo Sapiens
MLRQIIGQA

SEQ ID NO: 124092 - protein, 9 aa, Homo Sapiens
MLYEKFSPA

SEQ ID NO: 124093 - protein, 9 aa, Homo Sapiens
MPAFPLPYA

SEQ ID NO: 124094 - protein, 9 aa, Homo Sapiens
MPAGSFITA

SEQ ID NO: 124095 - protein, 9 aa, Homo Sapiens
MPALAPPEV

SEQ ID NO: 124096 - protein, 9 aa, Homo Sapiens
MPALGWAVA

SEQ ID NO: 124097 - protein, 9 aa, Homo Sapiens
MPAQLFFKT

SEQ ID NO: 124098 - protein, 9 aa, Homo Sapiens
MPATLARAA

SEQ ID NO: 124099 - protein, 9 aa, Homo Sapiens
MPDGQFKDI

SEQ ID NO: 124100 - protein, 9 aa, Homo Sapiens
MPDLPHLLA

SEQ ID NO: 124101 - protein, 9 aa, Homo Sapiens
MPDSILLEA

SEQ ID NO: 124102 - protein, 9 aa, Homo Sapiens
MPDTPRLFA

SEQ ID NO: 124103 - protein, 9 aa, Homo Sapiens
MPEEKLVEA

SEQ ID NO: 124104 - protein, 9 aa, Homo Sapiens
MPETLGQVA

SEQ ID NO: 124105 - protein, 9 aa, Homo Sapiens
MPFGNVISA

SEQ ID NO: 124106 - protein, 9 aa, Homo Sapiens
MPFGNVVSA

SEQ ID NO: 124107 - protein, 9 aa, Homo Sapiens
MPFNLIPVI

SEQ ID NO: 124108 - protein, 9 aa, Homo Sapiens
MPFPELPRP

SEQ ID NO: 124109 - protein, 9 aa, Homo Sapiens
MPFPNIRSA

SEQ ID NO: 124110 - protein, 9 aa, Homo Sapiens
MPFPVNHGA

SEQ ID NO: 124111 - protein, 9 aa, Homo Sapiens
MPFSGDIRA

SEQ ID NO: 124112 - protein, 9 aa, Homo Sapiens
MPFSPKASV

SEQ ID NO: 124113 - protein, 9 aa, Homo Sapiens
MPFTEKIMA

SEQ ID NO: 124114 - protein, 9 aa, Homo Sapiens
MPFYNPAQL

SEQ ID NO: 124115 - protein, 9 aa, Homo Sapiens
MPGSVIPPP

SEQ ID NO: 124116 - protein, 9 aa, Homo Sapiens
MPHLSMQQV

SEQ ID NO: 124117 - protein, 9 aa, Homo Sapiens
MPILIDFHA

SEQ ID NO: 124118 - protein, 9 aa, Homo Sapiens
MPKDLIYIN

SEQ ID NO: 124119 - protein, 9 aa, Homo Sapiens
MPLLKSEVA

SEQ ID NO: 124120 - protein, 9 aa, Homo Sapiens
MPLSTIREV

SEQ ID NO: 124121 - protein, 9 aa, Homo Sapiens
MPMERQMSV

SEQ ID NO: 124122 - protein, 9 aa, Homo Sapiens
MPMNVADLI

SEQ ID NO: 124123 - protein, 9 aa, Homo Sapiens
MPNDEHWKA

SEQ ID NO: 124124 - protein, 9 aa, Homo Sapiens
MPNENIPEL

SEQ ID NO: 124125 - protein, 9 aa, Homo Sapiens
MPNLLQQAV

SEQ ID NO: 124126 - protein, 9 aa, Homo Sapiens
MPNPSLAQV

SEQ ID NO: 124127 - protein, 9 aa, Homo Sapiens
MPPMPVASV

SEQ ID NO: 124128 - protein, 9 aa, Homo Sapiens
MPPPVGMVA

SEQ ID NO: 124129 - protein, 9 aa, Homo Sapiens
MPQDLRSPA

SEQ ID NO: 124130 - protein, 9 aa, Homo Sapiens
MPQFLSTEA

SEQ ID NO: 124131 - protein, 9 aa, Homo Sapiens
MPQHIKITV

SEQ ID NO: 124132 - protein, 9 aa, Homo Sapiens
MPQIPVASV

SEQ ID NO: 124133 - protein, 9 aa, Homo Sapiens
MPQLNAIIA

SEQ ID NO: 124134 - protein, 9 aa, Homo Sapiens
MPQNPHIIA

SEQ ID NO: 124135 - protein, 9 aa, Homo Sapiens
MPQVPVFTV

SEQ ID NO: 124136 - protein, 9 aa, Homo Sapiens
MPRDILIVV

SEQ ID NO: 124137 - protein, 9 aa, Homo Sapiens
MPRIYELAA

SEQ ID NO: 124138 - protein, 9 aa, Homo Sapiens
MPRWFTVQA

SEQ ID NO: 124139 - protein, 9 aa, Homo Sapiens
MPRWYFLLA

SEQ ID NO: 124140 - protein, 9 aa, Homo Sapiens
MPSDVLEVT

SEQ ID NO: 124141 - protein, 9 aa, Homo Sapiens
MPSFLSIEA

SEQ ID NO: 124142 - protein, 9 aa, Homo Sapiens
MPSIPVLNA

SEQ ID NO: 124143 - protein, 9 aa, Homo Sapiens
MPSSVPLRA

SEQ ID NO: 124144 - protein, 9 aa, Homo Sapiens
MPTDVLEVT

SEQ ID NO: 124145 - protein, 9 aa, Homo Sapiens
MPTLLLWLV

SEQ ID NO: 124146 - protein, 9 aa, Homo Sapiens
MPTLPPPSV

SEQ ID NO: 124147 - protein, 9 aa, Homo Sapiens
MPTPLVPSV

SEQ ID NO: 124148 - protein, 9 aa, Homo Sapiens
MPVDLELVA

SEQ ID NO: 124149 - protein, 9 aa, Homo Sapiens
MPVERILEA

SEQ ID NO: 124150 - protein, 9 aa, Homo Sapiens
MPVGLIAGA

SEQ ID NO: 124151 - protein, 9 aa, Homo Sapiens
MPVIPMNTI

SEQ ID NO: 124152 - protein, 9 aa, Homo Sapiens
MPVPAQPKA

SEQ ID NO: 124153 - protein, 9 aa, Homo Sapiens
MPWFKGWKV

SEQ ID NO: 124154 - protein, 9 aa, Homo Sapiens
MPWYQRRIA

SEQ ID NO: 124155 - protein, 9 aa, Homo Sapiens
MPYFLLTQA

SEQ ID NO: 124156 - protein, 9 aa, Homo Sapiens
MPYFQPSAI

SEQ ID NO: 124157 - protein, 9 aa, Homo Sapiens
MPYGSLYNV

SEQ ID NO: 124158 - protein, 9 aa, Homo Sapiens
MPYLIGVHA

SEQ ID NO: 124159 - protein, 9 aa, Homo Sapiens
MSVHLPFAV

SEQ ID NO: 124160 - protein, 9 aa, Homo Sapiens
MTVPPPPAA

SEQ ID NO: 124161 - protein, 9 aa, Homo Sapiens
MVFPKPVTA

SEQ ID NO: 124162 - protein, 9 aa, Homo Sapiens
MVMLLPTSA

SEQ ID NO: 124163 - protein, 9 aa, Homo Sapiens
NAFNRFLHA

SEQ ID NO: 124164 - protein, 9 aa, Homo Sapiens
NATWLVNSA

SEQ ID NO: 124165 - protein, 9 aa, Homo Sapiens
NIFWFFREA

SEQ ID NO: 124166 - protein, 9 aa, Homo Sapiens
NPAPPIDAV

SEQ ID NO: 124167 - protein, 9 aa, Homo Sapiens
NPFLFALEA

SEQ ID NO: 124168 - protein, 9 aa, Homo Sapiens
NPFTGFFYA

SEQ ID NO: 124169 - protein, 9 aa, Homo Sapiens
NPISSWFTA

SEQ ID NO: 124170 - protein, 9 aa, Homo Sapiens
NPLFIPVAV

SEQ ID NO: 124171 - protein, 9 aa, Homo Sapiens
NPLQVLVNA

SEQ ID NO: 124172 - protein, 9 aa, Homo Sapiens
NPVDFLSKA

SEQ ID NO: 124173 - protein, 9 aa, Homo Sapiens
NPVTGLLSA

SEQ ID NO: 124174 - protein, 9 aa, Homo Sapiens
NPYATLPRA

SEQ ID NO: 124175 - protein, 9 aa, Homo Sapiens
NPYSEFILA

SEQ ID NO: 124176 - protein, 9 aa, Homo Sapiens
NPYTIFHQA

SEQ ID NO: 124177 - protein, 9 aa, Homo Sapiens
PGLAILLSK

SEQ ID NO: 124178 - protein, 9 aa, Homo Sapiens
PITPRAAPL

SEQ ID NO: 124179 - protein, 9 aa, Homo Sapiens
PLPSPFLSA

SEQ ID NO: 124180 - protein, 9 aa, Homo Sapiens
QAVLQAVTA

SEQ ID NO: 124181 - protein, 9 aa, Homo Sapiens
QGFLSPLAA

SEQ ID NO: 124182 - protein, 9 aa, Homo Sapiens
QPFAVPHSA

SEQ ID NO: 124183 - protein, 9 aa, Homo Sapiens
QPFESYITA

SEQ ID NO: 124184 - protein, 9 aa, Homo Sapiens
QPFYPLPAA

SEQ ID NO: 124185 - protein, 9 aa, Homo Sapiens
QPHHIGVAV

SEQ ID NO: 124186 - protein, 9 aa, Homo Sapiens
QPILLELEA

SEQ ID NO: 124187 - protein, 9 aa, Homo Sapiens
QPLLKHWEA

SEQ ID NO: 124188 - protein, 9 aa, Homo Sapiens
QPLLPYSAV

SEQ ID NO: 124189 - protein, 9 aa, Homo Sapiens
QPLPVILHV

SEQ ID NO: 124190 - protein, 9 aa, Homo Sapiens
QPYMPTVSA

SEQ ID NO: 124191 - protein, 9 aa, Homo Sapiens
QSVLQRIAA

SEQ ID NO: 124192 - protein, 9 aa, Homo Sapiens
QVRDVIIAA

SEQ ID NO: 124193 - protein, 9 aa, Homo Sapiens
RPFIGMSSA

SEQ ID NO: 124194 - protein, 9 aa, Homo Sapiens
RPNDIMAEV

SEQ ID NO: 124195 - protein, 9 aa, Homo Sapiens
RPRAPIIAV

SEQ ID NO: 124196 - protein, 9 aa, Homo Sapiens
RPRPPVLSV

SEQ ID NO: 124197 - protein, 9 aa, Homo Sapiens
SAFAYAIAA

SEQ ID NO: 124198 - protein, 9 aa, Homo Sapiens
SAFEFLSSA

SEQ ID NO: 124199 - protein, 9 aa, Homo Sapiens
SAFGYFITA

SEQ ID NO: 124200 - protein, 9 aa, Homo Sapiens
SAFPFPVTV

SEQ ID NO: 124201 - protein, 9 aa, Homo Sapiens
SALALRWEA

SEQ ID NO: 124202 - protein, 9 aa, Homo Sapiens
SALEAMFTA

SEQ ID NO: 124203 - protein, 9 aa, Homo Sapiens
SALFQHITA

SEQ ID NO: 124204 - protein, 9 aa, Homo Sapiens
SAPVNFISA

SEQ ID NO: 124205 - protein, 9 aa, Homo Sapiens
SNRVIELPL

SEQ ID NO: 124206 - protein, 9 aa, Homo Sapiens
SPAAPVITA

SEQ ID NO: 124207 - protein, 9 aa, Homo Sapiens
SPFFPLVSA

SEQ ID NO: 124208 - protein, 9 aa, Homo Sapiens
SPFGSITSA

SEQ ID NO: 124209 - protein, 9 aa, Homo Sapiens
SPFGTITSA

SEQ ID NO: 124210 - protein, 9 aa, Homo Sapiens
SPFHFQPSA

SEQ ID NO: 124211 - protein, 9 aa, Homo Sapiens
SPFLSPLEA

SEQ ID NO: 124212 - protein, 9 aa, Homo Sapiens
SPFPDIPKV

SEQ ID NO: 124213 - protein, 9 aa, Homo Sapiens
SPFSSFISV

SEQ ID NO: 124214 - protein, 9 aa, Homo Sapiens
SPIEFLENA

SEQ ID NO: 124215 - protein, 9 aa, Homo Sapiens
SPIENIQRV

SEQ ID NO: 124216 - protein, 9 aa, Homo Sapiens
SPKQILDPA

SEQ ID NO: 124217 - protein, 9 aa, Homo Sapiens
SPLFSQHTA

SEQ ID NO: 124218 - protein, 9 aa, Homo Sapiens
SPLHLAVEA

SEQ ID NO: 124219 - protein, 9 aa, Homo Sapiens
SPLKHFVTA

SEQ ID NO: 124220 - protein, 9 aa, Homo Sapiens
SPLLLFLPP

SEQ ID NO: 124221 - protein, 9 aa, Homo Sapiens
SPLYLAHEV

SEQ ID NO: 124222 - protein, 9 aa, Homo Sapiens
SPMLPLPVA

SEQ ID NO: 124223 - protein, 9 aa, Homo Sapiens
SPREPGYKA

SEQ ID NO: 124224 - protein, 9 aa, Homo Sapiens
SPRPPLISV

SEQ ID NO: 124225 - protein, 9 aa, Homo Sapiens
SPVLPLTSA

SEQ ID NO: 124226 - protein, 9 aa, Homo Sapiens
SPVVPQISA

SEQ ID NO: 124227 - protein, 9 aa, Homo Sapiens
SPYAAMLAA

SEQ ID NO: 124228 - protein, 9 aa, Homo Sapiens
SPYDGLFIA

SEQ ID NO: 124229 - protein, 9 aa, Homo Sapiens
SPYHGFTIV

SEQ ID NO: 124230 - protein, 9 aa, Homo Sapiens
SPYYFLTSA

SEQ ID NO: 124231 - protein, 9 aa, Homo Sapiens
SSEFQIPTA

SEQ ID NO: 124232 - protein, 9 aa, Homo Sapiens
SVTLQAIAA

SEQ ID NO: 124233 - protein, 9 aa, Homo Sapiens
TAFLVQISA

SEQ ID NO: 124234 - protein, 9 aa, Homo Sapiens
TIPYQPMPA

SEQ ID NO: 124235 - protein, 9 aa, Homo Sapiens
TIQEILIPA

SEQ ID NO: 124236 - protein, 9 aa, Homo Sapiens
TPAHVLPSA

SEQ ID NO: 124237 - protein, 9 aa, Homo Sapiens
TPFYFKEPS

SEQ ID NO: 124238 - protein, 9 aa, Homo Sapiens
TPHFSGLAA

SEQ ID NO: 124239 - protein, 9 aa, Homo Sapiens
TPIIIIPAA

SEQ ID NO: 124240 - protein, 9 aa, Homo Sapiens
TPLLLPLAA

SEQ ID NO: 124241 - protein, 9 aa, Homo Sapiens
TPLLMQALP

SEQ ID NO: 124242 - protein, 9 aa, Homo Sapiens
TPLPAIVPA

SEQ ID NO: 124243 - protein, 9 aa, Homo Sapiens
TPMPPISSV

SEQ ID NO: 124244 - protein, 9 aa, Homo Sapiens
TPMSVLQQA

SEQ ID NO: 124245 - protein, 9 aa, Homo Sapiens
TPQSIFIFA

SEQ ID NO: 124246 - protein, 9 aa, Homo Sapiens
TPRPVIVEP

SEQ ID NO: 124247 - protein, 9 aa, Homo Sapiens
TPSIPVLTA

SEQ ID NO: 124248 - protein, 9 aa, Homo Sapiens
TPTEFFFHA

SEQ ID NO: 124249 - protein, 9 aa, Homo Sapiens
TPWFKIIAA

SEQ ID NO: 124250 - protein, 9 aa, Homo Sapiens
TPWIPVIAA

SEQ ID NO: 124251 - protein, 9 aa, Homo Sapiens
TPYNYPVPV

SEQ ID NO: 124252 - protein, 9 aa, Homo Sapiens
TVYEGFISA

SEQ ID NO: 124253 - protein, 9 aa, Homo Sapiens
VAVLQEVAA

SEQ ID NO: 124254 - protein, 9 aa, Homo Sapiens
VIRNIVEAA

SEQ ID NO: 124255 - protein, 9 aa, Homo Sapiens
VLPAAGLSA

SEQ ID NO: 124256 - protein, 9 aa, Homo Sapiens
VPAPFFLPA

SEQ ID NO: 124257 - protein, 9 aa, Homo Sapiens
VPFIVPLSV

SEQ ID NO: 124258 - protein, 9 aa, Homo Sapiens
VPFLNPYTV

SEQ ID NO: 124259 - protein, 9 aa, Homo Sapiens
VPFPSIQAV

SEQ ID NO: 124260 - protein, 9 aa, Homo Sapiens
VPFPTPLEA

SEQ ID NO: 124261 - protein, 9 aa, Homo Sapiens
VPHQPFSQA

SEQ ID NO: 124262 - protein, 9 aa, Homo Sapiens
VPIMPYPPA

SEQ ID NO: 124263 - protein, 9 aa, Homo Sapiens
VPITAVIAA

SEQ ID NO: 124264 - protein, 9 aa, Homo Sapiens
VPKPLFPVA

SEQ ID NO: 124265 - protein, 9 aa, Homo Sapiens
VPLAIVNKA

SEQ ID NO: 124266 - protein, 9 aa, Homo Sapiens
VPLFVQHDA

SEQ ID NO: 124267 - protein, 9 aa, Homo Sapiens
VPLLVLIEA

SEQ ID NO: 124268 - protein, 9 aa, Homo Sapiens
VPLSHLINA

SEQ ID NO: 124269 - protein, 9 aa, Homo Sapiens
VPMTPLRTV

SEQ ID NO: 124270 - protein, 9 aa, Homo Sapiens
VPNKFLVTA

SEQ ID NO: 124271 - protein, 9 aa, Homo Sapiens
VPNLQTVSV

SEQ ID NO: 124272 - protein, 9 aa, Homo Sapiens
VPNPYIISA

SEQ ID NO: 124273 - protein, 9 aa, Homo Sapiens
VPQPVPLIA

SEQ ID NO: 124274 - protein, 9 aa, Homo Sapiens
VPRLPATAA

SEQ ID NO: 124275 - protein, 9 aa, Homo Sapiens
VPSAVLIVA

SEQ ID NO: 124276 - protein, 9 aa, Homo Sapiens
VPVEPVLTV

SEQ ID NO: 124277 - protein, 9 aa, Homo Sapiens
VPVHFDASV

SEQ ID NO: 124278 - protein, 9 aa, Homo Sapiens
VPYGTPLSV

SEQ ID NO: 124279 - protein, 9 aa, Homo Sapiens
VPYPPLLRA

SEQ ID NO: 124280 - protein, 9 aa, Homo Sapiens
WATQGLAVA

SEQ ID NO: 124281 - protein, 9 aa, Homo Sapiens
WPELPVLSA

SEQ ID NO: 124282 - protein, 9 aa, Homo Sapiens
WPFQQPVDA

SEQ ID NO: 124283 - protein, 9 aa, Homo Sapiens
WPFQRPVDA

SEQ ID NO: 124284 - protein, 9 aa, Homo Sapiens
WPFSIQDVV

SEQ ID NO: 124285 - protein, 9 aa, Homo Sapiens
WPKDVGIVA

SEQ ID NO: 124286 - protein, 9 aa, Homo Sapiens
WPLDASFRA

SEQ ID NO: 124287 - protein, 9 aa, Homo Sapiens
YAFNMKATV

SEQ ID NO: 124288 - protein, 9 aa, Homo Sapiens
YAFVHMERA

SEQ ID NO: 124289 - protein, 9 aa, Homo Sapiens
YAKYLPHSA

SEQ ID NO: 124290 - protein, 9 aa, Homo Sapiens
YALNHTLSV

SEQ ID NO: 124291 - protein, 9 aa, Homo Sapiens
YALPAGLSA

SEQ ID NO: 124292 - protein, 9 aa, Homo Sapiens
YGFVNYVTA

SEQ ID NO: 124293 - protein, 9 aa, Homo Sapiens
YPAHAFLAA

SEQ ID NO: 124294 - protein, 9 aa, Homo Sapiens
YPALIGNLV

SEQ ID NO: 124295 - protein, 9 aa, Homo Sapiens
YPALIPITT

SEQ ID NO: 124296 - protein, 9 aa, Homo Sapiens
YPANSIVVV

SEQ ID NO: 124297 - protein, 9 aa, Homo Sapiens
YPAPQVSTA

SEQ ID NO: 124298 - protein, 9 aa, Homo Sapiens
YPASIVHQV

SEQ ID NO: 124299 - protein, 9 aa, Homo Sapiens
YPASSLVVV

SEQ ID NO: 124300 - protein, 9 aa, Homo Sapiens
YPAYISIKA

SEQ ID NO: 124301 - protein, 9 aa, Homo Sapiens
YPFFRGVTI

SEQ ID NO: 124302 - protein, 9 aa, Homo Sapiens
YPFHYAPFA

SEQ ID NO: 124303 - protein, 9 aa, Homo Sapiens
YPFIFDAQA

SEQ ID NO: 124304 - protein, 9 aa, Homo Sapiens
YPFKNLPTA

SEQ ID NO: 124305 - protein, 9 aa, Homo Sapiens
YPFKPPKVA

SEQ ID NO: 124306 - protein, 9 aa, Homo Sapiens
YPFLLPTSS

SEQ ID NO: 124307 - protein, 9 aa, Homo Sapiens
YPFPGRLLP

SEQ ID NO: 124308 - protein, 9 aa, Homo Sapiens
YPFPLSHSV

SEQ ID NO: 124309 - protein, 9 aa, Homo Sapiens
YPFVFDAQA

SEQ ID NO: 124310 - protein, 9 aa, Homo Sapiens
YPGFNPFRA

SEQ ID NO: 124311 - protein, 9 aa, Homo Sapiens
YPHGWVETA

SEQ ID NO: 124312 - protein, 9 aa, Homo Sapiens
YPIAIFIKP

SEQ ID NO: 124313 - protein, 9 aa, Homo Sapiens
YPISIFIKP

SEQ ID NO: 124314 - protein, 9 aa, Homo Sapiens
YPKLILREA

SEQ ID NO: 124315 - protein, 9 aa, Homo Sapiens
YPKNPHLRA

SEQ ID NO: 124316 - protein, 9 aa, Homo Sapiens
YPLDLLLKL

SEQ ID NO: 124317 - protein, 9 aa, Homo Sapiens
YPLEKVAEA

SEQ ID NO: 124318 - protein, 9 aa, Homo Sapiens
YPLLLKELA

SEQ ID NO: 124319 - protein, 9 aa, Homo Sapiens
YPLLLPKGV

SEQ ID NO: 124320 - protein, 9 aa, Homo Sapiens
YPLTQLVVV

SEQ ID NO: 124321 - protein, 9 aa, Homo Sapiens
YPNFSLPAA

SEQ ID NO: 124322 - protein, 9 aa, Homo Sapiens
YPNNVLSVP

SEQ ID NO: 124323 - protein, 9 aa, Homo Sapiens
YPNPVAHLP

SEQ ID NO: 124324 - protein, 9 aa, Homo Sapiens
YPNYPNPAV

SEQ ID NO: 124325 - protein, 9 aa, Homo Sapiens
YPPLGRFAV

SEQ ID NO: 124326 - protein, 9 aa, Homo Sapiens
YPQAVFLEV

SEQ ID NO: 124327 - protein, 9 aa, Homo Sapiens
YPQDPAWRA

SEQ ID NO: 124328 - protein, 9 aa, Homo Sapiens
YPQELIVPA

SEQ ID NO: 124329 - protein, 9 aa, Homo Sapiens
YPQQAIVFA

SEQ ID NO: 124330 - protein, 9 aa, Homo Sapiens
YPQQIFIQI

SEQ ID NO: 124331 - protein, 9 aa, Homo Sapiens
YPSAPFLAA

SEQ ID NO: 124332 - protein, 9 aa, Homo Sapiens
YPSEHLIQA

SEQ ID NO: 124333 - protein, 9 aa, Homo Sapiens
YPSETFTRV

SEQ ID NO: 124334 - protein, 9 aa, Homo Sapiens
YPSLPTMTV

SEQ ID NO: 124335 - protein, 9 aa, Homo Sapiens
YPSTKMVIV

SEQ ID NO: 124336 - protein, 9 aa, Homo Sapiens
YPTRPHIAA

SEQ ID NO: 124337 - protein, 9 aa, Homo Sapiens
YPTTFVMVV

SEQ ID NO: 124338 - protein, 9 aa, Homo Sapiens
YPVHLAVRA

SEQ ID NO: 124339 - protein, 9 aa, Homo Sapiens
YPVRLAVSA

SEQ ID NO: 124340 - protein, 9 aa, Homo Sapiens
YPVYQPVGP

SEQ ID NO: 124341 - protein, 9 aa, Homo Sapiens
YPWHRFPVT

SEQ ID NO: 124342 - protein, 9 aa, Homo Sapiens
YSFFSPSPA

SEQ ID NO: 124343 - protein, 9 aa, Homo Sapiens
YSFYLPIAA

SEQ ID NO: 124344 - protein, 9 aa, Homo Sapiens
YTLVTYVPV

SEQ ID NO: 124345 - protein, 9 aa, Homo Sapiens
YVASYLLAA

SEQ ID NO: 124346 - protein, 9 aa, Homo Sapiens
YVPPPFAAA

SEQ ID NO: 124347 - protein, 10 aa, Homo Sapiens
APHYPGIGPV

SEQ ID NO: 124348 - protein, 10 aa, Homo Sapiens
APSMESRPPA

SEQ ID NO: 124349 - protein, 10 aa, Homo Sapiens
AVTGWGSISA

SEQ ID NO: 124350 - protein, 10 aa, Homo Sapiens
AYDGKDYIAL

SEQ ID NO: 124351 - protein, 10 aa, Homo Sapiens
CPFSSKFFSA

SEQ ID NO: 124352 - protein, 10 aa, Homo Sapiens
DAISNIFQAA

SEQ ID NO: 124353 - protein, 10 aa, Homo Sapiens
EAFPVHGFPT

SEQ ID NO: 124354 - protein, 10 aa, Homo Sapiens
EALTPLHVAA

SEQ ID NO: 124355 - protein, 10 aa, Homo Sapiens
EVLMNTYSVV

SEQ ID NO: 124356 - protein, 10 aa, Homo Sapiens
FAAEEFKVPA

SEQ ID NO: 124357 - protein, 10 aa, Homo Sapiens
FAFEGHKLIA

SEQ ID NO: 124358 - protein, 10 aa, Homo Sapiens
FALAKGFTAA

SEQ ID NO: 124359 - protein, 10 aa, Homo Sapiens
FAVEGPKLVV

SEQ ID NO: 124360 - protein, 10 aa, Homo Sapiens
FGPGKPPPPP

SEQ ID NO: 124361 - protein, 10 aa, Homo Sapiens
FPAEFGVVAA

SEQ ID NO: 124362 - protein, 10 aa, Homo Sapiens
FPAEFYPHIV

SEQ ID NO: 124363 - protein, 10 aa, Homo Sapiens
FPAGPGRKVI

SEQ ID NO: 124364 - protein, 10 aa, Homo Sapiens
FPAHHGFVAA

SEQ ID NO: 124365 - protein, 10 aa, Homo Sapiens
FPANPANISV

SEQ ID NO: 124366 - protein, 10 aa, Homo Sapiens
FPANVMDVIA

SEQ ID NO: 124367 - protein, 10 aa, Homo Sapiens
FPAPSHVVTA

SEQ ID NO: 124368 - protein, 10 aa, Homo Sapiens
FPFDPPFVRV

SEQ ID NO: 124369 - protein, 10 aa, Homo Sapiens
FPFDQQFNIL

SEQ ID NO: 124370 - protein, 10 aa, Homo Sapiens
FPFDVTKVEV

SEQ ID NO: 124371 - protein, 10 aa, Homo Sapiens
FPFYGKPMRI

SEQ ID NO: 124372 - protein, 10 aa, Homo Sapiens
FPGGVHWVSV

SEQ ID NO: 124373 - protein, 10 aa, Homo Sapiens
FPHELEVPAL

SEQ ID NO: 124374 - protein, 10 aa, Homo Sapiens
FPHFDLSHGS

SEQ ID NO: 124375 - protein, 10 aa, Homo Sapiens
FPHGITDQVI

SEQ ID NO: 124376 - protein, 10 aa, Homo Sapiens
FPHLLQPVLW

SEQ ID NO: 124377 - protein, 10 aa, Homo Sapiens
FPHYEVPLAA

SEQ ID NO: 124378 - protein, 10 aa, Homo Sapiens
FPIEVRHYLA

SEQ ID NO: 124379 - protein, 10 aa, Homo Sapiens
FPIHLVGQLV

SEQ ID NO: 124380 - protein, 10 aa, Homo Sapiens
FPIQMEGVKL

SEQ ID NO: 124381 - protein, 10 aa, Homo Sapiens
FPKAEFVEVT

SEQ ID NO: 124382 - protein, 10 aa, Homo Sapiens
FPKPGPLEPT

SEQ ID NO: 124383 - protein, 10 aa, Homo Sapiens
FPKPVTALEY

SEQ ID NO: 124384 - protein, 10 aa, Homo Sapiens
FPKPYPNSEA

SEQ ID NO: 124385 - protein, 10 aa, Homo Sapiens
FPMEIRQYLA

SEQ ID NO: 124386 - protein, 10 aa, Homo Sapiens
FPNPQGLSEE

SEQ ID NO: 124387 - protein, 10 aa, Homo Sapiens
FPPTFAIPQA

SEQ ID NO: 124388 - protein, 10 aa, Homo Sapiens
FPQETLFLEA

SEQ ID NO: 124389 - protein, 10 aa, Homo Sapiens
FPQLRATMEA

SEQ ID NO: 124390 - protein, 10 aa, Homo Sapiens
FPRLPAGAVV

SEQ ID NO: 124391 - protein, 10 aa, Homo Sapiens
FPRPLTPLAA

SEQ ID NO: 124392 - protein, 10 aa, Homo Sapiens
FPSEYVPTVF

SEQ ID NO: 124393 - protein, 10 aa, Homo Sapiens
FPVGVFVVAV

SEQ ID NO: 124394 - protein, 10 aa, Homo Sapiens
FPVSVGVHSA

SEQ ID NO: 124395 - protein, 10 aa, Homo Sapiens
FPVYVGINEA

SEQ ID NO: 124396 - protein, 10 aa, Homo Sapiens
FPYEEHLEMA

SEQ ID NO: 124397 - protein, 10 aa, Homo Sapiens
FPYEGPLRLL

SEQ ID NO: 124398 - protein, 10 aa, Homo Sapiens
FPYEKDLIEA

SEQ ID NO: 124399 - protein, 10 aa, Homo Sapiens
FPYKIPAVVV

SEQ ID NO: 124400 - protein, 10 aa, Homo Sapiens
FPYLIAGKYA

SEQ ID NO: 124401 - protein, 10 aa, Homo Sapiens
FVNDIFERIA

SEQ ID NO: 124402 - protein, 10 aa, Homo Sapiens
GPGNIPPPPP

SEQ ID NO: 124403 - protein, 10 aa, Homo Sapiens
HALEWPSLTA

SEQ ID NO: 124404 - protein, 10 aa, Homo Sapiens
HDHFGIVEGL

SEQ ID NO: 124405 - protein, 10 aa, Homo Sapiens
HELTIPNNLI

SEQ ID NO: 124406 - protein, 10 aa, Homo Sapiens
HPAAFPLPVV

SEQ ID NO: 124407 - protein, 10 aa, Homo Sapiens
HPDEPIIISA

SEQ ID NO: 124408 - protein, 10 aa, Homo Sapiens
HPFKGFLLEA

SEQ ID NO: 124409 - protein, 10 aa, Homo Sapiens
HPFLLLGTTA

SEQ ID NO: 124410 - protein, 10 aa, Homo Sapiens
HPFPGPGLAI

SEQ ID NO: 124411 - protein, 10 aa, Homo Sapiens
HPIEPVLITA

SEQ ID NO: 124412 - protein, 10 aa, Homo Sapiens
HPIEWAINAA

SEQ ID NO: 124413 - protein, 10 aa, Homo Sapiens
HPIQGLPLAI

SEQ ID NO: 124414 - protein, 10 aa, Homo Sapiens
HPLLRPPPSA

SEQ ID NO: 124415 - protein, 10 aa, Homo Sapiens
HPNQPLTITA

SEQ ID NO: 124416 - protein, 10 aa, Homo Sapiens
HPNVTLTISA

SEQ ID NO: 124417 - protein, 10 aa, Homo Sapiens
HPREPLPPIQ

SEQ ID NO: 124418 - protein, 10 aa, Homo Sapiens
HPRVGDLILA

SEQ ID NO: 124419 - protein, 10 aa, Homo Sapiens
HPSPLSFFSA

SEQ ID NO: 124420 - protein, 10 aa, Homo Sapiens
HPSQELLASA

SEQ ID NO: 124421 - protein, 10 aa, Homo Sapiens
HPTEDLVVSA

SEQ ID NO: 124422 - protein, 10 aa, Homo Sapiens
HPVDNVIAVA

SEQ ID NO: 124423 - protein, 10 aa, Homo Sapiens
HPWETVTTAA

SEQ ID NO: 124424 - protein, 10 aa, Homo Sapiens
HPWEVIVGTV

SEQ ID NO: 124425 - protein, 10 aa, Homo Sapiens
HPYFYAPELL

SEQ ID NO: 124426 - protein, 10 aa, Homo Sapiens
HPYLFPVAAM

SEQ ID NO: 124427 - protein, 10 aa, Homo Sapiens
HSFGPMPISA

SEQ ID NO: 124428 - protein, 10 aa, Homo Sapiens
HVPDYLVPPA

SEQ ID NO: 124429 - protein, 10 aa, Homo Sapiens
IAAQGFTVAA

SEQ ID NO: 124430 - protein, 10 aa, Homo Sapiens
IPADLRIISA

SEQ ID NO: 124431 - protein, 10 aa, Homo Sapiens
IPFLVPGIRY

SEQ ID NO: 124432 - protein, 10 aa, Homo Sapiens
IPISPPPVSA

SEQ ID NO: 124433 - protein, 10 aa, Homo Sapiens
IPLYLKGGVA

SEQ ID NO: 124434 - protein, 10 aa, Homo Sapiens
IPMKIRNVSA

SEQ ID NO: 124435 - protein, 10 aa, Homo Sapiens
IPVLVPGIIF

SEQ ID NO: 124436 - protein, 10 aa, Homo Sapiens
IPVQLQRSMA

SEQ ID NO: 124437 - protein, 10 aa, Homo Sapiens
IPYQDYFYTA

SEQ ID NO: 124438 - protein, 10 aa, Homo Sapiens
IRLENEIQTY

SEQ ID NO: 124439 - protein, 10 aa, Homo Sapiens
KPYTLMSMVA

SEQ ID NO: 124440 - protein, 10 aa, Homo Sapiens
LAFLGNLVSA

SEQ ID NO: 124441 - protein, 10 aa, Homo Sapiens
LAVLLQAAEA

SEQ ID NO: 124442 - protein, 10 aa, Homo Sapiens
LGVHVDGFIA

SEQ ID NO: 124443 - protein, 10 aa, Homo Sapiens
LPAIQPRLVA

SEQ ID NO: 124444 - protein, 10 aa, Homo Sapiens
LPASIPHVIA

SEQ ID NO: 124445 - protein, 10 aa, Homo Sapiens
LPFEFRAIEA

SEQ ID NO: 124446 - protein, 10 aa, Homo Sapiens
LPFETLEVEA

SEQ ID NO: 124447 - protein, 10 aa, Homo Sapiens
LPFGSSPHRV

SEQ ID NO: 124448 - protein, 10 aa, Homo Sapiens
LPFYLIPPSA

SEQ ID NO: 124449 - protein, 10 aa, Homo Sapiens
LPHEIVVNLA

SEQ ID NO: 124450 - protein, 10 aa, Homo Sapiens
LPHPYAIAVF

SEQ ID NO: 124451 - protein, 10 aa, Homo Sapiens
LPHSAGRYAA

SEQ ID NO: 124452 - protein, 10 aa, Homo Sapiens
LPHSGDIIAT

SEQ ID NO: 124453 - protein, 10 aa, Homo Sapiens
LPIPDPGVSV

SEQ ID NO: 124454 - protein, 10 aa, Homo Sapiens
LPKEPQGIIA

SEQ ID NO: 124455 - protein, 10 aa, Homo Sapiens
LPLEGWNHVV

SEQ ID NO: 124456 - protein, 10 aa, Homo Sapiens
LPLEMAPWFA

SEQ ID NO: 124457 - protein, 10 aa, Homo Sapiens
LPLENGRFIA

SEQ ID NO: 124458 - protein, 10 aa, Homo Sapiens
LPLGAQIPAV

SEQ ID NO: 124459 - protein, 10 aa, Homo Sapiens
LPLLAGLVAA

SEQ ID NO: 124460 - protein, 10 aa, Homo Sapiens
LPLSAHGIVV

SEQ ID NO: 124461 - protein, 10 aa, Homo Sapiens
LPLVLLPPLA

SEQ ID NO: 124462 - protein, 10 aa, Homo Sapiens
LPMSVIIVGV

SEQ ID NO: 124463 - protein, 10 aa, Homo Sapiens
LPNFLDHIIA

SEQ ID NO: 124464 - protein, 10 aa, Homo Sapiens
LPNQSFPHSV

SEQ ID NO: 124465 - protein, 10 aa, Homo Sapiens
LPQEIKANVA

SEQ ID NO: 124466 - protein, 10 aa, Homo Sapiens
LPQIAAKIAA

SEQ ID NO: 124467 - protein, 10 aa, Homo Sapiens
LPSVPLSCAA

SEQ ID NO: 124468 - protein, 10 aa, Homo Sapiens
LPVDKAFYEA

SEQ ID NO: 124469 - protein, 10 aa, Homo Sapiens
LPVEVPLWLA

SEQ ID NO: 124470 - protein, 10 aa, Homo Sapiens
LPVQLQRAMA

SEQ ID NO: 124471 - protein, 10 aa, Homo Sapiens
LPVWLENHTA

SEQ ID NO: 124472 - protein, 10 aa, Homo Sapiens
LPYFDQGYEA

SEQ ID NO: 124473 - protein, 10 aa, Homo Sapiens
LPYKPYFYIA

SEQ ID NO: 124474 - protein, 10 aa, Homo Sapiens
LPYSHPGVVF

SEQ ID NO: 124475 - protein, 10 aa, Homo Sapiens
MAAESLLVTV

SEQ ID NO: 124476 - protein, 10 aa, Homo Sapiens
MARAAPLLAA

SEQ ID NO: 124477 - protein, 10 aa, Homo Sapiens
MGFTGAGIAA

SEQ ID NO: 124478 - protein, 10 aa, Homo Sapiens
MPAAHATSSA

SEQ ID NO: 124479 - protein, 10 aa, Homo Sapiens
MPAILDGEEA

SEQ ID NO: 124480 - protein, 10 aa, Homo Sapiens
MPFDPSKVVA

SEQ ID NO: 124481 - protein, 10 aa, Homo Sapiens
MPFQSGEFKA

SEQ ID NO: 124482 - protein, 10 aa, Homo Sapiens
MPGFIQKQQA

SEQ ID NO: 124483 - protein, 10 aa, Homo Sapiens
MPGYPVLAPA

SEQ ID NO: 124484 - protein, 10 aa, Homo Sapiens
MPHSIMRIDI

SEQ ID NO: 124485 - protein, 10 aa, Homo Sapiens
MPHSYPYVAL

SEQ ID NO: 124486 - protein, 10 aa, Homo Sapiens
MPIEVMMNET

SEQ ID NO: 124487 - protein, 10 aa, Homo Sapiens
MPIYPKWMGA

SEQ ID NO: 124488 - protein, 10 aa, Homo Sapiens
MPIYPTYNEV

SEQ ID NO: 124489 - protein, 10 aa, Homo Sapiens
MPLSTIREVA

SEQ ID NO: 124490 - protein, 10 aa, Homo Sapiens
MPLSVFPYYA

SEQ ID NO: 124491 - protein, 10 aa, Homo Sapiens
MPLVIKVTSA

SEQ ID NO: 124492 - protein, 10 aa, Homo Sapiens
MPNGDHIVSA

SEQ ID NO: 124493 - protein, 10 aa, Homo Sapiens
MPNPQLNIKA

SEQ ID NO: 124494 - protein, 10 aa, Homo Sapiens
MPQLNAIIAA

SEQ ID NO: 124495 - protein, 10 aa, Homo Sapiens
MPQSGTGVSV

SEQ ID NO: 124496 - protein, 10 aa, Homo Sapiens
MPRDILIVVG

SEQ ID NO: 124497 - protein, 10 aa, Homo Sapiens
MPRFTEQVEA

SEQ ID NO: 124498 - protein, 10 aa, Homo Sapiens
MPSRFPPVVF

SEQ ID NO: 124499 - protein, 10 aa, Homo Sapiens
MPTGENVISV

SEQ ID NO: 124500 - protein, 10 aa, Homo Sapiens
MPVIPALWEA

SEQ ID NO: 124501 - protein, 10 aa, Homo Sapiens
MPYEIKKVFA

SEQ ID NO: 124502 - protein, 10 aa, Homo Sapiens
MPYFLLTQAV

SEQ ID NO: 124503 - protein, 10 aa, Homo Sapiens
MSTPHVAEPA

SEQ ID NO: 124504 - protein, 10 aa, Homo Sapiens
MTIPYQPMPA

SEQ ID NO: 124505 - protein, 10 aa, Homo Sapiens
NHPYLFPVAA

SEQ ID NO: 124506 - protein, 10 aa, Homo Sapiens
NPLGMPVPAA

SEQ ID NO: 124507 - protein, 10 aa, Homo Sapiens
NPYFPGQAIA

SEQ ID NO: 124508 - protein, 10 aa, Homo Sapiens
NSFPLLLPMA

SEQ ID NO: 124509 - protein, 10 aa, Homo Sapiens
NVADLTSLRA

SEQ ID NO: 124510 - protein, 10 aa, Homo Sapiens
QPFGDHIISV

SEQ ID NO: 124511 - protein, 10 aa, Homo Sapiens
RAGASPPPVS

SEQ ID NO: 124512 - protein, 10 aa, Homo Sapiens
SIINYPKVSA

SEQ ID NO: 124513 - protein, 10 aa, Homo Sapiens
SPVPSHWMVA

SEQ ID NO: 124514 - protein, 10 aa, Homo Sapiens
TLAPGLGLPA

SEQ ID NO: 124515 - protein, 10 aa, Homo Sapiens
TPFEKGLHVV

SEQ ID NO: 124516 - protein, 10 aa, Homo Sapiens
TPFMLGALVA

SEQ ID NO: 124517 - protein, 10 aa, Homo Sapiens
TPIESLFIEA

SEQ ID NO: 124518 - protein, 10 aa, Homo Sapiens
TPLPAIVPAA

SEQ ID NO: 124519 - protein, 10 aa, Homo Sapiens
TPQEKIFIAA

SEQ ID NO: 124520 - protein, 10 aa, Homo Sapiens
TPYGYFLISA

SEQ ID NO: 124521 - protein, 10 aa, Homo Sapiens
TPYSGKLMSA

SEQ ID NO: 124522 - protein, 10 aa, Homo Sapiens
TVFSPTLPAA

SEQ ID NO: 124523 - protein, 10 aa, Homo Sapiens
VPNYKLITPA

SEQ ID NO: 124524 - protein, 10 aa, Homo Sapiens
VPYEIQKGQA

SEQ ID NO: 124525 - protein, 10 aa, Homo Sapiens
VPYRLLPGIF

SEQ ID NO: 124526 - protein, 10 aa, Homo Sapiens
YASAFHFLSA

SEQ ID NO: 124527 - protein, 10 aa, Homo Sapiens
YGYQFPGFPA

SEQ ID NO: 124528 - protein, 10 aa, Homo Sapiens
YPASLFQQQA

SEQ ID NO: 124529 - protein, 10 aa, Homo Sapiens
YPFILPHQQV

SEQ ID NO: 124530 - protein, 10 aa, Homo Sapiens
YPFKPPKVTF

SEQ ID NO: 124531 - protein, 10 aa, Homo Sapiens
YPFLLPVIQL

SEQ ID NO: 124532 - protein, 10 aa, Homo Sapiens
YPIGTNAIVA

SEQ ID NO: 124533 - protein, 10 aa, Homo Sapiens
YPLEDATHIA

SEQ ID NO: 124534 - protein, 10 aa, Homo Sapiens
YPLERGFIYV

SEQ ID NO: 124535 - protein, 10 aa, Homo Sapiens
YPNTYIFDLF

SEQ ID NO: 124536 - protein, 10 aa, Homo Sapiens
YPNYLPLYVA

SEQ ID NO: 124537 - protein, 10 aa, Homo Sapiens
YPRAQLEVSA

SEQ ID NO: 124538 - protein, 10 aa, Homo Sapiens
YPYELFQSGV

SEQ ID NO: 124539 - protein, 10 aa, Homo Sapiens
YPYNAPTVKF

SEQ ID NO: 124540 - protein, 11 aa, Homo Sapiens
APFYSSDILIA

SEQ ID NO: 124541 - protein, 11 aa, Homo Sapiens
APLDSIHSLAA

SEQ ID NO: 124542 - protein, 11 aa, Homo Sapiens
APMPYLIGVHA

SEQ ID NO: 124543 - protein, 11 aa, Homo Sapiens
ASHLPSDFTPA

SEQ ID NO: 124544 - protein, 11 aa, Homo Sapiens
DPASALSNMVA

SEQ ID NO: 124545 - protein, 11 aa, Homo Sapiens
DPVANVRFNVA

SEQ ID NO: 124546 - protein, 11 aa, Homo Sapiens
EAAAALTRMKA

SEQ ID NO: 124547 - protein, 11 aa, Homo Sapiens
EAARVAEQLRA

SEQ ID NO: 124548 - protein, 11 aa, Homo Sapiens
EAFEAIPRALA

SEQ ID NO: 124549 - protein, 11 aa, Homo Sapiens
EAFSIPGVLEA

SEQ ID NO: 124550 - protein, 11 aa, Homo Sapiens
EALPSDIAAEA

SEQ ID NO: 124551 - protein, 11 aa, Homo Sapiens
EIDVNGILRVT

SEQ ID NO: 124552 - protein, 11 aa, Homo Sapiens
EPLSYTRFSLA

SEQ ID NO: 124553 - protein, 11 aa, Homo Sapiens
FADIEISRNEA

SEQ ID NO: 124554 - protein, 11 aa, Homo Sapiens
FALNPDILCSA

SEQ ID NO: 124555 - protein, 11 aa, Homo Sapiens
FPADISSITEA

SEQ ID NO: 124556 - protein, 11 aa, Homo Sapiens
FPDFPTPGVVF

SEQ ID NO: 124557 - protein, 11 aa, Homo Sapiens
FPDRATLYVTA

SEQ ID NO: 124558 - protein, 11 aa, Homo Sapiens
FPDVSGVSRIP

SEQ ID NO: 124559 - protein, 11 aa, Homo Sapiens
FPFESGKPFKI

SEQ ID NO: 124560 - protein, 11 aa, Homo Sapiens
FPFIPDQPFRV

SEQ ID NO: 124561 - protein, 11 aa, Homo Sapiens
FPFKPPQRIEA

SEQ ID NO: 124562 - protein, 11 aa, Homo Sapiens
FPFMDLKLRAA

SEQ ID NO: 124563 - protein, 11 aa, Homo Sapiens
FPFNPLDFESF

SEQ ID NO: 124564 - protein, 11 aa, Homo Sapiens
FPFQPGSVAEV

SEQ ID NO: 124565 - protein, 11 aa, Homo Sapiens
FPFSAVVPAAL

SEQ ID NO: 124566 - protein, 11 aa, Homo Sapiens
FPHFDLSHGSA

SEQ ID NO: 124567 - protein, 11 aa, Homo Sapiens
FPLHPMMITNA

SEQ ID NO: 124568 - protein, 11 aa, Homo Sapiens
FPLIVTGQREA

SEQ ID NO: 124569 - protein, 11 aa, Homo Sapiens
FPLQFGREVLA

SEQ ID NO: 124570 - protein, 11 aa, Homo Sapiens
FPNASLIGLTA

SEQ ID NO: 124571 - protein, 11 aa, Homo Sapiens
FPNEFIVETKI

SEQ ID NO: 124572 - protein, 11 aa, Homo Sapiens
FPRAPSTSDSV

SEQ ID NO: 124573 - protein, 11 aa, Homo Sapiens
FPSEITDTVAA

SEQ ID NO: 124574 - protein, 11 aa, Homo Sapiens
FPSIFIYGHTA

SEQ ID NO: 124575 - protein, 11 aa, Homo Sapiens
FPTTSILPQTA

SEQ ID NO: 124576 - protein, 11 aa, Homo Sapiens
FPVLGGKAIEF

SEQ ID NO: 124577 - protein, 11 aa, Homo Sapiens
FPVYVLPKVEY

SEQ ID NO: 124578 - protein, 11 aa, Homo Sapiens
FPYYPSPGVLF

SEQ ID NO: 124579 - protein, 11 aa, Homo Sapiens
FVRSVHPYEVA

SEQ ID NO: 124580 - protein, 11 aa, Homo Sapiens
HAAAATYILEA

SEQ ID NO: 124581 - protein, 11 aa, Homo Sapiens
HELTIPNNLIG

SEQ ID NO: 124582 - protein, 11 aa, Homo Sapiens
HFDLSHGSAQV

SEQ ID NO: 124583 - protein, 11 aa, Homo Sapiens
HPFDLGLYNEA

SEQ ID NO: 124584 - protein, 11 aa, Homo Sapiens
HPIYLATGTSA

SEQ ID NO: 124585 - protein, 11 aa, Homo Sapiens
HPLASFSFTSA

SEQ ID NO: 124586 - protein, 11 aa, Homo Sapiens
HPLDPIDTVDF

SEQ ID NO: 124587 - protein, 11 aa, Homo Sapiens
HPLGIVQGFFA

SEQ ID NO: 124588 - protein, 11 aa, Homo Sapiens
HPLTGGGMTVA

SEQ ID NO: 124589 - protein, 11 aa, Homo Sapiens
HPNVTLTISAA

SEQ ID NO: 124590 - protein, 11 aa, Homo Sapiens
HPNYLGDLIMA

SEQ ID NO: 124591 - protein, 11 aa, Homo Sapiens
HPTASLIAKVA

SEQ ID NO: 124592 - protein, 11 aa, Homo Sapiens
HPTLLENLVFF

SEQ ID NO: 124593 - protein, 11 aa, Homo Sapiens
HPYPPGPGVAL

SEQ ID NO: 124594 - protein, 11 aa, Homo Sapiens
HSFPTLKFFPA

SEQ ID NO: 124595 - protein, 11 aa, Homo Sapiens
HSNVNLTIFTA

SEQ ID NO: 124596 - protein, 11 aa, Homo Sapiens
IPAFRGHFIAA

SEQ ID NO: 124597 - protein, 11 aa, Homo Sapiens
IPHSLPGAVAA

SEQ ID NO: 124598 - protein, 11 aa, Homo Sapiens
IPLPDEKSRVA

SEQ ID NO: 124599 - protein, 11 aa, Homo Sapiens
IPNSIMTILEA

SEQ ID NO: 124600 - protein, 11 aa, Homo Sapiens
IPSFAPVLLLA

SEQ ID NO: 124601 - protein, 11 aa, Homo Sapiens
IPVLVPGIIFS

SEQ ID NO: 124602 - protein, 11 aa, Homo Sapiens
IPWVQKPIIFD

SEQ ID NO: 124603 - protein, 11 aa, Homo Sapiens
IPYDQSGFVSA

SEQ ID NO: 124604 - protein, 11 aa, Homo Sapiens
IPYHSEVPVSL

SEQ ID NO: 124605 - protein, 11 aa, Homo Sapiens
IPYSPDVQIHA

SEQ ID NO: 124606 - protein, 11 aa, Homo Sapiens
LAMVPSHAVVA

SEQ ID NO: 124607 - protein, 11 aa, Homo Sapiens
LPAEFPDKVFA

SEQ ID NO: 124608 - protein, 11 aa, Homo Sapiens
LPAGAVVGIPA

SEQ ID NO: 124609 - protein, 11 aa, Homo Sapiens
LPALANTSVHA

SEQ ID NO: 124610 - protein, 11 aa, Homo Sapiens
LPASEIAKLLA

SEQ ID NO: 124611 - protein, 11 aa, Homo Sapiens
LPHAILRLDLA

SEQ ID NO: 124612 - protein, 11 aa, Homo Sapiens
LPLGFIVFLPA

SEQ ID NO: 124613 - protein, 11 aa, Homo Sapiens
LPLLPAPGAAA

SEQ ID NO: 124614 - protein, 11 aa, Homo Sapiens
LPLLQPRGASA

SEQ ID NO: 124615 - protein, 11 aa, Homo Sapiens
LPNSHLTEEAL

SEQ ID NO: 124616 - protein, 11 aa, Homo Sapiens
LPPVLLPGAAG

SEQ ID NO: 124617 - protein, 11 aa, Homo Sapiens
LPSASITSTSA

SEQ ID NO: 124618 - protein, 11 aa, Homo Sapiens
LPSDFTPAVHA

SEQ ID NO: 124619 - protein, 11 aa, Homo Sapiens
LPSDVVTGYLA

SEQ ID NO: 124620 - protein, 11 aa, Homo Sapiens
LPSLYPSFHSA

SEQ ID NO: 124621 - protein, 11 aa, Homo Sapiens
LPVGQHIYLSA

SEQ ID NO: 124622 - protein, 11 aa, Homo Sapiens
LPVLPWSEVTF

SEQ ID NO: 124623 - protein, 11 aa, Homo Sapiens
LPVNESFGFTA

SEQ ID NO: 124624 - protein, 11 aa, Homo Sapiens
LPVPPLSVRPA

SEQ ID NO: 124625 - protein, 11 aa, Homo Sapiens
LPVRSLTYFSA

SEQ ID NO: 124626 - protein, 11 aa, Homo Sapiens
LPWDPTGKIGP

SEQ ID NO: 124627 - protein, 11 aa, Homo Sapiens
LPWQQERDVAA

SEQ ID NO: 124628 - protein, 11 aa, Homo Sapiens
LPYTVNFKVSA

SEQ ID NO: 124629 - protein, 11 aa, Homo Sapiens
MAFWGWRAAAA

SEQ ID NO: 124630 - protein, 11 aa, Homo Sapiens
MAIGAIAGRIV

SEQ ID NO: 124631 - protein, 11 aa, Homo Sapiens
MALVASVRVPA

SEQ ID NO: 124632 - protein, 11 aa, Homo Sapiens
MAMSAGTLLTA

SEQ ID NO: 124633 - protein, 11 aa, Homo Sapiens
MIKTQSSLVPA

SEQ ID NO: 124634 - protein, 11 aa, Homo Sapiens
MPFFLEGKPKA

SEQ ID NO: 124635 - protein, 11 aa, Homo Sapiens
MPHSIMRIDIA

SEQ ID NO: 124636 - protein, 11 aa, Homo Sapiens
MPHSIMRVDIA

SEQ ID NO: 124637 - protein, 11 aa, Homo Sapiens
MPHTFFIGDHA

SEQ ID NO: 124638 - protein, 11 aa, Homo Sapiens
MPIYVTGITNH

SEQ ID NO: 124639 - protein, 11 aa, Homo Sapiens
MPKEILQIIQL

SEQ ID NO: 124640 - protein, 11 aa, Homo Sapiens
MPLFFVSPVSV

SEQ ID NO: 124641 - protein, 11 aa, Homo Sapiens
MPLHVAPLLAA

SEQ ID NO: 124642 - protein, 11 aa, Homo Sapiens
MPLQPSILREV

SEQ ID NO: 124643 - protein, 11 aa, Homo Sapiens
MPMFIVNTNVP

SEQ ID NO: 124644 - protein, 11 aa, Homo Sapiens
MPNAGLPGVGL

SEQ ID NO: 124645 - protein, 11 aa, Homo Sapiens
MPNPSLAQVKI

SEQ ID NO: 124646 - protein, 11 aa, Homo Sapiens
MPRTAALGVSF

SEQ ID NO: 124647 - protein, 11 aa, Homo Sapiens
MPRWAERLFPA

SEQ ID NO: 124648 - protein, 11 aa, Homo Sapiens
MPSEDVVSLQV

SEQ ID NO: 124649 - protein, 11 aa, Homo Sapiens
MPTNILGEIVV

SEQ ID NO: 124650 - protein, 11 aa, Homo Sapiens
MPTSGALDRVA

SEQ ID NO: 124651 - protein, 11 aa, Homo Sapiens
MPVILQDAPSA

SEQ ID NO: 124652 - protein, 11 aa, Homo Sapiens
MPWGDPNYRSA

SEQ ID NO: 124653 - protein, 11 aa, Homo Sapiens
NPLDLPERIAA

SEQ ID NO: 124654 - protein, 11 aa, Homo Sapiens
PGSGPAGGSTR

SEQ ID NO: 124655 - protein, 11 aa, Homo Sapiens
QAFSPPPNVTA

SEQ ID NO: 124656 - protein, 11 aa, Homo Sapiens
QPHDPLVPLSA

SEQ ID NO: 124657 - protein, 11 aa, Homo Sapiens
QPYAPPRDFAA

SEQ ID NO: 124658 - protein, 11 aa, Homo Sapiens
SAFLPARFYQA

SEQ ID NO: 124659 - protein, 11 aa, Homo Sapiens
SPIENIQRVAA

SEQ ID NO: 124660 - protein, 11 aa, Homo Sapiens
SPLDMKDGFLA

SEQ ID NO: 124661 - protein, 11 aa, Homo Sapiens
SSSPEVKGYWA

SEQ ID NO: 124662 - protein, 11 aa, Homo Sapiens
SSTISSNVASK

SEQ ID NO: 124663 - protein, 11 aa, Homo Sapiens
TANSKLVIITA

SEQ ID NO: 124664 - protein, 11 aa, Homo Sapiens
TAYKPKYFTSA

SEQ ID NO: 124665 - protein, 11 aa, Homo Sapiens
TLGVKQLIVGV

SEQ ID NO: 124666 - protein, 11 aa, Homo Sapiens
TPWPRGRLLTA

SEQ ID NO: 124667 - protein, 11 aa, Homo Sapiens
VPWMPPGKSSA

SEQ ID NO: 124668 - protein, 11 aa, Homo Sapiens
WPFVSDPAPTA

SEQ ID NO: 124669 - protein, 11 aa, Homo Sapiens
YLHLPPEIVPA

SEQ ID NO: 124670 - protein, 11 aa, Homo Sapiens
YPASPWSHISA

SEQ ID NO: 124671 - protein, 11 aa, Homo Sapiens
YPDSFGHYREA

SEQ ID NO: 124672 - protein, 11 aa, Homo Sapiens
YPFINSRIITV

SEQ ID NO: 124673 - protein, 11 aa, Homo Sapiens
YPFSSEQKWMA

SEQ ID NO: 124674 - protein, 11 aa, Homo Sapiens
YPHLVAGALAA

SEQ ID NO: 124675 - protein, 11 aa, Homo Sapiens
YPIEPSGVLGA

SEQ ID NO: 124676 - protein, 11 aa, Homo Sapiens
YPIGTNAIVAV

SEQ ID NO: 124677 - protein, 11 aa, Homo Sapiens
YPLDFARTRLA

SEQ ID NO: 124678 - protein, 11 aa, Homo Sapiens
YPLLLPKGVVL

SEQ ID NO: 124679 - protein, 11 aa, Homo Sapiens
YPLQGPGLLSV

SEQ ID NO: 124680 - protein, 11 aa, Homo Sapiens
YPNAELVFLEI

SEQ ID NO: 124681 - protein, 11 aa, Homo Sapiens
YPNIELSYEVV

SEQ ID NO: 124682 - protein, 11 aa, Homo Sapiens
YPREMLGPVTF

SEQ ID NO: 124683 - protein, 11 aa, Homo Sapiens
YPVEIHEYLSA

SEQ ID NO: 124684 - protein, 11 aa, Homo Sapiens
YPYGLQTFHPA

SEQ ID NO: 124685 - protein, 8 aa, Homo Sapiens
APASLTSA

SEQ ID NO: 124686 - protein, 8 aa, Homo Sapiens
APAVHPQA

SEQ ID NO: 124687 - protein, 8 aa, Homo Sapiens
APGVLPSA

SEQ ID NO: 124688 - protein, 8 aa, Homo Sapiens
APIRLLAA

SEQ ID NO: 124689 - protein, 8 aa, Homo Sapiens
APQRVPVA

SEQ ID NO: 124690 - protein, 8 aa, Homo Sapiens
APRPAPVA

SEQ ID NO: 124691 - protein, 8 aa, Homo Sapiens
APSPEPAV

SEQ ID NO: 124692 - protein, 8 aa, Homo Sapiens
APSRIPGV

SEQ ID NO: 124693 - protein, 8 aa, Homo Sapiens
APSVTPQA

SEQ ID NO: 124694 - protein, 8 aa, Homo Sapiens
APTAIKAA

SEQ ID NO: 124695 - protein, 8 aa, Homo Sapiens
APTAITEA

SEQ ID NO: 124696 - protein, 8 aa, Homo Sapiens
APTPAAPA

SEQ ID NO: 124697 - protein, 8 aa, Homo Sapiens
APVAIGVA

SEQ ID NO: 124698 - protein, 8 aa, Homo Sapiens
APVILPSA

SEQ ID NO: 124699 - protein, 8 aa, Homo Sapiens
APVLHLEA

SEQ ID NO: 124700 - protein, 8 aa, Homo Sapiens
APVNFISA

SEQ ID NO: 124701 - protein, 8 aa, Homo Sapiens
APVQQPRT

SEQ ID NO: 124702 - protein, 8 aa, Homo Sapiens
APVYLAAV

SEQ ID NO: 124703 - protein, 8 aa, Homo Sapiens
APWRPPPP

SEQ ID NO: 124704 - protein, 8 aa, Homo Sapiens
EPMKGPIA

SEQ ID NO: 124705 - protein, 8 aa, Homo Sapiens
EPQPEPVA

SEQ ID NO: 124706 - protein, 8 aa, Homo Sapiens
FPRYVTGA

SEQ ID NO: 124707 - protein, 8 aa, Homo Sapiens
FPTKIPRG

SEQ ID NO: 124708 - protein, 8 aa, Homo Sapiens
FPTSISVN

SEQ ID NO: 124709 - protein, 8 aa, Homo Sapiens
FPVCLLAS

SEQ ID NO: 124710 - protein, 8 aa, Homo Sapiens
FVGKTPEA

SEQ ID NO: 124711 - protein, 8 aa, Homo Sapiens
HPFHVIRI

SEQ ID NO: 124712 - protein, 8 aa, Homo Sapiens
HPFYTRAA

SEQ ID NO: 124713 - protein, 8 aa, Homo Sapiens
HPHLVAEA

SEQ ID NO: 124714 - protein, 8 aa, Homo Sapiens
HPLGRPPT

SEQ ID NO: 124715 - protein, 8 aa, Homo Sapiens
HPLLRPPP

SEQ ID NO: 124716 - protein, 8 aa, Homo Sapiens
HPTSIVKA

SEQ ID NO: 124717 - protein, 8 aa, Homo Sapiens
HPYLFPVA

SEQ ID NO: 124718 - protein, 8 aa, Homo Sapiens
IPDKKPMA

SEQ ID NO: 124719 - protein, 8 aa, Homo Sapiens
IPEEQPVA

SEQ ID NO: 124720 - protein, 8 aa, Homo Sapiens
IPFRIGNA

SEQ ID NO: 124721 - protein, 8 aa, Homo Sapiens
IPGVTPAA

SEQ ID NO: 124722 - protein, 8 aa, Homo Sapiens
IPHSLPGA

SEQ ID NO: 124723 - protein, 8 aa, Homo Sapiens
IPIAVSGV

SEQ ID NO: 124724 - protein, 8 aa, Homo Sapiens
IPKDPRQW

SEQ ID NO: 124725 - protein, 8 aa, Homo Sapiens
IPNRIPKI

SEQ ID NO: 124726 - protein, 8 aa, Homo Sapiens
IPQVMAIA

SEQ ID NO: 124727 - protein, 8 aa, Homo Sapiens
IPSKKPVA

SEQ ID NO: 124728 - protein, 8 aa, Homo Sapiens
IPTPIVGV

SEQ ID NO: 124729 - protein, 8 aa, Homo Sapiens
IPTTIYKA

SEQ ID NO: 124730 - protein, 8 aa, Homo Sapiens
IPVRFIEA

SEQ ID NO: 124731 - protein, 8 aa, Homo Sapiens
IPVTQASA

SEQ ID NO: 124732 - protein, 8 aa, Homo Sapiens
IPWKVPGL

SEQ ID NO: 124733 - protein, 8 aa, Homo Sapiens
IVYKIRAA

SEQ ID NO: 124734 - protein, 8 aa, Homo Sapiens
KPFPVSKA

SEQ ID NO: 124735 - protein, 8 aa, Homo Sapiens
KPGSVPLV

SEQ ID NO: 124736 - protein, 8 aa, Homo Sapiens
KPLLIRGV

SEQ ID NO: 124737 - protein, 8 aa, Homo Sapiens
KPLRIIGV

SEQ ID NO: 124738 - protein, 8 aa, Homo Sapiens
KPQNIREV

SEQ ID NO: 124739 - protein, 8 aa, Homo Sapiens
KPQNMPKA

SEQ ID NO: 124740 - protein, 8 aa, Homo Sapiens
KPWKFSSV

SEQ ID NO: 124741 - protein, 8 aa, Homo Sapiens
KPYPIAEV

SEQ ID NO: 124742 - protein, 8 aa, Homo Sapiens
LPHKGPEA

SEQ ID NO: 124743 - protein, 8 aa, Homo Sapiens
LPHQLPEA

SEQ ID NO: 124744 - protein, 8 aa, Homo Sapiens
LPKLGICA

SEQ ID NO: 124745 - protein, 8 aa, Homo Sapiens
LPNGVPKA

SEQ ID NO: 124746 - protein, 8 aa, Homo Sapiens
LPQHIREA

SEQ ID NO: 124747 - protein, 8 aa, Homo Sapiens
LPRHRLDA

SEQ ID NO: 124748 - protein, 8 aa, Homo Sapiens
LPRTPTPA

SEQ ID NO: 124749 - protein, 8 aa, Homo Sapiens
LPSKTPEG

SEQ ID NO: 124750 - protein, 8 aa, Homo Sapiens
LPSVIAGA

SEQ ID NO: 124751 - protein, 8 aa, Homo Sapiens
LPTAVPTA

SEQ ID NO: 124752 - protein, 8 aa, Homo Sapiens
LPTTICHA

SEQ ID NO: 124753 - protein, 8 aa, Homo Sapiens
LPVRLATA

SEQ ID NO: 124754 - protein, 8 aa, Homo Sapiens
LPWQGLKA

SEQ ID NO: 124755 - protein, 8 aa, Homo Sapiens
LPWRLLQA

SEQ ID NO: 124756 - protein, 8 aa, Homo Sapiens
LPYHTTDA

SEQ ID NO: 124757 - protein, 8 aa, Homo Sapiens
LVVPSRPA

SEQ ID NO: 124758 - protein, 8 aa, Homo Sapiens
MPATLARA

SEQ ID NO: 124759 - protein, 8 aa, Homo Sapiens
MPDLHPAA

SEQ ID NO: 124760 - protein, 8 aa, Homo Sapiens
MPGYLPGA

SEQ ID NO: 124761 - protein, 8 aa, Homo Sapiens
MPIYVTGI

SEQ ID NO: 124762 - protein, 8 aa, Homo Sapiens
MPQPVPTA

SEQ ID NO: 124763 - protein, 8 aa, Homo Sapiens
MPQSIVEA

SEQ ID NO: 124764 - protein, 8 aa, Homo Sapiens
MPRLIAKV

SEQ ID NO: 124765 - protein, 8 aa, Homo Sapiens
MPRLICKA

SEQ ID NO: 124766 - protein, 8 aa, Homo Sapiens
MPTTLEGA

SEQ ID NO: 124767 - protein, 8 aa, Homo Sapiens
MQPPVPGP

SEQ ID NO: 124768 - protein, 8 aa, Homo Sapiens
NPIAQPLA

SEQ ID NO: 124769 - protein, 8 aa, Homo Sapiens
NPTRQPLA

SEQ ID NO: 124770 - protein, 8 aa, Homo Sapiens
PAKKITAA

SEQ ID NO: 124771 - protein, 8 aa, Homo Sapiens
PCDKILKA

SEQ ID NO: 124772 - protein, 8 aa, Homo Sapiens
PDGRIIKV

SEQ ID NO: 124773 - protein, 8 aa, Homo Sapiens
PGPRRSGA

SEQ ID NO: 124774 - protein, 8 aa, Homo Sapiens
PHLVTHDA

SEQ ID NO: 124775 - protein, 8 aa, Homo Sapiens
PHSAGRYA

SEQ ID NO: 124776 - protein, 8 aa, Homo Sapiens
PKEKQPVA

SEQ ID NO: 124777 - protein, 8 aa, Homo Sapiens
PKPIGKLA

SEQ ID NO: 124778 - protein, 8 aa, Homo Sapiens
PLKGARIA

SEQ ID NO: 124779 - protein, 8 aa, Homo Sapiens
PTGDLPRA

SEQ ID NO: 124780 - protein, 8 aa, Homo Sapiens
PTKRPPVL

SEQ ID NO: 124781 - protein, 8 aa, Homo Sapiens
PVGPGRRA

SEQ ID NO: 124782 - protein, 8 aa, Homo Sapiens
QKPSGVSA

SEQ ID NO: 124783 - protein, 8 aa, Homo Sapiens
QPTPIQKA

SEQ ID NO: 124784 - protein, 8 aa, Homo Sapiens
QPYPLPHV

SEQ ID NO: 124785 - protein, 8 aa, Homo Sapiens
QPYRFPQA

SEQ ID NO: 124786 - protein, 8 aa, Homo Sapiens
RPFHLAAV

SEQ ID NO: 124787 - protein, 8 aa, Homo Sapiens
RPFKGEVV

SEQ ID NO: 124788 - protein, 8 aa, Homo Sapiens
RPFLLRRV

SEQ ID NO: 124789 - protein, 8 aa, Homo Sapiens
RPKVGLGA

SEQ ID NO: 124790 - protein, 8 aa, Homo Sapiens
RPLLLNSV

SEQ ID NO: 124791 - protein, 8 aa, Homo Sapiens
RPREFPTA

SEQ ID NO: 124792 - protein, 8 aa, Homo Sapiens
RPRNLAAA

SEQ ID NO: 124793 - protein, 8 aa, Homo Sapiens
RPRQLTRA

SEQ ID NO: 124794 - protein, 8 aa, Homo Sapiens
RPTCIVRA

SEQ ID NO: 124795 - protein, 8 aa, Homo Sapiens
RPTPQLRA

SEQ ID NO: 124796 - protein, 8 aa, Homo Sapiens
RPVKIRKI

SEQ ID NO: 124797 - protein, 8 aa, Homo Sapiens
RPVKLFRV

SEQ ID NO: 124798 - protein, 8 aa, Homo Sapiens
RPVLTSVA

SEQ ID NO: 124799 - protein, 8 aa, Homo Sapiens
RPVRLMKV

SEQ ID NO: 124800 - protein, 8 aa, Homo Sapiens
RPVSLREV

SEQ ID NO: 124801 - protein, 8 aa, Homo Sapiens
RPWLRPAA

SEQ ID NO: 124802 - protein, 8 aa, Homo Sapiens
RPYLLVHV

SEQ ID NO: 124803 - protein, 8 aa, Homo Sapiens
RPYRHIGV

SEQ ID NO: 124804 - protein, 8 aa, Homo Sapiens
SPAFKPAA

SEQ ID NO: 124805 - protein, 8 aa, Homo Sapiens
SPAKLQAA

SEQ ID NO: 124806 - protein, 8 aa, Homo Sapiens
SPALLRAE

SEQ ID NO: 124807 - protein, 8 aa, Homo Sapiens
SPALLREA

SEQ ID NO: 124808 - protein, 8 aa, Homo Sapiens
SPAQIKAV

SEQ ID NO: 124809 - protein, 8 aa, Homo Sapiens
SPASLSQA

SEQ ID NO: 124810 - protein, 8 aa, Homo Sapiens
SPDELPSA

SEQ ID NO: 124811 - protein, 8 aa, Homo Sapiens
SPGLLPVA

SEQ ID NO: 124812 - protein, 8 aa, Homo Sapiens
SPHLQGEA

SEQ ID NO: 124813 - protein, 8 aa, Homo Sapiens
SPHPGLVA

SEQ ID NO: 124814 - protein, 8 aa, Homo Sapiens
SPILVATA

SEQ ID NO: 124815 - protein, 8 aa, Homo Sapiens
SPISVAAA

SEQ ID NO: 124816 - protein, 8 aa, Homo Sapiens
SPLNTHAA

SEQ ID NO: 124817 - protein, 8 aa, Homo Sapiens
SPTPEPGV

SEQ ID NO: 124818 - protein, 8 aa, Homo Sapiens
SPTVITSV

SEQ ID NO: 124819 - protein, 8 aa, Homo Sapiens
SPTVIVMV

SEQ ID NO: 124820 - protein, 8 aa, Homo Sapiens
SPYKICMV

SEQ ID NO: 124821 - protein, 8 aa, Homo Sapiens
SPYLHPGA

SEQ ID NO: 124822 - protein, 8 aa, Homo Sapiens
SPYSSVSA

SEQ ID NO: 124823 - protein, 8 aa, Homo Sapiens
TAVSRPCA

SEQ ID NO: 124824 - protein, 8 aa, Homo Sapiens
TPASLLAA

SEQ ID NO: 124825 - protein, 8 aa, Homo Sapiens
TPGIIAEA

SEQ ID NO: 124826 - protein, 8 aa, Homo Sapiens
TPGLLPTA

SEQ ID NO: 124827 - protein, 8 aa, Homo Sapiens
TPHPFPAV

SEQ ID NO: 124828 - protein, 8 aa, Homo Sapiens
TPIHLASA

SEQ ID NO: 124829 - protein, 8 aa, Homo Sapiens
TPQQIAIA

SEQ ID NO: 124830 - protein, 8 aa, Homo Sapiens
TPTPVPVV

SEQ ID NO: 124831 - protein, 8 aa, Homo Sapiens
TPVRLPSI

SEQ ID NO: 124832 - protein, 8 aa, Homo Sapiens
TPYRPPAA

SEQ ID NO: 124833 - protein, 8 aa, Homo Sapiens
VKPVKVSA

SEQ ID NO: 124834 - protein, 8 aa, Homo Sapiens
VKRPLLVA

SEQ ID NO: 124835 - protein, 8 aa, Homo Sapiens
VPAVTLVA

SEQ ID NO: 124836 - protein, 8 aa, Homo Sapiens
VPFSIPAA

SEQ ID NO: 124837 - protein, 8 aa, Homo Sapiens
VPNTQPKA

SEQ ID NO: 124838 - protein, 8 aa, Homo Sapiens
VPQAKPVA

SEQ ID NO: 124839 - protein, 8 aa, Homo Sapiens
VPQETPHA

SEQ ID NO: 124840 - protein, 8 aa, Homo Sapiens
VPQRPGPP

SEQ ID NO: 124841 - protein, 8 aa, Homo Sapiens
VPRKLIVA

SEQ ID NO: 124842 - protein, 8 aa, Homo Sapiens
VPSAEPQA

SEQ ID NO: 124843 - protein, 8 aa, Homo Sapiens
VPSSQPSV

SEQ ID NO: 124844 - protein, 8 aa, Homo Sapiens
VPTKRPPV

SEQ ID NO: 124845 - protein, 8 aa, Homo Sapiens
VPTNIIAA

SEQ ID NO: 124846 - protein, 8 aa, Homo Sapiens
VPVETPEA

SEQ ID NO: 124847 - protein, 8 aa, Homo Sapiens
VPVGILSA

SEQ ID NO: 124848 - protein, 8 aa, Homo Sapiens
VPVPLLGA

SEQ ID NO: 124849 - protein, 8 aa, Homo Sapiens
VPWGGAAA

SEQ ID NO: 124850 - protein, 8 aa, Homo Sapiens
VPYLFKKV

SEQ ID NO: 124851 - protein, 8 aa, Homo Sapiens
VPYPLPKI

SEQ ID NO: 124852 - protein, 8 aa, Homo Sapiens
YPAAVPQA

SEQ ID NO: 124853 - protein, 8 aa, Homo Sapiens
YPFRVNSA

SEQ ID NO: 124854 - protein, 9 aa, Homo Sapiens
AAGPVGMAA

SEQ ID NO: 124855 - protein, 9 aa, Homo Sapiens
AAKDPSPSV

SEQ ID NO: 124856 - protein, 9 aa, Homo Sapiens
AAKLPGEGA

SEQ ID NO: 124857 - protein, 9 aa, Homo Sapiens
AAKPGMVSA

SEQ ID NO: 124858 - protein, 9 aa, Homo Sapiens
AAKPPPLSA

SEQ ID NO: 124859 - protein, 9 aa, Homo Sapiens
AAKVPGNQA

SEQ ID NO: 124860 - protein, 9 aa, Homo Sapiens
AAMPASTSA

SEQ ID NO: 124861 - protein, 9 aa, Homo Sapiens
AARLVGAAA

SEQ ID NO: 124862 - protein, 9 aa, Homo Sapiens
AHPPWAPLA

SEQ ID NO: 124863 - protein, 9 aa, Homo Sapiens
APAAATVAV

SEQ ID NO: 124864 - protein, 9 aa, Homo Sapiens
APAAGMNAA

SEQ ID NO: 124865 - protein, 9 aa, Homo Sapiens
APAEPGWKA

SEQ ID NO: 124866 - protein, 9 aa, Homo Sapiens
APAGSLPKI

SEQ ID NO: 124867 - protein, 9 aa, Homo Sapiens
APAGVFGVA

SEQ ID NO: 124868 - protein, 9 aa, Homo Sapiens
APAIGFPQA

SEQ ID NO: 124869 - protein, 9 aa, Homo Sapiens
APAPAAHVA

SEQ ID NO: 124870 - protein, 9 aa, Homo Sapiens
APAPPKAEA

SEQ ID NO: 124871 - protein, 9 aa, Homo Sapiens
APAPTPILA

SEQ ID NO: 124872 - protein, 9 aa, Homo Sapiens
APAPVIISS

SEQ ID NO: 124873 - protein, 9 aa, Homo Sapiens
APARPGPAA

SEQ ID NO: 124874 - protein, 9 aa, Homo Sapiens
APARPSVPP

SEQ ID NO: 124875 - protein, 9 aa, Homo Sapiens
APASVLPAA

SEQ ID NO: 124876 - protein, 9 aa, Homo Sapiens
APCTAIREV

SEQ ID NO: 124877 - protein, 9 aa, Homo Sapiens
APFEPLASG

SEQ ID NO: 124878 - protein, 9 aa, Homo Sapiens
APFGKISDA

SEQ ID NO: 124879 - protein, 9 aa, Homo Sapiens
APFPHGDSA

SEQ ID NO: 124880 - protein, 9 aa, Homo Sapiens
APFPKTQIA

SEQ ID NO: 124881 - protein, 9 aa, Homo Sapiens
APFQGLLQA

SEQ ID NO: 124882 - protein, 9 aa, Homo Sapiens
APGALLLEA

SEQ ID NO: 124883 - protein, 9 aa, Homo Sapiens
APGLPTARA

SEQ ID NO: 124884 - protein, 9 aa, Homo Sapiens
APGPGPASA

SEQ ID NO: 124885 - protein, 9 aa, Homo Sapiens
APGYSYTAA

SEQ ID NO: 124886 - protein, 9 aa, Homo Sapiens
APHAPGPPA

SEQ ID NO: 124887 - protein, 9 aa, Homo Sapiens
APHEILIQI

SEQ ID NO: 124888 - protein, 9 aa, Homo Sapiens
APHLLRLFV

SEQ ID NO: 124889 - protein, 9 aa, Homo Sapiens
APHPGLSEA

SEQ ID NO: 124890 - protein, 9 aa, Homo Sapiens
APHPPLSVV

SEQ ID NO: 124891 - protein, 9 aa, Homo Sapiens
APIDRVGQT

SEQ ID NO: 124892 - protein, 9 aa, Homo Sapiens
APIHKVIRI

SEQ ID NO: 124893 - protein, 9 aa, Homo Sapiens
APIIRVGGA

SEQ ID NO: 124894 - protein, 9 aa, Homo Sapiens
APIKVRLLA

SEQ ID NO: 124895 - protein, 9 aa, Homo Sapiens
APIPNAPPA

SEQ ID NO: 124896 - protein, 9 aa, Homo Sapiens
APIQPTPVA

SEQ ID NO: 124897 - protein, 9 aa, Homo Sapiens
APIQSEPRV

SEQ ID NO: 124898 - protein, 9 aa, Homo Sapiens
APITGQVSA

SEQ ID NO: 124899 - protein, 9 aa, Homo Sapiens
APIWLEHAA

SEQ ID NO: 124900 - protein, 9 aa, Homo Sapiens
APKAGPGVV

SEQ ID NO: 124901 - protein, 9 aa, Homo Sapiens
APKAGQLEA

SEQ ID NO: 124902 - protein, 9 aa, Homo Sapiens
APKDCFIEV

SEQ ID NO: 124903 - protein, 9 aa, Homo Sapiens
APKEKGITA

SEQ ID NO: 124904 - protein, 9 aa, Homo Sapiens
APKFRLHSA

SEQ ID NO: 124905 - protein, 9 aa, Homo Sapiens
APKIGSNGV

SEQ ID NO: 124906 - protein, 9 aa, Homo Sapiens
APKLGSNIA

SEQ ID NO: 124907 - protein, 9 aa, Homo Sapiens
APKPPPPPP

SEQ ID NO: 124908 - protein, 9 aa, Homo Sapiens
APKPQGTKI

SEQ ID NO: 124909 - protein, 9 aa, Homo Sapiens
APKQKIVKP

SEQ ID NO: 124910 - protein, 9 aa, Homo Sapiens
APKSPSQDV

SEQ ID NO: 124911 - protein, 9 aa, Homo Sapiens
APKSTSVFA

SEQ ID NO: 124912 - protein, 9 aa, Homo Sapiens
APLQGQLVA

SEQ ID NO: 124913 - protein, 9 aa, Homo Sapiens
APLVKSLCA

SEQ ID NO: 124914 - protein, 9 aa, Homo Sapiens
APMPPIIHA

SEQ ID NO: 124915 - protein, 9 aa, Homo Sapiens
APMPTASTA

SEQ ID NO: 124916 - protein, 9 aa, Homo Sapiens
APNEGFCSA

SEQ ID NO: 124917 - protein, 9 aa, Homo Sapiens
APNPIHLTV

SEQ ID NO: 124918 - protein, 9 aa, Homo Sapiens
APNPVVFVA

SEQ ID NO: 124919 - protein, 9 aa, Homo Sapiens
APNTPAWEA

SEQ ID NO: 124920 - protein, 9 aa, Homo Sapiens
APPRPPRAA

SEQ ID NO: 124921 - protein, 9 aa, Homo Sapiens
APQSLGSSA

SEQ ID NO: 124922 - protein, 9 aa, Homo Sapiens
APRAAREAL

SEQ ID NO: 124923 - protein, 9 aa, Homo Sapiens
APRFGGSRA

SEQ ID NO: 124924 - protein, 9 aa, Homo Sapiens
APRIALHTA

SEQ ID NO: 124925 - protein, 9 aa, Homo Sapiens
APRLQSEVA

SEQ ID NO: 124926 - protein, 9 aa, Homo Sapiens
APRPGPRAV

SEQ ID NO: 124927 - protein, 9 aa, Homo Sapiens
APRPPPKPM

SEQ ID NO: 124928 - protein, 9 aa, Homo Sapiens
APRPPVSAA

SEQ ID NO: 124929 - protein, 9 aa, Homo Sapiens
APRPWSRNA

SEQ ID NO: 124930 - protein, 9 aa, Homo Sapiens
APRQPGLMA

SEQ ID NO: 124931 - protein, 9 aa, Homo Sapiens
APRTVALTA

SEQ ID NO: 124932 - protein, 9 aa, Homo Sapiens
APSDRMPSA

SEQ ID NO: 124933 - protein, 9 aa, Homo Sapiens
APSLRARAA

SEQ ID NO: 124934 - protein, 9 aa, Homo Sapiens
APSPVQHQA

SEQ ID NO: 124935 - protein, 9 aa, Homo Sapiens
APSVGIKAA

SEQ ID NO: 124936 - protein, 9 aa, Homo Sapiens
APTAIKAAA

SEQ ID NO: 124937 - protein, 9 aa, Homo Sapiens
APTGDLPRA

SEQ ID NO: 124938 - protein, 9 aa, Homo Sapiens
APTLGLLPA

SEQ ID NO: 124939 - protein, 9 aa, Homo Sapiens
APTLPGSAA

SEQ ID NO: 124940 - protein, 9 aa, Homo Sapiens
APTPPTLVA

SEQ ID NO: 124941 - protein, 9 aa, Homo Sapiens
APVAEVPTA

SEQ ID NO: 124942 - protein, 9 aa, Homo Sapiens
APVAVEPGA

SEQ ID NO: 124943 - protein, 9 aa, Homo Sapiens
APVGIALIA

SEQ ID NO: 124944 - protein, 9 aa, Homo Sapiens
APVLFAKAA

SEQ ID NO: 124945 - protein, 9 aa, Homo Sapiens
APVLLPSAA

SEQ ID NO: 124946 - protein, 9 aa, Homo Sapiens
APVLPHTAV

SEQ ID NO: 124947 - protein, 9 aa, Homo Sapiens
APVNVTTEV

SEQ ID NO: 124948 - protein, 9 aa, Homo Sapiens
APVPGIPTA

SEQ ID NO: 124949 - protein, 9 aa, Homo Sapiens
APVPTAPAA

SEQ ID NO: 124950 - protein, 9 aa, Homo Sapiens
APVRVGTQA

SEQ ID NO: 124951 - protein, 9 aa, Homo Sapiens
APYAVGREA

SEQ ID NO: 124952 - protein, 9 aa, Homo Sapiens
APYGGPIAL

SEQ ID NO: 124953 - protein, 9 aa, Homo Sapiens
APYGTLGAV

SEQ ID NO: 124954 - protein, 9 aa, Homo Sapiens
APYPGFLSV

SEQ ID NO: 124955 - protein, 9 aa, Homo Sapiens
APYTHFTQA

SEQ ID NO: 124956 - protein, 9 aa, Homo Sapiens
APYVTFPVA

SEQ ID NO: 124957 - protein, 9 aa, Homo Sapiens
ASAPPGPPA

SEQ ID NO: 124958 - protein, 9 aa, Homo Sapiens
AVAPPSTSA

SEQ ID NO: 124959 - protein, 9 aa, Homo Sapiens
AVKFPSKSA

SEQ ID NO: 124960 - protein, 9 aa, Homo Sapiens
AVKPLGPTA

SEQ ID NO: 124961 - protein, 9 aa, Homo Sapiens
AVRIPGGPA

SEQ ID NO: 124962 - protein, 9 aa, Homo Sapiens
CPMAGTPKA

SEQ ID NO: 124963 - protein, 9 aa, Homo Sapiens
EAIGKIPAA

SEQ ID NO: 124964 - protein, 9 aa, Homo Sapiens
EPGEDFPAA

SEQ ID NO: 124965 - protein, 9 aa, Homo Sapiens
EPSAGIPKV

SEQ ID NO: 124966 - protein, 9 aa, Homo Sapiens
FPAPILRAV

SEQ ID NO: 124967 - protein, 9 aa, Homo Sapiens
FPHLRVLEA

SEQ ID NO: 124968 - protein, 9 aa, Homo Sapiens
FPKHVIECA

SEQ ID NO: 124969 - protein, 9 aa, Homo Sapiens
FPLQPGKVA

SEQ ID NO: 124970 - protein, 9 aa, Homo Sapiens
FPMPLPRKA

SEQ ID NO: 124971 - protein, 9 aa, Homo Sapiens
FPRPVTVEP

SEQ ID NO: 124972 - protein, 9 aa, Homo Sapiens
FPRTPARSV

SEQ ID NO: 124973 - protein, 9 aa, Homo Sapiens
FPSSAFLRA

SEQ ID NO: 124974 - protein, 9 aa, Homo Sapiens
FPVGKGLAA

SEQ ID NO: 124975 - protein, 9 aa, Homo Sapiens
FPVRLLVAA

SEQ ID NO: 124976 - protein, 9 aa, Homo Sapiens
FPYMTHPSV

SEQ ID NO: 124977 - protein, 9 aa, Homo Sapiens
GPALRVPVA

SEQ ID NO: 124978 - protein, 9 aa, Homo Sapiens
GPHAGKLVA

SEQ ID NO: 124979 - protein, 9 aa, Homo Sapiens
GPLPMHPAA

SEQ ID NO: 124980 - protein, 9 aa, Homo Sapiens
GPRLSAEAA

SEQ ID NO: 124981 - protein, 9 aa, Homo Sapiens
GPSGCLVPA

SEQ ID NO: 124982 - protein, 9 aa, Homo Sapiens
GPYKIILTA

SEQ ID NO: 124983 - protein, 9 aa, Homo Sapiens
GPYRAFRVA

SEQ ID NO: 124984 - protein, 9 aa, Homo Sapiens
HPAPVRGPP

SEQ ID NO: 124985 - protein, 9 aa, Homo Sapiens
HPARLTIEA

SEQ ID NO: 124986 - protein, 9 aa, Homo Sapiens
HPFERIATP

SEQ ID NO: 124987 - protein, 9 aa, Homo Sapiens
HPHPFLNSV

SEQ ID NO: 124988 - protein, 9 aa, Homo Sapiens
HPIDDLQSA

SEQ ID NO: 124989 - protein, 9 aa, Homo Sapiens
HPIHIIPAS

SEQ ID NO: 124990 - protein, 9 aa, Homo Sapiens
HPITAKAIA

SEQ ID NO: 124991 - protein, 9 aa, Homo Sapiens
HPKKPGPSL

SEQ ID NO: 124992 - protein, 9 aa, Homo Sapiens
HPKKPGVGV

SEQ ID NO: 124993 - protein, 9 aa, Homo Sapiens
HPKPEGLAA

SEQ ID NO: 124994 - protein, 9 aa, Homo Sapiens
HPKTGRISV

SEQ ID NO: 124995 - protein, 9 aa, Homo Sapiens
HPLPIWTPA

SEQ ID NO: 124996 - protein, 9 aa, Homo Sapiens
HPLSSCLTA

SEQ ID NO: 124997 - protein, 9 aa, Homo Sapiens
HPMAYQLQL

SEQ ID NO: 124998 - protein, 9 aa, Homo Sapiens
HPMPVLPKA

SEQ ID NO: 124999 - protein, 9 aa, Homo Sapiens
HPNNQKLMA

SEQ ID NO: 125000 - protein, 9 aa, Homo Sapiens
HPNQQHVVA

SEQ ID NO: 125001 - protein, 9 aa, Homo Sapiens
HPRLRPQSA

SEQ ID NO: 125002 - protein, 9 aa, Homo Sapiens
HPRTSITVV

SEQ ID NO: 125003 - protein, 9 aa, Homo Sapiens
HPSPVVLKV

SEQ ID NO: 125004 - protein, 9 aa, Homo Sapiens
HPSQELLAS

SEQ ID NO: 125005 - protein, 9 aa, Homo Sapiens
HPSTEHMVA

SEQ ID NO: 125006 - protein, 9 aa, Homo Sapiens
HPTWALKEA

SEQ ID NO: 125007 - protein, 9 aa, Homo Sapiens
HPVAKILHA

SEQ ID NO: 125008 - protein, 9 aa, Homo Sapiens
HPWLFIEEA

SEQ ID NO: 125009 - protein, 9 aa, Homo Sapiens
HPYGHQPTA

SEQ ID NO: 125010 - protein, 9 aa, Homo Sapiens
HPYKHSFRA

SEQ ID NO: 125011 - protein, 9 aa, Homo Sapiens
HPYLFPVAA

SEQ ID NO: 125012 - protein, 9 aa, Homo Sapiens
HPYLPINSA

SEQ ID NO: 125013 - protein, 9 aa, Homo Sapiens
HPYPPGPGV

SEQ ID NO: 125014 - protein, 9 aa, Homo Sapiens
HPYQRIVTA

SEQ ID NO: 125015 - protein, 9 aa, Homo Sapiens
HPYRLILTV

SEQ ID NO: 125016 - protein, 9 aa, Homo Sapiens
IAHTPGVAA

SEQ ID NO: 125017 - protein, 9 aa, Homo Sapiens
IIKEVLLEA

SEQ ID NO: 125018 - protein, 9 aa, Homo Sapiens
IIKHIGTSA

SEQ ID NO: 125019 - protein, 9 aa, Homo Sapiens
IITKDSHAL

SEQ ID NO: 125020 - protein, 9 aa, Homo Sapiens
INKKEGICA

SEQ ID NO: 125021 - protein, 9 aa, Homo Sapiens
IPAALPVAA

SEQ ID NO: 125022 - protein, 9 aa, Homo Sapiens
IPATPGIGA

SEQ ID NO: 125023 - protein, 9 aa, Homo Sapiens
IPFGITEEA

SEQ ID NO: 125024 - protein, 9 aa, Homo Sapiens
IPFWRNTAV

SEQ ID NO: 125025 - protein, 9 aa, Homo Sapiens
IPFYGILGA

SEQ ID NO: 125026 - protein, 9 aa, Homo Sapiens
IPHKKFTFA

SEQ ID NO: 125027 - protein, 9 aa, Homo Sapiens
IPHLVTHDA

SEQ ID NO: 125028 - protein, 9 aa, Homo Sapiens
IPHPLIMGV

SEQ ID NO: 125029 - protein, 9 aa, Homo Sapiens
IPIGGGTSV

SEQ ID NO: 125030 - protein, 9 aa, Homo Sapiens
IPISPISPA

SEQ ID NO: 125031 - protein, 9 aa, Homo Sapiens
IPKDKSWKA

SEQ ID NO: 125032 - protein, 9 aa, Homo Sapiens
IPKDYKTMA

SEQ ID NO: 125033 - protein, 9 aa, Homo Sapiens
IPKGLIRSA

SEQ ID NO: 125034 - protein, 9 aa, Homo Sapiens
IPKHINPVA

SEQ ID NO: 125035 - protein, 9 aa, Homo Sapiens
IPKKGFVEV

SEQ ID NO: 125036 - protein, 9 aa, Homo Sapiens
IPKKHISQI

SEQ ID NO: 125037 - protein, 9 aa, Homo Sapiens
IPKKLMHQA

SEQ ID NO: 125038 - protein, 9 aa, Homo Sapiens
IPKKMSHMA

SEQ ID NO: 125039 - protein, 9 aa, Homo Sapiens
IPKPEFPRA

SEQ ID NO: 125040 - protein, 9 aa, Homo Sapiens
IPKPEQLSA

SEQ ID NO: 125041 - protein, 9 aa, Homo Sapiens
IPKSFMISA

SEQ ID NO: 125042 - protein, 9 aa, Homo Sapiens
IPKYPTNPP

SEQ ID NO: 125043 - protein, 9 aa, Homo Sapiens
IPLDKRLAA

SEQ ID NO: 125044 - protein, 9 aa, Homo Sapiens
IPLGFGVAA

SEQ ID NO: 125045 - protein, 9 aa, Homo Sapiens
IPLKEMPAV

SEQ ID NO: 125046 - protein, 9 aa, Homo Sapiens
IPLPLEPQV

SEQ ID NO: 125047 - protein, 9 aa, Homo Sapiens
IPMRDFVCA

SEQ ID NO: 125048 - protein, 9 aa, Homo Sapiens
IPNFPRSTV

SEQ ID NO: 125049 - protein, 9 aa, Homo Sapiens
IPNNVKTAV

SEQ ID NO: 125050 - protein, 9 aa, Homo Sapiens
IPQKFHRSV

SEQ ID NO: 125051 - protein, 9 aa, Homo Sapiens
IPQKPSQPA

SEQ ID NO: 125052 - protein, 9 aa, Homo Sapiens
IPQNQKAIA

SEQ ID NO: 125053 - protein, 9 aa, Homo Sapiens
IPRQLGEVA

SEQ ID NO: 125054 - protein, 9 aa, Homo Sapiens
IPRSFLQEA

SEQ ID NO: 125055 - protein, 9 aa, Homo Sapiens
IPRSFMMEV

SEQ ID NO: 125056 - protein, 9 aa, Homo Sapiens
IPSGTILKA

SEQ ID NO: 125057 - protein, 9 aa, Homo Sapiens
IPTENSMTA

SEQ ID NO: 125058 - protein, 9 aa, Homo Sapiens
IPVGKSPMV

SEQ ID NO: 125059 - protein, 9 aa, Homo Sapiens
IPVIRPRAF

SEQ ID NO: 125060 - protein, 9 aa, Homo Sapiens
IPVKSSPQA

SEQ ID NO: 125061 - protein, 9 aa, Homo Sapiens
IPVNGGLAA

SEQ ID NO: 125062 - protein, 9 aa, Homo Sapiens
IPWGISATA

SEQ ID NO: 125063 - protein, 9 aa, Homo Sapiens
IPYAHSPSV

SEQ ID NO: 125064 - protein, 9 aa, Homo Sapiens
IPYGMRFIA

SEQ ID NO: 125065 - protein, 9 aa, Homo Sapiens
IPYHIVNIV

SEQ ID NO: 125066 - protein, 9 aa, Homo Sapiens
IPYPRPIHL

SEQ ID NO: 125067 - protein, 9 aa, Homo Sapiens
IPYQDLPHL

SEQ ID NO: 125068 - protein, 9 aa, Homo Sapiens
IPYQPMPAS

SEQ ID NO: 125069 - protein, 9 aa, Homo Sapiens
IPYRVIHNA

SEQ ID NO: 125070 - protein, 9 aa, Homo Sapiens
ITAPPGTAA

SEQ ID NO: 125071 - protein, 9 aa, Homo Sapiens
IVKPISRGA

SEQ ID NO: 125072 - protein, 9 aa, Homo Sapiens
IVKPVKVSA

SEQ ID NO: 125073 - protein, 9 aa, Homo Sapiens
KAIDYYLKA

SEQ ID NO: 125074 - protein, 9 aa, Homo Sapiens
KAKKPALVA

SEQ ID NO: 125075 - protein, 9 aa, Homo Sapiens
KGYFFPTSA

SEQ ID NO: 125076 - protein, 9 aa, Homo Sapiens
KLKPGGVGA

SEQ ID NO: 125077 - protein, 9 aa, Homo Sapiens
KPAESLPVI

SEQ ID NO: 125078 - protein, 9 aa, Homo Sapiens
KPAKQQPKL

SEQ ID NO: 125079 - protein, 9 aa, Homo Sapiens
KPALKIPQT

SEQ ID NO: 125080 - protein, 9 aa, Homo Sapiens
KPAMPMQQA

SEQ ID NO: 125081 - protein, 9 aa, Homo Sapiens
KPAMPRSVV

SEQ ID NO: 125082 - protein, 9 aa, Homo Sapiens
KPANVFITA

SEQ ID NO: 125083 - protein, 9 aa, Homo Sapiens
KPAPKVSAA

SEQ ID NO: 125084 - protein, 9 aa, Homo Sapiens
KPAPPFNVT

SEQ ID NO: 125085 - protein, 9 aa, Homo Sapiens
KPASRVLVA

SEQ ID NO: 125086 - protein, 9 aa, Homo Sapiens
KPAVPTVAS

SEQ ID NO: 125087 - protein, 9 aa, Homo Sapiens
KPEEGFRTA

SEQ ID NO: 125088 - protein, 9 aa, Homo Sapiens
KPFAYVSEA

SEQ ID NO: 125089 - protein, 9 aa, Homo Sapiens
KPFCAAAAA

SEQ ID NO: 125090 - protein, 9 aa, Homo Sapiens
KPFKEFVEA

SEQ ID NO: 125091 - protein, 9 aa, Homo Sapiens
KPFLLPVEA

SEQ ID NO: 125092 - protein, 9 aa, Homo Sapiens
KPFQEYLEA

SEQ ID NO: 125093 - protein, 9 aa, Homo Sapiens
KPGLRPRTA

SEQ ID NO: 125094 - protein, 9 aa, Homo Sapiens
KPHAIIILP

SEQ ID NO: 125095 - protein, 9 aa, Homo Sapiens
KPHPVTVTT

SEQ ID NO: 125096 - protein, 9 aa, Homo Sapiens
KPHSGFHVA

SEQ ID NO: 125097 - protein, 9 aa, Homo Sapiens
KPIFSLNTV

SEQ ID NO: 125098 - protein, 9 aa, Homo Sapiens
KPIVQIAVI

SEQ ID NO: 125099 - protein, 9 aa, Homo Sapiens
KPKAPPPSL

SEQ ID NO: 125100 - protein, 9 aa, Homo Sapiens
KPKEPPKVP

SEQ ID NO: 125101 - protein, 9 aa, Homo Sapiens
KPKEPQPEV

SEQ ID NO: 125102 - protein, 9 aa, Homo Sapiens
KPKIFIIQA

SEQ ID NO: 125103 - protein, 9 aa, Homo Sapiens
KPKIPKGVS

SEQ ID NO: 125104 - protein, 9 aa, Homo Sapiens
KPKITPVTV

SEQ ID NO: 125105 - protein, 9 aa, Homo Sapiens
KPKKPGKYI

SEQ ID NO: 125106 - protein, 9 aa, Homo Sapiens
KPKPIGKLA

SEQ ID NO: 125107 - protein, 9 aa, Homo Sapiens
KPKPPPVRA

SEQ ID NO: 125108 - protein, 9 aa, Homo Sapiens
KPKQPPKPP

SEQ ID NO: 125109 - protein, 9 aa, Homo Sapiens
KPKSLWKSV

SEQ ID NO: 125110 - protein, 9 aa, Homo Sapiens
KPKSSLPAV

SEQ ID NO: 125111 - protein, 9 aa, Homo Sapiens
KPKVIIIQA

SEQ ID NO: 125112 - protein, 9 aa, Homo Sapiens
KPKVPLKSA

SEQ ID NO: 125113 - protein, 9 aa, Homo Sapiens
KPLEKPLKL

SEQ ID NO: 125114 - protein, 9 aa, Homo Sapiens
KPLEPVSTV

SEQ ID NO: 125115 - protein, 9 aa, Homo Sapiens
KPLGKSPQV

SEQ ID NO: 125116 - protein, 9 aa, Homo Sapiens
KPLKEFVEA

SEQ ID NO: 125117 - protein, 9 aa, Homo Sapiens
KPLKGARIA

SEQ ID NO: 125118 - protein, 9 aa, Homo Sapiens
KPLPPIQVA

SEQ ID NO: 125119 - protein, 9 aa, Homo Sapiens
KPLQPARPV

SEQ ID NO: 125120 - protein, 9 aa, Homo Sapiens
KPLYLARVT

SEQ ID NO: 125121 - protein, 9 aa, Homo Sapiens
KPMEGWIAV

SEQ ID NO: 125122 - protein, 9 aa, Homo Sapiens
KPMEIARIV

SEQ ID NO: 125123 - protein, 9 aa, Homo Sapiens
KPMEKLLGL

SEQ ID NO: 125124 - protein, 9 aa, Homo Sapiens
KPMKSVLVV

SEQ ID NO: 125125 - protein, 9 aa, Homo Sapiens
KPMNEYRSV

SEQ ID NO: 125126 - protein, 9 aa, Homo Sapiens
KPNKPLILA

SEQ ID NO: 125127 - protein, 9 aa, Homo Sapiens
KPPAILPVA

SEQ ID NO: 125128 - protein, 9 aa, Homo Sapiens
KPPPPPPAP

SEQ ID NO: 125129 - protein, 9 aa, Homo Sapiens
KPQANVPSA

SEQ ID NO: 125130 - protein, 9 aa, Homo Sapiens
KPQATVVSA

SEQ ID NO: 125131 - protein, 9 aa, Homo Sapiens
KPQPSILQA

SEQ ID NO: 125132 - protein, 9 aa, Homo Sapiens
KPQRGMPKV

SEQ ID NO: 125133 - protein, 9 aa, Homo Sapiens
KPRPPPPPP

SEQ ID NO: 125134 - protein, 9 aa, Homo Sapiens
KPRPVSQLV

SEQ ID NO: 125135 - protein, 9 aa, Homo Sapiens
KPTGGLPET

SEQ ID NO: 125136 - protein, 9 aa, Homo Sapiens
KPTHFTVNA

SEQ ID NO: 125137 - protein, 9 aa, Homo Sapiens
KPVAIFKTP

SEQ ID NO: 125138 - protein, 9 aa, Homo Sapiens
KPVEAAVVA

SEQ ID NO: 125139 - protein, 9 aa, Homo Sapiens
KPVEVTESA

SEQ ID NO: 125140 - protein, 9 aa, Homo Sapiens
KPYCNEIHA

SEQ ID NO: 125141 - protein, 9 aa, Homo Sapiens
KPYEKVRIY

SEQ ID NO: 125142 - protein, 9 aa, Homo Sapiens
KPYESYIGA

SEQ ID NO: 125143 - protein, 9 aa, Homo Sapiens
KPYNVYITV

SEQ ID NO: 125144 - protein, 9 aa, Homo Sapiens
KPYPNSEAA

SEQ ID NO: 125145 - protein, 9 aa, Homo Sapiens
KPYTLMSMV

SEQ ID NO: 125146 - protein, 9 aa, Homo Sapiens
LAAARLAAA

SEQ ID NO: 125147 - protein, 9 aa, Homo Sapiens
LAAGPSAAA

SEQ ID NO: 125148 - protein, 9 aa, Homo Sapiens
LAGPLRPAA

SEQ ID NO: 125149 - protein, 9 aa, Homo Sapiens
LAHAAFSAA

SEQ ID NO: 125150 - protein, 9 aa, Homo Sapiens
LAKAVATEA

SEQ ID NO: 125151 - protein, 9 aa, Homo Sapiens
LARPAALTA

SEQ ID NO: 125152 - protein, 9 aa, Homo Sapiens
LARPPSGRA

SEQ ID NO: 125153 - protein, 9 aa, Homo Sapiens
LGLPHNQLA

SEQ ID NO: 125154 - protein, 9 aa, Homo Sapiens
LHPAPPNGL

SEQ ID NO: 125155 - protein, 9 aa, Homo Sapiens
LIKPESKVA

SEQ ID NO: 125156 - protein, 9 aa, Homo Sapiens
LIYGTPRAA

SEQ ID NO: 125157 - protein, 9 aa, Homo Sapiens
LLKERGISA

SEQ ID NO: 125158 - protein, 9 aa, Homo Sapiens
LLRGVGAAA

SEQ ID NO: 125159 - protein, 9 aa, Homo Sapiens
LNRLPGAAA

SEQ ID NO: 125160 - protein, 9 aa, Homo Sapiens
LPAEAVEAA

SEQ ID NO: 125161 - protein, 9 aa, Homo Sapiens
LPAGILPMV

SEQ ID NO: 125162 - protein, 9 aa, Homo Sapiens
LPAPPAVSA

SEQ ID NO: 125163 - protein, 9 aa, Homo Sapiens
LPASETPKA

SEQ ID NO: 125164 - protein, 9 aa, Homo Sapiens
LPATSIPTP

SEQ ID NO: 125165 - protein, 9 aa, Homo Sapiens
LPCEVKVVA

SEQ ID NO: 125166 - protein, 9 aa, Homo Sapiens
LPCFNGRVV

SEQ ID NO: 125167 - protein, 9 aa, Homo Sapiens
LPDGRIIKV

SEQ ID NO: 125168 - protein, 9 aa, Homo Sapiens
LPFDHSRVI

SEQ ID NO: 125169 - protein, 9 aa, Homo Sapiens
LPFRVIPLV

SEQ ID NO: 125170 - protein, 9 aa, Homo Sapiens
LPFSSMPTA

SEQ ID NO: 125171 - protein, 9 aa, Homo Sapiens
LPHGFTNMA

SEQ ID NO: 125172 - protein, 9 aa, Homo Sapiens
LPHHRVIEV

SEQ ID NO: 125173 - protein, 9 aa, Homo Sapiens
LPHKIHYAA

SEQ ID NO: 125174 - protein, 9 aa, Homo Sapiens
LPHPGLKVA

SEQ ID NO: 125175 - protein, 9 aa, Homo Sapiens
LPHPYAIAV

SEQ ID NO: 125176 - protein, 9 aa, Homo Sapiens
LPHSAGRYA

SEQ ID NO: 125177 - protein, 9 aa, Homo Sapiens
LPKDQQITA

SEQ ID NO: 125178 - protein, 9 aa, Homo Sapiens
LPKEKQPVA

SEQ ID NO: 125179 - protein, 9 aa, Homo Sapiens
LPKINSHPT

SEQ ID NO: 125180 - protein, 9 aa, Homo Sapiens
LPKIPSNAT

SEQ ID NO: 125181 - protein, 9 aa, Homo Sapiens
LPKPGFLGA

SEQ ID NO: 125182 - protein, 9 aa, Homo Sapiens
LPKPHGIRA

SEQ ID NO: 125183 - protein, 9 aa, Homo Sapiens
LPKPPGRGV

SEQ ID NO: 125184 - protein, 9 aa, Homo Sapiens
LPKPPKPVS

SEQ ID NO: 125185 - protein, 9 aa, Homo Sapiens
LPKPVQKPP

SEQ ID NO: 125186 - protein, 9 aa, Homo Sapiens
LPKSTVNGV

SEQ ID NO: 125187 - protein, 9 aa, Homo Sapiens
LPLGRKKGA

SEQ ID NO: 125188 - protein, 9 aa, Homo Sapiens
LPLGSRPAP

SEQ ID NO: 125189 - protein, 9 aa, Homo Sapiens
LPLLARPAA

SEQ ID NO: 125190 - protein, 9 aa, Homo Sapiens
LPLSLLKTA

SEQ ID NO: 125191 - protein, 9 aa, Homo Sapiens
LPMDYVQRV

SEQ ID NO: 125192 - protein, 9 aa, Homo Sapiens
LPMTDKRVA

SEQ ID NO: 125193 - protein, 9 aa, Homo Sapiens
LPNAVITRI

SEQ ID NO: 125194 - protein, 9 aa, Homo Sapiens
LPNQTVLKI

SEQ ID NO: 125195 - protein, 9 aa, Homo Sapiens
LPPKDGKVA

SEQ ID NO: 125196 - protein, 9 aa, Homo Sapiens
LPQGPMQNA

SEQ ID NO: 125197 - protein, 9 aa, Homo Sapiens
LPRDRQVVA

SEQ ID NO: 125198 - protein, 9 aa, Homo Sapiens
LPRDVLTRA

SEQ ID NO: 125199 - protein, 9 aa, Homo Sapiens
LPRGFPPSA

SEQ ID NO: 125200 - protein, 9 aa, Homo Sapiens
LPRKPVAGA

SEQ ID NO: 125201 - protein, 9 aa, Homo Sapiens
LPRLDTGTA

SEQ ID NO: 125202 - protein, 9 aa, Homo Sapiens
LPRPQGAAA

SEQ ID NO: 125203 - protein, 9 aa, Homo Sapiens
LPRPVPLVA

SEQ ID NO: 125204 - protein, 9 aa, Homo Sapiens
LPRRPLPPA

SEQ ID NO: 125205 - protein, 9 aa, Homo Sapiens
LPSSHALEA

SEQ ID NO: 125206 - protein, 9 aa, Homo Sapiens
LPSSLKRIA

SEQ ID NO: 125207 - protein, 9 aa, Homo Sapiens
LPSVPLSCA

SEQ ID NO: 125208 - protein, 9 aa, Homo Sapiens
LPTIRVPKA

SEQ ID NO: 125209 - protein, 9 aa, Homo Sapiens
LPVGPGRRA

SEQ ID NO: 125210 - protein, 9 aa, Homo Sapiens
LPWPGGSAA

SEQ ID NO: 125211 - protein, 9 aa, Homo Sapiens
LPWQGLKAA

SEQ ID NO: 125212 - protein, 9 aa, Homo Sapiens
LPYAITIVA

SEQ ID NO: 125213 - protein, 9 aa, Homo Sapiens
LPYDIPHRA

SEQ ID NO: 125214 - protein, 9 aa, Homo Sapiens
LPYHHVIHA

SEQ ID NO: 125215 - protein, 9 aa, Homo Sapiens
LPYHISSTA

SEQ ID NO: 125216 - protein, 9 aa, Homo Sapiens
LPYKWVVEA

SEQ ID NO: 125217 - protein, 9 aa, Homo Sapiens
LPYLGVHGA

SEQ ID NO: 125218 - protein, 9 aa, Homo Sapiens
LPYNGVTVA

SEQ ID NO: 125219 - protein, 9 aa, Homo Sapiens
LPYNGVVLA

SEQ ID NO: 125220 - protein, 9 aa, Homo Sapiens
LPYSDFPRP

SEQ ID NO: 125221 - protein, 9 aa, Homo Sapiens
LTKDRGVAA

SEQ ID NO: 125222 - protein, 9 aa, Homo Sapiens
LTKPAALAA

SEQ ID NO: 125223 - protein, 9 aa, Homo Sapiens
LVAPPLPAA

SEQ ID NO: 125224 - protein, 9 aa, Homo Sapiens
LVASVRVPA

SEQ ID NO: 125225 - protein, 9 aa, Homo Sapiens
LVGPVLGAA

SEQ ID NO: 125226 - protein, 9 aa, Homo Sapiens
LVKDVFISA

SEQ ID NO: 125227 - protein, 9 aa, Homo Sapiens
LVRPPTEQA

SEQ ID NO: 125228 - protein, 9 aa, Homo Sapiens
MAKPPGSLA

SEQ ID NO: 125229 - protein, 9 aa, Homo Sapiens
MAPLKMLAL

SEQ ID NO: 125230 - protein, 9 aa, Homo Sapiens
MAYGSSLAA

SEQ ID NO: 125231 - protein, 9 aa, Homo Sapiens
MPAAALNAA

SEQ ID NO: 125232 - protein, 9 aa, Homo Sapiens
MPADSGYPA

SEQ ID NO: 125233 - protein, 9 aa, Homo Sapiens
MPAFPLPYA

SEQ ID NO: 125234 - protein, 9 aa, Homo Sapiens
MPAGLIAGA

SEQ ID NO: 125235 - protein, 9 aa, Homo Sapiens
MPAGSFITA

SEQ ID NO: 125236 - protein, 9 aa, Homo Sapiens
MPAGTKLIA

SEQ ID NO: 125237 - protein, 9 aa, Homo Sapiens
MPAHFSDSA

SEQ ID NO: 125238 - protein, 9 aa, Homo Sapiens
MPATLARAA

SEQ ID NO: 125239 - protein, 9 aa, Homo Sapiens
MPFGNVISA

SEQ ID NO: 125240 - protein, 9 aa, Homo Sapiens
MPFGNVVSA

SEQ ID NO: 125241 - protein, 9 aa, Homo Sapiens
MPFPNIRSA

SEQ ID NO: 125242 - protein, 9 aa, Homo Sapiens
MPHSPTLRV

SEQ ID NO: 125243 - protein, 9 aa, Homo Sapiens
MPITGQLSA

SEQ ID NO: 125244 - protein, 9 aa, Homo Sapiens
MPKAEKNAV

SEQ ID NO: 125245 - protein, 9 aa, Homo Sapiens
MPKYAPKAA

SEQ ID NO: 125246 - protein, 9 aa, Homo Sapiens
MPLLKSEVA

SEQ ID NO: 125247 - protein, 9 aa, Homo Sapiens
MPLSTIREV

SEQ ID NO: 125248 - protein, 9 aa, Homo Sapiens
MPNPSLAQV

SEQ ID NO: 125249 - protein, 9 aa, Homo Sapiens
MPPLPGRAA

SEQ ID NO: 125250 - protein, 9 aa, Homo Sapiens
MPPPVGMVA

SEQ ID NO: 125251 - protein, 9 aa, Homo Sapiens
MPQDLRSPA

SEQ ID NO: 125252 - protein, 9 aa, Homo Sapiens
MPRDILIVV

SEQ ID NO: 125253 - protein, 9 aa, Homo Sapiens
MPRHRFMSA

SEQ ID NO: 125254 - protein, 9 aa, Homo Sapiens
MPRRNFPIA

SEQ ID NO: 125255 - protein, 9 aa, Homo Sapiens
MPSSVPLRA

SEQ ID NO: 125256 - protein, 9 aa, Homo Sapiens
MPVENGLRA

SEQ ID NO: 125257 - protein, 9 aa, Homo Sapiens
MPVERILEA

SEQ ID NO: 125258 - protein, 9 aa, Homo Sapiens
MPVGLIAGA

SEQ ID NO: 125259 - protein, 9 aa, Homo Sapiens
MPVPAQPKA

SEQ ID NO: 125260 - protein, 9 aa, Homo Sapiens
MPWYQRRIA

SEQ ID NO: 125261 - protein, 9 aa, Homo Sapiens
MPYFLLTQA

SEQ ID NO: 125262 - protein, 9 aa, Homo Sapiens
MPYLIGVHA

SEQ ID NO: 125263 - protein, 9 aa, Homo Sapiens
MPYSGMTGA

SEQ ID NO: 125264 - protein, 9 aa, Homo Sapiens
MVLPRKPVA

SEQ ID NO: 125265 - protein, 9 aa, Homo Sapiens
NPAIFRLIA

SEQ ID NO: 125266 - protein, 9 aa, Homo Sapiens
NPAPPIDAV

SEQ ID NO: 125267 - protein, 9 aa, Homo Sapiens
NPFGGASHA

SEQ ID NO: 125268 - protein, 9 aa, Homo Sapiens
NPFKGSSGA

SEQ ID NO: 125269 - protein, 9 aa, Homo Sapiens
NPFRSKLAA

SEQ ID NO: 125270 - protein, 9 aa, Homo Sapiens
NPLSTTSSA

SEQ ID NO: 125271 - protein, 9 aa, Homo Sapiens
NPMVVANAV

SEQ ID NO: 125272 - protein, 9 aa, Homo Sapiens
NPTQFVPAA

SEQ ID NO: 125273 - protein, 9 aa, Homo Sapiens
NPVTGLLSA

SEQ ID NO: 125274 - protein, 9 aa, Homo Sapiens
NPYATLPRA

SEQ ID NO: 125275 - protein, 9 aa, Homo Sapiens
NPYHNAVHA

SEQ ID NO: 125276 - protein, 9 aa, Homo Sapiens
NPYTIFHQA

SEQ ID NO: 125277 - protein, 9 aa, Homo Sapiens
NPYYGGESA

SEQ ID NO: 125278 - protein, 9 aa, Homo Sapiens
PHPATGKTV

SEQ ID NO: 125279 - protein, 9 aa, Homo Sapiens
PHSAGRYAA

SEQ ID NO: 125280 - protein, 9 aa, Homo Sapiens
PITPRAAPL

SEQ ID NO: 125281 - protein, 9 aa, Homo Sapiens
QPAPAIHSA

SEQ ID NO: 125282 - protein, 9 aa, Homo Sapiens
QPFAVPHSA

SEQ ID NO: 125283 - protein, 9 aa, Homo Sapiens
QPGASGMVA

SEQ ID NO: 125284 - protein, 9 aa, Homo Sapiens
QPHHIGVAV

SEQ ID NO: 125285 - protein, 9 aa, Homo Sapiens
QPHSSALTA

SEQ ID NO: 125286 - protein, 9 aa, Homo Sapiens
QPHVNGRLA

SEQ ID NO: 125287 - protein, 9 aa, Homo Sapiens
QPIFAVTSA

SEQ ID NO: 125288 - protein, 9 aa, Homo Sapiens
QPILLELEA

SEQ ID NO: 125289 - protein, 9 aa, Homo Sapiens
QPKEKISKV

SEQ ID NO: 125290 - protein, 9 aa, Homo Sapiens
QPKIHGKQV

SEQ ID NO: 125291 - protein, 9 aa, Homo Sapiens
QPKYPRKSA

SEQ ID NO: 125292 - protein, 9 aa, Homo Sapiens
QPLLPYSAV

SEQ ID NO: 125293 - protein, 9 aa, Homo Sapiens
QPLPATHAA

SEQ ID NO: 125294 - protein, 9 aa, Homo Sapiens
QPLPMAHCA

SEQ ID NO: 125295 - protein, 9 aa, Homo Sapiens
QPNSGLLQA

SEQ ID NO: 125296 - protein, 9 aa, Homo Sapiens
QPRYPVNSV

SEQ ID NO: 125297 - protein, 9 aa, Homo Sapiens
QPSAPGHSV

SEQ ID NO: 125298 - protein, 9 aa, Homo Sapiens
QPSEVLRTV

SEQ ID NO: 125299 - protein, 9 aa, Homo Sapiens
QPSHLMRQV

SEQ ID NO: 125300 - protein, 9 aa, Homo Sapiens
QPSSLLPLA

SEQ ID NO: 125301 - protein, 9 aa, Homo Sapiens
QPSWSIRTA

SEQ ID NO: 125302 - protein, 9 aa, Homo Sapiens
QPTDALLCV

SEQ ID NO: 125303 - protein, 9 aa, Homo Sapiens
QPTPQVPQV

SEQ ID NO: 125304 - protein, 9 aa, Homo Sapiens
QPTPVNIRA

SEQ ID NO: 125305 - protein, 9 aa, Homo Sapiens
QPVPPGRAA

SEQ ID NO: 125306 - protein, 9 aa, Homo Sapiens
QPWRGGAGA

SEQ ID NO: 125307 - protein, 9 aa, Homo Sapiens
QPYMPTVSA

SEQ ID NO: 125308 - protein, 9 aa, Homo Sapiens
QPYNSRPAV

SEQ ID NO: 125309 - protein, 9 aa, Homo Sapiens
QPYQPLREV

SEQ ID NO: 125310 - protein, 9 aa, Homo Sapiens
QPYSKLPGV

SEQ ID NO: 125311 - protein, 9 aa, Homo Sapiens
RAHLPTKEA

SEQ ID NO: 125312 - protein, 9 aa, Homo Sapiens
RAKLVSKIA

SEQ ID NO: 125313 - protein, 9 aa, Homo Sapiens
RIFDRAVAA

SEQ ID NO: 125314 - protein, 9 aa, Homo Sapiens
RIKPPGPTA

SEQ ID NO: 125315 - protein, 9 aa, Homo Sapiens
RLRNHMAVA

SEQ ID NO: 125316 - protein, 9 aa, Homo Sapiens
RPAAPLIGA

SEQ ID NO: 125317 - protein, 9 aa, Homo Sapiens
RPADVIFAT

SEQ ID NO: 125318 - protein, 9 aa, Homo Sapiens
RPADYLFML

SEQ ID NO: 125319 - protein, 9 aa, Homo Sapiens
RPAEKLSTA

SEQ ID NO: 125320 - protein, 9 aa, Homo Sapiens
RPAEPAFLA

SEQ ID NO: 125321 - protein, 9 aa, Homo Sapiens
RPAFVIPEV

SEQ ID NO: 125322 - protein, 9 aa, Homo Sapiens
RPALFSSSA

SEQ ID NO: 125323 - protein, 9 aa, Homo Sapiens
RPAPPPPTV

SEQ ID NO: 125324 - protein, 9 aa, Homo Sapiens
RPAPPRAPA

SEQ ID NO: 125325 - protein, 9 aa, Homo Sapiens
RPAPVAVAA

SEQ ID NO: 125326 - protein, 9 aa, Homo Sapiens
RPAPVLVSA

SEQ ID NO: 125327 - protein, 9 aa, Homo Sapiens
RPDGKLRYA

SEQ ID NO: 125328 - protein, 9 aa, Homo Sapiens
RPDKRFRLA

SEQ ID NO: 125329 - protein, 9 aa, Homo Sapiens
RPEEGRPVV

SEQ ID NO: 125330 - protein, 9 aa, Homo Sapiens
RPEHLGSSA

SEQ ID NO: 125331 - protein, 9 aa, Homo Sapiens
RPFHGISTV

SEQ ID NO: 125332 - protein, 9 aa, Homo Sapiens
RPFIGMSSA

SEQ ID NO: 125333 - protein, 9 aa, Homo Sapiens
RPFQNQTHA

SEQ ID NO: 125334 - protein, 9 aa, Homo Sapiens
RPFQSIIHA

SEQ ID NO: 125335 - protein, 9 aa, Homo Sapiens
RPFRLGTGA

SEQ ID NO: 125336 - protein, 9 aa, Homo Sapiens
RPFTNLESA

SEQ ID NO: 125337 - protein, 9 aa, Homo Sapiens
RPGPVLPAV

SEQ ID NO: 125338 - protein, 9 aa, Homo Sapiens
RPHAPGRPA

SEQ ID NO: 125339 - protein, 9 aa, Homo Sapiens
RPHAPGTPA

SEQ ID NO: 125340 - protein, 9 aa, Homo Sapiens
RPHEGTRPV

SEQ ID NO: 125341 - protein, 9 aa, Homo Sapiens
RPHRGILAV

SEQ ID NO: 125342 - protein, 9 aa, Homo Sapiens
RPIASGPVV

SEQ ID NO: 125343 - protein, 9 aa, Homo Sapiens
RPIDHWDAV

SEQ ID NO: 125344 - protein, 9 aa, Homo Sapiens
RPIDTSRLT

SEQ ID NO: 125345 - protein, 9 aa, Homo Sapiens
RPKFLSKTV

SEQ ID NO: 125346 - protein, 9 aa, Homo Sapiens
RPKGFYVET

SEQ ID NO: 125347 - protein, 9 aa, Homo Sapiens
RPKIGLPGV

SEQ ID NO: 125348 - protein, 9 aa, Homo Sapiens
RPKKPGQSF

SEQ ID NO: 125349 - protein, 9 aa, Homo Sapiens
RPKLGEREV

SEQ ID NO: 125350 - protein, 9 aa, Homo Sapiens
RPKLPDNEV

SEQ ID NO: 125351 - protein, 9 aa, Homo Sapiens
RPKMQEVVA

SEQ ID NO: 125352 - protein, 9 aa, Homo Sapiens
RPKPAPLTA

SEQ ID NO: 125353 - protein, 9 aa, Homo Sapiens
RPKPESQGI

SEQ ID NO: 125354 - protein, 9 aa, Homo Sapiens
RPKPIITSV

SEQ ID NO: 125355 - protein, 9 aa, Homo Sapiens
RPKPKIIQT

SEQ ID NO: 125356 - protein, 9 aa, Homo Sapiens
RPKPLSAVP

SEQ ID NO: 125357 - protein, 9 aa, Homo Sapiens
RPKPPNVRT

SEQ ID NO: 125358 - protein, 9 aa, Homo Sapiens
RPKPSRPTP

SEQ ID NO: 125359 - protein, 9 aa, Homo Sapiens
RPKSAFKVQ

SEQ ID NO: 125360 - protein, 9 aa, Homo Sapiens
RPKSSDVYV

SEQ ID NO: 125361 - protein, 9 aa, Homo Sapiens
RPKTGVRGL

SEQ ID NO: 125362 - protein, 9 aa, Homo Sapiens
RPLAQLREV

SEQ ID NO: 125363 - protein, 9 aa, Homo Sapiens
RPLFPGSTV

SEQ ID NO: 125364 - protein, 9 aa, Homo Sapiens
RPLHEFITA

SEQ ID NO: 125365 - protein, 9 aa, Homo Sapiens
RPLLKAITA

SEQ ID NO: 125366 - protein, 9 aa, Homo Sapiens
RPLQDEPAA

SEQ ID NO: 125367 - protein, 9 aa, Homo Sapiens
RPLTLFHTV

SEQ ID NO: 125368 - protein, 9 aa, Homo Sapiens
RPLVKPKIV

SEQ ID NO: 125369 - protein, 9 aa, Homo Sapiens
RPLVSTQPA

SEQ ID NO: 125370 - protein, 9 aa, Homo Sapiens
RPMKVGHVT

SEQ ID NO: 125371 - protein, 9 aa, Homo Sapiens
RPMSHYTTP

SEQ ID NO: 125372 - protein, 9 aa, Homo Sapiens
RPNDIMAEV

SEQ ID NO: 125373 - protein, 9 aa, Homo Sapiens
RPNLIKPAA

SEQ ID NO: 125374 - protein, 9 aa, Homo Sapiens
RPNPPPVSV

SEQ ID NO: 125375 - protein, 9 aa, Homo Sapiens
RPNWSKLVA

SEQ ID NO: 125376 - protein, 9 aa, Homo Sapiens
RPPLNPVSA

SEQ ID NO: 125377 - protein, 9 aa, Homo Sapiens
RPQELPRLA

SEQ ID NO: 125378 - protein, 9 aa, Homo Sapiens
RPQSETNVA

SEQ ID NO: 125379 - protein, 9 aa, Homo Sapiens
RPRAPIIAV

SEQ ID NO: 125380 - protein, 9 aa, Homo Sapiens
RPRDSQLYA

SEQ ID NO: 125381 - protein, 9 aa, Homo Sapiens
RPRFVSLRA

SEQ ID NO: 125382 - protein, 9 aa, Homo Sapiens
RPRGPPPPP

SEQ ID NO: 125383 - protein, 9 aa, Homo Sapiens
RPRHQGVMV

SEQ ID NO: 125384 - protein, 9 aa, Homo Sapiens
RPRPGRNPP

SEQ ID NO: 125385 - protein, 9 aa, Homo Sapiens
RPRPGTGLG

SEQ ID NO: 125386 - protein, 9 aa, Homo Sapiens
RPRPPPAAP

SEQ ID NO: 125387 - protein, 9 aa, Homo Sapiens
RPRPSWITT

SEQ ID NO: 125388 - protein, 9 aa, Homo Sapiens
RPRPTEATV

SEQ ID NO: 125389 - protein, 9 aa, Homo Sapiens
RPRPTTVTA

SEQ ID NO: 125390 - protein, 9 aa, Homo Sapiens
RPRPVVTTT

SEQ ID NO: 125391 - protein, 9 aa, Homo Sapiens
RPSFVHPGA

SEQ ID NO: 125392 - protein, 9 aa, Homo Sapiens
RPSPAISVS

SEQ ID NO: 125393 - protein, 9 aa, Homo Sapiens
RPSPAPPAA

SEQ ID NO: 125394 - protein, 9 aa, Homo Sapiens
RPSPPVQSV

SEQ ID NO: 125395 - protein, 9 aa, Homo Sapiens
RPSTLFSAA

SEQ ID NO: 125396 - protein, 9 aa, Homo Sapiens
RPTGGVGAV

SEQ ID NO: 125397 - protein, 9 aa, Homo Sapiens
RPVDPIRAA

SEQ ID NO: 125398 - protein, 9 aa, Homo Sapiens
RPVGGGPSA

SEQ ID NO: 125399 - protein, 9 aa, Homo Sapiens
RPVLPRTEA

SEQ ID NO: 125400 - protein, 9 aa, Homo Sapiens
RPVQRLPSV

SEQ ID NO: 125401 - protein, 9 aa, Homo Sapiens
RPVTPPRTA

SEQ ID NO: 125402 - protein, 9 aa, Homo Sapiens
RPWAQVLKA

SEQ ID NO: 125403 - protein, 9 aa, Homo Sapiens
RPWHKTVTI

SEQ ID NO: 125404 - protein, 9 aa, Homo Sapiens
RPWKAYLSA

SEQ ID NO: 125405 - protein, 9 aa, Homo Sapiens
RPWKGVLMV

SEQ ID NO: 125406 - protein, 9 aa, Homo Sapiens
RPWLRPAAL

SEQ ID NO: 125407 - protein, 9 aa, Homo Sapiens
RPWPNPNSA

SEQ ID NO: 125408 - protein, 9 aa, Homo Sapiens
RPYDKHISP

SEQ ID NO: 125409 - protein, 9 aa, Homo Sapiens
RPYDKNISP

SEQ ID NO: 125410 - protein, 9 aa, Homo Sapiens
RPYEPINSI

SEQ ID NO: 125411 - protein, 9 aa, Homo Sapiens
RPYERPPFA

SEQ ID NO: 125412 - protein, 9 aa, Homo Sapiens
RPYGCVLRA

SEQ ID NO: 125413 - protein, 9 aa, Homo Sapiens
RPYHTIIEI

SEQ ID NO: 125414 - protein, 9 aa, Homo Sapiens
RPYLSAVRA

SEQ ID NO: 125415 - protein, 9 aa, Homo Sapiens
RPYPVCFRP

SEQ ID NO: 125416 - protein, 9 aa, Homo Sapiens
RPYPVMRKI

SEQ ID NO: 125417 - protein, 9 aa, Homo Sapiens
RPYSHALVA

SEQ ID NO: 125418 - protein, 9 aa, Homo Sapiens
RPYSRKLEA

SEQ ID NO: 125419 - protein, 9 aa, Homo Sapiens
RPYTGKVGA

SEQ ID NO: 125420 - protein, 9 aa, Homo Sapiens
RPYVHKILV

SEQ ID NO: 125421 - protein, 9 aa, Homo Sapiens
RTKTPGPGA

SEQ ID NO: 125422 - protein, 9 aa, Homo Sapiens
RVKCVGLSA

SEQ ID NO: 125423 - protein, 9 aa, Homo Sapiens
RVQEALRVA

SEQ ID NO: 125424 - protein, 9 aa, Homo Sapiens
SAAPPGPPA

SEQ ID NO: 125425 - protein, 9 aa, Homo Sapiens
SAKTPGFSV

SEQ ID NO: 125426 - protein, 9 aa, Homo Sapiens
SPAALKPPA

SEQ ID NO: 125427 - protein, 9 aa, Homo Sapiens
SPAAPVITA

SEQ ID NO: 125428 - protein, 9 aa, Homo Sapiens
SPADRQLVA

SEQ ID NO: 125429 - protein, 9 aa, Homo Sapiens
SPAKTLPGA

SEQ ID NO: 125430 - protein, 9 aa, Homo Sapiens
SPALASRVA

SEQ ID NO: 125431 - protein, 9 aa, Homo Sapiens
SPALPSSGA

SEQ ID NO: 125432 - protein, 9 aa, Homo Sapiens
SPALTISKV

SEQ ID NO: 125433 - protein, 9 aa, Homo Sapiens
SPAPEEPKA

SEQ ID NO: 125434 - protein, 9 aa, Homo Sapiens
SPAQSISSV

SEQ ID NO: 125435 - protein, 9 aa, Homo Sapiens
SPAQVIPLA

SEQ ID NO: 125436 - protein, 9 aa, Homo Sapiens
SPASASLVA

SEQ ID NO: 125437 - protein, 9 aa, Homo Sapiens
SPASRIPPP

SEQ ID NO: 125438 - protein, 9 aa, Homo Sapiens
SPAYRDLAA

SEQ ID NO: 125439 - protein, 9 aa, Homo Sapiens
SPCLGPVAA

SEQ ID NO: 125440 - protein, 9 aa, Homo Sapiens
SPDRACRLA

SEQ ID NO: 125441 - protein, 9 aa, Homo Sapiens
SPEVGMRQA

SEQ ID NO: 125442 - protein, 9 aa, Homo Sapiens
SPFAEGTSA

SEQ ID NO: 125443 - protein, 9 aa, Homo Sapiens
SPFDQMKTA

SEQ ID NO: 125444 - protein, 9 aa, Homo Sapiens
SPFFPLVSA

SEQ ID NO: 125445 - protein, 9 aa, Homo Sapiens
SPFGSITSA

SEQ ID NO: 125446 - protein, 9 aa, Homo Sapiens
SPFGTITSA

SEQ ID NO: 125447 - protein, 9 aa, Homo Sapiens
SPFHFQPSA

SEQ ID NO: 125448 - protein, 9 aa, Homo Sapiens
SPFPDIPKV

SEQ ID NO: 125449 - protein, 9 aa, Homo Sapiens
SPFSGLQKA

SEQ ID NO: 125450 - protein, 9 aa, Homo Sapiens
SPGLHLGSA

SEQ ID NO: 125451 - protein, 9 aa, Homo Sapiens
SPHISSQTA

SEQ ID NO: 125452 - protein, 9 aa, Homo Sapiens
SPHLGPAPA

SEQ ID NO: 125453 - protein, 9 aa, Homo Sapiens
SPHLPGTSS

SEQ ID NO: 125454 - protein, 9 aa, Homo Sapiens
SPHPGLVAA

SEQ ID NO: 125455 - protein, 9 aa, Homo Sapiens
SPHPSPLGA

SEQ ID NO: 125456 - protein, 9 aa, Homo Sapiens
SPHQHGLLA

SEQ ID NO: 125457 - protein, 9 aa, Homo Sapiens
SPHQVTPQA

SEQ ID NO: 125458 - protein, 9 aa, Homo Sapiens
SPHSQVLTA

SEQ ID NO: 125459 - protein, 9 aa, Homo Sapiens
SPHSVPFLA

SEQ ID NO: 125460 - protein, 9 aa, Homo Sapiens
SPHVQVKAA

SEQ ID NO: 125461 - protein, 9 aa, Homo Sapiens
SPIEFLENA

SEQ ID NO: 125462 - protein, 9 aa, Homo Sapiens
SPIENIQRV

SEQ ID NO: 125463 - protein, 9 aa, Homo Sapiens
SPILVATAV

SEQ ID NO: 125464 - protein, 9 aa, Homo Sapiens
SPINRIVQI

SEQ ID NO: 125465 - protein, 9 aa, Homo Sapiens
SPIRYIPQV

SEQ ID NO: 125466 - protein, 9 aa, Homo Sapiens
SPITTVPKL

SEQ ID NO: 125467 - protein, 9 aa, Homo Sapiens
SPKAALRYA

SEQ ID NO: 125468 - protein, 9 aa, Homo Sapiens
SPKDVILKV

SEQ ID NO: 125469 - protein, 9 aa, Homo Sapiens
SPKFGKLVA

SEQ ID NO: 125470 - protein, 9 aa, Homo Sapiens
SPKFPGMRT

SEQ ID NO: 125471 - protein, 9 aa, Homo Sapiens
SPKGHLTRL

SEQ ID NO: 125472 - protein, 9 aa, Homo Sapiens
SPKHVYSIA

SEQ ID NO: 125473 - protein, 9 aa, Homo Sapiens
SPKKPGREI

SEQ ID NO: 125474 - protein, 9 aa, Homo Sapiens
SPKLPSLEA

SEQ ID NO: 125475 - protein, 9 aa, Homo Sapiens
SPKNTVISV

SEQ ID NO: 125476 - protein, 9 aa, Homo Sapiens
SPKPALRYA

SEQ ID NO: 125477 - protein, 9 aa, Homo Sapiens
SPKPPTRSP

SEQ ID NO: 125478 - protein, 9 aa, Homo Sapiens
SPKPVSSTV

SEQ ID NO: 125479 - protein, 9 aa, Homo Sapiens
SPKQILDPA

SEQ ID NO: 125480 - protein, 9 aa, Homo Sapiens
SPKQILDSA

SEQ ID NO: 125481 - protein, 9 aa, Homo Sapiens
SPKSPGLKA

SEQ ID NO: 125482 - protein, 9 aa, Homo Sapiens
SPKTTISVA

SEQ ID NO: 125483 - protein, 9 aa, Homo Sapiens
SPKTTITMA

SEQ ID NO: 125484 - protein, 9 aa, Homo Sapiens
SPLASGAVA

SEQ ID NO: 125485 - protein, 9 aa, Homo Sapiens
SPLATSTTA

SEQ ID NO: 125486 - protein, 9 aa, Homo Sapiens
SPLEEFKRA

SEQ ID NO: 125487 - protein, 9 aa, Homo Sapiens
SPLESWLTA

SEQ ID NO: 125488 - protein, 9 aa, Homo Sapiens
SPLFSQHTA

SEQ ID NO: 125489 - protein, 9 aa, Homo Sapiens
SPLGHSPTA

SEQ ID NO: 125490 - protein, 9 aa, Homo Sapiens
SPLHLAVEA

SEQ ID NO: 125491 - protein, 9 aa, Homo Sapiens
SPLIQKSAA

SEQ ID NO: 125492 - protein, 9 aa, Homo Sapiens
SPLKHFVTA

SEQ ID NO: 125493 - protein, 9 aa, Homo Sapiens
SPLLHNPSA

SEQ ID NO: 125494 - protein, 9 aa, Homo Sapiens
SPLNAMPRA

SEQ ID NO: 125495 - protein, 9 aa, Homo Sapiens
SPLPAHPSV

SEQ ID NO: 125496 - protein, 9 aa, Homo Sapiens
SPLSAARAA

SEQ ID NO: 125497 - protein, 9 aa, Homo Sapiens
SPLSSHPVV

SEQ ID NO: 125498 - protein, 9 aa, Homo Sapiens
SPLYLAHEV

SEQ ID NO: 125499 - protein, 9 aa, Homo Sapiens
SPMATTAAA

SEQ ID NO: 125500 - protein, 9 aa, Homo Sapiens
SPMDTVTEA

SEQ ID NO: 125501 - protein, 9 aa, Homo Sapiens
SPMPGTLTA

SEQ ID NO: 125502 - protein, 9 aa, Homo Sapiens
SPNCKLLIV

SEQ ID NO: 125503 - protein, 9 aa, Homo Sapiens
SPNEKFLLA

SEQ ID NO: 125504 - protein, 9 aa, Homo Sapiens
SPNENFKTV

SEQ ID NO: 125505 - protein, 9 aa, Homo Sapiens
SPNGKLTVA

SEQ ID NO: 125506 - protein, 9 aa, Homo Sapiens
SPNPHVRQA

SEQ ID NO: 125507 - protein, 9 aa, Homo Sapiens
SPNRYWLCA

SEQ ID NO: 125508 - protein, 9 aa, Homo Sapiens
SPNSILKAA

SEQ ID NO: 125509 - protein, 9 aa, Homo Sapiens
SPQDVTTHA

SEQ ID NO: 125510 - protein, 9 aa, Homo Sapiens
SPQGRVMTI

SEQ ID NO: 125511 - protein, 9 aa, Homo Sapiens
SPQPQIRAA

SEQ ID NO: 125512 - protein, 9 aa, Homo Sapiens
SPQPVGQQA

SEQ ID NO: 125513 - protein, 9 aa, Homo Sapiens
SPQYRLRIA

SEQ ID NO: 125514 - protein, 9 aa, Homo Sapiens
SPREPGYKA

SEQ ID NO: 125515 - protein, 9 aa, Homo Sapiens
SPRIATTTA

SEQ ID NO: 125516 - protein, 9 aa, Homo Sapiens
SPRISRPTA

SEQ ID NO: 125517 - protein, 9 aa, Homo Sapiens
SPRNLAMEA

SEQ ID NO: 125518 - protein, 9 aa, Homo Sapiens
SPRPPLISV

SEQ ID NO: 125519 - protein, 9 aa, Homo Sapiens
SPRPQAPKA

SEQ ID NO: 125520 - protein, 9 aa, Homo Sapiens
SPRVPNSSV

SEQ ID NO: 125521 - protein, 9 aa, Homo Sapiens
SPSAGVPRA

SEQ ID NO: 125522 - protein, 9 aa, Homo Sapiens
SPSDIGIIA

SEQ ID NO: 125523 - protein, 9 aa, Homo Sapiens
SPSMAVRIA

SEQ ID NO: 125524 - protein, 9 aa, Homo Sapiens
SPSPPQAEA

SEQ ID NO: 125525 - protein, 9 aa, Homo Sapiens
SPSPPSVAV

SEQ ID NO: 125526 - protein, 9 aa, Homo Sapiens
SPSQSSMVA

SEQ ID NO: 125527 - protein, 9 aa, Homo Sapiens
SPSSSSLAA

SEQ ID NO: 125528 - protein, 9 aa, Homo Sapiens
SPSVPKTSA

SEQ ID NO: 125529 - protein, 9 aa, Homo Sapiens
SPTFKKNFA

SEQ ID NO: 125530 - protein, 9 aa, Homo Sapiens
SPTHSAIPA

SEQ ID NO: 125531 - protein, 9 aa, Homo Sapiens
SPTKKVAVA

SEQ ID NO: 125532 - protein, 9 aa, Homo Sapiens
SPTNKISTA

SEQ ID NO: 125533 - protein, 9 aa, Homo Sapiens
SPVLPLTSA

SEQ ID NO: 125534 - protein, 9 aa, Homo Sapiens
SPVMVSNPA

SEQ ID NO: 125535 - protein, 9 aa, Homo Sapiens
SPVPGAPKA

SEQ ID NO: 125536 - protein, 9 aa, Homo Sapiens
SPVPIAPTA

SEQ ID NO: 125537 - protein, 9 aa, Homo Sapiens
SPVQHLVAA

SEQ ID NO: 125538 - protein, 9 aa, Homo Sapiens
SPVSSLPTA

SEQ ID NO: 125539 - protein, 9 aa, Homo Sapiens
SPVTDFREA

SEQ ID NO: 125540 - protein, 9 aa, Homo Sapiens
SPVVPQISA

SEQ ID NO: 125541 - protein, 9 aa, Homo Sapiens
SPYAAMLAA

SEQ ID NO: 125542 - protein, 9 aa, Homo Sapiens
SPYFRHSSV

SEQ ID NO: 125543 - protein, 9 aa, Homo Sapiens
SPYGGGRPG

SEQ ID NO: 125544 - protein, 9 aa, Homo Sapiens
SPYGRRIIP

SEQ ID NO: 125545 - protein, 9 aa, Homo Sapiens
SPYHGFTIV

SEQ ID NO: 125546 - protein, 9 aa, Homo Sapiens
SPYHNFDSV

SEQ ID NO: 125547 - protein, 9 aa, Homo Sapiens
SPYIPPHAA

SEQ ID NO: 125548 - protein, 9 aa, Homo Sapiens
SPYLPGRLA

SEQ ID NO: 125549 - protein, 9 aa, Homo Sapiens
SPYVHLLDA

SEQ ID NO: 125550 - protein, 9 aa, Homo Sapiens
SPYYFLTSA

SEQ ID NO: 125551 - protein, 9 aa, Homo Sapiens
SVKDGSLAA

SEQ ID NO: 125552 - protein, 9 aa, Homo Sapiens
SVRDPSPEA

SEQ ID NO: 125553 - protein, 9 aa, Homo Sapiens
TAKGPGLEA

SEQ ID NO: 125554 - protein, 9 aa, Homo Sapiens
TIRTPMAAA

SEQ ID NO: 125555 - protein, 9 aa, Homo Sapiens
TPAHVLPSA

SEQ ID NO: 125556 - protein, 9 aa, Homo Sapiens
TPAKAIAAV

SEQ ID NO: 125557 - protein, 9 aa, Homo Sapiens
TPATSVPFA

SEQ ID NO: 125558 - protein, 9 aa, Homo Sapiens
TPCDKILKA

SEQ ID NO: 125559 - protein, 9 aa, Homo Sapiens
TPFKGVRKA

SEQ ID NO: 125560 - protein, 9 aa, Homo Sapiens
TPFKLTTEA

SEQ ID NO: 125561 - protein, 9 aa, Homo Sapiens
TPFKPILEA

SEQ ID NO: 125562 - protein, 9 aa, Homo Sapiens
TPFTAIREA

SEQ ID NO: 125563 - protein, 9 aa, Homo Sapiens
TPHFSGLAA

SEQ ID NO: 125564 - protein, 9 aa, Homo Sapiens
TPHLRNLAV

SEQ ID NO: 125565 - protein, 9 aa, Homo Sapiens
TPIRGLLMA

SEQ ID NO: 125566 - protein, 9 aa, Homo Sapiens
TPKEVGDVI

SEQ ID NO: 125567 - protein, 9 aa, Homo Sapiens
TPKMPGQSV

SEQ ID NO: 125568 - protein, 9 aa, Homo Sapiens
TPKPATEAV

SEQ ID NO: 125569 - protein, 9 aa, Homo Sapiens
TPKPIPILA

SEQ ID NO: 125570 - protein, 9 aa, Homo Sapiens
TPKPPGTGP

SEQ ID NO: 125571 - protein, 9 aa, Homo Sapiens
TPKPVEPAA

SEQ ID NO: 125572 - protein, 9 aa, Homo Sapiens
TPKPVSIAT

SEQ ID NO: 125573 - protein, 9 aa, Homo Sapiens
TPLGGIQAA

SEQ ID NO: 125574 - protein, 9 aa, Homo Sapiens
TPLLHALTA

SEQ ID NO: 125575 - protein, 9 aa, Homo Sapiens
TPLLSGKAA

SEQ ID NO: 125576 - protein, 9 aa, Homo Sapiens
TPLSKLMKA

SEQ ID NO: 125577 - protein, 9 aa, Homo Sapiens
TPMAASVVA

SEQ ID NO: 125578 - protein, 9 aa, Homo Sapiens
TPMGPGRTV

SEQ ID NO: 125579 - protein, 9 aa, Homo Sapiens
TPMPPISSV

SEQ ID NO: 125580 - protein, 9 aa, Homo Sapiens
TPMSVLQQA

SEQ ID NO: 125581 - protein, 9 aa, Homo Sapiens
TPNKPSVAV

SEQ ID NO: 125582 - protein, 9 aa, Homo Sapiens
TPNQNFSTA

SEQ ID NO: 125583 - protein, 9 aa, Homo Sapiens
TPNSPRLAA

SEQ ID NO: 125584 - protein, 9 aa, Homo Sapiens
TPNTPRNLA

SEQ ID NO: 125585 - protein, 9 aa, Homo Sapiens
TPQETYRKV

SEQ ID NO: 125586 - protein, 9 aa, Homo Sapiens
TPQGHVAVA

SEQ ID NO: 125587 - protein, 9 aa, Homo Sapiens
TPQPPLLKA

SEQ ID NO: 125588 - protein, 9 aa, Homo Sapiens
TPQSIFIFA

SEQ ID NO: 125589 - protein, 9 aa, Homo Sapiens
TPRAATVKA

SEQ ID NO: 125590 - protein, 9 aa, Homo Sapiens
TPRGTTKVV

SEQ ID NO: 125591 - protein, 9 aa, Homo Sapiens
TPRPKFSVC

SEQ ID NO: 125592 - protein, 9 aa, Homo Sapiens
TPRPNPRSA

SEQ ID NO: 125593 - protein, 9 aa, Homo Sapiens
TPSSLYRVA

SEQ ID NO: 125594 - protein, 9 aa, Homo Sapiens
TPTVKHLEA

SEQ ID NO: 125595 - protein, 9 aa, Homo Sapiens
TPVATSPTA

SEQ ID NO: 125596 - protein, 9 aa, Homo Sapiens
TPVGGLLMA

SEQ ID NO: 125597 - protein, 9 aa, Homo Sapiens
TPVKAGRLV

SEQ ID NO: 125598 - protein, 9 aa, Homo Sapiens
TPVPASTSA

SEQ ID NO: 125599 - protein, 9 aa, Homo Sapiens
TPVSGTPQA

SEQ ID NO: 125600 - protein, 9 aa, Homo Sapiens
TPVTTSPSA

SEQ ID NO: 125601 - protein, 9 aa, Homo Sapiens
TPVYLGATA

SEQ ID NO: 125602 - protein, 9 aa, Homo Sapiens
TPWFKIIAA

SEQ ID NO: 125603 - protein, 9 aa, Homo Sapiens
TPYNYPVPV

SEQ ID NO: 125604 - protein, 9 aa, Homo Sapiens
TPYPKLKTA

SEQ ID NO: 125605 - protein, 9 aa, Homo Sapiens
TPYRPPAAA

SEQ ID NO: 125606 - protein, 9 aa, Homo Sapiens
TPYTGILYA

SEQ ID NO: 125607 - protein, 9 aa, Homo Sapiens
TPYVAKISA

SEQ ID NO: 125608 - protein, 9 aa, Homo Sapiens
TPYWMAPEV

SEQ ID NO: 125609 - protein, 9 aa, Homo Sapiens
TPYYVAPEV

SEQ ID NO: 125610 - protein, 9 aa, Homo Sapiens
TVKGVSLSS

SEQ ID NO: 125611 - protein, 9 aa, Homo Sapiens
TVKPPTSVA

SEQ ID NO: 125612 - protein, 9 aa, Homo Sapiens
TVYEGFISA

SEQ ID NO: 125613 - protein, 9 aa, Homo Sapiens
VAKPPGWSA

SEQ ID NO: 125614 - protein, 9 aa, Homo Sapiens
VAKVTGGAA

SEQ ID NO: 125615 - protein, 9 aa, Homo Sapiens
VEKPVGVAA

SEQ ID NO: 125616 - protein, 9 aa, Homo Sapiens
VPAEGAPTA

SEQ ID NO: 125617 - protein, 9 aa, Homo Sapiens
VPAGGAVAV

SEQ ID NO: 125618 - protein, 9 aa, Homo Sapiens
VPAGSGLSA

SEQ ID NO: 125619 - protein, 9 aa, Homo Sapiens
VPAKKITAA

SEQ ID NO: 125620 - protein, 9 aa, Homo Sapiens
VPAKWIHEA

SEQ ID NO: 125621 - protein, 9 aa, Homo Sapiens
VPALTGTTA

SEQ ID NO: 125622 - protein, 9 aa, Homo Sapiens
VPAPFFLPA

SEQ ID NO: 125623 - protein, 9 aa, Homo Sapiens
VPAPGGPAA

SEQ ID NO: 125624 - protein, 9 aa, Homo Sapiens
VPAPSPLSA

SEQ ID NO: 125625 - protein, 9 aa, Homo Sapiens
VPAPSVPSV

SEQ ID NO: 125626 - protein, 9 aa, Homo Sapiens
VPAQSRPCV

SEQ ID NO: 125627 - protein, 9 aa, Homo Sapiens
VPCQVLRMA

SEQ ID NO: 125628 - protein, 9 aa, Homo Sapiens
VPEKPRVPA

SEQ ID NO: 125629 - protein, 9 aa, Homo Sapiens
VPFAAPATA

SEQ ID NO: 125630 - protein, 9 aa, Homo Sapiens
VPFAATATA

SEQ ID NO: 125631 - protein, 9 aa, Homo Sapiens
VPFKDMPAT

SEQ ID NO: 125632 - protein, 9 aa, Homo Sapiens
VPFLNPYTV

SEQ ID NO: 125633 - protein, 9 aa, Homo Sapiens
VPFPTPLEA

SEQ ID NO: 125634 - protein, 9 aa, Homo Sapiens
VPHCVPISA

SEQ ID NO: 125635 - protein, 9 aa, Homo Sapiens
VPHQPFSQA

SEQ ID NO: 125636 - protein, 9 aa, Homo Sapiens
VPHRATVYA

SEQ ID NO: 125637 - protein, 9 aa, Homo Sapiens
VPIAGRHAV

SEQ ID NO: 125638 - protein, 9 aa, Homo Sapiens
VPIMPYPPA

SEQ ID NO: 125639 - protein, 9 aa, Homo Sapiens
VPIRLIINA

SEQ ID NO: 125640 - protein, 9 aa, Homo Sapiens
VPKEPQNPP

SEQ ID NO: 125641 - protein, 9 aa, Homo Sapiens
VPKKPPPSP

SEQ ID NO: 125642 - protein, 9 aa, Homo Sapiens
VPKPIGGVV

SEQ ID NO: 125643 - protein, 9 aa, Homo Sapiens
VPKPPPAKP

SEQ ID NO: 125644 - protein, 9 aa, Homo Sapiens
VPKVVGSAV

SEQ ID NO: 125645 - protein, 9 aa, Homo Sapiens
VPLATAPMA

SEQ ID NO: 125646 - protein, 9 aa, Homo Sapiens
VPLDHRVHA

SEQ ID NO: 125647 - protein, 9 aa, Homo Sapiens
VPLSHLINA

SEQ ID NO: 125648 - protein, 9 aa, Homo Sapiens
VPMPYTLKV

SEQ ID NO: 125649 - protein, 9 aa, Homo Sapiens
VPMQDPRAA

SEQ ID NO: 125650 - protein, 9 aa, Homo Sapiens
VPMTPLRTV

SEQ ID NO: 125651 - protein, 9 aa, Homo Sapiens
VPNKFLVTA

SEQ ID NO: 125652 - protein, 9 aa, Homo Sapiens
VPNNKITVV

SEQ ID NO: 125653 - protein, 9 aa, Homo Sapiens
VPNPYIISA

SEQ ID NO: 125654 - protein, 9 aa, Homo Sapiens
VPNVHGALA

SEQ ID NO: 125655 - protein, 9 aa, Homo Sapiens
VPQERQPEA

SEQ ID NO: 125656 - protein, 9 aa, Homo Sapiens
VPQGLLKAA

SEQ ID NO: 125657 - protein, 9 aa, Homo Sapiens
VPREPGVHT

SEQ ID NO: 125658 - protein, 9 aa, Homo Sapiens
VPRLPATAA

SEQ ID NO: 125659 - protein, 9 aa, Homo Sapiens
VPRPAARVA

SEQ ID NO: 125660 - protein, 9 aa, Homo Sapiens
VPRPASVSA

SEQ ID NO: 125661 - protein, 9 aa, Homo Sapiens
VPRPPSLLA

SEQ ID NO: 125662 - protein, 9 aa, Homo Sapiens
VPRPPSNPP

SEQ ID NO: 125663 - protein, 9 aa, Homo Sapiens
VPSAHQPSA

SEQ ID NO: 125664 - protein, 9 aa, Homo Sapiens
VPSAVLIVA

SEQ ID NO: 125665 - protein, 9 aa, Homo Sapiens
VPSPRLAAA

SEQ ID NO: 125666 - protein, 9 aa, Homo Sapiens
VPSPVAISA

SEQ ID NO: 125667 - protein, 9 aa, Homo Sapiens
VPSSPPTKR

SEQ ID NO: 125668 - protein, 9 aa, Homo Sapiens
VPSYPSKSA

SEQ ID NO: 125669 - protein, 9 aa, Homo Sapiens
VPTDYSVSA

SEQ ID NO: 125670 - protein, 9 aa, Homo Sapiens
VPTKRPPVL

SEQ ID NO: 125671 - protein, 9 aa, Homo Sapiens
VPVAGNPAV

SEQ ID NO: 125672 - protein, 9 aa, Homo Sapiens
VPVDTGVAA

SEQ ID NO: 125673 - protein, 9 aa, Homo Sapiens
VPVQPGSSV

SEQ ID NO: 125674 - protein, 9 aa, Homo Sapiens
VPVSTINHA

SEQ ID NO: 125675 - protein, 9 aa, Homo Sapiens
VPVTLIGEA

SEQ ID NO: 125676 - protein, 9 aa, Homo Sapiens
VPYDPGLKA

SEQ ID NO: 125677 - protein, 9 aa, Homo Sapiens
VPYGEFKSV

SEQ ID NO: 125678 - protein, 9 aa, Homo Sapiens
VPYGTPLSV

SEQ ID NO: 125679 - protein, 9 aa, Homo Sapiens
VPYGVGKAA

SEQ ID NO: 125680 - protein, 9 aa, Homo Sapiens
VPYLVGQVV

SEQ ID NO: 125681 - protein, 9 aa, Homo Sapiens
VPYPPLLRA

SEQ ID NO: 125682 - protein, 9 aa, Homo Sapiens
WGKVGGHAA

SEQ ID NO: 125683 - protein, 9 aa, Homo Sapiens
WPKDVGIVA

SEQ ID NO: 125684 - protein, 9 aa, Homo Sapiens
YARASGVCA

SEQ ID NO: 125685 - protein, 9 aa, Homo Sapiens
YPAPQVSTA

SEQ ID NO: 125686 - protein, 9 aa, Homo Sapiens
YPCSKFIIA

SEQ ID NO: 125687 - protein, 9 aa, Homo Sapiens
YPDTAGPEA

SEQ ID NO: 125688 - protein, 9 aa, Homo Sapiens
YPFKNLPTA

SEQ ID NO: 125689 - protein, 9 aa, Homo Sapiens
YPHGWVETA

SEQ ID NO: 125690 - protein, 9 aa, Homo Sapiens
YPKGLGSTV

SEQ ID NO: 125691 - protein, 9 aa, Homo Sapiens
YPKNPHLRA

SEQ ID NO: 125692 - protein, 9 aa, Homo Sapiens
YPKQSFTMV

SEQ ID NO: 125693 - protein, 9 aa, Homo Sapiens
YPKTPTGSP

SEQ ID NO: 125694 - protein, 9 aa, Homo Sapiens
YPNFAGPHA

SEQ ID NO: 125695 - protein, 9 aa, Homo Sapiens
YPNGHFVRV

SEQ ID NO: 125696 - protein, 9 aa, Homo Sapiens
YPNKGVGQA

SEQ ID NO: 125697 - protein, 9 aa, Homo Sapiens
YPRPGTPAA

SEQ ID NO: 125698 - protein, 9 aa, Homo Sapiens
YPSAPFLAA

SEQ ID NO: 125699 - protein, 9 aa, Homo Sapiens
YPSEHLIQA

SEQ ID NO: 125700 - protein, 9 aa, Homo Sapiens
YPTQLFRTV

SEQ ID NO: 125701 - protein, 9 aa, Homo Sapiens
YPWHRFPVT

SEQ ID NO: 125702 - protein, 9 aa, Homo Sapiens
YPYSCFKTV

SEQ ID NO: 125703 - protein, 10 aa, Homo Sapiens
AAPAPAAHVA

SEQ ID NO: 125704 - protein, 10 aa, Homo Sapiens
AGPARLSPAA

SEQ ID NO: 125705 - protein, 10 aa, Homo Sapiens
APAAATVAVA

SEQ ID NO: 125706 - protein, 10 aa, Homo Sapiens
APANVGLTSA

SEQ ID NO: 125707 - protein, 10 aa, Homo Sapiens
APAPAEKTPV

SEQ ID NO: 125708 - protein, 10 aa, Homo Sapiens
APDGTRNLTA

SEQ ID NO: 125709 - protein, 10 aa, Homo Sapiens
APFQNILPRV

SEQ ID NO: 125710 - protein, 10 aa, Homo Sapiens
APHIVVGTPG

SEQ ID NO: 125711 - protein, 10 aa, Homo Sapiens
APHTWPHIVA

SEQ ID NO: 125712 - protein, 10 aa, Homo Sapiens
APHWAVWLLA

SEQ ID NO: 125713 - protein, 10 aa, Homo Sapiens
APKAGPGVVR

SEQ ID NO: 125714 - protein, 10 aa, Homo Sapiens
APKGSVLQEA

SEQ ID NO: 125715 - protein, 10 aa, Homo Sapiens
APKIANGKAA

SEQ ID NO: 125716 - protein, 10 aa, Homo Sapiens
APKMPVVTSV

SEQ ID NO: 125717 - protein, 10 aa, Homo Sapiens
APKPPPASQP

SEQ ID NO: 125718 - protein, 10 aa, Homo Sapiens
APKPSSRPSL

SEQ ID NO: 125719 - protein, 10 aa, Homo Sapiens
APKWFDGQRA

SEQ ID NO: 125720 - protein, 10 aa, Homo Sapiens
APMLSTVHSA

SEQ ID NO: 125721 - protein, 10 aa, Homo Sapiens
APNLVPGVGA

SEQ ID NO: 125722 - protein, 10 aa, Homo Sapiens
APPEYHRKAV

SEQ ID NO: 125723 - protein, 10 aa, Homo Sapiens
APPSAVGSSA

SEQ ID NO: 125724 - protein, 10 aa, Homo Sapiens
APQETRGIPS

SEQ ID NO: 125725 - protein, 10 aa, Homo Sapiens
APRAPRALAA

SEQ ID NO: 125726 - protein, 10 aa, Homo Sapiens
APREPVGWPA

SEQ ID NO: 125727 - protein, 10 aa, Homo Sapiens
APRGAAGRPL

SEQ ID NO: 125728 - protein, 10 aa, Homo Sapiens
APRGPPQVTS

SEQ ID NO: 125729 - protein, 10 aa, Homo Sapiens
APRSFHPPAA

SEQ ID NO: 125730 - protein, 10 aa, Homo Sapiens
APSGGRLLSA

SEQ ID NO: 125731 - protein, 10 aa, Homo Sapiens
APSKATLIEA

SEQ ID NO: 125732 - protein, 10 aa, Homo Sapiens
APSWKCLPAA

SEQ ID NO: 125733 - protein, 10 aa, Homo Sapiens
APTSVPGARL

SEQ ID NO: 125734 - protein, 10 aa, Homo Sapiens
APVAAHTVTA

SEQ ID NO: 125735 - protein, 10 aa, Homo Sapiens
APVGPRAAMS

SEQ ID NO: 125736 - protein, 10 aa, Homo Sapiens
APYDAIHVGA

SEQ ID NO: 125737 - protein, 10 aa, Homo Sapiens
APYDPRVLAA

SEQ ID NO: 125738 - protein, 10 aa, Homo Sapiens
APYFKGTAVV

SEQ ID NO: 125739 - protein, 10 aa, Homo Sapiens
APYGNPKNMA

SEQ ID NO: 125740 - protein, 10 aa, Homo Sapiens
AVKKNPGIAA

SEQ ID NO: 125741 - protein, 10 aa, Homo Sapiens
EKPSYHPIAP

SEQ ID NO: 125742 - protein, 10 aa, Homo Sapiens
EVKPSSVTAA

SEQ ID NO: 125743 - protein, 10 aa, Homo Sapiens
FGPGKPPPPP

SEQ ID NO: 125744 - protein, 10 aa, Homo Sapiens
FPKPYPNSEA

SEQ ID NO: 125745 - protein, 10 aa, Homo Sapiens
FPKQPGTSGA

SEQ ID NO: 125746 - protein, 10 aa, Homo Sapiens
FPRDHKSVTA

SEQ ID NO: 125747 - protein, 10 aa, Homo Sapiens
GPFPGKFNEV

SEQ ID NO: 125748 - protein, 10 aa, Homo Sapiens
GPWVGTGLAA

SEQ ID NO: 125749 - protein, 10 aa, Homo Sapiens
GPYGGAQPSA

SEQ ID NO: 125750 - protein, 10 aa, Homo Sapiens
HPAAFPLPVV

SEQ ID NO: 125751 - protein, 10 aa, Homo Sapiens
HPAPTRKIAV

SEQ ID NO: 125752 - protein, 10 aa, Homo Sapiens
HPFKGFLLEA

SEQ ID NO: 125753 - protein, 10 aa, Homo Sapiens
HPLLRPPPSA

SEQ ID NO: 125754 - protein, 10 aa, Homo Sapiens
HPQPGSANSL

SEQ ID NO: 125755 - protein, 10 aa, Homo Sapiens
HPREPLPPIQ

SEQ ID NO: 125756 - protein, 10 aa, Homo Sapiens
HPRSPNVLSV

SEQ ID NO: 125757 - protein, 10 aa, Homo Sapiens
HPRVPSLTTV

SEQ ID NO: 125758 - protein, 10 aa, Homo Sapiens
HPRYSSRIQA

SEQ ID NO: 125759 - protein, 10 aa, Homo Sapiens
HPSQELLASA

SEQ ID NO: 125760 - protein, 10 aa, Homo Sapiens
HPTDASMIEA

SEQ ID NO: 125761 - protein, 10 aa, Homo Sapiens
HPTEDLVVSA

SEQ ID NO: 125762 - protein, 10 aa, Homo Sapiens
HPWETVTTAA

SEQ ID NO: 125763 - protein, 10 aa, Homo Sapiens
HPYLFPVAAM

SEQ ID NO: 125764 - protein, 10 aa, Homo Sapiens
HTPAHVLPSA

SEQ ID NO: 125765 - protein, 10 aa, Homo Sapiens
HVDPHQRLTA

SEQ ID NO: 125766 - protein, 10 aa, Homo Sapiens
IPADLRIISA

SEQ ID NO: 125767 - protein, 10 aa, Homo Sapiens
IPASDLPQVR

SEQ ID NO: 125768 - protein, 10 aa, Homo Sapiens
IPCELRVTSA

SEQ ID NO: 125769 - protein, 10 aa, Homo Sapiens
IPFLVPGIRY

SEQ ID NO: 125770 - protein, 10 aa, Homo Sapiens
IPISPISPAF

SEQ ID NO: 125771 - protein, 10 aa, Homo Sapiens
IPKDYKTMAA

SEQ ID NO: 125772 - protein, 10 aa, Homo Sapiens
IPKDYKTMTA

SEQ ID NO: 125773 - protein, 10 aa, Homo Sapiens
IPKHINPVAA

SEQ ID NO: 125774 - protein, 10 aa, Homo Sapiens
IPKPLNPALW

SEQ ID NO: 125775 - protein, 10 aa, Homo Sapiens
IPLEKADHPA

SEQ ID NO: 125776 - protein, 10 aa, Homo Sapiens
IPLYLKGGVA

SEQ ID NO: 125777 - protein, 10 aa, Homo Sapiens
IPMKIRNVSA

SEQ ID NO: 125778 - protein, 10 aa, Homo Sapiens
IPRGIPLDAA

SEQ ID NO: 125779 - protein, 10 aa, Homo Sapiens
IPRHPMPFAA

SEQ ID NO: 125780 - protein, 10 aa, Homo Sapiens
IPVECSQRSA

SEQ ID NO: 125781 - protein, 10 aa, Homo Sapiens
IPYAHSPSVR

SEQ ID NO: 125782 - protein, 10 aa, Homo Sapiens
IPYDQSPGPK

SEQ ID NO: 125783 - protein, 10 aa, Homo Sapiens
IPYTGPFNLL

SEQ ID NO: 125784 - protein, 10 aa, Homo Sapiens
IVCDVPSASA

SEQ ID NO: 125785 - protein, 10 aa, Homo Sapiens
IVKTAPKVSA

SEQ ID NO: 125786 - protein, 10 aa, Homo Sapiens
KLKTITGNSA

SEQ ID NO: 125787 - protein, 10 aa, Homo Sapiens
KPAPPFNVTV

SEQ ID NO: 125788 - protein, 10 aa, Homo Sapiens
KPATLTTTSA

SEQ ID NO: 125789 - protein, 10 aa, Homo Sapiens
KPFAFGNSSA

SEQ ID NO: 125790 - protein, 10 aa, Homo Sapiens
KPFKLSGLSF

SEQ ID NO: 125791 - protein, 10 aa, Homo Sapiens
KPHCSRNPVL

SEQ ID NO: 125792 - protein, 10 aa, Homo Sapiens
KPHGPRTLYA

SEQ ID NO: 125793 - protein, 10 aa, Homo Sapiens
KPHQIGGIRF

SEQ ID NO: 125794 - protein, 10 aa, Homo Sapiens
KPIDFVLNKV

SEQ ID NO: 125795 - protein, 10 aa, Homo Sapiens
KPIEMQLTSA

SEQ ID NO: 125796 - protein, 10 aa, Homo Sapiens
KPIPIIPTAL

SEQ ID NO: 125797 - protein, 10 aa, Homo Sapiens
KPKAAKPKVV

SEQ ID NO: 125798 - protein, 10 aa, Homo Sapiens
KPKDVSLWAA

SEQ ID NO: 125799 - protein, 10 aa, Homo Sapiens
KPKEVKPKIP

SEQ ID NO: 125800 - protein, 10 aa, Homo Sapiens
KPKEVTTVKV

SEQ ID NO: 125801 - protein, 10 aa, Homo Sapiens
KPKPAGVLGA

SEQ ID NO: 125802 - protein, 10 aa, Homo Sapiens
KPKPGHTPIF

SEQ ID NO: 125803 - protein, 10 aa, Homo Sapiens
KPKPVKPVTF

SEQ ID NO: 125804 - protein, 10 aa, Homo Sapiens
KPKVMEGTVA

SEQ ID NO: 125805 - protein, 10 aa, Homo Sapiens
KPLANRIKEA

SEQ ID NO: 125806 - protein, 10 aa, Homo Sapiens
KPLQPLPNTA

SEQ ID NO: 125807 - protein, 10 aa, Homo Sapiens
KPLRPLGKAA

SEQ ID NO: 125808 - protein, 10 aa, Homo Sapiens
KPMEIARIVA

SEQ ID NO: 125809 - protein, 10 aa, Homo Sapiens
KPMKSVLVVA

SEQ ID NO: 125810 - protein, 10 aa, Homo Sapiens
KPNPNQIISV

SEQ ID NO: 125811 - protein, 10 aa, Homo Sapiens
KPQSINTVSA

SEQ ID NO: 125812 - protein, 10 aa, Homo Sapiens
KPRPPQGLVR

SEQ ID NO: 125813 - protein, 10 aa, Homo Sapiens
KPRTPMPSSV

SEQ ID NO: 125814 - protein, 10 aa, Homo Sapiens
KPSPFTPVSA

SEQ ID NO: 125815 - protein, 10 aa, Homo Sapiens
KPSSSLAVAA

SEQ ID NO: 125816 - protein, 10 aa, Homo Sapiens
KPYTLMSMVA

SEQ ID NO: 125817 - protein, 10 aa, Homo Sapiens
KVKDIVINEA

SEQ ID NO: 125818 - protein, 10 aa, Homo Sapiens
KVKEPSVQEA

SEQ ID NO: 125819 - protein, 10 aa, Homo Sapiens
LKGHPGLPGL

SEQ ID NO: 125820 - protein, 10 aa, Homo Sapiens
LPAARAGPVA

SEQ ID NO: 125821 - protein, 10 aa, Homo Sapiens
LPAASQPQVF

SEQ ID NO: 125822 - protein, 10 aa, Homo Sapiens
LPHSAGRYAA

SEQ ID NO: 125823 - protein, 10 aa, Homo Sapiens
LPKAGKFGPA

SEQ ID NO: 125824 - protein, 10 aa, Homo Sapiens
LPKDVSPTQA

SEQ ID NO: 125825 - protein, 10 aa, Homo Sapiens
LPKEDPTAVA

SEQ ID NO: 125826 - protein, 10 aa, Homo Sapiens
LPKEPQGIIA

SEQ ID NO: 125827 - protein, 10 aa, Homo Sapiens
LPKPHGIRAL

SEQ ID NO: 125828 - protein, 10 aa, Homo Sapiens
LPNQSFPHSV

SEQ ID NO: 125829 - protein, 10 aa, Homo Sapiens
LPQSYIHTSA

SEQ ID NO: 125830 - protein, 10 aa, Homo Sapiens
LPRRPLPPAA

SEQ ID NO: 125831 - protein, 10 aa, Homo Sapiens
LPSGCYGRVA

SEQ ID NO: 125832 - protein, 10 aa, Homo Sapiens
LPSGEVVKIA

SEQ ID NO: 125833 - protein, 10 aa, Homo Sapiens
LPVFQPGVKL

SEQ ID NO: 125834 - protein, 10 aa, Homo Sapiens
LPVHYIPVAP

SEQ ID NO: 125835 - protein, 10 aa, Homo Sapiens
LPYEHGPKGA

SEQ ID NO: 125836 - protein, 10 aa, Homo Sapiens
LPYSHPGVVF

SEQ ID NO: 125837 - protein, 10 aa, Homo Sapiens
LVKDVFISAA

SEQ ID NO: 125838 - protein, 10 aa, Homo Sapiens
MPFQGSGKSA

SEQ ID NO: 125839 - protein, 10 aa, Homo Sapiens
MPHPATGKTV

SEQ ID NO: 125840 - protein, 10 aa, Homo Sapiens
MPLLKSEVAA

SEQ ID NO: 125841 - protein, 10 aa, Homo Sapiens
MPNGDHIVSA

SEQ ID NO: 125842 - protein, 10 aa, Homo Sapiens
MPNGTPHPTA

SEQ ID NO: 125843 - protein, 10 aa, Homo Sapiens
MPNPQLNIKA

SEQ ID NO: 125844 - protein, 10 aa, Homo Sapiens
MPQIPRDNKA

SEQ ID NO: 125845 - protein, 10 aa, Homo Sapiens
MPQMCKATSA

SEQ ID NO: 125846 - protein, 10 aa, Homo Sapiens
MPQSGTGVSV

SEQ ID NO: 125847 - protein, 10 aa, Homo Sapiens
MPRFTEQVEA

SEQ ID NO: 125848 - protein, 10 aa, Homo Sapiens
MPSRFPPVVF

SEQ ID NO: 125849 - protein, 10 aa, Homo Sapiens
MPVEAKCINA

SEQ ID NO: 125850 - protein, 10 aa, Homo Sapiens
MPVQFKPKSA

SEQ ID NO: 125851 - protein, 10 aa, Homo Sapiens
MPVRGGTRLA

SEQ ID NO: 125852 - protein, 10 aa, Homo Sapiens
MPVSPISQGA

SEQ ID NO: 125853 - protein, 10 aa, Homo Sapiens
NPKVQASLSA

SEQ ID NO: 125854 - protein, 10 aa, Homo Sapiens
NPSPAVCLVA

SEQ ID NO: 125855 - protein, 10 aa, Homo Sapiens
NPSPSTSISA

SEQ ID NO: 125856 - protein, 10 aa, Homo Sapiens
NPYFPGQAIA

SEQ ID NO: 125857 - protein, 10 aa, Homo Sapiens
NPYNGGGRVA

SEQ ID NO: 125858 - protein, 10 aa, Homo Sapiens
NQIKSGTPYR

SEQ ID NO: 125859 - protein, 10 aa, Homo Sapiens
PRGPAGPAAQ

SEQ ID NO: 125860 - protein, 10 aa, Homo Sapiens
PRLGELAVAA

SEQ ID NO: 125861 - protein, 10 aa, Homo Sapiens
PRPASGPIRP

SEQ ID NO: 125862 - protein, 10 aa, Homo Sapiens
QPFASLISKA

SEQ ID NO: 125863 - protein, 10 aa, Homo Sapiens
QPHHLLLPAA

SEQ ID NO: 125864 - protein, 10 aa, Homo Sapiens
QPHIAGVFSA

SEQ ID NO: 125865 - protein, 10 aa, Homo Sapiens
QPMAGCARVA

SEQ ID NO: 125866 - protein, 10 aa, Homo Sapiens
QPNRYTNRVV

SEQ ID NO: 125867 - protein, 10 aa, Homo Sapiens
QPRPPSNRTV

SEQ ID NO: 125868 - protein, 10 aa, Homo Sapiens
QPYYATRVNA

SEQ ID NO: 125869 - protein, 10 aa, Homo Sapiens
QRPGAAAARP

SEQ ID NO: 125870 - protein, 10 aa, Homo Sapiens
QVMQGMGVSA

SEQ ID NO: 125871 - protein, 10 aa, Homo Sapiens
RIRHWIGCGA

SEQ ID NO: 125872 - protein, 10 aa, Homo Sapiens
RPAAAPPAGA

SEQ ID NO: 125873 - protein, 10 aa, Homo Sapiens
RPADVIFATV

SEQ ID NO: 125874 - protein, 10 aa, Homo Sapiens
RPAPALAPAA

SEQ ID NO: 125875 - protein, 10 aa, Homo Sapiens
RPAPHFERTA

SEQ ID NO: 125876 - protein, 10 aa, Homo Sapiens
RPAPLPAAVV

SEQ ID NO: 125877 - protein, 10 aa, Homo Sapiens
RPAPPLRPSA

SEQ ID NO: 125878 - protein, 10 aa, Homo Sapiens
RPAPVAVAAA

SEQ ID NO: 125879 - protein, 10 aa, Homo Sapiens
RPFEGFQRKA

SEQ ID NO: 125880 - protein, 10 aa, Homo Sapiens
RPFGGLIRDV

SEQ ID NO: 125881 - protein, 10 aa, Homo Sapiens
RPFNLAERKA

SEQ ID NO: 125882 - protein, 10 aa, Homo Sapiens
RPFSGRRLPV

SEQ ID NO: 125883 - protein, 10 aa, Homo Sapiens
RPIEGRVVNA

SEQ ID NO: 125884 - protein, 10 aa, Homo Sapiens
RPIPNQPPTA

SEQ ID NO: 125885 - protein, 10 aa, Homo Sapiens
RPITPPRNSA

SEQ ID NO: 125886 - protein, 10 aa, Homo Sapiens
RPKDDIKLTA

SEQ ID NO: 125887 - protein, 10 aa, Homo Sapiens
RPKIGLPGVA

SEQ ID NO: 125888 - protein, 10 aa, Homo Sapiens
RPKIPGSREA

SEQ ID NO: 125889 - protein, 10 aa, Homo Sapiens
RPKPPIPAKP

SEQ ID NO: 125890 - protein, 10 aa, Homo Sapiens
RPKPPNVRTA

SEQ ID NO: 125891 - protein, 10 aa, Homo Sapiens
RPKPPSATSI

SEQ ID NO: 125892 - protein, 10 aa, Homo Sapiens
RPKPSASEVL

SEQ ID NO: 125893 - protein, 10 aa, Homo Sapiens
RPKQPGPVKL

SEQ ID NO: 125894 - protein, 10 aa, Homo Sapiens
RPLFPSTGAA

SEQ ID NO: 125895 - protein, 10 aa, Homo Sapiens
RPLPGALGVA

SEQ ID NO: 125896 - protein, 10 aa, Homo Sapiens
RPLSGSGISA

SEQ ID NO: 125897 - protein, 10 aa, Homo Sapiens
RPMGLRFKKA

SEQ ID NO: 125898 - protein, 10 aa, Homo Sapiens
RPNAFGMAQA

SEQ ID NO: 125899 - protein, 10 aa, Homo Sapiens
RPNDSRMLVA

SEQ ID NO: 125900 - protein, 10 aa, Homo Sapiens
RPNQDGTLIA

SEQ ID NO: 125901 - protein, 10 aa, Homo Sapiens
RPPGARLTTT

SEQ ID NO: 125902 - protein, 10 aa, Homo Sapiens
RPQSGRVLSA

SEQ ID NO: 125903 - protein, 10 aa, Homo Sapiens
RPRAVYAVEA

SEQ ID NO: 125904 - protein, 10 aa, Homo Sapiens
RPRDSQLYAV

SEQ ID NO: 125905 - protein, 10 aa, Homo Sapiens
RPRHQGVMVG

SEQ ID NO: 125906 - protein, 10 aa, Homo Sapiens
RPRPGDSLPS

SEQ ID NO: 125907 - protein, 10 aa, Homo Sapiens
RPRPHSAPSL

SEQ ID NO: 125908 - protein, 10 aa, Homo Sapiens
RPRPPPFLGP

SEQ ID NO: 125909 - protein, 10 aa, Homo Sapiens
RPRPPPVEQV

SEQ ID NO: 125910 - protein, 10 aa, Homo Sapiens
RPRPPQKALP

SEQ ID NO: 125911 - protein, 10 aa, Homo Sapiens
RPRTEVSLSA

SEQ ID NO: 125912 - protein, 10 aa, Homo Sapiens
RPRVTEPISA

SEQ ID NO: 125913 - protein, 10 aa, Homo Sapiens
RPSLIPPVTF

SEQ ID NO: 125914 - protein, 10 aa, Homo Sapiens
RPSSEVIKDA

SEQ ID NO: 125915 - protein, 10 aa, Homo Sapiens
RPSSLHGLAA

SEQ ID NO: 125916 - protein, 10 aa, Homo Sapiens
RPVHPALPFA

SEQ ID NO: 125917 - protein, 10 aa, Homo Sapiens
RPVIRPNVGF

SEQ ID NO: 125918 - protein, 10 aa, Homo Sapiens
RPVLPRTEAA

SEQ ID NO: 125919 - protein, 10 aa, Homo Sapiens
RPYEKGRLII

SEQ ID NO: 125920 - protein, 10 aa, Homo Sapiens
RPYGCVLRAA

SEQ ID NO: 125921 - protein, 10 aa, Homo Sapiens
RVAPRSGLAA

SEQ ID NO: 125922 - protein, 10 aa, Homo Sapiens
RVKPFSENEA

SEQ ID NO: 125923 - protein, 10 aa, Homo Sapiens
RVRDVFEAKA

SEQ ID NO: 125924 - protein, 10 aa, Homo Sapiens
RVRLSTGREA

SEQ ID NO: 125925 - protein, 10 aa, Homo Sapiens
SAKPPAKVEA

SEQ ID NO: 125926 - protein, 10 aa, Homo Sapiens
SPARPVSPAP

SEQ ID NO: 125927 - protein, 10 aa, Homo Sapiens
SPDGRWLISA

SEQ ID NO: 125928 - protein, 10 aa, Homo Sapiens
SPFHFQPSAA

SEQ ID NO: 125929 - protein, 10 aa, Homo Sapiens
SPHAHISEQA

SEQ ID NO: 125930 - protein, 10 aa, Homo Sapiens
SPHLPGTSSA

SEQ ID NO: 125931 - protein, 10 aa, Homo Sapiens
SPHPPSEVTA

SEQ ID NO: 125932 - protein, 10 aa, Homo Sapiens
SPIENIQRVA

SEQ ID NO: 125933 - protein, 10 aa, Homo Sapiens
SPITGEKIPA

SEQ ID NO: 125934 - protein, 10 aa, Homo Sapiens
SPKAALRYAA

SEQ ID NO: 125935 - protein, 10 aa, Homo Sapiens
SPKPALRYAA

SEQ ID NO: 125936 - protein, 10 aa, Homo Sapiens
SPKPCLAQPA

SEQ ID NO: 125937 - protein, 10 aa, Homo Sapiens
SPKQILDSAA

SEQ ID NO: 125938 - protein, 10 aa, Homo Sapiens
SPLATQIPQA

SEQ ID NO: 125939 - protein, 10 aa, Homo Sapiens
SPLRSPIRSA

SEQ ID NO: 125940 - protein, 10 aa, Homo Sapiens
SPLTPRPLSA

SEQ ID NO: 125941 - protein, 10 aa, Homo Sapiens
SPLWRGGGVA

SEQ ID NO: 125942 - protein, 10 aa, Homo Sapiens
SPMPFHPSQV

SEQ ID NO: 125943 - protein, 10 aa, Homo Sapiens
SPMSADRVVA

SEQ ID NO: 125944 - protein, 10 aa, Homo Sapiens
SPNDRLIPAV

SEQ ID NO: 125945 - protein, 10 aa, Homo Sapiens
SPNLIGATGA

SEQ ID NO: 125946 - protein, 10 aa, Homo Sapiens
SPNPFSVHTA

SEQ ID NO: 125947 - protein, 10 aa, Homo Sapiens
SPNRYWLCAA

SEQ ID NO: 125948 - protein, 10 aa, Homo Sapiens
SPRLFSNHAA

SEQ ID NO: 125949 - protein, 10 aa, Homo Sapiens
SPRPALVRSA

SEQ ID NO: 125950 - protein, 10 aa, Homo Sapiens
SPSPKLQNSA

SEQ ID NO: 125951 - protein, 10 aa, Homo Sapiens
SPSPPFGHSA

SEQ ID NO: 125952 - protein, 10 aa, Homo Sapiens
SPVDPGARQA

SEQ ID NO: 125953 - protein, 10 aa, Homo Sapiens
SPVPSHWMVA

SEQ ID NO: 125954 - protein, 10 aa, Homo Sapiens
SPYKDLLDPA

SEQ ID NO: 125955 - protein, 10 aa, Homo Sapiens
SPYSNVFHVV

SEQ ID NO: 125956 - protein, 10 aa, Homo Sapiens
TAKSGTGIAA

SEQ ID NO: 125957 - protein, 10 aa, Homo Sapiens
TARPPPSMSA

SEQ ID NO: 125958 - protein, 10 aa, Homo Sapiens
TPAHVLPSAA

SEQ ID NO: 125959 - protein, 10 aa, Homo Sapiens
TPAPVEKSPA

SEQ ID NO: 125960 - protein, 10 aa, Homo Sapiens
TPFQGQGHGA

SEQ ID NO: 125961 - protein, 10 aa, Homo Sapiens
TPFTGPFISV

SEQ ID NO: 125962 - protein, 10 aa, Homo Sapiens
TPHTVTAISA

SEQ ID NO: 125963 - protein, 10 aa, Homo Sapiens
TPKGPGQVPT

SEQ ID NO: 125964 - protein, 10 aa, Homo Sapiens
TPKMPGQSVR

SEQ ID NO: 125965 - protein, 10 aa, Homo Sapiens
TPKPIPILAA

SEQ ID NO: 125966 - protein, 10 aa, Homo Sapiens
TPLPAIVPAA

SEQ ID NO: 125967 - protein, 10 aa, Homo Sapiens
TPNTPRNLAA

SEQ ID NO: 125968 - protein, 10 aa, Homo Sapiens
TPREPNRWAV

SEQ ID NO: 125969 - protein, 10 aa, Homo Sapiens
TPRPLTSARA

SEQ ID NO: 125970 - protein, 10 aa, Homo Sapiens
TPSPVIRSTA

SEQ ID NO: 125971 - protein, 10 aa, Homo Sapiens
TPVQRTPLSA

SEQ ID NO: 125972 - protein, 10 aa, Homo Sapiens
TPYGYFLISA

SEQ ID NO: 125973 - protein, 10 aa, Homo Sapiens
TPYPGFKSHV

SEQ ID NO: 125974 - protein, 10 aa, Homo Sapiens
TPYSGKLMSA

SEQ ID NO: 125975 - protein, 10 aa, Homo Sapiens
TQARAPVTAA

SEQ ID NO: 125976 - protein, 10 aa, Homo Sapiens
VPAPSPLSAA

SEQ ID NO: 125977 - protein, 10 aa, Homo Sapiens
VPFKPQIPEA

SEQ ID NO: 125978 - protein, 10 aa, Homo Sapiens
VPHQPDNLAA

SEQ ID NO: 125979 - protein, 10 aa, Homo Sapiens
VPKEGKVVDA

SEQ ID NO: 125980 - protein, 10 aa, Homo Sapiens
VPKGNTAVSV

SEQ ID NO: 125981 - protein, 10 aa, Homo Sapiens
VPKKPGPPVL

SEQ ID NO: 125982 - protein, 10 aa, Homo Sapiens
VPKLPAVHPA

SEQ ID NO: 125983 - protein, 10 aa, Homo Sapiens
VPKNSDPWAA

SEQ ID NO: 125984 - protein, 10 aa, Homo Sapiens
VPKNYKLVAA

SEQ ID NO: 125985 - protein, 10 aa, Homo Sapiens
VPKPIGGVVV

SEQ ID NO: 125986 - protein, 10 aa, Homo Sapiens
VPKPSSVQSV

SEQ ID NO: 125987 - protein, 10 aa, Homo Sapiens
VPKSAVQQVA

SEQ ID NO: 125988 - protein, 10 aa, Homo Sapiens
VPNAGILPLV

SEQ ID NO: 125989 - protein, 10 aa, Homo Sapiens
VPNYKLITPA

SEQ ID NO: 125990 - protein, 10 aa, Homo Sapiens
VPQAQPTKPA

SEQ ID NO: 125991 - protein, 10 aa, Homo Sapiens
VPQLVTGRCA

SEQ ID NO: 125992 - protein, 10 aa, Homo Sapiens
VPRPPDTVST

SEQ ID NO: 125993 - protein, 10 aa, Homo Sapiens
VPRPPSNPPA

SEQ ID NO: 125994 - protein, 10 aa, Homo Sapiens
VPRQPTVTSV

SEQ ID NO: 125995 - protein, 10 aa, Homo Sapiens
VPRTVSSTTA

SEQ ID NO: 125996 - protein, 10 aa, Homo Sapiens
VPYRLLPGIF

SEQ ID NO: 125997 - protein, 10 aa, Homo Sapiens
WPKDVGIVAL

SEQ ID NO: 125998 - protein, 10 aa, Homo Sapiens
WRRIPGGYSA

SEQ ID NO: 125999 - protein, 10 aa, Homo Sapiens
YPALGPRLAA

SEQ ID NO: 126000 - protein, 10 aa, Homo Sapiens
YPKAEPMPSA

SEQ ID NO: 126001 - protein, 10 aa, Homo Sapiens
YPRVSSAVKA

SEQ ID NO: 126002 - protein, 10 aa, Homo Sapiens
YPYGDGNRSV

SEQ ID NO: 126003 - protein, 11 aa, Homo Sapiens
APILNIPIVQF

SEQ ID NO: 126004 - protein, 11 aa, Homo Sapiens
APKGPSRESVV

SEQ ID NO: 126005 - protein, 11 aa, Homo Sapiens
APKSPSQDVKA

SEQ ID NO: 126006 - protein, 11 aa, Homo Sapiens
APKSTSVFAVA

SEQ ID NO: 126007 - protein, 11 aa, Homo Sapiens
APLDSIHSLAA

SEQ ID NO: 126008 - protein, 11 aa, Homo Sapiens
APMPYLIGVHA

SEQ ID NO: 126009 - protein, 11 aa, Homo Sapiens
APRAPRALAAA

SEQ ID NO: 126010 - protein, 11 aa, Homo Sapiens
APRGPGAELQA

SEQ ID NO: 126011 - protein, 11 aa, Homo Sapiens
APRLCSISVTA

SEQ ID NO: 126012 - protein, 11 aa, Homo Sapiens
APRPASGPIRP

SEQ ID NO: 126013 - protein, 11 aa, Homo Sapiens
APSNGLSVRSA

SEQ ID NO: 126014 - protein, 11 aa, Homo Sapiens
APTGSGKTICA

SEQ ID NO: 126015 - protein, 11 aa, Homo Sapiens
APTSAGKTLVA

SEQ ID NO: 126016 - protein, 11 aa, Homo Sapiens
APVNIAGSRTA

SEQ ID NO: 126017 - protein, 11 aa, Homo Sapiens
APYAKGFGVAA

SEQ ID NO: 126018 - protein, 11 aa, Homo Sapiens
APYDPHFPAPA

SEQ ID NO: 126019 - protein, 11 aa, Homo Sapiens
EPKNPPPPINF

SEQ ID NO: 126020 - protein, 11 aa, Homo Sapiens
FPHFDLSHGSA

SEQ ID NO: 126021 - protein, 11 aa, Homo Sapiens
GVAALYKFRVA

SEQ ID NO: 126022 - protein, 11 aa, Homo Sapiens
HNPGYPKYLGT

SEQ ID NO: 126023 - protein, 11 aa, Homo Sapiens
HPKPVPGFQVA

SEQ ID NO: 126024 - protein, 11 aa, Homo Sapiens
HPKVNVPGSQA

SEQ ID NO: 126025 - protein, 11 aa, Homo Sapiens
HPLASFSFTSA

SEQ ID NO: 126026 - protein, 11 aa, Homo Sapiens
HPVHRQYFITA

SEQ ID NO: 126027 - protein, 11 aa, Homo Sapiens
HPYPPGPGVAL

SEQ ID NO: 126028 - protein, 11 aa, Homo Sapiens
IPAFRGHFIAA

SEQ ID NO: 126029 - protein, 11 aa, Homo Sapiens
IPAGTVTVNAA

SEQ ID NO: 126030 - protein, 11 aa, Homo Sapiens
IPHSLPGAVAA

SEQ ID NO: 126031 - protein, 11 aa, Homo Sapiens
IPKPSKDGVTV

SEQ ID NO: 126032 - protein, 11 aa, Homo Sapiens
IPLPDEKSRVA

SEQ ID NO: 126033 - protein, 11 aa, Homo Sapiens
IPNSIMTILEA

SEQ ID NO: 126034 - protein, 11 aa, Homo Sapiens
IPQSVPGVQTL

SEQ ID NO: 126035 - protein, 11 aa, Homo Sapiens
IPYDQSGFVSA

SEQ ID NO: 126036 - protein, 11 aa, Homo Sapiens
IPYSPDVQIHA

SEQ ID NO: 126037 - protein, 11 aa, Homo Sapiens
KPFEQVKGITL

SEQ ID NO: 126038 - protein, 11 aa, Homo Sapiens
KPFQPALPLVV

SEQ ID NO: 126039 - protein, 11 aa, Homo Sapiens
KPHKHLPPAAL

SEQ ID NO: 126040 - protein, 11 aa, Homo Sapiens
KPHQIGGIRFL

SEQ ID NO: 126041 - protein, 11 aa, Homo Sapiens
KPKPNGRTVEV

SEQ ID NO: 126042 - protein, 11 aa, Homo Sapiens
KPKVMEGTVAA

SEQ ID NO: 126043 - protein, 11 aa, Homo Sapiens
KPLDAPAVNKA

SEQ ID NO: 126044 - protein, 11 aa, Homo Sapiens
KPLDIPDGRRA

SEQ ID NO: 126045 - protein, 11 aa, Homo Sapiens
KPLSSLTPLIA

SEQ ID NO: 126046 - protein, 11 aa, Homo Sapiens
KPREAFGFEQA

SEQ ID NO: 126047 - protein, 11 aa, Homo Sapiens
KPRPPQGLVRV

SEQ ID NO: 126048 - protein, 11 aa, Homo Sapiens
KPRTVATPLNQ

SEQ ID NO: 126049 - protein, 11 aa, Homo Sapiens
KPVPLNSGVRF

SEQ ID NO: 126050 - protein, 11 aa, Homo Sapiens
KPYPNSEAARA

SEQ ID NO: 126051 - protein, 11 aa, Homo Sapiens
LPDATSSHRTV

SEQ ID NO: 126052 - protein, 11 aa, Homo Sapiens
LPKKSFEQISA

SEQ ID NO: 126053 - protein, 11 aa, Homo Sapiens
LPKPRMRGLLA

SEQ ID NO: 126054 - protein, 11 aa, Homo Sapiens
LPRESCTAHAA

SEQ ID NO: 126055 - protein, 11 aa, Homo Sapiens
LPYCPGKTLVV

SEQ ID NO: 126056 - protein, 11 aa, Homo Sapiens
MPHPATGKTVA

SEQ ID NO: 126057 - protein, 11 aa, Homo Sapiens
MPNGTPHPTAA

SEQ ID NO: 126058 - protein, 11 aa, Homo Sapiens
MPNPSLAQVKI

SEQ ID NO: 126059 - protein, 11 aa, Homo Sapiens
MPRWAERLFPA

SEQ ID NO: 126060 - protein, 11 aa, Homo Sapiens
MPSRFPPVVFY

SEQ ID NO: 126061 - protein, 11 aa, Homo Sapiens
NPKDNNQFASA

SEQ ID NO: 126062 - protein, 11 aa, Homo Sapiens
QAAVRPKGEAA

SEQ ID NO: 126063 - protein, 11 aa, Homo Sapiens
QPHDPLVPLSA

SEQ ID NO: 126064 - protein, 11 aa, Homo Sapiens
QPRNSLPASPA

SEQ ID NO: 126065 - protein, 11 aa, Homo Sapiens
QPYAPPRDFAA

SEQ ID NO: 126066 - protein, 11 aa, Homo Sapiens
QPYSKLPGVSL

SEQ ID NO: 126067 - protein, 11 aa, Homo Sapiens
QPYYATRVNAA

SEQ ID NO: 126068 - protein, 11 aa, Homo Sapiens
REAGAAALRNV

SEQ ID NO: 126069 - protein, 11 aa, Homo Sapiens
RMFHIRAVILR

SEQ ID NO: 126070 - protein, 11 aa, Homo Sapiens
RPAGALVALVV

SEQ ID NO: 126071 - protein, 11 aa, Homo Sapiens
RPALPVSYLQA

SEQ ID NO: 126072 - protein, 11 aa, Homo Sapiens
RPALVGVVKEA

SEQ ID NO: 126073 - protein, 11 aa, Homo Sapiens
RPCSPQNKISF

SEQ ID NO: 126074 - protein, 11 aa, Homo Sapiens
RPGPVLPAVAV

SEQ ID NO: 126075 - protein, 11 aa, Homo Sapiens
RPHAPHSPIKF

SEQ ID NO: 126076 - protein, 11 aa, Homo Sapiens
RPHSSLRELLA

SEQ ID NO: 126077 - protein, 11 aa, Homo Sapiens
RPICSVPGARV

SEQ ID NO: 126078 - protein, 11 aa, Homo Sapiens
RPKAKGGLASL

SEQ ID NO: 126079 - protein, 11 aa, Homo Sapiens
RPKGLEGERPA

SEQ ID NO: 126080 - protein, 11 aa, Homo Sapiens
RPKLNEGVVEF

SEQ ID NO: 126081 - protein, 11 aa, Homo Sapiens
RPKPIITSVPK

SEQ ID NO: 126082 - protein, 11 aa, Homo Sapiens
RPKPSSSPVIF

SEQ ID NO: 126083 - protein, 11 aa, Homo Sapiens
RPKSAFKVQNA

SEQ ID NO: 126084 - protein, 11 aa, Homo Sapiens
RPKSSQIGAVV

SEQ ID NO: 126085 - protein, 11 aa, Homo Sapiens
RPKTVRDTLLA

SEQ ID NO: 126086 - protein, 11 aa, Homo Sapiens
RPNFNIKGIRF

SEQ ID NO: 126087 - protein, 11 aa, Homo Sapiens
RPNGVITGLAA

SEQ ID NO: 126088 - protein, 11 aa, Homo Sapiens
RPNSLVGITSA

SEQ ID NO: 126089 - protein, 11 aa, Homo Sapiens
RPRDLEDFFSA

SEQ ID NO: 126090 - protein, 11 aa, Homo Sapiens
RPREALSTNEC

SEQ ID NO: 126091 - protein, 11 aa, Homo Sapiens
RPSELLAGVKA

SEQ ID NO: 126092 - protein, 11 aa, Homo Sapiens
RPVQRLPSVAL

SEQ ID NO: 126093 - protein, 11 aa, Homo Sapiens
RPYAPINANAI

SEQ ID NO: 126094 - protein, 11 aa, Homo Sapiens
RPYQPLGALVV

SEQ ID NO: 126095 - protein, 11 aa, Homo Sapiens
RVRSFLRGLPA

SEQ ID NO: 126096 - protein, 11 aa, Homo Sapiens
SPDEGALVRAA

SEQ ID NO: 126097 - protein, 11 aa, Homo Sapiens
SPIENIQRVAA

SEQ ID NO: 126098 - protein, 11 aa, Homo Sapiens
SPKGSEGYLAA

SEQ ID NO: 126099 - protein, 11 aa, Homo Sapiens
SPKKPGREIEL

SEQ ID NO: 126100 - protein, 11 aa, Homo Sapiens
SPKPAIKSISA

SEQ ID NO: 126101 - protein, 11 aa, Homo Sapiens
SPKRPPSPIKF

SEQ ID NO: 126102 - protein, 11 aa, Homo Sapiens
SPMAERSMMSA

SEQ ID NO: 126103 - protein, 11 aa, Homo Sapiens
SPREVFFRVAA

SEQ ID NO: 126104 - protein, 11 aa, Homo Sapiens
SPRGFPLGLSA

SEQ ID NO: 126105 - protein, 11 aa, Homo Sapiens
SPRHLPSCSPA

SEQ ID NO: 126106 - protein, 11 aa, Homo Sapiens
SPRIATTTASA

SEQ ID NO: 126107 - protein, 11 aa, Homo Sapiens
SPRNLGFETSA

SEQ ID NO: 126108 - protein, 11 aa, Homo Sapiens
SPRQSDVMIVA

SEQ ID NO: 126109 - protein, 11 aa, Homo Sapiens
SPRSGQRCWAA

SEQ ID NO: 126110 - protein, 11 aa, Homo Sapiens
SPRTAEGVLAA

SEQ ID NO: 126111 - protein, 11 aa, Homo Sapiens
SPRTPVSPVKF

SEQ ID NO: 126112 - protein, 11 aa, Homo Sapiens
SPTSPNALPPA

SEQ ID NO: 126113 - protein, 11 aa, Homo Sapiens
SPVSSKTESVS

SEQ ID NO: 126114 - protein, 11 aa, Homo Sapiens
SPYSGPKFNSA

SEQ ID NO: 126115 - protein, 11 aa, Homo Sapiens
TPADRSGWTSA

SEQ ID NO: 126116 - protein, 11 aa, Homo Sapiens
TPDPSTPSRLA

SEQ ID NO: 126117 - protein, 11 aa, Homo Sapiens
TPHPVLTPVAA

SEQ ID NO: 126118 - protein, 11 aa, Homo Sapiens
TPKLTRNESVA

SEQ ID NO: 126119 - protein, 11 aa, Homo Sapiens
TPKPPGTGPVP

SEQ ID NO: 126120 - protein, 11 aa, Homo Sapiens
TPKTTGARVEL

SEQ ID NO: 126121 - protein, 11 aa, Homo Sapiens
TPKTVTPASSA

SEQ ID NO: 126122 - protein, 11 aa, Homo Sapiens
TPMPPISSVLL

SEQ ID NO: 126123 - protein, 11 aa, Homo Sapiens
TPRSIHDGVAA

SEQ ID NO: 126124 - protein, 11 aa, Homo Sapiens
TPVQRTPLSAA

SEQ ID NO: 126125 - protein, 11 aa, Homo Sapiens
TPYQSKWTICA

SEQ ID NO: 126126 - protein, 11 aa, Homo Sapiens
VPAGGAVAVSA

SEQ ID NO: 126127 - protein, 11 aa, Homo Sapiens
VPDSSGPERIL

SEQ ID NO: 126128 - protein, 11 aa, Homo Sapiens
VPIEQIPLVKL

SEQ ID NO: 126129 - protein, 11 aa, Homo Sapiens
VPIPNSPFKVA

SEQ ID NO: 126130 - protein, 11 aa, Homo Sapiens
VPKENSTLNCA

SEQ ID NO: 126131 - protein, 11 aa, Homo Sapiens
VPKPFSGPVRL

SEQ ID NO: 126132 - protein, 11 aa, Homo Sapiens
VPKPIGGVVVF

SEQ ID NO: 126133 - protein, 11 aa, Homo Sapiens
VPRNPELPNAA

SEQ ID NO: 126134 - protein, 11 aa, Homo Sapiens
VPRPVLRALSF

SEQ ID NO: 126135 - protein, 11 aa, Homo Sapiens
VPYGTPLSVNF

SEQ ID NO: 126136 - protein, 11 aa, Homo Sapiens
VPYPLPKIDLI

SEQ ID NO: 126137 - protein, 8 aa, Homo Sapiens
APASLTSA

SEQ ID NO: 126138 - protein, 8 aa, Homo Sapiens
APGVLPSA

SEQ ID NO: 126139 - protein, 8 aa, Homo Sapiens
APIRLLAA

SEQ ID NO: 126140 - protein, 8 aa, Homo Sapiens
APRPAPVA

SEQ ID NO: 126141 - protein, 8 aa, Homo Sapiens
APTAIKAA

SEQ ID NO: 126142 - protein, 8 aa, Homo Sapiens
APTAITEA

SEQ ID NO: 126143 - protein, 8 aa, Homo Sapiens
APVAVWAA

SEQ ID NO: 126144 - protein, 8 aa, Homo Sapiens
APWGGPAA

SEQ ID NO: 126145 - protein, 8 aa, Homo Sapiens
FPVCLLAS

SEQ ID NO: 126146 - protein, 8 aa, Homo Sapiens
HPFYTRAA

SEQ ID NO: 126147 - protein, 8 aa, Homo Sapiens
HPHLVAEA

SEQ ID NO: 126148 - protein, 8 aa, Homo Sapiens
IFFNVHSA

SEQ ID NO: 126149 - protein, 8 aa, Homo Sapiens
IPQVMAIA

SEQ ID NO: 126150 - protein, 8 aa, Homo Sapiens
IPTPIVGV

SEQ ID NO: 126151 - protein, 8 aa, Homo Sapiens
IPTTIYKA

SEQ ID NO: 126152 - protein, 8 aa, Homo Sapiens
IPVRFIEA

SEQ ID NO: 126153 - protein, 8 aa, Homo Sapiens
LPMLQTVA

SEQ ID NO: 126154 - protein, 8 aa, Homo Sapiens
LPVRLATA

SEQ ID NO: 126155 - protein, 8 aa, Homo Sapiens
MPIYVTGI

SEQ ID NO: 126156 - protein, 8 aa, Homo Sapiens
MPQPVPTA

SEQ ID NO: 126157 - protein, 8 aa, Homo Sapiens
MPQSIVEA

SEQ ID NO: 126158 - protein, 8 aa, Homo Sapiens
MPTTLEGA

SEQ ID NO: 126159 - protein, 8 aa, Homo Sapiens
MQPPVPGP

SEQ ID NO: 126160 - protein, 8 aa, Homo Sapiens
NPIAQPLA

SEQ ID NO: 126161 - protein, 8 aa, Homo Sapiens
PAKKITAA

SEQ ID NO: 126162 - protein, 8 aa, Homo Sapiens
PYLFPVAA

SEQ ID NO: 126163 - protein, 8 aa, Homo Sapiens
QPVKLQEA

SEQ ID NO: 126164 - protein, 8 aa, Homo Sapiens
QPYRFPQA

SEQ ID NO: 126165 - protein, 8 aa, Homo Sapiens
RPRNLAAA

SEQ ID NO: 126166 - protein, 8 aa, Homo Sapiens
RPVKIRKI

SEQ ID NO: 126167 - protein, 8 aa, Homo Sapiens
RPVKLFRV

SEQ ID NO: 126168 - protein, 8 aa, Homo Sapiens
RPWLRPAA

SEQ ID NO: 126169 - protein, 8 aa, Homo Sapiens
RPYLAFAA

SEQ ID NO: 126170 - protein, 8 aa, Homo Sapiens
RPYLLVHV

SEQ ID NO: 126171 - protein, 8 aa, Homo Sapiens
RPYQMEVA

SEQ ID NO: 126172 - protein, 8 aa, Homo Sapiens
SPAKLQAA

SEQ ID NO: 126173 - protein, 8 aa, Homo Sapiens
SPALLRAE

SEQ ID NO: 126174 - protein, 8 aa, Homo Sapiens
SPFPLEAV

SEQ ID NO: 126175 - protein, 8 aa, Homo Sapiens
SPILVATA

SEQ ID NO: 126176 - protein, 8 aa, Homo Sapiens
SPLNTHAA

SEQ ID NO: 126177 - protein, 8 aa, Homo Sapiens
SPTFQHAV

SEQ ID NO: 126178 - protein, 8 aa, Homo Sapiens
TPFLLVGT

SEQ ID NO: 126179 - protein, 8 aa, Homo Sapiens
TPTPVPVV

SEQ ID NO: 126180 - protein, 8 aa, Homo Sapiens
VPAGGAVA

SEQ ID NO: 126181 - protein, 8 aa, Homo Sapiens
VPAVTLVA

SEQ ID NO: 126182 - protein, 8 aa, Homo Sapiens
VPFSIPAA

SEQ ID NO: 126183 - protein, 8 aa, Homo Sapiens
VPLIAIMA

SEQ ID NO: 126184 - protein, 8 aa, Homo Sapiens
VPTNIIAA

SEQ ID NO: 126185 - protein, 8 aa, Homo Sapiens
VPVETPEA

SEQ ID NO: 126186 - protein, 8 aa, Homo Sapiens
VPWGGAAA

SEQ ID NO: 126187 - protein, 8 aa, Homo Sapiens
YPIALTRA

SEQ ID NO: 126188 - protein, 9 aa, Homo Sapiens
AAAAAVDPH

SEQ ID NO: 126189 - protein, 9 aa, Homo Sapiens
AAFAGRATA

SEQ ID NO: 126190 - protein, 9 aa, Homo Sapiens
AAFSHPQAA

SEQ ID NO: 126191 - protein, 9 aa, Homo Sapiens
AAGPPLVAA

SEQ ID NO: 126192 - protein, 9 aa, Homo Sapiens
AAGPVGMAA

SEQ ID NO: 126193 - protein, 9 aa, Homo Sapiens
APAAATVAV

SEQ ID NO: 126194 - protein, 9 aa, Homo Sapiens
APAAGMNAA

SEQ ID NO: 126195 - protein, 9 aa, Homo Sapiens
APAEPGWKA

SEQ ID NO: 126196 - protein, 9 aa, Homo Sapiens
APAGCLSQA

SEQ ID NO: 126197 - protein, 9 aa, Homo Sapiens
APALLLIPA

SEQ ID NO: 126198 - protein, 9 aa, Homo Sapiens
APAPAAHVA

SEQ ID NO: 126199 - protein, 9 aa, Homo Sapiens
APAPPKAEA

SEQ ID NO: 126200 - protein, 9 aa, Homo Sapiens
APAPPVYEA

SEQ ID NO: 126201 - protein, 9 aa, Homo Sapiens
APAPQGCAV

SEQ ID NO: 126202 - protein, 9 aa, Homo Sapiens
APAPTPVSA

SEQ ID NO: 126203 - protein, 9 aa, Homo Sapiens
APAPVIISS

SEQ ID NO: 126204 - protein, 9 aa, Homo Sapiens
APARPGPAA

SEQ ID NO: 126205 - protein, 9 aa, Homo Sapiens
APARPSVPP

SEQ ID NO: 126206 - protein, 9 aa, Homo Sapiens
APASVPAQA

SEQ ID NO: 126207 - protein, 9 aa, Homo Sapiens
APCKQRISV

SEQ ID NO: 126208 - protein, 9 aa, Homo Sapiens
APCTAIREV

SEQ ID NO: 126209 - protein, 9 aa, Homo Sapiens
APDEKYVAA

SEQ ID NO: 126210 - protein, 9 aa, Homo Sapiens
APELQGVEV

SEQ ID NO: 126211 - protein, 9 aa, Homo Sapiens
APFEPLASG

SEQ ID NO: 126212 - protein, 9 aa, Homo Sapiens
APFGKISDA

SEQ ID NO: 126213 - protein, 9 aa, Homo Sapiens
APFPFPQLA

SEQ ID NO: 126214 - protein, 9 aa, Homo Sapiens
APFPHGDSA

SEQ ID NO: 126215 - protein, 9 aa, Homo Sapiens
APFPKTQIA

SEQ ID NO: 126216 - protein, 9 aa, Homo Sapiens
APFQGLLQA

SEQ ID NO: 126217 - protein, 9 aa, Homo Sapiens
APGGEFREA

SEQ ID NO: 126218 - protein, 9 aa, Homo Sapiens
APGGWLQVA

SEQ ID NO: 126219 - protein, 9 aa, Homo Sapiens
APGKNFQQA

SEQ ID NO: 126220 - protein, 9 aa, Homo Sapiens
APGLPTARA

SEQ ID NO: 126221 - protein, 9 aa, Homo Sapiens
APGNPVLAV

SEQ ID NO: 126222 - protein, 9 aa, Homo Sapiens
APGPATREA

SEQ ID NO: 126223 - protein, 9 aa, Homo Sapiens
APGPGPASA

SEQ ID NO: 126224 - protein, 9 aa, Homo Sapiens
APGPGTPCA

SEQ ID NO: 126225 - protein, 9 aa, Homo Sapiens
APGTLKTLA

SEQ ID NO: 126226 - protein, 9 aa, Homo Sapiens
APGYSYTAA

SEQ ID NO: 126227 - protein, 9 aa, Homo Sapiens
APHEILIQI

SEQ ID NO: 126228 - protein, 9 aa, Homo Sapiens
APHPGLSEA

SEQ ID NO: 126229 - protein, 9 aa, Homo Sapiens
APHVPATGA

SEQ ID NO: 126230 - protein, 9 aa, Homo Sapiens
APIQSEPRV

SEQ ID NO: 126231 - protein, 9 aa, Homo Sapiens
APITGQVSA

SEQ ID NO: 126232 - protein, 9 aa, Homo Sapiens
APIWLEHAA

SEQ ID NO: 126233 - protein, 9 aa, Homo Sapiens
APKAGPGVV

SEQ ID NO: 126234 - protein, 9 aa, Homo Sapiens
APLDAYFQV

SEQ ID NO: 126235 - protein, 9 aa, Homo Sapiens
APMPPIIHA

SEQ ID NO: 126236 - protein, 9 aa, Homo Sapiens
APMPTASTA

SEQ ID NO: 126237 - protein, 9 aa, Homo Sapiens
APNEGFCSA

SEQ ID NO: 126238 - protein, 9 aa, Homo Sapiens
APNLQNQQV

SEQ ID NO: 126239 - protein, 9 aa, Homo Sapiens
APNPIHLTV

SEQ ID NO: 126240 - protein, 9 aa, Homo Sapiens
APNPVVFVA

SEQ ID NO: 126241 - protein, 9 aa, Homo Sapiens
APQPLKESA

SEQ ID NO: 126242 - protein, 9 aa, Homo Sapiens
APQSLGSSA

SEQ ID NO: 126243 - protein, 9 aa, Homo Sapiens
APRFGGSRA

SEQ ID NO: 126244 - protein, 9 aa, Homo Sapiens
APRIALHTA

SEQ ID NO: 126245 - protein, 9 aa, Homo Sapiens
APRLQSEVA

SEQ ID NO: 126246 - protein, 9 aa, Homo Sapiens
APRPPPKPM

SEQ ID NO: 126247 - protein, 9 aa, Homo Sapiens
APRPPVSAA

SEQ ID NO: 126248 - protein, 9 aa, Homo Sapiens
APRQPGLMA

SEQ ID NO: 126249 - protein, 9 aa, Homo Sapiens
APRTVALTA

SEQ ID NO: 126250 - protein, 9 aa, Homo Sapiens
APSPPPAPV

SEQ ID NO: 126251 - protein, 9 aa, Homo Sapiens
APSPVQHQA

SEQ ID NO: 126252 - protein, 9 aa, Homo Sapiens
APSRVVVVA

SEQ ID NO: 126253 - protein, 9 aa, Homo Sapiens
APSSSFAAA

SEQ ID NO: 126254 - protein, 9 aa, Homo Sapiens
APSTIIFHL

SEQ ID NO: 126255 - protein, 9 aa, Homo Sapiens
APSVGIKAA

SEQ ID NO: 126256 - protein, 9 aa, Homo Sapiens
APTAIKAAA

SEQ ID NO: 126257 - protein, 9 aa, Homo Sapiens
APTGDLPRA

SEQ ID NO: 126258 - protein, 9 aa, Homo Sapiens
APTKPQSPA

SEQ ID NO: 126259 - protein, 9 aa, Homo Sapiens
APTLPGSAA

SEQ ID NO: 126260 - protein, 9 aa, Homo Sapiens
APTPPTLVA

SEQ ID NO: 126261 - protein, 9 aa, Homo Sapiens
APVAEVPTA

SEQ ID NO: 126262 - protein, 9 aa, Homo Sapiens
APVLPHTAV

SEQ ID NO: 126263 - protein, 9 aa, Homo Sapiens
APVNVTTEV

SEQ ID NO: 126264 - protein, 9 aa, Homo Sapiens
APVPTAPAA

SEQ ID NO: 126265 - protein, 9 aa, Homo Sapiens
APVTGMVSG

SEQ ID NO: 126266 - protein, 9 aa, Homo Sapiens
APYPGFLSV

SEQ ID NO: 126267 - protein, 9 aa, Homo Sapiens
APYTHFTQA

SEQ ID NO: 126268 - protein, 9 aa, Homo Sapiens
APYVTFPVA

SEQ ID NO: 126269 - protein, 9 aa, Homo Sapiens
ASAPPGPPA

SEQ ID NO: 126270 - protein, 9 aa, Homo Sapiens
ASFHNGVAA

SEQ ID NO: 126271 - protein, 9 aa, Homo Sapiens
ATVLQAVSA

SEQ ID NO: 126272 - protein, 9 aa, Homo Sapiens
AVAPPSTSA

SEQ ID NO: 126273 - protein, 9 aa, Homo Sapiens
AVFFQSHSA

SEQ ID NO: 126274 - protein, 9 aa, Homo Sapiens
AVPRPGAPA

SEQ ID NO: 126275 - protein, 9 aa, Homo Sapiens
CPPLQPVSV

SEQ ID NO: 126276 - protein, 9 aa, Homo Sapiens
DPPSNPVAA

SEQ ID NO: 126277 - protein, 9 aa, Homo Sapiens
FPAPILRAV

SEQ ID NO: 126278 - protein, 9 aa, Homo Sapiens
FPFFNPIQT

SEQ ID NO: 126279 - protein, 9 aa, Homo Sapiens
FPGEQFKPA

SEQ ID NO: 126280 - protein, 9 aa, Homo Sapiens
FPHLQDAQV

SEQ ID NO: 126281 - protein, 9 aa, Homo Sapiens
FPMSPVTSV

SEQ ID NO: 126282 - protein, 9 aa, Homo Sapiens
FPRPVTVEP

SEQ ID NO: 126283 - protein, 9 aa, Homo Sapiens
FPSAAATAA

SEQ ID NO: 126284 - protein, 9 aa, Homo Sapiens
FPTTCLERA

SEQ ID NO: 126285 - protein, 9 aa, Homo Sapiens
FPVGKGLAA

SEQ ID NO: 126286 - protein, 9 aa, Homo Sapiens
FPVGVFVVA

SEQ ID NO: 126287 - protein, 9 aa, Homo Sapiens
FPWPQPLST

SEQ ID NO: 126288 - protein, 9 aa, Homo Sapiens
FPYPVGVHA

SEQ ID NO: 126289 - protein, 9 aa, Homo Sapiens
GPFDEFQIA

SEQ ID NO: 126290 - protein, 9 aa, Homo Sapiens
GPFGQIFRP

SEQ ID NO: 126291 - protein, 9 aa, Homo Sapiens
GPHANPVAV

SEQ ID NO: 126292 - protein, 9 aa, Homo Sapiens
GPRLSAEAA

SEQ ID NO: 126293 - protein, 9 aa, Homo Sapiens
GPSGCLVPA

SEQ ID NO: 126294 - protein, 9 aa, Homo Sapiens
GPTLQGKAV

SEQ ID NO: 126295 - protein, 9 aa, Homo Sapiens
GPYKIILTA

SEQ ID NO: 126296 - protein, 9 aa, Homo Sapiens
HAGLNAVAA

SEQ ID NO: 126297 - protein, 9 aa, Homo Sapiens
HPADSVVSV

SEQ ID NO: 126298 - protein, 9 aa, Homo Sapiens
HPAPVRGPP

SEQ ID NO: 126299 - protein, 9 aa, Homo Sapiens
HPARLTIEA

SEQ ID NO: 126300 - protein, 9 aa, Homo Sapiens
HPHLRKVSV

SEQ ID NO: 126301 - protein, 9 aa, Homo Sapiens
HPHPFLNSV

SEQ ID NO: 126302 - protein, 9 aa, Homo Sapiens
HPIHIIPAS

SEQ ID NO: 126303 - protein, 9 aa, Homo Sapiens
HPKKPGVGV

SEQ ID NO: 126304 - protein, 9 aa, Homo Sapiens
HPLFQAKSA

SEQ ID NO: 126305 - protein, 9 aa, Homo Sapiens
HPLLVKVKA

SEQ ID NO: 126306 - protein, 9 aa, Homo Sapiens
HPLPPTPSV

SEQ ID NO: 126307 - protein, 9 aa, Homo Sapiens
HPMPHPPQA

SEQ ID NO: 126308 - protein, 9 aa, Homo Sapiens
HPMPVLPKA

SEQ ID NO: 126309 - protein, 9 aa, Homo Sapiens
HPQFLKNQV

SEQ ID NO: 126310 - protein, 9 aa, Homo Sapiens
HPQRQNVAV

SEQ ID NO: 126311 - protein, 9 aa, Homo Sapiens
HPQVNIYSV

SEQ ID NO: 126312 - protein, 9 aa, Homo Sapiens
HPREVVILA

SEQ ID NO: 126313 - protein, 9 aa, Homo Sapiens
HPSPVVLKV

SEQ ID NO: 126314 - protein, 9 aa, Homo Sapiens
HPSQELLAS

SEQ ID NO: 126315 - protein, 9 aa, Homo Sapiens
HPTKGFASV

SEQ ID NO: 126316 - protein, 9 aa, Homo Sapiens
HPTWALKEA

SEQ ID NO: 126317 - protein, 9 aa, Homo Sapiens
HPVAKILHA

SEQ ID NO: 126318 - protein, 9 aa, Homo Sapiens
HPVEPVTSV

SEQ ID NO: 126319 - protein, 9 aa, Homo Sapiens
HPVHPFLAV

SEQ ID NO: 126320 - protein, 9 aa, Homo Sapiens
HPVLLQPVA

SEQ ID NO: 126321 - protein, 9 aa, Homo Sapiens
HPVYCVNVV

SEQ ID NO: 126322 - protein, 9 aa, Homo Sapiens
HPWETVTTA

SEQ ID NO: 126323 - protein, 9 aa, Homo Sapiens
HPWLFIEEA

SEQ ID NO: 126324 - protein, 9 aa, Homo Sapiens
HPYKHSFRA

SEQ ID NO: 126325 - protein, 9 aa, Homo Sapiens
HPYLFPVAA

SEQ ID NO: 126326 - protein, 9 aa, Homo Sapiens
HPYLPINSA

SEQ ID NO: 126327 - protein, 9 aa, Homo Sapiens
HPYQRIVTA

SEQ ID NO: 126328 - protein, 9 aa, Homo Sapiens
HPYRLILTV

SEQ ID NO: 126329 - protein, 9 aa, Homo Sapiens
IAHTPGVAA

SEQ ID NO: 126330 - protein, 9 aa, Homo Sapiens
IARPACLAA

SEQ ID NO: 126331 - protein, 9 aa, Homo Sapiens
IIKEVLLEA

SEQ ID NO: 126332 - protein, 9 aa, Homo Sapiens
IINEPTAAA

SEQ ID NO: 126333 - protein, 9 aa, Homo Sapiens
IIRDEGISA

SEQ ID NO: 126334 - protein, 9 aa, Homo Sapiens
IPAALPVAA

SEQ ID NO: 126335 - protein, 9 aa, Homo Sapiens
IPAEKIDGV

SEQ ID NO: 126336 - protein, 9 aa, Homo Sapiens
IPASGDYVA

SEQ ID NO: 126337 - protein, 9 aa, Homo Sapiens
IPATPGIGA

SEQ ID NO: 126338 - protein, 9 aa, Homo Sapiens
IPFGIFSRA

SEQ ID NO: 126339 - protein, 9 aa, Homo Sapiens
IPFGITEEA

SEQ ID NO: 126340 - protein, 9 aa, Homo Sapiens
IPFSKPVKV

SEQ ID NO: 126341 - protein, 9 aa, Homo Sapiens
IPFWRNTAV

SEQ ID NO: 126342 - protein, 9 aa, Homo Sapiens
IPFYGILGA

SEQ ID NO: 126343 - protein, 9 aa, Homo Sapiens
IPHKKFTFA

SEQ ID NO: 126344 - protein, 9 aa, Homo Sapiens
IPHLVTHDA

SEQ ID NO: 126345 - protein, 9 aa, Homo Sapiens
IPHPLIMGV

SEQ ID NO: 126346 - protein, 9 aa, Homo Sapiens
IPIKKSDPV

SEQ ID NO: 126347 - protein, 9 aa, Homo Sapiens
IPISNILMV

SEQ ID NO: 126348 - protein, 9 aa, Homo Sapiens
IPKDKSWKA

SEQ ID NO: 126349 - protein, 9 aa, Homo Sapiens
IPKHINPVA

SEQ ID NO: 126350 - protein, 9 aa, Homo Sapiens
IPKKEIHTV

SEQ ID NO: 126351 - protein, 9 aa, Homo Sapiens
IPKKLMHQA

SEQ ID NO: 126352 - protein, 9 aa, Homo Sapiens
IPLDKRLAA

SEQ ID NO: 126353 - protein, 9 aa, Homo Sapiens
IPLGFGVAA

SEQ ID NO: 126354 - protein, 9 aa, Homo Sapiens
IPLTLLPAA

SEQ ID NO: 126355 - protein, 9 aa, Homo Sapiens
IPMELVNEV

SEQ ID NO: 126356 - protein, 9 aa, Homo Sapiens
IPMRDFVCA

SEQ ID NO: 126357 - protein, 9 aa, Homo Sapiens
IPMVNKVLV

SEQ ID NO: 126358 - protein, 9 aa, Homo Sapiens
IPQEAYNAV

SEQ ID NO: 126359 - protein, 9 aa, Homo Sapiens
IPQELNNIT

SEQ ID NO: 126360 - protein, 9 aa, Homo Sapiens
IPQLMKEEA

SEQ ID NO: 126361 - protein, 9 aa, Homo Sapiens
IPQLNSKAV

SEQ ID NO: 126362 - protein, 9 aa, Homo Sapiens
IPQQVFQEV

SEQ ID NO: 126363 - protein, 9 aa, Homo Sapiens
IPQSIIECV

SEQ ID NO: 126364 - protein, 9 aa, Homo Sapiens
IPRNQLQSV

SEQ ID NO: 126365 - protein, 9 aa, Homo Sapiens
IPRNTVVPT

SEQ ID NO: 126366 - protein, 9 aa, Homo Sapiens
IPRSFLQEA

SEQ ID NO: 126367 - protein, 9 aa, Homo Sapiens
IPRSFMMEV

SEQ ID NO: 126368 - protein, 9 aa, Homo Sapiens
IPSGTILKA

SEQ ID NO: 126369 - protein, 9 aa, Homo Sapiens
IPTENSMTA

SEQ ID NO: 126370 - protein, 9 aa, Homo Sapiens
IPTEVRSKA

SEQ ID NO: 126371 - protein, 9 aa, Homo Sapiens
IPTVNPVAI

SEQ ID NO: 126372 - protein, 9 aa, Homo Sapiens
IPVESIEEV

SEQ ID NO: 126373 - protein, 9 aa, Homo Sapiens
IPVNGGLAA

SEQ ID NO: 126374 - protein, 9 aa, Homo Sapiens
IPWGISATA

SEQ ID NO: 126375 - protein, 9 aa, Homo Sapiens
IPYAHSPSV

SEQ ID NO: 126376 - protein, 9 aa, Homo Sapiens
IPYHIVNIV

SEQ ID NO: 126377 - protein, 9 aa, Homo Sapiens
IPYLSKHRA

SEQ ID NO: 126378 - protein, 9 aa, Homo Sapiens
IPYRVIHNA

SEQ ID NO: 126379 - protein, 9 aa, Homo Sapiens
ITAPPGTAA

SEQ ID NO: 126380 - protein, 9 aa, Homo Sapiens
IVNLPGCSA

SEQ ID NO: 126381 - protein, 9 aa, Homo Sapiens
IVNVPQPAA

SEQ ID NO: 126382 - protein, 9 aa, Homo Sapiens
KAIFTGHSA

SEQ ID NO: 126383 - protein, 9 aa, Homo Sapiens
KAINVFVSA

SEQ ID NO: 126384 - protein, 9 aa, Homo Sapiens
KAQLQQVEA

SEQ ID NO: 126385 - protein, 9 aa, Homo Sapiens
KGYFFPTSA

SEQ ID NO: 126386 - protein, 9 aa, Homo Sapiens
KPAEFTVDA

SEQ ID NO: 126387 - protein, 9 aa, Homo Sapiens
KPALKIPQT

SEQ ID NO: 126388 - protein, 9 aa, Homo Sapiens
KPAMPMQQA

SEQ ID NO: 126389 - protein, 9 aa, Homo Sapiens
KPANVFITA

SEQ ID NO: 126390 - protein, 9 aa, Homo Sapiens
KPAPPFNVT

SEQ ID NO: 126391 - protein, 9 aa, Homo Sapiens
KPAPVIHPA

SEQ ID NO: 126392 - protein, 9 aa, Homo Sapiens
KPAVPTVAS

SEQ ID NO: 126393 - protein, 9 aa, Homo Sapiens
KPEEQWWSA

SEQ ID NO: 126394 - protein, 9 aa, Homo Sapiens
KPFAYVSEA

SEQ ID NO: 126395 - protein, 9 aa, Homo Sapiens
KPFKEFVEA

SEQ ID NO: 126396 - protein, 9 aa, Homo Sapiens
KPFKYIVTC

SEQ ID NO: 126397 - protein, 9 aa, Homo Sapiens
KPFLFDTKP

SEQ ID NO: 126398 - protein, 9 aa, Homo Sapiens
KPFLLPVEA

SEQ ID NO: 126399 - protein, 9 aa, Homo Sapiens
KPFYQKREV

SEQ ID NO: 126400 - protein, 9 aa, Homo Sapiens
KPGSPYRSV

SEQ ID NO: 126401 - protein, 9 aa, Homo Sapiens
KPHAIIILP

SEQ ID NO: 126402 - protein, 9 aa, Homo Sapiens
KPHDIFEAN

SEQ ID NO: 126403 - protein, 9 aa, Homo Sapiens
KPHSGFHVA

SEQ ID NO: 126404 - protein, 9 aa, Homo Sapiens
KPIFSLNTV

SEQ ID NO: 126405 - protein, 9 aa, Homo Sapiens
KPKEPPKVP

SEQ ID NO: 126406 - protein, 9 aa, Homo Sapiens
KPKEPQPEV

SEQ ID NO: 126407 - protein, 9 aa, Homo Sapiens
KPKIFIIQA

SEQ ID NO: 126408 - protein, 9 aa, Homo Sapiens
KPKIPKGVS

SEQ ID NO: 126409 - protein, 9 aa, Homo Sapiens
KPKITPVTV

SEQ ID NO: 126410 - protein, 9 aa, Homo Sapiens
KPKPIGKLA

SEQ ID NO: 126411 - protein, 9 aa, Homo Sapiens
KPKPPPVRA

SEQ ID NO: 126412 - protein, 9 aa, Homo Sapiens
KPKVPLKSA

SEQ ID NO: 126413 - protein, 9 aa, Homo Sapiens
KPLEPVSTV

SEQ ID NO: 126414 - protein, 9 aa, Homo Sapiens
KPLHPLLVV

SEQ ID NO: 126415 - protein, 9 aa, Homo Sapiens
KPLKEFVEA

SEQ ID NO: 126416 - protein, 9 aa, Homo Sapiens
KPLKGARIA

SEQ ID NO: 126417 - protein, 9 aa, Homo Sapiens
KPLPLGVRA

SEQ ID NO: 126418 - protein, 9 aa, Homo Sapiens
KPLPPIQVA

SEQ ID NO: 126419 - protein, 9 aa, Homo Sapiens
KPLQPARPV

SEQ ID NO: 126420 - protein, 9 aa, Homo Sapiens
KPLYLARVT

SEQ ID NO: 126421 - protein, 9 aa, Homo Sapiens
KPMASFVTT

SEQ ID NO: 126422 - protein, 9 aa, Homo Sapiens
KPMEGWIAV

SEQ ID NO: 126423 - protein, 9 aa, Homo Sapiens
KPMFTQVCV

SEQ ID NO: 126424 - protein, 9 aa, Homo Sapiens
KPMKSVLVV

SEQ ID NO: 126425 - protein, 9 aa, Homo Sapiens
KPMNEYRSV

SEQ ID NO: 126426 - protein, 9 aa, Homo Sapiens
KPNKPLILA

SEQ ID NO: 126427 - protein, 9 aa, Homo Sapiens
KPPAILPVA

SEQ ID NO: 126428 - protein, 9 aa, Homo Sapiens
KPPPPPPAP

SEQ ID NO: 126429 - protein, 9 aa, Homo Sapiens
KPPPPPPPP

SEQ ID NO: 126430 - protein, 9 aa, Homo Sapiens
KPQATVVSA

SEQ ID NO: 126431 - protein, 9 aa, Homo Sapiens
KPQEVFWAS

SEQ ID NO: 126432 - protein, 9 aa, Homo Sapiens
KPQNILVTS

SEQ ID NO: 126433 - protein, 9 aa, Homo Sapiens
KPQPLINHA

SEQ ID NO: 126434 - protein, 9 aa, Homo Sapiens
KPQPSILQA

SEQ ID NO: 126435 - protein, 9 aa, Homo Sapiens
KPRPIIPML

SEQ ID NO: 126436 - protein, 9 aa, Homo Sapiens
KPRPPPPPP

SEQ ID NO: 126437 - protein, 9 aa, Homo Sapiens
KPSDPAPKV

SEQ ID NO: 126438 - protein, 9 aa, Homo Sapiens
KPSESIYSA

SEQ ID NO: 126439 - protein, 9 aa, Homo Sapiens
KPSGISTIV

SEQ ID NO: 126440 - protein, 9 aa, Homo Sapiens
KPSPDHIQA

SEQ ID NO: 126441 - protein, 9 aa, Homo Sapiens
KPTGGLPET

SEQ ID NO: 126442 - protein, 9 aa, Homo Sapiens
KPTHFTVNA

SEQ ID NO: 126443 - protein, 9 aa, Homo Sapiens
KPTLVILRI

SEQ ID NO: 126444 - protein, 9 aa, Homo Sapiens
KPTVQPWIA

SEQ ID NO: 126445 - protein, 9 aa, Homo Sapiens
KPVEAAVVA

SEQ ID NO: 126446 - protein, 9 aa, Homo Sapiens
KPVEVTESA

SEQ ID NO: 126447 - protein, 9 aa, Homo Sapiens
KPVLPHKVA

SEQ ID NO: 126448 - protein, 9 aa, Homo Sapiens
KPYAHILSV

SEQ ID NO: 126449 - protein, 9 aa, Homo Sapiens
KPYCNEIHA

SEQ ID NO: 126450 - protein, 9 aa, Homo Sapiens
KPYESYIGA

SEQ ID NO: 126451 - protein, 9 aa, Homo Sapiens
KPYNVYITV

SEQ ID NO: 126452 - protein, 9 aa, Homo Sapiens
KPYPNSEAA

SEQ ID NO: 126453 - protein, 9 aa, Homo Sapiens
KVLLIENVA

SEQ ID NO: 126454 - protein, 9 aa, Homo Sapiens
LAAARLAAA

SEQ ID NO: 126455 - protein, 9 aa, Homo Sapiens
LALHQKITA

SEQ ID NO: 126456 - protein, 9 aa, Homo Sapiens
LLFHNAVSA

SEQ ID NO: 126457 - protein, 9 aa, Homo Sapiens
LPAAKGFVA

SEQ ID NO: 126458 - protein, 9 aa, Homo Sapiens
LPAAMPITA

SEQ ID NO: 126459 - protein, 9 aa, Homo Sapiens
LPAEAVEAA

SEQ ID NO: 126460 - protein, 9 aa, Homo Sapiens
LPAGILPMV

SEQ ID NO: 126461 - protein, 9 aa, Homo Sapiens
LPAPPAVSA

SEQ ID NO: 126462 - protein, 9 aa, Homo Sapiens
LPASETPKA

SEQ ID NO: 126463 - protein, 9 aa, Homo Sapiens
LPCEVKVVA

SEQ ID NO: 126464 - protein, 9 aa, Homo Sapiens
LPELLGLEA

SEQ ID NO: 126465 - protein, 9 aa, Homo Sapiens
LPFDRFSEV

SEQ ID NO: 126466 - protein, 9 aa, Homo Sapiens
LPFGGVPTV

SEQ ID NO: 126467 - protein, 9 aa, Homo Sapiens
LPFRVIPLV

SEQ ID NO: 126468 - protein, 9 aa, Homo Sapiens
LPFSSMPTA

SEQ ID NO: 126469 - protein, 9 aa, Homo Sapiens
LPHEILEMT

SEQ ID NO: 126470 - protein, 9 aa, Homo Sapiens
LPHGFTNMA

SEQ ID NO: 126471 - protein, 9 aa, Homo Sapiens
LPHNTHRVV

SEQ ID NO: 126472 - protein, 9 aa, Homo Sapiens
LPHPIIVSI

SEQ ID NO: 126473 - protein, 9 aa, Homo Sapiens
LPHPNRIQA

SEQ ID NO: 126474 - protein, 9 aa, Homo Sapiens
LPHRHPVNA

SEQ ID NO: 126475 - protein, 9 aa, Homo Sapiens
LPHSAGRYA

SEQ ID NO: 126476 - protein, 9 aa, Homo Sapiens
LPHSHDVSA

SEQ ID NO: 126477 - protein, 9 aa, Homo Sapiens
LPHSQLPQA

SEQ ID NO: 126478 - protein, 9 aa, Homo Sapiens
LPIGTLPLA

SEQ ID NO: 126479 - protein, 9 aa, Homo Sapiens
LPKEKQPVA

SEQ ID NO: 126480 - protein, 9 aa, Homo Sapiens
LPKHLLHSV

SEQ ID NO: 126481 - protein, 9 aa, Homo Sapiens
LPKPHGIRA

SEQ ID NO: 126482 - protein, 9 aa, Homo Sapiens
LPKPPGRGV

SEQ ID NO: 126483 - protein, 9 aa, Homo Sapiens
LPKPPKPVS

SEQ ID NO: 126484 - protein, 9 aa, Homo Sapiens
LPLAVTKEA

SEQ ID NO: 126485 - protein, 9 aa, Homo Sapiens
LPLHPSWEA

SEQ ID NO: 126486 - protein, 9 aa, Homo Sapiens
LPLSLLKTA

SEQ ID NO: 126487 - protein, 9 aa, Homo Sapiens
LPMDYVQRV

SEQ ID NO: 126488 - protein, 9 aa, Homo Sapiens
LPNANYPSA

SEQ ID NO: 126489 - protein, 9 aa, Homo Sapiens
LPNAVITRI

SEQ ID NO: 126490 - protein, 9 aa, Homo Sapiens
LPNFLPYNV

SEQ ID NO: 126491 - protein, 9 aa, Homo Sapiens
LPNLQTVTV

SEQ ID NO: 126492 - protein, 9 aa, Homo Sapiens
LPNQPVEKA

SEQ ID NO: 126493 - protein, 9 aa, Homo Sapiens
LPRDVLTRA

SEQ ID NO: 126494 - protein, 9 aa, Homo Sapiens
LPRKPVAGA

SEQ ID NO: 126495 - protein, 9 aa, Homo Sapiens
LPRLIDMSA

SEQ ID NO: 126496 - protein, 9 aa, Homo Sapiens
LPRPQGAAA

SEQ ID NO: 126497 - protein, 9 aa, Homo Sapiens
LPRPVPLVA

SEQ ID NO: 126498 - protein, 9 aa, Homo Sapiens
LPRRPLPPA

SEQ ID NO: 126499 - protein, 9 aa, Homo Sapiens
LPSDIAAEA

SEQ ID NO: 126500 - protein, 9 aa, Homo Sapiens
LPSELIVHI

SEQ ID NO: 126501 - protein, 9 aa, Homo Sapiens
LPSPPAVAV

SEQ ID NO: 126502 - protein, 9 aa, Homo Sapiens
LPSRFIESA

SEQ ID NO: 126503 - protein, 9 aa, Homo Sapiens
LPSVPLSCA

SEQ ID NO: 126504 - protein, 9 aa, Homo Sapiens
LPTKDLLSA

SEQ ID NO: 126505 - protein, 9 aa, Homo Sapiens
LPTKPTQGA

SEQ ID NO: 126506 - protein, 9 aa, Homo Sapiens
LPTTMGVVA

SEQ ID NO: 126507 - protein, 9 aa, Homo Sapiens
LPVAFKVVA

SEQ ID NO: 126508 - protein, 9 aa, Homo Sapiens
LPVDAVISV

SEQ ID NO: 126509 - protein, 9 aa, Homo Sapiens
LPVDVVVNA

SEQ ID NO: 126510 - protein, 9 aa, Homo Sapiens
LPVLPVAAA

SEQ ID NO: 126511 - protein, 9 aa, Homo Sapiens
LPVSLPTHA

SEQ ID NO: 126512 - protein, 9 aa, Homo Sapiens
LPVSNVVSV

SEQ ID NO: 126513 - protein, 9 aa, Homo Sapiens
LPWQGLKAA

SEQ ID NO: 126514 - protein, 9 aa, Homo Sapiens
LPWWGAIAA

SEQ ID NO: 126515 - protein, 9 aa, Homo Sapiens
LPYAITIVA

SEQ ID NO: 126516 - protein, 9 aa, Homo Sapiens
LPYDIPHRA

SEQ ID NO: 126517 - protein, 9 aa, Homo Sapiens
LPYHHVIHA

SEQ ID NO: 126518 - protein, 9 aa, Homo Sapiens
LPYKWVVEA

SEQ ID NO: 126519 - protein, 9 aa, Homo Sapiens
LPYNGVTVA

SEQ ID NO: 126520 - protein, 9 aa, Homo Sapiens
LPYNGVVLA

SEQ ID NO: 126521 - protein, 9 aa, Homo Sapiens
LVAPPLPAA

SEQ ID NO: 126522 - protein, 9 aa, Homo Sapiens
LVGPVLGAA

SEQ ID NO: 126523 - protein, 9 aa, Homo Sapiens
LVKDVFISA

SEQ ID NO: 126524 - protein, 9 aa, Homo Sapiens
LVRPPTEQA

SEQ ID NO: 126525 - protein, 9 aa, Homo Sapiens
LVRPVVPSA

SEQ ID NO: 126526 - protein, 9 aa, Homo Sapiens
LVYQGYLAA

SEQ ID NO: 126527 - protein, 9 aa, Homo Sapiens
MPAAALNAA

SEQ ID NO: 126528 - protein, 9 aa, Homo Sapiens
MPADSGYPA

SEQ ID NO: 126529 - protein, 9 aa, Homo Sapiens
MPAFPLPYA

SEQ ID NO: 126530 - protein, 9 aa, Homo Sapiens
MPAGLIAGA

SEQ ID NO: 126531 - protein, 9 aa, Homo Sapiens
MPAGSFITA

SEQ ID NO: 126532 - protein, 9 aa, Homo Sapiens
MPAHFSDSA

SEQ ID NO: 126533 - protein, 9 aa, Homo Sapiens
MPATLARAA

SEQ ID NO: 126534 - protein, 9 aa, Homo Sapiens
MPCVFVTEV

SEQ ID NO: 126535 - protein, 9 aa, Homo Sapiens
MPFGNVISA

SEQ ID NO: 126536 - protein, 9 aa, Homo Sapiens
MPFGNVVSA

SEQ ID NO: 126537 - protein, 9 aa, Homo Sapiens
MPFPNIRSA

SEQ ID NO: 126538 - protein, 9 aa, Homo Sapiens
MPHEDCITA

SEQ ID NO: 126539 - protein, 9 aa, Homo Sapiens
MPHKFVIAV

SEQ ID NO: 126540 - protein, 9 aa, Homo Sapiens
MPHYDIDSA

SEQ ID NO: 126541 - protein, 9 aa, Homo Sapiens
MPILIDFHA

SEQ ID NO: 126542 - protein, 9 aa, Homo Sapiens
MPKAEKNAV

SEQ ID NO: 126543 - protein, 9 aa, Homo Sapiens
MPLLKSEVA

SEQ ID NO: 126544 - protein, 9 aa, Homo Sapiens
MPMERQMSV

SEQ ID NO: 126545 - protein, 9 aa, Homo Sapiens
MPNHIHMGA

SEQ ID NO: 126546 - protein, 9 aa, Homo Sapiens
MPPPVGMVA

SEQ ID NO: 126547 - protein, 9 aa, Homo Sapiens
MPQDLRSPA

SEQ ID NO: 126548 - protein, 9 aa, Homo Sapiens
MPQIPVASV

SEQ ID NO: 126549 - protein, 9 aa, Homo Sapiens
MPQNPHIIA

SEQ ID NO: 126550 - protein, 9 aa, Homo Sapiens
MPRDILIVV

SEQ ID NO: 126551 - protein, 9 aa, Homo Sapiens
MPRQLSAAA

SEQ ID NO: 126552 - protein, 9 aa, Homo Sapiens
MPSDVLEVT

SEQ ID NO: 126553 - protein, 9 aa, Homo Sapiens
MPSKVNYQA

SEQ ID NO: 126554 - protein, 9 aa, Homo Sapiens
MPTDVLEVT

SEQ ID NO: 126555 - protein, 9 aa, Homo Sapiens
MPTLPPPSV

SEQ ID NO: 126556 - protein, 9 aa, Homo Sapiens
MPTQPQVQA

SEQ ID NO: 126557 - protein, 9 aa, Homo Sapiens
MPTRPGEQA

SEQ ID NO: 126558 - protein, 9 aa, Homo Sapiens
MPVGLIAGA

SEQ ID NO: 126559 - protein, 9 aa, Homo Sapiens
MPVPAQPKA

SEQ ID NO: 126560 - protein, 9 aa, Homo Sapiens
MPWFKGWKV

SEQ ID NO: 126561 - protein, 9 aa, Homo Sapiens
MPYFLLTQA

SEQ ID NO: 126562 - protein, 9 aa, Homo Sapiens
MPYLIGVHA

SEQ ID NO: 126563 - protein, 9 aa, Homo Sapiens
MPYSGMTGA

SEQ ID NO: 126564 - protein, 9 aa, Homo Sapiens
NPAPPIDAV

SEQ ID NO: 126565 - protein, 9 aa, Homo Sapiens
NPFCRFKAV

SEQ ID NO: 126566 - protein, 9 aa, Homo Sapiens
NPFGGASHA

SEQ ID NO: 126567 - protein, 9 aa, Homo Sapiens
NPFKGSSGA

SEQ ID NO: 126568 - protein, 9 aa, Homo Sapiens
NPFRSKLAA

SEQ ID NO: 126569 - protein, 9 aa, Homo Sapiens
NPGVPVPAA

SEQ ID NO: 126570 - protein, 9 aa, Homo Sapiens
NPKEFYHEV

SEQ ID NO: 126571 - protein, 9 aa, Homo Sapiens
NPLETRNIA

SEQ ID NO: 126572 - protein, 9 aa, Homo Sapiens
NPLFIPVAV

SEQ ID NO: 126573 - protein, 9 aa, Homo Sapiens
NPMGIGVTA

SEQ ID NO: 126574 - protein, 9 aa, Homo Sapiens
NPNELSVSA

SEQ ID NO: 126575 - protein, 9 aa, Homo Sapiens
NPNQYNYIA

SEQ ID NO: 126576 - protein, 9 aa, Homo Sapiens
NPTCPKVAA

SEQ ID NO: 126577 - protein, 9 aa, Homo Sapiens
NPVTGLLSA

SEQ ID NO: 126578 - protein, 9 aa, Homo Sapiens
NPYATLPRA

SEQ ID NO: 126579 - protein, 9 aa, Homo Sapiens
NPYHNAVHA

SEQ ID NO: 126580 - protein, 9 aa, Homo Sapiens
NPYSEFILA

SEQ ID NO: 126581 - protein, 9 aa, Homo Sapiens
NPYTIFHQA

SEQ ID NO: 126582 - protein, 9 aa, Homo Sapiens
NPYYGGESA

SEQ ID NO: 126583 - protein, 9 aa, Homo Sapiens
PITPRAAPL

SEQ ID NO: 126584 - protein, 9 aa, Homo Sapiens
QPANKGFRA

SEQ ID NO: 126585 - protein, 9 aa, Homo Sapiens
QPAPAIHSA

SEQ ID NO: 126586 - protein, 9 aa, Homo Sapiens
QPFESYITA

SEQ ID NO: 126587 - protein, 9 aa, Homo Sapiens
QPFGAAVST

SEQ ID NO: 126588 - protein, 9 aa, Homo Sapiens
QPFSKPVSV

SEQ ID NO: 126589 - protein, 9 aa, Homo Sapiens
QPGEALAEA

SEQ ID NO: 126590 - protein, 9 aa, Homo Sapiens
QPHHIGVAV

SEQ ID NO: 126591 - protein, 9 aa, Homo Sapiens
QPHSSALTA

SEQ ID NO: 126592 - protein, 9 aa, Homo Sapiens
QPHTILRVV

SEQ ID NO: 126593 - protein, 9 aa, Homo Sapiens
QPIFAVTSA

SEQ ID NO: 126594 - protein, 9 aa, Homo Sapiens
QPILLELEA

SEQ ID NO: 126595 - protein, 9 aa, Homo Sapiens
QPINLIFRY

SEQ ID NO: 126596 - protein, 9 aa, Homo Sapiens
QPITPGPSI

SEQ ID NO: 126597 - protein, 9 aa, Homo Sapiens
QPLEVLEAV

SEQ ID NO: 126598 - protein, 9 aa, Homo Sapiens
QPLLKHWEA

SEQ ID NO: 126599 - protein, 9 aa, Homo Sapiens
QPLLPYSAV

SEQ ID NO: 126600 - protein, 9 aa, Homo Sapiens
QPLPATHAA

SEQ ID NO: 126601 - protein, 9 aa, Homo Sapiens
QPLPMAHCA

SEQ ID NO: 126602 - protein, 9 aa, Homo Sapiens
QPLPVILHV

SEQ ID NO: 126603 - protein, 9 aa, Homo Sapiens
QPLYQPSHA

SEQ ID NO: 126604 - protein, 9 aa, Homo Sapiens
QPNTLICHI

SEQ ID NO: 126605 - protein, 9 aa, Homo Sapiens
QPQAPGVEA

SEQ ID NO: 126606 - protein, 9 aa, Homo Sapiens
QPQPQPYAV

SEQ ID NO: 126607 - protein, 9 aa, Homo Sapiens
QPRDPVRPP

SEQ ID NO: 126608 - protein, 9 aa, Homo Sapiens
QPRYPVNSV

SEQ ID NO: 126609 - protein, 9 aa, Homo Sapiens
QPSAPGHSV

SEQ ID NO: 126610 - protein, 9 aa, Homo Sapiens
QPSEVLRTV

SEQ ID NO: 126611 - protein, 9 aa, Homo Sapiens
QPSSLLPLA

SEQ ID NO: 126612 - protein, 9 aa, Homo Sapiens
QPTDALLCV

SEQ ID NO: 126613 - protein, 9 aa, Homo Sapiens
QPTPVNIRA

SEQ ID NO: 126614 - protein, 9 aa, Homo Sapiens
QPTSVLDKA

SEQ ID NO: 126615 - protein, 9 aa, Homo Sapiens
QPVCPSYTV

SEQ ID NO: 126616 - protein, 9 aa, Homo Sapiens
QPVSGTQVV

SEQ ID NO: 126617 - protein, 9 aa, Homo Sapiens
QPWRGGAGA

SEQ ID NO: 126618 - protein, 9 aa, Homo Sapiens
QPWTPVPQA

SEQ ID NO: 126619 - protein, 9 aa, Homo Sapiens
QPYGGFLDI

SEQ ID NO: 126620 - protein, 9 aa, Homo Sapiens
QPYMPTVSA

SEQ ID NO: 126621 - protein, 9 aa, Homo Sapiens
QPYQPLREV

SEQ ID NO: 126622 - protein, 9 aa, Homo Sapiens
QPYSKLPGV

SEQ ID NO: 126623 - protein, 9 aa, Homo Sapiens
QVRDVIIAA

SEQ ID NO: 126624 - protein, 9 aa, Homo Sapiens
RAFQQSTAA

SEQ ID NO: 126625 - protein, 9 aa, Homo Sapiens
RALLQAQQA

SEQ ID NO: 126626 - protein, 9 aa, Homo Sapiens
RARPPPPPP

SEQ ID NO: 126627 - protein, 9 aa, Homo Sapiens
RIFDRAVAA

SEQ ID NO: 126628 - protein, 9 aa, Homo Sapiens
RNQLQSVAA

SEQ ID NO: 126629 - protein, 9 aa, Homo Sapiens
RPAAPLIGA

SEQ ID NO: 126630 - protein, 9 aa, Homo Sapiens
RPADVIFAT

SEQ ID NO: 126631 - protein, 9 aa, Homo Sapiens
RPADYLFML

SEQ ID NO: 126632 - protein, 9 aa, Homo Sapiens
RPAEKLSTA

SEQ ID NO: 126633 - protein, 9 aa, Homo Sapiens
RPAFVIPEV

SEQ ID NO: 126634 - protein, 9 aa, Homo Sapiens
RPALFSSSA

SEQ ID NO: 126635 - protein, 9 aa, Homo Sapiens
RPALVEQTA

SEQ ID NO: 126636 - protein, 9 aa, Homo Sapiens
RPAPLPAAV

SEQ ID NO: 126637 - protein, 9 aa, Homo Sapiens
RPAPPPPTV

SEQ ID NO: 126638 - protein, 9 aa, Homo Sapiens
RPAPPRAPA

SEQ ID NO: 126639 - protein, 9 aa, Homo Sapiens
RPCDISRQL

SEQ ID NO: 126640 - protein, 9 aa, Homo Sapiens
RPFDLPLQP

SEQ ID NO: 126641 - protein, 9 aa, Homo Sapiens
RPFHGISTV

SEQ ID NO: 126642 - protein, 9 aa, Homo Sapiens
RPFIGMSSA

SEQ ID NO: 126643 - protein, 9 aa, Homo Sapiens
RPFNTYPRA

SEQ ID NO: 126644 - protein, 9 aa, Homo Sapiens
RPFPAAHHA

SEQ ID NO: 126645 - protein, 9 aa, Homo Sapiens
RPFQNQTHA

SEQ ID NO: 126646 - protein, 9 aa, Homo Sapiens
RPFQSIIHA

SEQ ID NO: 126647 - protein, 9 aa, Homo Sapiens
RPFRLGTGA

SEQ ID NO: 126648 - protein, 9 aa, Homo Sapiens
RPFTNLESA

SEQ ID NO: 126649 - protein, 9 aa, Homo Sapiens
RPFVAINYA

SEQ ID NO: 126650 - protein, 9 aa, Homo Sapiens
RPGDPGFCA

SEQ ID NO: 126651 - protein, 9 aa, Homo Sapiens
RPGLRLWKA

SEQ ID NO: 126652 - protein, 9 aa, Homo Sapiens
RPGPGVPAT

SEQ ID NO: 126653 - protein, 9 aa, Homo Sapiens
RPGPVLPAV

SEQ ID NO: 126654 - protein, 9 aa, Homo Sapiens
RPHAPGRPA

SEQ ID NO: 126655 - protein, 9 aa, Homo Sapiens
RPHPLPAER

SEQ ID NO: 126656 - protein, 9 aa, Homo Sapiens
RPHPLRPEA

SEQ ID NO: 126657 - protein, 9 aa, Homo Sapiens
RPHRGILAV

SEQ ID NO: 126658 - protein, 9 aa, Homo Sapiens
RPHSALLAV

SEQ ID NO: 126659 - protein, 9 aa, Homo Sapiens
RPHSVPSSV

SEQ ID NO: 126660 - protein, 9 aa, Homo Sapiens
RPHTVLTVI

SEQ ID NO: 126661 - protein, 9 aa, Homo Sapiens
RPIASGPVV

SEQ ID NO: 126662 - protein, 9 aa, Homo Sapiens
RPIDHWDAV

SEQ ID NO: 126663 - protein, 9 aa, Homo Sapiens
RPIPNQPPT

SEQ ID NO: 126664 - protein, 9 aa, Homo Sapiens
RPISGQKEV

SEQ ID NO: 126665 - protein, 9 aa, Homo Sapiens
RPKGFYVET

SEQ ID NO: 126666 - protein, 9 aa, Homo Sapiens
RPKMQEVVA

SEQ ID NO: 126667 - protein, 9 aa, Homo Sapiens
RPKPESQGI

SEQ ID NO: 126668 - protein, 9 aa, Homo Sapiens
RPKPIITSV

SEQ ID NO: 126669 - protein, 9 aa, Homo Sapiens
RPKPPNVRT

SEQ ID NO: 126670 - protein, 9 aa, Homo Sapiens
RPKSAFKVQ

SEQ ID NO: 126671 - protein, 9 aa, Homo Sapiens
RPLAQLREV

SEQ ID NO: 126672 - protein, 9 aa, Homo Sapiens
RPLATAYKA

SEQ ID NO: 126673 - protein, 9 aa, Homo Sapiens
RPLFGETSA

SEQ ID NO: 126674 - protein, 9 aa, Homo Sapiens
RPLFPSTGA

SEQ ID NO: 126675 - protein, 9 aa, Homo Sapiens
RPLGAGQEV

SEQ ID NO: 126676 - protein, 9 aa, Homo Sapiens
RPLHEFITA

SEQ ID NO: 126677 - protein, 9 aa, Homo Sapiens
RPLLKAITA

SEQ ID NO: 126678 - protein, 9 aa, Homo Sapiens
RPLQDEPAA

SEQ ID NO: 126679 - protein, 9 aa, Homo Sapiens
RPLSRLQAA

SEQ ID NO: 126680 - protein, 9 aa, Homo Sapiens
RPLTLFHTV

SEQ ID NO: 126681 - protein, 9 aa, Homo Sapiens
RPMKVGHVT

SEQ ID NO: 126682 - protein, 9 aa, Homo Sapiens
RPNDIMAEV

SEQ ID NO: 126683 - protein, 9 aa, Homo Sapiens
RPNERVDTV

SEQ ID NO: 126684 - protein, 9 aa, Homo Sapiens
RPNETFHLA

SEQ ID NO: 126685 - protein, 9 aa, Homo Sapiens
RPNGVITGL

SEQ ID NO: 126686 - protein, 9 aa, Homo Sapiens
RPNLIKPAA

SEQ ID NO: 126687 - protein, 9 aa, Homo Sapiens
RPNPPPVSV

SEQ ID NO: 126688 - protein, 9 aa, Homo Sapiens
RPPPIGAEV

SEQ ID NO: 126689 - protein, 9 aa, Homo Sapiens
RPQDIIVFV

SEQ ID NO: 126690 - protein, 9 aa, Homo Sapiens
RPQEIDEAA

SEQ ID NO: 126691 - protein, 9 aa, Homo Sapiens
RPQSETNVA

SEQ ID NO: 126692 - protein, 9 aa, Homo Sapiens
RPRAPIIAV

SEQ ID NO: 126693 - protein, 9 aa, Homo Sapiens
RPRDEVQEV

SEQ ID NO: 126694 - protein, 9 aa, Homo Sapiens
RPRDSQLYA

SEQ ID NO: 126695 - protein, 9 aa, Homo Sapiens
RPRFVSLRA

SEQ ID NO: 126696 - protein, 9 aa, Homo Sapiens
RPRHQGVMV

SEQ ID NO: 126697 - protein, 9 aa, Homo Sapiens
RPRIAGITA

SEQ ID NO: 126698 - protein, 9 aa, Homo Sapiens
RPRITHPPP

SEQ ID NO: 126699 - protein, 9 aa, Homo Sapiens
RPRPGTGLG

SEQ ID NO: 126700 - protein, 9 aa, Homo Sapiens
RPRPPPVEQ

SEQ ID NO: 126701 - protein, 9 aa, Homo Sapiens
RPRPPVSST

SEQ ID NO: 126702 - protein, 9 aa, Homo Sapiens
RPRPVVTTT

SEQ ID NO: 126703 - protein, 9 aa, Homo Sapiens
RPRTAGPAV

SEQ ID NO: 126704 - protein, 9 aa, Homo Sapiens
RPRYLEIRA

SEQ ID NO: 126705 - protein, 9 aa, Homo Sapiens
RPSDIKFKP

SEQ ID NO: 126706 - protein, 9 aa, Homo Sapiens
RPSFVHPGA

SEQ ID NO: 126707 - protein, 9 aa, Homo Sapiens
RPSHFLNFA

SEQ ID NO: 126708 - protein, 9 aa, Homo Sapiens
RPSLNIATV

SEQ ID NO: 126709 - protein, 9 aa, Homo Sapiens
RPSPAPPAA

SEQ ID NO: 126710 - protein, 9 aa, Homo Sapiens
RPSPPVQSV

SEQ ID NO: 126711 - protein, 9 aa, Homo Sapiens
RPSQVVAET

SEQ ID NO: 126712 - protein, 9 aa, Homo Sapiens
RPSSTFNTV

SEQ ID NO: 126713 - protein, 9 aa, Homo Sapiens
RPSTDFTQA

SEQ ID NO: 126714 - protein, 9 aa, Homo Sapiens
RPVGGGPSA

SEQ ID NO: 126715 - protein, 9 aa, Homo Sapiens
RPVHHVVPP

SEQ ID NO: 126716 - protein, 9 aa, Homo Sapiens
RPVHLDQAA

SEQ ID NO: 126717 - protein, 9 aa, Homo Sapiens
RPVLPRTEA

SEQ ID NO: 126718 - protein, 9 aa, Homo Sapiens
RPVNDMNIA

SEQ ID NO: 126719 - protein, 9 aa, Homo Sapiens
RPVPGYEPG

SEQ ID NO: 126720 - protein, 9 aa, Homo Sapiens
RPVQRLPSV

SEQ ID NO: 126721 - protein, 9 aa, Homo Sapiens
RPVTPPRTA

SEQ ID NO: 126722 - protein, 9 aa, Homo Sapiens
RPWKGVLMV

SEQ ID NO: 126723 - protein, 9 aa, Homo Sapiens
RPWLDPAAA

SEQ ID NO: 126724 - protein, 9 aa, Homo Sapiens
RPWPNPNSA

SEQ ID NO: 126725 - protein, 9 aa, Homo Sapiens
RPYDKNISP

SEQ ID NO: 126726 - protein, 9 aa, Homo Sapiens
RPYEPINSI

SEQ ID NO: 126727 - protein, 9 aa, Homo Sapiens
RPYFPKDEA

SEQ ID NO: 126728 - protein, 9 aa, Homo Sapiens
RPYGCVLRA

SEQ ID NO: 126729 - protein, 9 aa, Homo Sapiens
RPYHTIIEI

SEQ ID NO: 126730 - protein, 9 aa, Homo Sapiens
RPYLQRKDV

SEQ ID NO: 126731 - protein, 9 aa, Homo Sapiens
RPYLSAVRA

SEQ ID NO: 126732 - protein, 9 aa, Homo Sapiens
RPYSHALVA

SEQ ID NO: 126733 - protein, 9 aa, Homo Sapiens
RPYSVPPCV

SEQ ID NO: 126734 - protein, 9 aa, Homo Sapiens
RPYTGKVGA

SEQ ID NO: 126735 - protein, 9 aa, Homo Sapiens
RPYVHKILV

SEQ ID NO: 126736 - protein, 9 aa, Homo Sapiens
RVAYRPISA

SEQ ID NO: 126737 - protein, 9 aa, Homo Sapiens
RVKCVGLSA

SEQ ID NO: 126738 - protein, 9 aa, Homo Sapiens
RVKVSQAAA

SEQ ID NO: 126739 - protein, 9 aa, Homo Sapiens
RVREIIINA

SEQ ID NO: 126740 - protein, 9 aa, Homo Sapiens
SAPVNFISA

SEQ ID NO: 126741 - protein, 9 aa, Homo Sapiens
SPAALKPPA

SEQ ID NO: 126742 - protein, 9 aa, Homo Sapiens
SPAAPVITA

SEQ ID NO: 126743 - protein, 9 aa, Homo Sapiens
SPAARLHCA

SEQ ID NO: 126744 - protein, 9 aa, Homo Sapiens
SPAGILVDA

SEQ ID NO: 126745 - protein, 9 aa, Homo Sapiens
SPAHAVDAV

SEQ ID NO: 126746 - protein, 9 aa, Homo Sapiens
SPAHVLLAA

SEQ ID NO: 126747 - protein, 9 aa, Homo Sapiens
SPAKTLPGA

SEQ ID NO: 126748 - protein, 9 aa, Homo Sapiens
SPAPPLLHV

SEQ ID NO: 126749 - protein, 9 aa, Homo Sapiens
SPAQVIPLA

SEQ ID NO: 126750 - protein, 9 aa, Homo Sapiens
SPAYRDLAA

SEQ ID NO: 126751 - protein, 9 aa, Homo Sapiens
SPCNNNINA

SEQ ID NO: 126752 - protein, 9 aa, Homo Sapiens
SPDSPVTSA

SEQ ID NO: 126753 - protein, 9 aa, Homo Sapiens
SPEAHTVEA

SEQ ID NO: 126754 - protein, 9 aa, Homo Sapiens
SPESPVLAA

SEQ ID NO: 126755 - protein, 9 aa, Homo Sapiens
SPFAEGTSA

SEQ ID NO: 126756 - protein, 9 aa, Homo Sapiens
SPFENTENA

SEQ ID NO: 126757 - protein, 9 aa, Homo Sapiens
SPFFPLVSA

SEQ ID NO: 126758 - protein, 9 aa, Homo Sapiens
SPFGSITSA

SEQ ID NO: 126759 - protein, 9 aa, Homo Sapiens
SPFGTITSA

SEQ ID NO: 126760 - protein, 9 aa, Homo Sapiens
SPFHFQPSA

SEQ ID NO: 126761 - protein, 9 aa, Homo Sapiens
SPFPDIPKV

SEQ ID NO: 126762 - protein, 9 aa, Homo Sapiens
SPFPPAKSA

SEQ ID NO: 126763 - protein, 9 aa, Homo Sapiens
SPFRVNVGA

SEQ ID NO: 126764 - protein, 9 aa, Homo Sapiens
SPFSGLQKA

SEQ ID NO: 126765 - protein, 9 aa, Homo Sapiens
SPFSSFISV

SEQ ID NO: 126766 - protein, 9 aa, Homo Sapiens
SPGLQKEAV

SEQ ID NO: 126767 - protein, 9 aa, Homo Sapiens
SPHFPHTAA

SEQ ID NO: 126768 - protein, 9 aa, Homo Sapiens
SPHISSQTA

SEQ ID NO: 126769 - protein, 9 aa, Homo Sapiens
SPHLGPAPA

SEQ ID NO: 126770 - protein, 9 aa, Homo Sapiens
SPHPGLVAA

SEQ ID NO: 126771 - protein, 9 aa, Homo Sapiens
SPHPSPLGA

SEQ ID NO: 126772 - protein, 9 aa, Homo Sapiens
SPHQVTPQA

SEQ ID NO: 126773 - protein, 9 aa, Homo Sapiens
SPHRPILQA

SEQ ID NO: 126774 - protein, 9 aa, Homo Sapiens
SPHSQVLTA

SEQ ID NO: 126775 - protein, 9 aa, Homo Sapiens
SPHTKMDVA

SEQ ID NO: 126776 - protein, 9 aa, Homo Sapiens
SPHVQVKAA

SEQ ID NO: 126777 - protein, 9 aa, Homo Sapiens
SPIEFLENA

SEQ ID NO: 126778 - protein, 9 aa, Homo Sapiens
SPIENIQRV

SEQ ID NO: 126779 - protein, 9 aa, Homo Sapiens
SPILVATAV

SEQ ID NO: 126780 - protein, 9 aa, Homo Sapiens
SPIVKSTEA

SEQ ID NO: 126781 - protein, 9 aa, Homo Sapiens
SPKDVILKV

SEQ ID NO: 126782 - protein, 9 aa, Homo Sapiens
SPKGTIENI

SEQ ID NO: 126783 - protein, 9 aa, Homo Sapiens
SPKLPSLEA

SEQ ID NO: 126784 - protein, 9 aa, Homo Sapiens
SPKPVSSTV

SEQ ID NO: 126785 - protein, 9 aa, Homo Sapiens
SPKQILDPA

SEQ ID NO: 126786 - protein, 9 aa, Homo Sapiens
SPKSPGLKA

SEQ ID NO: 126787 - protein, 9 aa, Homo Sapiens
SPKTTISVA

SEQ ID NO: 126788 - protein, 9 aa, Homo Sapiens
SPKTTITMA

SEQ ID NO: 126789 - protein, 9 aa, Homo Sapiens
SPLASGAVA

SEQ ID NO: 126790 - protein, 9 aa, Homo Sapiens
SPLATSTTA

SEQ ID NO: 126791 - protein, 9 aa, Homo Sapiens
SPLFSQHTA

SEQ ID NO: 126792 - protein, 9 aa, Homo Sapiens
SPLHLAVEA

SEQ ID NO: 126793 - protein, 9 aa, Homo Sapiens
SPLKHFVTA

SEQ ID NO: 126794 - protein, 9 aa, Homo Sapiens
SPLLHNPSA

SEQ ID NO: 126795 - protein, 9 aa, Homo Sapiens
SPLLQAHHA

SEQ ID NO: 126796 - protein, 9 aa, Homo Sapiens
SPLNAMPRA

SEQ ID NO: 126797 - protein, 9 aa, Homo Sapiens
SPLPAHPSV

SEQ ID NO: 126798 - protein, 9 aa, Homo Sapiens
SPLPQYVTV

SEQ ID NO: 126799 - protein, 9 aa, Homo Sapiens
SPLPTPFGA

SEQ ID NO: 126800 - protein, 9 aa, Homo Sapiens
SPLQKALLA

SEQ ID NO: 126801 - protein, 9 aa, Homo Sapiens
SPLSAARAA

SEQ ID NO: 126802 - protein, 9 aa, Homo Sapiens
SPLSSHPVV

SEQ ID NO: 126803 - protein, 9 aa, Homo Sapiens
SPLWTSIGA

SEQ ID NO: 126804 - protein, 9 aa, Homo Sapiens
SPLYLAHEV

SEQ ID NO: 126805 - protein, 9 aa, Homo Sapiens
SPMDTVTEA

SEQ ID NO: 126806 - protein, 9 aa, Homo Sapiens
SPMIPSIVV

SEQ ID NO: 126807 - protein, 9 aa, Homo Sapiens
SPMPGTLTA

SEQ ID NO: 126808 - protein, 9 aa, Homo Sapiens
SPMSQTETV

SEQ ID NO: 126809 - protein, 9 aa, Homo Sapiens
SPNEVKVVA

SEQ ID NO: 126810 - protein, 9 aa, Homo Sapiens
SPNGQFVAP

SEQ ID NO: 126811 - protein, 9 aa, Homo Sapiens
SPNLPHRDA

SEQ ID NO: 126812 - protein, 9 aa, Homo Sapiens
SPNRYWLCA

SEQ ID NO: 126813 - protein, 9 aa, Homo Sapiens
SPNSILKAA

SEQ ID NO: 126814 - protein, 9 aa, Homo Sapiens
SPNSYFMDV

SEQ ID NO: 126815 - protein, 9 aa, Homo Sapiens
SPPEVIRAA

SEQ ID NO: 126816 - protein, 9 aa, Homo Sapiens
SPPKIHVSA

SEQ ID NO: 126817 - protein, 9 aa, Homo Sapiens
SPQAPTLQV

SEQ ID NO: 126818 - protein, 9 aa, Homo Sapiens
SPQPVGQQA

SEQ ID NO: 126819 - protein, 9 aa, Homo Sapiens
SPREPGYKA

SEQ ID NO: 126820 - protein, 9 aa, Homo Sapiens
SPREVFFRV

SEQ ID NO: 126821 - protein, 9 aa, Homo Sapiens
SPRLLGAAA

SEQ ID NO: 126822 - protein, 9 aa, Homo Sapiens
SPRNLAMEA

SEQ ID NO: 126823 - protein, 9 aa, Homo Sapiens
SPRPPLISV

SEQ ID NO: 126824 - protein, 9 aa, Homo Sapiens
SPRPVVVET

SEQ ID NO: 126825 - protein, 9 aa, Homo Sapiens
SPRVPNSSV

SEQ ID NO: 126826 - protein, 9 aa, Homo Sapiens
SPSAGVPRA

SEQ ID NO: 126827 - protein, 9 aa, Homo Sapiens
SPSDIGIIA

SEQ ID NO: 126828 - protein, 9 aa, Homo Sapiens
SPSEPGRAV

SEQ ID NO: 126829 - protein, 9 aa, Homo Sapiens
SPSKNYVMA

SEQ ID NO: 126830 - protein, 9 aa, Homo Sapiens
SPSPPQAEA

SEQ ID NO: 126831 - protein, 9 aa, Homo Sapiens
SPSPPSVAV

SEQ ID NO: 126832 - protein, 9 aa, Homo Sapiens
SPSPRWVAA

SEQ ID NO: 126833 - protein, 9 aa, Homo Sapiens
SPSTVFFGA

SEQ ID NO: 126834 - protein, 9 aa, Homo Sapiens
SPSTVIHGA

SEQ ID NO: 126835 - protein, 9 aa, Homo Sapiens
SPSVPKTSA

SEQ ID NO: 126836 - protein, 9 aa, Homo Sapiens
SPTGGFVDA

SEQ ID NO: 126837 - protein, 9 aa, Homo Sapiens
SPTLLLAEA

SEQ ID NO: 126838 - protein, 9 aa, Homo Sapiens
SPTRPPVAA

SEQ ID NO: 126839 - protein, 9 aa, Homo Sapiens
SPTSVRQMA

SEQ ID NO: 126840 - protein, 9 aa, Homo Sapiens
SPTTSHVGA

SEQ ID NO: 126841 - protein, 9 aa, Homo Sapiens
SPVAQPVTV

SEQ ID NO: 126842 - protein, 9 aa, Homo Sapiens
SPVGNRVTV

SEQ ID NO: 126843 - protein, 9 aa, Homo Sapiens
SPVLPLTSA

SEQ ID NO: 126844 - protein, 9 aa, Homo Sapiens
SPVMVSNPA

SEQ ID NO: 126845 - protein, 9 aa, Homo Sapiens
SPVPIAPTA

SEQ ID NO: 126846 - protein, 9 aa, Homo Sapiens
SPVPSHWMV

SEQ ID NO: 126847 - protein, 9 aa, Homo Sapiens
SPVSSLPTA

SEQ ID NO: 126848 - protein, 9 aa, Homo Sapiens
SPVTDFREA

SEQ ID NO: 126849 - protein, 9 aa, Homo Sapiens
SPVVPQISA

SEQ ID NO: 126850 - protein, 9 aa, Homo Sapiens
SPYAAMLAA

SEQ ID NO: 126851 - protein, 9 aa, Homo Sapiens
SPYGGGRPG

SEQ ID NO: 126852 - protein, 9 aa, Homo Sapiens
SPYHGFTIV

SEQ ID NO: 126853 - protein, 9 aa, Homo Sapiens
SPYHNFDSV

SEQ ID NO: 126854 - protein, 9 aa, Homo Sapiens
SPYIPPHAA

SEQ ID NO: 126855 - protein, 9 aa, Homo Sapiens
SPYYFLTSA

SEQ ID NO: 126856 - protein, 9 aa, Homo Sapiens
SVPSNPVAA

SEQ ID NO: 126857 - protein, 9 aa, Homo Sapiens
TIRTPMAAA

SEQ ID NO: 126858 - protein, 9 aa, Homo Sapiens
TPADIWSTA

SEQ ID NO: 126859 - protein, 9 aa, Homo Sapiens
TPAGAAVSA

SEQ ID NO: 126860 - protein, 9 aa, Homo Sapiens
TPAHVLPSA

SEQ ID NO: 126861 - protein, 9 aa, Homo Sapiens
TPAKAIAAV

SEQ ID NO: 126862 - protein, 9 aa, Homo Sapiens
TPCDKILKA

SEQ ID NO: 126863 - protein, 9 aa, Homo Sapiens
TPFKGVRKA

SEQ ID NO: 126864 - protein, 9 aa, Homo Sapiens
TPFKLTTEA

SEQ ID NO: 126865 - protein, 9 aa, Homo Sapiens
TPFKPILEA

SEQ ID NO: 126866 - protein, 9 aa, Homo Sapiens
TPFTAIREA

SEQ ID NO: 126867 - protein, 9 aa, Homo Sapiens
TPFYFKEPS

SEQ ID NO: 126868 - protein, 9 aa, Homo Sapiens
TPGRAQISA

SEQ ID NO: 126869 - protein, 9 aa, Homo Sapiens
TPHAIVILP

SEQ ID NO: 126870 - protein, 9 aa, Homo Sapiens
TPHDFIEHI

SEQ ID NO: 126871 - protein, 9 aa, Homo Sapiens
TPHFSGLAA

SEQ ID NO: 126872 - protein, 9 aa, Homo Sapiens
TPHLRNLAV

SEQ ID NO: 126873 - protein, 9 aa, Homo Sapiens
TPHTVILFA

SEQ ID NO: 126874 - protein, 9 aa, Homo Sapiens
TPHVPYRES

SEQ ID NO: 126875 - protein, 9 aa, Homo Sapiens
TPHYIYPPA

SEQ ID NO: 126876 - protein, 9 aa, Homo Sapiens
TPIGVQAEA

SEQ ID NO: 126877 - protein, 9 aa, Homo Sapiens
TPIRGLLMA

SEQ ID NO: 126878 - protein, 9 aa, Homo Sapiens
TPIRRDFSA

SEQ ID NO: 126879 - protein, 9 aa, Homo Sapiens
TPKMPGQSV

SEQ ID NO: 126880 - protein, 9 aa, Homo Sapiens
TPKPVEPAA

SEQ ID NO: 126881 - protein, 9 aa, Homo Sapiens
TPLASFTTV

SEQ ID NO: 126882 - protein, 9 aa, Homo Sapiens
TPLGGIQAA

SEQ ID NO: 126883 - protein, 9 aa, Homo Sapiens
TPLLMQALP

SEQ ID NO: 126884 - protein, 9 aa, Homo Sapiens
TPLLSGKAA

SEQ ID NO: 126885 - protein, 9 aa, Homo Sapiens
TPLPGGHAA

SEQ ID NO: 126886 - protein, 9 aa, Homo Sapiens
TPLRPLDPT

SEQ ID NO: 126887 - protein, 9 aa, Homo Sapiens
TPLSKLMKA

SEQ ID NO: 126888 - protein, 9 aa, Homo Sapiens
TPLYTDNTA

SEQ ID NO: 126889 - protein, 9 aa, Homo Sapiens
TPMAASVVA

SEQ ID NO: 126890 - protein, 9 aa, Homo Sapiens
TPMGPGRTV

SEQ ID NO: 126891 - protein, 9 aa, Homo Sapiens
TPMPPISSV

SEQ ID NO: 126892 - protein, 9 aa, Homo Sapiens
TPMSVLQQA

SEQ ID NO: 126893 - protein, 9 aa, Homo Sapiens
TPNKPSVAV

SEQ ID NO: 126894 - protein, 9 aa, Homo Sapiens
TPNRATFVV

SEQ ID NO: 126895 - protein, 9 aa, Homo Sapiens
TPQEDYVEA

SEQ ID NO: 126896 - protein, 9 aa, Homo Sapiens
TPQGHVAVA

SEQ ID NO: 126897 - protein, 9 aa, Homo Sapiens
TPQLNAIIA

SEQ ID NO: 126898 - protein, 9 aa, Homo Sapiens
TPQPPLLKA

SEQ ID NO: 126899 - protein, 9 aa, Homo Sapiens
TPQSIFIFA

SEQ ID NO: 126900 - protein, 9 aa, Homo Sapiens
TPRAATVKA

SEQ ID NO: 126901 - protein, 9 aa, Homo Sapiens
TPSAGAVAA

SEQ ID NO: 126902 - protein, 9 aa, Homo Sapiens
TPSIPVLTA

SEQ ID NO: 126903 - protein, 9 aa, Homo Sapiens
TPTEFFFHA

SEQ ID NO: 126904 - protein, 9 aa, Homo Sapiens
TPTFTYKAA

SEQ ID NO: 126905 - protein, 9 aa, Homo Sapiens
TPTGTHPLA

SEQ ID NO: 126906 - protein, 9 aa, Homo Sapiens
TPTKGGWKV

SEQ ID NO: 126907 - protein, 9 aa, Homo Sapiens
TPTPPFQQA

SEQ ID NO: 126908 - protein, 9 aa, Homo Sapiens
TPTSYIIEA

SEQ ID NO: 126909 - protein, 9 aa, Homo Sapiens
TPVGGLLMA

SEQ ID NO: 126910 - protein, 9 aa, Homo Sapiens
TPVKGGTVA

SEQ ID NO: 126911 - protein, 9 aa, Homo Sapiens
TPVLIPKGA

SEQ ID NO: 126912 - protein, 9 aa, Homo Sapiens
TPVLPAPTA

SEQ ID NO: 126913 - protein, 9 aa, Homo Sapiens
TPVNSICSV

SEQ ID NO: 126914 - protein, 9 aa, Homo Sapiens
TPVPPPSAA

SEQ ID NO: 126915 - protein, 9 aa, Homo Sapiens
TPVSYMHTA

SEQ ID NO: 126916 - protein, 9 aa, Homo Sapiens
TPWFKIIAA

SEQ ID NO: 126917 - protein, 9 aa, Homo Sapiens
TPYNYPVPV

SEQ ID NO: 126918 - protein, 9 aa, Homo Sapiens
TPYPKLKTA

SEQ ID NO: 126919 - protein, 9 aa, Homo Sapiens
TPYRPPAAA

SEQ ID NO: 126920 - protein, 9 aa, Homo Sapiens
TPYTGILYA

SEQ ID NO: 126921 - protein, 9 aa, Homo Sapiens
TVYEGFISA

SEQ ID NO: 126922 - protein, 9 aa, Homo Sapiens
VAVLQEVAA

SEQ ID NO: 126923 - protein, 9 aa, Homo Sapiens
VIRNIVEAA

SEQ ID NO: 126924 - protein, 9 aa, Homo Sapiens
VPAEGAPTA

SEQ ID NO: 126925 - protein, 9 aa, Homo Sapiens
VPAGGAVAV

SEQ ID NO: 126926 - protein, 9 aa, Homo Sapiens
VPAGSGLSA

SEQ ID NO: 126927 - protein, 9 aa, Homo Sapiens
VPAKKITAA

SEQ ID NO: 126928 - protein, 9 aa, Homo Sapiens
VPAKWIHEA

SEQ ID NO: 126929 - protein, 9 aa, Homo Sapiens
VPANPYHTA

SEQ ID NO: 126930 - protein, 9 aa, Homo Sapiens
VPAPAHLVA

SEQ ID NO: 126931 - protein, 9 aa, Homo Sapiens
VPAPAPAAA

SEQ ID NO: 126932 - protein, 9 aa, Homo Sapiens
VPAPFFLPA

SEQ ID NO: 126933 - protein, 9 aa, Homo Sapiens
VPAPGGPAA

SEQ ID NO: 126934 - protein, 9 aa, Homo Sapiens
VPAPSPLSA

SEQ ID NO: 126935 - protein, 9 aa, Homo Sapiens
VPAPSVPSV

SEQ ID NO: 126936 - protein, 9 aa, Homo Sapiens
VPCQVLRMA

SEQ ID NO: 126937 - protein, 9 aa, Homo Sapiens
VPFAAPATA

SEQ ID NO: 126938 - protein, 9 aa, Homo Sapiens
VPFIVPLSV

SEQ ID NO: 126939 - protein, 9 aa, Homo Sapiens
VPFKDMPAT

SEQ ID NO: 126940 - protein, 9 aa, Homo Sapiens
VPFLNPYTV

SEQ ID NO: 126941 - protein, 9 aa, Homo Sapiens
VPFPTPLEA

SEQ ID NO: 126942 - protein, 9 aa, Homo Sapiens
VPFQNAATA

SEQ ID NO: 126943 - protein, 9 aa, Homo Sapiens
VPHCVPISA

SEQ ID NO: 126944 - protein, 9 aa, Homo Sapiens
VPHNVQVAA

SEQ ID NO: 126945 - protein, 9 aa, Homo Sapiens
VPHQPFSQA

SEQ ID NO: 126946 - protein, 9 aa, Homo Sapiens
VPHRATVYA

SEQ ID NO: 126947 - protein, 9 aa, Homo Sapiens
VPHRSYVST

SEQ ID NO: 126948 - protein, 9 aa, Homo Sapiens
VPIKPLPNV

SEQ ID NO: 126949 - protein, 9 aa, Homo Sapiens
VPIMPYPPA

SEQ ID NO: 126950 - protein, 9 aa, Homo Sapiens
VPIPKSHEA

SEQ ID NO: 126951 - protein, 9 aa, Homo Sapiens
VPIRLIINA

SEQ ID NO: 126952 - protein, 9 aa, Homo Sapiens
VPITAVIAA

SEQ ID NO: 126953 - protein, 9 aa, Homo Sapiens
VPKAQKETV

SEQ ID NO: 126954 - protein, 9 aa, Homo Sapiens
VPKPEEEVA

SEQ ID NO: 126955 - protein, 9 aa, Homo Sapiens
VPLAIVNKA

SEQ ID NO: 126956 - protein, 9 aa, Homo Sapiens
VPLDHRVHA

SEQ ID NO: 126957 - protein, 9 aa, Homo Sapiens
VPLFVQHDA

SEQ ID NO: 126958 - protein, 9 aa, Homo Sapiens
VPLSHLINA

SEQ ID NO: 126959 - protein, 9 aa, Homo Sapiens
VPMSALKSV

SEQ ID NO: 126960 - protein, 9 aa, Homo Sapiens
VPMTPLRTV

SEQ ID NO: 126961 - protein, 9 aa, Homo Sapiens
VPNDKYYGA

SEQ ID NO: 126962 - protein, 9 aa, Homo Sapiens
VPNKFLVTA

SEQ ID NO: 126963 - protein, 9 aa, Homo Sapiens
VPNKIINRA

SEQ ID NO: 126964 - protein, 9 aa, Homo Sapiens
VPNLQTVSV

SEQ ID NO: 126965 - protein, 9 aa, Homo Sapiens
VPNPYIISA

SEQ ID NO: 126966 - protein, 9 aa, Homo Sapiens
VPQAKPVAV

SEQ ID NO: 126967 - protein, 9 aa, Homo Sapiens
VPQGLLKAA

SEQ ID NO: 126968 - protein, 9 aa, Homo Sapiens
VPQSVTECV

SEQ ID NO: 126969 - protein, 9 aa, Homo Sapiens
VPQTPLHTA

SEQ ID NO: 126970 - protein, 9 aa, Homo Sapiens
VPRLPATAA

SEQ ID NO: 126971 - protein, 9 aa, Homo Sapiens
VPRPASVSA

SEQ ID NO: 126972 - protein, 9 aa, Homo Sapiens
VPRQPTVTS

SEQ ID NO: 126973 - protein, 9 aa, Homo Sapiens
VPSAVLIVA

SEQ ID NO: 126974 - protein, 9 aa, Homo Sapiens
VPSLFSKSA

SEQ ID NO: 126975 - protein, 9 aa, Homo Sapiens
VPSLQGEKA

SEQ ID NO: 126976 - protein, 9 aa, Homo Sapiens
VPSPRLAAA

SEQ ID NO: 126977 - protein, 9 aa, Homo Sapiens
VPSPVAISA

SEQ ID NO: 126978 - protein, 9 aa, Homo Sapiens
VPSSPPTKR

SEQ ID NO: 126979 - protein, 9 aa, Homo Sapiens
VPSYPSKSA

SEQ ID NO: 126980 - protein, 9 aa, Homo Sapiens
VPTDYSVSA

SEQ ID NO: 126981 - protein, 9 aa, Homo Sapiens
VPTEPLPAP

SEQ ID NO: 126982 - protein, 9 aa, Homo Sapiens
VPTPAPISA

SEQ ID NO: 126983 - protein, 9 aa, Homo Sapiens
VPTPIHPIF

SEQ ID NO: 126984 - protein, 9 aa, Homo Sapiens
VPTTAAATA

SEQ ID NO: 126985 - protein, 9 aa, Homo Sapiens
VPVDTGVAA

SEQ ID NO: 126986 - protein, 9 aa, Homo Sapiens
VPVEPVLTV

SEQ ID NO: 126987 - protein, 9 aa, Homo Sapiens
VPVSTINHA

SEQ ID NO: 126988 - protein, 9 aa, Homo Sapiens
VPWGGAAAV

SEQ ID NO: 126989 - protein, 9 aa, Homo Sapiens
VPYGTPLSV

SEQ ID NO: 126990 - protein, 9 aa, Homo Sapiens
VPYGVGKAA

SEQ ID NO: 126991 - protein, 9 aa, Homo Sapiens
VPYLVGQVV

SEQ ID NO: 126992 - protein, 9 aa, Homo Sapiens
VPYPPLLRA

SEQ ID NO: 126993 - protein, 9 aa, Homo Sapiens
VVAPSIIAA

SEQ ID NO: 126994 - protein, 9 aa, Homo Sapiens
VVRPAHISA

SEQ ID NO: 126995 - protein, 9 aa, Homo Sapiens
YPAPQVSTA

SEQ ID NO: 126996 - protein, 9 aa, Homo Sapiens
YPFKNLPTA

SEQ ID NO: 126997 - protein, 9 aa, Homo Sapiens
YPGFNPFRA

SEQ ID NO: 126998 - protein, 9 aa, Homo Sapiens
YPHGWVETA

SEQ ID NO: 126999 - protein, 9 aa, Homo Sapiens
YPISIFIKP

SEQ ID NO: 127000 - protein, 9 aa, Homo Sapiens
YPKNPHLRA

SEQ ID NO: 127001 - protein, 9 aa, Homo Sapiens
YPLDLLLKL

SEQ ID NO: 127002 - protein, 9 aa, Homo Sapiens
YPLEKVAEA

SEQ ID NO: 127003 - protein, 9 aa, Homo Sapiens
YPLLLKELA

SEQ ID NO: 127004 - protein, 9 aa, Homo Sapiens
YPNFAGPHA

SEQ ID NO: 127005 - protein, 9 aa, Homo Sapiens
YPNFSLPAA

SEQ ID NO: 127006 - protein, 9 aa, Homo Sapiens
YPNYPNPAV

SEQ ID NO: 127007 - protein, 9 aa, Homo Sapiens
YPQELIVPA

SEQ ID NO: 127008 - protein, 9 aa, Homo Sapiens
YPRPGTPAA

SEQ ID NO: 127009 - protein, 9 aa, Homo Sapiens
YPSAPFLAA

SEQ ID NO: 127010 - protein, 9 aa, Homo Sapiens
YPTHVKVTA

SEQ ID NO: 127011 - protein, 9 aa, Homo Sapiens
YPVHLAVRA

SEQ ID NO: 127012 - protein, 9 aa, Homo Sapiens
YSFYLPIAA

SEQ ID NO: 127013 - protein, 10 aa, Homo Sapiens
AAAAAAKVPA

SEQ ID NO: 127014 - protein, 10 aa, Homo Sapiens
AAAAPAAPAA

SEQ ID NO: 127015 - protein, 10 aa, Homo Sapiens
AAGGPQRIPA

SEQ ID NO: 127016 - protein, 10 aa, Homo Sapiens
AAPAPAAHVA

SEQ ID NO: 127017 - protein, 10 aa, Homo Sapiens
AAVPTNIIAA

SEQ ID NO: 127018 - protein, 10 aa, Homo Sapiens
AGPARLSPAA

SEQ ID NO: 127019 - protein, 10 aa, Homo Sapiens
APAAATVAVA

SEQ ID NO: 127020 - protein, 10 aa, Homo Sapiens
APAAAVVRAA

SEQ ID NO: 127021 - protein, 10 aa, Homo Sapiens
APAAGSAPAA

SEQ ID NO: 127022 - protein, 10 aa, Homo Sapiens
APAAPLQVHA

SEQ ID NO: 127023 - protein, 10 aa, Homo Sapiens
APAERRQRAA

SEQ ID NO: 127024 - protein, 10 aa, Homo Sapiens
APAGGFQNIA

SEQ ID NO: 127025 - protein, 10 aa, Homo Sapiens
APAPAEKTPV

SEQ ID NO: 127026 - protein, 10 aa, Homo Sapiens
APAPGLGAAA

SEQ ID NO: 127027 - protein, 10 aa, Homo Sapiens
APASGQLPSA

SEQ ID NO: 127028 - protein, 10 aa, Homo Sapiens
APAVLLGGVA

SEQ ID NO: 127029 - protein, 10 aa, Homo Sapiens
APCSLFPYQA

SEQ ID NO: 127030 - protein, 10 aa, Homo Sapiens
APFAAHGYGA

SEQ ID NO: 127031 - protein, 10 aa, Homo Sapiens
APFQNILPRV

SEQ ID NO: 127032 - protein, 10 aa, Homo Sapiens
APFQTSQASA

SEQ ID NO: 127033 - protein, 10 aa, Homo Sapiens
APFVPVGIAG

SEQ ID NO: 127034 - protein, 10 aa, Homo Sapiens
APGPAPPVSA

SEQ ID NO: 127035 - protein, 10 aa, Homo Sapiens
APGPPLHIGA

SEQ ID NO: 127036 - protein, 10 aa, Homo Sapiens
APHDFANIKA

SEQ ID NO: 127037 - protein, 10 aa, Homo Sapiens
APHEILIQIV

SEQ ID NO: 127038 - protein, 10 aa, Homo Sapiens
APHIIVGTPG

SEQ ID NO: 127039 - protein, 10 aa, Homo Sapiens
APHIVVGTPG

SEQ ID NO: 127040 - protein, 10 aa, Homo Sapiens
APIAPLKITV

SEQ ID NO: 127041 - protein, 10 aa, Homo Sapiens
APKGSVLQEA

SEQ ID NO: 127042 - protein, 10 aa, Homo Sapiens
APLNLGMIAA

SEQ ID NO: 127043 - protein, 10 aa, Homo Sapiens
APMAGLMEKA

SEQ ID NO: 127044 - protein, 10 aa, Homo Sapiens
APMGREGVTA

SEQ ID NO: 127045 - protein, 10 aa, Homo Sapiens
APQPAAPVGA

SEQ ID NO: 127046 - protein, 10 aa, Homo Sapiens
APRSFHPPAA

SEQ ID NO: 127047 - protein, 10 aa, Homo Sapiens
APRSLPAAMA

SEQ ID NO: 127048 - protein, 10 aa, Homo Sapiens
APRTPEVRAA

SEQ ID NO: 127049 - protein, 10 aa, Homo Sapiens
APSAKGTISA

SEQ ID NO: 127050 - protein, 10 aa, Homo Sapiens
APSEARTTPA

SEQ ID NO: 127051 - protein, 10 aa, Homo Sapiens
APSGGRLLSA

SEQ ID NO: 127052 - protein, 10 aa, Homo Sapiens
APSKATLIEA

SEQ ID NO: 127053 - protein, 10 aa, Homo Sapiens
APSPSHPISA

SEQ ID NO: 127054 - protein, 10 aa, Homo Sapiens
APTEYASICV

SEQ ID NO: 127055 - protein, 10 aa, Homo Sapiens
APTKALVNQV

SEQ ID NO: 127056 - protein, 10 aa, Homo Sapiens
APTSFLPPEA

SEQ ID NO: 127057 - protein, 10 aa, Homo Sapiens
APVAAHTVTA

SEQ ID NO: 127058 - protein, 10 aa, Homo Sapiens
APVAVEPGAA

SEQ ID NO: 127059 - protein, 10 aa, Homo Sapiens
APVHPPNRSA

SEQ ID NO: 127060 - protein, 10 aa, Homo Sapiens
APVVLVGDHA

SEQ ID NO: 127061 - protein, 10 aa, Homo Sapiens
APYDAIHVGA

SEQ ID NO: 127062 - protein, 10 aa, Homo Sapiens
ATNKERLFAA

SEQ ID NO: 127063 - protein, 10 aa, Homo Sapiens
AVKKNPGIAA

SEQ ID NO: 127064 - protein, 10 aa, Homo Sapiens
CPFSSKFFSA

SEQ ID NO: 127065 - protein, 10 aa, Homo Sapiens
FPANVMDVIA

SEQ ID NO: 127066 - protein, 10 aa, Homo Sapiens
FPKPYPNSEA

SEQ ID NO: 127067 - protein, 10 aa, Homo Sapiens
FPPTFAIPQA

SEQ ID NO: 127068 - protein, 10 aa, Homo Sapiens
GPFPGKFNEV

SEQ ID NO: 127069 - protein, 10 aa, Homo Sapiens
GPWVGTGLAA

SEQ ID NO: 127070 - protein, 10 aa, Homo Sapiens
GPYGGAQPSA

SEQ ID NO: 127071 - protein, 10 aa, Homo Sapiens
HPAAFPLPVV

SEQ ID NO: 127072 - protein, 10 aa, Homo Sapiens
HPFKGFLLEA

SEQ ID NO: 127073 - protein, 10 aa, Homo Sapiens
HPFPGPGLAI

SEQ ID NO: 127074 - protein, 10 aa, Homo Sapiens
HPIEPVLITA

SEQ ID NO: 127075 - protein, 10 aa, Homo Sapiens
HPIHIIPASA

SEQ ID NO: 127076 - protein, 10 aa, Homo Sapiens
HPIQTSFQEA

SEQ ID NO: 127077 - protein, 10 aa, Homo Sapiens
HPKPEGLAAA

SEQ ID NO: 127078 - protein, 10 aa, Homo Sapiens
HPLLRPPPSA

SEQ ID NO: 127079 - protein, 10 aa, Homo Sapiens
HPNPPVVHSA

SEQ ID NO: 127080 - protein, 10 aa, Homo Sapiens
HPNQPLTITA

SEQ ID NO: 127081 - protein, 10 aa, Homo Sapiens
HPQPGSANSL

SEQ ID NO: 127082 - protein, 10 aa, Homo Sapiens
HPREPLPPIQ

SEQ ID NO: 127083 - protein, 10 aa, Homo Sapiens
HPSKALIASA

SEQ ID NO: 127084 - protein, 10 aa, Homo Sapiens
HPSPLSFFSA

SEQ ID NO: 127085 - protein, 10 aa, Homo Sapiens
HPSPVVLKVY

SEQ ID NO: 127086 - protein, 10 aa, Homo Sapiens
HPSQELLASA

SEQ ID NO: 127087 - protein, 10 aa, Homo Sapiens
HPTDASMIEA

SEQ ID NO: 127088 - protein, 10 aa, Homo Sapiens
HPTEDLVVSA

SEQ ID NO: 127089 - protein, 10 aa, Homo Sapiens
HPVEDGIMDA

SEQ ID NO: 127090 - protein, 10 aa, Homo Sapiens
HPWETVTTAA

SEQ ID NO: 127091 - protein, 10 aa, Homo Sapiens
HPYLFPVAAM

SEQ ID NO: 127092 - protein, 10 aa, Homo Sapiens
HPYRLILTVA

SEQ ID NO: 127093 - protein, 10 aa, Homo Sapiens
IPADLRIISA

SEQ ID NO: 127094 - protein, 10 aa, Homo Sapiens
IPAGGRPPAA

SEQ ID NO: 127095 - protein, 10 aa, Homo Sapiens
IPAHDSPLAA

SEQ ID NO: 127096 - protein, 10 aa, Homo Sapiens
IPCELRVTSA

SEQ ID NO: 127097 - protein, 10 aa, Homo Sapiens
IPHPLIMGVI

SEQ ID NO: 127098 - protein, 10 aa, Homo Sapiens
IPKDYKTMAA

SEQ ID NO: 127099 - protein, 10 aa, Homo Sapiens
IPKHINPVAA

SEQ ID NO: 127100 - protein, 10 aa, Homo Sapiens
IPLYLKGGVA

SEQ ID NO: 127101 - protein, 10 aa, Homo Sapiens
IPMKIRNVSA

SEQ ID NO: 127102 - protein, 10 aa, Homo Sapiens
IPQLVSNISA

SEQ ID NO: 127103 - protein, 10 aa, Homo Sapiens
IPRGIPLDAA

SEQ ID NO: 127104 - protein, 10 aa, Homo Sapiens
IPRPVDGVEV

SEQ ID NO: 127105 - protein, 10 aa, Homo Sapiens
IPSYIRDSAA

SEQ ID NO: 127106 - protein, 10 aa, Homo Sapiens
IPTNTMHYGS

SEQ ID NO: 127107 - protein, 10 aa, Homo Sapiens
IPVPVSPISA

SEQ ID NO: 127108 - protein, 10 aa, Homo Sapiens
IPVQLQRSMA

SEQ ID NO: 127109 - protein, 10 aa, Homo Sapiens
IPVTEIAIAA

SEQ ID NO: 127110 - protein, 10 aa, Homo Sapiens
IPYQDYFYTA

SEQ ID NO: 127111 - protein, 10 aa, Homo Sapiens
IPYTGPFNLL

SEQ ID NO: 127112 - protein, 10 aa, Homo Sapiens
IVCDVPSASA

SEQ ID NO: 127113 - protein, 10 aa, Homo Sapiens
KPAGPLGATA

SEQ ID NO: 127114 - protein, 10 aa, Homo Sapiens
KPAPPFNVTV

SEQ ID NO: 127115 - protein, 10 aa, Homo Sapiens
KPAPPQTEQV

SEQ ID NO: 127116 - protein, 10 aa, Homo Sapiens
KPATLTTTSA

SEQ ID NO: 127117 - protein, 10 aa, Homo Sapiens
KPIDFVLNKV

SEQ ID NO: 127118 - protein, 10 aa, Homo Sapiens
KPIEMQLTSA

SEQ ID NO: 127119 - protein, 10 aa, Homo Sapiens
KPIFSLNTVA

SEQ ID NO: 127120 - protein, 10 aa, Homo Sapiens
KPKEVTTVKV

SEQ ID NO: 127121 - protein, 10 aa, Homo Sapiens
KPKGTFKDYV

SEQ ID NO: 127122 - protein, 10 aa, Homo Sapiens
KPKPAGVLGA

SEQ ID NO: 127123 - protein, 10 aa, Homo Sapiens
KPLANRIKEA

SEQ ID NO: 127124 - protein, 10 aa, Homo Sapiens
KPLDLRPKKT

SEQ ID NO: 127125 - protein, 10 aa, Homo Sapiens
KPLQPLPNTA

SEQ ID NO: 127126 - protein, 10 aa, Homo Sapiens
KPLRPLGKAA

SEQ ID NO: 127127 - protein, 10 aa, Homo Sapiens
KPMEIARIVA

SEQ ID NO: 127128 - protein, 10 aa, Homo Sapiens
KPMKSVLVVA

SEQ ID NO: 127129 - protein, 10 aa, Homo Sapiens
KPMQPGPHVV

SEQ ID NO: 127130 - protein, 10 aa, Homo Sapiens
KPNEGAIVEV

SEQ ID NO: 127131 - protein, 10 aa, Homo Sapiens
KPNPNQIISV

SEQ ID NO: 127132 - protein, 10 aa, Homo Sapiens
KPPAILPVAA

SEQ ID NO: 127133 - protein, 10 aa, Homo Sapiens
KPQGHIGVDA

SEQ ID NO: 127134 - protein, 10 aa, Homo Sapiens
KPQSINTVSA

SEQ ID NO: 127135 - protein, 10 aa, Homo Sapiens
KPRPIIPMLY

SEQ ID NO: 127136 - protein, 10 aa, Homo Sapiens
KPSELLKAEA

SEQ ID NO: 127137 - protein, 10 aa, Homo Sapiens
KPSPFTPVSA

SEQ ID NO: 127138 - protein, 10 aa, Homo Sapiens
KPSVNSFISA

SEQ ID NO: 127139 - protein, 10 aa, Homo Sapiens
KPTETLLNTV

SEQ ID NO: 127140 - protein, 10 aa, Homo Sapiens
KPTTALLDKV

SEQ ID NO: 127141 - protein, 10 aa, Homo Sapiens
KPVYIPEVEL

SEQ ID NO: 127142 - protein, 10 aa, Homo Sapiens
KPYNVYITVA

SEQ ID NO: 127143 - protein, 10 aa, Homo Sapiens
KPYTLMSMVA

SEQ ID NO: 127144 - protein, 10 aa, Homo Sapiens
KPYTVVDVSA

SEQ ID NO: 127145 - protein, 10 aa, Homo Sapiens
LPAASQPQVF

SEQ ID NO: 127146 - protein, 10 aa, Homo Sapiens
LPAHREGISA

SEQ ID NO: 127147 - protein, 10 aa, Homo Sapiens
LPAQSGSHAA

SEQ ID NO: 127148 - protein, 10 aa, Homo Sapiens
LPASIPHVIA

SEQ ID NO: 127149 - protein, 10 aa, Homo Sapiens
LPFYLIPPSA

SEQ ID NO: 127150 - protein, 10 aa, Homo Sapiens
LPHPYAIAVF

SEQ ID NO: 127151 - protein, 10 aa, Homo Sapiens
LPHSAGRYAA

SEQ ID NO: 127152 - protein, 10 aa, Homo Sapiens
LPHSGYSDSA

SEQ ID NO: 127153 - protein, 10 aa, Homo Sapiens
LPIPDPGVSV

SEQ ID NO: 127154 - protein, 10 aa, Homo Sapiens
LPKAGKFGPA

SEQ ID NO: 127155 - protein, 10 aa, Homo Sapiens
LPKEDPTAVA

SEQ ID NO: 127156 - protein, 10 aa, Homo Sapiens
LPLSAHGIVV

SEQ ID NO: 127157 - protein, 10 aa, Homo Sapiens
LPNHQVIHTA

SEQ ID NO: 127158 - protein, 10 aa, Homo Sapiens
LPNQSFPHSV

SEQ ID NO: 127159 - protein, 10 aa, Homo Sapiens
LPPPDHGAPA

SEQ ID NO: 127160 - protein, 10 aa, Homo Sapiens
LPQEIKANVA

SEQ ID NO: 127161 - protein, 10 aa, Homo Sapiens
LPQSREKIIA

SEQ ID NO: 127162 - protein, 10 aa, Homo Sapiens
LPRGAAKAIA

SEQ ID NO: 127163 - protein, 10 aa, Homo Sapiens
LPRRPLPPAA

SEQ ID NO: 127164 - protein, 10 aa, Homo Sapiens
LPSGCYGRVA

SEQ ID NO: 127165 - protein, 10 aa, Homo Sapiens
LPVDKAFYEA

SEQ ID NO: 127166 - protein, 10 aa, Homo Sapiens
LPVGAVINCA

SEQ ID NO: 127167 - protein, 10 aa, Homo Sapiens
LPVQLQRAMA

SEQ ID NO: 127168 - protein, 10 aa, Homo Sapiens
LPVWLENHTA

SEQ ID NO: 127169 - protein, 10 aa, Homo Sapiens
LVYQEPIPTA

SEQ ID NO: 127170 - protein, 10 aa, Homo Sapiens
MAAANGIGRL

SEQ ID NO: 127171 - protein, 10 aa, Homo Sapiens
MAMESTATAA

SEQ ID NO: 127172 - protein, 10 aa, Homo Sapiens
MPAEHVAVQV

SEQ ID NO: 127173 - protein, 10 aa, Homo Sapiens
MPAPPPKENA

SEQ ID NO: 127174 - protein, 10 aa, Homo Sapiens
MPCSVIRPIL

SEQ ID NO: 127175 - protein, 10 aa, Homo Sapiens
MPHLVNGDAA

SEQ ID NO: 127176 - protein, 10 aa, Homo Sapiens
MPHPATGKTV

SEQ ID NO: 127177 - protein, 10 aa, Homo Sapiens
MPIYPTYNEV

SEQ ID NO: 127178 - protein, 10 aa, Homo Sapiens
MPLHTIIPLL

SEQ ID NO: 127179 - protein, 10 aa, Homo Sapiens
MPLSVFPYYA

SEQ ID NO: 127180 - protein, 10 aa, Homo Sapiens
MPNGDHIVSA

SEQ ID NO: 127181 - protein, 10 aa, Homo Sapiens
MPNGTPHPTA

SEQ ID NO: 127182 - protein, 10 aa, Homo Sapiens
MPNPQLNIKA

SEQ ID NO: 127183 - protein, 10 aa, Homo Sapiens
MPQLNAIIAA

SEQ ID NO: 127184 - protein, 10 aa, Homo Sapiens
MPQMCKATSA

SEQ ID NO: 127185 - protein, 10 aa, Homo Sapiens
MPQSGTGVSV

SEQ ID NO: 127186 - protein, 10 aa, Homo Sapiens
MPRFTEQVEA

SEQ ID NO: 127187 - protein, 10 aa, Homo Sapiens
MPTTLEGAEA

SEQ ID NO: 127188 - protein, 10 aa, Homo Sapiens
MPVEAKCINA

SEQ ID NO: 127189 - protein, 10 aa, Homo Sapiens
MPVQFKPKSA

SEQ ID NO: 127190 - protein, 10 aa, Homo Sapiens
NHPYLFPVAA

SEQ ID NO: 127191 - protein, 10 aa, Homo Sapiens
NPLGMPVPAA

SEQ ID NO: 127192 - protein, 10 aa, Homo Sapiens
NPLHELKAAA

SEQ ID NO: 127193 - protein, 10 aa, Homo Sapiens
NPSPSTSISA

SEQ ID NO: 127194 - protein, 10 aa, Homo Sapiens
NPYFPGQAIA

SEQ ID NO: 127195 - protein, 10 aa, Homo Sapiens
NSVPSNPVAA

SEQ ID NO: 127196 - protein, 10 aa, Homo Sapiens
PARFKNTEAI

SEQ ID NO: 127197 - protein, 10 aa, Homo Sapiens
PVRQGALQGG

SEQ ID NO: 127198 - protein, 10 aa, Homo Sapiens
QAAAPVLTPA

SEQ ID NO: 127199 - protein, 10 aa, Homo Sapiens
QFPAPKSAST

SEQ ID NO: 127200 - protein, 10 aa, Homo Sapiens
QPFGDHIISV

SEQ ID NO: 127201 - protein, 10 aa, Homo Sapiens
QPHHLLLPAA

SEQ ID NO: 127202 - protein, 10 aa, Homo Sapiens
QPPSLPAVSA

SEQ ID NO: 127203 - protein, 10 aa, Homo Sapiens
QPWPQPVPAL

SEQ ID NO: 127204 - protein, 10 aa, Homo Sapiens
QPYYATRVNA

SEQ ID NO: 127205 - protein, 10 aa, Homo Sapiens
QVMQGMGVSA

SEQ ID NO: 127206 - protein, 10 aa, Homo Sapiens
RPAAAPPAGA

SEQ ID NO: 127207 - protein, 10 aa, Homo Sapiens
RPADVIFATV

SEQ ID NO: 127208 - protein, 10 aa, Homo Sapiens
RPALVEQTAA

SEQ ID NO: 127209 - protein, 10 aa, Homo Sapiens
RPAPHFERTA

SEQ ID NO: 127210 - protein, 10 aa, Homo Sapiens
RPAPLPAAVV

SEQ ID NO: 127211 - protein, 10 aa, Homo Sapiens
RPAPPLRPSA

SEQ ID NO: 127212 - protein, 10 aa, Homo Sapiens
RPAPVAVAAA

SEQ ID NO: 127213 - protein, 10 aa, Homo Sapiens
RPASYQSVSV

SEQ ID NO: 127214 - protein, 10 aa, Homo Sapiens
RPAVVMQGSA

SEQ ID NO: 127215 - protein, 10 aa, Homo Sapiens
RPDSTHMVEA

SEQ ID NO: 127216 - protein, 10 aa, Homo Sapiens
RPELLCGAVA

SEQ ID NO: 127217 - protein, 10 aa, Homo Sapiens
RPFEGFQRKA

SEQ ID NO: 127218 - protein, 10 aa, Homo Sapiens
RPFHNGVKCL

SEQ ID NO: 127219 - protein, 10 aa, Homo Sapiens
RPFKGEVVDA

SEQ ID NO: 127220 - protein, 10 aa, Homo Sapiens
RPFLNSISKA

SEQ ID NO: 127221 - protein, 10 aa, Homo Sapiens
RPFSGRRLPV

SEQ ID NO: 127222 - protein, 10 aa, Homo Sapiens
RPFTIPYLTA

SEQ ID NO: 127223 - protein, 10 aa, Homo Sapiens
RPGPGVPATW

SEQ ID NO: 127224 - protein, 10 aa, Homo Sapiens
RPGPVLPAVA

SEQ ID NO: 127225 - protein, 10 aa, Homo Sapiens
RPHSASAARP

SEQ ID NO: 127226 - protein, 10 aa, Homo Sapiens
RPIPNQPPTA

SEQ ID NO: 127227 - protein, 10 aa, Homo Sapiens
RPISLGHVVV

SEQ ID NO: 127228 - protein, 10 aa, Homo Sapiens
RPITPPRNSA

SEQ ID NO: 127229 - protein, 10 aa, Homo Sapiens
RPIWLRESTV

SEQ ID NO: 127230 - protein, 10 aa, Homo Sapiens
RPIYIKDYVT

SEQ ID NO: 127231 - protein, 10 aa, Homo Sapiens
RPKPPNVRTA

SEQ ID NO: 127232 - protein, 10 aa, Homo Sapiens
RPLFPLPAAF

SEQ ID NO: 127233 - protein, 10 aa, Homo Sapiens
RPLFPSTGAA

SEQ ID NO: 127234 - protein, 10 aa, Homo Sapiens
RPLGVSITKA

SEQ ID NO: 127235 - protein, 10 aa, Homo Sapiens
RPLPVTFHRA

SEQ ID NO: 127236 - protein, 10 aa, Homo Sapiens
RPLQDYGISV

SEQ ID NO: 127237 - protein, 10 aa, Homo Sapiens
RPLSGLMETA

SEQ ID NO: 127238 - protein, 10 aa, Homo Sapiens
RPLSGSGISA

SEQ ID NO: 127239 - protein, 10 aa, Homo Sapiens
RPLYCSPITA

SEQ ID NO: 127240 - protein, 10 aa, Homo Sapiens
RPMCIPPSYA

SEQ ID NO: 127241 - protein, 10 aa, Homo Sapiens
RPNAFGMAQA

SEQ ID NO: 127242 - protein, 10 aa, Homo Sapiens
RPNDSRMLVA

SEQ ID NO: 127243 - protein, 10 aa, Homo Sapiens
RPNSLVGITS

SEQ ID NO: 127244 - protein, 10 aa, Homo Sapiens
RPPEPRHIPA

SEQ ID NO: 127245 - protein, 10 aa, Homo Sapiens
RPRAPIIAVT

SEQ ID NO: 127246 - protein, 10 aa, Homo Sapiens
RPRAVYAVEA

SEQ ID NO: 127247 - protein, 10 aa, Homo Sapiens
RPRDSQLYAV

SEQ ID NO: 127248 - protein, 10 aa, Homo Sapiens
RPRPPPVEQV

SEQ ID NO: 127249 - protein, 10 aa, Homo Sapiens
RPRTEVSLSA

SEQ ID NO: 127250 - protein, 10 aa, Homo Sapiens
RPRVTEPISA

SEQ ID NO: 127251 - protein, 10 aa, Homo Sapiens
RPSLLRPVSA

SEQ ID NO: 127252 - protein, 10 aa, Homo Sapiens
RPSPSIAVKA

SEQ ID NO: 127253 - protein, 10 aa, Homo Sapiens
RPSSLHGLAA

SEQ ID NO: 127254 - protein, 10 aa, Homo Sapiens
RPSTDFTQAA

SEQ ID NO: 127255 - protein, 10 aa, Homo Sapiens
RPVHPALPFA

SEQ ID NO: 127256 - protein, 10 aa, Homo Sapiens
RPVLPRTEAA

SEQ ID NO: 127257 - protein, 10 aa, Homo Sapiens
RPWEKTDKGA

SEQ ID NO: 127258 - protein, 10 aa, Homo Sapiens
RPWYSHPVYA

SEQ ID NO: 127259 - protein, 10 aa, Homo Sapiens
RPYAPINANA

SEQ ID NO: 127260 - protein, 10 aa, Homo Sapiens
RPYGCVLRAA

SEQ ID NO: 127261 - protein, 10 aa, Homo Sapiens
RPYLGYDWIA

SEQ ID NO: 127262 - protein, 10 aa, Homo Sapiens
RVAEVIFPTA

SEQ ID NO: 127263 - protein, 10 aa, Homo Sapiens
RVKCGPRLSA

SEQ ID NO: 127264 - protein, 10 aa, Homo Sapiens
RVNEVNQFAA

SEQ ID NO: 127265 - protein, 10 aa, Homo Sapiens
RVRDVFEAKA

SEQ ID NO: 127266 - protein, 10 aa, Homo Sapiens
RVRLSTGREA

SEQ ID NO: 127267 - protein, 10 aa, Homo Sapiens
SPAEVAKITA

SEQ ID NO: 127268 - protein, 10 aa, Homo Sapiens
SPARLYAIAA

SEQ ID NO: 127269 - protein, 10 aa, Homo Sapiens
SPFGLKPRSA

SEQ ID NO: 127270 - protein, 10 aa, Homo Sapiens
SPFHFQPSAA

SEQ ID NO: 127271 - protein, 10 aa, Homo Sapiens
SPHAHISEQA

SEQ ID NO: 127272 - protein, 10 aa, Homo Sapiens
SPHGLVMVGV

SEQ ID NO: 127273 - protein, 10 aa, Homo Sapiens
SPHGYLSDVA

SEQ ID NO: 127274 - protein, 10 aa, Homo Sapiens
SPHPPSEVTA

SEQ ID NO: 127275 - protein, 10 aa, Homo Sapiens
SPIENIQRVA

SEQ ID NO: 127276 - protein, 10 aa, Homo Sapiens
SPILVATAVA

SEQ ID NO: 127277 - protein, 10 aa, Homo Sapiens
SPITGEKIPA

SEQ ID NO: 127278 - protein, 10 aa, Homo Sapiens
SPKAALRYAA

SEQ ID NO: 127279 - protein, 10 aa, Homo Sapiens
SPKPALRYAA

SEQ ID NO: 127280 - protein, 10 aa, Homo Sapiens
SPKQILDPAA

SEQ ID NO: 127281 - protein, 10 aa, Homo Sapiens
SPKQILDSAA

SEQ ID NO: 127282 - protein, 10 aa, Homo Sapiens
SPLATQIPQA

SEQ ID NO: 127283 - protein, 10 aa, Homo Sapiens
SPLFSQHTAA

SEQ ID NO: 127284 - protein, 10 aa, Homo Sapiens
SPLRSPIRSA

SEQ ID NO: 127285 - protein, 10 aa, Homo Sapiens
SPLSVVKQEA

SEQ ID NO: 127286 - protein, 10 aa, Homo Sapiens
SPMSADRVVA

SEQ ID NO: 127287 - protein, 10 aa, Homo Sapiens
SPNGKYILAA

SEQ ID NO: 127288 - protein, 10 aa, Homo Sapiens
SPNKTGGFGA

SEQ ID NO: 127289 - protein, 10 aa, Homo Sapiens
SPNLASGLAA

SEQ ID NO: 127290 - protein, 10 aa, Homo Sapiens
SPNPARGHSV

SEQ ID NO: 127291 - protein, 10 aa, Homo Sapiens
SPNPFSVHTA

SEQ ID NO: 127292 - protein, 10 aa, Homo Sapiens
SPNRYWLCAA

SEQ ID NO: 127293 - protein, 10 aa, Homo Sapiens
SPQEAQIIQA

SEQ ID NO: 127294 - protein, 10 aa, Homo Sapiens
SPQSSQPPTA

SEQ ID NO: 127295 - protein, 10 aa, Homo Sapiens
SPRPALVRSA

SEQ ID NO: 127296 - protein, 10 aa, Homo Sapiens
SPSPPFGHSA

SEQ ID NO: 127297 - protein, 10 aa, Homo Sapiens
SPTACRAVAA

SEQ ID NO: 127298 - protein, 10 aa, Homo Sapiens
SPTGKEFVSA

SEQ ID NO: 127299 - protein, 10 aa, Homo Sapiens
SPVDPGARQA

SEQ ID NO: 127300 - protein, 10 aa, Homo Sapiens
SPVPSHWMVA

SEQ ID NO: 127301 - protein, 10 aa, Homo Sapiens
SPYKDLLDPA

SEQ ID NO: 127302 - protein, 10 aa, Homo Sapiens
TAAPSLKNAA

SEQ ID NO: 127303 - protein, 10 aa, Homo Sapiens
TKTGMLSRAT

SEQ ID NO: 127304 - protein, 10 aa, Homo Sapiens
TPAHVLPSAA

SEQ ID NO: 127305 - protein, 10 aa, Homo Sapiens
TPAPSAPAAA

SEQ ID NO: 127306 - protein, 10 aa, Homo Sapiens
TPAPVEKSPA

SEQ ID NO: 127307 - protein, 10 aa, Homo Sapiens
TPATSVPFAA

SEQ ID NO: 127308 - protein, 10 aa, Homo Sapiens
TPFQGQGHGA

SEQ ID NO: 127309 - protein, 10 aa, Homo Sapiens
TPFTGPFISV

SEQ ID NO: 127310 - protein, 10 aa, Homo Sapiens
TPFYFKEPSL

SEQ ID NO: 127311 - protein, 10 aa, Homo Sapiens
TPHLRNLAVA

SEQ ID NO: 127312 - protein, 10 aa, Homo Sapiens
TPHPVLTPVA

SEQ ID NO: 127313 - protein, 10 aa, Homo Sapiens
TPITGAKPSA

SEQ ID NO: 127314 - protein, 10 aa, Homo Sapiens
TPLPAIVPAA

SEQ ID NO: 127315 - protein, 10 aa, Homo Sapiens
TPMSAQGVQA

SEQ ID NO: 127316 - protein, 10 aa, Homo Sapiens
TPMYTHSIAA

SEQ ID NO: 127317 - protein, 10 aa, Homo Sapiens
TPQEKIFIAA

SEQ ID NO: 127318 - protein, 10 aa, Homo Sapiens
TPQLNAIIAA

SEQ ID NO: 127319 - protein, 10 aa, Homo Sapiens
TPRPLTSARA

SEQ ID NO: 127320 - protein, 10 aa, Homo Sapiens
TPRPPLRPGA

SEQ ID NO: 127321 - protein, 10 aa, Homo Sapiens
TPSKVWGSSA

SEQ ID NO: 127322 - protein, 10 aa, Homo Sapiens
TPSPVIRSTA

SEQ ID NO: 127323 - protein, 10 aa, Homo Sapiens
TPSSASTVSV

SEQ ID NO: 127324 - protein, 10 aa, Homo Sapiens
TPYEAFDPAA

SEQ ID NO: 127325 - protein, 10 aa, Homo Sapiens
TPYGYFLISA

SEQ ID NO: 127326 - protein, 10 aa, Homo Sapiens
TPYSGKLMSA

SEQ ID NO: 127327 - protein, 10 aa, Homo Sapiens
TQARAPVTAA

SEQ ID NO: 127328 - protein, 10 aa, Homo Sapiens
TSLLVQPISA

SEQ ID NO: 127329 - protein, 10 aa, Homo Sapiens
VPAHAVVVRA

SEQ ID NO: 127330 - protein, 10 aa, Homo Sapiens
VPAHPSGNMA

SEQ ID NO: 127331 - protein, 10 aa, Homo Sapiens
VPAKGLATSV

SEQ ID NO: 127332 - protein, 10 aa, Homo Sapiens
VPAPAHLVAT

SEQ ID NO: 127333 - protein, 10 aa, Homo Sapiens
VPAPSPLSAA

SEQ ID NO: 127334 - protein, 10 aa, Homo Sapiens
VPFKPQIPEA

SEQ ID NO: 127335 - protein, 10 aa, Homo Sapiens
VPHQPDNLAA

SEQ ID NO: 127336 - protein, 10 aa, Homo Sapiens
VPHWDPKISA

SEQ ID NO: 127337 - protein, 10 aa, Homo Sapiens
VPIEVLPTVL

SEQ ID NO: 127338 - protein, 10 aa, Homo Sapiens
VPIVPQAPAA

SEQ ID NO: 127339 - protein, 10 aa, Homo Sapiens
VPKKPGPPVL

SEQ ID NO: 127340 - protein, 10 aa, Homo Sapiens
VPKNSDPWAA

SEQ ID NO: 127341 - protein, 10 aa, Homo Sapiens
VPKSAVQQVA

SEQ ID NO: 127342 - protein, 10 aa, Homo Sapiens
VPLPEHGVSV

SEQ ID NO: 127343 - protein, 10 aa, Homo Sapiens
VPNAGILPLV

SEQ ID NO: 127344 - protein, 10 aa, Homo Sapiens
VPNYKLITPA

SEQ ID NO: 127345 - protein, 10 aa, Homo Sapiens
VPQQPTYVQA

SEQ ID NO: 127346 - protein, 10 aa, Homo Sapiens
VPRPPSNPPA

SEQ ID NO: 127347 - protein, 10 aa, Homo Sapiens
VPRQPTVTSV

SEQ ID NO: 127348 - protein, 10 aa, Homo Sapiens
VPRTVSSTTA

SEQ ID NO: 127349 - protein, 10 aa, Homo Sapiens
VPSPGLPVSA

SEQ ID NO: 127350 - protein, 10 aa, Homo Sapiens
VPTKELARQA

SEQ ID NO: 127351 - protein, 10 aa, Homo Sapiens
VPVGIAGFAA

SEQ ID NO: 127352 - protein, 10 aa, Homo Sapiens
VPVWSGMNVA

SEQ ID NO: 127353 - protein, 10 aa, Homo Sapiens
VPYCIIKGKA

SEQ ID NO: 127354 - protein, 10 aa, Homo Sapiens
VPYEIQKGQA

SEQ ID NO: 127355 - protein, 10 aa, Homo Sapiens
VPYRLLPGIF

SEQ ID NO: 127356 - protein, 10 aa, Homo Sapiens
WRRIPGGYSA

SEQ ID NO: 127357 - protein, 10 aa, Homo Sapiens
YPRTPEERAA

SEQ ID NO: 127358 - protein, 10 aa, Homo Sapiens
YPSTAVRHMA

SEQ ID NO: 127359 - protein, 11 aa, Homo Sapiens
APAPPKAEAKA

SEQ ID NO: 127360 - protein, 11 aa, Homo Sapiens
APAPVIISSSA

SEQ ID NO: 127361 - protein, 11 aa, Homo Sapiens
APCSLFPYQAA

SEQ ID NO: 127362 - protein, 11 aa, Homo Sapiens
APDGSLILVSA

SEQ ID NO: 127363 - protein, 11 aa, Homo Sapiens
APFDTVHIPEA

SEQ ID NO: 127364 - protein, 11 aa, Homo Sapiens
APHGGDLQPPA

SEQ ID NO: 127365 - protein, 11 aa, Homo Sapiens
APIRLPEHVTV

SEQ ID NO: 127366 - protein, 11 aa, Homo Sapiens
APKDVKIRISA

SEQ ID NO: 127367 - protein, 11 aa, Homo Sapiens
APLDSIHSLAA

SEQ ID NO: 127368 - protein, 11 aa, Homo Sapiens
APLEEARQFAA

SEQ ID NO: 127369 - protein, 11 aa, Homo Sapiens
APMALFYPATF

SEQ ID NO: 127370 - protein, 11 aa, Homo Sapiens
APMPYLIGIHL

SEQ ID NO: 127371 - protein, 11 aa, Homo Sapiens
APMPYLIGVHA

SEQ ID NO: 127372 - protein, 11 aa, Homo Sapiens
APNRFWASVEP

SEQ ID NO: 127373 - protein, 11 aa, Homo Sapiens
APRPASGPIRP

SEQ ID NO: 127374 - protein, 11 aa, Homo Sapiens
APSKACMLTTA

SEQ ID NO: 127375 - protein, 11 aa, Homo Sapiens
APSNGLSVRSA

SEQ ID NO: 127376 - protein, 11 aa, Homo Sapiens
APTGSGKTVAA

SEQ ID NO: 127377 - protein, 11 aa, Homo Sapiens
APTSAGKTLVA

SEQ ID NO: 127378 - protein, 11 aa, Homo Sapiens
APVAVEPGAAV

SEQ ID NO: 127379 - protein, 11 aa, Homo Sapiens
APWPPKGLVPA

SEQ ID NO: 127380 - protein, 11 aa, Homo Sapiens
APYAKGFGVAA

SEQ ID NO: 127381 - protein, 11 aa, Homo Sapiens
APYDPHFPAPA

SEQ ID NO: 127382 - protein, 11 aa, Homo Sapiens
ASPHAHISEQA

SEQ ID NO: 127383 - protein, 11 aa, Homo Sapiens
EPAPPSQGAEA

SEQ ID NO: 127384 - protein, 11 aa, Homo Sapiens
EPTDTLSKHQA

SEQ ID NO: 127385 - protein, 11 aa, Homo Sapiens
ETQITQIEHEV

SEQ ID NO: 127386 - protein, 11 aa, Homo Sapiens
FPFKPPQRIEA

SEQ ID NO: 127387 - protein, 11 aa, Homo Sapiens
FPHFDLSHGSA

SEQ ID NO: 127388 - protein, 11 aa, Homo Sapiens
GPWVGTGLAAA

SEQ ID NO: 127389 - protein, 11 aa, Homo Sapiens
HPFDLGLYNEA

SEQ ID NO: 127390 - protein, 11 aa, Homo Sapiens
HPIYLATGTSA

SEQ ID NO: 127391 - protein, 11 aa, Homo Sapiens
HPKVNVPGSQA

SEQ ID NO: 127392 - protein, 11 aa, Homo Sapiens
HPLASFSFTSA

SEQ ID NO: 127393 - protein, 11 aa, Homo Sapiens
HPLTGGGMTVA

SEQ ID NO: 127394 - protein, 11 aa, Homo Sapiens
HPQPILMGSVA

SEQ ID NO: 127395 - protein, 11 aa, Homo Sapiens
HPSHVQLKVVA

SEQ ID NO: 127396 - protein, 11 aa, Homo Sapiens
HPTASLIAKVA

SEQ ID NO: 127397 - protein, 11 aa, Homo Sapiens
IPAFRGHFIAA

SEQ ID NO: 127398 - protein, 11 aa, Homo Sapiens
IPAGTVTVNAA

SEQ ID NO: 127399 - protein, 11 aa, Homo Sapiens
IPAQGHFGISA

SEQ ID NO: 127400 - protein, 11 aa, Homo Sapiens
IPAQISPEGRA

SEQ ID NO: 127401 - protein, 11 aa, Homo Sapiens
IPCNNKGAHSV

SEQ ID NO: 127402 - protein, 11 aa, Homo Sapiens
IPHSLPGAVAA

SEQ ID NO: 127403 - protein, 11 aa, Homo Sapiens
IPIKFSEKQQA

SEQ ID NO: 127404 - protein, 11 aa, Homo Sapiens
IPKGKISIVEA

SEQ ID NO: 127405 - protein, 11 aa, Homo Sapiens
IPLKHLADRVA

SEQ ID NO: 127406 - protein, 11 aa, Homo Sapiens
IPLPDEKSRVA

SEQ ID NO: 127407 - protein, 11 aa, Homo Sapiens
IPNSIMTILEA

SEQ ID NO: 127408 - protein, 11 aa, Homo Sapiens
IPSTELAKQVI

SEQ ID NO: 127409 - protein, 11 aa, Homo Sapiens
IPYDQSGFVSA

SEQ ID NO: 127410 - protein, 11 aa, Homo Sapiens
IPYHSEVPVSL

SEQ ID NO: 127411 - protein, 11 aa, Homo Sapiens
IPYSPDVQIHA

SEQ ID NO: 127412 - protein, 11 aa, Homo Sapiens
IVNEVLKSVVA

SEQ ID NO: 127413 - protein, 11 aa, Homo Sapiens
KPASSSFGSEA

SEQ ID NO: 127414 - protein, 11 aa, Homo Sapiens
KPFELSPLVCA

SEQ ID NO: 127415 - protein, 11 aa, Homo Sapiens
KPFQPALPLVV

SEQ ID NO: 127416 - protein, 11 aa, Homo Sapiens
KPGGSLASHVA

SEQ ID NO: 127417 - protein, 11 aa, Homo Sapiens
KPHAEGAAVVA

SEQ ID NO: 127418 - protein, 11 aa, Homo Sapiens
KPHPAEGQWRA

SEQ ID NO: 127419 - protein, 11 aa, Homo Sapiens
KPKVMEGTVAA

SEQ ID NO: 127420 - protein, 11 aa, Homo Sapiens
KPLDAPAVNKA

SEQ ID NO: 127421 - protein, 11 aa, Homo Sapiens
KPLSSLTPLIA

SEQ ID NO: 127422 - protein, 11 aa, Homo Sapiens
KPMEGWIAVTV

SEQ ID NO: 127423 - protein, 11 aa, Homo Sapiens
KPMLQQGIELL

SEQ ID NO: 127424 - protein, 11 aa, Homo Sapiens
KPNEFASQINL

SEQ ID NO: 127425 - protein, 11 aa, Homo Sapiens
KPREAFGFEQA

SEQ ID NO: 127426 - protein, 11 aa, Homo Sapiens
KPTASPSSIAA

SEQ ID NO: 127427 - protein, 11 aa, Homo Sapiens
KPTAVPSIFHL

SEQ ID NO: 127428 - protein, 11 aa, Homo Sapiens
KPVPLNSGVRF

SEQ ID NO: 127429 - protein, 11 aa, Homo Sapiens
KPVVTPFGQVA

SEQ ID NO: 127430 - protein, 11 aa, Homo Sapiens
KVNENLTKFIA

SEQ ID NO: 127431 - protein, 11 aa, Homo Sapiens
KVYDNRVSVAA

SEQ ID NO: 127432 - protein, 11 aa, Homo Sapiens
LPAEFPDKVFA

SEQ ID NO: 127433 - protein, 11 aa, Homo Sapiens
LPASNLAGKEA

SEQ ID NO: 127434 - protein, 11 aa, Homo Sapiens
LPHAILRLDLA

SEQ ID NO: 127435 - protein, 11 aa, Homo Sapiens
LPHDRMTSQEA

SEQ ID NO: 127436 - protein, 11 aa, Homo Sapiens
LPHGAISEDQA

SEQ ID NO: 127437 - protein, 11 aa, Homo Sapiens
LPKSSSQEVEA

SEQ ID NO: 127438 - protein, 11 aa, Homo Sapiens
LPLLQPRGASA

SEQ ID NO: 127439 - protein, 11 aa, Homo Sapiens
LPLRPIIPLVA

SEQ ID NO: 127440 - protein, 11 aa, Homo Sapiens
LPRTVIRGSQA

SEQ ID NO: 127441 - protein, 11 aa, Homo Sapiens
LPSASITSTSA

SEQ ID NO: 127442 - protein, 11 aa, Homo Sapiens
LPSDFTPAVHA

SEQ ID NO: 127443 - protein, 11 aa, Homo Sapiens
LPSPLPAHPSV

SEQ ID NO: 127444 - protein, 11 aa, Homo Sapiens
LPTREGHHLVA

SEQ ID NO: 127445 - protein, 11 aa, Homo Sapiens
MPHPATGKTVA

SEQ ID NO: 127446 - protein, 11 aa, Homo Sapiens
MPHSIMRIDIA

SEQ ID NO: 127447 - protein, 11 aa, Homo Sapiens
MPHSIMRVDIA

SEQ ID NO: 127448 - protein, 11 aa, Homo Sapiens
MPLHVAPLLAA

SEQ ID NO: 127449 - protein, 11 aa, Homo Sapiens
MPNGTPHPTAA

SEQ ID NO: 127450 - protein, 11 aa, Homo Sapiens
MPNPSLAQVKI

SEQ ID NO: 127451 - protein, 11 aa, Homo Sapiens
MPRWAERLFPA

SEQ ID NO: 127452 - protein, 11 aa, Homo Sapiens
MPWGDPNYRSA

SEQ ID NO: 127453 - protein, 11 aa, Homo Sapiens
PLSPMLYSSSA

SEQ ID NO: 127454 - protein, 11 aa, Homo Sapiens
PSLSRPGPAAP

SEQ ID NO: 127455 - protein, 11 aa, Homo Sapiens
PSLSSLPAGAA

SEQ ID NO: 127456 - protein, 11 aa, Homo Sapiens
QAAVRPKGEAA

SEQ ID NO: 127457 - protein, 11 aa, Homo Sapiens
QPFPAHIGRSA

SEQ ID NO: 127458 - protein, 11 aa, Homo Sapiens
QPHDPLVPLSA

SEQ ID NO: 127459 - protein, 11 aa, Homo Sapiens
QPYAPPRDFAA

SEQ ID NO: 127460 - protein, 11 aa, Homo Sapiens
QPYYATRVNAA

SEQ ID NO: 127461 - protein, 11 aa, Homo Sapiens
QVFDAKNMMAA

SEQ ID NO: 127462 - protein, 11 aa, Homo Sapiens
RASLEVTQQQA

SEQ ID NO: 127463 - protein, 11 aa, Homo Sapiens
RISSIQATTAA

SEQ ID NO: 127464 - protein, 11 aa, Homo Sapiens
RPAAQPSFHQA

SEQ ID NO: 127465 - protein, 11 aa, Homo Sapiens
RPAGALVALVV

SEQ ID NO: 127466 - protein, 11 aa, Homo Sapiens
RPAGVGVVVEA

SEQ ID NO: 127467 - protein, 11 aa, Homo Sapiens
RPALAVGVTAV

SEQ ID NO: 127468 - protein, 11 aa, Homo Sapiens
RPALPVSYLQA

SEQ ID NO: 127469 - protein, 11 aa, Homo Sapiens
RPAPLSAELQA

SEQ ID NO: 127470 - protein, 11 aa, Homo Sapiens
RPAPPLRPSAA

SEQ ID NO: 127471 - protein, 11 aa, Homo Sapiens
RPAPVAVAAAA

SEQ ID NO: 127472 - protein, 11 aa, Homo Sapiens
RPAQFLPEMVA

SEQ ID NO: 127473 - protein, 11 aa, Homo Sapiens
RPAQLHIGFQA

SEQ ID NO: 127474 - protein, 11 aa, Homo Sapiens
RPCSPQNKISF

SEQ ID NO: 127475 - protein, 11 aa, Homo Sapiens
RPEDRMFHIRA

SEQ ID NO: 127476 - protein, 11 aa, Homo Sapiens
RPGPGLSQEAA

SEQ ID NO: 127477 - protein, 11 aa, Homo Sapiens
RPGPVLPAVAV

SEQ ID NO: 127478 - protein, 11 aa, Homo Sapiens
RPGVACSVSQA

SEQ ID NO: 127479 - protein, 11 aa, Homo Sapiens
RPHAPHSPIKF

SEQ ID NO: 127480 - protein, 11 aa, Homo Sapiens
RPHSSLRELLA

SEQ ID NO: 127481 - protein, 11 aa, Homo Sapiens
RPHTVLTVIQA

SEQ ID NO: 127482 - protein, 11 aa, Homo Sapiens
RPIPNQPPTAA

SEQ ID NO: 127483 - protein, 11 aa, Homo Sapiens
RPIRKGDIFLV

SEQ ID NO: 127484 - protein, 11 aa, Homo Sapiens
RPISLGHVVVA

SEQ ID NO: 127485 - protein, 11 aa, Homo Sapiens
RPKIPGSREAA

SEQ ID NO: 127486 - protein, 11 aa, Homo Sapiens
RPKLNEGVVEF

SEQ ID NO: 127487 - protein, 11 aa, Homo Sapiens
RPKPSSSPVIF

SEQ ID NO: 127488 - protein, 11 aa, Homo Sapiens
RPKSAFKVQNA

SEQ ID NO: 127489 - protein, 11 aa, Homo Sapiens
RPLLPSENITA

SEQ ID NO: 127490 - protein, 11 aa, Homo Sapiens
RPLPGALGVAA

SEQ ID NO: 127491 - protein, 11 aa, Homo Sapiens
RPNGVITGLAA

SEQ ID NO: 127492 - protein, 11 aa, Homo Sapiens
RPNSLVGITSA

SEQ ID NO: 127493 - protein, 11 aa, Homo Sapiens
RPRAPIIAVTR

SEQ ID NO: 127494 - protein, 11 aa, Homo Sapiens
RPRDLEDFFSA

SEQ ID NO: 127495 - protein, 11 aa, Homo Sapiens
RPREALSTNEC

SEQ ID NO: 127496 - protein, 11 aa, Homo Sapiens
RPRTAGPAVHL

SEQ ID NO: 127497 - protein, 11 aa, Homo Sapiens
RPSELLAGVKA

SEQ ID NO: 127498 - protein, 11 aa, Homo Sapiens
RPSQGLYSSSA

SEQ ID NO: 127499 - protein, 11 aa, Homo Sapiens
RPSSLPVGPVL

SEQ ID NO: 127500 - protein, 11 aa, Homo Sapiens
RPSTDFTQAAA

SEQ ID NO: 127501 - protein, 11 aa, Homo Sapiens
RPSTGGLGFSV

SEQ ID NO: 127502 - protein, 11 aa, Homo Sapiens
RPVTPPRGMIT

SEQ ID NO: 127503 - protein, 11 aa, Homo Sapiens
RPYLHEFLTSA

SEQ ID NO: 127504 - protein, 11 aa, Homo Sapiens
RPYQPLGALVV

SEQ ID NO: 127505 - protein, 11 aa, Homo Sapiens
SPCQTDVLRSA

SEQ ID NO: 127506 - protein, 11 aa, Homo Sapiens
SPDEGALVRAA

SEQ ID NO: 127507 - protein, 11 aa, Homo Sapiens
SPFQTPVQSSA

SEQ ID NO: 127508 - protein, 11 aa, Homo Sapiens
SPHAHISEQAV

SEQ ID NO: 127509 - protein, 11 aa, Homo Sapiens
SPHPAIQPLQA

SEQ ID NO: 127510 - protein, 11 aa, Homo Sapiens
SPHPSAAVPAA

SEQ ID NO: 127511 - protein, 11 aa, Homo Sapiens
SPIENIQRVAA

SEQ ID NO: 127512 - protein, 11 aa, Homo Sapiens
SPILVATAVAA

SEQ ID NO: 127513 - protein, 11 aa, Homo Sapiens
SPKPAIKSISA

SEQ ID NO: 127514 - protein, 11 aa, Homo Sapiens
SPLDMKDGFLA

SEQ ID NO: 127515 - protein, 11 aa, Homo Sapiens
SPLSAAAATAA

SEQ ID NO: 127516 - protein, 11 aa, Homo Sapiens
SPLSTPTSAQA

SEQ ID NO: 127517 - protein, 11 aa, Homo Sapiens
SPMAERSMMSA

SEQ ID NO: 127518 - protein, 11 aa, Homo Sapiens
SPNMANTVNAA

SEQ ID NO: 127519 - protein, 11 aa, Homo Sapiens
SPRHLPSCSPA

SEQ ID NO: 127520 - protein, 11 aa, Homo Sapiens
SPRNLGFETSA

SEQ ID NO: 127521 - protein, 11 aa, Homo Sapiens
SPRNLQPQRAA

SEQ ID NO: 127522 - protein, 11 aa, Homo Sapiens
SPRPALPALLV

SEQ ID NO: 127523 - protein, 11 aa, Homo Sapiens
SPRSGQRCWAA

SEQ ID NO: 127524 - protein, 11 aa, Homo Sapiens
SPRTAEGVLAA

SEQ ID NO: 127525 - protein, 11 aa, Homo Sapiens
SPRTPVSPVKF

SEQ ID NO: 127526 - protein, 11 aa, Homo Sapiens
SPSAAITVQRV

SEQ ID NO: 127527 - protein, 11 aa, Homo Sapiens
SPTSPNALPPA

SEQ ID NO: 127528 - protein, 11 aa, Homo Sapiens
SPVQVPGPVAA

SEQ ID NO: 127529 - protein, 11 aa, Homo Sapiens
SPVTLTKGTSA

SEQ ID NO: 127530 - protein, 11 aa, Homo Sapiens
SPYSGPKFNSA

SEQ ID NO: 127531 - protein, 11 aa, Homo Sapiens
TAYKPKYFTSA

SEQ ID NO: 127532 - protein, 11 aa, Homo Sapiens
TPAAAAAMNLA

SEQ ID NO: 127533 - protein, 11 aa, Homo Sapiens
TPFGPLSSRSA

SEQ ID NO: 127534 - protein, 11 aa, Homo Sapiens
TPFYPRSPYGA

SEQ ID NO: 127535 - protein, 11 aa, Homo Sapiens
TPHYIYPPAIV

SEQ ID NO: 127536 - protein, 11 aa, Homo Sapiens
TPKTPEEKAVA

SEQ ID NO: 127537 - protein, 11 aa, Homo Sapiens
TPLLLRGLTGS

SEQ ID NO: 127538 - protein, 11 aa, Homo Sapiens
TPNTSLGMVQA

SEQ ID NO: 127539 - protein, 11 aa, Homo Sapiens
TPRSIHDGVAA

SEQ ID NO: 127540 - protein, 11 aa, Homo Sapiens
TPSEKHMLLKV

SEQ ID NO: 127541 - protein, 11 aa, Homo Sapiens
TPSMSTITHSA

SEQ ID NO: 127542 - protein, 11 aa, Homo Sapiens
TPTSADKLRAA

SEQ ID NO: 127543 - protein, 11 aa, Homo Sapiens
TPWPRGRLLTA

SEQ ID NO: 127544 - protein, 11 aa, Homo Sapiens
TPYQSKWTICA

SEQ ID NO: 127545 - protein, 11 aa, Homo Sapiens
TVSPVLPLTSA

SEQ ID NO: 127546 - protein, 11 aa, Homo Sapiens
VPAGGAVAVSA

SEQ ID NO: 127547 - protein, 11 aa, Homo Sapiens
VPDSSGPERIL

SEQ ID NO: 127548 - protein, 11 aa, Homo Sapiens
VPIPNSPFKVA

SEQ ID NO: 127549 - protein, 11 aa, Homo Sapiens
VPKPIGGVVVF

SEQ ID NO: 127550 - protein, 11 aa, Homo Sapiens
VPNKFLVTAEI

SEQ ID NO: 127551 - protein, 11 aa, Homo Sapiens
VPSPVLCGVSF

SEQ ID NO: 127552 - protein, 11 aa, Homo Sapiens
VPTNIIAAKAA

SEQ ID NO: 127553 - protein, 11 aa, Homo Sapiens
VPVSLESKKAA

SEQ ID NO: 127554 - protein, 11 aa, Homo Sapiens
VPVVVVPEGSA

SEQ ID NO: 127555 - protein, 11 aa, Homo Sapiens
VPWMPPGKSSA

SEQ ID NO: 127556 - protein, 11 aa, Homo Sapiens
VPYPLPKIDLI

SEQ ID NO: 127557 - protein, 11 aa, Homo Sapiens
YPAAVPQALSA

SEQ ID NO: 127558 - protein, 8 aa, Homo Sapiens
AKNWAPGE

SEQ ID NO: 127559 - protein, 8 aa, Homo Sapiens
APASLTSA

SEQ ID NO: 127560 - protein, 8 aa, Homo Sapiens
APFLLNAV

SEQ ID NO: 127561 - protein, 8 aa, Homo Sapiens
APGVLPSA

SEQ ID NO: 127562 - protein, 8 aa, Homo Sapiens
APRPAPVA

SEQ ID NO: 127563 - protein, 8 aa, Homo Sapiens
APSSILQR

SEQ ID NO: 127564 - protein, 8 aa, Homo Sapiens
APTAIKAA

SEQ ID NO: 127565 - protein, 8 aa, Homo Sapiens
APTAITEA

SEQ ID NO: 127566 - protein, 8 aa, Homo Sapiens
APTPAAPA

SEQ ID NO: 127567 - protein, 8 aa, Homo Sapiens
APVAVWAA

SEQ ID NO: 127568 - protein, 8 aa, Homo Sapiens
APWGGPAA

SEQ ID NO: 127569 - protein, 8 aa, Homo Sapiens
APWPIVGL

SEQ ID NO: 127570 - protein, 8 aa, Homo Sapiens
FPVCLLAS

SEQ ID NO: 127571 - protein, 8 aa, Homo Sapiens
GVQPAAAA

SEQ ID NO: 127572 - protein, 8 aa, Homo Sapiens
HPASLFTA

SEQ ID NO: 127573 - protein, 8 aa, Homo Sapiens
HPFYTRAA

SEQ ID NO: 127574 - protein, 8 aa, Homo Sapiens
HPHLVAEA

SEQ ID NO: 127575 - protein, 8 aa, Homo Sapiens
HPTSIVKA

SEQ ID NO: 127576 - protein, 8 aa, Homo Sapiens
HPYLFPVA

SEQ ID NO: 127577 - protein, 8 aa, Homo Sapiens
IFFNVHSA

SEQ ID NO: 127578 - protein, 8 aa, Homo Sapiens
IPEPLAPA

SEQ ID NO: 127579 - protein, 8 aa, Homo Sapiens
IPEPLPAA

SEQ ID NO: 127580 - protein, 8 aa, Homo Sapiens
IPHSLPGA

SEQ ID NO: 127581 - protein, 8 aa, Homo Sapiens
IPQVMAIA

SEQ ID NO: 127582 - protein, 8 aa, Homo Sapiens
IPTPIVGV

SEQ ID NO: 127583 - protein, 8 aa, Homo Sapiens
IPTTIYKA

SEQ ID NO: 127584 - protein, 8 aa, Homo Sapiens
IPYKIEAV

SEQ ID NO: 127585 - protein, 8 aa, Homo Sapiens
KPQNMPKA

SEQ ID NO: 127586 - protein, 8 aa, Homo Sapiens
KPTALPSA

SEQ ID NO: 127587 - protein, 8 aa, Homo Sapiens
LPHQLPEA

SEQ ID NO: 127588 - protein, 8 aa, Homo Sapiens
LPMLQTVA

SEQ ID NO: 127589 - protein, 8 aa, Homo Sapiens
LPTTICHA

SEQ ID NO: 127590 - protein, 8 aa, Homo Sapiens
LPVRLATA

SEQ ID NO: 127591 - protein, 8 aa, Homo Sapiens
LQQAKDEI

SEQ ID NO: 127592 - protein, 8 aa, Homo Sapiens
MPIYVTGI

SEQ ID NO: 127593 - protein, 8 aa, Homo Sapiens
MPQPVPTA

SEQ ID NO: 127594 - protein, 8 aa, Homo Sapiens
MPTTLEGA

SEQ ID NO: 127595 - protein, 8 aa, Homo Sapiens
NPIAQPLA

SEQ ID NO: 127596 - protein, 8 aa, Homo Sapiens
PAKKITAA

SEQ ID NO: 127597 - protein, 8 aa, Homo Sapiens
PYLFPVAA

SEQ ID NO: 127598 - protein, 8 aa, Homo Sapiens
QPTETPVA

SEQ ID NO: 127599 - protein, 8 aa, Homo Sapiens
QPTPIQKA

SEQ ID NO: 127600 - protein, 8 aa, Homo Sapiens
QPYRFPQA

SEQ ID NO: 127601 - protein, 8 aa, Homo Sapiens
RPFKGEVV

SEQ ID NO: 127602 - protein, 8 aa, Homo Sapiens
RPHNLPVV

SEQ ID NO: 127603 - protein, 8 aa, Homo Sapiens
RPTCIVRA

SEQ ID NO: 127604 - protein, 8 aa, Homo Sapiens
RPVKIRKI

SEQ ID NO: 127605 - protein, 8 aa, Homo Sapiens
RPVKLFRV

SEQ ID NO: 127606 - protein, 8 aa, Homo Sapiens
RPVLTSVA

SEQ ID NO: 127607 - protein, 8 aa, Homo Sapiens
RPWLRPAA

SEQ ID NO: 127608 - protein, 8 aa, Homo Sapiens
RPWYIQGA

SEQ ID NO: 127609 - protein, 8 aa, Homo Sapiens
SPAKLQAA

SEQ ID NO: 127610 - protein, 8 aa, Homo Sapiens
SPALLRAE

SEQ ID NO: 127611 - protein, 8 aa, Homo Sapiens
SPALLREA

SEQ ID NO: 127612 - protein, 8 aa, Homo Sapiens
SPCLGPVA

SEQ ID NO: 127613 - protein, 8 aa, Homo Sapiens
SPFPLEAV

SEQ ID NO: 127614 - protein, 8 aa, Homo Sapiens
SPILVATA

SEQ ID NO: 127615 - protein, 8 aa, Homo Sapiens
SPLNTHAA

SEQ ID NO: 127616 - protein, 8 aa, Homo Sapiens
SPTFQHAV

SEQ ID NO: 127617 - protein, 8 aa, Homo Sapiens
SPVLFQEA

SEQ ID NO: 127618 - protein, 8 aa, Homo Sapiens
SPVPVPRA

SEQ ID NO: 127619 - protein, 8 aa, Homo Sapiens
TPTPVPVV

SEQ ID NO: 127620 - protein, 8 aa, Homo Sapiens
VPAGGAVA

SEQ ID NO: 127621 - protein, 8 aa, Homo Sapiens
VPFSIPAA

SEQ ID NO: 127622 - protein, 8 aa, Homo Sapiens
VPLIAIMA

SEQ ID NO: 127623 - protein, 8 aa, Homo Sapiens
VPNYLPSV

SEQ ID NO: 127624 - protein, 8 aa, Homo Sapiens
VPTNIIAA

SEQ ID NO: 127625 - protein, 8 aa, Homo Sapiens
VPVETPEA

SEQ ID NO: 127626 - protein, 8 aa, Homo Sapiens
VPVGILSA

SEQ ID NO: 127627 - protein, 8 aa, Homo Sapiens
VPWGGAAA

SEQ ID NO: 127628 - protein, 8 aa, Homo Sapiens
VTDTNVIL

SEQ ID NO: 127629 - protein, 8 aa, Homo Sapiens
YPAAVPQA

SEQ ID NO: 127630 - protein, 8 aa, Homo Sapiens
YPASLPDA

SEQ ID NO: 127631 - protein, 8 aa, Homo Sapiens
YPIALTRA

SEQ ID NO: 127632 - protein, 8 aa, Homo Sapiens
YPVLLDGV

SEQ ID NO: 127633 - protein, 9 aa, Homo Sapiens
AAFSHPQAA

SEQ ID NO: 127634 - protein, 9 aa, Homo Sapiens
AAGPPLVAA

SEQ ID NO: 127635 - protein, 9 aa, Homo Sapiens
AAGPVGMAA

SEQ ID NO: 127636 - protein, 9 aa, Homo Sapiens
AAMNGHVPA

SEQ ID NO: 127637 - protein, 9 aa, Homo Sapiens
AGPRLCSPA

SEQ ID NO: 127638 - protein, 9 aa, Homo Sapiens
APAAATVAV

SEQ ID NO: 127639 - protein, 9 aa, Homo Sapiens
APAAGMNAA

SEQ ID NO: 127640 - protein, 9 aa, Homo Sapiens
APAALFLAA

SEQ ID NO: 127641 - protein, 9 aa, Homo Sapiens
APAEPGWKA

SEQ ID NO: 127642 - protein, 9 aa, Homo Sapiens
APAEVQITA

SEQ ID NO: 127643 - protein, 9 aa, Homo Sapiens
APAGVFGVA

SEQ ID NO: 127644 - protein, 9 aa, Homo Sapiens
APALALPVA

SEQ ID NO: 127645 - protein, 9 aa, Homo Sapiens
APALLLIPA

SEQ ID NO: 127646 - protein, 9 aa, Homo Sapiens
APALPAPAA

SEQ ID NO: 127647 - protein, 9 aa, Homo Sapiens
APAPAAHVA

SEQ ID NO: 127648 - protein, 9 aa, Homo Sapiens
APAPPKAEA

SEQ ID NO: 127649 - protein, 9 aa, Homo Sapiens
APAPPPAEA

SEQ ID NO: 127650 - protein, 9 aa, Homo Sapiens
APAPPVADA

SEQ ID NO: 127651 - protein, 9 aa, Homo Sapiens
APAPPVYEA

SEQ ID NO: 127652 - protein, 9 aa, Homo Sapiens
APAPQGCAV

SEQ ID NO: 127653 - protein, 9 aa, Homo Sapiens
APAPSLFPA

SEQ ID NO: 127654 - protein, 9 aa, Homo Sapiens
APAPTPVSA

SEQ ID NO: 127655 - protein, 9 aa, Homo Sapiens
APAPVIISS

SEQ ID NO: 127656 - protein, 9 aa, Homo Sapiens
APAPVPVLA

SEQ ID NO: 127657 - protein, 9 aa, Homo Sapiens
APAPVVEAV

SEQ ID NO: 127658 - protein, 9 aa, Homo Sapiens
APARAVSAV

SEQ ID NO: 127659 - protein, 9 aa, Homo Sapiens
APARPGPAA

SEQ ID NO: 127660 - protein, 9 aa, Homo Sapiens
APARPSVPP

SEQ ID NO: 127661 - protein, 9 aa, Homo Sapiens
APASVPAQA

SEQ ID NO: 127662 - protein, 9 aa, Homo Sapiens
APCKQRISV

SEQ ID NO: 127663 - protein, 9 aa, Homo Sapiens
APCTAIREV

SEQ ID NO: 127664 - protein, 9 aa, Homo Sapiens
APDEKYVAA

SEQ ID NO: 127665 - protein, 9 aa, Homo Sapiens
APELQGVEV

SEQ ID NO: 127666 - protein, 9 aa, Homo Sapiens
APFDSRFPN

SEQ ID NO: 127667 - protein, 9 aa, Homo Sapiens
APFEPLASG

SEQ ID NO: 127668 - protein, 9 aa, Homo Sapiens
APFGKISDA

SEQ ID NO: 127669 - protein, 9 aa, Homo Sapiens
APFGRISDA

SEQ ID NO: 127670 - protein, 9 aa, Homo Sapiens
APFPHGDSA

SEQ ID NO: 127671 - protein, 9 aa, Homo Sapiens
APFPKTQIA

SEQ ID NO: 127672 - protein, 9 aa, Homo Sapiens
APFQGLLQA

SEQ ID NO: 127673 - protein, 9 aa, Homo Sapiens
APFQSMQTV

SEQ ID NO: 127674 - protein, 9 aa, Homo Sapiens
APGGEFREA

SEQ ID NO: 127675 - protein, 9 aa, Homo Sapiens
APGGWLQVA

SEQ ID NO: 127676 - protein, 9 aa, Homo Sapiens
APGLPTARA

SEQ ID NO: 127677 - protein, 9 aa, Homo Sapiens
APGNPVLAV

SEQ ID NO: 127678 - protein, 9 aa, Homo Sapiens
APGPATREA

SEQ ID NO: 127679 - protein, 9 aa, Homo Sapiens
APGPGPASA

SEQ ID NO: 127680 - protein, 9 aa, Homo Sapiens
APGPGTPCA

SEQ ID NO: 127681 - protein, 9 aa, Homo Sapiens
APGPSGQSV

SEQ ID NO: 127682 - protein, 9 aa, Homo Sapiens
APGYSYTAA

SEQ ID NO: 127683 - protein, 9 aa, Homo Sapiens
APHALLQAV

SEQ ID NO: 127684 - protein, 9 aa, Homo Sapiens
APHAPGPPA

SEQ ID NO: 127685 - protein, 9 aa, Homo Sapiens
APHEILIQI

SEQ ID NO: 127686 - protein, 9 aa, Homo Sapiens
APHLEKQPA

SEQ ID NO: 127687 - protein, 9 aa, Homo Sapiens
APHLTRAYA

SEQ ID NO: 127688 - protein, 9 aa, Homo Sapiens
APHPFPHPA

SEQ ID NO: 127689 - protein, 9 aa, Homo Sapiens
APHPGLSEA

SEQ ID NO: 127690 - protein, 9 aa, Homo Sapiens
APHPPLSVV

SEQ ID NO: 127691 - protein, 9 aa, Homo Sapiens
APHPPVADV

SEQ ID NO: 127692 - protein, 9 aa, Homo Sapiens
APHVPATGA

SEQ ID NO: 127693 - protein, 9 aa, Homo Sapiens
APIEETAAA

SEQ ID NO: 127694 - protein, 9 aa, Homo Sapiens
APIHKLEEA

SEQ ID NO: 127695 - protein, 9 aa, Homo Sapiens
APILSPEAA

SEQ ID NO: 127696 - protein, 9 aa, Homo Sapiens
APILVPHTA

SEQ ID NO: 127697 - protein, 9 aa, Homo Sapiens
APIQSEPRV

SEQ ID NO: 127698 - protein, 9 aa, Homo Sapiens
APITGQVSA

SEQ ID NO: 127699 - protein, 9 aa, Homo Sapiens
APIWLEHAA

SEQ ID NO: 127700 - protein, 9 aa, Homo Sapiens
APKAGPGVV

SEQ ID NO: 127701 - protein, 9 aa, Homo Sapiens
APKLGSNIA

SEQ ID NO: 127702 - protein, 9 aa, Homo Sapiens
APKPTSWAA

SEQ ID NO: 127703 - protein, 9 aa, Homo Sapiens
APLDAYFQV

SEQ ID NO: 127704 - protein, 9 aa, Homo Sapiens
APMPPIIHA

SEQ ID NO: 127705 - protein, 9 aa, Homo Sapiens
APMPTASTA

SEQ ID NO: 127706 - protein, 9 aa, Homo Sapiens
APNEGFCSA

SEQ ID NO: 127707 - protein, 9 aa, Homo Sapiens
APNLQNQQV

SEQ ID NO: 127708 - protein, 9 aa, Homo Sapiens
APNPVVFVA

SEQ ID NO: 127709 - protein, 9 aa, Homo Sapiens
APQPLKESA

SEQ ID NO: 127710 - protein, 9 aa, Homo Sapiens
APQSIPRSA

SEQ ID NO: 127711 - protein, 9 aa, Homo Sapiens
APQSLGSSA

SEQ ID NO: 127712 - protein, 9 aa, Homo Sapiens
APQSSAVAA

SEQ ID NO: 127713 - protein, 9 aa, Homo Sapiens
APRERLIDA

SEQ ID NO: 127714 - protein, 9 aa, Homo Sapiens
APRFGGSRA

SEQ ID NO: 127715 - protein, 9 aa, Homo Sapiens
APRIALHTA

SEQ ID NO: 127716 - protein, 9 aa, Homo Sapiens
APRLQSEVA

SEQ ID NO: 127717 - protein, 9 aa, Homo Sapiens
APRPPPKPM

SEQ ID NO: 127718 - protein, 9 aa, Homo Sapiens
APRPPVSAA

SEQ ID NO: 127719 - protein, 9 aa, Homo Sapiens
APRPTIINA

SEQ ID NO: 127720 - protein, 9 aa, Homo Sapiens
APRQPGLMA

SEQ ID NO: 127721 - protein, 9 aa, Homo Sapiens
APRSFHPPA

SEQ ID NO: 127722 - protein, 9 aa, Homo Sapiens
APRTVALTA

SEQ ID NO: 127723 - protein, 9 aa, Homo Sapiens
APSLNATTV

SEQ ID NO: 127724 - protein, 9 aa, Homo Sapiens
APSLPKQAA

SEQ ID NO: 127725 - protein, 9 aa, Homo Sapiens
APSPPPAPV

SEQ ID NO: 127726 - protein, 9 aa, Homo Sapiens
APSPVQHQA

SEQ ID NO: 127727 - protein, 9 aa, Homo Sapiens
APSRVVVVA

SEQ ID NO: 127728 - protein, 9 aa, Homo Sapiens
APSSLVAAA

SEQ ID NO: 127729 - protein, 9 aa, Homo Sapiens
APSTIIFHL

SEQ ID NO: 127730 - protein, 9 aa, Homo Sapiens
APSVGIKAA

SEQ ID NO: 127731 - protein, 9 aa, Homo Sapiens
APTAIKAAA

SEQ ID NO: 127732 - protein, 9 aa, Homo Sapiens
APTEMAKAA

SEQ ID NO: 127733 - protein, 9 aa, Homo Sapiens
APTGDLPRA

SEQ ID NO: 127734 - protein, 9 aa, Homo Sapiens
APTKPQSPA

SEQ ID NO: 127735 - protein, 9 aa, Homo Sapiens
APTLGLLPA

SEQ ID NO: 127736 - protein, 9 aa, Homo Sapiens
APTLPGSAA

SEQ ID NO: 127737 - protein, 9 aa, Homo Sapiens
APTPPTLVA

SEQ ID NO: 127738 - protein, 9 aa, Homo Sapiens
APVAEVPTA

SEQ ID NO: 127739 - protein, 9 aa, Homo Sapiens
APVGSVVSV

SEQ ID NO: 127740 - protein, 9 aa, Homo Sapiens
APVLFAKAA

SEQ ID NO: 127741 - protein, 9 aa, Homo Sapiens
APVLPHTAV

SEQ ID NO: 127742 - protein, 9 aa, Homo Sapiens
APVNVTTEV

SEQ ID NO: 127743 - protein, 9 aa, Homo Sapiens
APVPGIPTA

SEQ ID NO: 127744 - protein, 9 aa, Homo Sapiens
APVPTAPAA

SEQ ID NO: 127745 - protein, 9 aa, Homo Sapiens
APVTGMVSG

SEQ ID NO: 127746 - protein, 9 aa, Homo Sapiens
APVVPAVST

SEQ ID NO: 127747 - protein, 9 aa, Homo Sapiens
APVWYLVAA

SEQ ID NO: 127748 - protein, 9 aa, Homo Sapiens
APVYGRDLL

SEQ ID NO: 127749 - protein, 9 aa, Homo Sapiens
APWGSPTAA

SEQ ID NO: 127750 - protein, 9 aa, Homo Sapiens
APWSGRFYS

SEQ ID NO: 127751 - protein, 9 aa, Homo Sapiens
APYAVGREA

SEQ ID NO: 127752 - protein, 9 aa, Homo Sapiens
APYPGFLSV

SEQ ID NO: 127753 - protein, 9 aa, Homo Sapiens
APYTHFTQA

SEQ ID NO: 127754 - protein, 9 aa, Homo Sapiens
APYVTFPVA

SEQ ID NO: 127755 - protein, 9 aa, Homo Sapiens
ASAPPGPPA

SEQ ID NO: 127756 - protein, 9 aa, Homo Sapiens
ASFHNGVAA

SEQ ID NO: 127757 - protein, 9 aa, Homo Sapiens
ATVLQAVSA

SEQ ID NO: 127758 - protein, 9 aa, Homo Sapiens
AVAMPIPAA

SEQ ID NO: 127759 - protein, 9 aa, Homo Sapiens
AVFFQSHSA

SEQ ID NO: 127760 - protein, 9 aa, Homo Sapiens
AVFHLEHAA

SEQ ID NO: 127761 - protein, 9 aa, Homo Sapiens
AVPRPGAPA

SEQ ID NO: 127762 - protein, 9 aa, Homo Sapiens
AVTPLPVAA

SEQ ID NO: 127763 - protein, 9 aa, Homo Sapiens
DPHSGHFVA

SEQ ID NO: 127764 - protein, 9 aa, Homo Sapiens
DPPSNPVAA

SEQ ID NO: 127765 - protein, 9 aa, Homo Sapiens
ESLPRVVKR

SEQ ID NO: 127766 - protein, 9 aa, Homo Sapiens
ETILRTNKR

SEQ ID NO: 127767 - protein, 9 aa, Homo Sapiens
EVRKLIIRR

SEQ ID NO: 127768 - protein, 9 aa, Homo Sapiens
EYLEKIKQR

SEQ ID NO: 127769 - protein, 9 aa, Homo Sapiens
EYMEKIKQR

SEQ ID NO: 127770 - protein, 9 aa, Homo Sapiens
FPAPILRAV

SEQ ID NO: 127771 - protein, 9 aa, Homo Sapiens
FPFAPPAAA

SEQ ID NO: 127772 - protein, 9 aa, Homo Sapiens
FPFFNPIQT

SEQ ID NO: 127773 - protein, 9 aa, Homo Sapiens
FPGEQFKPA

SEQ ID NO: 127774 - protein, 9 aa, Homo Sapiens
FPHLQDAQV

SEQ ID NO: 127775 - protein, 9 aa, Homo Sapiens
FPHLRVLEA

SEQ ID NO: 127776 - protein, 9 aa, Homo Sapiens
FPIHAITGV

SEQ ID NO: 127777 - protein, 9 aa, Homo Sapiens
FPIKQPITV

SEQ ID NO: 127778 - protein, 9 aa, Homo Sapiens
FPKHVIECA

SEQ ID NO: 127779 - protein, 9 aa, Homo Sapiens
FPMSPVTSV

SEQ ID NO: 127780 - protein, 9 aa, Homo Sapiens
FPRPVTVEP

SEQ ID NO: 127781 - protein, 9 aa, Homo Sapiens
FPRRAFSEA

SEQ ID NO: 127782 - protein, 9 aa, Homo Sapiens
FPSAAATAA

SEQ ID NO: 127783 - protein, 9 aa, Homo Sapiens
FPTHPYFSA

SEQ ID NO: 127784 - protein, 9 aa, Homo Sapiens
FPTTCLERA

SEQ ID NO: 127785 - protein, 9 aa, Homo Sapiens
FPVGKGLAA

SEQ ID NO: 127786 - protein, 9 aa, Homo Sapiens
FPVGVFVVA

SEQ ID NO: 127787 - protein, 9 aa, Homo Sapiens
FPVRLLVAA

SEQ ID NO: 127788 - protein, 9 aa, Homo Sapiens
FPWPQPLST

SEQ ID NO: 127789 - protein, 9 aa, Homo Sapiens
FPYPVGVHA

SEQ ID NO: 127790 - protein, 9 aa, Homo Sapiens
GGPGGVGGL

SEQ ID NO: 127791 - protein, 9 aa, Homo Sapiens
GLINQIQAS

SEQ ID NO: 127792 - protein, 9 aa, Homo Sapiens
GPAAAFTAA

SEQ ID NO: 127793 - protein, 9 aa, Homo Sapiens
GPFAPVLSA

SEQ ID NO: 127794 - protein, 9 aa, Homo Sapiens
GPFDEFQIA

SEQ ID NO: 127795 - protein, 9 aa, Homo Sapiens
GPFGQIFRP

SEQ ID NO: 127796 - protein, 9 aa, Homo Sapiens
GPFSQFIKA

SEQ ID NO: 127797 - protein, 9 aa, Homo Sapiens
GPHANPVAV

SEQ ID NO: 127798 - protein, 9 aa, Homo Sapiens
GPLRSVWVA

SEQ ID NO: 127799 - protein, 9 aa, Homo Sapiens
GPRLSAEAA

SEQ ID NO: 127800 - protein, 9 aa, Homo Sapiens
GPRPPPPPP

SEQ ID NO: 127801 - protein, 9 aa, Homo Sapiens
GPSGCLVPA

SEQ ID NO: 127802 - protein, 9 aa, Homo Sapiens
GPTLQGKAV

SEQ ID NO: 127803 - protein, 9 aa, Homo Sapiens
GPTNAIFKA

SEQ ID NO: 127804 - protein, 9 aa, Homo Sapiens
HPAAFPLPV

SEQ ID NO: 127805 - protein, 9 aa, Homo Sapiens
HPARLTIEA

SEQ ID NO: 127806 - protein, 9 aa, Homo Sapiens
HPHLRKVSV

SEQ ID NO: 127807 - protein, 9 aa, Homo Sapiens
HPHPFLNSV

SEQ ID NO: 127808 - protein, 9 aa, Homo Sapiens
HPIDDLQSA

SEQ ID NO: 127809 - protein, 9 aa, Homo Sapiens
HPIHIIPAS

SEQ ID NO: 127810 - protein, 9 aa, Homo Sapiens
HPITAKAIA

SEQ ID NO: 127811 - protein, 9 aa, Homo Sapiens
HPKKPGVGV

SEQ ID NO: 127812 - protein, 9 aa, Homo Sapiens
HPKPEGLAA

SEQ ID NO: 127813 - protein, 9 aa, Homo Sapiens
HPLFQAKSA

SEQ ID NO: 127814 - protein, 9 aa, Homo Sapiens
HPLPIWTPA

SEQ ID NO: 127815 - protein, 9 aa, Homo Sapiens
HPLPPTPSV

SEQ ID NO: 127816 - protein, 9 aa, Homo Sapiens
HPMPHPPQA

SEQ ID NO: 127817 - protein, 9 aa, Homo Sapiens
HPMPVLPKA

SEQ ID NO: 127818 - protein, 9 aa, Homo Sapiens
HPNQQHVVA

SEQ ID NO: 127819 - protein, 9 aa, Homo Sapiens
HPNSVHICA

SEQ ID NO: 127820 - protein, 9 aa, Homo Sapiens
HPQFLKNQV

SEQ ID NO: 127821 - protein, 9 aa, Homo Sapiens
HPSPVVLKV

SEQ ID NO: 127822 - protein, 9 aa, Homo Sapiens
HPTWALKEA

SEQ ID NO: 127823 - protein, 9 aa, Homo Sapiens
HPVAKILHA

SEQ ID NO: 127824 - protein, 9 aa, Homo Sapiens
HPVEPVTSV

SEQ ID NO: 127825 - protein, 9 aa, Homo Sapiens
HPVHPFLAV

SEQ ID NO: 127826 - protein, 9 aa, Homo Sapiens
HPVHYDTSA

SEQ ID NO: 127827 - protein, 9 aa, Homo Sapiens
HPWLFIEEA

SEQ ID NO: 127828 - protein, 9 aa, Homo Sapiens
HPWVTGKAA

SEQ ID NO: 127829 - protein, 9 aa, Homo Sapiens
HPYKHSFRA

SEQ ID NO: 127830 - protein, 9 aa, Homo Sapiens
HPYLFPVAA

SEQ ID NO: 127831 - protein, 9 aa, Homo Sapiens
HPYLPINSA

SEQ ID NO: 127832 - protein, 9 aa, Homo Sapiens
HPYPPGPGV

SEQ ID NO: 127833 - protein, 9 aa, Homo Sapiens
HPYQRIVTA

SEQ ID NO: 127834 - protein, 9 aa, Homo Sapiens
IAHTPGVAA

SEQ ID NO: 127835 - protein, 9 aa, Homo Sapiens
IARPACLAA

SEQ ID NO: 127836 - protein, 9 aa, Homo Sapiens
IINEPTAAA

SEQ ID NO: 127837 - protein, 9 aa, Homo Sapiens
IIRDEGISA

SEQ ID NO: 127838 - protein, 9 aa, Homo Sapiens
IPAALPVAA

SEQ ID NO: 127839 - protein, 9 aa, Homo Sapiens
IPASGDYVA

SEQ ID NO: 127840 - protein, 9 aa, Homo Sapiens
IPASKLVEA

SEQ ID NO: 127841 - protein, 9 aa, Homo Sapiens
IPATPGIGA

SEQ ID NO: 127842 - protein, 9 aa, Homo Sapiens
IPFGIFSRA

SEQ ID NO: 127843 - protein, 9 aa, Homo Sapiens
IPFGITEEA

SEQ ID NO: 127844 - protein, 9 aa, Homo Sapiens
IPFGTMVAV

SEQ ID NO: 127845 - protein, 9 aa, Homo Sapiens
IPFSKPVKV

SEQ ID NO: 127846 - protein, 9 aa, Homo Sapiens
IPFWRNTAV

SEQ ID NO: 127847 - protein, 9 aa, Homo Sapiens
IPFYGILGA

SEQ ID NO: 127848 - protein, 9 aa, Homo Sapiens
IPFYLQPHA

SEQ ID NO: 127849 - protein, 9 aa, Homo Sapiens
IPHKKFTFA

SEQ ID NO: 127850 - protein, 9 aa, Homo Sapiens
IPHLLGDVV

SEQ ID NO: 127851 - protein, 9 aa, Homo Sapiens
IPHLVTHDA

SEQ ID NO: 127852 - protein, 9 aa, Homo Sapiens
IPHPLIMGV

SEQ ID NO: 127853 - protein, 9 aa, Homo Sapiens
IPIEVIPMA

SEQ ID NO: 127854 - protein, 9 aa, Homo Sapiens
IPIKKSDPV

SEQ ID NO: 127855 - protein, 9 aa, Homo Sapiens
IPISNILMV

SEQ ID NO: 127856 - protein, 9 aa, Homo Sapiens
IPISPISPA

SEQ ID NO: 127857 - protein, 9 aa, Homo Sapiens
IPITVLQPA

SEQ ID NO: 127858 - protein, 9 aa, Homo Sapiens
IPKDKSWKA

SEQ ID NO: 127859 - protein, 9 aa, Homo Sapiens
IPKHINPVA

SEQ ID NO: 127860 - protein, 9 aa, Homo Sapiens
IPKKEIHTV

SEQ ID NO: 127861 - protein, 9 aa, Homo Sapiens
IPKKLMHQA

SEQ ID NO: 127862 - protein, 9 aa, Homo Sapiens
IPKPEQLSA

SEQ ID NO: 127863 - protein, 9 aa, Homo Sapiens
IPKTINRAA

SEQ ID NO: 127864 - protein, 9 aa, Homo Sapiens
IPKYPTNPP

SEQ ID NO: 127865 - protein, 9 aa, Homo Sapiens
IPLGFGVAA

SEQ ID NO: 127866 - protein, 9 aa, Homo Sapiens
IPLPRPQSA

SEQ ID NO: 127867 - protein, 9 aa, Homo Sapiens
IPLQDLVAA

SEQ ID NO: 127868 - protein, 9 aa, Homo Sapiens
IPMELVNEV

SEQ ID NO: 127869 - protein, 9 aa, Homo Sapiens
IPMRDFVCA

SEQ ID NO: 127870 - protein, 9 aa, Homo Sapiens
IPNEIIHAL

SEQ ID NO: 127871 - protein, 9 aa, Homo Sapiens
IPNNVKTAV

SEQ ID NO: 127872 - protein, 9 aa, Homo Sapiens
IPQEAYNAV

SEQ ID NO: 127873 - protein, 9 aa, Homo Sapiens
IPQKPSQPA

SEQ ID NO: 127874 - protein, 9 aa, Homo Sapiens
IPQLMKEEA

SEQ ID NO: 127875 - protein, 9 aa, Homo Sapiens
IPQLNSKAV

SEQ ID NO: 127876 - protein, 9 aa, Homo Sapiens
IPQQVFQEV

SEQ ID NO: 127877 - protein, 9 aa, Homo Sapiens
IPQSAVDTA

SEQ ID NO: 127878 - protein, 9 aa, Homo Sapiens
IPQSIIECV

SEQ ID NO: 127879 - protein, 9 aa, Homo Sapiens
IPRNQLQSV

SEQ ID NO: 127880 - protein, 9 aa, Homo Sapiens
IPRNTVVPT

SEQ ID NO: 127881 - protein, 9 aa, Homo Sapiens
IPRQLGEVA

SEQ ID NO: 127882 - protein, 9 aa, Homo Sapiens
IPRSFLQEA

SEQ ID NO: 127883 - protein, 9 aa, Homo Sapiens
IPRSFMMEV

SEQ ID NO: 127884 - protein, 9 aa, Homo Sapiens
IPSGTILKA

SEQ ID NO: 127885 - protein, 9 aa, Homo Sapiens
IPSSVIHPA

SEQ ID NO: 127886 - protein, 9 aa, Homo Sapiens
IPTENSMTA

SEQ ID NO: 127887 - protein, 9 aa, Homo Sapiens
IPTEVRSKA

SEQ ID NO: 127888 - protein, 9 aa, Homo Sapiens
IPVDFKYIA

SEQ ID NO: 127889 - protein, 9 aa, Homo Sapiens
IPVDSAVAV

SEQ ID NO: 127890 - protein, 9 aa, Homo Sapiens
IPVESIEEV

SEQ ID NO: 127891 - protein, 9 aa, Homo Sapiens
IPVKSSPQA

SEQ ID NO: 127892 - protein, 9 aa, Homo Sapiens
IPVNGGLAA

SEQ ID NO: 127893 - protein, 9 aa, Homo Sapiens
IPWGISATA

SEQ ID NO: 127894 - protein, 9 aa, Homo Sapiens
IPWLQYNEV

SEQ ID NO: 127895 - protein, 9 aa, Homo Sapiens
IPWSIPLEA

SEQ ID NO: 127896 - protein, 9 aa, Homo Sapiens
IPYGMRFIA

SEQ ID NO: 127897 - protein, 9 aa, Homo Sapiens
IPYHIVNIV

SEQ ID NO: 127898 - protein, 9 aa, Homo Sapiens
IPYLSKHRA

SEQ ID NO: 127899 - protein, 9 aa, Homo Sapiens
IPYQPMPAS

SEQ ID NO: 127900 - protein, 9 aa, Homo Sapiens
IPYQSPVSS

SEQ ID NO: 127901 - protein, 9 aa, Homo Sapiens
IPYRPKPSS

SEQ ID NO: 127902 - protein, 9 aa, Homo Sapiens
IPYRVIHNA

SEQ ID NO: 127903 - protein, 9 aa, Homo Sapiens
ITAPPGTAA

SEQ ID NO: 127904 - protein, 9 aa, Homo Sapiens
IVKPVKVSA

SEQ ID NO: 127905 - protein, 9 aa, Homo Sapiens
IVNVPQPAA

SEQ ID NO: 127906 - protein, 9 aa, Homo Sapiens
IVRDRVTSA

SEQ ID NO: 127907 - protein, 9 aa, Homo Sapiens
IVREDLLSA

SEQ ID NO: 127908 - protein, 9 aa, Homo Sapiens
KAQLQQVEA

SEQ ID NO: 127909 - protein, 9 aa, Homo Sapiens
KPAEFTVDA

SEQ ID NO: 127910 - protein, 9 aa, Homo Sapiens
KPAKPLISV

SEQ ID NO: 127911 - protein, 9 aa, Homo Sapiens
KPAMPMQQA

SEQ ID NO: 127912 - protein, 9 aa, Homo Sapiens
KPANVFITA

SEQ ID NO: 127913 - protein, 9 aa, Homo Sapiens
KPAPPFNVT

SEQ ID NO: 127914 - protein, 9 aa, Homo Sapiens
KPAVPTVAS

SEQ ID NO: 127915 - protein, 9 aa, Homo Sapiens
KPEEQWWSA

SEQ ID NO: 127916 - protein, 9 aa, Homo Sapiens
KPFAYVSEA

SEQ ID NO: 127917 - protein, 9 aa, Homo Sapiens
KPFCAAAAA

SEQ ID NO: 127918 - protein, 9 aa, Homo Sapiens
KPFKEFVEA

SEQ ID NO: 127919 - protein, 9 aa, Homo Sapiens
KPFKYIVTC

SEQ ID NO: 127920 - protein, 9 aa, Homo Sapiens
KPFLLPVEA

SEQ ID NO: 127921 - protein, 9 aa, Homo Sapiens
KPFYQKREV

SEQ ID NO: 127922 - protein, 9 aa, Homo Sapiens
KPGSPYRSV

SEQ ID NO: 127923 - protein, 9 aa, Homo Sapiens
KPHAIIILP

SEQ ID NO: 127924 - protein, 9 aa, Homo Sapiens
KPHDIFEAN

SEQ ID NO: 127925 - protein, 9 aa, Homo Sapiens
KPHSGFHVA

SEQ ID NO: 127926 - protein, 9 aa, Homo Sapiens
KPHSQIPVS

SEQ ID NO: 127927 - protein, 9 aa, Homo Sapiens
KPIKFLVSV

SEQ ID NO: 127928 - protein, 9 aa, Homo Sapiens
KPKEPPKVP

SEQ ID NO: 127929 - protein, 9 aa, Homo Sapiens
KPKEPQPEV

SEQ ID NO: 127930 - protein, 9 aa, Homo Sapiens
KPKPIGKLA

SEQ ID NO: 127931 - protein, 9 aa, Homo Sapiens
KPKVPLKSA

SEQ ID NO: 127932 - protein, 9 aa, Homo Sapiens
KPLEKHYSV

SEQ ID NO: 127933 - protein, 9 aa, Homo Sapiens
KPLEPVSTV

SEQ ID NO: 127934 - protein, 9 aa, Homo Sapiens
KPLPPIQVA

SEQ ID NO: 127935 - protein, 9 aa, Homo Sapiens
KPLQPARPV

SEQ ID NO: 127936 - protein, 9 aa, Homo Sapiens
KPMEGWIAV

SEQ ID NO: 127937 - protein, 9 aa, Homo Sapiens
KPMFTQVCV

SEQ ID NO: 127938 - protein, 9 aa, Homo Sapiens
KPMKSVLVV

SEQ ID NO: 127939 - protein, 9 aa, Homo Sapiens
KPPPPPPAP

SEQ ID NO: 127940 - protein, 9 aa, Homo Sapiens
KPQATVVSA

SEQ ID NO: 127941 - protein, 9 aa, Homo Sapiens
KPQPSILQA

SEQ ID NO: 127942 - protein, 9 aa, Homo Sapiens
KPRPPLHLL

SEQ ID NO: 127943 - protein, 9 aa, Homo Sapiens
KPRPPPPPP

SEQ ID NO: 127944 - protein, 9 aa, Homo Sapiens
KPSESIYSA

SEQ ID NO: 127945 - protein, 9 aa, Homo Sapiens
KPTHFTVNA

SEQ ID NO: 127946 - protein, 9 aa, Homo Sapiens
KPTVQPWIA

SEQ ID NO: 127947 - protein, 9 aa, Homo Sapiens
KPVEVTESA

SEQ ID NO: 127948 - protein, 9 aa, Homo Sapiens
KPVLPHKVA

SEQ ID NO: 127949 - protein, 9 aa, Homo Sapiens
KPVLTQESA

SEQ ID NO: 127950 - protein, 9 aa, Homo Sapiens
KPYAHILSV

SEQ ID NO: 127951 - protein, 9 aa, Homo Sapiens
KPYCNEIHA

SEQ ID NO: 127952 - protein, 9 aa, Homo Sapiens
KPYESYIGA

SEQ ID NO: 127953 - protein, 9 aa, Homo Sapiens
KPYNVYITV

SEQ ID NO: 127954 - protein, 9 aa, Homo Sapiens
KPYPNSEAA

SEQ ID NO: 127955 - protein, 9 aa, Homo Sapiens
LAAARLAAA

SEQ ID NO: 127956 - protein, 9 aa, Homo Sapiens
LAGPLRPAA

SEQ ID NO: 127957 - protein, 9 aa, Homo Sapiens
LHPAPPNGL

SEQ ID NO: 127958 - protein, 9 aa, Homo Sapiens
LPAAKGFVA

SEQ ID NO: 127959 - protein, 9 aa, Homo Sapiens
LPAAMPITA

SEQ ID NO: 127960 - protein, 9 aa, Homo Sapiens
LPAEAVEAA

SEQ ID NO: 127961 - protein, 9 aa, Homo Sapiens
LPAEYLLSA

SEQ ID NO: 127962 - protein, 9 aa, Homo Sapiens
LPAGILPMV

SEQ ID NO: 127963 - protein, 9 aa, Homo Sapiens
LPAPAEVAA

SEQ ID NO: 127964 - protein, 9 aa, Homo Sapiens
LPAPPAVSA

SEQ ID NO: 127965 - protein, 9 aa, Homo Sapiens
LPAPPHIDV

SEQ ID NO: 127966 - protein, 9 aa, Homo Sapiens
LPASETPKA

SEQ ID NO: 127967 - protein, 9 aa, Homo Sapiens
LPCEVKVVA

SEQ ID NO: 127968 - protein, 9 aa, Homo Sapiens
LPCFNGRVV

SEQ ID NO: 127969 - protein, 9 aa, Homo Sapiens
LPCTVKCGI

SEQ ID NO: 127970 - protein, 9 aa, Homo Sapiens
LPDDVAISA

SEQ ID NO: 127971 - protein, 9 aa, Homo Sapiens
LPDLRPWTS

SEQ ID NO: 127972 - protein, 9 aa, Homo Sapiens
LPEEIREPA

SEQ ID NO: 127973 - protein, 9 aa, Homo Sapiens
LPEENREAA

SEQ ID NO: 127974 - protein, 9 aa, Homo Sapiens
LPELLGLEA

SEQ ID NO: 127975 - protein, 9 aa, Homo Sapiens
LPFDRFSEV

SEQ ID NO: 127976 - protein, 9 aa, Homo Sapiens
LPFGGVPTV

SEQ ID NO: 127977 - protein, 9 aa, Homo Sapiens
LPFPLPLFA

SEQ ID NO: 127978 - protein, 9 aa, Homo Sapiens
LPFRVIPLV

SEQ ID NO: 127979 - protein, 9 aa, Homo Sapiens
LPFSSMPTA

SEQ ID NO: 127980 - protein, 9 aa, Homo Sapiens
LPFVPPPAV

SEQ ID NO: 127981 - protein, 9 aa, Homo Sapiens
LPGELFHVV

SEQ ID NO: 127982 - protein, 9 aa, Homo Sapiens
LPGPLTPVA

SEQ ID NO: 127983 - protein, 9 aa, Homo Sapiens
LPHDLAVQA

SEQ ID NO: 127984 - protein, 9 aa, Homo Sapiens
LPHEILEMT

SEQ ID NO: 127985 - protein, 9 aa, Homo Sapiens
LPHGAISED

SEQ ID NO: 127986 - protein, 9 aa, Homo Sapiens
LPHGFTNMA

SEQ ID NO: 127987 - protein, 9 aa, Homo Sapiens
LPHHILADV

SEQ ID NO: 127988 - protein, 9 aa, Homo Sapiens
LPHHRVIEV

SEQ ID NO: 127989 - protein, 9 aa, Homo Sapiens
LPHKIHYAA

SEQ ID NO: 127990 - protein, 9 aa, Homo Sapiens
LPHKLRIKA

SEQ ID NO: 127991 - protein, 9 aa, Homo Sapiens
LPHPIIVSI

SEQ ID NO: 127992 - protein, 9 aa, Homo Sapiens
LPHPNRIQA

SEQ ID NO: 127993 - protein, 9 aa, Homo Sapiens
LPHPYAIAV

SEQ ID NO: 127994 - protein, 9 aa, Homo Sapiens
LPHSAGRYA

SEQ ID NO: 127995 - protein, 9 aa, Homo Sapiens
LPHSHDVSA

SEQ ID NO: 127996 - protein, 9 aa, Homo Sapiens
LPHSQLPQA

SEQ ID NO: 127997 - protein, 9 aa, Homo Sapiens
LPHSTAALA

SEQ ID NO: 127998 - protein, 9 aa, Homo Sapiens
LPIGTLPLA

SEQ ID NO: 127999 - protein, 9 aa, Homo Sapiens
LPKEKQPVA

SEQ ID NO: 128000 - protein, 9 aa, Homo Sapiens
LPKHLLHSV

SEQ ID NO: 128001 - protein, 9 aa, Homo Sapiens
LPKPHGIRA

SEQ ID NO: 128002 - protein, 9 aa, Homo Sapiens
LPKPPGRGV

SEQ ID NO: 128003 - protein, 9 aa, Homo Sapiens
LPLAVTKEA

SEQ ID NO: 128004 - protein, 9 aa, Homo Sapiens
LPLEVCNIV

SEQ ID NO: 128005 - protein, 9 aa, Homo Sapiens
LPLHPSWEA

SEQ ID NO: 128006 - protein, 9 aa, Homo Sapiens
LPLPYGVSA

SEQ ID NO: 128007 - protein, 9 aa, Homo Sapiens
LPLSLLKTA

SEQ ID NO: 128008 - protein, 9 aa, Homo Sapiens
LPLWVDKEA

SEQ ID NO: 128009 - protein, 9 aa, Homo Sapiens
LPMDYVQRV

SEQ ID NO: 128010 - protein, 9 aa, Homo Sapiens
LPNANYPSA

SEQ ID NO: 128011 - protein, 9 aa, Homo Sapiens
LPNAVITRI

SEQ ID NO: 128012 - protein, 9 aa, Homo Sapiens
LPNFLPYNV

SEQ ID NO: 128013 - protein, 9 aa, Homo Sapiens
LPNGPLLGT

SEQ ID NO: 128014 - protein, 9 aa, Homo Sapiens
LPNIQKVEV

SEQ ID NO: 128015 - protein, 9 aa, Homo Sapiens
LPNLQTVTV

SEQ ID NO: 128016 - protein, 9 aa, Homo Sapiens
LPNQPVEKA

SEQ ID NO: 128017 - protein, 9 aa, Homo Sapiens
LPQPAFIPA

SEQ ID NO: 128018 - protein, 9 aa, Homo Sapiens
LPQQPSRPS

SEQ ID NO: 128019 - protein, 9 aa, Homo Sapiens
LPRDVLTRA

SEQ ID NO: 128020 - protein, 9 aa, Homo Sapiens
LPRKPVAGA

SEQ ID NO: 128021 - protein, 9 aa, Homo Sapiens
LPRLIDMSA

SEQ ID NO: 128022 - protein, 9 aa, Homo Sapiens
LPRPPETTA

SEQ ID NO: 128023 - protein, 9 aa, Homo Sapiens
LPRPQGAAA

SEQ ID NO: 128024 - protein, 9 aa, Homo Sapiens
LPRPSAPSA

SEQ ID NO: 128025 - protein, 9 aa, Homo Sapiens
LPRPVPLVA

SEQ ID NO: 128026 - protein, 9 aa, Homo Sapiens
LPRRPLPPA

SEQ ID NO: 128027 - protein, 9 aa, Homo Sapiens
LPSDIAAEA

SEQ ID NO: 128028 - protein, 9 aa, Homo Sapiens
LPSDLTRAA

SEQ ID NO: 128029 - protein, 9 aa, Homo Sapiens
LPSELIVHI

SEQ ID NO: 128030 - protein, 9 aa, Homo Sapiens
LPSLSPLSA

SEQ ID NO: 128031 - protein, 9 aa, Homo Sapiens
LPSPPAVAV

SEQ ID NO: 128032 - protein, 9 aa, Homo Sapiens
LPSRFIESA

SEQ ID NO: 128033 - protein, 9 aa, Homo Sapiens
LPSVPLSCA

SEQ ID NO: 128034 - protein, 9 aa, Homo Sapiens
LPTESTKAV

SEQ ID NO: 128035 - protein, 9 aa, Homo Sapiens
LPTGVFQVA

SEQ ID NO: 128036 - protein, 9 aa, Homo Sapiens
LPTKDLLSA

SEQ ID NO: 128037 - protein, 9 aa, Homo Sapiens
LPTKPTQGA

SEQ ID NO: 128038 - protein, 9 aa, Homo Sapiens
LPTRIAYYA

SEQ ID NO: 128039 - protein, 9 aa, Homo Sapiens
LPTTMGVVA

SEQ ID NO: 128040 - protein, 9 aa, Homo Sapiens
LPVAFKVVA

SEQ ID NO: 128041 - protein, 9 aa, Homo Sapiens
LPVAVKHVV

SEQ ID NO: 128042 - protein, 9 aa, Homo Sapiens
LPVDAVISV

SEQ ID NO: 128043 - protein, 9 aa, Homo Sapiens
LPVDVVVNA

SEQ ID NO: 128044 - protein, 9 aa, Homo Sapiens
LPVEFTIDA

SEQ ID NO: 128045 - protein, 9 aa, Homo Sapiens
LPVLPVAAA

SEQ ID NO: 128046 - protein, 9 aa, Homo Sapiens
LPVPQKIEA

SEQ ID NO: 128047 - protein, 9 aa, Homo Sapiens
LPVRPQTNA

SEQ ID NO: 128048 - protein, 9 aa, Homo Sapiens
LPVSLPTHA

SEQ ID NO: 128049 - protein, 9 aa, Homo Sapiens
LPVSNVVSV

SEQ ID NO: 128050 - protein, 9 aa, Homo Sapiens
LPWQGLKAA

SEQ ID NO: 128051 - protein, 9 aa, Homo Sapiens
LPYAITIVA

SEQ ID NO: 128052 - protein, 9 aa, Homo Sapiens
LPYDIPHRA

SEQ ID NO: 128053 - protein, 9 aa, Homo Sapiens
LPYHHVIHA

SEQ ID NO: 128054 - protein, 9 aa, Homo Sapiens
LPYKWVVEA

SEQ ID NO: 128055 - protein, 9 aa, Homo Sapiens
LPYNGVTVA

SEQ ID NO: 128056 - protein, 9 aa, Homo Sapiens
LPYNGVVLA

SEQ ID NO: 128057 - protein, 9 aa, Homo Sapiens
LQIDNARLA

SEQ ID NO: 128058 - protein, 9 aa, Homo Sapiens
LQQVDTSTR

SEQ ID NO: 128059 - protein, 9 aa, Homo Sapiens
LTKPVEISA

SEQ ID NO: 128060 - protein, 9 aa, Homo Sapiens
LVAPPLPAA

SEQ ID NO: 128061 - protein, 9 aa, Homo Sapiens
LVGPVLGAA

SEQ ID NO: 128062 - protein, 9 aa, Homo Sapiens
LVKDVFISA

SEQ ID NO: 128063 - protein, 9 aa, Homo Sapiens
LVMGDIPAA

SEQ ID NO: 128064 - protein, 9 aa, Homo Sapiens
LVRPPTEQA

SEQ ID NO: 128065 - protein, 9 aa, Homo Sapiens
LVRPVVPSA

SEQ ID NO: 128066 - protein, 9 aa, Homo Sapiens
LVSKPFCAA

SEQ ID NO: 128067 - protein, 9 aa, Homo Sapiens
LVSPPAVSA

SEQ ID NO: 128068 - protein, 9 aa, Homo Sapiens
LVYQGYLAA

SEQ ID NO: 128069 - protein, 9 aa, Homo Sapiens
MPAAALNAA

SEQ ID NO: 128070 - protein, 9 aa, Homo Sapiens
MPADSGYPA

SEQ ID NO: 128071 - protein, 9 aa, Homo Sapiens
MPAFPLPYA

SEQ ID NO: 128072 - protein, 9 aa, Homo Sapiens
MPAGSFITA

SEQ ID NO: 128073 - protein, 9 aa, Homo Sapiens
MPAHFSDSA

SEQ ID NO: 128074 - protein, 9 aa, Homo Sapiens
MPATLARAA

SEQ ID NO: 128075 - protein, 9 aa, Homo Sapiens
MPFGNVISA

SEQ ID NO: 128076 - protein, 9 aa, Homo Sapiens
MPFGNVVSA

SEQ ID NO: 128077 - protein, 9 aa, Homo Sapiens
MPFPNIRSA

SEQ ID NO: 128078 - protein, 9 aa, Homo Sapiens
MPHEDCITA

SEQ ID NO: 128079 - protein, 9 aa, Homo Sapiens
MPILIDFHA

SEQ ID NO: 128080 - protein, 9 aa, Homo Sapiens
MPKAEKNAV

SEQ ID NO: 128081 - protein, 9 aa, Homo Sapiens
MPLLKSEVA

SEQ ID NO: 128082 - protein, 9 aa, Homo Sapiens
MPLSTIREV

SEQ ID NO: 128083 - protein, 9 aa, Homo Sapiens
MPMERQMSV

SEQ ID NO: 128084 - protein, 9 aa, Homo Sapiens
MPNDEHWKA

SEQ ID NO: 128085 - protein, 9 aa, Homo Sapiens
MPNHIHMGA

SEQ ID NO: 128086 - protein, 9 aa, Homo Sapiens
MPPPVGMVA

SEQ ID NO: 128087 - protein, 9 aa, Homo Sapiens
MPQDLRSPA

SEQ ID NO: 128088 - protein, 9 aa, Homo Sapiens
MPQIPVASV

SEQ ID NO: 128089 - protein, 9 aa, Homo Sapiens
MPQNPHIIA

SEQ ID NO: 128090 - protein, 9 aa, Homo Sapiens
MPRDILIVV

SEQ ID NO: 128091 - protein, 9 aa, Homo Sapiens
MPRQLSAAA

SEQ ID NO: 128092 - protein, 9 aa, Homo Sapiens
MPRRNFPIA

SEQ ID NO: 128093 - protein, 9 aa, Homo Sapiens
MPSDVLEVT

SEQ ID NO: 128094 - protein, 9 aa, Homo Sapiens
MPTDVLEVT

SEQ ID NO: 128095 - protein, 9 aa, Homo Sapiens
MPTLPPPSV

SEQ ID NO: 128096 - protein, 9 aa, Homo Sapiens
MPTQPQVQA

SEQ ID NO: 128097 - protein, 9 aa, Homo Sapiens
MPTRPGEQA

SEQ ID NO: 128098 - protein, 9 aa, Homo Sapiens
MPVERILEA

SEQ ID NO: 128099 - protein, 9 aa, Homo Sapiens
MPVGLIAGA

SEQ ID NO: 128100 - protein, 9 aa, Homo Sapiens
MPVPAQPKA

SEQ ID NO: 128101 - protein, 9 aa, Homo Sapiens
MPYFLLTQA

SEQ ID NO: 128102 - protein, 9 aa, Homo Sapiens
MPYLIGVHA

SEQ ID NO: 128103 - protein, 9 aa, Homo Sapiens
NPAPPIDAV

SEQ ID NO: 128104 - protein, 9 aa, Homo Sapiens
NPFGGASHA

SEQ ID NO: 128105 - protein, 9 aa, Homo Sapiens
NPGVPVPAA

SEQ ID NO: 128106 - protein, 9 aa, Homo Sapiens
NPNELSVSA

SEQ ID NO: 128107 - protein, 9 aa, Homo Sapiens
NPNQYHYVA

SEQ ID NO: 128108 - protein, 9 aa, Homo Sapiens
NPNQYNYIA

SEQ ID NO: 128109 - protein, 9 aa, Homo Sapiens
NPTCPKVAA

SEQ ID NO: 128110 - protein, 9 aa, Homo Sapiens
NPVTGLLSA

SEQ ID NO: 128111 - protein, 9 aa, Homo Sapiens
NPYATLPRA

SEQ ID NO: 128112 - protein, 9 aa, Homo Sapiens
NPYHNAVHA

SEQ ID NO: 128113 - protein, 9 aa, Homo Sapiens
NPYTIFHQA

SEQ ID NO: 128114 - protein, 9 aa, Homo Sapiens
NPYYGGESA

SEQ ID NO: 128115 - protein, 9 aa, Homo Sapiens
PAYHSSLMD

SEQ ID NO: 128116 - protein, 9 aa, Homo Sapiens
PITPRAAPL

SEQ ID NO: 128117 - protein, 9 aa, Homo Sapiens
PRKPVAGAL

SEQ ID NO: 128118 - protein, 9 aa, Homo Sapiens
PSIVHRKCF

SEQ ID NO: 128119 - protein, 9 aa, Homo Sapiens
QPAPAIHSA

SEQ ID NO: 128120 - protein, 9 aa, Homo Sapiens
QPFAVPHSA

SEQ ID NO: 128121 - protein, 9 aa, Homo Sapiens
QPFSKPVSV

SEQ ID NO: 128122 - protein, 9 aa, Homo Sapiens
QPGEALAEA

SEQ ID NO: 128123 - protein, 9 aa, Homo Sapiens
QPHHIGVAV

SEQ ID NO: 128124 - protein, 9 aa, Homo Sapiens
QPHSSALTA

SEQ ID NO: 128125 - protein, 9 aa, Homo Sapiens
QPHTILRVV

SEQ ID NO: 128126 - protein, 9 aa, Homo Sapiens
QPIFAVTSA

SEQ ID NO: 128127 - protein, 9 aa, Homo Sapiens
QPILLELEA

SEQ ID NO: 128128 - protein, 9 aa, Homo Sapiens
QPINLIFRY

SEQ ID NO: 128129 - protein, 9 aa, Homo Sapiens
QPITPGPSI

SEQ ID NO: 128130 - protein, 9 aa, Homo Sapiens
QPLLKHWEA

SEQ ID NO: 128131 - protein, 9 aa, Homo Sapiens
QPLLPYSAV

SEQ ID NO: 128132 - protein, 9 aa, Homo Sapiens
QPLPATHAA

SEQ ID NO: 128133 - protein, 9 aa, Homo Sapiens
QPLPMAHCA

SEQ ID NO: 128134 - protein, 9 aa, Homo Sapiens
QPLPVILHV

SEQ ID NO: 128135 - protein, 9 aa, Homo Sapiens
QPLYQPSHA

SEQ ID NO: 128136 - protein, 9 aa, Homo Sapiens
QPNTLICHI

SEQ ID NO: 128137 - protein, 9 aa, Homo Sapiens
QPQAPGVEA

SEQ ID NO: 128138 - protein, 9 aa, Homo Sapiens
QPQPQPYAV

SEQ ID NO: 128139 - protein, 9 aa, Homo Sapiens
QPRDPVRPP

SEQ ID NO: 128140 - protein, 9 aa, Homo Sapiens
QPSEVLRTV

SEQ ID NO: 128141 - protein, 9 aa, Homo Sapiens
QPTSVLDKA

SEQ ID NO: 128142 - protein, 9 aa, Homo Sapiens
QPVPPGRAA

SEQ ID NO: 128143 - protein, 9 aa, Homo Sapiens
QPWAQTVVV

SEQ ID NO: 128144 - protein, 9 aa, Homo Sapiens
QPWRGGAGA

SEQ ID NO: 128145 - protein, 9 aa, Homo Sapiens
QPYMPTVSA

SEQ ID NO: 128146 - protein, 9 aa, Homo Sapiens
QPYQPLREV

SEQ ID NO: 128147 - protein, 9 aa, Homo Sapiens
QPYSKLPGV

SEQ ID NO: 128148 - protein, 9 aa, Homo Sapiens
QVRDVIIAA

SEQ ID NO: 128149 - protein, 9 aa, Homo Sapiens
RAFQQSTAA

SEQ ID NO: 128150 - protein, 9 aa, Homo Sapiens
RARVPGPPA

SEQ ID NO: 128151 - protein, 9 aa, Homo Sapiens
RDIPRVTAL

SEQ ID NO: 128152 - protein, 9 aa, Homo Sapiens
RIFDRAVAA

SEQ ID NO: 128153 - protein, 9 aa, Homo Sapiens
RLPNALRAA

SEQ ID NO: 128154 - protein, 9 aa, Homo Sapiens
RNVSTGDVN

SEQ ID NO: 128155 - protein, 9 aa, Homo Sapiens
RPAAPLIGA

SEQ ID NO: 128156 - protein, 9 aa, Homo Sapiens
RPADVIFAT

SEQ ID NO: 128157 - protein, 9 aa, Homo Sapiens
RPAEKLSTA

SEQ ID NO: 128158 - protein, 9 aa, Homo Sapiens
RPAFVIPEV

SEQ ID NO: 128159 - protein, 9 aa, Homo Sapiens
RPALFSSSA

SEQ ID NO: 128160 - protein, 9 aa, Homo Sapiens
RPALVEQTA

SEQ ID NO: 128161 - protein, 9 aa, Homo Sapiens
RPAPLPAAV

SEQ ID NO: 128162 - protein, 9 aa, Homo Sapiens
RPAPPPPTV

SEQ ID NO: 128163 - protein, 9 aa, Homo Sapiens
RPAPPRAPA

SEQ ID NO: 128164 - protein, 9 aa, Homo Sapiens
RPAPVAVAA

SEQ ID NO: 128165 - protein, 9 aa, Homo Sapiens
RPATDLPEA

SEQ ID NO: 128166 - protein, 9 aa, Homo Sapiens
RPFHGISTV

SEQ ID NO: 128167 - protein, 9 aa, Homo Sapiens
RPFIGMSSA

SEQ ID NO: 128168 - protein, 9 aa, Homo Sapiens
RPFPAAHHA

SEQ ID NO: 128169 - protein, 9 aa, Homo Sapiens
RPFQNQTHA

SEQ ID NO: 128170 - protein, 9 aa, Homo Sapiens
RPFQSIIHA

SEQ ID NO: 128171 - protein, 9 aa, Homo Sapiens
RPFTNLESA

SEQ ID NO: 128172 - protein, 9 aa, Homo Sapiens
RPFVAINYA

SEQ ID NO: 128173 - protein, 9 aa, Homo Sapiens
RPGPGVPAT

SEQ ID NO: 128174 - protein, 9 aa, Homo Sapiens
RPGPVLPAV

SEQ ID NO: 128175 - protein, 9 aa, Homo Sapiens
RPHAPGRPA

SEQ ID NO: 128176 - protein, 9 aa, Homo Sapiens
RPHHAQLAV

SEQ ID NO: 128177 - protein, 9 aa, Homo Sapiens
RPHPLRPEA

SEQ ID NO: 128178 - protein, 9 aa, Homo Sapiens
RPHRGILAV

SEQ ID NO: 128179 - protein, 9 aa, Homo Sapiens
RPHSALLAV

SEQ ID NO: 128180 - protein, 9 aa, Homo Sapiens
RPHTVLTVI

SEQ ID NO: 128181 - protein, 9 aa, Homo Sapiens
RPIASGPVV

SEQ ID NO: 128182 - protein, 9 aa, Homo Sapiens
RPIDHWDAV

SEQ ID NO: 128183 - protein, 9 aa, Homo Sapiens
RPIPNQPPT

SEQ ID NO: 128184 - protein, 9 aa, Homo Sapiens
RPIQVKPAA

SEQ ID NO: 128185 - protein, 9 aa, Homo Sapiens
RPKMQEVVA

SEQ ID NO: 128186 - protein, 9 aa, Homo Sapiens
RPKPDYFAV

SEQ ID NO: 128187 - protein, 9 aa, Homo Sapiens
RPKPIITSV

SEQ ID NO: 128188 - protein, 9 aa, Homo Sapiens
RPKPPNVRT

SEQ ID NO: 128189 - protein, 9 aa, Homo Sapiens
RPLAQLREV

SEQ ID NO: 128190 - protein, 9 aa, Homo Sapiens
RPLFPSTGA

SEQ ID NO: 128191 - protein, 9 aa, Homo Sapiens
RPLHEFITA

SEQ ID NO: 128192 - protein, 9 aa, Homo Sapiens
RPLLKAITA

SEQ ID NO: 128193 - protein, 9 aa, Homo Sapiens
RPLQDEPAA

SEQ ID NO: 128194 - protein, 9 aa, Homo Sapiens
RPLSKQLSA

SEQ ID NO: 128195 - protein, 9 aa, Homo Sapiens
RPLSRLQAA

SEQ ID NO: 128196 - protein, 9 aa, Homo Sapiens
RPLTLFHTV

SEQ ID NO: 128197 - protein, 9 aa, Homo Sapiens
RPLVSTQPA

SEQ ID NO: 128198 - protein, 9 aa, Homo Sapiens
RPMKVGHVT

SEQ ID NO: 128199 - protein, 9 aa, Homo Sapiens
RPNDIMAEV

SEQ ID NO: 128200 - protein, 9 aa, Homo Sapiens
RPNGVSAVA

SEQ ID NO: 128201 - protein, 9 aa, Homo Sapiens
RPNLIKPAA

SEQ ID NO: 128202 - protein, 9 aa, Homo Sapiens
RPNPPPVSV

SEQ ID NO: 128203 - protein, 9 aa, Homo Sapiens
RPNSGIIDA

SEQ ID NO: 128204 - protein, 9 aa, Homo Sapiens
RPNWSKLVA

SEQ ID NO: 128205 - protein, 9 aa, Homo Sapiens
RPPHLYAVA

SEQ ID NO: 128206 - protein, 9 aa, Homo Sapiens
RPPLNPVSA

SEQ ID NO: 128207 - protein, 9 aa, Homo Sapiens
RPQPQPRPA

SEQ ID NO: 128208 - protein, 9 aa, Homo Sapiens
RPRAPIIAV

SEQ ID NO: 128209 - protein, 9 aa, Homo Sapiens
RPRDSQLYA

SEQ ID NO: 128210 - protein, 9 aa, Homo Sapiens
RPRFVSLRA

SEQ ID NO: 128211 - protein, 9 aa, Homo Sapiens
RPRHQGVMV

SEQ ID NO: 128212 - protein, 9 aa, Homo Sapiens
RPRITHPPP

SEQ ID NO: 128213 - protein, 9 aa, Homo Sapiens
RPRLIAELA

SEQ ID NO: 128214 - protein, 9 aa, Homo Sapiens
RPRLVAAAV

SEQ ID NO: 128215 - protein, 9 aa, Homo Sapiens
RPRNGGICV

SEQ ID NO: 128216 - protein, 9 aa, Homo Sapiens
RPRPPVLSV

SEQ ID NO: 128217 - protein, 9 aa, Homo Sapiens
RPRPPVSST

SEQ ID NO: 128218 - protein, 9 aa, Homo Sapiens
RPRPTTVTA

SEQ ID NO: 128219 - protein, 9 aa, Homo Sapiens
RPRPVLRSV

SEQ ID NO: 128220 - protein, 9 aa, Homo Sapiens
RPRPVVTTT

SEQ ID NO: 128221 - protein, 9 aa, Homo Sapiens
RPRTAGPAV

SEQ ID NO: 128222 - protein, 9 aa, Homo Sapiens
RPRYLEIRA

SEQ ID NO: 128223 - protein, 9 aa, Homo Sapiens
RPSALPFVA

SEQ ID NO: 128224 - protein, 9 aa, Homo Sapiens
RPSHFLNFA

SEQ ID NO: 128225 - protein, 9 aa, Homo Sapiens
RPSPAPPAA

SEQ ID NO: 128226 - protein, 9 aa, Homo Sapiens
RPSPPVQSV

SEQ ID NO: 128227 - protein, 9 aa, Homo Sapiens
RPSQVVAET

SEQ ID NO: 128228 - protein, 9 aa, Homo Sapiens
RPSSQYIVA

SEQ ID NO: 128229 - protein, 9 aa, Homo Sapiens
RPSSTFNTV

SEQ ID NO: 128230 - protein, 9 aa, Homo Sapiens
RPVGGGPSA

SEQ ID NO: 128231 - protein, 9 aa, Homo Sapiens
RPVHLDQAA

SEQ ID NO: 128232 - protein, 9 aa, Homo Sapiens
RPVLPRTEA

SEQ ID NO: 128233 - protein, 9 aa, Homo Sapiens
RPVNDMNIA

SEQ ID NO: 128234 - protein, 9 aa, Homo Sapiens
RPVPGYEPG

SEQ ID NO: 128235 - protein, 9 aa, Homo Sapiens
RPVQRLPSV

SEQ ID NO: 128236 - protein, 9 aa, Homo Sapiens
RPVTPPRTA

SEQ ID NO: 128237 - protein, 9 aa, Homo Sapiens
RPWKAYLSA

SEQ ID NO: 128238 - protein, 9 aa, Homo Sapiens
RPWLDPAAA

SEQ ID NO: 128239 - protein, 9 aa, Homo Sapiens
RPWPNPNSA

SEQ ID NO: 128240 - protein, 9 aa, Homo Sapiens
RPWSPAVSA

SEQ ID NO: 128241 - protein, 9 aa, Homo Sapiens
RPYDKNISP

SEQ ID NO: 128242 - protein, 9 aa, Homo Sapiens
RPYEPINSI

SEQ ID NO: 128243 - protein, 9 aa, Homo Sapiens
RPYFPKDEA

SEQ ID NO: 128244 - protein, 9 aa, Homo Sapiens
RPYGCVLRA

SEQ ID NO: 128245 - protein, 9 aa, Homo Sapiens
RPYHTIIEI

SEQ ID NO: 128246 - protein, 9 aa, Homo Sapiens
RPYLQRKDV

SEQ ID NO: 128247 - protein, 9 aa, Homo Sapiens
RPYSHALVA

SEQ ID NO: 128248 - protein, 9 aa, Homo Sapiens
RPYSRKLEA

SEQ ID NO: 128249 - protein, 9 aa, Homo Sapiens
RPYSVPPCV

SEQ ID NO: 128250 - protein, 9 aa, Homo Sapiens
RPYTGKVGA

SEQ ID NO: 128251 - protein, 9 aa, Homo Sapiens
RRPPASPPA

SEQ ID NO: 128252 - protein, 9 aa, Homo Sapiens
RRPPPPPPP

SEQ ID NO: 128253 - protein, 9 aa, Homo Sapiens
RVKCVGLSA

SEQ ID NO: 128254 - protein, 9 aa, Homo Sapiens
RVREIIINA

SEQ ID NO: 128255 - protein, 9 aa, Homo Sapiens
SPAALKPPA

SEQ ID NO: 128256 - protein, 9 aa, Homo Sapiens
SPAAPVITA

SEQ ID NO: 128257 - protein, 9 aa, Homo Sapiens
SPAGGIPST

SEQ ID NO: 128258 - protein, 9 aa, Homo Sapiens
SPAGILVDA

SEQ ID NO: 128259 - protein, 9 aa, Homo Sapiens
SPAHAVDAV

SEQ ID NO: 128260 - protein, 9 aa, Homo Sapiens
SPAHVLLAA

SEQ ID NO: 128261 - protein, 9 aa, Homo Sapiens
SPAKLQAAA

SEQ ID NO: 128262 - protein, 9 aa, Homo Sapiens
SPAKTLPGA

SEQ ID NO: 128263 - protein, 9 aa, Homo Sapiens
SPAPPLLHV

SEQ ID NO: 128264 - protein, 9 aa, Homo Sapiens
SPAQVIPLA

SEQ ID NO: 128265 - protein, 9 aa, Homo Sapiens
SPARGGIGA

SEQ ID NO: 128266 - protein, 9 aa, Homo Sapiens
SPASQLVAT

SEQ ID NO: 128267 - protein, 9 aa, Homo Sapiens
SPAYRDLAA

SEQ ID NO: 128268 - protein, 9 aa, Homo Sapiens
SPCLGPVAA

SEQ ID NO: 128269 - protein, 9 aa, Homo Sapiens
SPDSPVTSA

SEQ ID NO: 128270 - protein, 9 aa, Homo Sapiens
SPEAHTVEA

SEQ ID NO: 128271 - protein, 9 aa, Homo Sapiens
SPEKFQIEA

SEQ ID NO: 128272 - protein, 9 aa, Homo Sapiens
SPEQLCAPA

SEQ ID NO: 128273 - protein, 9 aa, Homo Sapiens
SPESPVLAA

SEQ ID NO: 128274 - protein, 9 aa, Homo Sapiens
SPFAEGTSA

SEQ ID NO: 128275 - protein, 9 aa, Homo Sapiens
SPFENTENA

SEQ ID NO: 128276 - protein, 9 aa, Homo Sapiens
SPFFPLVSA

SEQ ID NO: 128277 - protein, 9 aa, Homo Sapiens
SPFGSITSA

SEQ ID NO: 128278 - protein, 9 aa, Homo Sapiens
SPFGTITSA

SEQ ID NO: 128279 - protein, 9 aa, Homo Sapiens
SPFHFQPSA

SEQ ID NO: 128280 - protein, 9 aa, Homo Sapiens
SPFPDIPKV

SEQ ID NO: 128281 - protein, 9 aa, Homo Sapiens
SPFPPAKSA

SEQ ID NO: 128282 - protein, 9 aa, Homo Sapiens
SPFRVNVGA

SEQ ID NO: 128283 - protein, 9 aa, Homo Sapiens
SPFSGLQKA

SEQ ID NO: 128284 - protein, 9 aa, Homo Sapiens
SPFSSFISV

SEQ ID NO: 128285 - protein, 9 aa, Homo Sapiens
SPFTVGVAA

SEQ ID NO: 128286 - protein, 9 aa, Homo Sapiens
SPGDFSISV

SEQ ID NO: 128287 - protein, 9 aa, Homo Sapiens
SPGLQKEAV

SEQ ID NO: 128288 - protein, 9 aa, Homo Sapiens
SPHFPHTAA

SEQ ID NO: 128289 - protein, 9 aa, Homo Sapiens
SPHKVFYKS

SEQ ID NO: 128290 - protein, 9 aa, Homo Sapiens
SPHLGPAPA

SEQ ID NO: 128291 - protein, 9 aa, Homo Sapiens
SPHNETILA

SEQ ID NO: 128292 - protein, 9 aa, Homo Sapiens
SPHPGLVAA

SEQ ID NO: 128293 - protein, 9 aa, Homo Sapiens
SPHPSPLGA

SEQ ID NO: 128294 - protein, 9 aa, Homo Sapiens
SPHQVTPQA

SEQ ID NO: 128295 - protein, 9 aa, Homo Sapiens
SPHRPILQA

SEQ ID NO: 128296 - protein, 9 aa, Homo Sapiens
SPHSILVNG

SEQ ID NO: 128297 - protein, 9 aa, Homo Sapiens
SPHSQVLTA

SEQ ID NO: 128298 - protein, 9 aa, Homo Sapiens
SPHSVPFLA

SEQ ID NO: 128299 - protein, 9 aa, Homo Sapiens
SPHTKMDVA

SEQ ID NO: 128300 - protein, 9 aa, Homo Sapiens
SPHVAVLEA

SEQ ID NO: 128301 - protein, 9 aa, Homo Sapiens
SPHVQVKAA

SEQ ID NO: 128302 - protein, 9 aa, Homo Sapiens
SPIEFLENA

SEQ ID NO: 128303 - protein, 9 aa, Homo Sapiens
SPIENIQRV

SEQ ID NO: 128304 - protein, 9 aa, Homo Sapiens
SPILVATAV

SEQ ID NO: 128305 - protein, 9 aa, Homo Sapiens
SPKDVILKV

SEQ ID NO: 128306 - protein, 9 aa, Homo Sapiens
SPKGTIENI

SEQ ID NO: 128307 - protein, 9 aa, Homo Sapiens
SPKLPSLEA

SEQ ID NO: 128308 - protein, 9 aa, Homo Sapiens
SPKPVSSTV

SEQ ID NO: 128309 - protein, 9 aa, Homo Sapiens
SPKQILDPA

SEQ ID NO: 128310 - protein, 9 aa, Homo Sapiens
SPKQILDSA

SEQ ID NO: 128311 - protein, 9 aa, Homo Sapiens
SPKSPGLKA

SEQ ID NO: 128312 - protein, 9 aa, Homo Sapiens
SPKTTISVA

SEQ ID NO: 128313 - protein, 9 aa, Homo Sapiens
SPLASGAVA

SEQ ID NO: 128314 - protein, 9 aa, Homo Sapiens
SPLFSQHTA

SEQ ID NO: 128315 - protein, 9 aa, Homo Sapiens
SPLHLAVEA

SEQ ID NO: 128316 - protein, 9 aa, Homo Sapiens
SPLIQKSAA

SEQ ID NO: 128317 - protein, 9 aa, Homo Sapiens
SPLKHFVTA

SEQ ID NO: 128318 - protein, 9 aa, Homo Sapiens
SPLLQAHHA

SEQ ID NO: 128319 - protein, 9 aa, Homo Sapiens
SPLNAMPRA

SEQ ID NO: 128320 - protein, 9 aa, Homo Sapiens
SPLPQYVTV

SEQ ID NO: 128321 - protein, 9 aa, Homo Sapiens
SPLPTPFGA

SEQ ID NO: 128322 - protein, 9 aa, Homo Sapiens
SPLSAARAA

SEQ ID NO: 128323 - protein, 9 aa, Homo Sapiens
SPLSSHPVV

SEQ ID NO: 128324 - protein, 9 aa, Homo Sapiens
SPLWTSIGA

SEQ ID NO: 128325 - protein, 9 aa, Homo Sapiens
SPLYLAHEV

SEQ ID NO: 128326 - protein, 9 aa, Homo Sapiens
SPMATTAAA

SEQ ID NO: 128327 - protein, 9 aa, Homo Sapiens
SPMDTVTEA

SEQ ID NO: 128328 - protein, 9 aa, Homo Sapiens
SPMIPSIVV

SEQ ID NO: 128329 - protein, 9 aa, Homo Sapiens
SPMPGTLTA

SEQ ID NO: 128330 - protein, 9 aa, Homo Sapiens
SPMSQTETV

SEQ ID NO: 128331 - protein, 9 aa, Homo Sapiens
SPNEVKVVA

SEQ ID NO: 128332 - protein, 9 aa, Homo Sapiens
SPNGKLTVA

SEQ ID NO: 128333 - protein, 9 aa, Homo Sapiens
SPNGQFVAP

SEQ ID NO: 128334 - protein, 9 aa, Homo Sapiens
SPNRYWLCA

SEQ ID NO: 128335 - protein, 9 aa, Homo Sapiens
SPNSILKAA

SEQ ID NO: 128336 - protein, 9 aa, Homo Sapiens
SPNSYFMDV

SEQ ID NO: 128337 - protein, 9 aa, Homo Sapiens
SPPKIHVSA

SEQ ID NO: 128338 - protein, 9 aa, Homo Sapiens
SPPVPGPSA

SEQ ID NO: 128339 - protein, 9 aa, Homo Sapiens
SPQDVTTHA

SEQ ID NO: 128340 - protein, 9 aa, Homo Sapiens
SPQGQVLSA

SEQ ID NO: 128341 - protein, 9 aa, Homo Sapiens
SPRDGWHCA

SEQ ID NO: 128342 - protein, 9 aa, Homo Sapiens
SPREELHYA

SEQ ID NO: 128343 - protein, 9 aa, Homo Sapiens
SPREPGYKA

SEQ ID NO: 128344 - protein, 9 aa, Homo Sapiens
SPREPVLPP

SEQ ID NO: 128345 - protein, 9 aa, Homo Sapiens
SPREVFFRV

SEQ ID NO: 128346 - protein, 9 aa, Homo Sapiens
SPRIATTTA

SEQ ID NO: 128347 - protein, 9 aa, Homo Sapiens
SPRLLGAAA

SEQ ID NO: 128348 - protein, 9 aa, Homo Sapiens
SPRNLAMEA

SEQ ID NO: 128349 - protein, 9 aa, Homo Sapiens
SPRPPLISV

SEQ ID NO: 128350 - protein, 9 aa, Homo Sapiens
SPRPVVVET

SEQ ID NO: 128351 - protein, 9 aa, Homo Sapiens
SPRVPNSSV

SEQ ID NO: 128352 - protein, 9 aa, Homo Sapiens
SPSAGVPRA

SEQ ID NO: 128353 - protein, 9 aa, Homo Sapiens
SPSDIGIIA

SEQ ID NO: 128354 - protein, 9 aa, Homo Sapiens
SPSPPQAEA

SEQ ID NO: 128355 - protein, 9 aa, Homo Sapiens
SPSPPSVAV

SEQ ID NO: 128356 - protein, 9 aa, Homo Sapiens
SPSSSSLAA

SEQ ID NO: 128357 - protein, 9 aa, Homo Sapiens
SPSTVFFGA

SEQ ID NO: 128358 - protein, 9 aa, Homo Sapiens
SPSTVIHGA

SEQ ID NO: 128359 - protein, 9 aa, Homo Sapiens
SPSVPKTSA

SEQ ID NO: 128360 - protein, 9 aa, Homo Sapiens
SPTGGFVDA

SEQ ID NO: 128361 - protein, 9 aa, Homo Sapiens
SPTGRCWAA

SEQ ID NO: 128362 - protein, 9 aa, Homo Sapiens
SPTHSAIPA

SEQ ID NO: 128363 - protein, 9 aa, Homo Sapiens
SPTKKVAVA

SEQ ID NO: 128364 - protein, 9 aa, Homo Sapiens
SPTKNNIAV

SEQ ID NO: 128365 - protein, 9 aa, Homo Sapiens
SPTLLLAEA

SEQ ID NO: 128366 - protein, 9 aa, Homo Sapiens
SPTNKISTA

SEQ ID NO: 128367 - protein, 9 aa, Homo Sapiens
SPTRPPVAA

SEQ ID NO: 128368 - protein, 9 aa, Homo Sapiens
SPTSVRQMA

SEQ ID NO: 128369 - protein, 9 aa, Homo Sapiens
SPTTSHVGA

SEQ ID NO: 128370 - protein, 9 aa, Homo Sapiens
SPTYQYVTV

SEQ ID NO: 128371 - protein, 9 aa, Homo Sapiens
SPVAQPVTV

SEQ ID NO: 128372 - protein, 9 aa, Homo Sapiens
SPVENVTAA

SEQ ID NO: 128373 - protein, 9 aa, Homo Sapiens
SPVGNRVTV

SEQ ID NO: 128374 - protein, 9 aa, Homo Sapiens
SPVLPLTSA

SEQ ID NO: 128375 - protein, 9 aa, Homo Sapiens
SPVMVSNPA

SEQ ID NO: 128376 - protein, 9 aa, Homo Sapiens
SPVPIAPTA

SEQ ID NO: 128377 - protein, 9 aa, Homo Sapiens
SPVQHLVAA

SEQ ID NO: 128378 - protein, 9 aa, Homo Sapiens
SPVRGCYEA

SEQ ID NO: 128379 - protein, 9 aa, Homo Sapiens
SPVSSLPTA

SEQ ID NO: 128380 - protein, 9 aa, Homo Sapiens
SPVTDFREA

SEQ ID NO: 128381 - protein, 9 aa, Homo Sapiens
SPVTVEWKA

SEQ ID NO: 128382 - protein, 9 aa, Homo Sapiens
SPVVPQISA

SEQ ID NO: 128383 - protein, 9 aa, Homo Sapiens
SPYAAMLAA

SEQ ID NO: 128384 - protein, 9 aa, Homo Sapiens
SPYHGFTIV

SEQ ID NO: 128385 - protein, 9 aa, Homo Sapiens
SPYHNFDSV

SEQ ID NO: 128386 - protein, 9 aa, Homo Sapiens
SPYIPPHAA

SEQ ID NO: 128387 - protein, 9 aa, Homo Sapiens
SPYVHLLDA

SEQ ID NO: 128388 - protein, 9 aa, Homo Sapiens
SPYYFLTSA

SEQ ID NO: 128389 - protein, 9 aa, Homo Sapiens
SVPSNPVAA

SEQ ID NO: 128390 - protein, 9 aa, Homo Sapiens
SVTLQAIAA

SEQ ID NO: 128391 - protein, 9 aa, Homo Sapiens
TPAHVLPSA

SEQ ID NO: 128392 - protein, 9 aa, Homo Sapiens
TPAKAIAAV

SEQ ID NO: 128393 - protein, 9 aa, Homo Sapiens
TPFHHRVSV

SEQ ID NO: 128394 - protein, 9 aa, Homo Sapiens
TPFKGVRKA

SEQ ID NO: 128395 - protein, 9 aa, Homo Sapiens
TPFKLTTEA

SEQ ID NO: 128396 - protein, 9 aa, Homo Sapiens
TPFKPILEA

SEQ ID NO: 128397 - protein, 9 aa, Homo Sapiens
TPFYFKEPS

SEQ ID NO: 128398 - protein, 9 aa, Homo Sapiens
TPHAIVILP

SEQ ID NO: 128399 - protein, 9 aa, Homo Sapiens
TPHFSGLAA

SEQ ID NO: 128400 - protein, 9 aa, Homo Sapiens
TPHLRNLAV

SEQ ID NO: 128401 - protein, 9 aa, Homo Sapiens
TPHYIYPPA

SEQ ID NO: 128402 - protein, 9 aa, Homo Sapiens
TPIGVQAEA

SEQ ID NO: 128403 - protein, 9 aa, Homo Sapiens
TPIRGLLMA

SEQ ID NO: 128404 - protein, 9 aa, Homo Sapiens
TPKMPGQSV

SEQ ID NO: 128405 - protein, 9 aa, Homo Sapiens
TPKPVEPAA

SEQ ID NO: 128406 - protein, 9 aa, Homo Sapiens
TPKPVSIAT

SEQ ID NO: 128407 - protein, 9 aa, Homo Sapiens
TPLGGIQAA

SEQ ID NO: 128408 - protein, 9 aa, Homo Sapiens
TPLLSGKAA

SEQ ID NO: 128409 - protein, 9 aa, Homo Sapiens
TPLPAIVPA

SEQ ID NO: 128410 - protein, 9 aa, Homo Sapiens
TPLPGGHAA

SEQ ID NO: 128411 - protein, 9 aa, Homo Sapiens
TPLYTDNTA

SEQ ID NO: 128412 - protein, 9 aa, Homo Sapiens
TPMAASVVA

SEQ ID NO: 128413 - protein, 9 aa, Homo Sapiens
TPMGPGRTV

SEQ ID NO: 128414 - protein, 9 aa, Homo Sapiens
TPMPPISSV

SEQ ID NO: 128415 - protein, 9 aa, Homo Sapiens
TPNKPSVAV

SEQ ID NO: 128416 - protein, 9 aa, Homo Sapiens
TPNQNFSTA

SEQ ID NO: 128417 - protein, 9 aa, Homo Sapiens
TPNRATFVV

SEQ ID NO: 128418 - protein, 9 aa, Homo Sapiens
TPQEDYVEA

SEQ ID NO: 128419 - protein, 9 aa, Homo Sapiens
TPQPPLLKA

SEQ ID NO: 128420 - protein, 9 aa, Homo Sapiens
TPQSIFIFA

SEQ ID NO: 128421 - protein, 9 aa, Homo Sapiens
TPRAATVKA

SEQ ID NO: 128422 - protein, 9 aa, Homo Sapiens
TPRPVIVEP

SEQ ID NO: 128423 - protein, 9 aa, Homo Sapiens
TPSAGAVAA

SEQ ID NO: 128424 - protein, 9 aa, Homo Sapiens
TPSIPVLTA

SEQ ID NO: 128425 - protein, 9 aa, Homo Sapiens
TPTEFFFHA

SEQ ID NO: 128426 - protein, 9 aa, Homo Sapiens
TPTFTYKAA

SEQ ID NO: 128427 - protein, 9 aa, Homo Sapiens
TPTPPFQQA

SEQ ID NO: 128428 - protein, 9 aa, Homo Sapiens
TPVEEVPAA

SEQ ID NO: 128429 - protein, 9 aa, Homo Sapiens
TPVGGLLMA

SEQ ID NO: 128430 - protein, 9 aa, Homo Sapiens
TPVNSICSV

SEQ ID NO: 128431 - protein, 9 aa, Homo Sapiens
TPVYLGATA

SEQ ID NO: 128432 - protein, 9 aa, Homo Sapiens
TPWFKIIAA

SEQ ID NO: 128433 - protein, 9 aa, Homo Sapiens
TPYNYPVPV

SEQ ID NO: 128434 - protein, 9 aa, Homo Sapiens
TPYRPPAAA

SEQ ID NO: 128435 - protein, 9 aa, Homo Sapiens
TPYTGILYA

SEQ ID NO: 128436 - protein, 9 aa, Homo Sapiens
TPYVAKISA

SEQ ID NO: 128437 - protein, 9 aa, Homo Sapiens
TVARSPVAP

SEQ ID NO: 128438 - protein, 9 aa, Homo Sapiens
TVYEGFISA

SEQ ID NO: 128439 - protein, 9 aa, Homo Sapiens
VAVLQEVAA

SEQ ID NO: 128440 - protein, 9 aa, Homo Sapiens
VIRNIVEAA

SEQ ID NO: 128441 - protein, 9 aa, Homo Sapiens
VPAEGAPTA

SEQ ID NO: 128442 - protein, 9 aa, Homo Sapiens
VPAEPSPKA

SEQ ID NO: 128443 - protein, 9 aa, Homo Sapiens
VPAGGAVAV

SEQ ID NO: 128444 - protein, 9 aa, Homo Sapiens
VPAGSGLSA

SEQ ID NO: 128445 - protein, 9 aa, Homo Sapiens
VPAKKITAA

SEQ ID NO: 128446 - protein, 9 aa, Homo Sapiens
VPAKWIHEA

SEQ ID NO: 128447 - protein, 9 aa, Homo Sapiens
VPANPYHTA

SEQ ID NO: 128448 - protein, 9 aa, Homo Sapiens
VPAPAHLVA

SEQ ID NO: 128449 - protein, 9 aa, Homo Sapiens
VPAPAPAAA

SEQ ID NO: 128450 - protein, 9 aa, Homo Sapiens
VPAPFFLPA

SEQ ID NO: 128451 - protein, 9 aa, Homo Sapiens
VPAPGGPAA

SEQ ID NO: 128452 - protein, 9 aa, Homo Sapiens
VPAPSPLSA

SEQ ID NO: 128453 - protein, 9 aa, Homo Sapiens
VPAPSVPSV

SEQ ID NO: 128454 - protein, 9 aa, Homo Sapiens
VPATPRLPA

SEQ ID NO: 128455 - protein, 9 aa, Homo Sapiens
VPCQVLRMA

SEQ ID NO: 128456 - protein, 9 aa, Homo Sapiens
VPFAAPATA

SEQ ID NO: 128457 - protein, 9 aa, Homo Sapiens
VPFIVPLSV

SEQ ID NO: 128458 - protein, 9 aa, Homo Sapiens
VPFKDMPAT

SEQ ID NO: 128459 - protein, 9 aa, Homo Sapiens
VPFLNPYTV

SEQ ID NO: 128460 - protein, 9 aa, Homo Sapiens
VPFPTPLEA

SEQ ID NO: 128461 - protein, 9 aa, Homo Sapiens
VPHAITVSV

SEQ ID NO: 128462 - protein, 9 aa, Homo Sapiens
VPHCVPISA

SEQ ID NO: 128463 - protein, 9 aa, Homo Sapiens
VPHNVQVAA

SEQ ID NO: 128464 - protein, 9 aa, Homo Sapiens
VPHQPFSQA

SEQ ID NO: 128465 - protein, 9 aa, Homo Sapiens
VPHRATVYA

SEQ ID NO: 128466 - protein, 9 aa, Homo Sapiens
VPHRSYVST

SEQ ID NO: 128467 - protein, 9 aa, Homo Sapiens
VPIKPLPNV

SEQ ID NO: 128468 - protein, 9 aa, Homo Sapiens
VPIMPYPPA

SEQ ID NO: 128469 - protein, 9 aa, Homo Sapiens
VPIPKSHEA

SEQ ID NO: 128470 - protein, 9 aa, Homo Sapiens
VPIRLIINA

SEQ ID NO: 128471 - protein, 9 aa, Homo Sapiens
VPITAVIAA

SEQ ID NO: 128472 - protein, 9 aa, Homo Sapiens
VPKAQKETV

SEQ ID NO: 128473 - protein, 9 aa, Homo Sapiens
VPKPLFPVA

SEQ ID NO: 128474 - protein, 9 aa, Homo Sapiens
VPLAIVNKA

SEQ ID NO: 128475 - protein, 9 aa, Homo Sapiens
VPLFVQHDA

SEQ ID NO: 128476 - protein, 9 aa, Homo Sapiens
VPLGALNPA

SEQ ID NO: 128477 - protein, 9 aa, Homo Sapiens
VPLSHLINA

SEQ ID NO: 128478 - protein, 9 aa, Homo Sapiens
VPMKCLQQA

SEQ ID NO: 128479 - protein, 9 aa, Homo Sapiens
VPMSALKSV

SEQ ID NO: 128480 - protein, 9 aa, Homo Sapiens
VPMTPLRTV

SEQ ID NO: 128481 - protein, 9 aa, Homo Sapiens
VPNKFLVTA

SEQ ID NO: 128482 - protein, 9 aa, Homo Sapiens
VPNKIINRA

SEQ ID NO: 128483 - protein, 9 aa, Homo Sapiens
VPNLQTVSV

SEQ ID NO: 128484 - protein, 9 aa, Homo Sapiens
VPNPYIISA

SEQ ID NO: 128485 - protein, 9 aa, Homo Sapiens
VPNRHFAAA

SEQ ID NO: 128486 - protein, 9 aa, Homo Sapiens
VPNTQPKAA

SEQ ID NO: 128487 - protein, 9 aa, Homo Sapiens
VPQSVTECV

SEQ ID NO: 128488 - protein, 9 aa, Homo Sapiens
VPQTPLHTA

SEQ ID NO: 128489 - protein, 9 aa, Homo Sapiens
VPRLPATAA

SEQ ID NO: 128490 - protein, 9 aa, Homo Sapiens
VPRPASVSA

SEQ ID NO: 128491 - protein, 9 aa, Homo Sapiens
VPRQPTVTS

SEQ ID NO: 128492 - protein, 9 aa, Homo Sapiens
VPSAHQPSA

SEQ ID NO: 128493 - protein, 9 aa, Homo Sapiens
VPSAVLIVA

SEQ ID NO: 128494 - protein, 9 aa, Homo Sapiens
VPSLFSKSA

SEQ ID NO: 128495 - protein, 9 aa, Homo Sapiens
VPSLQGEKA

SEQ ID NO: 128496 - protein, 9 aa, Homo Sapiens
VPSPVAISA

SEQ ID NO: 128497 - protein, 9 aa, Homo Sapiens
VPSSPPTKR

SEQ ID NO: 128498 - protein, 9 aa, Homo Sapiens
VPSYPSKSA

SEQ ID NO: 128499 - protein, 9 aa, Homo Sapiens
VPTDYSVSA

SEQ ID NO: 128500 - protein, 9 aa, Homo Sapiens
VPTEPLPAP

SEQ ID NO: 128501 - protein, 9 aa, Homo Sapiens
VPTPAPISA

SEQ ID NO: 128502 - protein, 9 aa, Homo Sapiens
VPTPIHPIF

SEQ ID NO: 128503 - protein, 9 aa, Homo Sapiens
VPVAGNPAV

SEQ ID NO: 128504 - protein, 9 aa, Homo Sapiens
VPVDTGVAA

SEQ ID NO: 128505 - protein, 9 aa, Homo Sapiens
VPVEPVLTV

SEQ ID NO: 128506 - protein, 9 aa, Homo Sapiens
VPVSTINHA

SEQ ID NO: 128507 - protein, 9 aa, Homo Sapiens
VPWGGAAAV

SEQ ID NO: 128508 - protein, 9 aa, Homo Sapiens
VPYGEFKSV

SEQ ID NO: 128509 - protein, 9 aa, Homo Sapiens
VPYGTPLSV

SEQ ID NO: 128510 - protein, 9 aa, Homo Sapiens
VPYGVGKAA

SEQ ID NO: 128511 - protein, 9 aa, Homo Sapiens
VPYLVGQVV

SEQ ID NO: 128512 - protein, 9 aa, Homo Sapiens
VPYPPLLRA

SEQ ID NO: 128513 - protein, 9 aa, Homo Sapiens
VTIKKDVDG

SEQ ID NO: 128514 - protein, 9 aa, Homo Sapiens
VVAPSIIAA

SEQ ID NO: 128515 - protein, 9 aa, Homo Sapiens
VVRPAHISA

SEQ ID NO: 128516 - protein, 9 aa, Homo Sapiens
YPAPQVSTA

SEQ ID NO: 128517 - protein, 9 aa, Homo Sapiens
YPCSKFIIA

SEQ ID NO: 128518 - protein, 9 aa, Homo Sapiens
YPFANKESI

SEQ ID NO: 128519 - protein, 9 aa, Homo Sapiens
YPFKNLPTA

SEQ ID NO: 128520 - protein, 9 aa, Homo Sapiens
YPFPGRLLP

SEQ ID NO: 128521 - protein, 9 aa, Homo Sapiens
YPFPLSHSV

SEQ ID NO: 128522 - protein, 9 aa, Homo Sapiens
YPGFNPFRA

SEQ ID NO: 128523 - protein, 9 aa, Homo Sapiens
YPHGWVETA

SEQ ID NO: 128524 - protein, 9 aa, Homo Sapiens
YPHQVPLVL

SEQ ID NO: 128525 - protein, 9 aa, Homo Sapiens
YPKNPHLRA

SEQ ID NO: 128526 - protein, 9 aa, Homo Sapiens
YPLDHARAA

SEQ ID NO: 128527 - protein, 9 aa, Homo Sapiens
YPLDLLLKL

SEQ ID NO: 128528 - protein, 9 aa, Homo Sapiens
YPLEKVAEA

SEQ ID NO: 128529 - protein, 9 aa, Homo Sapiens
YPLLLKELA

SEQ ID NO: 128530 - protein, 9 aa, Homo Sapiens
YPNFAGPHA

SEQ ID NO: 128531 - protein, 9 aa, Homo Sapiens
YPNFSLPAA

SEQ ID NO: 128532 - protein, 9 aa, Homo Sapiens
YPNYPNPAV

SEQ ID NO: 128533 - protein, 9 aa, Homo Sapiens
YPQELIVPA

SEQ ID NO: 128534 - protein, 9 aa, Homo Sapiens
YPRPGTPAA

SEQ ID NO: 128535 - protein, 9 aa, Homo Sapiens
YPSAPFLAA

SEQ ID NO: 128536 - protein, 9 aa, Homo Sapiens
YPSEHLIQA

SEQ ID NO: 128537 - protein, 9 aa, Homo Sapiens
YPTHVKVTA

SEQ ID NO: 128538 - protein, 9 aa, Homo Sapiens
YPTRPHIAA

SEQ ID NO: 128539 - protein, 9 aa, Homo Sapiens
YPVESSKSA

SEQ ID NO: 128540 - protein, 9 aa, Homo Sapiens
YPVHLAVRA

SEQ ID NO: 128541 - protein, 9 aa, Homo Sapiens
YSFYLPIAA

SEQ ID NO: 128542 - protein, 10 aa, Homo Sapiens
AAAAAAKVPA

SEQ ID NO: 128543 - protein, 10 aa, Homo Sapiens
AAAAPAAPAA

SEQ ID NO: 128544 - protein, 10 aa, Homo Sapiens
AAGGPQRIPA

SEQ ID NO: 128545 - protein, 10 aa, Homo Sapiens
AAGPPISEGK

SEQ ID NO: 128546 - protein, 10 aa, Homo Sapiens
AAPAPAAHVA

SEQ ID NO: 128547 - protein, 10 aa, Homo Sapiens
AAPREPAIHS

SEQ ID NO: 128548 - protein, 10 aa, Homo Sapiens
AGPARLSPAA

SEQ ID NO: 128549 - protein, 10 aa, Homo Sapiens
APAAATVAVA

SEQ ID NO: 128550 - protein, 10 aa, Homo Sapiens
APAAAVVRAA

SEQ ID NO: 128551 - protein, 10 aa, Homo Sapiens
APAAPLQVHA

SEQ ID NO: 128552 - protein, 10 aa, Homo Sapiens
APAERRQRAA

SEQ ID NO: 128553 - protein, 10 aa, Homo Sapiens
APAGGFQNIA

SEQ ID NO: 128554 - protein, 10 aa, Homo Sapiens
APAKFQPASA

SEQ ID NO: 128555 - protein, 10 aa, Homo Sapiens
APALLLIPAA

SEQ ID NO: 128556 - protein, 10 aa, Homo Sapiens
APAPAAHVAG

SEQ ID NO: 128557 - protein, 10 aa, Homo Sapiens
APAPAEKTPV

SEQ ID NO: 128558 - protein, 10 aa, Homo Sapiens
APAPSLFPAA

SEQ ID NO: 128559 - protein, 10 aa, Homo Sapiens
APASVVPAPA

SEQ ID NO: 128560 - protein, 10 aa, Homo Sapiens
APAVLLGGVA

SEQ ID NO: 128561 - protein, 10 aa, Homo Sapiens
APFAAHGYGA

SEQ ID NO: 128562 - protein, 10 aa, Homo Sapiens
APFDSRFPNQ

SEQ ID NO: 128563 - protein, 10 aa, Homo Sapiens
APFQNILPRV

SEQ ID NO: 128564 - protein, 10 aa, Homo Sapiens
APFQTSQASA

SEQ ID NO: 128565 - protein, 10 aa, Homo Sapiens
APFVPVGIAG

SEQ ID NO: 128566 - protein, 10 aa, Homo Sapiens
APGPAPPVSA

SEQ ID NO: 128567 - protein, 10 aa, Homo Sapiens
APGPGLLLAA

SEQ ID NO: 128568 - protein, 10 aa, Homo Sapiens
APHALLQAVL

SEQ ID NO: 128569 - protein, 10 aa, Homo Sapiens
APHDFANIKA

SEQ ID NO: 128570 - protein, 10 aa, Homo Sapiens
APHEILIQIV

SEQ ID NO: 128571 - protein, 10 aa, Homo Sapiens
APHIIVGTPG

SEQ ID NO: 128572 - protein, 10 aa, Homo Sapiens
APHIVVGTPG

SEQ ID NO: 128573 - protein, 10 aa, Homo Sapiens
APHTWPHIVA

SEQ ID NO: 128574 - protein, 10 aa, Homo Sapiens
APIAPLKITV

SEQ ID NO: 128575 - protein, 10 aa, Homo Sapiens
APIGGIDHKP

SEQ ID NO: 128576 - protein, 10 aa, Homo Sapiens
APIYPGFPKV

SEQ ID NO: 128577 - protein, 10 aa, Homo Sapiens
APKGSVLQEA

SEQ ID NO: 128578 - protein, 10 aa, Homo Sapiens
APKSIEVYSA

SEQ ID NO: 128579 - protein, 10 aa, Homo Sapiens
APLDGCILVV

SEQ ID NO: 128580 - protein, 10 aa, Homo Sapiens
APLNLGMIAA

SEQ ID NO: 128581 - protein, 10 aa, Homo Sapiens
APLPGLPPSA

SEQ ID NO: 128582 - protein, 10 aa, Homo Sapiens
APMAGLMEKA

SEQ ID NO: 128583 - protein, 10 aa, Homo Sapiens
APMLSTVHSA

SEQ ID NO: 128584 - protein, 10 aa, Homo Sapiens
APQETRGIPS

SEQ ID NO: 128585 - protein, 10 aa, Homo Sapiens
APQLRPAGTA

SEQ ID NO: 128586 - protein, 10 aa, Homo Sapiens
APQPAAPVGA

SEQ ID NO: 128587 - protein, 10 aa, Homo Sapiens
APREPVGWPA

SEQ ID NO: 128588 - protein, 10 aa, Homo Sapiens
APRGTGIVSA

SEQ ID NO: 128589 - protein, 10 aa, Homo Sapiens
APRSFHPPAA

SEQ ID NO: 128590 - protein, 10 aa, Homo Sapiens
APRSLPAAMA

SEQ ID NO: 128591 - protein, 10 aa, Homo Sapiens
APRTPEVRAA

SEQ ID NO: 128592 - protein, 10 aa, Homo Sapiens
APSAKGTISA

SEQ ID NO: 128593 - protein, 10 aa, Homo Sapiens
APSEARTTPA

SEQ ID NO: 128594 - protein, 10 aa, Homo Sapiens
APSGGRLLSA

SEQ ID NO: 128595 - protein, 10 aa, Homo Sapiens
APSKATLIEA

SEQ ID NO: 128596 - protein, 10 aa, Homo Sapiens
APSKTLVETA

SEQ ID NO: 128597 - protein, 10 aa, Homo Sapiens
APSMESRPPA

SEQ ID NO: 128598 - protein, 10 aa, Homo Sapiens
APSPSHPISA

SEQ ID NO: 128599 - protein, 10 aa, Homo Sapiens
APSPVQQHQA

SEQ ID NO: 128600 - protein, 10 aa, Homo Sapiens
APSWKCLPAA

SEQ ID NO: 128601 - protein, 10 aa, Homo Sapiens
APTEYASICV

SEQ ID NO: 128602 - protein, 10 aa, Homo Sapiens
APTKALVNQV

SEQ ID NO: 128603 - protein, 10 aa, Homo Sapiens
APVAAHTVTA

SEQ ID NO: 128604 - protein, 10 aa, Homo Sapiens
APVAVEPGAA

SEQ ID NO: 128605 - protein, 10 aa, Homo Sapiens
APVAVWAALA

SEQ ID NO: 128606 - protein, 10 aa, Homo Sapiens
APVGPRAAMS

SEQ ID NO: 128607 - protein, 10 aa, Homo Sapiens
APVGSRPHTV

SEQ ID NO: 128608 - protein, 10 aa, Homo Sapiens
APVHEIHESA

SEQ ID NO: 128609 - protein, 10 aa, Homo Sapiens
APVHPPNRSA

SEQ ID NO: 128610 - protein, 10 aa, Homo Sapiens
APVVLVGDHA

SEQ ID NO: 128611 - protein, 10 aa, Homo Sapiens
APYDAIHVGA

SEQ ID NO: 128612 - protein, 10 aa, Homo Sapiens
APYGNPKNMA

SEQ ID NO: 128613 - protein, 10 aa, Homo Sapiens
ATNKERLFAA

SEQ ID NO: 128614 - protein, 10 aa, Homo Sapiens
AVDSRTGKLT

SEQ ID NO: 128615 - protein, 10 aa, Homo Sapiens
AVKKNPGIAA

SEQ ID NO: 128616 - protein, 10 aa, Homo Sapiens
EAGPSIVHRK

SEQ ID NO: 128617 - protein, 10 aa, Homo Sapiens
EEQLQQIRAE

SEQ ID NO: 128618 - protein, 10 aa, Homo Sapiens
EIKKPPVSER

SEQ ID NO: 128619 - protein, 10 aa, Homo Sapiens
FGPGKPPPPP

SEQ ID NO: 128620 - protein, 10 aa, Homo Sapiens
FPANVMDVIA

SEQ ID NO: 128621 - protein, 10 aa, Homo Sapiens
FPIKWTAPEA

SEQ ID NO: 128622 - protein, 10 aa, Homo Sapiens
FPKPYPNSEA

SEQ ID NO: 128623 - protein, 10 aa, Homo Sapiens
FPMEIRQYLA

SEQ ID NO: 128624 - protein, 10 aa, Homo Sapiens
FPPTFAIPQA

SEQ ID NO: 128625 - protein, 10 aa, Homo Sapiens
GAGGGFGSRS

SEQ ID NO: 128626 - protein, 10 aa, Homo Sapiens
GGGLSVSSSR

SEQ ID NO: 128627 - protein, 10 aa, Homo Sapiens
GPFPGKFNEV

SEQ ID NO: 128628 - protein, 10 aa, Homo Sapiens
GPMPFLGRAA

SEQ ID NO: 128629 - protein, 10 aa, Homo Sapiens
GPSIVHRKCF

SEQ ID NO: 128630 - protein, 10 aa, Homo Sapiens
GPVGGVFNLA

SEQ ID NO: 128631 - protein, 10 aa, Homo Sapiens
GPWVGTGLAA

SEQ ID NO: 128632 - protein, 10 aa, Homo Sapiens
GPYGGAQPSA

SEQ ID NO: 128633 - protein, 10 aa, Homo Sapiens
HPAAFPLPVV

SEQ ID NO: 128634 - protein, 10 aa, Homo Sapiens
HPDPERRPSA

SEQ ID NO: 128635 - protein, 10 aa, Homo Sapiens
HPEPASGLAA

SEQ ID NO: 128636 - protein, 10 aa, Homo Sapiens
HPFKGFLLEA

SEQ ID NO: 128637 - protein, 10 aa, Homo Sapiens
HPFPGPGLAI

SEQ ID NO: 128638 - protein, 10 aa, Homo Sapiens
HPIEPVLITA

SEQ ID NO: 128639 - protein, 10 aa, Homo Sapiens
HPIHIIPASA

SEQ ID NO: 128640 - protein, 10 aa, Homo Sapiens
HPIRPKPPSA

SEQ ID NO: 128641 - protein, 10 aa, Homo Sapiens
HPKPEGLAAA

SEQ ID NO: 128642 - protein, 10 aa, Homo Sapiens
HPLLRPPPSA

SEQ ID NO: 128643 - protein, 10 aa, Homo Sapiens
HPNPPVVHSA

SEQ ID NO: 128644 - protein, 10 aa, Homo Sapiens
HPNQPLTITA

SEQ ID NO: 128645 - protein, 10 aa, Homo Sapiens
HPNVTLTISA

SEQ ID NO: 128646 - protein, 10 aa, Homo Sapiens
HPQPGSANSL

SEQ ID NO: 128647 - protein, 10 aa, Homo Sapiens
HPREPLPPIQ

SEQ ID NO: 128648 - protein, 10 aa, Homo Sapiens
HPSKALIASA

SEQ ID NO: 128649 - protein, 10 aa, Homo Sapiens
HPSPLSFFSA

SEQ ID NO: 128650 - protein, 10 aa, Homo Sapiens
HPSPVVLKVY

SEQ ID NO: 128651 - protein, 10 aa, Homo Sapiens
HPSQELLASA

SEQ ID NO: 128652 - protein, 10 aa, Homo Sapiens
HPTDASMIEA

SEQ ID NO: 128653 - protein, 10 aa, Homo Sapiens
HPTEDLVVSA

SEQ ID NO: 128654 - protein, 10 aa, Homo Sapiens
HPTENIIASA

SEQ ID NO: 128655 - protein, 10 aa, Homo Sapiens
HPWETVTTAA

SEQ ID NO: 128656 - protein, 10 aa, Homo Sapiens
HPYLFPVAAM

SEQ ID NO: 128657 - protein, 10 aa, Homo Sapiens
HPYRLILTVA

SEQ ID NO: 128658 - protein, 10 aa, Homo Sapiens
IAAQGFTVAA

SEQ ID NO: 128659 - protein, 10 aa, Homo Sapiens
IAKGWQDVTA

SEQ ID NO: 128660 - protein, 10 aa, Homo Sapiens
IPAAAIGEKA

SEQ ID NO: 128661 - protein, 10 aa, Homo Sapiens
IPADLRIISA

SEQ ID NO: 128662 - protein, 10 aa, Homo Sapiens
IPAHDSPLAA

SEQ ID NO: 128663 - protein, 10 aa, Homo Sapiens
IPCELRVTSA

SEQ ID NO: 128664 - protein, 10 aa, Homo Sapiens
IPDGRVSVSA

SEQ ID NO: 128665 - protein, 10 aa, Homo Sapiens
IPFLVPGIRY

SEQ ID NO: 128666 - protein, 10 aa, Homo Sapiens
IPHPLIMGVI

SEQ ID NO: 128667 - protein, 10 aa, Homo Sapiens
IPHQAPGEMT

SEQ ID NO: 128668 - protein, 10 aa, Homo Sapiens
IPHSLPGAVA

SEQ ID NO: 128669 - protein, 10 aa, Homo Sapiens
IPKDYKTMAA

SEQ ID NO: 128670 - protein, 10 aa, Homo Sapiens
IPKEDGVITA

SEQ ID NO: 128671 - protein, 10 aa, Homo Sapiens
IPKHINPVAA

SEQ ID NO: 128672 - protein, 10 aa, Homo Sapiens
IPLEKADHPA

SEQ ID NO: 128673 - protein, 10 aa, Homo Sapiens
IPLYLKGGVA

SEQ ID NO: 128674 - protein, 10 aa, Homo Sapiens
IPMKIRNVSA

SEQ ID NO: 128675 - protein, 10 aa, Homo Sapiens
IPMKPYYTKV

SEQ ID NO: 128676 - protein, 10 aa, Homo Sapiens
IPQATHSVSA

SEQ ID NO: 128677 - protein, 10 aa, Homo Sapiens
IPQLVSNISA

SEQ ID NO: 128678 - protein, 10 aa, Homo Sapiens
IPRGIPLDAA

SEQ ID NO: 128679 - protein, 10 aa, Homo Sapiens
IPRHPMPFAA

SEQ ID NO: 128680 - protein, 10 aa, Homo Sapiens
IPRPVDGVEV

SEQ ID NO: 128681 - protein, 10 aa, Homo Sapiens
IPVECSQRSA

SEQ ID NO: 128682 - protein, 10 aa, Homo Sapiens
IPVETIETTV

SEQ ID NO: 128683 - protein, 10 aa, Homo Sapiens
IPVHLPNIQA

SEQ ID NO: 128684 - protein, 10 aa, Homo Sapiens
IPVLVPGIIF

SEQ ID NO: 128685 - protein, 10 aa, Homo Sapiens
IPVTEIAIAA

SEQ ID NO: 128686 - protein, 10 aa, Homo Sapiens
IPYDQSPGPK

SEQ ID NO: 128687 - protein, 10 aa, Homo Sapiens
IPYQDYFYTA

SEQ ID NO: 128688 - protein, 10 aa, Homo Sapiens
IPYTGPFNLL

SEQ ID NO: 128689 - protein, 10 aa, Homo Sapiens
IRLENEIQTY

SEQ ID NO: 128690 - protein, 10 aa, Homo Sapiens
IVCDVPSASA

SEQ ID NO: 128691 - protein, 10 aa, Homo Sapiens
IVSGSLNHAA

SEQ ID NO: 128692 - protein, 10 aa, Homo Sapiens
KPAGPLGATA

SEQ ID NO: 128693 - protein, 10 aa, Homo Sapiens
KPAPPFNVTV

SEQ ID NO: 128694 - protein, 10 aa, Homo Sapiens
KPAPPQTEQV

SEQ ID NO: 128695 - protein, 10 aa, Homo Sapiens
KPATLTTTSA

SEQ ID NO: 128696 - protein, 10 aa, Homo Sapiens
KPFVEKPVSA

SEQ ID NO: 128697 - protein, 10 aa, Homo Sapiens
KPKPAGVLGA

SEQ ID NO: 128698 - protein, 10 aa, Homo Sapiens
KPLQPLPNTA

SEQ ID NO: 128699 - protein, 10 aa, Homo Sapiens
KPLRPLGKAA

SEQ ID NO: 128700 - protein, 10 aa, Homo Sapiens
KPMEIARIVA

SEQ ID NO: 128701 - protein, 10 aa, Homo Sapiens
KPMKSVLVVA

SEQ ID NO: 128702 - protein, 10 aa, Homo Sapiens
KPNPNQIISV

SEQ ID NO: 128703 - protein, 10 aa, Homo Sapiens
KPNTTVQVPA

SEQ ID NO: 128704 - protein, 10 aa, Homo Sapiens
KPQPNIIPTV

SEQ ID NO: 128705 - protein, 10 aa, Homo Sapiens
KPQSINTVSA

SEQ ID NO: 128706 - protein, 10 aa, Homo Sapiens
KPSPFTPVSA

SEQ ID NO: 128707 - protein, 10 aa, Homo Sapiens
KPTETLLNTV

SEQ ID NO: 128708 - protein, 10 aa, Homo Sapiens
KPYTLMSMVA

SEQ ID NO: 128709 - protein, 10 aa, Homo Sapiens
KPYTVVDVSA

SEQ ID NO: 128710 - protein, 10 aa, Homo Sapiens
LAQQVQQVAA

SEQ ID NO: 128711 - protein, 10 aa, Homo Sapiens
LPAASQPQVF

SEQ ID NO: 128712 - protein, 10 aa, Homo Sapiens
LPAGINSIVA

SEQ ID NO: 128713 - protein, 10 aa, Homo Sapiens
LPAHREGISA

SEQ ID NO: 128714 - protein, 10 aa, Homo Sapiens
LPAHSDPVSA

SEQ ID NO: 128715 - protein, 10 aa, Homo Sapiens
LPAPDFKVNA

SEQ ID NO: 128716 - protein, 10 aa, Homo Sapiens
LPAPHIMPGV

SEQ ID NO: 128717 - protein, 10 aa, Homo Sapiens
LPAQSGSHAA

SEQ ID NO: 128718 - protein, 10 aa, Homo Sapiens
LPARFKNTEA

SEQ ID NO: 128719 - protein, 10 aa, Homo Sapiens
LPASAGHPRA

SEQ ID NO: 128720 - protein, 10 aa, Homo Sapiens
LPASETPKAA

SEQ ID NO: 128721 - protein, 10 aa, Homo Sapiens
LPASIPHVIA

SEQ ID NO: 128722 - protein, 10 aa, Homo Sapiens
LPFLAPGARA

SEQ ID NO: 128723 - protein, 10 aa, Homo Sapiens
LPFYLIPPSA

SEQ ID NO: 128724 - protein, 10 aa, Homo Sapiens
LPHAILRLDL

SEQ ID NO: 128725 - protein, 10 aa, Homo Sapiens
LPHEIVVNLA

SEQ ID NO: 128726 - protein, 10 aa, Homo Sapiens
LPHPYAIAVF

SEQ ID NO: 128727 - protein, 10 aa, Homo Sapiens
LPHSAGRYAA

SEQ ID NO: 128728 - protein, 10 aa, Homo Sapiens
LPHSGYSDSA

SEQ ID NO: 128729 - protein, 10 aa, Homo Sapiens
LPIDLNNKSA

SEQ ID NO: 128730 - protein, 10 aa, Homo Sapiens
LPIPDPGVSV

SEQ ID NO: 128731 - protein, 10 aa, Homo Sapiens
LPKAGKFGPA

SEQ ID NO: 128732 - protein, 10 aa, Homo Sapiens
LPKDVSPTQA

SEQ ID NO: 128733 - protein, 10 aa, Homo Sapiens
LPKEDPTAVA

SEQ ID NO: 128734 - protein, 10 aa, Homo Sapiens
LPKGRPGPVA

SEQ ID NO: 128735 - protein, 10 aa, Homo Sapiens
LPLSAHGIVV

SEQ ID NO: 128736 - protein, 10 aa, Homo Sapiens
LPNHQVIHTA

SEQ ID NO: 128737 - protein, 10 aa, Homo Sapiens
LPNQSFPHSV

SEQ ID NO: 128738 - protein, 10 aa, Homo Sapiens
LPPPDHGAPA

SEQ ID NO: 128739 - protein, 10 aa, Homo Sapiens
LPPPPPSHPA

SEQ ID NO: 128740 - protein, 10 aa, Homo Sapiens
LPQEIKANVA

SEQ ID NO: 128741 - protein, 10 aa, Homo Sapiens
LPQKVLGSPA

SEQ ID NO: 128742 - protein, 10 aa, Homo Sapiens
LPQSREKIIA

SEQ ID NO: 128743 - protein, 10 aa, Homo Sapiens
LPQSYIHTSA

SEQ ID NO: 128744 - protein, 10 aa, Homo Sapiens
LPREGPYVCS

SEQ ID NO: 128745 - protein, 10 aa, Homo Sapiens
LPRGAAKAIA

SEQ ID NO: 128746 - protein, 10 aa, Homo Sapiens
LPRRPLPPAA

SEQ ID NO: 128747 - protein, 10 aa, Homo Sapiens
LPSESMKVVA

SEQ ID NO: 128748 - protein, 10 aa, Homo Sapiens
LPSGCYGRVA

SEQ ID NO: 128749 - protein, 10 aa, Homo Sapiens
LPTDASTTAV

SEQ ID NO: 128750 - protein, 10 aa, Homo Sapiens
LPVDKAFYEA

SEQ ID NO: 128751 - protein, 10 aa, Homo Sapiens
LPVFQPGVKL

SEQ ID NO: 128752 - protein, 10 aa, Homo Sapiens
LPVGAVINCA

SEQ ID NO: 128753 - protein, 10 aa, Homo Sapiens
LPVQLQRAMA

SEQ ID NO: 128754 - protein, 10 aa, Homo Sapiens
LPVWLENHTA

SEQ ID NO: 128755 - protein, 10 aa, Homo Sapiens
LPWKPVFITA

SEQ ID NO: 128756 - protein, 10 aa, Homo Sapiens
LPYDVTPEQA

SEQ ID NO: 128757 - protein, 10 aa, Homo Sapiens
LPYKPYFYIA

SEQ ID NO: 128758 - protein, 10 aa, Homo Sapiens
LVYQEPIPTA

SEQ ID NO: 128759 - protein, 10 aa, Homo Sapiens
MAAANGIGRL

SEQ ID NO: 128760 - protein, 10 aa, Homo Sapiens
MAMESTATAA

SEQ ID NO: 128761 - protein, 10 aa, Homo Sapiens
MPAPPPKENA

SEQ ID NO: 128762 - protein, 10 aa, Homo Sapiens
MPCSVIRPIL

SEQ ID NO: 128763 - protein, 10 aa, Homo Sapiens
MPHLVNGDAA

SEQ ID NO: 128764 - protein, 10 aa, Homo Sapiens
MPIYPTYNEV

SEQ ID NO: 128765 - protein, 10 aa, Homo Sapiens
MPNGDHIVSA

SEQ ID NO: 128766 - protein, 10 aa, Homo Sapiens
MPNGTPHPTA

SEQ ID NO: 128767 - protein, 10 aa, Homo Sapiens
MPNPQLNIKA

SEQ ID NO: 128768 - protein, 10 aa, Homo Sapiens
MPPPVSPSTA

SEQ ID NO: 128769 - protein, 10 aa, Homo Sapiens
MPQLNAIIAA

SEQ ID NO: 128770 - protein, 10 aa, Homo Sapiens
MPQMCKATSA

SEQ ID NO: 128771 - protein, 10 aa, Homo Sapiens
MPQSGTGVSV

SEQ ID NO: 128772 - protein, 10 aa, Homo Sapiens
MPRFTEQVEA

SEQ ID NO: 128773 - protein, 10 aa, Homo Sapiens
MPTTLEGAEA

SEQ ID NO: 128774 - protein, 10 aa, Homo Sapiens
MPVEAKCINA

SEQ ID NO: 128775 - protein, 10 aa, Homo Sapiens
MPVQFKPKSA

SEQ ID NO: 128776 - protein, 10 aa, Homo Sapiens
NHPYLFPVAA

SEQ ID NO: 128777 - protein, 10 aa, Homo Sapiens
NPLGMPVPAA

SEQ ID NO: 128778 - protein, 10 aa, Homo Sapiens
NPMVVANAVA

SEQ ID NO: 128779 - protein, 10 aa, Homo Sapiens
NPSPSTSISA

SEQ ID NO: 128780 - protein, 10 aa, Homo Sapiens
NPYFPGQAIA

SEQ ID NO: 128781 - protein, 10 aa, Homo Sapiens
NPYNGGGRVA

SEQ ID NO: 128782 - protein, 10 aa, Homo Sapiens
NSVPSNPVAA

SEQ ID NO: 128783 - protein, 10 aa, Homo Sapiens
PARFKNTEAI

SEQ ID NO: 128784 - protein, 10 aa, Homo Sapiens
PPPPGKPQGP

SEQ ID NO: 128785 - protein, 10 aa, Homo Sapiens
PRGPAGPAAQ

SEQ ID NO: 128786 - protein, 10 aa, Homo Sapiens
PRRVEPAPAA

SEQ ID NO: 128787 - protein, 10 aa, Homo Sapiens
QAAAPVLTPA

SEQ ID NO: 128788 - protein, 10 aa, Homo Sapiens
QFPAPKSAST

SEQ ID NO: 128789 - protein, 10 aa, Homo Sapiens
QPFGDHIISV

SEQ ID NO: 128790 - protein, 10 aa, Homo Sapiens
QPHHLLLPAA

SEQ ID NO: 128791 - protein, 10 aa, Homo Sapiens
QPHIAGVFSA

SEQ ID NO: 128792 - protein, 10 aa, Homo Sapiens
QPPSLPAVSA

SEQ ID NO: 128793 - protein, 10 aa, Homo Sapiens
QPRTPSPLVL

SEQ ID NO: 128794 - protein, 10 aa, Homo Sapiens
QPWPQPVPAL

SEQ ID NO: 128795 - protein, 10 aa, Homo Sapiens
QPYYATRVNA

SEQ ID NO: 128796 - protein, 10 aa, Homo Sapiens
QVANVRFNVA

SEQ ID NO: 128797 - protein, 10 aa, Homo Sapiens
QVMQGMGVSA

SEQ ID NO: 128798 - protein, 10 aa, Homo Sapiens
RPAAAPPAGA

SEQ ID NO: 128799 - protein, 10 aa, Homo Sapiens
RPADVIFATV

SEQ ID NO: 128800 - protein, 10 aa, Homo Sapiens
RPAGPPREPV

SEQ ID NO: 128801 - protein, 10 aa, Homo Sapiens
RPALAVGVTA

SEQ ID NO: 128802 - protein, 10 aa, Homo Sapiens
RPALVEQTAA

SEQ ID NO: 128803 - protein, 10 aa, Homo Sapiens
RPAPALAPAA

SEQ ID NO: 128804 - protein, 10 aa, Homo Sapiens
RPAPHFERTA

SEQ ID NO: 128805 - protein, 10 aa, Homo Sapiens
RPAPLPAAVV

SEQ ID NO: 128806 - protein, 10 aa, Homo Sapiens
RPAPPLRPSA

SEQ ID NO: 128807 - protein, 10 aa, Homo Sapiens
RPAPVAVAAA

SEQ ID NO: 128808 - protein, 10 aa, Homo Sapiens
RPASYQSVSV

SEQ ID NO: 128809 - protein, 10 aa, Homo Sapiens
RPELLCGAVA

SEQ ID NO: 128810 - protein, 10 aa, Homo Sapiens
RPFEGFQRKA

SEQ ID NO: 128811 - protein, 10 aa, Homo Sapiens
RPFHNGVKCL

SEQ ID NO: 128812 - protein, 10 aa, Homo Sapiens
RPFLNSISKA

SEQ ID NO: 128813 - protein, 10 aa, Homo Sapiens
RPFSGRRLPV

SEQ ID NO: 128814 - protein, 10 aa, Homo Sapiens
RPFTIPYLTA

SEQ ID NO: 128815 - protein, 10 aa, Homo Sapiens
RPHDSHSFQA

SEQ ID NO: 128816 - protein, 10 aa, Homo Sapiens
RPIPNQPPTA

SEQ ID NO: 128817 - protein, 10 aa, Homo Sapiens
RPIPSALTQA

SEQ ID NO: 128818 - protein, 10 aa, Homo Sapiens
RPISLGHVVV

SEQ ID NO: 128819 - protein, 10 aa, Homo Sapiens
RPITPPRNSA

SEQ ID NO: 128820 - protein, 10 aa, Homo Sapiens
RPIWLRESTV

SEQ ID NO: 128821 - protein, 10 aa, Homo Sapiens
RPIYIKDYVT

SEQ ID NO: 128822 - protein, 10 aa, Homo Sapiens
RPKDCDVLTA

SEQ ID NO: 128823 - protein, 10 aa, Homo Sapiens
RPKDDIKLTA

SEQ ID NO: 128824 - protein, 10 aa, Homo Sapiens
RPKPPNVRTA

SEQ ID NO: 128825 - protein, 10 aa, Homo Sapiens
RPLDIDEVEA

SEQ ID NO: 128826 - protein, 10 aa, Homo Sapiens
RPLPVTFHRA

SEQ ID NO: 128827 - protein, 10 aa, Homo Sapiens
RPLQDEPAAA

SEQ ID NO: 128828 - protein, 10 aa, Homo Sapiens
RPLQDYGISV

SEQ ID NO: 128829 - protein, 10 aa, Homo Sapiens
RPLSGLMETA

SEQ ID NO: 128830 - protein, 10 aa, Homo Sapiens
RPLSGSGISA

SEQ ID NO: 128831 - protein, 10 aa, Homo Sapiens
RPLSYTVVTA

SEQ ID NO: 128832 - protein, 10 aa, Homo Sapiens
RPLYCSPITA

SEQ ID NO: 128833 - protein, 10 aa, Homo Sapiens
RPMYAHHISS

SEQ ID NO: 128834 - protein, 10 aa, Homo Sapiens
RPNAFGMAQA

SEQ ID NO: 128835 - protein, 10 aa, Homo Sapiens
RPNDSRMLVA

SEQ ID NO: 128836 - protein, 10 aa, Homo Sapiens
RPNSLVGITS

SEQ ID NO: 128837 - protein, 10 aa, Homo Sapiens
RPPDFISISA

SEQ ID NO: 128838 - protein, 10 aa, Homo Sapiens
RPPEPRHIPA

SEQ ID NO: 128839 - protein, 10 aa, Homo Sapiens
RPRAVYAVEA

SEQ ID NO: 128840 - protein, 10 aa, Homo Sapiens
RPRDSQLYAV

SEQ ID NO: 128841 - protein, 10 aa, Homo Sapiens
RPREVQETTV

SEQ ID NO: 128842 - protein, 10 aa, Homo Sapiens
RPRNGGICVA

SEQ ID NO: 128843 - protein, 10 aa, Homo Sapiens
RPRPAPGSPP

SEQ ID NO: 128844 - protein, 10 aa, Homo Sapiens
RPRPPPVEQV

SEQ ID NO: 128845 - protein, 10 aa, Homo Sapiens
RPRPVVTTTT

SEQ ID NO: 128846 - protein, 10 aa, Homo Sapiens
RPRTEVSLSA

SEQ ID NO: 128847 - protein, 10 aa, Homo Sapiens
RPRVTEPISA

SEQ ID NO: 128848 - protein, 10 aa, Homo Sapiens
RPSLLRPVSA

SEQ ID NO: 128849 - protein, 10 aa, Homo Sapiens
RPSSLHGLAA

SEQ ID NO: 128850 - protein, 10 aa, Homo Sapiens
RPVHPALPFA

SEQ ID NO: 128851 - protein, 10 aa, Homo Sapiens
RPWYSHPVYA

SEQ ID NO: 128852 - protein, 10 aa, Homo Sapiens
RPYAPINANA

SEQ ID NO: 128853 - protein, 10 aa, Homo Sapiens
RPYFPADATA

SEQ ID NO: 128854 - protein, 10 aa, Homo Sapiens
RPYGCVLRAA

SEQ ID NO: 128855 - protein, 10 aa, Homo Sapiens
RPYLGYDWIA

SEQ ID NO: 128856 - protein, 10 aa, Homo Sapiens
RQGVDADING

SEQ ID NO: 128857 - protein, 10 aa, Homo Sapiens
RVAEVIFPTA

SEQ ID NO: 128858 - protein, 10 aa, Homo Sapiens
SMDNNRSLDL

SEQ ID NO: 128859 - protein, 10 aa, Homo Sapiens
SPAEVAKITA

SEQ ID NO: 128860 - protein, 10 aa, Homo Sapiens
SPARLYAIAA

SEQ ID NO: 128861 - protein, 10 aa, Homo Sapiens
SPARPVSPAP

SEQ ID NO: 128862 - protein, 10 aa, Homo Sapiens
SPDGNRFATA

SEQ ID NO: 128863 - protein, 10 aa, Homo Sapiens
SPDGRWLISA

SEQ ID NO: 128864 - protein, 10 aa, Homo Sapiens
SPDPFGAVAA

SEQ ID NO: 128865 - protein, 10 aa, Homo Sapiens
SPFDHSRIKL

SEQ ID NO: 128866 - protein, 10 aa, Homo Sapiens
SPFGLKPRSA

SEQ ID NO: 128867 - protein, 10 aa, Homo Sapiens
SPFHFQPSAA

SEQ ID NO: 128868 - protein, 10 aa, Homo Sapiens
SPFPSSIPHA

SEQ ID NO: 128869 - protein, 10 aa, Homo Sapiens
SPHAHISEQA

SEQ ID NO: 128870 - protein, 10 aa, Homo Sapiens
SPHAVDGNTV

SEQ ID NO: 128871 - protein, 10 aa, Homo Sapiens
SPHGGLTVSA

SEQ ID NO: 128872 - protein, 10 aa, Homo Sapiens
SPHGLVMVGV

SEQ ID NO: 128873 - protein, 10 aa, Homo Sapiens
SPHGYLSDVA

SEQ ID NO: 128874 - protein, 10 aa, Homo Sapiens
SPHLPGTSSA

SEQ ID NO: 128875 - protein, 10 aa, Homo Sapiens
SPHPGVGVPT

SEQ ID NO: 128876 - protein, 10 aa, Homo Sapiens
SPHPPSEVTA

SEQ ID NO: 128877 - protein, 10 aa, Homo Sapiens
SPHSILVNGA

SEQ ID NO: 128878 - protein, 10 aa, Homo Sapiens
SPIENIQRVA

SEQ ID NO: 128879 - protein, 10 aa, Homo Sapiens
SPILVATAVA

SEQ ID NO: 128880 - protein, 10 aa, Homo Sapiens
SPIPLLLSCA

SEQ ID NO: 128881 - protein, 10 aa, Homo Sapiens
SPIRSRSPPA

SEQ ID NO: 128882 - protein, 10 aa, Homo Sapiens
SPITGEKIPA

SEQ ID NO: 128883 - protein, 10 aa, Homo Sapiens
SPKAALRYAA

SEQ ID NO: 128884 - protein, 10 aa, Homo Sapiens
SPKPALRYAA

SEQ ID NO: 128885 - protein, 10 aa, Homo Sapiens
SPKPCLAQPA

SEQ ID NO: 128886 - protein, 10 aa, Homo Sapiens
SPKQILDPAA

SEQ ID NO: 128887 - protein, 10 aa, Homo Sapiens
SPKQILDSAA

SEQ ID NO: 128888 - protein, 10 aa, Homo Sapiens
SPLATQIPQA

SEQ ID NO: 128889 - protein, 10 aa, Homo Sapiens
SPLFSQHTAA

SEQ ID NO: 128890 - protein, 10 aa, Homo Sapiens
SPLNTPHTSA

SEQ ID NO: 128891 - protein, 10 aa, Homo Sapiens
SPLRSPIRSA

SEQ ID NO: 128892 - protein, 10 aa, Homo Sapiens
SPLSAAAATA

SEQ ID NO: 128893 - protein, 10 aa, Homo Sapiens
SPLVTHQNPA

SEQ ID NO: 128894 - protein, 10 aa, Homo Sapiens
SPMPWKGVTV

SEQ ID NO: 128895 - protein, 10 aa, Homo Sapiens
SPMSADRVVA

SEQ ID NO: 128896 - protein, 10 aa, Homo Sapiens
SPNGKYILAA

SEQ ID NO: 128897 - protein, 10 aa, Homo Sapiens
SPNKTGGFGA

SEQ ID NO: 128898 - protein, 10 aa, Homo Sapiens
SPNMANTVNA

SEQ ID NO: 128899 - protein, 10 aa, Homo Sapiens
SPNPARGHSV

SEQ ID NO: 128900 - protein, 10 aa, Homo Sapiens
SPNPFSVHTA

SEQ ID NO: 128901 - protein, 10 aa, Homo Sapiens
SPNRYWLCAA

SEQ ID NO: 128902 - protein, 10 aa, Homo Sapiens
SPPAGLFTSA

SEQ ID NO: 128903 - protein, 10 aa, Homo Sapiens
SPQEAQIIQA

SEQ ID NO: 128904 - protein, 10 aa, Homo Sapiens
SPRLFSNHAA

SEQ ID NO: 128905 - protein, 10 aa, Homo Sapiens
SPRPALVRSA

SEQ ID NO: 128906 - protein, 10 aa, Homo Sapiens
SPRTAVAPSA

SEQ ID NO: 128907 - protein, 10 aa, Homo Sapiens
SPSMAVRIAA

SEQ ID NO: 128908 - protein, 10 aa, Homo Sapiens
SPSNVTLPQV

SEQ ID NO: 128909 - protein, 10 aa, Homo Sapiens
SPSPPFGHSA

SEQ ID NO: 128910 - protein, 10 aa, Homo Sapiens
SPTACRAVAA

SEQ ID NO: 128911 - protein, 10 aa, Homo Sapiens
SPTAYGVIAA

SEQ ID NO: 128912 - protein, 10 aa, Homo Sapiens
SPTGKEFVSA

SEQ ID NO: 128913 - protein, 10 aa, Homo Sapiens
SPVDPGARQA

SEQ ID NO: 128914 - protein, 10 aa, Homo Sapiens
SPVIIKEWAA

SEQ ID NO: 128915 - protein, 10 aa, Homo Sapiens
SPVPSHWMVA

SEQ ID NO: 128916 - protein, 10 aa, Homo Sapiens
SPVSSVGNSA

SEQ ID NO: 128917 - protein, 10 aa, Homo Sapiens
SPYKDLLDPA

SEQ ID NO: 128918 - protein, 10 aa, Homo Sapiens
SPYPWPLNHI

SEQ ID NO: 128919 - protein, 10 aa, Homo Sapiens
SYGGGSGGGF

SEQ ID NO: 128920 - protein, 10 aa, Homo Sapiens
TAAPSLKNAA

SEQ ID NO: 128921 - protein, 10 aa, Homo Sapiens
TPAALDGTVA

SEQ ID NO: 128922 - protein, 10 aa, Homo Sapiens
TPAHVLPSAA

SEQ ID NO: 128923 - protein, 10 aa, Homo Sapiens
TPAPSAPAAA

SEQ ID NO: 128924 - protein, 10 aa, Homo Sapiens
TPAPVEKSPA

SEQ ID NO: 128925 - protein, 10 aa, Homo Sapiens
TPFQGQGHGA

SEQ ID NO: 128926 - protein, 10 aa, Homo Sapiens
TPFTGPFISV

SEQ ID NO: 128927 - protein, 10 aa, Homo Sapiens
TPHPVLTPVA

SEQ ID NO: 128928 - protein, 10 aa, Homo Sapiens
TPHTVTAISA

SEQ ID NO: 128929 - protein, 10 aa, Homo Sapiens
TPKEVGDVIA

SEQ ID NO: 128930 - protein, 10 aa, Homo Sapiens
TPKPIPILAA

SEQ ID NO: 128931 - protein, 10 aa, Homo Sapiens
TPLPAIVPAA

SEQ ID NO: 128932 - protein, 10 aa, Homo Sapiens
TPLQSVPAPA

SEQ ID NO: 128933 - protein, 10 aa, Homo Sapiens
TPMSAQGVQA

SEQ ID NO: 128934 - protein, 10 aa, Homo Sapiens
TPMYTHSIAA

SEQ ID NO: 128935 - protein, 10 aa, Homo Sapiens
TPPLPVPPAA

SEQ ID NO: 128936 - protein, 10 aa, Homo Sapiens
TPPPFSLPSV

SEQ ID NO: 128937 - protein, 10 aa, Homo Sapiens
TPQEKIFIAA

SEQ ID NO: 128938 - protein, 10 aa, Homo Sapiens
TPRPLTSARA

SEQ ID NO: 128939 - protein, 10 aa, Homo Sapiens
TPRPPLRPGA

SEQ ID NO: 128940 - protein, 10 aa, Homo Sapiens
TPSKVWGSSA

SEQ ID NO: 128941 - protein, 10 aa, Homo Sapiens
TPSPVIRSTA

SEQ ID NO: 128942 - protein, 10 aa, Homo Sapiens
TPVLPAPTAA

SEQ ID NO: 128943 - protein, 10 aa, Homo Sapiens
TPYGYFLISA

SEQ ID NO: 128944 - protein, 10 aa, Homo Sapiens
TPYSGKLMSA

SEQ ID NO: 128945 - protein, 10 aa, Homo Sapiens
TQARAPVTAA

SEQ ID NO: 128946 - protein, 10 aa, Homo Sapiens
VLSAADKGNV

SEQ ID NO: 128947 - protein, 10 aa, Homo Sapiens
VPAHAVVVRA

SEQ ID NO: 128948 - protein, 10 aa, Homo Sapiens
VPAKGLATSV

SEQ ID NO: 128949 - protein, 10 aa, Homo Sapiens
VPAPAHLVAT

SEQ ID NO: 128950 - protein, 10 aa, Homo Sapiens
VPAPSPLSAA

SEQ ID NO: 128951 - protein, 10 aa, Homo Sapiens
VPFKPQIPEA

SEQ ID NO: 128952 - protein, 10 aa, Homo Sapiens
VPFYNGGNCV

SEQ ID NO: 128953 - protein, 10 aa, Homo Sapiens
VPGYISRSVA

SEQ ID NO: 128954 - protein, 10 aa, Homo Sapiens
VPHFPTPSIL

SEQ ID NO: 128955 - protein, 10 aa, Homo Sapiens
VPHQPDNLAA

SEQ ID NO: 128956 - protein, 10 aa, Homo Sapiens
VPHWDPKISA

SEQ ID NO: 128957 - protein, 10 aa, Homo Sapiens
VPIEVLPTVL

SEQ ID NO: 128958 - protein, 10 aa, Homo Sapiens
VPIVPQAPAA

SEQ ID NO: 128959 - protein, 10 aa, Homo Sapiens
VPKKPGPPVL

SEQ ID NO: 128960 - protein, 10 aa, Homo Sapiens
VPKNSDPWAA

SEQ ID NO: 128961 - protein, 10 aa, Homo Sapiens
VPKNYKLVAA

SEQ ID NO: 128962 - protein, 10 aa, Homo Sapiens
VPKSAVQQVA

SEQ ID NO: 128963 - protein, 10 aa, Homo Sapiens
VPNYKLITPA

SEQ ID NO: 128964 - protein, 10 aa, Homo Sapiens
VPQEAQKIQA

SEQ ID NO: 128965 - protein, 10 aa, Homo Sapiens
VPQPPPGPAA

SEQ ID NO: 128966 - protein, 10 aa, Homo Sapiens
VPQQPTYVQA

SEQ ID NO: 128967 - protein, 10 aa, Homo Sapiens
VPRPPDTVST

SEQ ID NO: 128968 - protein, 10 aa, Homo Sapiens
VPRPPSNPPA

SEQ ID NO: 128969 - protein, 10 aa, Homo Sapiens
VPRQPTVTSV

SEQ ID NO: 128970 - protein, 10 aa, Homo Sapiens
VPRTVSSTTA

SEQ ID NO: 128971 - protein, 10 aa, Homo Sapiens
VPSLPVPHPA

SEQ ID NO: 128972 - protein, 10 aa, Homo Sapiens
VPSPGLPVSA

SEQ ID NO: 128973 - protein, 10 aa, Homo Sapiens
VPVGIAGFAA

SEQ ID NO: 128974 - protein, 10 aa, Homo Sapiens
VPVVLVGNKA

SEQ ID NO: 128975 - protein, 10 aa, Homo Sapiens
VPVWSGMNVA

SEQ ID NO: 128976 - protein, 10 aa, Homo Sapiens
VPYCIIKGKA

SEQ ID NO: 128977 - protein, 10 aa, Homo Sapiens
VPYEIQKGQA

SEQ ID NO: 128978 - protein, 10 aa, Homo Sapiens
VPYRLLPGIF

SEQ ID NO: 128979 - protein, 10 aa, Homo Sapiens
WRRIPGGYSA

SEQ ID NO: 128980 - protein, 10 aa, Homo Sapiens
YLKDGPYITA

SEQ ID NO: 128981 - protein, 10 aa, Homo Sapiens
YPHGINTAIY

SEQ ID NO: 128982 - protein, 10 aa, Homo Sapiens
YPIGTNAIVA

SEQ ID NO: 128983 - protein, 10 aa, Homo Sapiens
YPKAEPMPSA

SEQ ID NO: 128984 - protein, 10 aa, Homo Sapiens
YPNFAGPHAA

SEQ ID NO: 128985 - protein, 10 aa, Homo Sapiens
YPRTPEERAA

SEQ ID NO: 128986 - protein, 10 aa, Homo Sapiens
YPSKSASVTA

SEQ ID NO: 128987 - protein, 10 aa, Homo Sapiens
YPSTAVRHMA

SEQ ID NO: 128988 - protein, 11 aa, Homo Sapiens
AAAAAAAKVPA

SEQ ID NO: 128989 - protein, 11 aa, Homo Sapiens
AALPAAALPAA

SEQ ID NO: 128990 - protein, 11 aa, Homo Sapiens
AGPAASPHLSP

SEQ ID NO: 128991 - protein, 11 aa, Homo Sapiens
APAAAPSSLAV

SEQ ID NO: 128992 - protein, 11 aa, Homo Sapiens
APAALPSSTAA

SEQ ID NO: 128993 - protein, 11 aa, Homo Sapiens
APAEEPAAAAA

SEQ ID NO: 128994 - protein, 11 aa, Homo Sapiens
APAGGDKKVIA

SEQ ID NO: 128995 - protein, 11 aa, Homo Sapiens
APAPAPTPVSA

SEQ ID NO: 128996 - protein, 11 aa, Homo Sapiens
APAPPKAEAKA

SEQ ID NO: 128997 - protein, 11 aa, Homo Sapiens
APAPPQVLPQA

SEQ ID NO: 128998 - protein, 11 aa, Homo Sapiens
APAPVIISSSA

SEQ ID NO: 128999 - protein, 11 aa, Homo Sapiens
APASVFPQNGA

SEQ ID NO: 129000 - protein, 11 aa, Homo Sapiens
APDGSLILVSA

SEQ ID NO: 129001 - protein, 11 aa, Homo Sapiens
APFDTVHIPEA

SEQ ID NO: 129002 - protein, 11 aa, Homo Sapiens
APFYSSDILIA

SEQ ID NO: 129003 - protein, 11 aa, Homo Sapiens
APHEILIQIVD

SEQ ID NO: 129004 - protein, 11 aa, Homo Sapiens
APHFVHPNDHA

SEQ ID NO: 129005 - protein, 11 aa, Homo Sapiens
APHGGDLQPPA

SEQ ID NO: 129006 - protein, 11 aa, Homo Sapiens
APIKVGDAIPA

SEQ ID NO: 129007 - protein, 11 aa, Homo Sapiens
APILNIPIVQF

SEQ ID NO: 129008 - protein, 11 aa, Homo Sapiens
APIQSPKGVEA

SEQ ID NO: 129009 - protein, 11 aa, Homo Sapiens
APIQWEERNVT

SEQ ID NO: 129010 - protein, 11 aa, Homo Sapiens
APIRLPEHVTV

SEQ ID NO: 129011 - protein, 11 aa, Homo Sapiens
APKDVKIRISA

SEQ ID NO: 129012 - protein, 11 aa, Homo Sapiens
APLAIPSAAAA

SEQ ID NO: 129013 - protein, 11 aa, Homo Sapiens
APLAVLQGHSA

SEQ ID NO: 129014 - protein, 11 aa, Homo Sapiens
APLDSIHSLAA

SEQ ID NO: 129015 - protein, 11 aa, Homo Sapiens
APLEEARQFAA

SEQ ID NO: 129016 - protein, 11 aa, Homo Sapiens
APMALFYPATF

SEQ ID NO: 129017 - protein, 11 aa, Homo Sapiens
APMPYLIGIHL

SEQ ID NO: 129018 - protein, 11 aa, Homo Sapiens
APMPYLIGVHA

SEQ ID NO: 129019 - protein, 11 aa, Homo Sapiens
APNEFQGQVIA

SEQ ID NO: 129020 - protein, 11 aa, Homo Sapiens
APNRFWASVEP

SEQ ID NO: 129021 - protein, 11 aa, Homo Sapiens
APQELNPAVTA

SEQ ID NO: 129022 - protein, 11 aa, Homo Sapiens
APRAPRALAAA

SEQ ID NO: 129023 - protein, 11 aa, Homo Sapiens
APRLCSISVTA

SEQ ID NO: 129024 - protein, 11 aa, Homo Sapiens
APRPASGPIRP

SEQ ID NO: 129025 - protein, 11 aa, Homo Sapiens
APSKAAALAAA

SEQ ID NO: 129026 - protein, 11 aa, Homo Sapiens
APSKACMLTTA

SEQ ID NO: 129027 - protein, 11 aa, Homo Sapiens
APSNGLSVRSA

SEQ ID NO: 129028 - protein, 11 aa, Homo Sapiens
APSPQVVYQVA

SEQ ID NO: 129029 - protein, 11 aa, Homo Sapiens
APTANLLQTCA

SEQ ID NO: 129030 - protein, 11 aa, Homo Sapiens
APTGSGKTVAA

SEQ ID NO: 129031 - protein, 11 aa, Homo Sapiens
APTKALVNQVA

SEQ ID NO: 129032 - protein, 11 aa, Homo Sapiens
APTPAQAQITA

SEQ ID NO: 129033 - protein, 11 aa, Homo Sapiens
APTSAGKTLVA

SEQ ID NO: 129034 - protein, 11 aa, Homo Sapiens
APVAVEPGAAV

SEQ ID NO: 129035 - protein, 11 aa, Homo Sapiens
APVAVLQGHSA

SEQ ID NO: 129036 - protein, 11 aa, Homo Sapiens
APVNIAGSRTA

SEQ ID NO: 129037 - protein, 11 aa, Homo Sapiens
APWAVTSLYEA

SEQ ID NO: 129038 - protein, 11 aa, Homo Sapiens
APWPIVGLGKF

SEQ ID NO: 129039 - protein, 11 aa, Homo Sapiens
APWPPKGLVPA

SEQ ID NO: 129040 - protein, 11 aa, Homo Sapiens
APYAKGFGVAA

SEQ ID NO: 129041 - protein, 11 aa, Homo Sapiens
APYDPHFPAPA

SEQ ID NO: 129042 - protein, 11 aa, Homo Sapiens
AVEAKKTYVRD

SEQ ID NO: 129043 - protein, 11 aa, Homo Sapiens
EIASFDKAKLK

SEQ ID NO: 129044 - protein, 11 aa, Homo Sapiens
ETQITQIEHEV

SEQ ID NO: 129045 - protein, 11 aa, Homo Sapiens
FPFKPPQRIEA

SEQ ID NO: 129046 - protein, 11 aa, Homo Sapiens
FPHFDLSHGSA

SEQ ID NO: 129047 - protein, 11 aa, Homo Sapiens
FPRAPSTSDSV

SEQ ID NO: 129048 - protein, 11 aa, Homo Sapiens
GPFPSSSATAA

SEQ ID NO: 129049 - protein, 11 aa, Homo Sapiens
GPWVGTGLAAA

SEQ ID NO: 129050 - protein, 11 aa, Homo Sapiens
HPFDLGLYNEA

SEQ ID NO: 129051 - protein, 11 aa, Homo Sapiens
HPIYLATGTSA

SEQ ID NO: 129052 - protein, 11 aa, Homo Sapiens
HPKPVPGFQVA

SEQ ID NO: 129053 - protein, 11 aa, Homo Sapiens
HPKVNVPGSQA

SEQ ID NO: 129054 - protein, 11 aa, Homo Sapiens
HPLASFSFTSA

SEQ ID NO: 129055 - protein, 11 aa, Homo Sapiens
HPNVTLTISAA

SEQ ID NO: 129056 - protein, 11 aa, Homo Sapiens
HPQPILMGSVA

SEQ ID NO: 129057 - protein, 11 aa, Homo Sapiens
HPSHVQLKVVA

SEQ ID NO: 129058 - protein, 11 aa, Homo Sapiens
HPTASLIAKVA

SEQ ID NO: 129059 - protein, 11 aa, Homo Sapiens
HPYSTTFQESA

SEQ ID NO: 129060 - protein, 11 aa, Homo Sapiens
IAKNRKDIENQ

SEQ ID NO: 129061 - protein, 11 aa, Homo Sapiens
IDNNIEQISSY

SEQ ID NO: 129062 - protein, 11 aa, Homo Sapiens
IPAFRGHFIAA

SEQ ID NO: 129063 - protein, 11 aa, Homo Sapiens
IPAGTVTVNAA

SEQ ID NO: 129064 - protein, 11 aa, Homo Sapiens
IPAQGHFGISA

SEQ ID NO: 129065 - protein, 11 aa, Homo Sapiens
IPAQISPEGRA

SEQ ID NO: 129066 - protein, 11 aa, Homo Sapiens
IPCNNKGAHSV

SEQ ID NO: 129067 - protein, 11 aa, Homo Sapiens
IPHSLPGAVAA

SEQ ID NO: 129068 - protein, 11 aa, Homo Sapiens
IPIKFSEKQQA

SEQ ID NO: 129069 - protein, 11 aa, Homo Sapiens
IPIYSKEPNSA

SEQ ID NO: 129070 - protein, 11 aa, Homo Sapiens
IPKGKISIVEA

SEQ ID NO: 129071 - protein, 11 aa, Homo Sapiens
IPLKEMPAVQL

SEQ ID NO: 129072 - protein, 11 aa, Homo Sapiens
IPLKHLADRVA

SEQ ID NO: 129073 - protein, 11 aa, Homo Sapiens
IPLPDEKSRVA

SEQ ID NO: 129074 - protein, 11 aa, Homo Sapiens
IPNPFIQQQDA

SEQ ID NO: 129075 - protein, 11 aa, Homo Sapiens
IPNSIMTILEA

SEQ ID NO: 129076 - protein, 11 aa, Homo Sapiens
IPRNQLQSVAA

SEQ ID NO: 129077 - protein, 11 aa, Homo Sapiens
IPTNAVSVVSS

SEQ ID NO: 129078 - protein, 11 aa, Homo Sapiens
IPVLVPGIIFS

SEQ ID NO: 129079 - protein, 11 aa, Homo Sapiens
IPYDQSGFVSA

SEQ ID NO: 129080 - protein, 11 aa, Homo Sapiens
IPYHSEVPVSL

SEQ ID NO: 129081 - protein, 11 aa, Homo Sapiens
IPYSPDVQIHA

SEQ ID NO: 129082 - protein, 11 aa, Homo Sapiens
IVNEVLKSVVA

SEQ ID NO: 129083 - protein, 11 aa, Homo Sapiens
KPFELSPLVCA

SEQ ID NO: 129084 - protein, 11 aa, Homo Sapiens
KPFQPALPLVV

SEQ ID NO: 129085 - protein, 11 aa, Homo Sapiens
KPKVMEGTVAA

SEQ ID NO: 129086 - protein, 11 aa, Homo Sapiens
KPLSSLTPLIA

SEQ ID NO: 129087 - protein, 11 aa, Homo Sapiens
KPMEGWIAVTV

SEQ ID NO: 129088 - protein, 11 aa, Homo Sapiens
KPREAFGFEQA

SEQ ID NO: 129089 - protein, 11 aa, Homo Sapiens
KPRPSAVTTTA

SEQ ID NO: 129090 - protein, 11 aa, Homo Sapiens
KPVVTPFGQVA

SEQ ID NO: 129091 - protein, 11 aa, Homo Sapiens
LPAEFPDKVFA

SEQ ID NO: 129092 - protein, 11 aa, Homo Sapiens
LPARTQETPSA

SEQ ID NO: 129093 - protein, 11 aa, Homo Sapiens
LPASEIAKLLA

SEQ ID NO: 129094 - protein, 11 aa, Homo Sapiens
LPASNLAGKEA

SEQ ID NO: 129095 - protein, 11 aa, Homo Sapiens
LPHAILRLDLA

SEQ ID NO: 129096 - protein, 11 aa, Homo Sapiens
LPHDRMTSQEA

SEQ ID NO: 129097 - protein, 11 aa, Homo Sapiens
LPHGAISEDQA

SEQ ID NO: 129098 - protein, 11 aa, Homo Sapiens
LPIGIPYSISF

SEQ ID NO: 129099 - protein, 11 aa, Homo Sapiens
LPKPRMRGLLA

SEQ ID NO: 129100 - protein, 11 aa, Homo Sapiens
LPKSSSQEVEA

SEQ ID NO: 129101 - protein, 11 aa, Homo Sapiens
LPLLPAPGAAA

SEQ ID NO: 129102 - protein, 11 aa, Homo Sapiens
LPLLQPRGASA

SEQ ID NO: 129103 - protein, 11 aa, Homo Sapiens
LPLRPIIPLVA

SEQ ID NO: 129104 - protein, 11 aa, Homo Sapiens
LPNQVLKSISV

SEQ ID NO: 129105 - protein, 11 aa, Homo Sapiens
LPPSTGTFQEA

SEQ ID NO: 129106 - protein, 11 aa, Homo Sapiens
LPRTVIRGSQA

SEQ ID NO: 129107 - protein, 11 aa, Homo Sapiens
LPSASITSTSA

SEQ ID NO: 129108 - protein, 11 aa, Homo Sapiens
LPSPLPAHPSV

SEQ ID NO: 129109 - protein, 11 aa, Homo Sapiens
LPTREGHHLVA

SEQ ID NO: 129110 - protein, 11 aa, Homo Sapiens
LPTSGAAATAA

SEQ ID NO: 129111 - protein, 11 aa, Homo Sapiens
LPVGQHIYLSA

SEQ ID NO: 129112 - protein, 11 aa, Homo Sapiens
LPVKLIGMNCT

SEQ ID NO: 129113 - protein, 11 aa, Homo Sapiens
LPWGSQGKPGA

SEQ ID NO: 129114 - protein, 11 aa, Homo Sapiens
LPYCPGKTLVV

SEQ ID NO: 129115 - protein, 11 aa, Homo Sapiens
MAPALLLIPAA

SEQ ID NO: 129116 - protein, 11 aa, Homo Sapiens
MIKGKTPEEIR

SEQ ID NO: 129117 - protein, 11 aa, Homo Sapiens
MPHPATGKTVA

SEQ ID NO: 129118 - protein, 11 aa, Homo Sapiens
MPHSIMRIDIA

SEQ ID NO: 129119 - protein, 11 aa, Homo Sapiens
MPHSIMRVDIA

SEQ ID NO: 129120 - protein, 11 aa, Homo Sapiens
MPIYVTGITNH

SEQ ID NO: 129121 - protein, 11 aa, Homo Sapiens
MPLHVAPLLAA

SEQ ID NO: 129122 - protein, 11 aa, Homo Sapiens
MPNGTPHPTAA

SEQ ID NO: 129123 - protein, 11 aa, Homo Sapiens
MPNPSLAQVKI

SEQ ID NO: 129124 - protein, 11 aa, Homo Sapiens
MPRWAERLFPA

SEQ ID NO: 129125 - protein, 11 aa, Homo Sapiens
MPWGDPNYRSA

SEQ ID NO: 129126 - protein, 11 aa, Homo Sapiens
NPAAAAAAVAA

SEQ ID NO: 129127 - protein, 11 aa, Homo Sapiens
NPDDRRRLLSA

SEQ ID NO: 129128 - protein, 11 aa, Homo Sapiens
PKFEVIEKPQA

SEQ ID NO: 129129 - protein, 11 aa, Homo Sapiens
PLSPMLYSSSA

SEQ ID NO: 129130 - protein, 11 aa, Homo Sapiens
PQSREKIIAAL

SEQ ID NO: 129131 - protein, 11 aa, Homo Sapiens
PSLSRPGPAAP

SEQ ID NO: 129132 - protein, 11 aa, Homo Sapiens
PSLSSLPAGAA

SEQ ID NO: 129133 - protein, 11 aa, Homo Sapiens
QPFPAHIGRSA

SEQ ID NO: 129134 - protein, 11 aa, Homo Sapiens
QPHDPLVPLSA

SEQ ID NO: 129135 - protein, 11 aa, Homo Sapiens
QPSPAQPRAEA

SEQ ID NO: 129136 - protein, 11 aa, Homo Sapiens
QPTSVLDKATA

SEQ ID NO: 129137 - protein, 11 aa, Homo Sapiens
QPYAPPRDFAA

SEQ ID NO: 129138 - protein, 11 aa, Homo Sapiens
QPYSKLPGVSL

SEQ ID NO: 129139 - protein, 11 aa, Homo Sapiens
QPYYATRVNAA

SEQ ID NO: 129140 - protein, 11 aa, Homo Sapiens
QVFDAKNMMAA

SEQ ID NO: 129141 - protein, 11 aa, Homo Sapiens
RAADALLKAVA

SEQ ID NO: 129142 - protein, 11 aa, Homo Sapiens
RASLEVTQQQA

SEQ ID NO: 129143 - protein, 11 aa, Homo Sapiens
RPAAQPSFHQA

SEQ ID NO: 129144 - protein, 11 aa, Homo Sapiens
RPAGALVALVV

SEQ ID NO: 129145 - protein, 11 aa, Homo Sapiens
RPAGVGVVVEA

SEQ ID NO: 129146 - protein, 11 aa, Homo Sapiens
RPALPVSYLQA

SEQ ID NO: 129147 - protein, 11 aa, Homo Sapiens
RPAPLSAELQA

SEQ ID NO: 129148 - protein, 11 aa, Homo Sapiens
RPAPVAVAAAA

SEQ ID NO: 129149 - protein, 11 aa, Homo Sapiens
RPAQFLPEMVA

SEQ ID NO: 129150 - protein, 11 aa, Homo Sapiens
RPAQLHIGFQA

SEQ ID NO: 129151 - protein, 11 aa, Homo Sapiens
RPGPVLPAVAV

SEQ ID NO: 129152 - protein, 11 aa, Homo Sapiens
RPHSSLRELLA

SEQ ID NO: 129153 - protein, 11 aa, Homo Sapiens
RPIPNQPPTAA

SEQ ID NO: 129154 - protein, 11 aa, Homo Sapiens
RPISLGHVVVA

SEQ ID NO: 129155 - protein, 11 aa, Homo Sapiens
RPIVIDGSNVA

SEQ ID NO: 129156 - protein, 11 aa, Homo Sapiens
RPKGLEGERPA

SEQ ID NO: 129157 - protein, 11 aa, Homo Sapiens
RPKPSSSPVIF

SEQ ID NO: 129158 - protein, 11 aa, Homo Sapiens
RPKSAFKVQNA

SEQ ID NO: 129159 - protein, 11 aa, Homo Sapiens
RPKSSQIGAVV

SEQ ID NO: 129160 - protein, 11 aa, Homo Sapiens
RPLPGALGVAA

SEQ ID NO: 129161 - protein, 11 aa, Homo Sapiens
RPNGVITGLAA

SEQ ID NO: 129162 - protein, 11 aa, Homo Sapiens
RPNSLVGITSA

SEQ ID NO: 129163 - protein, 11 aa, Homo Sapiens
RPRAPIIAVTR

SEQ ID NO: 129164 - protein, 11 aa, Homo Sapiens
RPREALSTNEC

SEQ ID NO: 129165 - protein, 11 aa, Homo Sapiens
RPREVQDPAPA

SEQ ID NO: 129166 - protein, 11 aa, Homo Sapiens
RPSELLAGVKA

SEQ ID NO: 129167 - protein, 11 aa, Homo Sapiens
RPSGAATTTAA

SEQ ID NO: 129168 - protein, 11 aa, Homo Sapiens
RPVTPPRGMIT

SEQ ID NO: 129169 - protein, 11 aa, Homo Sapiens
RQGVDADINGL

SEQ ID NO: 129170 - protein, 11 aa, Homo Sapiens
SAFLPARFYQA

SEQ ID NO: 129171 - protein, 11 aa, Homo Sapiens
SGPSIVHRKCF

SEQ ID NO: 129172 - protein, 11 aa, Homo Sapiens
SPAGSIARNSA

SEQ ID NO: 129173 - protein, 11 aa, Homo Sapiens
SPASTPSCLSA

SEQ ID NO: 129174 - protein, 11 aa, Homo Sapiens
SPCQTDVLRSA

SEQ ID NO: 129175 - protein, 11 aa, Homo Sapiens
SPDEGALVRAA

SEQ ID NO: 129176 - protein, 11 aa, Homo Sapiens
SPDGSRLLFTV

SEQ ID NO: 129177 - protein, 11 aa, Homo Sapiens
SPFPSGSEHSA

SEQ ID NO: 129178 - protein, 11 aa, Homo Sapiens
SPFQPHVPYSP

SEQ ID NO: 129179 - protein, 11 aa, Homo Sapiens
SPFQTPVQSSA

SEQ ID NO: 129180 - protein, 11 aa, Homo Sapiens
SPHAHISEQAV

SEQ ID NO: 129181 - protein, 11 aa, Homo Sapiens
SPHPAIQPLQA

SEQ ID NO: 129182 - protein, 11 aa, Homo Sapiens
SPHPSAAVPAA

SEQ ID NO: 129183 - protein, 11 aa, Homo Sapiens
SPIENIQRVAA

SEQ ID NO: 129184 - protein, 11 aa, Homo Sapiens
SPILVATAVAA

SEQ ID NO: 129185 - protein, 11 aa, Homo Sapiens
SPKPAIKSISA

SEQ ID NO: 129186 - protein, 11 aa, Homo Sapiens
SPLAIIGGNCA

SEQ ID NO: 129187 - protein, 11 aa, Homo Sapiens
SPLDMKDGFLA

SEQ ID NO: 129188 - protein, 11 aa, Homo Sapiens
SPLPDTSLLQV

SEQ ID NO: 129189 - protein, 11 aa, Homo Sapiens
SPLSAAAATAA

SEQ ID NO: 129190 - protein, 11 aa, Homo Sapiens
SPLSTPTSAQA

SEQ ID NO: 129191 - protein, 11 aa, Homo Sapiens
SPMAERSMMSA

SEQ ID NO: 129192 - protein, 11 aa, Homo Sapiens
SPNMANTVNAA

SEQ ID NO: 129193 - protein, 11 aa, Homo Sapiens
SPRHLPSCSPA

SEQ ID NO: 129194 - protein, 11 aa, Homo Sapiens
SPRNLGFETSA

SEQ ID NO: 129195 - protein, 11 aa, Homo Sapiens
SPRNLQPQRAA

SEQ ID NO: 129196 - protein, 11 aa, Homo Sapiens
SPRPALPALLV

SEQ ID NO: 129197 - protein, 11 aa, Homo Sapiens
SPRQSDVMIVA

SEQ ID NO: 129198 - protein, 11 aa, Homo Sapiens
SPRSGQRCWAA

SEQ ID NO: 129199 - protein, 11 aa, Homo Sapiens
SPRTAEGVLAA

SEQ ID NO: 129200 - protein, 11 aa, Homo Sapiens
SPRTPVSPVKF

SEQ ID NO: 129201 - protein, 11 aa, Homo Sapiens
SPSAAITVQRV

SEQ ID NO: 129202 - protein, 11 aa, Homo Sapiens
SPSELFAQHIV

SEQ ID NO: 129203 - protein, 11 aa, Homo Sapiens
SPTSPNALPPA

SEQ ID NO: 129204 - protein, 11 aa, Homo Sapiens
SPVQVPGPVAA

SEQ ID NO: 129205 - protein, 11 aa, Homo Sapiens
SPVRPLVFAAA

SEQ ID NO: 129206 - protein, 11 aa, Homo Sapiens
SPVTLTKGTSA

SEQ ID NO: 129207 - protein, 11 aa, Homo Sapiens
SPYSGPKFNSA

SEQ ID NO: 129208 - protein, 11 aa, Homo Sapiens
TAYKPKYFTSA

SEQ ID NO: 129209 - protein, 11 aa, Homo Sapiens
TPAAAAAMNLA

SEQ ID NO: 129210 - protein, 11 aa, Homo Sapiens
TPAGVIPGQTA

SEQ ID NO: 129211 - protein, 11 aa, Homo Sapiens
TPAPAAEETMN

SEQ ID NO: 129212 - protein, 11 aa, Homo Sapiens
TPDPSTPSRLA

SEQ ID NO: 129213 - protein, 11 aa, Homo Sapiens
TPFYPRSPYGA

SEQ ID NO: 129214 - protein, 11 aa, Homo Sapiens
TPHPVLTPVAA

SEQ ID NO: 129215 - protein, 11 aa, Homo Sapiens
TPHYIYPPAIV

SEQ ID NO: 129216 - protein, 11 aa, Homo Sapiens
TPWPRGRLLTA

SEQ ID NO: 129217 - protein, 11 aa, Homo Sapiens
TPYQSKWTICA

SEQ ID NO: 129218 - protein, 11 aa, Homo Sapiens
VAPGKDLTKTL

SEQ ID NO: 129219 - protein, 11 aa, Homo Sapiens
VPAGGAVAVSA

SEQ ID NO: 129220 - protein, 11 aa, Homo Sapiens
VPFQVPEILRT

SEQ ID NO: 129221 - protein, 11 aa, Homo Sapiens
VPIPWVSGTSA

SEQ ID NO: 129222 - protein, 11 aa, Homo Sapiens
VPITFQVKVTA

SEQ ID NO: 129223 - protein, 11 aa, Homo Sapiens
VPKENSTLNCA

SEQ ID NO: 129224 - protein, 11 aa, Homo Sapiens
VPKPIGGVVVF

SEQ ID NO: 129225 - protein, 11 aa, Homo Sapiens
VPMPSNKDYVV

SEQ ID NO: 129226 - protein, 11 aa, Homo Sapiens
VPRSSDFEDSA

SEQ ID NO: 129227 - protein, 11 aa, Homo Sapiens
VPTNIIAAKAA

SEQ ID NO: 129228 - protein, 11 aa, Homo Sapiens
VPVSLESKKAA

SEQ ID NO: 129229 - protein, 11 aa, Homo Sapiens
VPWMPPGKSSA

SEQ ID NO: 129230 - protein, 11 aa, Homo Sapiens
VPYPLPKIDLI

SEQ ID NO: 129231 - protein, 11 aa, Homo Sapiens
VTIKKDVDGAY

SEQ ID NO: 129232 - protein, 11 aa, Homo Sapiens
YDKKGPAAIQK

SEQ ID NO: 129233 - protein, 11 aa, Homo Sapiens
YPFSAGLPPAA

SEQ ID NO: 129234 - protein, 11 aa, Homo Sapiens
YPFSSEQKWMA

SEQ ID NO: 129235 - protein, 11 aa, Homo Sapiens
YPIGTNAIVAV

SEQ ID NO: 129236 - protein, 11 aa, Homo Sapiens
YPKACLQGITF

SEQ ID NO: 129237 - protein, 11 aa, Homo Sapiens
YPLLLPKGVVL

SEQ ID NO: 129238 - protein, 11 aa, Homo Sapiens
YPLPLRSGKEA

SEQ ID NO: 129239 - protein, 11 aa, Homo Sapiens
YVMPSSSARCA

SEQ ID NO: 129240 - protein, 8 aa, Homo Sapiens
EQYKINIY

SEQ ID NO: 129241 - protein, 8 aa, Homo Sapiens
FSFRSFIW

SEQ ID NO: 129242 - protein, 8 aa, Homo Sapiens
GSKFPVRW

SEQ ID NO: 129243 - protein, 8 aa, Homo Sapiens
HSGPFFTF

SEQ ID NO: 129244 - protein, 8 aa, Homo Sapiens
IAFLHALW

SEQ ID NO: 129245 - protein, 8 aa, Homo Sapiens
IAKIPNFW

SEQ ID NO: 129246 - protein, 8 aa, Homo Sapiens
ITAHPERW

SEQ ID NO: 129247 - protein, 8 aa, Homo Sapiens
ITKYPVLF

SEQ ID NO: 129248 - protein, 8 aa, Homo Sapiens
ITTEGKLW

SEQ ID NO: 129249 - protein, 8 aa, Homo Sapiens
KARLPLRL

SEQ ID NO: 129250 - protein, 8 aa, Homo Sapiens
KSFVLPSW

SEQ ID NO: 129251 - protein, 8 aa, Homo Sapiens
KVRDPRPW

SEQ ID NO: 129252 - protein, 8 aa, Homo Sapiens
LTGPWKLW

SEQ ID NO: 129253 - protein, 8 aa, Homo Sapiens
RIKVPVDW

SEQ ID NO: 129254 - protein, 8 aa, Homo Sapiens
RTRIGYSF

SEQ ID NO: 129255 - protein, 8 aa, Homo Sapiens
SFTTTAER

SEQ ID NO: 129256 - protein, 8 aa, Homo Sapiens
TAGAHRLW

SEQ ID NO: 129257 - protein, 8 aa, Homo Sapiens
TTKAISRW

SEQ ID NO: 129258 - protein, 8 aa, Homo Sapiens
VSDLPRQW

SEQ ID NO: 129259 - protein, 8 aa, Homo Sapiens
VSIKAIGW

SEQ ID NO: 129260 - protein, 8 aa, Homo Sapiens
VSRIPVSF

SEQ ID NO: 129261 - protein, 8 aa, Homo Sapiens
VTRLPIKW

SEQ ID NO: 129262 - protein, 8 aa, Homo Sapiens
VTRQGALW

SEQ ID NO: 129263 - protein, 9 aa, Homo Sapiens
AADETLRLW

SEQ ID NO: 129264 - protein, 9 aa, Homo Sapiens
AAEERPWLW

SEQ ID NO: 129265 - protein, 9 aa, Homo Sapiens
AAKAVLADW

SEQ ID NO: 129266 - protein, 9 aa, Homo Sapiens
AALPAAALW

SEQ ID NO: 129267 - protein, 9 aa, Homo Sapiens
AALTIIRYY

SEQ ID NO: 129268 - protein, 9 aa, Homo Sapiens
AALVIQKYW

SEQ ID NO: 129269 - protein, 9 aa, Homo Sapiens
AALVLQTIW

SEQ ID NO: 129270 - protein, 9 aa, Homo Sapiens
AANPHSFVF

SEQ ID NO: 129271 - protein, 9 aa, Homo Sapiens
AARTIQTAF

SEQ ID NO: 129272 - protein, 9 aa, Homo Sapiens
AARTWLGVW

SEQ ID NO: 129273 - protein, 9 aa, Homo Sapiens
ALGRPLPRW

SEQ ID NO: 129274 - protein, 9 aa, Homo Sapiens
ALRVLNSYW

SEQ ID NO: 129275 - protein, 9 aa, Homo Sapiens
ASAIIIQRW

SEQ ID NO: 129276 - protein, 9 aa, Homo Sapiens
ASAILFREW

SEQ ID NO: 129277 - protein, 9 aa, Homo Sapiens
ASFDGTFLW

SEQ ID NO: 129278 - protein, 9 aa, Homo Sapiens
ASFIGGIRW

SEQ ID NO: 129279 - protein, 9 aa, Homo Sapiens
ASHKGQKLW

SEQ ID NO: 129280 - protein, 9 aa, Homo Sapiens
ASLDISRKW

SEQ ID NO: 129281 - protein, 9 aa, Homo Sapiens
ASLGMILLW

SEQ ID NO: 129282 - protein, 9 aa, Homo Sapiens
ASLPEAQVW

SEQ ID NO: 129283 - protein, 9 aa, Homo Sapiens
ASLPLRVSF

SEQ ID NO: 129284 - protein, 9 aa, Homo Sapiens
ASMLIKALW

SEQ ID NO: 129285 - protein, 9 aa, Homo Sapiens
ASNYFRAMF

SEQ ID NO: 129286 - protein, 9 aa, Homo Sapiens
ASVSTVQLW

SEQ ID NO: 129287 - protein, 9 aa, Homo Sapiens
ASWVSELLW

SEQ ID NO: 129288 - protein, 9 aa, Homo Sapiens
ATADVEWRW

SEQ ID NO: 129289 - protein, 9 aa, Homo Sapiens
ATANEIHFW

SEQ ID NO: 129290 - protein, 9 aa, Homo Sapiens
ATDAAIRVW

SEQ ID NO: 129291 - protein, 9 aa, Homo Sapiens
ATFIVTNYW

SEQ ID NO: 129292 - protein, 9 aa, Homo Sapiens
ATHRIPIIW

SEQ ID NO: 129293 - protein, 9 aa, Homo Sapiens
ATIKEIVVW

SEQ ID NO: 129294 - protein, 9 aa, Homo Sapiens
ATIPNARQF

SEQ ID NO: 129295 - protein, 9 aa, Homo Sapiens
ATIRLIFHW

SEQ ID NO: 129296 - protein, 9 aa, Homo Sapiens
ATKKEITFF

SEQ ID NO: 129297 - protein, 9 aa, Homo Sapiens
ATLELTHNW

SEQ ID NO: 129298 - protein, 9 aa, Homo Sapiens
ATLKNPILW

SEQ ID NO: 129299 - protein, 9 aa, Homo Sapiens
ATNGVVVTW

SEQ ID NO: 129300 - protein, 9 aa, Homo Sapiens
ATNRITVTW

SEQ ID NO: 129301 - protein, 9 aa, Homo Sapiens
ATNVNNWHW

SEQ ID NO: 129302 - protein, 9 aa, Homo Sapiens
ATRPDYISW

SEQ ID NO: 129303 - protein, 9 aa, Homo Sapiens
ATSKYLIGW

SEQ ID NO: 129304 - protein, 9 aa, Homo Sapiens
ATVILQRAF

SEQ ID NO: 129305 - protein, 9 aa, Homo Sapiens
ATYMKPEMW

SEQ ID NO: 129306 - protein, 9 aa, Homo Sapiens
AVLALAASW

SEQ ID NO: 129307 - protein, 9 aa, Homo Sapiens
AVLPSRVYW

SEQ ID NO: 129308 - protein, 9 aa, Homo Sapiens
AVLQKVALW

SEQ ID NO: 129309 - protein, 9 aa, Homo Sapiens
AVWTRAYGW

SEQ ID NO: 129310 - protein, 9 aa, Homo Sapiens
ETLKLISGW

SEQ ID NO: 129311 - protein, 9 aa, Homo Sapiens
FADSTVRVW

SEQ ID NO: 129312 - protein, 9 aa, Homo Sapiens
FAVKLFKSW

SEQ ID NO: 129313 - protein, 9 aa, Homo Sapiens
FSEKFPTLW

SEQ ID NO: 129314 - protein, 9 aa, Homo Sapiens
FSFAEVHSW

SEQ ID NO: 129315 - protein, 9 aa, Homo Sapiens
FSFQIDRSW

SEQ ID NO: 129316 - protein, 9 aa, Homo Sapiens
FSKSDLVNW

SEQ ID NO: 129317 - protein, 9 aa, Homo Sapiens
FSLPAQPLW

SEQ ID NO: 129318 - protein, 9 aa, Homo Sapiens
FSLPNIPRW

SEQ ID NO: 129319 - protein, 9 aa, Homo Sapiens
FSRDLFIQW

SEQ ID NO: 129320 - protein, 9 aa, Homo Sapiens
FSYRDVNSW

SEQ ID NO: 129321 - protein, 9 aa, Homo Sapiens
FTKPPIGTW

SEQ ID NO: 129322 - protein, 9 aa, Homo Sapiens
FVKKLEHSW

SEQ ID NO: 129323 - protein, 9 aa, Homo Sapiens
GSASVNSRW

SEQ ID NO: 129324 - protein, 9 aa, Homo Sapiens
GSMGLRSLW

SEQ ID NO: 129325 - protein, 9 aa, Homo Sapiens
GTALLPHQW

SEQ ID NO: 129326 - protein, 9 aa, Homo Sapiens
GTFNPVSLW

SEQ ID NO: 129327 - protein, 9 aa, Homo Sapiens
GTFRGTRYF

SEQ ID NO: 129328 - protein, 9 aa, Homo Sapiens
GTHKVTVLF

SEQ ID NO: 129329 - protein, 9 aa, Homo Sapiens
GTHSLDIKW

SEQ ID NO: 129330 - protein, 9 aa, Homo Sapiens
GTIPERPGW

SEQ ID NO: 129331 - protein, 9 aa, Homo Sapiens
GTKWIANNW

SEQ ID NO: 129332 - protein, 9 aa, Homo Sapiens
GTLKERVQW

SEQ ID NO: 129333 - protein, 9 aa, Homo Sapiens
GTLKGHNGW

SEQ ID NO: 129334 - protein, 9 aa, Homo Sapiens
GTLSGHASW

SEQ ID NO: 129335 - protein, 9 aa, Homo Sapiens
GTMDIRHFF

SEQ ID NO: 129336 - protein, 9 aa, Homo Sapiens
GTMPLRNIF

SEQ ID NO: 129337 - protein, 9 aa, Homo Sapiens
GTVITPDTW

SEQ ID NO: 129338 - protein, 9 aa, Homo Sapiens
GTVLKIITF

SEQ ID NO: 129339 - protein, 9 aa, Homo Sapiens
GTYGVRAAW

SEQ ID NO: 129340 - protein, 9 aa, Homo Sapiens
GTYSPEISW

SEQ ID NO: 129341 - protein, 9 aa, Homo Sapiens
HADINLLYW

SEQ ID NO: 129342 - protein, 9 aa, Homo Sapiens
HAGNINFKW

SEQ ID NO: 129343 - protein, 9 aa, Homo Sapiens
HAGPIVSVW

SEQ ID NO: 129344 - protein, 9 aa, Homo Sapiens
HAHYIAQCW

SEQ ID NO: 129345 - protein, 9 aa, Homo Sapiens
HALALAWTF

SEQ ID NO: 129346 - protein, 9 aa, Homo Sapiens
HGLQETWYW

SEQ ID NO: 129347 - protein, 9 aa, Homo Sapiens
HLREIESRW

SEQ ID NO: 129348 - protein, 9 aa, Homo Sapiens
HSFLYQPDW

SEQ ID NO: 129349 - protein, 9 aa, Homo Sapiens
HSHFQNIFW

SEQ ID NO: 129350 - protein, 9 aa, Homo Sapiens
HSKELITAW

SEQ ID NO: 129351 - protein, 9 aa, Homo Sapiens
HSKPTTRDW

SEQ ID NO: 129352 - protein, 9 aa, Homo Sapiens
HSLESQVTF

SEQ ID NO: 129353 - protein, 9 aa, Homo Sapiens
HSQVCSILW

SEQ ID NO: 129354 - protein, 9 aa, Homo Sapiens
HSSGILPKW

SEQ ID NO: 129355 - protein, 9 aa, Homo Sapiens
HSTLVPHEW

SEQ ID NO: 129356 - protein, 9 aa, Homo Sapiens
HSYFWPLEW

SEQ ID NO: 129357 - protein, 9 aa, Homo Sapiens
HTFWGVVFF

SEQ ID NO: 129358 - protein, 9 aa, Homo Sapiens
HTGCFATIW

SEQ ID NO: 129359 - protein, 9 aa, Homo Sapiens
HTKIPFINW

SEQ ID NO: 129360 - protein, 9 aa, Homo Sapiens
HTLDINVRW

SEQ ID NO: 129361 - protein, 9 aa, Homo Sapiens
HTVGLSSTW

SEQ ID NO: 129362 - protein, 9 aa, Homo Sapiens
HTVWESEEW

SEQ ID NO: 129363 - protein, 9 aa, Homo Sapiens
HTWNGIRHL

SEQ ID NO: 129364 - protein, 9 aa, Homo Sapiens
HVRSIVDNW

SEQ ID NO: 129365 - protein, 9 aa, Homo Sapiens
IAAIIVSQW

SEQ ID NO: 129366 - protein, 9 aa, Homo Sapiens
IAAQRTINW

SEQ ID NO: 129367 - protein, 9 aa, Homo Sapiens
IAAQTGTRW

SEQ ID NO: 129368 - protein, 9 aa, Homo Sapiens
IAFFDVRTF

SEQ ID NO: 129369 - protein, 9 aa, Homo Sapiens
IAHLFNVEW

SEQ ID NO: 129370 - protein, 9 aa, Homo Sapiens
IAKVNNVVW

SEQ ID NO: 129371 - protein, 9 aa, Homo Sapiens
IALPPIAKW

SEQ ID NO: 129372 - protein, 9 aa, Homo Sapiens
IARDFNPNW

SEQ ID NO: 129373 - protein, 9 aa, Homo Sapiens
IAVPRNDEW

SEQ ID NO: 129374 - protein, 9 aa, Homo Sapiens
IGYVDTTHW

SEQ ID NO: 129375 - protein, 9 aa, Homo Sapiens
IIISTPEKW

SEQ ID NO: 129376 - protein, 9 aa, Homo Sapiens
IIMKDVPDW

SEQ ID NO: 129377 - protein, 9 aa, Homo Sapiens
IIRPQNVSW

SEQ ID NO: 129378 - protein, 9 aa, Homo Sapiens
ILRPPVEKW

SEQ ID NO: 129379 - protein, 9 aa, Homo Sapiens
ISADVHGIW

SEQ ID NO: 129380 - protein, 9 aa, Homo Sapiens
ISAIPEQRW

SEQ ID NO: 129381 - protein, 9 aa, Homo Sapiens
ISGHHPETW

SEQ ID NO: 129382 - protein, 9 aa, Homo Sapiens
ISGIKDFSW

SEQ ID NO: 129383 - protein, 9 aa, Homo Sapiens
ISGVHTVRF

SEQ ID NO: 129384 - protein, 9 aa, Homo Sapiens
ISIPIGFLF

SEQ ID NO: 129385 - protein, 9 aa, Homo Sapiens
ISKALVAYY

SEQ ID NO: 129386 - protein, 9 aa, Homo Sapiens
ISKEEAMRW

SEQ ID NO: 129387 - protein, 9 aa, Homo Sapiens
ISLLPKTSW

SEQ ID NO: 129388 - protein, 9 aa, Homo Sapiens
ISMASVAHW

SEQ ID NO: 129389 - protein, 9 aa, Homo Sapiens
ISMDPKVGW

SEQ ID NO: 129390 - protein, 9 aa, Homo Sapiens
ISMPAQNLW

SEQ ID NO: 129391 - protein, 9 aa, Homo Sapiens
ISRAVVLVF

SEQ ID NO: 129392 - protein, 9 aa, Homo Sapiens
ISRPIVNLF

SEQ ID NO: 129393 - protein, 9 aa, Homo Sapiens
ISSTVQRQL

SEQ ID NO: 129394 - protein, 9 aa, Homo Sapiens
ISTPVIRTF

SEQ ID NO: 129395 - protein, 9 aa, Homo Sapiens
ISVAEVEKW

SEQ ID NO: 129396 - protein, 9 aa, Homo Sapiens
ISVILGDRW

SEQ ID NO: 129397 - protein, 9 aa, Homo Sapiens
ISVPIFKQF

SEQ ID NO: 129398 - protein, 9 aa, Homo Sapiens
ISVPPIQKW

SEQ ID NO: 129399 - protein, 9 aa, Homo Sapiens
ISWGQGHFW

SEQ ID NO: 129400 - protein, 9 aa, Homo Sapiens
ITAGAHRLW

SEQ ID NO: 129401 - protein, 9 aa, Homo Sapiens
ITFPGIKLI

SEQ ID NO: 129402 - protein, 9 aa, Homo Sapiens
ITGPWRSLW

SEQ ID NO: 129403 - protein, 9 aa, Homo Sapiens
ITHIVNQNF

SEQ ID NO: 129404 - protein, 9 aa, Homo Sapiens
ITIPKNMHW

SEQ ID NO: 129405 - protein, 9 aa, Homo Sapiens
ITKDVVLQW

SEQ ID NO: 129406 - protein, 9 aa, Homo Sapiens
ITKTVVENI

SEQ ID NO: 129407 - protein, 9 aa, Homo Sapiens
ITNKYQLVF

SEQ ID NO: 129408 - protein, 9 aa, Homo Sapiens
ITSPVHVSF

SEQ ID NO: 129409 - protein, 9 aa, Homo Sapiens
ITTDVLYTI

SEQ ID NO: 129410 - protein, 9 aa, Homo Sapiens
ITTKAISRW

SEQ ID NO: 129411 - protein, 9 aa, Homo Sapiens
ITTSLTTKW

SEQ ID NO: 129412 - protein, 9 aa, Homo Sapiens
ITTTINPRF

SEQ ID NO: 129413 - protein, 9 aa, Homo Sapiens
ITTVIQHVF

SEQ ID NO: 129414 - protein, 9 aa, Homo Sapiens
ITTVVVQTF

SEQ ID NO: 129415 - protein, 9 aa, Homo Sapiens
ITVVSEKQF

SEQ ID NO: 129416 - protein, 9 aa, Homo Sapiens
ITYDKLNKW

SEQ ID NO: 129417 - protein, 9 aa, Homo Sapiens
ITYQHIDRW

SEQ ID NO: 129418 - protein, 9 aa, Homo Sapiens
ITYTFHSTW

SEQ ID NO: 129419 - protein, 9 aa, Homo Sapiens
KAAAILEAW

SEQ ID NO: 129420 - protein, 9 aa, Homo Sapiens
KAFDRPSLF

SEQ ID NO: 129421 - protein, 9 aa, Homo Sapiens
KAFELELSW

SEQ ID NO: 129422 - protein, 9 aa, Homo Sapiens
KAFLGGLNW

SEQ ID NO: 129423 - protein, 9 aa, Homo Sapiens
KAFLGLFFI

SEQ ID NO: 129424 - protein, 9 aa, Homo Sapiens
KAFNLRISF

SEQ ID NO: 129425 - protein, 9 aa, Homo Sapiens
KAFPFHIIF

SEQ ID NO: 129426 - protein, 9 aa, Homo Sapiens
KAGIIQDTW

SEQ ID NO: 129427 - protein, 9 aa, Homo Sapiens
KAGQVVTIW

SEQ ID NO: 129428 - protein, 9 aa, Homo Sapiens
KAIEKNVLF

SEQ ID NO: 129429 - protein, 9 aa, Homo Sapiens
KAIELLQEF

SEQ ID NO: 129430 - protein, 9 aa, Homo Sapiens
KAIGLFISF

SEQ ID NO: 129431 - protein, 9 aa, Homo Sapiens
KAINPINTF

SEQ ID NO: 129432 - protein, 9 aa, Homo Sapiens
KAKDIIRFL

SEQ ID NO: 129433 - protein, 9 aa, Homo Sapiens
KAKDLILRF

SEQ ID NO: 129434 - protein, 9 aa, Homo Sapiens
KAKEIYMTF

SEQ ID NO: 129435 - protein, 9 aa, Homo Sapiens
KAKTNVKLW

SEQ ID NO: 129436 - protein, 9 aa, Homo Sapiens
KALEVFPEF

SEQ ID NO: 129437 - protein, 9 aa, Homo Sapiens
KALSMPEKW

SEQ ID NO: 129438 - protein, 9 aa, Homo Sapiens
KALTLSVVF

SEQ ID NO: 129439 - protein, 9 aa, Homo Sapiens
KAMELIREL

SEQ ID NO: 129440 - protein, 9 aa, Homo Sapiens
KAMGIMNSF

SEQ ID NO: 129441 - protein, 9 aa, Homo Sapiens
KAMTGVEQW

SEQ ID NO: 129442 - protein, 9 aa, Homo Sapiens
KARLPLRLF

SEQ ID NO: 129443 - protein, 9 aa, Homo Sapiens
KASPTQNLF

SEQ ID NO: 129444 - protein, 9 aa, Homo Sapiens
KATDILPKW

SEQ ID NO: 129445 - protein, 9 aa, Homo Sapiens
KATPIKLIW

SEQ ID NO: 129446 - protein, 9 aa, Homo Sapiens
KAVFLVPKW

SEQ ID NO: 129447 - protein, 9 aa, Homo Sapiens
KAVSLFLCY

SEQ ID NO: 129448 - protein, 9 aa, Homo Sapiens
KIIFIDSTW

SEQ ID NO: 129449 - protein, 9 aa, Homo Sapiens
KIIPKTLTW

SEQ ID NO: 129450 - protein, 9 aa, Homo Sapiens
KIISTLPSW

SEQ ID NO: 129451 - protein, 9 aa, Homo Sapiens
KISNIIKQF

SEQ ID NO: 129452 - protein, 9 aa, Homo Sapiens
KLFDIRPIW

SEQ ID NO: 129453 - protein, 9 aa, Homo Sapiens
KLKDIRNAW

SEQ ID NO: 129454 - protein, 9 aa, Homo Sapiens
KSALVFITF

SEQ ID NO: 129455 - protein, 9 aa, Homo Sapiens
KSFADINLY

SEQ ID NO: 129456 - protein, 9 aa, Homo Sapiens
KSFDFHFGF

SEQ ID NO: 129457 - protein, 9 aa, Homo Sapiens
KSFDNIRNW

SEQ ID NO: 129458 - protein, 9 aa, Homo Sapiens
KSFEGLFYF

SEQ ID NO: 129459 - protein, 9 aa, Homo Sapiens
KSFENISKW

SEQ ID NO: 129460 - protein, 9 aa, Homo Sapiens
KSFMDFGSW

SEQ ID NO: 129461 - protein, 9 aa, Homo Sapiens
KSFVKVYNY

SEQ ID NO: 129462 - protein, 9 aa, Homo Sapiens
KSGELLATW

SEQ ID NO: 129463 - protein, 9 aa, Homo Sapiens
KSGSVQEQW

SEQ ID NO: 129464 - protein, 9 aa, Homo Sapiens
KSIDLIQKW

SEQ ID NO: 129465 - protein, 9 aa, Homo Sapiens
KSIHIVVTM

SEQ ID NO: 129466 - protein, 9 aa, Homo Sapiens
KSKDFVQVM

SEQ ID NO: 129467 - protein, 9 aa, Homo Sapiens
KSLALLLGY

SEQ ID NO: 129468 - protein, 9 aa, Homo Sapiens
KSLALLLNY

SEQ ID NO: 129469 - protein, 9 aa, Homo Sapiens
KSLEEIYLF

SEQ ID NO: 129470 - protein, 9 aa, Homo Sapiens
KSLENAIEW

SEQ ID NO: 129471 - protein, 9 aa, Homo Sapiens
KSLGVTTKF

SEQ ID NO: 129472 - protein, 9 aa, Homo Sapiens
KSLPDTELM

SEQ ID NO: 129473 - protein, 9 aa, Homo Sapiens
KSQDLELSW

SEQ ID NO: 129474 - protein, 9 aa, Homo Sapiens
KSSDIAKTF

SEQ ID NO: 129475 - protein, 9 aa, Homo Sapiens
KSSEVFTTF

SEQ ID NO: 129476 - protein, 9 aa, Homo Sapiens
KSTDVAKTF

SEQ ID NO: 129477 - protein, 9 aa, Homo Sapiens
KSVTAFFKW

SEQ ID NO: 129478 - protein, 9 aa, Homo Sapiens
KSVTLGYLF

SEQ ID NO: 129479 - protein, 9 aa, Homo Sapiens
KSWGLILLF

SEQ ID NO: 129480 - protein, 9 aa, Homo Sapiens
KSWVFGVHF

SEQ ID NO: 129481 - protein, 9 aa, Homo Sapiens
KSYVQGVTW

SEQ ID NO: 129482 - protein, 9 aa, Homo Sapiens
KTAEDMNLF

SEQ ID NO: 129483 - protein, 9 aa, Homo Sapiens
KTAEELMNF

SEQ ID NO: 129484 - protein, 9 aa, Homo Sapiens
KTAPFDSRF

SEQ ID NO: 129485 - protein, 9 aa, Homo Sapiens
KTFLFSATM

SEQ ID NO: 129486 - protein, 9 aa, Homo Sapiens
KTFLIPVLF

SEQ ID NO: 129487 - protein, 9 aa, Homo Sapiens
KTFPYQHRY

SEQ ID NO: 129488 - protein, 9 aa, Homo Sapiens
KTGETMIQW

SEQ ID NO: 129489 - protein, 9 aa, Homo Sapiens
KTHPLWRLW

SEQ ID NO: 129490 - protein, 9 aa, Homo Sapiens
KTILPLINF

SEQ ID NO: 129491 - protein, 9 aa, Homo Sapiens
KTKEVIQEW

SEQ ID NO: 129492 - protein, 9 aa, Homo Sapiens
KTKIDIIRM

SEQ ID NO: 129493 - protein, 9 aa, Homo Sapiens
KTLELPHVF

SEQ ID NO: 129494 - protein, 9 aa, Homo Sapiens
KTLIEPFTL

SEQ ID NO: 129495 - protein, 9 aa, Homo Sapiens
KTLPDILTF

SEQ ID NO: 129496 - protein, 9 aa, Homo Sapiens
KTQGPRALW

SEQ ID NO: 129497 - protein, 9 aa, Homo Sapiens
KTRIIDVVY

SEQ ID NO: 129498 - protein, 9 aa, Homo Sapiens
KTRPLIPEM

SEQ ID NO: 129499 - protein, 9 aa, Homo Sapiens
KTRQIISTI

SEQ ID NO: 129500 - protein, 9 aa, Homo Sapiens
KTRTNVPTF

SEQ ID NO: 129501 - protein, 9 aa, Homo Sapiens
KTRYIFDLF

SEQ ID NO: 129502 - protein, 9 aa, Homo Sapiens
KTVVKELTW

SEQ ID NO: 129503 - protein, 9 aa, Homo Sapiens
KVIEINPYL

SEQ ID NO: 129504 - protein, 9 aa, Homo Sapiens
KVKPNLQTF

SEQ ID NO: 129505 - protein, 9 aa, Homo Sapiens
KVLELQRKL

SEQ ID NO: 129506 - protein, 9 aa, Homo Sapiens
KVLIDIREY

SEQ ID NO: 129507 - protein, 9 aa, Homo Sapiens
KVLPIIQRW

SEQ ID NO: 129508 - protein, 9 aa, Homo Sapiens
KVPQVSTPT

SEQ ID NO: 129509 - protein, 9 aa, Homo Sapiens
KVQDITMQW

SEQ ID NO: 129510 - protein, 9 aa, Homo Sapiens
KVSDLPRQW

SEQ ID NO: 129511 - protein, 9 aa, Homo Sapiens
KVSVYLQNW

SEQ ID NO: 129512 - protein, 9 aa, Homo Sapiens
KVTELLRTF

SEQ ID NO: 129513 - protein, 9 aa, Homo Sapiens
KVVDVVRNL

SEQ ID NO: 129514 - protein, 9 aa, Homo Sapiens
KVVEIVKKL

SEQ ID NO: 129515 - protein, 9 aa, Homo Sapiens
KVWKAPSSW

SEQ ID NO: 129516 - protein, 9 aa, Homo Sapiens
KVYFIYEGY

SEQ ID NO: 129517 - protein, 9 aa, Homo Sapiens
LAALKLDEW

SEQ ID NO: 129518 - protein, 9 aa, Homo Sapiens
LAALRHAKW

SEQ ID NO: 129519 - protein, 9 aa, Homo Sapiens
LAAVRGEQW

SEQ ID NO: 129520 - protein, 9 aa, Homo Sapiens
LAKGWAPTF

SEQ ID NO: 129521 - protein, 9 aa, Homo Sapiens
LALVKPEVW

SEQ ID NO: 129522 - protein, 9 aa, Homo Sapiens
LANKLYERW

SEQ ID NO: 129523 - protein, 9 aa, Homo Sapiens
LATKIQAAW

SEQ ID NO: 129524 - protein, 9 aa, Homo Sapiens
LATTILQHW

SEQ ID NO: 129525 - protein, 9 aa, Homo Sapiens
LAWQNPPGW

SEQ ID NO: 129526 - protein, 9 aa, Homo Sapiens
LAWQNPSGW

SEQ ID NO: 129527 - protein, 9 aa, Homo Sapiens
LGRPDAEYW

SEQ ID NO: 129528 - protein, 9 aa, Homo Sapiens
LIRELFPTW

SEQ ID NO: 129529 - protein, 9 aa, Homo Sapiens
LQLPLHPSW

SEQ ID NO: 129530 - protein, 9 aa, Homo Sapiens
LSAFLPARF

SEQ ID NO: 129531 - protein, 9 aa, Homo Sapiens
LSFLGGIRW

SEQ ID NO: 129532 - protein, 9 aa, Homo Sapiens
LSFPTTKTY

SEQ ID NO: 129533 - protein, 9 aa, Homo Sapiens
LSGPFVQKW

SEQ ID NO: 129534 - protein, 9 aa, Homo Sapiens
LSIHLQHKF

SEQ ID NO: 129535 - protein, 9 aa, Homo Sapiens
LSKKLVVRW

SEQ ID NO: 129536 - protein, 9 aa, Homo Sapiens
LSKPNPPSL

SEQ ID NO: 129537 - protein, 9 aa, Homo Sapiens
LSKSDHSFF

SEQ ID NO: 129538 - protein, 9 aa, Homo Sapiens
LSLGVVKEF

SEQ ID NO: 129539 - protein, 9 aa, Homo Sapiens
LSNTVMPRF

SEQ ID NO: 129540 - protein, 9 aa, Homo Sapiens
LSQEQLRQW

SEQ ID NO: 129541 - protein, 9 aa, Homo Sapiens
LSQPKIVKW

SEQ ID NO: 129542 - protein, 9 aa, Homo Sapiens
LSRELFESW

SEQ ID NO: 129543 - protein, 9 aa, Homo Sapiens
LSSSVIREL

SEQ ID NO: 129544 - protein, 9 aa, Homo Sapiens
LSSTEILKW

SEQ ID NO: 129545 - protein, 9 aa, Homo Sapiens
LSTLVRPVF

SEQ ID NO: 129546 - protein, 9 aa, Homo Sapiens
LSVPSPFTW

SEQ ID NO: 129547 - protein, 9 aa, Homo Sapiens
LTAKVFRTY

SEQ ID NO: 129548 - protein, 9 aa, Homo Sapiens
LTIDHVPIW

SEQ ID NO: 129549 - protein, 9 aa, Homo Sapiens
LTKPFEYLF

SEQ ID NO: 129550 - protein, 9 aa, Homo Sapiens
LTLPVNHIF

SEQ ID NO: 129551 - protein, 9 aa, Homo Sapiens
LTPVVVTLW

SEQ ID NO: 129552 - protein, 9 aa, Homo Sapiens
LTRPGSSYF

SEQ ID NO: 129553 - protein, 9 aa, Homo Sapiens
LTRTELETL

SEQ ID NO: 129554 - protein, 9 aa, Homo Sapiens
LTRVEVTEF

SEQ ID NO: 129555 - protein, 9 aa, Homo Sapiens
LTSPDSEKW

SEQ ID NO: 129556 - protein, 9 aa, Homo Sapiens
LTSTLQQDW

SEQ ID NO: 129557 - protein, 9 aa, Homo Sapiens
LTSTLQVFF

SEQ ID NO: 129558 - protein, 9 aa, Homo Sapiens
LTVLVPRVW

SEQ ID NO: 129559 - protein, 9 aa, Homo Sapiens
LTVQVARVY

SEQ ID NO: 129560 - protein, 9 aa, Homo Sapiens
LTVRNLPQY

SEQ ID NO: 129561 - protein, 9 aa, Homo Sapiens
LTVVFENNW

SEQ ID NO: 129562 - protein, 9 aa, Homo Sapiens
LTYENVERW

SEQ ID NO: 129563 - protein, 9 aa, Homo Sapiens
LVHAVQALW

SEQ ID NO: 129564 - protein, 9 aa, Homo Sapiens
LVWKAQNTW

SEQ ID NO: 129565 - protein, 9 aa, Homo Sapiens
MSERQVALW

SEQ ID NO: 129566 - protein, 9 aa, Homo Sapiens
MSLPYRLVF

SEQ ID NO: 129567 - protein, 9 aa, Homo Sapiens
MSLRLNEQY

SEQ ID NO: 129568 - protein, 9 aa, Homo Sapiens
MSMVANLLY

SEQ ID NO: 129569 - protein, 9 aa, Homo Sapiens
MTHGVLEEW

SEQ ID NO: 129570 - protein, 9 aa, Homo Sapiens
MTLKDIYTW

SEQ ID NO: 129571 - protein, 9 aa, Homo Sapiens
MTNGFHMTW

SEQ ID NO: 129572 - protein, 9 aa, Homo Sapiens
NSSAVLLQW

SEQ ID NO: 129573 - protein, 9 aa, Homo Sapiens
NTAVVPQGW

SEQ ID NO: 129574 - protein, 9 aa, Homo Sapiens
QAAERPQEW

SEQ ID NO: 129575 - protein, 9 aa, Homo Sapiens
QAFPNTNRW

SEQ ID NO: 129576 - protein, 9 aa, Homo Sapiens
QSAKEQIKW

SEQ ID NO: 129577 - protein, 9 aa, Homo Sapiens
QSGIVQLLW

SEQ ID NO: 129578 - protein, 9 aa, Homo Sapiens
QSLANLIRW

SEQ ID NO: 129579 - protein, 9 aa, Homo Sapiens
QSLNMVKYW

SEQ ID NO: 129580 - protein, 9 aa, Homo Sapiens
QSLQIFRKW

SEQ ID NO: 129581 - protein, 9 aa, Homo Sapiens
QSQIKGYVW

SEQ ID NO: 129582 - protein, 9 aa, Homo Sapiens
QSSGLVRHW

SEQ ID NO: 129583 - protein, 9 aa, Homo Sapiens
QTFLSEIRW

SEQ ID NO: 129584 - protein, 9 aa, Homo Sapiens
QTFRLYREY

SEQ ID NO: 129585 - protein, 9 aa, Homo Sapiens
QTFSSKTEW

SEQ ID NO: 129586 - protein, 9 aa, Homo Sapiens
QTVSPAEKW

SEQ ID NO: 129587 - protein, 9 aa, Homo Sapiens
QTYYRIFTW

SEQ ID NO: 129588 - protein, 9 aa, Homo Sapiens
RAADVLVYL

SEQ ID NO: 129589 - protein, 9 aa, Homo Sapiens
RAAIMQALW

SEQ ID NO: 129590 - protein, 9 aa, Homo Sapiens
RAAPFSLEY

SEQ ID NO: 129591 - protein, 9 aa, Homo Sapiens
RAFHPDLEF

SEQ ID NO: 129592 - protein, 9 aa, Homo Sapiens
RAKAIIVEF

SEQ ID NO: 129593 - protein, 9 aa, Homo Sapiens
RALAHYRWW

SEQ ID NO: 129594 - protein, 9 aa, Homo Sapiens
RARELLVSY

SEQ ID NO: 129595 - protein, 9 aa, Homo Sapiens
RAVQLQELW

SEQ ID NO: 129596 - protein, 9 aa, Homo Sapiens
RAYPFHWAW

SEQ ID NO: 129597 - protein, 9 aa, Homo Sapiens
RGAQVEEIW

SEQ ID NO: 129598 - protein, 9 aa, Homo Sapiens
RILVDQQVW

SEQ ID NO: 129599 - protein, 9 aa, Homo Sapiens
RIVEPYVTW

SEQ ID NO: 129600 - protein, 9 aa, Homo Sapiens
RLIPERTVW

SEQ ID NO: 129601 - protein, 9 aa, Homo Sapiens
RMFAPTKTW

SEQ ID NO: 129602 - protein, 9 aa, Homo Sapiens
RMFLENETW

SEQ ID NO: 129603 - protein, 9 aa, Homo Sapiens
RMNEVISLW

SEQ ID NO: 129604 - protein, 9 aa, Homo Sapiens
RNVSTGDVN

SEQ ID NO: 129605 - protein, 9 aa, Homo Sapiens
RSAVFSVTY

SEQ ID NO: 129606 - protein, 9 aa, Homo Sapiens
RSFDLGRQF

SEQ ID NO: 129607 - protein, 9 aa, Homo Sapiens
RSFLTKLEW

SEQ ID NO: 129608 - protein, 9 aa, Homo Sapiens
RSFPGFQAF

SEQ ID NO: 129609 - protein, 9 aa, Homo Sapiens
RSFPSVREL

SEQ ID NO: 129610 - protein, 9 aa, Homo Sapiens
RSGPFGQIF

SEQ ID NO: 129611 - protein, 9 aa, Homo Sapiens
RSHDTLVRW

SEQ ID NO: 129612 - protein, 9 aa, Homo Sapiens
RSILAPLAW

SEQ ID NO: 129613 - protein, 9 aa, Homo Sapiens
RSKPLFHHF

SEQ ID NO: 129614 - protein, 9 aa, Homo Sapiens
RSLAYIHSF

SEQ ID NO: 129615 - protein, 9 aa, Homo Sapiens
RSLEISQSY

SEQ ID NO: 129616 - protein, 9 aa, Homo Sapiens
RSLLQENNW

SEQ ID NO: 129617 - protein, 9 aa, Homo Sapiens
RSLPEIWTL

SEQ ID NO: 129618 - protein, 9 aa, Homo Sapiens
RSLPENIQF

SEQ ID NO: 129619 - protein, 9 aa, Homo Sapiens
RSLQLSLVM

SEQ ID NO: 129620 - protein, 9 aa, Homo Sapiens
RSLQTICSW

SEQ ID NO: 129621 - protein, 9 aa, Homo Sapiens
RSLSTTNVF

SEQ ID NO: 129622 - protein, 9 aa, Homo Sapiens
RSMEDFVTW

SEQ ID NO: 129623 - protein, 9 aa, Homo Sapiens
RSMGLPLQF

SEQ ID NO: 129624 - protein, 9 aa, Homo Sapiens
RSRVFDLQF

SEQ ID NO: 129625 - protein, 9 aa, Homo Sapiens
RSVLHHFHF

SEQ ID NO: 129626 - protein, 9 aa, Homo Sapiens
RTEILNQEW

SEQ ID NO: 129627 - protein, 9 aa, Homo Sapiens
RTINVYPNF

SEQ ID NO: 129628 - protein, 9 aa, Homo Sapiens
RTKDILIRF

SEQ ID NO: 129629 - protein, 9 aa, Homo Sapiens
RTLDFDPLL

SEQ ID NO: 129630 - protein, 9 aa, Homo Sapiens
RTLDNQLFF

SEQ ID NO: 129631 - protein, 9 aa, Homo Sapiens
RTLETLKIF

SEQ ID NO: 129632 - protein, 9 aa, Homo Sapiens
RTLGEIPTY

SEQ ID NO: 129633 - protein, 9 aa, Homo Sapiens
RTLPVLLLY

SEQ ID NO: 129634 - protein, 9 aa, Homo Sapiens
RTLTFAERW

SEQ ID NO: 129635 - protein, 9 aa, Homo Sapiens
RTLVPNFTF

SEQ ID NO: 129636 - protein, 9 aa, Homo Sapiens
RTMEIESTF

SEQ ID NO: 129637 - protein, 9 aa, Homo Sapiens
RTMPIYPTY

SEQ ID NO: 129638 - protein, 9 aa, Homo Sapiens
RTSETNTLF

SEQ ID NO: 129639 - protein, 9 aa, Homo Sapiens
RTTDLLTDW

SEQ ID NO: 129640 - protein, 9 aa, Homo Sapiens
RTVEKPPKF

SEQ ID NO: 129641 - protein, 9 aa, Homo Sapiens
RTVEKTWKL

SEQ ID NO: 129642 - protein, 9 aa, Homo Sapiens
RTVIIEQSW

SEQ ID NO: 129643 - protein, 9 aa, Homo Sapiens
RTVRIWRQY

SEQ ID NO: 129644 - protein, 9 aa, Homo Sapiens
RTVYFSEQW

SEQ ID NO: 129645 - protein, 9 aa, Homo Sapiens
RTWLLKTHW

SEQ ID NO: 129646 - protein, 9 aa, Homo Sapiens
RTYDLYITY

SEQ ID NO: 129647 - protein, 9 aa, Homo Sapiens
RTYFVANEW

SEQ ID NO: 129648 - protein, 9 aa, Homo Sapiens
RTYPVQEYF

SEQ ID NO: 129649 - protein, 9 aa, Homo Sapiens
RVAHFGYHW

SEQ ID NO: 129650 - protein, 9 aa, Homo Sapiens
RVEPNIKWF

SEQ ID NO: 129651 - protein, 9 aa, Homo Sapiens
RVFLMDPAW

SEQ ID NO: 129652 - protein, 9 aa, Homo Sapiens
RVFPHEVNW

SEQ ID NO: 129653 - protein, 9 aa, Homo Sapiens
RVFPYSVFY

SEQ ID NO: 129654 - protein, 9 aa, Homo Sapiens
RVHAFLEQW

SEQ ID NO: 129655 - protein, 9 aa, Homo Sapiens
RVHPETYEW

SEQ ID NO: 129656 - protein, 9 aa, Homo Sapiens
RVIDVGSEW

SEQ ID NO: 129657 - protein, 9 aa, Homo Sapiens
RVIEFAAKF

SEQ ID NO: 129658 - protein, 9 aa, Homo Sapiens
RVIEILFSW

SEQ ID NO: 129659 - protein, 9 aa, Homo Sapiens
RVLELLKQY

SEQ ID NO: 129660 - protein, 9 aa, Homo Sapiens
RVLISTDVW

SEQ ID NO: 129661 - protein, 9 aa, Homo Sapiens
RVVDFDETW

SEQ ID NO: 129662 - protein, 9 aa, Homo Sapiens
RVWNLNHLW

SEQ ID NO: 129663 - protein, 9 aa, Homo Sapiens
RVWQWDEKW

SEQ ID NO: 129664 - protein, 9 aa, Homo Sapiens
RVYPQAVYF

SEQ ID NO: 129665 - protein, 9 aa, Homo Sapiens
RVYVDITTY

SEQ ID NO: 129666 - protein, 9 aa, Homo Sapiens
SAANIQPIF

SEQ ID NO: 129667 - protein, 9 aa, Homo Sapiens
SAAPLFFSW

SEQ ID NO: 129668 - protein, 9 aa, Homo Sapiens
SAARLYYYW

SEQ ID NO: 129669 - protein, 9 aa, Homo Sapiens
SAAYLPRMW

SEQ ID NO: 129670 - protein, 9 aa, Homo Sapiens
SADGTIKLW

SEQ ID NO: 129671 - protein, 9 aa, Homo Sapiens
SADKTVALW

SEQ ID NO: 129672 - protein, 9 aa, Homo Sapiens
SAHGIVVAW

SEQ ID NO: 129673 - protein, 9 aa, Homo Sapiens
SAIRYQEVW

SEQ ID NO: 129674 - protein, 9 aa, Homo Sapiens
SALDMTRYW

SEQ ID NO: 129675 - protein, 9 aa, Homo Sapiens
SLRLEVTEF

SEQ ID NO: 129676 - protein, 9 aa, Homo Sapiens
SSDGTIRLW

SEQ ID NO: 129677 - protein, 9 aa, Homo Sapiens
SSDNTIRFW

SEQ ID NO: 129678 - protein, 9 aa, Homo Sapiens
SSDTTVKVW

SEQ ID NO: 129679 - protein, 9 aa, Homo Sapiens
SSKALLQLW

SEQ ID NO: 129680 - protein, 9 aa, Homo Sapiens
SSKPDPSQW

SEQ ID NO: 129681 - protein, 9 aa, Homo Sapiens
SSLPTVEKW

SEQ ID NO: 129682 - protein, 9 aa, Homo Sapiens
SSLQLYRQF

SEQ ID NO: 129683 - protein, 9 aa, Homo Sapiens
SSLRVPSQW

SEQ ID NO: 129684 - protein, 9 aa, Homo Sapiens
SSRQIISHW

SEQ ID NO: 129685 - protein, 9 aa, Homo Sapiens
SSSRIRAAW

SEQ ID NO: 129686 - protein, 9 aa, Homo Sapiens
SSSSIEVHW

SEQ ID NO: 129687 - protein, 9 aa, Homo Sapiens
SSSSVRVEW

SEQ ID NO: 129688 - protein, 9 aa, Homo Sapiens
SSYPNTFEW

SEQ ID NO: 129689 - protein, 9 aa, Homo Sapiens
STDRHIRLW

SEQ ID NO: 129690 - protein, 9 aa, Homo Sapiens
STFPGFVSW

SEQ ID NO: 129691 - protein, 9 aa, Homo Sapiens
STIKIQAMW

SEQ ID NO: 129692 - protein, 9 aa, Homo Sapiens
STLPVSCAW

SEQ ID NO: 129693 - protein, 9 aa, Homo Sapiens
STYVIRDEW

SEQ ID NO: 129694 - protein, 9 aa, Homo Sapiens
SVKITQVTW

SEQ ID NO: 129695 - protein, 9 aa, Homo Sapiens
SVSSIVRQW

SEQ ID NO: 129696 - protein, 9 aa, Homo Sapiens
SVTEIQEKW

SEQ ID NO: 129697 - protein, 9 aa, Homo Sapiens
SVTGILKVW

SEQ ID NO: 129698 - protein, 9 aa, Homo Sapiens
TAADVVKQW

SEQ ID NO: 129699 - protein, 9 aa, Homo Sapiens
TAKISDFSW

SEQ ID NO: 129700 - protein, 9 aa, Homo Sapiens
TALPLLKQF

SEQ ID NO: 129701 - protein, 9 aa, Homo Sapiens
TALSNLITW

SEQ ID NO: 129702 - protein, 9 aa, Homo Sapiens
TANGIALLW

SEQ ID NO: 129703 - protein, 9 aa, Homo Sapiens
TARPVLWHW

SEQ ID NO: 129704 - protein, 9 aa, Homo Sapiens
TSKITSTAW

SEQ ID NO: 129705 - protein, 9 aa, Homo Sapiens
TSLFIARSF

SEQ ID NO: 129706 - protein, 9 aa, Homo Sapiens
TSLQLQHLF

SEQ ID NO: 129707 - protein, 9 aa, Homo Sapiens
TSTIVTLKW

SEQ ID NO: 129708 - protein, 9 aa, Homo Sapiens
TSVPDHVVW

SEQ ID NO: 129709 - protein, 9 aa, Homo Sapiens
TTAPEFRRW

SEQ ID NO: 129710 - protein, 9 aa, Homo Sapiens
TTHNIPQTF

SEQ ID NO: 129711 - protein, 9 aa, Homo Sapiens
TTKINTFNW

SEQ ID NO: 129712 - protein, 9 aa, Homo Sapiens
TTLEHQKTF

SEQ ID NO: 129713 - protein, 9 aa, Homo Sapiens
TTRELQQYW

SEQ ID NO: 129714 - protein, 9 aa, Homo Sapiens
TTSRVLKVL

SEQ ID NO: 129715 - protein, 9 aa, Homo Sapiens
TVGPKTFSW

SEQ ID NO: 129716 - protein, 9 aa, Homo Sapiens
TVYPKPEEW

SEQ ID NO: 129717 - protein, 9 aa, Homo Sapiens
VASEHFYFW

SEQ ID NO: 129718 - protein, 9 aa, Homo Sapiens
VAVLLSRTW

SEQ ID NO: 129719 - protein, 9 aa, Homo Sapiens
VIWPNPVIW

SEQ ID NO: 129720 - protein, 9 aa, Homo Sapiens
VNFTVDQIR

SEQ ID NO: 129721 - protein, 9 aa, Homo Sapiens
VSAGIQTSF

SEQ ID NO: 129722 - protein, 9 aa, Homo Sapiens
VSFAEKNGW

SEQ ID NO: 129723 - protein, 9 aa, Homo Sapiens
VSFYNQNKW

SEQ ID NO: 129724 - protein, 9 aa, Homo Sapiens
VSHPNEVSW

SEQ ID NO: 129725 - protein, 9 aa, Homo Sapiens
VSKAPAPTF

SEQ ID NO: 129726 - protein, 9 aa, Homo Sapiens
VSKPDLITF

SEQ ID NO: 129727 - protein, 9 aa, Homo Sapiens
VSKPDLITW

SEQ ID NO: 129728 - protein, 9 aa, Homo Sapiens
VSKPSAPVF

SEQ ID NO: 129729 - protein, 9 aa, Homo Sapiens
VSKTLPSTW

SEQ ID NO: 129730 - protein, 9 aa, Homo Sapiens
VSLSAGRSW

SEQ ID NO: 129731 - protein, 9 aa, Homo Sapiens
VSMIFPFHW

SEQ ID NO: 129732 - protein, 9 aa, Homo Sapiens
VSRILQEAW

SEQ ID NO: 129733 - protein, 9 aa, Homo Sapiens
VSSHVERVF

SEQ ID NO: 129734 - protein, 9 aa, Homo Sapiens
VSSKVEVVW

SEQ ID NO: 129735 - protein, 9 aa, Homo Sapiens
VSVPYVFRY

SEQ ID NO: 129736 - protein, 9 aa, Homo Sapiens
VTALAARTW

SEQ ID NO: 129737 - protein, 9 aa, Homo Sapiens
VTFLLPAGW

SEQ ID NO: 129738 - protein, 9 aa, Homo Sapiens
VTFPGIKLI

SEQ ID NO: 129739 - protein, 9 aa, Homo Sapiens
VTHSVRIGF

SEQ ID NO: 129740 - protein, 9 aa, Homo Sapiens
VTIRLLETI

SEQ ID NO: 129741 - protein, 9 aa, Homo Sapiens
VTKITLESF

SEQ ID NO: 129742 - protein, 9 aa, Homo Sapiens
VTKKTYEIW

SEQ ID NO: 129743 - protein, 9 aa, Homo Sapiens
VTLEFAQKW

SEQ ID NO: 129744 - protein, 9 aa, Homo Sapiens
VTNKSVSVW

SEQ ID NO: 129745 - protein, 9 aa, Homo Sapiens
VTNPHSSQW

SEQ ID NO: 129746 - protein, 9 aa, Homo Sapiens
VTNPHTDAW

SEQ ID NO: 129747 - protein, 9 aa, Homo Sapiens
VTPIWKLLI

SEQ ID NO: 129748 - protein, 9 aa, Homo Sapiens
VTSPLTVEW

SEQ ID NO: 129749 - protein, 9 aa, Homo Sapiens
VTTVVNPKY

SEQ ID NO: 129750 - protein, 9 aa, Homo Sapiens
VTYKNVPNW

SEQ ID NO: 129751 - protein, 9 aa, Homo Sapiens
VTYVPVTTF

SEQ ID NO: 129752 - protein, 9 aa, Homo Sapiens
VVMPIAHEF

SEQ ID NO: 129753 - protein, 9 aa, Homo Sapiens
YAAIIQLRW

SEQ ID NO: 129754 - protein, 9 aa, Homo Sapiens
YAVVLNATW

SEQ ID NO: 129755 - protein, 9 aa, Homo Sapiens
YSIRGQLSW

SEQ ID NO: 129756 - protein, 9 aa, Homo Sapiens
YTDNLVRVW

SEQ ID NO: 129757 - protein, 9 aa, Homo Sapiens
YTHEVVTLW

SEQ ID NO: 129758 - protein, 9 aa, Homo Sapiens
YTHQVVTRW

SEQ ID NO: 129759 - protein, 9 aa, Homo Sapiens
YTKFQIATW

SEQ ID NO: 129760 - protein, 9 aa, Homo Sapiens
YTNKVITLW

SEQ ID NO: 129761 - protein, 9 aa, Homo Sapiens
YTNRVVTLW

SEQ ID NO: 129762 - protein, 9 aa, Homo Sapiens
YTVRVIDVF

SEQ ID NO: 129763 - protein, 9 aa, Homo Sapiens
YTYRGPKAF

SEQ ID NO: 129764 - protein, 10 aa, Homo Sapiens
AAAAAAAAAW

SEQ ID NO: 129765 - protein, 10 aa, Homo Sapiens
AAADSAVRLW

SEQ ID NO: 129766 - protein, 10 aa, Homo Sapiens
AAALPAAALW

SEQ ID NO: 129767 - protein, 10 aa, Homo Sapiens
AAFDQRMKTW

SEQ ID NO: 129768 - protein, 10 aa, Homo Sapiens
AAKPEQIQKW

SEQ ID NO: 129769 - protein, 10 aa, Homo Sapiens
AALPDQSFLW

SEQ ID NO: 129770 - protein, 10 aa, Homo Sapiens
AHSNLNGVWH

SEQ ID NO: 129771 - protein, 10 aa, Homo Sapiens
ASADGTIKLW

SEQ ID NO: 129772 - protein, 10 aa, Homo Sapiens
ASAGNLKPVW

SEQ ID NO: 129773 - protein, 10 aa, Homo Sapiens
ASARAGIHLW

SEQ ID NO: 129774 - protein, 10 aa, Homo Sapiens
ASDDGTVRIW

SEQ ID NO: 129775 - protein, 10 aa, Homo Sapiens
ASEDRSVRIW

SEQ ID NO: 129776 - protein, 10 aa, Homo Sapiens
ASFDSTVRLW

SEQ ID NO: 129777 - protein, 10 aa, Homo Sapiens
ASFNDNIIKW

SEQ ID NO: 129778 - protein, 10 aa, Homo Sapiens
ASLDQTVRVW

SEQ ID NO: 129779 - protein, 10 aa, Homo Sapiens
ASLNLPAVSW

SEQ ID NO: 129780 - protein, 10 aa, Homo Sapiens
ASMDKTMILW

SEQ ID NO: 129781 - protein, 10 aa, Homo Sapiens
ASWDHTIRVW

SEQ ID NO: 129782 - protein, 10 aa, Homo Sapiens
ATFPDPNVKY

SEQ ID NO: 129783 - protein, 10 aa, Homo Sapiens
ATGGRIVPRF

SEQ ID NO: 129784 - protein, 10 aa, Homo Sapiens
ATILGNTERW

SEQ ID NO: 129785 - protein, 10 aa, Homo Sapiens
ATKVLGTVKW

SEQ ID NO: 129786 - protein, 10 aa, Homo Sapiens
ATLGIVQVFW

SEQ ID NO: 129787 - protein, 10 aa, Homo Sapiens
ATRDELPYTF

SEQ ID NO: 129788 - protein, 10 aa, Homo Sapiens
ATRFNLETEW

SEQ ID NO: 129789 - protein, 10 aa, Homo Sapiens
ATSGDYLRVW

SEQ ID NO: 129790 - protein, 10 aa, Homo Sapiens
ATYDFKSDLW

SEQ ID NO: 129791 - protein, 10 aa, Homo Sapiens
AVAIAAARVW

SEQ ID NO: 129792 - protein, 10 aa, Homo Sapiens
AVNKMDQVNW

SEQ ID NO: 129793 - protein, 10 aa, Homo Sapiens
AVNPRDPPSW

SEQ ID NO: 129794 - protein, 10 aa, Homo Sapiens
AVSEAVRQLW

SEQ ID NO: 129795 - protein, 10 aa, Homo Sapiens
AVTALAARTW

SEQ ID NO: 129796 - protein, 10 aa, Homo Sapiens
DLPVNLSVVW

SEQ ID NO: 129797 - protein, 10 aa, Homo Sapiens
ESLRNYYEQW

SEQ ID NO: 129798 - protein, 10 aa, Homo Sapiens
FAYKVQPRNW

SEQ ID NO: 129799 - protein, 10 aa, Homo Sapiens
FSIEKRFAYW

SEQ ID NO: 129800 - protein, 10 aa, Homo Sapiens
FSLQAPAPLM

SEQ ID NO: 129801 - protein, 10 aa, Homo Sapiens
FSRHTKAIVW

SEQ ID NO: 129802 - protein, 10 aa, Homo Sapiens
FTLREVQERW

SEQ ID NO: 129803 - protein, 10 aa, Homo Sapiens
GALPNLRELW

SEQ ID NO: 129804 - protein, 10 aa, Homo Sapiens
GALRVLNSYW

SEQ ID NO: 129805 - protein, 10 aa, Homo Sapiens
GAYKYIQELW

SEQ ID NO: 129806 - protein, 10 aa, Homo Sapiens
GSADKTVALW

SEQ ID NO: 129807 - protein, 10 aa, Homo Sapiens
GSIDSSIRCW

SEQ ID NO: 129808 - protein, 10 aa, Homo Sapiens
GSLQEGHRLW

SEQ ID NO: 129809 - protein, 10 aa, Homo Sapiens
GSSDGTIRLW

SEQ ID NO: 129810 - protein, 10 aa, Homo Sapiens
GSSDSTVRVW

SEQ ID NO: 129811 - protein, 10 aa, Homo Sapiens
GSWDGTLRLW

SEQ ID NO: 129812 - protein, 10 aa, Homo Sapiens
GSWDHTLRVW

SEQ ID NO: 129813 - protein, 10 aa, Homo Sapiens
GSWDQTVKLW

SEQ ID NO: 129814 - protein, 10 aa, Homo Sapiens
GSYDGFARIW

SEQ ID NO: 129815 - protein, 10 aa, Homo Sapiens
GSYVAPKAVW

SEQ ID NO: 129816 - protein, 10 aa, Homo Sapiens
GTFTIKSDVW

SEQ ID NO: 129817 - protein, 10 aa, Homo Sapiens
GTFTNQIHKW

SEQ ID NO: 129818 - protein, 10 aa, Homo Sapiens
GTLPPEIQAW

SEQ ID NO: 129819 - protein, 10 aa, Homo Sapiens
HAFDGFEVNW

SEQ ID NO: 129820 - protein, 10 aa, Homo Sapiens
HAKPIQDVQW

SEQ ID NO: 129821 - protein, 10 aa, Homo Sapiens
HAWMDNIREW

SEQ ID NO: 129822 - protein, 10 aa, Homo Sapiens
HSAVVEDVAW

SEQ ID NO: 129823 - protein, 10 aa, Homo Sapiens
HSGPVVAMVW

SEQ ID NO: 129824 - protein, 10 aa, Homo Sapiens
HSLDLQLQNW

SEQ ID NO: 129825 - protein, 10 aa, Homo Sapiens
HSMDPPTFTF

SEQ ID NO: 129826 - protein, 10 aa, Homo Sapiens
HSMLDINALF

SEQ ID NO: 129827 - protein, 10 aa, Homo Sapiens
HSVAQAGVQW

SEQ ID NO: 129828 - protein, 10 aa, Homo Sapiens
HSVTQAGVQW

SEQ ID NO: 129829 - protein, 10 aa, Homo Sapiens
HTADVQLHAW

SEQ ID NO: 129830 - protein, 10 aa, Homo Sapiens
HTAKISDFSW

SEQ ID NO: 129831 - protein, 10 aa, Homo Sapiens
HTAPVLDIAW

SEQ ID NO: 129832 - protein, 10 aa, Homo Sapiens
HTAVVEDVSW

SEQ ID NO: 129833 - protein, 10 aa, Homo Sapiens
HTFQNDIHVY

SEQ ID NO: 129834 - protein, 10 aa, Homo Sapiens
HTIGCNAVSW

SEQ ID NO: 129835 - protein, 10 aa, Homo Sapiens
HTLDDRTQLW

SEQ ID NO: 129836 - protein, 10 aa, Homo Sapiens
HTMTDDVTFW

SEQ ID NO: 129837 - protein, 10 aa, Homo Sapiens
HTRPVVDLAF

SEQ ID NO: 129838 - protein, 10 aa, Homo Sapiens
HTWIQDNGGW

SEQ ID NO: 129839 - protein, 10 aa, Homo Sapiens
IAANEENRKW

SEQ ID NO: 129840 - protein, 10 aa, Homo Sapiens
IGLPSGLESW

SEQ ID NO: 129841 - protein, 10 aa, Homo Sapiens
ISAPDSQVRF

SEQ ID NO: 129842 - protein, 10 aa, Homo Sapiens
ISASSLTSKW

SEQ ID NO: 129843 - protein, 10 aa, Homo Sapiens
ISATEVDSRW

SEQ ID NO: 129844 - protein, 10 aa, Homo Sapiens
ISDPYKVYRI

SEQ ID NO: 129845 - protein, 10 aa, Homo Sapiens
ISFHNIHNTF

SEQ ID NO: 129846 - protein, 10 aa, Homo Sapiens
ISFSASHRLY

SEQ ID NO: 129847 - protein, 10 aa, Homo Sapiens
ISKPGQFETF

SEQ ID NO: 129848 - protein, 10 aa, Homo Sapiens
ISLIPPEERW

SEQ ID NO: 129849 - protein, 10 aa, Homo Sapiens
ISLLAQNTSW

SEQ ID NO: 129850 - protein, 10 aa, Homo Sapiens
ISLPNGLQGF

SEQ ID NO: 129851 - protein, 10 aa, Homo Sapiens
ISLSEPRMLW

SEQ ID NO: 129852 - protein, 10 aa, Homo Sapiens
ISSGKLNEIW

SEQ ID NO: 129853 - protein, 10 aa, Homo Sapiens
ISSVRAVAVW

SEQ ID NO: 129854 - protein, 10 aa, Homo Sapiens
ISVPGLQTNW

SEQ ID NO: 129855 - protein, 10 aa, Homo Sapiens
ITAENVAKKW

SEQ ID NO: 129856 - protein, 10 aa, Homo Sapiens
ITFPNKEIAW

SEQ ID NO: 129857 - protein, 10 aa, Homo Sapiens
ITKADAAEFW

SEQ ID NO: 129858 - protein, 10 aa, Homo Sapiens
ITKEIEANEW

SEQ ID NO: 129859 - protein, 10 aa, Homo Sapiens
ITKGYVIRLY

SEQ ID NO: 129860 - protein, 10 aa, Homo Sapiens
ITLPTEASTW

SEQ ID NO: 129861 - protein, 10 aa, Homo Sapiens
ITLRQTITTF

SEQ ID NO: 129862 - protein, 10 aa, Homo Sapiens
ITTEGKLWSW

SEQ ID NO: 129863 - protein, 10 aa, Homo Sapiens
ITVDGKPPTW

SEQ ID NO: 129864 - protein, 10 aa, Homo Sapiens
ITVLARSKPG

SEQ ID NO: 129865 - protein, 10 aa, Homo Sapiens
ITVLVTGAKW

SEQ ID NO: 129866 - protein, 10 aa, Homo Sapiens
KAHPPELKKF

SEQ ID NO: 129867 - protein, 10 aa, Homo Sapiens
KAVDIVKQVW

SEQ ID NO: 129868 - protein, 10 aa, Homo Sapiens
KAVIDLNNRW

SEQ ID NO: 129869 - protein, 10 aa, Homo Sapiens
KAWAEYVVEW

SEQ ID NO: 129870 - protein, 10 aa, Homo Sapiens
KAYGPKVDIW

SEQ ID NO: 129871 - protein, 10 aa, Homo Sapiens
KGFSEEHNTW

SEQ ID NO: 129872 - protein, 10 aa, Homo Sapiens
KGFTDADNTW

SEQ ID NO: 129873 - protein, 10 aa, Homo Sapiens
KGWDGYDVQW

SEQ ID NO: 129874 - protein, 10 aa, Homo Sapiens
KGWPAVAQSW

SEQ ID NO: 129875 - protein, 10 aa, Homo Sapiens
KIKDYLEELW

SEQ ID NO: 129876 - protein, 10 aa, Homo Sapiens
KIYLPYLHEW

SEQ ID NO: 129877 - protein, 10 aa, Homo Sapiens
KLIDVTNIYW

SEQ ID NO: 129878 - protein, 10 aa, Homo Sapiens
KLMPGRIQLW

SEQ ID NO: 129879 - protein, 10 aa, Homo Sapiens
KSAEAVGVKI

SEQ ID NO: 129880 - protein, 10 aa, Homo Sapiens
KSAEKEISLW

SEQ ID NO: 129881 - protein, 10 aa, Homo Sapiens
KSAVELVQEF

SEQ ID NO: 129882 - protein, 10 aa, Homo Sapiens
KSFEGNVFMY

SEQ ID NO: 129883 - protein, 10 aa, Homo Sapiens
KSFEKAKESW

SEQ ID NO: 129884 - protein, 10 aa, Homo Sapiens
KSFSDLFKRF

SEQ ID NO: 129885 - protein, 10 aa, Homo Sapiens
KSFSDTLKTY

SEQ ID NO: 129886 - protein, 10 aa, Homo Sapiens
KSGPVVSLGW

SEQ ID NO: 129887 - protein, 10 aa, Homo Sapiens
KSIGDIFLKY

SEQ ID NO: 129888 - protein, 10 aa, Homo Sapiens
KSINSEVLKF

SEQ ID NO: 129889 - protein, 10 aa, Homo Sapiens
KSITIIGGGF

SEQ ID NO: 129890 - protein, 10 aa, Homo Sapiens
KSKESESFVF

SEQ ID NO: 129891 - protein, 10 aa, Homo Sapiens
KSKVDIPAHW

SEQ ID NO: 129892 - protein, 10 aa, Homo Sapiens
KSLEDVVRAY

SEQ ID NO: 129893 - protein, 10 aa, Homo Sapiens
KSLNIFGSSW

SEQ ID NO: 129894 - protein, 10 aa, Homo Sapiens
KSLPAEINRM

SEQ ID NO: 129895 - protein, 10 aa, Homo Sapiens
KSTPYTAVRW

SEQ ID NO: 129896 - protein, 10 aa, Homo Sapiens
KSVENLGVSY

SEQ ID NO: 129897 - protein, 10 aa, Homo Sapiens
KSVFVKNVGW

SEQ ID NO: 129898 - protein, 10 aa, Homo Sapiens
KSWQGVTIYF

SEQ ID NO: 129899 - protein, 10 aa, Homo Sapiens
KTAEEIKQIW

SEQ ID NO: 129900 - protein, 10 aa, Homo Sapiens
KTAEEVAALI

SEQ ID NO: 129901 - protein, 10 aa, Homo Sapiens
KTIPYSDKLF

SEQ ID NO: 129902 - protein, 10 aa, Homo Sapiens
KTKDGVREVF

SEQ ID NO: 129903 - protein, 10 aa, Homo Sapiens
KTLAEINQKW

SEQ ID NO: 129904 - protein, 10 aa, Homo Sapiens
KTLDQAIMKF

SEQ ID NO: 129905 - protein, 10 aa, Homo Sapiens
KTLGDFAAEY

SEQ ID NO: 129906 - protein, 10 aa, Homo Sapiens
KTLSDIFLLF

SEQ ID NO: 129907 - protein, 10 aa, Homo Sapiens
KTLTDISNQW

SEQ ID NO: 129908 - protein, 10 aa, Homo Sapiens
KTLVLSNLSY

SEQ ID NO: 129909 - protein, 10 aa, Homo Sapiens
KTNTFQGVIF

SEQ ID NO: 129910 - protein, 10 aa, Homo Sapiens
KTPEEIRKTF

SEQ ID NO: 129911 - protein, 10 aa, Homo Sapiens
KTRDDWLVSW

SEQ ID NO: 129912 - protein, 10 aa, Homo Sapiens
KTSELLVRKW

SEQ ID NO: 129913 - protein, 10 aa, Homo Sapiens
KTTPDVIFVF

SEQ ID NO: 129914 - protein, 10 aa, Homo Sapiens
KTVAGGAWTY

SEQ ID NO: 129915 - protein, 10 aa, Homo Sapiens
KTVALDGTLF

SEQ ID NO: 129916 - protein, 10 aa, Homo Sapiens
KTVTAMDVVY

SEQ ID NO: 129917 - protein, 10 aa, Homo Sapiens
KTYGEIFEKF

SEQ ID NO: 129918 - protein, 10 aa, Homo Sapiens
KTYQDIQNTI

SEQ ID NO: 129919 - protein, 10 aa, Homo Sapiens
KVFESWMHHW

SEQ ID NO: 129920 - protein, 10 aa, Homo Sapiens
KVGSVVSVGW

SEQ ID NO: 129921 - protein, 10 aa, Homo Sapiens
KVIAINDLNW

SEQ ID NO: 129922 - protein, 10 aa, Homo Sapiens
KVIDKRLWGW

SEQ ID NO: 129923 - protein, 10 aa, Homo Sapiens
KVLIDIREYW

SEQ ID NO: 129924 - protein, 10 aa, Homo Sapiens
KVLPPLEQVW

SEQ ID NO: 129925 - protein, 10 aa, Homo Sapiens
KVRAESFDTW

SEQ ID NO: 129926 - protein, 10 aa, Homo Sapiens
LALPPGAEHW

SEQ ID NO: 129927 - protein, 10 aa, Homo Sapiens
LALSPVPSHW

SEQ ID NO: 129928 - protein, 10 aa, Homo Sapiens
LGIPKDPRQW

SEQ ID NO: 129929 - protein, 10 aa, Homo Sapiens
LLFPGKAFSW

SEQ ID NO: 129930 - protein, 10 aa, Homo Sapiens
LSAIIDGKIF

SEQ ID NO: 129931 - protein, 10 aa, Homo Sapiens
LSALIDGKNF

SEQ ID NO: 129932 - protein, 10 aa, Homo Sapiens
LSFKDVAVVF

SEQ ID NO: 129933 - protein, 10 aa, Homo Sapiens
LSHGVPLPNW

SEQ ID NO: 129934 - protein, 10 aa, Homo Sapiens
LSINPNNHSW

SEQ ID NO: 129935 - protein, 10 aa, Homo Sapiens
LSIPDIKTAF

SEQ ID NO: 129936 - protein, 10 aa, Homo Sapiens
LSKGGELFAW

SEQ ID NO: 129937 - protein, 10 aa, Homo Sapiens
LSLDELHRKY

SEQ ID NO: 129938 - protein, 10 aa, Homo Sapiens
LSLPADLTKM

SEQ ID NO: 129939 - protein, 10 aa, Homo Sapiens
LSLPEDFYHF

SEQ ID NO: 129940 - protein, 10 aa, Homo Sapiens
LSMPASLGRM

SEQ ID NO: 129941 - protein, 10 aa, Homo Sapiens
LSSPDYQIRW

SEQ ID NO: 129942 - protein, 10 aa, Homo Sapiens
LSVKEPQLVW

SEQ ID NO: 129943 - protein, 10 aa, Homo Sapiens
LTFLGKYREF

SEQ ID NO: 129944 - protein, 10 aa, Homo Sapiens
LTFRDVAIEF

SEQ ID NO: 129945 - protein, 10 aa, Homo Sapiens
LTIPDGGVHI

SEQ ID NO: 129946 - protein, 10 aa, Homo Sapiens
LTLEDLEDSW

SEQ ID NO: 129947 - protein, 10 aa, Homo Sapiens
LTLNEDLRSW

SEQ ID NO: 129948 - protein, 10 aa, Homo Sapiens
LTMPDTPRLF

SEQ ID NO: 129949 - protein, 10 aa, Homo Sapiens
LTMSDVQIHW

SEQ ID NO: 129950 - protein, 10 aa, Homo Sapiens
LTRISDPEKW

SEQ ID NO: 129951 - protein, 10 aa, Homo Sapiens
LTVDGKVFSW

SEQ ID NO: 129952 - protein, 10 aa, Homo Sapiens
LVFPYTHQNW

SEQ ID NO: 129953 - protein, 10 aa, Homo Sapiens
MAAEALSRGW

SEQ ID NO: 129954 - protein, 10 aa, Homo Sapiens
MAFQNDVYEW

SEQ ID NO: 129955 - protein, 10 aa, Homo Sapiens
MTAGVDGHSW

SEQ ID NO: 129956 - protein, 10 aa, Homo Sapiens
MTFKDVEVTF

SEQ ID NO: 129957 - protein, 10 aa, Homo Sapiens
MTRPDLPVGF

SEQ ID NO: 129958 - protein, 10 aa, Homo Sapiens
NSVAASLMSW

SEQ ID NO: 129959 - protein, 10 aa, Homo Sapiens
QAINPKLLQL

SEQ ID NO: 129960 - protein, 10 aa, Homo Sapiens
QSLPDFGISY

SEQ ID NO: 129961 - protein, 10 aa, Homo Sapiens
QTLSLEADKW

SEQ ID NO: 129962 - protein, 10 aa, Homo Sapiens
QTMEDLISLW

SEQ ID NO: 129963 - protein, 10 aa, Homo Sapiens
QTQPWTTQLW

SEQ ID NO: 129964 - protein, 10 aa, Homo Sapiens
QTVSDIERGW

SEQ ID NO: 129965 - protein, 10 aa, Homo Sapiens
QTWWHGVLAW

SEQ ID NO: 129966 - protein, 10 aa, Homo Sapiens
RAAELFVETI

SEQ ID NO: 129967 - protein, 10 aa, Homo Sapiens
RAAEPVRVVW

SEQ ID NO: 129968 - protein, 10 aa, Homo Sapiens
RAIDSIHQLW

SEQ ID NO: 129969 - protein, 10 aa, Homo Sapiens
RALELEARRW

SEQ ID NO: 129970 - protein, 10 aa, Homo Sapiens
RAMQDMQLLW

SEQ ID NO: 129971 - protein, 10 aa, Homo Sapiens
RARFEEVLTW

SEQ ID NO: 129972 - protein, 10 aa, Homo Sapiens
RAYPHNLMTF

SEQ ID NO: 129973 - protein, 10 aa, Homo Sapiens
RGYPDSESTW

SEQ ID NO: 129974 - protein, 10 aa, Homo Sapiens
RMYPLKPTWW

SEQ ID NO: 129975 - protein, 10 aa, Homo Sapiens
RSFEHALMLF

SEQ ID NO: 129976 - protein, 10 aa, Homo Sapiens
RSFKETTNRW

SEQ ID NO: 129977 - protein, 10 aa, Homo Sapiens
RSFPIIPRSW

SEQ ID NO: 129978 - protein, 10 aa, Homo Sapiens
RSIEEVYYLW

SEQ ID NO: 129979 - protein, 10 aa, Homo Sapiens
RSIPAITRYW

SEQ ID NO: 129980 - protein, 10 aa, Homo Sapiens
RSIQADGLVW

SEQ ID NO: 129981 - protein, 10 aa, Homo Sapiens
RSIQLDGLVW

SEQ ID NO: 129982 - protein, 10 aa, Homo Sapiens
RSKDVAKILW

SEQ ID NO: 129983 - protein, 10 aa, Homo Sapiens
RSLINSNVGF

SEQ ID NO: 129984 - protein, 10 aa, Homo Sapiens
RSLKDALFKW

SEQ ID NO: 129985 - protein, 10 aa, Homo Sapiens
RSLNQTGVQW

SEQ ID NO: 129986 - protein, 10 aa, Homo Sapiens
RSLPEPLMTY

SEQ ID NO: 129987 - protein, 10 aa, Homo Sapiens
RSLSDLFRRY

SEQ ID NO: 129988 - protein, 10 aa, Homo Sapiens
RSLTTLSEQW

SEQ ID NO: 129989 - protein, 10 aa, Homo Sapiens
RSLVPAAVVW

SEQ ID NO: 129990 - protein, 10 aa, Homo Sapiens
RSMQLDYTTW

SEQ ID NO: 129991 - protein, 10 aa, Homo Sapiens
RSRDYQPLLW

SEQ ID NO: 129992 - protein, 10 aa, Homo Sapiens
RSSAGQAWKW

SEQ ID NO: 129993 - protein, 10 aa, Homo Sapiens
RSVDVTNTTF

SEQ ID NO: 129994 - protein, 10 aa, Homo Sapiens
RSVNIKEICW

SEQ ID NO: 129995 - protein, 10 aa, Homo Sapiens
RSVTQAGVQW

SEQ ID NO: 129996 - protein, 10 aa, Homo Sapiens
RSVVQAGVQW

SEQ ID NO: 129997 - protein, 10 aa, Homo Sapiens
RSWDQQIKLW

SEQ ID NO: 129998 - protein, 10 aa, Homo Sapiens
RSYQLEGVNW

SEQ ID NO: 129999 - protein, 10 aa, Homo Sapiens
RTAPFHLDLW

SEQ ID NO: 130000 - protein, 10 aa, Homo Sapiens
RTFTDHVMLF

SEQ ID NO: 130001 - protein, 10 aa, Homo Sapiens
RTILVDNNTW

SEQ ID NO: 130002 - protein, 10 aa, Homo Sapiens
RTIQELFEVY

SEQ ID NO: 130003 - protein, 10 aa, Homo Sapiens
RTLDNQLFFF

SEQ ID NO: 130004 - protein, 10 aa, Homo Sapiens
RTLDTIQLAF

SEQ ID NO: 130005 - protein, 10 aa, Homo Sapiens
RTLESKLVLF

SEQ ID NO: 130006 - protein, 10 aa, Homo Sapiens
RTMELLTQNW

SEQ ID NO: 130007 - protein, 10 aa, Homo Sapiens
RTMNIKSATW

SEQ ID NO: 130008 - protein, 10 aa, Homo Sapiens
RTSIETNVRF

SEQ ID NO: 130009 - protein, 10 aa, Homo Sapiens
RTTLVDNNTW

SEQ ID NO: 130010 - protein, 10 aa, Homo Sapiens
RTVFPSREFW

SEQ ID NO: 130011 - protein, 10 aa, Homo Sapiens
RTYSLVGQAW

SEQ ID NO: 130012 - protein, 10 aa, Homo Sapiens
RTYTYEKLLW

SEQ ID NO: 130013 - protein, 10 aa, Homo Sapiens
RVDPDVAQHW

SEQ ID NO: 130014 - protein, 10 aa, Homo Sapiens
RVFPDKGYSF

SEQ ID NO: 130015 - protein, 10 aa, Homo Sapiens
RVFPEKGYSF

SEQ ID NO: 130016 - protein, 10 aa, Homo Sapiens
RVINEEYKIW

SEQ ID NO: 130017 - protein, 10 aa, Homo Sapiens
RVKAEPFIKW

SEQ ID NO: 130018 - protein, 10 aa, Homo Sapiens
RVKPLHYISW

SEQ ID NO: 130019 - protein, 10 aa, Homo Sapiens
RVKSVNLDQW

SEQ ID NO: 130020 - protein, 10 aa, Homo Sapiens
RVLPLPSENW

SEQ ID NO: 130021 - protein, 10 aa, Homo Sapiens
RVLSDLDQKW

SEQ ID NO: 130022 - protein, 10 aa, Homo Sapiens
RVSPALGITW

SEQ ID NO: 130023 - protein, 10 aa, Homo Sapiens
SAASPHYQEW

SEQ ID NO: 130024 - protein, 10 aa, Homo Sapiens
SALPADTQAW

SEQ ID NO: 130025 - protein, 10 aa, Homo Sapiens
SATDAAIRVW

SEQ ID NO: 130026 - protein, 10 aa, Homo Sapiens
SKSVGQILLW

SEQ ID NO: 130027 - protein, 10 aa, Homo Sapiens
SSACLIGDAW

SEQ ID NO: 130028 - protein, 10 aa, Homo Sapiens
SSLDAHIRLW

SEQ ID NO: 130029 - protein, 10 aa, Homo Sapiens
SSSPEVKGYW

SEQ ID NO: 130030 - protein, 10 aa, Homo Sapiens
STAKEIIQHF

SEQ ID NO: 130031 - protein, 10 aa, Homo Sapiens
STLRELGQTW

SEQ ID NO: 130032 - protein, 10 aa, Homo Sapiens
TAIESGQHYW

SEQ ID NO: 130033 - protein, 10 aa, Homo Sapiens
TILPGNLQSW

SEQ ID NO: 130034 - protein, 10 aa, Homo Sapiens
TSLPEGLKDW

SEQ ID NO: 130035 - protein, 10 aa, Homo Sapiens
TSLTLKHAAW

SEQ ID NO: 130036 - protein, 10 aa, Homo Sapiens
TSRTQFEETW

SEQ ID NO: 130037 - protein, 10 aa, Homo Sapiens
TSSKPDPSQW

SEQ ID NO: 130038 - protein, 10 aa, Homo Sapiens
TSSSSVRVEW

SEQ ID NO: 130039 - protein, 10 aa, Homo Sapiens
TSYGVREVDQ

SEQ ID NO: 130040 - protein, 10 aa, Homo Sapiens
TTDGYLLRLF

SEQ ID NO: 130041 - protein, 10 aa, Homo Sapiens
TTIPHALLTW

SEQ ID NO: 130042 - protein, 10 aa, Homo Sapiens
TVLPGEIQNW

SEQ ID NO: 130043 - protein, 10 aa, Homo Sapiens
TVLPGELQSW

SEQ ID NO: 130044 - protein, 10 aa, Homo Sapiens
TVYTGIDHHW

SEQ ID NO: 130045 - protein, 10 aa, Homo Sapiens
VAAPSWLHRF

SEQ ID NO: 130046 - protein, 10 aa, Homo Sapiens
VAKPNIGENW

SEQ ID NO: 130047 - protein, 10 aa, Homo Sapiens
VARVEPNIKW

SEQ ID NO: 130048 - protein, 10 aa, Homo Sapiens
VSAEGVLHVW

SEQ ID NO: 130049 - protein, 10 aa, Homo Sapiens
VSLRLGDLVW

SEQ ID NO: 130050 - protein, 10 aa, Homo Sapiens
VSWDEKGMTW

SEQ ID NO: 130051 - protein, 10 aa, Homo Sapiens
VTARLVGVLW

SEQ ID NO: 130052 - protein, 10 aa, Homo Sapiens
VTFEDNSKYW

SEQ ID NO: 130053 - protein, 10 aa, Homo Sapiens
VTFEDVAVTF

SEQ ID NO: 130054 - protein, 10 aa, Homo Sapiens
VTFKDVAVTF

SEQ ID NO: 130055 - protein, 10 aa, Homo Sapiens
VTFPDIIRNY

SEQ ID NO: 130056 - protein, 10 aa, Homo Sapiens
VTFPFKPESW

SEQ ID NO: 130057 - protein, 10 aa, Homo Sapiens
VTFRDVAIYF

SEQ ID NO: 130058 - protein, 10 aa, Homo Sapiens
VTKDGRVFAW

SEQ ID NO: 130059 - protein, 10 aa, Homo Sapiens
VTLKNKYLDW

SEQ ID NO: 130060 - protein, 10 aa, Homo Sapiens
VTLRTGEVKW

SEQ ID NO: 130061 - protein, 10 aa, Homo Sapiens
VTNKSQIRTW

SEQ ID NO: 130062 - protein, 10 aa, Homo Sapiens
VTVPANVQRW

SEQ ID NO: 130063 - protein, 10 aa, Homo Sapiens
VVARTVAQLW

SEQ ID NO: 130064 - protein, 10 aa, Homo Sapiens
YTKIPDPSTW

SEQ ID NO: 130065 - protein, 10 aa, Homo Sapiens
YTLPNGDTAW

SEQ ID NO: 130066 - protein, 10 aa, Homo Sapiens
YTSRQIPQNF

SEQ ID NO: 130067 - protein, 11 aa, Homo Sapiens
AAFNKDALLNW

SEQ ID NO: 130068 - protein, 11 aa, Homo Sapiens
AAFPAEKESEW

SEQ ID NO: 130069 - protein, 11 aa, Homo Sapiens
AAYRNLGQNLW

SEQ ID NO: 130070 - protein, 11 aa, Homo Sapiens
ASGPHSSLSSW

SEQ ID NO: 130071 - protein, 11 aa, Homo Sapiens
ASLPAELINQI

SEQ ID NO: 130072 - protein, 11 aa, Homo Sapiens
ASLPFQVANVW

SEQ ID NO: 130073 - protein, 11 aa, Homo Sapiens
ASRVLISTDVW

SEQ ID NO: 130074 - protein, 11 aa, Homo Sapiens
ASYSGKAADVW

SEQ ID NO: 130075 - protein, 11 aa, Homo Sapiens
ATDPNILGRTW

SEQ ID NO: 130076 - protein, 11 aa, Homo Sapiens
ATIKDIREHEW

SEQ ID NO: 130077 - protein, 11 aa, Homo Sapiens
ATIPVSQISTI

SEQ ID NO: 130078 - protein, 11 aa, Homo Sapiens
ATLGNFAKATF

SEQ ID NO: 130079 - protein, 11 aa, Homo Sapiens
ATSQLIGTIFF

SEQ ID NO: 130080 - protein, 11 aa, Homo Sapiens
ATTPSAVFRVW

SEQ ID NO: 130081 - protein, 11 aa, Homo Sapiens
ATVPNTIVVNW

SEQ ID NO: 130082 - protein, 11 aa, Homo Sapiens
AVAAVLTQVVW

SEQ ID NO: 130083 - protein, 11 aa, Homo Sapiens
AVFSDAQMHIW

SEQ ID NO: 130084 - protein, 11 aa, Homo Sapiens
CSKPEQLVVTF

SEQ ID NO: 130085 - protein, 11 aa, Homo Sapiens
ETIDWKVFESW

SEQ ID NO: 130086 - protein, 11 aa, Homo Sapiens
FAYKDQNENRW

SEQ ID NO: 130087 - protein, 11 aa, Homo Sapiens
FGDPASSLFRW

SEQ ID NO: 130088 - protein, 11 aa, Homo Sapiens
FSKPDSDRFVF

SEQ ID NO: 130089 - protein, 11 aa, Homo Sapiens
GSSHLISTSSW

SEQ ID NO: 130090 - protein, 11 aa, Homo Sapiens
GSSTFHTSLYW

SEQ ID NO: 130091 - protein, 11 aa, Homo Sapiens
GSTKVLQAVQW

SEQ ID NO: 130092 - protein, 11 aa, Homo Sapiens
GTAAVFNAVNW

SEQ ID NO: 130093 - protein, 11 aa, Homo Sapiens
GTFEYEYSQRW

SEQ ID NO: 130094 - protein, 11 aa, Homo Sapiens
GTWIGKGTERW

SEQ ID NO: 130095 - protein, 11 aa, Homo Sapiens
GTYMGHTGAVW

SEQ ID NO: 130096 - protein, 11 aa, Homo Sapiens
GVSQVLNRLTF

SEQ ID NO: 130097 - protein, 11 aa, Homo Sapiens
HSAGNMLFRTW

SEQ ID NO: 130098 - protein, 11 aa, Homo Sapiens
HSFYPTPALQW

SEQ ID NO: 130099 - protein, 11 aa, Homo Sapiens
HSGLVHGLAFW

SEQ ID NO: 130100 - protein, 11 aa, Homo Sapiens
HSKENPKEFFW

SEQ ID NO: 130101 - protein, 11 aa, Homo Sapiens
HSNEQTLQRSW

SEQ ID NO: 130102 - protein, 11 aa, Homo Sapiens
HSQPIVSIRVW

SEQ ID NO: 130103 - protein, 11 aa, Homo Sapiens
HSSEELRNLGW

SEQ ID NO: 130104 - protein, 11 aa, Homo Sapiens
HSWMEGQVTVW

SEQ ID NO: 130105 - protein, 11 aa, Homo Sapiens
HTFFDHQDQVW

SEQ ID NO: 130106 - protein, 11 aa, Homo Sapiens
HTITPVIPLLW

SEQ ID NO: 130107 - protein, 11 aa, Homo Sapiens
HTNQDHVHAVW

SEQ ID NO: 130108 - protein, 11 aa, Homo Sapiens
HTWNGIRHLMW

SEQ ID NO: 130109 - protein, 11 aa, Homo Sapiens
IATKVLGTVKW

SEQ ID NO: 130110 - protein, 11 aa, Homo Sapiens
IGAQVLGKILW

SEQ ID NO: 130111 - protein, 11 aa, Homo Sapiens
IGLPGAGKTTW

SEQ ID NO: 130112 - protein, 11 aa, Homo Sapiens
ISAPDKRIYQF

SEQ ID NO: 130113 - protein, 11 aa, Homo Sapiens
ISDHEATLRCW

SEQ ID NO: 130114 - protein, 11 aa, Homo Sapiens
ISFIEDPERKY

SEQ ID NO: 130115 - protein, 11 aa, Homo Sapiens
ISKFDTVEDFW

SEQ ID NO: 130116 - protein, 11 aa, Homo Sapiens
ISKPVGFGEEF

SEQ ID NO: 130117 - protein, 11 aa, Homo Sapiens
ISLPDDVRRRL

SEQ ID NO: 130118 - protein, 11 aa, Homo Sapiens
ISMANDLKEVW

SEQ ID NO: 130119 - protein, 11 aa, Homo Sapiens
ISNPVTKEMLF

SEQ ID NO: 130120 - protein, 11 aa, Homo Sapiens
ISNTASYLRLW

SEQ ID NO: 130121 - protein, 11 aa, Homo Sapiens
ISYPQEVIPTF

SEQ ID NO: 130122 - protein, 11 aa, Homo Sapiens
ITIPDIKKDRW

SEQ ID NO: 130123 - protein, 11 aa, Homo Sapiens
ITREEGVLTLW

SEQ ID NO: 130124 - protein, 11 aa, Homo Sapiens
ITSQVTGQIGW

SEQ ID NO: 130125 - protein, 11 aa, Homo Sapiens
ITSSAKVDMTF

SEQ ID NO: 130126 - protein, 11 aa, Homo Sapiens
ITSSIHSKETF

SEQ ID NO: 130127 - protein, 11 aa, Homo Sapiens
ITYDDPIKTSW

SEQ ID NO: 130128 - protein, 11 aa, Homo Sapiens
IVDPNGLARLW

SEQ ID NO: 130129 - protein, 11 aa, Homo Sapiens
IVRPSIVGASW

SEQ ID NO: 130130 - protein, 11 aa, Homo Sapiens
KAFAETHIKGF

SEQ ID NO: 130131 - protein, 11 aa, Homo Sapiens
KAIEEGVNHMW

SEQ ID NO: 130132 - protein, 11 aa, Homo Sapiens
KAKYPDYEVTW

SEQ ID NO: 130133 - protein, 11 aa, Homo Sapiens
KAVDCLLDSKW

SEQ ID NO: 130134 - protein, 11 aa, Homo Sapiens
KIQPDTIIQVW

SEQ ID NO: 130135 - protein, 11 aa, Homo Sapiens
KLKPFIDREWW

SEQ ID NO: 130136 - protein, 11 aa, Homo Sapiens
KLSPEELLLRW

SEQ ID NO: 130137 - protein, 11 aa, Homo Sapiens
KSFETDTNLNF

SEQ ID NO: 130138 - protein, 11 aa, Homo Sapiens
KSFGSAQEFAW

SEQ ID NO: 130139 - protein, 11 aa, Homo Sapiens
KSFGWPSFITY

SEQ ID NO: 130140 - protein, 11 aa, Homo Sapiens
KSFPDTGSLNL

SEQ ID NO: 130141 - protein, 11 aa, Homo Sapiens
KSFSDTLKTYF

SEQ ID NO: 130142 - protein, 11 aa, Homo Sapiens
KSFSKSDLVNW

SEQ ID NO: 130143 - protein, 11 aa, Homo Sapiens
KSIDAGPVDAW

SEQ ID NO: 130144 - protein, 11 aa, Homo Sapiens
KSKAMTGVEQW

SEQ ID NO: 130145 - protein, 11 aa, Homo Sapiens
KSKEDLVSQGF

SEQ ID NO: 130146 - protein, 11 aa, Homo Sapiens
KSKLDAEVSKW

SEQ ID NO: 130147 - protein, 11 aa, Homo Sapiens
KSLESLDTSLF

SEQ ID NO: 130148 - protein, 11 aa, Homo Sapiens
KSLGVQDLLQF

SEQ ID NO: 130149 - protein, 11 aa, Homo Sapiens
KSLPEEDVAEI

SEQ ID NO: 130150 - protein, 11 aa, Homo Sapiens
KSRDLFVSTSW

SEQ ID NO: 130151 - protein, 11 aa, Homo Sapiens
KSVSAAEQQLW

SEQ ID NO: 130152 - protein, 11 aa, Homo Sapiens
KSYELPDGQVI

SEQ ID NO: 130153 - protein, 11 aa, Homo Sapiens
KSYLGSEADVW

SEQ ID NO: 130154 - protein, 11 aa, Homo Sapiens
KSYPGSQSQLF

SEQ ID NO: 130155 - protein, 11 aa, Homo Sapiens
KTATELSTVYL

SEQ ID NO: 130156 - protein, 11 aa, Homo Sapiens
KTAVICQLDYW

SEQ ID NO: 130157 - protein, 11 aa, Homo Sapiens
KTFLHDPLVEW

SEQ ID NO: 130158 - protein, 11 aa, Homo Sapiens
KTIPSQILEVM

SEQ ID NO: 130159 - protein, 11 aa, Homo Sapiens
KTIQTIALITY

SEQ ID NO: 130160 - protein, 11 aa, Homo Sapiens
KTLEEKLRSLF

SEQ ID NO: 130161 - protein, 11 aa, Homo Sapiens
KTLGFNLESGW

SEQ ID NO: 130162 - protein, 11 aa, Homo Sapiens
KTLPADVQNYY

SEQ ID NO: 130163 - protein, 11 aa, Homo Sapiens
KTLVNPANVTF

SEQ ID NO: 130164 - protein, 11 aa, Homo Sapiens
KTVDGPSGKLW

SEQ ID NO: 130165 - protein, 11 aa, Homo Sapiens
KTVYTGIDHHW

SEQ ID NO: 130166 - protein, 11 aa, Homo Sapiens
KTYNEPGSQVF

SEQ ID NO: 130167 - protein, 11 aa, Homo Sapiens
KTYSYLTPDLW

SEQ ID NO: 130168 - protein, 11 aa, Homo Sapiens
KVDEVKSTIKF

SEQ ID NO: 130169 - protein, 11 aa, Homo Sapiens
KVIHEQVNHRW

SEQ ID NO: 130170 - protein, 11 aa, Homo Sapiens
KVLKEIVERVF

SEQ ID NO: 130171 - protein, 11 aa, Homo Sapiens
LALDPSLVPTF

SEQ ID NO: 130172 - protein, 11 aa, Homo Sapiens
LARPSSTITYL

SEQ ID NO: 130173 - protein, 11 aa, Homo Sapiens
LGITAGAHRLW

SEQ ID NO: 130174 - protein, 11 aa, Homo Sapiens
LGTLPPEIQAW

SEQ ID NO: 130175 - protein, 11 aa, Homo Sapiens
LSALPADTQAW

SEQ ID NO: 130176 - protein, 11 aa, Homo Sapiens
LSDPDEVARRW

SEQ ID NO: 130177 - protein, 11 aa, Homo Sapiens
LSKRNPRQINW

SEQ ID NO: 130178 - protein, 11 aa, Homo Sapiens
LSLGVAALYKF

SEQ ID NO: 130179 - protein, 11 aa, Homo Sapiens
LTKQGGLVKTW

SEQ ID NO: 130180 - protein, 11 aa, Homo Sapiens
LTTNEDIKGSW

SEQ ID NO: 130181 - protein, 11 aa, Homo Sapiens
LTVKLPDGYEF

SEQ ID NO: 130182 - protein, 11 aa, Homo Sapiens
NSIKPQELLEW

SEQ ID NO: 130183 - protein, 11 aa, Homo Sapiens
QSDPSGAYFAW

SEQ ID NO: 130184 - protein, 11 aa, Homo Sapiens
QSLPSKTKVAW

SEQ ID NO: 130185 - protein, 11 aa, Homo Sapiens
QSLPSSVLHII

SEQ ID NO: 130186 - protein, 11 aa, Homo Sapiens
QTDPSGTYHAW

SEQ ID NO: 130187 - protein, 11 aa, Homo Sapiens
QTIRLPAQSIW

SEQ ID NO: 130188 - protein, 11 aa, Homo Sapiens
QTLTDYDIRFY

SEQ ID NO: 130189 - protein, 11 aa, Homo Sapiens
RAAEEFVNVYY

SEQ ID NO: 130190 - protein, 11 aa, Homo Sapiens
RAAGALSKRYW

SEQ ID NO: 130191 - protein, 11 aa, Homo Sapiens
RAALSDTVALW

SEQ ID NO: 130192 - protein, 11 aa, Homo Sapiens
RAFTCDDLFRF

SEQ ID NO: 130193 - protein, 11 aa, Homo Sapiens
RALDIPLVKNW

SEQ ID NO: 130194 - protein, 11 aa, Homo Sapiens
RALEAEKRALW

SEQ ID NO: 130195 - protein, 11 aa, Homo Sapiens
RALGTEVIQLF

SEQ ID NO: 130196 - protein, 11 aa, Homo Sapiens
RARLEESRRLW

SEQ ID NO: 130197 - protein, 11 aa, Homo Sapiens
RASITPGTILI

SEQ ID NO: 130198 - protein, 11 aa, Homo Sapiens
RASTLLSKVFL

SEQ ID NO: 130199 - protein, 11 aa, Homo Sapiens
RMLDPSIKGTF

SEQ ID NO: 130200 - protein, 11 aa, Homo Sapiens
RSDESVGNVTF

SEQ ID NO: 130201 - protein, 11 aa, Homo Sapiens
RSFDKGPFATF

SEQ ID NO: 130202 - protein, 11 aa, Homo Sapiens
RSFIFKGEDNW

SEQ ID NO: 130203 - protein, 11 aa, Homo Sapiens
RSIPAITRYWF

SEQ ID NO: 130204 - protein, 11 aa, Homo Sapiens
RSLEVLIGSGY

SEQ ID NO: 130205 - protein, 11 aa, Homo Sapiens
RSLPDPNLITF

SEQ ID NO: 130206 - protein, 11 aa, Homo Sapiens
RSLPHITDVSW

SEQ ID NO: 130207 - protein, 11 aa, Homo Sapiens
RSSSYLDNLVW

SEQ ID NO: 130208 - protein, 11 aa, Homo Sapiens
RSWLTAASTSW

SEQ ID NO: 130209 - protein, 11 aa, Homo Sapiens
RTIADSLINSF

SEQ ID NO: 130210 - protein, 11 aa, Homo Sapiens
RTIQTPIGSTW

SEQ ID NO: 130211 - protein, 11 aa, Homo Sapiens
RTKDLIIEQRF

SEQ ID NO: 130212 - protein, 11 aa, Homo Sapiens
RTLGTPDEVVW

SEQ ID NO: 130213 - protein, 11 aa, Homo Sapiens
RTLPTNTLMGF

SEQ ID NO: 130214 - protein, 11 aa, Homo Sapiens
RTNPNSGDFRF

SEQ ID NO: 130215 - protein, 11 aa, Homo Sapiens
RTRNEELAQTW

SEQ ID NO: 130216 - protein, 11 aa, Homo Sapiens
RTRPAANPIQF

SEQ ID NO: 130217 - protein, 11 aa, Homo Sapiens
RTVENMSIIGW

SEQ ID NO: 130218 - protein, 11 aa, Homo Sapiens
RVDPAKGLFYF

SEQ ID NO: 130219 - protein, 11 aa, Homo Sapiens
RVDPNGFFLYW

SEQ ID NO: 130220 - protein, 11 aa, Homo Sapiens
RVDPNGSRYLL

SEQ ID NO: 130221 - protein, 11 aa, Homo Sapiens
RVFEDESGKHW

SEQ ID NO: 130222 - protein, 11 aa, Homo Sapiens
RVIPHDVLPDW

SEQ ID NO: 130223 - protein, 11 aa, Homo Sapiens
RVIPYDVLPDW

SEQ ID NO: 130224 - protein, 11 aa, Homo Sapiens
RVLPPSHRVTW

SEQ ID NO: 130225 - protein, 11 aa, Homo Sapiens
RVLPYPFTHHW

SEQ ID NO: 130226 - protein, 11 aa, Homo Sapiens
RVYPESIPRKF

SEQ ID NO: 130227 - protein, 11 aa, Homo Sapiens
SAAADSAVRLW

SEQ ID NO: 130228 - protein, 11 aa, Homo Sapiens
SANEILGSLRW

SEQ ID NO: 130229 - protein, 11 aa, Homo Sapiens
SASPDATIRIW

SEQ ID NO: 130230 - protein, 11 aa, Homo Sapiens
SASRDKTIIMW

SEQ ID NO: 130231 - protein, 11 aa, Homo Sapiens
SGSSDGTIRLW

SEQ ID NO: 130232 - protein, 11 aa, Homo Sapiens
SIQGQHTISPL

SEQ ID NO: 130233 - protein, 11 aa, Homo Sapiens
SSATDAAIRVW

SEQ ID NO: 130234 - protein, 11 aa, Homo Sapiens
SSKPVLPTSGW

SEQ ID NO: 130235 - protein, 11 aa, Homo Sapiens
SSLPSPLQPSW

SEQ ID NO: 130236 - protein, 11 aa, Homo Sapiens
SSREGAITFTW

SEQ ID NO: 130237 - protein, 11 aa, Homo Sapiens
SSSAAVKDTLW

SEQ ID NO: 130238 - protein, 11 aa, Homo Sapiens
SSSLDAHIRLW

SEQ ID NO: 130239 - protein, 11 aa, Homo Sapiens
SSSPTHSLYVF

SEQ ID NO: 130240 - protein, 11 aa, Homo Sapiens
SSSQLVSHLLF

SEQ ID NO: 130241 - protein, 11 aa, Homo Sapiens
STFLEDGIRMW

SEQ ID NO: 130242 - protein, 11 aa, Homo Sapiens
STLKDTRLLTF

SEQ ID NO: 130243 - protein, 11 aa, Homo Sapiens
STSGIHAITVF

SEQ ID NO: 130244 - protein, 11 aa, Homo Sapiens
STSTFLSQTTY

SEQ ID NO: 130245 - protein, 11 aa, Homo Sapiens
SVIPARIIHNW

SEQ ID NO: 130246 - protein, 11 aa, Homo Sapiens
SVSKDHALRLW

SEQ ID NO: 130247 - protein, 11 aa, Homo Sapiens
SVTVPANVQRW

SEQ ID NO: 130248 - protein, 11 aa, Homo Sapiens
TGSTDKTVRLW

SEQ ID NO: 130249 - protein, 11 aa, Homo Sapiens
TPDETYVPKAF

SEQ ID NO: 130250 - protein, 11 aa, Homo Sapiens
TSASLDISRKW

SEQ ID NO: 130251 - protein, 11 aa, Homo Sapiens
TSYRDFLGTNW

SEQ ID NO: 130252 - protein, 11 aa, Homo Sapiens
TTKGSSISIQW

SEQ ID NO: 130253 - protein, 11 aa, Homo Sapiens
TTRILSDTTLW

SEQ ID NO: 130254 - protein, 11 aa, Homo Sapiens
TTVPNTIVVSW

SEQ ID NO: 130255 - protein, 11 aa, Homo Sapiens
TVSQLDSVRVW

SEQ ID NO: 130256 - protein, 11 aa, Homo Sapiens
VGLPAAGKTTW

SEQ ID NO: 130257 - protein, 11 aa, Homo Sapiens
VSAAIGTNLRR

SEQ ID NO: 130258 - protein, 11 aa, Homo Sapiens
VSAPLSTIINW

SEQ ID NO: 130259 - protein, 11 aa, Homo Sapiens
VSFEEDDKIRW

SEQ ID NO: 130260 - protein, 11 aa, Homo Sapiens
VSFPDVEKAEW

SEQ ID NO: 130261 - protein, 11 aa, Homo Sapiens
VSIPGNLFSLW

SEQ ID NO: 130262 - protein, 11 aa, Homo Sapiens
VSLPAPGVPAW

SEQ ID NO: 130263 - protein, 11 aa, Homo Sapiens
VSLPSHLNISY

SEQ ID NO: 130264 - protein, 11 aa, Homo Sapiens
VSNTASYLRLW

SEQ ID NO: 130265 - protein, 11 aa, Homo Sapiens
VTFPIPDLQKY

SEQ ID NO: 130266 - protein, 11 aa, Homo Sapiens
VTKPNNIKSMF

SEQ ID NO: 130267 - protein, 11 aa, Homo Sapiens
VTLHDQGTAQW

SEQ ID NO: 130268 - protein, 11 aa, Homo Sapiens
VTRSMEDFVTW

SEQ ID NO: 130269 - protein, 11 aa, Homo Sapiens
VTSIGTAIRYW

SEQ ID NO: 130270 - protein, 11 aa, Homo Sapiens
VVDPVHGFMYW

SEQ ID NO: 130271 - protein, 11 aa, Homo Sapiens
VVIPDPDILTF

SEQ ID NO: 130272 - protein, 11 aa, Homo Sapiens
VVSPHEDMRTW

SEQ ID NO: 130273 - protein, 11 aa, Homo Sapiens
VVVPAEWIKNW

SEQ ID NO: 130274 - protein, 11 aa, Homo Sapiens
YRVSLQENVPW

SEQ ID NO: 130275 - protein, 8 aa, Homo Sapiens
AKEIIQHF

SEQ ID NO: 130276 - protein, 8 aa, Homo Sapiens
ALQQAKED

SEQ ID NO: 130277 - protein, 8 aa, Homo Sapiens
ATGPSIKI

SEQ ID NO: 130278 - protein, 8 aa, Homo Sapiens
FNEKSKEL

SEQ ID NO: 130279 - protein, 8 aa, Homo Sapiens
HSGPFFTF

SEQ ID NO: 130280 - protein, 8 aa, Homo Sapiens
HSVEVHKW

SEQ ID NO: 130281 - protein, 8 aa, Homo Sapiens
ISAKPLEM

SEQ ID NO: 130282 - protein, 8 aa, Homo Sapiens
ISISAVQW

SEQ ID NO: 130283 - protein, 8 aa, Homo Sapiens
ISQEPVLF

SEQ ID NO: 130284 - protein, 8 aa, Homo Sapiens
ITAGAHRL

SEQ ID NO: 130285 - protein, 8 aa, Homo Sapiens
ITAHPERW

SEQ ID NO: 130286 - protein, 8 aa, Homo Sapiens
ITDKAREF

SEQ ID NO: 130287 - protein, 8 aa, Homo Sapiens
KSFVLPSW

SEQ ID NO: 130288 - protein, 8 aa, Homo Sapiens
KSNSAVAW

SEQ ID NO: 130289 - protein, 8 aa, Homo Sapiens
KSWHPQTL

SEQ ID NO: 130290 - protein, 8 aa, Homo Sapiens
KTFKPIDL

SEQ ID NO: 130291 - protein, 8 aa, Homo Sapiens
KTKKPLLI

SEQ ID NO: 130292 - protein, 8 aa, Homo Sapiens
KTNVPVKL

SEQ ID NO: 130293 - protein, 8 aa, Homo Sapiens
KTTILYKL

SEQ ID NO: 130294 - protein, 8 aa, Homo Sapiens
KTYKPMGF

SEQ ID NO: 130295 - protein, 8 aa, Homo Sapiens
KTYRPELI

SEQ ID NO: 130296 - protein, 8 aa, Homo Sapiens
LNNMRSQY

SEQ ID NO: 130297 - protein, 8 aa, Homo Sapiens
LQQAKEDL

SEQ ID NO: 130298 - protein, 8 aa, Homo Sapiens
LTGPALQW

SEQ ID NO: 130299 - protein, 8 aa, Homo Sapiens
LTLKPVKF

SEQ ID NO: 130300 - protein, 8 aa, Homo Sapiens
MSGPAWQL

SEQ ID NO: 130301 - protein, 8 aa, Homo Sapiens
NNRSLDLD

SEQ ID NO: 130302 - protein, 8 aa, Homo Sapiens
PDLLVNVL

SEQ ID NO: 130303 - protein, 8 aa, Homo Sapiens
PTKQTQTF

SEQ ID NO: 130304 - protein, 8 aa, Homo Sapiens
QAPKPRKQ

SEQ ID NO: 130305 - protein, 8 aa, Homo Sapiens
QRVKEKEA

SEQ ID NO: 130306 - protein, 8 aa, Homo Sapiens
QSLKELYI

SEQ ID NO: 130307 - protein, 8 aa, Homo Sapiens
RSDKPKLF

SEQ ID NO: 130308 - protein, 8 aa, Homo Sapiens
RSFKAQVF

SEQ ID NO: 130309 - protein, 8 aa, Homo Sapiens
RSFKATKF

SEQ ID NO: 130310 - protein, 8 aa, Homo Sapiens
RSFRPLLF

SEQ ID NO: 130311 - protein, 8 aa, Homo Sapiens
RSMKGLRW

SEQ ID NO: 130312 - protein, 8 aa, Homo Sapiens
RTAKALAM

SEQ ID NO: 130313 - protein, 8 aa, Homo Sapiens
RTFDPLLF

SEQ ID NO: 130314 - protein, 8 aa, Homo Sapiens
RTSRPLKI

SEQ ID NO: 130315 - protein, 8 aa, Homo Sapiens
SELKNMQD

SEQ ID NO: 130316 - protein, 8 aa, Homo Sapiens
SISAVQWL

SEQ ID NO: 130317 - protein, 8 aa, Homo Sapiens
STVRLYEW

SEQ ID NO: 130318 - protein, 8 aa, Homo Sapiens
TNHIHVRI

SEQ ID NO: 130319 - protein, 8 aa, Homo Sapiens
TTKAISRW

SEQ ID NO: 130320 - protein, 8 aa, Homo Sapiens
TVGNNKTL

SEQ ID NO: 130321 - protein, 8 aa, Homo Sapiens
VSFIPLNI

SEQ ID NO: 130322 - protein, 8 aa, Homo Sapiens
YTLLLHTW

SEQ ID NO: 130323 - protein, 8 aa, Homo Sapiens
YTQPPLKF

SEQ ID NO: 130324 - protein, 9 aa, Homo Sapiens
AAAKIQASF

SEQ ID NO: 130325 - protein, 9 aa, Homo Sapiens
AACKVLIEF

SEQ ID NO: 130326 - protein, 9 aa, Homo Sapiens
AACRVIARL

SEQ ID NO: 130327 - protein, 9 aa, Homo Sapiens
AAIREQVRF

SEQ ID NO: 130328 - protein, 9 aa, Homo Sapiens
AALPAAALW

SEQ ID NO: 130329 - protein, 9 aa, Homo Sapiens
AANPHSFVF

SEQ ID NO: 130330 - protein, 9 aa, Homo Sapiens
ASAIIIQRW

SEQ ID NO: 130331 - protein, 9 aa, Homo Sapiens
ASAPLGARW

SEQ ID NO: 130332 - protein, 9 aa, Homo Sapiens
ASAQIHCQF

SEQ ID NO: 130333 - protein, 9 aa, Homo Sapiens
ASAVLSWKL

SEQ ID NO: 130334 - protein, 9 aa, Homo Sapiens
ASCVFQVKF

SEQ ID NO: 130335 - protein, 9 aa, Homo Sapiens
ASFGSFHLI

SEQ ID NO: 130336 - protein, 9 aa, Homo Sapiens
ASFIGGIRW

SEQ ID NO: 130337 - protein, 9 aa, Homo Sapiens
ASFPGANII

SEQ ID NO: 130338 - protein, 9 aa, Homo Sapiens
ASFPLNASF

SEQ ID NO: 130339 - protein, 9 aa, Homo Sapiens
ASFTRAYLL

SEQ ID NO: 130340 - protein, 9 aa, Homo Sapiens
ASHKGQKLW

SEQ ID NO: 130341 - protein, 9 aa, Homo Sapiens
ASHLHIHVF

SEQ ID NO: 130342 - protein, 9 aa, Homo Sapiens
ASKEEATTF

SEQ ID NO: 130343 - protein, 9 aa, Homo Sapiens
ASLAIKPVF

SEQ ID NO: 130344 - protein, 9 aa, Homo Sapiens
ASLKNLETI

SEQ ID NO: 130345 - protein, 9 aa, Homo Sapiens
ASLKSNYNL

SEQ ID NO: 130346 - protein, 9 aa, Homo Sapiens
ASLLLHNKF

SEQ ID NO: 130347 - protein, 9 aa, Homo Sapiens
ASLPEAQVW

SEQ ID NO: 130348 - protein, 9 aa, Homo Sapiens
ASLPFFEVF

SEQ ID NO: 130349 - protein, 9 aa, Homo Sapiens
ASLPLRVSF

SEQ ID NO: 130350 - protein, 9 aa, Homo Sapiens
ASLPQAATF

SEQ ID NO: 130351 - protein, 9 aa, Homo Sapiens
ASNGDVYAW

SEQ ID NO: 130352 - protein, 9 aa, Homo Sapiens
ASNKLQIVF

SEQ ID NO: 130353 - protein, 9 aa, Homo Sapiens
ASNKYLVEF

SEQ ID NO: 130354 - protein, 9 aa, Homo Sapiens
ASNPRVTRF

SEQ ID NO: 130355 - protein, 9 aa, Homo Sapiens
ASPPSPARW

SEQ ID NO: 130356 - protein, 9 aa, Homo Sapiens
ASRDTVIVW

SEQ ID NO: 130357 - protein, 9 aa, Homo Sapiens
ASSQLKEHF

SEQ ID NO: 130358 - protein, 9 aa, Homo Sapiens
ASTKMLDRW

SEQ ID NO: 130359 - protein, 9 aa, Homo Sapiens
ASVEQFWRF

SEQ ID NO: 130360 - protein, 9 aa, Homo Sapiens
ASVKVVSKF

SEQ ID NO: 130361 - protein, 9 aa, Homo Sapiens
ASVPIMYSW

SEQ ID NO: 130362 - protein, 9 aa, Homo Sapiens
ASYFLISMF

SEQ ID NO: 130363 - protein, 9 aa, Homo Sapiens
ASYRQVASF

SEQ ID NO: 130364 - protein, 9 aa, Homo Sapiens
ASYVNLPTI

SEQ ID NO: 130365 - protein, 9 aa, Homo Sapiens
ATADISDVW

SEQ ID NO: 130366 - protein, 9 aa, Homo Sapiens
ATADVEWRW

SEQ ID NO: 130367 - protein, 9 aa, Homo Sapiens
ATALIEDIF

SEQ ID NO: 130368 - protein, 9 aa, Homo Sapiens
ATANLEAKW

SEQ ID NO: 130369 - protein, 9 aa, Homo Sapiens
ATAPLTELL

SEQ ID NO: 130370 - protein, 9 aa, Homo Sapiens
ATAPVVALF

SEQ ID NO: 130371 - protein, 9 aa, Homo Sapiens
ATCKDLVMF

SEQ ID NO: 130372 - protein, 9 aa, Homo Sapiens
ATCNVEQSF

SEQ ID NO: 130373 - protein, 9 aa, Homo Sapiens
ATDGKVLLW

SEQ ID NO: 130374 - protein, 9 aa, Homo Sapiens
ATHRIPIIW

SEQ ID NO: 130375 - protein, 9 aa, Homo Sapiens
ATIGHVEKF

SEQ ID NO: 130376 - protein, 9 aa, Homo Sapiens
ATIKEIVVW

SEQ ID NO: 130377 - protein, 9 aa, Homo Sapiens
ATIRFHDLL

SEQ ID NO: 130378 - protein, 9 aa, Homo Sapiens
ATIRLLDVL

SEQ ID NO: 130379 - protein, 9 aa, Homo Sapiens
ATKIEKELF

SEQ ID NO: 130380 - protein, 9 aa, Homo Sapiens
ATKKEITFF

SEQ ID NO: 130381 - protein, 9 aa, Homo Sapiens
ATKNAEPLI

SEQ ID NO: 130382 - protein, 9 aa, Homo Sapiens
ATLELTHNW

SEQ ID NO: 130383 - protein, 9 aa, Homo Sapiens
ATLKGNAAW

SEQ ID NO: 130384 - protein, 9 aa, Homo Sapiens
ATLKINNEI

SEQ ID NO: 130385 - protein, 9 aa, Homo Sapiens
ATLKNPILW

SEQ ID NO: 130386 - protein, 9 aa, Homo Sapiens
ATLPDNIKF

SEQ ID NO: 130387 - protein, 9 aa, Homo Sapiens
ATLSVVPQL

SEQ ID NO: 130388 - protein, 9 aa, Homo Sapiens
ATNPESKVF

SEQ ID NO: 130389 - protein, 9 aa, Homo Sapiens
ATNRIISHF

SEQ ID NO: 130390 - protein, 9 aa, Homo Sapiens
ATNRITVTW

SEQ ID NO: 130391 - protein, 9 aa, Homo Sapiens
ATNVNNWHW

SEQ ID NO: 130392 - protein, 9 aa, Homo Sapiens
ATRPDYISW

SEQ ID NO: 130393 - protein, 9 aa, Homo Sapiens
ATSKTQTRL

SEQ ID NO: 130394 - protein, 9 aa, Homo Sapiens
ATSKYLIGW

SEQ ID NO: 130395 - protein, 9 aa, Homo Sapiens
ATSNVFAMF

SEQ ID NO: 130396 - protein, 9 aa, Homo Sapiens
ATSQAQAGW

SEQ ID NO: 130397 - protein, 9 aa, Homo Sapiens
ATVATQTQF

SEQ ID NO: 130398 - protein, 9 aa, Homo Sapiens
ATWKSNYFL

SEQ ID NO: 130399 - protein, 9 aa, Homo Sapiens
ATYAAAVLF

SEQ ID NO: 130400 - protein, 9 aa, Homo Sapiens
ATYDKGYQF

SEQ ID NO: 130401 - protein, 9 aa, Homo Sapiens
ATYIFLQTF

SEQ ID NO: 130402 - protein, 9 aa, Homo Sapiens
ATYMKPEMW

SEQ ID NO: 130403 - protein, 9 aa, Homo Sapiens
ATYNEIVTF

SEQ ID NO: 130404 - protein, 9 aa, Homo Sapiens
ATYVFLHTV

SEQ ID NO: 130405 - protein, 9 aa, Homo Sapiens
AVCEVVTQF

SEQ ID NO: 130406 - protein, 9 aa, Homo Sapiens
AVCRLSVKF

SEQ ID NO: 130407 - protein, 9 aa, Homo Sapiens
AVIAIVPVF

SEQ ID NO: 130408 - protein, 9 aa, Homo Sapiens
AVIILNHNF

SEQ ID NO: 130409 - protein, 9 aa, Homo Sapiens
AVLQKVALW

SEQ ID NO: 130410 - protein, 9 aa, Homo Sapiens
AVWTRAYGW

SEQ ID NO: 130411 - protein, 9 aa, Homo Sapiens
CTITDVQLF

SEQ ID NO: 130412 - protein, 9 aa, Homo Sapiens
CTYGKPVTF

SEQ ID NO: 130413 - protein, 9 aa, Homo Sapiens
EALALTQTW

SEQ ID NO: 130414 - protein, 9 aa, Homo Sapiens
EALKQLAEW

SEQ ID NO: 130415 - protein, 9 aa, Homo Sapiens
ESWKTKVNW

SEQ ID NO: 130416 - protein, 9 aa, Homo Sapiens
ETIKCRTLF

SEQ ID NO: 130417 - protein, 9 aa, Homo Sapiens
ETLKLISGW

SEQ ID NO: 130418 - protein, 9 aa, Homo Sapiens
FGLRTPPLI

SEQ ID NO: 130419 - protein, 9 aa, Homo Sapiens
FSFKKPFKL

SEQ ID NO: 130420 - protein, 9 aa, Homo Sapiens
FSFKKSFKL

SEQ ID NO: 130421 - protein, 9 aa, Homo Sapiens
FSHRIYVAY

SEQ ID NO: 130422 - protein, 9 aa, Homo Sapiens
FSKKCSERW

SEQ ID NO: 130423 - protein, 9 aa, Homo Sapiens
FSLPAQPLW

SEQ ID NO: 130424 - protein, 9 aa, Homo Sapiens
FSLPLKPVI

SEQ ID NO: 130425 - protein, 9 aa, Homo Sapiens
FSLPNIPRW

SEQ ID NO: 130426 - protein, 9 aa, Homo Sapiens
FSSREQPKL

SEQ ID NO: 130427 - protein, 9 aa, Homo Sapiens
FSYRDVNSW

SEQ ID NO: 130428 - protein, 9 aa, Homo Sapiens
FTVPVRPFF

SEQ ID NO: 130429 - protein, 9 aa, Homo Sapiens
GAVALTETW

SEQ ID NO: 130430 - protein, 9 aa, Homo Sapiens
GAVRENYTW

SEQ ID NO: 130431 - protein, 9 aa, Homo Sapiens
GPASSLPQS

SEQ ID NO: 130432 - protein, 9 aa, Homo Sapiens
GSASVNSRW

SEQ ID NO: 130433 - protein, 9 aa, Homo Sapiens
GSDKLYHQW

SEQ ID NO: 130434 - protein, 9 aa, Homo Sapiens
GSFKNPSSF

SEQ ID NO: 130435 - protein, 9 aa, Homo Sapiens
GSIALIVLY

SEQ ID NO: 130436 - protein, 9 aa, Homo Sapiens
GSIPVTLTF

SEQ ID NO: 130437 - protein, 9 aa, Homo Sapiens
GSLSTTSHF

SEQ ID NO: 130438 - protein, 9 aa, Homo Sapiens
GSMGLRSLW

SEQ ID NO: 130439 - protein, 9 aa, Homo Sapiens
GSMPLKNSF

SEQ ID NO: 130440 - protein, 9 aa, Homo Sapiens
GSNPHLQTF

SEQ ID NO: 130441 - protein, 9 aa, Homo Sapiens
GSQGRAYLF

SEQ ID NO: 130442 - protein, 9 aa, Homo Sapiens
GSSEVQPQF

SEQ ID NO: 130443 - protein, 9 aa, Homo Sapiens
GSVLLDKRF

SEQ ID NO: 130444 - protein, 9 aa, Homo Sapiens
GSWDKTLKF

SEQ ID NO: 130445 - protein, 9 aa, Homo Sapiens
GSYAVQAKF

SEQ ID NO: 130446 - protein, 9 aa, Homo Sapiens
GSYGSLARF

SEQ ID NO: 130447 - protein, 9 aa, Homo Sapiens
GTAMIFTCF

SEQ ID NO: 130448 - protein, 9 aa, Homo Sapiens
GTCKALYTF

SEQ ID NO: 130449 - protein, 9 aa, Homo Sapiens
GTDRNAYVW

SEQ ID NO: 130450 - protein, 9 aa, Homo Sapiens
GTFNPVSLW

SEQ ID NO: 130451 - protein, 9 aa, Homo Sapiens
GTGKLFWVF

SEQ ID NO: 130452 - protein, 9 aa, Homo Sapiens
GTHKVTVLF

SEQ ID NO: 130453 - protein, 9 aa, Homo Sapiens
GTHSLDIKW

SEQ ID NO: 130454 - protein, 9 aa, Homo Sapiens
GTHTVSVKY

SEQ ID NO: 130455 - protein, 9 aa, Homo Sapiens
GTIAIKHYF

SEQ ID NO: 130456 - protein, 9 aa, Homo Sapiens
GTIPELPTF

SEQ ID NO: 130457 - protein, 9 aa, Homo Sapiens
GTISREHPW

SEQ ID NO: 130458 - protein, 9 aa, Homo Sapiens
GTLETKYKW

SEQ ID NO: 130459 - protein, 9 aa, Homo Sapiens
GTLKERVQW

SEQ ID NO: 130460 - protein, 9 aa, Homo Sapiens
GTLKGHNGW

SEQ ID NO: 130461 - protein, 9 aa, Homo Sapiens
GTLSGHASW

SEQ ID NO: 130462 - protein, 9 aa, Homo Sapiens
GTLVSHVTL

SEQ ID NO: 130463 - protein, 9 aa, Homo Sapiens
GTLVSKITF

SEQ ID NO: 130464 - protein, 9 aa, Homo Sapiens
GTMDIRHFF

SEQ ID NO: 130465 - protein, 9 aa, Homo Sapiens
GTMPLRNIF

SEQ ID NO: 130466 - protein, 9 aa, Homo Sapiens
GTRQAEPEL

SEQ ID NO: 130467 - protein, 9 aa, Homo Sapiens
GTSKVLVLL

SEQ ID NO: 130468 - protein, 9 aa, Homo Sapiens
GTTTLAFKF

SEQ ID NO: 130469 - protein, 9 aa, Homo Sapiens
GTTVIQTRF

SEQ ID NO: 130470 - protein, 9 aa, Homo Sapiens
GTVITPDTW

SEQ ID NO: 130471 - protein, 9 aa, Homo Sapiens
GTYAGPVLW

SEQ ID NO: 130472 - protein, 9 aa, Homo Sapiens
GTYGVRAAW

SEQ ID NO: 130473 - protein, 9 aa, Homo Sapiens
GTYIGGVTF

SEQ ID NO: 130474 - protein, 9 aa, Homo Sapiens
GTYSPEISW

SEQ ID NO: 130475 - protein, 9 aa, Homo Sapiens
GTYYFTEYF

SEQ ID NO: 130476 - protein, 9 aa, Homo Sapiens
GVHTIDVKF

SEQ ID NO: 130477 - protein, 9 aa, Homo Sapiens
GVHTVHVTF

SEQ ID NO: 130478 - protein, 9 aa, Homo Sapiens
HACGVIATI

SEQ ID NO: 130479 - protein, 9 aa, Homo Sapiens
HAGNINFKW

SEQ ID NO: 130480 - protein, 9 aa, Homo Sapiens
HAGPIVSVW

SEQ ID NO: 130481 - protein, 9 aa, Homo Sapiens
HAIPLRSSW

SEQ ID NO: 130482 - protein, 9 aa, Homo Sapiens
HAIQYVVEF

SEQ ID NO: 130483 - protein, 9 aa, Homo Sapiens
HALALAWTF

SEQ ID NO: 130484 - protein, 9 aa, Homo Sapiens
HALEALIHF

SEQ ID NO: 130485 - protein, 9 aa, Homo Sapiens
HALICISHW

SEQ ID NO: 130486 - protein, 9 aa, Homo Sapiens
HAMEEVKKF

SEQ ID NO: 130487 - protein, 9 aa, Homo Sapiens
HARAAEPLL

SEQ ID NO: 130488 - protein, 9 aa, Homo Sapiens
HARPEEPSW

SEQ ID NO: 130489 - protein, 9 aa, Homo Sapiens
HATKAIYRW

SEQ ID NO: 130490 - protein, 9 aa, Homo Sapiens
HIAKLQELW

SEQ ID NO: 130491 - protein, 9 aa, Homo Sapiens
HSAEILAEI

SEQ ID NO: 130492 - protein, 9 aa, Homo Sapiens
HSAILDQKL

SEQ ID NO: 130493 - protein, 9 aa, Homo Sapiens
HSCDALNRW

SEQ ID NO: 130494 - protein, 9 aa, Homo Sapiens
HSCLFRHSW

SEQ ID NO: 130495 - protein, 9 aa, Homo Sapiens
HSFLYQPDW

SEQ ID NO: 130496 - protein, 9 aa, Homo Sapiens
HSFPLQFTL

SEQ ID NO: 130497 - protein, 9 aa, Homo Sapiens
HSFQISLHF

SEQ ID NO: 130498 - protein, 9 aa, Homo Sapiens
HSGPFESKF

SEQ ID NO: 130499 - protein, 9 aa, Homo Sapiens
HSGPSKWNW

SEQ ID NO: 130500 - protein, 9 aa, Homo Sapiens
HSHFQNIFW

SEQ ID NO: 130501 - protein, 9 aa, Homo Sapiens
HSHPGFGCW

SEQ ID NO: 130502 - protein, 9 aa, Homo Sapiens
HSIPSLPRF

SEQ ID NO: 130503 - protein, 9 aa, Homo Sapiens
HSKELITAW

SEQ ID NO: 130504 - protein, 9 aa, Homo Sapiens
HSLAITNNF

SEQ ID NO: 130505 - protein, 9 aa, Homo Sapiens
HSLESQVTF

SEQ ID NO: 130506 - protein, 9 aa, Homo Sapiens
HSLPALIQI

SEQ ID NO: 130507 - protein, 9 aa, Homo Sapiens
HSLVIDVTM

SEQ ID NO: 130508 - protein, 9 aa, Homo Sapiens
HSNGTVSLW

SEQ ID NO: 130509 - protein, 9 aa, Homo Sapiens
HSNPSAYRM

SEQ ID NO: 130510 - protein, 9 aa, Homo Sapiens
HSQVCSILW

SEQ ID NO: 130511 - protein, 9 aa, Homo Sapiens
HSRPEIIFL

SEQ ID NO: 130512 - protein, 9 aa, Homo Sapiens
HSRPEQDKF

SEQ ID NO: 130513 - protein, 9 aa, Homo Sapiens
HSRSEPQYF

SEQ ID NO: 130514 - protein, 9 aa, Homo Sapiens
HSSELAPKF

SEQ ID NO: 130515 - protein, 9 aa, Homo Sapiens
HSSGILPKW

SEQ ID NO: 130516 - protein, 9 aa, Homo Sapiens
HSSNVKVVL

SEQ ID NO: 130517 - protein, 9 aa, Homo Sapiens
HSSVVNYEF

SEQ ID NO: 130518 - protein, 9 aa, Homo Sapiens
HSTQMQELF

SEQ ID NO: 130519 - protein, 9 aa, Homo Sapiens
HSTRFVTYF

SEQ ID NO: 130520 - protein, 9 aa, Homo Sapiens
HSVELRNMF

SEQ ID NO: 130521 - protein, 9 aa, Homo Sapiens
HSYFWPLEW

SEQ ID NO: 130522 - protein, 9 aa, Homo Sapiens
HSYPGASGW

SEQ ID NO: 130523 - protein, 9 aa, Homo Sapiens
HSYSVLERF

SEQ ID NO: 130524 - protein, 9 aa, Homo Sapiens
HTADISSHF

SEQ ID NO: 130525 - protein, 9 aa, Homo Sapiens
HTAHIACKF

SEQ ID NO: 130526 - protein, 9 aa, Homo Sapiens
HTANIQTLI

SEQ ID NO: 130527 - protein, 9 aa, Homo Sapiens
HTEMVAELW

SEQ ID NO: 130528 - protein, 9 aa, Homo Sapiens
HTFLPKIFF

SEQ ID NO: 130529 - protein, 9 aa, Homo Sapiens
HTFSPSPKL

SEQ ID NO: 130530 - protein, 9 aa, Homo Sapiens
HTGCFATIW

SEQ ID NO: 130531 - protein, 9 aa, Homo Sapiens
HTIQIRQDW

SEQ ID NO: 130532 - protein, 9 aa, Homo Sapiens
HTLEIEDTF

SEQ ID NO: 130533 - protein, 9 aa, Homo Sapiens
HTLTTKIKF

SEQ ID NO: 130534 - protein, 9 aa, Homo Sapiens
HTMDPQLRL

SEQ ID NO: 130535 - protein, 9 aa, Homo Sapiens
HTMTSQIVF

SEQ ID NO: 130536 - protein, 9 aa, Homo Sapiens
HTNPVGTEW

SEQ ID NO: 130537 - protein, 9 aa, Homo Sapiens
HTQENCETW

SEQ ID NO: 130538 - protein, 9 aa, Homo Sapiens
HTSSTTSAW

SEQ ID NO: 130539 - protein, 9 aa, Homo Sapiens
HTTGMDVLW

SEQ ID NO: 130540 - protein, 9 aa, Homo Sapiens
HTVGLSSTW

SEQ ID NO: 130541 - protein, 9 aa, Homo Sapiens
HTVPDMGKW

SEQ ID NO: 130542 - protein, 9 aa, Homo Sapiens
IAAIIVSQW

SEQ ID NO: 130543 - protein, 9 aa, Homo Sapiens
IAAQTGTRW

SEQ ID NO: 130544 - protein, 9 aa, Homo Sapiens
IAHLFNVEW

SEQ ID NO: 130545 - protein, 9 aa, Homo Sapiens
IAIPVTVAF

SEQ ID NO: 130546 - protein, 9 aa, Homo Sapiens
IALPPIAKW

SEQ ID NO: 130547 - protein, 9 aa, Homo Sapiens
IAPPKPASW

SEQ ID NO: 130548 - protein, 9 aa, Homo Sapiens
IAPRILTNF

SEQ ID NO: 130549 - protein, 9 aa, Homo Sapiens
IARAEVASF

SEQ ID NO: 130550 - protein, 9 aa, Homo Sapiens
IASPVQPVL

SEQ ID NO: 130551 - protein, 9 aa, Homo Sapiens
IGCRTIVYW

SEQ ID NO: 130552 - protein, 9 aa, Homo Sapiens
IGWDKHYGF

SEQ ID NO: 130553 - protein, 9 aa, Homo Sapiens
IIFVPVPQL

SEQ ID NO: 130554 - protein, 9 aa, Homo Sapiens
IIMKDVPDW

SEQ ID NO: 130555 - protein, 9 aa, Homo Sapiens
ILKGFDPLL

SEQ ID NO: 130556 - protein, 9 aa, Homo Sapiens
IMSRCIPLW

SEQ ID NO: 130557 - protein, 9 aa, Homo Sapiens
IQAPLVYHF

SEQ ID NO: 130558 - protein, 9 aa, Homo Sapiens
ISAEAPVLF

SEQ ID NO: 130559 - protein, 9 aa, Homo Sapiens
ISAGYAPVL

SEQ ID NO: 130560 - protein, 9 aa, Homo Sapiens
ISCKEELLL

SEQ ID NO: 130561 - protein, 9 aa, Homo Sapiens
ISCRIINTF

SEQ ID NO: 130562 - protein, 9 aa, Homo Sapiens
ISFHFTPVL

SEQ ID NO: 130563 - protein, 9 aa, Homo Sapiens
ISFPDPKML

SEQ ID NO: 130564 - protein, 9 aa, Homo Sapiens
ISFPLKEYF

SEQ ID NO: 130565 - protein, 9 aa, Homo Sapiens
ISGHHPETW

SEQ ID NO: 130566 - protein, 9 aa, Homo Sapiens
ISHQVDPEF

SEQ ID NO: 130567 - protein, 9 aa, Homo Sapiens
ISHVAHVTI

SEQ ID NO: 130568 - protein, 9 aa, Homo Sapiens
ISKALVAYY

SEQ ID NO: 130569 - protein, 9 aa, Homo Sapiens
ISKEEAMRW

SEQ ID NO: 130570 - protein, 9 aa, Homo Sapiens
ISKPDVITL

SEQ ID NO: 130571 - protein, 9 aa, Homo Sapiens
ISKQFHHQL

SEQ ID NO: 130572 - protein, 9 aa, Homo Sapiens
ISLHDPVSI

SEQ ID NO: 130573 - protein, 9 aa, Homo Sapiens
ISLKENRHW

SEQ ID NO: 130574 - protein, 9 aa, Homo Sapiens
ISLKFYKEL

SEQ ID NO: 130575 - protein, 9 aa, Homo Sapiens
ISLRPAQSF

SEQ ID NO: 130576 - protein, 9 aa, Homo Sapiens
ISMKILNSL

SEQ ID NO: 130577 - protein, 9 aa, Homo Sapiens
ISMRCMVQF

SEQ ID NO: 130578 - protein, 9 aa, Homo Sapiens
ISNPKTAEF

SEQ ID NO: 130579 - protein, 9 aa, Homo Sapiens
ISPGLDITF

SEQ ID NO: 130580 - protein, 9 aa, Homo Sapiens
ISPRFDVQL

SEQ ID NO: 130581 - protein, 9 aa, Homo Sapiens
ISPRSDATF

SEQ ID NO: 130582 - protein, 9 aa, Homo Sapiens
ISPSIPITF

SEQ ID NO: 130583 - protein, 9 aa, Homo Sapiens
ISPTIVQQF

SEQ ID NO: 130584 - protein, 9 aa, Homo Sapiens
ISQKIIPLL

SEQ ID NO: 130585 - protein, 9 aa, Homo Sapiens
ISRGEMDSF

SEQ ID NO: 130586 - protein, 9 aa, Homo Sapiens
ISRPIVNLF

SEQ ID NO: 130587 - protein, 9 aa, Homo Sapiens
ISSGVVSIW

SEQ ID NO: 130588 - protein, 9 aa, Homo Sapiens
ISSPVVTSL

SEQ ID NO: 130589 - protein, 9 aa, Homo Sapiens
ISSSAGARW

SEQ ID NO: 130590 - protein, 9 aa, Homo Sapiens
ISTEVNPKL

SEQ ID NO: 130591 - protein, 9 aa, Homo Sapiens
ISTPVIRTF

SEQ ID NO: 130592 - protein, 9 aa, Homo Sapiens
ISVAEVEKW

SEQ ID NO: 130593 - protein, 9 aa, Homo Sapiens
ISVILGDRW

SEQ ID NO: 130594 - protein, 9 aa, Homo Sapiens
ISVIQKEEF

SEQ ID NO: 130595 - protein, 9 aa, Homo Sapiens
ISVKGSNLF

SEQ ID NO: 130596 - protein, 9 aa, Homo Sapiens
ISVPIFKQF

SEQ ID NO: 130597 - protein, 9 aa, Homo Sapiens
ISVRQQVVL

SEQ ID NO: 130598 - protein, 9 aa, Homo Sapiens
ISWGPSPTF

SEQ ID NO: 130599 - protein, 9 aa, Homo Sapiens
ISWGQGHFW

SEQ ID NO: 130600 - protein, 9 aa, Homo Sapiens
ISYKGTPAM

SEQ ID NO: 130601 - protein, 9 aa, Homo Sapiens
ITAGAHRLW

SEQ ID NO: 130602 - protein, 9 aa, Homo Sapiens
ITAHVEPLL

SEQ ID NO: 130603 - protein, 9 aa, Homo Sapiens
ITCPKVNQF

SEQ ID NO: 130604 - protein, 9 aa, Homo Sapiens
ITFAPTYRF

SEQ ID NO: 130605 - protein, 9 aa, Homo Sapiens
ITFEGKVAF

SEQ ID NO: 130606 - protein, 9 aa, Homo Sapiens
ITFTKNNQF

SEQ ID NO: 130607 - protein, 9 aa, Homo Sapiens
ITHIVNQNF

SEQ ID NO: 130608 - protein, 9 aa, Homo Sapiens
ITIIGLICF

SEQ ID NO: 130609 - protein, 9 aa, Homo Sapiens
ITIPKNMHW

SEQ ID NO: 130610 - protein, 9 aa, Homo Sapiens
ITKGQTILL

SEQ ID NO: 130611 - protein, 9 aa, Homo Sapiens
ITKKQVSVW

SEQ ID NO: 130612 - protein, 9 aa, Homo Sapiens
ITKRKEVIF

SEQ ID NO: 130613 - protein, 9 aa, Homo Sapiens
ITLIPTCKF

SEQ ID NO: 130614 - protein, 9 aa, Homo Sapiens
ITLQEQVKL

SEQ ID NO: 130615 - protein, 9 aa, Homo Sapiens
ITNHIHVRI

SEQ ID NO: 130616 - protein, 9 aa, Homo Sapiens
ITNKYQLVF

SEQ ID NO: 130617 - protein, 9 aa, Homo Sapiens
ITQRAQVSL

SEQ ID NO: 130618 - protein, 9 aa, Homo Sapiens
ITRTKEEAL

SEQ ID NO: 130619 - protein, 9 aa, Homo Sapiens
ITRTQEEKL

SEQ ID NO: 130620 - protein, 9 aa, Homo Sapiens
ITSPTGETW

SEQ ID NO: 130621 - protein, 9 aa, Homo Sapiens
ITSPVHVSF

SEQ ID NO: 130622 - protein, 9 aa, Homo Sapiens
ITTDVLYTI

SEQ ID NO: 130623 - protein, 9 aa, Homo Sapiens
ITTKAISRW

SEQ ID NO: 130624 - protein, 9 aa, Homo Sapiens
ITTSLTTKW

SEQ ID NO: 130625 - protein, 9 aa, Homo Sapiens
ITTTINPRF

SEQ ID NO: 130626 - protein, 9 aa, Homo Sapiens
ITTVIQHVF

SEQ ID NO: 130627 - protein, 9 aa, Homo Sapiens
ITTVVLPTL

SEQ ID NO: 130628 - protein, 9 aa, Homo Sapiens
ITTVVVQTF

SEQ ID NO: 130629 - protein, 9 aa, Homo Sapiens
ITVKDGKTL

SEQ ID NO: 130630 - protein, 9 aa, Homo Sapiens
ITVKNPAVM

SEQ ID NO: 130631 - protein, 9 aa, Homo Sapiens
ITWQSVEYF

SEQ ID NO: 130632 - protein, 9 aa, Homo Sapiens
ITWTPPAIF

SEQ ID NO: 130633 - protein, 9 aa, Homo Sapiens
ITYDKLNKW

SEQ ID NO: 130634 - protein, 9 aa, Homo Sapiens
ITYPMLFKL

SEQ ID NO: 130635 - protein, 9 aa, Homo Sapiens
ITYQHIDRW

SEQ ID NO: 130636 - protein, 9 aa, Homo Sapiens
ITYTFHSTW

SEQ ID NO: 130637 - protein, 9 aa, Homo Sapiens
IVCPIRYEW

SEQ ID NO: 130638 - protein, 9 aa, Homo Sapiens
IVLKKWYTI

SEQ ID NO: 130639 - protein, 9 aa, Homo Sapiens
KAADLKNLF

SEQ ID NO: 130640 - protein, 9 aa, Homo Sapiens
KAAELSIKF

SEQ ID NO: 130641 - protein, 9 aa, Homo Sapiens
KAAEVYTRL

SEQ ID NO: 130642 - protein, 9 aa, Homo Sapiens
KAAHVSEQF

SEQ ID NO: 130643 - protein, 9 aa, Homo Sapiens
KAAKLKEKY

SEQ ID NO: 130644 - protein, 9 aa, Homo Sapiens
KAASLKSNY

SEQ ID NO: 130645 - protein, 9 aa, Homo Sapiens
KAASVRPVL

SEQ ID NO: 130646 - protein, 9 aa, Homo Sapiens
KAAVLLHLL

SEQ ID NO: 130647 - protein, 9 aa, Homo Sapiens
KAAVMVHQL

SEQ ID NO: 130648 - protein, 9 aa, Homo Sapiens
KACFLYFKL

SEQ ID NO: 130649 - protein, 9 aa, Homo Sapiens
KACTIAIRY

SEQ ID NO: 130650 - protein, 9 aa, Homo Sapiens
KACVVKREF

SEQ ID NO: 130651 - protein, 9 aa, Homo Sapiens
KACYLPWVI

SEQ ID NO: 130652 - protein, 9 aa, Homo Sapiens
KADENHPQF

SEQ ID NO: 130653 - protein, 9 aa, Homo Sapiens
KADKVTMLW

SEQ ID NO: 130654 - protein, 9 aa, Homo Sapiens
KAFDFPSSF

SEQ ID NO: 130655 - protein, 9 aa, Homo Sapiens
KAFDKHMNL

SEQ ID NO: 130656 - protein, 9 aa, Homo Sapiens
KAFDLIEHY

SEQ ID NO: 130657 - protein, 9 aa, Homo Sapiens
KAFDQRLTF

SEQ ID NO: 130658 - protein, 9 aa, Homo Sapiens
KAFDRPSLF

SEQ ID NO: 130659 - protein, 9 aa, Homo Sapiens
KAFDYPSLF

SEQ ID NO: 130660 - protein, 9 aa, Homo Sapiens
KAFDYPSRF

SEQ ID NO: 130661 - protein, 9 aa, Homo Sapiens
KAFNHPATL

SEQ ID NO: 130662 - protein, 9 aa, Homo Sapiens
KAFNLRISF

SEQ ID NO: 130663 - protein, 9 aa, Homo Sapiens
KAFPFHIIF

SEQ ID NO: 130664 - protein, 9 aa, Homo Sapiens
KAFQATLRW

SEQ ID NO: 130665 - protein, 9 aa, Homo Sapiens
KAFSTRWNW

SEQ ID NO: 130666 - protein, 9 aa, Homo Sapiens
KAFTHRSTF

SEQ ID NO: 130667 - protein, 9 aa, Homo Sapiens
KAGIIQDTW

SEQ ID NO: 130668 - protein, 9 aa, Homo Sapiens
KAGQVVTIW

SEQ ID NO: 130669 - protein, 9 aa, Homo Sapiens
KAIEENNNF

SEQ ID NO: 130670 - protein, 9 aa, Homo Sapiens
KAIEKNVLF

SEQ ID NO: 130671 - protein, 9 aa, Homo Sapiens
KAIELLQEF

SEQ ID NO: 130672 - protein, 9 aa, Homo Sapiens
KAIETQPNF

SEQ ID NO: 130673 - protein, 9 aa, Homo Sapiens
KAIGLFISF

SEQ ID NO: 130674 - protein, 9 aa, Homo Sapiens
KAIKELEEW

SEQ ID NO: 130675 - protein, 9 aa, Homo Sapiens
KAINPINTF

SEQ ID NO: 130676 - protein, 9 aa, Homo Sapiens
KAISKNVLF

SEQ ID NO: 130677 - protein, 9 aa, Homo Sapiens
KAKPDEPEF

SEQ ID NO: 130678 - protein, 9 aa, Homo Sapiens
KAKSEEFRF

SEQ ID NO: 130679 - protein, 9 aa, Homo Sapiens
KALDDKNCW

SEQ ID NO: 130680 - protein, 9 aa, Homo Sapiens
KALDKIAEI

SEQ ID NO: 130681 - protein, 9 aa, Homo Sapiens
KALDQFVNF

SEQ ID NO: 130682 - protein, 9 aa, Homo Sapiens
KALDYCHSM

SEQ ID NO: 130683 - protein, 9 aa, Homo Sapiens
KALEIITDF

SEQ ID NO: 130684 - protein, 9 aa, Homo Sapiens
KALEKGIEI

SEQ ID NO: 130685 - protein, 9 aa, Homo Sapiens
KALEMVPLL

SEQ ID NO: 130686 - protein, 9 aa, Homo Sapiens
KALEVFPEF

SEQ ID NO: 130687 - protein, 9 aa, Homo Sapiens
KALEYVFKF

SEQ ID NO: 130688 - protein, 9 aa, Homo Sapiens
KALGAIVYI

SEQ ID NO: 130689 - protein, 9 aa, Homo Sapiens
KALKGQFNF

SEQ ID NO: 130690 - protein, 9 aa, Homo Sapiens
KALKRIHQF

SEQ ID NO: 130691 - protein, 9 aa, Homo Sapiens
KALPELIYY

SEQ ID NO: 130692 - protein, 9 aa, Homo Sapiens
KALQEKVEI

SEQ ID NO: 130693 - protein, 9 aa, Homo Sapiens
KALQVMTDF

SEQ ID NO: 130694 - protein, 9 aa, Homo Sapiens
KALSMPEKW

SEQ ID NO: 130695 - protein, 9 aa, Homo Sapiens
KAMGIMNSF

SEQ ID NO: 130696 - protein, 9 aa, Homo Sapiens
KAMKQGFEF

SEQ ID NO: 130697 - protein, 9 aa, Homo Sapiens
KAMNQQTTL

SEQ ID NO: 130698 - protein, 9 aa, Homo Sapiens
KAMPLQPSI

SEQ ID NO: 130699 - protein, 9 aa, Homo Sapiens
KAMSAAVCF

SEQ ID NO: 130700 - protein, 9 aa, Homo Sapiens
KAMTGVEQW

SEQ ID NO: 130701 - protein, 9 aa, Homo Sapiens
KAMVFLEYF

SEQ ID NO: 130702 - protein, 9 aa, Homo Sapiens
KANPALYVL

SEQ ID NO: 130703 - protein, 9 aa, Homo Sapiens
KAPEYLHRF

SEQ ID NO: 130704 - protein, 9 aa, Homo Sapiens
KAPSVASSW

SEQ ID NO: 130705 - protein, 9 aa, Homo Sapiens
KARLAEPQL

SEQ ID NO: 130706 - protein, 9 aa, Homo Sapiens
KASDLYITL

SEQ ID NO: 130707 - protein, 9 aa, Homo Sapiens
KASNLLLGF

SEQ ID NO: 130708 - protein, 9 aa, Homo Sapiens
KASPTQNLF

SEQ ID NO: 130709 - protein, 9 aa, Homo Sapiens
KATNVCTRF

SEQ ID NO: 130710 - protein, 9 aa, Homo Sapiens
KATPIKLIW

SEQ ID NO: 130711 - protein, 9 aa, Homo Sapiens
KAVEAAHTF

SEQ ID NO: 130712 - protein, 9 aa, Homo Sapiens
KAVETVHNL

SEQ ID NO: 130713 - protein, 9 aa, Homo Sapiens
KAVFLVPKW

SEQ ID NO: 130714 - protein, 9 aa, Homo Sapiens
KAVKGKYKF

SEQ ID NO: 130715 - protein, 9 aa, Homo Sapiens
KAVTHQVKF

SEQ ID NO: 130716 - protein, 9 aa, Homo Sapiens
KAWENSPSL

SEQ ID NO: 130717 - protein, 9 aa, Homo Sapiens
KAWHQKSHF

SEQ ID NO: 130718 - protein, 9 aa, Homo Sapiens
KAWTKQNTL

SEQ ID NO: 130719 - protein, 9 aa, Homo Sapiens
KAYEALYNF

SEQ ID NO: 130720 - protein, 9 aa, Homo Sapiens
KAYFILDEF

SEQ ID NO: 130721 - protein, 9 aa, Homo Sapiens
KAYGASKTF

SEQ ID NO: 130722 - protein, 9 aa, Homo Sapiens
KAYRLTPKL

SEQ ID NO: 130723 - protein, 9 aa, Homo Sapiens
KAYSEAHEI

SEQ ID NO: 130724 - protein, 9 aa, Homo Sapiens
KGFLFLHTL

SEQ ID NO: 130725 - protein, 9 aa, Homo Sapiens
KGIEKLYEW

SEQ ID NO: 130726 - protein, 9 aa, Homo Sapiens
KIADLCHTF

SEQ ID NO: 130727 - protein, 9 aa, Homo Sapiens
KICDIAINW

SEQ ID NO: 130728 - protein, 9 aa, Homo Sapiens
KICEVDLVI

SEQ ID NO: 130729 - protein, 9 aa, Homo Sapiens
KIHPMAYQL

SEQ ID NO: 130730 - protein, 9 aa, Homo Sapiens
KIIFIDSTW

SEQ ID NO: 130731 - protein, 9 aa, Homo Sapiens
KIIPKTLTW

SEQ ID NO: 130732 - protein, 9 aa, Homo Sapiens
KIIPLVVKF

SEQ ID NO: 130733 - protein, 9 aa, Homo Sapiens
KIISTLPSW

SEQ ID NO: 130734 - protein, 9 aa, Homo Sapiens
KIKSFEVVF

SEQ ID NO: 130735 - protein, 9 aa, Homo Sapiens
KIKYPENFF

SEQ ID NO: 130736 - protein, 9 aa, Homo Sapiens
KILEENPKF

SEQ ID NO: 130737 - protein, 9 aa, Homo Sapiens
KILENAQRF

SEQ ID NO: 130738 - protein, 9 aa, Homo Sapiens
KILPFSPEF

SEQ ID NO: 130739 - protein, 9 aa, Homo Sapiens
KIREYEQTL

SEQ ID NO: 130740 - protein, 9 aa, Homo Sapiens
KIWTSEHVF

SEQ ID NO: 130741 - protein, 9 aa, Homo Sapiens
KLAYMPHTF

SEQ ID NO: 130742 - protein, 9 aa, Homo Sapiens
KLCDIIVHI

SEQ ID NO: 130743 - protein, 9 aa, Homo Sapiens
KLFDIRPIW

SEQ ID NO: 130744 - protein, 9 aa, Homo Sapiens
KLIEFLSKF

SEQ ID NO: 130745 - protein, 9 aa, Homo Sapiens
KLIEFMDTF

SEQ ID NO: 130746 - protein, 9 aa, Homo Sapiens
KLYPWIHQF

SEQ ID NO: 130747 - protein, 9 aa, Homo Sapiens
KMLDESFQW

SEQ ID NO: 130748 - protein, 9 aa, Homo Sapiens
KSADWVSDW

SEQ ID NO: 130749 - protein, 9 aa, Homo Sapiens
KSAFVRTQW

SEQ ID NO: 130750 - protein, 9 aa, Homo Sapiens
KSAIPHPLI

SEQ ID NO: 130751 - protein, 9 aa, Homo Sapiens
KSALVFITF

SEQ ID NO: 130752 - protein, 9 aa, Homo Sapiens
KSANPPHTI

SEQ ID NO: 130753 - protein, 9 aa, Homo Sapiens
KSAQPIEKF

SEQ ID NO: 130754 - protein, 9 aa, Homo Sapiens
KSCDLLLFL

SEQ ID NO: 130755 - protein, 9 aa, Homo Sapiens
KSCEKIHFI

SEQ ID NO: 130756 - protein, 9 aa, Homo Sapiens
KSCGLNPKL

SEQ ID NO: 130757 - protein, 9 aa, Homo Sapiens
KSCMNQVTI

SEQ ID NO: 130758 - protein, 9 aa, Homo Sapiens
KSCQSFISW

SEQ ID NO: 130759 - protein, 9 aa, Homo Sapiens
KSCVIVIRV

SEQ ID NO: 130760 - protein, 9 aa, Homo Sapiens
KSCVIVLRI

SEQ ID NO: 130761 - protein, 9 aa, Homo Sapiens
KSDPSIVRL

SEQ ID NO: 130762 - protein, 9 aa, Homo Sapiens
KSDQALHSF

SEQ ID NO: 130763 - protein, 9 aa, Homo Sapiens
KSFADINLY

SEQ ID NO: 130764 - protein, 9 aa, Homo Sapiens
KSFDFHFGF

SEQ ID NO: 130765 - protein, 9 aa, Homo Sapiens
KSFDNIKNW

SEQ ID NO: 130766 - protein, 9 aa, Homo Sapiens
KSFDNIRNW

SEQ ID NO: 130767 - protein, 9 aa, Homo Sapiens
KSFEAPIKL

SEQ ID NO: 130768 - protein, 9 aa, Homo Sapiens
KSFEGLFYF

SEQ ID NO: 130769 - protein, 9 aa, Homo Sapiens
KSFEGNVFM

SEQ ID NO: 130770 - protein, 9 aa, Homo Sapiens
KSFEKLMKI

SEQ ID NO: 130771 - protein, 9 aa, Homo Sapiens
KSFENISKW

SEQ ID NO: 130772 - protein, 9 aa, Homo Sapiens
KSFGGSHVM

SEQ ID NO: 130773 - protein, 9 aa, Homo Sapiens
KSFNRHLHF

SEQ ID NO: 130774 - protein, 9 aa, Homo Sapiens
KSFPSIFKF

SEQ ID NO: 130775 - protein, 9 aa, Homo Sapiens
KSFQAIHQF

SEQ ID NO: 130776 - protein, 9 aa, Homo Sapiens
KSFQIIAHL

SEQ ID NO: 130777 - protein, 9 aa, Homo Sapiens
KSFRSPSKL

SEQ ID NO: 130778 - protein, 9 aa, Homo Sapiens
KSFSHWSKL

SEQ ID NO: 130779 - protein, 9 aa, Homo Sapiens
KSFVKVYNY

SEQ ID NO: 130780 - protein, 9 aa, Homo Sapiens
KSGAIIEKW

SEQ ID NO: 130781 - protein, 9 aa, Homo Sapiens
KSGELLATW

SEQ ID NO: 130782 - protein, 9 aa, Homo Sapiens
KSGETSVRF

SEQ ID NO: 130783 - protein, 9 aa, Homo Sapiens
KSGKFVFSF

SEQ ID NO: 130784 - protein, 9 aa, Homo Sapiens
KSGLNIAHF

SEQ ID NO: 130785 - protein, 9 aa, Homo Sapiens
KSGPFGKKY

SEQ ID NO: 130786 - protein, 9 aa, Homo Sapiens
KSGSPVATF

SEQ ID NO: 130787 - protein, 9 aa, Homo Sapiens
KSHDVQEVL

SEQ ID NO: 130788 - protein, 9 aa, Homo Sapiens
KSHFIEIFL

SEQ ID NO: 130789 - protein, 9 aa, Homo Sapiens
KSHLLVTGF

SEQ ID NO: 130790 - protein, 9 aa, Homo Sapiens
KSHTVVIGF

SEQ ID NO: 130791 - protein, 9 aa, Homo Sapiens
KSHVECARF

SEQ ID NO: 130792 - protein, 9 aa, Homo Sapiens
KSIDCIRAF

SEQ ID NO: 130793 - protein, 9 aa, Homo Sapiens
KSIDDTSNF

SEQ ID NO: 130794 - protein, 9 aa, Homo Sapiens
KSIDLIQKW

SEQ ID NO: 130795 - protein, 9 aa, Homo Sapiens
KSIELFYKF

SEQ ID NO: 130796 - protein, 9 aa, Homo Sapiens
KSIHIVVTM

SEQ ID NO: 130797 - protein, 9 aa, Homo Sapiens
KSIKNIQKI

SEQ ID NO: 130798 - protein, 9 aa, Homo Sapiens
KSIRNDIEW

SEQ ID NO: 130799 - protein, 9 aa, Homo Sapiens
KSIVIMVHI

SEQ ID NO: 130800 - protein, 9 aa, Homo Sapiens
KSIVQVETL

SEQ ID NO: 130801 - protein, 9 aa, Homo Sapiens
KSKLIALFW

SEQ ID NO: 130802 - protein, 9 aa, Homo Sapiens
KSKPDKQLI

SEQ ID NO: 130803 - protein, 9 aa, Homo Sapiens
KSKPFCEKL

SEQ ID NO: 130804 - protein, 9 aa, Homo Sapiens
KSKSEEIKI

SEQ ID NO: 130805 - protein, 9 aa, Homo Sapiens
KSKTLQEFL

SEQ ID NO: 130806 - protein, 9 aa, Homo Sapiens
KSKVEDPEI

SEQ ID NO: 130807 - protein, 9 aa, Homo Sapiens
KSKYFESKF

SEQ ID NO: 130808 - protein, 9 aa, Homo Sapiens
KSLAKLPEF

SEQ ID NO: 130809 - protein, 9 aa, Homo Sapiens
KSLEEAQEW

SEQ ID NO: 130810 - protein, 9 aa, Homo Sapiens
KSLEEIYLF

SEQ ID NO: 130811 - protein, 9 aa, Homo Sapiens
KSLEIEEKI

SEQ ID NO: 130812 - protein, 9 aa, Homo Sapiens
KSLEKSELI

SEQ ID NO: 130813 - protein, 9 aa, Homo Sapiens
KSLELHEEF

SEQ ID NO: 130814 - protein, 9 aa, Homo Sapiens
KSLENAIEW

SEQ ID NO: 130815 - protein, 9 aa, Homo Sapiens
KSLENQTYF

SEQ ID NO: 130816 - protein, 9 aa, Homo Sapiens
KSLERATQL

SEQ ID NO: 130817 - protein, 9 aa, Homo Sapiens
KSLFLGQKL

SEQ ID NO: 130818 - protein, 9 aa, Homo Sapiens
KSLGLRANL

SEQ ID NO: 130819 - protein, 9 aa, Homo Sapiens
KSLGPMILI

SEQ ID NO: 130820 - protein, 9 aa, Homo Sapiens
KSLGVHYVF

SEQ ID NO: 130821 - protein, 9 aa, Homo Sapiens
KSLGVTTKF

SEQ ID NO: 130822 - protein, 9 aa, Homo Sapiens
KSLIEKNSW

SEQ ID NO: 130823 - protein, 9 aa, Homo Sapiens
KSLITTHHL

SEQ ID NO: 130824 - protein, 9 aa, Homo Sapiens
KSLKLIISM

SEQ ID NO: 130825 - protein, 9 aa, Homo Sapiens
KSLKQEFEM

SEQ ID NO: 130826 - protein, 9 aa, Homo Sapiens
KSLKQNINL

SEQ ID NO: 130827 - protein, 9 aa, Homo Sapiens
KSLLFVNTL

SEQ ID NO: 130828 - protein, 9 aa, Homo Sapiens
KSLLKIFAW

SEQ ID NO: 130829 - protein, 9 aa, Homo Sapiens
KSLLVVHFW

SEQ ID NO: 130830 - protein, 9 aa, Homo Sapiens
KSLPASITM

SEQ ID NO: 130831 - protein, 9 aa, Homo Sapiens
KSLPDTELM

SEQ ID NO: 130832 - protein, 9 aa, Homo Sapiens
KSLRSLNNF

SEQ ID NO: 130833 - protein, 9 aa, Homo Sapiens
KSLVSKGTL

SEQ ID NO: 130834 - protein, 9 aa, Homo Sapiens
KSMCAGQRL

SEQ ID NO: 130835 - protein, 9 aa, Homo Sapiens
KSMPTVTQI

SEQ ID NO: 130836 - protein, 9 aa, Homo Sapiens
KSMTLKEAI

SEQ ID NO: 130837 - protein, 9 aa, Homo Sapiens
KSNELFTTF

SEQ ID NO: 130838 - protein, 9 aa, Homo Sapiens
KSNKLLYTF

SEQ ID NO: 130839 - protein, 9 aa, Homo Sapiens
KSNPKPLVL

SEQ ID NO: 130840 - protein, 9 aa, Homo Sapiens
KSPAITATL

SEQ ID NO: 130841 - protein, 9 aa, Homo Sapiens
KSQDLELSW

SEQ ID NO: 130842 - protein, 9 aa, Homo Sapiens
KSQEIFLNL

SEQ ID NO: 130843 - protein, 9 aa, Homo Sapiens
KSQELQSQI

SEQ ID NO: 130844 - protein, 9 aa, Homo Sapiens
KSQEVYENF

SEQ ID NO: 130845 - protein, 9 aa, Homo Sapiens
KSQHASETF

SEQ ID NO: 130846 - protein, 9 aa, Homo Sapiens
KSQIPLSKI

SEQ ID NO: 130847 - protein, 9 aa, Homo Sapiens
KSRDYEREI

SEQ ID NO: 130848 - protein, 9 aa, Homo Sapiens
KSREEDPTL

SEQ ID NO: 130849 - protein, 9 aa, Homo Sapiens
KSRPELLEY

SEQ ID NO: 130850 - protein, 9 aa, Homo Sapiens
KSRPEVITF

SEQ ID NO: 130851 - protein, 9 aa, Homo Sapiens
KSRPIIKRF

SEQ ID NO: 130852 - protein, 9 aa, Homo Sapiens
KSSDIAKTF

SEQ ID NO: 130853 - protein, 9 aa, Homo Sapiens
KSSEMNVLI

SEQ ID NO: 130854 - protein, 9 aa, Homo Sapiens
KSSEPVVTM

SEQ ID NO: 130855 - protein, 9 aa, Homo Sapiens
KSSEVFTTF

SEQ ID NO: 130856 - protein, 9 aa, Homo Sapiens
KSSIQKVVF

SEQ ID NO: 130857 - protein, 9 aa, Homo Sapiens
KSSKIMESF

SEQ ID NO: 130858 - protein, 9 aa, Homo Sapiens
KSSLLQVLI

SEQ ID NO: 130859 - protein, 9 aa, Homo Sapiens
KSSLTQHSW

SEQ ID NO: 130860 - protein, 9 aa, Homo Sapiens
KSSQLVTHL

SEQ ID NO: 130861 - protein, 9 aa, Homo Sapiens
KSSQVQRRF

SEQ ID NO: 130862 - protein, 9 aa, Homo Sapiens
KSSTVLHTF

SEQ ID NO: 130863 - protein, 9 aa, Homo Sapiens
KSTCVLEAF

SEQ ID NO: 130864 - protein, 9 aa, Homo Sapiens
KSTDVAKTF

SEQ ID NO: 130865 - protein, 9 aa, Homo Sapiens
KSTMLYNKF

SEQ ID NO: 130866 - protein, 9 aa, Homo Sapiens
KSTTTGHLI

SEQ ID NO: 130867 - protein, 9 aa, Homo Sapiens
KSVDWLLVF

SEQ ID NO: 130868 - protein, 9 aa, Homo Sapiens
KSVGVFEAF

SEQ ID NO: 130869 - protein, 9 aa, Homo Sapiens
KSVKIKTKL

SEQ ID NO: 130870 - protein, 9 aa, Homo Sapiens
KSVKVKIKL

SEQ ID NO: 130871 - protein, 9 aa, Homo Sapiens
KSVKYTVNF

SEQ ID NO: 130872 - protein, 9 aa, Homo Sapiens
KSVLVKQTI

SEQ ID NO: 130873 - protein, 9 aa, Homo Sapiens
KSVRLDVTL

SEQ ID NO: 130874 - protein, 9 aa, Homo Sapiens
KSVSFSDVF

SEQ ID NO: 130875 - protein, 9 aa, Homo Sapiens
KSVSQGFCF

SEQ ID NO: 130876 - protein, 9 aa, Homo Sapiens
KSVTAFFKW

SEQ ID NO: 130877 - protein, 9 aa, Homo Sapiens
KSVTLGYLF

SEQ ID NO: 130878 - protein, 9 aa, Homo Sapiens
KSVTQGFSF

SEQ ID NO: 130879 - protein, 9 aa, Homo Sapiens
KSWADVVKL

SEQ ID NO: 130880 - protein, 9 aa, Homo Sapiens
KSWDEARMF

SEQ ID NO: 130881 - protein, 9 aa, Homo Sapiens
KSWKGGGII

SEQ ID NO: 130882 - protein, 9 aa, Homo Sapiens
KSWKKIFNL

SEQ ID NO: 130883 - protein, 9 aa, Homo Sapiens
KSWVFGVHF

SEQ ID NO: 130884 - protein, 9 aa, Homo Sapiens
KSYDFLTGF

SEQ ID NO: 130885 - protein, 9 aa, Homo Sapiens
KSYDRNYRL

SEQ ID NO: 130886 - protein, 9 aa, Homo Sapiens
KSYEDATKI

SEQ ID NO: 130887 - protein, 9 aa, Homo Sapiens
KSYGNEKRF

SEQ ID NO: 130888 - protein, 9 aa, Homo Sapiens
KSYKDPATL

SEQ ID NO: 130889 - protein, 9 aa, Homo Sapiens
KSYKGRQII

SEQ ID NO: 130890 - protein, 9 aa, Homo Sapiens
KSYPLVHVV

SEQ ID NO: 130891 - protein, 9 aa, Homo Sapiens
KSYQSFQTF

SEQ ID NO: 130892 - protein, 9 aa, Homo Sapiens
KSYSKAFTL

SEQ ID NO: 130893 - protein, 9 aa, Homo Sapiens
KSYVQGVTW

SEQ ID NO: 130894 - protein, 9 aa, Homo Sapiens
KSYYHVYKL

SEQ ID NO: 130895 - protein, 9 aa, Homo Sapiens
KTADICQML

SEQ ID NO: 130896 - protein, 9 aa, Homo Sapiens
KTAEDMNLF

SEQ ID NO: 130897 - protein, 9 aa, Homo Sapiens
KTAEELMNF

SEQ ID NO: 130898 - protein, 9 aa, Homo Sapiens
KTAELQEEL

SEQ ID NO: 130899 - protein, 9 aa, Homo Sapiens
KTAENFRQF

SEQ ID NO: 130900 - protein, 9 aa, Homo Sapiens
KTAITVEHL

SEQ ID NO: 130901 - protein, 9 aa, Homo Sapiens
KTAKLASTF

SEQ ID NO: 130902 - protein, 9 aa, Homo Sapiens
KTAPFDSRF

SEQ ID NO: 130903 - protein, 9 aa, Homo Sapiens
KTAQNHPML

SEQ ID NO: 130904 - protein, 9 aa, Homo Sapiens
KTASQVHLM

SEQ ID NO: 130905 - protein, 9 aa, Homo Sapiens
KTATIGSRF

SEQ ID NO: 130906 - protein, 9 aa, Homo Sapiens
KTAVVVGTI

SEQ ID NO: 130907 - protein, 9 aa, Homo Sapiens
KTCDQVMEF

SEQ ID NO: 130908 - protein, 9 aa, Homo Sapiens
KTCNVLVAL

SEQ ID NO: 130909 - protein, 9 aa, Homo Sapiens
KTCPIQIKV

SEQ ID NO: 130910 - protein, 9 aa, Homo Sapiens
KTCRYIPSL

SEQ ID NO: 130911 - protein, 9 aa, Homo Sapiens
KTCSMKVHW

SEQ ID NO: 130912 - protein, 9 aa, Homo Sapiens
KTDIIDHSF

SEQ ID NO: 130913 - protein, 9 aa, Homo Sapiens
KTDKTLVLL

SEQ ID NO: 130914 - protein, 9 aa, Homo Sapiens
KTDVTVVRF

SEQ ID NO: 130915 - protein, 9 aa, Homo Sapiens
KTDWHRYNL

SEQ ID NO: 130916 - protein, 9 aa, Homo Sapiens
KTEALTQAF

SEQ ID NO: 130917 - protein, 9 aa, Homo Sapiens
KTFARYLSF

SEQ ID NO: 130918 - protein, 9 aa, Homo Sapiens
KTFDAPPAL

SEQ ID NO: 130919 - protein, 9 aa, Homo Sapiens
KTFEEIWKF

SEQ ID NO: 130920 - protein, 9 aa, Homo Sapiens
KTFEGFCAL

SEQ ID NO: 130921 - protein, 9 aa, Homo Sapiens
KTFESLVDF

SEQ ID NO: 130922 - protein, 9 aa, Homo Sapiens
KTFHPVPNL

SEQ ID NO: 130923 - protein, 9 aa, Homo Sapiens
KTFLFSATM

SEQ ID NO: 130924 - protein, 9 aa, Homo Sapiens
KTFLIPVLF

SEQ ID NO: 130925 - protein, 9 aa, Homo Sapiens
KTFNIKNDF

SEQ ID NO: 130926 - protein, 9 aa, Homo Sapiens
KTFPFHFMF

SEQ ID NO: 130927 - protein, 9 aa, Homo Sapiens
KTFPYQHRY

SEQ ID NO: 130928 - protein, 9 aa, Homo Sapiens
KTFQGKPIM

SEQ ID NO: 130929 - protein, 9 aa, Homo Sapiens
KTFQMAEYL

SEQ ID NO: 130930 - protein, 9 aa, Homo Sapiens
KTFRDKNTL

SEQ ID NO: 130931 - protein, 9 aa, Homo Sapiens
KTFSGKSNL

SEQ ID NO: 130932 - protein, 9 aa, Homo Sapiens
KTFTAKSTL

SEQ ID NO: 130933 - protein, 9 aa, Homo Sapiens
KTFTFDTVF

SEQ ID NO: 130934 - protein, 9 aa, Homo Sapiens
KTFTGHREW

SEQ ID NO: 130935 - protein, 9 aa, Homo Sapiens
KTFTTQETI

SEQ ID NO: 130936 - protein, 9 aa, Homo Sapiens
KTFVGRAKL

SEQ ID NO: 130937 - protein, 9 aa, Homo Sapiens
KTFVQKQTL

SEQ ID NO: 130938 - protein, 9 aa, Homo Sapiens
KTFVQKSTL

SEQ ID NO: 130939 - protein, 9 aa, Homo Sapiens
KTFVQRNMF

SEQ ID NO: 130940 - protein, 9 aa, Homo Sapiens
KTGEHTWSL

SEQ ID NO: 130941 - protein, 9 aa, Homo Sapiens
KTGETMIQW

SEQ ID NO: 130942 - protein, 9 aa, Homo Sapiens
KTGKFLKRF

SEQ ID NO: 130943 - protein, 9 aa, Homo Sapiens
KTGKNKWFF

SEQ ID NO: 130944 - protein, 9 aa, Homo Sapiens
KTGPFVVHW

SEQ ID NO: 130945 - protein, 9 aa, Homo Sapiens
KTGPKPVRF

SEQ ID NO: 130946 - protein, 9 aa, Homo Sapiens
KTGPVAKEL

SEQ ID NO: 130947 - protein, 9 aa, Homo Sapiens
KTHGEHVGF

SEQ ID NO: 130948 - protein, 9 aa, Homo Sapiens
KTHPGDPRF

SEQ ID NO: 130949 - protein, 9 aa, Homo Sapiens
KTHTIQGTI

SEQ ID NO: 130950 - protein, 9 aa, Homo Sapiens
KTIDAMDTW

SEQ ID NO: 130951 - protein, 9 aa, Homo Sapiens
KTIDGHINL

SEQ ID NO: 130952 - protein, 9 aa, Homo Sapiens
KTIDGQQTI

SEQ ID NO: 130953 - protein, 9 aa, Homo Sapiens
KTIDYIQFL

SEQ ID NO: 130954 - protein, 9 aa, Homo Sapiens
KTIETSPSL

SEQ ID NO: 130955 - protein, 9 aa, Homo Sapiens
KTIHKYVHL

SEQ ID NO: 130956 - protein, 9 aa, Homo Sapiens
KTIIIKDHL

SEQ ID NO: 130957 - protein, 9 aa, Homo Sapiens
KTIIKKLFF

SEQ ID NO: 130958 - protein, 9 aa, Homo Sapiens
KTIKLWNTL

SEQ ID NO: 130959 - protein, 9 aa, Homo Sapiens
KTILDPLTL

SEQ ID NO: 130960 - protein, 9 aa, Homo Sapiens
KTILERNNF

SEQ ID NO: 130961 - protein, 9 aa, Homo Sapiens
KTILPLINF

SEQ ID NO: 130962 - protein, 9 aa, Homo Sapiens
KTIQKAALL

SEQ ID NO: 130963 - protein, 9 aa, Homo Sapiens
KTISPEHVI

SEQ ID NO: 130964 - protein, 9 aa, Homo Sapiens
KTITDVINI

SEQ ID NO: 130965 - protein, 9 aa, Homo Sapiens
KTITQIEEF

SEQ ID NO: 130966 - protein, 9 aa, Homo Sapiens
KTKESSEYL

SEQ ID NO: 130967 - protein, 9 aa, Homo Sapiens
KTKETSVNW

SEQ ID NO: 130968 - protein, 9 aa, Homo Sapiens
KTKEVADCF

SEQ ID NO: 130969 - protein, 9 aa, Homo Sapiens
KTKEVIQEW

SEQ ID NO: 130970 - protein, 9 aa, Homo Sapiens
KTKFEQHTI

SEQ ID NO: 130971 - protein, 9 aa, Homo Sapiens
KTKGFHTTI

SEQ ID NO: 130972 - protein, 9 aa, Homo Sapiens
KTKIDIIRM

SEQ ID NO: 130973 - protein, 9 aa, Homo Sapiens
KTKIEVIRM

SEQ ID NO: 130974 - protein, 9 aa, Homo Sapiens
KTKQGGLRF

SEQ ID NO: 130975 - protein, 9 aa, Homo Sapiens
KTKRDINRF

SEQ ID NO: 130976 - protein, 9 aa, Homo Sapiens
KTLDLINKL

SEQ ID NO: 130977 - protein, 9 aa, Homo Sapiens
KTLDQIRTI

SEQ ID NO: 130978 - protein, 9 aa, Homo Sapiens
KTLELPHVF

SEQ ID NO: 130979 - protein, 9 aa, Homo Sapiens
KTLERSYLL

SEQ ID NO: 130980 - protein, 9 aa, Homo Sapiens
KTLETHIKI

SEQ ID NO: 130981 - protein, 9 aa, Homo Sapiens
KTLETQSAL

SEQ ID NO: 130982 - protein, 9 aa, Homo Sapiens
KTLGKLWRL

SEQ ID NO: 130983 - protein, 9 aa, Homo Sapiens
KTLHETVNF

SEQ ID NO: 130984 - protein, 9 aa, Homo Sapiens
KTLIEKERF

SEQ ID NO: 130985 - protein, 9 aa, Homo Sapiens
KTLLEKSQF

SEQ ID NO: 130986 - protein, 9 aa, Homo Sapiens
KTLNAHEHF

SEQ ID NO: 130987 - protein, 9 aa, Homo Sapiens
KTLNVESNF

SEQ ID NO: 130988 - protein, 9 aa, Homo Sapiens
KTLPAKAKI

SEQ ID NO: 130989 - protein, 9 aa, Homo Sapiens
KTLPCLVRM

SEQ ID NO: 130990 - protein, 9 aa, Homo Sapiens
KTLPDILTF

SEQ ID NO: 130991 - protein, 9 aa, Homo Sapiens
KTLPIPVQI

SEQ ID NO: 130992 - protein, 9 aa, Homo Sapiens
KTLPSKPSW

SEQ ID NO: 130993 - protein, 9 aa, Homo Sapiens
KTLPSMLIL

SEQ ID NO: 130994 - protein, 9 aa, Homo Sapiens
KTLPVAFKV

SEQ ID NO: 130995 - protein, 9 aa, Homo Sapiens
KTLQEVTQL

SEQ ID NO: 130996 - protein, 9 aa, Homo Sapiens
KTLQKKCYL

SEQ ID NO: 130997 - protein, 9 aa, Homo Sapiens
KTLQLEYRF

SEQ ID NO: 130998 - protein, 9 aa, Homo Sapiens
KTLQRAPTI

SEQ ID NO: 130999 - protein, 9 aa, Homo Sapiens
KTLSAILRI

SEQ ID NO: 131000 - protein, 9 aa, Homo Sapiens
KTLTQEEKI

SEQ ID NO: 131001 - protein, 9 aa, Homo Sapiens
KTLVQNNCL

SEQ ID NO: 131002 - protein, 9 aa, Homo Sapiens
KTLYHITLW

SEQ ID NO: 131003 - protein, 9 aa, Homo Sapiens
KTMETAEKL

SEQ ID NO: 131004 - protein, 9 aa, Homo Sapiens
KTMKQQLQF

SEQ ID NO: 131005 - protein, 9 aa, Homo Sapiens
KTMLLIAHY

SEQ ID NO: 131006 - protein, 9 aa, Homo Sapiens
KTMTDTYLL

SEQ ID NO: 131007 - protein, 9 aa, Homo Sapiens
KTNEMLLNF

SEQ ID NO: 131008 - protein, 9 aa, Homo Sapiens
KTNIIRDYL

SEQ ID NO: 131009 - protein, 9 aa, Homo Sapiens
KTNVAQIRM

SEQ ID NO: 131010 - protein, 9 aa, Homo Sapiens
KTPEEAALF

SEQ ID NO: 131011 - protein, 9 aa, Homo Sapiens
KTPGKAYLF

SEQ ID NO: 131012 - protein, 9 aa, Homo Sapiens
KTPPPVLIF

SEQ ID NO: 131013 - protein, 9 aa, Homo Sapiens
KTQDVEYIF

SEQ ID NO: 131014 - protein, 9 aa, Homo Sapiens
KTQDYVVGF

SEQ ID NO: 131015 - protein, 9 aa, Homo Sapiens
KTQEKIWEF

SEQ ID NO: 131016 - protein, 9 aa, Homo Sapiens
KTQGPRALW

SEQ ID NO: 131017 - protein, 9 aa, Homo Sapiens
KTQHLQELF

SEQ ID NO: 131018 - protein, 9 aa, Homo Sapiens
KTRDEYLSL

SEQ ID NO: 131019 - protein, 9 aa, Homo Sapiens
KTRQIISTI

SEQ ID NO: 131020 - protein, 9 aa, Homo Sapiens
KTRSVEQTL

SEQ ID NO: 131021 - protein, 9 aa, Homo Sapiens
KTRTNVPTF

SEQ ID NO: 131022 - protein, 9 aa, Homo Sapiens
KTRYIFDLF

SEQ ID NO: 131023 - protein, 9 aa, Homo Sapiens
KTSDLYQLF

SEQ ID NO: 131024 - protein, 9 aa, Homo Sapiens
KTSGIINKF

SEQ ID NO: 131025 - protein, 9 aa, Homo Sapiens
KTSKLQTAF

SEQ ID NO: 131026 - protein, 9 aa, Homo Sapiens
KTSNIRANF

SEQ ID NO: 131027 - protein, 9 aa, Homo Sapiens
KTSVLVVQF

SEQ ID NO: 131028 - protein, 9 aa, Homo Sapiens
KTSVMVNSF

SEQ ID NO: 131029 - protein, 9 aa, Homo Sapiens
KTSVSQNVI

SEQ ID NO: 131030 - protein, 9 aa, Homo Sapiens
KTTECSNTF

SEQ ID NO: 131031 - protein, 9 aa, Homo Sapiens
KTTKLYSRF

SEQ ID NO: 131032 - protein, 9 aa, Homo Sapiens
KTTNTVSKF

SEQ ID NO: 131033 - protein, 9 aa, Homo Sapiens
KTTREYYTF

SEQ ID NO: 131034 - protein, 9 aa, Homo Sapiens
KTVAIHTLW

SEQ ID NO: 131035 - protein, 9 aa, Homo Sapiens
KTVALGHRL

SEQ ID NO: 131036 - protein, 9 aa, Homo Sapiens
KTVAQSQQL

SEQ ID NO: 131037 - protein, 9 aa, Homo Sapiens
KTVDKFNEW

SEQ ID NO: 131038 - protein, 9 aa, Homo Sapiens
KTVEDYFCF

SEQ ID NO: 131039 - protein, 9 aa, Homo Sapiens
KTVEQHLRL

SEQ ID NO: 131040 - protein, 9 aa, Homo Sapiens
KTVPQKVTI

SEQ ID NO: 131041 - protein, 9 aa, Homo Sapiens
KTVQCKVTL

SEQ ID NO: 131042 - protein, 9 aa, Homo Sapiens
KTVVGGAMF

SEQ ID NO: 131043 - protein, 9 aa, Homo Sapiens
KTVVNKDVF

SEQ ID NO: 131044 - protein, 9 aa, Homo Sapiens
KTWHKGTLI

SEQ ID NO: 131045 - protein, 9 aa, Homo Sapiens
KTWKGSIGL

SEQ ID NO: 131046 - protein, 9 aa, Homo Sapiens
KTWKVDVVL

SEQ ID NO: 131047 - protein, 9 aa, Homo Sapiens
KTYDKTVAL

SEQ ID NO: 131048 - protein, 9 aa, Homo Sapiens
KTYDLLFKL

SEQ ID NO: 131049 - protein, 9 aa, Homo Sapiens
KTYDYLFKL

SEQ ID NO: 131050 - protein, 9 aa, Homo Sapiens
KTYPPFVNF

SEQ ID NO: 131051 - protein, 9 aa, Homo Sapiens
KTYTDRVFF

SEQ ID NO: 131052 - protein, 9 aa, Homo Sapiens
KVADPVVTF

SEQ ID NO: 131053 - protein, 9 aa, Homo Sapiens
KVAELFEKL

SEQ ID NO: 131054 - protein, 9 aa, Homo Sapiens
KVAELKQEL

SEQ ID NO: 131055 - protein, 9 aa, Homo Sapiens
KVASALEKW

SEQ ID NO: 131056 - protein, 9 aa, Homo Sapiens
KVCVEHHTF

SEQ ID NO: 131057 - protein, 9 aa, Homo Sapiens
KVDIIISEW

SEQ ID NO: 131058 - protein, 9 aa, Homo Sapiens
KVFDSHPVL

SEQ ID NO: 131059 - protein, 9 aa, Homo Sapiens
KVFGNEIKL

SEQ ID NO: 131060 - protein, 9 aa, Homo Sapiens
KVGKFYELY

SEQ ID NO: 131061 - protein, 9 aa, Homo Sapiens
KVHCLNTLF

SEQ ID NO: 131062 - protein, 9 aa, Homo Sapiens
KVHQLYETI

SEQ ID NO: 131063 - protein, 9 aa, Homo Sapiens
KVIAQQVQL

SEQ ID NO: 131064 - protein, 9 aa, Homo Sapiens
KVIEEAVYF

SEQ ID NO: 131065 - protein, 9 aa, Homo Sapiens
KVIEINPYL

SEQ ID NO: 131066 - protein, 9 aa, Homo Sapiens
KVINAAHSF

SEQ ID NO: 131067 - protein, 9 aa, Homo Sapiens
KVIQMVPEF

SEQ ID NO: 131068 - protein, 9 aa, Homo Sapiens
KVITCEIAW

SEQ ID NO: 131069 - protein, 9 aa, Homo Sapiens
KVKEFCENL

SEQ ID NO: 131070 - protein, 9 aa, Homo Sapiens
KVKTDTVLI

SEQ ID NO: 131071 - protein, 9 aa, Homo Sapiens
KVLDFEHFL

SEQ ID NO: 131072 - protein, 9 aa, Homo Sapiens
KVLDILQHI

SEQ ID NO: 131073 - protein, 9 aa, Homo Sapiens
KVLDLKINL

SEQ ID NO: 131074 - protein, 9 aa, Homo Sapiens
KVLDLNPGF

SEQ ID NO: 131075 - protein, 9 aa, Homo Sapiens
KVLDLRINL

SEQ ID NO: 131076 - protein, 9 aa, Homo Sapiens
KVLELDPAL

SEQ ID NO: 131077 - protein, 9 aa, Homo Sapiens
KVLELFESF

SEQ ID NO: 131078 - protein, 9 aa, Homo Sapiens
KVLKIHINF

SEQ ID NO: 131079 - protein, 9 aa, Homo Sapiens
KVLKNNIRF

SEQ ID NO: 131080 - protein, 9 aa, Homo Sapiens
KVLPCQHTF

SEQ ID NO: 131081 - protein, 9 aa, Homo Sapiens
KVLPIIQRW

SEQ ID NO: 131082 - protein, 9 aa, Homo Sapiens
KVLVIPICF

SEQ ID NO: 131083 - protein, 9 aa, Homo Sapiens
KVMELLVHL

SEQ ID NO: 131084 - protein, 9 aa, Homo Sapiens
KVMPFANLM

SEQ ID NO: 131085 - protein, 9 aa, Homo Sapiens
KVMPQNHSF

SEQ ID NO: 131086 - protein, 9 aa, Homo Sapiens
KVNGKGSLW

SEQ ID NO: 131087 - protein, 9 aa, Homo Sapiens
KVPPFVFFF

SEQ ID NO: 131088 - protein, 9 aa, Homo Sapiens
KVQDITMQW

SEQ ID NO: 131089 - protein, 9 aa, Homo Sapiens
KVQPRNWLL

SEQ ID NO: 131090 - protein, 9 aa, Homo Sapiens
KVRPSEEML

SEQ ID NO: 131091 - protein, 9 aa, Homo Sapiens
KVSKMEQKF

SEQ ID NO: 131092 - protein, 9 aa, Homo Sapiens
KVSSINSRF

SEQ ID NO: 131093 - protein, 9 aa, Homo Sapiens
KVTIICIRF

SEQ ID NO: 131094 - protein, 9 aa, Homo Sapiens
KVVDAKTIF

SEQ ID NO: 131095 - protein, 9 aa, Homo Sapiens
KVVGKDYLL

SEQ ID NO: 131096 - protein, 9 aa, Homo Sapiens
KVVNIVPVI

SEQ ID NO: 131097 - protein, 9 aa, Homo Sapiens
KVVTIIPKI

SEQ ID NO: 131098 - protein, 9 aa, Homo Sapiens
KVWKAPSSW

SEQ ID NO: 131099 - protein, 9 aa, Homo Sapiens
KVYMFKCVW

SEQ ID NO: 131100 - protein, 9 aa, Homo Sapiens
LAAKLIHTL

SEQ ID NO: 131101 - protein, 9 aa, Homo Sapiens
LAAKLLAKY

SEQ ID NO: 131102 - protein, 9 aa, Homo Sapiens
LADRLLHQF

SEQ ID NO: 131103 - protein, 9 aa, Homo Sapiens
LAHRVETKM

SEQ ID NO: 131104 - protein, 9 aa, Homo Sapiens
LAKKIEPEL

SEQ ID NO: 131105 - protein, 9 aa, Homo Sapiens
LALVKPEVW

SEQ ID NO: 131106 - protein, 9 aa, Homo Sapiens
LANKLYERW

SEQ ID NO: 131107 - protein, 9 aa, Homo Sapiens
LASPIYTHF

SEQ ID NO: 131108 - protein, 9 aa, Homo Sapiens
LATTILQHW

SEQ ID NO: 131109 - protein, 9 aa, Homo Sapiens
LAVPFCVNF

SEQ ID NO: 131110 - protein, 9 aa, Homo Sapiens
LAWQNPSGW

SEQ ID NO: 131111 - protein, 9 aa, Homo Sapiens
LGTQLLYKF

SEQ ID NO: 131112 - protein, 9 aa, Homo Sapiens
LIRELEPLL

SEQ ID NO: 131113 - protein, 9 aa, Homo Sapiens
LKERDFEIK

SEQ ID NO: 131114 - protein, 9 aa, Homo Sapiens
LSAFLPARF

SEQ ID NO: 131115 - protein, 9 aa, Homo Sapiens
LSAFLSHQF

SEQ ID NO: 131116 - protein, 9 aa, Homo Sapiens
LSAPIHTQM

SEQ ID NO: 131117 - protein, 9 aa, Homo Sapiens
LSAPIMSRF

SEQ ID NO: 131118 - protein, 9 aa, Homo Sapiens
LSDETKNNW

SEQ ID NO: 131119 - protein, 9 aa, Homo Sapiens
LSDSPGPTW

SEQ ID NO: 131120 - protein, 9 aa, Homo Sapiens
LSFTHPISF

SEQ ID NO: 131121 - protein, 9 aa, Homo Sapiens
LSGPFVQKW

SEQ ID NO: 131122 - protein, 9 aa, Homo Sapiens
LSIHLQHKF

SEQ ID NO: 131123 - protein, 9 aa, Homo Sapiens
LSIKEAFRL

SEQ ID NO: 131124 - protein, 9 aa, Homo Sapiens
LSLKNIPVL

SEQ ID NO: 131125 - protein, 9 aa, Homo Sapiens
LSLPKQLVL

SEQ ID NO: 131126 - protein, 9 aa, Homo Sapiens
LSMIITPAF

SEQ ID NO: 131127 - protein, 9 aa, Homo Sapiens
LSNKISPLM

SEQ ID NO: 131128 - protein, 9 aa, Homo Sapiens
LSNTVMPRF

SEQ ID NO: 131129 - protein, 9 aa, Homo Sapiens
LSPDVTPCF

SEQ ID NO: 131130 - protein, 9 aa, Homo Sapiens
LSPRDITTI

SEQ ID NO: 131131 - protein, 9 aa, Homo Sapiens
LSQKLQMIL

SEQ ID NO: 131132 - protein, 9 aa, Homo Sapiens
LSQKPISSF

SEQ ID NO: 131133 - protein, 9 aa, Homo Sapiens
LSQNRLHTL

SEQ ID NO: 131134 - protein, 9 aa, Homo Sapiens
LSQPILLEL

SEQ ID NO: 131135 - protein, 9 aa, Homo Sapiens
LSQPTPATL

SEQ ID NO: 131136 - protein, 9 aa, Homo Sapiens
LSRELFESW

SEQ ID NO: 131137 - protein, 9 aa, Homo Sapiens
LSRPEAQSL

SEQ ID NO: 131138 - protein, 9 aa, Homo Sapiens
LSSTEILKW

SEQ ID NO: 131139 - protein, 9 aa, Homo Sapiens
LSTIISPLF

SEQ ID NO: 131140 - protein, 9 aa, Homo Sapiens
LSTLVRPVF

SEQ ID NO: 131141 - protein, 9 aa, Homo Sapiens
LSTTIQEEF

SEQ ID NO: 131142 - protein, 9 aa, Homo Sapiens
LSVAVRSEF

SEQ ID NO: 131143 - protein, 9 aa, Homo Sapiens
LSVETDYTF

SEQ ID NO: 131144 - protein, 9 aa, Homo Sapiens
LSVPSPFTW

SEQ ID NO: 131145 - protein, 9 aa, Homo Sapiens
LSWQYLTTL

SEQ ID NO: 131146 - protein, 9 aa, Homo Sapiens
LSYPQTDVF

SEQ ID NO: 131147 - protein, 9 aa, Homo Sapiens
LTAKILEAF

SEQ ID NO: 131148 - protein, 9 aa, Homo Sapiens
LTCKNQVLL

SEQ ID NO: 131149 - protein, 9 aa, Homo Sapiens
LTDRLQLTL

SEQ ID NO: 131150 - protein, 9 aa, Homo Sapiens
LTIDHVPIW

SEQ ID NO: 131151 - protein, 9 aa, Homo Sapiens
LTIVDTPGF

SEQ ID NO: 131152 - protein, 9 aa, Homo Sapiens
LTKAKEALI

SEQ ID NO: 131153 - protein, 9 aa, Homo Sapiens
LTKKSEEVF

SEQ ID NO: 131154 - protein, 9 aa, Homo Sapiens
LTKKYEHVL

SEQ ID NO: 131155 - protein, 9 aa, Homo Sapiens
LTKPFEYLF

SEQ ID NO: 131156 - protein, 9 aa, Homo Sapiens
LTKQEFQTL

SEQ ID NO: 131157 - protein, 9 aa, Homo Sapiens
LTLEERVHF

SEQ ID NO: 131158 - protein, 9 aa, Homo Sapiens
LTLPVNHIF

SEQ ID NO: 131159 - protein, 9 aa, Homo Sapiens
LTLREVEVF

SEQ ID NO: 131160 - protein, 9 aa, Homo Sapiens
LTMKDSNQF

SEQ ID NO: 131161 - protein, 9 aa, Homo Sapiens
LTMTRNAVW

SEQ ID NO: 131162 - protein, 9 aa, Homo Sapiens
LTNTIHCRL

SEQ ID NO: 131163 - protein, 9 aa, Homo Sapiens
LTPDVQPRF

SEQ ID NO: 131164 - protein, 9 aa, Homo Sapiens
LTPKINQTF

SEQ ID NO: 131165 - protein, 9 aa, Homo Sapiens
LTPVVVTLW

SEQ ID NO: 131166 - protein, 9 aa, Homo Sapiens
LTRTELETL

SEQ ID NO: 131167 - protein, 9 aa, Homo Sapiens
LTRVEVTEF

SEQ ID NO: 131168 - protein, 9 aa, Homo Sapiens
LTSKLYSLL

SEQ ID NO: 131169 - protein, 9 aa, Homo Sapiens
LTSVVQTLL

SEQ ID NO: 131170 - protein, 9 aa, Homo Sapiens
LTVGLSNLF

SEQ ID NO: 131171 - protein, 9 aa, Homo Sapiens
LTVIHDFLF

SEQ ID NO: 131172 - protein, 9 aa, Homo Sapiens
LTVRNLPQY

SEQ ID NO: 131173 - protein, 9 aa, Homo Sapiens
LTWKKIIKF

SEQ ID NO: 131174 - protein, 9 aa, Homo Sapiens
LTYASPPLI

SEQ ID NO: 131175 - protein, 9 aa, Homo Sapiens
LTYENVERW

SEQ ID NO: 131176 - protein, 9 aa, Homo Sapiens
LVHAVQALW

SEQ ID NO: 131177 - protein, 9 aa, Homo Sapiens
LVWKAQNTW

SEQ ID NO: 131178 - protein, 9 aa, Homo Sapiens
MAAKILEEF

SEQ ID NO: 131179 - protein, 9 aa, Homo Sapiens
MAALVHHSF

SEQ ID NO: 131180 - protein, 9 aa, Homo Sapiens
MAGIIIAGW

SEQ ID NO: 131181 - protein, 9 aa, Homo Sapiens
MAHQIQEMF

SEQ ID NO: 131182 - protein, 9 aa, Homo Sapiens
MAHQVQELF

SEQ ID NO: 131183 - protein, 9 aa, Homo Sapiens
MAIVGTHKF

SEQ ID NO: 131184 - protein, 9 aa, Homo Sapiens
MSERQVALW

SEQ ID NO: 131185 - protein, 9 aa, Homo Sapiens
MSLPYRLVF

SEQ ID NO: 131186 - protein, 9 aa, Homo Sapiens
MSLRLNEQY

SEQ ID NO: 131187 - protein, 9 aa, Homo Sapiens
MSNELENYF

SEQ ID NO: 131188 - protein, 9 aa, Homo Sapiens
MSNKHGWTW

SEQ ID NO: 131189 - protein, 9 aa, Homo Sapiens
MSVHLSPCF

SEQ ID NO: 131190 - protein, 9 aa, Homo Sapiens
MTNGFHMTW

SEQ ID NO: 131191 - protein, 9 aa, Homo Sapiens
MTNPHNHLY

SEQ ID NO: 131192 - protein, 9 aa, Homo Sapiens
MTQIMFETF

SEQ ID NO: 131193 - protein, 9 aa, Homo Sapiens
MTRIQKERF

SEQ ID NO: 131194 - protein, 9 aa, Homo Sapiens
MTVKEQQEW

SEQ ID NO: 131195 - protein, 9 aa, Homo Sapiens
MTVSIIDRF

SEQ ID NO: 131196 - protein, 9 aa, Homo Sapiens
NSRKQEAEW

SEQ ID NO: 131197 - protein, 9 aa, Homo Sapiens
NSTVRLYEW

SEQ ID NO: 131198 - protein, 9 aa, Homo Sapiens
NTINLIHTF

SEQ ID NO: 131199 - protein, 9 aa, Homo Sapiens
NTLKNTIVF

SEQ ID NO: 131200 - protein, 9 aa, Homo Sapiens
NVAAAAAFN

SEQ ID NO: 131201 - protein, 9 aa, Homo Sapiens
QAAELRAYL

SEQ ID NO: 131202 - protein, 9 aa, Homo Sapiens
QALQTNWHL

SEQ ID NO: 131203 - protein, 9 aa, Homo Sapiens
QARIEIESF

SEQ ID NO: 131204 - protein, 9 aa, Homo Sapiens
QATRTVPVF

SEQ ID NO: 131205 - protein, 9 aa, Homo Sapiens
QAWKEILKW

SEQ ID NO: 131206 - protein, 9 aa, Homo Sapiens
QSAKEQIKW

SEQ ID NO: 131207 - protein, 9 aa, Homo Sapiens
QSAKTQIKL

SEQ ID NO: 131208 - protein, 9 aa, Homo Sapiens
QSAVMSATF

SEQ ID NO: 131209 - protein, 9 aa, Homo Sapiens
QSCTVEVHF

SEQ ID NO: 131210 - protein, 9 aa, Homo Sapiens
QSCVIIIRI

SEQ ID NO: 131211 - protein, 9 aa, Homo Sapiens
QSIDLNHNF

SEQ ID NO: 131212 - protein, 9 aa, Homo Sapiens
QSLELVHRF

SEQ ID NO: 131213 - protein, 9 aa, Homo Sapiens
QSLKKQNVF

SEQ ID NO: 131214 - protein, 9 aa, Homo Sapiens
QSLMQAPLL

SEQ ID NO: 131215 - protein, 9 aa, Homo Sapiens
QSLRLGHLL

SEQ ID NO: 131216 - protein, 9 aa, Homo Sapiens
QSQIHNTCW

SEQ ID NO: 131217 - protein, 9 aa, Homo Sapiens
QSRVEEITM

SEQ ID NO: 131218 - protein, 9 aa, Homo Sapiens
QSTPIQHSF

SEQ ID NO: 131219 - protein, 9 aa, Homo Sapiens
QSVHFQTIF

SEQ ID NO: 131220 - protein, 9 aa, Homo Sapiens
QSVTLTHLF

SEQ ID NO: 131221 - protein, 9 aa, Homo Sapiens
QSYQESHCF

SEQ ID NO: 131222 - protein, 9 aa, Homo Sapiens
QSYQKFRRF

SEQ ID NO: 131223 - protein, 9 aa, Homo Sapiens
QTAVLIETL

SEQ ID NO: 131224 - protein, 9 aa, Homo Sapiens
QTCRLLLSY

SEQ ID NO: 131225 - protein, 9 aa, Homo Sapiens
QTFITLEKF

SEQ ID NO: 131226 - protein, 9 aa, Homo Sapiens
QTFLSEIRW

SEQ ID NO: 131227 - protein, 9 aa, Homo Sapiens
QTFSSKTEW

SEQ ID NO: 131228 - protein, 9 aa, Homo Sapiens
QTHRIHNAL

SEQ ID NO: 131229 - protein, 9 aa, Homo Sapiens
QTLPTSNYF

SEQ ID NO: 131230 - protein, 9 aa, Homo Sapiens
QTLSLKQLF

SEQ ID NO: 131231 - protein, 9 aa, Homo Sapiens
QTLVLHQYF

SEQ ID NO: 131232 - protein, 9 aa, Homo Sapiens
QTMELAPNF

SEQ ID NO: 131233 - protein, 9 aa, Homo Sapiens
QTVHINENF

SEQ ID NO: 131234 - protein, 9 aa, Homo Sapiens
QTVMITPTF

SEQ ID NO: 131235 - protein, 9 aa, Homo Sapiens
QTVSPAEKW

SEQ ID NO: 131236 - protein, 9 aa, Homo Sapiens
QVAPLTHVF

SEQ ID NO: 131237 - protein, 9 aa, Homo Sapiens
QVLKTQTKF

SEQ ID NO: 131238 - protein, 9 aa, Homo Sapiens
RAADVLVYL

SEQ ID NO: 131239 - protein, 9 aa, Homo Sapiens
RAAEIRETL

SEQ ID NO: 131240 - protein, 9 aa, Homo Sapiens
RAAELGVNF

SEQ ID NO: 131241 - protein, 9 aa, Homo Sapiens
RAAFVLPEF

SEQ ID NO: 131242 - protein, 9 aa, Homo Sapiens
RAANLESKF

SEQ ID NO: 131243 - protein, 9 aa, Homo Sapiens
RAATIHHRL

SEQ ID NO: 131244 - protein, 9 aa, Homo Sapiens
RAATLIQSF

SEQ ID NO: 131245 - protein, 9 aa, Homo Sapiens
RAAVIKHRF

SEQ ID NO: 131246 - protein, 9 aa, Homo Sapiens
RACQFLIKF

SEQ ID NO: 131247 - protein, 9 aa, Homo Sapiens
RAFEYEIRF

SEQ ID NO: 131248 - protein, 9 aa, Homo Sapiens
RAFHPDLEF

SEQ ID NO: 131249 - protein, 9 aa, Homo Sapiens
RAFLIRELF

SEQ ID NO: 131250 - protein, 9 aa, Homo Sapiens
RAGMFVSKF

SEQ ID NO: 131251 - protein, 9 aa, Homo Sapiens
RAHQIFEEF

SEQ ID NO: 131252 - protein, 9 aa, Homo Sapiens
RAIDKCWKI

SEQ ID NO: 131253 - protein, 9 aa, Homo Sapiens
RAIELQPHF

SEQ ID NO: 131254 - protein, 9 aa, Homo Sapiens
RAINIALQL

SEQ ID NO: 131255 - protein, 9 aa, Homo Sapiens
RAIQINPAF

SEQ ID NO: 131256 - protein, 9 aa, Homo Sapiens
RAKPEYHKF

SEQ ID NO: 131257 - protein, 9 aa, Homo Sapiens
RALKEITTF

SEQ ID NO: 131258 - protein, 9 aa, Homo Sapiens
RALKLLTTL

SEQ ID NO: 131259 - protein, 9 aa, Homo Sapiens
RALLVNVKF

SEQ ID NO: 131260 - protein, 9 aa, Homo Sapiens
RALSEQINI

SEQ ID NO: 131261 - protein, 9 aa, Homo Sapiens
RAPEVILSW

SEQ ID NO: 131262 - protein, 9 aa, Homo Sapiens
RAPEVYVAF

SEQ ID NO: 131263 - protein, 9 aa, Homo Sapiens
RAPPKQMVW

SEQ ID NO: 131264 - protein, 9 aa, Homo Sapiens
RAPQQWATF

SEQ ID NO: 131265 - protein, 9 aa, Homo Sapiens
RAQPYDPNF

SEQ ID NO: 131266 - protein, 9 aa, Homo Sapiens
RARTIYERF

SEQ ID NO: 131267 - protein, 9 aa, Homo Sapiens
RASGLTQKW

SEQ ID NO: 131268 - protein, 9 aa, Homo Sapiens
RASQVQSKL

SEQ ID NO: 131269 - protein, 9 aa, Homo Sapiens
RATPENYLF

SEQ ID NO: 131270 - protein, 9 aa, Homo Sapiens
RAVQLQELW

SEQ ID NO: 131271 - protein, 9 aa, Homo Sapiens
RAYAKDVKF

SEQ ID NO: 131272 - protein, 9 aa, Homo Sapiens
RAYPFHWAW

SEQ ID NO: 131273 - protein, 9 aa, Homo Sapiens
RGCDVTFEW

SEQ ID NO: 131274 - protein, 9 aa, Homo Sapiens
RGCQLTITF

SEQ ID NO: 131275 - protein, 9 aa, Homo Sapiens
RGFYSVETF

SEQ ID NO: 131276 - protein, 9 aa, Homo Sapiens
RGVPWNFTF

SEQ ID NO: 131277 - protein, 9 aa, Homo Sapiens
RGWDGFVEF

SEQ ID NO: 131278 - protein, 9 aa, Homo Sapiens
RGWNDPPQF

SEQ ID NO: 131279 - protein, 9 aa, Homo Sapiens
RICSKAHSW

SEQ ID NO: 131280 - protein, 9 aa, Homo Sapiens
RIHVCLYFI

SEQ ID NO: 131281 - protein, 9 aa, Homo Sapiens
RIIAKLAAW

SEQ ID NO: 131282 - protein, 9 aa, Homo Sapiens
RIIHLVHRF

SEQ ID NO: 131283 - protein, 9 aa, Homo Sapiens
RIKNNDPKL

SEQ ID NO: 131284 - protein, 9 aa, Homo Sapiens
RIYNFAHRF

SEQ ID NO: 131285 - protein, 9 aa, Homo Sapiens
RLAEISDVW

SEQ ID NO: 131286 - protein, 9 aa, Homo Sapiens
RLFKNDPLF

SEQ ID NO: 131287 - protein, 9 aa, Homo Sapiens
RLGQIYQSW

SEQ ID NO: 131288 - protein, 9 aa, Homo Sapiens
RLWEQLVHF

SEQ ID NO: 131289 - protein, 9 aa, Homo Sapiens
RMFLENETW

SEQ ID NO: 131290 - protein, 9 aa, Homo Sapiens
RMNPNSPSI

SEQ ID NO: 131291 - protein, 9 aa, Homo Sapiens
RNLPFDFTW

SEQ ID NO: 131292 - protein, 9 aa, Homo Sapiens
RQFPTAFEF

SEQ ID NO: 131293 - protein, 9 aa, Homo Sapiens
RSAAYAARW

SEQ ID NO: 131294 - protein, 9 aa, Homo Sapiens
RSADHPPKL

SEQ ID NO: 131295 - protein, 9 aa, Homo Sapiens
RSAEAYENF

SEQ ID NO: 131296 - protein, 9 aa, Homo Sapiens
RSAHLRSYF

SEQ ID NO: 131297 - protein, 9 aa, Homo Sapiens
RSAICIQSW

SEQ ID NO: 131298 - protein, 9 aa, Homo Sapiens
RSALLHADF

SEQ ID NO: 131299 - protein, 9 aa, Homo Sapiens
RSALVNNTI

SEQ ID NO: 131300 - protein, 9 aa, Homo Sapiens
RSANIEFQM

SEQ ID NO: 131301 - protein, 9 aa, Homo Sapiens
RSAQAIHKF

SEQ ID NO: 131302 - protein, 9 aa, Homo Sapiens
RSARPPEKF

SEQ ID NO: 131303 - protein, 9 aa, Homo Sapiens
RSAVFSVTY

SEQ ID NO: 131304 - protein, 9 aa, Homo Sapiens
RSAVVEMLI

SEQ ID NO: 131305 - protein, 9 aa, Homo Sapiens
RSCLLHLTL

SEQ ID NO: 131306 - protein, 9 aa, Homo Sapiens
RSCTLANNF

SEQ ID NO: 131307 - protein, 9 aa, Homo Sapiens
RSCTVNIMF

SEQ ID NO: 131308 - protein, 9 aa, Homo Sapiens
RSDNIIFQF

SEQ ID NO: 131309 - protein, 9 aa, Homo Sapiens
RSDPGHYSF

SEQ ID NO: 131310 - protein, 9 aa, Homo Sapiens
RSDTAQVEL

SEQ ID NO: 131311 - protein, 9 aa, Homo Sapiens
RSFFHQHYL

SEQ ID NO: 131312 - protein, 9 aa, Homo Sapiens
RSFHEVREF

SEQ ID NO: 131313 - protein, 9 aa, Homo Sapiens
RSFLTKLEW

SEQ ID NO: 131314 - protein, 9 aa, Homo Sapiens
RSFPGFQAF

SEQ ID NO: 131315 - protein, 9 aa, Homo Sapiens
RSFPTLPTL

SEQ ID NO: 131316 - protein, 9 aa, Homo Sapiens
RSFQGPVLI

SEQ ID NO: 131317 - protein, 9 aa, Homo Sapiens
RSFTNQIIL

SEQ ID NO: 131318 - protein, 9 aa, Homo Sapiens
RSFVEKHRW

SEQ ID NO: 131319 - protein, 9 aa, Homo Sapiens
RSFVSPPVL

SEQ ID NO: 131320 - protein, 9 aa, Homo Sapiens
RSGPFAPVL

SEQ ID NO: 131321 - protein, 9 aa, Homo Sapiens
RSGPFGQIF

SEQ ID NO: 131322 - protein, 9 aa, Homo Sapiens
RSHAGYQTI

SEQ ID NO: 131323 - protein, 9 aa, Homo Sapiens
RSHDTLVRW

SEQ ID NO: 131324 - protein, 9 aa, Homo Sapiens
RSHGFAAEF

SEQ ID NO: 131325 - protein, 9 aa, Homo Sapiens
RSHKIQTQL

SEQ ID NO: 131326 - protein, 9 aa, Homo Sapiens
RSHQVSVTL

SEQ ID NO: 131327 - protein, 9 aa, Homo Sapiens
RSHYLMHNY

SEQ ID NO: 131328 - protein, 9 aa, Homo Sapiens
RSHYSPIYL

SEQ ID NO: 131329 - protein, 9 aa, Homo Sapiens
RSIDKPFRL

SEQ ID NO: 131330 - protein, 9 aa, Homo Sapiens
RSIDLTVKL

SEQ ID NO: 131331 - protein, 9 aa, Homo Sapiens
RSIFSDFVF

SEQ ID NO: 131332 - protein, 9 aa, Homo Sapiens
RSILAPLAW

SEQ ID NO: 131333 - protein, 9 aa, Homo Sapiens
RSINKLIRI

SEQ ID NO: 131334 - protein, 9 aa, Homo Sapiens
RSINQPVAF

SEQ ID NO: 131335 - protein, 9 aa, Homo Sapiens
RSIPMTVDF

SEQ ID NO: 131336 - protein, 9 aa, Homo Sapiens
RSIQQGFCF

SEQ ID NO: 131337 - protein, 9 aa, Homo Sapiens
RSIRLPETI

SEQ ID NO: 131338 - protein, 9 aa, Homo Sapiens
RSIVNQVRF

SEQ ID NO: 131339 - protein, 9 aa, Homo Sapiens
RSKFENEEF

SEQ ID NO: 131340 - protein, 9 aa, Homo Sapiens
RSKKDDINL

SEQ ID NO: 131341 - protein, 9 aa, Homo Sapiens
RSKQAEEEF

SEQ ID NO: 131342 - protein, 9 aa, Homo Sapiens
RSKQTKELW

SEQ ID NO: 131343 - protein, 9 aa, Homo Sapiens
RSLAYIHSF

SEQ ID NO: 131344 - protein, 9 aa, Homo Sapiens
RSLDQQMYL

SEQ ID NO: 131345 - protein, 9 aa, Homo Sapiens
RSLEQKKTF

SEQ ID NO: 131346 - protein, 9 aa, Homo Sapiens
RSLEQNIQL

SEQ ID NO: 131347 - protein, 9 aa, Homo Sapiens
RSLGFNTQI

SEQ ID NO: 131348 - protein, 9 aa, Homo Sapiens
RSLGVHLSF

SEQ ID NO: 131349 - protein, 9 aa, Homo Sapiens
RSLIHHIRL

SEQ ID NO: 131350 - protein, 9 aa, Homo Sapiens
RSLPEHPAF

SEQ ID NO: 131351 - protein, 9 aa, Homo Sapiens
RSLPEIWTL

SEQ ID NO: 131352 - protein, 9 aa, Homo Sapiens
RSLPENIQF

SEQ ID NO: 131353 - protein, 9 aa, Homo Sapiens
RSLPQRFKM

SEQ ID NO: 131354 - protein, 9 aa, Homo Sapiens
RSLPRPHDF

SEQ ID NO: 131355 - protein, 9 aa, Homo Sapiens
RSLPSSSQL

SEQ ID NO: 131356 - protein, 9 aa, Homo Sapiens
RSLQLHLVF

SEQ ID NO: 131357 - protein, 9 aa, Homo Sapiens
RSLSTTNVF

SEQ ID NO: 131358 - protein, 9 aa, Homo Sapiens
RSLTHPPTI

SEQ ID NO: 131359 - protein, 9 aa, Homo Sapiens
RSLWKDVTF

SEQ ID NO: 131360 - protein, 9 aa, Homo Sapiens
RSMEAHNIL

SEQ ID NO: 131361 - protein, 9 aa, Homo Sapiens
RSMEDFVTW

SEQ ID NO: 131362 - protein, 9 aa, Homo Sapiens
RSMEVSTQL

SEQ ID NO: 131363 - protein, 9 aa, Homo Sapiens
RSMGLPLQF

SEQ ID NO: 131364 - protein, 9 aa, Homo Sapiens
RSMNGALAF

SEQ ID NO: 131365 - protein, 9 aa, Homo Sapiens
RSMQNSPSI

SEQ ID NO: 131366 - protein, 9 aa, Homo Sapiens
RSMQNYVQF

SEQ ID NO: 131367 - protein, 9 aa, Homo Sapiens
RSNKLHFAF

SEQ ID NO: 131368 - protein, 9 aa, Homo Sapiens
RSNNINTLF

SEQ ID NO: 131369 - protein, 9 aa, Homo Sapiens
RSPEILVKF

SEQ ID NO: 131370 - protein, 9 aa, Homo Sapiens
RSPEPGQTW

SEQ ID NO: 131371 - protein, 9 aa, Homo Sapiens
RSPETMIKW

SEQ ID NO: 131372 - protein, 9 aa, Homo Sapiens
RSPKLFVVF

SEQ ID NO: 131373 - protein, 9 aa, Homo Sapiens
RSPRTLVTL

SEQ ID NO: 131374 - protein, 9 aa, Homo Sapiens
RSQDHFHVF

SEQ ID NO: 131375 - protein, 9 aa, Homo Sapiens
RSQIHLHKY

SEQ ID NO: 131376 - protein, 9 aa, Homo Sapiens
RSQPPVRAF

SEQ ID NO: 131377 - protein, 9 aa, Homo Sapiens
RSQVSTPRF

SEQ ID NO: 131378 - protein, 9 aa, Homo Sapiens
RSSGRVYYF

SEQ ID NO: 131379 - protein, 9 aa, Homo Sapiens
RSSPLKLEF

SEQ ID NO: 131380 - protein, 9 aa, Homo Sapiens
RSSPVEYEF

SEQ ID NO: 131381 - protein, 9 aa, Homo Sapiens
RSSQMESQF

SEQ ID NO: 131382 - protein, 9 aa, Homo Sapiens
RSSTPLPTI

SEQ ID NO: 131383 - protein, 9 aa, Homo Sapiens
RSTELDSNW

SEQ ID NO: 131384 - protein, 9 aa, Homo Sapiens
RSTELIPRL

SEQ ID NO: 131385 - protein, 9 aa, Homo Sapiens
RSTPFRYLL

SEQ ID NO: 131386 - protein, 9 aa, Homo Sapiens
RSTQITVRF

SEQ ID NO: 131387 - protein, 9 aa, Homo Sapiens
RSTQQTTEW

SEQ ID NO: 131388 - protein, 9 aa, Homo Sapiens
RSTSTQVVF

SEQ ID NO: 131389 - protein, 9 aa, Homo Sapiens
RSVDLQTRI

SEQ ID NO: 131390 - protein, 9 aa, Homo Sapiens
RSVLHHFHF

SEQ ID NO: 131391 - protein, 9 aa, Homo Sapiens
RSVPLKATF

SEQ ID NO: 131392 - protein, 9 aa, Homo Sapiens
RSVVLNDVF

SEQ ID NO: 131393 - protein, 9 aa, Homo Sapiens
RSWAGIINL

SEQ ID NO: 131394 - protein, 9 aa, Homo Sapiens
RSWDHNEFF

SEQ ID NO: 131395 - protein, 9 aa, Homo Sapiens
RSWDQQIKL

SEQ ID NO: 131396 - protein, 9 aa, Homo Sapiens
RSWLPCIFF

SEQ ID NO: 131397 - protein, 9 aa, Homo Sapiens
RSYEEKKQF

SEQ ID NO: 131398 - protein, 9 aa, Homo Sapiens
RTADWRLYL

SEQ ID NO: 131399 - protein, 9 aa, Homo Sapiens
RTAFTKEQI

SEQ ID NO: 131400 - protein, 9 aa, Homo Sapiens
RTAHVILRY

SEQ ID NO: 131401 - protein, 9 aa, Homo Sapiens
RTAITTPNF

SEQ ID NO: 131402 - protein, 9 aa, Homo Sapiens
RTAKLQVTL

SEQ ID NO: 131403 - protein, 9 aa, Homo Sapiens
RTALFEVMF

SEQ ID NO: 131404 - protein, 9 aa, Homo Sapiens
RTATFQQRF

SEQ ID NO: 131405 - protein, 9 aa, Homo Sapiens
RTCDYKHHW

SEQ ID NO: 131406 - protein, 9 aa, Homo Sapiens
RTDGKVFQF

SEQ ID NO: 131407 - protein, 9 aa, Homo Sapiens
RTDYSFHKF

SEQ ID NO: 131408 - protein, 9 aa, Homo Sapiens
RTEILNQEW

SEQ ID NO: 131409 - protein, 9 aa, Homo Sapiens
RTFEDFVRI

SEQ ID NO: 131410 - protein, 9 aa, Homo Sapiens
RTFEEITFL

SEQ ID NO: 131411 - protein, 9 aa, Homo Sapiens
RTFLHTVCF

SEQ ID NO: 131412 - protein, 9 aa, Homo Sapiens
RTFLLQGLL

SEQ ID NO: 131413 - protein, 9 aa, Homo Sapiens
RTFPVLLRL

SEQ ID NO: 131414 - protein, 9 aa, Homo Sapiens
RTFQDEPLI

SEQ ID NO: 131415 - protein, 9 aa, Homo Sapiens
RTFSEGTHF

SEQ ID NO: 131416 - protein, 9 aa, Homo Sapiens
RTFSLFQQL

SEQ ID NO: 131417 - protein, 9 aa, Homo Sapiens
RTHPVATSF

SEQ ID NO: 131418 - protein, 9 aa, Homo Sapiens
RTHPVEIFY

SEQ ID NO: 131419 - protein, 9 aa, Homo Sapiens
RTIEDFNKF

SEQ ID NO: 131420 - protein, 9 aa, Homo Sapiens
RTIGVITKL

SEQ ID NO: 131421 - protein, 9 aa, Homo Sapiens
RTINVYPNF

SEQ ID NO: 131422 - protein, 9 aa, Homo Sapiens
RTIQAHEGF

SEQ ID NO: 131423 - protein, 9 aa, Homo Sapiens
RTIRMGTTL

SEQ ID NO: 131424 - protein, 9 aa, Homo Sapiens
RTIVLQESI

SEQ ID NO: 131425 - protein, 9 aa, Homo Sapiens
RTKASVHTL

SEQ ID NO: 131426 - protein, 9 aa, Homo Sapiens
RTKEEVNEW

SEQ ID NO: 131427 - protein, 9 aa, Homo Sapiens
RTKIDCDNL

SEQ ID NO: 131428 - protein, 9 aa, Homo Sapiens
RTKQVLHTF

SEQ ID NO: 131429 - protein, 9 aa, Homo Sapiens
RTKTKPHLF

SEQ ID NO: 131430 - protein, 9 aa, Homo Sapiens
RTKVKEALL

SEQ ID NO: 131431 - protein, 9 aa, Homo Sapiens
RTLALQQQL

SEQ ID NO: 131432 - protein, 9 aa, Homo Sapiens
RTLDCIHVL

SEQ ID NO: 131433 - protein, 9 aa, Homo Sapiens
RTLDFDPLL

SEQ ID NO: 131434 - protein, 9 aa, Homo Sapiens
RTLDNQLFF

SEQ ID NO: 131435 - protein, 9 aa, Homo Sapiens
RTLDSLMQF

SEQ ID NO: 131436 - protein, 9 aa, Homo Sapiens
RTLETLIRL

SEQ ID NO: 131437 - protein, 9 aa, Homo Sapiens
RTLLAILRL

SEQ ID NO: 131438 - protein, 9 aa, Homo Sapiens
RTLLGDPKF

SEQ ID NO: 131439 - protein, 9 aa, Homo Sapiens
RTLPKLYSL

SEQ ID NO: 131440 - protein, 9 aa, Homo Sapiens
RTLPVLLLY

SEQ ID NO: 131441 - protein, 9 aa, Homo Sapiens
RTLPWSSVL

SEQ ID NO: 131442 - protein, 9 aa, Homo Sapiens
RTLRDIETF

SEQ ID NO: 131443 - protein, 9 aa, Homo Sapiens
RTLVPNFTF

SEQ ID NO: 131444 - protein, 9 aa, Homo Sapiens
RTMDDKTVF

SEQ ID NO: 131445 - protein, 9 aa, Homo Sapiens
RTMEIESTF

SEQ ID NO: 131446 - protein, 9 aa, Homo Sapiens
RTMEIFQLL

SEQ ID NO: 131447 - protein, 9 aa, Homo Sapiens
RTMPRIPTL

SEQ ID NO: 131448 - protein, 9 aa, Homo Sapiens
RTMPSNACF

SEQ ID NO: 131449 - protein, 9 aa, Homo Sapiens
RTMQPLAVL

SEQ ID NO: 131450 - protein, 9 aa, Homo Sapiens
RTNAIKQTF

SEQ ID NO: 131451 - protein, 9 aa, Homo Sapiens
RTNGKEPEL

SEQ ID NO: 131452 - protein, 9 aa, Homo Sapiens
RTNPNNGEF

SEQ ID NO: 131453 - protein, 9 aa, Homo Sapiens
RTNTAYQCF

SEQ ID NO: 131454 - protein, 9 aa, Homo Sapiens
RTPFPLAFW

SEQ ID NO: 131455 - protein, 9 aa, Homo Sapiens
RTPSVTAQF

SEQ ID NO: 131456 - protein, 9 aa, Homo Sapiens
RTQAFQVLL

SEQ ID NO: 131457 - protein, 9 aa, Homo Sapiens
RTQGFLALF

SEQ ID NO: 131458 - protein, 9 aa, Homo Sapiens
RTQVITQTL

SEQ ID NO: 131459 - protein, 9 aa, Homo Sapiens
RTSETNTLF

SEQ ID NO: 131460 - protein, 9 aa, Homo Sapiens
RTSTSQAVF

SEQ ID NO: 131461 - protein, 9 aa, Homo Sapiens
RTSVTDVKF

SEQ ID NO: 131462 - protein, 9 aa, Homo Sapiens
RTTDIVIRI

SEQ ID NO: 131463 - protein, 9 aa, Homo Sapiens
RTTDLLTDW

SEQ ID NO: 131464 - protein, 9 aa, Homo Sapiens
RTTEILHHL

SEQ ID NO: 131465 - protein, 9 aa, Homo Sapiens
RTTQIYTYF

SEQ ID NO: 131466 - protein, 9 aa, Homo Sapiens
RTTTVESSF

SEQ ID NO: 131467 - protein, 9 aa, Homo Sapiens
RTVAELVQF

SEQ ID NO: 131468 - protein, 9 aa, Homo Sapiens
RTVALTALL

SEQ ID NO: 131469 - protein, 9 aa, Homo Sapiens
RTVDARLKL

SEQ ID NO: 131470 - protein, 9 aa, Homo Sapiens
RTVEDFNKF

SEQ ID NO: 131471 - protein, 9 aa, Homo Sapiens
RTVEKPPKF

SEQ ID NO: 131472 - protein, 9 aa, Homo Sapiens
RTVEKTWKL

SEQ ID NO: 131473 - protein, 9 aa, Homo Sapiens
RTVIIEQSW

SEQ ID NO: 131474 - protein, 9 aa, Homo Sapiens
RTVYFSEQW

SEQ ID NO: 131475 - protein, 9 aa, Homo Sapiens
RTWKKFVKF

SEQ ID NO: 131476 - protein, 9 aa, Homo Sapiens
RTYEHEAMW

SEQ ID NO: 131477 - protein, 9 aa, Homo Sapiens
RTYKQRLLF

SEQ ID NO: 131478 - protein, 9 aa, Homo Sapiens
RTYPVQEYF

SEQ ID NO: 131479 - protein, 9 aa, Homo Sapiens
RVADLTEQY

SEQ ID NO: 131480 - protein, 9 aa, Homo Sapiens
RVAQMKRTW

SEQ ID NO: 131481 - protein, 9 aa, Homo Sapiens
RVAVILNEF

SEQ ID NO: 131482 - protein, 9 aa, Homo Sapiens
RVAVVSSRF

SEQ ID NO: 131483 - protein, 9 aa, Homo Sapiens
RVCDYHTKL

SEQ ID NO: 131484 - protein, 9 aa, Homo Sapiens
RVCEIQATL

SEQ ID NO: 131485 - protein, 9 aa, Homo Sapiens
RVFDLPLTW

SEQ ID NO: 131486 - protein, 9 aa, Homo Sapiens
RVFKNLQLF

SEQ ID NO: 131487 - protein, 9 aa, Homo Sapiens
RVFPHEVNW

SEQ ID NO: 131488 - protein, 9 aa, Homo Sapiens
RVFSLSSEF

SEQ ID NO: 131489 - protein, 9 aa, Homo Sapiens
RVHAFLEQW

SEQ ID NO: 131490 - protein, 9 aa, Homo Sapiens
RVHPETYEW

SEQ ID NO: 131491 - protein, 9 aa, Homo Sapiens
RVIDVGSEW

SEQ ID NO: 131492 - protein, 9 aa, Homo Sapiens
RVIEFAAKF

SEQ ID NO: 131493 - protein, 9 aa, Homo Sapiens
RVKEKEAEL

SEQ ID NO: 131494 - protein, 9 aa, Homo Sapiens
RVKEKEAIL

SEQ ID NO: 131495 - protein, 9 aa, Homo Sapiens
RVLISTDVW

SEQ ID NO: 131496 - protein, 9 aa, Homo Sapiens
RVLPCNHEF

SEQ ID NO: 131497 - protein, 9 aa, Homo Sapiens
RVLQEAWMF

SEQ ID NO: 131498 - protein, 9 aa, Homo Sapiens
RVLRFQVSF

SEQ ID NO: 131499 - protein, 9 aa, Homo Sapiens
RVLVVSAKF

SEQ ID NO: 131500 - protein, 9 aa, Homo Sapiens
RVMPSSFFL

SEQ ID NO: 131501 - protein, 9 aa, Homo Sapiens
RVNPVEYSI

SEQ ID NO: 131502 - protein, 9 aa, Homo Sapiens
RVREITENL

SEQ ID NO: 131503 - protein, 9 aa, Homo Sapiens
RVTSVVTGF

SEQ ID NO: 131504 - protein, 9 aa, Homo Sapiens
RVVDFDETW

SEQ ID NO: 131505 - protein, 9 aa, Homo Sapiens
RVVDIYSKF

SEQ ID NO: 131506 - protein, 9 aa, Homo Sapiens
RVVELQQTL

SEQ ID NO: 131507 - protein, 9 aa, Homo Sapiens
RVVPQFVVF

SEQ ID NO: 131508 - protein, 9 aa, Homo Sapiens
RVWNLNHLW

SEQ ID NO: 131509 - protein, 9 aa, Homo Sapiens
RVWQWDEKW

SEQ ID NO: 131510 - protein, 9 aa, Homo Sapiens
RVYPELQRF

SEQ ID NO: 131511 - protein, 9 aa, Homo Sapiens
RVYPQAVYF

SEQ ID NO: 131512 - protein, 9 aa, Homo Sapiens
SAANIQPIF

SEQ ID NO: 131513 - protein, 9 aa, Homo Sapiens
SAAPLFFSW

SEQ ID NO: 131514 - protein, 9 aa, Homo Sapiens
SAARLLFSF

SEQ ID NO: 131515 - protein, 9 aa, Homo Sapiens
SAARLYYYW

SEQ ID NO: 131516 - protein, 9 aa, Homo Sapiens
SADKTVALW

SEQ ID NO: 131517 - protein, 9 aa, Homo Sapiens
SAFSGFPSF

SEQ ID NO: 131518 - protein, 9 aa, Homo Sapiens
SAIKENFQF

SEQ ID NO: 131519 - protein, 9 aa, Homo Sapiens
SALRAQETF

SEQ ID NO: 131520 - protein, 9 aa, Homo Sapiens
SAVKVLMKF

SEQ ID NO: 131521 - protein, 9 aa, Homo Sapiens
SAYQHPASF

SEQ ID NO: 131522 - protein, 9 aa, Homo Sapiens
SFHNIHNTF

SEQ ID NO: 131523 - protein, 9 aa, Homo Sapiens
SSFGNFDRF

SEQ ID NO: 131524 - protein, 9 aa, Homo Sapiens
SSFVNEATF

SEQ ID NO: 131525 - protein, 9 aa, Homo Sapiens
SSGPVAESW

SEQ ID NO: 131526 - protein, 9 aa, Homo Sapiens
SSHHFVETF

SEQ ID NO: 131527 - protein, 9 aa, Homo Sapiens
SSLALVTSW

SEQ ID NO: 131528 - protein, 9 aa, Homo Sapiens
SSLKTCYKY

SEQ ID NO: 131529 - protein, 9 aa, Homo Sapiens
SSLNVVTTF

SEQ ID NO: 131530 - protein, 9 aa, Homo Sapiens
SSLPTVEKW

SEQ ID NO: 131531 - protein, 9 aa, Homo Sapiens
SSLRVHERI

SEQ ID NO: 131532 - protein, 9 aa, Homo Sapiens
SSLRVPSQW

SEQ ID NO: 131533 - protein, 9 aa, Homo Sapiens
SSMTLVDKF

SEQ ID NO: 131534 - protein, 9 aa, Homo Sapiens
SSPAPRTAL

SEQ ID NO: 131535 - protein, 9 aa, Homo Sapiens
SSRPEEPFL

SEQ ID NO: 131536 - protein, 9 aa, Homo Sapiens
SSSKEHVKW

SEQ ID NO: 131537 - protein, 9 aa, Homo Sapiens
SSSSVRVEW

SEQ ID NO: 131538 - protein, 9 aa, Homo Sapiens
SSTTVIPTL

SEQ ID NO: 131539 - protein, 9 aa, Homo Sapiens
SSVRAVAVW

SEQ ID NO: 131540 - protein, 9 aa, Homo Sapiens
SSYPNTFEW

SEQ ID NO: 131541 - protein, 9 aa, Homo Sapiens
STAKCLNIW

SEQ ID NO: 131542 - protein, 9 aa, Homo Sapiens
STDKTVAVW

SEQ ID NO: 131543 - protein, 9 aa, Homo Sapiens
STFKNWPFL

SEQ ID NO: 131544 - protein, 9 aa, Homo Sapiens
STFPGFVSW

SEQ ID NO: 131545 - protein, 9 aa, Homo Sapiens
STFRLLTVF

SEQ ID NO: 131546 - protein, 9 aa, Homo Sapiens
STIETVPYW

SEQ ID NO: 131547 - protein, 9 aa, Homo Sapiens
STIKKTFNF

SEQ ID NO: 131548 - protein, 9 aa, Homo Sapiens
STIRLLTSL

SEQ ID NO: 131549 - protein, 9 aa, Homo Sapiens
STKTGEPLM

SEQ ID NO: 131550 - protein, 9 aa, Homo Sapiens
STLHLVLRL

SEQ ID NO: 131551 - protein, 9 aa, Homo Sapiens
STLPVSCAW

SEQ ID NO: 131552 - protein, 9 aa, Homo Sapiens
STLREQVSL

SEQ ID NO: 131553 - protein, 9 aa, Homo Sapiens
STLRFLCKL

SEQ ID NO: 131554 - protein, 9 aa, Homo Sapiens
STLRTLPTL

SEQ ID NO: 131555 - protein, 9 aa, Homo Sapiens
STLRVLYNL

SEQ ID NO: 131556 - protein, 9 aa, Homo Sapiens
STRLEKEKW

SEQ ID NO: 131557 - protein, 9 aa, Homo Sapiens
STRPEVASI

SEQ ID NO: 131558 - protein, 9 aa, Homo Sapiens
STTRVKPFI

SEQ ID NO: 131559 - protein, 9 aa, Homo Sapiens
STVKVLIRL

SEQ ID NO: 131560 - protein, 9 aa, Homo Sapiens
STYDGVFIW

SEQ ID NO: 131561 - protein, 9 aa, Homo Sapiens
STYKFFEVI

SEQ ID NO: 131562 - protein, 9 aa, Homo Sapiens
STYVIRDEW

SEQ ID NO: 131563 - protein, 9 aa, Homo Sapiens
SVAALRFEW

SEQ ID NO: 131564 - protein, 9 aa, Homo Sapiens
SVMRCIAVF

SEQ ID NO: 131565 - protein, 9 aa, Homo Sapiens
SVTEIQEKW

SEQ ID NO: 131566 - protein, 9 aa, Homo Sapiens
TAAVLNAVW

SEQ ID NO: 131567 - protein, 9 aa, Homo Sapiens
TALSNLITW

SEQ ID NO: 131568 - protein, 9 aa, Homo Sapiens
TAMTVQILL

SEQ ID NO: 131569 - protein, 9 aa, Homo Sapiens
TANKYQVFF

SEQ ID NO: 131570 - protein, 9 aa, Homo Sapiens
TITKGPSKL

SEQ ID NO: 131571 - protein, 9 aa, Homo Sapiens
TSCTSNYHF

SEQ ID NO: 131572 - protein, 9 aa, Homo Sapiens
TSFKHFIFF

SEQ ID NO: 131573 - protein, 9 aa, Homo Sapiens
TSHSVGTVF

SEQ ID NO: 131574 - protein, 9 aa, Homo Sapiens
TSLPDTDTW

SEQ ID NO: 131575 - protein, 9 aa, Homo Sapiens
TSLQLQHLF

SEQ ID NO: 131576 - protein, 9 aa, Homo Sapiens
TSLTIKSVF

SEQ ID NO: 131577 - protein, 9 aa, Homo Sapiens
TSLVEKHTL

SEQ ID NO: 131578 - protein, 9 aa, Homo Sapiens
TSRKALETL

SEQ ID NO: 131579 - protein, 9 aa, Homo Sapiens
TSVMLKDRW

SEQ ID NO: 131580 - protein, 9 aa, Homo Sapiens
TSVPLPVTW

SEQ ID NO: 131581 - protein, 9 aa, Homo Sapiens
TSYLGKEHW

SEQ ID NO: 131582 - protein, 9 aa, Homo Sapiens
TTAQVLIRF

SEQ ID NO: 131583 - protein, 9 aa, Homo Sapiens
TTARVTTAF

SEQ ID NO: 131584 - protein, 9 aa, Homo Sapiens
TTHNIPQTF

SEQ ID NO: 131585 - protein, 9 aa, Homo Sapiens
TTIKCMQTI

SEQ ID NO: 131586 - protein, 9 aa, Homo Sapiens
TTKDVEPLL

SEQ ID NO: 131587 - protein, 9 aa, Homo Sapiens
TTKTDDPQL

SEQ ID NO: 131588 - protein, 9 aa, Homo Sapiens
TTLKHSNVW

SEQ ID NO: 131589 - protein, 9 aa, Homo Sapiens
TTLVDNNTW

SEQ ID NO: 131590 - protein, 9 aa, Homo Sapiens
TTTVMNPKF

SEQ ID NO: 131591 - protein, 9 aa, Homo Sapiens
TTYKHQNKL

SEQ ID NO: 131592 - protein, 9 aa, Homo Sapiens
TVAQITQRF

SEQ ID NO: 131593 - protein, 9 aa, Homo Sapiens
TVLTTHHHW

SEQ ID NO: 131594 - protein, 9 aa, Homo Sapiens
TVYDKPASF

SEQ ID NO: 131595 - protein, 9 aa, Homo Sapiens
TVYPKPEEW

SEQ ID NO: 131596 - protein, 9 aa, Homo Sapiens
VAFHFNPRF

SEQ ID NO: 131597 - protein, 9 aa, Homo Sapiens
VALQDHFKW

SEQ ID NO: 131598 - protein, 9 aa, Homo Sapiens
VARKSEEHW

SEQ ID NO: 131599 - protein, 9 aa, Homo Sapiens
VIWPNPVIW

SEQ ID NO: 131600 - protein, 9 aa, Homo Sapiens
VSADLNNKF

SEQ ID NO: 131601 - protein, 9 aa, Homo Sapiens
VSAGIQTSF

SEQ ID NO: 131602 - protein, 9 aa, Homo Sapiens
VSAPSSETF

SEQ ID NO: 131603 - protein, 9 aa, Homo Sapiens
VSCRLVVLL

SEQ ID NO: 131604 - protein, 9 aa, Homo Sapiens
VSDKNHMHF

SEQ ID NO: 131605 - protein, 9 aa, Homo Sapiens
VSEHQPTTW

SEQ ID NO: 131606 - protein, 9 aa, Homo Sapiens
VSFAEKNGW

SEQ ID NO: 131607 - protein, 9 aa, Homo Sapiens
VSFQHPHKY

SEQ ID NO: 131608 - protein, 9 aa, Homo Sapiens
VSFYNQNKW

SEQ ID NO: 131609 - protein, 9 aa, Homo Sapiens
VSIRDILSW

SEQ ID NO: 131610 - protein, 9 aa, Homo Sapiens
VSKEEPVTF

SEQ ID NO: 131611 - protein, 9 aa, Homo Sapiens
VSKPDLITF

SEQ ID NO: 131612 - protein, 9 aa, Homo Sapiens
VSKPDLITW

SEQ ID NO: 131613 - protein, 9 aa, Homo Sapiens
VSKRIEPSV

SEQ ID NO: 131614 - protein, 9 aa, Homo Sapiens
VSLKVGETI

SEQ ID NO: 131615 - protein, 9 aa, Homo Sapiens
VSLPSHLNI

SEQ ID NO: 131616 - protein, 9 aa, Homo Sapiens
VSLTLTNKF

SEQ ID NO: 131617 - protein, 9 aa, Homo Sapiens
VSNRCITTF

SEQ ID NO: 131618 - protein, 9 aa, Homo Sapiens
VSPKTLLTF

SEQ ID NO: 131619 - protein, 9 aa, Homo Sapiens
VSPRINLTW

SEQ ID NO: 131620 - protein, 9 aa, Homo Sapiens
VSRPENEQL

SEQ ID NO: 131621 - protein, 9 aa, Homo Sapiens
VSSDVQSVF

SEQ ID NO: 131622 - protein, 9 aa, Homo Sapiens
VSTVLTSKY

SEQ ID NO: 131623 - protein, 9 aa, Homo Sapiens
VSVKLLTSF

SEQ ID NO: 131624 - protein, 9 aa, Homo Sapiens
VSYISKEHF

SEQ ID NO: 131625 - protein, 9 aa, Homo Sapiens
VSYKNPSLM

SEQ ID NO: 131626 - protein, 9 aa, Homo Sapiens
VSYPGKNKI

SEQ ID NO: 131627 - protein, 9 aa, Homo Sapiens
VTAHLAAKW

SEQ ID NO: 131628 - protein, 9 aa, Homo Sapiens
VTCETKELF

SEQ ID NO: 131629 - protein, 9 aa, Homo Sapiens
VTCPVAKEI

SEQ ID NO: 131630 - protein, 9 aa, Homo Sapiens
VTDIHQLSF

SEQ ID NO: 131631 - protein, 9 aa, Homo Sapiens
VTDNAVYHW

SEQ ID NO: 131632 - protein, 9 aa, Homo Sapiens
VTFLLPAGW

SEQ ID NO: 131633 - protein, 9 aa, Homo Sapiens
VTFPECVRW

SEQ ID NO: 131634 - protein, 9 aa, Homo Sapiens
VTHSVRIGF

SEQ ID NO: 131635 - protein, 9 aa, Homo Sapiens
VTIKKALTL

SEQ ID NO: 131636 - protein, 9 aa, Homo Sapiens
VTIRLLETI

SEQ ID NO: 131637 - protein, 9 aa, Homo Sapiens
VTKKTYEIW

SEQ ID NO: 131638 - protein, 9 aa, Homo Sapiens
VTKSVDFHF

SEQ ID NO: 131639 - protein, 9 aa, Homo Sapiens
VTLEFAQKW

SEQ ID NO: 131640 - protein, 9 aa, Homo Sapiens
VTLPEAIHF

SEQ ID NO: 131641 - protein, 9 aa, Homo Sapiens
VTNKSVSVW

SEQ ID NO: 131642 - protein, 9 aa, Homo Sapiens
VTNPHSSQW

SEQ ID NO: 131643 - protein, 9 aa, Homo Sapiens
VTNPHTDAW

SEQ ID NO: 131644 - protein, 9 aa, Homo Sapiens
VTNPYQATI

SEQ ID NO: 131645 - protein, 9 aa, Homo Sapiens
VTPKSPYTF

SEQ ID NO: 131646 - protein, 9 aa, Homo Sapiens
VTQRLNSQW

SEQ ID NO: 131647 - protein, 9 aa, Homo Sapiens
VTRDIVENW

SEQ ID NO: 131648 - protein, 9 aa, Homo Sapiens
VTRHEHEAW

SEQ ID NO: 131649 - protein, 9 aa, Homo Sapiens
VTRPEPQAL

SEQ ID NO: 131650 - protein, 9 aa, Homo Sapiens
VTSHFQVTL

SEQ ID NO: 131651 - protein, 9 aa, Homo Sapiens
VTSPLTVEW

SEQ ID NO: 131652 - protein, 9 aa, Homo Sapiens
VTSTILQTI

SEQ ID NO: 131653 - protein, 9 aa, Homo Sapiens
VTTVVNPKY

SEQ ID NO: 131654 - protein, 9 aa, Homo Sapiens
VTVAVVDTF

SEQ ID NO: 131655 - protein, 9 aa, Homo Sapiens
VTVKDMYLF

SEQ ID NO: 131656 - protein, 9 aa, Homo Sapiens
VTWELKCTF

SEQ ID NO: 131657 - protein, 9 aa, Homo Sapiens
VTYKNVPNW

SEQ ID NO: 131658 - protein, 9 aa, Homo Sapiens
VTYPGELLL

SEQ ID NO: 131659 - protein, 9 aa, Homo Sapiens
VTYVPVTTF

SEQ ID NO: 131660 - protein, 9 aa, Homo Sapiens
VVMPIAHEF

SEQ ID NO: 131661 - protein, 9 aa, Homo Sapiens
VVVPQAPEF

SEQ ID NO: 131662 - protein, 9 aa, Homo Sapiens
YAYDGKDYI

SEQ ID NO: 131663 - protein, 9 aa, Homo Sapiens
YSIPLRENW

SEQ ID NO: 131664 - protein, 9 aa, Homo Sapiens
YSIRGQLSW

SEQ ID NO: 131665 - protein, 9 aa, Homo Sapiens
YSLKKRHFF

SEQ ID NO: 131666 - protein, 9 aa, Homo Sapiens
YSLPNAPTL

SEQ ID NO: 131667 - protein, 9 aa, Homo Sapiens
YSLQHKLLL

SEQ ID NO: 131668 - protein, 9 aa, Homo Sapiens
YSMENANKW

SEQ ID NO: 131669 - protein, 9 aa, Homo Sapiens
YSPKIEVHF

SEQ ID NO: 131670 - protein, 9 aa, Homo Sapiens
YSPRAIHSW

SEQ ID NO: 131671 - protein, 9 aa, Homo Sapiens
YSQKAQNSW

SEQ ID NO: 131672 - protein, 9 aa, Homo Sapiens
YSRNEPLTF

SEQ ID NO: 131673 - protein, 9 aa, Homo Sapiens
YSVRVSPQM

SEQ ID NO: 131674 - protein, 9 aa, Homo Sapiens
YTCPFVEKF

SEQ ID NO: 131675 - protein, 9 aa, Homo Sapiens
YTHEVVTLW

SEQ ID NO: 131676 - protein, 9 aa, Homo Sapiens
YTHQVVTRW

SEQ ID NO: 131677 - protein, 9 aa, Homo Sapiens
YTLRILRQL

SEQ ID NO: 131678 - protein, 9 aa, Homo Sapiens
YTNKVITLW

SEQ ID NO: 131679 - protein, 9 aa, Homo Sapiens
YTNKYSSQF

SEQ ID NO: 131680 - protein, 9 aa, Homo Sapiens
YTNRVVTLW

SEQ ID NO: 131681 - protein, 9 aa, Homo Sapiens
YTSRIVVRL

SEQ ID NO: 131682 - protein, 9 aa, Homo Sapiens
YTTKIKPRL

SEQ ID NO: 131683 - protein, 9 aa, Homo Sapiens
YTVRVIDVF

SEQ ID NO: 131684 - protein, 9 aa, Homo Sapiens
YTYKKQVKI

SEQ ID NO: 131685 - protein, 9 aa, Homo Sapiens
YTYRGPKAF

SEQ ID NO: 131686 - protein, 10 aa, Homo Sapiens
AAAAAAAAAW

SEQ ID NO: 131687 - protein, 10 aa, Homo Sapiens
AAALPAAALW

SEQ ID NO: 131688 - protein, 10 aa, Homo Sapiens
AAGHAELAWT

SEQ ID NO: 131689 - protein, 10 aa, Homo Sapiens
AALPDQSFLW

SEQ ID NO: 131690 - protein, 10 aa, Homo Sapiens
AHSNLNGVWH

SEQ ID NO: 131691 - protein, 10 aa, Homo Sapiens
ASCGVNLYQF

SEQ ID NO: 131692 - protein, 10 aa, Homo Sapiens
ASFNDNIIKW

SEQ ID NO: 131693 - protein, 10 aa, Homo Sapiens
ASLNLPAVSW

SEQ ID NO: 131694 - protein, 10 aa, Homo Sapiens
ASRIIRNEQF

SEQ ID NO: 131695 - protein, 10 aa, Homo Sapiens
ASSRQIISHW

SEQ ID NO: 131696 - protein, 10 aa, Homo Sapiens
ASYQDRRQSW

SEQ ID NO: 131697 - protein, 10 aa, Homo Sapiens
ATAKAVAVTL

SEQ ID NO: 131698 - protein, 10 aa, Homo Sapiens
ATCHVVSDSW

SEQ ID NO: 131699 - protein, 10 aa, Homo Sapiens
ATCKDLVMFI

SEQ ID NO: 131700 - protein, 10 aa, Homo Sapiens
ATKVGKDELF

SEQ ID NO: 131701 - protein, 10 aa, Homo Sapiens
ATLAAVLQRI

SEQ ID NO: 131702 - protein, 10 aa, Homo Sapiens
ATLKDRELSF

SEQ ID NO: 131703 - protein, 10 aa, Homo Sapiens
ATLKIRNSNF

SEQ ID NO: 131704 - protein, 10 aa, Homo Sapiens
ATLTIQGIRF

SEQ ID NO: 131705 - protein, 10 aa, Homo Sapiens
ATRDELPYTF

SEQ ID NO: 131706 - protein, 10 aa, Homo Sapiens
AVNPRDPPSW

SEQ ID NO: 131707 - protein, 10 aa, Homo Sapiens
AVSEAVRQLW

SEQ ID NO: 131708 - protein, 10 aa, Homo Sapiens
EEFAKLIQTI

SEQ ID NO: 131709 - protein, 10 aa, Homo Sapiens
FSAAEARQKF

SEQ ID NO: 131710 - protein, 10 aa, Homo Sapiens
FSLQAPAPLM

SEQ ID NO: 131711 - protein, 10 aa, Homo Sapiens
FTLRDEGKTI

SEQ ID NO: 131712 - protein, 10 aa, Homo Sapiens
FTLRDMYEQF

SEQ ID NO: 131713 - protein, 10 aa, Homo Sapiens
FTLREVQERW

SEQ ID NO: 131714 - protein, 10 aa, Homo Sapiens
GALPNLRELW

SEQ ID NO: 131715 - protein, 10 aa, Homo Sapiens
GALRVLNSYW

SEQ ID NO: 131716 - protein, 10 aa, Homo Sapiens
GLIALAVLAC

SEQ ID NO: 131717 - protein, 10 aa, Homo Sapiens
GPPPPPGKPQ

SEQ ID NO: 131718 - protein, 10 aa, Homo Sapiens
GTCVAVNNKY

SEQ ID NO: 131719 - protein, 10 aa, Homo Sapiens
GTWLPSRAEW

SEQ ID NO: 131720 - protein, 10 aa, Homo Sapiens
GTYENLIHVW

SEQ ID NO: 131721 - protein, 10 aa, Homo Sapiens
GTYYIKEQKL

SEQ ID NO: 131722 - protein, 10 aa, Homo Sapiens
HACALAASLW

SEQ ID NO: 131723 - protein, 10 aa, Homo Sapiens
HAFDGFEVNW

SEQ ID NO: 131724 - protein, 10 aa, Homo Sapiens
HSAAVNGLSF

SEQ ID NO: 131725 - protein, 10 aa, Homo Sapiens
HSAVVEDVAW

SEQ ID NO: 131726 - protein, 10 aa, Homo Sapiens
HSCEVKGIEW

SEQ ID NO: 131727 - protein, 10 aa, Homo Sapiens
HSGPGLLQLW

SEQ ID NO: 131728 - protein, 10 aa, Homo Sapiens
HSGPVVAMVW

SEQ ID NO: 131729 - protein, 10 aa, Homo Sapiens
HSLDQSIISF

SEQ ID NO: 131730 - protein, 10 aa, Homo Sapiens
HSMDPPTFTF

SEQ ID NO: 131731 - protein, 10 aa, Homo Sapiens
HSMLDINALF

SEQ ID NO: 131732 - protein, 10 aa, Homo Sapiens
HSMSDPGVSY

SEQ ID NO: 131733 - protein, 10 aa, Homo Sapiens
HSNPGDPALW

SEQ ID NO: 131734 - protein, 10 aa, Homo Sapiens
HSQEVTSVCW

SEQ ID NO: 131735 - protein, 10 aa, Homo Sapiens
HSSGVTGVTF

SEQ ID NO: 131736 - protein, 10 aa, Homo Sapiens
HSSHVTNVSF

SEQ ID NO: 131737 - protein, 10 aa, Homo Sapiens
HSYRGHLWLF

SEQ ID NO: 131738 - protein, 10 aa, Homo Sapiens
HTADVQLHAW

SEQ ID NO: 131739 - protein, 10 aa, Homo Sapiens
HTAEVNCLSF

SEQ ID NO: 131740 - protein, 10 aa, Homo Sapiens
HTAKISDFSW

SEQ ID NO: 131741 - protein, 10 aa, Homo Sapiens
HTAPVLDIAW

SEQ ID NO: 131742 - protein, 10 aa, Homo Sapiens
HTATVIANSF

SEQ ID NO: 131743 - protein, 10 aa, Homo Sapiens
HTAVVEDVSW

SEQ ID NO: 131744 - protein, 10 aa, Homo Sapiens
HTFTFSHATF

SEQ ID NO: 131745 - protein, 10 aa, Homo Sapiens
HTGPVLDVCW

SEQ ID NO: 131746 - protein, 10 aa, Homo Sapiens
HTIGCNAVSW

SEQ ID NO: 131747 - protein, 10 aa, Homo Sapiens
HTLDDRTQLW

SEQ ID NO: 131748 - protein, 10 aa, Homo Sapiens
HTLGDAHIYL

SEQ ID NO: 131749 - protein, 10 aa, Homo Sapiens
HTSREVLIIF

SEQ ID NO: 131750 - protein, 10 aa, Homo Sapiens
HTVAIDNQIF

SEQ ID NO: 131751 - protein, 10 aa, Homo Sapiens
HTVYNIITNF

SEQ ID NO: 131752 - protein, 10 aa, Homo Sapiens
ILYPHEAPSW

SEQ ID NO: 131753 - protein, 10 aa, Homo Sapiens
INSTVRLYEW

SEQ ID NO: 131754 - protein, 10 aa, Homo Sapiens
ISAIPANIHI

SEQ ID NO: 131755 - protein, 10 aa, Homo Sapiens
ISAKDLKNML

SEQ ID NO: 131756 - protein, 10 aa, Homo Sapiens
ISAPDSQVRF

SEQ ID NO: 131757 - protein, 10 aa, Homo Sapiens
ISASSLTSKW

SEQ ID NO: 131758 - protein, 10 aa, Homo Sapiens
ISATEVDSRW

SEQ ID NO: 131759 - protein, 10 aa, Homo Sapiens
ISCDTGIILL

SEQ ID NO: 131760 - protein, 10 aa, Homo Sapiens
ISCRIINTFL

SEQ ID NO: 131761 - protein, 10 aa, Homo Sapiens
ISFHNIHNTF

SEQ ID NO: 131762 - protein, 10 aa, Homo Sapiens
ISISVDGLKF

SEQ ID NO: 131763 - protein, 10 aa, Homo Sapiens
ISKKEIGRCF

SEQ ID NO: 131764 - protein, 10 aa, Homo Sapiens
ISKKPESTSF

SEQ ID NO: 131765 - protein, 10 aa, Homo Sapiens
ISKMIINEEL

SEQ ID NO: 131766 - protein, 10 aa, Homo Sapiens
ISKPGQFETF

SEQ ID NO: 131767 - protein, 10 aa, Homo Sapiens
ISKQDAQELF

SEQ ID NO: 131768 - protein, 10 aa, Homo Sapiens
ISLADIAQKL

SEQ ID NO: 131769 - protein, 10 aa, Homo Sapiens
ISLIPPEERW

SEQ ID NO: 131770 - protein, 10 aa, Homo Sapiens
ISLLAQNTSW

SEQ ID NO: 131771 - protein, 10 aa, Homo Sapiens
ISLLNEPNTF

SEQ ID NO: 131772 - protein, 10 aa, Homo Sapiens
ISLPGIRNEF

SEQ ID NO: 131773 - protein, 10 aa, Homo Sapiens
ISLPNGLQGF

SEQ ID NO: 131774 - protein, 10 aa, Homo Sapiens
ISLRQPPMAF

SEQ ID NO: 131775 - protein, 10 aa, Homo Sapiens
ISMPDFDLHL

SEQ ID NO: 131776 - protein, 10 aa, Homo Sapiens
ISMPDVDLHL

SEQ ID NO: 131777 - protein, 10 aa, Homo Sapiens
ISNLVDAIYK

SEQ ID NO: 131778 - protein, 10 aa, Homo Sapiens
ISPRGAGWLF

SEQ ID NO: 131779 - protein, 10 aa, Homo Sapiens
ISPRGAGYTF

SEQ ID NO: 131780 - protein, 10 aa, Homo Sapiens
ISQPASGNTF

SEQ ID NO: 131781 - protein, 10 aa, Homo Sapiens
ISQSAVKTKF

SEQ ID NO: 131782 - protein, 10 aa, Homo Sapiens
ISSIKGAEEW

SEQ ID NO: 131783 - protein, 10 aa, Homo Sapiens
ISSSDLVSKW

SEQ ID NO: 131784 - protein, 10 aa, Homo Sapiens
ISSTAFDIRF

SEQ ID NO: 131785 - protein, 10 aa, Homo Sapiens
ISVPGLQTNW

SEQ ID NO: 131786 - protein, 10 aa, Homo Sapiens
ISVQVNSIKF

SEQ ID NO: 131787 - protein, 10 aa, Homo Sapiens
ISWTGDGWEF

SEQ ID NO: 131788 - protein, 10 aa, Homo Sapiens
ITAENVAKKW

SEQ ID NO: 131789 - protein, 10 aa, Homo Sapiens
ITFPNKEIAW

SEQ ID NO: 131790 - protein, 10 aa, Homo Sapiens
ITFQPDLSKF

SEQ ID NO: 131791 - protein, 10 aa, Homo Sapiens
ITKADAAEFW

SEQ ID NO: 131792 - protein, 10 aa, Homo Sapiens
ITLIVDGHHF

SEQ ID NO: 131793 - protein, 10 aa, Homo Sapiens
ITLIVENVHF

SEQ ID NO: 131794 - protein, 10 aa, Homo Sapiens
ITLRQTITTF

SEQ ID NO: 131795 - protein, 10 aa, Homo Sapiens
ITVDGKPPTW

SEQ ID NO: 131796 - protein, 10 aa, Homo Sapiens
IVYPGIAVFF

SEQ ID NO: 131797 - protein, 10 aa, Homo Sapiens
KAAEVFFETF

SEQ ID NO: 131798 - protein, 10 aa, Homo Sapiens
KAATIGQIGW

SEQ ID NO: 131799 - protein, 10 aa, Homo Sapiens
KAGPIWDLRL

SEQ ID NO: 131800 - protein, 10 aa, Homo Sapiens
KAHGVKNLVF

SEQ ID NO: 131801 - protein, 10 aa, Homo Sapiens
KAIADRGWRF

SEQ ID NO: 131802 - protein, 10 aa, Homo Sapiens
KAIDLSRNQF

SEQ ID NO: 131803 - protein, 10 aa, Homo Sapiens
KAIPDTRLTI

SEQ ID NO: 131804 - protein, 10 aa, Homo Sapiens
KAIPSFLNSF

SEQ ID NO: 131805 - protein, 10 aa, Homo Sapiens
KAKEFVADIF

SEQ ID NO: 131806 - protein, 10 aa, Homo Sapiens
KAKMTDFDRF

SEQ ID NO: 131807 - protein, 10 aa, Homo Sapiens
KALADVEVTY

SEQ ID NO: 131808 - protein, 10 aa, Homo Sapiens
KALDVMVSTF

SEQ ID NO: 131809 - protein, 10 aa, Homo Sapiens
KALEDARINL

SEQ ID NO: 131810 - protein, 10 aa, Homo Sapiens
KALEGIISNF

SEQ ID NO: 131811 - protein, 10 aa, Homo Sapiens
KALELDSNLY

SEQ ID NO: 131812 - protein, 10 aa, Homo Sapiens
KALKDIKVGF

SEQ ID NO: 131813 - protein, 10 aa, Homo Sapiens
KALKDYKSSF

SEQ ID NO: 131814 - protein, 10 aa, Homo Sapiens
KALPALPISI

SEQ ID NO: 131815 - protein, 10 aa, Homo Sapiens
KALQDVQIRF

SEQ ID NO: 131816 - protein, 10 aa, Homo Sapiens
KAMEDGGVKL

SEQ ID NO: 131817 - protein, 10 aa, Homo Sapiens
KAPLHLDVTW

SEQ ID NO: 131818 - protein, 10 aa, Homo Sapiens
KARLTEGCSF

SEQ ID NO: 131819 - protein, 10 aa, Homo Sapiens
KARVETQNHW

SEQ ID NO: 131820 - protein, 10 aa, Homo Sapiens
KAVDIVKQVW

SEQ ID NO: 131821 - protein, 10 aa, Homo Sapiens
KAVEAAHTFF

SEQ ID NO: 131822 - protein, 10 aa, Homo Sapiens
KAVEDIHGLF

SEQ ID NO: 131823 - protein, 10 aa, Homo Sapiens
KAVIDLNNRW

SEQ ID NO: 131824 - protein, 10 aa, Homo Sapiens
KAWAEYVVEW

SEQ ID NO: 131825 - protein, 10 aa, Homo Sapiens
KAYGPKVDIW

SEQ ID NO: 131826 - protein, 10 aa, Homo Sapiens
KGFSEEHNTW

SEQ ID NO: 131827 - protein, 10 aa, Homo Sapiens
KGFTDADNTW

SEQ ID NO: 131828 - protein, 10 aa, Homo Sapiens
KGWDGYDVQW

SEQ ID NO: 131829 - protein, 10 aa, Homo Sapiens
KIIEDLGVHF

SEQ ID NO: 131830 - protein, 10 aa, Homo Sapiens
KLIDVTNIYW

SEQ ID NO: 131831 - protein, 10 aa, Homo Sapiens
KLKKPEAVRW

SEQ ID NO: 131832 - protein, 10 aa, Homo Sapiens
KLLPVLVHTF

SEQ ID NO: 131833 - protein, 10 aa, Homo Sapiens
KSAEAVGVKI

SEQ ID NO: 131834 - protein, 10 aa, Homo Sapiens
KSAEKEISLW

SEQ ID NO: 131835 - protein, 10 aa, Homo Sapiens
KSAEQLRIEL

SEQ ID NO: 131836 - protein, 10 aa, Homo Sapiens
KSAPDQEVRI

SEQ ID NO: 131837 - protein, 10 aa, Homo Sapiens
KSARVKGLSF

SEQ ID NO: 131838 - protein, 10 aa, Homo Sapiens
KSATDTSAKW

SEQ ID NO: 131839 - protein, 10 aa, Homo Sapiens
KSAVELVQEF

SEQ ID NO: 131840 - protein, 10 aa, Homo Sapiens
KSAWQTLNEF

SEQ ID NO: 131841 - protein, 10 aa, Homo Sapiens
KSCSKLFQRW

SEQ ID NO: 131842 - protein, 10 aa, Homo Sapiens
KSFEKAKESW

SEQ ID NO: 131843 - protein, 10 aa, Homo Sapiens
KSFKDNYNTL

SEQ ID NO: 131844 - protein, 10 aa, Homo Sapiens
KSFKLSGFSF

SEQ ID NO: 131845 - protein, 10 aa, Homo Sapiens
KSFLPVVSTF

SEQ ID NO: 131846 - protein, 10 aa, Homo Sapiens
KSFLSQGQVL

SEQ ID NO: 131847 - protein, 10 aa, Homo Sapiens
KSFPGGKEYL

SEQ ID NO: 131848 - protein, 10 aa, Homo Sapiens
KSFQKIQVRL

SEQ ID NO: 131849 - protein, 10 aa, Homo Sapiens
KSFSQSSTLF

SEQ ID NO: 131850 - protein, 10 aa, Homo Sapiens
KSFSTVTNTF

SEQ ID NO: 131851 - protein, 10 aa, Homo Sapiens
KSFTQIQATF

SEQ ID NO: 131852 - protein, 10 aa, Homo Sapiens
KSFYGSTLFL

SEQ ID NO: 131853 - protein, 10 aa, Homo Sapiens
KSGPVVSLGW

SEQ ID NO: 131854 - protein, 10 aa, Homo Sapiens
KSHDDIVTEF

SEQ ID NO: 131855 - protein, 10 aa, Homo Sapiens
KSIDEMNNAW

SEQ ID NO: 131856 - protein, 10 aa, Homo Sapiens
KSIEFLSSKW

SEQ ID NO: 131857 - protein, 10 aa, Homo Sapiens
KSIGDIFLKY

SEQ ID NO: 131858 - protein, 10 aa, Homo Sapiens
KSIHLSINFF

SEQ ID NO: 131859 - protein, 10 aa, Homo Sapiens
KSINEFWNKF

SEQ ID NO: 131860 - protein, 10 aa, Homo Sapiens
KSINSEVLKF

SEQ ID NO: 131861 - protein, 10 aa, Homo Sapiens
KSITEINANF

SEQ ID NO: 131862 - protein, 10 aa, Homo Sapiens
KSITIIGGGF

SEQ ID NO: 131863 - protein, 10 aa, Homo Sapiens
KSKGNYDEGF

SEQ ID NO: 131864 - protein, 10 aa, Homo Sapiens
KSKGSQTEEW

SEQ ID NO: 131865 - protein, 10 aa, Homo Sapiens
KSKINVNEIF

SEQ ID NO: 131866 - protein, 10 aa, Homo Sapiens
KSLALLGQTF

SEQ ID NO: 131867 - protein, 10 aa, Homo Sapiens
KSLDHQGINF

SEQ ID NO: 131868 - protein, 10 aa, Homo Sapiens
KSLDLLTMKN

SEQ ID NO: 131869 - protein, 10 aa, Homo Sapiens
KSLDQAISRF

SEQ ID NO: 131870 - protein, 10 aa, Homo Sapiens
KSLDQIFETL

SEQ ID NO: 131871 - protein, 10 aa, Homo Sapiens
KSLEDKSLEF

SEQ ID NO: 131872 - protein, 10 aa, Homo Sapiens
KSLEDLKATL

SEQ ID NO: 131873 - protein, 10 aa, Homo Sapiens
KSLEKVLVEF

SEQ ID NO: 131874 - protein, 10 aa, Homo Sapiens
KSLELAIGRF

SEQ ID NO: 131875 - protein, 10 aa, Homo Sapiens
KSLEVSDTRF

SEQ ID NO: 131876 - protein, 10 aa, Homo Sapiens
KSLGLLTTKF

SEQ ID NO: 131877 - protein, 10 aa, Homo Sapiens
KSLGSSDLKF

SEQ ID NO: 131878 - protein, 10 aa, Homo Sapiens
KSLIIVHPSW

SEQ ID NO: 131879 - protein, 10 aa, Homo Sapiens
KSLKDPSNNF

SEQ ID NO: 131880 - protein, 10 aa, Homo Sapiens
KSLLGKDVLF

SEQ ID NO: 131881 - protein, 10 aa, Homo Sapiens
KSLPAEINRM

SEQ ID NO: 131882 - protein, 10 aa, Homo Sapiens
KSLRFIDVEF

SEQ ID NO: 131883 - protein, 10 aa, Homo Sapiens
KSMYGVYNTF

SEQ ID NO: 131884 - protein, 10 aa, Homo Sapiens
KSNDISIHHF

SEQ ID NO: 131885 - protein, 10 aa, Homo Sapiens
KSPPASPESW

SEQ ID NO: 131886 - protein, 10 aa, Homo Sapiens
KSPPVLSHEF

SEQ ID NO: 131887 - protein, 10 aa, Homo Sapiens
KSQPEPSPVL

SEQ ID NO: 131888 - protein, 10 aa, Homo Sapiens
KSSDGPIQRF

SEQ ID NO: 131889 - protein, 10 aa, Homo Sapiens
KSSGQMAQKF

SEQ ID NO: 131890 - protein, 10 aa, Homo Sapiens
KSSIAGSSTW

SEQ ID NO: 131891 - protein, 10 aa, Homo Sapiens
KSSTAPSRNF

SEQ ID NO: 131892 - protein, 10 aa, Homo Sapiens
KSTALQTWLF

SEQ ID NO: 131893 - protein, 10 aa, Homo Sapiens
KSTDYMNLHF

SEQ ID NO: 131894 - protein, 10 aa, Homo Sapiens
KSTEILLRKL

SEQ ID NO: 131895 - protein, 10 aa, Homo Sapiens
KSTGELVVQW

SEQ ID NO: 131896 - protein, 10 aa, Homo Sapiens
KSTPYTAVRW

SEQ ID NO: 131897 - protein, 10 aa, Homo Sapiens
KSVAVKTTRF

SEQ ID NO: 131898 - protein, 10 aa, Homo Sapiens
KSVDDHIVRF

SEQ ID NO: 131899 - protein, 10 aa, Homo Sapiens
KSVELEDVKF

SEQ ID NO: 131900 - protein, 10 aa, Homo Sapiens
KSVENLGVSY

SEQ ID NO: 131901 - protein, 10 aa, Homo Sapiens
KSVIDYQTHF

SEQ ID NO: 131902 - protein, 10 aa, Homo Sapiens
KSVKTGSVFW

SEQ ID NO: 131903 - protein, 10 aa, Homo Sapiens
KSVSFSDVFF

SEQ ID NO: 131904 - protein, 10 aa, Homo Sapiens
KSWLKGLVTF

SEQ ID NO: 131905 - protein, 10 aa, Homo Sapiens
KSWQGVTIYF

SEQ ID NO: 131906 - protein, 10 aa, Homo Sapiens
KSYLEREDFF

SEQ ID NO: 131907 - protein, 10 aa, Homo Sapiens
KSYRIIYNLF

SEQ ID NO: 131908 - protein, 10 aa, Homo Sapiens
KTAEDAKDFF

SEQ ID NO: 131909 - protein, 10 aa, Homo Sapiens
KTAEEIKQIW

SEQ ID NO: 131910 - protein, 10 aa, Homo Sapiens
KTAEEVAALI

SEQ ID NO: 131911 - protein, 10 aa, Homo Sapiens
KTAVETAVLL

SEQ ID NO: 131912 - protein, 10 aa, Homo Sapiens
KTAVIDHHNY

SEQ ID NO: 131913 - protein, 10 aa, Homo Sapiens
KTAYISIQQF

SEQ ID NO: 131914 - protein, 10 aa, Homo Sapiens
KTFDSSCHFF

SEQ ID NO: 131915 - protein, 10 aa, Homo Sapiens
KTFEDRMDLF

SEQ ID NO: 131916 - protein, 10 aa, Homo Sapiens
KTFGQKPVKF

SEQ ID NO: 131917 - protein, 10 aa, Homo Sapiens
KTFKDVGNLL

SEQ ID NO: 131918 - protein, 10 aa, Homo Sapiens
KTFQDGATKL

SEQ ID NO: 131919 - protein, 10 aa, Homo Sapiens
KTGADVCRLW

SEQ ID NO: 131920 - protein, 10 aa, Homo Sapiens
KTIDDLEDKL

SEQ ID NO: 131921 - protein, 10 aa, Homo Sapiens
KTIDDLEEKL

SEQ ID NO: 131922 - protein, 10 aa, Homo Sapiens
KTIDGQQTII

SEQ ID NO: 131923 - protein, 10 aa, Homo Sapiens
KTIDICHDHF

SEQ ID NO: 131924 - protein, 10 aa, Homo Sapiens
KTIEDFQQKI

SEQ ID NO: 131925 - protein, 10 aa, Homo Sapiens
KTIEDVREFL

SEQ ID NO: 131926 - protein, 10 aa, Homo Sapiens
KTIEESEETL

SEQ ID NO: 131927 - protein, 10 aa, Homo Sapiens
KTIEFGKTNF

SEQ ID NO: 131928 - protein, 10 aa, Homo Sapiens
KTIEGIYEKF

SEQ ID NO: 131929 - protein, 10 aa, Homo Sapiens
KTIGGGDDSF

SEQ ID NO: 131930 - protein, 10 aa, Homo Sapiens
KTIKAFKNRF

SEQ ID NO: 131931 - protein, 10 aa, Homo Sapiens
KTIQIPEHLM

SEQ ID NO: 131932 - protein, 10 aa, Homo Sapiens
KTKDFQESSI

SEQ ID NO: 131933 - protein, 10 aa, Homo Sapiens
KTKDGVREVF

SEQ ID NO: 131934 - protein, 10 aa, Homo Sapiens
KTKEGVREVF

SEQ ID NO: 131935 - protein, 10 aa, Homo Sapiens
KTKNAQQVHF

SEQ ID NO: 131936 - protein, 10 aa, Homo Sapiens
KTKSCSGVEF

SEQ ID NO: 131937 - protein, 10 aa, Homo Sapiens
KTKSENGLEF

SEQ ID NO: 131938 - protein, 10 aa, Homo Sapiens
KTLADLLESF

SEQ ID NO: 131939 - protein, 10 aa, Homo Sapiens
KTLAEINQKW

SEQ ID NO: 131940 - protein, 10 aa, Homo Sapiens
KTLALEIINF

SEQ ID NO: 131941 - protein, 10 aa, Homo Sapiens
KTLDFELDTF

SEQ ID NO: 131942 - protein, 10 aa, Homo Sapiens
KTLDQAIMKF

SEQ ID NO: 131943 - protein, 10 aa, Homo Sapiens
KTLDSASAHF

SEQ ID NO: 131944 - protein, 10 aa, Homo Sapiens
KTLDSWRDEF

SEQ ID NO: 131945 - protein, 10 aa, Homo Sapiens
KTLDVFNITI

SEQ ID NO: 131946 - protein, 10 aa, Homo Sapiens
KTLEECRVTL

SEQ ID NO: 131947 - protein, 10 aa, Homo Sapiens
KTLEHRGFKL

SEQ ID NO: 131948 - protein, 10 aa, Homo Sapiens
KTLEHVAVTV

SEQ ID NO: 131949 - protein, 10 aa, Homo Sapiens
KTLEKIRPVF

SEQ ID NO: 131950 - protein, 10 aa, Homo Sapiens
KTLESDCTKL

SEQ ID NO: 131951 - protein, 10 aa, Homo Sapiens
KTLESSIQGL

SEQ ID NO: 131952 - protein, 10 aa, Homo Sapiens
KTLGANAQTL

SEQ ID NO: 131953 - protein, 10 aa, Homo Sapiens
KTLGGVIFRK

SEQ ID NO: 131954 - protein, 10 aa, Homo Sapiens
KTLHDTRTHF

SEQ ID NO: 131955 - protein, 10 aa, Homo Sapiens
KTLKEIRNAF

SEQ ID NO: 131956 - protein, 10 aa, Homo Sapiens
KTLNVESNFI

SEQ ID NO: 131957 - protein, 10 aa, Homo Sapiens
KTLPADVQNY

SEQ ID NO: 131958 - protein, 10 aa, Homo Sapiens
KTLPFYKDYF

SEQ ID NO: 131959 - protein, 10 aa, Homo Sapiens
KTLQEFLERI

SEQ ID NO: 131960 - protein, 10 aa, Homo Sapiens
KTLQEVHFLL

SEQ ID NO: 131961 - protein, 10 aa, Homo Sapiens
KTLSDATTKF

SEQ ID NO: 131962 - protein, 10 aa, Homo Sapiens
KTLSDIFLLF

SEQ ID NO: 131963 - protein, 10 aa, Homo Sapiens
KTLSTFKESW

SEQ ID NO: 131964 - protein, 10 aa, Homo Sapiens
KTLTGKTITL

SEQ ID NO: 131965 - protein, 10 aa, Homo Sapiens
KTLTMDILTL

SEQ ID NO: 131966 - protein, 10 aa, Homo Sapiens
KTLVDQRFLI

SEQ ID NO: 131967 - protein, 10 aa, Homo Sapiens
KTLVLSNLSY

SEQ ID NO: 131968 - protein, 10 aa, Homo Sapiens
KTMKMRGQAF

SEQ ID NO: 131969 - protein, 10 aa, Homo Sapiens
KTNIQKEATW

SEQ ID NO: 131970 - protein, 10 aa, Homo Sapiens
KTNTFQGVIF

SEQ ID NO: 131971 - protein, 10 aa, Homo Sapiens
KTPEEIHKTF

SEQ ID NO: 131972 - protein, 10 aa, Homo Sapiens
KTPEEIRKTF

SEQ ID NO: 131973 - protein, 10 aa, Homo Sapiens
KTPEKEPPLW

SEQ ID NO: 131974 - protein, 10 aa, Homo Sapiens
KTPELNLDQF

SEQ ID NO: 131975 - protein, 10 aa, Homo Sapiens
KTPSSDVLVF

SEQ ID NO: 131976 - protein, 10 aa, Homo Sapiens
KTQEPDNLLF

SEQ ID NO: 131977 - protein, 10 aa, Homo Sapiens
KTQRDFMLSF

SEQ ID NO: 131978 - protein, 10 aa, Homo Sapiens
KTRDDWLVSW

SEQ ID NO: 131979 - protein, 10 aa, Homo Sapiens
KTRQGVEDAF

SEQ ID NO: 131980 - protein, 10 aa, Homo Sapiens
KTSDSTFLVF

SEQ ID NO: 131981 - protein, 10 aa, Homo Sapiens
KTSELLVRKW

SEQ ID NO: 131982 - protein, 10 aa, Homo Sapiens
KTSSTVNTKF

SEQ ID NO: 131983 - protein, 10 aa, Homo Sapiens
KTTAQVLIRF

SEQ ID NO: 131984 - protein, 10 aa, Homo Sapiens
KTTGIPIHVF

SEQ ID NO: 131985 - protein, 10 aa, Homo Sapiens
KTTPDVIFVF

SEQ ID NO: 131986 - protein, 10 aa, Homo Sapiens
KTVAGGAWTY

SEQ ID NO: 131987 - protein, 10 aa, Homo Sapiens
KTVEPTGKRF

SEQ ID NO: 131988 - protein, 10 aa, Homo Sapiens
KTVIDSQTHY

SEQ ID NO: 131989 - protein, 10 aa, Homo Sapiens
KTVQDLLNLM

SEQ ID NO: 131990 - protein, 10 aa, Homo Sapiens
KTVTAMDVVY

SEQ ID NO: 131991 - protein, 10 aa, Homo Sapiens
KTVTELGNQL

SEQ ID NO: 131992 - protein, 10 aa, Homo Sapiens
KTVVGGAMFF

SEQ ID NO: 131993 - protein, 10 aa, Homo Sapiens
KTYDSKRVCF

SEQ ID NO: 131994 - protein, 10 aa, Homo Sapiens
KTYEAALETI

SEQ ID NO: 131995 - protein, 10 aa, Homo Sapiens
KTYGEIFEKF

SEQ ID NO: 131996 - protein, 10 aa, Homo Sapiens
KTYQDIQNTI

SEQ ID NO: 131997 - protein, 10 aa, Homo Sapiens
KVAEAAIQIF

SEQ ID NO: 131998 - protein, 10 aa, Homo Sapiens
KVAELENSEF

SEQ ID NO: 131999 - protein, 10 aa, Homo Sapiens
KVAKEAANRW

SEQ ID NO: 132000 - protein, 10 aa, Homo Sapiens
KVARLDNIFL

SEQ ID NO: 132001 - protein, 10 aa, Homo Sapiens
KVCLSILNTW

SEQ ID NO: 132002 - protein, 10 aa, Homo Sapiens
KVFDPKVFTF

SEQ ID NO: 132003 - protein, 10 aa, Homo Sapiens
KVFESWMHHW

SEQ ID NO: 132004 - protein, 10 aa, Homo Sapiens
KVIAINDLNW

SEQ ID NO: 132005 - protein, 10 aa, Homo Sapiens
KVKPEELESF

SEQ ID NO: 132006 - protein, 10 aa, Homo Sapiens
KVLEEHGEWW

SEQ ID NO: 132007 - protein, 10 aa, Homo Sapiens
KVLIDIREYW

SEQ ID NO: 132008 - protein, 10 aa, Homo Sapiens
KVLPGHFNTF

SEQ ID NO: 132009 - protein, 10 aa, Homo Sapiens
KVLPPLEQVW

SEQ ID NO: 132010 - protein, 10 aa, Homo Sapiens
KVMPLIIQGF

SEQ ID NO: 132011 - protein, 10 aa, Homo Sapiens
LAADLSLHSF

SEQ ID NO: 132012 - protein, 10 aa, Homo Sapiens
LALFNPDVCW

SEQ ID NO: 132013 - protein, 10 aa, Homo Sapiens
LALSPVPSHW

SEQ ID NO: 132014 - protein, 10 aa, Homo Sapiens
LLFPGKAFSW

SEQ ID NO: 132015 - protein, 10 aa, Homo Sapiens
LSAEAIRQRL

SEQ ID NO: 132016 - protein, 10 aa, Homo Sapiens
LSAHGIVVAW

SEQ ID NO: 132017 - protein, 10 aa, Homo Sapiens
LSAQDHQTFF

SEQ ID NO: 132018 - protein, 10 aa, Homo Sapiens
LSDRGQLFSW

SEQ ID NO: 132019 - protein, 10 aa, Homo Sapiens
LSFKDVAVVF

SEQ ID NO: 132020 - protein, 10 aa, Homo Sapiens
LSIPDIKTAF

SEQ ID NO: 132021 - protein, 10 aa, Homo Sapiens
LSKPVPESEF

SEQ ID NO: 132022 - protein, 10 aa, Homo Sapiens
LSKQETGTEF

SEQ ID NO: 132023 - protein, 10 aa, Homo Sapiens
LSLPDIKVYL

SEQ ID NO: 132024 - protein, 10 aa, Homo Sapiens
LSLPEDFYHF

SEQ ID NO: 132025 - protein, 10 aa, Homo Sapiens
LSLPESTESF

SEQ ID NO: 132026 - protein, 10 aa, Homo Sapiens
LSMPASLGRM

SEQ ID NO: 132027 - protein, 10 aa, Homo Sapiens
LSNPDPRLLF

SEQ ID NO: 132028 - protein, 10 aa, Homo Sapiens
LSQSHAYQQF

SEQ ID NO: 132029 - protein, 10 aa, Homo Sapiens
LSSPDYQIRW

SEQ ID NO: 132030 - protein, 10 aa, Homo Sapiens
LSTHMSALLF

SEQ ID NO: 132031 - protein, 10 aa, Homo Sapiens
LTFRDVAIEF

SEQ ID NO: 132032 - protein, 10 aa, Homo Sapiens
LTIPDGGVHI

SEQ ID NO: 132033 - protein, 10 aa, Homo Sapiens
LTIVDTGIGM

SEQ ID NO: 132034 - protein, 10 aa, Homo Sapiens
LTKQEFQTLF

SEQ ID NO: 132035 - protein, 10 aa, Homo Sapiens
LTMSDVQIHW

SEQ ID NO: 132036 - protein, 10 aa, Homo Sapiens
LTSDALAVTF

SEQ ID NO: 132037 - protein, 10 aa, Homo Sapiens
LTSKLYSLLF

SEQ ID NO: 132038 - protein, 10 aa, Homo Sapiens
LTWPEGKVLW

SEQ ID NO: 132039 - protein, 10 aa, Homo Sapiens
LTYLDNGVVF

SEQ ID NO: 132040 - protein, 10 aa, Homo Sapiens
LVFPYTHQNW

SEQ ID NO: 132041 - protein, 10 aa, Homo Sapiens
LVFVGKGITF

SEQ ID NO: 132042 - protein, 10 aa, Homo Sapiens
MAFQNDVYEW

SEQ ID NO: 132043 - protein, 10 aa, Homo Sapiens
MTFKDVEVTF

SEQ ID NO: 132044 - protein, 10 aa, Homo Sapiens
MTTRELQQYW

SEQ ID NO: 132045 - protein, 10 aa, Homo Sapiens
MVMASAWRLW

SEQ ID NO: 132046 - protein, 10 aa, Homo Sapiens
NAGEDPGLAR

SEQ ID NO: 132047 - protein, 10 aa, Homo Sapiens
NARMPEKVTW

SEQ ID NO: 132048 - protein, 10 aa, Homo Sapiens
NTLKEVNMRW

SEQ ID NO: 132049 - protein, 10 aa, Homo Sapiens
PTSSPPSFEF

SEQ ID NO: 132050 - protein, 10 aa, Homo Sapiens
QSIYPLHDVF

SEQ ID NO: 132051 - protein, 10 aa, Homo Sapiens
QSLPDFGISY

SEQ ID NO: 132052 - protein, 10 aa, Homo Sapiens
QSMDNQILIF

SEQ ID NO: 132053 - protein, 10 aa, Homo Sapiens
QTALLQKLTW

SEQ ID NO: 132054 - protein, 10 aa, Homo Sapiens
QTARMEDFTF

SEQ ID NO: 132055 - protein, 10 aa, Homo Sapiens
QTASAVVQHM

SEQ ID NO: 132056 - protein, 10 aa, Homo Sapiens
QTLPTSVVTI

SEQ ID NO: 132057 - protein, 10 aa, Homo Sapiens
QTLTDYDIRF

SEQ ID NO: 132058 - protein, 10 aa, Homo Sapiens
QTNQRMQETF

SEQ ID NO: 132059 - protein, 10 aa, Homo Sapiens
RAAELFVETI

SEQ ID NO: 132060 - protein, 10 aa, Homo Sapiens
RAAEPVRVVW

SEQ ID NO: 132061 - protein, 10 aa, Homo Sapiens
RAAEVFFETF

SEQ ID NO: 132062 - protein, 10 aa, Homo Sapiens
RAFKEVGIEF

SEQ ID NO: 132063 - protein, 10 aa, Homo Sapiens
RAFPYGNVAF

SEQ ID NO: 132064 - protein, 10 aa, Homo Sapiens
RAFREEAIKF

SEQ ID NO: 132065 - protein, 10 aa, Homo Sapiens
RAGPFDEFQI

SEQ ID NO: 132066 - protein, 10 aa, Homo Sapiens
RAGPLSGKKF

SEQ ID NO: 132067 - protein, 10 aa, Homo Sapiens
RAIDSIHQLW

SEQ ID NO: 132068 - protein, 10 aa, Homo Sapiens
RAIEALLQYW

SEQ ID NO: 132069 - protein, 10 aa, Homo Sapiens
RAITHLNNNF

SEQ ID NO: 132070 - protein, 10 aa, Homo Sapiens
RAKTDSAEKW

SEQ ID NO: 132071 - protein, 10 aa, Homo Sapiens
RALESELQQL

SEQ ID NO: 132072 - protein, 10 aa, Homo Sapiens
RALPQGSIKF

SEQ ID NO: 132073 - protein, 10 aa, Homo Sapiens
RASLVTSVVW

SEQ ID NO: 132074 - protein, 10 aa, Homo Sapiens
RAVLDVANHF

SEQ ID NO: 132075 - protein, 10 aa, Homo Sapiens
RAYPHNLMTF

SEQ ID NO: 132076 - protein, 10 aa, Homo Sapiens
RGYPDSESTW

SEQ ID NO: 132077 - protein, 10 aa, Homo Sapiens
RILDIVPPTF

SEQ ID NO: 132078 - protein, 10 aa, Homo Sapiens
RLIPQPAFQW

SEQ ID NO: 132079 - protein, 10 aa, Homo Sapiens
RMYPLKPTWW

SEQ ID NO: 132080 - protein, 10 aa, Homo Sapiens
RSADEPMTTF

SEQ ID NO: 132081 - protein, 10 aa, Homo Sapiens
RSARDTAQIF

SEQ ID NO: 132082 - protein, 10 aa, Homo Sapiens
RSASSTSSLF

SEQ ID NO: 132083 - protein, 10 aa, Homo Sapiens
RSATEVDNNF

SEQ ID NO: 132084 - protein, 10 aa, Homo Sapiens
RSFEHALMLF

SEQ ID NO: 132085 - protein, 10 aa, Homo Sapiens
RSFKETTNRW

SEQ ID NO: 132086 - protein, 10 aa, Homo Sapiens
RSGEGFLLVF

SEQ ID NO: 132087 - protein, 10 aa, Homo Sapiens
RSIEEVYYLW

SEQ ID NO: 132088 - protein, 10 aa, Homo Sapiens
RSIISPNFSF

SEQ ID NO: 132089 - protein, 10 aa, Homo Sapiens
RSIKAQLQNF

SEQ ID NO: 132090 - protein, 10 aa, Homo Sapiens
RSIKGLKEHF

SEQ ID NO: 132091 - protein, 10 aa, Homo Sapiens
RSIQADGLVW

SEQ ID NO: 132092 - protein, 10 aa, Homo Sapiens
RSIQLDGLVW

SEQ ID NO: 132093 - protein, 10 aa, Homo Sapiens
RSKDVVEPLL

SEQ ID NO: 132094 - protein, 10 aa, Homo Sapiens
RSKEGLTERF

SEQ ID NO: 132095 - protein, 10 aa, Homo Sapiens
RSLAAFLQQL

SEQ ID NO: 132096 - protein, 10 aa, Homo Sapiens
RSLACQPISF

SEQ ID NO: 132097 - protein, 10 aa, Homo Sapiens
RSLDNGGYYI

SEQ ID NO: 132098 - protein, 10 aa, Homo Sapiens
RSLEQIESFF

SEQ ID NO: 132099 - protein, 10 aa, Homo Sapiens
RSLEYLPLRF

SEQ ID NO: 132100 - protein, 10 aa, Homo Sapiens
RSLGYAYVNF

SEQ ID NO: 132101 - protein, 10 aa, Homo Sapiens
RSLINSNVGF

SEQ ID NO: 132102 - protein, 10 aa, Homo Sapiens
RSLKADLQKL

SEQ ID NO: 132103 - protein, 10 aa, Homo Sapiens
RSLKDHKVSF

SEQ ID NO: 132104 - protein, 10 aa, Homo Sapiens
RSLKTYGVSF

SEQ ID NO: 132105 - protein, 10 aa, Homo Sapiens
RSLPDIPAHL

SEQ ID NO: 132106 - protein, 10 aa, Homo Sapiens
RSLPIVFDEF

SEQ ID NO: 132107 - protein, 10 aa, Homo Sapiens
RSLPRFQVTL

SEQ ID NO: 132108 - protein, 10 aa, Homo Sapiens
RSLPSLKKTL

SEQ ID NO: 132109 - protein, 10 aa, Homo Sapiens
RSLQDTAELL

SEQ ID NO: 132110 - protein, 10 aa, Homo Sapiens
RSLRDTAVRL

SEQ ID NO: 132111 - protein, 10 aa, Homo Sapiens
RSLTTLSEQW

SEQ ID NO: 132112 - protein, 10 aa, Homo Sapiens
RSLVPAAVVW

SEQ ID NO: 132113 - protein, 10 aa, Homo Sapiens
RSMGDYAQTL

SEQ ID NO: 132114 - protein, 10 aa, Homo Sapiens
RSMQLDYTTW

SEQ ID NO: 132115 - protein, 10 aa, Homo Sapiens
RSMSLVLDEF

SEQ ID NO: 132116 - protein, 10 aa, Homo Sapiens
RSNPSVFVIF

SEQ ID NO: 132117 - protein, 10 aa, Homo Sapiens
RSPDESHRMW

SEQ ID NO: 132118 - protein, 10 aa, Homo Sapiens
RSQKAEGQRW

SEQ ID NO: 132119 - protein, 10 aa, Homo Sapiens
RSRVDQEERW

SEQ ID NO: 132120 - protein, 10 aa, Homo Sapiens
RSSQSSSQQF

SEQ ID NO: 132121 - protein, 10 aa, Homo Sapiens
RSSSCLKNHF

SEQ ID NO: 132122 - protein, 10 aa, Homo Sapiens
RSSTVTVLLL

SEQ ID NO: 132123 - protein, 10 aa, Homo Sapiens
RSSVEVRMEF

SEQ ID NO: 132124 - protein, 10 aa, Homo Sapiens
RSSVVTAVKF

SEQ ID NO: 132125 - protein, 10 aa, Homo Sapiens
RSVDVTNTTF

SEQ ID NO: 132126 - protein, 10 aa, Homo Sapiens
RSVLDNRARF

SEQ ID NO: 132127 - protein, 10 aa, Homo Sapiens
RSVNIKEICW

SEQ ID NO: 132128 - protein, 10 aa, Homo Sapiens
RSVPTNKVCF

SEQ ID NO: 132129 - protein, 10 aa, Homo Sapiens
RSVQVIGGIW

SEQ ID NO: 132130 - protein, 10 aa, Homo Sapiens
RSVVLNDVFL

SEQ ID NO: 132131 - protein, 10 aa, Homo Sapiens
RSWDQQIKLW

SEQ ID NO: 132132 - protein, 10 aa, Homo Sapiens
RSYQLEGVNW

SEQ ID NO: 132133 - protein, 10 aa, Homo Sapiens
RSYSDPPLKF

SEQ ID NO: 132134 - protein, 10 aa, Homo Sapiens
RSYSESEKQW

SEQ ID NO: 132135 - protein, 10 aa, Homo Sapiens
RTAKALQAHW

SEQ ID NO: 132136 - protein, 10 aa, Homo Sapiens
RTAPFHLDLW

SEQ ID NO: 132137 - protein, 10 aa, Homo Sapiens
RTCEWTGLKF

SEQ ID NO: 132138 - protein, 10 aa, Homo Sapiens
RTDLDKARTF

SEQ ID NO: 132139 - protein, 10 aa, Homo Sapiens
RTFTDHVMLF

SEQ ID NO: 132140 - protein, 10 aa, Homo Sapiens
RTIKIRNISY

SEQ ID NO: 132141 - protein, 10 aa, Homo Sapiens
RTIKLEHVHF

SEQ ID NO: 132142 - protein, 10 aa, Homo Sapiens
RTILVDNNTW

SEQ ID NO: 132143 - protein, 10 aa, Homo Sapiens
RTIQGLIDFI

SEQ ID NO: 132144 - protein, 10 aa, Homo Sapiens
RTLCEGPQRF

SEQ ID NO: 132145 - protein, 10 aa, Homo Sapiens
RTLDELGIHL

SEQ ID NO: 132146 - protein, 10 aa, Homo Sapiens
RTLDKIMILF

SEQ ID NO: 132147 - protein, 10 aa, Homo Sapiens
RTLDNQLFFF

SEQ ID NO: 132148 - protein, 10 aa, Homo Sapiens
RTLDTIQLAF

SEQ ID NO: 132149 - protein, 10 aa, Homo Sapiens
RTLESKLVLF

SEQ ID NO: 132150 - protein, 10 aa, Homo Sapiens
RTLKEEVQKL

SEQ ID NO: 132151 - protein, 10 aa, Homo Sapiens
RTLNISGNEI

SEQ ID NO: 132152 - protein, 10 aa, Homo Sapiens
RTLPDDLHFL

SEQ ID NO: 132153 - protein, 10 aa, Homo Sapiens
RTLPELITQF

SEQ ID NO: 132154 - protein, 10 aa, Homo Sapiens
RTLPTKEFLW

SEQ ID NO: 132155 - protein, 10 aa, Homo Sapiens
RTLRDIETFY

SEQ ID NO: 132156 - protein, 10 aa, Homo Sapiens
RTMELLTQNW

SEQ ID NO: 132157 - protein, 10 aa, Homo Sapiens
RTMNCIVNVF

SEQ ID NO: 132158 - protein, 10 aa, Homo Sapiens
RTMNIKSATW

SEQ ID NO: 132159 - protein, 10 aa, Homo Sapiens
RTNHQGTYVL

SEQ ID NO: 132160 - protein, 10 aa, Homo Sapiens
RTPDTPFSLF

SEQ ID NO: 132161 - protein, 10 aa, Homo Sapiens
RTRLEQVHEW

SEQ ID NO: 132162 - protein, 10 aa, Homo Sapiens
RTSDDVAKEF

SEQ ID NO: 132163 - protein, 10 aa, Homo Sapiens
RTSIETNVRF

SEQ ID NO: 132164 - protein, 10 aa, Homo Sapiens
RTTLVDNNTW

SEQ ID NO: 132165 - protein, 10 aa, Homo Sapiens
RTTPGTLARF

SEQ ID NO: 132166 - protein, 10 aa, Homo Sapiens
RTVEICPFSF

SEQ ID NO: 132167 - protein, 10 aa, Homo Sapiens
RTVKELGNSL

SEQ ID NO: 132168 - protein, 10 aa, Homo Sapiens
RTVKELKEKF

SEQ ID NO: 132169 - protein, 10 aa, Homo Sapiens
RTVQPHFLEF

SEQ ID NO: 132170 - protein, 10 aa, Homo Sapiens
RTVSLVHESF

SEQ ID NO: 132171 - protein, 10 aa, Homo Sapiens
RTVVTGIEMF

SEQ ID NO: 132172 - protein, 10 aa, Homo Sapiens
RTWDYVAPFL

SEQ ID NO: 132173 - protein, 10 aa, Homo Sapiens
RTWNVVVHDW

SEQ ID NO: 132174 - protein, 10 aa, Homo Sapiens
RTYINPFVSF

SEQ ID NO: 132175 - protein, 10 aa, Homo Sapiens
RTYSDDHVKF

SEQ ID NO: 132176 - protein, 10 aa, Homo Sapiens
RTYSLVGQAW

SEQ ID NO: 132177 - protein, 10 aa, Homo Sapiens
RTYSVGVCTF

SEQ ID NO: 132178 - protein, 10 aa, Homo Sapiens
RTYTYEKLLW

SEQ ID NO: 132179 - protein, 10 aa, Homo Sapiens
RVADFGSATF

SEQ ID NO: 132180 - protein, 10 aa, Homo Sapiens
RVAQLEQVYI

SEQ ID NO: 132181 - protein, 10 aa, Homo Sapiens
RVDPDVAQHW

SEQ ID NO: 132182 - protein, 10 aa, Homo Sapiens
RVFPDKGYSF

SEQ ID NO: 132183 - protein, 10 aa, Homo Sapiens
RVFPEKGYSF

SEQ ID NO: 132184 - protein, 10 aa, Homo Sapiens
RVGPIEATSF

SEQ ID NO: 132185 - protein, 10 aa, Homo Sapiens
SAASPHYQEW

SEQ ID NO: 132186 - protein, 10 aa, Homo Sapiens
SACRTSGQTF

SEQ ID NO: 132187 - protein, 10 aa, Homo Sapiens
SALPADTQAW

SEQ ID NO: 132188 - protein, 10 aa, Homo Sapiens
SAQGSESHSL

SEQ ID NO: 132189 - protein, 10 aa, Homo Sapiens
SMDNNRSLDL

SEQ ID NO: 132190 - protein, 10 aa, Homo Sapiens
SNKGISKTEI

SEQ ID NO: 132191 - protein, 10 aa, Homo Sapiens
SSLSGPRLLF

SEQ ID NO: 132192 - protein, 10 aa, Homo Sapiens
SSSPSVRQTW

SEQ ID NO: 132193 - protein, 10 aa, Homo Sapiens
STAKEIIQHF

SEQ ID NO: 132194 - protein, 10 aa, Homo Sapiens
STAREIECFW

SEQ ID NO: 132195 - protein, 10 aa, Homo Sapiens
STIKDCATVF

SEQ ID NO: 132196 - protein, 10 aa, Homo Sapiens
STIRNLKERF

SEQ ID NO: 132197 - protein, 10 aa, Homo Sapiens
STLRELGQTW

SEQ ID NO: 132198 - protein, 10 aa, Homo Sapiens
STLRNIQGLF

SEQ ID NO: 132199 - protein, 10 aa, Homo Sapiens
STLRVLYNLF

SEQ ID NO: 132200 - protein, 10 aa, Homo Sapiens
SVGESSSKGP

SEQ ID NO: 132201 - protein, 10 aa, Homo Sapiens
SVNGSKSYEI

SEQ ID NO: 132202 - protein, 10 aa, Homo Sapiens
TAQSDNKITW

SEQ ID NO: 132203 - protein, 10 aa, Homo Sapiens
TSLGYEVQKF

SEQ ID NO: 132204 - protein, 10 aa, Homo Sapiens
TSLPDFCHKF

SEQ ID NO: 132205 - protein, 10 aa, Homo Sapiens
TSLPDKCNSF

SEQ ID NO: 132206 - protein, 10 aa, Homo Sapiens
TSLTLKHAAW

SEQ ID NO: 132207 - protein, 10 aa, Homo Sapiens
TSSRPEEPFL

SEQ ID NO: 132208 - protein, 10 aa, Homo Sapiens
TSSSSVRVEW

SEQ ID NO: 132209 - protein, 10 aa, Homo Sapiens
TSWYSPDAKF

SEQ ID NO: 132210 - protein, 10 aa, Homo Sapiens
TTIFVAAFPL

SEQ ID NO: 132211 - protein, 10 aa, Homo Sapiens
TTKKDLKDYF

SEQ ID NO: 132212 - protein, 10 aa, Homo Sapiens
TTKPSSLDQF

SEQ ID NO: 132213 - protein, 10 aa, Homo Sapiens
VAAPPPKNSF

SEQ ID NO: 132214 - protein, 10 aa, Homo Sapiens
VAGPLGVTHF

SEQ ID NO: 132215 - protein, 10 aa, Homo Sapiens
VDGAYMTKVD

SEQ ID NO: 132216 - protein, 10 aa, Homo Sapiens
VSAKSGAVTF

SEQ ID NO: 132217 - protein, 10 aa, Homo Sapiens
VSFKDVAVDF

SEQ ID NO: 132218 - protein, 10 aa, Homo Sapiens
VSIGDLQATF

SEQ ID NO: 132219 - protein, 10 aa, Homo Sapiens
VSKRIAQETF

SEQ ID NO: 132220 - protein, 10 aa, Homo Sapiens
VSLKNVAVSF

SEQ ID NO: 132221 - protein, 10 aa, Homo Sapiens
VSLRLGDLVW

SEQ ID NO: 132222 - protein, 10 aa, Homo Sapiens
VSQKISKTRW

SEQ ID NO: 132223 - protein, 10 aa, Homo Sapiens
VSSITASLRF

SEQ ID NO: 132224 - protein, 10 aa, Homo Sapiens
VSWDEKGMTW

SEQ ID NO: 132225 - protein, 10 aa, Homo Sapiens
VSWDTKLIQW

SEQ ID NO: 132226 - protein, 10 aa, Homo Sapiens
VTAEAVRSVW

SEQ ID NO: 132227 - protein, 10 aa, Homo Sapiens
VTARLVGVLW

SEQ ID NO: 132228 - protein, 10 aa, Homo Sapiens
VTATDIRVTL

SEQ ID NO: 132229 - protein, 10 aa, Homo Sapiens
VTFEDVAVHF

SEQ ID NO: 132230 - protein, 10 aa, Homo Sapiens
VTFKDVAVTF

SEQ ID NO: 132231 - protein, 10 aa, Homo Sapiens
VTFRDVAIDF

SEQ ID NO: 132232 - protein, 10 aa, Homo Sapiens
VTFRDVAIYF

SEQ ID NO: 132233 - protein, 10 aa, Homo Sapiens
VTIFVEGQRF

SEQ ID NO: 132234 - protein, 10 aa, Homo Sapiens
VTIKLKNVNF

SEQ ID NO: 132235 - protein, 10 aa, Homo Sapiens
VTLKIGDHKF

SEQ ID NO: 132236 - protein, 10 aa, Homo Sapiens
VTLKNKYLDW

SEQ ID NO: 132237 - protein, 10 aa, Homo Sapiens
VTMDVGMTKF

SEQ ID NO: 132238 - protein, 10 aa, Homo Sapiens
VTQPNTKYTF

SEQ ID NO: 132239 - protein, 10 aa, Homo Sapiens
VTTSITSKKW

SEQ ID NO: 132240 - protein, 10 aa, Homo Sapiens
VTVPANVQRW

SEQ ID NO: 132241 - protein, 10 aa, Homo Sapiens
VVARTVAQLW

SEQ ID NO: 132242 - protein, 10 aa, Homo Sapiens
VVWENKHITW

SEQ ID NO: 132243 - protein, 10 aa, Homo Sapiens
YACRVNHVTL

SEQ ID NO: 132244 - protein, 10 aa, Homo Sapiens
YSFKFGFNEF

SEQ ID NO: 132245 - protein, 10 aa, Homo Sapiens
YSKYYKTIDD

SEQ ID NO: 132246 - protein, 10 aa, Homo Sapiens
YTMKKVHALW

SEQ ID NO: 132247 - protein, 10 aa, Homo Sapiens
YTVKVEDLTF

SEQ ID NO: 132248 - protein, 10 aa, Homo Sapiens
YTYKDPITEF

SEQ ID NO: 132249 - protein, 11 aa, Homo Sapiens
AAAAAAAAAMS

SEQ ID NO: 132250 - protein, 11 aa, Homo Sapiens
AAFNKDALLNW

SEQ ID NO: 132251 - protein, 11 aa, Homo Sapiens
AALDSRKNYNW

SEQ ID NO: 132252 - protein, 11 aa, Homo Sapiens
AAYRNLGQNLW

SEQ ID NO: 132253 - protein, 11 aa, Homo Sapiens
ASAAVLAPLGF

SEQ ID NO: 132254 - protein, 11 aa, Homo Sapiens
ASCPNHFEGLF

SEQ ID NO: 132255 - protein, 11 aa, Homo Sapiens
ASIKDPKDLKF

SEQ ID NO: 132256 - protein, 11 aa, Homo Sapiens
ASIRLPSQYNF

SEQ ID NO: 132257 - protein, 11 aa, Homo Sapiens
ASLPAELINQI

SEQ ID NO: 132258 - protein, 11 aa, Homo Sapiens
ASLPSELIVHI

SEQ ID NO: 132259 - protein, 11 aa, Homo Sapiens
ASLRDLPAQLL

SEQ ID NO: 132260 - protein, 11 aa, Homo Sapiens
ASSLTIDKLLL

SEQ ID NO: 132261 - protein, 11 aa, Homo Sapiens
ATADYICKVKW

SEQ ID NO: 132262 - protein, 11 aa, Homo Sapiens
ATARNLSNLTL

SEQ ID NO: 132263 - protein, 11 aa, Homo Sapiens
ATFHQRGIALW

SEQ ID NO: 132264 - protein, 11 aa, Homo Sapiens
ATIKDIREHEW

SEQ ID NO: 132265 - protein, 11 aa, Homo Sapiens
ATIPVSQISTI

SEQ ID NO: 132266 - protein, 11 aa, Homo Sapiens
ATLGNFAKATF

SEQ ID NO: 132267 - protein, 11 aa, Homo Sapiens
ATMPHQLQDTF

SEQ ID NO: 132268 - protein, 11 aa, Homo Sapiens
ATNALLNSLEF

SEQ ID NO: 132269 - protein, 11 aa, Homo Sapiens
ATSSVFQEVTL

SEQ ID NO: 132270 - protein, 11 aa, Homo Sapiens
ATVPNTIVVNW

SEQ ID NO: 132271 - protein, 11 aa, Homo Sapiens
AVAAVLTQVVW

SEQ ID NO: 132272 - protein, 11 aa, Homo Sapiens
AVAEALTNLVF

SEQ ID NO: 132273 - protein, 11 aa, Homo Sapiens
AVFVQGPAWQF

SEQ ID NO: 132274 - protein, 11 aa, Homo Sapiens
AVSTIETVPYW

SEQ ID NO: 132275 - protein, 11 aa, Homo Sapiens
ESCRIASSVNW

SEQ ID NO: 132276 - protein, 11 aa, Homo Sapiens
ETADVIAKVAF

SEQ ID NO: 132277 - protein, 11 aa, Homo Sapiens
EVSRIVGSVEF

SEQ ID NO: 132278 - protein, 11 aa, Homo Sapiens
FAYKDQNENRW

SEQ ID NO: 132279 - protein, 11 aa, Homo Sapiens
FSLKGVDFQKF

SEQ ID NO: 132280 - protein, 11 aa, Homo Sapiens
FSLRPIDSNTF

SEQ ID NO: 132281 - protein, 11 aa, Homo Sapiens
FSSPAVAQAHY

SEQ ID NO: 132282 - protein, 11 aa, Homo Sapiens
GASEAVADIKF

SEQ ID NO: 132283 - protein, 11 aa, Homo Sapiens
GSSHLISTSSW

SEQ ID NO: 132284 - protein, 11 aa, Homo Sapiens
GSTKVLQAVQW

SEQ ID NO: 132285 - protein, 11 aa, Homo Sapiens
GTAAVFNAVNW

SEQ ID NO: 132286 - protein, 11 aa, Homo Sapiens
GTWIGKGTERW

SEQ ID NO: 132287 - protein, 11 aa, Homo Sapiens
GVSQVLNRLTF

SEQ ID NO: 132288 - protein, 11 aa, Homo Sapiens
HSAGNMLFRTW

SEQ ID NO: 132289 - protein, 11 aa, Homo Sapiens
HSFGGGTGSGF

SEQ ID NO: 132290 - protein, 11 aa, Homo Sapiens
HSFLYQPDWRF

SEQ ID NO: 132291 - protein, 11 aa, Homo Sapiens
HSFNQSSSSQW

SEQ ID NO: 132292 - protein, 11 aa, Homo Sapiens
HSFYPTPALQW

SEQ ID NO: 132293 - protein, 11 aa, Homo Sapiens
HSNETIGSVRW

SEQ ID NO: 132294 - protein, 11 aa, Homo Sapiens
HSSEELRNLGW

SEQ ID NO: 132295 - protein, 11 aa, Homo Sapiens
HSWMEGQVTVW

SEQ ID NO: 132296 - protein, 11 aa, Homo Sapiens
HTAPSGVGSSW

SEQ ID NO: 132297 - protein, 11 aa, Homo Sapiens
HTCVLHSIVGW

SEQ ID NO: 132298 - protein, 11 aa, Homo Sapiens
HTFFDHQDQVW

SEQ ID NO: 132299 - protein, 11 aa, Homo Sapiens
HTLPHEIVVNL

SEQ ID NO: 132300 - protein, 11 aa, Homo Sapiens
HTLVTSGVYAW

SEQ ID NO: 132301 - protein, 11 aa, Homo Sapiens
HTNQDHVHAVW

SEQ ID NO: 132302 - protein, 11 aa, Homo Sapiens
HTSDEQNHLVI

SEQ ID NO: 132303 - protein, 11 aa, Homo Sapiens
HTSDVPGKLIY

SEQ ID NO: 132304 - protein, 11 aa, Homo Sapiens
HTSPSSDSLLF

SEQ ID NO: 132305 - protein, 11 aa, Homo Sapiens
HTVQPKGKITF

SEQ ID NO: 132306 - protein, 11 aa, Homo Sapiens
HTWNGIRHLMW

SEQ ID NO: 132307 - protein, 11 aa, Homo Sapiens
IARKDEKLLSF

SEQ ID NO: 132308 - protein, 11 aa, Homo Sapiens
IASARAGETRF

SEQ ID NO: 132309 - protein, 11 aa, Homo Sapiens
IASHSIARISF

SEQ ID NO: 132310 - protein, 11 aa, Homo Sapiens
IAWWTDKNVKF

SEQ ID NO: 132311 - protein, 11 aa, Homo Sapiens
IGAQVLGKILW

SEQ ID NO: 132312 - protein, 11 aa, Homo Sapiens
ISAPDKRIYQF

SEQ ID NO: 132313 - protein, 11 aa, Homo Sapiens
ISDHEATLRCW

SEQ ID NO: 132314 - protein, 11 aa, Homo Sapiens
ISERYGPVFTI

SEQ ID NO: 132315 - protein, 11 aa, Homo Sapiens
ISFPATGCQKL

SEQ ID NO: 132316 - protein, 11 aa, Homo Sapiens
ISFPEKELLLL

SEQ ID NO: 132317 - protein, 11 aa, Homo Sapiens
ISKFDTVEDFW

SEQ ID NO: 132318 - protein, 11 aa, Homo Sapiens
ISKPVGFGEEF

SEQ ID NO: 132319 - protein, 11 aa, Homo Sapiens
ISLPDDVRRRL

SEQ ID NO: 132320 - protein, 11 aa, Homo Sapiens
ISTFLLTRELW

SEQ ID NO: 132321 - protein, 11 aa, Homo Sapiens
ISYPQEVIPTF

SEQ ID NO: 132322 - protein, 11 aa, Homo Sapiens
ITIPDIKKDRW

SEQ ID NO: 132323 - protein, 11 aa, Homo Sapiens
ITQKALQSQSW

SEQ ID NO: 132324 - protein, 11 aa, Homo Sapiens
ITREEGVLTLW

SEQ ID NO: 132325 - protein, 11 aa, Homo Sapiens
ITSQVTGQIGW

SEQ ID NO: 132326 - protein, 11 aa, Homo Sapiens
ITSSIHSKETF

SEQ ID NO: 132327 - protein, 11 aa, Homo Sapiens
ITVEDSDKQLL

SEQ ID NO: 132328 - protein, 11 aa, Homo Sapiens
ITYDDPIKTSW

SEQ ID NO: 132329 - protein, 11 aa, Homo Sapiens
ITYPAGFMDVI

SEQ ID NO: 132330 - protein, 11 aa, Homo Sapiens
IVDANLSVLNL

SEQ ID NO: 132331 - protein, 11 aa, Homo Sapiens
IVFPVPGICQF

SEQ ID NO: 132332 - protein, 11 aa, Homo Sapiens
KAAEAAASAYY

SEQ ID NO: 132333 - protein, 11 aa, Homo Sapiens
KAAECAGKLFL

SEQ ID NO: 132334 - protein, 11 aa, Homo Sapiens
KAAEVLNKHSL

SEQ ID NO: 132335 - protein, 11 aa, Homo Sapiens
KAATILTKSTL

SEQ ID NO: 132336 - protein, 11 aa, Homo Sapiens
KAIEEGVNHMW

SEQ ID NO: 132337 - protein, 11 aa, Homo Sapiens
KAIPRPDGIEW

SEQ ID NO: 132338 - protein, 11 aa, Homo Sapiens
KAISGVHTVRF

SEQ ID NO: 132339 - protein, 11 aa, Homo Sapiens
KAKYPDYEVTW

SEQ ID NO: 132340 - protein, 11 aa, Homo Sapiens
KALNVEKVINF

SEQ ID NO: 132341 - protein, 11 aa, Homo Sapiens
KASELHSVRKL

SEQ ID NO: 132342 - protein, 11 aa, Homo Sapiens
KASGQLKSLRF

SEQ ID NO: 132343 - protein, 11 aa, Homo Sapiens
KASLSLIEKYF

SEQ ID NO: 132344 - protein, 11 aa, Homo Sapiens
KATDAVSKMTI

SEQ ID NO: 132345 - protein, 11 aa, Homo Sapiens
KAVAAESNATF

SEQ ID NO: 132346 - protein, 11 aa, Homo Sapiens
KAVDCLLDSKW

SEQ ID NO: 132347 - protein, 11 aa, Homo Sapiens
KAVDSQILPKI

SEQ ID NO: 132348 - protein, 11 aa, Homo Sapiens
KAWFQTPYTTF

SEQ ID NO: 132349 - protein, 11 aa, Homo Sapiens
KGAYPIIFTAW

SEQ ID NO: 132350 - protein, 11 aa, Homo Sapiens
KGWKEGTKITF

SEQ ID NO: 132351 - protein, 11 aa, Homo Sapiens
KIITFTKNNQF

SEQ ID NO: 132352 - protein, 11 aa, Homo Sapiens
KIQPDTIIQVW

SEQ ID NO: 132353 - protein, 11 aa, Homo Sapiens
KLDENSAFLQF

SEQ ID NO: 132354 - protein, 11 aa, Homo Sapiens
KLFDSICNNKW

SEQ ID NO: 132355 - protein, 11 aa, Homo Sapiens
KLKPFIDREWW

SEQ ID NO: 132356 - protein, 11 aa, Homo Sapiens
KLSPEELLLRW

SEQ ID NO: 132357 - protein, 11 aa, Homo Sapiens
KQFAEMYVAKF

SEQ ID NO: 132358 - protein, 11 aa, Homo Sapiens
KSCEINNSTKF

SEQ ID NO: 132359 - protein, 11 aa, Homo Sapiens
KSCGIQDIFVF

SEQ ID NO: 132360 - protein, 11 aa, Homo Sapiens
KSCSPELQQKF

SEQ ID NO: 132361 - protein, 11 aa, Homo Sapiens
KSFEAPIKLVF

SEQ ID NO: 132362 - protein, 11 aa, Homo Sapiens
KSFEGNVFMYY

SEQ ID NO: 132363 - protein, 11 aa, Homo Sapiens
KSFETDTNLNF

SEQ ID NO: 132364 - protein, 11 aa, Homo Sapiens
KSFGSAQEFAW

SEQ ID NO: 132365 - protein, 11 aa, Homo Sapiens
KSFIPKDNQNF

SEQ ID NO: 132366 - protein, 11 aa, Homo Sapiens
KSFLGVKELSF

SEQ ID NO: 132367 - protein, 11 aa, Homo Sapiens
KSFPDTGSLNL

SEQ ID NO: 132368 - protein, 11 aa, Homo Sapiens
KSFPGGKEYLM

SEQ ID NO: 132369 - protein, 11 aa, Homo Sapiens
KSFSDTLKTYF

SEQ ID NO: 132370 - protein, 11 aa, Homo Sapiens
KSFSKSDLVNW

SEQ ID NO: 132371 - protein, 11 aa, Homo Sapiens
KSFVTPPQSHF

SEQ ID NO: 132372 - protein, 11 aa, Homo Sapiens
KSIASAIVNEL

SEQ ID NO: 132373 - protein, 11 aa, Homo Sapiens
KSIDNGIFVQL

SEQ ID NO: 132374 - protein, 11 aa, Homo Sapiens
KSIEDFAHSSF

SEQ ID NO: 132375 - protein, 11 aa, Homo Sapiens
KSIVSSSISAF

SEQ ID NO: 132376 - protein, 11 aa, Homo Sapiens
KSKAMTGVEQW

SEQ ID NO: 132377 - protein, 11 aa, Homo Sapiens
KSKLDAEVSKW

SEQ ID NO: 132378 - protein, 11 aa, Homo Sapiens
KSKPIIAEPEI

SEQ ID NO: 132379 - protein, 11 aa, Homo Sapiens
KSLCPETWPTW

SEQ ID NO: 132380 - protein, 11 aa, Homo Sapiens
KSLDPSRPVTF

SEQ ID NO: 132381 - protein, 11 aa, Homo Sapiens
KSLENSVENKI

SEQ ID NO: 132382 - protein, 11 aa, Homo Sapiens
KSLESLDTSLF

SEQ ID NO: 132383 - protein, 11 aa, Homo Sapiens
KSLGCEDFISF

SEQ ID NO: 132384 - protein, 11 aa, Homo Sapiens
KSLGELGLEHF

SEQ ID NO: 132385 - protein, 11 aa, Homo Sapiens
KSLGVQDLLQF

SEQ ID NO: 132386 - protein, 11 aa, Homo Sapiens
KSLKVDPRACF

SEQ ID NO: 132387 - protein, 11 aa, Homo Sapiens
KSLPCFEPYEF

SEQ ID NO: 132388 - protein, 11 aa, Homo Sapiens
KSLPEEDVAEI

SEQ ID NO: 132389 - protein, 11 aa, Homo Sapiens
KSLPEFPDSGF

SEQ ID NO: 132390 - protein, 11 aa, Homo Sapiens
KSLPSLVPLRI

SEQ ID NO: 132391 - protein, 11 aa, Homo Sapiens
KSLSALIGQCI

SEQ ID NO: 132392 - protein, 11 aa, Homo Sapiens
KSLTAHIVENF

SEQ ID NO: 132393 - protein, 11 aa, Homo Sapiens
KSLTYDEVISF

SEQ ID NO: 132394 - protein, 11 aa, Homo Sapiens
KSPASDTYIVF

SEQ ID NO: 132395 - protein, 11 aa, Homo Sapiens
KSSVIGASSQF

SEQ ID NO: 132396 - protein, 11 aa, Homo Sapiens
KSTSTLAMLNF

SEQ ID NO: 132397 - protein, 11 aa, Homo Sapiens
KSVSAAEQQLW

SEQ ID NO: 132398 - protein, 11 aa, Homo Sapiens
KSVTAHLAAKW

SEQ ID NO: 132399 - protein, 11 aa, Homo Sapiens
KSWPEGHFATI

SEQ ID NO: 132400 - protein, 11 aa, Homo Sapiens
KSYELPDGQVI

SEQ ID NO: 132401 - protein, 11 aa, Homo Sapiens
KSYLGSEADVW

SEQ ID NO: 132402 - protein, 11 aa, Homo Sapiens
KSYQPETNSSF

SEQ ID NO: 132403 - protein, 11 aa, Homo Sapiens
KTAPDQFIGIF

SEQ ID NO: 132404 - protein, 11 aa, Homo Sapiens
KTASQVHLMKF

SEQ ID NO: 132405 - protein, 11 aa, Homo Sapiens
KTATELSTVYL

SEQ ID NO: 132406 - protein, 11 aa, Homo Sapiens
KTAVETAVLLL

SEQ ID NO: 132407 - protein, 11 aa, Homo Sapiens
KTAVICQLDYW

SEQ ID NO: 132408 - protein, 11 aa, Homo Sapiens
KTCDADASGTF

SEQ ID NO: 132409 - protein, 11 aa, Homo Sapiens
KTCEEILNYVL

SEQ ID NO: 132410 - protein, 11 aa, Homo Sapiens
KTDATTAIIKL

SEQ ID NO: 132411 - protein, 11 aa, Homo Sapiens
KTFEEAAAQLL

SEQ ID NO: 132412 - protein, 11 aa, Homo Sapiens
KTFEEKQGTEI

SEQ ID NO: 132413 - protein, 11 aa, Homo Sapiens
KTFEGFCALHL

SEQ ID NO: 132414 - protein, 11 aa, Homo Sapiens
KTFEGHDASVL

SEQ ID NO: 132415 - protein, 11 aa, Homo Sapiens
KTFEQVKAIFL

SEQ ID NO: 132416 - protein, 11 aa, Homo Sapiens
KTFFLGDGQKL

SEQ ID NO: 132417 - protein, 11 aa, Homo Sapiens
KTFGGFASSSF

SEQ ID NO: 132418 - protein, 11 aa, Homo Sapiens
KTFIGKIPIML

SEQ ID NO: 132419 - protein, 11 aa, Homo Sapiens
KTFIVGDQISF

SEQ ID NO: 132420 - protein, 11 aa, Homo Sapiens
KTFLHDPLVEW

SEQ ID NO: 132421 - protein, 11 aa, Homo Sapiens
KTFNEPGSEYF

SEQ ID NO: 132422 - protein, 11 aa, Homo Sapiens
KTFSDEDYYQF

SEQ ID NO: 132423 - protein, 11 aa, Homo Sapiens
KTFVDNIQTAF

SEQ ID NO: 132424 - protein, 11 aa, Homo Sapiens
KTGTTIAGLVF

SEQ ID NO: 132425 - protein, 11 aa, Homo Sapiens
KTHVGMSIQTF

SEQ ID NO: 132426 - protein, 11 aa, Homo Sapiens
KTIEDDLVSAL

SEQ ID NO: 132427 - protein, 11 aa, Homo Sapiens
KTIRNDNSSRF

SEQ ID NO: 132428 - protein, 11 aa, Homo Sapiens
KTKPEVLEAHY

SEQ ID NO: 132429 - protein, 11 aa, Homo Sapiens
KTKSTETEHSF

SEQ ID NO: 132430 - protein, 11 aa, Homo Sapiens
KTLAESALQLL

SEQ ID NO: 132431 - protein, 11 aa, Homo Sapiens
KTLEEKLRSLF

SEQ ID NO: 132432 - protein, 11 aa, Homo Sapiens
KTLELAKVTQF

SEQ ID NO: 132433 - protein, 11 aa, Homo Sapiens
KTLKDEQTRKL

SEQ ID NO: 132434 - protein, 11 aa, Homo Sapiens
KTLPADVQNYY

SEQ ID NO: 132435 - protein, 11 aa, Homo Sapiens
KTLPETSLPNY

SEQ ID NO: 132436 - protein, 11 aa, Homo Sapiens
KTLQHDKLVRL

SEQ ID NO: 132437 - protein, 11 aa, Homo Sapiens
KTLRQVEVINF

SEQ ID NO: 132438 - protein, 11 aa, Homo Sapiens
KTLTADKLEHL

SEQ ID NO: 132439 - protein, 11 aa, Homo Sapiens
KTLTPIIQEYF

SEQ ID NO: 132440 - protein, 11 aa, Homo Sapiens
KTLVNPANVTF

SEQ ID NO: 132441 - protein, 11 aa, Homo Sapiens
KTMDGKADVSF

SEQ ID NO: 132442 - protein, 11 aa, Homo Sapiens
KTMLDDDKRQL

SEQ ID NO: 132443 - protein, 11 aa, Homo Sapiens
KTMTDTYLLNL

SEQ ID NO: 132444 - protein, 11 aa, Homo Sapiens
KTNDQMVVVYL

SEQ ID NO: 132445 - protein, 11 aa, Homo Sapiens
KTNPKIQSIYL

SEQ ID NO: 132446 - protein, 11 aa, Homo Sapiens
KTNTKLGKLYL

SEQ ID NO: 132447 - protein, 11 aa, Homo Sapiens
KTQQASKHIRF

SEQ ID NO: 132448 - protein, 11 aa, Homo Sapiens
KTRSKDIFDQL

SEQ ID NO: 132449 - protein, 11 aa, Homo Sapiens
KTSDSLLSMKF

SEQ ID NO: 132450 - protein, 11 aa, Homo Sapiens
KTSRVLQNVAF

SEQ ID NO: 132451 - protein, 11 aa, Homo Sapiens
KTSVSVHLMEW

SEQ ID NO: 132452 - protein, 11 aa, Homo Sapiens
KTVSAVCSLAW

SEQ ID NO: 132453 - protein, 11 aa, Homo Sapiens
KTVSNDSFFNF

SEQ ID NO: 132454 - protein, 11 aa, Homo Sapiens
KTVSSTKLVSF

SEQ ID NO: 132455 - protein, 11 aa, Homo Sapiens
KTVYTGIDHHW

SEQ ID NO: 132456 - protein, 11 aa, Homo Sapiens
KTYAEVDRQVI

SEQ ID NO: 132457 - protein, 11 aa, Homo Sapiens
KTYKDEGNDYF

SEQ ID NO: 132458 - protein, 11 aa, Homo Sapiens
KTYNEPGSQVF

SEQ ID NO: 132459 - protein, 11 aa, Homo Sapiens
KTYPVNTPERW

SEQ ID NO: 132460 - protein, 11 aa, Homo Sapiens
KTYSYLTPDLW

SEQ ID NO: 132461 - protein, 11 aa, Homo Sapiens
KVASLLHQVSW

SEQ ID NO: 132462 - protein, 11 aa, Homo Sapiens
KVDPAKDRELW

SEQ ID NO: 132463 - protein, 11 aa, Homo Sapiens
KVIHEQVNHRW

SEQ ID NO: 132464 - protein, 11 aa, Homo Sapiens
KVLPPNHRVVW

SEQ ID NO: 132465 - protein, 11 aa, Homo Sapiens
KVLPTNHRVTW

SEQ ID NO: 132466 - protein, 11 aa, Homo Sapiens
KVSEQVKNVKL

SEQ ID NO: 132467 - protein, 11 aa, Homo Sapiens
KVSVLTGIIKI

SEQ ID NO: 132468 - protein, 11 aa, Homo Sapiens
KVVDVVRNLVF

SEQ ID NO: 132469 - protein, 11 aa, Homo Sapiens
KVYDSQGLLIF

SEQ ID NO: 132470 - protein, 11 aa, Homo Sapiens
LADWVSGKISF

SEQ ID NO: 132471 - protein, 11 aa, Homo Sapiens
LALDPSLVPTF

SEQ ID NO: 132472 - protein, 11 aa, Homo Sapiens
LASPDLGLLKL

SEQ ID NO: 132473 - protein, 11 aa, Homo Sapiens
LAWSADGQTLF

SEQ ID NO: 132474 - protein, 11 aa, Homo Sapiens
LESRIRDVHEL

SEQ ID NO: 132475 - protein, 11 aa, Homo Sapiens
LGTLPPEIQAW

SEQ ID NO: 132476 - protein, 11 aa, Homo Sapiens
LSALPADTQAW

SEQ ID NO: 132477 - protein, 11 aa, Homo Sapiens
LSDPDEVARRW

SEQ ID NO: 132478 - protein, 11 aa, Homo Sapiens
LSLGVAALYKF

SEQ ID NO: 132479 - protein, 11 aa, Homo Sapiens
LSPPSANNATF

SEQ ID NO: 132480 - protein, 11 aa, Homo Sapiens
LSYNFSPEVEF

SEQ ID NO: 132481 - protein, 11 aa, Homo Sapiens
LSYPDTDVILM

SEQ ID NO: 132482 - protein, 11 aa, Homo Sapiens
LTADARLLCNF

SEQ ID NO: 132483 - protein, 11 aa, Homo Sapiens
LTKEDGEKETW

SEQ ID NO: 132484 - protein, 11 aa, Homo Sapiens
LTSPDVGLLKL

SEQ ID NO: 132485 - protein, 11 aa, Homo Sapiens
LVSLIDLLVLF

SEQ ID NO: 132486 - protein, 11 aa, Homo Sapiens
MSFPVGDVNNF

SEQ ID NO: 132487 - protein, 11 aa, Homo Sapiens
PEPAKSAPAPK

SEQ ID NO: 132488 - protein, 11 aa, Homo Sapiens
QAALALSRVEL

SEQ ID NO: 132489 - protein, 11 aa, Homo Sapiens
QALQDSRNYGW

SEQ ID NO: 132490 - protein, 11 aa, Homo Sapiens
QSAIVLGDLKL

SEQ ID NO: 132491 - protein, 11 aa, Homo Sapiens
QSDPSGAYFAW

SEQ ID NO: 132492 - protein, 11 aa, Homo Sapiens
QSIPYQDLPHL

SEQ ID NO: 132493 - protein, 11 aa, Homo Sapiens
QSLPAGTLLHL

SEQ ID NO: 132494 - protein, 11 aa, Homo Sapiens
QSLPEFGITHF

SEQ ID NO: 132495 - protein, 11 aa, Homo Sapiens
QSLPNDVISSL

SEQ ID NO: 132496 - protein, 11 aa, Homo Sapiens
QSLPNPKSWDF

SEQ ID NO: 132497 - protein, 11 aa, Homo Sapiens
QSLPSKTKVAW

SEQ ID NO: 132498 - protein, 11 aa, Homo Sapiens
QSLPSSVLHII

SEQ ID NO: 132499 - protein, 11 aa, Homo Sapiens
QSSSEISDHSF

SEQ ID NO: 132500 - protein, 11 aa, Homo Sapiens
QSSTLLTSVRL

SEQ ID NO: 132501 - protein, 11 aa, Homo Sapiens
QTARQHPKMHL

SEQ ID NO: 132502 - protein, 11 aa, Homo Sapiens
QTCKLFDTQQF

SEQ ID NO: 132503 - protein, 11 aa, Homo Sapiens
QTDGTLSTLEF

SEQ ID NO: 132504 - protein, 11 aa, Homo Sapiens
QTIRLPAQSIW

SEQ ID NO: 132505 - protein, 11 aa, Homo Sapiens
QTLPNGVTQKI

SEQ ID NO: 132506 - protein, 11 aa, Homo Sapiens
QTMSDQIIGRI

SEQ ID NO: 132507 - protein, 11 aa, Homo Sapiens
RAAEEFVNVYY

SEQ ID NO: 132508 - protein, 11 aa, Homo Sapiens
RAAGALSKRYW

SEQ ID NO: 132509 - protein, 11 aa, Homo Sapiens
RAALSDTVALW

SEQ ID NO: 132510 - protein, 11 aa, Homo Sapiens
RAALWIGTTSF

SEQ ID NO: 132511 - protein, 11 aa, Homo Sapiens
RAATVLATVLL

SEQ ID NO: 132512 - protein, 11 aa, Homo Sapiens
RACAAQTKATF

SEQ ID NO: 132513 - protein, 11 aa, Homo Sapiens
RAFPNKQGYVL

SEQ ID NO: 132514 - protein, 11 aa, Homo Sapiens
RAFQAHKEENW

SEQ ID NO: 132515 - protein, 11 aa, Homo Sapiens
RAFTCDDLFRF

SEQ ID NO: 132516 - protein, 11 aa, Homo Sapiens
RALEAEKRALW

SEQ ID NO: 132517 - protein, 11 aa, Homo Sapiens
RALQASALNAW

SEQ ID NO: 132518 - protein, 11 aa, Homo Sapiens
RASITPGTILI

SEQ ID NO: 132519 - protein, 11 aa, Homo Sapiens
RASTLLSKVFL

SEQ ID NO: 132520 - protein, 11 aa, Homo Sapiens
RGAVVVGNVGF

SEQ ID NO: 132521 - protein, 11 aa, Homo Sapiens
RGTTILAKHAW

SEQ ID NO: 132522 - protein, 11 aa, Homo Sapiens
RIAEALSKMKL

SEQ ID NO: 132523 - protein, 11 aa, Homo Sapiens
RILPQDVILKF

SEQ ID NO: 132524 - protein, 11 aa, Homo Sapiens
RLAPIGRRQLL

SEQ ID NO: 132525 - protein, 11 aa, Homo Sapiens
RLFPSAAQVTF

SEQ ID NO: 132526 - protein, 11 aa, Homo Sapiens
RSADFLGKVAI

SEQ ID NO: 132527 - protein, 11 aa, Homo Sapiens
RSAGACTAAAF

SEQ ID NO: 132528 - protein, 11 aa, Homo Sapiens
RSCLEQAKLLF

SEQ ID NO: 132529 - protein, 11 aa, Homo Sapiens
RSDESVGNVTF

SEQ ID NO: 132530 - protein, 11 aa, Homo Sapiens
RSFANDDRHVM

SEQ ID NO: 132531 - protein, 11 aa, Homo Sapiens
RSFDKGPFATF

SEQ ID NO: 132532 - protein, 11 aa, Homo Sapiens
RSFDQADRAKF

SEQ ID NO: 132533 - protein, 11 aa, Homo Sapiens
RSIGALNKINF

SEQ ID NO: 132534 - protein, 11 aa, Homo Sapiens
RSIPAYLAETL

SEQ ID NO: 132535 - protein, 11 aa, Homo Sapiens
RSIPVNEKDTL

SEQ ID NO: 132536 - protein, 11 aa, Homo Sapiens
RSISQGLTWTW

SEQ ID NO: 132537 - protein, 11 aa, Homo Sapiens
RSKKQTKFEVL

SEQ ID NO: 132538 - protein, 11 aa, Homo Sapiens
RSKPGEGKLIF

SEQ ID NO: 132539 - protein, 11 aa, Homo Sapiens
RSLAHQHVVGF

SEQ ID NO: 132540 - protein, 11 aa, Homo Sapiens
RSLPDPNLITF

SEQ ID NO: 132541 - protein, 11 aa, Homo Sapiens
RSLPHITDVSW

SEQ ID NO: 132542 - protein, 11 aa, Homo Sapiens
RSMPLGARILF

SEQ ID NO: 132543 - protein, 11 aa, Homo Sapiens
RSMSVERDIRF

SEQ ID NO: 132544 - protein, 11 aa, Homo Sapiens
RSNPKLKDLYI

SEQ ID NO: 132545 - protein, 11 aa, Homo Sapiens
RSSNMTATTKF

SEQ ID NO: 132546 - protein, 11 aa, Homo Sapiens
RSSRSHAVLLV

SEQ ID NO: 132547 - protein, 11 aa, Homo Sapiens
RSSRSHSVFQL

SEQ ID NO: 132548 - protein, 11 aa, Homo Sapiens
RSSSYLDNLVW

SEQ ID NO: 132549 - protein, 11 aa, Homo Sapiens
RSTVHGVTQAF

SEQ ID NO: 132550 - protein, 11 aa, Homo Sapiens
RSYQDPSNAQF

SEQ ID NO: 132551 - protein, 11 aa, Homo Sapiens
RSYSDGASQQF

SEQ ID NO: 132552 - protein, 11 aa, Homo Sapiens
RTAGTICLETF

SEQ ID NO: 132553 - protein, 11 aa, Homo Sapiens
RTATQLAVNKI

SEQ ID NO: 132554 - protein, 11 aa, Homo Sapiens
RTDVGITHQHW

SEQ ID NO: 132555 - protein, 11 aa, Homo Sapiens
RTFAAQSLVQL

SEQ ID NO: 132556 - protein, 11 aa, Homo Sapiens
RTFTSPRPTQF

SEQ ID NO: 132557 - protein, 11 aa, Homo Sapiens
RTHPDEPLYSF

SEQ ID NO: 132558 - protein, 11 aa, Homo Sapiens
RTIADSLINSF

SEQ ID NO: 132559 - protein, 11 aa, Homo Sapiens
RTIDDRIVHEL

SEQ ID NO: 132560 - protein, 11 aa, Homo Sapiens
RTIKPEKHLRF

SEQ ID NO: 132561 - protein, 11 aa, Homo Sapiens
RTIQTPIGSTW

SEQ ID NO: 132562 - protein, 11 aa, Homo Sapiens
RTLGTPDEVVW

SEQ ID NO: 132563 - protein, 11 aa, Homo Sapiens
RTLKSGDGITF

SEQ ID NO: 132564 - protein, 11 aa, Homo Sapiens
RTLPTNTLMGF

SEQ ID NO: 132565 - protein, 11 aa, Homo Sapiens
RTLPVDSSHGF

SEQ ID NO: 132566 - protein, 11 aa, Homo Sapiens
RTLVEHSGRVF

SEQ ID NO: 132567 - protein, 11 aa, Homo Sapiens
RTMQPLAVLAF

SEQ ID NO: 132568 - protein, 11 aa, Homo Sapiens
RTMVQLGICAF

SEQ ID NO: 132569 - protein, 11 aa, Homo Sapiens
RTNPNNGEFRF

SEQ ID NO: 132570 - protein, 11 aa, Homo Sapiens
RTNPNSGDFRF

SEQ ID NO: 132571 - protein, 11 aa, Homo Sapiens
RTRNEELAQTW

SEQ ID NO: 132572 - protein, 11 aa, Homo Sapiens
RTSAEIAAIVF

SEQ ID NO: 132573 - protein, 11 aa, Homo Sapiens
RTSTSQAVFRL

SEQ ID NO: 132574 - protein, 11 aa, Homo Sapiens
RTSVKISYIGL

SEQ ID NO: 132575 - protein, 11 aa, Homo Sapiens
RTVENMSIIGW

SEQ ID NO: 132576 - protein, 11 aa, Homo Sapiens
RTWKGTAFGGW

SEQ ID NO: 132577 - protein, 11 aa, Homo Sapiens
RTYTGLSGLAL

SEQ ID NO: 132578 - protein, 11 aa, Homo Sapiens
RVCQQPGLSLW

SEQ ID NO: 132579 - protein, 11 aa, Homo Sapiens
RVDPNGSRYLL

SEQ ID NO: 132580 - protein, 11 aa, Homo Sapiens
RVFEDESGKHW

SEQ ID NO: 132581 - protein, 11 aa, Homo Sapiens
RVFWDPSVNLF

SEQ ID NO: 132582 - protein, 11 aa, Homo Sapiens
RVLEAANLFQF

SEQ ID NO: 132583 - protein, 11 aa, Homo Sapiens
RVLPPSHRVTW

SEQ ID NO: 132584 - protein, 11 aa, Homo Sapiens
RVNPALAELNL

SEQ ID NO: 132585 - protein, 11 aa, Homo Sapiens
RVSDLVKDLIF

SEQ ID NO: 132586 - protein, 11 aa, Homo Sapiens
RVSNQVAVNMY

SEQ ID NO: 132587 - protein, 11 aa, Homo Sapiens
SANEILGSLRW

SEQ ID NO: 132588 - protein, 11 aa, Homo Sapiens
SSLPDVEALRF

SEQ ID NO: 132589 - protein, 11 aa, Homo Sapiens
SSLPNFKQNEF

SEQ ID NO: 132590 - protein, 11 aa, Homo Sapiens
SSSAAVKDTLW

SEQ ID NO: 132591 - protein, 11 aa, Homo Sapiens
SSSHTLTYSYW

SEQ ID NO: 132592 - protein, 11 aa, Homo Sapiens
SSSSVLHGMVF

SEQ ID NO: 132593 - protein, 11 aa, Homo Sapiens
STALPLTQLRW

SEQ ID NO: 132594 - protein, 11 aa, Homo Sapiens
STARSIAVLEL

SEQ ID NO: 132595 - protein, 11 aa, Homo Sapiens
STFEDVKILAF

SEQ ID NO: 132596 - protein, 11 aa, Homo Sapiens
STIDDSQICRF

SEQ ID NO: 132597 - protein, 11 aa, Homo Sapiens
STLKDTRLLTF

SEQ ID NO: 132598 - protein, 11 aa, Homo Sapiens
STNKGTAYTFF

SEQ ID NO: 132599 - protein, 11 aa, Homo Sapiens
STSGIHAITVF

SEQ ID NO: 132600 - protein, 11 aa, Homo Sapiens
STSRVFTTLVL

SEQ ID NO: 132601 - protein, 11 aa, Homo Sapiens
SVCGQISIIRF

SEQ ID NO: 132602 - protein, 11 aa, Homo Sapiens
SVIPARIIHNW

SEQ ID NO: 132603 - protein, 11 aa, Homo Sapiens
SVSEVVGSSTL

SEQ ID NO: 132604 - protein, 11 aa, Homo Sapiens
TISAARLYYYW

SEQ ID NO: 132605 - protein, 11 aa, Homo Sapiens
TSADAVRNMEW

SEQ ID NO: 132606 - protein, 11 aa, Homo Sapiens
TSLPDKCNSFL

SEQ ID NO: 132607 - protein, 11 aa, Homo Sapiens
TSYRDFLGTNW

SEQ ID NO: 132608 - protein, 11 aa, Homo Sapiens
TTIDPRWLVEF

SEQ ID NO: 132609 - protein, 11 aa, Homo Sapiens
TTIPTKQTQTF

SEQ ID NO: 132610 - protein, 11 aa, Homo Sapiens
TTSAVIHSENF

SEQ ID NO: 132611 - protein, 11 aa, Homo Sapiens
TTVKNKDIRKF

SEQ ID NO: 132612 - protein, 11 aa, Homo Sapiens
TTVPNTIVVSW

SEQ ID NO: 132613 - protein, 11 aa, Homo Sapiens
TTWKPLNPNSW

SEQ ID NO: 132614 - protein, 11 aa, Homo Sapiens
VAKRNSLKELW

SEQ ID NO: 132615 - protein, 11 aa, Homo Sapiens
VAMKNLADNHW

SEQ ID NO: 132616 - protein, 11 aa, Homo Sapiens
VASKEIGKRKL

SEQ ID NO: 132617 - protein, 11 aa, Homo Sapiens
VASTAIAAAQW

SEQ ID NO: 132618 - protein, 11 aa, Homo Sapiens
VGLPAAGKTTW

SEQ ID NO: 132619 - protein, 11 aa, Homo Sapiens
VSAPTQILAQF

SEQ ID NO: 132620 - protein, 11 aa, Homo Sapiens
VSCGNGKLRQW

SEQ ID NO: 132621 - protein, 11 aa, Homo Sapiens
VSFEEDDKIRW

SEQ ID NO: 132622 - protein, 11 aa, Homo Sapiens
VSFPDVEKAEW

SEQ ID NO: 132623 - protein, 11 aa, Homo Sapiens
VSKSTQFEYAW

SEQ ID NO: 132624 - protein, 11 aa, Homo Sapiens
VSLPAPGVPAW

SEQ ID NO: 132625 - protein, 11 aa, Homo Sapiens
VSLPSHLNISY

SEQ ID NO: 132626 - protein, 11 aa, Homo Sapiens
VSMDNRLMELF

SEQ ID NO: 132627 - protein, 11 aa, Homo Sapiens
VSPPLITQVHW

SEQ ID NO: 132628 - protein, 11 aa, Homo Sapiens
VTDKKIAILGF

SEQ ID NO: 132629 - protein, 11 aa, Homo Sapiens
VTIKKDVDGAY

SEQ ID NO: 132630 - protein, 11 aa, Homo Sapiens
VTLHDQGTAQW

SEQ ID NO: 132631 - protein, 11 aa, Homo Sapiens
VTLKTLQQQTF

SEQ ID NO: 132632 - protein, 11 aa, Homo Sapiens
VVDPVHGFMYW

SEQ ID NO: 132633 - protein, 11 aa, Homo Sapiens
VVVPAEWIKNW

SEQ ID NO: 132634 - protein, 11 aa, Homo Sapiens
YAPRAEAEKTF

SEQ ID NO: 132635 - protein, 11 aa, Homo Sapiens
YSFQDKDNLYF

SEQ ID NO: 132636 - protein, 11 aa, Homo Sapiens
YSSDDINKFLW

SEQ ID NO: 132637 - protein, 8 aa, Homo Sapiens
AAGQVFSW

SEQ ID NO: 132638 - protein, 8 aa, Homo Sapiens
AALSWQYL

SEQ ID NO: 132639 - protein, 8 aa, Homo Sapiens
AAVKTYRW

SEQ ID NO: 132640 - protein, 8 aa, Homo Sapiens
AAYKTFSW

SEQ ID NO: 132641 - protein, 8 aa, Homo Sapiens
ASAPNWKW

SEQ ID NO: 132642 - protein, 8 aa, Homo Sapiens
ASAPSWEW

SEQ ID NO: 132643 - protein, 8 aa, Homo Sapiens
ASSTAHLW

SEQ ID NO: 132644 - protein, 8 aa, Homo Sapiens
ATGHHYTW

SEQ ID NO: 132645 - protein, 8 aa, Homo Sapiens
ATGPSIKI

SEQ ID NO: 132646 - protein, 8 aa, Homo Sapiens
AVGPTFSF

SEQ ID NO: 132647 - protein, 8 aa, Homo Sapiens
DTNADKQL

SEQ ID NO: 132648 - protein, 8 aa, Homo Sapiens
FAARSFYY

SEQ ID NO: 132649 - protein, 8 aa, Homo Sapiens
FNEKSKEL

SEQ ID NO: 132650 - protein, 8 aa, Homo Sapiens
FSFRSFIW

SEQ ID NO: 132651 - protein, 8 aa, Homo Sapiens
FSKSSDVW

SEQ ID NO: 132652 - protein, 8 aa, Homo Sapiens
FSSKSDIW

SEQ ID NO: 132653 - protein, 8 aa, Homo Sapiens
FSSKSDVW

SEQ ID NO: 132654 - protein, 8 aa, Homo Sapiens
FSTKSDVW

SEQ ID NO: 132655 - protein, 8 aa, Homo Sapiens
FTIKSDVW

SEQ ID NO: 132656 - protein, 8 aa, Homo Sapiens
GTAPAYSF

SEQ ID NO: 132657 - protein, 8 aa, Homo Sapiens
GTGKTFSF

SEQ ID NO: 132658 - protein, 8 aa, Homo Sapiens
HASTSWYW

SEQ ID NO: 132659 - protein, 8 aa, Homo Sapiens
HGVQSWSW

SEQ ID NO: 132660 - protein, 8 aa, Homo Sapiens
HSFLGFEW

SEQ ID NO: 132661 - protein, 8 aa, Homo Sapiens
HSGPFFTF

SEQ ID NO: 132662 - protein, 8 aa, Homo Sapiens
HSGPPIVI

SEQ ID NO: 132663 - protein, 8 aa, Homo Sapiens
HSHVAVAW

SEQ ID NO: 132664 - protein, 8 aa, Homo Sapiens
HSISPQMW

SEQ ID NO: 132665 - protein, 8 aa, Homo Sapiens
HSSVAFMF

SEQ ID NO: 132666 - protein, 8 aa, Homo Sapiens
HSTIVYHW

SEQ ID NO: 132667 - protein, 8 aa, Homo Sapiens
HSVEVHKW

SEQ ID NO: 132668 - protein, 8 aa, Homo Sapiens
HTTQSAQW

SEQ ID NO: 132669 - protein, 8 aa, Homo Sapiens
HTYQDHLW

SEQ ID NO: 132670 - protein, 8 aa, Homo Sapiens
IANVAHTF

SEQ ID NO: 132671 - protein, 8 aa, Homo Sapiens
IIGPYASW

SEQ ID NO: 132672 - protein, 8 aa, Homo Sapiens
ILGPTFTL

SEQ ID NO: 132673 - protein, 8 aa, Homo Sapiens
ISADTHQF

SEQ ID NO: 132674 - protein, 8 aa, Homo Sapiens
ISAKPLEM

SEQ ID NO: 132675 - protein, 8 aa, Homo Sapiens
ISGFAYEY

SEQ ID NO: 132676 - protein, 8 aa, Homo Sapiens
ISGSSVQW

SEQ ID NO: 132677 - protein, 8 aa, Homo Sapiens
ISMGDHLW

SEQ ID NO: 132678 - protein, 8 aa, Homo Sapiens
ITAHPERW

SEQ ID NO: 132679 - protein, 8 aa, Homo Sapiens
ITARPVLW

SEQ ID NO: 132680 - protein, 8 aa, Homo Sapiens
ITDKAREF

SEQ ID NO: 132681 - protein, 8 aa, Homo Sapiens
ITTEGKLW

SEQ ID NO: 132682 - protein, 8 aa, Homo Sapiens
IVTSTYGW

SEQ ID NO: 132683 - protein, 8 aa, Homo Sapiens
KAAISNKI

SEQ ID NO: 132684 - protein, 8 aa, Homo Sapiens
KAGISFII

SEQ ID NO: 132685 - protein, 8 aa, Homo Sapiens
KAGKSFDL

SEQ ID NO: 132686 - protein, 8 aa, Homo Sapiens
KAGKSLLF

SEQ ID NO: 132687 - protein, 8 aa, Homo Sapiens
KAGLASRW

SEQ ID NO: 132688 - protein, 8 aa, Homo Sapiens
KAGLAYHL

SEQ ID NO: 132689 - protein, 8 aa, Homo Sapiens
KAGLTHII

SEQ ID NO: 132690 - protein, 8 aa, Homo Sapiens
KANPGYKW

SEQ ID NO: 132691 - protein, 8 aa, Homo Sapiens
KASESFLL

SEQ ID NO: 132692 - protein, 8 aa, Homo Sapiens
KATTSTNW

SEQ ID NO: 132693 - protein, 8 aa, Homo Sapiens
KAVTTNQW

SEQ ID NO: 132694 - protein, 8 aa, Homo Sapiens
KAWKALEI

SEQ ID NO: 132695 - protein, 8 aa, Homo Sapiens
KAYKAYRL

SEQ ID NO: 132696 - protein, 8 aa, Homo Sapiens
KGASSFKI

SEQ ID NO: 132697 - protein, 8 aa, Homo Sapiens
KLGPAIKL

SEQ ID NO: 132698 - protein, 8 aa, Homo Sapiens
KSALALRW

SEQ ID NO: 132699 - protein, 8 aa, Homo Sapiens
KSDQSYVI

SEQ ID NO: 132700 - protein, 8 aa, Homo Sapiens
KSEKVKLW

SEQ ID NO: 132701 - protein, 8 aa, Homo Sapiens
KSFGGEKW

SEQ ID NO: 132702 - protein, 8 aa, Homo Sapiens
KSFVLPSW

SEQ ID NO: 132703 - protein, 8 aa, Homo Sapiens
KSGLAEHW

SEQ ID NO: 132704 - protein, 8 aa, Homo Sapiens
KSGLSVRF

SEQ ID NO: 132705 - protein, 8 aa, Homo Sapiens
KSIWNNRW

SEQ ID NO: 132706 - protein, 8 aa, Homo Sapiens
KSTIGVEF

SEQ ID NO: 132707 - protein, 8 aa, Homo Sapiens
KSVTADRW

SEQ ID NO: 132708 - protein, 8 aa, Homo Sapiens
KSWRDVYW

SEQ ID NO: 132709 - protein, 8 aa, Homo Sapiens
KSWSTGKW

SEQ ID NO: 132710 - protein, 8 aa, Homo Sapiens
KSYFSQKW

SEQ ID NO: 132711 - protein, 8 aa, Homo Sapiens
KTIKDCKW

SEQ ID NO: 132712 - protein, 8 aa, Homo Sapiens
KTSHTVKW

SEQ ID NO: 132713 - protein, 8 aa, Homo Sapiens
KTSVVIKW

SEQ ID NO: 132714 - protein, 8 aa, Homo Sapiens
KVGKTYEL

SEQ ID NO: 132715 - protein, 8 aa, Homo Sapiens
KVGPNATY

SEQ ID NO: 132716 - protein, 8 aa, Homo Sapiens
LAALSWQY

SEQ ID NO: 132717 - protein, 8 aa, Homo Sapiens
LAGPPLEI

SEQ ID NO: 132718 - protein, 8 aa, Homo Sapiens
LAGVSFEI

SEQ ID NO: 132719 - protein, 8 aa, Homo Sapiens
LGAPGFAW

SEQ ID NO: 132720 - protein, 8 aa, Homo Sapiens
LIGPPLLI

SEQ ID NO: 132721 - protein, 8 aa, Homo Sapiens
LIGPTFSY

SEQ ID NO: 132722 - protein, 8 aa, Homo Sapiens
LLGPTAQW

SEQ ID NO: 132723 - protein, 8 aa, Homo Sapiens
LNNMRSQY

SEQ ID NO: 132724 - protein, 8 aa, Homo Sapiens
LSGEAFDW

SEQ ID NO: 132725 - protein, 8 aa, Homo Sapiens
LSGPRLLF

SEQ ID NO: 132726 - protein, 8 aa, Homo Sapiens
LSQKGYSW

SEQ ID NO: 132727 - protein, 8 aa, Homo Sapiens
LSQRGYEW

SEQ ID NO: 132728 - protein, 8 aa, Homo Sapiens
LSSQSRQW

SEQ ID NO: 132729 - protein, 8 aa, Homo Sapiens
LSTRPEKF

SEQ ID NO: 132730 - protein, 8 aa, Homo Sapiens
LTAEAFGF

SEQ ID NO: 132731 - protein, 8 aa, Homo Sapiens
LTGPALQW

SEQ ID NO: 132732 - protein, 8 aa, Homo Sapiens
LTGPWKLW

SEQ ID NO: 132733 - protein, 8 aa, Homo Sapiens
MSGPAWQL

SEQ ID NO: 132734 - protein, 8 aa, Homo Sapiens
MSTKAVLW

SEQ ID NO: 132735 - protein, 8 aa, Homo Sapiens
MSTLPSKW

SEQ ID NO: 132736 - protein, 8 aa, Homo Sapiens
MTGLALLY

SEQ ID NO: 132737 - protein, 8 aa, Homo Sapiens
MTGPFFRY

SEQ ID NO: 132738 - protein, 8 aa, Homo Sapiens
MTGRAARW

SEQ ID NO: 132739 - protein, 8 aa, Homo Sapiens
NGGPSHLW

SEQ ID NO: 132740 - protein, 8 aa, Homo Sapiens
NSASSHNW

SEQ ID NO: 132741 - protein, 8 aa, Homo Sapiens
PDEVARRW

SEQ ID NO: 132742 - protein, 8 aa, Homo Sapiens
PDIKKDRW

SEQ ID NO: 132743 - protein, 8 aa, Homo Sapiens
PINGNGKQ

SEQ ID NO: 132744 - protein, 8 aa, Homo Sapiens
PSGAYFAW

SEQ ID NO: 132745 - protein, 8 aa, Homo Sapiens
QAAQPTRW

SEQ ID NO: 132746 - protein, 8 aa, Homo Sapiens
QATGTSRW

SEQ ID NO: 132747 - protein, 8 aa, Homo Sapiens
QAWTSHLW

SEQ ID NO: 132748 - protein, 8 aa, Homo Sapiens
QSFITSSW

SEQ ID NO: 132749 - protein, 8 aa, Homo Sapiens
QSGLVHIW

SEQ ID NO: 132750 - protein, 8 aa, Homo Sapiens
QSLKELYI

SEQ ID NO: 132751 - protein, 8 aa, Homo Sapiens
RAIRDFFW

SEQ ID NO: 132752 - protein, 8 aa, Homo Sapiens
RGFGSFRF

SEQ ID NO: 132753 - protein, 8 aa, Homo Sapiens
RGGPFQRW

SEQ ID NO: 132754 - protein, 8 aa, Homo Sapiens
RLAPNFRW

SEQ ID NO: 132755 - protein, 8 aa, Homo Sapiens
RSAEALAF

SEQ ID NO: 132756 - protein, 8 aa, Homo Sapiens
RSAKWRPG

SEQ ID NO: 132757 - protein, 8 aa, Homo Sapiens
RSDKPKLF

SEQ ID NO: 132758 - protein, 8 aa, Homo Sapiens
RSFRPLLF

SEQ ID NO: 132759 - protein, 8 aa, Homo Sapiens
RSGPASTF

SEQ ID NO: 132760 - protein, 8 aa, Homo Sapiens
RSMKGLRW

SEQ ID NO: 132761 - protein, 8 aa, Homo Sapiens
RSWLSYSY

SEQ ID NO: 132762 - protein, 8 aa, Homo Sapiens
RTFKGFQI

SEQ ID NO: 132763 - protein, 8 aa, Homo Sapiens
RVGKAFKY

SEQ ID NO: 132764 - protein, 8 aa, Homo Sapiens
SAAGTYAW

SEQ ID NO: 132765 - protein, 8 aa, Homo Sapiens
SAAKSWVF

SEQ ID NO: 132766 - protein, 8 aa, Homo Sapiens
SAAPTFMI

SEQ ID NO: 132767 - protein, 8 aa, Homo Sapiens
SAASSYSF

SEQ ID NO: 132768 - protein, 8 aa, Homo Sapiens
SAGHAYHW

SEQ ID NO: 132769 - protein, 8 aa, Homo Sapiens
SAGHTFSW

SEQ ID NO: 132770 - protein, 8 aa, Homo Sapiens
SAGQAWKW

SEQ ID NO: 132771 - protein, 8 aa, Homo Sapiens
SAGSSFVF

SEQ ID NO: 132772 - protein, 8 aa, Homo Sapiens
SIHLQHKF

SEQ ID NO: 132773 - protein, 8 aa, Homo Sapiens
SSFASHKW

SEQ ID NO: 132774 - protein, 8 aa, Homo Sapiens
SSGPQSGW

SEQ ID NO: 132775 - protein, 8 aa, Homo Sapiens
SSSSSFRW

SEQ ID NO: 132776 - protein, 8 aa, Homo Sapiens
SSTVTHLF

SEQ ID NO: 132777 - protein, 8 aa, Homo Sapiens
STAPQPVW

SEQ ID NO: 132778 - protein, 8 aa, Homo Sapiens
STAVSYAW

SEQ ID NO: 132779 - protein, 8 aa, Homo Sapiens
SVTEIQEK

SEQ ID NO: 132780 - protein, 8 aa, Homo Sapiens
TSGPGFHL

SEQ ID NO: 132781 - protein, 8 aa, Homo Sapiens
TSGPPLTM

SEQ ID NO: 132782 - protein, 8 aa, Homo Sapiens
TTAIAEAW

SEQ ID NO: 132783 - protein, 8 aa, Homo Sapiens
TTKAISRW

SEQ ID NO: 132784 - protein, 8 aa, Homo Sapiens
VAAKPESW

SEQ ID NO: 132785 - protein, 8 aa, Homo Sapiens
VAAPSWLH

SEQ ID NO: 132786 - protein, 8 aa, Homo Sapiens
VAAQSYLY

SEQ ID NO: 132787 - protein, 8 aa, Homo Sapiens
VAGKTYRW

SEQ ID NO: 132788 - protein, 8 aa, Homo Sapiens
VIEVKVPA

SEQ ID NO: 132789 - protein, 8 aa, Homo Sapiens
VSAVASQW

SEQ ID NO: 132790 - protein, 8 aa, Homo Sapiens
VSGKVYQW

SEQ ID NO: 132791 - protein, 8 aa, Homo Sapiens
VSIKAIGW

SEQ ID NO: 132792 - protein, 8 aa, Homo Sapiens
VSLTACKV

SEQ ID NO: 132793 - protein, 8 aa, Homo Sapiens
VSSKAYLM

SEQ ID NO: 132794 - protein, 8 aa, Homo Sapiens
VSTASHLL

SEQ ID NO: 132795 - protein, 8 aa, Homo Sapiens
VSVPTFSW

SEQ ID NO: 132796 - protein, 8 aa, Homo Sapiens
VTATSSKW

SEQ ID NO: 132797 - protein, 8 aa, Homo Sapiens
VTMDDFRW

SEQ ID NO: 132798 - protein, 8 aa, Homo Sapiens
VTVQSFGW

SEQ ID NO: 132799 - protein, 8 aa, Homo Sapiens
YATQSHQW

SEQ ID NO: 132800 - protein, 8 aa, Homo Sapiens
YSARGWEW

SEQ ID NO: 132801 - protein, 8 aa, Homo Sapiens
YSASEYRW

SEQ ID NO: 132802 - protein, 8 aa, Homo Sapiens
YSGLSVSW

SEQ ID NO: 132803 - protein, 9 aa, Homo Sapiens
AAAKIQASF

SEQ ID NO: 132804 - protein, 9 aa, Homo Sapiens
AAANAQLHW

SEQ ID NO: 132805 - protein, 9 aa, Homo Sapiens
AAAPPSPAW

SEQ ID NO: 132806 - protein, 9 aa, Homo Sapiens
AALPAAALW

SEQ ID NO: 132807 - protein, 9 aa, Homo Sapiens
AANHKVAKW

SEQ ID NO: 132808 - protein, 9 aa, Homo Sapiens
AANPHSFVF

SEQ ID NO: 132809 - protein, 9 aa, Homo Sapiens
AANPIESQW

SEQ ID NO: 132810 - protein, 9 aa, Homo Sapiens
AASSISSPW

SEQ ID NO: 132811 - protein, 9 aa, Homo Sapiens
AAVVPLGTW

SEQ ID NO: 132812 - protein, 9 aa, Homo Sapiens
AIESGQHYW

SEQ ID NO: 132813 - protein, 9 aa, Homo Sapiens
AILKKVIQW

SEQ ID NO: 132814 - protein, 9 aa, Homo Sapiens
AISDLQQLW

SEQ ID NO: 132815 - protein, 9 aa, Homo Sapiens
ALSPAVGSW

SEQ ID NO: 132816 - protein, 9 aa, Homo Sapiens
ASAHDQLLW

SEQ ID NO: 132817 - protein, 9 aa, Homo Sapiens
ASAIDISKW

SEQ ID NO: 132818 - protein, 9 aa, Homo Sapiens
ASAIIIQRW

SEQ ID NO: 132819 - protein, 9 aa, Homo Sapiens
ASAPSWEWA

SEQ ID NO: 132820 - protein, 9 aa, Homo Sapiens
ASATERQEW

SEQ ID NO: 132821 - protein, 9 aa, Homo Sapiens
ASAWALERW

SEQ ID NO: 132822 - protein, 9 aa, Homo Sapiens
ASFDGTFLW

SEQ ID NO: 132823 - protein, 9 aa, Homo Sapiens
ASFHQDSAW

SEQ ID NO: 132824 - protein, 9 aa, Homo Sapiens
ASGNVSWLW

SEQ ID NO: 132825 - protein, 9 aa, Homo Sapiens
ASHKGQKLW

SEQ ID NO: 132826 - protein, 9 aa, Homo Sapiens
ASILCKALW

SEQ ID NO: 132827 - protein, 9 aa, Homo Sapiens
ASLLHQVSW

SEQ ID NO: 132828 - protein, 9 aa, Homo Sapiens
ASLPEAQVW

SEQ ID NO: 132829 - protein, 9 aa, Homo Sapiens
ASLPSSASW

SEQ ID NO: 132830 - protein, 9 aa, Homo Sapiens
ASMGFDPRW

SEQ ID NO: 132831 - protein, 9 aa, Homo Sapiens
ASNGDVYAW

SEQ ID NO: 132832 - protein, 9 aa, Homo Sapiens
ASNGVLLLM

SEQ ID NO: 132833 - protein, 9 aa, Homo Sapiens
ASNKLQIVF

SEQ ID NO: 132834 - protein, 9 aa, Homo Sapiens
ASNKYLVEF

SEQ ID NO: 132835 - protein, 9 aa, Homo Sapiens
ASNPAMLLY

SEQ ID NO: 132836 - protein, 9 aa, Homo Sapiens
ASNPVLDAW

SEQ ID NO: 132837 - protein, 9 aa, Homo Sapiens
ASRDTVIVW

SEQ ID NO: 132838 - protein, 9 aa, Homo Sapiens
ASSPDGFFW

SEQ ID NO: 132839 - protein, 9 aa, Homo Sapiens
ASSSAEEQW

SEQ ID NO: 132840 - protein, 9 aa, Homo Sapiens
ASTHMSPSW

SEQ ID NO: 132841 - protein, 9 aa, Homo Sapiens
ASTLIVGHW

SEQ ID NO: 132842 - protein, 9 aa, Homo Sapiens
ASTQPTHSW

SEQ ID NO: 132843 - protein, 9 aa, Homo Sapiens
ASVKVVSKF

SEQ ID NO: 132844 - protein, 9 aa, Homo Sapiens
ASVPIMYSW

SEQ ID NO: 132845 - protein, 9 aa, Homo Sapiens
ATADVEWRW

SEQ ID NO: 132846 - protein, 9 aa, Homo Sapiens
ATAPVVALF

SEQ ID NO: 132847 - protein, 9 aa, Homo Sapiens
ATATEKSEW

SEQ ID NO: 132848 - protein, 9 aa, Homo Sapiens
ATAVAQLLW

SEQ ID NO: 132849 - protein, 9 aa, Homo Sapiens
ATDGKVLLW

SEQ ID NO: 132850 - protein, 9 aa, Homo Sapiens
ATEVTGHRW

SEQ ID NO: 132851 - protein, 9 aa, Homo Sapiens
ATGPRPALF

SEQ ID NO: 132852 - protein, 9 aa, Homo Sapiens
ATIGHVEKF

SEQ ID NO: 132853 - protein, 9 aa, Homo Sapiens
ATIKEIVVW

SEQ ID NO: 132854 - protein, 9 aa, Homo Sapiens
ATLELTHNW

SEQ ID NO: 132855 - protein, 9 aa, Homo Sapiens
ATLKNPILW

SEQ ID NO: 132856 - protein, 9 aa, Homo Sapiens
ATNGVVVTW

SEQ ID NO: 132857 - protein, 9 aa, Homo Sapiens
ATNRITVTW

SEQ ID NO: 132858 - protein, 9 aa, Homo Sapiens
ATNVNNWHW

SEQ ID NO: 132859 - protein, 9 aa, Homo Sapiens
ATQPEVADW

SEQ ID NO: 132860 - protein, 9 aa, Homo Sapiens
ATRPDYISW

SEQ ID NO: 132861 - protein, 9 aa, Homo Sapiens
ATSKVALVY

SEQ ID NO: 132862 - protein, 9 aa, Homo Sapiens
ATSKYLIGW

SEQ ID NO: 132863 - protein, 9 aa, Homo Sapiens
ATSQAQAGW

SEQ ID NO: 132864 - protein, 9 aa, Homo Sapiens
ATVEQQEHW

SEQ ID NO: 132865 - protein, 9 aa, Homo Sapiens
ATYMKPEMW

SEQ ID NO: 132866 - protein, 9 aa, Homo Sapiens
AVCRLRHWW

SEQ ID NO: 132867 - protein, 9 aa, Homo Sapiens
AVDFTQEEW

SEQ ID NO: 132868 - protein, 9 aa, Homo Sapiens
AVDSTVKVW

SEQ ID NO: 132869 - protein, 9 aa, Homo Sapiens
AVEKNPAVW

SEQ ID NO: 132870 - protein, 9 aa, Homo Sapiens
AVIDLNNRW

SEQ ID NO: 132871 - protein, 9 aa, Homo Sapiens
AVLQKVALW

SEQ ID NO: 132872 - protein, 9 aa, Homo Sapiens
AVMTPQELW

SEQ ID NO: 132873 - protein, 9 aa, Homo Sapiens
AVNCHVITW

SEQ ID NO: 132874 - protein, 9 aa, Homo Sapiens
AVNGVQLHY

SEQ ID NO: 132875 - protein, 9 aa, Homo Sapiens
AVSAVASQW

SEQ ID NO: 132876 - protein, 9 aa, Homo Sapiens
AVSKDIANW

SEQ ID NO: 132877 - protein, 9 aa, Homo Sapiens
AVSLIREEW

SEQ ID NO: 132878 - protein, 9 aa, Homo Sapiens
AVSRILEEW

SEQ ID NO: 132879 - protein, 9 aa, Homo Sapiens
DPDEVARRW

SEQ ID NO: 132880 - protein, 9 aa, Homo Sapiens
FAVPDKVLW

SEQ ID NO: 132881 - protein, 9 aa, Homo Sapiens
FICTAKTEW

SEQ ID NO: 132882 - protein, 9 aa, Homo Sapiens
FMVPAQSSW

SEQ ID NO: 132883 - protein, 9 aa, Homo Sapiens
FRVPTANVS

SEQ ID NO: 132884 - protein, 9 aa, Homo Sapiens
FSAPGVTSW

SEQ ID NO: 132885 - protein, 9 aa, Homo Sapiens
FSDRSSLTF

SEQ ID NO: 132886 - protein, 9 aa, Homo Sapiens
FSEKFPTLW

SEQ ID NO: 132887 - protein, 9 aa, Homo Sapiens
FSFAEVHSW

SEQ ID NO: 132888 - protein, 9 aa, Homo Sapiens
FSFKKSFKL

SEQ ID NO: 132889 - protein, 9 aa, Homo Sapiens
FSKKCSERW

SEQ ID NO: 132890 - protein, 9 aa, Homo Sapiens
FSKSDLVNW

SEQ ID NO: 132891 - protein, 9 aa, Homo Sapiens
FSLPAQPLW

SEQ ID NO: 132892 - protein, 9 aa, Homo Sapiens
FSLPNIPRW

SEQ ID NO: 132893 - protein, 9 aa, Homo Sapiens
FSLSVFHHW

SEQ ID NO: 132894 - protein, 9 aa, Homo Sapiens
FSQPEVQLW

SEQ ID NO: 132895 - protein, 9 aa, Homo Sapiens
FSSPVCMAF

SEQ ID NO: 132896 - protein, 9 aa, Homo Sapiens
FSSREQPKL

SEQ ID NO: 132897 - protein, 9 aa, Homo Sapiens
FSYRDVNSW

SEQ ID NO: 132898 - protein, 9 aa, Homo Sapiens
FVAVEREEW

SEQ ID NO: 132899 - protein, 9 aa, Homo Sapiens
GAVRENYTW

SEQ ID NO: 132900 - protein, 9 aa, Homo Sapiens
GLTKNILGF

SEQ ID NO: 132901 - protein, 9 aa, Homo Sapiens
GSASVNSRW

SEQ ID NO: 132902 - protein, 9 aa, Homo Sapiens
GSCRLPVSW

SEQ ID NO: 132903 - protein, 9 aa, Homo Sapiens
GSHGIEAAW

SEQ ID NO: 132904 - protein, 9 aa, Homo Sapiens
GSIPNSWKW

SEQ ID NO: 132905 - protein, 9 aa, Homo Sapiens
GSNKTLLSF

SEQ ID NO: 132906 - protein, 9 aa, Homo Sapiens
GSNPHLQTF

SEQ ID NO: 132907 - protein, 9 aa, Homo Sapiens
GSYNGQVGW

SEQ ID NO: 132908 - protein, 9 aa, Homo Sapiens
GSYWKEGRW

SEQ ID NO: 132909 - protein, 9 aa, Homo Sapiens
GTAGLLEQW

SEQ ID NO: 132910 - protein, 9 aa, Homo Sapiens
GTDGHPFGW

SEQ ID NO: 132911 - protein, 9 aa, Homo Sapiens
GTDKTLRTW

SEQ ID NO: 132912 - protein, 9 aa, Homo Sapiens
GTDPNSAAW

SEQ ID NO: 132913 - protein, 9 aa, Homo Sapiens
GTDRNAYVW

SEQ ID NO: 132914 - protein, 9 aa, Homo Sapiens
GTFNPVSLW

SEQ ID NO: 132915 - protein, 9 aa, Homo Sapiens
GTHSLDIKW

SEQ ID NO: 132916 - protein, 9 aa, Homo Sapiens
GTISREHPW

SEQ ID NO: 132917 - protein, 9 aa, Homo Sapiens
GTLETKYKW

SEQ ID NO: 132918 - protein, 9 aa, Homo Sapiens
GTLKERVQW

SEQ ID NO: 132919 - protein, 9 aa, Homo Sapiens
GTMDVHHHW

SEQ ID NO: 132920 - protein, 9 aa, Homo Sapiens
GTSPEVQTW

SEQ ID NO: 132921 - protein, 9 aa, Homo Sapiens
GTVITPDTW

SEQ ID NO: 132922 - protein, 9 aa, Homo Sapiens
GTYSPEISW

SEQ ID NO: 132923 - protein, 9 aa, Homo Sapiens
HAASDTVGW

SEQ ID NO: 132924 - protein, 9 aa, Homo Sapiens
HAATIRLIF

SEQ ID NO: 132925 - protein, 9 aa, Homo Sapiens
HAATTSLSW

SEQ ID NO: 132926 - protein, 9 aa, Homo Sapiens
HACGVIATI

SEQ ID NO: 132927 - protein, 9 aa, Homo Sapiens
HADINLLYW

SEQ ID NO: 132928 - protein, 9 aa, Homo Sapiens
HADTTKWEW

SEQ ID NO: 132929 - protein, 9 aa, Homo Sapiens
HAGNINFKW

SEQ ID NO: 132930 - protein, 9 aa, Homo Sapiens
HAGPIVSVW

SEQ ID NO: 132931 - protein, 9 aa, Homo Sapiens
HAIPLRSSW

SEQ ID NO: 132932 - protein, 9 aa, Homo Sapiens
HAIRLLLEY

SEQ ID NO: 132933 - protein, 9 aa, Homo Sapiens
HALICISHW

SEQ ID NO: 132934 - protein, 9 aa, Homo Sapiens
HAMGGVPAW

SEQ ID NO: 132935 - protein, 9 aa, Homo Sapiens
HAMTNDVTW

SEQ ID NO: 132936 - protein, 9 aa, Homo Sapiens
HATKAIYRW

SEQ ID NO: 132937 - protein, 9 aa, Homo Sapiens
HAVVICTEW

SEQ ID NO: 132938 - protein, 9 aa, Homo Sapiens
HLAWVQEEW

SEQ ID NO: 132939 - protein, 9 aa, Homo Sapiens
HSAQELQEW

SEQ ID NO: 132940 - protein, 9 aa, Homo Sapiens
HSCDALNRW

SEQ ID NO: 132941 - protein, 9 aa, Homo Sapiens
HSCLFRHSW

SEQ ID NO: 132942 - protein, 9 aa, Homo Sapiens
HSDPEEMQW

SEQ ID NO: 132943 - protein, 9 aa, Homo Sapiens
HSFLYQPDW

SEQ ID NO: 132944 - protein, 9 aa, Homo Sapiens
HSFPLQFTL

SEQ ID NO: 132945 - protein, 9 aa, Homo Sapiens
HSGGPCALW

SEQ ID NO: 132946 - protein, 9 aa, Homo Sapiens
HSGIAVHTW

SEQ ID NO: 132947 - protein, 9 aa, Homo Sapiens
HSGPSKWNW

SEQ ID NO: 132948 - protein, 9 aa, Homo Sapiens
HSGPVIPVY

SEQ ID NO: 132949 - protein, 9 aa, Homo Sapiens
HSHFQNIFW

SEQ ID NO: 132950 - protein, 9 aa, Homo Sapiens
HSICTSEEW

SEQ ID NO: 132951 - protein, 9 aa, Homo Sapiens
HSILNPQKW

SEQ ID NO: 132952 - protein, 9 aa, Homo Sapiens
HSLESQVTF

SEQ ID NO: 132953 - protein, 9 aa, Homo Sapiens
HSNEVIMTI

SEQ ID NO: 132954 - protein, 9 aa, Homo Sapiens
HSNGTVSLW

SEQ ID NO: 132955 - protein, 9 aa, Homo Sapiens
HSNPEGSSW

SEQ ID NO: 132956 - protein, 9 aa, Homo Sapiens
HSNPGDYAW

SEQ ID NO: 132957 - protein, 9 aa, Homo Sapiens
HSNSVPLAL

SEQ ID NO: 132958 - protein, 9 aa, Homo Sapiens
HSQEELAEW

SEQ ID NO: 132959 - protein, 9 aa, Homo Sapiens
HSQVCSILW

SEQ ID NO: 132960 - protein, 9 aa, Homo Sapiens
HSSAVAATY

SEQ ID NO: 132961 - protein, 9 aa, Homo Sapiens
HSSGILPKW

SEQ ID NO: 132962 - protein, 9 aa, Homo Sapiens
HSSIVRSGW

SEQ ID NO: 132963 - protein, 9 aa, Homo Sapiens
HSSVGQVTW

SEQ ID NO: 132964 - protein, 9 aa, Homo Sapiens
HSSVVNYEF

SEQ ID NO: 132965 - protein, 9 aa, Homo Sapiens
HSTKLIQEW

SEQ ID NO: 132966 - protein, 9 aa, Homo Sapiens
HSTLVPHEW

SEQ ID NO: 132967 - protein, 9 aa, Homo Sapiens
HSVDQSWSW

SEQ ID NO: 132968 - protein, 9 aa, Homo Sapiens
HSYFWPLEW

SEQ ID NO: 132969 - protein, 9 aa, Homo Sapiens
HSYPGASGW

SEQ ID NO: 132970 - protein, 9 aa, Homo Sapiens
HTAHIACKF

SEQ ID NO: 132971 - protein, 9 aa, Homo Sapiens
HTAPNVPHY

SEQ ID NO: 132972 - protein, 9 aa, Homo Sapiens
HTEMVAELW

SEQ ID NO: 132973 - protein, 9 aa, Homo Sapiens
HTGPAGDSW

SEQ ID NO: 132974 - protein, 9 aa, Homo Sapiens
HTIQIRQDW

SEQ ID NO: 132975 - protein, 9 aa, Homo Sapiens
HTNPVGTEW

SEQ ID NO: 132976 - protein, 9 aa, Homo Sapiens
HTQENCETW

SEQ ID NO: 132977 - protein, 9 aa, Homo Sapiens
HTQTGVSTW

SEQ ID NO: 132978 - protein, 9 aa, Homo Sapiens
HTSSTTSAW

SEQ ID NO: 132979 - protein, 9 aa, Homo Sapiens
HTSYEISAW

SEQ ID NO: 132980 - protein, 9 aa, Homo Sapiens
HTTGMDVLW

SEQ ID NO: 132981 - protein, 9 aa, Homo Sapiens
HTVGLSSTW

SEQ ID NO: 132982 - protein, 9 aa, Homo Sapiens
HTVPDMGKW

SEQ ID NO: 132983 - protein, 9 aa, Homo Sapiens
HTVWESEEW

SEQ ID NO: 132984 - protein, 9 aa, Homo Sapiens
HTWKELELW

SEQ ID NO: 132985 - protein, 9 aa, Homo Sapiens
HVEDLNAKW

SEQ ID NO: 132986 - protein, 9 aa, Homo Sapiens
HVIWFHPTW

SEQ ID NO: 132987 - protein, 9 aa, Homo Sapiens
HVVEQHWEW

SEQ ID NO: 132988 - protein, 9 aa, Homo Sapiens
IAAPDSRRW

SEQ ID NO: 132989 - protein, 9 aa, Homo Sapiens
IAAQTGTRW

SEQ ID NO: 132990 - protein, 9 aa, Homo Sapiens
IAIKGVARF

SEQ ID NO: 132991 - protein, 9 aa, Homo Sapiens
IAIPLRRSS

SEQ ID NO: 132992 - protein, 9 aa, Homo Sapiens
IAIPVTVAF

SEQ ID NO: 132993 - protein, 9 aa, Homo Sapiens
IALPPIAKW

SEQ ID NO: 132994 - protein, 9 aa, Homo Sapiens
IANQIQEDW

SEQ ID NO: 132995 - protein, 9 aa, Homo Sapiens
IANQVQLFY

SEQ ID NO: 132996 - protein, 9 aa, Homo Sapiens
IAQRYLLQY

SEQ ID NO: 132997 - protein, 9 aa, Homo Sapiens
IAVEPGNQW

SEQ ID NO: 132998 - protein, 9 aa, Homo Sapiens
IAVPRNDEW

SEQ ID NO: 132999 - protein, 9 aa, Homo Sapiens
IFNAVSLRW

SEQ ID NO: 133000 - protein, 9 aa, Homo Sapiens
IGYVDTTHW

SEQ ID NO: 133001 - protein, 9 aa, Homo Sapiens
IIFVPVPQL

SEQ ID NO: 133002 - protein, 9 aa, Homo Sapiens
IIISTPEKW

SEQ ID NO: 133003 - protein, 9 aa, Homo Sapiens
IIMKDVPDW

SEQ ID NO: 133004 - protein, 9 aa, Homo Sapiens
IITPIHEQW

SEQ ID NO: 133005 - protein, 9 aa, Homo Sapiens
IIVCTPEKW

SEQ ID NO: 133006 - protein, 9 aa, Homo Sapiens
ILSRLILLW

SEQ ID NO: 133007 - protein, 9 aa, Homo Sapiens
IMDVTEEVW

SEQ ID NO: 133008 - protein, 9 aa, Homo Sapiens
IMFDGPEAW

SEQ ID NO: 133009 - protein, 9 aa, Homo Sapiens
IMSRCIPLW

SEQ ID NO: 133010 - protein, 9 aa, Homo Sapiens
ISAEDAERW

SEQ ID NO: 133011 - protein, 9 aa, Homo Sapiens
ISAHDILSW

SEQ ID NO: 133012 - protein, 9 aa, Homo Sapiens
ISAIPEQRW

SEQ ID NO: 133013 - protein, 9 aa, Homo Sapiens
ISAKNGVQW

SEQ ID NO: 133014 - protein, 9 aa, Homo Sapiens
ISAPVSERM

SEQ ID NO: 133015 - protein, 9 aa, Homo Sapiens
ISCGPSSRW

SEQ ID NO: 133016 - protein, 9 aa, Homo Sapiens
ISCKEELLL

SEQ ID NO: 133017 - protein, 9 aa, Homo Sapiens
ISFPPRDEW

SEQ ID NO: 133018 - protein, 9 aa, Homo Sapiens
ISGHHPETW

SEQ ID NO: 133019 - protein, 9 aa, Homo Sapiens
ISHEDGTLW

SEQ ID NO: 133020 - protein, 9 aa, Homo Sapiens
ISHGEVLEW

SEQ ID NO: 133021 - protein, 9 aa, Homo Sapiens
ISHIPASRW

SEQ ID NO: 133022 - protein, 9 aa, Homo Sapiens
ISHYPDYSW

SEQ ID NO: 133023 - protein, 9 aa, Homo Sapiens
ISLKENRHW

SEQ ID NO: 133024 - protein, 9 aa, Homo Sapiens
ISMPAQNLW

SEQ ID NO: 133025 - protein, 9 aa, Homo Sapiens
ISMRCMVQF

SEQ ID NO: 133026 - protein, 9 aa, Homo Sapiens
ISNPKTAEF

SEQ ID NO: 133027 - protein, 9 aa, Homo Sapiens
ISNPVTKEM

SEQ ID NO: 133028 - protein, 9 aa, Homo Sapiens
ISQKTLSQW

SEQ ID NO: 133029 - protein, 9 aa, Homo Sapiens
ISQRAPVHW

SEQ ID NO: 133030 - protein, 9 aa, Homo Sapiens
ISSDGQFAL

SEQ ID NO: 133031 - protein, 9 aa, Homo Sapiens
ISSGVVSIW

SEQ ID NO: 133032 - protein, 9 aa, Homo Sapiens
ISSKTAAKL

SEQ ID NO: 133033 - protein, 9 aa, Homo Sapiens
ISSQTTERF

SEQ ID NO: 133034 - protein, 9 aa, Homo Sapiens
ISSSAGARW

SEQ ID NO: 133035 - protein, 9 aa, Homo Sapiens
ISSSAHHVT

SEQ ID NO: 133036 - protein, 9 aa, Homo Sapiens
ISTEVNPKL

SEQ ID NO: 133037 - protein, 9 aa, Homo Sapiens
ISTIFKSLW

SEQ ID NO: 133038 - protein, 9 aa, Homo Sapiens
ISTKTSAKL

SEQ ID NO: 133039 - protein, 9 aa, Homo Sapiens
ISTPFPAVW

SEQ ID NO: 133040 - protein, 9 aa, Homo Sapiens
ISTPVIRTF
